United States Patent Application Publication US 2006/0003322 A1 - sequence listing, part 2

SEQ ID NO: 15186 - RNA, 72 nt, Human
gugugcagcgggcuggccuggggucccccgaaaggccgccgaagacaagcccaggaucaccccgucugcagc

SEQ ID NO: 15187 - RNA, 70 nt, Human
acaguuuuuauuuccaucaguaaauguauaaaaacacuuuucccuuaauacucauggcaauaacuauugu

SEQ ID NO: 15188 - RNA, 71 nt, Human
aggcugaaaugaaagugucuuccaggguggguacucaacuaaagcucugaggaggaauucgcuuccagccu

SEQ ID NO: 15189 - RNA, 68 nt, Human
auuaaaaaauacauagaaaaaagaaaaaaauccugguggauguagugauuuuucaguguuauuuuaau

SEQ ID NO: 15190 - RNA, 68 nt, Human
cugucgcccaggcuggagugcagugucaugaucucagcucacugcaagcuccaccucccggguucaag

SEQ ID NO: 15191 - RNA, 76 nt, Human
cuucuaguaaguaauuauuuucacuugguugauuuauaucuuuuucaucuaucuggggcaacauacugcuuggagg

SEQ ID NO: 15192 - RNA, 88 nt, Human
ggcuggucuugaacuccuuacgucgugauccaccugcuucggccucccaaagugcugggauuacaggcgugagccacugugcccagcu

SEQ ID NO: 15193 - RNA, 131 nt, Human
caaacucugucugggccacgcggagcuccugcucagaagccuguggacaggcccguguccuugaugagggagaggaggggcaggggcuuucccaggcuggggacagagccgugcuccuggcaguuguuggg

SEQ ID NO: 15194 - RNA, 61 nt, Human
guccacacugaaggccccaccgccaauaugauuauugguuuucagaagggagccuguugac

SEQ ID NO: 15195 - RNA, 94 nt, Human
ucauguguuuugcacugacuaguacugaauaauacaaccacucuuauuuaauguuaguauuauuuauuugacaacucagugucuaacagcuuga

SEQ ID NO: 15196 - RNA, 68 nt, Human
agccccacugauggucuguccugacugccaggcaccugcuugguuuagaggcagacaacagcaggguu

SEQ ID NO: 15197 - RNA, 67 nt, Human
gaagagguggugcuucaccagcaugucccggacgcccuccuucaggggcugcugcgccucucucuuc

SEQ ID NO: 15198 - RNA, 72 nt, Human
gcaagcggcgccgcaaccuucugcguaacccguguggggaagaggacuuggaaggcuggugugacguggagc

SEQ ID NO: 15199 - RNA, 75 nt, Human
ugaguggugucacaaagcacaggucauagacccugaggguugaggcuacugugaggaacugcuugacacgacuca

SEQ ID NO: 15200 - RNA, 121 nt, Human
ggggcauggaacacuuggguucugaguucaagauuuggcaaugucuugaccuggguuggaagguagggugggucuggaaaagcuuugguccaggguucaagauuugagagugccuugcucc

SEQ ID NO: 15201 - RNA, 65 nt, Human; identical to SEQ ID NO: 10292

SEQ ID NO: 15202 - RNA, 62 nt, Human
cccagccccuagccccacagccaagacaguuugacauaacaggccccggggcccugguuggg

SEQ ID NO: 15203 - RNA, 101 nt, Human
uguggccguggcguggccuggugaucuuggccacuguggucuuagggggugcccuccccgaggccuggcuuauggugguggccagggccucgucacccucg

SEQ ID NO: 15204 - RNA, 61 nt, Human
auuuaugauuuaauuaaaacuauuuaugcuucaauguaaaucucuuuaaugauuauuaaau

SEQ ID NO: 15205 - RNA, 79 nt, Human
agcugccggguguuggggaaagagucgccugccuccggaccggagugcagaccucugacccuggagucgcucggccgcu

SEQ ID NO: 15206 - RNA, 94 nt, Human
ccccuugggucgucgccugggccgcccgucguuccccggccccgagggguccggcuggccgcgguguggguagaggucagcaugagccaagggg

SEQ ID NO: 15207 - RNA, 65 nt, Human
cuuucugggcagaagauggccacuguucaauaaaacgacugucauguggagcccuguccagagag

SEQ ID NO: 15208 - RNA, 65 nt, Human; identical to SEQ ID NO: 11397

SEQ ID NO: 15209 - RNA, 130 nt, Human
cucucucucuuuuugagauggagucuugccuuguugccuaggcuggagugcaguggcaugaucuuggcucauuguaaccuccaccucuuggguucaagugauucuccugucucagccucccgaauagaug

SEQ ID NO: 15210 - RNA, 63 nt, Human
gccuggccaauuuuuuuuuuuuguauuuuuaguagagaugggguuucaucauauuggucaggc

SEQ ID NO: 15211 - RNA, 66 nt, Human
ggugaugaaaauguucuaaaaccagcuguggugauaaucacacuauuugugaacacauuaaaaacc

SEQ ID NO: 15212 - RNA, 79 nt, Human; identical to SEQ ID NO: 5860

SEQ ID NO: 15213 - RNA, 72 nt, Human; identical to SEQ ID NO: 5861

SEQ ID NO: 15214 - RNA, 60 nt, Human; identical to SEQ ID NO: 1720

SEQ ID NO: 15215 - RNA, 64 nt, Human
acuuuuuuaaugggucucaaaauucugggacaaauuuuuggucaaguuguuuccauuaaaaagu

SEQ ID NO: 15216 - RNA, 89 nt, Human; identical to SEQ ID NO: 288

SEQ ID NO: 15217 - RNA, 63 nt, Human
ccuucacgaugcuuugugugucauccggaaccucauccggauaaucguguggaguauggaagg

SEQ ID NO: 15218 - RNA, 60 nt, Human
ggggcugcugagauauccugugcccugggcaguuuagcccaagaagcggauuagugcccc

SEQ ID NO: 15219 - RNA, 74 nt, Human; identical to SEQ ID NO: 8144

SEQ ID NO: 15220 - RNA, 89 nt, Human
gucggaccccagcccuccggggccucgagggccugcagcagccgcugcagccucuugauggagauguccuggaaagccacaaagucgau

SEQ ID NO: 15221 - RNA, 61 nt, Human
gacacuuuuggauuuucccgucuuuuccaacaccaaggaugagauuaucaaaagauguguc

SEQ ID NO: 15222 - RNA, 69 nt, Human
gccuuggcgcugccggucccaacuugauccaaggagccuugagaaggagaugagauucaguaccagggc

SEQ ID NO: 15223 - RNA, 78 nt, Human
ggccguggcucccauccuccggaaucugcaaaauggcuacuucuucagacauaauggggagagggauggcaagaggcc

SEQ ID NO: 15224 - RNA, 62 nt, Human
ggagguuuggggacuuccuucagacccccaguaaacuuguuuguggaggccuucagaccccc

SEQ ID NO: 15225 - RNA, 87 nt, Human
aauggaaaccccuccaccucccacuucucaaaagcacccaacaacgggcccugggcacugagggugggagguggagggguuaccauu

SEQ ID NO: 15226 - RNA, 108 nt, Human
gacucccaggagaccuggccagcugcagcggcccccguggaccagcagagggacaagagaggagcugacguggaggagccgaggcccacugggggcuccuggagaguc

SEQ ID NO: 15227 - RNA, 67 nt, Human
gguguggagcggaggccgcggaggcuccucgguccuucagcaccccucggcccgacgcacccacgcc

SEQ ID NO: 15228 - RNA, 65 nt, Human
guagcuuccuuagaggacuccaaaacaaaacggggcucaccggcuuugggaaucucgucagcugc

SEQ ID NO: 15229 - RNA, 89 nt, Human; identical to SEQ ID NO: 15114

SEQ ID NO: 15230 - RNA, 60 nt, Human
gcaagugaggaaggaauucccuaucaauaaauggugcugggauaacuggcuaucacaugc

SEQ ID NO: 15231 - RNA, 80 nt, Human
uucuacggguccucaggguaucauaucagugggagggcuccuaagaaugugggaagauuagcgggggaccccucauagag

SEQ ID NO: 15232 - RNA, 102 nt, Human
aggggagguucuugcagauucccaaggaaaugucagaaaggcaaaauggccagcauuauccauuugcuuuuuuggguuuacugggugaauagcacuuuccuu

SEQ ID NO: 15233 - RNA, 84 nt, Human
gcuagcuuguuuguauagguagaaugauucaucucuccauuuuagauggcuagauguuuuguggaagaucuuagaauugccugc

SEQ ID NO: 15234 - RNA, 77 nt, Human; identical to SEQ ID NO: 796

SEQ ID NO: 15235 - RNA, 60 nt, Human; identical to SEQ ID NO: 11384

SEQ ID NO: 15236 - RNA, 64 nt, Human; identical to SEQ ID NO: 11385

SEQ ID NO: 15237 - RNA, 96 nt, Human
ucuguuauaacaucucaacuuaccuguugccacuuggaauauauaucgauacauuauggugccgagugguaacaugggaguguuugauccaacaga

SEQ ID NO: 15238 - RNA, 83 nt, Human; identical to SEQ ID NO: 12564

SEQ ID NO: 15239 - RNA, 73 nt, Human
cccagacgccaugaaagcugccauggccuggagaaaaagcugaaccaggccuuuggaaucuuaaugcccuggg

SEQ ID NO: 15240 - RNA, 68 nt, Human
cccaucucugugacuuccuggagacucacuuccuagaugaggacgugaaggcuaucacagaagauggg

SEQ ID NO: 15241 - RNA, 60 nt, Human
cuuugagcaaggauaugagggcccugcaaggaaggggucugcgaaacucacacagcaaag

SEQ ID NO: 15242 - RNA, 77 nt, Human
auuuguuuuuauugguguagucgcugcaguuuuaccugccaugguggugcucagguauaacauagauggaaacaagu

SEQ ID NO: 15243 - RNA, 63 nt, Human
ucauuuuguuuucuuucucuuaauucuguuaauuuauuuaaucucaugggagagaaaacauga

SEQ ID NO: 15244 - RNA, 70 nt, Human
acaggaacuuuggagauaaacagggcucucgacauuggcaaguugcaccaucccugguuucuccaucugu

SEQ ID NO: 15245 - RNA, 62 nt, Human
gaccauaugcauaguaccgagaaacuagugcgaaguagugaucagguaugcuguuagauauc

SEQ ID NO: 15246 - RNA, 63 nt, Human
cuucuucugggguucucuaauggggauaacauuaaucaucuccuaagaugacuauaguagagg

SEQ ID NO: 15247 - RNA, 61 nt, Human
gacauggcuguugugaggaucaaauggaaggauccaugagugcuuagaacaguccuggguc

SEQ ID NO: 15248 - RNA, 77 nt, Human
ucacagccuuucuauccugaacguuuuguuccuuagaugccagagaaauguuuagcauuggaauucugaaggcuuga

SEQ ID NO: 15249 - RNA, 98 nt, Human
ugaugguucucugcuuuauaucuccaacuggaauaaugcuguuggugagagaaagaaaacagcacuuagucagguuugagaaagcuuuucaugccaca

SEQ ID NO: 15250 - RNA, 67 nt, Human
caggguaccugauacaugagcauuuaacauauaugcugauauaugcugauaugcuguuagguuccug

SEQ ID NO: 15251 - RNA, 63 nt, Human
guacagauuuuuauaaaaucaucuauacagaugaaguacaaauuuuuauaaaauaaucuauac

SEQ ID NO: 15252 - RNA, 73 nt, Human
aaguauuauaaauuaucuaauugccaaauacagagaauacuucugagaauggaagaaauggauuuaugugcuu

SEQ ID NO: 15253 - RNA, 65 nt, Human
cuuaacuaaacuucguuucgaugagacauuguuucacaaucaaaguuaguccuugaaguuuuaag

SEQ ID NO: 15254 - RNA, 74 nt, Human
uaggaccugugcaucuauucaguauaaauauuuuaaaaguuuaaauaccuuaugggaaccuugcauggguccug

SEQ ID NO: 15255 - RNA, 67 nt, Human
ggagggaaugugauggucaaggucacucuaccaaugaguuccucccagaccgacgcuuuguuccccc

SEQ ID NO: 15256 - RNA, 103 nt, Human
ucugguauaaugaucuaugaugccaacauuacucaaagcagguaccacuguuuacuuugguguagucaauggcagaccuuauaaaucaaauacaacaaccagg

SEQ ID NO: 15257 - RNA, 89 nt, Human
uuggaaugaguuacagagauaucgauaugaguacaaugagagagaagguacuuuagucauauguugauaaaaacuuguacaucacccaa

SEQ ID NO: 15258 - RNA, 66 nt, Human
aggcagauuuuccaggacaagaaccuguguuccaucauuuuuuuuuuuuuuuuggagacuccgucu

SEQ ID NO: 15259 - RNA, 101 nt, Human
gggaugcgcgugagccgcagggugugggggcccguacacggcaggcacucagcaggcugccagggaccacaggcacccucgcgucugaacccagccauccc

SEQ ID NO: 15260 - RNA, 84 nt, Human
ugaugcgucgcaguauggucugcaggucggguagccgguggcggugcugcagguaggguguggugcggacuauagcaugcauca

SEQ ID NO: 15261 - RNA, 112 nt, Human
cauaacuauuaguggcagguuaguuguguguagggcucaugguagggguaaaaggagggcaauugcuagaucaaauaauaagaagguaauagcuacuaagaagaauuuuaug

SEQ ID NO: 15262 - RNA, 67 nt, Human
ccugcccucugaucucugccuguuccucugucccacagggggcaaaggcuacgggucagagagcggg

SEQ ID NO: 15263 - RNA, 63 nt, Human
guccgcucugacucggcuggcgucuuucgcucgcguuggaggccgccuuuucagaagcggugc

SEQ ID NO: 15264 - RNA, 120 nt, Human
uugauguacaguuucuccuaagaagaagcgaggugguugaauuuuggaagcacuucuugaaucggauuaacccaugcucuuauugaauuuuuucaucugcucuguuuaguuugauauuaa

SEQ ID NO: 15265 - RNA, 60 nt, Human
gguagcaggccccaaguuauuauuccccgcccugaauauucaucuuguagcagcucugcc

SEQ ID NO: 15266 - RNA, 72 nt, Human
ugacauugugcucaggucgcaggcccaggcucccacccaggacaaggggcagacgagagcugugagcaguca

SEQ ID NO: 15267 - RNA, 75 nt, Human
gagagacuacuugauauaauuuugauuuucuuaaauuuauuaagaguuguuuuguguccuaucauauggucuauc

SEQ ID NO: 15268 - RNA, 71 nt, Human
gaucacucaggagcauguuauucaauuuucauguauuuacauuguuuugaagguuccuuuuggaguugauu

SEQ ID NO: 15269 - RNA, 89 nt, Human
gcucuuucagauuuuuugauguaggcauuuaaggcuauguacuuuccacuuagcuucaccuuugccauaucccagauguuuugauaggu

SEQ ID NO: 15270 - RNA, 81 nt, Human
ugauagguugugucacuauuauuguucaguucaaauaauuuuuaaauuuccaucuugauuuuauuguugacccaaugauca

SEQ ID NO: 15271 - RNA, 60 nt, Human
cagugccgggagaucuugucuguggacuguuccaccaacaaccccucccaggcuaagcug

SEQ ID NO: 15272 - RNA, 61 nt, Human
gcccagccgcgagccccccaagaugaacccagugguggagccacuguccuggaugcugggc

SEQ ID NO: 15273 - RNA, 71 nt, Human
uacagaauagaauacauugauacaaaguacagaaaaauacuuugauuuuuauccauuucuuuuacucugug

SEQ ID NO: 15274 - RNA, 65 nt, Human
gaggucauugugugggaauucgcaguguuuaaaaaauaauaccacugggccuggcgcagugacuc

SEQ ID NO: 15275 - RNA, 64 nt, Human; identical to SEQ ID NO: 1375

SEQ ID NO: 15276 - RNA, 61 nt, Human; identical to SEQ ID NO: 2204

SEQ ID NO: 15277 - RNA, 70 nt, Human
gucucuuuuuaccuaguaagaguagacuucuuuaagucaaggaauaugcuuuauucaggugcucggcggc

SEQ ID NO: 15278 - RNA, 80 nt, Human
gaagggcugcagugaccccuccuggccagcagagguauuggcccagccaggcugggggagggcugaaacugcuucccuuc

SEQ ID NO: 15279 - RNA, 91 nt, Human
ggcauauaaaccuuggcuuuucauaagcucuaccugccuauccccaggaguuagggaggaucuauuugugauggccuaggguuuaagagcu

SEQ ID NO: 15280 - RNA, 62 nt, Human
gugggaggauuuugagauacuuauucuuuauuugagccagucuugcaagguuaacuucucac

SEQ ID NO: 15281 - RNA, 64 nt, Human
uuuguuacuuuuuucggaguuagggagggauugaagacugaaccucccuuggaagaauaccaga

SEQ ID NO: 15282 - RNA, 69 nt, Human
acuuacaccacuuucaggcacauccaaagaguuccuagauacuuggaaaaugucugaaaauuuuuaagu

SEQ ID NO: 15283 - RNA, 62 nt, Human
gccuugagaacaaauagauuguuacagccuugggcugcugcguaaucacgguuccucgaggc

SEQ ID NO: 15284 - RNA, 98 nt, Human
uuccaauuucauuguuaugccuauugaaguauuaauugccagguuugauuuuuagugaagcuuggaguccauacuuugagcagaccaagugaagggaa

SEQ ID NO: 15285 - RNA, 78 nt, Human
agaagcgcgucgaccugcgccaucugccguucgucaccaucgacggcgaagaugcccgcgacuucgacgaugcggucu

SEQ ID NO: 15286 - RNA, 67 nt, Human
ccuacgacauuccccacgucuggccgagcgugcucaaggaagcggcgacucaagccggaagucgagg

SEQ ID NO: 15287 - RNA, 75 nt, Human
gauccagcaggaagugcuggugaccccgggccgcaacgccgacgcccgugucgucaguucgucaaggugaagauc

SEQ ID NO: 15288 - RNA, 72 nt, Human
gcccagggcgaugugaucgaaguggugggcaacuacauggcgcccggcauggagaucgaugucgcgcugcgc

SEQ ID NO: 15289 - RNA, 81 nt, Human
aaugugauguuugcuuaaauaugugauagaguguaucuuuuuaaaacauguucuuaaaauauauuagcaggucauuauauu

SEQ ID NO: 15290 - RNA, 75 nt, Human
cccucaaguuuacugaguugguggaaaugugggcguucuagagaacugcccuaauauagacuacagcuaagaggg

SEQ ID NO: 15291 - RNA, 62 nt, Human
guuuguuacugcaacagacuggaguuuguuacugcaacagacuggaguuuguuacugcaaac

SEQ ID NO: 15292 - RNA, 61 nt, Human
ggcggcugaggcggcauggaucucagcgagcuggagagagacaauacaggccgcugucgcc

SEQ ID NO: 15293 - RNA, 68 nt, Human; identical to SEQ ID NO: 863

SEQ ID NO: 15294 - RNA, 62 nt, Human; identical to SEQ ID NO: 864

SEQ ID NO: 15295 - RNA, 84 nt, Human
cucagccagggcugcuugcggaaaagauugauuugaaagucucuuggcggcggaacuuugcuacaaggggcccuuuugccggag

SEQ ID NO: 15296 - RNA, 86 nt, Human; identical to SEQ ID NO: 343

SEQ ID NO: 15297 - RNA, 70 nt, Human
uggaggggcggcagauucuggcagggcagcagagggcucaguggccauggcuagagggguaaaaaauuca

SEQ ID NO: 15298 - RNA, 97 nt, Human
uuuuuuuuguggaaaccauugauuuuuauuaauuucauaacugggaaauuccaugugaaagugaaacaagcaugagucaagucaaccagggaaggaa

SEQ ID NO: 15299 - RNA, 85 nt, Human
ggauguggaguaccguccccugaccuugacugcacuaugggcuguggggccuggggcaggagaggcccagggcgugcccguaccc

SEQ ID NO: 15300 - RNA, 69 nt, Human
guuagucagaucuagaggaucccacuugcauguaccggcuugcaugggaagcuugaguauugcacugac

SEQ ID NO: 15301 - RNA, 87 nt, Human
uguccaucugucuguauaccuucgugagggacuccguaggggagccucuguacaugcucuuucgagggauuaagcaccaaguggaua

SEQ ID NO: 15302 - RNA, 74 nt, Human
acgaacgguuaagcuggcuguccugaacacuauuauaacgguggacugagaauggcaaaauuagucgccuucgu

SEQ ID NO: 15303 - RNA, 82 nt, Human
ucuugugucgagacuucgugguggugcuaagcaaacaggaagaagaagucuuacaccacucccaagaagaauaagcacaaga

SEQ ID NO: 15304 - RNA, 80 nt, Human; identical to SEQ ID NO: 7779

SEQ ID NO: 15305 - RNA, 83 nt, Human
gcugaacuguguuuacuggaaaaauucagaggccuaaaguuuaaaauaaaauuuacuucugauguuuuaauuaaaauguuugc

SEQ ID NO: 15306 - RNA, 62 nt, Human; identical to SEQ ID NO: 7780

SEQ ID NO: 15307 - RNA, 81 nt, Human
uuugugcuauuuuaucacaggcuuacacuacaauuguuaauaaauacuucauuuggagauguaugguguaaaacacacaaa

SEQ ID NO: 15308 - RNA, 100 nt, Human
aucccaauacugggaggccgaggcaggcagaucacaaggucaggaguucgagaccagccucaagugauucccccgccugggccuccuaaaguggcgggau

SEQ ID NO: 15309 - RNA, 130 nt, Human
cacagcucugggaaaacaagaggagcagacaggguucccugggcccagucucagcccagccacugaugcuggaugaccuuggccugacccuggucuggucucagaaaucacuuuucccaucuguaaauug

SEQ ID NO: 15310 - RNA, 61 nt, Human
uuuucaggugaagagugagguugucauggccucagcuaugcuuccuggcucucccucaaga

SEQ ID NO: 15311 - RNA, 75 nt, Human
cagcauuuuuauuuuaaguauucagcauuuuccaggaaauuaccauauuucuugcugacuuauaaagguuugcug

SEQ ID NO: 15312 - RNA, 60 nt, Human
cuauaugagcaguggaagaauuucgaugagagaaaagagauggcaaccauucuuaguaag

SEQ ID NO: 15313 - RNA, 86 nt, Human
guuaaagucuggguuauugggccauauucgaauggcgguuauugugggcgccaaguuuuucgauuauagcuauacccagaagcaac

SEQ ID NO: 15314 - RNA, 61 nt, Human; identical to SEQ ID NO: 6766

SEQ ID NO: 15315 - RNA, 69 nt, Human; identical to SEQ ID NO: 9578

SEQ ID NO: 15316 - RNA, 60 nt, Human
cccggacccugcucucaccccuggcacccgugccuacggguggcucccagaacauccugg

SEQ ID NO: 15317 - RNA, 85 nt, Human
agguuuugcucuguuacccaggauggaaugcaguggcgugaucauagcucacuguaaccuugaacuccugggcucaagcaauccu

SEQ ID NO: 15318 - RNA, 61 nt, Human
acugugggcucccuggccggccagccgcuacaggagcggacccaggccuggggcgagcggu

SEQ ID NO: 15319 - RNA, 100 nt, Human
ggcaguguaccaggcccuggcccgcgagggcgccgagcgcggucuaagcgccauccgugagcgccuggggccccugguggaacagggccgugugcgggcc

SEQ ID NO: 15320 - RNA, 103 nt, Human
ugcgcaucaagcuggaggagcaggcccagcagauacgccugcaggccgaggccuuucaggcccgucucaagagcugguucgagccccugguggaagacaugca

SEQ ID NO: 15321 - RNA, 79 nt, Human
aggcuggaaugcagugauacuaacauggcucgcagcagccuugaccuccugggcucaagcgacccuccugcuucagccu

SEQ ID NO: 15322 - RNA, 68 nt, Human
guagaaacagggucucgguauguuacccaggcuggucuugacauccugggcucaaccuauccuccuac

SEQ ID NO: 15323 - RNA, 63 nt, Human
cgcuuuucuaagucaguuguuucucgggcuacccuuuaagagacacugcugaauggccuggug

SEQ ID NO: 15324 - RNA, 80 nt, Human
uacagaaacagauggguacaagaacuaagaaaacggcuaagaaaguguuuugguccugacuacuaccauuucgcucugug

SEQ ID NO: 15325 - RNA, 83 nt, Human
ugcccuuucuucuuugucaaaagacaaaaucacaacaaauuuaguucaaagauuuuuuuuuucuuaagagacggacucuggca

SEQ ID NO: 15326 - RNA, 72 nt, Human; identical to SEQ ID NO: 7743

SEQ ID NO: 15327 - RNA, 66 nt, Human; identical to SEQ ID NO: 8995

SEQ ID NO: 15328 - RNA, 64 nt, Human
ugggaaccacgucaccacgguacaacaggcagcaagccauguauuuaccauggcgagggucaca

SEQ ID NO: 15329 - RNA, 70 nt, Human; identical to SEQ ID NO: 6934

SEQ ID NO: 15330 - RNA, 77 nt, Human; identical to SEQ ID NO: 9246

SEQ ID NO: 15331 - RNA, 61 nt, Human
guagagguugucuuuuucgauggcaaaucggacccuugcaggcugagggagagaaagcuac

SEQ ID NO: 15332 - RNA, 72 nt, Human
cuauggcauuugcagauguucagccccauguagcugacgucauggacagggcuggauguugagugacuguag

SEQ ID NO: 15333 - RNA, 73 nt, Human
ggcuauuugcacugggcuucuuuucaugccgcuacucuaagccucccugaauuuucccccgggacaaucagcc

SEQ ID NO: 15334 - RNA, 69 nt, Human
cgcgaagaugccaguggcggugauggcggaaagcgccgucuaguuucaaaaaguugcuggaucagugcg

SEQ ID NO: 15335 - RNA, 60 nt, Human
gaacuugggggaauuuggucaguaggacaaagaaucuggcagagagauuucccugggauc

SEQ ID NO: 15336 - RNA, 71 nt, Human
ggagcucgaggccccuggaggaauugcuacacccccaguguauggucagcuucuagcuuuauauuugcucc

SEQ ID NO: 15337 - RNA, 86 nt, Human
agagauauuguugauuaaagaaaaucuagaacugaagugaaagaagagaguuccaguucuaauagucuuuugauuaacaauucuuu

SEQ ID NO: 15338 - RNA, 61 nt, Human
guugaaggcacaacaguuaauggcuguauuguugcuauuccguugcugacauguuuuuaau

SEQ ID NO: 15339 - RNA, 74 nt, Human
gcucagcuacacagggcgugaugaccggcacuuuguacccaugggccucuacaucgucaggcagugauaugagc

SEQ ID NO: 15340 - RNA, 81 nt, Human
ggagguguacagacuggaagagauggagaagauuuuugucagguuggagaugaagaucaucaagggcuccaguggcacccc

SEQ ID NO: 15341 - RNA, 70 nt, Human
acagaaaaggcuaaugauaccuaaaaagcuuucacccuguuacguaggucaacucaguuaccuuggcugu

SEQ ID NO: 15342 - RNA, 71 nt, Human
ccaaagaagcguaguauacuaggaccuauauaugucugagggaucuaaggcaccacuauguucugacuugg

SEQ ID NO: 15343 - RNA, 70 nt, Human
acagaaaaggauaaugauaccuaaaaagcuuucacccuguuacguaggucaacucaguuaccuuggcugu

SEQ ID NO: 15344 - RNA, 65 nt, Human
auuacggaggaaaaggggggcauaggguguuguucaacucuaugagggguguugucgucgguggu

SEQ ID NO: 15345 - RNA, 67 nt, Human
ccugggagaagugggugucccguaaauugagcgagaguugggguaggggagaauauauugagugggg

SEQ ID NO: 15346 - RNA, 70 nt, Human
gugugugaagcccguguacucuagugagcaguaguuuuuggucaagggaaaacggggguaucauaagcac

SEQ ID NO: 15347 - RNA, 61 nt, Human
ggagccaccacggggcugcuggcucaguuugccucuucccucccccagcaguccaagcucu

SEQ ID NO: 15348 - RNA, 64 nt, Human
gucccucaaauaaaagucacuuucacgagguggucaaggaaggccagugugcuuuuguagggac

SEQ ID NO: 15349 - RNA, 104 nt, Human
gucguggcucuaagauaauaaaucaaauguuguguuaucuuugguugaaagauacacagaucaaaauauuuguuggaauauauuuuaaaaauugagaaaacgac

SEQ ID NO: 15350 - RNA, 73 nt, Human
ugggaauguguggggggcuuccaugggcacaugauccucaagggcauucuagcccauuaggcucccaguccca

SEQ ID NO: 15351 - RNA, 120 nt, Human
ccauuuuuaaucuauggguucaacuguuugugagacugaauccuugcaaugcauuaagauauuaaagcaaauuaugauucacucauuucuugcgggucguaucccugauuucagaagagg

SEQ ID NO: 15352 - RNA, 60 nt, Human; identical to SEQ ID NO: 8964

SEQ ID NO: 15353 - RNA, 85 nt, Human
uggcaucccagauguugcaguugaagucgucguagccagcgagcagcagccguccgcugcgcgagaaggcaacagagggaugcca

SEQ ID NO: 15354 - RNA, 64 nt, Human; identical to SEQ ID NO: 287

SEQ ID NO: 15355 - RNA, 103 nt, Human; identical to SEQ ID NO: 294

SEQ ID NO: 15356 - RNA, 82 nt, Human; identical to SEQ ID NO: 8105

SEQ ID NO: 15357 - RNA, 84 nt, Human; identical to SEQ ID NO: 286

SEQ ID NO: 15358 - RNA, 66 nt, Human
cagcaggacaauggcauggacuggcuuaacgacacgcucugggucuaccaucccuauauccugcug

SEQ ID NO: 15359 - RNA, 83 nt, Human
cuucaagugucuugaugguagacaaggugaacguuuccuccuucucaaauucauccccuaccucaucccaggcugcuucgaag

SEQ ID NO: 15360 - RNA, 63 nt, Human
ggaugucaugaccaccccggaacacaccagccaggaacaaccgggugguuguccuuguuaucc

SEQ ID NO: 15361 - RNA, 60 nt, Human
gguaguguuggggaaggguaugagguccuaugcaggcuggccucuuaucccacagaugcc

SEQ ID NO: 15362 - RNA, 61 nt, Human
ggguucuccggggaacuccuccagcuuggucagcaaguucucgggguucuccggggaaucc

SEQ ID NO: 15363 - RNA, 71 nt, Human
ucuuaauacagucgugugucauaaccugaccuggaaaagaucagucgaugaucuaguaggcgguguugagg

SEQ ID NO: 15364 - RNA, 74 nt, Human
gaagguuccuguccuucccuagcuaacaaagguuaauccagcagcaguguuguggggcuggggagcagaucuuc

SEQ ID NO: 15365 - RNA, 75 nt, Human
gugaugcgguugugaggaccauggagagugaccugcgagggagcuuagggaucaccucagccaacucugcauuac

SEQ ID NO: 15366 - RNA, 79 nt, Human; identical to SEQ ID NO: 2688

SEQ ID NO: 15367 - RNA, 70 nt, Human
cauuugaaaauggccuugugauacuguggaacuguaaauuauuuauuuuuuacauaaggucacuuaaaug

SEQ ID NO: 15368 - RNA, 97 nt, Human
ucuacuuuauaaucagauauuacggggguuagaugcucucggguaaaucuuacugagagagggcuaguaacugaaauuucuuguacuuaaggauggg

SEQ ID NO: 15369 - RNA, 82 nt, Human
gguggccacagcucaucaggaacagcuucuucuaagggauccacuggaccuaggaaaaccgagguguugagagcaggccacc

SEQ ID NO: 15370 - RNA, 88 nt, Human
uggaagugaugacucuaaacagugcaaugaacaauuuauuuauguacuauuaaaagaacuguaaaugcaauguaaagacacacagcca

SEQ ID NO: 15371 - RNA, 71 nt, Human
gggguuauaaugagaagaaaauaacagacaauauucagugugagauuuuucaaguucuuuaugaagaagcc

SEQ ID NO: 15372 - RNA, 62 nt, Human
guuucauauaguuuuugugcugagaacagauaccaauguauguguacgaaagacugugaaac

SEQ ID NO: 15373 - RNA, 105 nt, Human
uagacaauggggugggggugggcucaaggugagaugauuuuuuggguccaagucuacucaagacaggcaucccagucuucggucuccaaauccaccuccugucug

SEQ ID NO: 15374 - RNA, 86 nt, Human
cgacuggguggacaggccguuuguugugaaucguacaggcuuccaggagcgggugccgaucaauagcgaggugccgaugaauagcg

SEQ ID NO: 15375 - RNA, 67 nt, Human
cugagcauguuguccuagaccugggcaaaggacaauucagagcucgggggaauaggggugugcucag

SEQ ID NO: 15376 - RNA, 65 nt, Human
ugcuccuuguaggcagaugccacaccccaauuucauggagugauuugcgucugcagcaggcagca

SEQ ID NO: 15377 - RNA, 61 nt, Human
ggguaguggcuaacgggugggacggcacagaucuggguguucucauuuguucuccacgccc

SEQ ID NO: 15378 - RNA, 78 nt, Human; identical to SEQ ID NO: 5302

SEQ ID NO: 15379 - RNA, 62 nt, Human; identical to SEQ ID NO: 484

SEQ ID NO: 15380 - RNA, 86 nt, Human
gaagaaaagaaaugggaauaaauaauaguacucaccccaucgaaugaucaugaguaucaaauuaaauguaaaacuuuguuuuuuuc

SEQ ID NO: 15381 - RNA, 84 nt, Human
ucaagagacaacuuuaaaaacuccauugugguccauuuucuaaaacagacacacacggaggguggaguaaaguaaugucuagga

SEQ ID NO: 15382 - RNA, 111 nt, Human
ggagcauucuugucccucuauccucacagagaagcagaggcuucucuccccaagaucuuggggugaggcugggccaugugcugggguugugaggaugagucaaggaggccc

SEQ ID NO: 15383 - RNA, 71 nt, Human
uccucgcuguuuugugcccaggcuaccuugugaugcuuuuugcugaagccugggcuuugaaaggugggugg

SEQ ID NO: 15384 - RNA, 88 nt, Human
ggccagcgcgagggcaucguggcgaccgaugcaggagaaggugucccccuucuuccaguccucggcugccacgcgcaguaugcugguc

SEQ ID NO: 15385 - RNA, 95 nt, Human
gggcccacccggugggacccccguggggcagggagcugggcccgacauggcuccggccucugccuuugcaccacgggacaucacagggugggccu

SEQ ID NO: 15386 - RNA, 65 nt, Human
aggucaccagugacagggaaaaaguccugaaauccaggaaaaucacuuagucccugcgggugccu

SEQ ID NO: 15387 - RNA, 88 nt, Human
ggagacggcccagcaggucugggaaauggugcaucaggugcuugcaggugguguugaggaacuccccgaagugcagggcucggccucc

SEQ ID NO: 15388 - RNA, 80 nt, Human
gggcggcguggggguggggcaggggguggugcuuaccggugaacaggggugcagcagcucggacguucucccagcugcuc

SEQ ID NO: 15389 - RNA, 63 nt, Human
ggaguugggugcuccaugaagagauggggcaggugcccccacuugacucucgccccagacucc

SEQ ID NO: 15390 - RNA, 74 nt, Human
gauaggccacguagucaacucucaagccguguucucccugaaaagagcaguguaagugacuacgacggguuguu

SEQ ID NO: 15391 - RNA, 66 nt, Human
gugcuggaauccacaguuucuccggagggcuaugcaaggcgcuuuggaaaggcgaagccugggcgc

SEQ ID NO: 15392 - RNA, 62 nt, Human
cccgcuucaccggcagccgcagaggcaccccaggguguccucggcugccccggugggcaggg

SEQ ID NO: 15393 - RNA, 63 nt, Human
cuccaucgaccaccuggaaccggcgagcacgagagccaggacccagaggacacaugcagggag

SEQ ID NO: 15394 - RNA, 60 nt, Human
ggugacaacaugcuggagccaagugcuaacaugccuugguccaagggauggaaagucacc

SEQ ID NO: 15395 - RNA, 72 nt, Human
ggaacaagguguuaacaggccugggaaucuagaaaaucccaucagcuucaccauuuuguuuucauuuugucu

SEQ ID NO: 15396 - RNA, 67 nt, Human
guacuccgucaugaucaacaaggccacgcccuacaacuacccagugcccguccgugaugaugggaac

SEQ ID NO: 15397 - RNA, 70 nt, Human
ugugucgcgcgggucaaccuggccacgugcucccuagguccaugcgcgguugggugcgccugccggccca

SEQ ID NO: 15398 - RNA, 64 nt, Human
cccgggccugaagcuccaccccggccaggguccagacuucugcuuguggggaagcaggcccggg

SEQ ID NO: 15399 - RNA, 69 nt, Human
ccuuauaugauuuuaauaauucucacuuaacuaauuuuguaagccugagaucaauaagaaauguucagg

SEQ ID NO: 15400 - RNA, 80 nt, Human
ucuggguuccuuacauuaaaguuccucuuuccaguccugucuggaagugcuucacgaggaaugccugagggauucuuaga

SEQ ID NO: 15401 - RNA, 67 nt, Human
ucuguggguuacgccaucuuuaagguucuaaaugagaagaaacuucaagagguugauaguuuaugga

SEQ ID NO: 15402 - RNA, 60 nt, Human
uuugaaacuccagagaaagcaaacaaaauaguaaagcuaaaacauuugagaaauuucagg

SEQ ID NO: 15403 - RNA, 88 nt, Human
auuugagaauggaaaggacaaucuuugggaugacauagcuuaggacacuugcucauuuauuugaaagaguccgauacacagugcagau

SEQ ID NO: 15404 - RNA, 63 nt, Human
gugcuggguagcugugagagguuacucacuggaguagguagccuaguaauuagugguaagcac

SEQ ID NO: 15405 - RNA, 89 nt, Human
guaggagggcgacccuccggaggucgagagggggcguucucccgaauggggggggggccggucuuggaaucaccgggucguccucucuc

SEQ ID NO: 15406 - RNA, 81 nt, Human
ucgagauggcauccuccuugccacaggucuucacgugcaccgcaacucagcccauucagcaggaguaggagccaucuuuga

SEQ ID NO: 15407 - RNA, 66 nt, Human
ggcggaacacuggccaauuacagcgggcggggccccuuuuuuuauccgcuuagcauggcccccgcc

SEQ ID NO: 15408 - RNA, 65 nt, Human
ugucaggucuuucccuucccacgaggccauauuucagacuaucacauggggagaaaccuuggaca

SEQ ID NO: 15409 - RNA, 69 nt, Human
gccugaagagccgagagagaacuacuacagagagaagagcugugcuaacuuuaauugauuccuacaggc

SEQ ID NO: 15410 - RNA, 64 nt, Human
uuguaaggccaugaggguaaaacgggaaccgaggaagacgguuuagaccuucugugccccacaa

SEQ ID NO: 15411 - RNA, 80 nt, Human
gccacguguugcucagacagggugugcugggcaucaaggugaagaucaugcugcccugggacccaacugguaagauuggc

SEQ ID NO: 15412 - RNA, 71 nt, Human; identical to SEQ ID NO: 1145

SEQ ID NO: 15413 - RNA, 83 nt, Human
uuugucgcugacuggcauuuucacucggcuggaagugcaaaugauguauuccuuucuccgaggaugcucgugucguugacaga

SEQ ID NO: 15414 - RNA, 121 nt, Human
aucgucaaugaaagcccugggcugcucuccaggaugucaccauuggggguucggcucguccgguggccggggcggguuuccaccgguguggcgccuggccgcguccggggcuucgggcgau

SEQ ID NO: 15415 - RNA, 75 nt, Human; identical to SEQ ID NO: 74

SEQ ID NO: 15416 - RNA, 67 nt, Human; identical to SEQ ID NO: 836

SEQ ID NO: 15417 - RNA, 67 nt, Human
ggugaacggauuaugguggccgcaacacugggaaaacucauugguggugggaccauaaucauuaacc

SEQ ID NO: 15418 - RNA, 87 nt, Human; identical to SEQ ID NO: 76

SEQ ID NO: 15419 - RNA, 62 nt, Human
guuggucugaaagcccccgguaucauuccucgaauuucagugcgggaaccaugcagacuggc

SEQ ID NO: 15420 - RNA, 62 nt, Human
gauccccagccuucuaggacacuuaacugcagggcacucccugccuguaaggcuuugggguc

SEQ ID NO: 15421 - RNA, 73 nt, Human
ggcuccucuguuccgaccuuucccgugcccugcagauuucuagggcgcacugaggcucgaccacggaagggcc

SEQ ID NO: 15422 - RNA, 77 nt, Human
acucucaugucagaugugggccaaacuaggcugaucuccaccaacagcccagucaagcucaccucugacaugagagu

SEQ ID NO: 15423 - RNA, 109 nt, Human
uacuuuggacaagcuuccuggucucuuagccaaauuuucuccccucacccagcuguccccagcucugcuuacgagaagaacacaugguacuccagguccugacgaggug

SEQ ID NO: 15424 - RNA, 73 nt, Human
uguauaugcauuuguuauuuauauugaaaacauuccauuguuccuugcaguauagaaggcaaaugcaauuaua

SEQ ID NO: 15425 - RNA, 62 nt, Human
gggugcgcuugagccggucgaagacaaaccagcgcuucuuccaugauuuaaucuugccgccc

SEQ ID NO: 15426 - RNA, 67 nt, Human
aguugaucagauuucaaggucuggggaguauauccacuguguacugggucuugagcucuagagagcu

SEQ ID NO: 15427 - RNA, 79 nt, Human
ccaccccaugauuuuagcauucauugaugauucuugugugaacguuuaauacauuugugauuauggaauuuuaacgugg

SEQ ID NO: 15428 - RNA, 64 nt, Human
cugaggcugcuuucuugaagaaaacuugacuuuauuucauuuagugggaagagcagcagcccag

SEQ ID NO: 15429 - RNA, 89 nt, Human
ggcugugaaguguucguggcaguagacucugaagcuaaggagcugagggcuuaacaaguuucuagaagcugccaucaacaugccaaguc

SEQ ID NO: 15430 - RNA, 68 nt, Human
caagcgguccacagcuugacgcaauccagauuccacauguaggccugccagucgugccucaucgcuug

SEQ ID NO: 15431 - RNA, 81 nt, Human
cucaguaugcaugguuggcaauguagagugacugugcugcugcuccaccaucuucuacacugccuucauacuugcccugag

SEQ ID NO: 15432 - RNA, 63 nt, Human
cugggccugggcuuuugaaagcugagggaggaggaccauuugagcccaggagccugaaaccag

SEQ ID NO: 15433 - RNA, 80 nt, Human
uuuuuuuuuuuuuuuuuuuuuuggacaccaaaaaccaucuuuuauuggaaaauuaguuaagggaaacgggaaaaaaaaaa

SEQ ID NO: 15434 - RNA, 73 nt, Human
cuaguagugucuacuuccuagggcuguuagggguuacaugggauaaugccuguaaggguuaacacauugcugg

SEQ ID NO: 15435 - RNA, 74 nt, Human
gauuccucuauugccacugauuggagcugaaaauaaaacugaaauucagcuagaaaaaaaggagcauaugaguc

SEQ ID NO: 15436 - RNA, 80 nt, Human; identical to SEQ ID NO: 788

SEQ ID NO: 15437 - RNA, 70 nt, Human; identical to SEQ ID NO: 5658

SEQ ID NO: 15438 - RNA, 79 nt, Human; identical to SEQ ID NO: 3903

SEQ ID NO: 15439 - RNA, 70 nt, Human
ggcacgaggcgacucuuagcuugucggggacgguaaccgggacccggugucugcuccugucgccuucgcc

SEQ ID NO: 15440 - RNA, 124 nt, Human
gguucuggguucaccucccugcucauggaacgucucucaguugauuauggcaagaaguccaagcuggaguucuccauuuacccagcaccccagguuuccacagcuguaguugagcccuacaacu

SEQ ID NO: 15441 - RNA, 70 nt, Human
cugguuguuuauauuucuugguggugaaaugacaagcaaggucauuuugcugagagugugggugggccag

SEQ ID NO: 15442 - RNA, 67 nt, Human
gaaggaaggcagucauauaggcacagaugcugguaguuggguauauguggcugacuuguaguucuuu

SEQ ID NO: 15443 - RNA, 90 nt, Human
cgggggggccugggucccagcgggugggggggcugguucgcggugccguugcucaccgccgugcgccgcauuuggggccuggcgcccccg

SEQ ID NO: 15444 - RNA, 74 nt, Human
cucugaucgagauacuauuucagauguuccugcaguauacuuugugaugccaacugaagaaaauauugacagag

SEQ ID NO: 15445 - RNA, 68 nt, Human
gcgugugguccguauggaaagccugguagcccugcgaguuaaguacugcuuccauucauuguuuacgc

SEQ ID NO: 15446 - RNA, 65 nt, Human
guuucuguauacagcugugugcuuugauguuguguuacuguacacagaagugugugcacugaggc

SEQ ID NO: 15447 - RNA, 66 nt, Human
uaaguacugcuuccauucauuguuuacgcuggaauuuuucuccccauggaauguaaguaaaacuua

SEQ ID NO: 15448 - RNA, 90 nt, Human
agguacgaguagagguuuaaagaaaaaucaguuuuuguucuuaaaaaugcauuuaaguuguaaacgucuuuuuaagccuuugaagugccu

SEQ ID NO: 15449 - RNA, 98 nt, Human; identical to SEQ ID NO: 10030

SEQ ID NO: 15450 - RNA, 101 nt, Human
agaggugcacaggaugcugcagcuggccaucagcgaggguugcgagggcuuuggcaugcucugaccacucuccugucauccaguuggcucccaugcucucu

SEQ ID NO: 15451 - RNA, 109 nt, Human
uuuuugaugagaaugagcuugagcugcugaugugugggacuggagacaucagugugucugacuucaaagcccaugcaguaguuguugguggcucauggcauuucagaga

SEQ ID NO: 15452 - RNA, 67 nt, Human
ggacgccuuuacagucuagcacauguaucaagacaucagucaggaucaugugaagaaaacaguguuc

SEQ ID NO: 15453 - RNA, 100 nt, Human
ucacccucaucugccaccaccucccauguguucaguucacccaugcaggcaagcugaggugaugaagaaaaucauugagacuguugcagaaggaggggga

SEQ ID NO: 15454 - RNA, 69 nt, Human
ggcgggucauacuccuuaagagcaguucagaugaugaucaagccuauugacugaagagagacacucgcc

SEQ ID NO: 15455 - RNA, 84 nt, Human
guaacuauaaaagggaaccuauaaauguaguuucaucugucgucaauuacugcagaaaauuauguguauccacaaccuaguuau

SEQ ID NO: 15456 - RNA, 63 nt, Human
guaugguacggaggaggccauuacagaagcaagcaccaagauggaauuuucugggccgaauac

SEQ ID NO: 15457 - RNA, 83 nt, Human
caucuguggauugugaaguuuaucuaguuguuuauaacuuuuuuuuagcuaaauagaauagaaaacaucaaagugcauacgug

SEQ ID NO: 15458 - RNA, 63 nt, Human; identical to SEQ ID NO: 981

SEQ ID NO: 15459 - RNA, 72 nt, Human
ucaggugucacauuccaagcagauuggcccucaucccucagaauguggaucugccgaauugaagaggccuga

SEQ ID NO: 15460 - RNA, 65 nt, Human; identical to SEQ ID NO: 1253

SEQ ID NO: 15461 - RNA, 74 nt, Human
aaauuuaguuaggacauagaaagaauaauguugagauaaauuccuugaagccuuuugcaacuguccuuaaguuu

SEQ ID NO: 15462 - RNA, 77 nt, Human
caugugcaguguacaacauacuauauacauauggggcuucccuauguacauauacauaugcauacacuaucuauaug

SEQ ID NO: 15463 - RNA, 69 nt, Human
uuguuuguauucaucuucauguagcagaauagaccacuguucaagaaguagaugaaaaauucauaacag

SEQ ID NO: 15464 - RNA, 84 nt, Human
accaacacaggagauauuuuuauagaaagcaaugaauuuuuucuuuaaagaacuuaauuuuaaaaugucuaccccauguuuggu

SEQ ID NO: 15465 - RNA, 88 nt, Human
agcccucgaugagaacaaggucacggucagcugauuuacuugagcguucggcuuacucugaccugacacacuccacagagcacuggcu

SEQ ID NO: 15466 - RNA, 103 nt, Human
ccaaauuugucagguggggauuucaccccagccuuaugacucaguuuuagauuuaacuugauucauuuaagguuggaguuuauuucuggcuggcaaaauaugg

SEQ ID NO: 15467 - RNA, 95 nt, Human
ugucuaccccauguuuggucuuucaagagugcauugcguguggcaugagauguacauagcuucauguuuguuucuaaugaagguggggauggaua

SEQ ID NO: 15468 - RNA, 87 nt, Human
cagaaacgucccacaugcccaccaggagcaagcuucaaaauguucagcuugcuuacauuaagcagaguaauuccagggauguuucug

SEQ ID NO: 15469 - RNA, 63 nt, Human
ucaagauucugcuaagaucuguauuaaucaucuugugcaugggaagauuguaguuacucuuga

SEQ ID NO: 15470 - RNA, 67 nt, Human
uucaguggguucuucuuuaggacucugcgauggaucuucuugcguggugcccgaagggcucuuugga

SEQ ID NO: 15471 - RNA, 69 nt, Human
gcacugagcuuggaggagguacagguggaccagaugacggcucugccugugaaauccaaauuccagugu

SEQ ID NO: 15472 - RNA, 67 nt, Human
ggaacaugacagcaggcacacucauggaauacaauggguuuuccaugcacccugucauccucagucc

SEQ ID NO: 15473 - RNA, 61 nt, Human
ugcugggaauaccauagccaccuuuuagggaaacuuaaauuauguuuuuggauacccugua

SEQ ID NO: 15474 - RNA, 64 nt, Human
uucucacuaguugucaaaaagaacagccuugcuaucuggucaggugaaugacaaccaaguggaa

SEQ ID NO: 15475 - RNA, 85 nt, Human
guuguuuuuuucuaacaguagauauguauauauuuuucccucucuaggugaaucaauucagauauuugcugagauugagaacugc

SEQ ID NO: 15476 - RNA, 85 nt, Human
gacuugagaauuuuuuaacguaacuuccuaaguguaagaugacaaaauuugacuuacgggauauacuggcguuaauuuucccguc

SEQ ID NO: 15477 - RNA, 79 nt, Human; identical to SEQ ID NO: 10269

SEQ ID NO: 15478 - RNA, 80 nt, Human
gggcuagaagguaucuacaacuucacacauaaccaaaaacagagaaguggugaaguggugaaaggaguuucucaaagccu

SEQ ID NO: 15479 - RNA, 61 nt, Human
ucuucagucaagugauuucauuggcagcaaugggccaguaugagaacuugaaagcugcaga

SEQ ID NO: 15480 - RNA, 84 nt, Human
gcuccugggcugaagcgaucuuccugucuugaccuccuaaaguucugagauuacaggcaugagccacugcacccagcccacugc

SEQ ID NO: 15481 - RNA, 93 nt, Human
uuggcccugugaauaaugcugaaaugaacaugagauugcacaucucgcuuugagguucugauuucacuucaacuuaaggcauuuuuuauccaa

SEQ ID NO: 15482 - RNA, 78 nt, Human; identical to SEQ ID NO: 5302

SEQ ID NO: 15483 - RNA, 101 nt, Human
acaccacaugcagauuuuggugcuuucccaaccuucuugguauaaagguaaacaauucuauuaccagggguucgggacagccuaguuuuguuagaggcugu

SEQ ID NO: 15484 - RNA, 96 nt, Human
acuagccuugagcaauaugcagagugaucucuauagaguugcugucauuuuuguucuauagucauaucaucaugucauaggagaaucaucaauagu

SEQ ID NO: 15485 - RNA, 66 nt, Human
gauguguaaaugccacauuucguaacaagaaagcucuuggagaaaagaaguuguauuuguuucauc

SEQ ID NO: 15486 - RNA, 61 nt, Human
ggugagucuagugguauguaguuuguuuacugugacaacaaacaugucaccccuuuucacu

SEQ ID NO: 15487 - RNA, 80 nt, Human; identical to SEQ ID NO: 15478

SEQ ID NO: 15488 - RNA, 61 nt, Human; identical to SEQ ID NO: 15479

SEQ ID NO: 15489 - RNA, 92 nt, Human
gcccuucugugcuuguuaguugcucaugacauggcucugagucugcauuugugugugccucggagaugucacugcguguugcgcaggagggu

SEQ ID NO: 15490 - RNA, 87 nt, Human
uaagggcaaagcgggcauacucccauggcaucgaacuuuugucuuaaaguaaaucaaggccguugaguugagaaugcuuugcuuuug

SEQ ID NO: 15491 - RNA, 92 nt, Human
agagcucagaucugggaucgccugugaauugggauggguguguaggcgccaagcacauccuuaccguuagcacuugaccaggaggagacuuu

SEQ ID NO: 15492 - RNA, 66 nt, Human
gggcgcugcgaggcaggaagggggccacaggcaggccgcagugggccccuagagagagcauugccc

SEQ ID NO: 15493 - RNA, 82 nt, Human
accugagccagcucgggugucagguugacaguuauguuuuuauacaaggcgucguaugugauguuugcaaaguaguucaggu

SEQ ID NO: 15494 - RNA, 70 nt, Human
gcuguguagacccuccccccuccaaaaaaaaaucucaucggacugcuuucuugguggcgguggguaaagc

SEQ ID NO: 15495 - RNA, 62 nt, Human
aagagagaccagucaguccuaaugugaguaaaugaaauuuacagguaacuuacuuacuccuu

SEQ ID NO: 15496 - RNA, 72 nt, Human
auuggaguauuugaaaaugaccaauauauagcugccagucaugguccagucuguuuucuguuaaacuccaau

SEQ ID NO: 15497 - RNA, 99 nt, Human
gcuaggauuacagguaugagccaccacacccagcuaguuguuuucuuucguuguuguuaauucuuaaaguuggggggggucucaauuuguuauccuggc

SEQ ID NO: 15498 - RNA, 61 nt, Human
ggguuggccaggcguggucucgaacuccugaccucaggcaauccacccgccuuggccuccc

SEQ ID NO: 15499 - RNA, 94 nt, Human
ugggcauauacucaggaguggaaugcuggauccuaucguaauucuguuuacuuuuuugaggaaccaccaugcuguugccgcaguauaugcacca

SEQ ID NO: 15500 - RNA, 68 nt, Human
ggagagaaaauuguaccucuucuacugcaauacuguuaugauuccagugagauaaggaauuucuaucc

SEQ ID NO: 15501 - RNA, 98 nt, Human
ucucuucugaacaagccccaucauuuggugaaccuccacccuaacaaaguagcgaugggguugggggcuaaauuaauuggaguggggcgaggacgaga

SEQ ID NO: 15502 - RNA, 65 nt, Human
agauagaucuuaaagggcaaagcaguauauugguaguugucaauauagcagugcuagcucugucu

SEQ ID NO: 15503 - RNA, 75 nt, Human
agggcugacauggugugagugugugggugugugauaagcuucucaucccugcauagaugcaguauucuuagccuu

SEQ ID NO: 15504 - RNA, 71 nt, Human; identical to SEQ ID NO: 11073

SEQ ID NO: 15505 - RNA, 85 nt, Human; identical to SEQ ID NO: 10310

SEQ ID NO: 15506 - RNA, 64 nt, Human
gcuugaugcuuggcugucagaagacaugaauuacgcacgguucaucacggcagcgagcgcacgc

SEQ ID NO: 15507 - RNA, 69 nt, Human
aauugaguagugaaaggaaggaggaggaaaggaaauuaaauguccuucuaguauucucuggacucaagu

SEQ ID NO: 15508 - RNA, 127 nt, Human
cacauucccauucacuuugauuuucuacauguaauuaccuucuuuuguuuaucauuagauuugauggggccaaaguugagauagaauagagggugaugacgguaagagcaagugucccaugaaugug

SEQ ID NO: 15509 - RNA, 93 nt, Human
gacauaugaagaauuggaucagagauuucuaugacagugcgggaaagcagcacugagaaacuuuugauuguuuucaauuucuucuuuuauguu

SEQ ID NO: 15510 - RNA, 81 nt, Human
accuuuccccuggguuuccauuaggguaguucuugaaaugaauuucauuuuucacugagugccuaccuucccagggcaggu

SEQ ID NO: 15511 - RNA, 83 nt, Human
gugacccucaacuaccucagguuugaaggcccuaaaugaaacugauuaccacucauagggacaaaccgaggggguucgguuac

SEQ ID NO: 15512 - RNA, 115 nt, Human; identical to SEQ ID NO: 14236

SEQ ID NO: 15513 - RNA, 98 nt, Human; identical to SEQ ID NO: 6908

SEQ ID NO: 15514 - RNA, 61 nt, Human
cggcuuuguggacuuuuguccuucuaggucugugcuuuuaauaggacugucuccaaaguug

SEQ ID NO: 15515 - RNA, 75 nt, Human
ugcccagucccugaaagagauggucuccaagcugaagaagccccggcggaucauccuccuggugaaggcugggca

SEQ ID NO: 15516 - RNA, 75 nt, Human
acagucuuuuuacaguuguuguuuucagugggguccgaauaugguucaccauuugcauuuauuugauaagucugu

SEQ ID NO: 15517 - RNA, 77 nt, Human
cauucuggauuuggucgauugcuucuuuuuaguaucuuuaacuuauuagaucucaaacucagcugcacaucagaaug

SEQ ID NO: 15518 - RNA, 65 nt, Human
cagaaaacaagaagucauaccuuuuucuuaaaaaaaaaaaaaaaguuuuugcuucaaguguuuug

SEQ ID NO: 15519 - RNA, 70 nt, Human
ggugaugcaggcuguggcgcgacugggagcugagcccuucccuuugcgccugccucagaggauuguugcc

SEQ ID NO: 15520 - RNA, 84 nt, Human
ccagauagccaugauguuugacuucugaggggcauugagcagaggaacaugaaaggaaggggucagaguacauaauggugcugg

SEQ ID NO: 15521 - RNA, 73 nt, Human
cuucaggcccugucgauuggggagcagcucacugaacuccuuguaguucucuccaccagcacgggguacaaag

SEQ ID NO: 15522 - RNA, 77 nt, Human; identical to SEQ ID NO: 1066

SEQ ID NO: 15523 - RNA, 76 nt, Human
ggcuggucacuugcuguaggucuuaaagccugguuccuggaggcuuaggagaucuucuuuuagcccagauccagcc

SEQ ID NO: 15524 - RNA, 66 nt, Human
gccuccaaggccucacuccacuccggaaccugggcccccacugggcuggacugggcugggcuaggc

SEQ ID NO: 15525 - RNA, 72 nt, Human
ggcggccucugggaggacccuuccuuaguccccucucccaccacucaggcuccugcuucccagagaguggcc

SEQ ID NO: 15526 - RNA, 66 nt, Human
ggcuguggggggaugagcucacucuggccccacagaccuguggcuccaaggaaucuucccacggcc

SEQ ID NO: 15527 - RNA, 61 nt, Human
gggggaucuggcugguggggaaccggguggaccuuggcccccauccucagcaccugccccc

SEQ ID NO: 15528 - RNA, 62 nt, Human; identical to SEQ ID NO: 7958

SEQ ID NO: 15529 - RNA, 70 nt, Human
cauuagugauuuuuuuuuucguaggucgucaaugucuugucauuguucauucuauaauaaaucauuucug

SEQ ID NO: 15530 - RNA, 72 nt, Human
cccccuucacccuucucuguuaaccuugugccugucuccuguaugaucacaucaccaaaaagggggaggggg

SEQ ID NO: 15531 - RNA, 69 nt, Human
ugauucacuuugccauguuuccuucacauccagaucccugucgguguuaguuccacucuuggucuuuca

SEQ ID NO: 15532 - RNA, 67 nt, Human
ggaaaaauggacaguuuauuacucacagggaacacagcagccaaaacaguaucuuuagucacuuucc

SEQ ID NO: 15533 - RNA, 84 nt, Human
gccacacaacaacacaccuccccuccuugagccuggcacacagcaccgggcucucugaauuuggaaaguguuucauuuuguggc

SEQ ID NO: 15534 - RNA, 110 nt, Human
gcccaggccacccgugcaccuguccugcuuccugcaguccccacucccugccuccuuugagggacugggggacuugggguagggggacagacgggaaagggucugaaugc

SEQ ID NO: 15535 - RNA, 71 nt, Human
guugaaggaagugagcacauuauuuguacugugaauauaaauuuuuggccuuuuauuuaucuuccuuugac

SEQ ID NO: 15536 - RNA, 63 nt, Human
cucaugcagacgcuccgauuucuuggacucuacagagaugagcaucaggauuuuauggaugag

SEQ ID NO: 15537 - RNA, 67 nt, Human
gacuuucuuccucaguggcggagagaagaaagugcauuuauugucuuuccacauauggaggaauguc

SEQ ID NO: 15538 - RNA, 63 nt, Human
uuggaggaacacagucaucuccuggugaaaucuaauccgguuacauguggcugguuucuugaa

SEQ ID NO: 15539 - RNA, 69 nt, Human
cuuucgaaucauguuaauuaaauggugguccuuuaaccaguagcaguuugauuaccaauuacucggagg

SEQ ID NO: 15540 - RNA, 91 nt, Human; identical to SEQ ID NO: 10489

SEQ ID NO: 15541 - RNA, 61 nt, Human; identical to SEQ ID NO: 544

SEQ ID NO: 15542 - RNA, 92 nt, Human; identical to SEQ ID NO: 9620

SEQ ID NO: 15543 - RNA, 76 nt, Human
gagcuaacaaacugcuacaaacugaaggaccuuuucaaaaaagcaaacugaaggaccuuuucaaaaaagcaagcuc

SEQ ID NO: 15544 - RNA, 90 nt, Human
ugcacauaaauguaaaccaaaacauguauuucaucaaaguaacuaacaugaugaugagaaacaggauauuuugaaacauauuuauaagca

SEQ ID NO: 15545 - RNA, 85 nt, Human; identical to SEQ ID NO: 11187

SEQ ID NO: 15546 - RNA, 91 nt, Human
ggaaaguuagaucuguauguuuuuaauuuuaaagaaauuacauauuuuuuaauuuaauuuuuauuuuuuuaaacugcacauuuaccuuuuc

SEQ ID NO: 15547 - RNA, 89 nt, Human
ucuuaguaaccuaauguaguuacuuacuucuuuuauccuacuacauauauaauagaaccaaaauaguaacgucaaugugguuauuaaga

SEQ ID NO: 15548 - RNA, 72 nt, Human; identical to SEQ ID NO: 14420

SEQ ID NO: 15549 - RNA, 76 nt, Human
caaaaaaaauuaaaauaagaaaaccaaagcacacaaugauaaaccacuuuucucuucuugcuguaauuuuucuuug

SEQ ID NO: 15550 - RNA, 87 nt, Human
uuuuuuugagacagagucuugcucugucgccuuggcucacugcaagcuccggccuaggcgacagagcgagacuccaucucaaaaaaa

SEQ ID NO: 15551 - RNA, 66 nt, Human
aggccagaggaucacuugagcccaggaguuugagaccagccugggcaacauagugagacucugucu

SEQ ID NO: 15552 - RNA, 78 nt, Human; identical to SEQ ID NO: 99

SEQ ID NO: 15553 - RNA, 80 nt, Human; identical to SEQ ID NO: 100

SEQ ID NO: 15554 - RNA, 68 nt, Human; identical to SEQ ID NO: 863

SEQ ID NO: 15555 - RNA, 71 nt, Human
guauuaguucuugcagcuggugguggcggcugaggcggcauggaucucagcgagcuggagagagacaauac

SEQ ID NO: 15556 - RNA, 64 nt, Human
uggaggcugcccgaauuugugccaauaaguacaugguaaaaaguuguggcaaagauggcuucca

SEQ ID NO: 15557 - RNA, 105 nt, Human
cacugauacuauaagcauuauuuuaaaugacgcugaucuuaagucugaaauaaauggaaaguagaaaaggugagccaguugauuugaaugcauuggauauuagug

SEQ ID NO: 15558 - RNA, 76 nt, Human
caugaacuguuaaauuucuuaaguuacauaguuacuacaccacauuuauguguauguuauguuuuaauagucaaug

SEQ ID NO: 15559 - RNA, 75 nt, Human
guauguacaauugauaauauaaaggggcucauugaaacuugagagccuguugaguuuugguuacuuguacauugc

SEQ ID NO: 15560 - RNA, 63 nt, Human
gguggaggaucacuuuugcccaggaguugaagaccagccugagcaacacagugagacuccauc

SEQ ID NO: 15561 - RNA, 90 nt, Human
gguguggucaugcauaccugcagucccagcuacuuagaugagaggaaggaucaccugagccugggagaucaagugagucaugaucacacc

SEQ ID NO: 15562 - RNA, 96 nt, Human; identical to SEQ ID NO: 2935

SEQ ID NO: 15563 - RNA, 76 nt, Human; identical to SEQ ID NO: 2936

SEQ ID NO: 15564 - RNA, 71 nt, Human; identical to SEQ ID NO: 2937

SEQ ID NO: 15565 - RNA, 65 nt, Human
gacaaagaaagaagaaaauaaaaacccuagagaguggcuuugggguuauuuuacgguacaaaguc

SEQ ID NO: 15566 - RNA, 67 nt, Human; identical to SEQ ID NO: 11915

SEQ ID NO: 15567 - RNA, 61 nt, Human
acgacggugaagcagacggcuguggugaugcccacggccaugaugacugccucgguguugu

SEQ ID NO: 15568 - RNA, 104 nt, Human
augcgguuccggaugaagaugcagagaauggcgaagaugaagagcaccaccaugcucaccaggagcacgcccaugcaugaggugaagucguagcgggucugcau

SEQ ID NO: 15569 - RNA, 100 nt, Human
caacaggaugccucuuaaagacaucuggugauuagaaacccagagacuauuuuauauucuguacuugccugagauauaccaccaacuaagcagucuguug

SEQ ID NO: 15570 - RNA, 100 nt, Human
caggacuggauaugggagauggggagucaacauugguuaaaugacuuguuccaugccaggcauaaucaacauuccucauuacuucuucaacauccucuug

SEQ ID NO: 15571 - RNA, 100 nt, Human
gaaacccagagacuauuuuauauucuguacuugccugagauauaccaccaacuaagcagucuguugaggauacaggacuggauaugggagauggggaguc

SEQ ID NO: 15572 - RNA, 72 nt, Human
guggcacagaguggaaggcuaccugaauucaaagucauguuuucacuaugccaugaagcucauuaaagccau

SEQ ID NO: 15573 - RNA, 131 nt, Human
ugccaggcauaaucaacauuccucauuacuucuucaacauccucuugaaagcugugcucauuuuacaaaugagaaaacagauuuagagaaauauaaugacuuguaugaggucacauagcuuaugaguggca

SEQ ID NO: 15574 - RNA, 93 nt, Human
cuccugcuuuauauaacuucuugaauccagcuaagagauuuauaaacuaauggcauaaaugucuggagccaaccuuggcaguuauagcaggag

SEQ ID NO: 15575 - RNA, 64 nt, Human
ggugaaggaggccgcgaugucggugagcacguagggcagugcgcuggcacggcucuccucugcc

SEQ ID NO: 15576 - RNA, 83 nt, Human
uuggacuucugugcaucuugagucccggaccgguuugaacccgccaugauaccggucacggaggggaaguagaugccaaccag

SEQ ID NO: 15577 - RNA, 81 nt, Human
aauagggaucaaguuuuaaauccuccuccuucccuuuuuucuggagucuugagggccagaguuuuuguuuuuguuuuuguu

SEQ ID NO: 15578 - RNA, 80 nt, Human
ggucacaaucugaugcugucaguuugaccgagcugguuuugcuuauggucaugcugcaauuuguuagaauaauagggauc

SEQ ID NO: 15579 - RNA, 88 nt, Human
guuuuuguuuuuguuuuuguuuuuuuuuuccugcuugcuacuguuuugugguguugaaaagugguuuaaaccugagacuaacuuaaac

SEQ ID NO: 15580 - RNA, 67 nt, Human
guuuccuuucuuagcugaugucuuuggccagaacaccgugggcuguuacuugcuuugaguuggaagc

SEQ ID NO: 15581 - RNA, 73 nt, Human
uggucacuucguggcucagguaagaacgugcuuguggaagacaagucuguggcuuggugagucuguguggcca

SEQ ID NO: 15582 - RNA, 62 nt, Human
caaaagccuuagaauaagaaaagcuuuuuuuaaauugcuuuaucuguauaucugaacucuug

SEQ ID NO: 15583 - RNA, 70 nt, Human
cugccuguagaggaugccgcacagagauugacuugauucauagagacaauucacuccaucccuauggcag

SEQ ID NO: 15584 - RNA, 111 nt, Human
guagaaugucauuguuuuuaaaacuguuuuauaucuuaagagugccuuauuaaaguauagauguaugucuuaaaaugugggugauaggaauuuuaaagauuuauauaaugc

SEQ ID NO: 15585 - RNA, 73 nt, Human
aaggcugucuggggauaaaagugguacccucuuggaauaugggcaggaaggcaucccuagugaccauagccuu

SEQ ID NO: 15586 - RNA, 68 nt, Human
ucuugggcacuggaguaggacucuugcugcagaugguauaguucugguucucgagaaggaauccaaga

SEQ ID NO: 15587 - RNA, 62 nt, Human
ugacauuagcagcauuaggucuauagguggcugcuuaacuaauuaugaacucagcugcuuca

SEQ ID NO: 15588 - RNA, 62 nt, Human
cagguaacauauuucuaacucuauacaccgcugcuauaaauguugguuuaacacuacgccug

SEQ ID NO: 15589 - RNA, 78 nt, Human
gucgugacuugguuacucgcuagcuuagggaucccggaggacccuucacuucugcuggugugacuauuggaucauagc

SEQ ID NO: 15590 - RNA, 81 nt, Human
uucuauuuuuuuauuauugugauagcagaugugcguauuuaguuuauugcaccuauguauacaggagccuaaacaauagaa

SEQ ID NO: 15591 - RNA, 64 nt, Human
uuugagagagaagaaaaacuguguuggaaccacaccaaugauauuuuucuuuguaauacuugaa

SEQ ID NO: 15592 - RNA, 80 nt, Human
acguggucaggcugcggcccugugagaagaagcggcuggacauccgguggcagacuuuaccuggccccccgucaccacgu

SEQ ID NO: 15593 - RNA, 66 nt, Human
cagguccccgcagguccgggcacuagcaccccucccagcagccccgugcggaccugcgggccccug

SEQ ID NO: 15594 - RNA, 61 nt, Human
cggacggaucgugcaaggcgcuuucggggcggauugugacuuguggagagauggccgucug

SEQ ID NO: 15595 - RNA, 64 nt, Human
gccaggagccccacacccgcugccgcuguccccgagggcacggcagccgagggcgcucccaggc

SEQ ID NO: 15596 - RNA, 62 nt, Human
augacaauguagaggaugacuucucuaaucaguuacgagcugaacuagagaaacaugguuau

SEQ ID NO: 15597 - RNA, 89 nt, Human
ggcgcacgacucgaccaaccacacuccugccgagagacacucuaagucacucgcgcgcauacccaaggagaccaagaaacagagacgcc

SEQ ID NO: 15598 - RNA, 71 nt, Human
gggagaaaggcuuaaguccuuggggugggaggagaaaccccuccccggggauccugcagcucuagucuccc

SEQ ID NO: 15599 - RNA, 62 nt, Human
guuuggagcuucguuuugagcgucccgugaacaccacgcccgccuuaauggggcauuuaaac

SEQ ID NO: 15600 - RNA, 79 nt, Human
cgugggaccacgcugcuugagggucugggccugggucuuacacaaaucguccacugucaagccuugggcgcgucccacg

SEQ ID NO: 15601 - RNA, 79 nt, Human; identical to SEQ ID NO: 1810

SEQ ID NO: 15602 - RNA, 65 nt, Human
gugcuguggcucuagacgacuaaaggaccugagauccgaacugggcucaucaagggcagcggcac

SEQ ID NO: 15603 - RNA, 73 nt, Human
uguggcucgucugaacuucucucaauggaacucagugaguaccagugcggagaccaucaagaaugugcgcaca

SEQ ID NO: 15604 - RNA, 60 nt, Human
ugucuucaccuuuguucucagcuccacagucuggauugcugacaguagguguauaugaca

SEQ ID NO: 15605 - RNA, 77 nt, Human
agcagucaauagcauccuucucuacaacaggaggucaugaguagcuuucugccagagggaggguguuacgagcugcu

SEQ ID NO: 15606 - RNA, 69 nt, Human
ggcaggcauucacccucagaagcuuguaccaaugagaugguaacauucuugcagggcgagcugccuguc

SEQ ID NO: 15607 - RNA, 60 nt, Human; identical to SEQ ID NO: 15604

SEQ ID NO: 15608 - RNA, 60 nt, Human; identical to SEQ ID NO: 15604

SEQ ID NO: 15609 - RNA, 62 nt, Human
uuucaggcauuuuuauuuuuccuggcuaaacguuggugaaaguuauaaccuccugccuggga

SEQ ID NO: 15610 - RNA, 65 nt, Human
aggaaaugcaaaggaucauucagcacuguagcaauuacaguacacaggaaugguuacgauuuccu

SEQ ID NO: 15611 - RNA, 68 nt, Human
cuagccagagaauuaccuucagcguguagucacgagaucaagguggcaucuggagguggugggguugg

SEQ ID NO: 15612 - RNA, 60 nt, Human; identical to SEQ ID NO: 15604

SEQ ID NO: 15613 - RNA, 74 nt, Human
uucagacccucgaggauucggucauaugggaauugcuguuccugauguauacagugcuuguaaaacgguuugaa

SEQ ID NO: 15614 - RNA, 65 nt, Human
ggggguugaacaccagaaggucucuuauuucuggaaauggguccguaccuucugauucagguucc

SEQ ID NO: 15615 - RNA, 70 nt, Human
cccauugcgggccugggcuagggggaccaggcacucaccgccuccucccugguacacaggcuucuguggg

SEQ ID NO: 15616 - RNA, 70 nt, Human; identical to SEQ ID NO: 7835

SEQ ID NO: 15617 - RNA, 86 nt, Human
ucaauggaagcgguacuuucuggcuggcuugagguugauguauguggccuucaucuccucggccucaggguuccgcacaucuuuga

SEQ ID NO: 15618 - RNA, 60 nt, Human
uuuacuuugcccauugauguuuuccgauaguagguuaauauuuuggagcuaaggaguaga

SEQ ID NO: 15619 - RNA, 84 nt, Human; identical to SEQ ID NO: 384

SEQ ID NO: 15620 - RNA, 89 nt, Human; identical to SEQ ID NO: 385

SEQ ID NO: 15621 - RNA, 73 nt, Human
gcagaucagccauggccucgucgaaaguggucuuggccagagagauggccuccucggggcuguuggcgaucuc

SEQ ID NO: 15622 - RNA, 101 nt, Human
gguagaagacccggcucucggcguccccggccuccuugaugagguggcuguccagcaggcccagcaaggugucgcacacgcccuggagcucagucuccacc

SEQ ID NO: 15623 - RNA, 129 nt, Human
uggggggcggcaucuccuucuagcugauguccauggccucaugguaggcugaccgggcugagucaaugaugcgcuucuugucgucaccgguggccaccucggccagguagcgguaguagucacccuuca

SEQ ID NO: 15624 - RNA, 72 nt, Human
auuugccaaguauguaucugauccacacaaauccuuagaaagguuuucuguguagucuucauuaacgcaaau

SEQ ID NO: 15625 - RNA, 65 nt, Human
uauaucuuauuugcuuuguagucugcugucauuccuuucaaagagcacacagcacaugaggcaua

SEQ ID NO: 15626 - RNA, 63 nt, Human
uuugugaauguuucacucuuacuguaggaucuugaauauguuuuacaauaaugaagcuacaaa

SEQ ID NO: 15627 - RNA, 64 nt, Human; identical to SEQ ID NO: 3890

SEQ ID NO: 15628 - RNA, 84 nt, Human
ggcugggcaguguggaggucguuggagucacuuccgcgucaccagcuccugugccugccagucggugccccucccgcuccagcc

SEQ ID NO: 15629 - RNA, 83 nt, Human
gcugggccuguuggucaggcauggaggagcuguguggucacuggccacuggcucucuucugcaccaccgccggcucugacagu

SEQ ID NO: 15630 - RNA, 74 nt, Human; identical to SEQ ID NO: 365

SEQ ID NO: 15631 - RNA, 77 nt, Human; identical to SEQ ID NO: 3082

SEQ ID NO: 15632 - RNA, 75 nt, Human
gaaggagguuuuuucacauuugguucacaacuaggcaguaugugugcaagugacagcugaaagcaaaccuguuuc

SEQ ID NO: 15633 - RNA, 80 nt, Human
gccucccaaagcaccauuaaucuuuucaagcagggccucaaggaguaaggacaaagcuaauggguuaauggguggggggc

SEQ ID NO: 15634 - RNA, 76 nt, Human
gcugaguguaugauggcaugacuauagcucacuguaaccuugaacuccugggcucaagcaauccuccuaccucagc

SEQ ID NO: 15635 - RNA, 69 nt, Human
cgcugguucagcgcgggcucgcuuccaacucgagcuggcucgggagaagcaggcggcguuguccaugug

SEQ ID NO: 15636 - RNA, 61 nt, Human; identical to SEQ ID NO: 14276

SEQ ID NO: 15637 - RNA, 72 nt, Human
gggucucuuuucggcgcucuagaggcagagggaggggaucccugucgugacaagagcgccugucugcgaccc

SEQ ID NO: 15638 - RNA, 75 nt, Human
gugucugcuugugugcuggcguuucuuggagagauacgguggcugucacccucuucuccaggcacacacagacac

SEQ ID NO: 15639 - RNA, 83 nt, Human
cggccugcuucuccaccagcaccgccaucugcaagaagagcucguguacgucgcggaugcggcucuccaggcgcagcaguucg

SEQ ID NO: 15640 - RNA, 105 nt, Human
ucccugcagggcagagcucccggcuuuggugcguccuucccagcgcgcuccauggucugggaugggcgguggcggcccgggccggccugcuacuugaggcaggga

SEQ ID NO: 15641 - RNA, 70 nt, Human
ggcuugaggcaggagucugacggcagcagcucccgagagcccuugccgaugccuggcuccauccagagcc

SEQ ID NO: 15642 - RNA, 77 nt, Human
gaagucggucguguccggcgugaugggcuugcuguccuccuggucagagcccaucccuguccggggacugccgcuuu

SEQ ID NO: 15643 - RNA, 104 nt, Human
gcuugcuccacuggaggaggugcugggcagcguucuucugaggccagugcuggcuggguucaggucguaugccaggugccccugcagcucccccagggagaagu

SEQ ID NO: 15644 - RNA, 82 nt, Human
cugggucaaccgaaacagagcucacuccagagauccgcacagcccaaaucucagaggcagcucaagcugggaccuggcccag

SEQ ID NO: 15645 - RNA, 80 nt, Human
aaaggggagacuuaaaauuugcuccaaugucaguucucuacagaugagaaccaauacuacagcaaguaagucuugccuuu

SEQ ID NO: 15646 - RNA, 60 nt, Human
ugcuaguuucuuuuucggggggacagaggacuaucuaaucucccucuucaaucacaagca

SEQ ID NO: 15647 - RNA, 126 nt, Human
auugcaaauaaguucccaauuuuagucuagguuagaucacucugguuaaucauagggccaugaugcccucagaacucaagcaggagcugcugcuacuugggcuuaaagcugaggcacgaacgcaau

SEQ ID NO: 15648 - RNA, 66 nt, Human
uuaauaaauacuuuauacacugaguguagaaaaacuugugcauauucuauaaagauaauuuauuaa

SEQ ID NO: 15649 - RNA, 74 nt, Human
uugagggagggcaagagaggauuugauaaaaugaggaaaaauguucuacucuccuuucuuuccuggagccuuaa

SEQ ID NO: 15650 - RNA, 117 nt, Human
gccaguacagaaguuuuuaaaccaaacugaggcauaaagcagaaagagcaaagacacaugaauacccuucuuaacaaucucuucuacuuaugccuucaccguaaccuuuguacuugu

SEQ ID NO: 15651 - RNA, 72 nt, Human
uguuuagcauuauuuaauagccugaaaguggaaaacaauccaaauauccaucaacuagugaaugguuaaaua

SEQ ID NO: 15652 - RNA, 65 nt, Human; identical to SEQ ID NO: 1727

SEQ ID NO: 15653 - RNA, 102 nt, Human; identical to SEQ ID NO: 2172

SEQ ID NO: 15654 - RNA, 80 nt, Human; identical to SEQ ID NO: 367

SEQ ID NO: 15655 - RNA, 65 nt, Human; identical to SEQ ID NO: 247

SEQ ID NO: 15656 - RNA, 71 nt, Human
cuagaaucucguguguuaguuuuaacuguuuugaaaauaauaaguaacauuaacacaauguugauauuugg

SEQ ID NO: 15657 - RNA, 73 nt, Human
guagcuaacauuagaucuagcuuauuauuucagaaauuaauuuaggaaauaauuauuaaaacauguuggcuac

SEQ ID NO: 15658 - RNA, 65 nt, Human
ccaaggaaccaagggacgcuuggcauaaucagguaaacuuguggucaggcgagcccaagccuugg

SEQ ID NO: 15659 - RNA, 76 nt, Human
gauagucuaauauuuacaaucauuucuuguuuuaguguuccacauguagcuucuagaacagaacugaugauuacuc

SEQ ID NO: 15660 - RNA, 87 nt, Human
ucaguccaguggcagacgugugacucacaacuuuguaccuuaguuugggaggccaaguugugauuugcacaccugccacuggccuga

SEQ ID NO: 15661 - RNA, 63 nt, Human
ucuuugaaguguuuuucuuagagucuggcacaugcuaggcauuggagaaauuaagaacgagga

SEQ ID NO: 15662 - RNA, 84 nt, Human; identical to SEQ ID NO: 286

SEQ ID NO: 15663 - RNA, 64 nt, Human; identical to SEQ ID NO: 287

SEQ ID NO: 15664 - RNA, 89 nt, Human; identical to SEQ ID NO: 288

SEQ ID NO: 15665 - RNA, 61 nt, Human; identical to SEQ ID NO: 544

SEQ ID NO: 15666 - RNA, 86 nt, Human
gggcccccaagcuggggcccgcgacucgaaggggacugggauggggaucucguuggacugcguggcuagcuugggcaugggggccu

SEQ ID NO: 15667 - RNA, 88 nt, Human
uuuuuuuuuuuuuuuuuuuuuuuuuuuuuuuuaggggggggcuuugaacuuuauuugaaaaaaacagaaaauaaauggaucaaaagaa

SEQ ID NO: 15668 - RNA, 113 nt, Human
ccucccagcccugggcgcacagcauggaagaggagcucgggaggacaggguuggggccuccagggucugacaccaccccacuccucuuccuagcaccaugggguagggacagg

SEQ ID NO: 15669 - RNA, 68 nt, Human
ggguucugauuuggucauuaccacauccagucacuguggugagcgagaaugaccugagucaaaugccu

SEQ ID NO: 15670 - RNA, 84 nt, Human
ucacuaaguucaucuguggggcuggaaggggaggguuggcagaaagucagccccacccaguccacgugguugcuauacauggga

SEQ ID NO: 15671 - RNA, 69 nt, Human
agaugccuuuucccuguuugguucauuguauuguauuagguuaagcucuacuaggguaaugaaggcucu

SEQ ID NO: 15672 - RNA, 62 nt, Human; identical to SEQ ID NO: 14062

SEQ ID NO: 15673 - RNA, 83 nt, Human
agguguggguggggcccguggcucugagcgccugucugcccguccacagggcccugaugagcuguggagccuuccccuccccu

SEQ ID NO: 15674 - RNA, 72 nt, Human
guuaguuaacgcuguucacguagcucuuuucugccuuuucacuuagagcuguguguguaccaguuuccugac

SEQ ID NO: 15675 - RNA, 74 nt, Human
ggcucaaugaaaugaaagugaaaagaaccugacuuuacuucaucuuucuuuugauuaacuugugaucuugagcc

SEQ ID NO: 15676 - RNA, 67 nt, Human
gcugaucuucaccaaaacaucuucuguggcucuuuucuucccacagucauaggcagugacggucagc

SEQ ID NO: 15677 - RNA, 90 nt, Human
guugcuuuaugagacuuuuucacguuggugccaucaggucccuucccacaaucauaggccuggauggugaaugaauagucuuucugcagc

SEQ ID NO: 15678 - RNA, 63 nt, Human
ugaggggagcagucggcauccacggccuccacccucaaaaugcugucguacugcuuccccucg

SEQ ID NO: 15679 - RNA, 75 nt, Human
uuaguuugaagguugcuuuuuuuuuuucuugcuuguaaaguggaacaaaucuugaaucuccaaucugaaaacuga

SEQ ID NO: 15680 - RNA, 66 nt, Human
uuuuuuuuuuuuuuuugcacacaaugcaguuuaauaaaugcaauagaggcagaggcugagaagaaa

SEQ ID NO: 15681 - RNA, 64 nt, Human
cuacccucaccccaucacagcacccugagaaucacggguccaacugugugggagggggcugugg

SEQ ID NO: 15682 - RNA, 95 nt, Human
gugacucugguccaucacacuuagguccucuggccugccucugccacauccagcugcuaggggcuggccucagcccugugaggggccgcaggcac

SEQ ID NO: 15683 - RNA, 74 nt, Human
cuggaugugcugcagaugcaucccaauaaucaggguggccucaaaacccugucuguccucuguagcacuuuuag

SEQ ID NO: 15684 - RNA, 85 nt, Human
uucuaaaauuaugaagaucaauuuauauguaaaucuuacgcauuaagaacaugcuuauugauaaaucuaaaucucuauuuuagag

SEQ ID NO: 15685 - RNA, 63 nt, Human
caugacaacagacacauugacauggguggguuuaccgccaagcggucgauggucuucugugug

SEQ ID NO: 15686 - RNA, 98 nt, Human
ccuguauuucuccaucuccaggucuggacagugcaaguugccaagaaaaaggaccuaguguagccauugcacugcagaugaaauaauggaggcucagg

SEQ ID NO: 15687 - RNA, 66 nt, Human
ugcccaagacucaccucccuuccccucugcaggccgacggcaugaagacagucgggugauggugua

SEQ ID NO: 15688 - RNA, 74 nt, Human; identical to SEQ ID NO: 493

SEQ ID NO: 15689 - RNA, 61 nt, Human
agguuucagagcauauuccuguuuaucaacaagaagaaaaccaaacagaugucuggacucu

SEQ ID NO: 15690 - RNA, 63 nt, Human; identical to SEQ ID NO: 11804

SEQ ID NO: 15691 - RNA, 103 nt, Human
ggaagggauguuacgguacaaacguauauuuauguguguguguguguaugugugugcgcgcgcgcgugugcauuuauuugugaugucugugacccuccucucc

SEQ ID NO: 15692 - RNA, 91 nt, Human; identical to SEQ ID NO: 5353

SEQ ID NO: 15693 - RNA, 66 nt, Human
uuucucagauugcugauuuguuuccacaugucucuuaugguauaguucuugagcaauuuccugaaa

SEQ ID NO: 15694 - RNA, 67 nt, Human; identical to SEQ ID NO: 3685

SEQ ID NO: 15695 - RNA, 73 nt, Human; identical to SEQ ID NO: 2833

SEQ ID NO: 15696 - RNA, 66 nt, Human
cauacgugagcugacugcccgagcaguggaagucccacagaagcuacagcugccaggucacgcaug

SEQ ID NO: 15697 - RNA, 88 nt, Human
ggagaauugcuugacccgggaggcggagguugcagugagccaagauugcgccauugcacuccacccugggcaacaacagcgaaacucc

SEQ ID NO: 15698 - RNA, 87 nt, Human
gccugggcugcccccacuucucccauaauucccugcccuagagcagcaccuccagagcuaggagaaggagagggggccacccaaggc

SEQ ID NO: 15699 - RNA, 75 nt, Human
uuucuuuauuggcacuaguauaaaacagagcagaucaacuggccucucggucuguacaaaguguggggcgugaaa

SEQ ID NO: 15700 - RNA, 80 nt, Human
uguggcuuaaaugauuuuuucuaacuaauaaaguggaauauauauuucaaaaaacagaagaaaaaaacagagaaaacaca

SEQ ID NO: 15701 - RNA, 94 nt, Human
ggcaauuguugauguucccaaaguccuuggggcaaugcagccagcccccgggcaaggacagcaaugccacuaggcuggagcccaacagugagcc

SEQ ID NO: 15702 - RNA, 84 nt, Human; identical to SEQ ID NO: 286

SEQ ID NO: 15703 - RNA, 64 nt, Human; identical to SEQ ID NO: 287

SEQ ID NO: 15704 - RNA, 89 nt, Human; identical to SEQ ID NO: 288

SEQ ID NO: 15705 - RNA, 61 nt, Human; identical to SEQ ID NO: 776

SEQ ID NO: 15706 - RNA, 92 nt, Human
gcucgcgcugcuucucccgcuucuucaucaggugcauggcgcgggcggccucgcucgcggcgcccuuguauugagccauggcagcggcgugc

SEQ ID NO: 15707 - RNA, 66 nt, Human
gguggcuacuaguccacgguuggcuacuaguccacgguuggcgggacuugagcucuggcugccacc

SEQ ID NO: 15708 - RNA, 64 nt, Human
guagugcgcagagaacugcuugucaaugucggauuucaugaugugcuccuccgcgaugcgcugc

SEQ ID NO: 15709 - RNA, 131 nt, Human
uacuaguccacgguuggcuacuaguccacgguuggcuacuaguccacgguuggcuacuaguccacgguuggcuacuaguccacgguuggcuacuaguccacgguuggcuacuaguccacgguuggcuacua

SEQ ID NO: 15710 - RNA, 89 nt, Human; identical to SEQ ID NO: 385

SEQ ID NO: 15711 - RNA, 80 nt, Human
cuucacgcuggggcuagcaggacuucucggcgagggaguuuuuaacuuugugagaacuccucaugcacccugugcuggag

SEQ ID NO: 15712 - RNA, 69 nt, Human
gauuuagcagcuaaugaagcccagcuucugaggaaaauucaguuguugugccucauggagaugacuuuc

SEQ ID NO: 15713 - RNA, 74 nt, Human
ggcaguggcugauugacacccucuaugccuucaacaguggcaacguagagcgguuccagacucugaagacugcc

SEQ ID NO: 15714 - RNA, 81 nt, Human
ggucaggaguucaucuugauuuuuacauuugaaaauaaugaaauaaauuuacaaaauaaaaggaaaagugaauaucuuucc

SEQ ID NO: 15715 - RNA, 72 nt, Human; identical to SEQ ID NO: 3662

SEQ ID NO: 15716 - RNA, 74 nt, Human; identical to SEQ ID NO: 365

SEQ ID NO: 15717 - RNA, 102 nt, Human; identical to SEQ ID NO: 2172

SEQ ID NO: 15718 - RNA, 77 nt, Human; identical to SEQ ID NO: 3082

SEQ ID NO: 15719 - RNA, 84 nt, Human; identical to SEQ ID NO: 286

SEQ ID NO: 15720 - RNA, 64 nt, Human; identical to SEQ ID NO: 287

SEQ ID NO: 15721 - RNA, 89 nt, Human; identical to SEQ ID NO: 288

SEQ ID NO: 15722 - RNA, 83 nt, Human
ggauaccuuaggaagcaguacaaaucuucauaaucacucugagggagaguauauuccaggagcuuguagugcuucaagugucc

SEQ ID NO: 15723 - RNA, 61 nt, Human
uaaugaccaucuucaacuuucugcagaagucguggaagguaguagauaccaggaaucauua

SEQ ID NO: 15724 - RNA, 88 nt, Human
aggugaagagggaccguauucuggggcuuaguguggguggggcauauccuccccaaacuuguucuggugggcgauguucuucacaucu

SEQ ID NO: 15725 - RNA, 82 nt, Human
ggagagccuggugguggacauaggccugacaguaguaacaccaggcugacaggucgauguagcugaggaccaacgggugucc

SEQ ID NO: 15726 - RNA, 72 nt, Human
ggguaauuaacuuaaucuccagccccucuccccuccgugaagguuaagggguggggcugaaaguuccaaccc

SEQ ID NO: 15727 - RNA, 60 nt, Human
gugauagaggcuuguuuguuagucagguugguuuuuuugaggcagucuuaacucugucac

SEQ ID NO: 15728 - RNA, 61 nt, Human
ucaggaacugggaugaugagcaaauauauguauuucuuauuauaucacaaucaguguuuga

SEQ ID NO: 15729 - RNA, 92 nt, Human
guuccauuuuaaguuagaaaaauguaucugugugggaguaaaaagauuuccuuuuuaaaaucauuucagauaucaccauacuugaugggaac

SEQ ID NO: 15730 - RNA, 62 nt, Human
cgagugacuagcaaggaaagcagggcucaccaagagauccuugacacuuguuaaggcauuug

SEQ ID NO: 15731 - RNA, 65 nt, Human
cuuccaguuugcaaaagaucuucugugaccaugagugagcccguagaagugaaccaggcugggag

SEQ ID NO: 15732 - RNA, 62 nt, Human
acagauuauuuagugacccagguacuaagccuaguacccaauaguuacuuuucugguccugu

SEQ ID NO: 15733 - RNA, 81 nt, Human
accuguucaucccuuucuucccuaauccccuggcaaccacuuuaaaaaaaaaaauuagguucaggggguacaugugcaggu

SEQ ID NO: 15734 - RNA, 64 nt, Human
gggcuuagacaaauguaugaugauaucuacaauuauagaaucauacagaauaguuucacugccc

SEQ ID NO: 15735 - RNA, 73 nt, Human
caguggaauuuaguagugggcgccuguauaccaacuuuagugacuauaaaccaaaaauaaaauucuaagccug

SEQ ID NO: 15736 - RNA, 124 nt, Human
cucuuuaaaucugauaagaaacauuuacaggccugguggcucaugccuguaauuucagcaccuuggauuacaggcgugacgacugcaccagcccaucuuuuuuuuuuuuuuucuucagacagag

SEQ ID NO: 15737 - RNA, 64 nt, Human
ccaguuguagagcggcguccuuguucaagcaccggauaaugaugccccugauuuugcauucugg

SEQ ID NO: 15738 - RNA, 81 nt, Human
aauaguauuuauuuaauaaaacauauauuauauugaacuauguguuaauucauuuguaucuuuuaaaaaauuaucacuguu

SEQ ID NO: 15739 - RNA, 74 nt, Human
aggauggaacaggaagguauguccugucaguaucuuaacccuuucaacaagacauuuaccuauuugucuuuccu

SEQ ID NO: 15740 - RNA, 86 nt, Human
aacauggauuuuaacguugcaggauuguaaauucauaagauaguuauuaccuuucuuugaaauuguguaauguuuauauucuuguu

SEQ ID NO: 15741 - RNA, 66 nt, Human
auggguguuacuucuuugauaguucuuacuaccuugugggggaacuaccaaaggaaguugucucgu

SEQ ID NO: 15742 - RNA, 81 nt, Human
ccaaauugcaaaguggauauuauauuggcgaccuucacaggggggguccgguguggugggaaccaaacaggcacaauuagg

SEQ ID NO: 15743 - RNA, 64 nt, Human
uacaaaaaagauucaguuagaaucuguaaacuaaaccaguuuauuuuuaugggaucuucaugua

SEQ ID NO: 15744 - RNA, 68 nt, Human
caugaggaaggacaaagauaaacagguuucuaaaacaugacggagguuugagaugaagcuucuucaug

SEQ ID NO: 15745 - RNA, 84 nt, Human
gcuuuuagauucacacaugaacggugacuuaaacagcuuaaaguuuaguuuacaaguuguaggugauuaaaauaauuugaaggc

SEQ ID NO: 15746 - RNA, 77 nt, Human
ugcuuagcguuaaguuuuuaacguaauuuuaauagcuuaagauuuuaagcagaaaacuaugaagacuuagaagagua

SEQ ID NO: 15747 - RNA, 79 nt, Human; identical to SEQ ID NO: 728

SEQ ID NO: 15748 - RNA, 73 nt, Human; identical to SEQ ID NO: 729

SEQ ID NO: 15749 - RNA, 102 nt, Human; identical to SEQ ID NO: 2701

SEQ ID NO: 15750 - RNA, 87 nt, Human; identical to SEQ ID NO: 4680

SEQ ID NO: 15751 - RNA, 64 nt, Human; identical to SEQ ID NO: 11768

SEQ ID NO: 15752 - RNA, 60 nt, Human
uaguuguaauuugauagcaucuggucagugguuaucacugacuaucuucaauaacaauua

SEQ ID NO: 15753 - RNA, 100 nt, Human
cgggccuucgggagcugggaagagcacccugcugaagaggcugcuccaggagcacagcggcaucuuuggcuucagcgugucccauaccacgaggaacccg

SEQ ID NO: 15754 - RNA, 74 nt, Human
ggggcggagaugugcccuguggguuggaccuccugggugaccccguaccagcuccgugggguggucccuguccc

SEQ ID NO: 15755 - RNA, 62 nt, Human
gccucuucagaaugcugcuuuccuagagcaaccauugagcagucauuaucuguugucuuggc

SEQ ID NO: 15756 - RNA, 70 nt, Human
agggaggagcuggaagcagccguggcaucucuugcucgaaguccagggcgacguagcacagcuucuccuu

SEQ ID NO: 15757 - RNA, 76 nt, Human
ggaagagugccucagggcagcggaaccggcucauugcaauggugauggacuggccgucagagcucguaacucuucu

SEQ ID NO: 15758 - RNA, 69 nt, Human; identical to SEQ ID NO: 8816

SEQ ID NO: 15759 - RNA, 88 nt, Human
uggaggggccggacucgucauacuccugcuugcugauccacaucugcuggaagguggacagcgaggccaggauggagccgccgaucca

SEQ ID NO: 15760 - RNA, 61 nt, Human
uucuguggagagaggucuaauauaauauguaguauuuuauguaaggcacuguuauacagaa

SEQ ID NO: 15761 - RNA, 61 nt, Human
cccaggugcaccucauaaaaagguguauuacaccugauaguugugaguaguccaaccuggg

SEQ ID NO: 15762 - RNA, 66 nt, Human; identical to SEQ ID NO: 7949

SEQ ID NO: 15763 - RNA, 72 nt, Human; identical to SEQ ID NO: 1696

SEQ ID NO: 15764 - RNA, 62 nt, Human
gaggguguacgcucacugauuuucagcacacagcgccacuuggcaaagucagcaccauccuu

SEQ ID NO: 15765 - RNA, 83 nt, Human
gauggucacucagggccuuguacacagcagccaaguaccuucucuguaacauacugacaacguuugaggucgugaucuccauc

SEQ ID NO: 15766 - RNA, 71 nt, Human
guauacuugaugggacaggcauugcccggugucaccauguugggcuugagcaggguccccuccagguauac

SEQ ID NO: 15767 - RNA, 78 nt, Human; identical to SEQ ID NO: 99

SEQ ID NO: 15768 - RNA, 80 nt, Human; identical to SEQ ID NO: 100

SEQ ID NO: 15769 - RNA, 72 nt, Human
cccuccagagagaaaggaggccgcucccaaguccguccuugccccguggccuuccuguuccuuugacgaggg

SEQ ID NO: 15770 - RNA, 76 nt, Human
ggcccaccuucuagucguuuccuggugaauggcucugcugaagauggccggaaagcagauuaaugaaggugcugcc

SEQ ID NO: 15771 - RNA, 61 nt, Human
gggggcccuggccucauacccaccuggauugucuuccuccaagugagagaccacagcuucc

SEQ ID NO: 15772 - RNA, 67 nt, Human
acuauugagaccgcaacugcuugcacugaucauuuugguucgugagcaguuggugaguuuagauggu

SEQ ID NO: 15773 - RNA, 63 nt, Human
gagcagagagggagccguucaugucagagacucacugccagaaaagccuuacccauuuugguu

SEQ ID NO: 15774 - RNA, 62 nt, Human
ugagaauguuccccccauuggaaacugacgcuuggcuccuuucuuguggauggauuuucuca

SEQ ID NO: 15775 - RNA, 76 nt, Human
ugugcugcugggaaggaucuuuggccuaggggaugacuuaguuuauucaaagcuuuucuuaagcccuuucaguaca

SEQ ID NO: 15776 - RNA, 71 nt, Human
ccgcaugccaucccaagauuauguccucacuuauaacuaugagggaagaagaucuccagcugguucugugg

SEQ ID NO: 15777 - RNA, 65 nt, Human; identical to SEQ ID NO: 1253

SEQ ID NO: 15778 - RNA, 90 nt, Human
ccccgcagaccccgcagaccccauggacccaggugcagaggcccgacggcaaaaagcacaggguaggugggugugggggcaccagcaggg

SEQ ID NO: 15779 - RNA, 65 nt, Human
cuguggggacaggaugucuggguccccaggcuuugacuguggggacaggugucugggucccccag

SEQ ID NO: 15780 - RNA, 61 nt, Human
auguggaagaggagcagcccgaggaguuuuuuauccccuaugucuggucucuugucuacau

SEQ ID NO: 15781 - RNA, 64 nt, Human
gccaagcagcccuucaaguucuuuuauuucuggguaacagaaguagacagacaggcuacuuggu

SEQ ID NO: 15782 - RNA, 63 nt, Human
aucucuguggagagaucgcucgauuuucgcaucguggagaugaagacuucuuguagcagaggu

SEQ ID NO: 15783 - RNA, 69 nt, Human
uacucuggguguguacauucucacgaccggccugaucccugugcuggagaaagaacacgaccccgagug

SEQ ID NO: 15784 - RNA, 79 nt, Human
gaucauuguccccucaaugagcgagguucgaugaagcaugauucuauugcuggaguugccugcgcuuaaggacgugauc

SEQ ID NO: 15785 - RNA, 63 nt, Human
uggccauuuguaucacucauucugccuacaaaacaaagaaugcacuguggaauuugagggcca

SEQ ID NO: 15786 - RNA, 85 nt, Human
guauguuagacugggauugucuucaucaucaucuuuauccagucauacagcaggggugacagaaaaacauucucaggacucauac

SEQ ID NO: 15787 - RNA, 70 nt, Human
uacaacagagaugaaguucagcugccccggggaccuagugccacaccaguagauuguucacucuguggua

SEQ ID NO: 15788 - RNA, 74 nt, Human
uugaaaacuauugcccauaagccucaggauuuuaagagccuggauauuuuuuuggaaaugguuauuuuauucaa

SEQ ID NO: 15789 - RNA, 71 nt, Human
ucuugcccccaaggaccagcgcuguggcugacacauacgaacguggcccacauaggucucugggcgugaga

SEQ ID NO: 15790 - RNA, 131 nt, Human
auuucagcugauuggacuacaaauucacaagggaaaaaagucaagggcauuugguauuuggagacaggaaaacucaaggaaccaaaaguacugguacuuuaagucucaaaaaaggguuucagucaggaaau

SEQ ID NO: 15791 - RNA, 66 nt, Human
uuuuuuuagggaaagggcaaacccuuuauuauguacauugggggaaagggaggccaccuggaaaaa

SEQ ID NO: 15792 - RNA, 61 nt, Human
ucugagcagcagcugacaaaguuugcagagaaauuccaggaggugaaagaagcugccaaga

SEQ ID NO: 15793 - RNA, 89 nt, Human
cgggcggugcgacagcagcuggagggcagaggaggcggcgcgggguguccuguccucgccaugaggccgcuaguaggcgccgguguccg

SEQ ID NO: 15794 - RNA, 85 nt, Human
cugugauccuuuugauuacguuucugagaaaacaccaaugaagcacuucacuuuguuuauucaaagccauuuaauaaaaccacag

SEQ ID NO: 15795 - RNA, 69 nt, Human
uaugcagaagcgagagaagcucggcggccagucauaucucgaagguuguuuggcuuguuuaacagcaua

SEQ ID NO: 15796 - RNA, 69 nt, Human; identical to SEQ ID NO: 4109

SEQ ID NO: 15797 - RNA, 74 nt, Human; identical to SEQ ID NO: 4110

SEQ ID NO: 15798 - RNA, 62 nt, Human
uccaaguaccacgggguauccuaauagcuuuuuaauuagaugaaagcccagugggaauugga

SEQ ID NO: 15799 - RNA, 88 nt, Human
gagcuggcagguuggaugacacacugggaagcguauggggaaaacucugaacaauuccaaaaugcuucuaagaaccuguuugaagcuc

SEQ ID NO: 15800 - RNA, 63 nt, Human
gaaggaggagaccaaggaggaugcugaggagaagcaauaaaucgucuuauuuaauuuucuuuc

SEQ ID NO: 15801 - RNA, 79 nt, Human
gucagauggagacugagaaagcaagauguuggcuaccagaaauggaguuucaaaaauuuucuuaaaagcucuauuggac

SEQ ID NO: 15802 - RNA, 79 nt, Human
cauguggcuugcucaguguuuaauugcaaguuuucaaucuuggacuuugaaaacaggauuaaacguuaguacucgugug

SEQ ID NO: 15803 - RNA, 107 nt, Human
ugaagaucgacauuuaaaaaaugagggugaagaaaagcuauaguggcauagaaaaguauaaagcucaguuaguuuuuuuauuauuauuauuauuaaaaguuaauuca

SEQ ID NO: 15804 - RNA, 94 nt, Human
gauguguggccacccugaccgcuggcaugugcccagcgacguggccggaagccaugaucugcgucgauugccaauccgguuaauuccacgcauc

SEQ ID NO: 15805 - RNA, 72 nt, Human
gugcccaggaugauauuuuuacacaagcuguaaauauggcaggauugccagcagugaguaucccuguugcac

SEQ ID NO: 15806 - RNA, 86 nt, Human
ucaaaccaaggguugccaauaggacugcaguuuauuggacgugcguuuugugaccagcagcuucuuacaguagccaaaugguuuga

SEQ ID NO: 15807 - RNA, 62 nt, Human
uugaaccuggagguggaguugaaaaacccaaacaugccaugcuugauuccacccgggugaaa

SEQ ID NO: 15808 - RNA, 78 nt, Human; identical to SEQ ID NO: 5302

SEQ ID NO: 15809 - RNA, 62 nt, Human; identical to SEQ ID NO: 484

SEQ ID NO: 15810 - RNA, 68 nt, Human; identical to SEQ ID NO: 485

SEQ ID NO: 15811 - RNA, 69 nt, Human
gauaaucaacacguagcaugcagaaucauuauuuuaaaaggacuaagacaguuguguggugugauuguu

SEQ ID NO: 15812 - RNA, 75 nt, Human
gguuguggggguacagcguagaugccaguguggagacaggaaggaugauaacguguggucccacuaagagcagcc

SEQ ID NO: 15813 - RNA, 60 nt, Human
uuagaaagaacugaguagcguuacacaugaaaaugugaaaucugauuuucuuauuucuaa

SEQ ID NO: 15814 - RNA, 60 nt, Human
acacugagggagcugaggagccggggccgcgcacgcuccuggaugcucagcggaucgugu

SEQ ID NO: 15815 - RNA, 61 nt, Human
caucgucaugaacaucaaaguugaagagugguccaucuucccccgugccuuggugacgaug

SEQ ID NO: 15816 - RNA, 76 nt, Human
guucugggucccauggccagugaauaccccugguccggagaaggaaaaccaucauugcaucauggggcagccaggc

SEQ ID NO: 15817 - RNA, 83 nt, Human
uuuuuuuuuuuuuuuuuuuuuuuuuuuauuuaccacaacaacuuuauuagguagauacuauaugauuuuauggaagaagaaag

SEQ ID NO: 15818 - RNA, 67 nt, Human
guugauauuugaacuacgagagaaggacauuaauagaaauucucagugacugaguaguaaguucaac

SEQ ID NO: 15819 - RNA, 86 nt, Human
gggaagucuggacauuuuaacaauauugauucucccaauccaugaacauggaauaucuuuccauuuuguuguauuuucaguuucuu

SEQ ID NO: 15820 - RNA, 81 nt, Human
ccccccuugaguaucaggccauuaggacccgaggagggacaguauagccuugaguaucaggccauuagaacccgagggggg

SEQ ID NO: 15821 - RNA, 60 nt, Human
acugcgagcauggccgacucggacagacuacgauaacacugaagucauggcaugcccagu

SEQ ID NO: 15822 - RNA, 71 nt, Human
cgggcuguucgccugcgucgcuccgggagcugccgacggacggagcgcccccggcgaagagcgggcgcccg

SEQ ID NO: 15823 - RNA, 77 nt, Human
gaggcggagcacgcacgcagcucaucgacgaccacauuccucuucgacaaagcccguguaccccugcugcuggccuc

SEQ ID NO: 15824 - RNA, 67 nt, Human
cagacccuuccaaguaaguccaacgaaagccaugaccacauggaugauauggaugaugaagaugaug

SEQ ID NO: 15825 - RNA, 97 nt, Human
gaggugauagugugguuuauggacugaggucaaaaucuaagaaguuucgcagaccugacauccaguacccugaugcuacagacgaggacaucaccuc

SEQ ID NO: 15826 - RNA, 68 nt, Human
gcaggaggaggcagagcacagcaucgucgggaccagacucgucucaggccaguugcagccuucucagc

SEQ ID NO: 15827 - RNA, 61 nt, Human
ggaaaggccaugaugagagcaaugagcauuccgaaugugauugauagucagggaccuuccc

SEQ ID NO: 15828 - RNA, 76 nt, Human
uugcuuuugccuccuaggcaucaccugugccauaccaguuaaacaggcugauucuggaaguucugaggaaaagcag

SEQ ID NO: 15829 - RNA, 70 nt, Human; identical to SEQ ID NO: 14198

SEQ ID NO: 15830 - RNA, 80 nt, Human
cuccuuggcagccgggagaggagcaagcgcacgccacugcccgugacccaggcguccggcugcuguccccugccggggag

SEQ ID NO: 15831 - RNA, 60 nt, Human
ugcgggaaccaugcugcaagccuuuaccugaaggacacagcgcagccacaggguucccca

SEQ ID NO: 15832 - RNA, 68 nt, Human; identical to SEQ ID NO: 10509

SEQ ID NO: 15833 - RNA, 65 nt, Human
ggguaauauugucaugcucuuaguucaucuucacaacaaaacuaugaguaagcgguauuaggcuc

SEQ ID NO: 15834 - RNA, 73 nt, Human
gcugggccggucgagcugugcggugcccuccgggacgcagggggcgcugcagccacgcugggucaggcuccgc

SEQ ID NO: 15835 - RNA, 76 nt, Human
aaaggcagauuuaugauuaugggauagacaguagcuugcucucucuauuuuauuuuuuaaaaacuguucuuccuuu

SEQ ID NO: 15836 - RNA, 84 nt, Human
gauugcuggaugugugugugugugugcaugcaugcgugugugugugugugugugugugugugcacgcgugcugucucugugguc

SEQ ID NO: 15837 - RNA, 62 nt, Human
acaguagguacucgcgucuaucuucuuuuacucaccaaguuuuugacacuaauccauguugu

SEQ ID NO: 15838 - RNA, 97 nt, Human
accgccccugccgcuggcugcagauggcugaccugcgggcggagacaccggacaugcuggccgacggcacccggcugcagcuggcaggggucccggu

SEQ ID NO: 15839 - RNA, 70 nt, Human
gcaucgcaguaagccuggcaggccuguaacugugaccaguaccuaaaggucuccagggacaugaugaagc

SEQ ID NO: 15840 - RNA, 64 nt, Human
gcucauguggcucagcagucaccaggaggggcccaggagcucaggugacgaggccacccagagc

SEQ ID NO: 15841 - RNA, 74 nt, Human
caggguugcugggucagacugugcaagaccccccuuggccacuuguaaaguucggaucucaguuccagccacug

SEQ ID NO: 15842 - RNA, 82 nt, Human
uuagaggaucccugggaggcaggacacuggaggaugacaaagagucuuagggaaaaugcacugaguuugagggauaaacuag

SEQ ID NO: 15843 - RNA, 73 nt, Human
cuggggcgggggcggagagaggccagcaugggaccuucacuuggcaagccuccacucucugcccagcacccag

SEQ ID NO: 15844 - RNA, 81 nt, Human
gcgcucagccaggcacuggcagaugccgcccgccaccagagguaccacgcggcacaccugggccacugccacagcuagcgc

SEQ ID NO: 15845 - RNA, 76 nt, Human
cagcuuuuauugaaaauaguuacugcagccaacguuggaaaaguuuacugcagcuuuugacuucuucaaagagcug

SEQ ID NO: 15846 - RNA, 110 nt, Human
uucaaaauguucacuuuuaacacaaagucuucccauaaaaaauguggcuacauuuuccccccaaugacuacauacauagauggguagcagcaagaaaagaugaaaaugaa

SEQ ID NO: 15847 - RNA, 103 nt, Human
caaaagguauugaaauuuaaaaaguuacaguuuuauauguuuaaaaaagccucuuaauucauauaguuauuguaagcagagaaauuuucauuuuuacuuuuug

SEQ ID NO: 15848 - RNA, 62 nt, Human
uuuuauucauuguuucagcuggccaaaaaaaaugagguaugaugaaauuauaauuaauaaaa

SEQ ID NO: 15849 - RNA, 60 nt, Human
aagaaaaggaaaucugguucacagcaucugaauuacuucuggacucucuuucugguucuu

SEQ ID NO: 15850 - RNA, 86 nt, Human; identical to SEQ ID NO: 8822

SEQ ID NO: 15851 - RNA, 76 nt, Human; identical to SEQ ID NO: 8823

SEQ ID NO: 15852 - RNA, 60 nt, Human
uuuuuuuuuuuuuugcugggugguaacucuuuauuucauuguccggaagaaagaugggag

SEQ ID NO: 15853 - RNA, 69 nt, Human
acaugugcauuggugauuuugaucauucauucuuaauauuugauuucugugucaccuacugucauuugu

SEQ ID NO: 15854 - RNA, 93 nt, Human
gccuaaauacauuuuugcuuacuagcuauuuaaaauaaauucuuaaucagaggaggccuuuggguuuuauuggucaaaucuuuguaagcuggc

SEQ ID NO: 15855 - RNA, 74 nt, Human; identical to SEQ ID NO: 365

SEQ ID NO: 15856 - RNA, 81 nt, Human
ccagugccaggcagaggugggaugcaggggguuccugaaagggggugccugggaggcuugcccaugggaugcuuggacugg

SEQ ID NO: 15857 - RNA, 95 nt, Human
cuguccggacccucgucuugcuccccagaacuugcugcagugacagguacaggaagaagauggggcagggcuggaguuugagggaccaagggcag

SEQ ID NO: 15858 - RNA, 63 nt, Human
cugaguuuagaaaauccauauaauguuuaguaaaacuaguauuucauaaaugcugaaugacag

SEQ ID NO: 15859 - RNA, 62 nt, Human
uacagcugauagccuguuuuuguaaauaaaguuuuacuggauggcagaguugaauaguugua

SEQ ID NO: 15860 - RNA, 79 nt, Human
agccuuccauuggaagaaggugccgucuaggacuuucauaacuagagagaagacaacaucugcuuugaaaggacaugcu

SEQ ID NO: 15861 - RNA, 62 nt, Human
gaugugcccuggccugugaauuucaacucuccuugacuuaaguucucuugaagggcaacauu

SEQ ID NO: 15862 - RNA, 70 nt, Human
guguugaucgaccacgcggaugaauuuucugcaaauuauggguccgaaagucaccgugggacgggaacac

SEQ ID NO: 15863 - RNA, 61 nt, Human
uagcauugggugccaauuucgugguguggaauggugacaacaugcguggagccaagugcua

SEQ ID NO: 15864 - RNA, 66 nt, Human
aguguuguuuuuuauuuucuuucuugggccagcugcagcuuccaaccaagaaaaccucaaagcauu

SEQ ID NO: 15865 - RNA, 73 nt, Human
caggaagacgggcacuggggggcuggguggggcuuagcgcagguccuccucaucgcccuggauggucuucuug

SEQ ID NO: 15866 - RNA, 72 nt, Human
gucuuuggcgcuguacuugaggagggggcuguccauggcauugguccccaccuguucguagaugucaauggc

SEQ ID NO: 15867 - RNA, 85 nt, Human
gaagcaagauuuacuagggacaucuggauagcccaggacaaugacuucugggaacaggaagcucccuagggccagaucgugcugc

SEQ ID NO: 15868 - RNA, 76 nt, Human
gggagaugacauuaucgugcugggaugguggguaacuccuucaaaccaauccaugucacagaacacugucuauucc

SEQ ID NO: 15869 - RNA, 65 nt, Human
ugacuguacaaaccaguuuuauuagggaacugccccaggugcaccucugguucaugcucuuguca

SEQ ID NO: 15870 - RNA, 61 nt, Human
aaaaaguauucuagcacaagauuuuucuguaaaccuagaauuauguuugcuaaaccuuuuu

SEQ ID NO: 15871 - RNA, 62 nt, Human
uaggagugucgguuguuaagaacuagagcuuauuccuauuccaaaucuaucuugcgcuccug

SEQ ID NO: 15872 - RNA, 67 nt, Human
ucauugguuccuuuaagggcauccauuucacaggugagggacugcaccugucuccgguacucagugg

SEQ ID NO: 15873 - RNA, 65 nt, Human
uugcagugagggcacuaguuagaaugcguacgagaacacuuauccuuucugucucuacgcugcaa

SEQ ID NO: 15874 - RNA, 68 nt, Human
caggaccugguugcuacugguucggcaacugcagaaaauguccucccuuguggcuuccucagcuccug

SEQ ID NO: 15875 - RNA, 74 nt, Human
ggagagcacggucugaaucugcacagagcaagaugcugaguggagucgggggcuuugugcugggccugcucuuc

SEQ ID NO: 15876 - RNA, 88 nt, Human; identical to SEQ ID NO: 4936

SEQ ID NO: 15877 - RNA, 87 nt, Human
ggaauugaaaaguaaaaacaaagugugcauuuuccuuacuacguuuagucaggaauaugcggucauuuuauugguuacuggguuucc

SEQ ID NO: 15878 - RNA, 89 nt, Human
uccccuuucugccaacccaaaggauccaaauuaaaguaguccgagaaaagacacagcauuuggucugacuugugccuaggaaaggagga

SEQ ID NO: 15879 - RNA, 72 nt, Human
ugguuacuggguuuccucauacaaacagauauaauaucacuuuuaagagaaauguacacaaggaaguaacca

SEQ ID NO: 15880 - RNA, 62 nt, Human
acucaauuauagugucauguauccucucaaccguauugugauuaugacgcuuuacuguuagu

SEQ ID NO: 15881 - RNA, 69 nt, Human
cccggggaaauaaggcccucgaaugcaaggggaauggaaagaucccauaggacgggcccacacugcggg

SEQ ID NO: 15882 - RNA, 71 nt, Human
gcggagcaauugcuagaccgaggcauucacccaaucagaauagccgauggcuaugagcaggcugcucgcgu

SEQ ID NO: 15883 - RNA, 79 nt, Human
agagcugcucugcaagcuagaacgugggacgcacacauccugggugcugucuugugaagccuugcugcaggcaagcccu

SEQ ID NO: 15884 - RNA, 73 nt, Human
gaaacuggugauuguuggugauggagccuguggaaagacaugcuugcucauagucuucagcaaggaccaguuc

SEQ ID NO: 15885 - RNA, 120 nt, Human
guggauggaaagcagguagaguuggcuuugugggacacagcugggcaggaagauuaugaucgccugaggccccucuccuacccagauaccgauguuauacugauguguuuuuccaucgac

SEQ ID NO: 15886 - RNA, 69 nt, Human; identical to SEQ ID NO: 15454

SEQ ID NO: 15887 - RNA, 63 nt, Human; identical to SEQ ID NO: 92

SEQ ID NO: 15888 - RNA, 65 nt, Human
uauauuacuuggcacaauuuauuucuacacauaaaguuuuuaaaaugaauuuuaccguaacuaua

SEQ ID NO: 15889 - RNA, 66 nt, Human
cccgcuguggucugcacagugcacauaccucacgaucacgggaaacacacaugcagagaaggcggg

SEQ ID NO: 15890 - RNA, 100 nt, Human
acuuuuuuuuuuuuuuugaaggcaguuuuauaacuuuauuugaucugacgaucagcgauuaguucucauccacauugacugucuguagauuuuugaaagu

SEQ ID NO: 15891 - RNA, 61 nt, Human
guaacagguacauagguaaccaaaguauauagcuuauuuggugaaucuucauccucauuac

SEQ ID NO: 15892 - RNA, 74 nt, Human
ucauugguuucagaguucgcagguccccagcuuugcccagaugcugaaaaagaaccugccaguucaaccagcga

SEQ ID NO: 15893 - RNA, 70 nt, Human
gacacagucuauugacccaaaacuucaggaauaccucuguaguuuuaagagguuagaagacuuccguguu

SEQ ID NO: 15894 - RNA, 82 nt, Human
gugaugaauuuggaagaaaaagacauuccucuacuucuggugaggagaguaaucgucauagacuuccaccuaauuccucuac

SEQ ID NO: 15895 - RNA, 93 nt, Human
guucuuuguccuugaagucaacauucacaucaauuauuuauucggggaaaaucuucugguguuuaauugugauauaagaaagaagacaagaac

SEQ ID NO: 15896 - RNA, 61 nt, Human; identical to SEQ ID NO: 347

SEQ ID NO: 15897 - RNA, 74 nt, Human; identical to SEQ ID NO: 3804

SEQ ID NO: 15898 - RNA, 61 nt, Human; identical to SEQ ID NO: 347

SEQ ID NO: 15899 - RNA, 74 nt, Human; identical to SEQ ID NO: 3804

SEQ ID NO: 15900 - RNA, 80 nt, Human
cuauucuuaaguccuacacuguuuuagagcaucaagucacugcaguuauucaguucugagacacugucgauuuauuuuag

SEQ ID NO: 15901 - RNA, 64 nt, Human
gagacuuguuuuuuaccauaauuauuuugccaucaagacagugguuacaaaaaaaaaaguacuc

SEQ ID NO: 15902 - RNA, 61 nt, Human; identical to SEQ ID NO: 347

SEQ ID NO: 15903 - RNA, 61 nt, Human; identical to SEQ ID NO: 9580

SEQ ID NO: 15904 - RNA, 82 nt, Human; identical to SEQ ID NO: 12483

SEQ ID NO: 15905 - RNA, 74 nt, Human
ggcggaggcacucagagaagguaaagcuuuccuagcccaagcaaggaugcucugcccagcuggccaccaccgcu

SEQ ID NO: 15906 - RNA, 75 nt, Human
gggcgcuccaggaccggccccagcgggcaaaccccccgcauucacccccgcacccggggcuccacccaagcgccc

SEQ ID NO: 15907 - RNA, 63 nt, Human
gaucacucaugauguuucuuccaagaacugcaaagccaucuuggaagagcagcccaggugguc

SEQ ID NO: 15908 - RNA, 62 nt, Human
ggccagguucucgcucugucgugucuguucaaaccggcacggucugauccggaaauauggcc

SEQ ID NO: 15909 - RNA, 84 nt, Human
cggcguucuuuuccucugccgugagugcgcuucgacgcucacacgguggcggacacacggagagaggcaaauaaaagaagaccg

SEQ ID NO: 15910 - RNA, 80 nt, Human
ucuuuuugggggaaaaccccgauaggguugugcacugguaaagaacaccugaaucuuaucucgguucucccuccaaagga

SEQ ID NO: 15911 - RNA, 63 nt, Human
ccaaggagcuagaggacuuugagaugaagaaagcugcugcucgagcugucacuggcguccugg

SEQ ID NO: 15912 - RNA, 95 nt, Human; identical to SEQ ID NO: 10902

SEQ ID NO: 15913 - RNA, 66 nt, Human
ugguggagcuaagagagugaccuccauugcagaccaggcugaauguggacuuugccuuguucccca

SEQ ID NO: 15914 - RNA, 83 nt, Human
gagggggccgguuaucccccaagguuugccgcgaccgggggggccccccuccgggcaccgccuugggcgcgugccgaccccuu

SEQ ID NO: 15915 - RNA, 70 nt, Human
gcugagaagcagugacccgcagaugccggcugaauggacugcuccggucuuggagucacugcuacucagc

SEQ ID NO: 15916 - RNA, 66 nt, Human
aggaucauucuuccucggcggauaacaagagcgcaguggcucuucccuggggauagagugcacccu

SEQ ID NO: 15917 - RNA, 65 nt, Human
cugggggaacacaggggguccacauaauaagaagacacuuaaguuccucccccuuauaaucccag

SEQ ID NO: 15918 - RNA, 90 nt, Human
ggauucugcauacgccaucucugagagccauggagggagccacaccccuggugacuucauggugcuggaugggagacgcuagcggcaucc

SEQ ID NO: 15919 - RNA, 63 nt, Human
ucucuuacauucuuuuuucuuuuucccgggguuuauauacuuuaggaaaaagagauuaagaga

SEQ ID NO: 15920 - RNA, 87 nt, Human
gcgcggucugcgcguucccauuuuccacaggaggcgccgauuuuuuuucgaaccaccucccgcaagaaaaugguguugucgccgugc

SEQ ID NO: 15921 - RNA, 108 nt, Human
cgguucucuggaggcugagugccguugcggugcccuaggaggccgagcucuguugcuucgaacuccaguggucagaccugcucauaucucagcauuucuucaggaccg

SEQ ID NO: 15922 - RNA, 61 nt, Human
acauucgcuccacagaacuggcaagcaggucaucgaguaugccggcaguggagaugaacgu

SEQ ID NO: 15923 - RNA, 68 nt, Human
gagggacgagagccccuagcaggaaaacauugauuugcuguacacucaauagggcaucucaugccuuc

SEQ ID NO: 15924 - RNA, 76 nt, Human
gggcuggauuguggcgggccagggccgccugcgugaucgggacucuggauuccugguguggacgacuuccaugccc

SEQ ID NO: 15925 - RNA, 71 nt, Human
aggcuugggccugagcagcugggagggcuccuucuccccggcccccucuuucugcaucgggacuggggcuu

SEQ ID NO: 15926 - RNA, 69 nt, Human
aucaaugagauccgucagaugucuggggcgcagaucaaaauugcgaacccaguggaaggaucuacugau

SEQ ID NO: 15927 - RNA, 85 nt, Human; identical to SEQ ID NO: 2337

SEQ ID NO: 15928 - RNA, 66 nt, Human
uuuaucaucacucgugauuuuuaauuaaagcguuaaauuccuucucuguucaggggugauggugag

SEQ ID NO: 15929 - RNA, 66 nt, Human; identical to SEQ ID NO: 2802

SEQ ID NO: 15930 - RNA, 65 nt, Human
ggcugauuuagaaacgcguccucagcggaaagcugacucguagaagggcgccuuccacuacagcc

SEQ ID NO: 15931 - RNA, 68 nt, Human
gaaagccucugagaacuugaagcauauuguuaaccaugaugaugucucgaggaaucugaagaacuuuc

SEQ ID NO: 15932 - RNA, 64 nt, Human
ugggcucagauaaucaguccaaaccccugauaccucuucaaaaagaaacugauucagagaccca

SEQ ID NO: 15933 - RNA, 73 nt, Human
ugcauuucuuuuuagcuguuaauuguacuaugccaucaucaccauuaguaaauguagcuggccaggacaugua

SEQ ID NO: 15934 - RNA, 74 nt, Human
gauaaaguugaaggcuacaagaagaccaaggaagcuguuugcuccuuaagaaacuuaaagccuggaaugauauc

SEQ ID NO: 15935 - RNA, 83 nt, Human
gugcuuuccggaaguuagaugaauuguacggcacuuggcguaaagccgcuucccucaagaguaacuacaaucuucccaugcac

SEQ ID NO: 15936 - RNA, 70 nt, Human
ggcuucauacgcuauguccugcccguuagagcagccagcggguacagaauggauuuuggaagagggaguc

SEQ ID NO: 15937 - RNA, 76 nt, Human
ggcagccuggaggcugaagagugggugagcgggcggaugccgaccgaucuucauucacugcggaaggccaagugcc

SEQ ID NO: 15938 - RNA, 77 nt, Human
gugcaggcugcgacaacgugguacucaucuggaaugugggcacagcggaggagcuguaccgccuggacagccugcac

SEQ ID NO: 15939 - RNA, 63 nt, Human
cuggaggagggacgggucugcagguuccaaugggugacagccugacaucugucccuucaacgg

SEQ ID NO: 15940 - RNA, 90 nt, Human
ggacuuggauauggggugcugggaucgauuccuagcuuuaccacuaacuagcuguguggccuugaguaaaucccguuaccucucugagcc

SEQ ID NO: 15941 - RNA, 67 nt, Human
aggacgcggccgcaagcuuauucccuuuagugaggguuaauuuuagcuuggcacuggccgucguuuu

SEQ ID NO: 15942 - RNA, 63 nt, Human; identical to SEQ ID NO: 10365

SEQ ID NO: 15943 - RNA, 63 nt, Human
auggugacaacaugcuggagccaagugcuaacaugccuugguucagggauggaaagucaccgu

SEQ ID NO: 15944 - RNA, 79 nt, Human; identical to SEQ ID NO: 1810

SEQ ID NO: 15945 - RNA, 67 nt, Human
gagagcauuagacccaagaccauuguggagaagauugacuugacaguguguccagcauaaugcucuc

SEQ ID NO: 15946 - RNA, 65 nt, Human
ggaugaaaacauggaccucuuggaagguauaacuggcuuugaagacucuguccgaaaguuuaucu

SEQ ID NO: 15947 - RNA, 61 nt, Human
agcgcuccacccaaauacauuaacaccuccucagagguuuauuucucccagggacagugcu

SEQ ID NO: 15948 - RNA, 60 nt, Human
gauccucaagaugggcgaauccaacucggggcugagauguugaugcgcccacuugggcuc

SEQ ID NO: 15949 - RNA, 69 nt, Human
uuauuuuuuucuuuaagcucuuucacacuuuuucuucacacaacagaucuauugaggggcaaaaaauag

SEQ ID NO: 15950 - RNA, 79 nt, Human
cguauaucuguucucgguacuauagggcaccagaguugaucuuuggagccacugauuauaccucuaguauagauguaug

SEQ ID NO: 15951 - RNA, 98 nt, Human
ucaggauccaacaagagguucugcgguuuaauaucccgauggcagauuccaaaggaauggauauaggcuaaacuucggaaccucuuguuggauccuga

SEQ ID NO: 15952 - RNA, 84 nt, Human; identical to SEQ ID NO: 286

SEQ ID NO: 15953 - RNA, 89 nt, Human; identical to SEQ ID NO: 288

SEQ ID NO: 15954 - RNA, 91 nt, Human
uuuuuucuauuuaacuuuuuuaaugggucucaaaauucugugacaaauuuuuggucaaguuguuuccauuaaaaaguacugauuuuaaaaa

SEQ ID NO: 15955 - RNA, 74 nt, Human; identical to SEQ ID NO: 365

SEQ ID NO: 15956 - RNA, 77 nt, Human; identical to SEQ ID NO: 3082

SEQ ID NO: 15957 - RNA, 76 nt, Human
auuggcaaauagcgugggauagauuugucucuuaaugggugugaccaauccuguuuuuccuaugcucugggugaau

SEQ ID NO: 15958 - RNA, 80 nt, Human; identical to SEQ ID NO: 14260

SEQ ID NO: 15959 - RNA, 70 nt, Human
cucuugagucuuggccaugagaucuguguucagagagagcuguuucguaaagggccaguggacuagagag

SEQ ID NO: 15960 - RNA, 70 nt, Human
uuuagcugguuccagguagaagaggcuauuguuuuagauagagauuagcuugugggaagauaaagcugga

SEQ ID NO: 15961 - RNA, 110 nt, Human
caguaucaugauguauaugagggcuaacccauugugguuuacuuaaaaauuaguuuaaguggaguuagaaguggguuauuuuccucuggugaaaauuauggacauagcug

SEQ ID NO: 15962 - RNA, 71 nt, Human
guguguagggauaaggcgugaccacagcuccuugggccuucgagaguagugauuacuaccuuccugcgugc

SEQ ID NO: 15963 - RNA, 70 nt, Human
cuucacagucggcucucagcagcugcugcugguuucucggcuccagcaccacgaguaccgcacucugagg

SEQ ID NO: 15964 - RNA, 89 nt, Human
gaaguaaagcauuguuuuggagcugguucacagaaaaaaggcaaaacugguuauccugacuucaagcuccaacauaaacugcucgcuuu

SEQ ID NO: 15965 - RNA, 89 nt, Human
cuucagcuugaugcauggucacuucuuuacuauuuaaaauacuacacauuguacaaaauaucgaagacacuaccauaugcuaaaggaag

SEQ ID NO: 15966 - RNA, 99 nt, Human
uagcugggauauaggauuuuuguuguuuuuguuuuuguuuguuuugcuauuuagcaauaacauggucaaaaaggcaaucagaaauuuuaaauacaguua

SEQ ID NO: 15967 - RNA, 70 nt, Human
gcugagccuuaaugggggcagaaaggggucauaaagaacccucuucagcuccacauucacggggcucugc

SEQ ID NO: 15968 - RNA, 62 nt, Human
gugaguguucuaaugauuccuaaacuacagucccuuaggaacugcguggcuaucacacugac

SEQ ID NO: 15969 - RNA, 66 nt, Human
acaaauaaguuaauuaagggccuguuacuaaaccaagauacaacaggagccuaauguuuaguuugu

SEQ ID NO: 15970 - RNA, 85 nt, Human
ucaagauggaggagacucugcugcauacacuuggaggucuagauuuccauagagggcacguagcauauugaggaccuuuucuuga

SEQ ID NO: 15971 - RNA, 89 nt, Human
aguagugggagcacuguguuuagaguuaagagugaacacuguuugauuuuacuuggaauuuccucuguuauauagccuuucccaaugcu

SEQ ID NO: 15972 - RNA, 81 nt, Human; identical to SEQ ID NO: 14670

SEQ ID NO: 15973 - RNA, 81 nt, Human
gggaauaccuuggcaagcagcuccaguccgagcagccccagaccgcugccgcccgaagcuaagccugccucuggccuuccc

SEQ ID NO: 15974 - RNA, 78 nt, Human
aaaguuaugauuaauaauauauauaaaaugucugacaguguguuuaacauauuguagauauuuuuaaaucuuuacuuu

SEQ ID NO: 15975 - RNA, 129 nt, Human
gcggaugaggggguuacaucuagauaaacuuacuuugaauugaaaauacuuuaagucaaaaaugcacuuucaacuuaacauuauuuuuaacuuaugaugggcguguugggauguagccccaucauaagu

SEQ ID NO: 15976 - RNA, 73 nt, Human
uccuucggucuuuuuuuauuugcuuaaaucaaguugcuuauaaagauuuguugaaaaagaggcagacagagga

SEQ ID NO: 15977 - RNA, 66 nt, Human
cgaaaaauaaccaucgggcggggcucucgucguacccgcggcgaaccauccgcccaccuugguucg

SEQ ID NO: 15978 - RNA, 86 nt, Human
uauauguugaaugucuaaaaugguaaaaugugccacugugucaaguuacaguggcuuauguucuuucaucaaguaauucacauaug

SEQ ID NO: 15979 - RNA, 93 nt, Human
cugaagacuacuauagcugaagcaucauucacuggacgugacuucucucaaauagugauccccuuaaaugcuuuggucuuaucugucguguag

SEQ ID NO: 15980 - RNA, 87 nt, Human
ggaaggagccagaauggaggcccaggcugggagguguccgugcuggagccaguuuugagccaagccucaggaagcuggcugccuucu

SEQ ID NO: 15981 - RNA, 70 nt, Human
uuaauauuucaucuuauuuaauggugcaugacuucagugaaacuacccuuugcaaugcaauaaauuuuaa

SEQ ID NO: 15982 - RNA, 74 nt, Human
uucuuaacgauauaagcaacggcuuugagagagaaaacuacuuucaaacaaagcacaguaacaguugaaaagag

SEQ ID NO: 15983 - RNA, 82 nt, Human; identical to SEQ ID NO: 3034

SEQ ID NO: 15984 - RNA, 68 nt, Human; identical to SEQ ID NO: 13466

SEQ ID NO: 15985 - RNA, 65 nt, Human
ugccucucagaacaucaccuaccacugcaagaacagcauugcauacauggaugaggagacuggca

SEQ ID NO: 15986 - RNA, 64 nt, Human
cacuaacaacuucuggccgggccacggggcucaugccuuguaauucucagccagagggcgggug

SEQ ID NO: 15987 - RNA, 77 nt, Human
gguuucagcauguccuucucugaaugaugaauacuuuuacuacuugugacaacauuaacgguccucaugcugauacc

SEQ ID NO: 15988 - RNA, 102 nt, Human
acauugagagggucaaauaguaaauauuguaggcuauguuggcuaccuguagucuccaucacauauucuuugucuuuauuauuuaugauccuuuuaaaaugu

SEQ ID NO: 15989 - RNA, 90 nt, Human
cauuccuaauugugggcacauguuguggaguugagcugaauucugugaauggaaacguggcucauuugcaucaugcaguaagugggagug

SEQ ID NO: 15990 - RNA, 84 nt, Human
ugucuuuugccgaaaugcuaaugauuucugugaaaacucacuaggguacaggagacaaucauuuauguuuaagaaaagaaggca

SEQ ID NO: 15991 - RNA, 85 nt, Human; identical to SEQ ID NO: 1585

SEQ ID NO: 15992 - RNA, 91 nt, Human
ggaggaagaggacucaaaagucuggccuuucacugagcccccacagcaguggggggagaagcaaggguugggcccaguguccccuuucccc

SEQ ID NO: 15993 - RNA, 64 nt, Human
gucugcagaaacagugcaaggaagggcagcgacuuccugguugagcuucugcuaaaacauggac

SEQ ID NO: 15994 - RNA, 64 nt, Human
ugcuucagugcugcuccugagagaguagcagguuaccacucuggcaggccccagcccugcagca

SEQ ID NO: 15995 - RNA, 75 nt, Human
agaccuuccucuggaaccucaguuaaauucacuuaaucuaagugggucuaggugcugggggcccuuaucuugucu

SEQ ID NO: 15996 - RNA, 73 nt, Human
ccuguuaagaaugccuucguuauuucgucaugcuuuaaggcccaggaaaaaccuaggcaaaacucuugguggg

SEQ ID NO: 15997 - RNA, 67 nt, Human
gguuuggagagucccuucagaucuccaauaaacuuguuuguggaggccuggggaguuucuucagacc

SEQ ID NO: 15998 - RNA, 90 nt, Human
agcuuugccucuccauggaauaagugaagacuuuccaaaaacuccaguuugcagugcuuacuuuuuccguugaccuccgagugcucagcu

SEQ ID NO: 15999 - RNA, 121 nt, Human
cagggucagaucuuuuguuucuacuuuucauaagugcaucugcuugucugacaaucaauuauaauuuauaguuaggaaaauaaggucacauaucuugaaucacuugaaagccauuacccug

SEQ ID NO: 16000 - RNA, 72 nt, Human
cuggccucaagugguccucccaucuuggcuucccaaagugcugggauuacagaugugagccaccauggccgg

SEQ ID NO: 16001 - RNA, 64 nt, Human
uggaacauucucucuuaauuaacucuuuuauugaaguauaauguacuuagaggaaaaaugucca

SEQ ID NO: 16002 - RNA, 73 nt, Human
cucuaccauuacauuauaucguauauaguugaugguaaaauaauuauauaugggccugcauacaguggaagag

SEQ ID NO: 16003 - RNA, 60 nt, Human
guauauuccaacgcaucccugcugauccagaaugucacccggaaggaugcaggaaccuac

SEQ ID NO: 16004 - RNA, 64 nt, Human
cucaacucgcagaaacaguggaagcagucgaaggacuucaacccacugacacuguacuucagag

SEQ ID NO: 16005 - RNA, 94 nt, Human
gcacccaguggagccuggaucggagccguaccccccggggacuagaugaugaacuggacaccggggaugccaaaguucuuccaggucauugagc

SEQ ID NO: 16006 - RNA, 106 nt, Human
gggcacugcggggugcuugcugucucgcuugagggccucacgaugcguccaucacugcugaugacccguuaccuggaguccuggggcgcagccaagccuuuugccc

SEQ ID NO: 16007 - RNA, 83 nt, Human
gcuuuucuuucauaucugaaaccuagcugcuuacuuggcuuuucaauuucaguaguuaggauucugauuuugucuacucuagc

SEQ ID NO: 16008 - RNA, 89 nt, Human
ugucuuuuuaggucugucaugaugucuagucuuguugcuaugauucauaggugcauaaaggcuuuaauuuguuuaguuuuuaaaagaca

SEQ ID NO: 16009 - RNA, 62 nt, Human
uggcaggagaaguugcccaacuggcagaucacaaagauggcgagcgcaaguuucaccuguug

SEQ ID NO: 16010 - RNA, 60 nt, Human
acagugagucauucgggcaguuagguggaaaaacacacuccuuugccacgugcuugcugu

SEQ ID NO: 16011 - RNA, 70 nt, Human
gcuggggugcuaggacuuggugcauguguucuuucuaguccuuacgauguucccaccuggaugccccagc

SEQ ID NO: 16012 - RNA, 128 nt, Human
uaaauucaggguaaugguuacaguuaggagaggaaagggaauacaaucagauuaugguaguaaacagggauuuuaaccauauugauuauguuuuauuucugaaacuggguaauggauacucugguuua

SEQ ID NO: 16013 - RNA, 63 nt, Human
gcggggcucccgggcgcgcgugcccggggucugcugugcagcgcgcggccgggcagcucccgc

SEQ ID NO: 16014 - RNA, 76 nt, Human
agaagaggaaaguugcuagcauuuauugaguuucuacuacauauugggcacugugcuaagugauuuaccuuucucu

SEQ ID NO: 16015 - RNA, 60 nt, Human
uaguaugagauuaagcuagagcaggucugauuccaaacugcuuauuucuucucuuugcug

SEQ ID NO: 16016 - RNA, 75 nt, Human
ugcaagagggucagguauaugugugucuaauacaguggucuguacuuccauccacauauauguggcuuuguugua

SEQ ID NO: 16017 - RNA, 66 nt, Human
ugauuucuaggacucaagcagcaagccaggauucuagguguggcugcugugucaucuuugaaguca

SEQ ID NO: 16018 - RNA, 64 nt, Human
uuaaacaccuucaucauggaacucucagagugggguccguuuggguuccuggugguggguuuga

SEQ ID NO: 16019 - RNA, 77 nt, Human
uuaugaugaaguaucgggagacggguuuucaagaagaaaguccgguauucaggauaucucuaaaguuaucauuauaa

SEQ ID NO: 16020 - RNA, 86 nt, Human
ccgcucaacucuucaucuucucgccccacuccaaacgagagagcgacggaccggagaggcgagacagcggcgagagaagggagcgg

SEQ ID NO: 16021 - RNA, 64 nt, Human
gaaacacgcugagcucauggagaugcagcuucuucuguagcuccuaaagcccagcugagguauc

SEQ ID NO: 16022 - RNA, 86 nt, Human
ggcccacgugccggucaugcccauuccgcggugggugcgcuccuuccacggcccgcacaccaccugcugcaugcggcuguugggcc

SEQ ID NO: 16023 - RNA, 74 nt, Human
gcaguggagggggcaggaccuccugcuggugcagcaccagcugcugugagcagguccaccggccccuacacugc

SEQ ID NO: 16024 - RNA, 66 nt, Human
uaguacagcaaaugaauggauauuucugcuaauuuccacuuaauuucuucauaauauggcugucug

SEQ ID NO: 16025 - RNA, 75 nt, Human
gggaauccaugaccacaguaaggaccaaauugccgaucuccugcaacaaaaacuaaacugucaaggcaguuuccc

SEQ ID NO: 16026 - RNA, 86 nt, Human
ugagucagcugcuuccacauaaaagucauauauacgcaagguagaaauauguugagacaauauaugauuaugguggcagcugauca

SEQ ID NO: 16027 - RNA, 65 nt, Human
cuucagcucaucagaggggcaagauucuuuuuuaauacagucucucccugucaucugggcuggag

SEQ ID NO: 16028 - RNA, 85 nt, Human
ggcauguggcugggcagguggauuacaaggcuggucuugaguccugaccucaagugauccaccugccucugccucccaaagugcu

SEQ ID NO: 16029 - RNA, 64 nt, Human
ugauguccauuuuauguuagcuguauucuucaaauuuaugaaggcccuagaaagguggucauua

SEQ ID NO: 16030 - RNA, 67 nt, Human
guacacuucacucagaggcaggugcaucuuuaaauaauuucuuauaagccucuaaagugaucagugc

SEQ ID NO: 16031 - RNA, 70 nt, Human
guuagggauaagugcuuauuuuuaagagcuguggagcucuuaaauaucaaccauggcacuuucuccugac

SEQ ID NO: 16032 - RNA, 93 nt, Human
cuucugggcgccauagagagcguggcgguaucccggagccugccguccggcccuaccgggaccgaugcccucuaguggccuaguguccagaag

SEQ ID NO: 16033 - RNA, 82 nt, Human
gcugcugcugaagcuacaccucuggccgcaguugcgcuggcuuccggcggacuuggccuuugcggugcgagcucugugcugc

SEQ ID NO: 16034 - RNA, 71 nt, Human
gucucagcuagaacgagcggcccuagguuuucggaagggaggaucaggguauguuugcgagcggcuggaac

SEQ ID NO: 16035 - RNA, 65 nt, Human
accagggauaccaucugguccagugguuuuuaaacaaagcugcuuagcaccuggaauucccuggu

SEQ ID NO: 16036 - RNA, 87 nt, Human
gagagauuaagagcuguucucuggaguuccaaucccaccuuuaccguuuaauagcugugugacuuuagguaaguuacuuaaccucuc

SEQ ID NO: 16037 - RNA, 105 nt, Human
gcaggccccgcuggugcacugaagagccacccuguggcaucgauaaacaccgguguuuaucgaugccaccccuggccuucuuuugcccgaccagggguggcuggc

SEQ ID NO: 16038 - RNA, 70 nt, Human
gugggaacggguggcccggcugugugacuuuaaccccaagucuagcaagcaggccaaagaugucucccgc

SEQ ID NO: 16039 - RNA, 93 nt, Human
gacuuuguuggaaggggaggcggggagagagugcuggaggcucuggggcgauggcuuccgcaccucuuccaaccacccucuuucccuggaguc

SEQ ID NO: 16040 - RNA, 96 nt, Human
ucccguuucccugcuuuggccaauggaggagcuacgaauggcacgaccugcucgagcuuggcagucuccaguugggcugugcauggaagcuuggga

SEQ ID NO: 16041 - RNA, 70 nt, Human
cuuauuuccugcucuguggugucaagauauuguugaaaaugucaaaaagaccugcagauaccccuaugag

SEQ ID NO: 16042 - RNA, 76 nt, Human
uggcauggugaaagggugcaaugggcuuauuuaaggacuagagcagugugcagccauaacacaagaaaucauguca

SEQ ID NO: 16043 - RNA, 73 nt, Human
ccagcaugauccugaaaucugcauccgccgugguuuguauucauugugcauaucagggauacccucaagcugg

SEQ ID NO: 16044 - RNA, 77 nt, Human
cugggacucagagccccgcuucuucccacuccacuuguugucccaugaaggaagaagugggguuccuccugacccag

SEQ ID NO: 16045 - RNA, 67 nt, Human
gccucuuacgguuugguaugggacaugcacacacacucacaugcucucacucaccacacuggagggc

SEQ ID NO: 16046 - RNA, 64 nt, Human
cucuuucauccuguagucagggagauaggccacaaaggugcugccaaggaccaggaugauggag

SEQ ID NO: 16047 - RNA, 131 nt, Human
ucagccccuuugaucaggugcucugagaagaggucagaauggcaggcaggggguggggaaggcggugcuucuugagccccacuuagcaacuggucacucauccucuggcagcuggaucuugcuggggucga

SEQ ID NO: 16048 - RNA, 61 nt, Human
uccaugaugggaaggccauuggcucucgguauuucacaagccucucagcuucgcgucggga

SEQ ID NO: 16049 - RNA, 64 nt, Human
cguccuuuucccuuccuucgucccuuccuuccuuccuuucgccgggcgcgauggagccggggcg

SEQ ID NO: 16050 - RNA, 95 nt, Human
gugggagcuccaggggaggggaacagcacaggaagccucuaucagugccagucgggcacaggacacugccugccagucacccugagagguuccac

SEQ ID NO: 16051 - RNA, 88 nt, Human
ucgagugcuggaaggaugaaggauuccugcaucacugugauggccauggcgcugcugucuggguucuuuuucuucgcgccggccucga

SEQ ID NO: 16052 - RNA, 73 nt, Human
agguauuuuugcaaucuaaaauagugaugcuaauacugcuucaguaagcuagauuuacuaauuuaagaauccu

SEQ ID NO: 16053 - RNA, 60 nt, Human
augggaauggccuacaauuacaauaaacaauuaauucaguuauuuuaggggccuuaccau

SEQ ID NO: 16054 - RNA, 70 nt, Human
gugugcuaaaacagaaauagagguagaaucccauuuuucuuaaguaccacucuacaagccaguuccacac

SEQ ID NO: 16055 - RNA, 61 nt, Human; identical to SEQ ID NO: 8378

SEQ ID NO: 16056 - RNA, 91 nt, Human
uugcuuccucuugagugcaacggaaagggcuaucagauaucugcacguuugugagauuuauagcuccuccauuacacuucuucauaagcaa

SEQ ID NO: 16057 - RNA, 64 nt, Human; identical to SEQ ID NO: 14289

SEQ ID NO: 16058 - RNA, 80 nt, Human
aagggguuuucgcaaaaucacucgggggaagggaaagguugcuuuguuaaucaugcccuauggugggugauuaacugcuu

SEQ ID NO: 16059 - RNA, 62 nt, Human; identical to SEQ ID NO: 241

SEQ ID NO: 16060 - RNA, 66 nt, Human
ggugaaaugaggguagcaguagugacgcccaucuccacuggcagugcugauccucagaaacucauc

SEQ ID NO: 16061 - RNA, 68 nt, Human
gcuccuggcuccuagggcagcgccuagagcacagugugauugcaucaggcgcccuuugaggccagggc

SEQ ID NO: 16062 - RNA, 72 nt, Human
cacuguugcccaagcuggaguagagugacaccaucuuggcucacugcaaccuccgccuccuggguucaagug

SEQ ID NO: 16063 - RNA, 79 nt, Human
gccucagccuucagaguagcugagaccacagauguguaccacuaugcucagcuacuuuuuuuuagaaggggggugaggc

SEQ ID NO: 16064 - RNA, 84 nt, Human
gaagacuuugugauucaggcaaaggcugacuguuacuucaccaacgggacagaaaaggugcaguuuguggucugauuccucuuu

SEQ ID NO: 16065 - RNA, 65 nt, Human
gagcucauucugaagaggcugacgauuuuacuaucucauuuuuuuccuuucuccagaauggguuc

SEQ ID NO: 16066 - RNA, 65 nt, Human
acggcgagagcgagaacagacguaagggcgacaacuagaaauccgcccugcgcuggcucugccgu

SEQ ID NO: 16067 - RNA, 89 nt, Human; identical to SEQ ID NO: 6449

SEQ ID NO: 16068 - RNA, 60 nt, Human
gagauggagcgagucagaaccagcauggaguguuacugcugauuucugucccugcaucuc

SEQ ID NO: 16069 - RNA, 69 nt, Human
uugaagaacaccaacauuuagaagcauuuaaaaagacagagcaagaagaaauguaggaugugguaucag

SEQ ID NO: 16070 - RNA, 106 nt, Human
ccccgucuugcuaagcaguuuaguuagacugcaggccagucucuguggugugacaccccccaguggcaaggagcugccaaaacugagcuucugggcaagacguggg

SEQ ID NO: 16071 - RNA, 60 nt, Human
ggcuuucuguucauccguacuuucaaagauuuagugaucaaguacuaugugucaggaacc

SEQ ID NO: 16072 - RNA, 73 nt, Human
ucaaaaggcagcaucugauugugauuugguccagaaauuccuggccagaauauuuccaguguggugcauguga

SEQ ID NO: 16073 - RNA, 73 nt, Human; identical to SEQ ID NO: 7292

SEQ ID NO: 16074 - RNA, 110 nt, Human
gcuguaucaccuuggaucagucagguaaccucccgcgaaucugguugcuuccggggcaggggauccgcgggcugcagguuugagccugguugccggcaggguggagcagc

SEQ ID NO: 16075 - RNA, 61 nt, Human
ggugacaaacaugcuggagaccaagugcuacaugcuugguucaagggauggacaagucacc

SEQ ID NO: 16076 - RNA, 69 nt, Human
cccucaccuuauugggcaaaacugcaucaaucuccuuuugcaguuucugcuggacaucagggugagugg

SEQ ID NO: 16077 - RNA, 64 nt, Human
cuccuggggaguggugaggaggcauuuuugcuaaggcuucaccucuucccuucaucuccagggg

SEQ ID NO: 16078 - RNA, 75 nt, Human
gaagcuuuggggaauuaaguucuuuucaaaucuuggaagucaauauucacuugaaggaauucuauccggggcuuu

SEQ ID NO: 16079 - RNA, 106 nt, Human
gcaaaggaaguggcuuaaugauccugaagggauuucuucugaugguagcuuuuuguauuaucacguaagauucuauuuucaguuguguguaagccaguuuuuuagu

SEQ ID NO: 16080 - RNA, 60 nt, Human
gcugacauuaacuacaauuaugggaaaugcaaaaguuguuuggauaugguaguguguggu

SEQ ID NO: 16081 - RNA, 60 nt, Human
uuugauacuguaucuguuuuccuucaaaguauagagcuuuuggggaaggaaaguauugaa

SEQ ID NO: 16082 - RNA, 77 nt, Human
ccugcgcaaccucuaccgccucuccaaggcccucuucccgccggagccccuggugcugcgagagaugugcaagcagg

SEQ ID NO: 16083 - RNA, 73 nt, Human
gacaaccugccacucuaugagcuuaagaacaccaucacagugucccccuucucgggcgagagugacaucuguc

SEQ ID NO: 16084 - RNA, 61 nt, Human
uccugaaccggcccaaccccuugcuggcguugccccccgcccgcccccacggcccagagga

SEQ ID NO: 16085 - RNA, 81 nt, Human
cuuuugaccuuuucuuccuggacuauugaaaucaagcuuauggauuaagugauauuucuauagcgauugaaagggcaauag

SEQ ID NO: 16086 - RNA, 61 nt, Human
ggauguguuuaaaaucugucauuugcuuauuugccuguuagacaugacugaugacauaucu

SEQ ID NO: 16087 - RNA, 92 nt, Human
gagcuuuucacaagaucgagagccauauauaaucucccagauauguauuuuugagagagagagaauauaugccacgucuugucuuguggcuc

SEQ ID NO: 16088 - RNA, 80 nt, Human
acaggcugcuauaaaugcgcuugaugggcucggcuucuuccuugucaaggaugccuuucuccacauaagcaucagcuugu

SEQ ID NO: 16089 - RNA, 81 nt, Human
uauugaugaagucucucaucuuuagaaaggucauaaucuucuuuauuucccuuuuugucauguuucuucaaccauucaaua

SEQ ID NO: 16090 - RNA, 83 nt, Human
agcaguggcugcuacagcugguacggacugauaggcaauucagaccaacagaagauaaccauaagcugcauggagccaugacu

SEQ ID NO: 16091 - RNA, 77 nt, Human
agaauuaaaauuauauguagaaggaaacaccaagaaaagaauuuccagggaaaauccucuuugcagguauuaauucu

SEQ ID NO: 16092 - RNA, 69 nt, Human
gaggaauuuuuuugcuuguuugucuuuuaagaaaggaaagaaaggaugaaaaaaauaaacagaaaacuc

SEQ ID NO: 16093 - RNA, 86 nt, Human
gcucaggcacaauugucaccaaggaguuaaaagcuucuucuucaauagaggaauguucuggggguccuggagacuuaccauugagc

SEQ ID NO: 16094 - RNA, 87 nt, Human
agaacuucagccguggcucucuagucuucgugucaauauccuuuauuguuuugaugauuauuuucuucagccauggcucauauuucu

SEQ ID NO: 16095 - RNA, 82 nt, Human; identical to SEQ ID NO: 968

SEQ ID NO: 16096 - RNA, 60 nt, Human; identical to SEQ ID NO: 969

SEQ ID NO: 16097 - RNA, 61 nt, Human
gcucgccgcgcuagcccugcugaccugcagccuguggccggcacgggcagacaacgcgagc

SEQ ID NO: 16098 - RNA, 76 nt, Human
gcggccagcacauggcgguguugcaguggagcgugcugggccgcgagcugcagcugcacgaacaucauguggucgc

SEQ ID NO: 16099 - RNA, 62 nt, Human
gcggcgcccccagcccagcccggcccaguccccccgcgcugugaccuggggccucucgccgc

SEQ ID NO: 16100 - RNA, 99 nt, Human; identical to SEQ ID NO: 1699

SEQ ID NO: 16101 - RNA, 67 nt, Human
cuaaugaauucucuuaaaaacauacuguauucuguugcuguguguuucauuuuaaauugagcauuag

SEQ ID NO: 16102 - RNA, 88 nt, Human
gugccaggaaaggcgggauuacuucuuuuuucuuuuuucaccgguggauuggggagaggguccggggucccgaaacccuuucugggau

SEQ ID NO: 16103 - RNA, 60 nt, Human; identical to SEQ ID NO: 1701

SEQ ID NO: 16104 - RNA, 67 nt, Human
cguccacuuucaucucuuugcucgggagguucaacugcuggaccccaaagagacugcaucauggacg

SEQ ID NO: 16105 - RNA, 70 nt, Human
uguuccacgugcuggcacacaucuacugggcccacuucaaggagacgcuggcccuggagcugcacggaca

SEQ ID NO: 16106 - RNA, 65 nt, Human; identical to SEQ ID NO: 6179

SEQ ID NO: 16107 - RNA, 89 nt, Human
uuucucaguucauaggcuaucccaucacccuuuauuuggagaaggaacgagagaaggaaauuagugaugaugaggcagaggaagagaaa

SEQ ID NO: 16108 - RNA, 72 nt, Human
cgaacggcgaaccacagacuaggcuauuuacggaaagaaggaaagaagccgauuaugugguuuagccaguug

SEQ ID NO: 16109 - RNA, 75 nt, Human
gaccccgucaaggcguauaagcuacgugacacauuauauugcaagcgcaaaguauccuacgccucgaugagaguc

SEQ ID NO: 16110 - RNA, 78 nt, Human; identical to SEQ ID NO: 5647

SEQ ID NO: 16111 - RNA, 61 nt, Human
ggagugagggcaggcgagccccaccccggccccggcccuccuggacucgccugcucgcuuc

SEQ ID NO: 16112 - RNA, 60 nt, Human
uccugccccggaagacugugucugcagcgucccacugcucaggccacugaauggguagga

SEQ ID NO: 16113 - RNA, 75 nt, Human
cgaugggcccaaggagguugucgcugcaggcuuuugaaccugugccuugcugugcucaccugggggggggucacg

SEQ ID NO: 16114 - RNA, 61 nt, Human
cuuccacaccugcucuaguccuguggguccccacguuccugcuggacgcagcugagggaag

SEQ ID NO: 16115 - RNA, 111 nt, Human
gacgcuggcccucacgagugacuacaucacgccugcuggccucaggcaccuaccugguccacagccuacauccuggugguggcgggcacugucgucauggugacuggcguc

SEQ ID NO: 16116 - RNA, 85 nt, Human
gccgggcuuggaagccuuugaccuggauccugcacaguuggggagucaauguccagcccuacuccggguccccagccaaccuggc

SEQ ID NO: 16117 - RNA, 67 nt, Human; identical to SEQ ID NO: 4894

SEQ ID NO: 16118 - RNA, 131 nt, Human
cccccccccuuaacccccccccuuugggggggcggggggggguuaccccccuggggggggggggaccccgcccccccaccugggggaaccccccuuuuuccuuaaaccaauacgggggggggggggggggg

SEQ ID NO: 16119 - RNA, 60 nt, Human
ccuuuuuuccccccgggggcggggguuuugggggggccccccccaggggggggggggggg

SEQ ID NO: 16120 - RNA, 62 nt, Human
gcgcaucauucccacccuuucucaaugauuccuucacuugacucccuguggaaugaaaccgc

SEQ ID NO: 16121 - RNA, 64 nt, Human
acuuuuuuaaugggucucaaaauucugugacaaauuuuuggucaaguugauuccauuaaaaagu

SEQ ID NO: 16122 - RNA, 89 nt, Human; identical to SEQ ID NO: 288

SEQ ID NO: 16123 - RNA, 68 nt, Human
gggagaaaugaggaggcuuuaaaaauagacaccacuguuuuuggccuuuguuuaaaauagugauuccc

SEQ ID NO: 16124 - RNA, 67 nt, Human
ugccaucagggaagcuuaacuacaacaauucucuuucagugucgucaauuuuccaugaguucaggca

SEQ ID NO: 16125 - RNA, 80 nt, Human
agucccaggacgguggaaacuagcuaguagauugcagccauguuguggaagcugcugcugagaucccaguccugcaggcu

SEQ ID NO: 16126 - RNA, 110 nt, Human
cccugugccugucucuccaggguucuaccacuuggggggauugggccgguccguggugcauuggauggugucccaaccgggugguggaccuugucaucgacgucacaggg

SEQ ID NO: 16127 - RNA, 63 nt, Human
ccucucuggcuucuuucuccuuagcucagcagguccacuugggguucugggcucccagagagg

SEQ ID NO: 16128 - RNA, 64 nt, Human; identical to SEQ ID NO: 3251

SEQ ID NO: 16129 - RNA, 77 nt, Human
ggagccucagucccucauccgugaaauggggauacaaagauguaccucgcccacacuggccagcagaccaaggcucc

SEQ ID NO: 16130 - RNA, 66 nt, Human
uccagcugcauaguaauccaguguauauauguaccauaggccauucaaucacucucuaugcuugga

SEQ ID NO: 16131 - RNA, 64 nt, Human
aacauccaauucaacugugggaaaggagcuccuucaacugaugccccaguacuuuguggguguu

SEQ ID NO: 16132 - RNA, 78 nt, Human
guggcccagaguccgagucgugcaggugcugugggcccugcuggcagugcuccuggcgucguggaggcugugggcgau

SEQ ID NO: 16133 - RNA, 61 nt, Human
agccucaggucuauuuuuauaacuuguggucguacacaauaacaaaaaaaaaaagggggcu

SEQ ID NO: 16134 - RNA, 78 nt, Human
gcaauucaacuuugaguuaucuuuuaaauaugucuuguauaguucauauucauggcugaaacuugaccacacuauugc

SEQ ID NO: 16135 - RNA, 79 nt, Human
auggguuccucacccccucccuccagaacagcuugagacagucuccaagcugagcuggaugggcuaccuuagaacccgu

SEQ ID NO: 16136 - RNA, 118 nt, Human
ggggaaagccgcugggagguaauggaguaaaggauaaaaguauuaucuuuagaacagacagacgaggguuuggauucuacuagauggugacuguaugaccuuaaaguaguuauucucu

SEQ ID NO: 16137 - RNA, 72 nt, Human
gcaguggagggggcaggaccuccugcuggugcagcaccagugcuggagcagguccaccggccccuacauugc

SEQ ID NO: 16138 - RNA, 64 nt, Human; identical to SEQ ID NO: 1642

SEQ ID NO: 16139 - RNA, 69 nt, Human; identical to SEQ ID NO: 6356

SEQ ID NO: 16140 - RNA, 71 nt, Human
gagcaggaggauucagauucgaaacaucccuccucacgugcagugggaggugucggauggacuuuuggcuc

SEQ ID NO: 16141 - RNA, 70 nt, Human
ucccggaugaagaggugagcuccccuucgcccccucagcgagcccagcguggggaccacucuucccggga

SEQ ID NO: 16142 - RNA, 82 nt, Human; identical to SEQ ID NO: 4052

SEQ ID NO: 16143 - RNA, 64 nt, Human; identical to SEQ ID NO: 4053

SEQ ID NO: 16144 - RNA, 72 nt, Human
gcauaagagaacaguacaauuugcaguuaggaucaucuuucuagauuucuguaucuuucaaaauuucugugc

SEQ ID NO: 16145 - RNA, 80 nt, Human
uuaggcauugaacacauucuuaaaaacacuggucuguaagaaacugguguuuugaaaaauuaaagugugucguagucuag

SEQ ID NO: 16146 - RNA, 76 nt, Human
uuuauuuuggccacauagaucaaaguuaguuucagucuuuucaagcucuaaaauuuugguucugugguuauuuaaa

SEQ ID NO: 16147 - RNA, 60 nt, Human
uagauagguaaggcugggugcaguggcucacacauguuaucccagcacuuucagaagcua

SEQ ID NO: 16148 - RNA, 97 nt, Human
caucuauuuaagcugaagacaacaucaugggaguuagggagauuucggagugcgauugagcuggacacccccucuaugacugcagagcaaguagcug

SEQ ID NO: 16149 - RNA, 82 nt, Human
ccgagaacugagccuggaugauccugagguggagcaggugaguggccgggguuugccugaugaucaugcugggcccauucgg

SEQ ID NO: 16150 - RNA, 64 nt, Human
cugcagacugaagggagcaacggcaagaaagaagugcugagcgguuuccaaguggugcuggaag

SEQ ID NO: 16151 - RNA, 73 nt, Human
ccacauugacugucuguagauuuuggaaagugguaacagguacauagguaaccagaguauauagcuuaugugg

SEQ ID NO: 16152 - RNA, 64 nt, Human
guuuucuggacagccgcacacggauucgguauggcacauuccuuauugcguuggcccagacagc

SEQ ID NO: 16153 - RNA, 72 nt, Human
ucacccuggugugaaugcgcacaucuggaguuccagcuccuucauggcaaaguuccgaaucgcuuggaguga

SEQ ID NO: 16154 - RNA, 69 nt, Human
gcccccaaaccauguucagccacacgccuaccaguucaccuaccguguuacugaauguggcaucagggc

SEQ ID NO: 16155 - RNA, 70 nt, Human
guccccauggcucaccaagcccugcuccaugagaguagccagcaagagcagggccacagcccagaaggau

SEQ ID NO: 16156 - RNA, 65 nt, Human; identical to SEQ ID NO: 4180

SEQ ID NO: 16157 - RNA, 69 nt, Human
ucugggucucuaaaagccacccucaguuuauaccaacugaucaggaaauagguggugacagggccuuga

SEQ ID NO: 16158 - RNA, 67 nt, Human
ucuuugcagggcacagaugaccaaagucccuuccugcuuccuguuaccugucuugcuccuggggaga

SEQ ID NO: 16159 - RNA, 71 nt, Human
uugucuuuuguauaaaugacaaaguguugaaaauguaucuccugaauaaauguuucaaaugcagaaaccag

SEQ ID NO: 16160 - RNA, 78 nt, Human; identical to SEQ ID NO: 8845

SEQ ID NO: 16161 - RNA, 64 nt, Human; identical to SEQ ID NO: 4082

SEQ ID NO: 16162 - RNA, 83 nt, Human
ggcaggcagcuggugccggggcggucaccuccugcucagagaugucaaaucccagccucugaagcugccccaccagcucugcc

SEQ ID NO: 16163 - RNA, 63 nt, Human
cucgguguccucccugguggcuaacagggaaucuuacccaccacaggccuccaagcaccagag

SEQ ID NO: 16164 - RNA, 77 nt, Human
gccuuuugccugggaauugccucagcuacucuaacauuugaucacaguuuagaggcacaguggaccaaguggaaggc

SEQ ID NO: 16165 - RNA, 93 nt, Human
ggcuuuuagugcuacuggugcucuugaaggacagauguuccggaaaacugggaggcuuaucucacugagugagcagaaucugguagcacugcu

SEQ ID NO: 16166 - RNA, 93 nt, Human
gggaagggaaacacagcuucacaauggccaugaacgccuuuggagacaugaccagugaagaauucaggcaggugaugaauggcuuucaaaacc

SEQ ID NO: 16167 - RNA, 79 nt, Human
augggucgugacacugggccugagcuuugucuacaugauucgaguuuaccugcugcaggguugguacauugugaccuau

SEQ ID NO: 16168 - RNA, 64 nt, Human
cugaggcuggcugcgugcucagaggguuugcugaaggccucacagccgcuuagcacaguuacag

SEQ ID NO: 16169 - RNA, 63 nt, Human
gguguacagauuuuucacaagacuuggacagauuuaucaguccuggcuagacaaguccacacc

SEQ ID NO: 16170 - RNA, 63 nt, Human
gcagcagcaccgucucccuggcagcgggcuucuuugugcgaagcccggagaaugugaggcugc

SEQ ID NO: 16171 - RNA, 81 nt, Human
guuuggggacuggcucgggaaugggcucaggcagcuccacgggguuugccuggcagguucaggcucaggacagcccugagc

SEQ ID NO: 16172 - RNA, 60 nt, Human
gaggauccuccggaagccuuaacccuccuuccccaaacagggcucuaaaucaugguccuc

SEQ ID NO: 16173 - RNA, 86 nt, Human
auaaguugaauauuauucuuuaaugugacuagcaaaaaaauucuuuuuuuaacuacaucguauaugccuagaauaaugaaacuugu

SEQ ID NO: 16174 - RNA, 66 nt, Human
aucaucauuuaguuuucuaacccuucuuugauucuuaaaguuucaaaauggagacucauggaugau

SEQ ID NO: 16175 - RNA, 67 nt, Human
guuuauuuaaccauuauccguaagcauuuaucagaauauauguuuagagggaaauauaaauuuaaac

SEQ ID NO: 16176 - RNA, 121 nt, Human; identical to SEQ ID NO: 14784

SEQ ID NO: 16177 - RNA, 60 nt, Human; identical to SEQ ID NO: 1551

SEQ ID NO: 16178 - RNA, 62 nt, Human
agauuccaggccccacccuagacuuccugaaucagaaacuugguugugggguguggggaucu

SEQ ID NO: 16179 - RNA, 64 nt, Human
gaguacgugcuaagugccuuguguacuuugugagcucugugccaggugcuuuguggauguucuc

SEQ ID NO: 16180 - RNA, 103 nt, Human
uuaaucccuccagugacagcgguggggcagcuguuuuguuucuauuucacagaugagaaaggcggagaggcuccaaaagggcuaaugauuggauggagauugg

SEQ ID NO: 16181 - RNA, 72 nt, Human
ccgggagcggccgguggcugagcagucccagaaagcgccugggacuuuagaccaguuaacccggcgcccugg

SEQ ID NO: 16182 - RNA, 131 nt, Human
augcucccuauaaucagacauuaacuggauauaaugacuacaucaagaugagcauuaauccuaagaaacuuguaauggguguuccuugguaugguuaugauuauaccugccugaaucugucugaggaucau

SEQ ID NO: 16183 - RNA, 78 nt, Human
gcuuacggggcauuuggcauuguuggaaaugcaaaacugucuugacuacucugggagaugcugguagccaaaacaagc

SEQ ID NO: 16184 - RNA, 66 nt, Human
uuuuguaucagaggauuuaguucuugcauuuauaauuguuggauauacugaguaucggauauaaag

SEQ ID NO: 16185 - RNA, 63 nt, Human
ggcuuuaaaguugaacauuaccacuuuaggugaucacuuagugucaguguaguuguaaaugcu

SEQ ID NO: 16186 - RNA, 73 nt, Human
guguuguacucauuaauguuauuaugagguuaauguuauuauuaggcuuuuaacaauaugacuguguacacau

SEQ ID NO: 16187 - RNA, 83 nt, Human
uuucuuuuugcuuuuuguuuuguuuuuucauauuuguagggguugugaagucccuagaaaacagagaauccaguuguaagaaa

SEQ ID NO: 16188 - RNA, 80 nt, Human
gccuaacucagcuucuaguccuuggaaauuaagcagcucauugaaaauucaagaguuccagccagaagcuacagcuaggc

SEQ ID NO: 16189 - RNA, 69 nt, Human
ggaauucaucauaugaaggaaugaagauguucaaaagaaaaccuucaaccucaugccagaagauguucc

SEQ ID NO: 16190 - RNA, 86 nt, Human
uuucccucuguagugguugguguggcauuuauaauauaacuccuuuauguacacuguaaaccauuccuucucagggcagauggaag

SEQ ID NO: 16191 - RNA, 74 nt, Human
cuguuguuguuuauagcauuuagaaaaaaauuaaagacuauuguuuaaagcaguuuuagguguacagcaaguag

SEQ ID NO: 16192 - RNA, 112 nt, Human
uccuaauguaucaaaaauagauaguuggugacugcccugugugcagagcccagcccuggauuugugccgcaguuguugguaauacacacuuccugucuguucuggugcugga

SEQ ID NO: 16193 - RNA, 85 nt, Human
gaagccacuggaagguuucuccagaccaugugacuguugcuugugcuucauagucgugaaacuggugucuccuuuaguggcauuc

SEQ ID NO: 16194 - RNA, 71 nt, Human
gcgccgggcggccauggacuuguacagcaccccggccgcugcgcuggacagguucguggccagaaggcugc

SEQ ID NO: 16195 - RNA, 68 nt, Human
gguuuucuagauacaggaacaugucaucugcagagacaguuugacgucaucucuuugucuugaauacu

SEQ ID NO: 16196 - RNA, 67 nt, Human
ucugugaccagugggacgcccucggcucucugacacauagucgcagggaagcccuggagaaaacaga

SEQ ID NO: 16197 - RNA, 85 nt, Human
gguguauugcuuugcccucuuuuucacugagaaccauucagaaaggauauggucuguaucaaaguuggccaacaugcaacuugcc

SEQ ID NO: 16198 - RNA, 70 nt, Human
aauuuuauacuuuuaauuuuuuuuguauuugaaauuuuucauaauacauagaugauauaaaaaugagauu

SEQ ID NO: 16199 - RNA, 70 nt, Human
gaggaggaaggagugauuaucugugucauuauuuuuugauagauugaguaagaagcuauauggacuccuc

SEQ ID NO: 16200 - RNA, 66 nt, Human
ggaugagaaggaacuaauauaugagucuaucuaggaagaaagaaucauugagauaggaggaaaucc

SEQ ID NO: 16201 - RNA, 72 nt, Human
ggcuggagugggacgaucacagcucccugcagugucgacauccccaggcucaagcauccucccaucucagcc

SEQ ID NO: 16202 - RNA, 72 nt, Human
uagagacaggguuuugccauguugcucaggcuagucuugaaugcccgggcucaagugauccaccccccucug

SEQ ID NO: 16203 - RNA, 64 nt, Human
acugcuuaguggcuaugucugugcucacuccuuuagaguuuuauauuuaacuuccauuaguagu

SEQ ID NO: 16204 - RNA, 62 nt, Human; identical to SEQ ID NO: 5011

SEQ ID NO: 16205 - RNA, 76 nt, Human; identical to SEQ ID NO: 4288

SEQ ID NO: 16206 - RNA, 67 nt, Human
cucacugcuauauucaaaauuuauugagcugcaacugugugcucagcaaugagaauauagcagugag

SEQ ID NO: 16207 - RNA, 69 nt, Human
cuuuccaccuagcugauccuaaauguuccuuccucagggaggucuuuucugauuucuuggugggucaag

SEQ ID NO: 16208 - RNA, 75 nt, Human
uuagcaccaugcauuuuccagaguuuuuauuacaauuguaaaauuauggcuguaauaggcuggcugcgcugcuag

SEQ ID NO: 16209 - RNA, 67 nt, Human
gaagaauguggaucaguuuugauggaacuuggaguacguuuucaucgacuuaucuaugagcaucuuc

SEQ ID NO: 16210 - RNA, 74 nt, Human
caggguguuuaucgaugccacaucccccucaaagggagugcgauggggauguggcuugcuucuuccgggcucug

SEQ ID NO: 16211 - RNA, 63 nt, Human
uggguaugauggauguggcgaaaugaacauauuauggauuuuguugugucaucuauuaaccua

SEQ ID NO: 16212 - RNA, 63 nt, Human; identical to SEQ ID NO: 1503

SEQ ID NO: 16213 - RNA, 61 nt, Human
guggagcccagacgcucucggcucacuggguccccggccccccgagcugaggaggcuucgc

SEQ ID NO: 16214 - RNA, 68 nt, Human
gaaggcgggccaagucagcuggcacagaggccaggagguugcugugcaggacaaggagccgcaaggac

SEQ ID NO: 16215 - RNA, 63 nt, Human
ugucacugugaggaaggugagggcggggagggcccccagagccucaggcagcucagagaggca

SEQ ID NO: 16216 - RNA, 83 nt, Human
cuguacgcucccacgguggcacaugaacgacuucuuccacuccuuccugauuguguuccgcgugcuguguggagaguggauag

SEQ ID NO: 16217 - RNA, 64 nt, Human
gaccaugugggacuguauggaggucgcuggucaagcuaugugccuuauuguuuacaugaugguc

SEQ ID NO: 16218 - RNA, 72 nt, Human
gugaucuauuauuuuuauaauuuuauaauuaauuauaucuacaauuauuaauugcaaaagaauagugaucau

SEQ ID NO: 16219 - RNA, 61 nt, Human
caugaagggguaauauaugggguauaacagaaccguauguacgcugccugugaccuuugug

SEQ ID NO: 16220 - RNA, 76 nt, Human
gauaggcgagucuaagagcuacugucagaccuucaguauacaguaacccuguucccaagauuguacuaggccuauc

SEQ ID NO: 16221 - RNA, 72 nt, Human
guuaacacaagauuuuuuuuuuuaagauacacuaaaaugaaaaucucuaagagaaaaugucuucuuuaggac

SEQ ID NO: 16222 - RNA, 66 nt, Human
uccucagcuggagcaacagcaggggggggggcaggacccccugcuggggcaacaccagcuggugga

SEQ ID NO: 16223 - RNA, 74 nt, Human
gaaacccuauaaauguccuaucugugagaaaaguuucauucagagaucaaacuuuaauagacaucagaggguuc

SEQ ID NO: 16224 - RNA, 64 nt, Human
gaacucacaccggagagacauacuuucagugcaccaucugcaaaaaagccuuucugcggaguuc

SEQ ID NO: 16225 - RNA, 72 nt, Human
gacaagagaaugacaaggagaaccuaaauuuggagaaucacagggaccaggagcuccugcaugcuuccuguc

SEQ ID NO: 16226 - RNA, 76 nt, Human
ggaggcauuucccaucccaaaucugaccugacuaauucaauagaauuuggggaagagcuggcaggaauauaccuuc

SEQ ID NO: 16227 - RNA, 84 nt, Human
guuugccacauguagccagggguccuuguggaucacuaucuggagucagagguaaucaggcccaggcugcguugaaggcugaac

SEQ ID NO: 16228 - RNA, 68 nt, Human
cacugcgccaagugcuuccgcuacaagcagucgcucaaguaccaccugcggacccacacgggcgagug

SEQ ID NO: 16229 - RNA, 99 nt, Human
gcgcgcgccccgccgccgccgcccggccaggugcgcgggccgugcccccccucggacaccgccaggcccgagcccagcgggcgggggcggggcgcgcgc

SEQ ID NO: 16230 - RNA, 61 nt, Human
uuucugaguuaacaaaauauuuuuaauaaaaucuuuuuguuuguuuguuuuguuuuggaaa

SEQ ID NO: 16231 - RNA, 71 nt, Human
acacaaauguucccaguuuuucaucugcacugccaagcacugaguugguuggauuggcaagcauguugugu

SEQ ID NO: 16232 - RNA, 72 nt, Human
agaaucauuccuuacuguugcucauggagagcacccgcuccacccccauuugcucgcaguauccuagaaucu

SEQ ID NO: 16233 - RNA, 131 nt, Human
agcgcuuugagguccaggauacuggcaaugaccagcauagaagaucaccaguugcugacguguggacaacucgagauuaguuugacuugguguuuuaucuugacccaccagaaucauuccuuacuguugcu

SEQ ID NO: 16234 - RNA, 89 nt, Human
accccuccucaaauuauaagguaaaugacacaaaguugaacauagggucaguguugggcaaaaagcauuuaaaauauagauaacggggu

SEQ ID NO: 16235 - RNA, 70 nt, Human
ugcaugauuuugaaaacuauauguguaauugugacaaaacuaaacuguagagaaaagacaaaaucaagca

SEQ ID NO: 16236 - RNA, 89 nt, Human
ugcuuccucuugagugcaacggaaagggcuaucagauaucugcacguuugucgaauuuauagcuccuccauuacacuucuucauaagca

SEQ ID NO: 16237 - RNA, 64 nt, Human; identical to SEQ ID NO: 8380

SEQ ID NO: 16238 - RNA, 89 nt, Human; identical to SEQ ID NO: 288

SEQ ID NO: 16239 - RNA, 61 nt, Human; identical to SEQ ID NO: 776

SEQ ID NO: 16240 - RNA, 75 nt, Human
ccccgauuuguaggcagcagagaaagagaucuuaguaauaguuguggccaaggauucuuugcuugucuccugggg

SEQ ID NO: 16241 - RNA, 65 nt, Human
cugccgccucuccgagcucuugugacgcggaccucagugccaggauggcucggggcgagcggcgg

SEQ ID NO: 16242 - RNA, 74 nt, Human
cuuggagcuggagaaguugacuuguagagcccuccaggucagggccucaggaacacccuuuuucucaagccaag

SEQ ID NO: 16243 - RNA, 95 nt, Human
ugugggcgcagcagggcaccgacccggggacuccuaagcucaggcacacgugugagcagggggacgguguggguccuauggcugggaguuccacg

SEQ ID NO: 16244 - RNA, 116 nt, Human
gcccuuggccauggcagcuugguugggacagccgggccaagggaaaaaaaggugcaaaaguccaaaugcuggcacuucagguguggccggcacccagccaggcgcagugggugggc

SEQ ID NO: 16245 - RNA, 65 nt, Human
acaauacugucuuugugguucuggcuguuuagcacuaaacacccaguuauaaaagguaggcuugu

SEQ ID NO: 16246 - RNA, 63 nt, Human
caggugcaggguggacucuuucuggauguuguagucagacagggugcguccaucuuccagcug

SEQ ID NO: 16247 - RNA, 75 nt, Human
ccagucagggucuucacgaagaucugcaucccaccucuaagacggaggaccaggugcaggguggacucuuucugg

SEQ ID NO: 16248 - RNA, 81 nt, Human
accugcgcccuccugccuccugugaccucgagaucucucuucggggggucaagcugagucugagcggaggagggcccgagu

SEQ ID NO: 16249 - RNA, 61 nt, Human
gaugaagaacaucuccuucugcggcugccauccccgcaacagcugcuauuucggcuucauc

SEQ ID NO: 16250 - RNA, 68 nt, Human
guggcgcagagugugggccgcgccuuccuggaguacuaccaagagcaccuggcguacgccugccccac

SEQ ID NO: 16251 - RNA, 92 nt, Human
ggacucauagugguagauagcuuauuggucaggguagauagagauauguuuucuguguaacugucuaguuuuuguccuaccauucggagacu

SEQ ID NO: 16252 - RNA, 77 nt, Human
cuacauggaggugggauauuaaaaaacacaaguaaccguaaaauuauguguuauggaauauaguuauaagcaugugg

SEQ ID NO: 16253 - RNA, 63 nt, Human
gccgcuccucgcgcuucuuccgggccagcucagccuugaccuguccugggugcugggacgugc

SEQ ID NO: 16254 - RNA, 62 nt, Human
ggguagcgaaggggucgcccuugucgcuggacucugggccaccccaguuauacucgcuggcc

SEQ ID NO: 16255 - RNA, 88 nt, Human
cuguauguauaaagucaugcucgauuucaggagagcagcugaucacaauuugcuucaugaaucaagguguggaaaugguuauauaugg

SEQ ID NO: 16256 - RNA, 79 nt, Human
uggcucugcugggcgugaggccgucggucacagcgaaggagcuugccuggcccugggaggcccaaggauagcagggcca

SEQ ID NO: 16257 - RNA, 61 nt, Human
uuugaaauucauaguuuacagaauuuuaaugagagaaauuauugagcuaaugaauggcaga

SEQ ID NO: 16258 - RNA, 74 nt, Human
cugguaguugguaaaggagcuggccuugaacucagggauaucuugaaagccacuguugcuucuauggacucuag

SEQ ID NO: 16259 - RNA, 111 nt, Human
gggaggccgcagguccucgcuggucccggagacuaugcuggucaggccagggcuggguccggggccaggcuggcagcugucuggggcuggggaggagcccugccgcauccc

SEQ ID NO: 16260 - RNA, 89 nt, Human
guucccacacuggcgguguggcugccugcucagggccuggcuccuccgacauggaggaggaaggggcggcagcuggcacagccggggac

SEQ ID NO: 16261 - RNA, 63 nt, Human
ucugcgcaguccgcgcaaacaugcaggugcuugaagagcgagcggugcgugcggaagcgcagg

SEQ ID NO: 16262 - RNA, 81 nt, Human
ugagaaaugccaggcaaucaaugaggaugcucaguuuagcaucuccuauuugaguagauuuacaguuguguggaauucuua

SEQ ID NO: 16263 - RNA, 79 nt, Human
guguguuucccgccauguauuuauucuucaugcuugguuuucuagcauuuucaaguuugcaguaaaagguucaauacac

SEQ ID NO: 16264 - RNA, 60 nt, Human
ccucuccuccucuucccuccccaucuaaagggguuuggggagagacacaggcaggcgagg

SEQ ID NO: 16265 - RNA, 65 nt, Human
ggcuggucccagucuguugggguggugcucaggguaaagggcuaugggcaacaggggaccagacc

SEQ ID NO: 16266 - RNA, 70 nt, Human
gcggggggggccgcggcgcgggcccagggcggcaggacucgggccggagcguggccggacccccacccgc

SEQ ID NO: 16267 - RNA, 102 nt, Human
ggcugacugggcccgaaaguggagggggaccguggagaagggcccccaguaugacacacuggagaaggccuggcaugccuuuuucacggcggcugagcggcu

SEQ ID NO: 16268 - RNA, 84 nt, Human
uuugcccuucucagucuguuccacuucuaggaggcagccaccaggcucagcauccggcaagaaaacagaaaauauggggacaga

SEQ ID NO: 16269 - RNA, 67 nt, Human
aaaaacucaagagcaaaaaaaagguaugcuauaauuuuuaggucuucaauuuuuguauagaguuuuu

SEQ ID NO: 16270 - RNA, 77 nt, Human
cuuuucucaccgaagugaucuggaaugugcuaccguauaugcaaggaagacagguuacaagaucaaggugaaggcag

SEQ ID NO: 16271 - RNA, 68 nt, Human
gcagcugcguaaaacauacaggccggagcuuaucaaagaugggaaguuuggggccuacaugcaggugc

SEQ ID NO: 16272 - RNA, 62 nt, Human; identical to SEQ ID NO: 15871

SEQ ID NO: 16273 - RNA, 77 nt, Human
gcccaaagacaaauauugggcaggaaaucaguucucacugagcccgguuuccauguaaaaucucuguuguggugggc

SEQ ID NO: 16274 - RNA, 62 nt, Human
gggacagguggauuuauuuuuuuaaguuacaauaaaaugcucucaaguccuuugaauguucc

SEQ ID NO: 16275 - RNA, 63 nt, Human
cucuuguauaaaaaagcaccaguguccuggacuggacacccacugcuauaaaagaugcagggg

SEQ ID NO: 16276 - RNA, 88 nt, Human
guggaaacuguguggauggaauaguauuauguacaaggcagggguugaagugauagguacaaguucuuucauauuuacacuauuucac

SEQ ID NO: 16277 - RNA, 80 nt, Human; identical to SEQ ID NO: 9102

SEQ ID NO: 16278 - RNA, 130 nt, Human; identical to SEQ ID NO: 3361

SEQ ID NO: 16279 - RNA, 67 nt, Human
caucagcuggcaauuguaaauagguuuccaggaucaaaacuaaccuuucagcguauucucagcuaug

SEQ ID NO: 16280 - RNA, 61 nt, Human
ccauauggaugaaggacuuggguaggaaagauguuccuguugaaguuacccaaccaaaugg

SEQ ID NO: 16281 - RNA, 70 nt, Human
caauuuucugaugcuuauauuauguuaaugggaguuuucuauacuuccaggagccaaucauuagaauuug

SEQ ID NO: 16282 - RNA, 80 nt, Human
ccuucacugaacaacugugugaacuuggugaagucacuguaucucucuucaccuuaacucccucaccaguacaguggagg

SEQ ID NO: 16283 - RNA, 63 nt, Human
gcuggggaugagaaagagcccuguggcuacguggugucaggaagugggauugucagccucagc

SEQ ID NO: 16284 - RNA, 63 nt, Human; identical to SEQ ID NO: 16283

SEQ ID NO: 16285 - RNA, 92 nt, Human
ucagcuccuucacugaacaacugugugaacuuggugaagucacuguaucucucuucaccuuaacucccucaccaguacaguggagguguugg

SEQ ID NO: 16286 - RNA, 62 nt, Human
acaauucaagaaucguuauucaucacauaaugggaaaguggugaguuggugagugcugaugu

SEQ ID NO: 16287 - RNA, 61 nt, Human
ggcagcggaugaauauugggaagcucuagauuagcugaaucuggaggaaaagucaguugcc

SEQ ID NO: 16288 - RNA, 86 nt, Human
gagucuugcucugucgcccaggcugaauugcaguggggccaucucagcucacugcaaccuucaccuuccggguucaagcaguucuc

SEQ ID NO: 16289 - RNA, 81 nt, Human
gccucauccucccaaguagcugggauuacaggcuuuugccauuaugccugguaauuuugguauuuuuaguagagauggggu

SEQ ID NO: 16290 - RNA, 81 nt, Human
cggauggguuaccggacuuccaggcauugcaaaaugccuuugauaucggucgcagccuggacauugucuauuaccuguuug

SEQ ID NO: 16291 - RNA, 66 nt, Human
gguggggcgcccgaaaaaaccagcugcugcgaagaaaaccacgcgcaaauccucaacugcccugcc

SEQ ID NO: 16292 - RNA, 92 nt, Human
cagaaaugaacaaaacuaaugcuagcagguuaaaaucaaucaaaauguuuaaaaauugauucuguccucagcauguuauuuccucagcucug

SEQ ID NO: 16293 - RNA, 72 nt, Human
cgggucacagcgccgccgccgcccaugcugcugccccuagccugccugcacggccgcgucgcucagugccug

SEQ ID NO: 16294 - RNA, 60 nt, Human
cuccuugcuuuugcuugcagagccgcucccgaggccccggcgcggcgcgagggcgcggag

SEQ ID NO: 16295 - RNA, 64 nt, Human
cccaucucugugacuuccuggagacucauuucuagaugggaagggaaguuaucaagacgauggg

SEQ ID NO: 16296 - RNA, 69 nt, Human
ggcugggaaggcgaguauucucuuccgaagagguccacucucaaggcaggaauaaagagcuuuugagcc

SEQ ID NO: 16297 - RNA, 79 nt, Human
gcuuuucuaguuugcaacuucuaaucugcugugagucaggaaaacauauggcagaguuaaauugugcuuuugguuaggu

SEQ ID NO: 16298 - RNA, 66 nt, Human
gcccguggaucauuaaguauccucuaccugcaaauggggaggcuauuucuuaaacuguccauuggu

SEQ ID NO: 16299 - RNA, 75 nt, Human
ccauaguucucccgcgucugguuggccccguguguuccuuuuccuauaccuccccaggcagccuggggaacgugg

SEQ ID NO: 16300 - RNA, 74 nt, Human
ggauuggaacuguguuugggagccucaucauugguuaugccaggaacccuucucugaagcaacagcucuucucc

SEQ ID NO: 16301 - RNA, 76 nt, Human
agugaaccagaaugcaguuuuccuugagauaccuguuuuaaaagguuuuucagacaauuuugcagaaaggugcauu

SEQ ID NO: 16302 - RNA, 90 nt, Human
cauuucagccagaggacuuuggaacugugaauauacuuccugaaggggagggagaagggaggaaguuccauuguguuaaaggcuguaaug

SEQ ID NO: 16303 - RNA, 99 nt, Human
gaggcaggagaaucgcuugaauccgggagguggagguugcagugagcugagaugguuccauugcacuccagccuggguaacagagugagacuccgucuc

SEQ ID NO: 16304 - RNA, 64 nt, Human
uuugggggucacgacuugacguaaacaggauuuggaacaguuaugcgacgauugugcuuugagg

SEQ ID NO: 16305 - RNA, 72 nt, Human; identical to SEQ ID NO: 3662

SEQ ID NO: 16306 - RNA, 102 nt, Human; identical to SEQ ID NO: 2172

SEQ ID NO: 16307 - RNA, 77 nt, Human; identical to SEQ ID NO: 3082

SEQ ID NO: 16308 - RNA, 60 nt, Human; identical to SEQ ID NO: 14851

SEQ ID NO: 16309 - RNA, 126 nt, Human
ugcguuguuacaggaagucccuugccauccuaaaagccaccccuuuucucucuaaggagaauggcccaguccucucccaaguccacacaggggaggugauagcauugcuuucguguaaauuaugua

SEQ ID NO: 16310 - RNA, 117 nt, Human
cgcguacaggaucugguuaccugugcaguugugaauacccagagguugggcagaucagugucucuaguccuaccucuggguauucacaacuguacaggaucugguuaccugcucgug

SEQ ID NO: 16311 - RNA, 73 nt, Human
uagggugugguccccuggcacguggccaccaucaugucuaggccuaugcuaggaggcaaauggccaggcucug

SEQ ID NO: 16312 - RNA, 72 nt, Human
gguauuguguauucuguaauuaugaaaaagguuguuucuauuuuuacaauauuaucagcaauaaucauugcc

SEQ ID NO: 16313 - RNA, 93 nt, Human
gugguguuauuuaauguuuugcaucuguaucuucuaaauucagagaucuggaggauugauaagauucagauucaauuuugaguguaagccuac

SEQ ID NO: 16314 - RNA, 60 nt, Human
ugcaaaaacuaaaucaggugucccguaaauaugccagcggucuggguuugguugauugca

SEQ ID NO: 16315 - RNA, 62 nt, Human
uuaaugacacuugaaaauguuauuaaauucaaauuuuagcauccauaauaaaguuucauuga

SEQ ID NO: 16316 - RNA, 80 nt, Human; identical to SEQ ID NO: 10199

SEQ ID NO: 16317 - RNA, 72 nt, Human
cugccucugaaauagcugcugcuucgagauccucccuuuuuaaagcacuuucuaaagcccucaggauggcgg

SEQ ID NO: 16318 - RNA, 70 nt, Human
cugacuucaaaaaauuaauguguauccagggacauuuuaaaaaccuguacacaguguuuauugugguuag

SEQ ID NO: 16319 - RNA, 89 nt, Human
ccuuucgggugauugcauaguguccuuugagcucgugcagggcccacaugauguccugacuacugagcacuuugaagucggccaugagg

SEQ ID NO: 16320 - RNA, 64 nt, Human
uacucugccccggacugagcuuagcaucuuugugguucaccuuggcuugaguagggggcaggua

SEQ ID NO: 16321 - RNA, 63 nt, Human
ucauuggcagcuuuccaaggaaaaccgcuuuuuuuuuucuuggguuuuugggcagccuuguga

SEQ ID NO: 16322 - RNA, 99 nt, Human
ggaaauuaggagaaggaauuucagguggguuuaagucagagcuaguuccccaacagaaagaucauuugaaaccaguuuuuaucccuucucuuuccuucc

SEQ ID NO: 16323 - RNA, 72 nt, Human
uuucccuaaaucaaaucaauauuaauugugccuuauuucacuuaacauagacuugaauuauuuuuagggaaa

SEQ ID NO: 16324 - RNA, 103 nt, Human
uaucgcagugugggaacaagacuuuucauugccuuuugcucaguaagauugucuacacaaacugccacgggaggaaugacaagcaguugacccacuggugaua

SEQ ID NO: 16325 - RNA, 63 nt, Human
ugccauaugcacucuccuuuuuacaaggcaaucacagauugcaaauuccauagggcuguggca

SEQ ID NO: 16326 - RNA, 75 nt, Human
gcuuaauugcugauacauaugaaugaaaccuuggcugguauuaccuggcauucacugugcuaucggcaaugaugc

SEQ ID NO: 16327 - RNA, 62 nt, Human; identical to SEQ ID NO: 4147

SEQ ID NO: 16328 - RNA, 73 nt, Human
aaugaaauguauggucuuuugugauuggcaucuuucccuuagcauguuuucaguuucauccauguauuucauu

SEQ ID NO: 16329 - RNA, 63 nt, Human
uuuuguauuuuuaaaauguauuuuguaaacaguguuaugaaauauaauucacauaccacaaaa

SEQ ID NO: 16330 - RNA, 75 nt, Human
caaaccagcaacaugaaauggacaaaccaaucugcuuaagaucugucauaguuuagaucaugguuaucugauuug

SEQ ID NO: 16331 - RNA, 60 nt, Human
cauccucgugggaaauuuccagguuuugugaagaccuguagaaccucuuuuuguggggug

SEQ ID NO: 16332 - RNA, 60 nt, Human
ggacaaagaacggaggacaggcgagaccaucccccguugucuucgcgugugucugagucc

SEQ ID NO: 16333 - RNA, 63 nt, Human; identical to SEQ ID NO: 11061

SEQ ID NO: 16334 - RNA, 63 nt, Human; identical to SEQ ID NO: 14043

SEQ ID NO: 16335 - RNA, 107 nt, Human
aagccuuguuuuuucccagagcaaccauguuuuagcauaaugggaugaccuggugucccauuauaaauaaagggugguauggcuagaaggguaugagcaguaggcuu

SEQ ID NO: 16336 - RNA, 69 nt, Human
agauuuuaguuaacaauaaugagccugggagcaguaguacuaaggcgucuuuuguaggcuuaagaauuu

SEQ ID NO: 16337 - RNA, 67 nt, Human; identical to SEQ ID NO: 2928

SEQ ID NO: 16338 - RNA, 76 nt, Human
acucaggugaguuuuagcuuuauuggggagggggugaucuaaaacacucuuuacgccggcuucuauugacuugggu

SEQ ID NO: 16339 - RNA, 97 nt, Human
ccucuagagggauaugaagcaccgccaggguccuuugaguuuuaagcuguggcucguaguguucuggcgggcaguuauguugauuuaacuguugagg

SEQ ID NO: 16340 - RNA, 82 nt, Human; identical to SEQ ID NO: 4821

SEQ ID NO: 16341 - RNA, 66 nt, Human; identical to SEQ ID NO: 4823

SEQ ID NO: 16342 - RNA, 92 nt, Human
cuucccgaaccguuucguaccucagcaucccugagagaucuagcacauuccauucuguaacagggacgccacagguuuuuaguggagggagg

SEQ ID NO: 16343 - RNA, 76 nt, Human
ggugccgaggucagagaugguggcccuagagucauaggcuugagcagggagccacgauaauucuccagacaguacc

SEQ ID NO: 16344 - RNA, 104 nt, Human
ucauaguggcaaugaaugacgagcauugagccaucaugaggugccaggcacugcuucggaaaccaaaggaccaugcugaagagcucugucguucuccacucuga

SEQ ID NO: 16345 - RNA, 64 nt, Human; identical to SEQ ID NO: 287

SEQ ID NO: 16346 - RNA, 89 nt, Human; identical to SEQ ID NO: 288

SEQ ID NO: 16347 - RNA, 61 nt, Human
caauuuuuauaaucuauuuguggauuuuguuaaaagauuucacaugaagauuuauuaguug

SEQ ID NO: 16348 - RNA, 68 nt, Human
uaaaauuuuuauauguuuaguuaaaagauuugacaugaaaauuuauuagauaccauuuaaaaauuuua

SEQ ID NO: 16349 - RNA, 88 nt, Human
ugaguguguuucuggacacaaacuucugcaguagaaugaccuaacaugucgguuucauugcagucauuauaggauugaaauacguuca

SEQ ID NO: 16350 - RNA, 68 nt, Human
guucacguacagcagaacauguaguuaugcuugcucuuugcaucuacuugacauucuuugaagugaac

SEQ ID NO: 16351 - RNA, 87 nt, Human
ugaccuagauuuaguuuaaauaccaguuuccuuaccaggaaggaaagaaaacugguaaggaaacuguuguuguuaaaaucuagguua

SEQ ID NO: 16352 - RNA, 86 nt, Human
acaauauaauauauucuaaacacaaugaaauagggaauauaauguaugaacuuuuugcauuggcuugaagcaauauaauauauugu

SEQ ID NO: 16353 - RNA, 82 nt, Human
gucacaagaauuuggauggugcaguuaauguugaaguuacagcauuucagauuuuauugucagauauuuagauguuuguuac

SEQ ID NO: 16354 - RNA, 66 nt, Human
gaugggaggaaaguagagguuucgaagggaaaaaaguucguccuuuaacauccaccccccaccauc

SEQ ID NO: 16355 - RNA, 65 nt, Human; identical to SEQ ID NO: 6774

SEQ ID NO: 16356 - RNA, 76 nt, Human; identical to SEQ ID NO: 758

SEQ ID NO: 16357 - RNA, 71 nt, Human; identical to SEQ ID NO: 1764

SEQ ID NO: 16358 - RNA, 61 nt, Human
ggaucucugaagacauccuuauugacgacaguuuuguccaaggggauauccacagaguacc

SEQ ID NO: 16359 - RNA, 114 nt, Human
uugaucucuuggcgaucuucuucuugcccauggcagcugucacuuugcggggguagcggucaauuccagccaccagagcauggcuguaggggcgaucugaggugccaucaucaa

SEQ ID NO: 16360 - RNA, 77 nt, Human
gagucacaggucguguuacagaucagggggacagacaagcacagaacccccaucucccaucacccagccuccgaguc

SEQ ID NO: 16361 - RNA, 65 nt, Human
gugaagcuguugauuauguuuguaguuguugcauuacaguuacacaagaguuaaccagaaugcau

SEQ ID NO: 16362 - RNA, 80 nt, Human
cugggggaaugcgguggcuuccaggguaaccgucugacccugaacuucagcacguuaagcggccgggggucaucuaacag

SEQ ID NO: 16363 - RNA, 74 nt, Human
ggcgacaggugcagaacaaaaacagcaggacaaacccacgaguuugaauguuggaaagacacugacaaaucgcc

SEQ ID NO: 16364 - RNA, 89 nt, Human
gguaguagccauggcggccaugaguuuguugcggcggguuucgguuacugcgguggcagcucugucuggccggccccuuggcacucgcc

SEQ ID NO: 16365 - RNA, 64 nt, Human
ccauccuuuaauagaucucauaagcagaauucagaucaugaaugacugaccagaauaugggugg

SEQ ID NO: 16366 - RNA, 60 nt, Human
ccguugaaacagggaggcaagcacaagacugggccaaaucuccauggucucuuugggcgg

SEQ ID NO: 16367 - RNA, 79 nt, Human
ggaaugguggagugcaauuuuaaacguuuaauggagauggguuuauaauuaaauuauauaauggguaugugacuauuuu

SEQ ID NO: 16368 - RNA, 82 nt, Human
caggcuacuucuauagacaucacuuaaccuaaaauucuaaagaguuaauaugcaugagggauaguaauauaggaagcaccug

SEQ ID NO: 16369 - RNA, 84 nt, Human
ccaaugccaucuuucgcuucuaacugccaguuggcacauucagcuucaaugccuugggaagggaggagcagaggaaagcagggg

SEQ ID NO: 16370 - RNA, 74 nt, Human; identical to SEQ ID NO: 6796

SEQ ID NO: 16371 - RNA, 70 nt, Human; identical to SEQ ID NO: 9240

SEQ ID NO: 16372 - RNA, 91 nt, Human; identical to SEQ ID NO: 10617

SEQ ID NO: 16373 - RNA, 74 nt, Human
gaauugugaacuuguugaagcauagaauugggcauccaguacuuuugucauaaucacugcaucuucuucaauuc

SEQ ID NO: 16374 - RNA, 64 nt, Human
uagcuggcugggcucuuaucuggaaguuccaaggacuaauccacuuucaugcucauucugguug

SEQ ID NO: 16375 - RNA, 68 nt, Human; identical to SEQ ID NO: 1444

SEQ ID NO: 16376 - RNA, 78 nt, Human; identical to SEQ ID NO: 1445

SEQ ID NO: 16377 - RNA, 62 nt, Human
cagaggcugaaguauacaaacugaaagcugaacuaagaaaugacucuuuacuucaaacucug

SEQ ID NO: 16378 - RNA, 61 nt, Human
ugguucuuuagcauguucucaguucaagaauuacgauccugaaagaaggccuaaagaauua

SEQ ID NO: 16379 - RNA, 91 nt, Human
gguuccuuuggucgcucgcuccucuccuacuuggauaacugugguaauucuagagcuaagacaagguagagccgagagacaagguagagcc

SEQ ID NO: 16380 - RNA, 70 nt, Human
accacauuguugcuuggagacaugucauuuucgcgucugucugacauuugcgucugagaaacaaugcggu

SEQ ID NO: 16381 - RNA, 65 nt, Human
ccuuagauguucugacagcacugcaccuuuggcuugguuucagugguugguggaacaugaauagg

SEQ ID NO: 16382 - RNA, 86 nt, Human
auucauggcuagcaccuggaaaugcaguaucucguguauauagcaaaaagauccuggguaguucggaugauacuggaauccugaau

SEQ ID NO: 16383 - RNA, 85 nt, Human
gcaccugaauaaaugaagcgaaggaugucugauaaacaagaacagaagagggcgucuuuaacaaugacucguaaugguggguugc

SEQ ID NO: 16384 - RNA, 86 nt, Human
cuuuuucagucaugcaggagucagucgaaguguggccauaauaacugcuuuucucaugaagacugaccaacuucccuuugaaaaag

SEQ ID NO: 16385 - RNA, 65 nt, Human
gaccggugcguggccuucaucggucaggcccgcgcugagggccgugcgguguuggugcacugguc

SEQ ID NO: 16386 - RNA, 62 nt, Human; identical to SEQ ID NO: 1426

SEQ ID NO: 16387 - RNA, 80 nt, Human
uugcagaauuuaccucaagaacucuuugcuguugacccaacuaccguuucacaaggauugaaagaugagguucucuacaa

SEQ ID NO: 16388 - RNA, 87 nt, Human
uuuuaguugcagccacuaacauguuaaucaaaagaagcaaauacauguuuuucccuugagaaaacauggauagugguguaacgggaa

SEQ ID NO: 16389 - RNA, 90 nt, Human
guguuuacuauauucagaguugugcaacuaucauuuuucucacccccaaaagaaacccuaugcccguuaguauucacucuguuuucucac

SEQ ID NO: 16390 - RNA, 75 nt, Human
ugggcaaggccaugcuccucuggaggcuuccaugaugcaucccauauucaguguuucccgaguaagccccaccca

SEQ ID NO: 16391 - RNA, 89 nt, Human
ccagaagucuauaacauuccaauucacacuucauaccuauuguuaaugguagguacaggagaggaaugaugauuuacccggacuauugg

SEQ ID NO: 16392 - RNA, 65 nt, Human
gggcugggcucaggaaaaaccagccacugcuuuacaggacaggggguugaagcugagccccgccu

SEQ ID NO: 16393 - RNA, 79 nt, Human
ugucugucucagcucaaccacagucugacaccagagcccacuuccauccucucuggugugaggcacagcgagggcagca

SEQ ID NO: 16394 - RNA, 72 nt, Human
caguugauuauggcaagaaguccaagcuggaguucuccauuuaacccagcaccccagguuuguccacagcug

SEQ ID NO: 16395 - RNA, 80 nt, Human; identical to SEQ ID NO: 788

SEQ ID NO: 16396 - RNA, 79 nt, Human; identical to SEQ ID NO: 3903

SEQ ID NO: 16397 - RNA, 83 nt, Human
gggguugccgcucugggaacccgaccguuuggagccagggucugucccccggaggucccggaaagggcggggcggccaacccc

SEQ ID NO: 16398 - RNA, 98 nt, Human
gggacguccgcgacuaccuggaagagaggcuggaagcugaauucggucagaagagaauccaucugaauagccaguuuccaggcacccagcggcuuccc

SEQ ID NO: 16399 - RNA, 60 nt, Human
ccagggguuuccuccuuucguuuggguuaucaaagcguuagguuauaggaauucucuugg

SEQ ID NO: 16400 - RNA, 100 nt, Human
guggcagggucauaggauaauaguggagagaaggucagcagauaaacacgugaacaaaggucucugguuuuccuaggcagaggucccuguggccuuccgc

SEQ ID NO: 16401 - RNA, 68 nt, Human
gaugcuuuuguaugcuucuaucauuuggggagauuauuuccuuacuuucuagaauaacaagauguucc

SEQ ID NO: 16402 - RNA, 97 nt, Human
gguuuacuguguaccuauccugccuuaauucuagaaucagcucuuucuccaacaagcuuugguucuucuuaguggcgcaugauauguauuagagacc

SEQ ID NO: 16403 - RNA, 72 nt, Human
ucgccuucccaaagugcugggauuacagaugugagccaccacaccuggcugucuuuuccauuauggguguga

SEQ ID NO: 16404 - RNA, 73 nt, Human
gagagugacacacagugcuggcccggagacauuuccacaaaguggucaacucugccugcauccuaaaacuuuu

SEQ ID NO: 16405 - RNA, 89 nt, Human
uccuuacagucguuuuuuuacagagaaaaggggcauuguuuuuucacugcuuucucaacaguuccugugaauaaaugaaacauuucgga

SEQ ID NO: 16406 - RNA, 93 nt, Human
ugucaccauccuucaagcugagacuccuggugagccuuugccaccaugaaaaccacauagcugaccagggcugugcuugagguacagaggaca

SEQ ID NO: 16407 - RNA, 80 nt, Human
gacaaacuucgucacagacgcgcggguacacacgcaccggacccuccgggagaguguaccugccgaucauagacgacguc

SEQ ID NO: 16408 - RNA, 76 nt, Human; identical to SEQ ID NO: 13770

SEQ ID NO: 16409 - RNA, 85 nt, Human
cacagaaucagaccaugacuaccuucaccuggaacaucaaccacgcccggcugauggugguggaggaaccgauguguuuacugug

SEQ ID NO: 16410 - RNA, 72 nt, Human; identical to SEQ ID NO: 5736

SEQ ID NO: 16411 - RNA, 73 nt, Human
cucugacaacaguggcuggacugaaauccgccgggaagccugggucuccucuagcuuauuggugucuccagag

SEQ ID NO: 16412 - RNA, 83 nt, Human
uucuggcagcgguacccgaaucccuauagcaaacaugucuugacggaagacauaguacaccgggaggugaccccugaccagaa

SEQ ID NO: 16413 - RNA, 79 nt, Human; identical to SEQ ID NO: 1810

SEQ ID NO: 16414 - RNA, 65 nt, Human
gcagacucaugcagcccuauggccgcucagaccaaggcgcagagcaacuaucagggcagcucugc

SEQ ID NO: 16415 - RNA, 67 nt, Human
ggcccagcaguauugcucacgggggcuccagccgccggcguaggcccucaugagcuacgccuggguc

SEQ ID NO: 16416 - RNA, 84 nt, Human
ugacuuggaaggugcccugugcuaugucgugccugcagggacacgucggaucccgugggccucacaugccaggucaccagguca

SEQ ID NO: 16417 - RNA, 71 nt, Human; identical to SEQ ID NO: 1145

SEQ ID NO: 16418 - RNA, 67 nt, Human; identical to SEQ ID NO: 1146

SEQ ID NO: 16419 - RNA, 80 nt, Human; identical to SEQ ID NO: 100

SEQ ID NO: 16420 - RNA, 77 nt, Human
cugggguguuuauggcaagucacuuugacagacauuaauguggcagauguugucugacuuacuguuucaacaaccag

SEQ ID NO: 16421 - RNA, 65 nt, Human; identical to SEQ ID NO: 247

SEQ ID NO: 16422 - RNA, 80 nt, Human; identical to SEQ ID NO: 100

SEQ ID NO: 16423 - RNA, 89 nt, Human
uuguucaccuggcaagcacuguggcuggcucuccaggauguuuucccauugugggguugggcacggcccggugggaccagaguggacga

SEQ ID NO: 16424 - RNA, 60 nt, Human
gcauacacugacacgggaaagagggcgaagacaccaagcaaacugcccgaaacagaaagc

SEQ ID NO: 16425 - RNA, 66 nt, Human
ggcauccggcggaacuggaucgaggcucugagaaagaccguacguccaacuucagccccagauguc

SEQ ID NO: 16426 - RNA, 64 nt, Human
guggcagcagccugagaaagugcccugacgggagaacuuagcggugcccucaugccugcucaac

SEQ ID NO: 16427 - RNA, 65 nt, Human
ugagcuggauggugagaucgaccugcguuccugcacggaugucacugaguacgcggugcagcgca

SEQ ID NO: 16428 - RNA, 110 nt, Human; identical to SEQ ID NO: 5411

SEQ ID NO: 16429 - RNA, 81 nt, Human
cagggcgcauagugauaccuuugauaaagggcagaugaauaaaacaugcagcuacacgacggaagaacaauuguaauccug

SEQ ID NO: 16430 - RNA, 107 nt, Human
cccggaguauggccgcaagaagcgccuccugacugggccucaugucccuccagagccugaaugaugugagcuugagcacaggcgcaucaauugcugccaacccaggg

SEQ ID NO: 16431 - RNA, 63 nt, Human
ccuaccccagcggccagaucggcuucaugcugugcagcaagaacccgagcacgaacuuccagg

SEQ ID NO: 16432 - RNA, 60 nt, Human
ccuugaaaggcaauuguuggcuguuuucauaagcaggaaaaauaaacagaaguauaaagg

SEQ ID NO: 16433 - RNA, 65 nt, Human
gguuccgguucuguggugaucuggacugucccgacuggguccuggcagaaaucagcacgcuggcc

SEQ ID NO: 16434 - RNA, 83 nt, Human; identical to SEQ ID NO: 741

SEQ ID NO: 16435 - RNA, 61 nt, Human; identical to SEQ ID NO: 742

SEQ ID NO: 16436 - RNA, 78 nt, Human; identical to SEQ ID NO: 743

SEQ ID NO: 16437 - RNA, 85 nt, Human
aggcgccauuccuuccacauucggcuauggggaggaaagccaguaggacccauuugucgacaugguggaagggguuucacugucu

SEQ ID NO: 16438 - RNA, 75 nt, Human
ggccaaggucaggcuggaggagguggacuuuggccccuagggagcccccaccugaccucuacuugcaccuuggcu

SEQ ID NO: 16439 - RNA, 78 nt, Human
ugacauuuggauaaacaagaggcgccauuccuuccacauucggcuauggggaggaaagccaguaggacccauuugucg

SEQ ID NO: 16440 - RNA, 103 nt, Human; identical to SEQ ID NO: 13269

SEQ ID NO: 16441 - RNA, 101 nt, Human
ggaaggaaaaaaaguaaauaugcaggcuuuuaggacugaguagccuugaaaauaaaccucauuucuaaaaaggaccuuuuguuuauacuuuuuuuuuuuuu

SEQ ID NO: 16442 - RNA, 65 nt, Human
gcuggagguacugucagagguugaaugccaucugcgagugucuuucuuugaugucaccuaccggc

SEQ ID NO: 16443 - RNA, 64 nt, Human
cugguuucagaucucagaccuuauuuuuauauccuacaaaaauuucaauaaccuuugaaaucag

SEQ ID NO: 16444 - RNA, 89 nt, Human
ggaaaaaaacuuuaauuggcgccaaaaaacagaaugaaaugggcuuggccuuauauuguguuuuuugcguuggucugggguuuucuucu

SEQ ID NO: 16445 - RNA, 90 nt, Human; identical to SEQ ID NO: 5362

SEQ ID NO: 16446 - RNA, 72 nt, Human
ucuuuuucggcgcuugcacucaggcauuuaacaacacuggacacggugcaaggugacagcagucgguuggga

SEQ ID NO: 16447 - RNA, 81 nt, Human
cagggcuggagagagggagacgcagagccggacgugacgggcugugcuugucaaaacugugcagucuccuucguggcucug

SEQ ID NO: 16448 - RNA, 62 nt, Human
ggcccaaccacaaaggcagagaaguuagccccagaaagcugacagcugaaggcggggaggcu

SEQ ID NO: 16449 - RNA, 66 nt, Human
ggcuccacccagcaaggccucuggcaggggcuauguuuaaggcuggggucaggcagaggugggacc

SEQ ID NO: 16450 - RNA, 73 nt, Human
aaccauagcaggugucagcccugguccagucagccuugcccagugggcagggaagggcuagggcugugugguu

SEQ ID NO: 16451 - RNA, 64 nt, Human
gugagucagugggcggcaagguggaaaacuguaggguggccaguuagccguaaaaaaagaucac

SEQ ID NO: 16452 - RNA, 91 nt, Human
ccaaggcgccuuuguuggggguccgggaauccgcggugugccaggucggaaaaggcguccgcuuuccuggagaggaggcuaaggugccggg

SEQ ID NO: 16453 - RNA, 80 nt, Human
aguuuaggaaacaauguuucugggagagugcuuaauuccugugaaguuuaugauccugccucagaaacauggacugagcu

SEQ ID NO: 16454 - RNA, 97 nt, Human
uguccaaugauugaagccaggaagaaucaugggcugguauuuguaaaagacaagauauuugcuguggguggucagaaugguuuagguggucuggaca

SEQ ID NO: 16455 - RNA, 60 nt, Human
cugcgccggcugcccguugcuagcuauggcaaaugguggcggcggcggcggcggcagcag

SEQ ID NO: 16456 - RNA, 90 nt, Human
ggcggcggcggcggaggcagcagucuuagaaugaguagcaauauccacgcgaaccaucucagccuagacgcguccuccuccuccuccucc

SEQ ID NO: 16457 - RNA, 99 nt, Human
ucuucgggggccucuucaucaucuugcucuggcggacgcucaaguaccuguggaccgugugcugccacugcgggggcaagacgaaggaggcccagaaga

SEQ ID NO: 16458 - RNA, 79 nt, Human
cacacaauuaaguugcugcaaauucaaaagcuuagagagaauaagcuucuugguggugaaacuacaacucucacgugug

SEQ ID NO: 16459 - RNA, 76 nt, Human
ccgugguuccucaccugcauuaaccagccccaguuccgggcugucuugggggaagugcaacuguggagaaagaugg

SEQ ID NO: 16460 - RNA, 60 nt, Human
auuaggcccuaauugccugacuuaaauuaauauugguuaaggcccacuuaggguccuggu

SEQ ID NO: 16461 - RNA, 62 nt, Human
guauuaaaccuauucuuuauaaacucauauuacuguucuaaauugaagaaauuauuuauuac

SEQ ID NO: 16462 - RNA, 87 nt, Human
uuuuuuuuuugcauuucucauuuuuauuugacagaaaaaguugcucuugcuguacagauuuuaaaaaaccaaaaugccuuuaagaaa

SEQ ID NO: 16463 - RNA, 106 nt, Human; identical to SEQ ID NO: 6411

SEQ ID NO: 16464 - RNA, 80 nt, Human; identical to SEQ ID NO: 367

SEQ ID NO: 16465 - RNA, 65 nt, Human
ggcccccucaaaaguggucucaacgggggguucgccggccccgggagaaacacgccagggggacc

SEQ ID NO: 16466 - RNA, 62 nt, Human
ucucuggggucaagagagagccugggccuaggagaucuagggucuaaaaaagcucaaaggga

SEQ ID NO: 16467 - RNA, 70 nt, Human
ggauuugcucauugcuguaccacaucugcucuagggaaucuggauuauguuauacaaggcaagcauuuuu

SEQ ID NO: 16468 - RNA, 77 nt, Human
gguuguuaacaucugacacagugagugagaaaaaauccagcacagucacugggcagguuuaagaagaaguggcagcc

SEQ ID NO: 16469 - RNA, 71 nt, Human
guuuagaaguuucuggccccacaguucuagaggcugacugacuggggcagguuguagagaaacuucuggac

SEQ ID NO: 16470 - RNA, 81 nt, Human
cuaugacugcucugccauguugcuuugccgaccucgccccugggaaggggaccgggcaaggccacuuccagaggguugugg

SEQ ID NO: 16471 - RNA, 97 nt, Human
agagcugauaauagauguuuaguuuuaaaaaggauuaugugcgggagacucucuguuagaggagccuuuuucaucugacauuuguuauuucuguucu

SEQ ID NO: 16472 - RNA, 71 nt, Human
ugccauuuugacuuaugacugcaggaccaaguguauuucuguccuguauucuaccgaguccgaggguggua

SEQ ID NO: 16473 - RNA, 75 nt, Human
uccaguccauggcaggcggguacaaggggagguaagaugggagcuccacuccuuggaccaccagcugguucugga

SEQ ID NO: 16474 - RNA, 60 nt, Human
uggaauuuucugagagaucuuuauucuuuauucaggaugugggaucgaucagcacugcca

SEQ ID NO: 16475 - RNA, 105 nt, Human
acuugugcugauauuuuaaggaugugcucaagaguaugaagcagggugcuuuugucccuuucucuccucccuaguaauucccuccucccuaucccauagccaagu

SEQ ID NO: 16476 - RNA, 67 nt, Human
cccuuugcuucguugguaugguaggugcccuuguggcggaacauguaccggaucaggaagaccaggg

SEQ ID NO: 16477 - RNA, 64 nt, Human
gccaccccucaaaugagccauuccuuuuugcuuucaucaauggucucugugaaguuggggucgu

SEQ ID NO: 16478 - RNA, 76 nt, Human; identical to SEQ ID NO: 128

SEQ ID NO: 16479 - RNA, 85 nt, Human
gaugaauccuucaaauaggagccgauggaucugugguccuuugggacucaucaaagccuugguuuagcauuuugucaguuuuauc

SEQ ID NO: 16480 - RNA, 63 nt, Human
ucgcugcccucucugccagcaggacugggugguccaaagaaucggcaaaugagagugguuaga

SEQ ID NO: 16481 - RNA, 75 nt, Human; identical to SEQ ID NO: 1049

SEQ ID NO: 16482 - RNA, 70 nt, Human
gggagaagggcuugaugcuuggggugggaggagagaccccuccccugggauccugcagcucuagucuccc

SEQ ID NO: 16483 - RNA, 74 nt, Human
ccucugccuugcccccagacccaccagccaggagccagagggagggaggcugaggggcggggacgaggaagagg

SEQ ID NO: 16484 - RNA, 78 nt, Human
cuuccagguccucaguacacaaccaccacgagggaaacccagaccuagguuuccggcgccgacucugaggcccgggag

SEQ ID NO: 16485 - RNA, 70 nt, Human; identical to SEQ ID NO: 2845

SEQ ID NO: 16486 - RNA, 75 nt, Human
gaggcccucaagagcaguagaaucaguauauccugaaggcagugcuggaggcagucucaugcacuaggggguuuc

SEQ ID NO: 16487 - RNA, 60 nt, Human
uuccaaccacguugcccaguguaaauccaagcaggaacuggagcaugaugucggugggga

SEQ ID NO: 16488 - RNA, 62 nt, Human
gucuacaagcauuuugaaauauucugugccuucgcagaauuucgugugugaucacugaggac

SEQ ID NO: 16489 - RNA, 87 nt, Human
ugcucuacaaaguugagggucagagggggaacaauuauauagaaauuucggagauguguauucuuuggccuucgaaauucuggagca

SEQ ID NO: 16490 - RNA, 125 nt, Human
uggaagugagcgguugacccuccuggcuccccugaauucuguauucaaagauggaaccccuccaauugaugcccauacaaggaauuugcuucggaaccacauaauuaaagaccagcuggccucua

SEQ ID NO: 16491 - RNA, 68 nt, Human; identical to SEQ ID NO: 14562

SEQ ID NO: 16492 - RNA, 79 nt, Human
uugaugagcuacucaucccagacucagccaagacacuauuugaauuggcugcagagucugauguguccacagccauuga

SEQ ID NO: 16493 - RNA, 64 nt, Human
aaauaucaaagacuaauacuggaauauguauucuacacauauaucauuuauuucuuugaucuuu

SEQ ID NO: 16494 - RNA, 70 nt, Human
uuuguugauagagugguuuccuccuuuguaauuccccugcccagggccagcccauagcuuuauuuucaga

SEQ ID NO: 16495 - RNA, 61 nt, Human
ggcuagcacaguuccagaucacuguaauuucuuuacaauuuucuauacuguuuaaaagguc

SEQ ID NO: 16496 - RNA, 75 nt, Human
uucuacaauaaucauuuaucauuuauguaaucaaaaaguuauuuuuauuauuuuaguuuacaugccuuuguggaa

SEQ ID NO: 16497 - RNA, 78 nt, Human
caguuggucuuggcacucagccagcuucgccuccgugaucuucaggaugucagggagcugcugcaggucagccagcug

SEQ ID NO: 16498 - RNA, 81 nt, Human
cuggaacugccuucgugccgccucaaucucuuuguucaucucaucuuuaaggaucuuguucucuuugugacagcguucuag

SEQ ID NO: 16499 - RNA, 96 nt, Human
uaggagaagggggugccaaugccuggugaggcgcuggaccgcagccacaggcagauggugaaggcguacagcucaggcagcgucuucuugaucuug

SEQ ID NO: 16500 - RNA, 68 nt, Human; identical to SEQ ID NO: 10162

SEQ ID NO: 16501 - RNA, 60 nt, Human
auuugaaccaacaguucuuagaccggucuuccaacccugguuaagaauuggguugcaagu

SEQ ID NO: 16502 - RNA, 66 nt, Human
ccuuuuuaaugggucccaaaaucugugacaaauuuugguccaguugguucccuuuaaaaguucugg

SEQ ID NO: 16503 - RNA, 63 nt, Human
aguauugagggggcaucagaauuggguguacagcugagcauucucuccugacucuucuaugcu

SEQ ID NO: 16504 - RNA, 89 nt, Human
gggcugcgggcgaccuuuaccauaggacgaaguaaccuugcauucggaugcaagguguacuguacguacacaggugcuggucgaugucc

SEQ ID NO: 16505 - RNA, 89 nt, Human
guuuuauuuuuguaaagguauguaaguuauuaaaugguuaaucauggccuuuuaaaaauaaaauaaagugauaccuuuacaaugaagac

SEQ ID NO: 16506 - RNA, 85 nt, Human
uuuaaaaaaauaccacugugagaauaaagcgcuaguaagauacaucacuuacugauuuuaaaaauacagaaagauuuugaguaaa

SEQ ID NO: 16507 - RNA, 69 nt, Human
ccuucgcuagucuccguauggcccgugccaacgcccggcucuucggcauacggggcaaaagagccaagg

SEQ ID NO: 16508 - RNA, 74 nt, Human
uuggccaguuggcguaauaccgaagaggccugaaccgaucgccuuuuccaacaguugcgcaaccugauagccaa

SEQ ID NO: 16509 - RNA, 65 nt, Human
uacauuuauugaaauggcuguacauguaagcagguaacuacacagcagacguggcaauaugugug

SEQ ID NO: 16510 - RNA, 61 nt, Human
gcuucugccgaggugucccugaugccaagauucgcauuuuugaccuggggcggaaaaaggc

SEQ ID NO: 16511 - RNA, 62 nt, Human; identical to SEQ ID NO: 5274

SEQ ID NO: 16512 - RNA, 77 nt, Human; identical to SEQ ID NO: 14184

SEQ ID NO: 16513 - RNA, 74 nt, Human
aucacuugaacccgggagguggagguugcagugagcugagaucaugccacugcacuccagccugggcaagagau

SEQ ID NO: 16514 - RNA, 67 nt, Human
ggcacaguggcucacgccuguaaucacagcacuuuggaaggcagaggugagugaauuacuugaggcc

SEQ ID NO: 16515 - RNA, 69 nt, Human
gccauuagacuuauaggugaugcaagcaucuaagagagggguuaaucacacuauagaggcauaaguggu

SEQ ID NO: 16516 - RNA, 66 nt, Human; identical to SEQ ID NO: 4461

SEQ ID NO: 16517 - RNA, 61 nt, Human
ggugacaacaugcugggagccaagugcuaacaugccuuggguucaagcgauggaagucacc

SEQ ID NO: 16518 - RNA, 70 nt, Human
ccaacacgcuggugagaggccugauuagguuuuggggaagaucugagagcucuggccucuucgugagugg

SEQ ID NO: 16519 - RNA, 69 nt, Human
gccuggagaaggccuccccugaccugcucucucaguauccuggagagcuggccagaggccaucacaggc

SEQ ID NO: 16520 - RNA, 88 nt, Human
ggaggauugcucgaaccugggaggcggagguugcagugagccuagaucacgccauugcacuccagccugggugacagagugagacucc

SEQ ID NO: 16521 - RNA, 73 nt, Human
guggcggcuccagacccggguagugccuuuguccccugaauacucacucccccgguccagagggccuucccac

SEQ ID NO: 16522 - RNA, 120 nt, Human
guguguguggucuuucacucucagauagugaauguacgucaccacaacaaggaaaaagcgcugaggaagaaugugcaucccacaggucagagagucaagcaggaaguaccaguagagcac

SEQ ID NO: 16523 - RNA, 90 nt, Human
uccaaauauagcaaauuuggaacaacuaggcauuacugugaaagaacuuccuaguuuuucauuugucugccaccacauugcuacauugga

SEQ ID NO: 16524 - RNA, 79 nt, Human
uuuaugauuuguuucaguuuuauuuuccugucucaguuucaguaaaagauucagagaacugauugacacacaucauaag

SEQ ID NO: 16525 - RNA, 62 nt, Human
uuuuucuuuuucacggaacaaggugacacuaucuuuguucaaaccaaagugaaaaggaagag

SEQ ID NO: 16526 - RNA, 66 nt, Human; identical to SEQ ID NO: 10783

SEQ ID NO: 16527 - RNA, 88 nt, Human
caccaccguuacuacgaucaauguuugcgcauguucgagaugagucucaccaacaguguguaagucauuaacaguccuaacuguggug

SEQ ID NO: 16528 - RNA, 65 nt, Human
uguguauguguguguauguguguguuuuguaaaaucuguaaauagcacaugaccaaaugaacaua

SEQ ID NO: 16529 - RNA, 67 nt, Human
cauuagauucaguccauagauucugugacaaaauuaacuacagucagucugugcaaugaaauugaug

SEQ ID NO: 16530 - RNA, 64 nt, Human
aaaguaaugaauugggauguacaagguuauucuuaacgcuuauuugaaaccacuuuauuuuuuu

SEQ ID NO: 16531 - RNA, 66 nt, Human
gcgcugccacaccccgcuaauuuuuguauuuuuaguagagacgggguuacaccaugugggucaggc

SEQ ID NO: 16532 - RNA, 72 nt, Human
gcucuguuacccaggcuggaaugcaguggcacaaucucggcucacugcaaccuccaccucccggguucaagc

SEQ ID NO: 16533 - RNA, 62 nt, Human
aguuggagcguucagaaguugauagcaagaugaaagaaaguuggaauuucuggagacuaauu

SEQ ID NO: 16534 - RNA, 88 nt, Human
ggagaaucacuugaaccagggagguggagguugcagugagcugagauugcaccauugcacuccagccugggugaaaaagcgagacucc

SEQ ID NO: 16535 - RNA, 93 nt, Human
ugguagaaauaugggaugccaagguggguggaucacuuaagaucaggaguuugagaccagccucaccaacauggagaaaucucaucucuacua

SEQ ID NO: 16536 - RNA, 61 nt, Human; identical to SEQ ID NO: 15377

SEQ ID NO: 16537 - RNA, 70 nt, Human; identical to SEQ ID NO: 1644

SEQ ID NO: 16538 - RNA, 68 nt, Human
uuuuaagaaauuaauuuauuugaguucaaauauuuuugaaauauaaaaauugguuguauuuuuuaaag

SEQ ID NO: 16539 - RNA, 98 nt, Human
acagccuggcuccuaacaggagggaagaugaagcagacugccgggagaucucugccagcaaacucuucucuucccacucauguuaggcccaguguugu

SEQ ID NO: 16540 - RNA, 66 nt, Human
aggugggcagaucacuugaggucaggaguucgagaccagccuggucaacauggugaaaccccgucu

SEQ ID NO: 16541 - RNA, 60 nt, Human
ggcccacgcguacacuccucugguucaaugcugccccagccugagcguacaguguggucc

SEQ ID NO: 16542 - RNA, 62 nt, Human
gcacuggggggcccagccuaccugccagacaguucccaggagugaggcuggucuuuccuggc

SEQ ID NO: 16543 - RNA, 69 nt, Human
gcgcacaguggcaguaccgggcaccgcacugacacaaguguaggggggaugggggaagccacagacagc

SEQ ID NO: 16544 - RNA, 61 nt, Human
gaugcaucugggaagggcauggagcacugcacccauauccccauacuucgcccuaagcauc

SEQ ID NO: 16545 - RNA, 64 nt, Human
gcugggauuacagacaugagccaccgcgcccggccugauugugguucuuaagacccuccccagc

SEQ ID NO: 16546 - RNA, 67 nt, Human
ucaugaagcuuccaugaaaagccaagaggacuggguccagagagcuucuggguagcugaacacguga

SEQ ID NO: 16547 - RNA, 90 nt, Human
uaagcagcaucauggagguuugaagaugccgcauuuggauuggaugaauuccaaauucugcuugcuugcuuuuuaauauugauaugcuua

SEQ ID NO: 16548 - RNA, 96 nt, Human
cugauuuaaaaauauggucuuuguuuuauaugauuaaaugguuuguuuucauagaugauauguuacucauuguaaagaccacauauuuuuauucag

SEQ ID NO: 16549 - RNA, 63 nt, Human
gcgguuuuaugucuuuagaaauguuuugccuuucuaagccuugugcuaaaggcguauaacggu

SEQ ID NO: 16550 - RNA, 80 nt, Human
cuucauccacuacucagucauccaaacuagugccauuacaaaugcggcacagucgaugaucugucaauguagagaugcag

SEQ ID NO: 16551 - RNA, 64 nt, Human
gggugugugcuuuggugguguugagaugcucagucauccaaaaccuauacuaaaguauaguccu

SEQ ID NO: 16552 - RNA, 87 nt, Human; identical to SEQ ID NO: 76

SEQ ID NO: 16553 - RNA, 78 nt, Human; identical to SEQ ID NO: 99

SEQ ID NO: 16554 - RNA, 80 nt, Human; identical to SEQ ID NO: 100

SEQ ID NO: 16555 - RNA, 78 nt, Human
ugugcccacaguguugagaacuauguggcagauaucgagguggauggaaagcagguagaguuggcuuugugggacaca

SEQ ID NO: 16556 - RNA, 75 nt, Human; identical to SEQ ID NO: 9063

SEQ ID NO: 16557 - RNA, 80 nt, Human; identical to SEQ ID NO: 9064

SEQ ID NO: 16558 - RNA, 82 nt, Human
gggcaacugugugagccugcuguccccaagccccgagggugacccgcgcuucagcuuccuccuccacuucuacacaguaccc

SEQ ID NO: 16559 - RNA, 60 nt, Human
uggacagccucucuuuccagcugggccucuaccucagcccacacuuccuccaggccucca

SEQ ID NO: 16560 - RNA, 91 nt, Human; identical to SEQ ID NO: 9253

SEQ ID NO: 16561 - RNA, 84 nt, Human
cugcauagacagguauucuuccaugcaggaaucuggaccaagaaaguggccccuauucagagaaggaaaaagccugcuucacag

SEQ ID NO: 16562 - RNA, 66 nt, Human
ggucuggggcaagaucacucgaucuccaggaugaggucgucaccuuccagugucauguccuugguc

SEQ ID NO: 16563 - RNA, 92 nt, Human
gacuugucguggccccggucugacuugucguggccccugucuaguuucucauggcugcgguccgacuugucauggccccuguccgacuuguc

SEQ ID NO: 16564 - RNA, 96 nt, Human
ggcuccgguccaacuuuucuucagcaucugcauuacugcuucugagcuucuuggccgauuugguaaccacggaguuggggucauguggggagagcc

SEQ ID NO: 16565 - RNA, 88 nt, Human
ugggagccauugccucucgcuuugucugcuucgggccacacgucucccguugaagcagaaaucaggucccuuucaguucuggcuccca

SEQ ID NO: 16566 - RNA, 94 nt, Human
auagccaguaccacacuaucuugguuacuguaguuuuacagcaaguuuugaaacugaaaacuaugaguccuccaauuuuguuaguuuuggcuau

SEQ ID NO: 16567 - RNA, 98 nt, Human
guccagauaauuccaggccaggcacgguggcucacgucuguaaucauagcacuuugggacuacaggcauaagccaucaugccuggcuuauuucuagac

SEQ ID NO: 16568 - RNA, 82 nt, Human
guuuuauuuaaacuuuuuuguaauucaaguaaaaaaaaagcuguuuuuuaacuacuguuacauaaaaaguggaaagugaggc

SEQ ID NO: 16569 - RNA, 74 nt, Human
aggccaggcacgguggcucacgucuguaaucauagcacuuugggacuacaggcauaagccaucaugccuggcuu

SEQ ID NO: 16570 - RNA, 82 nt, Human; identical to SEQ ID NO: 16568

SEQ ID NO: 16571 - RNA, 87 nt, Human
ggacacagccuccuuugcugcuagugucgauaucuucuuuaucaacaaguuuacgaucacugucaguuucccuggaguacuuaaucc

SEQ ID NO: 16572 - RNA, 85 nt, Human
uguccuugauuauuuguuaaaaucugcuagaaaaguaacaggaauguuaucaagccuuucuagacauuuugaacacaaucugaca

SEQ ID NO: 16573 - RNA, 66 nt, Human
ucggcucggggcaaacucgcucuuggacuugguugucuuuggucaggcaugugcccugagcaucga

SEQ ID NO: 16574 - RNA, 103 nt, Human; identical to SEQ ID NO: 294

SEQ ID NO: 16575 - RNA, 61 nt, Human
gcuuuaaauuuuuguacuuugcugaaaauucuuuuucccagggucuauaaaacauuaauuc

SEQ ID NO: 16576 - RNA, 94 nt, Human
ggguucuuuugucuuuaaaucaauaaguaaucuaggacuagcauuauguuugcuagaccuggcauuugcucgggacauaagguucaaaguuucc

SEQ ID NO: 16577 - RNA, 84 nt, Human
guuuuucgauguuuagauauuuuucuucggggaagcacaaguuucuuuucauggucccugaucaauuuuaaacaguuggaacac

SEQ ID NO: 16578 - RNA, 96 nt, Human
uuuauaauucaaauuacguuggcuugcucaauuaucaauucuguuacuuaaaacaaaacugacauucugagcuauuccacaguaaagaauuacaaa

SEQ ID NO: 16579 - RNA, 82 nt, Human
gcccuugugccaguugcucuugcagguguaggaggugcgacaaucuucccaccauugcucacaguccucuuugcacaggggc

SEQ ID NO: 16580 - RNA, 96 nt, Human
ggaaaggccaggcugcccagggcccagccccacucauggcugcagcauagaaccucgccaccuccucauugggguugcccugggcugggucgaacc

SEQ ID NO: 16581 - RNA, 76 nt, Human
ggagugcaguggcguggucucggcucgcugcaaccucugccucccagguucuagcgggucucaugccucggccucc

SEQ ID NO: 16582 - RNA, 63 nt, Human
ucuguguuugaagugucuauugggcuagcaugguuagaaauagaacauuaccaucauugcaga

SEQ ID NO: 16583 - RNA, 65 nt, Human
uguggcuauuuaaauucaaguuaguuaaaauuaaauacauuuuaaaauugagucccuuagucaua

SEQ ID NO: 16584 - RNA, 61 nt, Human
acguggccuggggggagcugugacuaccuggugguggacacugcccccgugggaccuccgu

SEQ ID NO: 16585 - RNA, 68 nt, Human
cggggacagcggucacugcugggccuuccacguccacccccacgaaggauaacagcaaaaugucccug

SEQ ID NO: 16586 - RNA, 69 nt, Human
cugagugcccggggccagguaucugcaaggaugagaaacgcacacguaaacugacgcccguccgcucgg

SEQ ID NO: 16587 - RNA, 62 nt, Human; identical to SEQ ID NO: 6784

SEQ ID NO: 16588 - RNA, 92 nt, Human; identical to SEQ ID NO: 6785

SEQ ID NO: 16589 - RNA, 69 nt, Human
aucucccaaacucauuucuucaucuacagucaccucccuguaucccugaacaccuggguauugggagau

SEQ ID NO: 16590 - RNA, 81 nt, Human
gaggaccaagacugacacagacucucuucuguuucccuuaucuccuuuccaaaguaagucugugaaucuacccugguccuu

SEQ ID NO: 16591 - RNA, 63 nt, Human
gggcccacaguagguacuccuccaggggcagcucuucuugguccauauccugcccaucugcuc

SEQ ID NO: 16592 - RNA, 113 nt, Human
aggugugucucaggaaggugguucugugcaugccugggugugguuaaggcguggccagaaggcuucccuggugcucucaguccaggcaaagcccagagcaucugagcacgucu

SEQ ID NO: 16593 - RNA, 60 nt, Human
guuugaacguggugaaacaggguguaguucuuuuccacauucugugucaucuagucgugc

SEQ ID NO: 16594 - RNA, 87 nt, Human
acgggggaacaacacaggagagaaauaguauauacagccacgacugcuguugccgcugacuauaaaacaaaccuguguugucucugu

SEQ ID NO: 16595 - RNA, 68 nt, Human
agcugccuugaggcuccuggacugcguccuuaccaacauucgguccaauggaaggccuuuuggcugcu

SEQ ID NO: 16596 - RNA, 61 nt, Human
ccaauugggggcuuggacuguaccguugccacugggcaugugguuuuaagcccgggagugg

SEQ ID NO: 16597 - RNA, 78 nt, Human; identical to SEQ ID NO: 13410

SEQ ID NO: 16598 - RNA, 76 nt, Human
cauccgcagccaggccucccugacaacccagcaggccaucggccugaagcauuacagugacuuccuggaacguaug

SEQ ID NO: 16599 - RNA, 65 nt, Human
cucauuaugcuuuuccuguagaacaaaacaaguaguuggguuuaucugcaauuaggguuuuugag

SEQ ID NO: 16600 - RNA, 87 nt, Human
gugaggguggcuggacaaguuggguagaccugcaaaagggccagcggcucucugcauggcucuggccauccggcacuuucccuugac

SEQ ID NO: 16601 - RNA, 97 nt, Human
gagcccggcacgccacaggacccguggcacauucccggugugccugagccgugcacgccacaggacccguggcacauucccggugugccuugagcuc

SEQ ID NO: 16602 - RNA, 76 nt, Human
ucaccagcuuccuggagcugcacugccuugagagccccacagagcugucucagagcagcgacagugaggccgguga

SEQ ID NO: 16603 - RNA, 67 nt, Human
uggccuguuugauuccugucagagguuugcugacccaagacaguaucgaaaaugcauauuaagguca

SEQ ID NO: 16604 - RNA, 73 nt, Human
gggcccauucuugcuucucaggcaccuuccguuuauuaauugccauugcuccugacaucacuaagaugggucc

SEQ ID NO: 16605 - RNA, 63 nt, Human
cauucuuaauucgagccacagucugggucacaagguggggagggcaggaaagaaucgggggug

SEQ ID NO: 16606 - RNA, 71 nt, Human
ggaggaaugcgggccuggccuggcauguggggcgacucuggucugggcgggcaggcgggcagcauuccucc

SEQ ID NO: 16607 - RNA, 73 nt, Human
uauuggauugccacacuggucugauugccugcaaguuuggugaggcugaggcaaagaaugguggcgucuggua

SEQ ID NO: 16608 - RNA, 79 nt, Human
gaugaucuucuacugaaaugccuaaagaagucacaggcuggcuucuguuuuauucagggauuuuuuuaaaaagucaauc

SEQ ID NO: 16609 - RNA, 76 nt, Human
uacaaagguaauauuguauuaaaaucauguuuaagauagcugcuuuuauguguauuuuauauugcaugcuuuugua

SEQ ID NO: 16610 - RNA, 94 nt, Human
gccuucucagaguacggcucaggcuugggggccggcugcuuggggguccgguugagguggaccccaagccugagccguccuucucagaguacgc

SEQ ID NO: 16611 - RNA, 67 nt, Human
ggagggcuggggcggugcaggcucugggacccaggggccaggguggcucuucucuccccagcccucc

SEQ ID NO: 16612 - RNA, 70 nt, Human
cacaaagaauagcaagaaugaaaauuacucagauacaccucugaauuugucuccugcuaaauauuuugug

SEQ ID NO: 16613 - RNA, 90 nt, Human
gcaguuguugauuaaauguauuagcaaauuuugaaugaaaugcaaauuucauuagaaauuuagccauuagauaaagucagaaaguacugu

SEQ ID NO: 16614 - RNA, 66 nt, Human
gcucaaaaaauuuagccgcugcguuaagccaugaugguaacggaggcaguggaaccaaucgugagc

SEQ ID NO: 16615 - RNA, 67 nt, Human
gucauucaagaguugcuuguggacuacuaugugaaagauacaagacacaaauguaacuucugaggac

SEQ ID NO: 16616 - RNA, 67 nt, Human
acucacgaagauaguauuggaaccucccaacauaaaaguugguaggacuccgagaugaccaaggagu

SEQ ID NO: 16617 - RNA, 62 nt, Human
ggacccccucggucuaccauguuggcaugucaacaguuucagccaaugugcccgugaagucc

SEQ ID NO: 16618 - RNA, 60 nt, Human
gggauucugugacaggcagcugaaccuacggcugcugaagaaacacaauuacaauauccu

SEQ ID NO: 16619 - RNA, 85 nt, Human
gaccuguucuguuuuaucuucugucagcuccucuggugcuaugccugugguacugauugagcuaaagaagaaaagagaggagguu

SEQ ID NO: 16620 - RNA, 61 nt, Human; identical to SEQ ID NO: 544

SEQ ID NO: 16621 - RNA, 64 nt, Human
gucuucucuaagaaauuuuagaauggacauugaacaaaguuuauacaaauuugagggagaagau

SEQ ID NO: 16622 - RNA, 72 nt, Human
gcccagcccucaccccuaagggggggccgaacgugcacacguguggccccagcggugaggacaaaacggggc

SEQ ID NO: 16623 - RNA, 62 nt, Human
auggugacaacaugcuggagccaagugcuaaauggcuugguucacggauggcaagucaccgu

SEQ ID NO: 16624 - RNA, 71 nt, Human
guggcacacaagugugagacaggcggguugucucaaaagcccggcuauugcguugcaccacuuugcgccac

SEQ ID NO: 16625 - RNA, 83 nt, Human
agucuuacuauguugcccaggcugguccugaacucuuggccucgagagauccugcugccucaaccucccaaguagcuaagauu

SEQ ID NO: 16626 - RNA, 74 nt, Human
cacucuguaacccaggcuagagugcaguggugcaaucauagcuuacuaaagccucaaacuccuggguucaagug

SEQ ID NO: 16627 - RNA, 65 nt, Human
gccacgcgcaggucggggcgguacuuguucuugcggaucaugugucugaugcugcugagcguggc

SEQ ID NO: 16628 - RNA, 100 nt, Human
ccgugcaccucaucgacaagcuuccacugcccgucaccaucaagagccaccucaaguccuucucgauggccaacggcaugaacgcggucaugaugcacgg

SEQ ID NO: 16629 - RNA, 85 nt, Human
cucuugguguaugacaucaccaaccgcugguccuuugacggcaucgaccgcuggaucaaggagaucgaugagcaugcacccggag

SEQ ID NO: 16630 - RNA, 68 nt, Human; identical to SEQ ID NO: 6117

SEQ ID NO: 16631 - RNA, 77 nt, Human
uaugguguagcauauuuacauagcauuuuauaugguaauggguauuauaagaaaucuagagaugauuuaacauuaua

SEQ ID NO: 16632 - RNA, 69 nt, Human
guguuucucccucaaucaaaaguucaaaucagcuuuauguuaagcagcugggaggagaggggggaagac

SEQ ID NO: 16633 - RNA, 91 nt, Human
gugaagacacgggagaaaauccaccauaauaaaacugacauucaauuuucaacuuuaguuauuuaacacagauuuucuuuauucucuuuau

SEQ ID NO: 16634 - RNA, 79 nt, Human
ugagacgggguuuggcucugucgcgcagagaucgugccacugcaauccagccugggcgacagagcgagacucugucuca

SEQ ID NO: 16635 - RNA, 78 nt, Human
gaugcacuuguccguucccauagccugcugcuaugauccccugccacagcugcacagaggggcacggaacuccaaauc

SEQ ID NO: 16636 - RNA, 80 nt, Human
gcagacacacagaagccgaguauugccgucaccaugucagcacacaauccuguccugggcagcucgguggcaaugucugu

SEQ ID NO: 16637 - RNA, 63 nt, Human
caagagcugcccaagcggcugguaucugcuacaucaccagcacauuugccagcuguagccuug

SEQ ID NO: 16638 - RNA, 77 nt, Human
guuucagagcauaacucgauugcccaucauccugaaagggauuuugacaaaagaggaugcagaguuagcugugaagc

SEQ ID NO: 16639 - RNA, 125 nt, Human
ucuaugugcauccagaccugcagcugaacaaacaguugauccagaggguagaaucccuagguuucaaagcuuugguaauaacuuuggauacaccuguauguggcaacaggcgacaugacauucga

SEQ ID NO: 16640 - RNA, 67 nt, Human
cccaauacaucauagagggcagucagcucaauuagggcuaaauggcaaacuuucuucauguccuggg

SEQ ID NO: 16641 - RNA, 69 nt, Human
gcugucaauggaacgcaaaaaagaccagaaucuuuuguuuugauuuucacagcuuuuuguuguuucagc

SEQ ID NO: 16642 - RNA, 71 nt, Human
guugcugcuucuugguuggaagauucuggacagccugaaaggcuuugagauacuccacacugagcaguggc

SEQ ID NO: 16643 - RNA, 80 nt, Human
cccugacagaaugguggugcgggauuguuaaagguuuuuaacccuuccaauuaugaccgguuauaccaccucccgaaggg

SEQ ID NO: 16644 - RNA, 67 nt, Human
cggcccguaggcgucuggcagcccggcgccaucuucaucgagcgccauggccgcagccugcgggccg

SEQ ID NO: 16645 - RNA, 61 nt, Human
ggacuuagauaucgcauacaaaauuuggaaaaauguggugagcugugaaggcuaugagucc

SEQ ID NO: 16646 - RNA, 74 nt, Human
ucuuauaccccaaaagucauacagugucagaacaaaggcugggauggguaugauguaacagugggaauguaaga

SEQ ID NO: 16647 - RNA, 68 nt, Human
ggguggugcagcuggcgaccugggcgggagcugauguucuaguuugaggacugugcagcuggagaccc

SEQ ID NO: 16648 - RNA, 66 nt, Human
aggucagugcauggaaaguuacuaacaggaaacaucaaguuagggggacucgugcuaaacugacuu

SEQ ID NO: 16649 - RNA, 78 nt, Human
uguaagucaugacuguuaucacaggggagagagauuaggcucaacucugaauacagugaagacaauuggggauuuaua

SEQ ID NO: 16650 - RNA, 89 nt, Human
acuguuuaaaguuaacacuuguuuaaauuuuuuuacacuauagcauuuaugcaaugguuuacagaauucauggaguuauuuuuaucagu

SEQ ID NO: 16651 - RNA, 60 nt, Human
ggcgggcacggggcguaggagcuggcuggcggccggcucugcauguucuuguugccuguc

SEQ ID NO: 16652 - RNA, 71 nt, Human
uuacaugagaauguuauuugaauggaauuuucuuaacccagaagguaguauuuauaaucauuuacuuguag

SEQ ID NO: 16653 - RNA, 96 nt, Human
gaacacuguuugaguacguacuguaugcagaccaguugcugugagauaaucuauacuacuguuccugucucaguaaaauuagaugggcaaguguuc

SEQ ID NO: 16654 - RNA, 107 nt, Human
uaaauaagucauauagguaauuauuguccaacacauguuuaaguaaaguauaugauaauuggauccauguguaugugggaaaagcuguaccuguuuuuguuuauuug

SEQ ID NO: 16655 - RNA, 69 nt, Human
gcaucuucaucuuggucaccacgccagagaggauccgcccucgaauggacacauuaccagugaaggggc

SEQ ID NO: 16656 - RNA, 76 nt, Human; identical to SEQ ID NO: 758

SEQ ID NO: 16657 - RNA, 94 nt, Human; identical to SEQ ID NO: 6788

SEQ ID NO: 16658 - RNA, 66 nt, Human; identical to SEQ ID NO: 1983

SEQ ID NO: 16659 - RNA, 69 nt, Human
gagaaagguacacaguugcccgguugggaaugugcuuggcgcugacccugcgggcaucugacuggucuu

SEQ ID NO: 16660 - RNA, 81 nt, Human
ucagcauuccuuacuaugugauaaaauacauauagaauauaagauauacuauauacauuuuguccauaaacguuaugcuga

SEQ ID NO: 16661 - RNA, 70 nt, Human; identical to SEQ ID NO: 1713

SEQ ID NO: 16662 - RNA, 81 nt, Human; identical to SEQ ID NO: 1712

SEQ ID NO: 16663 - RNA, 67 nt, Human
ggaagcgagcgagcgcuucgcugccggcuacauccagugcaugcacgaggugcacacguucgugucc

SEQ ID NO: 16664 - RNA, 76 nt, Human
ggagugucuuggaggccuuggugaccaaugccagcagaguccugcggggugugggcccggccucccuggauucucu

SEQ ID NO: 16665 - RNA, 70 nt, Human
ggcugaacugagucaggcuccugcugaggggcccgauuggugcccgcagccugggcagcugaccacagcc

SEQ ID NO: 16666 - RNA, 86 nt, Human
gucguguccuacccaugcgcgucccggcggagcgggcaugcgccaccgcggcgccuggcgggacgugugggccgugaggauaggac

SEQ ID NO: 16667 - RNA, 71 nt, Human
gcgcagcacgcuuuccgcaccuucgacaagaacggcgacggcaccaucgacuuccgggaguucaucugcgc

SEQ ID NO: 16668 - RNA, 60 nt, Human
ggacaagaucuucaagaagauggaccaggauaaggacgaccagauuacauggaggaguuc

SEQ ID NO: 16669 - RNA, 78 nt, Human
uuugagauguacgaccuggacggcgacgggcgcaucacgcgccuggagaugcuggagaucaucgaggcaaucuacaag

SEQ ID NO: 16670 - RNA, 75 nt, Human; identical to SEQ ID NO: 74

SEQ ID NO: 16671 - RNA, 87 nt, Human; identical to SEQ ID NO: 76

SEQ ID NO: 16672 - RNA, 71 nt, Human; identical to SEQ ID NO: 77

SEQ ID NO: 16673 - RNA, 61 nt, Human
cugaagcugaagggccccugguuuggacaugccucuuucccgggcucucuucuggcuccag

SEQ ID NO: 16674 - RNA, 69 nt, Human
gagcaaaucaacaugaggcaugaucugaguuauucugaagaauuagagaggcugaaugguaccuugcuu

SEQ ID NO: 16675 - RNA, 60 nt, Human
agcagccucuugucacagcuugacuccuagguagugugccuagugaccaagagggcugcu

SEQ ID NO: 16676 - RNA, 101 nt, Human
ugaggcaggagaauugcuugaacccgggaggcggaggcugcagugagccaagaucgcuccacuguacuccagccugggcgacagagcaagacuccgucuca

SEQ ID NO: 16677 - RNA, 74 nt, Human
cuggauucagccugggccugggcagugggcaggggcugugcgccacccccgguaacaggcccaggcgguuccag

SEQ ID NO: 16678 - RNA, 66 nt, Human
gcaggugaagccgcugccugcgccccuggauggacagcggaagaagcgaggcggcgcagguaccgc

SEQ ID NO: 16679 - RNA, 83 nt, Human
gccuagccuggccucuucuacgugguagagugcuuagagaucacgccagcaccuccauccacucuaagugggcgggcuguggc

SEQ ID NO: 16680 - RNA, 66 nt, Human
gcugacaggagcuuugguagucacacaugccugacggggugcacaggaccacagucucugaaaggc

SEQ ID NO: 16681 - RNA, 66 nt, Human
aacuggaucacacugcauaugucccacaaaagaaagcacaauguacaaaaugugcauguuucaguu

SEQ ID NO: 16682 - RNA, 66 nt, Human
uuuuugucacuguaacuauuuuuauuacauuacaauaauuaggaguaguacaguucaugacaaaaa

SEQ ID NO: 16683 - RNA, 68 nt, Human
gggggagucagguugucagcucagcaagugugcagaaaacacuuggaagagggucggcuuuauccucc

SEQ ID NO: 16684 - RNA, 82 nt, Human
uuguccgcucccagauguguaguacugauuaugaccagauucuaccugauuguuauucuugggcugaagaggggggggagaa

SEQ ID NO: 16685 - RNA, 70 nt, Human
accugcgacugagcgaugccgucggggaccagguacuggccgugguuuaacggguccugcgguggugggu

SEQ ID NO: 16686 - RNA, 68 nt, Human
gcaucuuacuuuauuuuaaaauuaucugccucccuguagguaucauuuuuugaaggggguuaaccugc

SEQ ID NO: 16687 - RNA, 87 nt, Human; identical to SEQ ID NO: 76

SEQ ID NO: 16688 - RNA, 65 nt, Human
uacucaggggcuuauuaugcaccgugguaauacucagaccaguuacuccacagaaguuccgagua

SEQ ID NO: 16689 - RNA, 67 nt, Human
aggacugguucgcuugguuuauagcagugacagccguucaugcacagcugcuucccaacccaguccu

SEQ ID NO: 16690 - RNA, 79 nt, Human
ugucugauaaccacacuaauucaucugcuuccagguuacagcuccgucuagcagcaagguugaaaagguuaaaaaggca

SEQ ID NO: 16691 - RNA, 63 nt, Human
aguuucccaauauguagaagaagccauuaagauggcuuacugugacaagcaaauguggaaacu

SEQ ID NO: 16692 - RNA, 76 nt, Human
ggaagcaaagaugacuuccucauauaugauagauguggccgucugguauaucaucuggguugccuuuuugccuucc

SEQ ID NO: 16693 - RNA, 64 nt, Human; identical to SEQ ID NO: 1777

SEQ ID NO: 16694 - RNA, 64 nt, Human
uucuuauauggucgguaaucaucaaggaaucucuucucgauuuaaaauacacacaucuuaagaa

SEQ ID NO: 16695 - RNA, 62 nt, Human
cgggaaauuguccauuugaccuuagccggauggcagcaaagagaaggugggcaaguucugug

SEQ ID NO: 16696 - RNA, 67 nt, Human
guaucugggagucaggaugguccagcuaugugaugcuuaggaucaugguuaacguuucccacgguau

SEQ ID NO: 16697 - RNA, 75 nt, Human
guccugugaguuuacuggggauauucuccguaacaccggugucugaggauaugcuuggucggguauucaauggau

SEQ ID NO: 16698 - RNA, 67 nt, Human
auuuuuccuuugauuuucucuucucagucauaaguggaaauggaagggauucauucaaagguaaaau

SEQ ID NO: 16699 - RNA, 65 nt, Human
gaucuaucacugggacagaaggaagaugaaaacauuuacuucagacuguuuacuacuguucgauu

SEQ ID NO: 16700 - RNA, 105 nt, Human
gcaaagucuucccagaggugaaguauucaggcugaucuggaacucuggcuggauaauggagaagagcaaucugggcacuguuaccacugggcagaaugacauggc

SEQ ID NO: 16701 - RNA, 86 nt, Human; identical to SEQ ID NO: 9719

SEQ ID NO: 16702 - RNA, 75 nt, Human
uacgggcuggcgcgaccuuucaggccugugcugccccgccugcggcugcgagggguugagaacgccuagcccgug

SEQ ID NO: 16703 - RNA, 81 nt, Human
ccgugcuccugugauuaaugcugugagcaacaggcaugguggccagugccugugcucgaaccgugacaaucacacauacgg

SEQ ID NO: 16704 - RNA, 88 nt, Human
gguggcccaagcguugccugcagguugauggcaggggcacgucaaggcguaacccuggaucugcgcauugcuggaccuaugggccacu

SEQ ID NO: 16705 - RNA, 84 nt, Human
cccgaucugccuccagucucggacuugguuguugcgcgcuccggcuccggcugagcugggagaguuggaggagguguuuucggg

SEQ ID NO: 16706 - RNA, 60 nt, Human
cuuggugacaaauauguuguguaaaguucaggggagaguccgccacauguuguucccagg

SEQ ID NO: 16707 - RNA, 75 nt, Human
agugugauaucaagaaagggcuucaccaggaugaucaaugcaaauggauauggagcuuucuuggaaugaaacauu

SEQ ID NO: 16708 - RNA, 74 nt, Human
cagaagucucccugcugaaucgaaaggaagugcuacaauauucuuucaaauucaucgcaguugagagaaaacug

SEQ ID NO: 16709 - RNA, 62 nt, Human
cuucucuuaaucugccuuuggucuguugauuuucagugaacaaucagagaguaaaggggaag

SEQ ID NO: 16710 - RNA, 118 nt, Human
auuuaacugggauucacugucagcacaacauaaaugaaugcgaaguugagccuugcaaaaaugguggaacuauguacagaucuuguugcuaacuauuccugugagugcccaggcgaau

SEQ ID NO: 16711 - RNA, 62 nt, Human
gagcucuuuuuggacuccaaaaaugguaucccuacuaugcacgucuuaauaagaaggggcuu

SEQ ID NO: 16712 - RNA, 61 nt, Human
agugcaaacacaucuucuguuuaacccauugguauacacagaauauuccugugcccacacu

SEQ ID NO: 16713 - RNA, 80 nt, Human
augucaaucuauaauuuuaaccauuuauccaagauucuacuaaguguaaaauuauuuaauaauggcuauuaaauugauau

SEQ ID NO: 16714 - RNA, 60 nt, Human
ucgaacaacugaaagaacaagcagcaacuggaaaacagcuagaaaaaaaucaguuggaga

SEQ ID NO: 16715 - RNA, 98 nt, Human
gaggcagagaauugcuugaacccaggaggcagaguuugcagugagccaagaucacaccacugcacuccagcuuggacgacagagcgagacucugucuc

SEQ ID NO: 16716 - RNA, 64 nt, Human
accacgcagaagaggugcagugugauggcaggagcuuccaccgcugcugcuuucucugcauggu

SEQ ID NO: 16717 - RNA, 74 nt, Human
gccacagcccuuaggggaguccagggccagcuggucgaaagugaggaucuugcccccugcccugaggaugcggc

SEQ ID NO: 16718 - RNA, 64 nt, Human; identical to SEQ ID NO: 1375

SEQ ID NO: 16719 - RNA, 61 nt, Human; identical to SEQ ID NO: 2204

SEQ ID NO: 16720 - RNA, 80 nt, Human; identical to SEQ ID NO: 12407

SEQ ID NO: 16721 - RNA, 85 nt, Human
aagcagcuucaauucugccgggacuucucccgccuuuuuuuuccugcggcgggagaaguagaugaagccagugauuaggguguuu

SEQ ID NO: 16722 - RNA, 67 nt, Human
ccgagauggaggccaaugucgugggcugcuacuggcccaacccccuggcccagggcuucaucaccgg

SEQ ID NO: 16723 - RNA, 92 nt, Human
ugggaaggcuuucgcagacaugaugggcaagguggacgucugaaaguggugcaaccuguccgaguucaucguguacuaugagaguuucacca

SEQ ID NO: 16724 - RNA, 91 nt, Human
cucuagcgugauagucucuucuggguggcugcauccucaggcaggcuccccuccuagucccacauccaggaugacaccuuaacaguuaggg

SEQ ID NO: 16725 - RNA, 66 nt, Human
cuccagaguagcguaggacuucaggcaugcaccaccaugccuggguaacuugcguauuuucgguag

SEQ ID NO: 16726 - RNA, 65 nt, Human
gaacgaccgugcucguuaucuuuauccguucguguucaugagaguaaggucucugcacaucguuc

SEQ ID NO: 16727 - RNA, 60 nt, Human
auuuuaaaauuagcucaucaauuucugcaaaaaaauaaagaagccagcugauauuuugau

SEQ ID NO: 16728 - RNA, 114 nt, Human
uaacuauuuaaguuuuccaaauuuaugaacacaggaugucuucccauuuauuuaagucgucucuaauuucuuucaaugauauuuuguaguuuucaauguagaauucuucuguug

SEQ ID NO: 16729 - RNA, 106 nt, Human; identical to SEQ ID NO: 14525

SEQ ID NO: 16730 - RNA, 106 nt, Human
gcauauauuucagcuuaugcugaagaauuagcuguauguagcgcguugaaucauaucuugcagggccauauacggguacaucuucagcauaagcugaaauauaugc

SEQ ID NO: 16731 - RNA, 63 nt, Human
ggcucgaucacagcucaccaccgccucaaccuccugggcucaagugaucuuccugucucagcc

SEQ ID NO: 16732 - RNA, 73 nt, Human
aguuuauccacguuacaaaagcauauuugucucuccucugaguaagaaugcuguguuccuucgcuggacaacu

SEQ ID NO: 16733 - RNA, 64 nt, Human
ugucaccauccagcaugaguuucugaauaauuucucucacuuuauauccuguuggcuggcgaca

SEQ ID NO: 16734 - RNA, 90 nt, Human
aaacuuaacaaugaaggcagaagaagaacauaguagaaacaauuacuacaaacauuuuagcuuccaauuucauauaauguuauacaguuu

SEQ ID NO: 16735 - RNA, 62 nt, Human
uuuuuuugguauuuagaaauuuuuuuaauugaaauuuugaaaauuuuuugacucuaaaaagg

SEQ ID NO: 16736 - RNA, 94 nt, Human
ccuuuaagauauccaucuuuuucuuuuuaacccuaaucuuucacuugaaagauuuuauuguauaaaaaguuucacaggucaauaaacuuagagg

SEQ ID NO: 16737 - RNA, 101 nt, Human
cacgaggucauuuaaaaguucauuuugagggaauaacauguaauauaauuugaaauaaagguauaguaaccuuaaaaagaacauuauaacugauuguugug

SEQ ID NO: 16738 - RNA, 64 nt, Human
ggugaauuuguuaaaaugaguaacuuugauaaaguuuuucaugcacaggcaaaauguauucacu

SEQ ID NO: 16739 - RNA, 60 nt, Human
uaaacaugauguugagauuauuauauacuguauuuucuucuaaauuaacccuaauguuua

SEQ ID NO: 16740 - RNA, 113 nt, Human
gucaauuuuuauucuuuucauaaaaccucuuuguaaacauguaccuuuucuucccaucaaaaaugcauuaacaagaucaugcuuauaguuagucagcacaagaaaaaaacgac

SEQ ID NO: 16741 - RNA, 61 nt, Human
uauauguacaagcaagaagucaauuuuuauucuuuucauaaaaccucuuuguaaacaugua

SEQ ID NO: 16742 - RNA, 77 nt, Human
uuuggggauuuuuuuuuaaccuuuauucauucagaaugcaauucugggccacucuacaaccaagagaaaacccuaaa

SEQ ID NO: 16743 - RNA, 69 nt, Human; identical to SEQ ID NO: 10301

SEQ ID NO: 16744 - RNA, 70 nt, Human
auaaauaaugaccuaauuucauuuaaaaaaugguuucagcaaauaugaaaauagaaaguccguuauuugu

SEQ ID NO: 16745 - RNA, 85 nt, Human
cccucuccccagcucuccucccccuggccccgucgccccgcccucgccgggcugggcugcggggucaggggccgagcggagaggg

SEQ ID NO: 16746 - RNA, 71 nt, Human
gcccucgaggcccccgcagucccaucauucaguuccguagggucaccggcgcggcaguggccucgcagggc

SEQ ID NO: 16747 - RNA, 60 nt, Human
guauaaaugugugugugauauauaugugugguguguauguguaguguguauagugugugc

SEQ ID NO: 16748 - RNA, 64 nt, Human
auucuuaaucuuagugaaauucugaaauacuugauaauucuuuaaaagcugucugguuaagaau

SEQ ID NO: 16749 - RNA, 87 nt, Human
ggaaaugguuauugaaucagauagaccaguucuguugagggucuuaaagagucucaauuuucucaucuauaaaaccaauaccuuucc

SEQ ID NO: 16750 - RNA, 70 nt, Human; identical to SEQ ID NO: 3865

SEQ ID NO: 16751 - RNA, 62 nt, Human
gguguuaacuaaugcacucaauagugaucacaaagaauacaggaagugccaaguucaaugcc

SEQ ID NO: 16752 - RNA, 61 nt, Human
accguaaccuuuguacuuguuuuccuccuggggaaagugucagaacagugcaaggacuggu

SEQ ID NO: 16753 - RNA, 65 nt, Human
aguguaaaagcuagagauuuauuguuauuuuaugauuaauaaauugucaaauuaguuaugacacu

SEQ ID NO: 16754 - RNA, 68 nt, Human
gaggcauaaagcagaaagagcaaagacacaugaauacccuucuuaacaaucucuucuacuuaugccuc

SEQ ID NO: 16755 - RNA, 66 nt, Human
gagacgggguuucaccauguuagcaaugauggucucuaucuccugaccuugugauccaccugccuc

SEQ ID NO: 16756 - RNA, 128 nt, Human
gccuccuguaacagucgccuuuuguguucugcuggcauuuguuugaacacaguccacagguucagugguugcaucucuaaucagcugccaguccccaucccagacauucuuugcaucuaagcugaggu

SEQ ID NO: 16757 - RNA, 92 nt, Human; identical to SEQ ID NO: 3187

SEQ ID NO: 16758 - RNA, 60 nt, Human; identical to SEQ ID NO: 3188

SEQ ID NO: 16759 - RNA, 75 nt, Human
acucaccauuuuacuacuucuaucuuuuugacuuuccaagaauguccuagaguuggagugguacaguaugugggu

SEQ ID NO: 16760 - RNA, 60 nt, Human
cuaaaguccauaguuuacauuagaguucauucuuugaguuucacggauuauggguuuugg

SEQ ID NO: 16761 - RNA, 65 nt, Human
agcgccggcuaugccccuguauuggauugccacacgggucacauugcaugcaaguuugcugagcu

SEQ ID NO: 16762 - RNA, 65 nt, Human
uucuugaagucugggugaugcugccauugugauaugguuccuggcaagcccaugugugucgagag

SEQ ID NO: 16763 - RNA, 63 nt, Human
guaaaucgcgaugugugcagcccguugcucauucugugucuugcaccguugccagccauuugc

SEQ ID NO: 16764 - RNA, 86 nt, Human; identical to SEQ ID NO: 7823

SEQ ID NO: 16765 - RNA, 69 nt, Human
gcgucgggaucucggccccgggaggcguuccgucgggcgcagccgcgaagaugccguuggaacugacgc

SEQ ID NO: 16766 - RNA, 79 nt, Human
ucaguugcuaugaagccagcuaccagccccucgaccucgacagaugcgacagggacuugucgcugaucaaugugauuga

SEQ ID NO: 16767 - RNA, 71 nt, Human
cgcuguaaagaaguucuugaguggcguguaaaauacagcaaauacaaaccauuaucaaaaccuaaaaagug

SEQ ID NO: 16768 - RNA, 91 nt, Human
gacagugaaggauucuuaucacauaaugugcaggccaugugccugugaacuugaaguuugcgcaaaauguggaaagaaagaagacauuguu

SEQ ID NO: 16769 - RNA, 65 nt, Human
ggugaauaauuuuucaauugggaaucuuuucauaauucaaaauaguuccugaaaauuaaugcauc

SEQ ID NO: 16770 - RNA, 66 nt, Human
ucaaugucuucuacuuaagcugggugcauuuaaaaugcaacacaauucuuugaaaggagacuauga

SEQ ID NO: 16771 - RNA, 70 nt, Human
ggcucucggccuuggcaacggccgucgucaugguuacuggccccuaggcgccgauggccgaggccgcgcc

SEQ ID NO: 16772 - RNA, 76 nt, Human; identical to SEQ ID NO: 8409

SEQ ID NO: 16773 - RNA, 94 nt, Human
cauaaaaaucccuguguccuaaagucauggcgugcucuauuucauggucauuuguagagcacagcagcacugugccugucagggaaaaggugug

SEQ ID NO: 16774 - RNA, 88 nt, Human; identical to SEQ ID NO: 8410

SEQ ID NO: 16775 - RNA, 96 nt, Human
ggacaaagggucaauccacaaauuugucccuuaccugauugcuggcauccaacacucaugccaggacauugugugccaagagcuugacccaagucc

SEQ ID NO: 16776 - RNA, 75 nt, Human
ucauugcugauggaggaauccaaaaugugggucauauugcgaaagccuuggcccuuggggccuccacagucauga

SEQ ID NO: 16777 - RNA, 79 nt, Human; identical to SEQ ID NO: 1810

SEQ ID NO: 16778 - RNA, 61 nt, Human
acuccaccugaagauuaucggcuauaagagaauaagaauugccgacacauaacagugaagu

SEQ ID NO: 16779 - RNA, 68 nt, Human
cccuugacuuaacuuuuuaaccaaguuguuuauuccaaagaguguggaauuuugguuggggugggggg

SEQ ID NO: 16780 - RNA, 64 nt, Human
ucuugauguucagacauuuauguguugaaaauuuuuuaaauauuuaaauguacuuauauuaaga

SEQ ID NO: 16781 - RNA, 65 nt, Human
cgggagagacucuuuggaguucagagagauaggugagacucuaacugccaaagaguaucauuucg

SEQ ID NO: 16782 - RNA, 66 nt, Human
ccaauuacuucauacccuuuuuggagacugauuaugcacagcugcaacaucuuaugaaaccuaugg

SEQ ID NO: 16783 - RNA, 113 nt, Human
uuggucauuaucuugagcagugaccauuacuagaucauguuaaauuagcgaaugcuguuacugaauacgcuaacccauguguugcugaugagucaacugacaauugugaccaa

SEQ ID NO: 16784 - RNA, 84 nt, Human
gauucccccaggugggcgaagcggugggaagaaaccuucgguugguggaggcgguuccagucuguugaaaccccuuggggaauu

SEQ ID NO: 16785 - RNA, 91 nt, Human
gcacucuguguccagacuuuaacuaaaggcggauuucccgagacuacgggugugcuguuagaaggguucugggucugugcacuaaagaggu

SEQ ID NO: 16786 - RNA, 110 nt, Human
gcacugaagauggcggcugcuguaggacgguugcuccgagcgucgguugcccgacaugugagugccauuccuuggggcauuucugccacugcagcccucaggccugcugc

SEQ ID NO: 16787 - RNA, 68 nt, Human
guggauucccacuuuagccaucugugccuggauaaauacaccaagaaagaauggugguugugggccac

SEQ ID NO: 16788 - RNA, 65 nt, Human
ccaggaaccauucaaguaaauggccauggaggacagccaucaaaacuugugaagaggggaccugg

SEQ ID NO: 16789 - RNA, 79 nt, Human; identical to SEQ ID NO: 1810

SEQ ID NO: 16790 - RNA, 60 nt, Human
cagccuugugugaaaaugccuucuuccucuuuaagaaaaaggacaauuuuuaagcugcug

SEQ ID NO: 16791 - RNA, 92 nt, Human
gcagguauguuacgaaguuuagggggaauuugcuaagccgggagcauauggcuuggcgugcaagugcuggaugaaacuuauaacaugccugc

SEQ ID NO: 16792 - RNA, 71 nt, Human
ggaauggugacaacaugcuuggagccaagugcuaacaugccuugguuccagggauggcaagucaccguaac

SEQ ID NO: 16793 - RNA, 79 nt, Human; identical to SEQ ID NO: 1810

SEQ ID NO: 16794 - RNA, 75 nt, Human
gcauccaggacugcgggacaagauucuuggugccaccauugagaacuccaggauuguccugcagaucgacaaugc

SEQ ID NO: 16795 - RNA, 67 nt, Human
ggaggacaaugacacauuuucucugguggucuuguaauuggggaugauguaaacaugagucuaaucu

SEQ ID NO: 16796 - RNA, 74 nt, Human
uacgggaaauacauaaaucauacuauaugacgauagcccagaagauugcauggaggaucuuuguguuuccugua

SEQ ID NO: 16797 - RNA, 79 nt, Human
uggaguuauuguugaccaggcaucaagaaaggagggauaugcaucagaaaucauuuugccugaaauaagcacaacucca

SEQ ID NO: 16798 - RNA, 61 nt, Human
ggcugggccugagacaugggcuggccuccagguggagggguccagcaggcagguacaagcc

SEQ ID NO: 16799 - RNA, 66 nt, Human
gaggcagguggaucaccaagucaggaguucaagaccagccuggcaaagauggugaaacccugucuc

SEQ ID NO: 16800 - RNA, 61 nt, Human
gcacuucccacacuaaaauaacccaguuuuucucaaucuuuugguauuuuuggagaggugu

SEQ ID NO: 16801 - RNA, 85 nt, Human
auguggaauuuucagaaaaagauugucugcucugguuaaacuuccuucuggagaggauuacaauuugaaacuggaacuucuucau

SEQ ID NO: 16802 - RNA, 69 nt, Human
ggggaccaaagaacucugaacgguuuuuugucaaucgaaugugcacaauaaaagguucggaucgucccc

SEQ ID NO: 16803 - RNA, 80 nt, Human
guuuacaagacaugauuuugcuggcuuuacaaaaggacauucuauuuauuuuuccaguaauucuucauugucccauaagc

SEQ ID NO: 16804 - RNA, 82 nt, Human; identical to SEQ ID NO: 1523

SEQ ID NO: 16805 - RNA, 73 nt, Human
auucuauaaugaagauguuucaugaacuggggcauguauuugucaagaaacuucuuaucuucaugaacugaau

SEQ ID NO: 16806 - RNA, 76 nt, Human; identical to SEQ ID NO: 10891

SEQ ID NO: 16807 - RNA, 87 nt, Human
aggauccgcguauaggcugaagaaaaagacguucaguuaacagugcgcgcuguagaacuuuaacacaagucuucagguggaauuccu

SEQ ID NO: 16808 - RNA, 61 nt, Human; identical to SEQ ID NO: 7082

SEQ ID NO: 16809 - RNA, 67 nt, Human
uaccguuuacaguuuagugagguggucugcauucucgcaaacgacuuacaaaguacaagaaauggug

SEQ ID NO: 16810 - RNA, 76 nt, Human
cauuuuuaguuuuguuaaaaaaaaauucugacaaaucagaaauggggguucaggagugguggugaugcaaaagaug

SEQ ID NO: 16811 - RNA, 82 nt, Human
ccguguccuguucaacugagaagaaaacguagcauggucagaauaaggcaugaaaaggggaaagugaggcaggaacacacgg

SEQ ID NO: 16812 - RNA, 77 nt, Human
gacuauucaggcgcaguacaaguuggggcacugcauccuuuguggauggauuuccguugcuguguuccucacaaguc

SEQ ID NO: 16813 - RNA, 75 nt, Human
uuuuuuuuuuugaaguuuuugcuauaaaacauuuaauguuaaccuacaauacaauguaaacuuuuaugaaaaaaa

SEQ ID NO: 16814 - RNA, 62 nt, Human
cgacuaugacuaccugcggaagcucuucaccgaccucuucgaccgcaguggcuucguguucg

SEQ ID NO: 16815 - RNA, 69 nt, Human
ggagaaagagaaaaucgcugcagcgacacaagugacccugggcgcgugcagcccccugaaucuuucucc

SEQ ID NO: 16816 - RNA, 66 nt, Human
gcagguauuuucauagacaaauuaaagauuaaauaagauaucauggcauaagugaaaauauuuagc

SEQ ID NO: 16817 - RNA, 61 nt, Human
uagguggcugaauucaaaauuaauuuuuuaaauuaaugaguuuucaacuagaaguccccua

SEQ ID NO: 16818 - RNA, 62 nt, Human
acuggcaucucauuuacaaaguauuuuugugaaauacucuccauuggcuuugcuugcucagu

SEQ ID NO: 16819 - RNA, 67 nt, Human
cagcacacuaccagaagacagcagaaaugaaaagcauuuacuuguggcuggauuauuuguaaugcug

SEQ ID NO: 16820 - RNA, 72 nt, Human
cgggggggcgccggugcugaaacaggguccccgcgccggggcgggggaaacccaaagcggggcgcccccccg

SEQ ID NO: 16821 - RNA, 88 nt, Human
guuuuggccaggggcgguccccagaaggaugccagggagacucacucaauccuuggucagcccugcggauccugcgccgagccaaugc

SEQ ID NO: 16822 - RNA, 62 nt, Human
uuucuguuaauaacacaaaauauuuuuuuaagaaaaaaagaaaaaaaagguagggaaagaag

SEQ ID NO: 16823 - RNA, 62 nt, Human
gcugguaacugauaagggggcaccgcugaggggcgggcccccucaaggcgggaguugccggc

SEQ ID NO: 16824 - RNA, 92 nt, Human
gugcuucaacugguaucuaugaggcccuagagcuccgggacaaugauaagacucgcuauauggggaagggugucucaaaggcuguugagcac

SEQ ID NO: 16825 - RNA, 75 nt, Human
gacccacuguccauuuggguuggccugaugcaggagucaauuaccugcagugguugguccaaacaggcucugguc

SEQ ID NO: 16826 - RNA, 64 nt, Human
gcaggguggucagggugggagacacaagauguuuuuauagucuagagccuuuaaaaaacccagc

SEQ ID NO: 16827 - RNA, 68 nt, Human
cccggggacugagaguuaaggagaguuggaggcuuuacugggccacaggguuccuacucgccccuggg

SEQ ID NO: 16828 - RNA, 78 nt, Human
uuucggauacuuacauaguuuugcgggaagccagaucgaagauguaucccagcaagcacacuaggcagguggcugaga

SEQ ID NO: 16829 - RNA, 60 nt, Human
uauagauacacaaggaauaauuucugauccaggaucguccuuccaaaugguguauuuaua

SEQ ID NO: 16830 - RNA, 93 nt, Human
uggagcugacugaagcaucuuauuuuauaguauaucaacuuugguguuuaaauugacccugcaagguagcugaagaacuuuuagacaguucca

SEQ ID NO: 16831 - RNA, 84 nt, Human; identical to SEQ ID NO: 4235

SEQ ID NO: 16832 - RNA, 67 nt, Human; identical to SEQ ID NO: 3353

SEQ ID NO: 16833 - RNA, 65 nt, Human
ugcucagacugggugugcuggggcucaugguggacugaucaugcugcccugggacccagcuggua

SEQ ID NO: 16834 - RNA, 69 nt, Human
acagauuccgcgacaaaauucacuccagucacucugggcacagaggcugauaguugcaggucuaucugu

SEQ ID NO: 16835 - RNA, 62 nt, Human
gcgggcuccacgaugaucgccaacagcaugcccauugcgaccauggccgccuuccaguccgu

SEQ ID NO: 16836 - RNA, 73 nt, Human
gcacugcgagaccugcauaucuggcuucuacggugaucccaccaauggagggaaaugucagccaugcaagugc

SEQ ID NO: 16837 - RNA, 61 nt, Human
gcaugugucuagaggacagcagaucaacuggucuuucauucacuguccagcuugccaaugc

SEQ ID NO: 16838 - RNA, 75 nt, Human
ggcacgcgucucugugcaacaccaacacgggcaagugcuucugcaccaccaagggcgucaagggggacgagugcc

SEQ ID NO: 16839 - RNA, 84 nt, Human
acuucuucucuuauguuagcuucauuauuagauuguuucauuuuugaaaauuccugaugugagaccugaauauuuuuaagaagu

SEQ ID NO: 16840 - RNA, 64 nt, Human
agggcugucaaaaacuugcuugucaugucaaaauucacagauuucaagucauucuccagacccu

SEQ ID NO: 16841 - RNA, 68 nt, Human
cuguuucuucauagauucuuggacuuuaguuguaagaccuacauagacucgaucuaguucaguaacag

SEQ ID NO: 16842 - RNA, 97 nt, Human
gggagccgguugaggaaaggcagacauccgacuucuugcccugguauaacuggcacgacaaggguaaggaucugcaucugaucuuccacggguuucc

SEQ ID NO: 16843 - RNA, 87 nt, Human
ggugccgcuggucugaaucagaguaaaaggcaggcagccggaguucccacucgccuuccaugagcucuccgcagcucagcgagcauc

SEQ ID NO: 16844 - RNA, 61 nt, Human
aucaugagauagacacuguuuaaggccgcauagguguuagucccaguuccauuuucaugau

SEQ ID NO: 16845 - RNA, 90 nt, Human
ccauauuggacuuuccaucugucagaaggaugauggcaugucggauuuccugccaggccaucguuuccaugccgagguagucgcauuugg

SEQ ID NO: 16846 - RNA, 83 nt, Human
ggacagacaugaugacuuugagcucugaggcaaaggugauaauggcaacgcucacauugaucucaaagcugaagauccugucc

SEQ ID NO: 16847 - RNA, 70 nt, Human
guccauuugggguauuccaucuuccuggucacaaugaugacuugaggcuggauaccauccucgucuggac

SEQ ID NO: 16848 - RNA, 85 nt, Human
aguacaggugcagcugagggaccaggcuggugggaagcucugcuccaugucuucucccagacacccauauucaguggcucuuacu

SEQ ID NO: 16849 - RNA, 123 nt, Human
cauacuuauauacuuuuugaaauauuuauuauuagcuaauaauuuauuuuuauuguaucgguagcucuaaauuguucuaaagcaaauuauaaaauaguuuuaaaaauagcuuauauuuguaug

SEQ ID NO: 16850 - RNA, 103 nt, Human
cuuuaaggaggcgaggaagugccggcaagucugaucuuuaaaauggugacuaaauaguaguguggcuauagaauuuauugucuaaacccgagcaacuuugagg

SEQ ID NO: 16851 - RNA, 80 nt, Human
cuuucuguccacucugaggugcugcuccagauguggggcccucccagagggccucggagacaccauaggggaacagggag

SEQ ID NO: 16852 - RNA, 90 nt, Human
ggcuccauucugaccucccugaagcgcuggguuagacgggcaccaucagcccaccucacaggcucggcgucgggugagcucguggacgcu

SEQ ID NO: 16853 - RNA, 64 nt, Human
gguggguggauggagagaggccccagccuaaggacccaggcuccugccuucccaccacccgucc

SEQ ID NO: 16854 - RNA, 66 nt, Human
cuucccagcaggaguccucaggaacaguggguguucagcagaaaaacacaggcucuucuggugagg

SEQ ID NO: 16855 - RNA, 67 nt, Human
gccucuuacccacugggauaggaaccaaaauguguucacugucccuguuuagccaaggguagguggc

SEQ ID NO: 16856 - RNA, 101 nt, Human
uggcccucccugccugcuuauguauggacagaguauguugucucagcuuccuccgagagagacuggugguuuagcuucugucuacacaggcagaagggcua

SEQ ID NO: 16857 - RNA, 80 nt, Human
cagcuuucaguuaaaaaagaagaagaagaaauggcaaagagaaaguuuuuucaaauuucuuucuuuuuuaauuuagauug

SEQ ID NO: 16858 - RNA, 74 nt, Human; identical to SEQ ID NO: 365

SEQ ID NO: 16859 - RNA, 102 nt, Human; identical to SEQ ID NO: 2172

SEQ ID NO: 16860 - RNA, 68 nt, Human; identical to SEQ ID NO: 6413

SEQ ID NO: 16861 - RNA, 98 nt, Human
aguguugcauuacuuugaggcagaucguugucuauuucuucugaaaagucagucugaguugcagaaguaauagugugccuuggaguagcagcagcauu

SEQ ID NO: 16862 - RNA, 62 nt, Human
uuuguaguauuaacuugaacuugguugauuucuuuuauaacuuguucauaagauggugggag

SEQ ID NO: 16863 - RNA, 66 nt, Human
cuaauaauucacauuaaggcuucuggaguauaagugguucacagaaguaugaaaaggggauguuag

SEQ ID NO: 16864 - RNA, 68 nt, Human; identical to SEQ ID NO: 3808

SEQ ID NO: 16865 - RNA, 67 nt, Human; identical to SEQ ID NO: 3809

SEQ ID NO: 16866 - RNA, 70 nt, Human
uguuugucagugauuuagaugauuuaaaaaugcaugugugauuugaauuuuauaauuguuuugacaagca

SEQ ID NO: 16867 - RNA, 64 nt, Human
ggagaaacccagggcuaaagucacguguuuuccuccuuuaagacuuagcucaacacuucacucc

SEQ ID NO: 16868 - RNA, 73 nt, Human
cagggaggcugcauggggccagcgcuagguggcugacucagcagcagccauggggcuggaagaagcuucccug

SEQ ID NO: 16869 - RNA, 91 nt, Human
ccaguggccagggcuuuguugcguuggggcucuccugcagugcagacuuacaggaagggccuuggcggccagcacgcgagcccguaguugg

SEQ ID NO: 16870 - RNA, 81 nt, Human; identical to SEQ ID NO: 12385

SEQ ID NO: 16871 - RNA, 87 nt, Human
cauuuucuuucacagcuugacaauguuuacauguacaaaaacccagcaagaagcaucaugucauguagauuucaguaagggagaaug

SEQ ID NO: 16872 - RNA, 118 nt, Human; identical to SEQ ID NO: 12386

SEQ ID NO: 16873 - RNA, 69 nt, Human
guagacaaguccuccagcacagccuauauggagcucacuaggcugacaucugaggacucugcugucuau

SEQ ID NO: 16874 - RNA, 62 nt, Human
aggaagucagguugggugaccccaguaacugcucucagaggcugggugaugaccggcuuccu

SEQ ID NO: 16875 - RNA, 87 nt, Human; identical to SEQ ID NO: 76

SEQ ID NO: 16876 - RNA, 60 nt, Human
cuggucuccugugaagaacauguggaucucuucccgaaggaaaaggucccaggagaccag

SEQ ID NO: 16877 - RNA, 61 nt, Human
uuggcccugugucuuugucauggcacaaaggugugcacugcgugacaaugacccaagccag

SEQ ID NO: 16878 - RNA, 60 nt, Human
acaccgugggcuuguuaacuugcuuugaguuggaagcgguuugaauuacgccuguaaugu

SEQ ID NO: 16879 - RNA, 60 nt, Human; identical to SEQ ID NO: 10992

SEQ ID NO: 16880 - RNA, 62 nt, Human
ccucaggaggggagggcugguaggagggggggagaggucucuguccuacugcucuccagagg

SEQ ID NO: 16881 - RNA, 64 nt, Human
ugauguguuugauuuccuucuauaugauucaagauguguuucugauucugugaagaacauauca

SEQ ID NO: 16882 - RNA, 76 nt, Human
gauuuuauuaaaauuaaguugaacaucaauagcacauuaauauaaugguaaaauuuaacuuaucugguauaaaauc

SEQ ID NO: 16883 - RNA, 105 nt, Human
uuaagaauacagauuuuuaccuacauuaaaggcuaaacuuuuuuuuguuuuaaagauuuaagcaaguuuuaaaauguuaauuguaaaggaaauucuguguguuaa

SEQ ID NO: 16884 - RNA, 91 nt, Human
gggaggaucaccugagcccuggaaguggagguugcagugaaccauaauugcgcaaccacacuccagccugggcuacagagcgaaaccuucc

SEQ ID NO: 16885 - RNA, 112 nt, Human
uacuaaaaauacaaaaauuagcuggacguaguggcaugugugcucgugugugugcugugugugcgugugugcugugcguuugugugugcugugcguuugugugugugcugug

SEQ ID NO: 16886 - RNA, 66 nt, Human
gagcuggccacaaguaaaccugccaaugacaaacucaggacuuaacagaaagacuuaguucaguuc

SEQ ID NO: 16887 - RNA, 61 nt, Human
gcuuugugcucaggcaucacauagcaggcagccugcagccuuucuugccugagagaagagu

SEQ ID NO: 16888 - RNA, 82 nt, Human
guggcuaggaaagaacagcauaacuucagaguaaggguauagacuugggaugugaggcaguuaugcugaaagguucugucac

SEQ ID NO: 16889 - RNA, 67 nt, Human
acgucgcccuggacuucgagcaggagauggccaccgccggauccuccucuucucugggagaagacgu

SEQ ID NO: 16890 - RNA, 68 nt, Human
gggcucaaguaauccuuuugccucagccucccaaagugcugggauugcaggcaugagcuacggugccc

SEQ ID NO: 16891 - RNA, 75 nt, Human; identical to SEQ ID NO: 447

SEQ ID NO: 16892 - RNA, 106 nt, Human
gcaggguguacaccugugguucucggggcugccuuuggcuuuggagaugguuuucucgaugggggcugggagggcuuuguuggagacuugcacuuguacuccuugc

SEQ ID NO: 16893 - RNA, 130 nt, Human
ucuuguccacggugagcuugcuguagaggaagaaggagccgucggaguccagcacgggaggcguggucuuguaguuguucuccggcugcccauugcucucccacuccacggcgaugucgcugggauagaa

SEQ ID NO: 16894 - RNA, 77 nt, Human
cguucauuuuaugcuucaugguugaaauuuuucugucagugaguggaaaauaaccaugagauacauagacuguagcg

SEQ ID NO: 16895 - RNA, 69 nt, Human
ucauuucaucuuugugcuuugguuaacaagcaggcucaagagacugcuuuguguaauuaaaugaauuga

SEQ ID NO: 16896 - RNA, 66 nt, Human
uucugguggugauguggcuaugauugacaaauauucuguaaaauuucugccugucugccucuagaa

SEQ ID NO: 16897 - RNA, 76 nt, Human
cugauuccuuauuuauggaaucaucucuggguauaugauuuccaaaaccuagagauauuccuaugguauaauucag

SEQ ID NO: 16898 - RNA, 68 nt, Human
acuuucugggaagaauucaacaaccauuuaguagacacugacuauguugauguucuugucccaaaagu

SEQ ID NO: 16899 - RNA, 81 nt, Human
agguagccuacuggugauuucauauugccucugguggcagagagucaguuacuuccaagaggccuuuacuuugggcugcuu

SEQ ID NO: 16900 - RNA, 75 nt, Human
uggagaguuuaaauaauuugcugaaugucucauggccaaaauccuauugaaguauuugcugggaucuucucucca

SEQ ID NO: 16901 - RNA, 66 nt, Human
uguaugucuuuaaacaauaagcaauuucuucucaaauacugugcacuuuccccaaacagauauaca

SEQ ID NO: 16902 - RNA, 99 nt, Human; identical to SEQ ID NO: 11253

SEQ ID NO: 16903 - RNA, 78 nt, Human; identical to SEQ ID NO: 5302

SEQ ID NO: 16904 - RNA, 62 nt, Human; identical to SEQ ID NO: 484

SEQ ID NO: 16905 - RNA, 70 nt, Human; identical to SEQ ID NO: 5304

SEQ ID NO: 16906 - RNA, 63 nt, Human
augagggcagcaccugccucugaaugggaaaucaugcaacuacucagaauguguccuccucau

SEQ ID NO: 16907 - RNA, 63 nt, Human
uggaugagcguggcuugucccaauaaaacuuuauuuucagaaacaagccacugggcugguuca

SEQ ID NO: 16908 - RNA, 76 nt, Human; identical to SEQ ID NO: 758

SEQ ID NO: 16909 - RNA, 71 nt, Human; identical to SEQ ID NO: 1764

SEQ ID NO: 16910 - RNA, 67 nt, Human
cagcugggcccgggggaccacuaccaccaaaaugcggggaccgguaguggccccaaaugucuggcug

SEQ ID NO: 16911 - RNA, 62 nt, Human
guugguccuucuggcaacacuugaggggagauacuaucacccuuaucuuuguagggaccagc

SEQ ID NO: 16912 - RNA, 85 nt, Human
gucacagacuguugaaacaugaccagaagcguguagcuccauccaucgugcuagagcucgcuugggucccuuugacaucuuuggc

SEQ ID NO: 16913 - RNA, 63 nt, Human
ucucguucauccauucaugcgcgucacuaauuagaugacgaggcauuuggcuaccuuaagaga

SEQ ID NO: 16914 - RNA, 71 nt, Human
cacuaaaaacaguuaauucaagagcauuguucuggcauccaaauccaaaagccuuguuacuguuucuaaug

SEQ ID NO: 16915 - RNA, 71 nt, Human
uacuuccagccuucccuuaucugauagaccaucuuugggaaacaaccagguggauguuaaugggagaagua

SEQ ID NO: 16916 - RNA, 72 nt, Human
gagagcacggucugaaucugcacagagcaagaugcugaguggagucgggggcuuugugcugggccugcucuu

SEQ ID NO: 16917 - RNA, 70 nt, Human
uccuggucuguucugugagugguuucuauccaggcagcauugaagucaggugguuccggaauggccagga

SEQ ID NO: 16918 - RNA, 76 nt, Human
agggcuuggaucaugcauuacaguguguugauuacaucaaggcugauggacaaaauauaggaugcagauuuucccu

SEQ ID NO: 16919 - RNA, 69 nt, Human
uugaucuuaacaagggcauugaagcgaagauacacacgcuuuuaccauggcaaugcacaaauggaucag

SEQ ID NO: 16920 - RNA, 73 nt, Human
gugaaaugggacuauuuguuugucuuuaaauacagucucuauaggaaagacaaaauaaauacuuaaaucucac

SEQ ID NO: 16921 - RNA, 98 nt, Human
uacuugauucaugaugaggagauggccacugaaauuggacagugacagucuuuucugcccauuguucaauuauauucgucucuuuacauuagaaagua

SEQ ID NO: 16922 - RNA, 88 nt, Human
cagcagagcauccggaacgucacagaggacgugcagaacagcuguuuggccuacgucacucaugaggacaucugcagaugcuuugcug

SEQ ID NO: 16923 - RNA, 67 nt, Human
ccaaagugcugggauuacaggugugagccaccgugcaugaccaaaaguccuucuaauagcaaagugg

SEQ ID NO: 16924 - RNA, 68 nt, Human
ccucacugccucuaccugaaaaacugagauauuuagccacuuggucucauuuggaggauacaguaggg

SEQ ID NO: 16925 - RNA, 81 nt, Human
guuuuauccuagauccugagaggcccucaaagugggagagucagcugccaaggauuaaagggcaagcaggaaugggagaac

SEQ ID NO: 16926 - RNA, 61 nt, Human
accuuguggggcucuugggaugggcgggcacccaagcccuggcuuguccuucccagaaggu

SEQ ID NO: 16927 - RNA, 73 nt, Human
ccagcaucaucgcagagauccugagugucuaccagaagugcaaggacaagcaggcugcugcuaagugagcugg

SEQ ID NO: 16928 - RNA, 66 nt, Human
ugcugcuaagucagguugccuuuacuuugaaaaagguaaaaaggacaaaacauaucuacuuaggca

SEQ ID NO: 16929 - RNA, 90 nt, Human
ccccgagugagcaauuucugucccuuuuaagggcucacaacucuaagggggugugcgugagagggucgugaucgauugagcaagcagggg

SEQ ID NO: 16930 - RNA, 68 nt, Human
cuccccaaucaccgcugcuugccagggugccucuucacaguucccauguggcagcaguaguggcagag

SEQ ID NO: 16931 - RNA, 93 nt, Human
cuggacggcgucgaaaugaccccggccaccgugcuggcgacccugaaccguaucgguggcgaacacgguaucggucgucuggacaucgucgag

SEQ ID NO: 16932 - RNA, 87 nt, Human
ccuguuaguauuguuaaaaagcaagagugacuuuaguauucaugaacaguaaaucagaggucagacuugacaagagcgagugacagg

SEQ ID NO: 16933 - RNA, 69 nt, Human
auuucacucuuuugccuuccagucacuuaacuacaacuaagagaaagacacagguagaugauagggaau

SEQ ID NO: 16934 - RNA, 80 nt, Human
gacaaucucauaacaggaagauuugaacauagcagcugcuuaccauuucaugcuaauuaaaugugauuuccaucauuguc

SEQ ID NO: 16935 - RNA, 62 nt, Human
uagggguuugcaaacaauacguagccaauuuccuuaaaagggaaauucuugugugucuccua

SEQ ID NO: 16936 - RNA, 64 nt, Human; identical to SEQ ID NO: 1650

SEQ ID NO: 16937 - RNA, 62 nt, Human; identical to SEQ ID NO: 1651

SEQ ID NO: 16938 - RNA, 116 nt, Human; identical to SEQ ID NO: 1652

SEQ ID NO: 16939 - RNA, 67 nt, Human; identical to SEQ ID NO: 1460

SEQ ID NO: 16940 - RNA, 60 nt, Human; identical to SEQ ID NO: 1551

SEQ ID NO: 16941 - RNA, 60 nt, Human; identical to SEQ ID NO: 1551

SEQ ID NO: 16942 - RNA, 72 nt, Human
gaggcggagcuugcagugagccgagaucccgcacugcacuccagccugggcgacagagcgagacuccgucuc

SEQ ID NO: 16943 - RNA, 67 nt, Human
gcauguucaaaugguuuccacugauucgauuuuucauucauuuaaugcaaacccauucuggauaugu

SEQ ID NO: 16944 - RNA, 94 nt, Human
acuggcgcugcaaggcugugggcaaggucaucccuugagcugaacgggaagcucacuggcauggccuuccgugucccacugccaacgugucagu

SEQ ID NO: 16945 - RNA, 65 nt, Human
gccgcaucuucuugugcgucgccagccgagccacaucgcugagacaccauggggaaggugaaggu

SEQ ID NO: 16946 - RNA, 80 nt, Human
ccaguguguugaacaaauucaagaguugguucuacgcuucugugagaagaacugugaaaagagcaugguugaacagcugg

SEQ ID NO: 16947 - RNA, 101 nt, Human
cgauuaugacacugacaaugaaaauacuaacauaccagucauuuaccauaagugaauauugaauuugaagcguuauucccuaucagauaaugauuaugacg

SEQ ID NO: 16948 - RNA, 61 nt, Human
ugucccuccacagaucgcucugaccauguaacagcagcuucagaaagaacuggcgggggca

SEQ ID NO: 16949 - RNA, 65 nt, Human
caagaagguuaucuccucagccaacagagcugugguuggugugguggcuggagguggccgaauug

SEQ ID NO: 16950 - RNA, 82 nt, Human
cucuauuguacuuuuaaaaauccuauuuuugcaguuggcuuccuaucagugaauuaguuagguaguuuugguacauuuggag

SEQ ID NO: 16951 - RNA, 61 nt, Human
ugauuaaccuuuagcaauaaacgaaaguuuaacuaagcuauacuaaccccaggguugguca

SEQ ID NO: 16952 - RNA, 64 nt, Human
cucuuugugcccucauuugguauuuggugcugaaacuaagcauggugcuaccauucaagaagag

SEQ ID NO: 16953 - RNA, 70 nt, Human
caagccgcgcacgguggcucacgccuguaaucccaaagugcuaggauuauagccaccgcaccucgucuug

SEQ ID NO: 16954 - RNA, 72 nt, Human
ccaaauaaauuaaaaauguuuuaaagcccugaguucauagacugguuuuaggagauuuuuaugacacacggg

SEQ ID NO: 16955 - RNA, 83 nt, Human
gcccccucucggcuucccccucucccccucccccugcgggauguucagggugggggagaauugaggagcucggagaggcaggu

SEQ ID NO: 16956 - RNA, 64 nt, Human
gcucugcuuauauagaccucccaccgagugguagcguaaggagggcgaugagagauaucagagc

SEQ ID NO: 16957 - RNA, 66 nt, Human
cacagcagaccaaucauguucccugaaauuuaacaaucaaucauacuuaauaaaggccuguuagug

SEQ ID NO: 16958 - RNA, 78 nt, Human
gcaccaguaagaaagacugucgcuagcauuuuuauuucaucaucaacaacaaacaugcaguuucuuucucugaugugc

SEQ ID NO: 16959 - RNA, 61 nt, Human
uaucuuuaaauacugcaaagcauugugagcugcaucacuuugugcauugccacaggagaua

SEQ ID NO: 16960 - RNA, 84 nt, Human
cuuuuauuuauuuuccuaguauuuuuuuccucagauggaaaaauaauuucaucaagaaaacaagugcuucugccaaagugaaag

SEQ ID NO: 16961 - RNA, 94 nt, Human
aaguuuuaaauucugauuuuucacuacuacuaaagauagauacaccagauucucauuuauuaaauucaugaccaaauccagaauuuguaggcuu

SEQ ID NO: 16962 - RNA, 89 nt, Human
guucuucuauuauucccauuuuauggauaaagaaacaaagacacauagagguuaaaaguuucugcccauggaauauagccaggaagaac

SEQ ID NO: 16963 - RNA, 78 nt, Human
uuauugaagacuuuaacaguagauaaaggaauagaguuuuucuaaucaucuaaaggcuguuaauaguguugacaauaa

SEQ ID NO: 16964 - RNA, 63 nt, Human
ggacauuggaaaugaaauuaauaucuucuacuugauuagaaaaaguggaucuuuuccaaugcc

SEQ ID NO: 16965 - RNA, 66 nt, Human
aggccuggcacagccuuggcuuccacgccugagcguggagcgcacgaguuaguuguaguccggcuu

SEQ ID NO: 16966 - RNA, 65 nt, Human
cuuccuguugguuugagccccuuuuuguuuugcccucuggguguuuucuuuggucccgcaggagg

SEQ ID NO: 16967 - RNA, 91 nt, Human
gguucauucucuggaucagagucaguggugucagaauaucuauaaugaucagguucauugucacuaacaucugguguacagaaguugaacu

SEQ ID NO: 16968 - RNA, 62 nt, Human
uauaagguuuauuuucacuguguuuuaucccucuugauaaaaaaaaaauucagacuuuugua

SEQ ID NO: 16969 - RNA, 60 nt, Human
acugugauacaagcacuggguucuuugagaugagagcuguuuuuagugucuguucggagu

SEQ ID NO: 16970 - RNA, 63 nt, Human
gagaucacuggcuggcuggaaggcuucauucauuaaacguuguuccccagcaucuaauuucuc

SEQ ID NO: 16971 - RNA, 85 nt, Human
uucugguguuuccuagagagccaauggacuguauauaaaugcugcguuuguuuggagagggugucuuucuguaaggaucacugaa

SEQ ID NO: 16972 - RNA, 60 nt, Human
cacuuguuuauggccuaaaauuuguauaaggacacacuuauacagauuucauaaacaaug

SEQ ID NO: 16973 - RNA, 75 nt, Human
gaggcugggaagugcaagaccaagauaugaacagauucauuaucugguacagauacccugcauauuuuuggccuc

SEQ ID NO: 16974 - RNA, 72 nt, Human
uaugaagaaagaaauguuuuugaaaguuuacgugugugcauuuaucaucauaaauacauuuaauucauugua

SEQ ID NO: 16975 - RNA, 81 nt, Human
gacuggaaggugcccugugcuaugucgugccugcagggacacgucggaucccgugggccucacaugccaggucaccagguc

SEQ ID NO: 16976 - RNA, 64 nt, Human
gcagacucaugcagcccuauggccgcucagaccaaggcgcagagaacuaucagggcagcucugc

SEQ ID NO: 16977 - RNA, 65 nt, Human
ggcccagcaguauugcucacgggggcuccagcgccggcguggcccucaugagcuacgccuggguc

SEQ ID NO: 16978 - RNA, 70 nt, Human
gaucuccuacuuuucaccucagaaagcuacaaauguaaaaggaaaauuaaauuuguuuugagaggagauc

SEQ ID NO: 16979 - RNA, 60 nt, Human
cuuaauugaauacuuagaaaaaaauggccaguggcgauugaaagguauauuaaaauuaag

SEQ ID NO: 16980 - RNA, 62 nt, Human; identical to SEQ ID NO: 7075

SEQ ID NO: 16981 - RNA, 65 nt, Human
cuuuguaugcccagggaaggaggcgcuaugaucggaagcagaguggcuauggugggcagacaaag

SEQ ID NO: 16982 - RNA, 68 nt, Human
ggccaggugucgggcgcuguuucucguuuucaucauauagacaaaacagcccugcugcaaagaugguc

SEQ ID NO: 16983 - RNA, 84 nt, Human
uuuuuuuaacaugugucaaaagauuuuauuaaacuaauucaauuuguuagggaaaugguaagauguuacaacugguuaagagga

SEQ ID NO: 16984 - RNA, 87 nt, Human
cuaggaaggugauccgggaggcuggagagcuugucaaggucacagacccacgguuuuccgcccccuaggguccaagcucuuuccugg

SEQ ID NO: 16985 - RNA, 60 nt, Human
gguggcagcaggggaacgucuucucaugcuccgugaugcaugaggcucugcacaaccacu

SEQ ID NO: 16986 - RNA, 68 nt, Human
uuugccagacugauuuccgaauucuacuggaugcauucaaaguuaccagaagacgaaggacuggggag

SEQ ID NO: 16987 - RNA, 67 nt, Human; identical to SEQ ID NO: 1379

SEQ ID NO: 16988 - RNA, 63 nt, Human; identical to SEQ ID NO: 1366

SEQ ID NO: 16989 - RNA, 86 nt, Human; identical to SEQ ID NO: 1381

SEQ ID NO: 16990 - RNA, 62 nt, Human
ugccagggugaaagggauagacaacuggauuagagcccaagugccacuccaguugcuuggca

SEQ ID NO: 16991 - RNA, 96 nt, Human
gggaaaggccaucacccuccguggacggggucucggccaccacauccaccuucugaagguggcccagacaccuccacgcugcugacugcacuuccc

SEQ ID NO: 16992 - RNA, 60 nt, Human
ggguggucggauggcagcgugacgccaguaucauuuccagcauuuccaucuuuaccacuc

SEQ ID NO: 16993 - RNA, 71 nt, Human
uaucucaacgagaagggacaccucacgucgcugacagcucggcacguggcuggucccaggccccagagaua

SEQ ID NO: 16994 - RNA, 66 nt, Human; identical to SEQ ID NO: 2392

SEQ ID NO: 16995 - RNA, 88 nt, Human; identical to SEQ ID NO: 2393

SEQ ID NO: 16996 - RNA, 89 nt, Human
gccacgguucauuucacccuugacaggcucauugaggauggcauaagcgugugucauucuggaugucuugcaccgggcauagccguggu

SEQ ID NO: 16997 - RNA, 92 nt, Human
ggguucucgacggcagcagagcggggcuucuuggcagcgggcucgaagucggccuccucggcccaggacuccuucaccucguugaugagcuc

SEQ ID NO: 16998 - RNA, 74 nt, Human
guagccuggaagaggggcuccugcagguaaucguacacuucauuuuugccuagccgaucaucuuccugagcugc

SEQ ID NO: 16999 - RNA, 63 nt, Human
gucaagucuuaaagcauguuggauuucagaaacaugaguuuauucauaucuucuggacugagc

SEQ ID NO: 17000 - RNA, 75 nt, Human
aaaggccacuucuaugacuuauuuuucuguuugguugggcugccauggaaaccggaagcauguauucaagccuuu

SEQ ID NO: 17001 - RNA, 77 nt, Human
cuagagacagacauagucaaaaugaaaacauaaauuccaauuuugugucaauuauuuucaaacuauguucccucugg

SEQ ID NO: 17002 - RNA, 71 nt, Human
guuuucauaaguaggacagcaccagucauuauuuuuucacugacugcuccugguccuauuguuuaggaagc

SEQ ID NO: 17003 - RNA, 72 nt, Human; identical to SEQ ID NO: 4935

SEQ ID NO: 17004 - RNA, 104 nt, Human; identical to SEQ ID NO: 4774

SEQ ID NO: 17005 - RNA, 82 nt, Human; identical to SEQ ID NO: 182

SEQ ID NO: 17006 - RNA, 68 nt, Human
ggacucucaggaaucuuucagauugcugcaacuaagcaggaagggauggaaggucuccuugggacucu

SEQ ID NO: 17007 - RNA, 74 nt, Human
ggugcuaucugucugcucuaguaauaagccggcuauuguagaagcugguggaaugcaagcuuuaggacuucacc

SEQ ID NO: 17008 - RNA, 94 nt, Human
gugcagcuggaauucuuucuaaccucacuugcaauaauuauuagaaccagaugauggucuggcaagugggugguauagaggcucuugugcguac

SEQ ID NO: 17009 - RNA, 93 nt, Human
gccgacgccggcccgcucugcgccgccugccguauggcugcgggccccgagccgcccgagugggaaccgcgcuggaggaaggcgcugcgcggc

SEQ ID NO: 17010 - RNA, 65 nt, Human
ggagaacaaggggucuguggaaaucaugagaaaggacuugaaugacacccgggaccugcauggcc

SEQ ID NO: 17011 - RNA, 72 nt, Human; identical to SEQ ID NO: 3662

SEQ ID NO: 17012 - RNA, 63 nt, Human; identical to SEQ ID NO: 12838

SEQ ID NO: 17013 - RNA, 85 nt, Human; identical to SEQ ID NO: 10310

SEQ ID NO: 17014 - RNA, 68 nt, Human
gacuacugaaaggaaaagcuggugcuggggagcccuccacaccacugacugaugaauuucagcacguc

SEQ ID NO: 17015 - RNA, 66 nt, Human
gggguauccuguaauaaggcagggcagggcucgaacaccagugcucgcugccacuagggaggccuc

SEQ ID NO: 17016 - RNA, 74 nt, Human; identical to SEQ ID NO: 1525

SEQ ID NO: 17017 - RNA, 66 nt, Human; identical to SEQ ID NO: 1526

SEQ ID NO: 17018 - RNA, 64 nt, Human; identical to SEQ ID NO: 1527

SEQ ID NO: 17019 - RNA, 68 nt, Human
ucaucucgggugggaugugcgagguuucugugcccuuaucgucugguucuugguaugucccaggauga

SEQ ID NO: 17020 - RNA, 75 nt, Human
cccaagaccccugugccauuggggugcuccacucucucaaacaggaugagcaucucacagugcggggucugcggg

SEQ ID NO: 17021 - RNA, 62 nt, Human
cugccacagccuugaccggccggaagggaaugcccuucacccgguuagauggggcucugcag

SEQ ID NO: 17022 - RNA, 83 nt, Human
gguuuucaaaauaccuuuuaaaaaguauucuagcccaagauuuuucuguaaacuagauuauguuguaaacuuuuuucuaaauc

SEQ ID NO: 17023 - RNA, 66 nt, Human
uuuuuuuuuuccaaagauuuauugaagcagaaccaaguugguuggauacuugcuggaaaaaaaaaa

SEQ ID NO: 17024 - RNA, 62 nt, Human; identical to SEQ ID NO: 6172

SEQ ID NO: 17025 - RNA, 80 nt, Human; identical to SEQ ID NO: 9351

SEQ ID NO: 17026 - RNA, 72 nt, Human; identical to SEQ ID NO: 3662

SEQ ID NO: 17027 - RNA, 74 nt, Human; identical to SEQ ID NO: 365

SEQ ID NO: 17028 - RNA, 102 nt, Human; identical to SEQ ID NO: 2172

SEQ ID NO: 17029 - RNA, 78 nt, Human
agguguuuauuuuguucuauuuaagaauuuguuuuauuaaauuaauauaaaaaucuuuguaaaucucuauauacaucu

SEQ ID NO: 17030 - RNA, 77 nt, Human; identical to SEQ ID NO: 6000

SEQ ID NO: 17031 - RNA, 67 nt, Human
gggcauugcagcugaugcacugauagacggcacgugcuguggaucaggguauauagacagaaugguc

SEQ ID NO: 17032 - RNA, 62 nt, Human
gggcucgggcucugggcucaccaccucaucgaucagagggaggcccaguccugcccgggccc

SEQ ID NO: 17033 - RNA, 85 nt, Human; identical to SEQ ID NO: 11784

SEQ ID NO: 17034 - RNA, 103 nt, Human
uuuuuuuuuuuuuuuccugcauuucucauuuuuauuugacagaaaaaguugcuuuugcuguacagauuuuaaaaaaccaaaaugccuuuaaaaaacaugaaaa

SEQ ID NO: 17035 - RNA, 66 nt, Human
gacuaugauguggaauggggcuaugcuuuugaugugcaucucaaugcuuuuuauccacuccugguc

SEQ ID NO: 17036 - RNA, 120 nt, Human; identical to SEQ ID NO: 1182

SEQ ID NO: 17037 - RNA, 78 nt, Human
uucaguucucgaggagaaaagauccuuauggcagaugcugauggagccacaaaguuuccagauguugagaacuuagaa

SEQ ID NO: 17038 - RNA, 80 nt, Human
aaaaauauaugcuauuguuuagacuuuccauccuuuuuuuuuuuuauuuugaggaaaagucaaauucauuguuuauuuuu

SEQ ID NO: 17039 - RNA, 67 nt, Human
gauacugggaagagcauuagccaagaacuugucucuuugaucuguuucguuaagcugaaccaguguc

SEQ ID NO: 17040 - RNA, 96 nt, Human
ccaagagaggcucuucugggggccaggcugggacugggccccggaaaccaaaacuccgugccuuacccagccggggcccuccuggagccuucuugg

SEQ ID NO: 17041 - RNA, 66 nt, Human
gccaagggccagucggggggugcugcgcucugccaguguccaccacgagucugccugcccuugagc

SEQ ID NO: 17042 - RNA, 93 nt, Human; identical to SEQ ID NO: 634

SEQ ID NO: 17043 - RNA, 77 nt, Human
gcaguuccagggauauggccagcaaccaacuucccaggcaccagcuccugccuuuucuggucagccucaacaacugc

SEQ ID NO: 17044 - RNA, 66 nt, Human
uacaccaauuaauguagcugcuagcuauuggccucccaaaagacuccaguacuauuuuaauuugua

SEQ ID NO: 17045 - RNA, 70 nt, Human
uccuuaugcgcguaaccguccucccuuuggucagggcuauacccaaccuggaccugguuaucgauaagga

SEQ ID NO: 17046 - RNA, 118 nt, Human; identical to SEQ ID NO: 3011

SEQ ID NO: 17047 - RNA, 80 nt, Human; identical to SEQ ID NO: 3013

SEQ ID NO: 17048 - RNA, 80 nt, Human; identical to SEQ ID NO: 83

SEQ ID NO: 17049 - RNA, 77 nt, Human
ccgcguaucauacaccuuccuaggggcgugagucaagggcucaggauugcccauguggaucacugugugcugcucgg

SEQ ID NO: 17050 - RNA, 75 nt, Human
ggcgcugucuaccuccucugguccagggguacugguggcauuagaacuagaccagucagagaagucagacguguu

SEQ ID NO: 17051 - RNA, 62 nt, Human; identical to SEQ ID NO: 17032

SEQ ID NO: 17052 - RNA, 62 nt, Human
agccugagacuaguucggacuccccuucggcaaggucgaaggggguucggcuggucucugcu

SEQ ID NO: 17053 - RNA, 66 nt, Human
ucuugggcaacggucaugaugggaggaguaaucagaggugcucuuguguugugaucaggcuggaga

SEQ ID NO: 17054 - RNA, 63 nt, Human; identical to SEQ ID NO: 1098

SEQ ID NO: 17055 - RNA, 68 nt, Human
ggaaaaagguuucuucucggaaggcuuuuuuaaaggggcggguuuuugggaagcgggggccuuuuucc

SEQ ID NO: 17056 - RNA, 130 nt, Human
uuuuuuuuuuuuuuuuuuuuuuuuuuuuuuuuuuuuuuuuuuuuuuuuuuuuuuuuggccggaaaaaaaaggcuuuaaaaaaaaaaaagcggccaaaaaaaaauggaccuuaaggaaaaaaaaaaaaaaa

SEQ ID NO: 17057 - RNA, 67 nt, Human; identical to SEQ ID NO: 3685

SEQ ID NO: 17058 - RNA, 73 nt, Human; identical to SEQ ID NO: 2833

SEQ ID NO: 17059 - RNA, 67 nt, Human
ccucuuuccuuucuucagacaaacaccaaauaaaaugcaggugaaagagaugaaccacgacuagagg

SEQ ID NO: 17060 - RNA, 61 nt, Human
uuagaaauuuaugcugacucgaucuaaaaaaaauuauguugguuaauguuaaucuaucuaa

SEQ ID NO: 17061 - RNA, 98 nt, Human
uuucaugaugugcuacaugauagauuuguaaacaccugucucaauaaacuuauaguuguguuggaauagguauuauucucaguugcaucuucaugaaa

SEQ ID NO: 17062 - RNA, 60 nt, Human
ccuugcugagguuugccagccgggacaccaguuaacugcucguucagcugcucagcaagg

SEQ ID NO: 17063 - RNA, 80 nt, Human
gcagugcuugucuaacagcuucugggugcagauuuucuucggcauccuuuugcacucagcuuauuacagguagguagugc

SEQ ID NO: 17064 - RNA, 89 nt, Human
uuuuauaugaccugcagguaaaaagcacauuuaauuauaaacaauauauucaaaaugggcaaauuuuauuuucaaaugcagguguagag

SEQ ID NO: 17065 - RNA, 72 nt, Human
guaaagccgucggacauccuuggagagaggauagauuccuuaauucuuuugccaaguaugccucggcuuggc

SEQ ID NO: 17066 - RNA, 63 nt, Human
ccugucuuggggcucuccuaccgauuggcugugggcgacaauccgaucgugccccaagacagg

SEQ ID NO: 17067 - RNA, 93 nt, Human
cgucuuccagccgggggacacuauccucgaagacaccucguguuucacccguguuuuugcggcgagaaggcugucccccgugcggggggggcg

SEQ ID NO: 17068 - RNA, 72 nt, Human
ccaaagggucggcagguggagccucggggggggggcccccgguggggcuccacccgucacauggcccgaggg

SEQ ID NO: 17069 - RNA, 84 nt, Human
cgucaugucuaagucagagucuccuaaagagcccgaacagcugaggaagcucuucauggaggguugagcuugaaacaacugaug

SEQ ID NO: 17070 - RNA, 63 nt, Human
ggucgaaguggucuggaacuugcggggcguggagggguccggcgggaaugaccacuuccggcc

SEQ ID NO: 17071 - RNA, 73 nt, Human
uugaagaggguuuaauaugggaguuauuuuacauagguugugggcauguguagcugcccauuaugcccuucaa

SEQ ID NO: 17072 - RNA, 78 nt, Human
gguaaaguggggaaggccacaucugagcggggucgcgcucggugauuguuccuggccaguguggagucucuaaacacc

SEQ ID NO: 17073 - RNA, 60 nt, Human; identical to SEQ ID NO: 1551

SEQ ID NO: 17074 - RNA, 73 nt, Human
cugugggcgagugaaaggguuccaaccggaaggggaacuggacgcaagggacaacacgcacucgggaacacag

SEQ ID NO: 17075 - RNA, 79 nt, Human
gccugggccugagcagcaucguuggcgucugguaccugcugaggaagcacuggauugccaacaaccuuuuuggccuggc

SEQ ID NO: 17076 - RNA, 67 nt, Human
guuuuuuccagccagcuuuccaaaucgacaguaccagcugcucuucacacaggguucuggggaaaac

SEQ ID NO: 17077 - RNA, 61 nt, Human
ggggcuuggggcuggggccugcagcagaagugugcccagcgucucucagcucccgcacccc

SEQ ID NO: 17078 - RNA, 109 nt, Human
ugucuucucagguagcagggcgcguuuccacuuaaggugugucugucacgcaccucauucuccccagacagucuuugaguaacaucuguucccaucuuccuuggaagca

SEQ ID NO: 17079 - RNA, 61 nt, Human; identical to SEQ ID NO: 6766

SEQ ID NO: 17080 - RNA, 76 nt, Human; identical to SEQ ID NO: 758

SEQ ID NO: 17081 - RNA, 86 nt, Human
cacaggagggauccuuggguuaaggauuguauuuaaaaacccccaaacggcguuuuaacaaugguaaccccccuagggcuccugug

SEQ ID NO: 17082 - RNA, 79 nt, Human; identical to SEQ ID NO: 7764

SEQ ID NO: 17083 - RNA, 117 nt, Human
cugggugcgguggugugcaccuguaaucccagcuacuugggaggcugaggcagaagaaucgcuugaacccaggagguggagguugcagugagccaagaucacaccacugcacuccag

SEQ ID NO: 17084 - RNA, 93 nt, Human
cuucaccacuucaccacugugcauccugggaaguggccuccuccuuuaaauagggauggaggucuccagggugugcucuggaagauugugagg

SEQ ID NO: 17085 - RNA, 65 nt, Human
ggucccacugaagcaccucuauuuaaaucccccuguuccgaauaagggagcuguguaaauggacc

SEQ ID NO: 17086 - RNA, 61 nt, Human
uucuuuggcauuuauucacuagaucucuaaacaggagaucacuguuucguaugcucuagag

SEQ ID NO: 17087 - RNA, 86 nt, Human
auugcaggauggagcacugagaaagcaagauguuggcuaccagaaauggaguuucaaaaauuuucuuaaaagcucuauuggacaau

SEQ ID NO: 17088 - RNA, 63 nt, Human
ucaguaaaacauuuucaaaagucaucaauauuuuggaucugagcauuuaaauguuuuauauga

SEQ ID NO: 17089 - RNA, 79 nt, Human
ugaggggugaauucaugauccucgcuuacugacuuccugcgcucggggagucaggugcggggagcgguuaagcccuuca

SEQ ID NO: 17090 - RNA, 66 nt, Human
guugcuguagccaaauucguugucauaccaggaaaugagcuugacaaaguggucguugagggcaau

SEQ ID NO: 17091 - RNA, 60 nt, Human
gaugggauggaaaugaaauggccaaaagagcaaaggcuuauuucaaaaccuuugucccuc

SEQ ID NO: 17092 - RNA, 62 nt, Human
gucccccccccucgccacggcaaacauagcaaaaaaaugucccucuuggcccccggggggac

SEQ ID NO: 17093 - RNA, 61 nt, Human
uccuccgcgggcaugaccaguccgccuacgacggcaaggauuacaucgcccugaacgagga

SEQ ID NO: 17094 - RNA, 69 nt, Human
cugcgugcgcagguucgucgucugugccaggagaaucaguggcuacgggaugaacuggccaacacgcag

SEQ ID NO: 17095 - RNA, 72 nt, Human
gcguucgcgcccggcggcgcuccaggugcugacagcgcgagagagcgcggcccucaggagcaaggcgaaugu

SEQ ID NO: 17096 - RNA, 60 nt, Human
uccaguacgccucgcaggggcgcuacgagguagcugugccccucugcaagcaggccugga

SEQ ID NO: 17097 - RNA, 65 nt, Human
gaaggccggcggguugcggccacccacggauuaagguccacgggggcuucuuugcguuggucuuu

SEQ ID NO: 17098 - RNA, 70 nt, Human
ggcuagcgucccugucggagcgggccucgcguuguggacgaggcgcagagaccgcgucagggacgcagcc

SEQ ID NO: 17099 - RNA, 67 nt, Human
uccagaggggaagacgaaggcaugguucagggcaccgugaagucccauucuguuuuguucccuugga

SEQ ID NO: 17100 - RNA, 72 nt, Human
uuacagggcugcuugaacccucauaggccuaggcuuuggucuaaaaggaacauuuaaaaaguugcccuguaa

SEQ ID NO: 17101 - RNA, 83 nt, Human
ggucuaguugucuuagaguugggcugaacagaagcacucuuccaagggcgcugcagcaauuuucagugagacagcagaagacu

SEQ ID NO: 17102 - RNA, 65 nt, Human
ucgcuccucagcggauugcuggauaaggucaguuuucucagacucccgccacugaugaggagaga

SEQ ID NO: 17103 - RNA, 71 nt, Human
uucaaaaccagaagcagucgagacauaggacaaccuagcaguuggccuuauaaguggcucuuuguuuugaa

SEQ ID NO: 17104 - RNA, 85 nt, Human
uucgcuggcucgcaaaucacauuucaucaagcucagaugacuuauuuggcaugugggcucgugcaggaugucaugcagaagugaa

SEQ ID NO: 17105 - RNA, 71 nt, Human
gacgaauccuuaguacuguggaaaagagcagacagaaauauaaaccagcuucucucacaguggaauucguc

SEQ ID NO: 17106 - RNA, 78 nt, Human
ccggaaccugcucaucuggaucaagaagaauuugcuaaaagagcggccagaguuguucauccaggagacagcgugcgg

SEQ ID NO: 17107 - RNA, 72 nt, Human; identical to SEQ ID NO: 5861

SEQ ID NO: 17108 - RNA, 76 nt, Human
gcguguuggcuuggcuguugacauggaugaaauugaaaaguaccaagaaguggaagaagaccaagacccaucaugc

SEQ ID NO: 17109 - RNA, 97 nt, Human
acaguauugcuagggggcagaaaauuccuaucuucucugccgcgugggcuaccacacaaugagauugcaggucagaucugucgccaggcuugguugu

SEQ ID NO: 17110 - RNA, 72 nt, Human
cggggccgcacccgagcuacgccgugccgcaccgguugggccggucggugggagcucugggagcaggcgcug

SEQ ID NO: 17111 - RNA, 74 nt, Human; identical to SEQ ID NO: 12863

SEQ ID NO: 17112 - RNA, 70 nt, Human
cgccgacgcccccgaggaggaggaccacguccuggugcugaggaaaagcaacuucgcggaggcgcuggcg

SEQ ID NO: 17113 - RNA, 88 nt, Human
gcggggaggauuuauaaaggcgaggccgggaccggcgcgcgcucucgucgcccccgcugucccggcggcgccaaccgaagcgccccgc

SEQ ID NO: 17114 - RNA, 66 nt, Human
uggggguuguccucuuuaagaacaguugaugaacgccggaacaacuuugaaaggggagggucccca

SEQ ID NO: 17115 - RNA, 82 nt, Human
caucucgagacagcgguucagaaagucccggaagauagcugacagcuucucuggguucugaaguucuggggucccauuggug

SEQ ID NO: 17116 - RNA, 82 nt, Human
guggagugaggcuggagaggggcuuggcaaucuucaggaauugaugcuguagcagcucuuuagcugaaccucucuucuccac

SEQ ID NO: 17117 - RNA, 64 nt, Human
gcgcgcggugguggugggcuuugacccgcacuucagcuacaugaagcucaccaaggcccugcgc

SEQ ID NO: 17118 - RNA, 62 nt, Human
aggggcauauuuuauauuagugaagagguauuacugacacaauuucuucuauauaugaaccu

SEQ ID NO: 17119 - RNA, 60 nt, Human
gcaggaucuccaacuauaaugcuucuguccuuaaaagcagguggaguugguugaaucugu

SEQ ID NO: 17120 - RNA, 93 nt, Human
uuuaguaaggucaguuugauuggauacuuaaguuuuagaaaugagaaaaauacagaguuuuagaaaugagaucuagagaacacgucuucuaaa

SEQ ID NO: 17121 - RNA, 67 nt, Human
cauugucgucauuggacacguagauucgggcaaguccaccacuacguggccaucugaucuauaaaug

SEQ ID NO: 17122 - RNA, 67 nt, Human
ggugacaaaccauugcugugagccaagcugcuaacaugccuugguuccaacgcgauggcaagucacc

SEQ ID NO: 17123 - RNA, 100 nt, Human
gacgagagcccugaaggcagcgcugccgacgaccucuacagcaugcucgaggaggagaggcagcagaggcaugagcagcgacccgcggcggggcggcguc

SEQ ID NO: 17124 - RNA, 60 nt, Human
ggggcggcauccccagccugguucgggccgugacggcggcggcaugcagggacgcgcccc

SEQ ID NO: 17125 - RNA, 76 nt, Human
cccaggcgucgaagcaaugcuccggucuuagccucccaaguagcggcgaguacaggcacagugccacgacgccggg

SEQ ID NO: 17126 - RNA, 64 nt, Human; identical to SEQ ID NO: 15556

SEQ ID NO: 17127 - RNA, 86 nt, Human
agacuugauguuuuugaaaguugucaccaguuuauugucaccuuccaacugaaccacugucuugacuuucuccccugucauugucu

SEQ ID NO: 17128 - RNA, 64 nt, Human
guauauauauauauauauauauauguaugcgugaguguguguguauauauauauauauauguau

SEQ ID NO: 17129 - RNA, 91 nt, Human
ucacuacagucucagucaacagugugaauguaucauguuuuacuuuaaaugugugugugauacuucuucauuauguccugcgcugcaguga

SEQ ID NO: 17130 - RNA, 70 nt, Human
cauccagccaaagaggucgaagcggcucuggacacuuugggggggucgcgcagggggcucgguggggaug

SEQ ID NO: 17131 - RNA, 80 nt, Human
ucaugucuaagucagagucuccuaaagagcccgaacagcugaggaagcucuucauggaggguugagcuugaaacaacuga

SEQ ID NO: 17132 - RNA, 63 nt, Human
cucuaucugccgagcuucuucaccuacgccaaguacaucgugcaaguggaugguaagauaggg

SEQ ID NO: 17133 - RNA, 90 nt, Human
uccuacgagaugaugaugcagugugugucccgcauguuggcccacccccugcaugucaucucaaugcgcugcaugguccaguuuguggga

SEQ ID NO: 17134 - RNA, 86 nt, Human
ggcacgacggugggaccuuccacugcagacacaaagcacaccaccaccugaggucgaggguuaugauuugaauccuaccaagugcc

SEQ ID NO: 17135 - RNA, 114 nt, Human
cgcgaucgggaauuggcagugagcguguuccagaguucagucugcgccucagguaacacgggccugacgccggcgcgucucucgggaauaaccuggcuguuggugagaucugcg

SEQ ID NO: 17136 - RNA, 79 nt, Human
cuggaugcuuuggagccaagcuuucgucccaugcaagggaaacaaccacuucugggauguccgcugcaaucugcuccgg

SEQ ID NO: 17137 - RNA, 77 nt, Human
gcagaaugcccagagucuucccugguagaugcagguuccauagcgacguucuccugcaaugcacgcugguauucugc

SEQ ID NO: 17138 - RNA, 92 nt, Human
gagggugucuauggagaggcggcggcgcggcugcugaggcggaggcugaggcaguggcgauggcgcccuuuccugaagaaguggacgucuuc

SEQ ID NO: 17139 - RNA, 61 nt, Human
uauuccgcuggaugacaagucagauaacgaagcagaagugucagaacauuccacagguaua

SEQ ID NO: 17140 - RNA, 74 nt, Human
ccuacagcacaaucccccgcucagcuggcugguagggcccuucgccuugcccgcuggcgggcaguagcuguagg

SEQ ID NO: 17141 - RNA, 94 nt, Human
gcgcccgggcgcuacuggaagaggucaaggcgcugcucggcccugcgccugaggacgaggaugagcggccugaggccgaggacagcccgggugc

SEQ ID NO: 17142 - RNA, 75 nt, Human
ggcaguagaggccgcuauggcgaacguuccgugggcagaggucugcgagaaauuccaggcggcgcucgcucuguc

SEQ ID NO: 17143 - RNA, 64 nt, Human
caagucugagcucuggaagccagaagccuuuagccaggaauuuggagaccaggauguagacuug

SEQ ID NO: 17144 - RNA, 72 nt, Human
guugggauucccaucggggagggugcucaugaugaagagguacucaagacaauugacgagggagaugccgau

SEQ ID NO: 17145 - RNA, 63 nt, Human
uaacagcagaagauagaagaguugguacaacaaaucuucacuuagaugugucugaugcuguua

SEQ ID NO: 17146 - RNA, 62 nt, Human
uggcaggcucaaucuggccucuaggcuaccuagcuacuuuguaaggccugaucugggcccca

SEQ ID NO: 17147 - RNA, 65 nt, Human
gaagaugauguuuuuauuccucuguauccaaagagugcuguagaaaacaaaacaucaccucauuc

SEQ ID NO: 17148 - RNA, 70 nt, Human
guuaccuuauuauagcacuucucaaugccacaccugggccagaugugguuaaaaagugcaaccagguagc

SEQ ID NO: 17149 - RNA, 61 nt, Human
guuccaagaaagacaguucuggucaggccuaaagcucuuccgcaauauucuucuuuggaau

SEQ ID NO: 17150 - RNA, 83 nt, Human
aggcaugaaguuugaucgaggcuauauuucuccauacuuuauuaauacaucaaaaggucagaaaugugaauuccaggaugccu

SEQ ID NO: 17151 - RNA, 87 nt, Human; identical to SEQ ID NO: 76

SEQ ID NO: 17152 - RNA, 97 nt, Human
ggcuguggauagcuuggugccaauuggucguggucagcgugaacugauuauuggugacccgacagacugggaaaaccucaauugcuaugacacaauc

SEQ ID NO: 17153 - RNA, 75 nt, Human; identical to SEQ ID NO: 74

SEQ ID NO: 17154 - RNA, 87 nt, Human; identical to SEQ ID NO: 76

SEQ ID NO: 17155 - RNA, 87 nt, Human; identical to SEQ ID NO: 76

SEQ ID NO: 17156 - RNA, 87 nt, Human; identical to SEQ ID NO: 76

SEQ ID NO: 17157 - RNA, 87 nt, Human; identical to SEQ ID NO: 76

SEQ ID NO: 17158 - RNA, 75 nt, Human; identical to SEQ ID NO: 74

SEQ ID NO: 17159 - RNA, 87 nt, Human; identical to SEQ ID NO: 76

SEQ ID NO: 17160 - RNA, 71 nt, Human; identical to SEQ ID NO: 77

SEQ ID NO: 17161 - RNA, 75 nt, Human; identical to SEQ ID NO: 74

SEQ ID NO: 17162 - RNA, 87 nt, Human; identical to SEQ ID NO: 76

SEQ ID NO: 17163 - RNA, 71 nt, Human; identical to SEQ ID NO: 77

SEQ ID NO: 17164 - RNA, 75 nt, Human
gcagcuggaucgggccucagagcaggcggcaggcguugcccacgcugucagcugaggugucaaggucauggcugu

SEQ ID NO: 17165 - RNA, 75 nt, Human; identical to SEQ ID NO: 74

SEQ ID NO: 17166 - RNA, 87 nt, Human; identical to SEQ ID NO: 76

SEQ ID NO: 17167 - RNA, 71 nt, Human; identical to SEQ ID NO: 77

SEQ ID NO: 17168 - RNA, 75 nt, Human
gagauguccucuauucuugaagagcguauccuuggagcugauaccucuguugaucuugaagaaacugggcguguc

SEQ ID NO: 17169 - RNA, 71 nt, Human; identical to SEQ ID NO: 77

SEQ ID NO: 17170 - RNA, 75 nt, Human; identical to SEQ ID NO: 74

SEQ ID NO: 17171 - RNA, 71 nt, Human; identical to SEQ ID NO: 77

SEQ ID NO: 17172 - RNA, 75 nt, Human; identical to SEQ ID NO: 74

SEQ ID NO: 17173 - RNA, 87 nt, Human; identical to SEQ ID NO: 76

SEQ ID NO: 17174 - RNA, 71 nt, Human; identical to SEQ ID NO: 77

SEQ ID NO: 17175 - RNA, 75 nt, Human; identical to SEQ ID NO: 74

SEQ ID NO: 17176 - RNA, 61 nt, Human
gcuauugacacaaucauuaaccagaaacguuucaaugauggaucugaugaaaagaaaaagc

SEQ ID NO: 17177 - RNA, 87 nt, Human; identical to SEQ ID NO: 76

SEQ ID NO: 17178 - RNA, 71 nt, Human; identical to SEQ ID NO: 77

SEQ ID NO: 17179 - RNA, 63 nt, Human; identical to SEQ ID NO: 3963

SEQ ID NO: 17180 - RNA, 75 nt, Human; identical to SEQ ID NO: 74

SEQ ID NO: 17181 - RNA, 71 nt, Human; identical to SEQ ID NO: 77

SEQ ID NO: 17182 - RNA, 75 nt, Human; identical to SEQ ID NO: 74

SEQ ID NO: 17183 - RNA, 87 nt, Human; identical to SEQ ID NO: 76

SEQ ID NO: 17184 - RNA, 78 nt, Human; identical to SEQ ID NO: 99

SEQ ID NO: 17185 - RNA, 66 nt, Human
gaagguuaagcuggcuguccugaaauauuauaaggugggaugagaauggcaaaauuagucgccuuc

SEQ ID NO: 17186 - RNA, 80 nt, Human; identical to SEQ ID NO: 100

SEQ ID NO: 17187 - RNA, 65 nt, Human; identical to SEQ ID NO: 1518

SEQ ID NO: 17188 - RNA, 75 nt, Human; identical to SEQ ID NO: 74

SEQ ID NO: 17189 - RNA, 92 nt, Human
gcugcaaggaacuuccaugccucuaacacucaucuucaaaagacugggacugcugagauguccucuauucuugaagagcguauucuuggagc

SEQ ID NO: 17190 - RNA, 87 nt, Human; identical to SEQ ID NO: 76

SEQ ID NO: 17191 - RNA, 71 nt, Human; identical to SEQ ID NO: 77

SEQ ID NO: 17192 - RNA, 87 nt, Human; identical to SEQ ID NO: 76

SEQ ID NO: 17193 - RNA, 75 nt, Human; identical to SEQ ID NO: 74

SEQ ID NO: 17194 - RNA, 87 nt, Human; identical to SEQ ID NO: 76

SEQ ID NO: 17195 - RNA, 71 nt, Human; identical to SEQ ID NO: 77

SEQ ID NO: 17196 - RNA, 65 nt, Human; identical to SEQ ID NO: 1518

SEQ ID NO: 17197 - RNA, 75 nt, Human; identical to SEQ ID NO: 74

SEQ ID NO: 17198 - RNA, 87 nt, Human; identical to SEQ ID NO: 76

SEQ ID NO: 17199 - RNA, 71 nt, Human; identical to SEQ ID NO: 77

SEQ ID NO: 17200 - RNA, 78 nt, Human; identical to SEQ ID NO: 10175

SEQ ID NO: 17201 - RNA, 63 nt, Human
gagcuguaucugcagguucguaagcauagagacgauuugaauaucuuccagugauaucggcuc

SEQ ID NO: 17202 - RNA, 61 nt, Human
auuacauaugucauugguucccuuuuaauuugaauggguggggauaaaauaaagauguaau

SEQ ID NO: 17203 - RNA, 61 nt, Human
gauguuuuaaacauagaacauugguuggaauaauaacacauuaauaacaauuuaaaauguc

SEQ ID NO: 17204 - RNA, 68 nt, Human
uguauauauuauguacacauagaauguuacauauuauauauaugguuuuagguguauauauauguaua

SEQ ID NO: 17205 - RNA, 77 nt, Human
auaucaaaaggaaguuauaaggccauugagagaaaaucucagaagaagucaacaggcccaagauaccucagugauau

SEQ ID NO: 17206 - RNA, 66 nt, Human
gaugcagaaagaacuugaggugacuaaugacauaauagcaaaacuucaagccaaaguucaugaauc

SEQ ID NO: 17207 - RNA, 65 nt, Human
uaaagaaaaguuacaaccaagaacugggagauuuuccaaagcucuaaagugacugaacagcuuua

SEQ ID NO: 17208 - RNA, 65 nt, Human; identical to SEQ ID NO: 1518

SEQ ID NO: 17209 - RNA, 80 nt, Human
cugcccuggcccaccuccgugcugcgguccuguaugugauggauuugucugagcagugugggcaugggcugagggagcag

SEQ ID NO: 17210 - RNA, 70 nt, Human
cuguugccuaguuuuguacauggaucucauuuuacaagagaaucucucugcaaaaaaaaaaaaaaaacag

SEQ ID NO: 17211 - RNA, 72 nt, Human
gguuauaguacuaccaauguuggugacuugguaagauuauauccaggugauugguguguguguauuauggcu

SEQ ID NO: 17212 - RNA, 76 nt, Human
ccgggguuccaccccuuucuccggcccucagccucccccguacuguggcacugccggccccuggcccuagucccgg

SEQ ID NO: 17213 - RNA, 87 nt, Human
cgggcuugaccggcgucggcccgccgccuccgcugccgcuucgccccaauccggucccucuggcccggccugacccggucuggcuug

SEQ ID NO: 17214 - RNA, 71 nt, Human
cgcuuccuaucucagcgcccugccgccgccgccgcggcccagcgagcggcccugaugcaggccaucaagug

SEQ ID NO: 17215 - RNA, 75 nt, Human; identical to SEQ ID NO: 12725

SEQ ID NO: 17216 - RNA, 60 nt, Human
gcuuaugggauacagcuggacaagaagauuaugacagauuacgcccccuauccuaucagc

SEQ ID NO: 17217 - RNA, 90 nt, Human
ggaggccggaugugaguggagcggccauuuccuguuucucugcaguuuuccucagcuuugggugguggccgcugccgggcaucggcuucc

SEQ ID NO: 17218 - RNA, 76 nt, Human
ccauugauuagguguauuagauacuaauuuggccuauuuuaagaaccaaaaacuaacuucuagacaaacuucaagg

SEQ ID NO: 17219 - RNA, 77 nt, Human
aagcugaaggugcuggaggugccaagugaagugugugcauuuuugauaacuguguacuucuggugacuguacaguuu

SEQ ID NO: 17220 - RNA, 67 nt, Human
acuggcccauggguugcauugagaaccaacguugugcuugacuuguagucccuuuacugcggucagu

SEQ ID NO: 17221 - RNA, 61 nt, Human
gggcuaaaugaucuacagccuuggccuaaucaaauggcuauagcauguggaucucgagcuc

SEQ ID NO: 17222 - RNA, 61 nt, Human
ucuucacgccaucgcacuggacagaggcgucugaaacccugcccuggccaguggcgugaga

SEQ ID NO: 17223 - RNA, 84 nt, Human; identical to SEQ ID NO: 384

SEQ ID NO: 17224 - RNA, 89 nt, Human; identical to SEQ ID NO: 385

SEQ ID NO: 17225 - RNA, 75 nt, Human; identical to SEQ ID NO: 74

SEQ ID NO: 17226 - RNA, 87 nt, Human; identical to SEQ ID NO: 76

SEQ ID NO: 17227 - RNA, 71 nt, Human; identical to SEQ ID NO: 77

SEQ ID NO: 17228 - RNA, 65 nt, Human; identical to SEQ ID NO: 1518

SEQ ID NO: 17229 - RNA, 75 nt, Human; identical to SEQ ID NO: 74

SEQ ID NO: 17230 - RNA, 87 nt, Human; identical to SEQ ID NO: 76

SEQ ID NO: 17231 - RNA, 78 nt, Human
accuucggguccacugguuugaugacacccaccgcaacugucuguggcauaucacgaacagcaaagcgacccaaaggu

SEQ ID NO: 17232 - RNA, 65 nt, Human; identical to SEQ ID NO: 1518

SEQ ID NO: 17233 - RNA, 87 nt, Human; identical to SEQ ID NO: 76

SEQ ID NO: 17234 - RNA, 65 nt, Human; identical to SEQ ID NO: 1518

SEQ ID NO: 17235 - RNA, 75 nt, Human; identical to SEQ ID NO: 74

SEQ ID NO: 17236 - RNA, 87 nt, Human; identical to SEQ ID NO: 76

SEQ ID NO: 17237 - RNA, 71 nt, Human; identical to SEQ ID NO: 77

SEQ ID NO: 17238 - RNA, 75 nt, Human; identical to SEQ ID NO: 74

SEQ ID NO: 17239 - RNA, 75 nt, Human; identical to SEQ ID NO: 74

SEQ ID NO: 17240 - RNA, 87 nt, Human; identical to SEQ ID NO: 76

SEQ ID NO: 17241 - RNA, 71 nt, Human; identical to SEQ ID NO: 77

SEQ ID NO: 17242 - RNA, 61 nt, Human; identical to SEQ ID NO: 1238

SEQ ID NO: 17243 - RNA, 75 nt, Human; identical to SEQ ID NO: 74

SEQ ID NO: 17244 - RNA, 87 nt, Human; identical to SEQ ID NO: 76

SEQ ID NO: 17245 - RNA, 71 nt, Human; identical to SEQ ID NO: 77

SEQ ID NO: 17246 - RNA, 65 nt, Human; identical to SEQ ID NO: 1518

SEQ ID NO: 17247 - RNA, 75 nt, Human; identical to SEQ ID NO: 74

SEQ ID NO: 17248 - RNA, 87 nt, Human; identical to SEQ ID NO: 76

SEQ ID NO: 17249 - RNA, 65 nt, Human; identical to SEQ ID NO: 1518

SEQ ID NO: 17250 - RNA, 75 nt, Human; identical to SEQ ID NO: 74

SEQ ID NO: 17251 - RNA, 87 nt, Human; identical to SEQ ID NO: 76

SEQ ID NO: 17252 - RNA, 75 nt, Human; identical to SEQ ID NO: 74

SEQ ID NO: 17253 - RNA, 87 nt, Human; identical to SEQ ID NO: 76

SEQ ID NO: 17254 - RNA, 71 nt, Human; identical to SEQ ID NO: 77

SEQ ID NO: 17255 - RNA, 62 nt, Human
ggaacuuguaacuuuaugcaagagucuguucuugacuuugacaaaccuucaagugcaauucc

SEQ ID NO: 17256 - RNA, 64 nt, Human
auucuauuagagugguauuuuuauccaauuucacagauuaaaauauaaggcacuucaauaaaau

SEQ ID NO: 17257 - RNA, 68 nt, Human
cauuuugcuuauucauggcaucuuucaaauuuuauuuuaguuuccuuuauuugccaagaauacauaug

SEQ ID NO: 17258 - RNA, 81 nt, Human
uaaggagagaaggaaaggguaggaaaccagggccuuggguuuaguaacaggcauuggaugucuauuaaccaacuauucuua

SEQ ID NO: 17259 - RNA, 68 nt, Human
cucaguaaaacggcauuuuguuagcuuucuccuuacuccaccaggggaauaacagugaauuuagugag

SEQ ID NO: 17260 - RNA, 130 nt, Human
gaagagaagaaaugggagcaggcagcccucgucagcagaccgggagccgcgugggcgcggagccauuugcauuccggucugcguggggcucggggaugcuggugacaggcccgguucccgguggcucgcc

SEQ ID NO: 17261 - RNA, 60 nt, Human; identical to SEQ ID NO: 10165

SEQ ID NO: 17262 - RNA, 95 nt, Human
gccuggcuccagcagccugggcauggcggcgacucccccaaaaacaccccagcugggugggugccugggggccuaggugaggcugguguuggagc

SEQ ID NO: 17263 - RNA, 79 nt, Human
aacucuaaaggaucagcugauuuauaaucuucuaaaggaagaacagaccccccagaauaagauuacaguuguugggguu

SEQ ID NO: 17264 - RNA, 71 nt, Human
agacaaauugaagggagagaugauggaccuccaacauggcagccuuuuccuuagaacaccaaagauugucu

SEQ ID NO: 17265 - RNA, 60 nt, Human
gauuggacauuugaacagacagugggaaacugcaauuacaugccugucuacuguucuauc

SEQ ID NO: 17266 - RNA, 75 nt, Human
ggugcgggagcgacggggcccagggauuguguuuaaaguagugcuucuaccaacaugucccgugguuccagcgcc

SEQ ID NO: 17267 - RNA, 79 nt, Human
cccgcguaucauacaccuuccuaggggcgugagucaagggcucaggauugcccauguggaucacugugugcugcucggg

SEQ ID NO: 17268 - RNA, 62 nt, Human
gggcucgggcucugggcucaccaccucaucgaucagagggaggcccaguucuguccgggccc

SEQ ID NO: 17269 - RNA, 65 nt, Human
gcauccuugguuggaagggccaagcacacaccuaacaggcagcugggccucucgacuuggggugc

SEQ ID NO: 17270 - RNA, 74 nt, Human; identical to SEQ ID NO: 15934

SEQ ID NO: 17271 - RNA, 61 nt, Human
gcggacauuaaacaccaugacgguuuacguccacgggggccucaccaaacaauugucccgc

SEQ ID NO: 17272 - RNA, 82 nt, Human
ggcaccagcaagagcccagggcucaggucgaugcgggguaacuccgggcauggaccugauaagccucggcucugcgcaagcc

SEQ ID NO: 17273 - RNA, 62 nt, Human
ggccuauugaagacaccugcucaguaugacgcuucugagcuaaaagcuuccaugaaggggcu

SEQ ID NO: 17274 - RNA, 84 nt, Human
ugguaucgacugccuugcuacaccucaggcccggggcugccuugccacccguggccacuucggccaagugcccuuuugaugcca

SEQ ID NO: 17275 - RNA, 64 nt, Human
cccuccagaaccugugcgagaaagaccugaaggagauccagcaccaccugaagaaacuggaggg

SEQ ID NO: 17276 - RNA, 108 nt, Human
cauaacuguaaauuguugguagguagaaguuaauauuugugguucauguauauuuugaccagaguauauuuaaguauauaauuucagcuuccuugauuuagaaauaug

SEQ ID NO: 17277 - RNA, 61 nt, Human; identical to SEQ ID NO: 3214

SEQ ID NO: 17278 - RNA, 65 nt, Human; identical to SEQ ID NO: 5312

SEQ ID NO: 17279 - RNA, 85 nt, Human; identical to SEQ ID NO: 3621

SEQ ID NO: 17280 - RNA, 62 nt, Human
gguuuaccauaugugaaauuuguuuuugacuuacaaaaaugcccaugucacauggguucacc

SEQ ID NO: 17281 - RNA, 97 nt, Human
uaacaaaaaccacuuuuauuuuuaaaucaauuuacuaucaaauacacaacagaacucgguguggaggcaguguuugauuucaacugguuaucuguua

SEQ ID NO: 17282 - RNA, 96 nt, Human
uccucacuguagcaucuugucaguggcacuacuuuuaaaaaaaugauucccuuuagaaaagcuaguauauuuguauucagagauuacaagugaggg

SEQ ID NO: 17283 - RNA, 81 nt, Human
ucgguguggaggcaguguuugauuucaacugguuaucuguuaaaaggcuugugucccagugcaacacuaccuuugugcaga

SEQ ID NO: 17284 - RNA, 78 nt, Human; identical to SEQ ID NO: 99

SEQ ID NO: 17285 - RNA, 65 nt, Human; identical to SEQ ID NO: 247

SEQ ID NO: 17286 - RNA, 80 nt, Human; identical to SEQ ID NO: 100

SEQ ID NO: 17287 - RNA, 63 nt, Human
caggggaggggaagaagguggacauugcggguaucuaccccccugugaccacccccuucacug

SEQ ID NO: 17288 - RNA, 72 nt, Human
cuggguccccaagucuggucuucugugaggcaggggcuaagcaggagcuuguccaggaaugugggggucugg

SEQ ID NO: 17289 - RNA, 75 nt, Human
cuguggggggcgucugcgcccuggccaauguccugggggcucagguaugccagcuggagcgacugugcugcacgg

SEQ ID NO: 17290 - RNA, 89 nt, Human
gaccucauuguuccacaaauugugccucuauuuuuaccauuuuggguaaacgucaggauagagauaccacauguggcaagccaaagguc

SEQ ID NO: 17291 - RNA, 63 nt, Human; identical to SEQ ID NO: 2971

SEQ ID NO: 17292 - RNA, 61 nt, Human; identical to SEQ ID NO: 1092

SEQ ID NO: 17293 - RNA, 72 nt, Human
uuagaaacuauugacuguccauagugguuauugauauuccucucaacccuuuuaagucugauccccuucuaa

SEQ ID NO: 17294 - RNA, 82 nt, Human; identical to SEQ ID NO: 1770

SEQ ID NO: 17295 - RNA, 65 nt, Human
ucuccuugcagcucaaucaaggcaaucugcauaguaagaagagugugggauuuggaggcaagaga

SEQ ID NO: 17296 - RNA, 69 nt, Human
uuuuucagaagguuuuaaaagacugaugaauacugauggaaaauuacacuuaaaaccacuuaugaaaaa

SEQ ID NO: 17297 - RNA, 128 nt, Human
guugacacucaucucuuuugucuuaugcuuagccauauuuaaaucuuaaauuuaauagagucuagugaaaaaaugagugggaagaaugaauauaaaaguaauaauauaaggaaaaagggaaaguaaac

SEQ ID NO: 17298 - RNA, 63 nt, Human; identical to SEQ ID NO: 981

SEQ ID NO: 17299 - RNA, 65 nt, Human; identical to SEQ ID NO: 1253

SEQ ID NO: 17300 - RNA, 60 nt, Human
gagaaggccagguuuucuaccuaugggguuuuucuacccggagauacuaaugggcuucuu

SEQ ID NO: 17301 - RNA, 78 nt, Human
gcugcuaaucauagugguauuugguugggaaugacuuguggagcagguaguaccuuuacggcuguggcuuuuggcagc

SEQ ID NO: 17302 - RNA, 66 nt, Human
uagccucacagaugacuuaaaaaucugguauuuucuacaucagaguucauagcggggauggggcua

SEQ ID NO: 17303 - RNA, 60 nt, Human; identical to SEQ ID NO: 7955

SEQ ID NO: 17304 - RNA, 70 nt, Human
acccucuuuauucacaaguguaccucugcuaaccauaauuacaucacuaagccuguuaguuugagagggu

SEQ ID NO: 17305 - RNA, 64 nt, Human
gugcccaaucaauucuugguuuauucuuuuccaaaaaguaaaauaaccaaagucuuaaaaguac

SEQ ID NO: 17306 - RNA, 73 nt, Human
guaacacaacuuuuauaauuaaccacugaaguugucuuuaaggacaaaacuuaaauuuuaaaauggguguuac

SEQ ID NO: 17307 - RNA, 66 nt, Human
guugccuugcuccaagucugggcaucgugacauugccgugaugcccagaagaaaguuaauggcaau

SEQ ID NO: 17308 - RNA, 62 nt, Human
gaaaaaguuuggcaaaggcacagguuuuggcaguagaucuuguuuuucuugccauccacuuc

SEQ ID NO: 17309 - RNA, 111 nt, Human
ggauauggagaaugauaccagguaucaagcucauagcggccaaaagcaauuguuuuaaucauguugcuucccucugugauuuggacuugcagccuuaacuucuccaaaucc

SEQ ID NO: 17310 - RNA, 62 nt, Human
ugaucuccugugggucuggugcuauauucuagagaaguuugcaccuggacaauaggaauucg

SEQ ID NO: 17311 - RNA, 62 nt, Human; identical to SEQ ID NO: 6172

SEQ ID NO: 17312 - RNA, 82 nt, Human
gcugcugcugcuccccagcccaccagugccuggccagccugcccccuucccuggacagggcuguggagauggcuccggcggc

SEQ ID NO: 17313 - RNA, 80 nt, Human; identical to SEQ ID NO: 9351

SEQ ID NO: 17314 - RNA, 84 nt, Human; identical to SEQ ID NO: 2448

SEQ ID NO: 17315 - RNA, 98 nt, Human
ugucggcuuugcuggcccagcaagccugauaagcaugaagcucuuaucuuugguggcuguggucggguguuugcuggugcccccagcugaagccaaca

SEQ ID NO: 17316 - RNA, 78 nt, Human; identical to SEQ ID NO: 99

SEQ ID NO: 17317 - RNA, 80 nt, Human; identical to SEQ ID NO: 100

SEQ ID NO: 17318 - RNA, 108 nt, Human
ggcagcugcugcguggaugugcugggugcugagcaagcuggagcucaggcucucauacauuuuggcccugccugcuuaagcccuccagcccgcccacugcccguugcc

SEQ ID NO: 17319 - RNA, 93 nt, Human
ggcuuuggcuacucuccugcgcccacgguaccuggaccugcuagucuccagcccagcuuuuccccaaccaguggguucccugaguccagagcc

SEQ ID NO: 17320 - RNA, 76 nt, Human
gugcuucgucaacguucuguggccuuggagcucugugucaaggccuuugaggcccagaacccagaccccaaagcgc

SEQ ID NO: 17321 - RNA, 101 nt, Human; identical to SEQ ID NO: 411

SEQ ID NO: 17322 - RNA, 101 nt, Human
cagguccuuccuuuagagucugguuguugcaccaucugcuugguuggcuggcagcugagagcccugcugugggagagcgaagggggucaaaggaagacuug

SEQ ID NO: 17323 - RNA, 69 nt, Human
ugggaaccacgucaccacgguacaacaagcagcaagcaauguauuuaccauggcgaggggcacauuuca

SEQ ID NO: 17324 - RNA, 69 nt, Human
aaggcuugaucuuagaaguucaaaauuguuccauaugguaaagacacauucacugccuggucaggccuu

SEQ ID NO: 17325 - RNA, 69 nt, Human
guauuuccagcuguuuuucaauaagcaccauccacacgagucaguauuauuuucaaaaggcuucuauac

SEQ ID NO: 17326 - RNA, 130 nt, Human
uuuccuuuccugcauuucugaauuugucauguugcuuaucuugcucagaauuuccuucauucucaaaaguaugggugugguacagauuuucgggcagcagcauguaacacuuuauagguagguuuuccaa

SEQ ID NO: 17327 - RNA, 84 nt, Human
aaaugauguuguggaugcaacagaacuccuacaauguaaaauaaucguucacauuugagggguucuuauccacuuugcuuauuu

SEQ ID NO: 17328 - RNA, 78 nt, Human
ccaccagucuguccccaucucugaaauccuuccuucucuuucccccuaagucuuuugagugucaucauguacuggugg

SEQ ID NO: 17329 - RNA, 75 nt, Human
gccagcucagccuuggcuuuuaacucaauauuccaguccauaggggugguuaaaaguugcugcaaggcugcaggc

SEQ ID NO: 17330 - RNA, 62 nt, Human
cuugauggauaaaagucuucauguuggcacucaaugugccuuaacaagaagaugcccacaag

SEQ ID NO: 17331 - RNA, 75 nt, Human; identical to SEQ ID NO: 74

SEQ ID NO: 17332 - RNA, 71 nt, Human; identical to SEQ ID NO: 77

SEQ ID NO: 17333 - RNA, 66 nt, Human
gcugacgugggugugaucgcuagcagcuucgagaucgggaaccuggcgcucauccucuucgugagc

SEQ ID NO: 17334 - RNA, 82 nt, Human
gggacacgcuacgcccggccaccucccgguggcacgaauccccccuugcgccuacccuuggaggccggcgcgcccccccccc

SEQ ID NO: 17335 - RNA, 68 nt, Human
guguccugcuuuuccaacaucaagaucuuccugguguccgagugcgcccugaugcuggcgcagggcac

SEQ ID NO: 17336 - RNA, 99 nt, Human
gggccgucuccucaaacagcccgaagaucaggaucuuguucuucaugcccugcuggaaggacgaguuccuccgggucuugcagaugaucggaucggccc

SEQ ID NO: 17337 - RNA, 74 nt, Human
uggacgacaacgaugcucacaaagaaggccguguggcaggugaacuccaccaccuuccucugcucguaugucca

SEQ ID NO: 17338 - RNA, 81 nt, Human
aacccgguggaaaaaaggggcuccccggaggacaaccccccccuggggggguuuacuaaaucccggggccccggccggguu

SEQ ID NO: 17339 - RNA, 79 nt, Human
cgggggggguccccccaaaagggguucucucuuuccaagcgccgcgcuggggaaaagggggccccgggucccccccccg

SEQ ID NO: 17340 - RNA, 65 nt, Human
gggaacaaaaaaaggggggggcccacccccccccccaaaaagggccccccccuucaaaaaacccc

SEQ ID NO: 17341 - RNA, 63 nt, Human
gggugagccccaggauucccccuaaccccgggggcccccgaaggggguucucaagguucaccc

SEQ ID NO: 17342 - RNA, 75 nt, Human; identical to SEQ ID NO: 74

SEQ ID NO: 17343 - RNA, 87 nt, Human; identical to SEQ ID NO: 76

SEQ ID NO: 17344 - RNA, 71 nt, Human; identical to SEQ ID NO: 77

SEQ ID NO: 17345 - RNA, 78 nt, Human; identical to SEQ ID NO: 99

SEQ ID NO: 17346 - RNA, 80 nt, Human; identical to SEQ ID NO: 100

SEQ ID NO: 17347 - RNA, 75 nt, Human
cuacggggaugaucgucgugguggcagaggaggcuaugaucgaggcggcuaccggggccgcggcggggaccgugg

SEQ ID NO: 17348 - RNA, 72 nt, Human
cgcugugcgugagcugcgacggcaagguggagcacuaccgcaucauguaccaugccagcaagcucagcaucg

SEQ ID NO: 17349 - RNA, 78 nt, Human
gaggagguguacuuugagaaccucuuguugcugguggagcacuacaccucagacguuuauuuuuucuguacgcgccuc

SEQ ID NO: 17350 - RNA, 61 nt, Human; identical to SEQ ID NO: 823

SEQ ID NO: 17351 - RNA, 83 nt, Human; identical to SEQ ID NO: 11462

SEQ ID NO: 17352 - RNA, 72 nt, Human
gggauggaaagucacccguaaagauggcaaugccagugggaacacgcugccugaagcucuggacugcauccu

SEQ ID NO: 17353 - RNA, 79 nt, Human; identical to SEQ ID NO: 1810

SEQ ID NO: 17354 - RNA, 81 nt, Human
cauggcaaccgccaaggccguugcugcuggcaauuccugucgccaggaagaugucauugccacagccucugagccgccgug

SEQ ID NO: 17355 - RNA, 76 nt, Human
ucaacgcagugaaagauguagccaaagcccugugagaccucaucagugcaacgaaggcugcagcuggcaaaguugg

SEQ ID NO: 17356 - RNA, 73 nt, Human
agaagaaggauagguagcccuuagugccccagcuuucagcuuguuucugugggcagcuacugucuuauuuucu

SEQ ID NO: 17357 - RNA, 101 nt, Human
ugaggcaggagaaucacuugaaccccaggaggcggagguugcagugagcugagaucacgccacugcacuccagccuggcgacugagugagacuccgucuca

SEQ ID NO: 17358 - RNA, 65 nt, Human
gaguacccaagcaaugccguggaggaggucacucagaacaacuuccggcuccucugcaagggcuc

SEQ ID NO: 17359 - RNA, 63 nt, Human
gggagugucucacucaucauucugcucaccgauggcgaccccacuguggaggagacuaacccc

SEQ ID NO: 17360 - RNA, 61 nt, Human
ugguucugcuuuuauacccucuggugucucaccagaaauguucuugcuagcagaaauacua

SEQ ID NO: 17361 - RNA, 73 nt, Human
uuucugugacagucacugcccucaggcuuggccuguccugauaggcugggugguagugcaucuuccauagggg

SEQ ID NO: 17362 - RNA, 106 nt, Human
uuguuucggacuauagagugcugauggcagagauuggugaggauuuggauaaaucugauguguccucauuaauuuuccucaugaaggauuacaugggccgaggcag

SEQ ID NO: 17363 - RNA, 88 nt, Human
gaagaugauacuguugugguagcacuggacuuacaaggugugguauucccuuacuuuccacgacuggggcgcuacaaucucaauuuuc

SEQ ID NO: 17364 - RNA, 97 nt, Human
ggagucaggaacuacggauuuugggauaaagauaaaagcagauaugauguuuucuguuuuacauccaauuucaauggccguuuuuacuaucugaucc

SEQ ID NO: 17365 - RNA, 62 nt, Human
cuggagcagugggugaccgaggaggccgccugccuuugugccgccuucgccaaccacuccgg

SEQ ID NO: 17366 - RNA, 70 nt, Human
ccacuuguaaaugacuauaaacuauuaugugauugcuuuuuuuuuuuagaaugucuuguuuaaauagugg

SEQ ID NO: 17367 - RNA, 82 nt, Human
uauggaaggguguaaagauucuuuugaaagguuuauucacauuguagaacagcaaaugacauuuuuacaguauuuuuuugua

SEQ ID NO: 17368 - RNA, 66 nt, Human
ugguauauguguauuagugaaacauuguaaaggugaacuucuaccucuguaucuaaauguauacca

SEQ ID NO: 17369 - RNA, 75 nt, Human
uuccucaggaaguugcuguguuucauuucuuuggauggacucuuaucuagaauacauagcagcucugcaaaggaa

SEQ ID NO: 17370 - RNA, 76 nt, Human
gccagaaacucauaauccagaggaacuguguccagcaagcgggcguaguugccauugaucugggcgaugaucuggu

SEQ ID NO: 17371 - RNA, 72 nt, Human
ugcagggcuuaauaaaguaguuguugcccagaaucuuggaagguggcuuaucacuguagccagcccuuugcg

SEQ ID NO: 17372 - RNA, 74 nt, Human
gcuuaauauaguggugagaaguguaugguguuuaacggaggggggggaguguuaaggguuauuguggguugagu

SEQ ID NO: 17373 - RNA, 67 nt, Human
guguggcaaguaagguuuauauuugugaguuguguuggcgggcagauguuuuuuuucuuggauauau

SEQ ID NO: 17374 - RNA, 87 nt, Human
uagaugggggaaauguuuguuuuggguuuuggagggggguguuuuuuuuuuuuuguuuggagauguauauuauauuuuuaauaucua

SEQ ID NO: 17375 - RNA, 62 nt, Human
uuuacaggguugaagaguuugggaggggguuuuacguuguuagaggauggaaauuuuguggg

SEQ ID NO: 17376 - RNA, 81 nt, Human
agcacguuggcaguguuuuuuuuggcuuuucguguuguuggggcggcggcgauguuggugggggugcgcuggggguguguu

SEQ ID NO: 17377 - RNA, 65 nt, Human
ccggagguugagugcaguggguuugguugguugggucugccugggguuguguguauuguuuccgg

SEQ ID NO: 17378 - RNA, 101 nt, Human
cguggagguguagagggaucgcggucuggucgugugauuuugggaguuguuuggggugcggguucugugucgggugggagcguuuguuguggaccuccgcg

SEQ ID NO: 17379 - RNA, 87 nt, Human; identical to SEQ ID NO: 76

SEQ ID NO: 17380 - RNA, 71 nt, Human; identical to SEQ ID NO: 77

SEQ ID NO: 17381 - RNA, 90 nt, Human
cauaggaagccauaguucuuuguuaccacagggaauuacguccaagugaauuuccugauucucaggugacuaaaaagcuagcacucuaug

SEQ ID NO: 17382 - RNA, 105 nt, Human
gccccccuuuuauaugagaugaauaaccaauaauaauuuuuuuuaauaagaccccaaugaacuuguauuaaaaggauuuuguucccagaauauaaaaaccaggac

SEQ ID NO: 17383 - RNA, 74 nt, Human
uugcauuuccagaauucugaguuaaagaaacaaaguguuugcuuuguaacaggccaaaauucuauuuccugcaa

SEQ ID NO: 17384 - RNA, 95 nt, Human
guuugagguguuugugguauaauuuuuuugcguuuaguaugguguguaguuauauauauugaguuuaaggguuguguguauagaguauuuuggau

SEQ ID NO: 17385 - RNA, 75 nt, Human
uaauuuauguuuauuauuuauacguuauauucgguuuauuuauuguguugguguguaaaauguagguguuuauug

SEQ ID NO: 17386 - RNA, 110 nt, Human
acuuggagcaaaagauugaggugcauuucaugccuccuuuugagagucuugcucugucgcccaggcuguagugcaguggcgcaaucuuggcugcaccucagccuccaagu

SEQ ID NO: 17387 - RNA, 65 nt, Human
cuauguaaauucuagagaguagcagaccucucaucugaagucuuagugaaucucuuuugacauag

SEQ ID NO: 17388 - RNA, 65 nt, Human
guaucuuucuucuuuccccuuucuuuuucuaaacaagagaagaaaagcguaauagaggggagaac

SEQ ID NO: 17389 - RNA, 72 nt, Human
gacacaaagaugaaaagcuuggccacaaaggagcugacggugccguggcgagagagauccaucuugacgguc

SEQ ID NO: 17390 - RNA, 60 nt, Human
ggugagggccaccaccccacugugggggcucaccuuccggguggugaaaaagcccuccuc

SEQ ID NO: 17391 - RNA, 95 nt, Human
cucaggaggacuuguuugcacacagagcaauguuaggcacugcuguuuugggaauuuggcuuucauuaauguucuaaggcagauaucuacuuggg

SEQ ID NO: 17392 - RNA, 131 nt, Human; identical to SEQ ID NO: 6294

SEQ ID NO: 17393 - RNA, 61 nt, Human; identical to SEQ ID NO: 776

SEQ ID NO: 17394 - RNA, 77 nt, Human
cccaaugcuggucucaguaaaacacugagguggaagcuuacacaucucccucagccucugguuuuucagcacuuggg

SEQ ID NO: 17395 - RNA, 92 nt, Human
cgcuacuggcaagucugucuggggcucccucgcuguccagaacagcccuaaggguugccaccgggacaagaggacccagauugucuacagug

SEQ ID NO: 17396 - RNA, 67 nt, Human
ucaggccguugcugagcucaacgggacccagguggagucuguacagcucaaagucaacauagcccga

SEQ ID NO: 17397 - RNA, 88 nt, Human
uccaugugacugucggcgggcuuugucucuggauucgauggcucugcgggcacagccaucaucacagaagagcaugcagccaugugga

SEQ ID NO: 17398 - RNA, 70 nt, Human
ccauuuaaugaccagcagucacugagcgcugugaaaauucacucagugauaccccguguggucuugaagg

SEQ ID NO: 17399 - RNA, 62 nt, Human
gugauucucucagcccugagguauacagaaucauuugccucagacugcuguuggauuuuaac

SEQ ID NO: 17400 - RNA, 86 nt, Human
guggcacagcuggagaguggggagcugggacuugagcccagguaguguguccccagcaccuucaacuaaacuccauucugugcugc

SEQ ID NO: 17401 - RNA, 72 nt, Human
uuuuuuucagugaacauguuuuuauugaacaccaacuuaauuucaggaacauuucagguacauugucagaaa

SEQ ID NO: 17402 - RNA, 61 nt, Human; identical to SEQ ID NO: 776

SEQ ID NO: 17403 - RNA, 87 nt, Human
agacaucacgguggaggacaugaacgagcuagagcgacaguuucuugaauugcugcaguucagacaucaauguuccuuccagugucu

SEQ ID NO: 17404 - RNA, 63 nt, Human
uagguugagaaaagacagacuugggguagagcuaggccgagucgcccucccuuucucuuuuua

SEQ ID NO: 17405 - RNA, 60 nt, Human; identical to SEQ ID NO: 3438

SEQ ID NO: 17406 - RNA, 76 nt, Human
guauacagguccuucagggaggcaagagaccuuucgacuggucugcaggugccuccaaaugcugguccuguggaac

SEQ ID NO: 17407 - RNA, 67 nt, Human
ccagcaacgacauguaccacagccgcgcgcugcagguggugcgcgcccgcaagcagaucguagcugg

SEQ ID NO: 17408 - RNA, 75 nt, Human; identical to SEQ ID NO: 197

SEQ ID NO: 17409 - RNA, 67 nt, Human
agccccaccucggcccgauaagcugacacuaagaacuugagggagagcgaacggcucgagugggucu

SEQ ID NO: 17410 - RNA, 110 nt, Human
gagcggggccgggcgggagggugggcaggccgcggcggccugggcucgcgggagcucacuuuguuccugccccgccggcggggcgagccgguucucuccccgucucucuc

SEQ ID NO: 17411 - RNA, 86 nt, Human
gccauccugucggugaacggcaccgaccugcgccaggccacccacgaccaggccgugcaggcgcugaagcgcgcgggcaaggaggu

SEQ ID NO: 17412 - RNA, 108 nt, Human
aaauggaagaagauacaguauuguuuagaucagaaucauuaaaaaauauuuuuguuuaguaaguuugaagauuucuggcuuuuaggccuuuucuauuuuguuccauuu

SEQ ID NO: 17413 - RNA, 66 nt, Human; identical to SEQ ID NO: 1526

SEQ ID NO: 17414 - RNA, 104 nt, Human
agauguuaagguaugcuucaaaaauuuuguaaauguuuauuuuaaacuuaucuguuuguaaauuguaacugauuaagaauugugauaguucagcuugaaugucu

SEQ ID NO: 17415 - RNA, 61 nt, Human
cuccuguggugaauggauaaguaaaggcagaaaagauuuuuugucauaccuccaugugggg

SEQ ID NO: 17416 - RNA, 84 nt, Human; identical to SEQ ID NO: 286

SEQ ID NO: 17417 - RNA, 89 nt, Human; identical to SEQ ID NO: 288

SEQ ID NO: 17418 - RNA, 94 nt, Human; identical to SEQ ID NO: 5398

SEQ ID NO: 17419 - RNA, 102 nt, Human; identical to SEQ ID NO: 2701

SEQ ID NO: 17420 - RNA, 87 nt, Human
cguuacgggugcuggcggcugcagccggaguucaaaccuaagcagcuggaaggaaccauggccaacugugagcguaccuucauugcg

SEQ ID NO: 17421 - RNA, 92 nt, Human
ucuugugggagagauuaucaagcguuuugagcagaaaggauuccgccuuguuggucugaaauucaugcaagcuuccgaagaucuucucaagg

SEQ ID NO: 17422 - RNA, 98 nt, Human
caugguggcgcaugucuguagucccagcuacucaggagacuaaggugaaaagaucaucugagccugggaaguuguggcugcagugaguugugaucaug

SEQ ID NO: 17423 - RNA, 78 nt, Human
gagguuaagugacuugcucaaugccacacugaaaauuuagcacaaagccaggucuggagcagagguggcuugaaccuc

SEQ ID NO: 17424 - RNA, 81 nt, Human
uucauccauuucuguauuuguauccauuucuguauccccagugcuucauacaguaggauuuaauauaugcagggugaugag

SEQ ID NO: 17425 - RNA, 71 nt, Human
gaggacgugggggcugcugcccaacacggaggcugggcuggccugguccgugggcucagguucucauccuc

SEQ ID NO: 17426 - RNA, 99 nt, Human
ggugaguccuucaacuacaucugcaagguuuuauuucuuaggaaaauauuuaaagcaaauauuucaaaaaugacuaaaucugagugguagggagucacu

SEQ ID NO: 17427 - RNA, 102 nt, Human
gugcaucugccuccugugcgucucugugcacacgcuuguaucuggaugcagaguccugugcccaguguacaugcacagaugugcgcaucuggguagaugugc

SEQ ID NO: 17428 - RNA, 63 nt, Human
caguguggagcaggggcugggucugaggccccuccugaggcuucauccuugcucugcagccug

SEQ ID NO: 17429 - RNA, 87 nt, Human
ccccacagcugggccuccuuccucuuuuccaagccccuuccagaagaguggccacugggcaggcaccggaaauggccaucugcgggg

SEQ ID NO: 17430 - RNA, 65 nt, Human
ggaacagcgguggaggccgagcaguccccaccuccuuggguggcucaguccucagccucuggucc

SEQ ID NO: 17431 - RNA, 63 nt, Human; identical to SEQ ID NO: 11804

SEQ ID NO: 17432 - RNA, 86 nt, Human
gccauuggccaggccaccagggguccccaugauaaugcacagcuaguugcuugagcaugguuauggugauucgugcccccaacagc

SEQ ID NO: 17433 - RNA, 105 nt, Human
guguauguuuuuuugugucuuggggaagcuuugaaauacuugcugauuuauggagagugaaaagugaaccagacuuucucagaacauuuagaaaaacucagacac

SEQ ID NO: 17434 - RNA, 60 nt, Human
gcaucuauucauacauuaaauuauguuuccuguucauaauaucaaacaucucacaggugc

SEQ ID NO: 17435 - RNA, 66 nt, Human
uaauggucuuaugccaauccaugcagaaaaauaagacacaaugcaggagucagaugaggaccauua

SEQ ID NO: 17436 - RNA, 62 nt, Human
augcaguauuugguuuccuguuccuguguuaauuugcuuaggauaauggccuccagcugcau

SEQ ID NO: 17437 - RNA, 80 nt, Human
cgugagccaauucucccuaauaaacucccuuauauauguagucauauauccuacuaguucuguuccucuggagaaucaug

SEQ ID NO: 17438 - RNA, 82 nt, Human
uaauacaaaauccuugucaguuuugcuagauguuuaucaauuuuauacauucuuuuagaagacuuuauuuuauuuuguuuua

SEQ ID NO: 17439 - RNA, 93 nt, Human
agacugaggaccaagacugacacagacucucuucuguuucccuuaucuccuuuccaaaguaagucugugaaucuacccugguccuuuccuucu

SEQ ID NO: 17440 - RNA, 69 nt, Human; identical to SEQ ID NO: 16589

SEQ ID NO: 17441 - RNA, 63 nt, Human; identical to SEQ ID NO: 16591

SEQ ID NO: 17442 - RNA, 70 nt, Human
caucaugcaguuucuucauuagguaguccagcuggauuuucuuacaugacagcagaaacagucaaagaug

SEQ ID NO: 17443 - RNA, 62 nt, Human
ggcucauucgauaucuccucacucaccugucuggugccucggugauggcuguugugugagcc

SEQ ID NO: 17444 - RNA, 63 nt, Human
uaguuauguguugugugauaaaccauauaaaauuuagugucuuaaaaucacaacacuuuauug

SEQ ID NO: 17445 - RNA, 101 nt, Human
ugcuauagaauguuagaugacauauuauugacugagggauuucuggauaagagauuacuaacucauguuuucugaaucucgugauuuaaaauuuuguagua

SEQ ID NO: 17446 - RNA, 66 nt, Human
caacuccgccucuggccuggccucuucaacugugcugugggagaggaguugcugaagacugaguug

SEQ ID NO: 17447 - RNA, 63 nt, Human
gcaccgcagcacccuugggagcucccagugccucugggugacuugggggugccagcauugugc

SEQ ID NO: 17448 - RNA, 72 nt, Human
ugaugaaaugcacuuucccgugcagcaguguucuuuugccugucaacugcugggugguuuuugcauucauca

SEQ ID NO: 17449 - RNA, 85 nt, Human
ugcaaagcgcucaaauguggaagccagucauuggcauuuuuauuuuuuauugauugauugauuuuuucaccaguggcuuuuugua

SEQ ID NO: 17450 - RNA, 77 nt, Human
gccugugaaccaaagcuucgugcacauguguuccccuaaagguuggggagccucgcugugucuugcuguucccaggc

SEQ ID NO: 17451 - RNA, 67 nt, Human
gucuugccuccugucugcagcugugaauagucauuugacugugacuguugcccuuagccagccagau

SEQ ID NO: 17452 - RNA, 60 nt, Human
cggcauuuugccuuccuguuuuugcucacccagaaacgcuggugaaaguaaaagaugcug

SEQ ID NO: 17453 - RNA, 85 nt, Human
ucggggaaaugugcgcggaaccccuauuuguuuauuuuucuaaauacauucaaauauguauccgcucaugagacaauaacccuga

SEQ ID NO: 17454 - RNA, 64 nt, Human
gaggcugggcugagcaggagcgcaaugaauugucagacagcuggaguucagugagccagacuuc

SEQ ID NO: 17455 - RNA, 68 nt, Human; identical to SEQ ID NO: 4221

SEQ ID NO: 17456 - RNA, 96 nt, Human
cacguguacauauguauagguacgagcgcugcggccuccccgugcgcccucccgcgaccgggggcccgguuuguauguacauagaauguauaggug

SEQ ID NO: 17457 - RNA, 69 nt, Human
gcuuugcacuucggaaccuguugcguuuugacccacggagguggaggaguaacuuuuugacauguuggc

SEQ ID NO: 17458 - RNA, 62 nt, Human
acuggaaggauggauauagaccaccugcuggucgaucaguguccgguaacccuccuugcggu

SEQ ID NO: 17459 - RNA, 88 nt, Human
uuccccccuuccugugugcuggggaguuagcugugagcuggcuggggugggguccguggcuggguccguggcugggucugauggggaa

SEQ ID NO: 17460 - RNA, 71 nt, Human
auccccguucccgauuccuguaguagcggcuguauugcagccgccugccgaacugacccgggucuguggau

SEQ ID NO: 17461 - RNA, 65 nt, Human
gcgcaguuucaucuagcgacuggucacccuugcaauuauggauauuuacucgcgucccacugcgc

SEQ ID NO: 17462 - RNA, 74 nt, Human
ggucccucuggcgccguucgguuucucuuauugccuucacugaggaugagucccuuuguggcucuauguggacc

SEQ ID NO: 17463 - RNA, 69 nt, Human
aggaggaguuuuuuuuuuuucuuuuuauuuuuuuuuuuuuuuuaaaaaaaaaaaaaaaaaaucccuccu

SEQ ID NO: 17464 - RNA, 81 nt, Human
cagaccccagacacccauuguccauagccuucucagggcagagugggcugguuguguugacaauaaaacaguguugguuug

SEQ ID NO: 17465 - RNA, 85 nt, Human
augauccaucuguguaguuucugaacagucagcgauuccagguuuuaaauaguuguaaauuuucaguuucuacacacuuuaucau

SEQ ID NO: 17466 - RNA, 76 nt, Human
gaucgcguggccgccaaaagaugaggaccccgccaacugaucauggcagcaaaucauaggcaagcggccgcggauc

SEQ ID NO: 17467 - RNA, 60 nt, Human
ggauugugggggcaaugaaugaagcgaacagauuuucguucauuuugguucucaggguuu

SEQ ID NO: 17468 - RNA, 61 nt, Human; identical to SEQ ID NO: 823

SEQ ID NO: 17469 - RNA, 65 nt, Human
gaagucagcacuuacauuacgaaaauggguacaaccccgacacaguagcaauuggugccaauuuc

SEQ ID NO: 17470 - RNA, 61 nt, Human
ggugacaacaugcuggagccaagugcuaacaugccugugguucaagggauggaaagucacc

SEQ ID NO: 17471 - RNA, 89 nt, Human
cagagcugcaaggccuucgcuggcucuccugaguacgugaaccuccccaucaauggcaacgggaaacagugaggguuggggugacucug

SEQ ID NO: 17472 - RNA, 62 nt, Human
ggcaagaccuucguugugggagaccagaucuccuucgcugacuacaaccugcuggacuugcu

SEQ ID NO: 17473 - RNA, 64 nt, Human
gguguacaggguaaaugacggcguggaguagcugcgcugcaaauacgucgcccucgucuacacc

SEQ ID NO: 17474 - RNA, 67 nt, Human
gcauauucauggcuuagauuuuaaaucacauuuacagaugagggaaaacuucuaggccuaaacaggu

SEQ ID NO: 17475 - RNA, 73 nt, Human
guuaguucaguacuuauuagcugcaggagcuaacguucaugcaagaacagcaacaggggauacagcgacuaac

SEQ ID NO: 17476 - RNA, 83 nt, Human
acuggaacaacguuugacgguguuggggggugcuguacauuggcugauaacacuuagcaaacacugaucuuacugugugaagu

SEQ ID NO: 17477 - RNA, 61 nt, Human
uaguguugaagguugugcguccacaccuacuuaguggcucaguggaaagcacgucgcauua

SEQ ID NO: 17478 - RNA, 60 nt, Human
ucucacaguuccucuggagaaaaaaaagagaaagagguccagggcaggaggaucaugaga

SEQ ID NO: 17479 - RNA, 83 nt, Human
ucucuugcaacgugugagcugccucuugccaagagugaguggcaaaagaaacuaaccccggagcaguucuacgucacaagaga

SEQ ID NO: 17480 - RNA, 60 nt, Human
agcacagaacugcuuuuuauuuggggucugugaguuucuuagguauuagcaaucugugcu

SEQ ID NO: 17481 - RNA, 72 nt, Human
gcuuauuuucuaacuuaaaauucaccuggaacuuuaaaugggaaaggauucuuuuaauuguggauuauaggc

SEQ ID NO: 17482 - RNA, 66 nt, Human
cagcuguuuucacucauuagcuccugagguaaacaaauggaaaaaaugagcgaacuggaacaguug

SEQ ID NO: 17483 - RNA, 82 nt, Human
gccucuuccaaauuaugggauauccgagauggcauguguuagacagucuuccaggggacaugucccagauaucaaggguggc

SEQ ID NO: 17484 - RNA, 61 nt, Human
aucggucaaacgggucauacgcaaguguugacacauauuguguacacucccuaggacugau

SEQ ID NO: 17485 - RNA, 82 nt, Human
gguugcacaacgagcacagcccggacuaugaguuggagaucuaaauucugaucugagucuggaacugacaaguugugugacc

SEQ ID NO: 17486 - RNA, 60 nt, Human
cccugggguuuccaccuccugccuccggccuccagagggugugaggccccaaccccaggg

SEQ ID NO: 17487 - RNA, 70 nt, Human
guaccgagaccucuuccagcaggggaccugagggcuguccucgcugcugagaagagccauaacucgugac

SEQ ID NO: 17488 - RNA, 74 nt, Human
ccaucaggagagggggggucagaaggggacaggguguuacugguguuuuaauuugcuccgccucuugcugaugg

SEQ ID NO: 17489 - RNA, 60 nt, Human
cugcaucaucagugucaugucuguagcugggagcuggagacccaagaaauccuggugcag

SEQ ID NO: 17490 - RNA, 84 nt, Human
gaaaaaugaguaaaauaauuaaugaaacauauuuagagcacuuaauggucucuguuuucaauauaauucuugauuucauuuuuc

SEQ ID NO: 17491 - RNA, 80 nt, Human
gcuugccauccugcaguaguauaaaucaugaauaaaaaauaauuuugcuguuguaguauacauuggagaaacuggcaggu

SEQ ID NO: 17492 - RNA, 94 nt, Human
ccucccgugcugcccgggggcaggcaggugggcaaggagggggcaggaagccccccaggccucaccuucugaguccccaaucagggcagggagg

SEQ ID NO: 17493 - RNA, 68 nt, Human
cuuaggagaacacagcugauuuuaacauguucugaggagcacaauuuuucuugcugguacucaugaag

SEQ ID NO: 17494 - RNA, 60 nt, Human
gggccgggggugaaugcggccgaggcccuuucaaggcuuugaaugauaccacuaaggccc

SEQ ID NO: 17495 - RNA, 81 nt, Human
gacaagaggguggucuaccugggggccaugcuucuauuggaugagagggacgaugcccaccuggugauuaccaacaguguu

SEQ ID NO: 17496 - RNA, 77 nt, Human
ccuccggccucgguagaaccgccagcccgcguccgaaggcggaggcgaggggaacuggccgcgugaggggccugagg

SEQ ID NO: 17497 - RNA, 63 nt, Human
cuuccaugcauauugacgagggaucuagucuaaguaagaaugucuuuugccugcgcguggagg

SEQ ID NO: 17498 - RNA, 68 nt, Human
uaucaaguacuuaguuuggccaaauuuagaguauaguuuaaaggggaaaaaaaguuuguauuuugaug

SEQ ID NO: 17499 - RNA, 82 nt, Human; identical to SEQ ID NO: 6291

SEQ ID NO: 17500 - RNA, 80 nt, Human; identical to SEQ ID NO: 887

SEQ ID NO: 17501 - RNA, 83 nt, Human
ccugacgcaguuguuccugcagacccagcaccagcgggaugaguccaggagugggucacguaccucugggaucagcugucagg

SEQ ID NO: 17502 - RNA, 64 nt, Human
ggucucauugacaggauaguggccagggaugcuugugcagaacauaaucauguugacgagugcc

SEQ ID NO: 17503 - RNA, 61 nt, Human
auauuuucauguauuucucacaggaauuugauacuucccacugugaauacugguuaaguau

SEQ ID NO: 17504 - RNA, 70 nt, Human
cacuguucacugccgacaucccucccccagcagaaugggaggcaggggacaagggaggcaguggcuagug

SEQ ID NO: 17505 - RNA, 96 nt, Human
gacccgggguggggugcacucgccauuuccucacgugcaggacagcucuugauuuggguggaaaacagggugcuaaagccaaccagccuuuggguc

SEQ ID NO: 17506 - RNA, 72 nt, Human
gcaguagccagccauacuauguguauucccaguaucauguacgcacuaaaaaaaaugugugcuugcugcugc

SEQ ID NO: 17507 - RNA, 80 nt, Human
ugagagauuagaaaauguuuggaauuuauaaaauuaauguuuuucuuuguaaccauuuauauauauuuuuuaacauuuua

SEQ ID NO: 17508 - RNA, 72 nt, Human
ggacgaauccuuaguacuguggaaaagagcagacagaaauauaaccagcuucucucacaguggaauucgucc

SEQ ID NO: 17509 - RNA, 64 nt, Human
guugcuuauugcaucucuuuggagccauuguagccggugggcagaggaaugcuuugcaagcaau

SEQ ID NO: 17510 - RNA, 65 nt, Human
ucuccagccacuauggaaguucuuaugcgaguauuggcagauugugauuccugggaggauggaga

SEQ ID NO: 17511 - RNA, 61 nt, Human
gcugaaacaggagcugucccugcugccccuaacggagccugcuaucaccgccaauuuuagc

SEQ ID NO: 17512 - RNA, 64 nt, Human
ucuuugcccccuuuggcaguggcugcccagucaaugggcagagccagcugaggggggcuuugga

SEQ ID NO: 17513 - RNA, 64 nt, Human
agcaugagccacugcaccgggcugacaugucaaaauaaagguuaagugcuauggucugaauguu

SEQ ID NO: 17514 - RNA, 60 nt, Human
gugggcaaggucaucccugagcugaacggaaagcucaccuggauggcuuucgugucccau

SEQ ID NO: 17515 - RNA, 64 nt, Human
guggacucgcugauguuuggaaagauuggacuugcuacagaaggucuuuccacagugaugacac

SEQ ID NO: 17516 - RNA, 65 nt, Human; identical to SEQ ID NO: 1518

SEQ ID NO: 17517 - RNA, 75 nt, Human; identical to SEQ ID NO: 74

SEQ ID NO: 17518 - RNA, 70 nt, Human
guaggcgaguuggucugaaagcccccgguaucauuccucgaauuucagugcgcggaaccaacuugcagac

SEQ ID NO: 17519 - RNA, 88 nt, Human
guccuugaacuuggaaccugacaauguugguguugucgugucuggaaaugauaaacuaauuaacggaaggagauauagugaagaggac

SEQ ID NO: 17520 - RNA, 71 nt, Human; identical to SEQ ID NO: 77

SEQ ID NO: 17521 - RNA, 67 nt, Human
ccgcagccgggcugaggcugagagcauguaccagaucaaguaugaggagcugcagagccuggcuggg

SEQ ID NO: 17522 - RNA, 76 nt, Human
gaucucggacacaucuguggugcuguccauggacaacagccgcucccuggacauggacagcaucauugcugagguc

SEQ ID NO: 17523 - RNA, 60 nt, Human
ccacuguauuuacuccuuuggaauauggugcuuguggccuuucugaggagaaagcugugg

SEQ ID NO: 17524 - RNA, 80 nt, Human
cgggcuuucccaagaauccucccaagguugcuuccccaagcuucggcugggguuggccuuuggauccccgggaagguccg

SEQ ID NO: 17525 - RNA, 61 nt, Human
gcgguccaacccagaucaaccaaguggugagucauccaaaccagccucucaccaucaccgc

SEQ ID NO: 17526 - RNA, 61 nt, Human
ggccuccuguucugcugauggcaccguccgcaucugggaccccagcagcagcagcccggcc

SEQ ID NO: 17527 - RNA, 67 nt, Human
gugcuggcgcugaugcccuggcaaggucuucguaugaugcccaccuggcccugcccuggcgccacgc

SEQ ID NO: 17528 - RNA, 61 nt, Human
acaugccuugguucacggauggcaagucccccguaggauggcaugcccguggacacgcugu

SEQ ID NO: 17529 - RNA, 79 nt, Human; identical to SEQ ID NO: 1810

SEQ ID NO: 17530 - RNA, 131 nt, Human
cuuagaugguuucuucauuagaccauuuuacaagaugauguugggaaagcagauaacccugaaugacauggaaucuguggauagugaauauuacaacucuuugaaauggauccuggagaaugacccuacug

SEQ ID NO: 17531 - RNA, 74 nt, Human
gaggccacucccuuuaaaaaugcucaaaguguuggagcuacugugugacaacagcugacauuuaggagggcuuu

SEQ ID NO: 17532 - RNA, 63 nt, Human
agggauguauugugauuaucugaaauauugagauuuuugguagaccuggacaauacuaacccu

SEQ ID NO: 17533 - RNA, 73 nt, Human
gccuucacuaccgccuggagaagcacgagcgagcccgaugucgccguugaccuggacagcacuuguggagagc

SEQ ID NO: 17534 - RNA, 61 nt, Human
gucuccagugauccacagacugcgauucagaaccgacguacagcuagguaucucuggagac

SEQ ID NO: 17535 - RNA, 84 nt, Human
cugaacuugggccagccacucaucugacuuguccuucguucccuaaccugucaaguaaaacggaagagggauggaccgaaccag

SEQ ID NO: 17536 - RNA, 61 nt, Human
uagagcccccuuccuugcccuguauuuuuguuuuagagguugaguuuuggacuaggcuuug

SEQ ID NO: 17537 - RNA, 122 nt, Human
cgugcucucggccgaccuggugcacuaccugcgccucagccgcgacuaccugcgcgccuggcacagcgaggacgugucucugggcgccuggcuggcgccgguggacguccagcgggagcacg

SEQ ID NO: 17538 - RNA, 88 nt, Human
gcgacgcuggcgcgcgagggccgccugugcaagcgcgaggugcagcugcgccuguccuacguguacgacugguccgcgccgcccucgc

SEQ ID NO: 17539 - RNA, 63 nt, Human
gcggcugcagcaaccaguaccuggugacgcacaagcagagccuggaggacaugcuggagaagc

SEQ ID NO: 17540 - RNA, 86 nt, Human; identical to SEQ ID NO: 7823

SEQ ID NO: 17541 - RNA, 61 nt, Human
cuuggaacgaacuaauccugaaagaagaacuacuugugaagggcaaacaguuuaguucaag

SEQ ID NO: 17542 - RNA, 64 nt, Human
acccccuuucugcugcccucaccugugcaaaacuuaccacagccuuugaggaaguauggggggu

SEQ ID NO: 17543 - RNA, 67 nt, Human
gguaauuaagaauccaguaucagaucacuuuccaguuggauguaugaaaguuggcacuucuuuuucc

SEQ ID NO: 17544 - RNA, 94 nt, Human
acuaggguggcggggggacgaacuucucuuccucacaugagguuacuguuucuuuccucuguggggcauuggauccucccacaguugcccuggu

SEQ ID NO: 17545 - RNA, 67 nt, Human
gcgcuuuauguuuucuuccguuugauaauuaguugguuaaaagcugagggaaccggaaggaaagugc

SEQ ID NO: 17546 - RNA, 68 nt, Human
guuguuuuuauaaugggcguuuucacaugcacauauguguaugcauguauacgcccauacagacaugc

SEQ ID NO: 17547 - RNA, 80 nt, Human
cuggcccuccacuucccccacaaccauggcgcacgaauccgagaggagcucucgucucggggugcccugcggggagccgg

SEQ ID NO: 17548 - RNA, 70 nt, Human
gcgaggaggaucacccccaagucugugccaagugcugcgcacaauucacugacccaacugaauuccucgc

SEQ ID NO: 17549 - RNA, 82 nt, Human
gacgcugcuggccuuugccggguacucagggcuacuggcugggguggaagugagugcugggucaccccccauccgcaacguc

SEQ ID NO: 17550 - RNA, 65 nt, Human
gcgcgagccgccuggcaacucugcgacuacuaccugcccuacgcgcugggccgggggcuacgugc

SEQ ID NO: 17551 - RNA, 72 nt, Human
uacgaaaaccucacggccaaggugcuggccaugcuggccuggcuggacgagcacguggccuucgaguucgug

SEQ ID NO: 17552 - RNA, 110 nt, Human
cuucugccagccccuggccuuuacuuucuuccuugccuaugcagggcaaacaaaaugugaaauucugcccucagcugagcugaguaagggcuccuggggguuggcuggag

SEQ ID NO: 17553 - RNA, 68 nt, Human
aagcacaucaugggccagaauguugcagauuacaugcgcuacuuaauggaacgaagaugaagaugcuu

SEQ ID NO: 17554 - RNA, 62 nt, Human; identical to SEQ ID NO: 2350

SEQ ID NO: 17555 - RNA, 82 nt, Human
gcugaagccauuggugucugcuccgcugaucguccugaugcccgaggaccuguggaccguggaaaaugacaugauggucagc

SEQ ID NO: 17556 - RNA, 71 nt, Human; identical to SEQ ID NO: 4943

SEQ ID NO: 17557 - RNA, 63 nt, Human
cucuuuaggucccaaucacaugucuacaguugcuguccauucuuucauugagaucuaaggcag

SEQ ID NO: 17558 - RNA, 66 nt, Human
gggaagaaggaaugcugcacacagaugccgagaauuaaucggaacagacaggcauugcuggauccc

SEQ ID NO: 17559 - RNA, 82 nt, Human
ccucccauaguucucccgcgucugguuggcccguguguuccuuuuccuauaccuccccaggcagccuggggaacgugguugg

SEQ ID NO: 17560 - RNA, 71 nt, Human
ggaggccauggggcucuuuugucugaugguagccuuucucauccucuuugccaugugaaggagccgucucc

SEQ ID NO: 17561 - RNA, 84 nt, Human
ggcugggauuggaacuguguugggagccucaucauugguuaugccaggaacccuucucugaagcaacagcucuucuccuacgcc

SEQ ID NO: 17562 - RNA, 84 nt, Human
ugucuccacucccuccuuggucaagagcaccucacagcugcugagccguccgcuaucugcagggugcugaaacgaccggagaua

SEQ ID NO: 17563 - RNA, 70 nt, Human
augugguccaaccugggcauggccuagcuaucucccugucugugguuggggcagccuggggcaucuauau

SEQ ID NO: 17564 - RNA, 63 nt, Human
ccgugggagucugcuacaccauuuugauugggcuuccgcuugauguggcaugguuccugacgg

SEQ ID NO: 17565 - RNA, 66 nt, Human
gccagccagcccagcagcgcuccgugcuccaucggagagcggugugcggagaaggcaugagcuggc

SEQ ID NO: 17566 - RNA, 64 nt, Human
ucccugcugauuccgccuaagcccguaccccuuggcugagguuucgcuggauaguagguaggga

SEQ ID NO: 17567 - RNA, 64 nt, Human
agccacucagaaggcugaggcaggaggaucgcuugagaccaagaguuugagccugcggugagcu

SEQ ID NO: 17568 - RNA, 67 nt, Human
ggcaacaaaacaagacucugucucuacaaaaaguuuaagaaaugagccagacauggugguguaugcc

SEQ ID NO: 17569 - RNA, 62 nt, Human
uucuggucucagggugaugcauugcgccaugugggauauuuggcacggacugaggccaagaa

SEQ ID NO: 17570 - RNA, 90 nt, Human
auguccucgguugcaaaugugccuagauggucguaccgguaauccaaguacacugguggggcaggagccggccaagacgaaugaggacau

SEQ ID NO: 17571 - RNA, 78 nt, Human
cucugggaagcuuagaagauacuucagcacugggaggauucuuuuacaggaacuguguguugauuucugguuccagag

SEQ ID NO: 17572 - RNA, 69 nt, Human
ccuuccacucagcucaacuuuauggcuuccugagcaaggagguaaagaacauggaagagaaguggaugg

SEQ ID NO: 17573 - RNA, 69 nt, Human
agaacuuuuauaaaagcaucuuuuggaacuucaacguugccaauuuuccucagcuuuuuuuucccuucu

SEQ ID NO: 17574 - RNA, 73 nt, Human
gcaguugcagccaagggcaugugguguggcacccuagcuauuaaacaguggcuuuggcucuuuaacaauuugc

SEQ ID NO: 17575 - RNA, 63 nt, Human
gggugauguacuccacagugaccggguccuccacagucagccgguggcucuggcacuccaccc

SEQ ID NO: 17576 - RNA, 80 nt, Human
uggcaccccggccuauggcauuggccuuccaggcaugguaugugcccgaggggucagucugauagagccuaggagugcca

SEQ ID NO: 17577 - RNA, 76 nt, Human; identical to SEQ ID NO: 3277

SEQ ID NO: 17578 - RNA, 78 nt, Human
ggucuuguggaaaggaggagcgaccgccugagcgugcagcaggacguccuccugaccugaaguacaagucacaagacc

SEQ ID NO: 17579 - RNA, 79 nt, Human; identical to SEQ ID NO: 995

SEQ ID NO: 17580 - RNA, 61 nt, Human; identical to SEQ ID NO: 996

SEQ ID NO: 17581 - RNA, 75 nt, Human
ugcugagcucggcuuauauuucggaccacaugaaggugcacagccaggguccucaccaugucugugagcucugca

SEQ ID NO: 17582 - RNA, 90 nt, Human; identical to SEQ ID NO: 1285

SEQ ID NO: 17583 - RNA, 81 nt, Human
acaauauaguuucuccugaacaccugcuuuccuucugggagucuggaauuuugguaugugccaggcagagacuaccuuugu

SEQ ID NO: 17584 - RNA, 60 nt, Human
uugauuggcaucugggaacuuggaguucagggggcuuccaccauucccagaacugaucaa

SEQ ID NO: 17585 - RNA, 66 nt, Human
gauggugugaaauguccacuucuuaauuuuaagaugaacuuagucuaaagaagauacaggcccauc

SEQ ID NO: 17586 - RNA, 71 nt, Human
gcuugauuugcuuggugaccgaauuacuaggugacuaguuuacuaacuaggucauucacggcaagucaagu

SEQ ID NO: 17587 - RNA, 78 nt, Human; identical to SEQ ID NO: 99

SEQ ID NO: 17588 - RNA, 65 nt, Human; identical to SEQ ID NO: 247

SEQ ID NO: 17589 - RNA, 76 nt, Human
acuucguugugguugacacggugcauaugggauucgaguccuuggccucaauccgcgggguaccaccacaaggagu

SEQ ID NO: 17590 - RNA, 65 nt, Human
gccugugaugcucacgacuggcguaugguugucacgcagggcaagccagagagagcagagaaggc

SEQ ID NO: 17591 - RNA, 82 nt, Human
gcgucaccagcagcgaggugcccgccgucuccguugaaguaguugccacgaccaguuggcagguuccgaugcuugguggcgc

SEQ ID NO: 17592 - RNA, 85 nt, Human
gcaagaaacgugugcuaaagacugagguuccuuggaaacaugcugaaaauucuguucucaagggugucagaaccauacguacugc

SEQ ID NO: 17593 - RNA, 61 nt, Human
caggcccugccacggccaacucaggucagccagccugaggcuguggccuccaaagggucug

SEQ ID NO: 17594 - RNA, 99 nt, Human
ccacguuagcugccuuccuugagcuccccaggagucgguuuccacaucuguagagguggagggcugguguggaggugcucaugggggugcggugcuugg

SEQ ID NO: 17595 - RNA, 61 nt, Human
ccccccaggucgcaggugucugaggccagccaaccugcagagcacucgcggcguggguggg

SEQ ID NO: 17596 - RNA, 63 nt, Human
gcagcaaggagaggaugcagaacagcuucuugcagaagcaccugcuccggcauccagcgcugc

SEQ ID NO: 17597 - RNA, 78 nt, Human
ggagacugccuggcuguguccucucagccaggugccguguuggccuuggcuaggacccagagccacacugcagccucc

SEQ ID NO: 17598 - RNA, 79 nt, Human
uggcugcccagugugucacaaagguggcgcugaauguuuccugugccaaucuuuggauaaagauauagggucaaaguca

SEQ ID NO: 17599 - RNA, 67 nt, Human
acguaaggggcugggcugggcagcaccaggggcuugaggcucuggugaugcuccuccagcuccucgu

SEQ ID NO: 17600 - RNA, 73 nt, Human
caggcccuaggagggcgagggcuuaguagguaucuucagggucagagccugaguccucgccuuguugguucug

SEQ ID NO: 17601 - RNA, 64 nt, Human
gacuuugcuuccgguacaaacaggccaccugagcacuggugguggccugcuccggcugcuuguc

SEQ ID NO: 17602 - RNA, 60 nt, Human
gauggcgguggccaccuccuuggagcacuuaacacccagaccgacguggccauuguaguc

SEQ ID NO: 17603 - RNA, 82 nt, Human
auauauucauuugcacuuacgugaaacacaaacuuugcucuacaaaauuucguguuucuuagugauuuuaaaaugcauguau

SEQ ID NO: 17604 - RNA, 60 nt, Human; identical to SEQ ID NO: 2287

SEQ ID NO: 17605 - RNA, 67 nt, Human; identical to SEQ ID NO: 2288

SEQ ID NO: 17606 - RNA, 66 nt, Human; identical to SEQ ID NO: 13041

SEQ ID NO: 17607 - RNA, 67 nt, Human; identical to SEQ ID NO: 11915

SEQ ID NO: 17608 - RNA, 68 nt, Human
ucaggaagacuucccaaaauaagacucaguaugaauuugcuaaguaacugaucuaugaaguuagcuga

SEQ ID NO: 17609 - RNA, 93 nt, Human
cuuauuuuuucacaagccugguuauuugaggaugugcuuguaacguaugcuuucucuucuauuucucauagccaaugcuuguaccuuaauagg

SEQ ID NO: 17610 - RNA, 94 nt, Human
gaggaaggacuggagagccacuugaggucauauguuaagguauguaaaacacacuguucugaucacuuacaucuguggcucuccaguuuuccuu

SEQ ID NO: 17611 - RNA, 88 nt, Human
gcgcagcaucugcuucuugcuguugucggagguguccggcacguugagaaccgcucccgagaacuugcucuugaaguagaucaagcgu

SEQ ID NO: 17612 - RNA, 76 nt, Human
cuccaacgaugccuuuguucugaaaacccccucagccgccuaccuguggguggguacaggagccagcgaggcagag

SEQ ID NO: 17613 - RNA, 67 nt, Human
guggaggcgcugugucuccuacgcaacuucugagggcuggagggugccaagggcagcugcugaccgc

SEQ ID NO: 17614 - RNA, 86 nt, Human
cccaguuuucaagaaucaacacauaugacaagguagcuuagcuacacacaugagaagccugagaaagugguuguuuugaacuaggg

SEQ ID NO: 17615 - RNA, 63 nt, Human
ucaccuguaccuugcuuggguaauacaaagaauagugcuuauuuauacaaauuuacuugguga

SEQ ID NO: 17616 - RNA, 76 nt, Human
cggaaaguuuauauagagaauucuggcuuuaacagugaacuggaauaaugagagcuucacugguaaaaugcuucug

SEQ ID NO: 17617 - RNA, 71 nt, Human
ccaucuauagacuuauuuugcucaaugguuucugaaugccaaacugcucacaaaaauaagucuucugaagg

SEQ ID NO: 17618 - RNA, 61 nt, Human
gaauaauagcuuuuaaauuguuuaaaaauaagcuuauuaaacaagaauauaaauuuuaauc

SEQ ID NO: 17619 - RNA, 75 nt, Human
cucugaucaauccuucuuuuucucuuuugcccacaauuuaaggcaaguaggaugugcagaaggaaaugggaaggg

SEQ ID NO: 17620 - RNA, 91 nt, Human
uucagcuuucaguuaaaaaagaaggaaggaaggaaaugggcaaagaggaaagguuuuuucaaauuucuuucuuuuuuaauuuaggauugag

SEQ ID NO: 17621 - RNA, 80 nt, Human; identical to SEQ ID NO: 367

SEQ ID NO: 17622 - RNA, 67 nt, Human
gaguguccguugaaagcaauaaggaauuccagaacagaacuguacuucuugucccucucucacacuu

SEQ ID NO: 17623 - RNA, 98 nt, Human; identical to SEQ ID NO: 6908

SEQ ID NO: 17624 - RNA, 78 nt, Human; identical to SEQ ID NO: 6909

SEQ ID NO: 17625 - RNA, 81 nt, Human; identical to SEQ ID NO: 3878

SEQ ID NO: 17626 - RNA, 68 nt, Human
cagcauuggaucaacuauuucuucagaucguucugauucagagcgagaggagauugaaguggauguug

SEQ ID NO: 17627 - RNA, 62 nt, Human
cccgacugcagcauucaaagcccccacggagguugagccgggcacagaaacacagcagcggg

SEQ ID NO: 17628 - RNA, 60 nt, Human
gcucaucugcgccuuuguuuagaacgcuuaaaaguucugauuccacuaggaccagacugc

SEQ ID NO: 17629 - RNA, 84 nt, Human; identical to SEQ ID NO: 286

SEQ ID NO: 17630 - RNA, 80 nt, Human
ggguuccacacuguugggagucgcugcaagaaucggacaggcgcugagcaccuguggcugacccgacaucucagggaccc

SEQ ID NO: 17631 - RNA, 98 nt, Human
ucagguggcggugcagaaggucaacgccgcaggcacagaucccagcucuccuguuggcuuugugcuugggguagaucuucuucacauauucccccugg

SEQ ID NO: 17632 - RNA, 71 nt, Human; identical to SEQ ID NO: 77

SEQ ID NO: 17633 - RNA, 62 nt, Human
uagcacccccacuggcgccugggacagcugguauuaagccucggagccggugggccauguug

SEQ ID NO: 17634 - RNA, 67 nt, Human
ggacaccgacaccaaaaacccguuuuuuuccccaaagaaaggcguguuugguuuaagaacgguguuu

SEQ ID NO: 17635 - RNA, 100 nt, Human
uucuuucccccccuuuuuuuuuguggggcgcgggcguugggaaccgacaccgccgggggggcccgggguccgggcggcacguucuuccggggggguggaa

SEQ ID NO: 17636 - RNA, 75 nt, Human
cucaugguugaauaugacauuuuucugcuuuucccucuaagaaguuuuugagaauguuaauguugaaguaugcag

SEQ ID NO: 17637 - RNA, 70 nt, Human
uuguaauuauaaugguaucaaauaagaugcaaaagaaguugaugcuuauuggugcuuaagagaauuacaa

SEQ ID NO: 17638 - RNA, 124 nt, Human
cugagacccugggagagaaguuugaagcacaacucccuuaaggucuccaaaccagacggugacgccugcgggaccaucuggggcaccugcuuccacccgucucucugcccacucgggucugcag

SEQ ID NO: 17639 - RNA, 66 nt, Human
uacaggagcuuuugugugccugguagaaacuauuucuguuccagucacauugccaucacucuugua

SEQ ID NO: 17640 - RNA, 79 nt, Human; identical to SEQ ID NO: 728

SEQ ID NO: 17641 - RNA, 72 nt, Human
cggggucggcacacaggcuuugagacaaccaggaugcggagacaaucacaaagaguguguaggccagccccg

SEQ ID NO: 17642 - RNA, 65 nt, Human
ggcgcgggcucggcgggcugcgugcuggcugggaggcucacggaggaccccgccgagcgcgugcu

SEQ ID NO: 17643 - RNA, 75 nt, Human; identical to SEQ ID NO: 74

SEQ ID NO: 17644 - RNA, 71 nt, Human; identical to SEQ ID NO: 77

SEQ ID NO: 17645 - RNA, 69 nt, Human
ccuuaguuggaggccacagucaucuuuaacaucuaguauguugacagguucuaugguuuccaacagagg

SEQ ID NO: 17646 - RNA, 69 nt, Human
uaucaaauaaagauaucuagcuugacacaaaaguugguagcugcaagguuaagcuguauuaguuugaug

SEQ ID NO: 17647 - RNA, 85 nt, Human
uugagguguuuggaugaaaaaaaauacaagagcuuugccuucaugucuacagaucucuuaauauauuguuggucuugcaccuuaa

SEQ ID NO: 17648 - RNA, 70 nt, Human
uuuuguccuuaaauauuggcuguaacaaaugcugauuuagcaaaaaguaagcuucuauuagacagcaaga

SEQ ID NO: 17649 - RNA, 72 nt, Human; identical to SEQ ID NO: 2728

SEQ ID NO: 17650 - RNA, 83 nt, Human; identical to SEQ ID NO: 2729

SEQ ID NO: 17651 - RNA, 130 nt, Human; identical to SEQ ID NO: 2385

SEQ ID NO: 17652 - RNA, 65 nt, Human; identical to SEQ ID NO: 2386

SEQ ID NO: 17653 - RNA, 66 nt, Human
cuuaaucuuguggauuuuguagaugguuucaaaugacugaacugcauucagauuuacgagugaaag

SEQ ID NO: 17654 - RNA, 66 nt, Human
uaggaaauuuugacaguauuuuuguacaaaacauuuuuuugaaaaaauacuuguuaauuuauucua

SEQ ID NO: 17655 - RNA, 81 nt, Human
ugcauuaguugguugcaugaacuucgaagggcagauauuacugcacaaacugccaucucgcuucauuuuuuuaacuaugca

SEQ ID NO: 17656 - RNA, 78 nt, Human
aguugugugcguucaacacgauaauaccuguugccacuggaggaacagauggguacgucgugucuggaagugccagcu

SEQ ID NO: 17657 - RNA, 74 nt, Human
gcccggcgcggcauguccugggugccgcggugcgggcagugaacgcgcgccggggggaugggccggcgccgggc

SEQ ID NO: 17658 - RNA, 70 nt, Human; identical to SEQ ID NO: 455

SEQ ID NO: 17659 - RNA, 72 nt, Human; identical to SEQ ID NO: 1920

SEQ ID NO: 17660 - RNA, 112 nt, Human; identical to SEQ ID NO: 2686

SEQ ID NO: 17661 - RNA, 85 nt, Human
acuuccagcucagcggugcuuuaggagauuuugauucgcuuuccaaggacaaugucuucgagaauaaccguuuggccuuugaagu

SEQ ID NO: 17662 - RNA, 92 nt, Human
cauggccaagcggcugagccaaauugggguggaaaacacagaggagaaccgccggcuguaccgccagguccuguucagugcugaugaccgug

SEQ ID NO: 17663 - RNA, 67 nt, Human
cugaaauguuucucaguuuuagcuuuugaaaacccccagguaucgaugacccugguaaauguuuugg

SEQ ID NO: 17664 - RNA, 62 nt, Human
acuguuggauguuacaccagccuuuccaggguuaaccacugugguggugugcugcuuauagu

SEQ ID NO: 17665 - RNA, 79 nt, Human
caguuugcaauuacuuucucgauuggugucaguaguuuuacugauuaggacuuuuauugugaauuacaguugaaagcug

SEQ ID NO: 17666 - RNA, 91 nt, Human
ucugucagccuuacuauauacugagcuacuccuuucccaccucccccugaacacugugacaagaggaagcuagguugaaaucacugauaga

SEQ ID NO: 17667 - RNA, 72 nt, Human
auccgcaucggccucccugcccacaaagcgccacaacggugaccagccggagcagccggagcugaagcggau

SEQ ID NO: 17668 - RNA, 65 nt, Human
ggcacucacguggcaucaguccccacugcgguccacggccaggugaacaaugccgcggcgagucc

SEQ ID NO: 17669 - RNA, 76 nt, Human
gggggugcaaggcccugugguuggacuucaccucuuagcacugaaaacccaaaacccaacuggccuuaacaccucu

SEQ ID NO: 17670 - RNA, 62 nt, Human; identical to SEQ ID NO: 9237

SEQ ID NO: 17671 - RNA, 87 nt, Human
gagagguaugaacgaguugucagguuccuaugggcuuaagcuaggacaaucaggcccuaaacuccaaauuuggauaaaauaucucuu

SEQ ID NO: 17672 - RNA, 72 nt, Human
gcauucuucuuggccaccugcauagucugacacauacguauguacaguuagacuugcaggcugcaggagugc

SEQ ID NO: 17673 - RNA, 75 nt, Human
uuuguuuugcuuuuguuuuuuuccucauguaacauuggugaaggauccaggaauaugacacaaagguggaauaaa

SEQ ID NO: 17674 - RNA, 67 nt, Human; identical to SEQ ID NO: 3685

SEQ ID NO: 17675 - RNA, 89 nt, Human
gcucguguggggucuccgguccagggcgcggcaugggcguccuggccgcagcggcgcgcugccugguccggggugcggaccgaaugagc

SEQ ID NO: 17676 - RNA, 74 nt, Human
ucgucucugaaagccacucggaauuucuccaucucagauuggagcaagaacuuugagguuguuuuccaggauga

SEQ ID NO: 17677 - RNA, 67 nt, Human; identical to SEQ ID NO: 1862

SEQ ID NO: 17678 - RNA, 112 nt, Human
gugaggcaguucaccagccggcucaggucuucucuguucaagguuccgucaucaucaaagucaaagaugcggaaggcauaaugggacuugaugucuggcguggcugugucac

SEQ ID NO: 17679 - RNA, 62 nt, Human
cguggagcccggcgccccaggccuggggaacugccuccggcaaaggcgcgguuuucaccacg

SEQ ID NO: 17680 - RNA, 96 nt, Human
ggccgugucucaaguaaccaccaaguacgugcuguggguggacgacgacuucgucuucacggcgcggacgcggcuggagaggcuuguggacgugcu

SEQ ID NO: 17681 - RNA, 63 nt, Human
gucggcuucccaggcugcguggucaccgacggcgugguuaacuucuuccuggcgcggacugac

SEQ ID NO: 17682 - RNA, 64 nt, Human
auauggucaugugaaucaaauuugauguauaaaguacucacacaaguugucucaaagaugauau

SEQ ID NO: 17683 - RNA, 68 nt, Human
cugugaacagagaggccaugggaagauucgaaauuauucacgaaaaauccuaagauuucaguucagag

SEQ ID NO: 17684 - RNA, 60 nt, Human
acagugauucggcacauaaaacaggugcugaacuguagcaguuguuuuacuccauccugu

SEQ ID NO: 17685 - RNA, 75 nt, Human
gguuagagaaacucaucagaagaaaguuucaaucacuucacuguuauuuucugcaauucuuauucucuuauagcc

SEQ ID NO: 17686 - RNA, 66 nt, Human
gugauuuuauuauuaucaacuauaacauucaaaucagauuacauaaaaaugguucuauaaaauuau

SEQ ID NO: 17687 - RNA, 75 nt, Human
gcuauagaacaaauguuucgucuuaaaauauauuuaggaaauguaaaauuaaagauuaaaaauuuuauucuaugc

SEQ ID NO: 17688 - RNA, 131 nt, Human
uaaaauuauaaacacaauuccuagcucacaggccauaaaaagcaggcagcagcauggauuugauccacaggccauaguuggcugucucuuaaacaggcuuuuauacguuaugcaaaguguuucaaauucca

SEQ ID NO: 17689 - RNA, 76 nt, Human
uccagagacuuuggagacuuuucguuuuuuagauuucucauuuuaaaacacacauaauacaaguuuucuuucugga

SEQ ID NO: 17690 - RNA, 62 nt, Human
cagugauguuuauaauguucugccagcagcuccugcaggcucuggcugaaggucugcagcug

SEQ ID NO: 17691 - RNA, 65 nt, Human
gcuggagugugaucuagcucacuguagccucaacguccauggcucaggugauucucacacucagc

SEQ ID NO: 17692 - RNA, 101 nt, Human
ccaccaguccaggggugggaauacagggggugggaggugugcauaagagguuauaggcacaggccagcccgguacagaacccuaggcguccugacaggugg

SEQ ID NO: 17693 - RNA, 67 nt, Human
ccagcuaagauaugcuuucuggccgcgaccacaugaagccgcgggcuguuguaaauuucuuuguugg

SEQ ID NO: 17694 - RNA, 80 nt, Human
gcaagaaggaaggagggagggcagagcguugucugagcaacaaaggccgccugcugccuucucugucugucuccuggugc

SEQ ID NO: 17695 - RNA, 95 nt, Human
ggucauuguguccugccaaggcacagccguagaucuggaaagagcagaaugcuuuccuuuucagauguggcuggucauggaaggggcaguugucc

SEQ ID NO: 17696 - RNA, 65 nt, Human
cauugacaauccagugggcacaggcuucaguuuuacugaugauacccacggauaugcagucaaug

SEQ ID NO: 17697 - RNA, 92 nt, Human
gcacgggauuuauacagugcacuaauucaguuuuuccagauauuuccugaauauaaaaauaaugacuuugaugucacuggggagucuuaugc

SEQ ID NO: 17698 - RNA, 61 nt, Human
ggcuguuucgcucccuauacagaaguguuuccaugccaccuaagggagacucaggacagcc

SEQ ID NO: 17699 - RNA, 72 nt, Human
uuguggaacaugggccuuauguugucacaaguaacaugaccuugcgugacagagacuuccccuggaccacaa

SEQ ID NO: 17700 - RNA, 78 nt, Human; identical to SEQ ID NO: 99

SEQ ID NO: 17701 - RNA, 80 nt, Human; identical to SEQ ID NO: 100

SEQ ID NO: 17702 - RNA, 71 nt, Human
gccccacuuuuaaaaaccuggcuccuuacucuggcugggucccggggaagagauauuuuuaaaacaagggc

SEQ ID NO: 17703 - RNA, 72 nt, Human
gcugcggcugagaaguaccgccugcggaguaacugcaaagaugcuguccgugcgcguugcugcggccguggu

SEQ ID NO: 17704 - RNA, 71 nt, Human; identical to SEQ ID NO: 77

SEQ ID NO: 17705 - RNA, 90 nt, Human
aagguuuuuggagcugcacugaagcaucuuauuuuauaguauaucaaccuuuuguuuuuaaauugaccugccaagguagcugaagaccuu

SEQ ID NO: 17706 - RNA, 80 nt, Human
guuuauuggagcuagcaauaauugguuucuggcaaguuuggccagacugacuucaaaaaauuaauguguauccaggggac

SEQ ID NO: 17707 - RNA, 75 nt, Human
gauacuggaaacuuugguuuugggauccaggaacacaucgaucuggguaucaaauaugacccaagcauugguauc

SEQ ID NO: 17708 - RNA, 76 nt, Human
ucuccucccccuuggggaaaugugccucauuuguggcaaauguagggggugcaggucugaacaaggguggacaaga

SEQ ID NO: 17709 - RNA, 69 nt, Human
ccgcagucccucuauuacucacugguugagagcaagagcggugccauucaguuuguggacggauugcgg

SEQ ID NO: 17710 - RNA, 70 nt, Human
gaauucuacaagagccucacuaaugacugggaagaccacuuggcagucaagcacuuuucuguagaagguc

SEQ ID NO: 17711 - RNA, 72 nt, Human
agaaacaugcuugccuuauguaucagaggacaugcucagcagauccaagagauauauuuggcaacuuuuucu

SEQ ID NO: 17712 - RNA, 77 nt, Human; identical to SEQ ID NO: 1216

SEQ ID NO: 17713 - RNA, 68 nt, Human; identical to SEQ ID NO: 813

SEQ ID NO: 17714 - RNA, 75 nt, Human; identical to SEQ ID NO: 815

SEQ ID NO: 17715 - RNA, 73 nt, Human
caaaggcaggcuucuccgguggcauggugguagacuacccuaacagugccaaagcaaagaaauucuaccucug

SEQ ID NO: 17716 - RNA, 72 nt, Human
cuuuuuucuguucucguccggggaucccgagcuguccugcagcuguacccugagaacucagagcaguuggag

SEQ ID NO: 17717 - RNA, 76 nt, Human
ggagucuuguguuucaccaaaugagagguucccauuaaggauguucgaggcggggaaugguggagggcaagacucc

SEQ ID NO: 17718 - RNA, 100 nt, Human
uggagcuucuuuaucugccagagaauaagcccuguuaccugcuggauauuggcuguggcacugggcugaguggaaguuaucugucagaugaagggcacua

SEQ ID NO: 17719 - RNA, 60 nt, Human
aggcccacauggucacucacagcagccgcaaggaccacgagugcaagcucuguggggccu

SEQ ID NO: 17720 - RNA, 71 nt, Human
gaggggcacaccgggcgaggccguucgccugcgcgcaguguggcaaggccuuccccaaggucuaccugcuc

SEQ ID NO: 17721 - RNA, 66 nt, Human
guguggaaagagcuuccgggagucgggugcacugacccggcaccucaagucucucacccccugcac

SEQ ID NO: 17722 - RNA, 81 nt, Human
gaucgccauguucauggugaacaccauucaacaaucuauccaucuccggaggaaccuugaagcuguucagaauaugguauc

SEQ ID NO: 17723 - RNA, 79 nt, Human
gugacacacaccgaugaccgcccggacgaacccuacuucccaggcauccaacguggucgcgaccucgugugcgugucau

SEQ ID NO: 17724 - RNA, 67 nt, Human
uguccgaaugugcucuuacacccaugucucagcauugcuuggcacugaacacaccuccacacggaca

SEQ ID NO: 17725 - RNA, 96 nt, Human
cuaccuuguuuuugguuggcuuuuguuguuguuccugcuacuuucaccuuuaagcagagcagucaggagacaagcauaaaccagagcacuggguag

SEQ ID NO: 17726 - RNA, 66 nt, Human
gcuacagagcugucugaugcaauacuugaaggauaccccaagagcaagaagcaguucuuuguaagu

SEQ ID NO: 17727 - RNA, 88 nt, Human
gaggccccugggcugguggacguaccuggugggcacccugagccucagggcccugugcccugguggcagcccccagcaccaggaccuc

SEQ ID NO: 17728 - RNA, 75 nt, Human
gggcagcuggugguacaugaacucuuuuccaguguccuucaggagaucugugaugaggugaaccugccgcugcuc

SEQ ID NO: 17729 - RNA, 61 nt, Human
uugugagaugcuguuaugcugagaaaccugacuuuguuaguguuggcaaaaagucuuacag

SEQ ID NO: 17730 - RNA, 77 nt, Human
ccgcugguaccggggcauccggggacugcgugcggcagacgguucgcaaccauggcaguccugggccuguaccgcgg

SEQ ID NO: 17731 - RNA, 77 nt, Human
gcacaugcgggaugcccaggguacggcuggacgagcacgcguguggccugcugugcggccugggcgcuggcgugugc

SEQ ID NO: 17732 - RNA, 75 nt, Human
aagcuuuauucccauuggguccaaggcugguaaggauaguuaaaaaagcugccuaugggcuggagggagaggcuu

SEQ ID NO: 17733 - RNA, 64 nt, Human
gcugggcucaaaaggcucugggucgugcuugaaagugagccuuucgaagagauacucgcccagc

SEQ ID NO: 17734 - RNA, 83 nt, Human
guggcucacgccuuccagagccacaucaucggggcgaaauaaaagcccagagagagguagguguaggaggccgugcaggucac

SEQ ID NO: 17735 - RNA, 85 nt, Human
cagguccugccuguuccccauggugcuucucacccugaaacccucagagcuacagccagggauagagcagaugagcagugagcug

SEQ ID NO: 17736 - RNA, 69 nt, Human
uuuccucaagagugcauuccagaaggggaccugcuauucuucgaggggaccugcuauucuucgagggga

SEQ ID NO: 17737 - RNA, 64 nt, Human
gagaggagcaggugcagugauucauacccacucuaaagcuggcugugauggccacccuucucuu

SEQ ID NO: 17738 - RNA, 77 nt, Human
ucauugaaaaggacaucaguggaccuucgucaucgaaugaagcuaaaaaaaaggccaguguacuccucuuuacauga

SEQ ID NO: 17739 - RNA, 66 nt, Human
ggauuggaaaggggacagagagguggacaagcaaguccagccuucuccaggugcucaucuccaucc

SEQ ID NO: 17740 - RNA, 105 nt, Human; identical to SEQ ID NO: 979

SEQ ID NO: 17741 - RNA, 73 nt, Human; identical to SEQ ID NO: 4762

SEQ ID NO: 17742 - RNA, 65 nt, Human
gugaugcucgagcaauuggcucugcuucagagggugcccagagcuccuugcaagaaguuuaccac

SEQ ID NO: 17743 - RNA, 68 nt, Human
caugucagaagcucaaagcgacucauaaugcaugugaauuugcuuuggagagacuuaucuucugagug

SEQ ID NO: 17744 - RNA, 114 nt, Human
ccauuuuauaaaauguuauacucauauuugucugaauuuuuccaguauuccuacaugaaauuguauguauuaaaaacucaauauuaguggcaaauauuaauacuauuaaaaugg

SEQ ID NO: 17745 - RNA, 68 nt, Human
gauauucgcucuggagaaguuacauguaaauagaauucuauaaauuguuuuccaguugaccgaguauc

SEQ ID NO: 17746 - RNA, 70 nt, Human
gguuagagacuucaaggagagucaccuugcucauuuaauugcgaauccaucucaucugauugaaauaacc

SEQ ID NO: 17747 - RNA, 74 nt, Human
uuuuaaaaaauguuuugggcugggauuacagguguuugccaccgcgcccagcccaaauuauuacauucguaaga

SEQ ID NO: 17748 - RNA, 75 nt, Human
ccccaaugugcucaaguucauuggugugcuguacaaggauaagaagcugaaccuccugacagaguacauugaggg

SEQ ID NO: 17749 - RNA, 78 nt, Human
uggugguggcagacuuugggcugucacggcucauaauggaagagaggaaaagggcccccauggagaaggccaccccca

SEQ ID NO: 17750 - RNA, 68 nt, Human
gcucgaguaucaggaagaaaugaaagccaacuacagggaaauggcgaaggagcuuucugaaaucaugc

SEQ ID NO: 17751 - RNA, 81 nt, Human
gggcucgggggcgcucagcggcgagugggcaagauuggggccuuuccuguccucgaagcugcacaaagguggccccagccc

SEQ ID NO: 17752 - RNA, 94 nt, Human
gcagagcuuguguaggaagaaugaaaucugcaauuugacuuuuaggagugucguuuuccgggucaggcagauugguauucagcgcuggcucugc

SEQ ID NO: 17753 - RNA, 63 nt, Human
ugugugaauuuaggcaaguuuauaccuuuuaauguuucaguuucgcugucuuuuccucacaca

SEQ ID NO: 17754 - RNA, 74 nt, Human
agaaacuuauuaggcaagaacagguaauguaguuauccaugacuacuuuuaaccaugcagacuaauaauauucu

SEQ ID NO: 17755 - RNA, 95 nt, Human
acagacuuccggggaauuuugauguuuucccguguuguagagcuuccaggguuuaauaaaacugguuaaaaauugagucuuucccugaaguaagu

SEQ ID NO: 17756 - RNA, 70 nt, Human
guaacuuugcucuuuuaauaauuauguucagccuaugaugaaguauuugauuauuagacagcaaugucac

SEQ ID NO: 17757 - RNA, 62 nt, Human
cgccacccaggaguccacauuccaggagcugugcgaggggcugcuggaggagucggauggug

SEQ ID NO: 17758 - RNA, 83 nt, Human
gccgcguugcgggccgcccggcuucggcaccaggagcuuguccggcugcucgggaucaaggcccagguggcccuguagcuggc

SEQ ID NO: 17759 - RNA, 74 nt, Human
gggagccaggccagggcgaggggccggaggcuggggaugccgaggucugucccacgcccgcccgccuggccacc

SEQ ID NO: 17760 - RNA, 65 nt, Human
cccauuuggcuuauaaagacucgguuacagcuugaugcaaggaaccgcggggaaaggcgaauggg

SEQ ID NO: 17761 - RNA, 74 nt, Human
cugcaaggaaaaguugaaugauguauuugauccugauucuacccaaguacauaugauuucagcugcaauggcag

SEQ ID NO: 17762 - RNA, 78 nt, Human
gacagauggacuaaaaggauuuuauaggggcaugucugcuucauaugcugguauaucagagacuguuauccauuuguu

SEQ ID NO: 17763 - RNA, 72 nt, Human
ugcaaaauauuucauaaguauggaugugcaauauuacuggccauagugcaaaaggugaaagguuuuacugca

SEQ ID NO: 17764 - RNA, 60 nt, Human
ccgaagcuuccggacgacgaggaaccgcccaacauggccucggagagugggaagcuuugg

SEQ ID NO: 17765 - RNA, 61 nt, Human
ggggagaauagaaagaaaacaauugacaaaauccucaaauguaaacucaauuugccucccu

SEQ ID NO: 17766 - RNA, 62 nt, Human
guggauugguggaguuugggagcauuaauguaugacaugcugacuggagcacccccauucac

SEQ ID NO: 17767 - RNA, 63 nt, Human
gauaccagccucccacuguggugccugguggagaacuggccaagguacaaggaaggcuguguu

SEQ ID NO: 17768 - RNA, 85 nt, Human
gaugucaaugcugccauugccaccaucaaaacaagcgcagcauccaguuuguggauuggugccccacuggcuucaagguggcauc

SEQ ID NO: 17769 - RNA, 60 nt, Human
aucauaugaguucagguguggaguuuuucacugguggcaucaugucugugcucaauagau

SEQ ID NO: 17770 - RNA, 61 nt, Human; identical to SEQ ID NO: 1363

SEQ ID NO: 17771 - RNA, 63 nt, Human; identical to SEQ ID NO: 8453

SEQ ID NO: 17772 - RNA, 63 nt, Human; identical to SEQ ID NO: 1364

SEQ ID NO: 17773 - RNA, 64 nt, Human
ggauacaaguggggccaugccucccuggcccugacuccaggcugggguauccugaacuguaucc

SEQ ID NO: 17774 - RNA, 64 nt, Human; identical to SEQ ID NO: 287

SEQ ID NO: 17775 - RNA, 67 nt, Human
uccaaagcacuuuuguugagugacaacccgauuagcaaggcccuguuacugaacagagggcagugga

SEQ ID NO: 17776 - RNA, 61 nt, Human
gcucuuagugggaguauaguauugaguccucuagagaggauuaugauacgacucugagagc

SEQ ID NO: 17777 - RNA, 94 nt, Human
gggaguauagggcugugacuaguauguugaguccuguaaguaggagagugauauuugaucaggaaacgugguuacuagcccagagaguucuccc

SEQ ID NO: 17778 - RNA, 63 nt, Human
aaccuggcagccggacugggcgcccagaaaggucaguggugcugccccauucggcgaaagguu

SEQ ID NO: 17779 - RNA, 66 nt, Human
ugggcggcagguaacgagucauugccucucacgccaccuggaaggcuggacuacuuccuccuccca

SEQ ID NO: 17780 - RNA, 90 nt, Human
aggaccagugcaauuuagaggugcauguuuauaaucaagaagaagacucuuuuuuauguacaccaugauauacucuugucugcauauccu

SEQ ID NO: 17781 - RNA, 64 nt, Human
gauugacacacagggggauggaguugguccuuguccauucucucacccuugcugugcauguauc

SEQ ID NO: 17782 - RNA, 69 nt, Human
ggggacuuaguuagguagauuaauaucuggagcuccucgagggaccaaaucuccaacuuuuuuuucccc

SEQ ID NO: 17783 - RNA, 63 nt, Human
aggucaaauuguguccuccaucacugcuucccugagauuugauggagcccugaauguugaccu

SEQ ID NO: 17784 - RNA, 74 nt, Human
gccgagaguguguggcaggccccaacaucgccgccaucgucgggggcaccguggcaggcaucgugcugaucggc

SEQ ID NO: 17785 - RNA, 65 nt, Human
ggcgcuuggagaaggagaagcucaagucccaguggaacaaugauaauccccuuuucaagagcgcc

SEQ ID NO: 17786 - RNA, 86 nt, Human
ggugaagacaaggccgucaggagccaccaugucugccccaucacgcggcgagacaugguugccaucagcucuugauggaugucacc

SEQ ID NO: 17787 - RNA, 90 nt, Human
ucaacagggauuuggugccaacuggagucuuggugaccaauggggauuaugaucaagaacaguuugcugaugaccaaauaccacuguugg

SEQ ID NO: 17788 - RNA, 69 nt, Human
acuaugcaccaggugccauguuucauuuauguuaucucauuuaauauucacaacaagccuugcaguagu

SEQ ID NO: 17789 - RNA, 108 nt, Human
uuacaaugcuugguuuccccauugauuuuucaucaaucggacuaacaguagcaaaucauugagagucagaguugggguaaagauuccagggaaagcgaacauuuguaa

SEQ ID NO: 17790 - RNA, 66 nt, Human
ucccuagaugauucugaagguaagccauguuugggaacccagaacucaaccuuucacaucuuugga

SEQ ID NO: 17791 - RNA, 84 nt, Human
aucauucauacuuguccauuuuuuucuauuaguuuuauuuugguguaaaaaguucuuuauuaguaaaaauguuagaguaaugau

SEQ ID NO: 17792 - RNA, 66 nt, Human
uucuugggcuaacaguagagcugaacuuuuccauaucauguuuagagaccacugguagccuaagaa

SEQ ID NO: 17793 - RNA, 81 nt, Human
agauuccuccuuauaauucuguaaguguuggcuuuuaacuuggaauaauggccauauccuaccaaauuuuaaaagguuucu

SEQ ID NO: 17794 - RNA, 72 nt, Human
ugaaaguuuaguuuuauuauggacacuuuaugcaaacauuucaauacuuuuggcuacuucuauaaucuuuua

SEQ ID NO: 17795 - RNA, 76 nt, Human
uugaugaugucucucacucuguuccuuuaauuacaaagucucugaagacucugaacuugacugaggauaauguuaa

SEQ ID NO: 17796 - RNA, 131 nt, Human
gaaguuugaggcuguagugagcuaugauugcaccagugcacuccagcuuggaugacagaauggaguuucacucuugucucccaggcuggaguacaauggcaugaucucagcuuacugcaaccuccgucucc

SEQ ID NO: 17797 - RNA, 76 nt, Human
cauguuauagauuauuuggaaagacuguauuucccauugucacaaagcaaguuuauuucaaaugcuuuaucacaug

SEQ ID NO: 17798 - RNA, 63 nt, Human
cagcuccagcacacacacucuucccugggcagcaggaaaaggagguaacaaggacuugggcug

SEQ ID NO: 17799 - RNA, 131 nt, Human
gcugucuagcgaaaacuagucacuaaguccuggccugagagauacccacauuuccuuuagaacaaacagaacuaauaccuguguacauuucugagagccugaugugugaguccuuaaaauguagaccuugc

SEQ ID NO: 17800 - RNA, 75 nt, Human
aucuauuguccaguagucacaugggcucaaucuaauugcaaagagaagccccaaaauauaagaggacauguggau

SEQ ID NO: 17801 - RNA, 86 nt, Human
gacggugaggauggucccaagaggcgcagcuagggucacuggccccgguccuggugccucuugccuuugccuuucuucuucuuguc

SEQ ID NO: 17802 - RNA, 99 nt, Human
gcagcggcgccacgcggguccacugguugcacugcgggcuguaggccuccacgcccagcacgucgaagcgcuccauggacucgauguugucaucgcugc

SEQ ID NO: 17803 - RNA, 81 nt, Human
ggccucgcggucguacaccugcacggucuuggagaaggcaguguucucccagcuguagccgcccaggauguagaugcggcc

SEQ ID NO: 17804 - RNA, 81 nt, Human
aagucuugcuguaguguggaugaaguuuuguuguaguguggauagcaaugacagucuuucucuaauguuuccagaagauuu

SEQ ID NO: 17805 - RNA, 74 nt, Human
ggguuccaaugggugcacaguuccaaaaauguggagggacccuucucaguuuugaggccaugaauccaaagccc

SEQ ID NO: 17806 - RNA, 64 nt, Human
ugcuggcaugcuagguuucuggguucucucucccugagcgguccuggugacccugcuugaagca

SEQ ID NO: 17807 - RNA, 79 nt, Human; identical to SEQ ID NO: 6024

SEQ ID NO: 17808 - RNA, 79 nt, Human; identical to SEQ ID NO: 6025

SEQ ID NO: 17809 - RNA, 78 nt, Human; identical to SEQ ID NO: 5647

SEQ ID NO: 17810 - RNA, 86 nt, Human
ggcccgcgacugcugggcaccuucauccagcccugggguucucgugccuacgugaccuggaugacgggcggcaucuuuguggcgcc

SEQ ID NO: 17811 - RNA, 77 nt, Human
cugggguguuuauggcaagucacuuugacagacauuauuguggcaauguugucugacuuacuguuucaacaaaccag

SEQ ID NO: 17812 - RNA, 65 nt, Human; identical to SEQ ID NO: 247

SEQ ID NO: 17813 - RNA, 80 nt, Human; identical to SEQ ID NO: 100

SEQ ID NO: 17814 - RNA, 99 nt, Human
caggccaggcaggggccacgugugggccagucagccacuacaagauuuuugcuaagcuuugggcuguuggcagcaucuuggaccucaugccugggccug

SEQ ID NO: 17815 - RNA, 97 nt, Human
auugaaaaagaaaaagaagaaaacgaaaagaagaaacaaaagaaagcaucaugaugaauaaaaugucuuugcuuguaauuuuuaaauucauaucaau

SEQ ID NO: 17816 - RNA, 75 nt, Human; identical to SEQ ID NO: 9063

SEQ ID NO: 17817 - RNA, 80 nt, Human; identical to SEQ ID NO: 2983

SEQ ID NO: 17818 - RNA, 61 nt, Human
ccaugagcacggugaagcagacccaagacauuccauauacuggucccuuuaauugcucugg

SEQ ID NO: 17819 - RNA, 77 nt, Human; identical to SEQ ID NO: 17811

SEQ ID NO: 17820 - RNA, 66 nt, Human
gaagguuaagcuggcuguccugaaauauuauacagguggaugagaauggcaaaauuagucgccuuc

SEQ ID NO: 17821 - RNA, 80 nt, Human; identical to SEQ ID NO: 100

SEQ ID NO: 17822 - RNA, 66 nt, Human
cccgccaccacgcccagguaauuuggugucaguagagacgggguuuccccaugugggccuggcggg

SEQ ID NO: 17823 - RNA, 87 nt, Human
cgggugacaggacuuuucgaacaaggucucaccaugcugcccaagcuggucugaaaacucuuguccucaggcaguccucccaccucg

SEQ ID NO: 17824 - RNA, 89 nt, Human
ggaguuucacuguuguugcccagguuggagugcaggggcacaaucucagcucauugcaaccucugccuccgggguucaagugauucucc

SEQ ID NO: 17825 - RNA, 103 nt, Human
uugagacagggucucgcucuguugcccaggcuggagugcaggggcaugaucccagcucacugcaaccuccaccucuuggauucaagugauucucccgucucag

SEQ ID NO: 17826 - RNA, 72 nt, Human
agugcugagcuuuuaacaggaaauguggcccuagguauuagucuuaguuuaaaauguugguguuuagagacu

SEQ ID NO: 17827 - RNA, 63 nt, Human
uagcaaguugaaggacagguaguugagaugaaacacuucaaaacccugguuauagauguacug

SEQ ID NO: 17828 - RNA, 70 nt, Human
uauucacaaaguuaucugauagggccuuggaggagaagguccaguuuuaaaaaaugacaguuuguguuua

SEQ ID NO: 17829 - RNA, 67 nt, Human
ggucccggucucgguccaggaguccucccccaguguccaagagggaauccaaauccaggucgcgauc

SEQ ID NO: 17830 - RNA, 72 nt, Human
uaauuuagugaggugaacgacuucagauuucauuacuggauuggauauuugagguaaaauuucauuugguua

SEQ ID NO: 17831 - RNA, 75 nt, Human; identical to SEQ ID NO: 74

SEQ ID NO: 17832 - RNA, 87 nt, Human; identical to SEQ ID NO: 76

SEQ ID NO: 17833 - RNA, 71 nt, Human; identical to SEQ ID NO: 77

SEQ ID NO: 17834 - RNA, 65 nt, Human; identical to SEQ ID NO: 247

SEQ ID NO: 17835 - RNA, 80 nt, Human; identical to SEQ ID NO: 100

SEQ ID NO: 17836 - RNA, 67 nt, Human
gggguggguaugcgccaacccuauuucaggcagcgcucaaaguagguggagccgauguagccacccc

SEQ ID NO: 17837 - RNA, 70 nt, Human
acugaaaaauuugguaaauagguuggauucuuguuagaggguuuuuguucuggaagccauauuugauagu

SEQ ID NO: 17838 - RNA, 60 nt, Human
cagaauccaguggaacccaaaguccuaagcgccauucugggucuuacgcugugacaucug

SEQ ID NO: 17839 - RNA, 122 nt, Human
cuggcauuaaggcuguggauagcuuggugccaauuggucguggccagcgugaacugauuauugggugaccgaccagacuggcgaaaaccuuccauugcuauugaccacaaucauuaacccag

SEQ ID NO: 17840 - RNA, 75 nt, Human; identical to SEQ ID NO: 74

SEQ ID NO: 17841 - RNA, 87 nt, Human; identical to SEQ ID NO: 76

SEQ ID NO: 17842 - RNA, 71 nt, Human; identical to SEQ ID NO: 77

SEQ ID NO: 17843 - RNA, 65 nt, Human
ggugaaggugcugaggaaagcucccaggaugagccugggagugcuucagguaucagcuuccagcc

SEQ ID NO: 17844 - RNA, 76 nt, Human; identical to SEQ ID NO: 758

SEQ ID NO: 17845 - RNA, 99 nt, Human
gguugacuaaggucggcuuuguuccuggaaaugcaguugaaaguuccccauuaugauuuuaacucuucucagaagcaaagcacgcuuugauaaauagcc

SEQ ID NO: 17846 - RNA, 74 nt, Human
ucauggagauacaauaacaccacuuaucagugaaucucaauucaagauguuauggaggaauagauuugcuuuga

SEQ ID NO: 17847 - RNA, 88 nt, Human
uuuuuuaauaauucaaauaucuggccacauuccagagauucucagaaaaaucuuaaaugaagccaugguauguguuguuuuugaaaaa

SEQ ID NO: 17848 - RNA, 87 nt, Human
ccgcuacaggcaccagugccgcugcgcgggagcuagggcugucgaggccaacccuuccgcgcccgugacgcggggccugagagacgg

SEQ ID NO: 17849 - RNA, 73 nt, Human
gauggcggcugcaggguugcugccgccccaucugcuauugcccggcgaggucgccgcugccucagcugccauc

SEQ ID NO: 17850 - RNA, 83 nt, Human
gauuucgcguugggauuuaccuguuuagagaguaagaccaagaaugugcucuggagauuuaaauuuucccagcuuaagggauc

SEQ ID NO: 17851 - RNA, 70 nt, Human; identical to SEQ ID NO: 13852

SEQ ID NO: 17852 - RNA, 74 nt, Human
cgggaagguucuggaggcaaacgaagccugcgggaucugcaggcgcucagugccuuggggaagaaggaauccug

SEQ ID NO: 17853 - RNA, 62 nt, Human
ugcaguggccgguacagcugggaggagcgccccuuccggcuacacauuaccauuccggugca

SEQ ID NO: 17854 - RNA, 90 nt, Human
aggacugcagccuaaauuccaaauaccagagacugaaauuuucagccuugcuaagggaacaucucgauguuugaaccuuuguugugucuu

SEQ ID NO: 17855 - RNA, 67 nt, Human
aguuugucgugguuauaaaacaauuagcagaauagccuacauuuguauuuauuuucuauuccauacu

SEQ ID NO: 17856 - RNA, 130 nt, Human
gcuagcaccucccccaggagaccguugcagucggccagcccccuucuccacgguaaccaugugcgaccgaaaggccgugaucaaaaaugcggacaugucggaagagaugcaacaggacucgguggagugc

SEQ ID NO: 17857 - RNA, 74 nt, Human
gacguucucuugccaguuucuccagcaggaccccuucuuguuuugaaaauggucggcugcuuugguaggacguc

SEQ ID NO: 17858 - RNA, 76 nt, Human; identical to SEQ ID NO: 758

SEQ ID NO: 17859 - RNA, 71 nt, Human; identical to SEQ ID NO: 1764

SEQ ID NO: 17860 - RNA, 73 nt, Human; identical to SEQ ID NO: 8238

SEQ ID NO: 17861 - RNA, 64 nt, Human; identical to SEQ ID NO: 8239

SEQ ID NO: 17862 - RNA, 130 nt, Human
uaacaggacccauuccaaggaguguguguggguuuucccccuccccuguguccucugucaccuuggugaugaggccagagugaugugaagacugggagggaacccuaggucagaccuugguuuccuguug

SEQ ID NO: 17863 - RNA, 73 nt, Human; identical to SEQ ID NO: 721

SEQ ID NO: 17864 - RNA, 82 nt, Human; identical to SEQ ID NO: 119

SEQ ID NO: 17865 - RNA, 63 nt, Human; identical to SEQ ID NO: 722

SEQ ID NO: 17866 - RNA, 60 nt, Human; identical to SEQ ID NO: 723

SEQ ID NO: 17867 - RNA, 112 nt, Human
ccacgggccugguguucaucaucgugguagucaacaucuucaucacggcuucgggguccagaagcccuugauggacauggcaccccagcaguuagggacaccaggacccugg

SEQ ID NO: 17868 - RNA, 131 nt, Human
gauaaacucuuuagguauuagagccucuuagaugagguaucguuuacugcaaagaaaaaaaauuguuauaauuuugccauaaguuaugccuauuuagauggcuguauaacugguacuuugaagagaugaac

SEQ ID NO: 17869 - RNA, 88 nt, Human
ggaugccuuuuauuucuuuauuuugucugaucacucuggcuuggaugucccauacuguguugaauaagaguggugaaagugggcaucc

SEQ ID NO: 17870 - RNA, 69 nt, Human
ggcacaugcgaaaaugccccguuaauuuuuuuauauuuuuaguagagacgggguuucaccgugugagcc

SEQ ID NO: 17871 - RNA, 103 nt, Human
uugagauggaguauugcucuguggcccaggcuggagugcaguggcacaaucucggcuuacugcaagcuccgccuccuggguucacgccauucuccuaccucag

SEQ ID NO: 17872 - RNA, 78 nt, Human
acuuguugaaauagugauuugcaauagacuaagaaacauucccuguagucaacauucaaaauccuacuaucaucaggu

SEQ ID NO: 17873 - RNA, 98 nt, Human
augauuucauuaugaaaugguaaaaaguauaugugcaauacuucugagcuacaaagaacacuuguauuuucuccuuugcauuuauaacugaaguucau

SEQ ID NO: 17874 - RNA, 76 nt, Human
gugcucccguagagcccguugagguuggcguaguggcaguuccuguaccaccaggccccucgguaggagacagcgc

SEQ ID NO: 17875 - RNA, 103 nt, Human; identical to SEQ ID NO: 12300

SEQ ID NO: 17876 - RNA, 61 nt, Human
cugucuccggccgcccuggugcugccuguguccaugaccggugcuggggggucgggggcag

SEQ ID NO: 17877 - RNA, 74 nt, Human; identical to SEQ ID NO: 12302

SEQ ID NO: 17878 - RNA, 66 nt, Human; identical to SEQ ID NO: 2392

SEQ ID NO: 17879 - RNA, 88 nt, Human; identical to SEQ ID NO: 2393

SEQ ID NO: 17880 - RNA, 84 nt, Human; identical to SEQ ID NO: 384

SEQ ID NO: 17881 - RNA, 102 nt, Human; identical to SEQ ID NO: 2701

SEQ ID NO: 17882 - RNA, 60 nt, Human; identical to SEQ ID NO: 5595

SEQ ID NO: 17883 - RNA, 65 nt, Human; identical to SEQ ID NO: 247

SEQ ID NO: 17884 - RNA, 80 nt, Human; identical to SEQ ID NO: 100

SEQ ID NO: 17885 - RNA, 61 nt, Human
gggccuccaauccuaguaaacaggggcgcgaaugcccuuuuuccuccuaggguaggggacc

SEQ ID NO: 17886 - RNA, 64 nt, Human
uccuagacaacaacugauuuaauauccuugauaccaagcuaugauagaggaccagcgucuagga

SEQ ID NO: 17887 - RNA, 66 nt, Human
ucuaguagcgaagaucaacccaugcgcacaaaguaaaucgcguagacaaagacuuucgagauugga

SEQ ID NO: 17888 - RNA, 80 nt, Human; identical to SEQ ID NO: 174

SEQ ID NO: 17889 - RNA, 65 nt, Human; identical to SEQ ID NO: 3507

SEQ ID NO: 17890 - RNA, 77 nt, Human
uggggcuugcacugccuucucaggccagcuauacccuagcugagcaaagaacugaagaagcaaguguccacucccca

SEQ ID NO: 17891 - RNA, 70 nt, Human
uuuugaacuaauagaaauuuaauguuguuuuaagauaauacuuaaauauuaagaaagcuaaaauuuaaaa

SEQ ID NO: 17892 - RNA, 99 nt, Human
gcugcuggccccaaggagccacggggugaggcuggucaaaccaagggggcuuguuuggugggaucuggucguguggcccggggccccggggcgggcagc

SEQ ID NO: 17893 - RNA, 64 nt, Human
ggggcgggaagggcccccggaagugugggggcgcugcaugcgaaggguggcucgcgcuggcccc

SEQ ID NO: 17894 - RNA, 64 nt, Human
cguugucucguaucuuuucagucuaaagauccaaccgcauugugacuuguuaagauagacaacg

SEQ ID NO: 17895 - RNA, 70 nt, Human
ucacaccgacgggguaaugaauauguuagaacuacaagccucauauucagguauccaaagucaggaauga

SEQ ID NO: 17896 - RNA, 87 nt, Human
cccuucgucgggcuaccuugugggagggcgccccccccucuucuggggggcgggggacgcccucucgugcggccccccucccucggg

SEQ ID NO: 17897 - RNA, 69 nt, Human
auguauguuaccaaaauaaauauaucuaacaccaggacuagaaugguaguaauuuugggcauaaugcau

SEQ ID NO: 17898 - RNA, 82 nt, Human
cccuaauaccugucauccuccauagaacgguguggguuuuuacacacaacgacacgcgguaucuggcaauacaggcgauggg

SEQ ID NO: 17899 - RNA, 63 nt, Human
agguucugaggcaaguauuuauuccaagcaaacacgugggcguggacagcuaucucagagccu

SEQ ID NO: 17900 - RNA, 97 nt, Human
cuccauagccaucaucugcuacagggccaaagccaccuccagcgcccaggugauuggggugcugcucugggucgaacaugcggaucugggauugggg

SEQ ID NO: 17901 - RNA, 62 nt, Human
gucuuccagcuucagcccuucucuugccaccucuguggucugagcugggggagggggagggc

SEQ ID NO: 17902 - RNA, 65 nt, Human; identical to SEQ ID NO: 3875

SEQ ID NO: 17903 - RNA, 66 nt, Human; identical to SEQ ID NO: 3876

SEQ ID NO: 17904 - RNA, 115 nt, Human
gacccacagccuaagcugagugugaccccagaagccacgaugugcucuguauccagaacacacuuggcagauggaggaagcaucugaguuugagaccauggcuguuacagggauc

SEQ ID NO: 17905 - RNA, 64 nt, Human
ucucgguuccucccauacaugauauaauacagaaugaaauagaugaauaagaggaaaaccaaga

SEQ ID NO: 17906 - RNA, 70 nt, Human
cuucaauccucugucucucgaggaacuaggcuccaacacggggauccagguuuucaaucagauugugaag

SEQ ID NO: 17907 - RNA, 66 nt, Human
uccccgcgccgcgagaccaggcucccgcuccgguugcggcgaccgccuccgcggcgccccugggga

SEQ ID NO: 17908 - RNA, 106 nt, Human; identical to SEQ ID NO: 6411

SEQ ID NO: 17909 - RNA, 61 nt, Human
acaucauuagagcccuguagaaugacagcuuuuuucagguugccagucucuucauccaugu

SEQ ID NO: 17910 - RNA, 77 nt, Human; identical to SEQ ID NO: 8698

SEQ ID NO: 17911 - RNA, 80 nt, Human; identical to SEQ ID NO: 367

SEQ ID NO: 17912 - RNA, 86 nt, Human
cucgaagugauccugaggccgaagauugggcugccugguguugcagagacagaagccgggagcggcugaucaggaacacgugcgag

SEQ ID NO: 17913 - RNA, 86 nt, Human
ggcuccacagugugcacagaugaacgaaguuauggcagaguuagcuaacagaacucccucaaguuucauuugugaaguuggaagcu

SEQ ID NO: 17914 - RNA, 79 nt, Human
gguguuccugaaguaucugaaaaauaugaaauuagcucuguucccacuuuucuguuuuucaagaauucucagaaacauc

SEQ ID NO: 17915 - RNA, 61 nt, Human
cugcagacggugagcagugagaagguccgcuccacuaaucucaacugcucagugauugcgg

SEQ ID NO: 17916 - RNA, 105 nt, Human
gcgccaaagagaccaacaagaugauuuuagcguggacuaggacacuuaaccuaagaagaguuucacuuaaucauucaaaucacuaucugaagggucacggagcgc

SEQ ID NO: 17917 - RNA, 62 nt, Human
gugaggcaugacggcuccgagcccugcguggacgugcuguucggagacgggcaucgccugau

SEQ ID NO: 17918 - RNA, 80 nt, Human
auugcaggugauggcucaguguuccgagacuugguuauuaaguacggugcaguugacccacuguuggcucuccuugcagu

SEQ ID NO: 17919 - RNA, 107 nt, Human
ccgggucugacaggagcagccugugggcaccgcggcgguaguuggaggcgggagaggguccguagccgcgccgcccugccccgccaugggccuccugucggacccgg

SEQ ID NO: 17920 - RNA, 62 nt, Human
gggggaauagugggggggcccauggcaacgcacuuggggguauacaccccgcuuucaccccc

SEQ ID NO: 17921 - RNA, 84 nt, Human
cugucuacugguccaaauagaccaugucaguucacccccugguuugugucuauggguggcugugguauaugggaaaaguagcgg

SEQ ID NO: 17922 - RNA, 82 nt, Human
gaacagaaucuuguggaagaagaaugaaguugcugauuaugaagcuacaacauuuuccaucuucuauaacaacacucuguuc

SEQ ID NO: 17923 - RNA, 69 nt, Human
gugugaugacccuaguaagcacauauugguagccuuugcauacaagaaugugaaauuguucucaagcac

SEQ ID NO: 17924 - RNA, 70 nt, Human
uggucguggucauuguugcuuccuucuucauauugaagaacuucaacccacagugaacuacauaugucca

SEQ ID NO: 17925 - RNA, 60 nt, Human
ggugacaacaugcuggagccaagugcuaacaugccuggguucaagggauggaaagucacc

SEQ ID NO: 17926 - RNA, 74 nt, Human
uccucaacccguuugguggucacuuugguccgucaaguuccacggaguaauugugaaaggccagaauuugagga

SEQ ID NO: 17927 - RNA, 93 nt, Human
gcaggacaucaucuaugaaaauuaucugugaguacgaaaacgagcaucgugguuuaagguguuccagaugacuucaaagguaugaaugccugc

SEQ ID NO: 17928 - RNA, 64 nt, Human
gcaucgugcuggcuucuuaauaggugaugguugccgguguagggaccaggcacggcacgauagc

SEQ ID NO: 17929 - RNA, 60 nt, Human
auaugucaggguacuguauagguucuggaaggaaguuauaauauaguagacuguucaugu

SEQ ID NO: 17930 - RNA, 102 nt, Human
cuuaugagcaaaaguugguauuuaagagucauuugagggaauagcuguauauauugaauuaagguuguaccuuaaagacauuauacugauguuguggagggg

SEQ ID NO: 17931 - RNA, 63 nt, Human
ccuguuuucccggggugagccaguaucuccccagacacuggcaggcacgccgggcagaguagg

SEQ ID NO: 17932 - RNA, 81 nt, Human
cugcaguugugcgaggacgaaguuccuccagaagaaggccuuccuuaccugguccucacaucuccuuagcgugacucguag

SEQ ID NO: 17933 - RNA, 62 nt, Human
gcuccccugggcuccuucccauggcugccuccacgcagcaggcagaggagggggcggggggc

SEQ ID NO: 17934 - RNA, 75 nt, Human; identical to SEQ ID NO: 74

SEQ ID NO: 17935 - RNA, 86 nt, Human; identical to SEQ ID NO: 1403

SEQ ID NO: 17936 - RNA, 61 nt, Human
cagaguucagugcccugcuucagggcagagaccaaguuguggagucaggaacugaaagcug

SEQ ID NO: 17937 - RNA, 69 nt, Human; identical to SEQ ID NO: 10828

SEQ ID NO: 17938 - RNA, 78 nt, Human; identical to SEQ ID NO: 6377

SEQ ID NO: 17939 - RNA, 103 nt, Human
gggguggaaggauacggugaccuggugaccugucuugugaggcccacgguauccgacguguccugcaagcacaaauuacucagggcacccuucaagucagccc

SEQ ID NO: 17940 - RNA, 82 nt, Human
cccacugccggcagugcugguucuccaacagaguggugucuagauuuaucagaguaacgagaagacaaacuccggcacuggg

SEQ ID NO: 17941 - RNA, 94 nt, Human
aacagagauuuaccgcauuguuucucagaagcaaaugucagacagacgcgaaaaugacaugucuccaagcaacaaugugguuccuauucauguu

SEQ ID NO: 17942 - RNA, 78 nt, Human; identical to SEQ ID NO: 99

SEQ ID NO: 17943 - RNA, 65 nt, Human; identical to SEQ ID NO: 247

SEQ ID NO: 17944 - RNA, 80 nt, Human
ucuuguguugagacuucgugguggugcuaagaaaaggaagaagaagucucacaccacucccaagaagaauaagcacaaga

SEQ ID NO: 17945 - RNA, 61 nt, Human
gauauuccaaaagaacaagaaauuaaugcagugucuaauuuuuuuucuuuuguaauuuauc

SEQ ID NO: 17946 - RNA, 68 nt, Human
gaggcagguggaucaccugaggucaggaguucaggagcagccuggccaacauggugaaaccccgucuc

SEQ ID NO: 17947 - RNA, 67 nt, Human
ggccagcuggucgaaagugaggaucuugcccccugcccugaagaugcggcugccgacccugcugguc

SEQ ID NO: 17948 - RNA, 90 nt, Human
ggcuaaauuuauuuucuugugucugccuagcaagauaauuucucuauucuuugacaguauugucucaggcaccugaaucagaccuaagcc

SEQ ID NO: 17949 - RNA, 66 nt, Human
ggaagacauggcuguugugaggaucaaauggaaggauccaugagugcuuagaacaguccugggucc

SEQ ID NO: 17950 - RNA, 65 nt, Human; identical to SEQ ID NO: 1518

SEQ ID NO: 17951 - RNA, 75 nt, Human; identical to SEQ ID NO: 74

SEQ ID NO: 17952 - RNA, 87 nt, Human; identical to SEQ ID NO: 76

SEQ ID NO: 17953 - RNA, 71 nt, Human; identical to SEQ ID NO: 77

SEQ ID NO: 17954 - RNA, 88 nt, Human
ggccacagugugggcucagggaacauucuggcagccgugggguucuguucagugggccugguggagacccucuagccgaccuguggcc

SEQ ID NO: 17955 - RNA, 81 nt, Human
gacacgauuauuuuuccuucagcacuuugauguucuaacuccaugguuuucuagcauugauuguagaggguggaucugguc

SEQ ID NO: 17956 - RNA, 81 nt, Human
uguaaaucaucucguguuccugaaacuguccucacugcacucuccuucuugauugauaguuuacuuauacguugaauuaca

SEQ ID NO: 17957 - RNA, 65 nt, Human; identical to SEQ ID NO: 1518

SEQ ID NO: 17958 - RNA, 96 nt, Human; identical to SEQ ID NO: 2594

SEQ ID NO: 17959 - RNA, 87 nt, Human; identical to SEQ ID NO: 76

SEQ ID NO: 17960 - RNA, 72 nt, Human
gcauagcuuucaagaaauugucacaaaagguuuuauucucuuugcuugugacuauuuuucauugaagcaugc

SEQ ID NO: 17961 - RNA, 65 nt, Human; identical to SEQ ID NO: 1518

SEQ ID NO: 17962 - RNA, 75 nt, Human; identical to SEQ ID NO: 74

SEQ ID NO: 17963 - RNA, 87 nt, Human; identical to SEQ ID NO: 76

SEQ ID NO: 17964 - RNA, 65 nt, Human; identical to SEQ ID NO: 1518

SEQ ID NO: 17965 - RNA, 75 nt, Human; identical to SEQ ID NO: 74

SEQ ID NO: 17966 - RNA, 87 nt, Human; identical to SEQ ID NO: 76

SEQ ID NO: 17967 - RNA, 71 nt, Human; identical to SEQ ID NO: 77

SEQ ID NO: 17968 - RNA, 65 nt, Human; identical to SEQ ID NO: 1518

SEQ ID NO: 17969 - RNA, 75 nt, Human; identical to SEQ ID NO: 74

SEQ ID NO: 17970 - RNA, 87 nt, Human; identical to SEQ ID NO: 76

SEQ ID NO: 17971 - RNA, 71 nt, Human; identical to SEQ ID NO: 77

SEQ ID NO: 17972 - RNA, 82 nt, Human; identical to SEQ ID NO: 119

SEQ ID NO: 17973 - RNA, 62 nt, Human
caugugaugauaauggucuucucgccaucccaagauggguuggcagccaugaucuuugcaug

SEQ ID NO: 17974 - RNA, 109 nt, Human
cugugcaccucgugguaaaacucuuugggguucgccagcuguagcucauauuucauguuggggucaugccgaacacccaugaaguuguaguuccacgaggacugggcag

SEQ ID NO: 17975 - RNA, 62 nt, Human
cuguguucuggcggccccauucguagccacugggggucagcuuguaggccgucaguguacag

SEQ ID NO: 17976 - RNA, 65 nt, Human; identical to SEQ ID NO: 1518

SEQ ID NO: 17977 - RNA, 75 nt, Human; identical to SEQ ID NO: 74

SEQ ID NO: 17978 - RNA, 87 nt, Human; identical to SEQ ID NO: 76

SEQ ID NO: 17979 - RNA, 71 nt, Human; identical to SEQ ID NO: 77

SEQ ID NO: 17980 - RNA, 75 nt, Human; identical to SEQ ID NO: 74

SEQ ID NO: 17981 - RNA, 71 nt, Human; identical to SEQ ID NO: 77

SEQ ID NO: 17982 - RNA, 68 nt, Human
caggggauggcccugguuggccuggaagggugaaccugccagauuuaucaguagaggcugauccucug

SEQ ID NO: 17983 - RNA, 60 nt, Human
cuccgacuccaacucccccugcuguaagaggaggaagcggggacacaguggggacaggag

SEQ ID NO: 17984 - RNA, 74 nt, Human
gaagcccgaggcugcuccuguggaaguggcucugggcaccagccuguggggcuaaagacuugacagcuagcuuc

SEQ ID NO: 17985 - RNA, 67 nt, Human
ucucgcagguggcaugacagaggcucugaggccugauggcuggacccugcucacugcuguuguggga

SEQ ID NO: 17986 - RNA, 80 nt, Human
ugaccucuauuuucuuauauugcucuuugguuucauaauuuuuuacagggaaaaaaaaagggggggaaaaucaggggcca

SEQ ID NO: 17987 - RNA, 75 nt, Human; identical to SEQ ID NO: 74

SEQ ID NO: 17988 - RNA, 87 nt, Human; identical to SEQ ID NO: 76

SEQ ID NO: 17989 - RNA, 79 nt, Human
ucagugcgggaaccaaugcagacuggcauuaaggcuguggauagcuuggugccaauuggucguggucaacgugaacuga

SEQ ID NO: 17990 - RNA, 81 nt, Human; identical to SEQ ID NO: 4694

SEQ ID NO: 17991 - RNA, 89 nt, Human; identical to SEQ ID NO: 504

SEQ ID NO: 17992 - RNA, 65 nt, Human; identical to SEQ ID NO: 1518

SEQ ID NO: 17993 - RNA, 75 nt, Human; identical to SEQ ID NO: 74

SEQ ID NO: 17994 - RNA, 87 nt, Human; identical to SEQ ID NO: 76

SEQ ID NO: 17995 - RNA, 75 nt, Human; identical to SEQ ID NO: 74

SEQ ID NO: 17996 - RNA, 87 nt, Human; identical to SEQ ID NO: 76

SEQ ID NO: 17997 - RNA, 71 nt, Human; identical to SEQ ID NO: 77

SEQ ID NO: 17998 - RNA, 66 nt, Human
gaaagauugugcagaugacugaagcagaaguucgaggcuuauguaucaagucucgggagaucuuuc

SEQ ID NO: 17999 - RNA, 76 nt, Human
gaggaaagcagucuuuggaaaccauuuguuugcuauuggcuuauaaaaucaaauauccagagaacuucuuucucuu

SEQ ID NO: 18000 - RNA, 108 nt, Human; identical to SEQ ID NO: 13761

SEQ ID NO: 18001 - RNA, 75 nt, Human; identical to SEQ ID NO: 74

SEQ ID NO: 18002 - RNA, 87 nt, Human; identical to SEQ ID NO: 76

SEQ ID NO: 18003 - RNA, 71 nt, Human; identical to SEQ ID NO: 77

SEQ ID NO: 18004 - RNA, 87 nt, Human; identical to SEQ ID NO: 76

SEQ ID NO: 18005 - RNA, 72 nt, Human
ggcagcaaaauuucggguugggaacuugaagaagcaaugcgcuaauuauuauuccaagucccaguuguugcc

SEQ ID NO: 18006 - RNA, 65 nt, Human; identical to SEQ ID NO: 1518

SEQ ID NO: 18007 - RNA, 87 nt, Human; identical to SEQ ID NO: 76

SEQ ID NO: 18008 - RNA, 61 nt, Human
gguuccuugugaggcuccgagcagggcugggaagacccccccaucggggcugagcagagcu

SEQ ID NO: 18009 - RNA, 124 nt, Human
ucccuagccugcagcgcgccgcgcccccggccccgcgccugcacgacgccgccgccuccugguucggggcugucgugacccugggugccgcggcggggggagugcugggcggcuggcuggugga

SEQ ID NO: 18010 - RNA, 86 nt, Human; identical to SEQ ID NO: 8024

SEQ ID NO: 18011 - RNA, 65 nt, Human; identical to SEQ ID NO: 1518

SEQ ID NO: 18012 - RNA, 71 nt, Human; identical to SEQ ID NO: 77

SEQ ID NO: 18013 - RNA, 75 nt, Human; identical to SEQ ID NO: 74

SEQ ID NO: 18014 - RNA, 71 nt, Human; identical to SEQ ID NO: 77

SEQ ID NO: 18015 - RNA, 65 nt, Human; identical to SEQ ID NO: 1518

SEQ ID NO: 18016 - RNA, 75 nt, Human; identical to SEQ ID NO: 74

SEQ ID NO: 18017 - RNA, 87 nt, Human; identical to SEQ ID NO: 76

SEQ ID NO: 18018 - RNA, 71 nt, Human; identical to SEQ ID NO: 77

SEQ ID NO: 18019 - RNA, 88 nt, Human
cacagacauuuucggggcaguuuucuuugggaaggucuuugauaaauuuuguaaucaccucucggaagaaagccccaaaugacaugug

SEQ ID NO: 18020 - RNA, 73 nt, Human
ggagugcaguggcacaaucucagcucacuacaaccuccgccucccagguucaagcgauucugccuuagccucc

SEQ ID NO: 18021 - RNA, 87 nt, Human
uagcuggaauuacaggugccugccaccaugucuggcuaauuuuuguguuuuuaguagagaugggguuucaccauguuggccaggcug

SEQ ID NO: 18022 - RNA, 71 nt, Human; identical to SEQ ID NO: 77

SEQ ID NO: 18023 - RNA, 76 nt, Human; identical to SEQ ID NO: 758

SEQ ID NO: 18024 - RNA, 71 nt, Human; identical to SEQ ID NO: 1764

SEQ ID NO: 18025 - RNA, 71 nt, Human
uuuuuuuuuuuuuuuuuuaaaggggucucauuuauugucacuguuccaaauguacaaaaaaaauuagaaaa

SEQ ID NO: 18026 - RNA, 65 nt, Human; identical to SEQ ID NO: 1518

SEQ ID NO: 18027 - RNA, 75 nt, Human; identical to SEQ ID NO: 74

SEQ ID NO: 18028 - RNA, 87 nt, Human; identical to SEQ ID NO: 76

SEQ ID NO: 18029 - RNA, 71 nt, Human; identical to SEQ ID NO: 77

SEQ ID NO: 18030 - RNA, 116 nt, Human
auagauugagguugguuuaaaauuauuccuguaaaccaacaauaaagcaaagaagagguucauuuuuguaaauaacacugguuucaaauagugauguuagacuuaaccuaauuuau

SEQ ID NO: 18031 - RNA, 69 nt, Human
gaauguugcugucaaagggcugcccccuaccuuauaaggguugcugggcauuugaaggcaggaagauuu

SEQ ID NO: 18032 - RNA, 78 nt, Human
ucccucucccaccugucugcauagaaaggcagaauuagacauagcaugcuuuggaaaagcaaauaggaauuguuggga

SEQ ID NO: 18033 - RNA, 77 nt, Human
ugaacugaaugagagagaaaaagagguccagaguaguuuguggagcgauguuuccaucucuaaugccacucagcuca

SEQ ID NO: 18034 - RNA, 104 nt, Human
uuauggucccacaaccacggccgucuuguuuucccggccaggaagcuucaucuuccggaucauccuggaaagggacagaggcggccgguuggugcgacucauaa

SEQ ID NO: 18035 - RNA, 67 nt, Human
cauguuguucgcaaugugugagaacgugaugaaagacgauauccccguuuacacacaaauucaacug

SEQ ID NO: 18036 - RNA, 72 nt, Human; identical to SEQ ID NO: 1696

SEQ ID NO: 18037 - RNA, 63 nt, Human
ccauugccauuucuacauguuauucgcuuguuacccucaaguugauacaaggucuggcauugg

SEQ ID NO: 18038 - RNA, 87 nt, Human
acugaggccgugguuccaguggcugcucggugguggggcuggagcuuggcagcauccugcagcccucuggacucccggcucucgagu

SEQ ID NO: 18039 - RNA, 98 nt, Human
uggugagggcguguggcugaagcucuguuccugcuuggggguuggccacacagcaucccaacuccagguccagagccgagccugacagcccuccucca

SEQ ID NO: 18040 - RNA, 110 nt, Human
uguuauuauuuauuucuuuuaauacaaagcuuuggcauuagcaguuuuaugagaaaauaaaaugugcgaaaaauaaaugcuuguguggcaugauugguaaaugaugcaca

SEQ ID NO: 18041 - RNA, 87 nt, Human; identical to SEQ ID NO: 76

SEQ ID NO: 18042 - RNA, 65 nt, Human; identical to SEQ ID NO: 1518

SEQ ID NO: 18043 - RNA, 75 nt, Human; identical to SEQ ID NO: 74

SEQ ID NO: 18044 - RNA, 87 nt, Human; identical to SEQ ID NO: 76

SEQ ID NO: 18045 - RNA, 75 nt, Human; identical to SEQ ID NO: 74

SEQ ID NO: 18046 - RNA, 87 nt, Human; identical to SEQ ID NO: 76

SEQ ID NO: 18047 - RNA, 71 nt, Human; identical to SEQ ID NO: 77

SEQ ID NO: 18048 - RNA, 109 nt, Human
gcacgccuuacgugucucgguccugaccgauggcaggaggagacgcgccgcugaaucggcgcguuuucgggcugcacaaaccacgggacggagccucgagcaggcgugc

SEQ ID NO: 18049 - RNA, 95 nt, Human; identical to SEQ ID NO: 806

SEQ ID NO: 18050 - RNA, 94 nt, Human; identical to SEQ ID NO: 807

SEQ ID NO: 18051 - RNA, 76 nt, Human
agacucuguuaugauuuuauuucuucaauuguuccaaucacaguuucuaauacagaaauaaaacuauucagcgucu

SEQ ID NO: 18052 - RNA, 82 nt, Human
gacagccaguaucauccugagcacugagguaugcuuuccauggccgagacccagcccuacucauugcgauggucuggauguu

SEQ ID NO: 18053 - RNA, 75 nt, Human
gccaaggcaacacuugcugaugagcaacuuuaaggcuaagccaaguuuucucaaaauaaucagcaguaagcuggc

SEQ ID NO: 18054 - RNA, 76 nt, Human
cacuggguucugcuacuccccagaccucagggacaacugccggggguucaggguugguagcagggaguacccagug

SEQ ID NO: 18055 - RNA, 91 nt, Human
cuuaaggagagagauuguguucuuccucucucaggggugauaacucaggaagccucuggguugggaagaccaucaguucuuuugucuuagg

SEQ ID NO: 18056 - RNA, 61 nt, Human
auagagggcuuucuaugugccaggugcugguccaagccccuuuucaacauaagcucucugu

SEQ ID NO: 18057 - RNA, 67 nt, Human
gcagccaccuacacagagugauagagauugaaaaagaaucaccuuucaccaugggcagcgaggcugc

SEQ ID NO: 18058 - RNA, 84 nt, Human
guugauuuguuuccaugaaccugaguugcuuugauuuaaaaaaaauuaaugcaacaaaaauacagcaucaguauacaaauccac

SEQ ID NO: 18059 - RNA, 93 nt, Human
gguugggggugcccggcuggcagcuccgagggacccagagucugagccugcucugaggcacccggggcaguuggcugggccagcccaccaacc

SEQ ID NO: 18060 - RNA, 84 nt, Human; identical to SEQ ID NO: 384

SEQ ID NO: 18061 - RNA, 89 nt, Human; identical to SEQ ID NO: 385

SEQ ID NO: 18062 - RNA, 66 nt, Human; identical to SEQ ID NO: 8995

SEQ ID NO: 18063 - RNA, 79 nt, Human
ggauaguuggaacuaauguacagaacuaaauuuuuuaaacuuuauuugcuguuaaaauucugugaaguuucaguuaucu

SEQ ID NO: 18064 - RNA, 81 nt, Human
gucauaauuuguuaaaaugacuucauuuaacauucacugauguagauuaauaauguaaguucugauuuaaagaaugguggc

SEQ ID NO: 18065 - RNA, 61 nt, Human
auguauauaauaucuccgguuuauaaaaccuauuuauaacacuuuuuacauauauguacau

SEQ ID NO: 18066 - RNA, 85 nt, Human
ggccaucuacacggugaggcacccggaguggcaucucaacucggauuacuccuacgguuucgccuacauccuggccuggguggcc

SEQ ID NO: 18067 - RNA, 74 nt, Human
uaugaaaggugugaacuugcaauguccuccugucuuaaacccaaguugacagugcccucucaaaacuuuucaua

SEQ ID NO: 18068 - RNA, 100 nt, Human
aaccugagaacauccauuucaauguccccaaacacuauuuauccccugaaaaagcagcuuaaaauaugggugcacauuuugcagcuuauguucuuugguu

SEQ ID NO: 18069 - RNA, 64 nt, Human
cggagcaccugucuucauugccucucccuucugcagccugaaaggagggauguucaggacucug

SEQ ID NO: 18070 - RNA, 76 nt, Human
gggcuaggcugggccuagcuguagagacacaccuaaguuccguucucuguuuggaggcugcacccagccugagucc

SEQ ID NO: 18071 - RNA, 76 nt, Human; identical to SEQ ID NO: 4396

SEQ ID NO: 18072 - RNA, 79 nt, Human
cauuuuucacucuuuaaaaucacauucaaaaaucggcaaagaaacgccccggggaaugaguagacgggaggggagggug

SEQ ID NO: 18073 - RNA, 90 nt, Human
cccaugaagcuguuacagauuguguaucuuggacugaauucuauaaguauauaugguacagacuaaaacaaauguggcuagcuagguggg

SEQ ID NO: 18074 - RNA, 78 nt, Human
uauuuagguaaagcucuaagacucaugagccaacuuuucauguaacuggcuuuccuaggcuggggcuugaacuaagua

SEQ ID NO: 18075 - RNA, 68 nt, Human; identical to SEQ ID NO: 5576

SEQ ID NO: 18076 - RNA, 62 nt, Human
ccuuuuaaguuuggauugggugagcuuucuucuaaaaggagcuucugaaguaauugcaaagg

SEQ ID NO: 18077 - RNA, 68 nt, Human
gguaauugaaaguuuguugaugaauauuuguguaaaacgcauucaagucuauaaccuuuccaauuacc

SEQ ID NO: 18078 - RNA, 72 nt, Human
uguugcugagugagucuuucuagccaggacaagcugauuggaauuuuugaaugguagagaagaaacagcaca

SEQ ID NO: 18079 - RNA, 68 nt, Human
gcagcacaaaggcggcgcggugcacaucggaguuguaguacuucagcugcaucugcgccaccugcugc

SEQ ID NO: 18080 - RNA, 66 nt, Human; identical to SEQ ID NO: 4249

SEQ ID NO: 18081 - RNA, 82 nt, Human; identical to SEQ ID NO: 1766

SEQ ID NO: 18082 - RNA, 92 nt, Human
aaaugcaguguagggagaggagauggcaggacacagcaaacaggacacauuugccugcuucucucuugccuaauucuuccugaccuguauuu

SEQ ID NO: 18083 - RNA, 73 nt, Human
auuaauccuuuuaaaacauuuuuguuaaaguuaguguaucaguaagaaacagaccuaguuuaaaaggaauaau

SEQ ID NO: 18084 - RNA, 86 nt, Human
uuuuuuuuuuuuuuuuuuuuuuuuuguggaaacccaggagcuuuuuuuuuuuaaaaaccauuuggaaaaaaggggaggaggacgaa

SEQ ID NO: 18085 - RNA, 81 nt, Human
aauuuuuuuauucuacauaaaagcugucaaaguuuugacacaucaaaaaugcaaaauaauggaauauacuuuaaaaaaauu

SEQ ID NO: 18086 - RNA, 65 nt, Human
aggcucaguuccuggaagagagacagagggucgcuacucuucuuggccugcucaggagggggccu

SEQ ID NO: 18087 - RNA, 61 nt, Human
gcuauuggccgacuccgcgaucugcuuguuaggcauaagggguggaaacuggccaagaugc

SEQ ID NO: 18088 - RNA, 62 nt, Human
ggcuuuggaggggcccgcagagcgcuggcauaggacauggcgggcuugccccccgcagagcu

SEQ ID NO: 18089 - RNA, 62 nt, Human
gggugauguacuucacagugaccggguccuccacagguagcucgggcuauggcacuucaccc

SEQ ID NO: 18090 - RNA, 80 nt, Human; identical to SEQ ID NO: 17576

SEQ ID NO: 18091 - RNA, 68 nt, Human
aaugugccuaguagaaaauuuuaaauuaccuauguggcucacauuauacuucuacuggacaguacauu

SEQ ID NO: 18092 - RNA, 72 nt, Human
cgcccuggggucauugucagguaaagaugguaaagccuguugcuagucaaguauugagggacucagguggug

SEQ ID NO: 18093 - RNA, 68 nt, Human; identical to SEQ ID NO: 18091

SEQ ID NO: 18094 - RNA, 72 nt, Human; identical to SEQ ID NO: 18092

SEQ ID NO: 18095 - RNA, 62 nt, Human
aaccaccagaucacgguccugcacgucuaccaccaugccucgaugcugaacaucuggugguu

SEQ ID NO: 18096 - RNA, 63 nt, Human
gugaugaacuggguccccugcggccacucuuauuuuggugccacacuuaauagcuucauccac

SEQ ID NO: 18097 - RNA, 74 nt, Human
ccgggaggccccgaggaggcggcuccucuucaagagugggagggggcaggccuggaguguugggggcagccugg

SEQ ID NO: 18098 - RNA, 65 nt, Human
cuggcagcagccccagccugaccgcccggaguguacuuuccuugacaggcaaggcuguuggccag

SEQ ID NO: 18099 - RNA, 128 nt, Human; identical to SEQ ID NO: 844

SEQ ID NO: 18100 - RNA, 79 nt, Human
cgacuugucuccucuauauaaaugcguagggguuuuaguuaaauguccuuugaaguauacuugaggagggugacgggcg

SEQ ID NO: 18101 - RNA, 85 nt, Human; identical to SEQ ID NO: 6904

SEQ ID NO: 18102 - RNA, 72 nt, Human; identical to SEQ ID NO: 8132

SEQ ID NO: 18103 - RNA, 73 nt, Human
cguuuuggaagcaaguggguucagugaaguguguugccacgaauagcacccgcugcuuuuggcuuuauuaacg

SEQ ID NO: 18104 - RNA, 64 nt, Human; identical to SEQ ID NO: 3890

SEQ ID NO: 18105 - RNA, 82 nt, Human
uggaguggggcggcgguugccgguggccucagacaugcagaaggggacggggcgccggccgggccacgaggccccccaccca

SEQ ID NO: 18106 - RNA, 94 nt, Human
gggugcauggccggaugucucugggacugaacgggggagggagugugaucugcugcuccuccaaauucccacaaggacuuuccuaucaucacuu

SEQ ID NO: 18107 - RNA, 78 nt, Human; identical to SEQ ID NO: 99

SEQ ID NO: 18108 - RNA, 65 nt, Human; identical to SEQ ID NO: 247

SEQ ID NO: 18109 - RNA, 80 nt, Human; identical to SEQ ID NO: 100

SEQ ID NO: 18110 - RNA, 79 nt, Human
ucugccuccagugucaaucccaaaccccgaacaaccaucuuuguuuagugggcaagugagggaccacauugauuucaga

SEQ ID NO: 18111 - RNA, 66 nt, Human; identical to SEQ ID NO: 1526

SEQ ID NO: 18112 - RNA, 122 nt, Human
auguguaccauggcugaaaaaaagagucacaaguggcugagacacugcuccauacaggacucauguguggucauugcccacccaaucuuaugacuccaucaucuugggaccuggaacaacau

SEQ ID NO: 18113 - RNA, 65 nt, Human
guauuaauuugauucuuaugucuuuuguaagugagaacaauagacuuucaggauacaaaacaugc

SEQ ID NO: 18114 - RNA, 65 nt, Human
gugccaauguccuaccagcuaccccagaccuacuacaggauuuuuacguggcgauuuccaagcac

SEQ ID NO: 18115 - RNA, 73 nt, Human
uccaguuuuuggacagaaugcgggcugccggcaaguuggaccagccugaucguuucucuuucaaagaccagga

SEQ ID NO: 18116 - RNA, 71 nt, Human
cagauguuuugaagaucgugacgucuuguaacuagcagugugugcacagaauccuacucaaggaacgucug

SEQ ID NO: 18117 - RNA, 71 nt, Human
gaacgguugugaccacaccgacacguauuuuacagauaaaucauucuugcggcggcgggucgaacacguuu

SEQ ID NO: 18118 - RNA, 82 nt, Human
cauggcccacucacccaaacuuacccuacacacacuaggauaucuucuaggugaaagcaguaaauggaggagguugggcaug

SEQ ID NO: 18119 - RNA, 65 nt, Human
gaaggcagugcccccagugcuagugaugcccagaaggacaaggaagcauccccacuacugcccuc

SEQ ID NO: 18120 - RNA, 60 nt, Human
gcaacagagucauuauuuggagaauaacagugaaaacagccaagcagauaaacucugugc

SEQ ID NO: 18121 - RNA, 78 nt, Human
cccccagaggaaucugguaaagaagacaaacagggccaggcgcgguggcucacuucuuuaaucccagcacuuuggggg

SEQ ID NO: 18122 - RNA, 75 nt, Human
ucaggaguucaccauuagacucucacauuuacauauauuccggaagaugugagagucuaauggugagcucuauga

SEQ ID NO: 18123 - RNA, 66 nt, Human
cagaauggccgugucggacacugauuuggaucacauucuuccaucuucuguucuuccuccauucug

SEQ ID NO: 18124 - RNA, 63 nt, Human
ugcaguuguaauuuagauucgagaagugguuuauccuuugacuggaaaagaaaaguagcugca

SEQ ID NO: 18125 - RNA, 64 nt, Human
agaugaaauuaagccacucacuuuaaaauuuuuauaagaauuugaacguggcuuuguuuccucu

SEQ ID NO: 18126 - RNA, 61 nt, Human
ucuaauuccauacaauuucugcaauuuuaaaagauacccccaaauugauuguuaggauaga

SEQ ID NO: 18127 - RNA, 97 nt, Human
ggaagcugggaggacgcagauccuucggaccggggggcgacccuuuuuaggcugugacucggggguggccccaggcccgggauagcccccagauucc

SEQ ID NO: 18128 - RNA, 98 nt, Human
gcuucaacuuugacuuucugccagaggagagugagcacaauaucuggggcaccuaagauguagcauguuuccgaaagugggagguuuaggacugaggc

SEQ ID NO: 18129 - RNA, 77 nt, Human
uguuacaggaggcagaaagaaaugauuuagguagacgggguaaagccaguccccagcagaaaauuugccuuuuaaca

SEQ ID NO: 18130 - RNA, 78 nt, Human; identical to SEQ ID NO: 5110

SEQ ID NO: 18131 - RNA, 84 nt, Human; identical to SEQ ID NO: 5111

SEQ ID NO: 18132 - RNA, 69 nt, Human
uccuucuucaccgacgauguacagcaagacaccucagcugggaguggaaccuugucgauuaaggaagga

SEQ ID NO: 18133 - RNA, 60 nt, Human; identical to SEQ ID NO: 5112

SEQ ID NO: 18134 - RNA, 84 nt, Human
gggggaggaccacguugguuuggcuugccgagcaugucacgggugggagaagcucacagcccgguaggccgcaaguccuuuucu

SEQ ID NO: 18135 - RNA, 60 nt, Human; identical to SEQ ID NO: 10992

SEQ ID NO: 18136 - RNA, 64 nt, Human
guucaacuuugagaguuucccggaguccccuggggagaacggggcaacuuugcaaacccuaagc

SEQ ID NO: 18137 - RNA, 70 nt, Human
ggagucuccucucuaccgccacugucacaccguagcccacauggauagcacaguugucagacaagauucc

SEQ ID NO: 18138 - RNA, 73 nt, Human
gggaagguggggaggguccgaggggaaggggacccagcuucccugugcccgcucaccccacuccaccaguccc

SEQ ID NO: 18139 - RNA, 67 nt, Human
uuuguuaauguuucaaacauacuuucuugguuuucuaauggaguauauaguuuagucauuucacaga

SEQ ID NO: 18140 - RNA, 61 nt, Human
ggaguggccuauuaagagucucaaagucuaccugggagugaagaagaaacucaggccaccc

SEQ ID NO: 18141 - RNA, 81 nt, Human; identical to SEQ ID NO: 7833

SEQ ID NO: 18142 - RNA, 70 nt, Human; identical to SEQ ID NO: 7835

SEQ ID NO: 18143 - RNA, 88 nt, Human
cugagcagauuccucauggucaugggggccacguuguuauguaccuugcaucacgugggugguuuccauauagaccgaggcgguucag

SEQ ID NO: 18144 - RNA, 63 nt, Human
aaguggucucugcuggggaaggguuuacuuuucuuuuuuucuuuaauaacaaggagauuacuu

SEQ ID NO: 18145 - RNA, 69 nt, Human
gccaaaaucagcauguucuccuaugccucagccaguucuaauguaauaggagaugcaguuuauuuaagc

SEQ ID NO: 18146 - RNA, 130 nt, Human
ucacgucugcaaucccaguacuuucggaggcugaagcggugguucacuugaugccaggcugcucuugaauuccugaccucaggugauccucccgccucggccucccaaggugcugggauuaaaggcauga

SEQ ID NO: 18147 - RNA, 71 nt, Human
uucaguuugauacaugcuauugauugcuuaaaauuuccuacuaaaaaauuaauauucucaacuaaauugaa

SEQ ID NO: 18148 - RNA, 73 nt, Human
acuaagacuggcugugguuaaaugaauauguucaguucugaacuuuuaauaguaacuccaauucaguaauggu

SEQ ID NO: 18149 - RNA, 63 nt, Human
cuuggauuuuucacucggggaaugcuccggcuuaacagcagauccggguggucgcuggccaag

SEQ ID NO: 18150 - RNA, 65 nt, Human
gcacuucgggacgggggggaaacaccacaaaacgggccugcggaauuccucacuugucugugugu

SEQ ID NO: 18151 - RNA, 63 nt, Human
uacaggcacauaccaccacgcccagcaaauuugugugugugugugugugugugugugugugug

SEQ ID NO: 18152 - RNA, 68 nt, Human
ccuccuuugcuccucaaaaauauucaagggacagucucucuuucauauauuuuggcugcagauacagg

SEQ ID NO: 18153 - RNA, 70 nt, Human
ccccuuuuccagggggaaaaccugggggcccacuugcuuuaauaaaucccccaccccccgggaaaagggg

SEQ ID NO: 18154 - RNA, 63 nt, Human
gggccaaaauuguuuccuggggaaaauuguuaccccuucaaaauuccccacaacauacaaccc

SEQ ID NO: 18155 - RNA, 103 nt, Human
aaggggagguuuuugcaaauucccaaggaaaugucaaaaagggaaaauggccagcauuauccauuugcuuuuuuggguuuacugggggaauaacacuuuccuu

SEQ ID NO: 18156 - RNA, 61 nt, Human
uuugggggguuuggccaaacuuuuuauuuaauauucuggaguugguuaacacacacuuaaa

SEQ ID NO: 18157 - RNA, 64 nt, Human
gaguguuuugguguucccugccccuguguuuuggggagcuugggggcggggauguugaacacuu

SEQ ID NO: 18158 - RNA, 80 nt, Human
gcgcgcucucccugcucaucccgaggagagagacugauggcgggacagggcuucuuggggugggugggaaaggggugcgc

SEQ ID NO: 18159 - RNA, 88 nt, Human
guuuuuguuuuuuuggucauaaauccagaugagaugaaguaucgugucuacuauuuccuuucagagccgugaucuuccuaacgagagc

SEQ ID NO: 18160 - RNA, 61 nt, Human
ucuuccaucggccucggucuuuuagauucccugccuucgagccgaaccgagauuuggaagg

SEQ ID NO: 18161 - RNA, 95 nt, Human
ccccaaagcugaaagagcuuucaugaaaaugccuggagccauucaguauagaacuaagugcucuuccccaugguagcuaucucaacuuugaaggg

SEQ ID NO: 18162 - RNA, 64 nt, Human
ugggaaaauaaggcacuguccaaguaacacacagugacaguggcaaagucgugcuugcuuccca

SEQ ID NO: 18163 - RNA, 75 nt, Human
gauaaaguugaaggcuacaagaagaccaaggaagcuguuuugcuccuuaagaaacuuaaagccuggaaugauauc

SEQ ID NO: 18164 - RNA, 63 nt, Human
gaucuuagcagaaucuugaaaagcccagagaucaaagagcccuucgagcacacgcagaagauc

SEQ ID NO: 18165 - RNA, 67 nt, Human
ugugucguggaggcgaauguuugcaccaaccaaaaccuggcgccguuggcaucguagagugaacaca

SEQ ID NO: 18166 - RNA, 66 nt, Human; identical to SEQ ID NO: 4461

SEQ ID NO: 18167 - RNA, 61 nt, Human
ggugacaacaugcuggagccaagugcuaacuauggccugguucaagggauggaaagucacc

SEQ ID NO: 18168 - RNA, 66 nt, Human; identical to SEQ ID NO: 3532

SEQ ID NO: 18169 - RNA, 61 nt, Human
gugacaacaugcuggagaccaagugcuaacaugccuugguuccacgggaugggaaagucac

SEQ ID NO: 18170 - RNA, 68 nt, Human
cagaagagcuaaaacgguuugaugauccagguuugaugcucauggguuucaagccguugguacugcug

SEQ ID NO: 18171 - RNA, 65 nt, Human
gcagggggacggccccaaguguccuguccacaaaaggcgcggugacaaagggacuccuaacccgc

SEQ ID NO: 18172 - RNA, 61 nt, Human
gcgggcgaauaaccccgucuuuuuccauuauaacucuuccggcaaaggcgcguuugcccgc

SEQ ID NO: 18173 - RNA, 83 nt, Human
gucucuguuccgcaggaugggguuuguuaaaguuguuaagaauaaggccuacuuuaagagauaccaagugaaauuuagaagac

SEQ ID NO: 18174 - RNA, 62 nt, Human; identical to SEQ ID NO: 2350

SEQ ID NO: 18175 - RNA, 81 nt, Human
gcccaggcuggaguguaguggcaugaucucggcucacugcaagcucugccucccggguucacgcccuucuccugccucagc

SEQ ID NO: 18176 - RNA, 77 nt, Human
uuucaccacguuugccaucauggucuugaucuccugaccucaugauccacccgucuuggccguccaaagugcuggga

SEQ ID NO: 18177 - RNA, 94 nt, Human; identical to SEQ ID NO: 807

SEQ ID NO: 18178 - RNA, 77 nt, Human; identical to SEQ ID NO: 796

SEQ ID NO: 18179 - RNA, 84 nt, Human
ccggaagcugcccuuccagagguuggugagggagaucgcgcaggauuucaaaaccgaccugagguuucagagcgcagccaucgg

SEQ ID NO: 18180 - RNA, 66 nt, Human; identical to SEQ ID NO: 3532

SEQ ID NO: 18181 - RNA, 67 nt, Human; identical to SEQ ID NO: 351

SEQ ID NO: 18182 - RNA, 66 nt, Human
ccccgggauuuuggccugccccuucgucggagacccggccgggggggcgcagcucuuuccuagggg

SEQ ID NO: 18183 - RNA, 83 nt, Human
gggcauccuggcugcagaugaguccacugggagcauugccaagcggcugcaguccauuggcaccgagaacaccgaggagaacc

SEQ ID NO: 18184 - RNA, 81 nt, Human
cgauugggacugacgcucauggacaggguucccauggauaaauuugucgaaggcaccagguccaaugcaguggucaagucg

SEQ ID NO: 18185 - RNA, 75 nt, Human
caccgcguaggaugcugauauugccugccgaugcugccagcggaaaugaugauggugucaguaucaaaaccggug

SEQ ID NO: 18186 - RNA, 130 nt, Human
auauaggaagguauacugguuucuggugugauucuuuagcuacauuuauuccuugucuuaugucauuucacuggaucauguaacuguccuggcuuucagaaauuauauuagaugcccagccuuucucauu

SEQ ID NO: 18187 - RNA, 66 nt, Human
gagaugggguuucgccguguuagccaggacggccucgaucuccugacgucgugauccgcccgucuc

SEQ ID NO: 18188 - RNA, 81 nt, Human
cuggagguggaagccaacaaugccuuugaccaguaucgagaccuguauuuugaagguggcgucucaucugucuaccucugg

SEQ ID NO: 18189 - RNA, 72 nt, Human
uuucggaaucaggcgggucccuggugauucgcuggguuuucccacuucccacggggaccucaccuuugggaa

SEQ ID NO: 18190 - RNA, 61 nt, Human
ggcaucuucuggcuugacuggauggaaggagacuuaggaaccuaccaguuggcaugauguc

SEQ ID NO: 18191 - RNA, 62 nt, Human
gugggguagcagauggaguaauggucacgagguccagacccacucccaaagcucagacuugc

SEQ ID NO: 18192 - RNA, 60 nt, Human
ucggggaaacggcgggguacugcacagcccuggcugcuacagaaccaccaaaacccgcga

SEQ ID NO: 18193 - RNA, 100 nt, Human
ggccugugccgcgaccggccccccugggcggggcucggggcugccgcgucccgcgacgcgggaccucgccccccgcucguggccggccccggcgcgggcc

SEQ ID NO: 18194 - RNA, 95 nt, Human
augaaguuaugugugcacaauucaaguggacuguaaacuguugguauauucagugaugcaguucugaacuuguauauggcaugauguauuuuuau

SEQ ID NO: 18195 - RNA, 62 nt, Human
cagaguguaaauggugaucuucuaaaucuguguccacaaauuccaaaacccauaacacucug

SEQ ID NO: 18196 - RNA, 70 nt, Human
caguauuuguccuaccggguuuuuguuguuuucuguucuguauaauaguaucuaauguuggcaaaaauug

SEQ ID NO: 18197 - RNA, 97 nt, Human
cgauggcugguggcuggggccagccccgggacucccgggugcaggaggacccuguggucccggguccuggcgcuggcaucccugggcaaaagcggcg

SEQ ID NO: 18198 - RNA, 76 nt, Human
guaggcccuguuggcuuuggcccuggugaucggagucaccuggacagcccagaggcucgagaagccauguuccugc

SEQ ID NO: 18199 - RNA, 69 nt, Human
guguggggcguggaccagggcggcgggcagcggguuuuccuccugguccuccaaaaugcgcuucagaac

SEQ ID NO: 18200 - RNA, 73 nt, Human
cccucccaacccccuugaucccuuucucugaucaggggaaaggagcugagugagggagguagaguuggaaggg

SEQ ID NO: 18201 - RNA, 88 nt, Human
agaucagagaauaggucuauauuucauuaagauaaauguuucaaaugaaacauuugguaauugagaauacuacuuuaauaucugagcu

SEQ ID NO: 18202 - RNA, 69 nt, Human
ccuggaggaucagcgcuaacucauguacaaugugcucauuauuggacaauauucugcuaucuacacagg

SEQ ID NO: 18203 - RNA, 84 nt, Human; identical to SEQ ID NO: 286

SEQ ID NO: 18204 - RNA, 65 nt, Human
cccggagcccagucacagcggugccugccuagcacaaguguaggacagcuuuauugaucucuggg

SEQ ID NO: 18205 - RNA, 71 nt, Human
cuuuccacacaggcuaccagauauuuuauuuacauuuaaaaauagguuuucuucuucaacguaguggaaag

SEQ ID NO: 18206 - RNA, 93 nt, Human
uuuuuuuaguuaaaacuguuuaauaggaacaaucuuuuucaagcaugaaagagcuuuguuuuggaggauuauagcaacauacaacugagagag

SEQ ID NO: 18207 - RNA, 65 nt, Human
guaauuuucucaucaacagaaucuggcucucuauuuucuguaaguccuucaugagagucuguugc

SEQ ID NO: 18208 - RNA, 131 nt, Human
uauucuugcuuuaucuggaacaguuuacuccguuauugaauaucuauuaguguuuaauauagaagagcuuaauaaaccgcuaauccgaaaauaaugguauucccuugcuuuucagaccuuuuugcugaaua

SEQ ID NO: 18209 - RNA, 65 nt, Human
ccccacccaccagccgccaagcgucacaccaaacccaggaccuucagacaggaugaauggugggg

SEQ ID NO: 18210 - RNA, 64 nt, Human
uucccaggcggcaggucugggucugagcacaugcuguuugggggaucaccuggacgccugggga

SEQ ID NO: 18211 - RNA, 88 nt, Human
cugggcccgggagacaacuuggcgucaccccucagcggucgccacucucuucucuguuguuggguccgcaucguauucccggaaucag

SEQ ID NO: 18212 - RNA, 84 nt, Human
gugaacuuuuagcuccugcagcuccuuuugacaagaaauguggucgugaaaauuggacuguugcuuuugcuccagaugguucau

SEQ ID NO: 18213 - RNA, 74 nt, Human
gaggaggcuauggcuaguuagaauauaugcaugguaacugaauuaccuguaucuguuuuuaaugggguccucuc

SEQ ID NO: 18214 - RNA, 73 nt, Human
uguucucuaggccuuuguagaaaacauggacguuguuccuuggcgcacauauuaugcgaaucuauagagaaua

SEQ ID NO: 18215 - RNA, 63 nt, Human
cugagcaagaaggagcugaaagagcugcugcagacggagcucucuggcuuccuggaugcccag

SEQ ID NO: 18216 - RNA, 86 nt, Human
cccugguguggggagccgaggcggugcaggcccuccgggagcgccuggguguggggggccgcacgguaggcgcccugccccgcggg

SEQ ID NO: 18217 - RNA, 71 nt, Human
ccgguucaggcaggcccuggacuggcgugucccggucuaagaguggcccagccggcgccugccugagcugg

SEQ ID NO: 18218 - RNA, 63 nt, Human
gcugcugaugcccgaagaggcgcggcucuuggccgagaucggcgccgugacucuggucagcgc

SEQ ID NO: 18219 - RNA, 67 nt, Human
cuguuuccucucgaauuccauccuguuggagaaacagggaguccaggagcccguugggaggagacag

SEQ ID NO: 18220 - RNA, 85 nt, Human
guggacccaaguuaggugugacacguucacauaacugugcagcacaugccgggagugaucagucagacauuuuaauuugaaccac

SEQ ID NO: 18221 - RNA, 63 nt, Human
ccgcggaagccggcuggagcacuuugggacugccccaguacggauaauaguuggccuccgugg

SEQ ID NO: 18222 - RNA, 61 nt, Human
agagcgaaggauuugagagcacucuccagaacaaggaaagauuuuuauugcaaggcgcucu

SEQ ID NO: 18223 - RNA, 114 nt, Human
cuuaugcuuuggcaaauuuccuaccguuguuuggaccugguggaucauguuccugucuacauuuucaguucccuauuuucuguuucaacauugggccacuggcuauagcaagag

SEQ ID NO: 18224 - RNA, 71 nt, Human
uugccgggccgcuacccggggucuggggaacacaccggcguucuaaaacaccgcgggcgauggcgcggcga

SEQ ID NO: 18225 - RNA, 65 nt, Human
agcuauucaguugguaagcuuccaggaaaaaggacaggcagaaagaguuugagaccugaauagcu

SEQ ID NO: 18226 - RNA, 65 nt, Human
ccagauuucagucuuuuccuguuuuuguuaacuuuggguuaaaaaaaaaaaaaaagucucguugg

SEQ ID NO: 18227 - RNA, 64 nt, Human
gguugaacaaugcucucacauuacaggaauuuagggccuagaauguguaaggcucuugccagcc

SEQ ID NO: 18228 - RNA, 71 nt, Human
ggauguuuggaagauaagcuuaaaggagaaaugauggaucugcagcaugggagcuuauuucuucagacacc

SEQ ID NO: 18229 - RNA, 61 nt, Human
gcagguuuaggacagccauuggcuaacugggucgaucuacugggcugauucugggacccgu

SEQ ID NO: 18230 - RNA, 101 nt, Human
gagaguauaaagccaacagauccagguuuugaaauauuuaaguaaaaugacagcaugacacuaauaaacaaaaauauaaucuaaauuguuuuuuuauuuuu

SEQ ID NO: 18231 - RNA, 80 nt, Human
gcgagugccagcaugccuggcuaauuuuuuguauuuuuaguagagacuggguuucaccauguuggccaggcuggucucgu

SEQ ID NO: 18232 - RNA, 112 nt, Human
cuggagaacuuaaaaaaauaaagacugcugccugggccucacccuagaccaauuagaucagaauuuccaggaguugaggucugaacaucauuaauuuuuuaaagcuccccag

SEQ ID NO: 18233 - RNA, 63 nt, Human
ucaggcaguagcaucaacaucacccugaagcuuguuaaucagauucucacaugcuaucacuga

SEQ ID NO: 18234 - RNA, 77 nt, Human
acagauuaaaggauagggugcaccauuuuuguaacuuuuaaggcguugcaaaagggcauuuucugucaaauauuugu

SEQ ID NO: 18235 - RNA, 62 nt, Human
ucuugccuuucccuugauaaugcaguaagggacccccauuuuacgacacagggcaggcaaga

SEQ ID NO: 18236 - RNA, 87 nt, Human
ggagucucacucuguugcccaggcuggaauggaguggcgcgaucucagcucacugcacuccagccugggggaacagagugagacuuc

SEQ ID NO: 18237 - RNA, 68 nt, Human
ucuuuaggaaagaaaaugaaauaaagacauuuucuuuuuuuucuuuacuuuuuuuuuuuuuuaugaga

SEQ ID NO: 18238 - RNA, 70 nt, Human
uggugguaacgaaauuugguaaugcucuucgaaccugaggguuauggggcugacuuuagugggaccauca

SEQ ID NO: 18239 - RNA, 66 nt, Human
cagaagagcuugcuagagugucaaaacuucuccccagggagauaauguugacccuugcucucucug

SEQ ID NO: 18240 - RNA, 71 nt, Human
ugaaaauucuuuauuuaaaauaccaaguuauuaaaauggguaaaaugacauaguaaaauaaaauuuuuuca

SEQ ID NO: 18241 - RNA, 62 nt, Human
ugauggguaggcacaugaugccagccaagccguccuucuguauuaccuguguuugccgauca

SEQ ID NO: 18242 - RNA, 68 nt, Human
gacgagcugagguuggacuuguugaaauaauccugauacauuccuacaauggccacugcucagcuuuc

SEQ ID NO: 18243 - RNA, 64 nt, Human
cauguugacuuuccauaaauugagcgucagguuacuggauauggguaugggaaaaauuggcaug

SEQ ID NO: 18244 - RNA, 88 nt, Human
ggcggcgaaaggaccggcuuaaugccagaccgggaguuggagguguccgaucucgaguggggauccagcaaggccuucucagccaguc

SEQ ID NO: 18245 - RNA, 62 nt, Human
ggagacaaagugggagcagugaagucacgcugcugaacaugcucaauaucucccgcuucucc

SEQ ID NO: 18246 - RNA, 94 nt, Human
uaaugucagcuccuuuuccuacguaugaaaaccaauugaguguuaccaauauaauggaauuuucuuucauauguaggaaaaggagcugacauua

SEQ ID NO: 18247 - RNA, 87 nt, Human
uuuacuaacacuauauguguuauguuuuucauaaaaauauaucaauugauaugaacuuaggacauugacuuauacgaguguaguaga

SEQ ID NO: 18248 - RNA, 78 nt, Human
ccguaugaaugcagcgaaugugggaaagccuuuagguuugaagucuccauucguuguacaccagagaacucauacagg

SEQ ID NO: 18249 - RNA, 94 nt, Human
gaaagccuuugguaggaaggaacagcucacugcacaucugagagcucaugcaggagagaagcccuauggaugcagugaaugugggaaggcuuuc

SEQ ID NO: 18250 - RNA, 81 nt, Human; identical to SEQ ID NO: 13161

SEQ ID NO: 18251 - RNA, 63 nt, Human
cuacucuuauuccuacucauuuagcaguaguucuauugggcacuaguagucaguagggagugg

SEQ ID NO: 18252 - RNA, 91 nt, Human
cuagaacaaaauaugacuuuuuuacaccaucuugcuguugauucauuggcuuuugaagagaagcauagaagagacuuuuuauuuauucuag

SEQ ID NO: 18253 - RNA, 62 nt, Human
cuuuguguacuggaaugauguugaauucagagaggugacagaacuuauuaaaguggauaaag

SEQ ID NO: 18254 - RNA, 61 nt, Human
uccugccgggcucguggcggcuucuguccgcuccgcggugggaagcgccuuccccacagga

SEQ ID NO: 18255 - RNA, 74 nt, Human
guuauuuugacuugccucuucaucuggcaaaaucucugaaccacugcucuggagaugacagcaggcaaaaucac

SEQ ID NO: 18256 - RNA, 68 nt, Human
uaggauugaacuuacccgcacuuuguuccaaauaauucaauuucuucgggggaagcuucugcaucuua

SEQ ID NO: 18257 - RNA, 69 nt, Human
gucucuucagagcugcuugugcccaguggugcuucaacugguaucuaugaggcccuagagcuccgggac

SEQ ID NO: 18258 - RNA, 71 nt, Human
gugaguuuuguuuccaccuggacugucaccugccggcccugcaggauguaccaggggaggaguggagcugc

SEQ ID NO: 18259 - RNA, 62 nt, Human
guaccugagcccugaccucuggagggacuguuuuucccauguuccuaucaggaguucaugac

SEQ ID NO: 18260 - RNA, 61 nt, Human
gccugaugacaugcucacgugacaugguuaugcccuguuuggcuuuauaugugauaaaggc

SEQ ID NO: 18261 - RNA, 66 nt, Human
uucauauucacuguuucauaaauauuacaguaaaugagcuuuuuauauugcaaacagugguuggaa

SEQ ID NO: 18262 - RNA, 63 nt, Human
uuuuuuuucucugacaucacagacuuguuuauucucaaacaugggccuguuagaaaaaaaaaa

SEQ ID NO: 18263 - RNA, 67 nt, Human
gaagaaaccacaaaauucaggaagguucuuaugaaccauucauucauugaagaguuguuuuuuuuuc

SEQ ID NO: 18264 - RNA, 80 nt, Human
cccaaaacaaguucuuccagacuaaagaaauuaagguaacaucaauaccuaggucugagauauacccauccuuguuuggg

SEQ ID NO: 18265 - RNA, 65 nt, Human
cuggcacuucagaaccucuuccucuacacuuuuggugugcuucugaaucuaggucugcaugcugg

SEQ ID NO: 18266 - RNA, 82 nt, Human
ucuacagaggcccuggcacauuuuuccuuuccaccccugaguccaccaaagcaaaauguccccuccagggccccucuguggg

SEQ ID NO: 18267 - RNA, 76 nt, Human
aguagaggugggguuucaucauaguggucagguugggcuugaacuccugaccucaggugaucugccugccucggcu

SEQ ID NO: 18268 - RNA, 96 nt, Human
ggagucucgcuguguugcccagccuggagggaagugguguaguggugugaucucagcucacugcaacuucugccuccuggguucaagugauucucc

SEQ ID NO: 18269 - RNA, 85 nt, Human
uagcugggacuacaggcgcaugugccaccccuggcuaaguuuuuauauuuuaguagagaugggguuucaccuuguuacccagcug

SEQ ID NO: 18270 - RNA, 69 nt, Human
gguuuccccauacugucucuuguuuuuggaggugacauuuccauccagaaggauaacgaucaggaaacu

SEQ ID NO: 18271 - RNA, 77 nt, Human
uugagggcugggaagaggcuaggcgacgugguuucagauacgaaaaggacuaugcugggaauauuuucugucuucaa

SEQ ID NO: 18272 - RNA, 70 nt, Human
cuuaucuuaacaucuacucugugccaagcacucugcuauaauaugggaccauaaagaugaguaagacaag

SEQ ID NO: 18273 - RNA, 71 nt, Human
uuuccugaucagcuuuuaauaucugucaaauaaaaauugaaauugaagaugguauauaagauuucaggaaa

SEQ ID NO: 18274 - RNA, 61 nt, Human
uagaggccagccuuugucuuguucagaugacuguugcacaggaaagacugcuggcugacua

SEQ ID NO: 18275 - RNA, 60 nt, Human
cgugcguggaaguggcucgcagauacuggagaacgggaagggagacgcuugcagcgcgcg

SEQ ID NO: 18276 - RNA, 65 nt, Human; identical to SEQ ID NO: 1518

SEQ ID NO: 18277 - RNA, 75 nt, Human; identical to SEQ ID NO: 74

SEQ ID NO: 18278 - RNA, 87 nt, Human; identical to SEQ ID NO: 76

SEQ ID NO: 18279 - RNA, 71 nt, Human; identical to SEQ ID NO: 77

SEQ ID NO: 18280 - RNA, 60 nt, Human
ucuggagaaaagucagaaugaacaagaagcuauucgcaauaaccugacgacacucuuaga

SEQ ID NO: 18281 - RNA, 63 nt, Human
aguugaaaaguuccggcagagaauucuggcucccuguaagcuagagacuguuggauggcagcu

SEQ ID NO: 18282 - RNA, 72 nt, Human
caacucggagugaacaaugaagauucaaagagccuggagaaaguucuuguggaauucagucacaaggaguug

SEQ ID NO: 18283 - RNA, 84 nt, Human
cacugaguguagacaaguccuccagcacagccuauauggagcucacuaggcugacaucugaggacucugcugucuauuucugug

SEQ ID NO: 18284 - RNA, 74 nt, Human; identical to SEQ ID NO: 14314

SEQ ID NO: 18285 - RNA, 90 nt, Human
ggaaccuuugccucugccaccugcacagucugccaaagaccuucccagggggaggacauucgggcugacgugauuggcagacaggguucc

SEQ ID NO: 18286 - RNA, 92 nt, Human
ccggccgcccagggucgccgccgccccucgcaccgcuaggucugcgcaccaucucgcccccgccguggggaggcgugcggcucagcggucgg

SEQ ID NO: 18287 - RNA, 67 nt, Human
gcccgcccgccgccccgcagcgccagggacggcccgccuggcaagaagcugcgcugaaggcccgggc

SEQ ID NO: 18288 - RNA, 62 nt, Human
ccccgggggggacgcccggagaaacgugguucuacacgggacgaccgggcgcccacuugggg

SEQ ID NO: 18289 - RNA, 130 nt, Human
ggggaaccgcgguggcuuccgcggagguuucggcaguggcauucggggccggggucgcggccguggacggggccggggccgaggccgcggagcucgcggaggcaaggccgaggauaaggaguggaugccc

SEQ ID NO: 18290 - RNA, 75 nt, Human
agcggagggacugauaucucuggcuaaauauuuguccuuuuauuaugguuucuaaaucaguuauuuucuucagcu

SEQ ID NO: 18291 - RNA, 63 nt, Human
cccuauuuuuguccaauaaggcgaaccuuuaacagagucccuuaauuggguggcuaaaacggg

SEQ ID NO: 18292 - RNA, 64 nt, Human
uggaauaauuaaaaauucuggugcaguggugguauaccaaucuuuagaauucuuaaguauucua

SEQ ID NO: 18293 - RNA, 62 nt, Human
aaauuauauuugugugaaaaugugacaaacacacuuaucugucucuucuacaaaugugguuu

SEQ ID NO: 18294 - RNA, 60 nt, Human
ucaaagccagcugaaggaaagaggaagugcuagagagagcacccuucagugugcuucuga

SEQ ID NO: 18295 - RNA, 78 nt, Human; identical to SEQ ID NO: 9151

SEQ ID NO: 18296 - RNA, 60 nt, Human
uuaaguuuucaugauucaauacucuuaagauacuuuguuuuaaaauuacugaaagccuga

SEQ ID NO: 18297 - RNA, 76 nt, Human
uucacuucugcugaacucuguguuacugcugccuagaaaaggguguaugugguuaggaguaauaggugagggugaa

SEQ ID NO: 18298 - RNA, 61 nt, Human
gagaagugagcugguucaaaguucacagaguuaggacuguguccuggcuggcucauuuuuc

SEQ ID NO: 18299 - RNA, 69 nt, Human
gagugaacgcuaaaacggaggagaguaaacccuacaggaaacgugggaauacucuagaauucuucauuc

SEQ ID NO: 18300 - RNA, 117 nt, Human
ucuuggaguugugaagguccgccuuaucuauaaaucugcuugggcgacagccgguccaacuacuaaacgggauugcccacggcaauaaaaugaguaauggcggcccacaccccaggg

SEQ ID NO: 18301 - RNA, 81 nt, Human
aggaacagacuucauucuuuuucuuaacaaaaaaggcaucuucagugugugauuucaaaagaaagaagauucuggguuccu

SEQ ID NO: 18302 - RNA, 93 nt, Human
uugauacaaagcuuaaaauucugcauauggucauagaaaaugcauauugguuuguguuuuuaucacuugcuuccaacuuaggcuuuggcucag

SEQ ID NO: 18303 - RNA, 62 nt, Human; identical to SEQ ID NO: 10015

SEQ ID NO: 18304 - RNA, 73 nt, Human
gcagugauguugggcaacucugcgccggggccugcgacccgcgaggcgggcucggcgcugcuagcauugcagc

SEQ ID NO: 18305 - RNA, 77 nt, Human
gccugccugcgccuuucgcaaccuccucggcccugcguggucucgagcugggugagcgagcgggcgggcugguaggc

SEQ ID NO: 18306 - RNA, 65 nt, Human
gcucagaagaagccagcugaaucucaaaaaauagagcgugaagaugcccuggcuuuuaauucagc

SEQ ID NO: 18307 - RNA, 87 nt, Human; identical to SEQ ID NO: 76

SEQ ID NO: 18308 - RNA, 60 nt, Human; identical to SEQ ID NO: 2705

SEQ ID NO: 18309 - RNA, 72 nt, Human; identical to SEQ ID NO: 1989

SEQ ID NO: 18310 - RNA, 66 nt, Human
agaggccagagaggcgguggcguccgagaagugcggugcguguguauacucucucucugugccucu

SEQ ID NO: 18311 - RNA, 83 nt, Human
auaucucucacacauucucccccuugggcgcuguaaugcugggaaguggugugguguguacacaaagugugugugugagaugu

SEQ ID NO: 18312 - RNA, 72 nt, Human
ggaguuuuuuuaaaaaaaagaaauuacucguggugacaccaucagcggugauuuccaucuaaagaauucucc

SEQ ID NO: 18313 - RNA, 65 nt, Human
auggugacaacaugcuggagccaagugcuaacaugccuugguuccacgggauggaaagucaccgu

SEQ ID NO: 18314 - RNA, 70 nt, Human; identical to SEQ ID NO: 16318

SEQ ID NO: 18315 - RNA, 109 nt, Human
gguagcugaagaccuuuuagacaguuccaucuuuuuuuuuaaauuuuuucugccuauuuaaagacaaauuaugggacguuuguagaaccugaguauuuuucuuuuuacc

SEQ ID NO: 18316 - RNA, 123 nt, Human; identical to SEQ ID NO: 5157

SEQ ID NO: 18317 - RNA, 67 nt, Human
gaaagcuucgucugccaaacagagacucaagugugccagucuucaaaaauuuggagaaagagcuuuc

SEQ ID NO: 18318 - RNA, 62 nt, Human
gggacuuccuccacccucaccaggacauucuuuccaucucuugucuccugugugcaaguccc

SEQ ID NO: 18319 - RNA, 78 nt, Human
gcgggauuacugucuucuaccuggccuguggggaacuacgggcucauggaauacgagagggccuuaaaguacguccgc

SEQ ID NO: 18320 - RNA, 81 nt, Human
ugggcuuggccaucgugguaggcaugcccuuggguguggcgggacuggccggauucaucggauuugcuguguccaagucca

SEQ ID NO: 18321 - RNA, 61 nt, Human
auugcuaugguuugucauugcaugcuuugucuugugugugacugagugaaaauauggugau

SEQ ID NO: 18322 - RNA, 60 nt, Human
ggcucaugaggaugcggagugugagaagcucauggagcucuacgagcgucuggaggagcu

SEQ ID NO: 18323 - RNA, 79 nt, Human
ucccuuucugcccacgacucgaagauaggcagccaaaaagaaggaggcugccaaagcucgacagcggcccagaaaagga

SEQ ID NO: 18324 - RNA, 123 nt, Human
ggugcuggucuguguucugguugcgcuggccauugucuaucucauugccuuggcugucugucagugccgccgaaagaacuacgggcagcuggacaucuuuccagcccgggauaccuaccaucc

SEQ ID NO: 18325 - RNA, 77 nt, Human
auuauguauuuauuauuggcgauuauaaaguuuguuuucacagggcguaguaguuagcaacaaugaaaaugaauaau

SEQ ID NO: 18326 - RNA, 64 nt, Human
cguaaaucuauggguagaaugcaaagggaacucgauacuuugcagcaaacuuaugaauuaaacg

SEQ ID NO: 18327 - RNA, 65 nt, Human
gccaccauaaguuucagguacagccaaugcaaagccuuggaaauccaccugacagcuccgguugu

SEQ ID NO: 18328 - RNA, 66 nt, Human
gcccuguggggaggcucuccagagcauugcuucagauugaggugacccugggcgguaccauggggc

SEQ ID NO: 18329 - RNA, 83 nt, Human
ggccgcugggagccuugagagccaugugcaaagaggacagauccuguuccugucaccauugcucucgauucacucagcuggcu

SEQ ID NO: 18330 - RNA, 78 nt, Human
uucaccugaucuccagaaggccucgaaauccaccuaucgacuaauaccggauuuaagcaaggcaaaggagauagugag

SEQ ID NO: 18331 - RNA, 60 nt, Human
gagagacaccauccuggcgaggaguuucaauaaauggcuccucuccugaguuagucucuu

SEQ ID NO: 18332 - RNA, 103 nt, Human
gccugggcugugguaaguaauggagcugugaguuccuggauggugacacgguccaggaucuugaaacucguguccaguuucaggggcuggcugcagcgcuggc

SEQ ID NO: 18333 - RNA, 93 nt, Human
ggcuaggcuggucuugaacuccugaccucgugauccacccgccuuggccucccaaagugcugggauuacaggcaugagccaccgcaccuggcc

SEQ ID NO: 18334 - RNA, 64 nt, Human
uuacuacucauauugauuaaaacaguuaacacacuuuuuucuuuuuaaaaugugagaucaguga

SEQ ID NO: 18335 - RNA, 102 nt, Human
uugagauggagucucgcucuguugcccaggcuggagugcaguggugcgaucucagcucacugcauccucugccucccggguucaagcaauucucugccucag

SEQ ID NO: 18336 - RNA, 71 nt, Human; identical to SEQ ID NO: 6999

SEQ ID NO: 18337 - RNA, 61 nt, Human
cucaugggccacauuggccuccaagaguaaaacccuuggacacagccagaaagcccaagag

SEQ ID NO: 18338 - RNA, 63 nt, Human
cuggcauggccuuccguguccccacugccaacgugucagugguggaccugaccugccgucuag

SEQ ID NO: 18339 - RNA, 81 nt, Human
gcgacugcagcucugggacacagcuggucaggagagguuccgcagccugauccccagcuacauccgggacuccacgguggc

SEQ ID NO: 18340 - RNA, 81 nt, Human
gcgcgccaaagaacugagcgucauguucauugagaccagugcgaagacuggcuacaacgugaagcagcuuuuucgacgugu

SEQ ID NO: 18341 - RNA, 77 nt, Human
guguaaaauuauugcuuaugucauuucuuaagcaguuaugcucuuaaugcuuaaaagaaggcuagcauuguuugcac

SEQ ID NO: 18342 - RNA, 72 nt, Human
cccuuuggcccggcugcgcccacaggcccccggacgccgagccaugcccgcacagaagagccagccgagggg

SEQ ID NO: 18343 - RNA, 63 nt, Human
uugggcuuuuacuggugcccggucuugagccagacaagguaagggcaaguuggggagguccag

SEQ ID NO: 18344 - RNA, 66 nt, Human; identical to SEQ ID NO: 3532

SEQ ID NO: 18345 - RNA, 69 nt, Human
cacgagagcgcagcauccgaccagguugucacugagaagauguuuauuuuggucaguuggguuuuuaug

SEQ ID NO: 18346 - RNA, 76 nt, Human
cgcagcgcgggcacacggagcugcugacgguggagcaggcccuggccgacuucgcagagcugcuccgcgcgcuacg

SEQ ID NO: 18347 - RNA, 80 nt, Human; identical to SEQ ID NO: 7871

SEQ ID NO: 18348 - RNA, 69 nt, Human
guuuuaaaagagacaggaccugaugaugaguggauagccaaagaggcaaaggucaacuccaauuaaaac

SEQ ID NO: 18349 - RNA, 102 nt, Human
acagagcacaauagggagaagggguacugguucugaacagaauggguucccuucauagagccgauguuucagaaaauacugcuuuuuguucuuaaacucugu

SEQ ID NO: 18350 - RNA, 86 nt, Human
agcaugaucaagaagccccgcccacucgggcugaaggcagugauuuuggccaaugcaguccuggauggagccgacugcaucaugcu

SEQ ID NO: 18351 - RNA, 72 nt, Human
gcagagaaggucuuccuugcucagaagaugaugauuggacggugcaaccgagcugggaagccugucaucugu

SEQ ID NO: 18352 - RNA, 99 nt, Human
guugauaugguguuugcgucauucauccgcaaggcaucugauguccaugaaguuaggaagguccugggagagaagggaaagaacaucaagauuaucagc

SEQ ID NO: 18353 - RNA, 72 nt, Human; identical to SEQ ID NO: 12171

SEQ ID NO: 18354 - RNA, 68 nt, Human; identical to SEQ ID NO: 7705

SEQ ID NO: 18355 - RNA, 63 nt, Human
ggccgaucgagaucuuccagucgagcugaugaacuguauccaaugauuggaaacucccuggcc

SEQ ID NO: 18356 - RNA, 75 nt, Human
uggcaaauuguaagcguuaaauauuuguuaaaaaucgcguuaaauuuuuguuaaaucagcuuauuuuuuaaccca

SEQ ID NO: 18357 - RNA, 61 nt, Human
uguuuuugcuaaguaguauugcuguacaugugacacuuuuaaauucaauuuagcauuaaua

SEQ ID NO: 18358 - RNA, 93 nt, Human
ggguugugucuccaguccucucuggaggguauguucugggcggaggggccaucugcauggaacuucucaccaaacagggcuggagcagugccu

SEQ ID NO: 18359 - RNA, 78 nt, Human
ccaaccacauggcacaucgggcuauuugaacacggugacugucucucccagauggaucccucugugcuucuuggacgg

SEQ ID NO: 18360 - RNA, 64 nt, Human
gcggcggcaggagagguuguggugcuaguuucucuaagccauccagugccauccucgucgcugc

SEQ ID NO: 18361 - RNA, 64 nt, Human
guggcugggacaagcuggucaagguuauggaacccuggcuaacugcaagcugaagaccaaccac

SEQ ID NO: 18362 - RNA, 71 nt, Human; identical to SEQ ID NO: 6999

SEQ ID NO: 18363 - RNA, 60 nt, Human; identical to SEQ ID NO: 894

SEQ ID NO: 18364 - RNA, 65 nt, Human; identical to SEQ ID NO: 6010

SEQ ID NO: 18365 - RNA, 65 nt, Human; identical to SEQ ID NO: 6010

SEQ ID NO: 18366 - RNA, 85 nt, Human; identical to SEQ ID NO: 10310

SEQ ID NO: 18367 - RNA, 61 nt, Human
gcccuuguggugcggcccccaguguccgcugcuggggccgcuaggugaccgagaucggggc

SEQ ID NO: 18368 - RNA, 84 nt, Human
gggguaccaacgaguccuggccuugucuguggaggcggauuacaccuucccauugcugaaaaggucgaggccucuuggugaucc

SEQ ID NO: 18369 - RNA, 64 nt, Human; identical to SEQ ID NO: 11768

SEQ ID NO: 18370 - RNA, 73 nt, Human
gucacgaaagagugucggauucggaucgcugguggauugccagacgagguuuagggucgcggcuacaagugac

SEQ ID NO: 18371 - RNA, 73 nt, Human; identical to SEQ ID NO: 10930

SEQ ID NO: 18372 - RNA, 78 nt, Human
gucaaugcugacuuggggagcuggugugaacauguccguuuccggugcuuucaugccgguugcccaugacagcggaac

SEQ ID NO: 18373 - RNA, 69 nt, Human
cuccagcagugugacgggguaccgggugcucugagaccauuuccggguucccguugccuuugcugaggg

SEQ ID NO: 18374 - RNA, 74 nt, Human
cucuuucaguggaaaaccgauggggaaccuggcccccaaggcuggucccccaggaacgggcagcccuucaagag

SEQ ID NO: 18375 - RNA, 71 nt, Human; identical to SEQ ID NO: 17560

SEQ ID NO: 18376 - RNA, 85 nt, Human; identical to SEQ ID NO: 14413

SEQ ID NO: 18377 - RNA, 108 nt, Human
ggucaagagcaccucacagcugcugagccguccgcuaucugcaguggugcugaaacgaccggagauacugacagaugagagccucagcagcuuggcagucucaugucc

SEQ ID NO: 18378 - RNA, 75 nt, Human; identical to SEQ ID NO: 74

SEQ ID NO: 18379 - RNA, 86 nt, Human; identical to SEQ ID NO: 1403

SEQ ID NO: 18380 - RNA, 71 nt, Human; identical to SEQ ID NO: 77

SEQ ID NO: 18381 - RNA, 62 nt, Human
gucaguuguggaagaggucaucacuccccggaaggaccuggccucuuuaauccucaauugau

SEQ ID NO: 18382 - RNA, 87 nt, Human
ugagguuucccuccaggagucaauccgauacgccccuggggaugcagggagaaguggcugaaugacuugcugugccuggaugccuca

SEQ ID NO: 18383 - RNA, 64 nt, Human
ccuggaggcucucguggcccaccuuuaaaaaguaaaggugccccaagaaacgagaggcucuugg

SEQ ID NO: 18384 - RNA, 74 nt, Human
ugucuccauugagauuaauguggccccugcuuaguucuuacuaaucagaacacuuaauuuacaaucaaaugaca

SEQ ID NO: 18385 - RNA, 131 nt, Human; identical to SEQ ID NO: 1788

SEQ ID NO: 18386 - RNA, 61 nt, Human
gagcgcgacccccggugcggcgcggcuaccccggcggaggcggcgggcgcggggcgcgcuc

SEQ ID NO: 18387 - RNA, 60 nt, Human
gccaggccccugcgcgccaagcccugguuggcagccggggaggacgucaggaggcccugc

SEQ ID NO: 18388 - RNA, 65 nt, Human; identical to SEQ ID NO: 11397

SEQ ID NO: 18389 - RNA, 62 nt, Human
gaugcauuuguuggagguuuucugucucaacuggucucugcaagccucugacugaauguauc

SEQ ID NO: 18390 - RNA, 99 nt, Human
ugcccuaauugcuuccugagaauucccauauuaauaaagaagaaaauuaucugccauuuuuuccuacuauaauaacgcugaaucuuaauuuagagggua

SEQ ID NO: 18391 - RNA, 64 nt, Human
uuuccauugcuugaauguaagagucagaugauguuuuaauugaaauaaaauucuaggcuggaaa

SEQ ID NO: 18392 - RNA, 80 nt, Human
ccguuggacccagagagccugaguuggagaugaacuuuggccaacuuuccucaucaccauacuuaaaauccuguccaagg

SEQ ID NO: 18393 - RNA, 62 nt, Human
aucccgcgacugagucaguaccugguuaguacacuacacaggagcagacuggggcgugugau

SEQ ID NO: 18394 - RNA, 61 nt, Human
gcaugggaaucuuuauagugauccucugggaguucuaucuaccccuauuuauauucccugu

SEQ ID NO: 18395 - RNA, 62 nt, Human
guguuuuugccguuacucccuuaggaggaaagaaagacgcucccccaggaacagcacuacac

SEQ ID NO: 18396 - RNA, 69 nt, Human; identical to SEQ ID NO: 3815

SEQ ID NO: 18397 - RNA, 78 nt, Human
ugagagaaagauuuauaaaggcaucauucaaaaggauuuuuacauuugggugugccuuacucgauuacaaaaauuuca

SEQ ID NO: 18398 - RNA, 90 nt, Human
caaccccgagccuggcguccggccuguggcgcacccugcaagugggcuggaacaugcagcugcugcccgcgggcuuggcguccuuuguug

SEQ ID NO: 18399 - RNA, 61 nt, Human
gcggaggcuggacuggagugacagccuggcccaacuggcucaagccagggcagcccucugu

SEQ ID NO: 18400 - RNA, 91 nt, Human
uacagccacgcggcaggagagugugcucgcaacgccaccugcacccacuacacgcagcucgugugggccaccucaagccagcugggcugug

SEQ ID NO: 18401 - RNA, 66 nt, Human
uacuagauuauaaacuccaugagggcagagaccaucucugccuuuuuuaccacuauuagcucagua

SEQ ID NO: 18402 - RNA, 87 nt, Human
gagggaaauaccuuggcaugcagcuccaguccgagcagccccaaaccgcugccgcccgaagcuaagccugccucuggccuuccccuc

SEQ ID NO: 18403 - RNA, 131 nt, Human
uuuccaaacaacaacaacaaaauaacauguuugccuguuaaguuguauaaaaguaggugauucuguauuuaaagaaaauauuacuguuacauauacugcuugcaauuucuguauuuauuguucucuggaaa

SEQ ID NO: 18404 - RNA, 66 nt, Human
ucaguugagaugaaaaacagguauucaguauuauucuaaacucuugcuguuauucauaccaauuga

SEQ ID NO: 18405 - RNA, 85 nt, Human
uggaucaugggugguggugaacagcagaaagggauuauggaugaaucugcauuguucuagcugcuccccaugccacccgucuccg

SEQ ID NO: 18406 - RNA, 61 nt, Human
cugcuggaggacuggacugcuacuacuacuccuggcuguggcagugagagaauccuggcag

SEQ ID NO: 18407 - RNA, 65 nt, Human
guguagcagcauugguuuuccaaaaaaugugagacuuuuucuuggacgaauucagguagcuacac

SEQ ID NO: 18408 - RNA, 77 nt, Human
cuuccagaguuccacuuggcucucccaaauagguaccucaaaaacuguuagcaagcgccauuuggaugucuugacag

SEQ ID NO: 18409 - RNA, 69 nt, Human
ggaaagagguugugagcugauuggauuaaagaccuggcacuucaguaacucagcacgcuuccacuucac

SEQ ID NO: 18410 - RNA, 72 nt, Human
aaguuggcgugcagcugggagagcuagacuaaguuggucaugaugcagaagcuacucaggugcagucggcuu

SEQ ID NO: 18411 - RNA, 67 nt, Human
uccaugacaaccuuaggucucuugacaggaaucugcccuaaacagccaggacuugggucaacaugga

SEQ ID NO: 18412 - RNA, 75 nt, Human
gcuucuccucggccaauucgcggaagaaguggcucacgccuuccagaaccacaucaucgcggucgaaauagaagc

SEQ ID NO: 18413 - RNA, 68 nt, Human
acaaagaucugacaugucacccagggacccauuucacccacugcucuguuuggccgccagucuuuugu

SEQ ID NO: 18414 - RNA, 61 nt, Human
ugguuuguugcccuugccaauaacaaaaauguuggaaagucgaguggcaaagcuguugcca

SEQ ID NO: 18415 - RNA, 65 nt, Human
cucauucagagcucuuuuggcugcgagaaacagacacccaaucaaaucagcuucagcaaaaugag

SEQ ID NO: 18416 - RNA, 70 nt, Human
ggccacuuucaagaacagagugucaucuuuaauguaggcguucuuggcauucuccaaaacagaaugagcc

SEQ ID NO: 18417 - RNA, 60 nt, Human
ugcaauguucaucuccccaucaggucuuuuaaagcugcugauggggagaugaacauugca

SEQ ID NO: 18418 - RNA, 62 nt, Human
accuuggucaacaucuuccccgcuaugcuggaauuacuucgguguucugcgguggccauggu

SEQ ID NO: 18419 - RNA, 65 nt, Human
gaggagagugaagaggaggcgcugccuucuaggugcugugacuucuccuuuucgugauucuucuc

SEQ ID NO: 18420 - RNA, 65 nt, Human
ggagcuucuuacugccuuuuccuguccccuagucaacggcauccaucuuccugguaggaggcuuc

SEQ ID NO: 18421 - RNA, 97 nt, Human
ccacggcggcggccugggagcagagguggagcgaccccauuacgcuaaagaugaaaggcugggguuggcuggcccugcuucugggggcccugcuggg

SEQ ID NO: 18422 - RNA, 89 nt, Human
aacccagucucuuacauuucaucuguuaaauagugacgguguauuagucuguucuugcacuacuacaaaugauuaguuuagacuggguu

SEQ ID NO: 18423 - RNA, 80 nt, Human
uguggcuggaggaauaguaagagaaguggggggaggugccacacacuuuaacaaccaggucucuuuauaacuccaucaca

SEQ ID NO: 18424 - RNA, 63 nt, Human
gcagggcaaguuccaaggcagaccgcagcacacacaggucuaccagaaagaacagugcccugc

SEQ ID NO: 18425 - RNA, 63 nt, Human
gccaccaggucaugaaggaggcguuugggcccgaagauggguuacagaggcucaccugguggu

SEQ ID NO: 18426 - RNA, 60 nt, Human
auuuguugcccaggcuggggugcacgacucacuguagccucaaacucccugggcucaagu

SEQ ID NO: 18427 - RNA, 65 nt, Human
uaagaucccuacccucauccugacccacgaggaaagaaggaaaggaagaguuuguggggauuuug

SEQ ID NO: 18428 - RNA, 61 nt, Human
ucuuccugcacagaggagccuggcccaaaaaagauaccccaggcuucuccgugcaggaaga

SEQ ID NO: 18429 - RNA, 85 nt, Human
guucagacugccacaauacaagucaggagagggcguuuucuuugugcugccaauucugaucauuuaaauuuugguuuguuugggu

SEQ ID NO: 18430 - RNA, 78 nt, Human; identical to SEQ ID NO: 5302

SEQ ID NO: 18431 - RNA, 62 nt, Human; identical to SEQ ID NO: 484

SEQ ID NO: 18432 - RNA, 70 nt, Human; identical to SEQ ID NO: 5304

SEQ ID NO: 18433 - RNA, 61 nt, Human; identical to SEQ ID NO: 4783

SEQ ID NO: 18434 - RNA, 84 nt, Human; identical to SEQ ID NO: 4784

SEQ ID NO: 18435 - RNA, 70 nt, Human
uagcaggugguggggcuaugaucuaaacacaggcauucuggguccagguccaugcucugaaccucugcug

SEQ ID NO: 18436 - RNA, 88 nt, Human
ugucugcaagauuccgauuaaugcuauuuuuaugguuccaaauuuaagauagacaauagcugaucauaauagggaacacuuacagaca

SEQ ID NO: 18437 - RNA, 64 nt, Human
auaauugacauuauggcaguauaguucacucuuuauucucugcuuuaugccauuaugaaauuau

SEQ ID NO: 18438 - RNA, 80 nt, Human
ggccucugcaacuuacuagcuguguguccuugggaaagaacuucaaggacuucuuugcagguaucugauuaguggagguc

SEQ ID NO: 18439 - RNA, 83 nt, Human
uagaaggaaauauauaaaaauguuuacaaauauuuuaaaaaguaaaaaaugaauaaaaguaaaaauuugagugguucucucug

SEQ ID NO: 18440 - RNA, 70 nt, Human
accuguuuuuacuuccucacccugaauucguuuuguaaauguagaguuuggauguguaacugaggcaggu

SEQ ID NO: 18441 - RNA, 110 nt, Human
cguaggccgauuuccggguguuguagguuucucuuuuucaggcuuauacucaugaaucuugucugaagcuuuugagggcagacugccaaguccuggagaaauaguagaug

SEQ ID NO: 18442 - RNA, 77 nt, Human; identical to SEQ ID NO: 14076

SEQ ID NO: 18443 - RNA, 62 nt, Human
uugggguaaugaaguauuucaguuuugugaauagaugaccuguuuuuacuuccucacccuga

SEQ ID NO: 18444 - RNA, 74 nt, Human
aguucuucagcagacucaacuaucauggacauucaggucccgacacgagccccagaugcagucuacacagaacu

SEQ ID NO: 18445 - RNA, 86 nt, Human
ccgucagcccuuggcagggggucuuggaagccagagguuuuugcucagggcagggaaagggcugcaggauccccgggggcugccgg

SEQ ID NO: 18446 - RNA, 81 nt, Human
gcccaccucuccaacccaaacuggcugugaugaaaaccaaaaacccagaccagaccagcaacugggaaggaacggaugggc

SEQ ID NO: 18447 - RNA, 73 nt, Human
ggaccugcaggggaaggaagcagggugacgguuugguauccccaccuaagacccuccccuuuccccugaggcc

SEQ ID NO: 18448 - RNA, 67 nt, Human
gggagguguuucucugcuucaggagugcccgccggcccuugcagcugcuggaagacccauuuaucuc

SEQ ID NO: 18449 - RNA, 79 nt, Human
augacaugucuccacgaggguacagcugugcucuuacuuuuaagcacggaaaucgaccugcccgugaauaggcacucau

SEQ ID NO: 18450 - RNA, 61 nt, Human
agaagagucuaagauggugacugaugucucuuccuccuucccaaauaucugagacucuucu

SEQ ID NO: 18451 - RNA, 88 nt, Human
gaagacuauuuguuuucauuuucuuugccuccucucuggcuauguguccccggaaggcagcuuggauuuugacagcagcaaccucuuc

SEQ ID NO: 18452 - RNA, 72 nt, Human
aagugguaaguugguacgcugucuaauucuuuccuucaaaucuugaauaccuccugugccaauggaucucuu

SEQ ID NO: 18453 - RNA, 65 nt, Human
gaugguuuuucgaaucauaauagcgcuguaggaucauagcacuucugcuuuucaaauauccaguc

SEQ ID NO: 18454 - RNA, 62 nt, Human; identical to SEQ ID NO: 17330

SEQ ID NO: 18455 - RNA, 96 nt, Human
gcuccaggaaucccuucgaggccccagucccuccccacuuaggaccccaaguccaccagacuggaggugagggggccgagcagagagucuuggagc

SEQ ID NO: 18456 - RNA, 72 nt, Human
uuuuuuuuuuuuuuuuucccugaucucugcauugggaaggaaaaugcaaaaguggaaagaguuggagagaag

SEQ ID NO: 18457 - RNA, 74 nt, Human
ccaaagugcugggauuacaaguguaagacacuacauccaaccuacacuuuuaaaaauuaucccacaguucuugg

SEQ ID NO: 18458 - RNA, 64 nt, Human
cuggguuugucauguugcccaggcuggacucaaacuccuggccucaagcaaucgccugccucag

SEQ ID NO: 18459 - RNA, 67 nt, Human
uguuuuuaaaaauuuuccauuccuuuuugaaaucuuucaauuucaauuugggaaguuucuauugaca

SEQ ID NO: 18460 - RNA, 65 nt, Human
guuugcuauagcuuacugcuuaacuaauuuuaaauaaggaaauaaguauguuagaugcaguagac

SEQ ID NO: 18461 - RNA, 82 nt, Human
uuagaguaauucuauuguuaacauuuuaguguauuguuuuuugaagagaguguauaguagugguuaagagaugagacuuugg

SEQ ID NO: 18462 - RNA, 104 nt, Human
aaaaauccagcugagugauaaaggcugaguguugaggaaauuucugcaguuuuaagcagucguauuugcgauugaagcugaguacauuuugcugguguauuuuu

SEQ ID NO: 18463 - RNA, 77 nt, Human
cagacuucacagagaaugcaggugucuugacuucaggucugucuguucuguuggcaaguaaaugcaguacuguucug

SEQ ID NO: 18464 - RNA, 74 nt, Human; identical to SEQ ID NO: 13531

SEQ ID NO: 18465 - RNA, 97 nt, Human; identical to SEQ ID NO: 13532

SEQ ID NO: 18466 - RNA, 101 nt, Human; identical to SEQ ID NO: 6996

SEQ ID NO: 18467 - RNA, 62 nt, Human
aguucuuugauuugcucuuugaggaccuccacuucuucuuugaccgcauacaucaaauggcu

SEQ ID NO: 18468 - RNA, 63 nt, Human
cagccaguucugcgggggcauaggcagcuaugcgguugguccugagcccugcgaugcuggcug

SEQ ID NO: 18469 - RNA, 74 nt, Human
uccgaugcuacuauuuuauugcaggagguggggguguaugcaccgcacaccggggcuaugagaagcaagaagga

SEQ ID NO: 18470 - RNA, 64 nt, Human; identical to SEQ ID NO: 12453

SEQ ID NO: 18471 - RNA, 82 nt, Human; identical to SEQ ID NO: 5099

SEQ ID NO: 18472 - RNA, 99 nt, Human
gggcuaggcaucucaucuugcuggggcuguuggguccccuggaccucaaaucccaauaccaggaggacaagaaacagagcugggaggagucgugugccc

SEQ ID NO: 18473 - RNA, 64 nt, Human
gucugaaccugggggaucaggggaguaggggacucuccccuuguccacugauggggggucuggc

SEQ ID NO: 18474 - RNA, 72 nt, Human
ugccuguguaagugcucauggcugcugugcuuuugcuguacaagucccugaguuucucaucuacagcgggca

SEQ ID NO: 18475 - RNA, 65 nt, Human
gccuggcguguuaaguuguguccucaccugucauuggcgaagggcagggcgaucucaaacuuggc

SEQ ID NO: 18476 - RNA, 62 nt, Human
ggccagccgugcucacuguccugcugacccaggcccggcaggcaggucaucgggugcuggcc

SEQ ID NO: 18477 - RNA, 82 nt, Human
uccuuccauguuuuccuacaccuuuucaauaaguggauuucuuuuaacucccugaacagagaagcccguggcacaggaggga

SEQ ID NO: 18478 - RNA, 88 nt, Human
cggacuuuugggccggggccgggcggcgggggaggcucucuaaggccuccgccucugccucucccgcccccuuacccgccccggagcg

SEQ ID NO: 18479 - RNA, 60 nt, Human; identical to SEQ ID NO: 7400

SEQ ID NO: 18480 - RNA, 64 nt, Human; identical to SEQ ID NO: 8200

SEQ ID NO: 18481 - RNA, 66 nt, Human; identical to SEQ ID NO: 2189

SEQ ID NO: 18482 - RNA, 69 nt, Human
aaaaaggaaaguguauuuugggaauaaagucaggugggaaaauuccauuuuuuuaaauucccccuuuuu

SEQ ID NO: 18483 - RNA, 92 nt, Human
guucaugcagcuguggcagaguuacaguucugugguuucauguuaguuaccuuauaguuacuguguaauuagugccacuuaauguauguuac

SEQ ID NO: 18484 - RNA, 60 nt, Human
ggguggaucaccugaggucaggaguucaagaccagccuggccaacauggugaaacucccc

SEQ ID NO: 18485 - RNA, 81 nt, Human
uccauggauuuaaauaaauaaaauuuaauucugccuuuuauaacaugcaggguuguuuuaugguuguugagauuuguguga

SEQ ID NO: 18486 - RNA, 80 nt, Human
uguguuuagguaccaacaauuguuaaugacgcucaguucauauuuucagaauaucacauugauaaugguacuauaauaua

SEQ ID NO: 18487 - RNA, 79 nt, Human
caggaucgagggcgugcugugcggggccgugaagcagcugaaggucacccgcgccaagccugacagcacccucuaccug

SEQ ID NO: 18488 - RNA, 71 nt, Human
cggucucaccaaacgccccaaacucuccuccacacccccucugagugcccuggggcgccuggcugaggcug

SEQ ID NO: 18489 - RNA, 61 nt, Human
cugcucgaccuuccacuaguacauacuugcucauuguaaaaccuguaugaaaguguagcag

SEQ ID NO: 18490 - RNA, 105 nt, Human
gccacccuauuugcaguuuuucuaaguaacuugguagguugaaagauccaaggucaaaagaacuuauccaguguagcaaauaacaguaaaauaagauaaaguggc

SEQ ID NO: 18491 - RNA, 62 nt, Human
gugggugcaucacaugaggucaggaguucgagaucagccuggccaacauggugaaaucccau

SEQ ID NO: 18492 - RNA, 62 nt, Human
aaauugcauucuuuucaaauuuauaagucuaagaaaacaaaaccaaauaaaagaagccauuu

SEQ ID NO: 18493 - RNA, 113 nt, Human
agaaauguugaugggaacugagcauugcuugcuuucaucagguguucuuguugccaaagacaugaacgauacugaggaaaacgacaagagugagcauucccgccaguaaaucu

SEQ ID NO: 18494 - RNA, 71 nt, Human
auugauuugcaaaaggcauauuuacucuuugugagaaaucacuuuuuaaauugcauucuuuucaaauuuau

SEQ ID NO: 18495 - RNA, 73 nt, Human
gguaauacucucgaccccauucuucuaacacagaaaacuuucucagguaaacugugggguuaugagaaucccc

SEQ ID NO: 18496 - RNA, 79 nt, Human
ggagaaaggcugagcuuggagaaaaggugcuugaggaccccacugccuaaggaccugcucuaggaaacauucccacucc

SEQ ID NO: 18497 - RNA, 79 nt, Human; identical to SEQ ID NO: 4118

SEQ ID NO: 18498 - RNA, 63 nt, Human
gagggggccuucaagcuguacugugagcagacgcauugguauuaucauucagcagucucccuc

SEQ ID NO: 18499 - RNA, 62 nt, Human
caggcuggagcgcaguggcgaucauggcccacugcggccucgaccuccugggcuccagcgug

SEQ ID NO: 18500 - RNA, 70 nt, Human
gcacgagcucuuccuucccacagcgucuaaucuuuuuuuauguuuuuguggcaaggucucgcuuagucgc

SEQ ID NO: 18501 - RNA, 78 nt, Human; identical to SEQ ID NO: 99

SEQ ID NO: 18502 - RNA, 65 nt, Human; identical to SEQ ID NO: 247

SEQ ID NO: 18503 - RNA, 80 nt, Human; identical to SEQ ID NO: 100

SEQ ID NO: 18504 - RNA, 122 nt, Human
aucugcagacagacacuggcaacauugcggacacccuccaggaagcgagaaugcagaguuuccucugugauaucaagcacuucaggguuguagaugcugccauugucgaacaccugcuggau

SEQ ID NO: 18505 - RNA, 67 nt, Human
gcuucaaccuuagcuggggcugcagcagcacagggagcagcugugguggcagcagcacaggggcagc

SEQ ID NO: 18506 - RNA, 62 nt, Human
caacauccuguucugcggcuuccuuggcucuuuuugcccguaugccgaagagccgggcguug

SEQ ID NO: 18507 - RNA, 66 nt, Human
cuuggguggcaucuccuauaucuaauuccaucauuucuagauacuuagggugagugcccauccagg

SEQ ID NO: 18508 - RNA, 78 nt, Human
uguuauggcugagggaagcagugauggggguaggcaccacagucuguaaccccuccccuucuaucuuaguacccaaca

SEQ ID NO: 18509 - RNA, 73 nt, Human
ccaggcggccuccccugccgcauaaagugcuugaacagagccgccgugccucagaggacugggccuguccugg

SEQ ID NO: 18510 - RNA, 71 nt, Human
guaguauuuggauaguuagauguuuuacuuagauuuuuguuucauuagcaacuaaugguugaggugucuau

SEQ ID NO: 18511 - RNA, 72 nt, Human
gucuggggcccugcgccugaugagcugccaugaaaguggccgccucucacacuggcaggcgguggcucagau

SEQ ID NO: 18512 - RNA, 76 nt, Human
ugcugagguucuggaguggcacaggaacaggaggagcaaaugacacugggucuuugugcugaggcaggacacagcg

SEQ ID NO: 18513 - RNA, 130 nt, Human
agcaugcucaguuaaauuugaauuucagacaaauaaugaaugcuuuuacuguaaauauaugccaaauauugcaugaaacauucuuaacgugacaauuguuucucugaaauucaaacuuaacugggcaucu

SEQ ID NO: 18514 - RNA, 84 nt, Human; identical to SEQ ID NO: 7538

SEQ ID NO: 18515 - RNA, 65 nt, Human; identical to SEQ ID NO: 8124

SEQ ID NO: 18516 - RNA, 88 nt, Human
ggaguuucgcuuuuguugcccaggcuggaaugcaguggcgcaaucucggcuacuguaaccuccaccucccagguucuagcgauucucc

SEQ ID NO: 18517 - RNA, 73 nt, Human
cuguauguaguuuaaucccugauaucuaccucacccccacgaugugacauccuauucagcauuauaccugcag

SEQ ID NO: 18518 - RNA, 96 nt, Human
ucauuaaaucuuucuuccugaauuuucuuaucuuaauaguaccucuggauacgguucaguccccauuaaggccagaauuucaaauuaaguaaauga

SEQ ID NO: 18519 - RNA, 76 nt, Human
gcggagccgguagcccgcagaagcccggucagcgcacgugcccgcgagaccugcaaacuugugccaccggcucugc

SEQ ID NO: 18520 - RNA, 71 nt, Human
ggcagaaggcuuuuacaccacaagugcagugaaagaacugcacggugaguuuaaaacaaccgcuuguggcc

SEQ ID NO: 18521 - RNA, 102 nt, Human
gugucugggaggaguccccuacgccucccugguggccaccauccucugcuucuccgggguggccuuauucugcggcugugggcauguggcucucgcaggcac

SEQ ID NO: 18522 - RNA, 67 nt, Human
cacgggcugggcucuaggcggucuuggggccaugaucgggcccgggggcuggcuggacccccccgug

SEQ ID NO: 18523 - RNA, 64 nt, Human
ccaggagcagaucgguggagaugcugcugccagaugcuagcuugcuccgccuaucccugcccgg

SEQ ID NO: 18524 - RNA, 61 nt, Human
aaguuuauccuuuauguguguuaaaauugcaauucuauaucagaaaugaaggaaacaacuu

SEQ ID NO: 18525 - RNA, 68 nt, Human
gaucacaagggcaacccaccaaacuagcguacuaccaguauggccugggcaaucuuggcccugugauc

SEQ ID NO: 18526 - RNA, 81 nt, Human
gccaggaccaagagacaggcagcucaccaggguggacaaaucgccagagauguggugcauuguccuguuuucacuuuuggc

SEQ ID NO: 18527 - RNA, 65 nt, Human
accuacuucccgcacuucgaccugagccacggcucugcccagguuaagggccacggcaagaaggu

SEQ ID NO: 18528 - RNA, 72 nt, Human; identical to SEQ ID NO: 3359

SEQ ID NO: 18529 - RNA, 67 nt, Human; identical to SEQ ID NO: 12406

SEQ ID NO: 18530 - RNA, 80 nt, Human
guaucuacagccacuguaagcauccaguaggcaggaagauggcuuugggcagcggcuggaugaaagcagauuugagauac

SEQ ID NO: 18531 - RNA, 67 nt, Human; identical to SEQ ID NO: 12406

SEQ ID NO: 18532 - RNA, 67 nt, Human; identical to SEQ ID NO: 12406

SEQ ID NO: 18533 - RNA, 80 nt, Human; identical to SEQ ID NO: 12407

SEQ ID NO: 18534 - RNA, 64 nt, Human
gacagcacuaauuuaaugccgauauacucuagaugaaguuuuacauuguugagcuauugcuguu

SEQ ID NO: 18535 - RNA, 62 nt, Human
aggcauuucaucuggguauuuucaggcuccaguccaggccuggccuuccacaucuggugcuu

SEQ ID NO: 18536 - RNA, 89 nt, Human
guggccagcggagggcaggagagguaaccagcggccuucaguuccacuguccucaccuugguccggcuccugcacuuuccacuguccgc

SEQ ID NO: 18537 - RNA, 68 nt, Human
auugguggccuagaaucugaucuguccuguuuaugcacaccggagggauaggaucuguaccguccagu

SEQ ID NO: 18538 - RNA, 73 nt, Human
ugcugaaugggcuguuuucuaaccaugccuccuugccucuggagacucuuguugguuggagcaguaguuggca

SEQ ID NO: 18539 - RNA, 68 nt, Human
ucgaagguaucucaacggaaccaggggucaaccccuaagacaauucagguccauuguugugccuuuga

SEQ ID NO: 18540 - RNA, 70 nt, Human
uuggccccgcgggaaaggagacagacgcgggccauuggucagugucaccgcccaaaaaccuaggggcugg

SEQ ID NO: 18541 - RNA, 62 nt, Human
gcucuaguggugggucugagguuugcucuaguggugggucugagguuuucucuacugagggc

SEQ ID NO: 18542 - RNA, 130 nt, Human
guucuguucuuuuucuguuuuccugaugaggcuucuguacuucucccuuuaaggaggcaacugaauagcaugaaaauaagggguauggguggugguaguugcugaggggaaugacaauggauuugguaac

SEQ ID NO: 18543 - RNA, 64 nt, Human
guccuucaugggccugcuggccauguacaccuacuuccaggccaagauaagggcccugaagggc

SEQ ID NO: 18544 - RNA, 61 nt, Human
caaugcuccagaaggauugccccagcugauggaaguagugcgauccaacuaugaagcaaug

SEQ ID NO: 18545 - RNA, 66 nt, Human
gaggccucgugccaagccaccucuugguccuaaaagcucugcaggauggccgggcauaugggucuc

SEQ ID NO: 18546 - RNA, 63 nt, Human
guggaggcuguggagcugcuaauucgcaaucauuugguuaauaugcagcaguaugaucuucac

SEQ ID NO: 18547 - RNA, 75 nt, Human; identical to SEQ ID NO: 74

SEQ ID NO: 18548 - RNA, 67 nt, Human
gcggcugcaggaguaccgccugcggaguaacugcaaagaugcuguccgugcgcguugcugcggccgu

SEQ ID NO: 18549 - RNA, 87 nt, Human; identical to SEQ ID NO: 76

SEQ ID NO: 18550 - RNA, 71 nt, Human; identical to SEQ ID NO: 77

SEQ ID NO: 18551 - RNA, 60 nt, Human
gcuugaacccaggagugaggcugcaguaagcuauaaucugccaugcacuccagccugagc

SEQ ID NO: 18552 - RNA, 86 nt, Human
ugaucugucuuuauaaaggagauggaagugaauucaagauauugagauguuagauuugacuggguuguccuuuggcuagaagauca

SEQ ID NO: 18553 - RNA, 76 nt, Human
caggacagaaaucauuaucuuagccaccagaacacagaauguucuuggugagaagggccggaugauucuggaacug

SEQ ID NO: 18554 - RNA, 65 nt, Human
gcuguaguucagaugagguuuggcuuuccagagggcaguguagagcuuuaugcugaaaagguggc

SEQ ID NO: 18555 - RNA, 69 nt, Human
ccuuuuauaugaugaucuggagaauucugcucuuugauaacaacucaggauuuuuuugaucacguuugg

SEQ ID NO: 18556 - RNA, 69 nt, Human
guuauucuaagggccaaauuuuguaaaauuuccauuaggaaugucagcuucaaauacccuuuggauagc

SEQ ID NO: 18557 - RNA, 90 nt, Human
ugaguaaauuuguaugcaguauaaagcccaaguagaggguguauuuuuaaugacuacuuugcuuacauuuuagauugugcaaaugucuca

SEQ ID NO: 18558 - RNA, 61 nt, Human; identical to SEQ ID NO: 13200

SEQ ID NO: 18559 - RNA, 74 nt, Human
uaacugggggcuauuuuaucagcuugccuauuaaaggacuaugguaaguauagaaucuuaaugguugccaguua

SEQ ID NO: 18560 - RNA, 69 nt, Human
acuuaaggguaguuuaucuagauacaggacuuucuucccugauaaguaguaucauuggagcccuuaggu

SEQ ID NO: 18561 - RNA, 79 nt, Human
caauugguaacuugaguugugucuuggucaugggagaguauugcauucuugguugaauacauaguuaagauguuaauug

SEQ ID NO: 18562 - RNA, 75 nt, Human
uuuuuuuuuuuuuggagacggagucucacuccagccugggcaacagagcaagacucugucucaaaaaaaaauaaa

SEQ ID NO: 18563 - RNA, 67 nt, Human
gccuugucaccuccaguugggugccucuggguucccacuggcucugcccaggugggggugggugggc

SEQ ID NO: 18564 - RNA, 64 nt, Human; identical to SEQ ID NO: 6321

SEQ ID NO: 18565 - RNA, 60 nt, Human
ugggagugcuacuaaagauauaugagacuucaacaucuugaccacaucacuuuuucucca

SEQ ID NO: 18566 - RNA, 84 nt, Human
auuagguguuuauuuuguucuauuuaagaauuuguuuuauuaaauuaauauaaaaaucuuuguaaaucucuauauacaucuggu

SEQ ID NO: 18567 - RNA, 77 nt, Human; identical to SEQ ID NO: 6000

SEQ ID NO: 18568 - RNA, 61 nt, Human; identical to SEQ ID NO: 2204

SEQ ID NO: 18569 - RNA, 67 nt, Human
ucacgccuggagcgccuucugcaaggcccuggccuaagacaggcuggcacagccccaggcuugguga

SEQ ID NO: 18570 - RNA, 98 nt, Human
aggugguuacccuaacagcuaaugauaagacaaguguuuccuucuccucccucccgggacaaggugucauauacaaugucauuguuugggacccguuu

SEQ ID NO: 18571 - RNA, 62 nt, Human
uacaucugcugccuacauuccugcucacacauacgcuugcagcuuugaggcaggagagggua

SEQ ID NO: 18572 - RNA, 73 nt, Human
ugcaguaugaugucuaucaguauuuucugccugagaaugaccucacugaggagauguugcugaagcaucugca

SEQ ID NO: 18573 - RNA, 69 nt, Human
caugugauuucagguuuuucguacugagaacauugagauuucaguuggaagacacccugaaaucuuaug

SEQ ID NO: 18574 - RNA, 82 nt, Human
ugcagauucccaaggaaaugucagaaaggcaaaauggccagcauuauccauuugcuuuuuuggguuuacugggugaauagca

SEQ ID NO: 18575 - RNA, 70 nt, Human
aagaaauaaugcagcuacaggagcaaauuaaauuacuauaaaacauuccuucaucuguaaaacauuucuu

SEQ ID NO: 18576 - RNA, 74 nt, Human
aaugcagccauggcgucuaguucuggagaucucauaaggguggguccaaagacgauuccaagguucucugcauu

SEQ ID NO: 18577 - RNA, 81 nt, Human
aggauuuaauaauuacucuuuuacuuuuauuacaauaaauaauuaucaauaauagaauuaaacaauuuucaauuaaaaccu

SEQ ID NO: 18578 - RNA, 63 nt, Human
aggcauagagaauggcgugcacuuucugcagcuagagcugauucaaugggcgcuugagugccu

SEQ ID NO: 18579 - RNA, 76 nt, Human
gcccggcgcggcauguccugggugccgcggugcgggcagugaacgcgcgccggggcgggaugggccggcgccgggc

SEQ ID NO: 18580 - RNA, 85 nt, Human
ggcugcugccuuaugggucagugguaugggugugaggacaucugauggaguucucuuccaaccacugccuacaauugguggugcc

SEQ ID NO: 18581 - RNA, 71 nt, Human
ggguccuuuuaagcaucuuuuacagucagcacgauguuaagcucucuccauagggggugcuguuggggccc

SEQ ID NO: 18582 - RNA, 79 nt, Human
caggugguggcguguucuuccaucaggagucauguaauguuuggugaucucucgugauguuagcagcuguugcuguuug

SEQ ID NO: 18583 - RNA, 65 nt, Human
gagauggguuucaccauguuggucaggcuggucucgaacuccugaccucaugauccgcccaccuc

SEQ ID NO: 18584 - RNA, 77 nt, Human
gcuucccugggagaaaguccuucccuccccauggcccagcccuggggaaagaaagcagagacuaacucagggacugc

SEQ ID NO: 18585 - RNA, 68 nt, Human
ggccggcugagggcgaaaucaagacuggagccaagugcgcugagcucucacaugagguccuuugcucc

SEQ ID NO: 18586 - RNA, 74 nt, Human
cggcgcuuccgcaaguuccugguguuuguggcaaacuucgaugaagaaugaccccaagaccuuugagggcguug

SEQ ID NO: 18587 - RNA, 82 nt, Human; identical to SEQ ID NO: 119

SEQ ID NO: 18588 - RNA, 63 nt, Human; identical to SEQ ID NO: 722

SEQ ID NO: 18589 - RNA, 60 nt, Human; identical to SEQ ID NO: 723

SEQ ID NO: 18590 - RNA, 81 nt, Human
gugguggacagaucgagcauucaagucccuccgauucaauacuugcacaacgaacuggaagugcgucacaggguucgccac

SEQ ID NO: 18591 - RNA, 68 nt, Human
gucccaaaagccacccaaaaauuguagagaagcuuuuacugcugauggugaucaaguuuuugcaggac

SEQ ID NO: 18592 - RNA, 63 nt, Human
agcauggaccagaucccagacugcaucacccaugucgccaucuccgagagccuagucccugcu

SEQ ID NO: 18593 - RNA, 65 nt, Human
gccaugccugguaccauggccgcaucccccgagaggucucggagaccuugguacaacgcaacggc

SEQ ID NO: 18594 - RNA, 62 nt, Human
cuggucauuauaucuaucagcauauguucaucagccauauaccaauagauccaaucgaucag

SEQ ID NO: 18595 - RNA, 101 nt, Human
agagagaacuccgcaaggggggugggguguccauaagaacacuccauaggagugcucuagaggcccccccucucuauaaaagauuuguggaggugucaucu

SEQ ID NO: 18596 - RNA, 66 nt, Human
uucuucccuguuagggagagcugagggcagcugccacugagucuccugucccugagaaggggagga

SEQ ID NO: 18597 - RNA, 60 nt, Human
ucauguuacauacgucuuacagugcacguuaccccaaucugugaaaauaaaccaacauga

SEQ ID NO: 18598 - RNA, 73 nt, Human
cuguggcacaugccuauacugagacgggagggucacuugacuccaggaguucaaggcuaugaucaugccacag

SEQ ID NO: 18599 - RNA, 79 nt, Human
gaaucagaaaguucuaauuagaaaaucaaauauauugcauauuguuaaaacauuuugguacugaucaacuuccugcuuu

SEQ ID NO: 18600 - RNA, 79 nt, Human; identical to SEQ ID NO: 18599

SEQ ID NO: 18601 - RNA, 72 nt, Human; identical to SEQ ID NO: 18511

SEQ ID NO: 18602 - RNA, 76 nt, Human; identical to SEQ ID NO: 18512

SEQ ID NO: 18603 - RNA, 73 nt, Human
gcaguggagggggcaggaccuccugcuggugcagcaccagcucguggagcagguccaccggccccuacauugc

SEQ ID NO: 18604 - RNA, 62 nt, Human
gguaucacagcaucacuuaguagacagaaaucuuaucuuccccuuaaaguaguugucaugcc

SEQ ID NO: 18605 - RNA, 60 nt, Human; identical to SEQ ID NO: 18597

SEQ ID NO: 18606 - RNA, 62 nt, Human
ugcggaagccggacgggcagggauggggccccaacuucgcccugcccauuuugacuucagca

SEQ ID NO: 18607 - RNA, 60 nt, Human
uuuaacguguguuuuugccaaaaaaaggcgccaguauaucgagggcgaacacacguuaaa

SEQ ID NO: 18608 - RNA, 126 nt, Human
caguaauaaauauaaugcagucuucuuaagagucaguuuggaguugaaaaggcaguguacccuugauggaaacagucaaacuggugguaccaucuucuucagaacugcaucuaaaaggcugugcug

SEQ ID NO: 18609 - RNA, 64 nt, Human
gugacaaauugcacuaacauacuuuuccagcguaacucuaguucaaagucugugagcuugucac

SEQ ID NO: 18610 - RNA, 87 nt, Human
ggucaugccugaaucuguaccuucuacagagauccugaagcagauugaacaaagaaagagcagggcugucgugcagauggcgugacc

SEQ ID NO: 18611 - RNA, 66 nt, Human
cugauuucucuguggaacguguucggucccgagugaggacugugugucuuuuuacccugaaguuag

SEQ ID NO: 18612 - RNA, 100 nt, Human
cagugccaauuccuggucggaauggugacaacaugcuggagacaagugcuaacaugacuugguucaagcgauggcaagucacccguaaggauggcaacug

SEQ ID NO: 18613 - RNA, 79 nt, Human; identical to SEQ ID NO: 1810

SEQ ID NO: 18614 - RNA, 71 nt, Human
gguacuucuacucacagcggcgauuccgaggccaacuccagcaauggcuuugcaaaucugcggaaagugcu

SEQ ID NO: 18615 - RNA, 67 nt, Human
ugaacgacuauaggguaugacccccaucauuuacaccaguaggucucgggacauccuuugguguuca

SEQ ID NO: 18616 - RNA, 73 nt, Human
ccggccccaggcauguaccacggacccccuccccucagagcuggggccucccgucagcucugccugggccugg

SEQ ID NO: 18617 - RNA, 68 nt, Human
gccccccagagcuaauuacauccacacccauccccugaagugguggacauaagggagcccuggggagc

SEQ ID NO: 18618 - RNA, 69 nt, Human
uucuagucccagagccaguguuuauuagcaagauggaacccaaaggcggcuguggccugggcagcagaa

SEQ ID NO: 18619 - RNA, 94 nt, Human
gcugcagcaugggaggguaaauauuuuauugccaaucaaaaaauaugcauaagguuuuacuggauuuaagaaauuucccuucacuauuuacagc

SEQ ID NO: 18620 - RNA, 65 nt, Human
uaaggggcaaacugcaaauuucugcagcaugauuacuguaugaaugaaugacaucauguuccuua

SEQ ID NO: 18621 - RNA, 70 nt, Human
aucugaucucucggucccuuccuuaaccccauaaaaagaaggggauauuuggggaccgacgggaacaggu

SEQ ID NO: 18622 - RNA, 76 nt, Human
cuuaacccagaagugcgcuuuguggucauucuaccugauuacuuguggggggccuaaaagugggcuuuucugauag

SEQ ID NO: 18623 - RNA, 79 nt, Human
gaagagagccugcugaugugguaauuugcuggguuaaaaacuuuaaaaguguagcagaagcauagcaagugcucuuuuc

SEQ ID NO: 18624 - RNA, 65 nt, Human
ugcauugcuucagaugguggugucugaacacaaagcacuuuucagaaacgucuaaauacaaugca

SEQ ID NO: 18625 - RNA, 77 nt, Human
ccuaucaguagauccuuccacuggguucgcaauuuugaucugcgccccagacaucugacggaucucauugauuuugg

SEQ ID NO: 18626 - RNA, 83 nt, Human
ggaucaugggugguggugaacagcagaaagggauuauggaugaaucugcauuguucuagcugcuccccaugccacccgucucc

SEQ ID NO: 18627 - RNA, 67 nt, Human
uguguagaaacugaaaauuuacaaacuauuuaaaaccuggaaucgcugacuguucagaaacuacaca

SEQ ID NO: 18628 - RNA, 97 nt, Human
gaguccacuggugcccaguaacacccuccgugggaccaccaugggaagcaugugccgcggaguccaccacaggggguccugggucccgggagggcuc

SEQ ID NO: 18629 - RNA, 61 nt, Human
gccagugucuuugggggcuguggcaagggccccuugccugggguucccuuacucaucuggu

SEQ ID NO: 18630 - RNA, 67 nt, Human
gcugaauuacauuuacuguacaaagaacgguucggagagaaccaggaauggcggagugucuaacagc

SEQ ID NO: 18631 - RNA, 77 nt, Human; identical to SEQ ID NO: 9858

SEQ ID NO: 18632 - RNA, 64 nt, Human
guccuugcagucggggugauaugacacaucuguugucuaauguaccuacugugugcucacggac

SEQ ID NO: 18633 - RNA, 83 nt, Human
guguauuuacaaccuggagauagcugacagcccauacuucaccuugaaguuugacuugucuguucccucaaaugugucgacac

SEQ ID NO: 18634 - RNA, 66 nt, Human
ggcgagaagguguuccguguuaacguugaagaugaaaaucacauuaacauaauccgcgaguuggcc

SEQ ID NO: 18635 - RNA, 73 nt, Human
acagucacccugguuaauaacaaguuuuacugaucaguugcugguugguugguugguuggcaugugggugugu

SEQ ID NO: 18636 - RNA, 75 nt, Human
guuuauccugaugucgcuuguaaugcaguagaggcuauucgcuucggcuuuccuuuccucgacuuuuugguaaac

SEQ ID NO: 18637 - RNA, 75 nt, Human
ugaaaauggagggcacucuaucagucuauaacuaucaacguagugcaacaggguguuuugauaccuuuguuuuca

SEQ ID NO: 18638 - RNA, 63 nt, Human; identical to SEQ ID NO: 1503

SEQ ID NO: 18639 - RNA, 60 nt, Human
guugcaauguagaauauaaaaccauaucgaauaauuucucguagccuguuacauuguuac

SEQ ID NO: 18640 - RNA, 63 nt, Human
gccaagaucuugaugaaaaaauagugaugagaaacauugaccggacaaucaugaaggcucugc

SEQ ID NO: 18641 - RNA, 67 nt, Human
ggccaacaugacauaaccccaucucugcuacaaguauaaaaauuagcuggguguaguggugugugcc

SEQ ID NO: 18642 - RNA, 100 nt, Human
ugagacaggagaauugcuuuaacccgggaggcggagguugcagugagccgagauggcaccacugugcucuaccugggugacagagcaagacucugucuca

SEQ ID NO: 18643 - RNA, 71 nt, Human
cggcaaggggggcggcaaaauucgcaaggugcgcgacagcacuggagcacgugucaucuucccugcggcug

SEQ ID NO: 18644 - RNA, 64 nt, Human; identical to SEQ ID NO: 3783

SEQ ID NO: 18645 - RNA, 84 nt, Human
gaccccaagcaccaccgccacuucgucauccgcagaggccaggucuugcgggagauugcugaagaguauggcggggugaugguc

SEQ ID NO: 18646 - RNA, 83 nt, Human; identical to SEQ ID NO: 13454

SEQ ID NO: 18647 - RNA, 64 nt, Human
gggcguuggcagagguggcggcggcggcaugggugccccgacguugcccccugccuggcagccc

SEQ ID NO: 18648 - RNA, 62 nt, Human
uuaggaaaggagaucaacauuuucaaauuagauguuucaacugugcucuuguuuugucuuga

SEQ ID NO: 18649 - RNA, 64 nt, Human
auggugacaacaugcuggagccaagugcuaacaugccuugguucaagggauggaaagucaccgu

SEQ ID NO: 18650 - RNA, 61 nt, Human; identical to SEQ ID NO: 823

SEQ ID NO: 18651 - RNA, 64 nt, Human
acgcgaggaacaacacuucaggguaaggugauaaccaccgauauggccgggaagugcucgacgu

SEQ ID NO: 18652 - RNA, 69 nt, Human
gcccuuggccugcucuccaggagguuuacccauggggguugggccguccggggcgaguggcacgggggu

SEQ ID NO: 18653 - RNA, 66 nt, Human
ugggaaaggaaaagacucauaucaacaugucuggcauuggacacguagauucgggcaaguccacca

SEQ ID NO: 18654 - RNA, 74 nt, Human
auagccaguuuucccagcaccauuuauugaagagauaguuuuuccccaauguacauucuuggcagcuguguuau

SEQ ID NO: 18655 - RNA, 62 nt, Human
gcuguuuugguuacuauagcucuguaguuuaauuugaagucagguaaugugauuccuccagu

SEQ ID NO: 18656 - RNA, 100 nt, Human
uucauaguuugaggucuuagguuuaagucuucaauccauuugcauuugauauuuguauaugugagagauaggaaucuaguuuuauucuucugccuaugga

SEQ ID NO: 18657 - RNA, 93 nt, Human
gucauuguacuaguuagaagcuuauuaucuuaauucaguagguuuauguagaccuuaacaaaaggaaauaaauaucuuguaaugaguauugac

SEQ ID NO: 18658 - RNA, 61 nt, Human
gugauugguuuaauuuguguaugaaucaugucuugauuuuaaauguugucuuaccaauuau

SEQ ID NO: 18659 - RNA, 94 nt, Human; identical to SEQ ID NO: 600

SEQ ID NO: 18660 - RNA, 82 nt, Human
agaggaauuuggaguaguuucaaauacaagauugauugcugcugcuacuucuguauuaaaaacuagauuuucauaugccuuu

SEQ ID NO: 18661 - RNA, 75 nt, Human
aggaugaaucauauauuagaaugugaauucuaucuguuagaacuaauggauuguugcuugauaguguaucauccu

SEQ ID NO: 18662 - RNA, 64 nt, Human
cuguguuguacagcagaaagaugccaggcaaugguuugcugagcuuucuguggauauggaaaag

SEQ ID NO: 18663 - RNA, 70 nt, Human
cuuuuggcagagcucccacuauuugcaauggauuuuggauaaacaagaucuguuggaggagcgccaaaag

SEQ ID NO: 18664 - RNA, 95 nt, Human
gucauuuaucucugauggcacuuugagggaaaagaauguccacauacaguuuuugaaagaucuucucuccaaaccaguuaguuagagccagugac

SEQ ID NO: 18665 - RNA, 66 nt, Human
guguucuggggcggaaucugugcugucuagguuugugcuucuagccaugcccauucccgcccccac

SEQ ID NO: 18666 - RNA, 127 nt, Human
ugaggacccaggcccauccagggauuucaucucuaagccuggcagugcuggggggaaauguguuucuguguauauagcuccucuuguccacucugcuuucggaagugcuguggucugggggucuuca

SEQ ID NO: 18667 - RNA, 67 nt, Human
guucuuuucccuugcugcaaccuacagaggugccauugugggaaugauaguagcugaaauuaagaac

SEQ ID NO: 18668 - RNA, 70 nt, Human
gccaugccaccgccucgccaaccugcauacucccaugcaucgaguagccuggcuguaggugacacauggc

SEQ ID NO: 18669 - RNA, 72 nt, Human
gucuuuggguaauuugaccccacgugcucucuggcccucaagcauguaaccucggggucugaggcccaggac

SEQ ID NO: 18670 - RNA, 77 nt, Human
gugguggaugggccaucagaauauacacuugcuagauaauuuggcuaucugagugaaaugaguuauggaucuacuac

SEQ ID NO: 18671 - RNA, 63 nt, Human
gguccggggcuacgacuucaaccgcggugugaauuaccgcgcacugcuggaggccuucggacc

SEQ ID NO: 18672 - RNA, 64 nt, Human
uguguguguauauauguauguguguauguguguguauauauagauguauauauauacacacaca

SEQ ID NO: 18673 - RNA, 100 nt, Human
uaagaucuuuauuauuaaguaacucacugggguugucaaaguauguuauaaaauuacacagauaauuagagauauauguuacauagaaaugcugauuuua

SEQ ID NO: 18674 - RNA, 82 nt, Human
ugcaguacucuaauuuagccaaguaauugcugcuguaaaauccaaaucuacagagcgcacaauuuuuuaaauggagugugca

SEQ ID NO: 18675 - RNA, 76 nt, Human
aaaaucccacauuuuuggauuauguccggccacguuccuggacuugucguuacguguuuuagaagcuugggacuuu

SEQ ID NO: 18676 - RNA, 77 nt, Human
gcugauguggacuucucuuuucuugggcaauggagucuuacucugcuuuuauucucaagaaugguaugcacgucagc

SEQ ID NO: 18677 - RNA, 62 nt, Human
cauugccauuaauuuacuauaggucacuuaauuugaauugguauuaauuuaguaacgcaaug

SEQ ID NO: 18678 - RNA, 63 nt, Human
ucaaagagcaacgcagggaaauacuaagaugaagccuuaauacccaacagaguugugcuauga

SEQ ID NO: 18679 - RNA, 86 nt, Human
uuuuucuuguuaucuauuucagccugaaaaugaaaucccaagacuuuaaacauuuaugagcaugaggaggaagcaucacagaagaa

SEQ ID NO: 18680 - RNA, 63 nt, Human; identical to SEQ ID NO: 5205

SEQ ID NO: 18681 - RNA, 64 nt, Human
cuuuuauauuucuuuucaagauuggaucagagcucaucuccauccagucuuguuucuaugaagg

SEQ ID NO: 18682 - RNA, 75 nt, Human; identical to SEQ ID NO: 74

SEQ ID NO: 18683 - RNA, 71 nt, Human; identical to SEQ ID NO: 77

SEQ ID NO: 18684 - RNA, 80 nt, Human; identical to SEQ ID NO: 174

SEQ ID NO: 18685 - RNA, 64 nt, Human; identical to SEQ ID NO: 175

SEQ ID NO: 18686 - RNA, 66 nt, Human; identical to SEQ ID NO: 5320

SEQ ID NO: 18687 - RNA, 71 nt, Human
acagaugucugcugccaaaaaguuguucugauagaaaauccaaaaucaucgaccccaaaagccaagucugu

SEQ ID NO: 18688 - RNA, 69 nt, Human
ugucuuaaccaauuugggggcaggguggggucucaagccuuuggccccugugacuccaaguauaaggca

SEQ ID NO: 18689 - RNA, 83 nt, Human
uugaaaauggaauggaaucuccaggagugaggguuuccauggaagccagcacuauccuuggggacaccacugaccauuaacaa

SEQ ID NO: 18690 - RNA, 64 nt, Human; identical to SEQ ID NO: 1324

SEQ ID NO: 18691 - RNA, 68 nt, Human
aauucagaguuaauuacaaauucaguugaaacaaaauuucaguuuggauuaaauuuacacugugaauu

SEQ ID NO: 18692 - RNA, 80 nt, Human; identical to SEQ ID NO: 353

SEQ ID NO: 18693 - RNA, 62 nt, Human; identical to SEQ ID NO: 6733

SEQ ID NO: 18694 - RNA, 61 nt, Human
ccagacaaccaccccaccaaguucaaggugacaaauguggaugaugaggggguggagcugg

SEQ ID NO: 18695 - RNA, 65 nt, Human
cggucagcuccccgauggccugggugagggcaggcuggcugcucugacaccauggggagcugcug

SEQ ID NO: 18696 - RNA, 61 nt, Human
gcaagaaagagaugcaacccacacacccaauccgccuggggcuugcucuuaacuuuucugu

SEQ ID NO: 18697 - RNA, 81 nt, Human
uuccucccuaaucuucgggguuccuuccaguagcaauuucagccuuaguuucuuuagaaggaccggcgauuaauggaggga

SEQ ID NO: 18698 - RNA, 63 nt, Human
ccauguguucacauguucucaucauuuagcuccuauuuguaagugagaacaugcgguauuugg

SEQ ID NO: 18699 - RNA, 60 nt, Human
uguguuauuuugcuaaggauaauggcuuccagcuccauccaugucccugcaaaggacacg

SEQ ID NO: 18700 - RNA, 61 nt, Human
ucuuucauauugugaaacaucagaggguacaaccuuuguucuucaguuuagguauuaaaga

SEQ ID NO: 18701 - RNA, 80 nt, Human
uuuuaaguucuuuagaaugugacgcuuuuaauauagccucugguuuuagauggagaaacacuaugcuauugucauuaaaa

SEQ ID NO: 18702 - RNA, 78 nt, Human
uuuugagagucugacaugcauaucauaauuuuaugucagguauuauagauauuuugaaauggugacugacucuuuuga

SEQ ID NO: 18703 - RNA, 85 nt, Human
cuucccaggcccguggcaacccagcaguccuucccucagcugccuaggaggaagggacccagcugggucugggccacaagggagg

SEQ ID NO: 18704 - RNA, 79 nt, Human
ucuuguguugagacuucgugguggugcuaagaaaaggaagaagaagucuuacaccaucccaagaagaauaagcacaaga

SEQ ID NO: 18705 - RNA, 85 nt, Human
cgagccugacuugauggucuguccaauggccaugauguacucgucaaggucauuggacagcugaaccuugaccagucgggucuug

SEQ ID NO: 18706 - RNA, 60 nt, Human
gggagggucacuugagcccaggaauugugagaucaacugggcauauagggagauccuguc

SEQ ID NO: 18707 - RNA, 61 nt, Human
uggguucgguggucaugcuguaaucccaucacuuugggaggcagaaggugauacugauuca

SEQ ID NO: 18708 - RNA, 76 nt, Human
uuuaaaaaaagaagcuauguuuacacuacacuauagucuauuuaaagugugaaauggguuaugucuuaauuuuaaa

SEQ ID NO: 18709 - RNA, 61 nt, Human
ggaaaggugguuuuuauucacagaaaguuacaacuaauccaaaccuuaggaucaucagucu

SEQ ID NO: 18710 - RNA, 67 nt, Human
ugugcaacuuaugaaucuuugauaauauuuccuaugcggauugcucaacagguuuauauaaagcaca

SEQ ID NO: 18711 - RNA, 65 nt, Human
ucccgcgaaaaaagaccuugugguccucaguuggcucggccaggaaauacaagggguccaagggg

SEQ ID NO: 18712 - RNA, 73 nt, Human
gagcuacgcugggcuuugagguagagguuggggguuuaugaacccaaaucugguuaagaucuugguguggcuc

SEQ ID NO: 18713 - RNA, 73 nt, Human
ggauagguggcugagacccacugcccugagcuacuacuaguguggcugugccugugggucucuagaaccaucu

SEQ ID NO: 18714 - RNA, 62 nt, Human
uguuuagugucuauuuauucuuggguggccaguuuugaaaccuaaaaauggacaauaaagca

SEQ ID NO: 18715 - RNA, 60 nt, Human
cauauaucugggagcacuucgauaaggaccggcugguccaggugguaacucagaguaaug

SEQ ID NO: 18716 - RNA, 65 nt, Human
gcccagguggugcagugggugagcuuugcugauuccgauauagugcccccagccaguaccugggu

SEQ ID NO: 18717 - RNA, 64 nt, Human; identical to SEQ ID NO: 13710

SEQ ID NO: 18718 - RNA, 81 nt, Human
cgugcucuaugcccggacagugguggcgccgaugggcuaucuucccagaacggcacgcuguaugugacggcacggaggacg

SEQ ID NO: 18719 - RNA, 80 nt, Human
gggugaagauggcggcagccgaggccgcgaacugcaucauggagguguccuguggccaggcggaaagcagugagaagccc

SEQ ID NO: 18720 - RNA, 83 nt, Human
ggcagaaaaucgauucagaugaagcacgaggauucgagggaaucuuuguacugucaacuuuuugguacuucgaguuuucugcc

SEQ ID NO: 18721 - RNA, 72 nt, Human
cucuaugccaugguggugguucucucgaggggcucaagauccugagggaggggcaccccaaggcagcaugag

SEQ ID NO: 18722 - RNA, 68 nt, Human
cugggggggggggggccagcacccugguugaaacggcaggcggcauuggguccagcaaggaccucuag

SEQ ID NO: 18723 - RNA, 72 nt, Human
uggaggccaagcugauaaaacacaagaaggggauugucaaugaacaguuucugcugcagcggugggcagacg

SEQ ID NO: 18724 - RNA, 62 nt, Human
uuucagagauuauguguguacauauaaacaaauguuucuuauuuauuuauuuauuuuugaga

SEQ ID NO: 18725 - RNA, 64 nt, Human
auuguguaaaaaaggggcgcgccgggaaaggaaaccgggaauaugagcgcgacgaaaacauagu

SEQ ID NO: 18726 - RNA, 73 nt, Human
ccgccgcgaguuuuuguuuugucccaaaauccccgcgcggggaauagggcagugggcagaaaagacugggcgg

SEQ ID NO: 18727 - RNA, 64 nt, Human
uacuuuuuuuuuuuuuuuuuuucaauagaucuuuuauuuguuuaauaacuuaugaaaaggagug

SEQ ID NO: 18728 - RNA, 86 nt, Human
uggguuuuguguuugaucuggaaaaacacuuguacaaugaaaauucaucaauguaggugucauucugaauuaaaugucuguauuca

SEQ ID NO: 18729 - RNA, 69 nt, Human
gaacugcucugcagaaaggucgcugcucaaguggcugcacucacaggcuagccuuucugcacugcuguc

SEQ ID NO: 18730 - RNA, 64 nt, Human
auccaagagugugauggauucuauuaagaaaauugauuuccuccguuaauaaggauccuuggau

SEQ ID NO: 18731 - RNA, 62 nt, Human
gaggcgagcaaaagauuguaaugacugaagcuguuuaauugugauuuguggacguuuuccuu

SEQ ID NO: 18732 - RNA, 60 nt, Human
ggugaaggcagacagcgaguggcgacgaugaucaaaggcuucuccugagacugcgucacu

SEQ ID NO: 18733 - RNA, 70 nt, Human
ucccccgaccuaugggcauaccuuuaagaauuagaaaagucuuuuccgugguagaucaaacgcgagggga

SEQ ID NO: 18734 - RNA, 65 nt, Human
ucggaagcauuucggggcguuggaggccgcucuuggccaaaauaaaugacccugaagcuuuucgg

SEQ ID NO: 18735 - RNA, 64 nt, Human; identical to SEQ ID NO: 3889

SEQ ID NO: 18736 - RNA, 64 nt, Human; identical to SEQ ID NO: 3890

SEQ ID NO: 18737 - RNA, 80 nt, Human
gggucaagcugaaaaggcaagguuucuucaacuggcuugagagcuaugagguaggcuguuuccuucuuucgcuuuguccc

SEQ ID NO: 18738 - RNA, 64 nt, Human
gccccccaacauaaccaauuuaggaaaggcaauucuuuaaagggguuaaaaccuuuuggggggc

SEQ ID NO: 18739 - RNA, 69 nt, Human
cugccucccagucuccucuuccaacucuguccuguuugaugauggccucagggagacaagggauggcag

SEQ ID NO: 18740 - RNA, 62 nt, Human
gagcccucugagaggcccagguccuagagcagcuucugccugggcugaggucuugggggcuu

SEQ ID NO: 18741 - RNA, 75 nt, Human
agggggaagaauggagauggcagggcucuggaauuagaggaggucauucauuucacaaacauuugcagacccccu

SEQ ID NO: 18742 - RNA, 63 nt, Human
gcugcgugagugcuuagagcuuuucgguggaagaugccggacaguaacuucgcagagcgcagc

SEQ ID NO: 18743 - RNA, 131 nt, Human; identical to SEQ ID NO: 6294

SEQ ID NO: 18744 - RNA, 80 nt, Human
gaaugugucccagagauucugguauguuguaucuuuguucucguugguuucaaagaacaucuuuauuucugccuucauuu

SEQ ID NO: 18745 - RNA, 79 nt, Human
gugauguuagggugucaauuuuagaucuuuccugcuuucucuugugggcauuuagugcuauaaauuucccucuacacac

SEQ ID NO: 18746 - RNA, 61 nt, Human
gguuggggucauggcgccccgaagccuccuccugcugcucucaggggcccuggcccugacc

SEQ ID NO: 18747 - RNA, 64 nt, Human
caggcagaaagguugggcaugggcuugguaucccgaagcucugucucccacuccgugcugucug

SEQ ID NO: 18748 - RNA, 90 nt, Human
uccuaaucaguuugcguuuaauguuuuugauugaguccauacaucacacuguagauaggcaaaaccaagaacugaugcaggcucaaagga

SEQ ID NO: 18749 - RNA, 75 nt, Human
ugcagacaaaccaguguuaagaaaguauucaccaucauuuaaacaaauaaccacuuaaauagaacagugucugca

SEQ ID NO: 18750 - RNA, 120 nt, Human
uugaaccugaccaugguuuuuaauuagauacugcuagggcauuuuaaugugcaaaaaaauuaacauaguucuuuucaaaagaaacuguccucaguguucuagagaccuagaggguuucaa

SEQ ID NO: 18751 - RNA, 89 nt, Human; identical to SEQ ID NO: 288

SEQ ID NO: 18752 - RNA, 61 nt, Human; identical to SEQ ID NO: 776

SEQ ID NO: 18753 - RNA, 118 nt, Human; identical to SEQ ID NO: 3011

SEQ ID NO: 18754 - RNA, 61 nt, Human
ggcuucaugauauacaccaauuccaaaauaaaacaaucaaaugguccagguguagaaugcc

SEQ ID NO: 18755 - RNA, 69 nt, Human
ucuugcccaggcuggagugcaguggugcgaucuuggcucacugcaaccucugccuccuggguucaagca

SEQ ID NO: 18756 - RNA, 73 nt, Human; identical to SEQ ID NO: 11655

SEQ ID NO: 18757 - RNA, 90 nt, Human; identical to SEQ ID NO: 15

SEQ ID NO: 18758 - RNA, 77 nt, Human; identical to SEQ ID NO: 16

SEQ ID NO: 18759 - RNA, 60 nt, Human
uuuacuacuuuaauuugugcuuuuuuugaaaaaaaguuuucaaguaagagcaauaguaaa

SEQ ID NO: 18760 - RNA, 89 nt, Human
agagguggaacuuugaagaauucacuggucguuuuguaucacagguacaacuagagcguacacuuaacuuuucaacuguucuaucaucu

SEQ ID NO: 18761 - RNA, 73 nt, Human
cagauggcuaaugagcaggcguuucuucauuuuucuuugcaaguuuguucuauaugcucguauggccugaaug

SEQ ID NO: 18762 - RNA, 71 nt, Human
gcuuccucaguucuuuccauccuccuucuaaaggcaaaacacagaacaaccaccaaaagaaaaagggaagc

SEQ ID NO: 18763 - RNA, 87 nt, Human
uccugccucaccacugugcagguggguggcguggagaccgaagucgggcuggcaggcagggcuuacagcacagagggagggcaugga

SEQ ID NO: 18764 - RNA, 79 nt, Human; identical to SEQ ID NO: 5273

SEQ ID NO: 18765 - RNA, 71 nt, Human
gaggagcccaguggcgccuuuucagugguucuugggaugcuccgcagccaauuaagccgacugaguuccuu

SEQ ID NO: 18766 - RNA, 62 nt, Human; identical to SEQ ID NO: 5274

SEQ ID NO: 18767 - RNA, 63 nt, Human
caaugcaaacaucuauaaaaugccucugcauaauugucagaagcuauaguccagaaaucauug

SEQ ID NO: 18768 - RNA, 63 nt, Human
cugcacauaucaucgcggaauucauucggcuuccagcaagcugacacuccaugauacaagcgg

SEQ ID NO: 18769 - RNA, 88 nt, Human
gaggauuuuauuucaagauaaaacauaacuucuacccauacuauugauuccaaagguuagaaaaaguguuuuuccucaucuuauccuu

SEQ ID NO: 18770 - RNA, 66 nt, Human
aggcggguggaucaccggaggucaggaguucaagaccagccuggcaaauauugugaaaccccgucu

SEQ ID NO: 18771 - RNA, 63 nt, Human
cagugugauggugcaugccuguggucccagcuacucuggaggcugaggcaggagaaucaccug

SEQ ID NO: 18772 - RNA, 69 nt, Human
ggugcucguguauugguggugcuccguguauugguggagcacacuuguaaucccaguacuuugggagcc

SEQ ID NO: 18773 - RNA, 74 nt, Human; identical to SEQ ID NO: 3801

SEQ ID NO: 18774 - RNA, 74 nt, Human
gcugcaucaaagguagacuuucgcacagguugugagguuggagucacaguguuauuuguuguaccugauguagu

SEQ ID NO: 18775 - RNA, 83 nt, Human
ugggucuguuuacagagugugguaauuucguucuuuagauuugcagaauuuauaaagaaagaaaauuacagccugcacaccca

SEQ ID NO: 18776 - RNA, 131 nt, Human
auucuaagaguaaacccacccaauauggcaaacaaucaaaauuuuuaaaauuuaacuuagaaagucugagaucauuauuuucaaaacauugauuuguacauuguuucauacacaaauaauugacugacuau

SEQ ID NO: 18777 - RNA, 62 nt, Human
cuuugggagguaauuaggugaugaggguagagcccucaugaauggaauuugugcccuuaaag

SEQ ID NO: 18778 - RNA, 69 nt, Human
aucaacaacauaacuauauguuaauauuuugaacuaacauuucaaauguagacugaccacauguuugau

SEQ ID NO: 18779 - RNA, 68 nt, Human
cugaauccacuggucuugguugcccccacauggaacaucaauauugguaaccacacgaucccuuucag

SEQ ID NO: 18780 - RNA, 69 nt, Human
cuuaaagaaucaauguucccuuuugugaagauggcuuuuguugucauuagauucuacugauuuuuuagg

SEQ ID NO: 18781 - RNA, 92 nt, Human; identical to SEQ ID NO: 9220

SEQ ID NO: 18782 - RNA, 84 nt, Human
uacuuagacgacugaacuggccucuguguucuaaugguugagccucagaguacauauuuggggugcgguuugguuugcuuugua

SEQ ID NO: 18783 - RNA, 67 nt, Human
agcucccaguaucgaggggcaaacuuaacauuagcuuaaugcgacuuauuugcccagauuggguccu

SEQ ID NO: 18784 - RNA, 104 nt, Human
auggcaccccacgggguuuccacacguuggugcguaugagcaucuuugacucuuagucgcucggcaccgcauaacaccccugugggcacgucugauugugccgu

SEQ ID NO: 18785 - RNA, 66 nt, Human
gcuaugccagcccggagaugugcuucguguuuagcgacagguauaaauuccggacauggcggcagc

SEQ ID NO: 18786 - RNA, 71 nt, Human
ggucgcagguugggauggcggcuggaggcgaucaugguucgcccgacagcuaccgcucaccucuugccucc

SEQ ID NO: 18787 - RNA, 81 nt, Human; identical to SEQ ID NO: 2259

SEQ ID NO: 18788 - RNA, 73 nt, Human
gaugggaggccuggggcccugcccgcuggacagcacuaucucuaccagcggugguuccggccuucugauaauc

SEQ ID NO: 18789 - RNA, 65 nt, Human
uggccugcugacacuucccugcaacccauccaccccugguuucuccuccugggagucaaagucca

SEQ ID NO: 18790 - RNA, 61 nt, Human
ccuguuuuuccuugccacauuggacuuccagaagccauuuggauuggguuuagaagauggg

SEQ ID NO: 18791 - RNA, 68 nt, Human
ucaaucaaauuugggauucucaacauuuucugugucaauaaaagguguggaauuaguagauucgauga

SEQ ID NO: 18792 - RNA, 70 nt, Human; identical to SEQ ID NO: 2062

SEQ ID NO: 18793 - RNA, 60 nt, Human; identical to SEQ ID NO: 3438

SEQ ID NO: 18794 - RNA, 76 nt, Human; identical to SEQ ID NO: 17406

SEQ ID NO: 18795 - RNA, 130 nt, Human
gguguggcagcuaacgccuguaauuccagcacuuugggaggccaagguggguggaucacuucaggucaggaauucgagaccagccuuggccuaccaaagugcugggauuacgggcgugagccaccgcacc

SEQ ID NO: 18796 - RNA, 92 nt, Human
ugccuugagacagggucucacuuuguugcccaggcuggaaugcagucgcacacucauagcccccugcagccuugaccucccuggcucaagca

SEQ ID NO: 18797 - RNA, 78 nt, Human; identical to SEQ ID NO: 99

SEQ ID NO: 18798 - RNA, 80 nt, Human
ucuuguguugagacuucgugguggugcuaagaaaaggaagaagaagucuuacaccacucccaagaagaauaagcgcaaga

SEQ ID NO: 18799 - RNA, 68 nt, Human
cggcguggcgggcgaucccacacgcgccacgggaaacguuacgcgcgagggagagaagcgccccggcg

SEQ ID NO: 18800 - RNA, 65 nt, Human
gaagguuaggcuggcuguccugaaauauuauaagguggaugagaauggcaaaauuagucgccuuc

SEQ ID NO: 18801 - RNA, 80 nt, Human; identical to SEQ ID NO: 100

SEQ ID NO: 18802 - RNA, 76 nt, Human; identical to SEQ ID NO: 758

SEQ ID NO: 18803 - RNA, 67 nt, Human
gaacuuuuagaauaugaaaauaagagcccugaggauccacaggucuuggauaacuuucuacaaguuc

SEQ ID NO: 18804 - RNA, 80 nt, Human; identical to SEQ ID NO: 13061

SEQ ID NO: 18805 - RNA, 60 nt, Human
uugccuccuauaaguggaaugucucccggcccucauugcuggcugacuccaaggauguga

SEQ ID NO: 18806 - RNA, 77 nt, Human
gggauaaauggacuuuggcacauaucuaacucuaguaacaauauuuuacauauguacacuuauuccauauauauucc

SEQ ID NO: 18807 - RNA, 89 nt, Human; identical to SEQ ID NO: 8424

SEQ ID NO: 18808 - RNA, 69 nt, Human
ccgaccccagccgcggugagucuguggcgcgcuccguuguggcccuucuuguugccggcacuucuucgg

SEQ ID NO: 18809 - RNA, 65 nt, Human
ccaaacugaauaaauagcaucccucuccccacgagagcuaggggagacucaugugcugaguuugg

SEQ ID NO: 18810 - RNA, 62 nt, Human
ccugccacacuccccucccagccuggucccaggacagguggucggugagggucuggagcggg

SEQ ID NO: 18811 - RNA, 109 nt, Human
ccaccgaggcgcgcguggggccacugccguggcggcggcugcccuccucacacucggcuccgcgccgccuccggccaccgugcgcucccgcguggggcgccucggaugg

SEQ ID NO: 18812 - RNA, 129 nt, Human
agcaugcucaguuaaauuugaauuucagacaaacaaugaaugcuuuuacuguaaauauaugccaaauauugcaugaaacauucuuaacgugaaauuguuucucugaaauucaaacuuaacugggcaucu

SEQ ID NO: 18813 - RNA, 84 nt, Human; identical to SEQ ID NO: 7538

SEQ ID NO: 18814 - RNA, 78 nt, Human
agaaaguuuuucaauccuucauggaaauaacaucacguuucuucuacagacaugaaacauggagagagaaacauuucu

SEQ ID NO: 18815 - RNA, 110 nt, Human
ggucaucuugugucuguucauggaguacuuggagaaaaaccgcuucacuuugucagcgaccuggugggcgugcaacacacgagcuucauguuaccaaaacuggagagacc

SEQ ID NO: 18816 - RNA, 104 nt, Human
aauuaacuaagucacaggaaggucucacuuaagcagauuaugaucaauccaaaauuucuucuauguacgucagcuuuagugagauuuacuccauuaguauaauu

SEQ ID NO: 18817 - RNA, 61 nt, Human; identical to SEQ ID NO: 544

SEQ ID NO: 18818 - RNA, 92 nt, Human; identical to SEQ ID NO: 9620

SEQ ID NO: 18819 - RNA, 77 nt, Human
gggaggggggccucacuauguugcccaggcuggucgcaaacacccagccucaagcaauccuccugccucagccuccc

SEQ ID NO: 18820 - RNA, 84 nt, Human
uguuuaaaaaacggaaacugaagagcucuguguaaauucacuuuuaagacacggugaaguucaaauguauaugaagaagaaaca

SEQ ID NO: 18821 - RNA, 64 nt, Human; identical to SEQ ID NO: 1375

SEQ ID NO: 18822 - RNA, 61 nt, Human; identical to SEQ ID NO: 2204

SEQ ID NO: 18823 - RNA, 80 nt, Human
gugcugcugcugcucggccuguuucggccgccccccgcgcucugcgcgcggccgguaaaggagccccgcggccuaagcgc

SEQ ID NO: 18824 - RNA, 61 nt, Human; identical to SEQ ID NO: 8603

SEQ ID NO: 18825 - RNA, 62 nt, Human; identical to SEQ ID NO: 7075

SEQ ID NO: 18826 - RNA, 80 nt, Human; identical to SEQ ID NO: 7076

SEQ ID NO: 18827 - RNA, 96 nt, Human
gggcugcuuguggcuuccauuuucaauugccaggaaagagguagaaauaucuugucauggacagucguucuauggugggcauuugagcuuuggccc

SEQ ID NO: 18828 - RNA, 79 nt, Human
auuccccugauucucucuacaaaaugcuaacauuuaaauaugucauuuguaaauuguuaaccagaaggaacaugggaau

SEQ ID NO: 18829 - RNA, 81 nt, Human; identical to SEQ ID NO: 13271

SEQ ID NO: 18830 - RNA, 76 nt, Human; identical to SEQ ID NO: 758

SEQ ID NO: 18831 - RNA, 63 nt, Human; identical to SEQ ID NO: 9379

SEQ ID NO: 18832 - RNA, 70 nt, Human; identical to SEQ ID NO: 4167

SEQ ID NO: 18833 - RNA, 61 nt, Human; identical to SEQ ID NO: 18754

SEQ ID NO: 18834 - RNA, 80 nt, Human; identical to SEQ ID NO: 174

SEQ ID NO: 18835 - RNA, 64 nt, Human
gcuaagauaguucagauugaucuuaggucaauggguagaccuauguaguucaugaagucuuggc

SEQ ID NO: 18836 - RNA, 66 nt, Human; identical to SEQ ID NO: 5320

SEQ ID NO: 18837 - RNA, 90 nt, Human; identical to SEQ ID NO: 5340

SEQ ID NO: 18838 - RNA, 67 nt, Human; identical to SEQ ID NO: 14482

SEQ ID NO: 18839 - RNA, 60 nt, Human
aacauguauauuuaggugccaaauaugauuguuaaccauauguaacuuauuaaauauguu

SEQ ID NO: 18840 - RNA, 80 nt, Human
acaaagacaugaaagcuaaaaaagaaaacaccucaagagcuuuugguuuuacuuuuuugguuuuuguuuuuuguuuuugu

SEQ ID NO: 18841 - RNA, 80 nt, Human
aguuucuuccuccugggggggucguggucucgcuggcuuuaggagugaagcugcagaccuucgccaagaggauuacaacu

SEQ ID NO: 18842 - RNA, 102 nt, Human
ggaauugguggguucuuggucucacugacuucaagaaugaagcuguggacccucacgaugagugugacaguucuuaaagauagugugcccagaguuccuucc

SEQ ID NO: 18843 - RNA, 92 nt, Human
aggagauauaaagcuggcuugcccugcgcuguuugcaaucacccacuccugguggcugcaggugcuggggagagagcuaggggagguuuccu

SEQ ID NO: 18844 - RNA, 66 nt, Human
ucugaaggaggcuuggcggugguugggcugguggcugagccugacugccucaucuucuccgccaga

SEQ ID NO: 18845 - RNA, 84 nt, Human
uacacacaaguuagauggaauuuuuagagugaaagaauuaaguaggauuuaauugggugcuuuguaaauagucaacugugugua

SEQ ID NO: 18846 - RNA, 75 nt, Human
cccuugcauuugucuucuaagguaggagggcagacaccauugccuuuggucuacaacugaggaaacaauauaggg

SEQ ID NO: 18847 - RNA, 75 nt, Human
guccucacccuggcccagcgacucauaaagucaugcaaccaugagcaucacugccuccugggccaaagugagcac

SEQ ID NO: 18848 - RNA, 74 nt, Human
uggcuguaaaugcguggauuuauaccugaguucucucaucuguuucacugauccaugugucuguuuuuaugcca

SEQ ID NO: 18849 - RNA, 60 nt, Human
cccaugugccaugcauggugcugggcaccaaagugcuuuccaucccuugccugcuauggg

SEQ ID NO: 18850 - RNA, 63 nt, Human; identical to SEQ ID NO: 11804

SEQ ID NO: 18851 - RNA, 109 nt, Human
gauacuuuuaagaaguuuaggaguugugaaugugguaaaacugaaccuuuccagugauuuaguggaaaggucuuaucaaucuuaauuuuuucuuuuucaugaaaguuuc

SEQ ID NO: 18852 - RNA, 90 nt, Human
ucauauucuggacucaaaucauggaaagaaggcauuacuguacacugcgguaaaucaguuggcuaugggaagcaguucagcagaagauga

SEQ ID NO: 18853 - RNA, 84 nt, Human
auagaaaaacacacuaauuaugugcgggguauauggcaugugcucuggccuuaauccaugaacaucauuauaucauuuuuuuau

SEQ ID NO: 18854 - RNA, 80 nt, Human
ggaacucugcuuugccucacaucauaucauuauggcucagaaugaacugcugagcuuuacuaugagugaaagaagcagcc

SEQ ID NO: 18855 - RNA, 76 nt, Human
cgugacuugggcagugguaggcggguuccagaaguuuaaaagugaugcugugagcaggacccccuuccaggugaug

SEQ ID NO: 18856 - RNA, 70 nt, Human
gauucuggggcaaauuguggacaaguagaagaacguccuuccccuuggaaacuuugguuggcucggcuuc

SEQ ID NO: 18857 - RNA, 100 nt, Human; identical to SEQ ID NO: 1173

SEQ ID NO: 18858 - RNA, 70 nt, Human; identical to SEQ ID NO: 1335

SEQ ID NO: 18859 - RNA, 91 nt, Human
gggguccaggcucugguuggggcuguggacugaggucugaucuccaggcugguauguggacugugggcaguuuggacugggccuggguccc

SEQ ID NO: 18860 - RNA, 130 nt, Human
uggucuuggggucuagggugggaguuggguucugguuuagauccagacaagguucuagacauugggcuggggcuuaaguguuaagguuuggaguggauucuuagcugcuucugggcucuggaggggauca

SEQ ID NO: 18861 - RNA, 68 nt, Human
acuuucauguguagaugaaguaagagguacggagauccucuucacuugcuauucuagacagagaaggu

SEQ ID NO: 18862 - RNA, 76 nt, Human
agaauugcaguggagcaaauuggucauuuuuuaaaaaaauauauuuuaaccuacagucaccaguuuucauuguucu

SEQ ID NO: 18863 - RNA, 65 nt, Human
uaccucacugaaguacucgcauguuguuugguacccacugagcaacuguuucaguuccuaaggua

SEQ ID NO: 18864 - RNA, 75 nt, Human
gucaauguaggugcccucaauagccuccuugggugucuugaagcccagaccgauguucuuguaguaccgcgggac

SEQ ID NO: 18865 - RNA, 71 nt, Human; identical to SEQ ID NO: 1764

SEQ ID NO: 18866 - RNA, 61 nt, Human; identical to SEQ ID NO: 12046

SEQ ID NO: 18867 - RNA, 60 nt, Human
agucucgaacuccugagcucaagcaguccgcccaccuugaccucccaaagugcugggauu

SEQ ID NO: 18868 - RNA, 68 nt, Human
ggguucaagugauccucccaccuuagccucccaaguagcugggaccauuggugcaugccacuaugccu

SEQ ID NO: 18869 - RNA, 69 nt, Human
gguaugagcugccaugcccagcuucauucuuuuuaaagacugaauaauauuccauuguaugcguaugcc

SEQ ID NO: 18870 - RNA, 62 nt, Human
auggugacaacaugcuggagcccagugcuacaugccuugguucacgggauggaagucaccgu

SEQ ID NO: 18871 - RNA, 91 nt, Human
aggaaaagaaagaaagaaaauaaauucuuaauguguguguguguuguguguguguguguuuguaauuauuucuauuuuucacucuuuuccu

SEQ ID NO: 18872 - RNA, 81 nt, Human
cuaugaggaaguaauagucucuuuuccaaauacuguuaguccaaaggcuuguuuguagaaucagacuguucuuuguuuugg

SEQ ID NO: 18873 - RNA, 75 nt, Human
gaggcggagguuugcagugagccgagagcgugccauugcauuccagccugggcaacaagagcaaaacuccgucuc

SEQ ID NO: 18874 - RNA, 85 nt, Human
ccgauucacugcuagucccagaagguguccagccgagacucuuucgggaggaggcucuucgugcugguacugguguugugaucgg

SEQ ID NO: 18875 - RNA, 103 nt, Human
gugucgauccccucuucucaucacugcugcuccaacuggauugaugacuccgggaauggucagagccuugguuggagccuaagagaauggaggagggcggcgc

SEQ ID NO: 18876 - RNA, 82 nt, Human
uacauuauuuacaccaaaagcacagggcucgugugggugaacagucugcagucaaagccgaugcuggguguccuguagugua

SEQ ID NO: 18877 - RNA, 64 nt, Human
agcucaucaaugcugccaagggcuccucgaacuccuaugccauucagcaacgcaaggacgagcu

SEQ ID NO: 18878 - RNA, 66 nt, Human
cugugcacaggcgcucgugaggcugccuuccggcaacauuacgaccauugcugagugccuggccag

SEQ ID NO: 18879 - RNA, 93 nt, Human
cugagaguuggggccacaccaccagugaggggugcaguagucacucacagacucagacaagcaacccacuggcuugccugucccaauucccag

SEQ ID NO: 18880 - RNA, 60 nt, Human
gcuggggcaccaugcagagucagagaagggauuacacucugcaaauuuugugcucacagc

SEQ ID NO: 18881 - RNA, 62 nt, Human
guugcggcccccaaucccagacagucagcucucaagcuugcccaccuggguuuggcugcagc

SEQ ID NO: 18882 - RNA, 60 nt, Human
gaauagaucuguuucuuucuguccacaaugauuugugucauagacauaauugaucaauuu

SEQ ID NO: 18883 - RNA, 60 nt, Human
cugcuguguccucguaggcccugcacaggcaaguggggcgcguggacaucgucacagcag

SEQ ID NO: 18884 - RNA, 71 nt, Human
gcagcacaaaggcggcgcggugcacgucggaguuguaguacuucagcugcaucugcgccaccugcugcugu

SEQ ID NO: 18885 - RNA, 66 nt, Human; identical to SEQ ID NO: 4249

SEQ ID NO: 18886 - RNA, 64 nt, Human
gauuuuuauuauuuaaaaaaauggaaaaacaaaaaugcauuuuucauucaauaaauguuccauc

SEQ ID NO: 18887 - RNA, 74 nt, Human
uaacugcagcaauuuccuugaacugucuguagaaauucuggaaugcagauauuuauucaaugguacugcaguua

SEQ ID NO: 18888 - RNA, 61 nt, Human
aguacggcagccuugagaucaaaugccccggccugggcuccaauccacagcaugcaaaacu

SEQ ID NO: 18889 - RNA, 74 nt, Human
gccacugcggcagcugcgauguguaguaggugaugaugaugucagcaccugcucugcggaaggcagucaguggu

SEQ ID NO: 18890 - RNA, 68 nt, Human
ggcauucccggcuucaccaauagcaugucaaguuccuucccuuacaucccguucacagcucgagugcc

SEQ ID NO: 18891 - RNA, 69 nt, Human
ugguuuucacuugucugaggccccgggaacguuuuaaaguucuaguucuugggccuggcacugucucca

SEQ ID NO: 18892 - RNA, 64 nt, Human
cugagaaagugucuuaaucaaaauuucuacaaaucuuugauaucgccuuauuuauuuucugcag

SEQ ID NO: 18893 - RNA, 65 nt, Human
guuuuuauuuuguuaauuuuuuauugaguguccaaauuaaugucaauauaacagaauucaaaggc

SEQ ID NO: 18894 - RNA, 91 nt, Human
ggauccggcugccagccugaggccaagcacggcuggagacccacgaccuggccugccguugcccugagcugcagccucggccccaggaucc

SEQ ID NO: 18895 - RNA, 84 nt, Human; identical to SEQ ID NO: 286

SEQ ID NO: 18896 - RNA, 64 nt, Human; identical to SEQ ID NO: 14346

SEQ ID NO: 18897 - RNA, 89 nt, Human; identical to SEQ ID NO: 288

SEQ ID NO: 18898 - RNA, 89 nt, Human; identical to SEQ ID NO: 288

SEQ ID NO: 18899 - RNA, 72 nt, Human
ucauauagcuguggggggcuuuaauauucuggacauuuauucacugauguuagaaucaucacacauaucuga

SEQ ID NO: 18900 - RNA, 67 nt, Human
ugaggacuuuaaagugguauugaguaauacuuaccugaaaguugccaaaugcuuuugugaggccuca

SEQ ID NO: 18901 - RNA, 64 nt, Human
ccaucauggcucagauuggcuccuauguuccugcagaagaagcgacaauugggauuguggaugg

SEQ ID NO: 18902 - RNA, 86 nt, Human
uaucuuggaugaacuaggaagagggacgagcacucaugauggaauugccauugccuaugcuacacuugaguauuucauccgagaug

SEQ ID NO: 18903 - RNA, 82 nt, Human
ggguuugggucaaccuuggguuucuucacuggagcagcaacugacuugccguuucaugaagugucccuucuugcccuugccc

SEQ ID NO: 18904 - RNA, 65 nt, Human; identical to SEQ ID NO: 247

SEQ ID NO: 18905 - RNA, 66 nt, Human
guauguuuuauaaggugggugagggagguuguuuugcccugaaaacaucuacaaaugcuagcauau

SEQ ID NO: 18906 - RNA, 60 nt, Human
uguucuugugaugaucagauugucaguucaguuuacuguauuccacacaacauacgagca

SEQ ID NO: 18907 - RNA, 63 nt, Human
ugcauuacaaaccugcagcuugccaacaacaacaaaaaagguaaagguuucacagucagugca

SEQ ID NO: 18908 - RNA, 70 nt, Human; identical to SEQ ID NO: 16155

SEQ ID NO: 18909 - RNA, 82 nt, Human
ucugauuggcugcagggaugaaaguuuuuaaguucauaggacugaugauccuccucaccucugcguuuucagccgguucagg

SEQ ID NO: 18910 - RNA, 63 nt, Human; identical to SEQ ID NO: 527

SEQ ID NO: 18911 - RNA, 78 nt, Human
gcccgccgcucuuccuggcgugucaucuccagcauugagcagaaaacagagaggaaugagaagaagcagcagaugggc

SEQ ID NO: 18912 - RNA, 69 nt, Human; identical to SEQ ID NO: 528

SEQ ID NO: 18913 - RNA, 90 nt, Human; identical to SEQ ID NO: 5735

SEQ ID NO: 18914 - RNA, 78 nt, Human
cugggguguuuauggcaagucacuuugacagacauuauuguggcuaauguugucugacuuacuguuucaacaaaccag

SEQ ID NO: 18915 - RNA, 65 nt, Human; identical to SEQ ID NO: 247

SEQ ID NO: 18916 - RNA, 80 nt, Human
ucugguguggagacuucgugguggugcuaagaaaaggaagaagaagucuuacaccacucccaagaagaauaagcacaaga

SEQ ID NO: 18917 - RNA, 62 nt, Human
aacuguuguggccuuuuuugauccauaagaguugguacuguuuaaggccaaaaguaacaguu

SEQ ID NO: 18918 - RNA, 79 nt, Human
agaggaaaaagcaagugcuccagaaaaaccuguaaagaaacaaaagacaggugagacuucgagagcccugucaucuucu

SEQ ID NO: 18919 - RNA, 61 nt, Human; identical to SEQ ID NO: 4152

SEQ ID NO: 18920 - RNA, 79 nt, Human; identical to SEQ ID NO: 4153

SEQ ID NO: 18921 - RNA, 67 nt, Human
gauaucaauguaaaggaugaucaaacacuggaauauauuuuccuaggacuuccuuuauucugguuuc

SEQ ID NO: 18922 - RNA, 77 nt, Human
gguacaucugcauaaacaauauggcacaucuacuuauuaaccaaguuuccugugcuuucacauuguuuuuugcuacc

SEQ ID NO: 18923 - RNA, 72 nt, Human
uuuguuuguuuuguuuuguuuuguuuucucaaaaauguugaauuuggaaagagaacuauccagaaagauaga

SEQ ID NO: 18924 - RNA, 84 nt, Human
uuuggcacgaaccaugccacuguuuccaugggcccgaguuacuuuuccccagaugacucugguuuuguuugguuugccgccaga

SEQ ID NO: 18925 - RNA, 107 nt, Human
gccuaugaucucuaagcuuggguuccguguugccaaagcgccuucugguggacucagcccaggaggagcccaugugccccacgcuggccuggcuuguggucaugggc

SEQ ID NO: 18926 - RNA, 85 nt, Human
uguugaaaacaaauacuguuucauuuguugaaaacaaauacugugucauuuguuuucagacagcaaacagaaugauucuuugaca

SEQ ID NO: 18927 - RNA, 93 nt, Human
guggcugcguggacaaguggcgucgcgguagccccuuacccggcaaaggcccgguuggggcucuguugcgggcgcacgacgcacggcggcgac

SEQ ID NO: 18928 - RNA, 69 nt, Human
cggcguugcugcccccgagacccgggugccugccccggcggugcgggucgcgggccuccgcucucgccg

SEQ ID NO: 18929 - RNA, 60 nt, Human
gccccucuccgggcacugugcgggagccacuuccccaaacaguccccguucugcaagggc

SEQ ID NO: 18930 - RNA, 76 nt, Human
ggauagcagaagguugauguuuuuagugggacccaaggccuugaauuucccaguaauaaaauuagguuuccuuucc

SEQ ID NO: 18931 - RNA, 60 nt, Human
ucgcuggauuaauguuugacaggaaaaaacacgaaauggaugaacagcugaucgagucga

SEQ ID NO: 18932 - RNA, 77 nt, Human; identical to SEQ ID NO: 17811

SEQ ID NO: 18933 - RNA, 65 nt, Human; identical to SEQ ID NO: 247

SEQ ID NO: 18934 - RNA, 80 nt, Human; identical to SEQ ID NO: 100

SEQ ID NO: 18935 - RNA, 60 nt, Human
cuggcaugaggacugggucguguucuaugcccggcaaauucuuguuucuucacaugccgg

SEQ ID NO: 18936 - RNA, 65 nt, Human
aacaaaguuuaagcuaguguuaauaaauuaaaaaaaauugcuugucugucuacuucagcuuuguu

SEQ ID NO: 18937 - RNA, 68 nt, Human
ggccgcucuagaggauccaagcuuacguacgcgugcaugcgacgucauagcucuucuauagugucacc

SEQ ID NO: 18938 - RNA, 68 nt, Human
gaaggcgggccgaaggcuuauucccuuuaguggagguuaauuuuuacuuugguaccuggcccgccuuu

SEQ ID NO: 18939 - RNA, 105 nt, Human
gcggaguggaaguggccguggggcggguaugggacuagcuggcgugugcgcccugagacgcucagcgggcuauauacucgucgguggggccggcggucagucugc

SEQ ID NO: 18940 - RNA, 124 nt, Human
cggcuagguacgcaggcugguggcgcggaggcugcggcugcgaaguacgccugcggaguaacugcaaagaugcuguccgugcgcguugcugcggccgugguccgcgcccuuccucggcgggccg

SEQ ID NO: 18941 - RNA, 75 nt, Human; identical to SEQ ID NO: 74

SEQ ID NO: 18942 - RNA, 87 nt, Human; identical to SEQ ID NO: 76

SEQ ID NO: 18943 - RNA, 63 nt, Human; identical to SEQ ID NO: 527

SEQ ID NO: 18944 - RNA, 76 nt, Human
augcuacacaacagaaaguaagguguucuacuugaaaaugaaaggagauuauuuagguaucuuucugaaguggcau

SEQ ID NO: 18945 - RNA, 127 nt, Human
caggcuuaccaggaagcauuugaaauuaguaagaaagaaaugcagccuacacacccaauucgucuuggucuggcacuuaauuucucagucuuuuacuaugagauucuaaaucuccugaaaaggccug

SEQ ID NO: 18946 - RNA, 69 nt, Human; identical to SEQ ID NO: 528

SEQ ID NO: 18947 - RNA, 68 nt, Human
aggaaaggaggaagaaauguuuucuuaggggaauucgcuagguuuuaacgauuguuucuccugcuccu

SEQ ID NO: 18948 - RNA, 79 nt, Human; identical to SEQ ID NO: 995

SEQ ID NO: 18949 - RNA, 61 nt, Human; identical to SEQ ID NO: 996

SEQ ID NO: 18950 - RNA, 74 nt, Human
ugcugagcucggcuuauauuucggaccacaugaaggugcacagccagguccucaccaugucugugagcucugca

SEQ ID NO: 18951 - RNA, 68 nt, Human
gccuggcgauugagagugacggcaagaaggggagcaaaguuuucauguauuacuucgauaacccgggu

SEQ ID NO: 18952 - RNA, 80 nt, Human
ugcaacggagagacuguggucuacugggaagugaaguacccuuuucccauguccaacagagacuaugucuaccuucggca

SEQ ID NO: 18953 - RNA, 80 nt, Human
agcgaggugcgcaggaacuuugaugcacuggugauggaccugacuacguacuaucccgcaagagcgagcaugccucagcu

SEQ ID NO: 18954 - RNA, 68 nt, Human
ggcucgucuccuugaaaucaacgcgcguaccaagauguuucgugaguaacuagagagcagacgcagcc

SEQ ID NO: 18955 - RNA, 83 nt, Human
cuacuaaugaggcuaguuauuagauauacuguauuuuaacacuaaagaauagagcuuuaucuucguauuuaucuuauuuauag

SEQ ID NO: 18956 - RNA, 71 nt, Human
cucuuaucaaugaagaacuuuguauccaacaauaauaaacuggcaaauugcaaaguuacguuuuguaggag

SEQ ID NO: 18957 - RNA, 81 nt, Human
guaaguccugcucauguauguuccuuuauuugaagcaaaccuacagguguuucuuaauaugacagaaucaugaagacuugc

SEQ ID NO: 18958 - RNA, 79 nt, Human
guguuugaaagcucuguuuauaaauagugauugauacauuuaucauguauuuggugcugaagauaaacacuuuuuacau

SEQ ID NO: 18959 - RNA, 66 nt, Human
gcuguacauuguugcuugagagucuguacauuuaguccagauuuguauuugcacugucaguauggc

SEQ ID NO: 18960 - RNA, 88 nt, Human
gucaguguuccagguguaucuuagcuaaaacuagagaaugcccuaacuuagaugguuuuugaagccuauacaauugguauuguuugac

SEQ ID NO: 18961 - RNA, 70 nt, Human
uggaacaaauuggcugacaccuuacugguaaccugcuauucuucugguguuauccuucaggauuguucca

SEQ ID NO: 18962 - RNA, 91 nt, Human
uuuuuugauucagcuuauacccgggcugaaaaccucaauuuauguucaugacagugggguuuucagcccggguauaagcugaaucaaaaaa

SEQ ID NO: 18963 - RNA, 86 nt, Human
caggaaacagauugagagcuguauaucuggcgcuaaaaaccaguaauguuuuuguagaaaguuggcauugagaaucugugggccug

SEQ ID NO: 18964 - RNA, 70 nt, Human
gugauucaucaacuuaaugccccuuuguggcagauucgugguacagagaaaagcagcgugagggaguuac

SEQ ID NO: 18965 - RNA, 106 nt, Human
gccucaccccugcggagagcaccguggcggggcgacagcgcaugcaggaacgggggucuccucuccugcccguccuggccggggugccucuggggacgggcgacgc

SEQ ID NO: 18966 - RNA, 87 nt, Human
gcgguccgagguggaagaaguggauuuugccggcugguuguguaaaacccugcggcugaaccagcccggcacacccacgcgcaccgc

SEQ ID NO: 18967 - RNA, 100 nt, Human
ggccaucuuugaacuccuggacuauauugugaacgagccaccuccuaagcugcccaacgguguguucacccccgacuuccaggaguugucaauaaaugcc

SEQ ID NO: 18968 - RNA, 60 nt, Human
gugugacaguggccgggcucccugcguccugcuggugaccugcccaccgucccuguccau

SEQ ID NO: 18969 - RNA, 79 nt, Human; identical to SEQ ID NO: 16297

SEQ ID NO: 18970 - RNA, 80 nt, Human
ccagaacgauggugugcccucgguuggguccgggcucgaguccuucaugcuguccgggguugggaccgccgcguucucgg

SEQ ID NO: 18971 - RNA, 77 nt, Human
ccuguccuucggucccccaggccugccggucagaagccuggggcugguaggcccuuggugguccucauguggauggg

SEQ ID NO: 18972 - RNA, 71 nt, Human
gccuccuccuuccugccugugaugcuccgucucaaacagccgaaaccugucuugcaauggggggagggggc

SEQ ID NO: 18973 - RNA, 61 nt, Human
caaggaaucugugucuuugaugaccaccucaaaagggucgcagacuucacaguguaacuug

SEQ ID NO: 18974 - RNA, 81 nt, Human
gaccuugaugaccagcgucacgacagagcgcugugggccaaucccgccauggaccucucccucgaugcugaccagcacguc

SEQ ID NO: 18975 - RNA, 77 nt, Human
ggcagggccccuuugagguaccaguugacaccugucgucacgacugcaccugaagcccagccaaugagcggcccgcc

SEQ ID NO: 18976 - RNA, 67 nt, Human; identical to SEQ ID NO: 3353

SEQ ID NO: 18977 - RNA, 67 nt, Human; identical to SEQ ID NO: 1379

SEQ ID NO: 18978 - RNA, 63 nt, Human; identical to SEQ ID NO: 1366

SEQ ID NO: 18979 - RNA, 86 nt, Human; identical to SEQ ID NO: 1381

SEQ ID NO: 18980 - RNA, 72 nt, Human
gagcgcaggaagucacuaccauuuauauucuaaaacagaacuaucuauguucauaggacuucugauguguuc

SEQ ID NO: 18981 - RNA, 66 nt, Human
aguauggaugugucuugaauguguugaggcccuuggaagggacucuuucugcaagauaccuguacu

SEQ ID NO: 18982 - RNA, 89 nt, Human; identical to SEQ ID NO: 14153

SEQ ID NO: 18983 - RNA, 85 nt, Human
gaauguaaaaggaauauuacaguguuaacugccauauauguaauauacacaaacucaauuagcauuguaauggccaaaugcauuc

SEQ ID NO: 18984 - RNA, 99 nt, Human; identical to SEQ ID NO: 16322

SEQ ID NO: 18985 - RNA, 66 nt, Human; identical to SEQ ID NO: 12118

SEQ ID NO: 18986 - RNA, 62 nt, Human; identical to SEQ ID NO: 12047

SEQ ID NO: 18987 - RNA, 73 nt, Human; identical to SEQ ID NO: 12049

SEQ ID NO: 18988 - RNA, 63 nt, Human; identical to SEQ ID NO: 9730

SEQ ID NO: 18989 - RNA, 62 nt, Human
gccagaggagccugcuguuuuucagaacugaacuggaagggcagaaucaggcuaucucuggc

SEQ ID NO: 18990 - RNA, 65 nt, Human; identical to SEQ ID NO: 5414

SEQ ID NO: 18991 - RNA, 85 nt, Human; identical to SEQ ID NO: 2879

SEQ ID NO: 18992 - RNA, 66 nt, Human; identical to SEQ ID NO: 1526

SEQ ID NO: 18993 - RNA, 100 nt, Human
ugugauuccucagccagagcaaccucucuaugccaaguacaggcacugcucagggagaaggagagugcugaacggcaagggugcagguggagggauggca

SEQ ID NO: 18994 - RNA, 70 nt, Human; identical to SEQ ID NO: 6934

SEQ ID NO: 18995 - RNA, 73 nt, Human
uguaggccggagguucaugguugguauugcuaggguggcgcuuccaauuaggugcaugaguagguggccugca

SEQ ID NO: 18996 - RNA, 68 nt, Human
gccuggccaacauggugaaacccugucucuacuaaaaauacaaaaaguagccagccgugaugacaggc

SEQ ID NO: 18997 - RNA, 72 nt, Human
gucucaaaaggggaaaaaaaaaauugcugaugugacccaugaagggaacucauuuuccucguaauuugggac

SEQ ID NO: 18998 - RNA, 62 nt, Human
uccugguaguggccagggccugcguuccucagaccaaaaggcgcaaacuggcauugcuguga

SEQ ID NO: 18999 - RNA, 102 nt, Human
ugagacgaagucuugcucuucuugcccaggcuggagugcaauggugacaucucagcucaccacacucuccaccugccagguucaagcgauucuccugucuca

SEQ ID NO: 19000 - RNA, 91 nt, Human
uuaaauuuuuaauagcuaauauaauaacagccaauguuuguugaaugccaaaacuauucuguuuauuacauuaauuaucuaguucauuuaa

SEQ ID NO: 19001 - RNA, 77 nt, Human
uuccaucuuuuuauaccaauuugacaugcuaccuucaucaccuucccauguauaauuaauuggguauaauucuggaa

SEQ ID NO: 19002 - RNA, 63 nt, Human
caaugacuugggccaauuacacgacugcaaagcuagagcugccaacagggcuccagggaguug

SEQ ID NO: 19003 - RNA, 69 nt, Human
ccaccggggaucuagccuguggcaccccggagaugacacgaggcucacaugacucuagacacuuggugg

SEQ ID NO: 19004 - RNA, 70 nt, Human
gcagggaccccugaaguguuggucgggggccucgagcugccugagcugacacgaggggaggggucugugu

SEQ ID NO: 19005 - RNA, 90 nt, Human
gccugggccgggagugggccacguggggacuacuguguggagcugaccgcacuccccagcaugcuggcauccagcuccccaagggccagc

SEQ ID NO: 19006 - RNA, 67 nt, Human
gcgcugggucaaucagucaacacacgccucucacuuaugacgaguacgucugaugcugccacagugc

SEQ ID NO: 19007 - RNA, 66 nt, Human
ggugucauuuuaagagagguaauccagcaucauguaccaaggccuaccaauguuuaaaaugacauu

SEQ ID NO: 19008 - RNA, 64 nt, Human
ugguccuuuguaaccucauaaaguguccgaugagcagcaggggcuggaggauaauuuagggcca

SEQ ID NO: 19009 - RNA, 66 nt, Human
gguuugacugucagaaauuauuggucugcguucacacuugauuugcucaacuuuccacagacagcc

SEQ ID NO: 19010 - RNA, 62 nt, Human
gucccaucagcuuggaugacaaaugauauggucacccuaaauuggucuuccaggugcuugac

SEQ ID NO: 19011 - RNA, 69 nt, Human
auuggaugaauuuuguaacaaacaucuuuagauaacuuacauucuaaugguuuuuacagauuauugaau

SEQ ID NO: 19012 - RNA, 68 nt, Human
ggauacccucuauaaagcauuuguguucuuuuacaaaucguaagaagacgcuuauuuguauugguacc

SEQ ID NO: 19013 - RNA, 94 nt, Human
ugaagauuuuuaagacaauuauugaguaaaauacaaagaauaagaugaccuggcauuccauuuuuuuuuacuuuauauaugugucuaauuuuca

SEQ ID NO: 19014 - RNA, 64 nt, Human; identical to SEQ ID NO: 17566

SEQ ID NO: 19015 - RNA, 75 nt, Human; identical to SEQ ID NO: 74

SEQ ID NO: 19016 - RNA, 71 nt, Human
ggccaagcgaaccccgucggcccugcggacaacuccgcgcgcagccggagcacauggggggcgucaaggcc

SEQ ID NO: 19017 - RNA, 85 nt, Human
guccuugaacuuggaaccugacaauguuggugugucguguuggaaaugauaaacuaauuaaggaaggagauauagugaagaggac

SEQ ID NO: 19018 - RNA, 71 nt, Human; identical to SEQ ID NO: 77

SEQ ID NO: 19019 - RNA, 87 nt, Human; identical to SEQ ID NO: 76

SEQ ID NO: 19020 - RNA, 108 nt, Human; identical to SEQ ID NO: 710

SEQ ID NO: 19021 - RNA, 75 nt, Human; identical to SEQ ID NO: 74

SEQ ID NO: 19022 - RNA, 71 nt, Human; identical to SEQ ID NO: 77

SEQ ID NO: 19023 - RNA, 73 nt, Human
gccgcaccaggucuuguagcagcgccuccucgagaagccaacagagcaguaagcgcagcagccggaguguggc

SEQ ID NO: 19024 - RNA, 67 nt, Human; identical to SEQ ID NO: 6270

SEQ ID NO: 19025 - RNA, 84 nt, Human
aggaggaucuguuugggaaacauagauugucuuccccucaaaugaggggaaaaaaaaagacccuuuguucaaauggauucuguu

SEQ ID NO: 19026 - RNA, 68 nt, Human
caguauguuuaugucauucuaaaugcagcaauucaugauagcaguccaauugaucauaagcagguuug

SEQ ID NO: 19027 - RNA, 61 nt, Human
ucaucuauaaguagcaucugggaagaggagaucgaggccacaguuugcuauuuuaguauga

SEQ ID NO: 19028 - RNA, 93 nt, Human
acacaaaacuaugagagugacaaaauggugacagguagcugggaccuaggcuaucuuaccaugaagguuguuuugcuuauuguauauuugugu

SEQ ID NO: 19029 - RNA, 61 nt, Human
uggucucgccucucuccucuccuccccccaggaggaacuugaaaggaggguaaaaagacua

SEQ ID NO: 19030 - RNA, 88 nt, Human
aagaagacauguuuuagacaaauacucacguguaugggcaaaaaacucgaggacuguauuugugacuaauuguauaacagguuauuuu

SEQ ID NO: 19031 - RNA, 69 nt, Human
cuuuaucuuuuuuuauaccauuuuauccuuuucucuuuaacagaaaguaaauauguauaaaauuugaag

SEQ ID NO: 19032 - RNA, 82 nt, Human
uggauaaauuuccuguuguguggguggcauuuuucuuaacgagauuugcuucugucuuagccucacacagggaaaauaucca

SEQ ID NO: 19033 - RNA, 76 nt, Human
ccggguguuggcagggcuguacaugggccgcucagacacccagcugguggugcggcaggcgucccugcaugucugg

SEQ ID NO: 19034 - RNA, 103 nt, Human
gcgugagauccuaccccucucuuugggcuccugcuggguuuccuggccagcacgugugcagauaagagaacgauugcagcgagaacauugggagaucuugugc

SEQ ID NO: 19035 - RNA, 88 nt, Human
ucagguucagcucuguucagcuccuuggggaucuccuguuucacaucucaggagucacugggaagaugaccacagaaacugccucuga

SEQ ID NO: 19036 - RNA, 79 nt, Human
ggauuaacacggcagaggaacaaaggugugcucugagcuucuucauauuucaccuucacccucaccuguguucucuucc

SEQ ID NO: 19037 - RNA, 72 nt, Human
ugcuuuaaaugcucccugccugguguggggauggggucccccucuuugugagggcuggagcauggcacggca

SEQ ID NO: 19038 - RNA, 66 nt, Human
acaggugugugccaccacgcccggcuaauuuuuuguauuuuuaguagacgugggguuucaccaugu

SEQ ID NO: 19039 - RNA, 67 nt, Human
ugaucuccugaccuugugauccgcccgacuuggccucccaacgugcugggauuacaggcaugaguca

SEQ ID NO: 19040 - RNA, 103 nt, Human
uugagacagagucuugcucugucacccaggcuggagugcaguggcacgaucucagcucacugcaaccuccgucucccggguucaagcaauucuccugccucag

SEQ ID NO: 19041 - RNA, 84 nt, Human
gucgacuuuuuuuuuuuuuuuuuucuggcccaaauugaguuuaauaaagagcuugagugaugcucagauuagggagggagugac

SEQ ID NO: 19042 - RNA, 84 nt, Human
aucaguuucuuuugaaggugaguaaaauuaaacucugugcuuccaugacagggguuuuuuauaccccuuuaaaaaauacuuggu

SEQ ID NO: 19043 - RNA, 63 nt, Human
aaauaaaugauaugaaucauuuaacuauacaaauguauaguuaaugcuaacauguauuuauuu

SEQ ID NO: 19044 - RNA, 73 nt, Human; identical to SEQ ID NO: 15657

SEQ ID NO: 19045 - RNA, 79 nt, Human; identical to SEQ ID NO: 18561

SEQ ID NO: 19046 - RNA, 65 nt, Human
cuuucagaaauagccauaauuuuguauuacauacaaguaagccauuuuaaggaguuucaugaaag

SEQ ID NO: 19047 - RNA, 61 nt, Human
uacagcuuagaaaaugcagguuacccccccuccccgccagccugcuuuguuacauccugua

SEQ ID NO: 19048 - RNA, 83 nt, Human; identical to SEQ ID NO: 15057

SEQ ID NO: 19049 - RNA, 78 nt, Human
ucggcaggucugcagugggaaccuguggagacaaaagugacuucuucuuggaugccacuccccuguguugacuuucga

SEQ ID NO: 19050 - RNA, 79 nt, Human
ugcaucuuucauaguucuguuaacuauuuuguacaucgcuucuuuuucaaaacuaguucuuaggaacagacucgaugca

SEQ ID NO: 19051 - RNA, 61 nt, Human
gagaaagaaaguaguuuuaagguccagcuucuuagucuacuugaagcaaauuuuuuuucuu

SEQ ID NO: 19052 - RNA, 65 nt, Human
ggagauugaugucaggucagaauauuggaguuauacaucuauuucugaguugaauacucagcucc

SEQ ID NO: 19053 - RNA, 90 nt, Human
uauacucuuauaugggcuaaaaagaccccaugaauaaauagcagguucaguaguugaggaguggaguuuaguagguucguauucaguaua

SEQ ID NO: 19054 - RNA, 67 nt, Human; identical to SEQ ID NO: 1736

SEQ ID NO: 19055 - RNA, 92 nt, Human; identical to SEQ ID NO: 1737

SEQ ID NO: 19056 - RNA, 77 nt, Human; identical to SEQ ID NO: 1738

SEQ ID NO: 19057 - RNA, 88 nt, Human
gguggugguagcauuugggucugagaucggcccagcucugacugaaggggcuuggcuuccacucagcaucagcguggcagucaccacc

SEQ ID NO: 19058 - RNA, 61 nt, Human
uaaaagauuucaccagaaaaccuucauauaaaaauucaggcccuuuuuggacaauuuuuua

SEQ ID NO: 19059 - RNA, 64 nt, Human
ccucccauccucgugcacacggaugcugacaggccuuggggaaagcagcgcguggauguggagg

SEQ ID NO: 19060 - RNA, 61 nt, Human; identical to SEQ ID NO: 544

SEQ ID NO: 19061 - RNA, 82 nt, Human
cuacuaguaaguagauuucucaaauaaaacauaauaauagcuaaauauagcuaauauuuacugaccauuuacuaugcagcag

SEQ ID NO: 19062 - RNA, 76 nt, Human
gccauguugguuucaaauuuagauaaaaugagaaaugaggucauuuuaauuuuugucuaccgaauaugacaguggc

SEQ ID NO: 19063 - RNA, 82 nt, Human
acugcgugcuauccuucaacaaguguacguggcuggauaaugucguccagaucccacauguguggacgaucgccauagcagu

SEQ ID NO: 19064 - RNA, 65 nt, Human
guucugcaaacaauguccaagguauuuucaaccaccaggaacuuggauacagugugcuuuagaau

SEQ ID NO: 19065 - RNA, 71 nt, Human
uaaauauuucuaauucuuuuuuuguuuucaguucccuacugugaaaauuuaaguagauucuuaaauguuug

SEQ ID NO: 19066 - RNA, 64 nt, Human; identical to SEQ ID NO: 3818

SEQ ID NO: 19067 - RNA, 67 nt, Human
caccaagaucugcaccugcggcggcuccacccgggcccgcgcccuaggcuucacggcagaucaggug

SEQ ID NO: 19068 - RNA, 86 nt, Human
cgcuccaguugguuggguauaccgaugacuuugggccgugaguguguuucggguuucaaggucgcugggcccgagguggaccugcg

SEQ ID NO: 19069 - RNA, 61 nt, Human
gcacagcccccucaugcugguccuugagcauuucaugggcggagggacuggcgggguuggc

SEQ ID NO: 19070 - RNA, 111 nt, Human
gguugugggcagagcuccuggcccggaugcugucuccuguucuaucgagagacuuggaagaucagcacugagauuauuaugagcagaauggucaggaggaugcccagagcc

SEQ ID NO: 19071 - RNA, 80 nt, Human; identical to SEQ ID NO: 100

SEQ ID NO: 19072 - RNA, 90 nt, Human
agccccuguguccagcugccuccagaagguucccagcaccgggguccacacagccguguugcugccacuuccaggugcuggcuugggguu

SEQ ID NO: 19073 - RNA, 91 nt, Human
gcgcagaggcuuucauuagaacacuuggaacguuauucagaugaaaugucaaaaugagcagcgucccucuccacacuggcagccccugugu

SEQ ID NO: 19074 - RNA, 63 nt, Human
ccagacaaccuuagccaaaccauuuacccaaauaaaguauaggcgauagaaauugagaccugg

SEQ ID NO: 19075 - RNA, 93 nt, Human
auuuuacuuucuucauaguucgacaccuuaaauguauauuacuaauaguagcuuugcauuuuuggcugauuuaaaaauugauauaaaugaaau

SEQ ID NO: 19076 - RNA, 69 nt, Human
ggcaugagccugccagauugccaauuccauccuccaccuucagaggaugccgccauccagaauuuugcc

SEQ ID NO: 19077 - RNA, 60 nt, Human
uguuauucuuaaagauguuugaaaugaauauaccuuucuaaauaucuuuuuaaaauaaua

SEQ ID NO: 19078 - RNA, 92 nt, Human
aaguuacucuagcuuuuuaaaaggcuguuuacaauucuguguaaaaauagagcaguaucuacucaaguuuguguaaauguuagggauaauuu

SEQ ID NO: 19079 - RNA, 71 nt, Human
gcccagagucagcaugugcggcgggccaggaccacaaggcuccuaaucccagauguaccgcgacccuaggc

SEQ ID NO: 19080 - RNA, 64 nt, Human
gugaaccucgccuggagcaucucucccuaccuagccgugcagcugcugccagguuuaagaacac

SEQ ID NO: 19081 - RNA, 74 nt, Human
ucguucgguggaccgggagccguuagugaugugcugaagcaaucaaguccuggucaccuggacacaucgagcga

SEQ ID NO: 19082 - RNA, 89 nt, Human
gagguuggaaagggaaugaauugcaacguuguauccgaaagaggaaaaugguuggaaguagaauguucgcugaugaccugcacaaccuu

SEQ ID NO: 19083 - RNA, 63 nt, Human
cuugcguuacccacuuaaaucgcuggagacaauccccuuuugcaaguggcguauaacgauaag

SEQ ID NO: 19084 - RNA, 75 nt, Human
gauuggugaaaguuuuuaguaccaagaaaacagggaugaggcucuuggauuaaaagguaacuucauucacugauu

SEQ ID NO: 19085 - RNA, 125 nt, Human
gggugugggggaugcuaaccacagggccugagaagucuugcuuuaugggcucaagaaugccaugcgcuggcaguacaugugcacaaagcagaaucucagagggucuccugcagcccucugcuccu

SEQ ID NO: 19086 - RNA, 63 nt, Human; identical to SEQ ID NO: 19074

SEQ ID NO: 19087 - RNA, 75 nt, Human
ucuuuucgaaguauggcaaaaugugggcugcucuguucauaagggcuugccuucguucaguauguuaaugagaga

SEQ ID NO: 19088 - RNA, 62 nt, Human
cagaacauauaccauauagugaaaggcaacuuuuuaaauaacuucaugacuaauaugaacug

SEQ ID NO: 19089 - RNA, 60 nt, Human
gccuccuucucaaaacucaaauacucuuuauucaucuaagggucugggagagucgggggu

SEQ ID NO: 19090 - RNA, 66 nt, Human
gcggugaagaccuggcgacgcaucggaaaguacgaggagaaccgacgcacagcuaggaaugaccgc

SEQ ID NO: 19091 - RNA, 60 nt, Human
gcucauugcucaaagguauuuauuacaguaucaggagccaauaccuugugagcaguuggu

SEQ ID NO: 19092 - RNA, 79 nt, Human
cauuguaacaaugccucuuuucucacauaaaguuauugauucgaagcaguaaauuuucuuuuuaaaaagaggcucaaug

SEQ ID NO: 19093 - RNA, 87 nt, Human
uggacagauuuaucaguccuggcuagacaaguccacacccuacacggcugugcgaugggucgugacacugggccugagcuuugucua

SEQ ID NO: 19094 - RNA, 70 nt, Human
gcugucggggauucugcugggcaauggcacccugcccgccaccauccucaccagucucuucaccgacagc

SEQ ID NO: 19095 - RNA, 69 nt, Human
guauuuggagaaggcauuugaagaugaaaugaaaaagcuucuccucuuccuuaaagccuuuuccgaaac

SEQ ID NO: 19096 - RNA, 73 nt, Human
cagguguguauuuacuuuagaaaaaaugaaaaagacaagauuuaugagaaauauuugaaggcaguacacucug

SEQ ID NO: 19097 - RNA, 67 nt, Human
guuguuuggaugauuaagagauugccauuuuuaucuuggaagaacuagugguaaaacauccaagagc

SEQ ID NO: 19098 - RNA, 71 nt, Human
gaaguugaggaugacgaugaugaugagccaaucuuuguuggcgagauaucaaguucaaaaccagcaauuuc

SEQ ID NO: 19099 - RNA, 76 nt, Human
uccauuggauguuguuuaucaauaucaacaguacccaguuacaauucuggacugucauaaguagucauccaguaga

SEQ ID NO: 19100 - RNA, 99 nt, Human
agcaauucacuagacaaucuucacaugaaugucgguagccagggucucucccgagggauggcuuuagucuugaugaaugugaaccaugucggaauuguu

SEQ ID NO: 19101 - RNA, 71 nt, Human
ggcacuagcuuagcaaagaaggucacagugauguggagucgccgcacccaucuuugaagauagccaguguc

SEQ ID NO: 19102 - RNA, 82 nt, Human
cccacagacgaauaccuggagggcaugaugagcgaggccccggggcccaucaacuucaccauguuccucaccauguuugggg

SEQ ID NO: 19103 - RNA, 78 nt, Human; identical to SEQ ID NO: 17106

SEQ ID NO: 19104 - RNA, 72 nt, Human; identical to SEQ ID NO: 5861

SEQ ID NO: 19105 - RNA, 62 nt, Human
ccgcaccgaucgccuuucccaacagugcgcagccugaauggcgaauggcaaauuguaagcgg

SEQ ID NO: 19106 - RNA, 62 nt, Human
uauuuauuucaaggagacagaucaaauuaaaaacuucaagaauguuuucugccugguaaaua

SEQ ID NO: 19107 - RNA, 84 nt, Human
auuaaucucuuuauccaugcugaacgacugugacuauucaguaacgaaguaauaguaauuaauuaguaugguauaaucuuuaau

SEQ ID NO: 19108 - RNA, 63 nt, Human; identical to SEQ ID NO: 6872

SEQ ID NO: 19109 - RNA, 81 nt, Human
gguuuuccacuuagcauucaaaauguugcauagagaguaguuuucaauuucuuauguacucuucgaaguaaguugaaaauc

SEQ ID NO: 19110 - RNA, 73 nt, Human
uccuguuaaaucuguugcacucuccugggcugucuuuuucuccagcagaccccugcaugcaguuguguaagga

SEQ ID NO: 19111 - RNA, 64 nt, Human
gguggguggaucaccugaggucaggaguucgagaccagccuggccaacacggugaaaccccauc

SEQ ID NO: 19112 - RNA, 107 nt, Human
ugaggugggagaauugcuugaacccaggaggcggaggcagaggcugcagugacccaagauugugccacugcacuccacccugggcaacagagcaagaccccaucuca

SEQ ID NO: 19113 - RNA, 119 nt, Human
agguggcuccagugggcauuuucuucauauuaaaauuuuuuacaugaagcaauagaaguacaaaauacuuauuuuguucaaaauuuuaauguguuccaugaaacuguuggcagucgcuu

SEQ ID NO: 19114 - RNA, 93 nt, Human
agagggcaaaugucaacugcuggagagagugcauggacagaagugcaagcaaaauaaaguccagcucuuccagguugaccacuuugugccccu

SEQ ID NO: 19115 - RNA, 62 nt, Human
uugagucucagaaacaagcucuuuaauaaggaaaauccagaagcuauaaaacuggggggcaa

SEQ ID NO: 19116 - RNA, 77 nt, Human
uuugugcauaucaaaccuuguuccagaauggaguggcgaaaacaaucgggcugaagcagcgguaccagaugcagaaa

SEQ ID NO: 19117 - RNA, 80 nt, Human; identical to SEQ ID NO: 174

SEQ ID NO: 19118 - RNA, 64 nt, Human; identical to SEQ ID NO: 175

SEQ ID NO: 19119 - RNA, 66 nt, Human; identical to SEQ ID NO: 5320

SEQ ID NO: 19120 - RNA, 69 nt, Human; identical to SEQ ID NO: 3814

SEQ ID NO: 19121 - RNA, 69 nt, Human; identical to SEQ ID NO: 3815

SEQ ID NO: 19122 - RNA, 65 nt, Human
cagguguuccgggccccuucaccuggggcucaagugagagcagguguucugggccccuucaccug

SEQ ID NO: 19123 - RNA, 75 nt, Human
ggggcucaagugagagcaaguggucccgggccccuucaccaggggcucaggugagagcagguguucccgggcccc

SEQ ID NO: 19124 - RNA, 81 nt, Human
accagcugcaugacgguguccuguccucggcagcgcuacccugccaacugcacggugcgggaccacguccacugcuugggu

SEQ ID NO: 19125 - RNA, 64 nt, Human; identical to SEQ ID NO: 175

SEQ ID NO: 19126 - RNA, 61 nt, Human; identical to SEQ ID NO: 148

SEQ ID NO: 19127 - RNA, 80 nt, Human
ugucaccagagauggaucacacuugauggggaugguuagacaacugucucauucaauaaacugucaguuucuggagggca

SEQ ID NO: 19128 - RNA, 82 nt, Human; identical to SEQ ID NO: 13628

SEQ ID NO: 19129 - RNA, 89 nt, Human
cggaaccgcugucuuucacgccugucucacuccacacgggggccccgaccccagggucccgaaagucccaggcuguuggacguggucug

SEQ ID NO: 19130 - RNA, 88 nt, Human
gaucacuuccagguccucaguacacaaccaccacgagggaaacccagaccuagguuuccggcgccgacucugaggcccgggaguuuuc

SEQ ID NO: 19131 - RNA, 100 nt, Human; identical to SEQ ID NO: 18068

SEQ ID NO: 19132 - RNA, 74 nt, Human
cuguguccagcccuugcagagagcuuuguccucugacaucagcuaccacacaggcucauucucaacuggcacag

SEQ ID NO: 19133 - RNA, 76 nt, Human
gcugcuuccggagcaccugucuucauugccucucccuucugcagccugaaaggagggauguucaggacucugcagc

SEQ ID NO: 19134 - RNA, 125 nt, Human
ggcucugaaggguguuuguucugggcugggcuaggcugggccuagcuguagagacacaccuaaguuccguucucuguuuggaggcugcacccagccugaguccccaccaguccccuccaagagcc

SEQ ID NO: 19135 - RNA, 100 nt, Human; identical to SEQ ID NO: 1173

SEQ ID NO: 19136 - RNA, 70 nt, Human; identical to SEQ ID NO: 1335

SEQ ID NO: 19137 - RNA, 78 nt, Human
ggagagcauuuguauguuauggugaaugccaaauuugaaguggaggcaauguucacugcaaugugcgaaugccaggcc

SEQ ID NO: 19138 - RNA, 65 nt, Human
ggauucucacuggaauaccccaccauuaguuuacaugcauuauccagggaccgaagugacugucu

SEQ ID NO: 19139 - RNA, 67 nt, Human
gcuauuccaagaacaugaauggaggaauguugggccgaauuacagcgugguugugcaugggaguggu

SEQ ID NO: 19140 - RNA, 74 nt, Human
uuuggugccuggaauugguaugugguugggcaacgcccaaugccauucgugcuaacuggauuuuggguaucgag

SEQ ID NO: 19141 - RNA, 72 nt, Human; identical to SEQ ID NO: 3662

SEQ ID NO: 19142 - RNA, 74 nt, Human; identical to SEQ ID NO: 365

SEQ ID NO: 19143 - RNA, 96 nt, Human
acggaaaggaagggcucagauuaggggguguagcacauuuaucaggagguaagaucuccauagucuccuaccccuccuggccuggccuuuuacugu

SEQ ID NO: 19144 - RNA, 63 nt, Human
uucuguagcaaugaaaauuuuuaauuugaauaaaaaucacguaagcaugagguuguuggggaa

SEQ ID NO: 19145 - RNA, 69 nt, Human
cucacucagaccuucaugagcuggaaucucaucacuggaauguuccagcgacuggacaagcugaggaag

SEQ ID NO: 19146 - RNA, 81 nt, Human
guagauaaaaggugaaccaugugacaugggcauuuuuguaagucaaaaacaaauuucacauaugguaaaccuaauauucac

SEQ ID NO: 19147 - RNA, 131 nt, Human
agccaaucugcagacagacacuggcaacauugcggacacccuccaggaagcgagaaugcagaguuuccucugugauaucaagcacuucaggguuguagaugcugccauugucguacaccugcuggaugacu

SEQ ID NO: 19148 - RNA, 66 nt, Human
ccuuggcuucaaccuuagcuggggcugcagcagcacagagagcagcugugguggcagcagccaagg

SEQ ID NO: 19149 - RNA, 62 nt, Human
ggagaaggggggagauguugagcauguucagcagcguggcuucgcuggcucccacuuugucu

SEQ ID NO: 19150 - RNA, 71 nt, Human
ucucaaggccugacagacagaagggcuuggagauuuuuuuucuuuacaauucagucuucagcaacuugaga

SEQ ID NO: 19151 - RNA, 72 nt, Human; identical to SEQ ID NO: 7726

SEQ ID NO: 19152 - RNA, 77 nt, Human
ucuucggacaaaggcagcaguaagcuaaaaacaaaaucaacuggcugaauuuuccuucuuuaccucuugucugagga

SEQ ID NO: 19153 - RNA, 80 nt, Human; identical to SEQ ID NO: 11254

SEQ ID NO: 19154 - RNA, 91 nt, Human
uugauuuucauuaauccagagcugcagcaccagagauaauuucaaucaacucuuuugugaugacagcuuggcggguacgguugaaugucaa

SEQ ID NO: 19155 - RNA, 100 nt, Human
ucaacuggcuuuggcaugauuuaugauaucccugggauuaugcgugagaagagagaauugaacccggaagcauagacugugcuagacauggccuguauga

SEQ ID NO: 19156 - RNA, 79 nt, Human
ucugaagauagaucgccaucaugaacgacaccguaacuauccggacuagaaaguacaugaccaagcgacuaucuucaga

SEQ ID NO: 19157 - RNA, 95 nt, Human
aggaaaugcggagccgcgugguucugggggaguugggguucgcaauguccauacuacugacuuucccgguaacuauuccgguuaugaugaugccu

SEQ ID NO: 19158 - RNA, 73 nt, Human
agcgugugcagcgcuaccuggaggagaagggcaccuaccgaggagugucugccgaucuaccugcugcgcaucu

SEQ ID NO: 19159 - RNA, 65 nt, Human
augugggggaagugccuggacugcaucaaugagcugauggauauccuguuugcaaaucccaacau

SEQ ID NO: 19160 - RNA, 62 nt, Human
guuuugauuacgaggcccaucagcgacaggugacccgcugagggcuuccucaaagucugagc

SEQ ID NO: 19161 - RNA, 75 nt, Human; identical to SEQ ID NO: 15515

SEQ ID NO: 19162 - RNA, 69 nt, Human
caugaugcgaacaguacagauugcggcagugagcaaaacugauagcaaaaguaauauaaaaguaccaug

SEQ ID NO: 19163 - RNA, 69 nt, Human
caugcgcacaucaugguugacuucgugcuuagauaguuggcauggagagcgaugcuagugaugcacaug

SEQ ID NO: 19164 - RNA, 116 nt, Human
gcaaagucucucuguaccacccugugccaggucgcugcgcuacauguccugaacgggcaaaacacggcgaauguaccgcacguaccuggacacggugaaauugcugaugagguugc

SEQ ID NO: 19165 - RNA, 104 nt, Human
uagguacuagauuugcguccugauggacaucgagcaggucucuggacucacaaucgagggaucugccaccgagaucugucgcgugcgcaagucuugaacaucua

SEQ ID NO: 19166 - RNA, 71 nt, Human
acgucaggugagggcucggcccggcgguccccguuggucccugcagcccgggccgggccugacccuggugu

SEQ ID NO: 19167 - RNA, 78 nt, Human
cugggcccggaggucaccacgcaguuacggcgugccaauaccggacggugcacacugaguggacccagagggaccugg

SEQ ID NO: 19168 - RNA, 71 nt, Human
guccuucuuucagaccaaagcuuggacgucagugccagcgaugaugagauagccaggcugaagaagcagac

SEQ ID NO: 19169 - RNA, 78 nt, Human; identical to SEQ ID NO: 99

SEQ ID NO: 19170 - RNA, 80 nt, Human; identical to SEQ ID NO: 100

SEQ ID NO: 19171 - RNA, 92 nt, Human
gagacacagucuugcucuguugcccaggcuggaaugcaguggcgccaucucagcucacugcaaccugggcaacaagagcaaaacuccgucuc

SEQ ID NO: 19172 - RNA, 62 nt, Human
auccagcaauuuuccugcuggguauuuacccaaaagaaaggaaaucacuauauugaagggau

SEQ ID NO: 19173 - RNA, 70 nt, Human
ucaucucaccccaguuaaaauggcuuguacccaaaagacaggcaguuaacaaaugcuggcaaagagaugg

SEQ ID NO: 19174 - RNA, 76 nt, Human
aagaugcuacccagcaucuuuaaaccagcuuggugcggauagucugacuaguuuaaggagacuggcgaagcgucuu

SEQ ID NO: 19175 - RNA, 115 nt, Human
ugguucauagaagcagccaccagcagaugacaaagaagcuucaguucuccuuaaagaaguuagggguaggacaaguaucucgugguauugaagaggugaauauguuuacaaacca

SEQ ID NO: 19176 - RNA, 76 nt, Human
caggcaaggaagaugcugccaauaacuaugcccgagggcacuacaccauuggcaaggagaucauugaccuugugug

SEQ ID NO: 19177 - RNA, 80 nt, Human; identical to SEQ ID NO: 788

SEQ ID NO: 19178 - RNA, 68 nt, Human
aagggaaucacgaacacagagacgucaucguaggacaccugcccuuccucugugagacugucuuccuu

SEQ ID NO: 19179 - RNA, 78 nt, Human
cacacccaggcacuagagcaguucugggauacagugucugaauccucaguggucacugcucucuuggcccugacugug

SEQ ID NO: 19180 - RNA, 81 nt, Human
ggggauggugcauagcuaaauugacaggagcagauggugcaugagcgauuaugugcgcuggaacguggaagugacgucucc

SEQ ID NO: 19181 - RNA, 70 nt, Human
uggcgugaaccugggagcuugcagugagccgagaucgcgccacugcauuccagccugggcagcagagcca

SEQ ID NO: 19182 - RNA, 62 nt, Human
ggaugcccaggacagccagcccugagcucucagcagcuucacucaagcuguccuaggaaucc

SEQ ID NO: 19183 - RNA, 74 nt, Human
guccuaugucacguggggcuuauaggacggacggggcuugaucuggauguucugugccccuugcggucugggau

SEQ ID NO: 19184 - RNA, 62 nt, Human
ugaagggaggcacugaggucuucugaucuggggagaacagacugggacucaucuuccuuuca

SEQ ID NO: 19185 - RNA, 88 nt, Human
guuuaccaccaagucagaugugugguccuuuggcgugcuccucugggagcugaugacaagaggagccccaccuuauccugauguaaac

SEQ ID NO: 19186 - RNA, 120 nt, Human
uaucagcaaucuucucuacuuucauuggggagcacuauguccaugugaacgcuacuuaugugaacguaaaaugugucgcuccauauccuucucuguugucaucagaagauaacgcugaug

SEQ ID NO: 19187 - RNA, 64 nt, Human
aaaaagggugauauucaaggugaaaaguaauaagagaagcgcauaaugaauaaugaccuuauuu

SEQ ID NO: 19188 - RNA, 60 nt, Human
uccagaaccgugagaaguaaauuucuguuuauuuaaacagucaaguaaaaucaagcuggg

SEQ ID NO: 19189 - RNA, 78 nt, Human; identical to SEQ ID NO: 12410

SEQ ID NO: 19190 - RNA, 81 nt, Human; identical to SEQ ID NO: 18064

SEQ ID NO: 19191 - RNA, 67 nt, Human
gacgaaccuuggccgcaguccuugcgaacuguucgcaaaacagugcgggcugcggugggucagcguc

SEQ ID NO: 19192 - RNA, 61 nt, Human
gcaaugccguagcuauggaauagaagcauuuguugaacucuuuuugugagccaggcccugu

SEQ ID NO: 19193 - RNA, 94 nt, Human
uggagggucucuaguuaauuggcauuccggugcuuaaggccacuuuuggguagagguuuggcaaggauggaguguccagaccuaugauccucua

SEQ ID NO: 19194 - RNA, 66 nt, Human
cucccugauauaagcugcuuuaacccugaugagcugauaaguggcagggcagugaaagaaggggag

SEQ ID NO: 19195 - RNA, 74 nt, Human
cugcauuuuaagauuuucugaccuggauuuaaaagauaugagucuuauuaaucccagcagcagucuuaaagcag

SEQ ID NO: 19196 - RNA, 73 nt, Human
guuuugaauguaaagaaaaauuguggaaaugcugucagcagcuauucacagaccaaaccagacauccauagac

SEQ ID NO: 19197 - RNA, 62 nt, Human
ugcugaugaaauuuaucaccagacagcuucuauuuaaaagcaacuggcugugacauugagca

SEQ ID NO: 19198 - RNA, 105 nt, Human
gcucugucacccaggcugagugcaggggcaugaucauggcucacugaacuccaccucaugggucagcgaucuccugacucaagcucaaguacuggauuacagggc

SEQ ID NO: 19199 - RNA, 67 nt, Human
gccugucaguggcccucccuggugcacuguccccgaaaccccugcuugggaagggaagcugucgggu

SEQ ID NO: 19200 - RNA, 75 nt, Human
gggacgguugggggcugggagcccugggcguguaguguaacuggaaucuuuugccucucccagccaccuccuccc

SEQ ID NO: 19201 - RNA, 60 nt, Human
ccugggugacucugauggcaagcaugagacugugaaccaggaagagaagaguggcccagg

SEQ ID NO: 19202 - RNA, 63 nt, Human
ggccggcccgggaaauaucuucuuaggguaagggaaauaugcccuaugagagggggggcggcc

SEQ ID NO: 19203 - RNA, 86 nt, Human
ccugucccucaccugcggugguuuaugguggguccuucagugguuacuacuggagcuggauccgccagcccccaggaaggggcugg

SEQ ID NO: 19204 - RNA, 81 nt, Human
uggacgucucaggauucccucuuuuggaacucugguuuaugggcggaagacuccgagggcaggaauguggagagacguuua

SEQ ID NO: 19205 - RNA, 67 nt, Human
guggcccagacccagcugggucccuuccuccuaggcagcugagggaaggacugcugggauuggccac

SEQ ID NO: 19206 - RNA, 60 nt, Human
ugccgacucuaucgaucccuuaccuucaaugagaccuaccaggacaucagugaguuggua

SEQ ID NO: 19207 - RNA, 74 nt, Human
gcgucggacaccugggguggcacacacacgcaaaaugucacgccguguaagacacacccgagggaucaugucgc

SEQ ID NO: 19208 - RNA, 83 nt, Human
ucgcuauggaaugggaacgucuguugagagagcggcagccagcacugauuacuacaagagaggcgauuucauuccugggcuga

SEQ ID NO: 19209 - RNA, 82 nt, Human
aacccgacacaguagcauuugugccaauuucugguuggaauggugacaacaugcuggagccaagugcuaacaugucuggguu

SEQ ID NO: 19210 - RNA, 73 nt, Human
caggaugcuacacaaugggguugggaaaggcccuggggccgaggagaaggguuccaaaccggugugguaccug

SEQ ID NO: 19211 - RNA, 66 nt, Human; identical to SEQ ID NO: 3532

SEQ ID NO: 19212 - RNA, 62 nt, Human
ggugacaacaugcugagagccaagugcuaacauggccuggcuccagggauggcaaagucacc

SEQ ID NO: 19213 - RNA, 69 nt, Human
agaccaugacuaccuucaccuggaacaucaaccacgcccggcugauggugguggaggaacgauguguuu

SEQ ID NO: 19214 - RNA, 72 nt, Human; identical to SEQ ID NO: 5736

SEQ ID NO: 19215 - RNA, 77 nt, Human
cggcccggcccucgcgugccucccaggcuccgcaccccugaugcugcgcgggugcugagcccgcuucggccgggacg

SEQ ID NO: 19216 - RNA, 79 nt, Human; identical to SEQ ID NO: 1810

SEQ ID NO: 19217 - RNA, 98 nt, Human
gccuguccucugggagugaccuuuauuaguccaccccuuggagcuagacauccuguacuuagucacggggaugguggaagagggagaagaggaagggu

SEQ ID NO: 19218 - RNA, 61 nt, Human
ugguaugacacucgccccaaaggaaaacaacuuuucuuacacgaaggacgcgucacugcca

SEQ ID NO: 19219 - RNA, 62 nt, Human; identical to SEQ ID NO: 3062

SEQ ID NO: 19220 - RNA, 83 nt, Human
ggaaugaggucugaacuccacugaauuaaaccacuggcauuugggggcuguguauuauagcagugcaaagaguuccuuuaucc

SEQ ID NO: 19221 - RNA, 94 nt, Human
auuugacacacuuggaggcauggucuaguaauaauaauguaauauguaccuugcugguuaauauaacuaagauuuugccuuuauuggguuaggu

SEQ ID NO: 19222 - RNA, 75 nt, Human
gcgugaccuggcagcuguagcuucugugggacuuccacugcucaggcgucaggcucauauagcugcuggccgcgu

SEQ ID NO: 19223 - RNA, 71 nt, Human; identical to SEQ ID NO: 1050

SEQ ID NO: 19224 - RNA, 65 nt, Human
uuguuuggaggguguuguggucuccaaucccggcuugacggggcugcuaucugccuuccaggcaa

SEQ ID NO: 19225 - RNA, 62 nt, Human
gaccagauguuggcugcuguacuuacucccugagguagggaauguguggugaucgagugguc

SEQ ID NO: 19226 - RNA, 68 nt, Human
uguguggugaucgaguggucuguguuccuauugcugguggggugauagggugggcuaaaaaccaugca

SEQ ID NO: 19227 - RNA, 70 nt, Human
ucccaaccuccccuuccuguggcugccccagagccugugagggaugcugcaguacaggggagcauaggga

SEQ ID NO: 19228 - RNA, 92 nt, Human; identical to SEQ ID NO: 16824

SEQ ID NO: 19229 - RNA, 66 nt, Human
uucauaaauuaaaugucuacaugugccagaauggaaaggaaacaaggggagacaacuuuuauagaa

SEQ ID NO: 19230 - RNA, 61 nt, Human
uaagguuaugucuguguaugucauucacacuuaggcaagcauacacaggcacauggcuuua

SEQ ID NO: 19231 - RNA, 80 nt, Human
aggguacagugugguagucuugaccuaggaauacacccaugaaaacaccuccacaauuaaaauagcacaucuguggcccu

SEQ ID NO: 19232 - RNA, 94 nt, Human
uuucgaguuuuuauagguuggugcaaaagugauugugguuugcauugagaauaauggagaagacgaauauuuggacaacuguauauaaauggaa

SEQ ID NO: 19233 - RNA, 63 nt, Human
cucagugaguucagaauauccuacaccuaaccccccucuuagaugguagcuaugcucagugag

SEQ ID NO: 19234 - RNA, 90 nt, Human
aggaguuggggguauagaaugagguugacccuuuucguguuaaccuguaauuaacucugggagucaaugucuaugguacacuugacuguu

SEQ ID NO: 19235 - RNA, 61 nt, Human
gaacaacucuaguggaaccccacaaauuucauuaaguuacgguuucauuuuauuucuguuc

SEQ ID NO: 19236 - RNA, 87 nt, Human
agaggcuguguggccaaccaggacccaaggugcccuucccagauuccuugggaaggacacagcaguauuggaccgguucuagccucu

SEQ ID NO: 19237 - RNA, 78 nt, Human
gggaacuucuggauacaaguggggccaugcucccuggcccugacuccaggcugggguauccugaacuguauccaaccc

SEQ ID NO: 19238 - RNA, 62 nt, Human
gccaugucuaucggauuagcacucggugccaaauacucaacugaugcuccugguaugauggc

SEQ ID NO: 19239 - RNA, 69 nt, Human
ugccucuggauauuuaaggacagugucaggaccgacucggccaacgcacucuaaauccccagauaggua

SEQ ID NO: 19240 - RNA, 70 nt, Human
uggguccuaaaccagugaaccuuuggcaucguaucuuccaugaauuacugagcuccaaaauugggaucca

SEQ ID NO: 19241 - RNA, 72 nt, Human
ugacuccugcugccaucucaaggacauuuuccuaaggacaguccugguguccugauggagugaaagggauca

SEQ ID NO: 19242 - RNA, 100 nt, Human
uggcucagaucugcugagguucuggaguggcacaggaacaggaggagcaaaugacacugggucuuugugcugaggcaggacacagcggcuuuccgaaaca

SEQ ID NO: 19243 - RNA, 66 nt, Human
ggguucuucaaagguucuuuuauuguggaacuuucuuaaguaggaggaaaggauuguuaagggccc

SEQ ID NO: 19244 - RNA, 73 nt, Human
cgcugcucacauccugcacggagacugacccgcccugcguccuagggcaggcuccaggcagggucugcaugug

SEQ ID NO: 19245 - RNA, 110 nt, Human
cucuuugagaugacugguauugaauggagcagucuuugaaaggcaccaacccuuccuaacugaugguggucucuugaaagaggcucuuccaaauuugucuucugaaagug

SEQ ID NO: 19246 - RNA, 60 nt, Human
agccucccuaguaguugggauuacaggcaugcgcuaccaagcccagcuaauuuuuguguu

SEQ ID NO: 19247 - RNA, 80 nt, Human; identical to SEQ ID NO: 10264

SEQ ID NO: 19248 - RNA, 63 nt, Human
ggaaaccccacguguccuuuccuaaccaggaagcccguccucuaaggagggggcauggguccc

SEQ ID NO: 19249 - RNA, 104 nt, Human
ucccuguccagccuaagcgugcuucuguguccagcuuuaaggccucugcgugaggaaggccacagacucccagcugucagcacgcuggcaugaugagacuugga

SEQ ID NO: 19250 - RNA, 70 nt, Human
acaggaaggacgggcguggucugcaggaggaucuccaggccccugcagcccucccuacaguccucucugu

SEQ ID NO: 19251 - RNA, 79 nt, Human; identical to SEQ ID NO: 10416

SEQ ID NO: 19252 - RNA, 64 nt, Human
cucuuuggaaaauauuccugauuccagcccagggcccaggguggggcagcaggagcuaacggag

SEQ ID NO: 19253 - RNA, 127 nt, Human
ggugguuuguuucaccuaucaacccgucaucuagguuuuaagccccgcaugcauuagguauuuguccuaaugugcugcuucccuuuucccccaagacccugacaggccccugggugugauguucccc

SEQ ID NO: 19254 - RNA, 68 nt, Human
guuccuguguuaguuugcugaggaugaugguuuccagcuucauccaugucccugcaaaggacaggaac

SEQ ID NO: 19255 - RNA, 78 nt, Human
cugggauauggaucgcuggcuaaguuaaugucauguaacucuguacugaugccaaaguuagccacaucuuacuuccag

SEQ ID NO: 19256 - RNA, 69 nt, Human
uuucuguuuucaaaaauuauuaaaucuaaaaauuacuucugauuuuaaaaggauucucugaaacagaag

SEQ ID NO: 19257 - RNA, 78 nt, Human
gagacuaugacgaaucacuuuacagcauccaaggucaucaacagagaauucuaaaugucgguagcguucaucaguuuc

SEQ ID NO: 19258 - RNA, 66 nt, Human; identical to SEQ ID NO: 16024

SEQ ID NO: 19259 - RNA, 82 nt, Human
cccuuggaucaugacaaauaagucucacacagugccguaauacuuguggauucuuuuguaaucuuuguaaucuuaauaaggg

SEQ ID NO: 19260 - RNA, 75 nt, Human
caggaggcagaaaguuccagaaaccaaggagccaaccuguggauuaaaggguauugugacucacauguccuccug

SEQ ID NO: 19261 - RNA, 63 nt, Human
uggguugaagaaucuguuuuguucuuuugguaguuuuauuaaaacaugaccuauucuuacuca

SEQ ID NO: 19262 - RNA, 89 nt, Human; identical to SEQ ID NO: 14669

SEQ ID NO: 19263 - RNA, 69 nt, Human
uguuaaguuguauaaaaguaggugauucuguauuuaaagaaaauauuacuguuacauauacugcuugca

SEQ ID NO: 19264 - RNA, 87 nt, Human
gagaaguuaagccucgaaugaaugagcuggaagcuuuuaauauguugaaaguuguacugguucccuguauagagacuuugauuccuc

SEQ ID NO: 19265 - RNA, 73 nt, Human
gguggcccccugcgcaaagaccuaggcccuggugucgggcuggcaggccugguaggcggaggcgggcaccacc

SEQ ID NO: 19266 - RNA, 76 nt, Human
auuggaagcugugcaguauaaaauucaaguuguugcuggagcaaauuacuacauuaagguacgagcaggugauaau

SEQ ID NO: 19267 - RNA, 117 nt, Human
uauaugcacuugaaaguauucaaaagucuucccggacaaaaugaggacuugguacuuacuggauaccagguugacaaaaacaaggaugacgagcugacgggcuuuuagcagcaugua

SEQ ID NO: 19268 - RNA, 82 nt, Human; identical to SEQ ID NO: 8738

SEQ ID NO: 19269 - RNA, 74 nt, Human
gucuuuuguaaaucaaguaagaauccauuaaagaaauuaauuuuaaaugugcauuaccugguuacauaaaggac

SEQ ID NO: 19270 - RNA, 104 nt, Human
ugcgguggggaugggggaguugggggcccucacuugguccuucucuguuguuuuuuuccaggacaaagccaaaggccccuuguuagcuggccaucccugcccca

SEQ ID NO: 19271 - RNA, 60 nt, Human
aggagucaagaaacuuuucuuuugagcuauugacagcuuuuaacaaguuauuauacuccu

SEQ ID NO: 19272 - RNA, 69 nt, Human
cgaaauacuggauuaugauaaggguuuaaggauaugguaaaaaaaaaucccaggaccacccauguuucg

SEQ ID NO: 19273 - RNA, 90 nt, Human
augguuuaacuuuguuguuuaacuauccucagcauccuuuccaucaagaauggaggugcuuugauuaaugguuaaaacuuguuuuacuau

SEQ ID NO: 19274 - RNA, 85 nt, Human
ccaggugaauggcugguuagaaaguucuuuggcuccuuaccagacucuugggccagugggcauucugugccuguggugaccgugg

SEQ ID NO: 19275 - RNA, 112 nt, Human
caggcgcgcggggccgucggggcugagcggcggugugucgggcggcggcggggggcggcccccgggaccucgcaugcacgaagccgccgggcccggggcgcccucgcgcuug

SEQ ID NO: 19276 - RNA, 70 nt, Human
ccgggcccgggcgcgccgaaaccagggccaccgaaaggcggcgggaaggaggcgcgcggaccgggcgcgg

SEQ ID NO: 19277 - RNA, 89 nt, Human
gucgcagcagcucagacaccaggccacccgcgggggcgcuguauggcgugggcgcgccggguucgguguaauagaacgcaggcggcggc

SEQ ID NO: 19278 - RNA, 64 nt, Human
aaagacucguuuugucuucucuuccccugaaguaauuuaaacucccaaagcagcacgaguuuuu

SEQ ID NO: 19279 - RNA, 86 nt, Human
uuaacauuuugagauauuuuauuucugugauaaggaaaucucacauaaaagucuuuaucauuucauuaauucacaaaaaguguuaa

SEQ ID NO: 19280 - RNA, 72 nt, Human
auugaaauacuauuauuacuauauauuaaauuggaacaaauuugagaugcaguaauauaugggcuuuuuaau

SEQ ID NO: 19281 - RNA, 64 nt, Human
uaucuccuguucucccccccgugucgcaauucgcguguuacauaggucggcuugagcacugaua

SEQ ID NO: 19282 - RNA, 105 nt, Human
cauugucuccuucucagaagacuccguuucuggggaaacaucacuuuuucaauaacaggaagugucuccgcagcuuuuacuauuuuugacuggauaacuucaaug

SEQ ID NO: 19283 - RNA, 69 nt, Human
gugaaccuuuucaaauaaccccucccuucuguuuuuauuuuggaaggucuaaaguuugugaggguucau

SEQ ID NO: 19284 - RNA, 63 nt, Human
cuagagcgguccuuggggagacgcgggucccaguccugcggcuccuacuggggagugcgcugg

SEQ ID NO: 19285 - RNA, 60 nt, Human
gcuggagauaaggagugggcccuggaagaugcucauucaggcccugcucaagauuccagu

SEQ ID NO: 19286 - RNA, 131 nt, Human
ugcacaccaggaacccaagucuuucaacggauccuugaagaauguggcuguagaugaacugagcaggcagggcugcaccgucacagugucugauuuguaugcccaugaacuuggagccgagggccaaggca

SEQ ID NO: 19287 - RNA, 69 nt, Human; identical to SEQ ID NO: 3815

SEQ ID NO: 19288 - RNA, 61 nt, Human
uccaugucuccaagugcucugcuauaccugccaccagcagcugccaccuccagacuuugga

SEQ ID NO: 19289 - RNA, 61 nt, Human
uaggaggugaugaggcugccacaucuaagagaagccucacagagguagcaucaagccccua

SEQ ID NO: 19290 - RNA, 69 nt, Human
ucccuuucuuugugaagguuacauuccauuggggggaaguaauaaaacauaaacuguguuagauaggga

SEQ ID NO: 19291 - RNA, 75 nt, Human
uuuacugagcgucuacuuugggcccgacacuuuucuagguacaggagauauggcagggaacaaaugccaagugaa

SEQ ID NO: 19292 - RNA, 69 nt, Human
uuuuuuuuuuuuuuuuugaaaagggauaaucuuuuauuucauuccacugggcaaaaaacaaaacaaaaa

SEQ ID NO: 19293 - RNA, 95 nt, Human
gcagacugccccagugucuccaucgaggcugggggacagcugcugcccccacuggagacagcggacuguccuucaguagaagacagguggucugc

SEQ ID NO: 19294 - RNA, 66 nt, Human
gucuggguguagugucauuuuaaguauuuuggggugggaugagggagagagagcagcuccacagac

SEQ ID NO: 19295 - RNA, 87 nt, Human
guggcuuuuccagaaccagcauguucccuuuccucaguaaacgaggaauccauaaaacaaguuuuuguugguuacuaccagagucau

SEQ ID NO: 19296 - RNA, 80 nt, Human
caggugcugcugagcgagcccgaggaggcggcggcucuguaucggggccuuagccgccagcccgcgcugagcgccgccug

SEQ ID NO: 19297 - RNA, 125 nt, Human
ggcacuuuuguauacauuacuuauuucauuugagaaaaaaauauuuaccauaggaauuucaccaugaauguucuaucauauguuuaaccuugauuuggaaucugauauauguuuuuuagaaggcc

SEQ ID NO: 19298 - RNA, 74 nt, Human
ucauucacuuuuauuauaggauccccacaaauucaguagaaaaggggugggauacagaaaaaaaaagugagaga

SEQ ID NO: 19299 - RNA, 79 nt, Human
agugggagcaggagcuuggaggugagcacaggaagccccacuugaggcuuuuacgcagccucuagucucuguuucuucu

SEQ ID NO: 19300 - RNA, 81 nt, Human; identical to SEQ ID NO: 1413

SEQ ID NO: 19301 - RNA, 65 nt, Human; identical to SEQ ID NO: 1415

SEQ ID NO: 19302 - RNA, 77 nt, Human
agccguacauucccacgcaguuucaucucagggaggccaguuggcggccgguccuggauuuguuuuaagguacggcu

SEQ ID NO: 19303 - RNA, 62 nt, Human
ggaggggucccugcagaagcguggcauuguggaacaaugcuguaccagcaucugcucccucu

SEQ ID NO: 19304 - RNA, 66 nt, Human
cagaaaaugggcgggguggugugggugaugggacucauuguagaaaggaagccuugcucauuucug

SEQ ID NO: 19305 - RNA, 68 nt, Human
gaaccagucagguuuacuuacgcuggauguuugagugugaagaaauaccggcccaaguacugcgguuc

SEQ ID NO: 19306 - RNA, 83 nt, Human
cugcuuuugcacagaucugggaguaucggauguagcugaguccagccugucuccaguaggccaccaugcuguagcgaaagcgg

SEQ ID NO: 19307 - RNA, 61 nt, Human
gcucgucgggccgaaucgccaagacgccggcaaugucggcucgugccgauucggcacgagc

SEQ ID NO: 19308 - RNA, 90 nt, Human
guuuuacagaggugacaggauuuugggguguuguuuuuuucuguucuucuuccuugacugaggcaauacauuuuguguuacuuguauaau

SEQ ID NO: 19309 - RNA, 71 nt, Human
gacagggucuggguccagcgguaauugggcaugucugcccguugccuagguugggcucaguuuuccuuguc

SEQ ID NO: 19310 - RNA, 91 nt, Human
ggaaaaaacaggggcuaguugaauuuagccuuggaaaaauccaucuccggauguugauccaugaacuucuucagaaucuccuguuucuucu

SEQ ID NO: 19311 - RNA, 66 nt, Human
guccucaaugagccacgagcucuccuccaccuucacuucauuguagagcuccccaucaaugaucgc

SEQ ID NO: 19312 - RNA, 72 nt, Human
ggaacagggagggccugugucuggccaggcugagguuccagaucuguugccaucauggccccuucaggugcc

SEQ ID NO: 19313 - RNA, 89 nt, Human
gcucugguugcuucgaauacuuuggcuugaucuuucugaacucaucacaucucgaggaucaauucauauguugucaaaggcuuaagggc

SEQ ID NO: 19314 - RNA, 71 nt, Human
gcuguaaaacacucuacacaauuucacaagacgcauugcaggggaaaaagugacugagauggaucaacagu

SEQ ID NO: 19315 - RNA, 65 nt, Human
gggccuggggaauuggcacaccagcugguacuccucuaccagcugcccauaccaaccccagggcc

SEQ ID NO: 19316 - RNA, 95 nt, Human
gaagcaaaguguuucaacaacugagagguaagaaaaucuuguuauuugcauguauuuuuauauaaucaaucagguugcagauucuaaaauugcuc

SEQ ID NO: 19317 - RNA, 125 nt, Human
gcagcgauccaucagcaacaccaaacuugaaauugauuuauguggaaaaacuuggcuugucugccaucuaacaagcccuguugaguaaaauaagcaagcuuaaauuugauuaguugugugucugc

SEQ ID NO: 19318 - RNA, 67 nt, Human
gggagugguaggcugccuuuucuccugguauuuguacacaaaagcuggggagagcuuuuccacugcc

SEQ ID NO: 19319 - RNA, 78 nt, Human
uuugauuaguugugugucugccugaaaccauuuaguagagcacuuuaauucugcaugguuuuuacaaaacucauuaaa

SEQ ID NO: 19320 - RNA, 76 nt, Human
gaggguacuguagaaucuuuauuaucucaacaaucuaaaaaaugauguuuauuuccuuaguuagauagugccacuu

SEQ ID NO: 19321 - RNA, 64 nt, Human
ucugucucaacuggucucugcaagccucugacugaauguauccgugcuggcccuaugagacgga

SEQ ID NO: 19322 - RNA, 66 nt, Human
uucccccgaacuugaucaauguauacaaugcuuacacauucauauaugugcaagauucaacaggaa

SEQ ID NO: 19323 - RNA, 64 nt, Human; identical to SEQ ID NO: 8532

SEQ ID NO: 19324 - RNA, 64 nt, Human
ucguuuuggaucacuuuggacccagcggugauggugaacuugaagugcuucccauucugaacga

SEQ ID NO: 19325 - RNA, 73 nt, Human
ucuuccggcagaccgauugccuucaugaaggcuucaaaguuuuccuggcucugcaguugguacuugccggaga

SEQ ID NO: 19326 - RNA, 74 nt, Human; identical to SEQ ID NO: 1641

SEQ ID NO: 19327 - RNA, 67 nt, Human
ggggggcaccaaugacaagggaauugggauggggaugacagucccuauuuccuuugcuguguucccc

SEQ ID NO: 19328 - RNA, 67 nt, Human
ggccgauccugguuuauuugguuuucuucucagccaagggaggggacccgcagggcaggcgccggcc

SEQ ID NO: 19329 - RNA, 79 nt, Human; identical to SEQ ID NO: 2369

SEQ ID NO: 19330 - RNA, 106 nt, Human
gauuuguagauguugacccagaguccucuguccccuccugaagaggauuuucuuacugguuucuacugaaggggagguaggggaggcuugaccaacggaacaaguu

SEQ ID NO: 19331 - RNA, 65 nt, Human
ggguaagcuagguggcucagggaguggcagaagggccauuuuucccucugccaaaaagacuuccu

SEQ ID NO: 19332 - RNA, 87 nt, Human; identical to SEQ ID NO: 17671

SEQ ID NO: 19333 - RNA, 73 nt, Human
ggaaggagggcggugucggcaggagccagggguguccucuggcuucccaaagcuagggccguucccuccuucc

SEQ ID NO: 19334 - RNA, 74 nt, Human
ggucccuucuaugugaaaagagaaggugggcugaagccucuaagaucuucuccaguuuucacauaguauggacu

SEQ ID NO: 19335 - RNA, 74 nt, Human
gccucuggcuuuaccauugaaauuuaagaacuagaacgauuucuuaaaguaagugugggucaagguccuaaggc

SEQ ID NO: 19336 - RNA, 81 nt, Human
uguaaaguucagacauaaaaaggggcaguaaagaaucuguaacugcagaaagugcugccugagcacuguaaauacuuuuca

SEQ ID NO: 19337 - RNA, 87 nt, Human
ugccuuuggcuggcuccuugguguggggcaggguaggguuuggcaacagccugggcuucaugcccccucugguggaccucaaaggca

SEQ ID NO: 19338 - RNA, 71 nt, Human; identical to SEQ ID NO: 1764

SEQ ID NO: 19339 - RNA, 93 nt, Human
gcuagagcugccaacagggcuccagggagcuuggcuucuguagaaguucuaaggaagcgguacgaacuccacggcgggugggcgcuaacuagc

SEQ ID NO: 19340 - RNA, 64 nt, Human
ggaccccugcaaguguuggucgggggccucgaccugccugagcugacacgaggggagggggucu

SEQ ID NO: 19341 - RNA, 60 nt, Human
ggcucacaugauucuagacacuugguggaaagugaggggagaaaaacaaucacuugggcc

SEQ ID NO: 19342 - RNA, 103 nt, Human
ccacaauggaagucauuaccucugcagucaauuaagugugcugaguuccuuuccuuaugggggcccagugugcaauggcugcaaacagcagcuuccuuggugg

SEQ ID NO: 19343 - RNA, 118 nt, Human
cccugauaauaggccuuucaaauguauguucaugucucugaccuugcauuaccccaauguaggcuucaaacaggcaugcgaggugccuuuggaaaaccccaaggcacuguggucaggg

SEQ ID NO: 19344 - RNA, 72 nt, Human
cuuggauccucuagagcggccggcuacuacuacuaaauucgcggccgcgucgacgaaacauuuaggaccaag

SEQ ID NO: 19345 - RNA, 61 nt, Human
aguuuaguggcaaguucuuuagccuuugccuuuucgagcuuggcgauacgagccacaaacu

SEQ ID NO: 19346 - RNA, 130 nt, Human; identical to SEQ ID NO: 18146

SEQ ID NO: 19347 - RNA, 74 nt, Human
uguuguguuuaaaaaauaagaaaccucuuuaagcaauagauuugcuguggguuuucuuuuuuaaaaacauaaua

SEQ ID NO: 19348 - RNA, 70 nt, Human; identical to SEQ ID NO: 9460

SEQ ID NO: 19349 - RNA, 65 nt, Human
ggaagccaugaagcagucuucuugccgugaaugggguaaauauggacugcgcauucauggguucc

SEQ ID NO: 19350 - RNA, 76 nt, Human
ucucuacuguaauuaauugggucuauuauuaacucucuguuccaucauagaauguggccaggccuuacaauggaga

SEQ ID NO: 19351 - RNA, 65 nt, Human
cucaaggugccucguuuuuguccuagaaauggaguuucuauaucaaucugcuucauaaccuuggg

SEQ ID NO: 19352 - RNA, 65 nt, Human
gggcucacuguauuuuauaugguugugugggaaaaugcauuacuaguuuauuauggcuugggucc

SEQ ID NO: 19353 - RNA, 91 nt, Human
uguugcccaggcuggucuugaacucuauaguguuugaucauagaaguggagauacuaaccaaaaaucuuuucaaauuaagccuaauaaaca

SEQ ID NO: 19354 - RNA, 71 nt, Human
gguaacaugcaaauaaugugauaaaguuaaagaggacuugucaauagcaaacauuauaaauguaugcuacu

SEQ ID NO: 19355 - RNA, 79 nt, Human
uuugguaguaauuucauuuuacagugguugaauuuacccacccaaggcuuaaugaccacaaaauguuucugcaacuaaa

SEQ ID NO: 19356 - RNA, 66 nt, Human
gccucuguccuuuaucagucgucuuagcagaucugucuuauuuuucagcugauaaacguagagagc

SEQ ID NO: 19357 - RNA, 78 nt, Human
ggagugacuggcaggaucagauuugggcauuugugaaguucucuagcucagguuccauucaaugcaagucacaauucc

SEQ ID NO: 19358 - RNA, 65 nt, Human
ccugcccugaggaugcggcugcgggcccggcuggucacgcgcagugcacauaccuucaguuuggg

SEQ ID NO: 19359 - RNA, 99 nt, Human
ccauugcccacguccucccagcccugcacaaggaccggccccguuuugacuuugccaauuuggcgguggcugccacgcaagaggauccgccuaagaugg

SEQ ID NO: 19360 - RNA, 60 nt, Human
gugcacgagaucacccgcuccaccaucacggagauggcggcggcgcagggccucguggac

SEQ ID NO: 19361 - RNA, 82 nt, Human; identical to SEQ ID NO: 8738

SEQ ID NO: 19362 - RNA, 69 nt, Human
ucuucacagagugccuuuaugaccaguuuggagaauuacgaugguaaggggaagaggcagauaugaaga

SEQ ID NO: 19363 - RNA, 60 nt, Human
ccagccucuccuccagccugagaagcaugccgucgcuggacgggguggacgggaagcugg

SEQ ID NO: 19364 - RNA, 61 nt, Human
uugaucucaucgguaagcgggugccggaucaccacugacauccucuugcggacggaaucga

SEQ ID NO: 19365 - RNA, 72 nt, Human
caguaucugaacacagucauuccuuacgagaagaaagccucuccucccucaguggaagaccugcagaugcug

SEQ ID NO: 19366 - RNA, 70 nt, Human
cucugacacugagguaauugaggagauugaggaaaugaugcagaacuccccagacccugaggaagaagag

SEQ ID NO: 19367 - RNA, 69 nt, Human
gccggaccccagagccugaggugggcagugugccaggucccuugcggccuccucaagcccuguccaggc

SEQ ID NO: 19368 - RNA, 71 nt, Human
gcucagaacuuguucacgaacgugacagagcuuacguuaagcagaggucaccgggcaacuaaguuccaugc

SEQ ID NO: 19369 - RNA, 99 nt, Human
gagacggggaauccucagggccuauuaccaggagaggaaucgagccaugguccuccuuacuccucuucagcuggugaauccuccggaucuccuuuccuc

SEQ ID NO: 19370 - RNA, 64 nt, Human
ggaggccggagcggagccgcgucugacugaggcgggcagcaagcggccccucgcuccucccucc

SEQ ID NO: 19371 - RNA, 62 nt, Human; identical to SEQ ID NO: 5971

SEQ ID NO: 19372 - RNA, 90 nt, Human
cacaaguggcuccauuacgacagggauuagagugacauucaucaaaaucaaguucacacuggucuccgcuguauccuggcaccacaggug

SEQ ID NO: 19373 - RNA, 71 nt, Human
uugugccagccauagucacaugucucgguaucuugcucacaaagugcaccaacauaacuuggaaggcagag

SEQ ID NO: 19374 - RNA, 90 nt, Human
ccagaauguuuugagcuacuucgggauacuugguaaagggggcuauggaaagguucuccaaguacgagaaguaacaggagcaaauacugg

SEQ ID NO: 19375 - RNA, 83 nt, Human
gcggaggcucguaacugucgguucuuuccccuucggucuuaggaugaggugggcgcaccgggcauagugguuggaguuucugu

SEQ ID NO: 19376 - RNA, 87 nt, Human
gguuuagguuaugcugauguugagaaccguguaccauguaaaccagagacaguuaugcgaauugcuagcaucagcaaaagucucacc

SEQ ID NO: 19377 - RNA, 66 nt, Human
uugugggaagcagggaaacuggaucuugauauuccaguacaacauuauguucccgaauucccagaa

SEQ ID NO: 19378 - RNA, 73 nt, Human; identical to SEQ ID NO: 7892

SEQ ID NO: 19379 - RNA, 100 nt, Human
gcagucuccucccuuguggcccagacccagcugggucccuuccuccuaggcagcugagggaaggacugcuggguuggccacgggccugggaaggggaagc

SEQ ID NO: 19380 - RNA, 81 nt, Human
ccauguguucgaguguaauuuagagagcagcguggagaguaucaucucaccgaaggugaaaauggcauuacggacaucagg

SEQ ID NO: 19381 - RNA, 65 nt, Human
gccgcggcguaacggcagccaucuuguuuguuugagugaaucggaaaggaggcgccggcuguggc

SEQ ID NO: 19382 - RNA, 63 nt, Human
ggaaagccaaauaccuucuugcagacuguaaugaagcauucauuaagauaaagauggcuuuuc

SEQ ID NO: 19383 - RNA, 109 nt, Human; identical to SEQ ID NO: 831

SEQ ID NO: 19384 - RNA, 75 nt, Human; identical to SEQ ID NO: 74

SEQ ID NO: 19385 - RNA, 100 nt, Human
ggccaaaagagauccacuguugccccaguugguggaaaagacuuuacagaugcaacaugccaugaaguaccacccuuuggggguggucggcuuacgggcc

SEQ ID NO: 19386 - RNA, 87 nt, Human; identical to SEQ ID NO: 76

SEQ ID NO: 19387 - RNA, 71 nt, Human; identical to SEQ ID NO: 77

SEQ ID NO: 19388 - RNA, 80 nt, Human
gcccuggccucacccccuuaccaauggagggcagggggaaagaccaccuggccauuaaggggaaagggggccuccagggc

SEQ ID NO: 19389 - RNA, 130 nt, Human
ucaagaaguucaccuucggcuuagacugggugcccaagaaacuggauguguccaucgagaugccagaggagcucgacaucucccaguugaggggcacagggcugcagcccggagaggaggagcugccaga

SEQ ID NO: 19390 - RNA, 71 nt, Human; identical to SEQ ID NO: 6999

SEQ ID NO: 19391 - RNA, 60 nt, Human; identical to SEQ ID NO: 894

SEQ ID NO: 19392 - RNA, 62 nt, Human
gggggggggaccccccgggcgccccuggguuuaccaucccugggaggcgggggccccccucc

SEQ ID NO: 19393 - RNA, 62 nt, Human
acugcuggggagucccugccacacucagucccccaccacacugaaucuccccuccucacagu

SEQ ID NO: 19394 - RNA, 87 nt, Human; identical to SEQ ID NO: 76

SEQ ID NO: 19395 - RNA, 73 nt, Human; identical to SEQ ID NO: 75

SEQ ID NO: 19396 - RNA, 71 nt, Human; identical to SEQ ID NO: 77

SEQ ID NO: 19397 - RNA, 89 nt, Human
ucucuaacaaggugcagagcuuagcugauuggugaacagugauugguuuccgcuuuguucacaguggcuaaguucugcaccugaagaga

SEQ ID NO: 19398 - RNA, 88 nt, Human
cccccguuugagggaguccaacuugccggguuguuaaaagaaccuccaggccuuuaagcauucggcuggguuggcccuuaaagggggg

SEQ ID NO: 19399 - RNA, 60 nt, Human
cgcccgacuggccccaucagcccaacaagaccuucgcuuucaucuccaaccagccgggcg

SEQ ID NO: 19400 - RNA, 65 nt, Human
gccgcccgccauccucuggcucucaccccgaaagcaccuggucucagccaagagcaaugggcggc

SEQ ID NO: 19401 - RNA, 70 nt, Human
guaccugugcaucgcggccaacgcgggcggcaacgacuccaugcccgcccaccugcaugugcgcagcuac

SEQ ID NO: 19402 - RNA, 62 nt, Human; identical to SEQ ID NO: 2890

SEQ ID NO: 19403 - RNA, 74 nt, Human; identical to SEQ ID NO: 9607

SEQ ID NO: 19404 - RNA, 72 nt, Human
ccccuggauuuggaaaaaaaaaagcaggguccccccccgggggaauuguuguaaauaaaaacccgccggggg

SEQ ID NO: 19405 - RNA, 100 nt, Human
agguguucucagcauucaucacaguguugcaaaugaaggagaugaaaguaagugacaucccccaguacucccagcuggugcugaaugucugugagacccu

SEQ ID NO: 19406 - RNA, 74 nt, Human
aguauucuuucuagagaguuagguucuguggaugaaauccuuggacccuugacggagauccuggagggagugcu

SEQ ID NO: 19407 - RNA, 86 nt, Human
ggagcugugugagguagacgaggauggugacuccuggcugcagguaacccgcaggcuccccauccuacacaccuccucaccacucu

SEQ ID NO: 19408 - RNA, 84 nt, Human
aguccaccgacucacugcccgcgcacgcgaccgagucuucgcuauugcugaccuacgucugugcugcgguguguccagggggcu

SEQ ID NO: 19409 - RNA, 105 nt, Human
agcaucugcaguacaucgugaccugguauggacucucugcagcuacauccuaccugugguuuaagaaauuccuacgugggacaccuggugugugacagaucagcu

SEQ ID NO: 19410 - RNA, 63 nt, Human
cacugcaccgaccugggagucaccauccugguaaauagaggguucguucccaggaagaaagug

SEQ ID NO: 19411 - RNA, 65 nt, Human
ggcauuaucgagaccuggaagcuauggccagaaucacaggcgcagagcccaucuucauugaugcc

SEQ ID NO: 19412 - RNA, 62 nt, Human
auccacacugcccaaauuuccacgcaccucaaggcgcccagagaucacgcacgcgguacgau

SEQ ID NO: 19413 - RNA, 67 nt, Human
cggggggagccgagauuagagcaucagccugagagaagcggugcuucugguucuccgcuccgccucg

SEQ ID NO: 19414 - RNA, 61 nt, Human
ugccauucgguguucccaacaguuaaucuccuggaagagguugacaggggaggccuuggca

SEQ ID NO: 19415 - RNA, 86 nt, Human
gcggcagccgccggggcgcaaugcgagcggcuggcguaggcuugguggacugucacugccaccucuccgccccggacuuugaccgc

SEQ ID NO: 19416 - RNA, 64 nt, Human
gggcccggcccucccuggaucuccucccuccucccagggguucagauguggugggguagggccc

SEQ ID NO: 19417 - RNA, 115 nt, Human
uagggacccugcagcucuggaguggguggagggagggagcuacgggcaggaggaagaauuuuguagagcugccagcgcucucccagguucacccacccaggcuucaccagcccug

SEQ ID NO: 19418 - RNA, 74 nt, Human
cgccucagccgccucgcacauuuagucuugccgggaguggugugauucccgaccaagauggcggccguggggcg

SEQ ID NO: 19419 - RNA, 94 nt, Human
ggacugcuuggauucuuuacagaaaugggcagugucguuagagaaccuguugaccaacugaaaauuccuccugaagaaaugaaacaaauggacc

SEQ ID NO: 19420 - RNA, 74 nt, Human
ccaccgcugguguaguauucguggaccauguacugaaucauauacacgcacgaugguacaauccgagugguugg

SEQ ID NO: 19421 - RNA, 78 nt, Human
caaggggggugcaugcuucaaaggaaugcugggggugaaaauccuaaacauggguagaauggcagcaugcaggacuug

SEQ ID NO: 19422 - RNA, 72 nt, Human
gcggggguuaggcgcugagacggauuuggcggugagaucgcuguggccaggcugcagcugaaugggccucgu

SEQ ID NO: 19423 - RNA, 86 nt, Human
cgucaugucuaagucagagucuccuaaagagcccgaacagcugaggaagcucuucauuggaggguugagcuuugaaacaacugaug

SEQ ID NO: 19424 - RNA, 65 nt, Human
ucccuucugcuuagagaaagaaauggccuuuagcugguuucauguuuguguuuugacuggaggga

SEQ ID NO: 19425 - RNA, 79 nt, Human; identical to SEQ ID NO: 1810

SEQ ID NO: 19426 - RNA, 79 nt, Human; identical to SEQ ID NO: 1810

SEQ ID NO: 19427 - RNA, 64 nt, Human
guucuuauacaauaauuugggcguacaucaugcagcccuucuugaugauuugcucccagagaac

SEQ ID NO: 19428 - RNA, 66 nt, Human; identical to SEQ ID NO: 5267

SEQ ID NO: 19429 - RNA, 74 nt, Human
cugggugcugcaugggucccuccagcugccaccaccugcaccaggcagucccgaggggucacaggcuagcccag

SEQ ID NO: 19430 - RNA, 115 nt, Human
gcuuugggcccucggcgacuuucccaggcagugcaggcuagcccaguccaggagugugcagccuggcuugggucgagcucugucacaucuggauaagcaacugggggcugagagu

SEQ ID NO: 19431 - RNA, 89 nt, Human
ugaggucacggccgucuuugcugcugaugcuauggcccgccuguccgggacggugggcguggcggcagugacagcaggcccuggccuca

SEQ ID NO: 19432 - RNA, 86 nt, Human
gacucaaugugcaacugacaucugcuagugaugaucugguaauauacaaccuguccaguagccaaacaguugguuuuuauugaguu

SEQ ID NO: 19433 - RNA, 69 nt, Human
gggggguaaacaaauuucuuuccuggucaauagaaaaaaaaaaaggaaacggguuuuugggugcuuccc

SEQ ID NO: 19434 - RNA, 79 nt, Human
ugccccuuccaugaccagccacaucugaaaaggaaagcauucugcucuuuccagaucuacgcugugccuuggcagggca

SEQ ID NO: 19435 - RNA, 60 nt, Human
aaaaauaaaaauaaaaaguugaauugcagaaaagcuaagagguuuuuaguuuuuguuuuu

SEQ ID NO: 19436 - RNA, 75 nt, Human
gccaugagcacaggcggguccacacacaggcggcgaaccuccacucgcuggcagacggcucgcuuuucguauggc

SEQ ID NO: 19437 - RNA, 103 nt, Human
cugagauucuauggucuauuccuauucuagauuggucucucagauuccaaauuccacuucugaggcucuaagcccagccuaggaucugacacuggagucucag

SEQ ID NO: 19438 - RNA, 90 nt, Human
cagggauuuuuaaguccguuuagagagcaaaccauauugugccucuucaucuugacccaggcucuuauagauagguccuaaacauugcug

SEQ ID NO: 19439 - RNA, 86 nt, Human
uaccuuuuuccugucagaaagguuuuccucugugcuacccuuaacuuagggaugaacagacuauaacuaggaaaggaggaaaggua

SEQ ID NO: 19440 - RNA, 75 nt, Human
uucaguuaaaaaaaagaaaaaagaaaaugggcaagagaaagguuuuucaaauuucuuuuuuuuuauuuaauugag

SEQ ID NO: 19441 - RNA, 62 nt, Human
gaggacaacaagugaccagggcugcccuccacccucacccuccacccuuugcugcugaccuc

SEQ ID NO: 19442 - RNA, 94 nt, Human
guaggcuugaugacagagccuggacaagaacagcgaccaggagaucgaccucaaggaguacucgguguuccugaccaugcugugcauggccuac

SEQ ID NO: 19443 - RNA, 71 nt, Human; identical to SEQ ID NO: 8959

SEQ ID NO: 19444 - RNA, 90 nt, Human; identical to SEQ ID NO: 1501

SEQ ID NO: 19445 - RNA, 82 nt, Human
uuguggagagcgagggaaggaguuaaugaaacuguauugcacaaugcucugaucaauccuucuuuuucucuuuugcccacaa

SEQ ID NO: 19446 - RNA, 80 nt, Human; identical to SEQ ID NO: 367

SEQ ID NO: 19447 - RNA, 88 nt, Human
gcuggguacagcccugccagcccaucccugagcagggcacccccagauggggcagagcaggguauggcugggcagggcaaggcugggc

SEQ ID NO: 19448 - RNA, 63 nt, Human
aagucuagaagaugaaauugugggaagacuucuaaaaauuuuguuuguuaucuuuguugacuu

SEQ ID NO: 19449 - RNA, 62 nt, Human
uucuggauaugacugguaaaaacuggauauuaauuucuacuacuacucccaaaagucuagaa

SEQ ID NO: 19450 - RNA, 73 nt, Human
auugugcgaaacgcuucgccagacaugcagggccuaccuuguuaguacgggucuagaagccaguugcaucaau

SEQ ID NO: 19451 - RNA, 75 nt, Human
gauguggguuugugcauccuggacugaagagugaguugcauccuucgacucagauagauucauagaauucacguc

SEQ ID NO: 19452 - RNA, 87 nt, Human
agggcugcuaaggaagcaaaaaaggcuaagcaagcaucuaaaaagacugcaauggcugcugcuaaggcaccuacaaaggcagcaccu

SEQ ID NO: 19453 - RNA, 65 nt, Human
gacacguaggcgcuacgcaggaccgacgggaagguuuuccaguuucuuaaugcgaaaugcgaguc

SEQ ID NO: 19454 - RNA, 68 nt, Human
cuuucggaugugaaucauaaaucuaccacuguggcuagaacagccuauauguacauggauucugaaag

SEQ ID NO: 19455 - RNA, 70 nt, Human
ggaaaaggaugacaaugugcuuuuauuuuuuuucuuguuaaaaaaaaacaacauugguaaaucguuuucc

SEQ ID NO: 19456 - RNA, 65 nt, Human
cucucccuugcaauuguucgccccucugggccaaaccaaagggacgcugcucuguacagguagag

SEQ ID NO: 19457 - RNA, 116 nt, Human
gccauaaguggaauucuucauugagucguugacuucucgacggaaugcugacagguucugggugaaccugucucuguuuuucguaagaagauuucgcucgaugccuuccaucaggu

SEQ ID NO: 19458 - RNA, 68 nt, Human
cagggccucucugcagcugccucaucuccauuucuuucuuucuggcuuggggcugcacuuuggcucug

SEQ ID NO: 19459 - RNA, 76 nt, Human
gagagcaggagcaaagccuuucugaaggguugccuggcacuguggguuucaggcagggccucucugcagcugccuc

SEQ ID NO: 19460 - RNA, 66 nt, Human
guugguuccgcaggacccacggucacaguuacugucucugucauacccaggugcuguggcacuaac

SEQ ID NO: 19461 - RNA, 63 nt, Human
aucaagucagagagacaaaauauuuuucagaggguaacuucagaacaaucucucuuccuuggu

SEQ ID NO: 19462 - RNA, 60 nt, Human
gcagucaacacugagacagguucccccagagaaaaaccuucugcuucagugggccccugc

SEQ ID NO: 19463 - RNA, 74 nt, Human
gcucaccaacuauaaguaggaauacuggcugaucuugguaggacucagcggguauccaguguaaauuguugagc

SEQ ID NO: 19464 - RNA, 67 nt, Human
auuugguauucaguuggauuuggauauauuaggauuaccucucagucacagauucacuaguucagau

SEQ ID NO: 19465 - RNA, 105 nt, Human
gucgaguuauaccauuuuuccagaugcguauuaauacugcuuaagaaguuauauaggaauuucugcgacaagucauaacauuuacggggaugguaagaacucugc

SEQ ID NO: 19466 - RNA, 61 nt, Human
ucucagaaaacaguuaagaagucaaggcauuugaucuuuccccuuuaauuugaauuugaga

SEQ ID NO: 19467 - RNA, 72 nt, Human
gcuuaucucuuuugguuccuuguuggaaaguugauuuugaaggcauccagcuugggaacccgggacaauagc

SEQ ID NO: 19468 - RNA, 79 nt, Human
gacuuuauggucccucagaaucacagucacuggaugugucaacgcaggugacacagauacacucaggacucaaaaaauc

SEQ ID NO: 19469 - RNA, 75 nt, Human; identical to SEQ ID NO: 1049

SEQ ID NO: 19470 - RNA, 71 nt, Human; identical to SEQ ID NO: 1050

SEQ ID NO: 19471 - RNA, 95 nt, Human
agaauauucuacaccuuggaaaagaaaaucagcaguaacauucucacugaauauuguaaauuacauuuuucuucauaaaagguacauacuauucu

SEQ ID NO: 19472 - RNA, 62 nt, Human
auaaaagguacauacuauucugcacuuuuccaccaaaagcagugguguguuaugcuuguuau

SEQ ID NO: 19473 - RNA, 83 nt, Human
gaggccagcgccccguggccaggcagcagcgugugcaugucgccggcugugccacgcguggcugcggaagcguggauggccuc

SEQ ID NO: 19474 - RNA, 65 nt, Human
gcaccgggugcuccugcucgaggccacugugacguucaugcaggcccugugggagcccacggugu

SEQ ID NO: 19475 - RNA, 70 nt, Human
cugagccuguggagagauucuggucacuuggagcagcuacacugcacgugccucuuuacucagcgcucag

SEQ ID NO: 19476 - RNA, 84 nt, Human
uagccacucugcucuacgugguccaugcgguguucucuuuaaucagauggaagucuucauaaagccgcaguagaacuugagcug

SEQ ID NO: 19477 - RNA, 65 nt, Human
gcggggggagcagcagccaaguccgcgggaaaccgagcugcucgggccugcccugcaccccccgc

SEQ ID NO: 19478 - RNA, 65 nt, Human
uuuuuuuuuuugagggucgcaauuuuauuaagaaaacaaaaauucaaccuauacaaaaaggaaaa

SEQ ID NO: 19479 - RNA, 78 nt, Human
uccgcccgcggcugccggugcgagcggggcccggcuccccuccucccccgcccgccgccgccgcugugauugggugga

SEQ ID NO: 19480 - RNA, 60 nt, Human
ggguggaucacaaggucaggaguucaagaccagccuggccaacauagugaaaccccaccu

SEQ ID NO: 19481 - RNA, 76 nt, Human
ucgcuugaacccaggaggcagagguuguaguaagccgagaucacgccacugcacuccagccugggcaacagaguga

SEQ ID NO: 19482 - RNA, 66 nt, Human
guuugaucacugaauuuggcaguuauuauuaccuagguacccccgcuguuacacagguguuuagau

SEQ ID NO: 19483 - RNA, 67 nt, Human; identical to SEQ ID NO: 10237

SEQ ID NO: 19484 - RNA, 88 nt, Human
ggcacccucggugcugccuccucugaggcuggcaguuccuuccuggauaugcaaggucaagagcggagggggaagcagagagagugcc

SEQ ID NO: 19485 - RNA, 87 nt, Human
gcggaguccaucccggauggccugcagggugugucgcuucucgcugagccaguggccgcccuccaggcauccuggugggaccuccgc

SEQ ID NO: 19486 - RNA, 70 nt, Human
uggugcuuggggcagggucugaugggggcuacaggcaggugcuccccgguccccaccccuacagcugccg

SEQ ID NO: 19487 - RNA, 90 nt, Human
auguauaaauguaaggaguauauauuuugaauacuaugaucaccccagaaugaucauucaauaagaauguaucuaauaucauuuguacau

SEQ ID NO: 19488 - RNA, 91 nt, Human
gagggaaaguaggucagauuuuccuaucacaucuuuuuacuuuuaaaguaaaaauggauacacaugaaauccgacucuucuuaaauuccuc

SEQ ID NO: 19489 - RNA, 64 nt, Human
gguugcuucaaaaaagagugaauggcauuuucugcuuauuaugucaaaagcugaagcucuuacc

SEQ ID NO: 19490 - RNA, 70 nt, Human
guauauaaaacauacccacaugagauucuuacuuuaaaaugcagauuuuaagggguaugauguugaauac

SEQ ID NO: 19491 - RNA, 65 nt, Human
guguguagugguugugcagagccucaugcaucacggagcaugagaagacauuccccuccugccac

SEQ ID NO: 19492 - RNA, 66 nt, Human
accaaugccagaacuuguaucaacuugaggguaacaagcgaauaacauguagaaauggacaauggu

SEQ ID NO: 19493 - RNA, 72 nt, Human; identical to SEQ ID NO: 225

SEQ ID NO: 19494 - RNA, 62 nt, Human; identical to SEQ ID NO: 2027

SEQ ID NO: 19495 - RNA, 118 nt, Human
agcaauuaugucuuuauugguuauauaaauuuacagucuuugagaagcuguguaaauauugccaguuaauauaguuucacuuuuuauuugcauaacaauaauaacaauauuaaaagcu

SEQ ID NO: 19496 - RNA, 85 nt, Human
gacuacauguucauuuuaaagguuaaauuaugaucaguacaaacauacguaacucaucuaauuucauuuuaaaugauauuugguu

SEQ ID NO: 19497 - RNA, 87 nt, Human
uuggaccuaaguguaacuccuucaugcacuaaacuggacagagccaugcugucuagucuugaaguccucauuuacacagagguucag

SEQ ID NO: 19498 - RNA, 86 nt, Human
gagaauugcuugaacccgggagguggaguuugcagugagccaagauugcgccacugcacuccagccugggcgacagagcgagacuc

SEQ ID NO: 19499 - RNA, 61 nt, Human
gugguguggcacugggagcugcuccuaaggaagcagggagcaaaucccaccuuuaccccac

SEQ ID NO: 19500 - RNA, 64 nt, Human
aggcagggcauagcgacagugugggaccugcccccagcuucugccacgcuuuaugcccuugccu

SEQ ID NO: 19501 - RNA, 62 nt, Human
gacagugguggggaggaggacgagaaggagucauugucggcguccucguccucauccgcguc

SEQ ID NO: 19502 - RNA, 62 nt, Human; identical to SEQ ID NO: 2890

SEQ ID NO: 19503 - RNA, 62 nt, Human
gguggcaauucggacgaggaggcguuggagucacuuccgcgucaccagcuccugugccugcc

SEQ ID NO: 19504 - RNA, 92 nt, Human
ggcacucgacacaacauuugcgcucaacugucuuguccaccauugguguugcugggcuugugaucuacguugcagguguaggucugggugcc

SEQ ID NO: 19505 - RNA, 60 nt, Human
uggucagagcgccugaguuccacgacaccgucaccgguucggggaaguaguccuugacca

SEQ ID NO: 19506 - RNA, 69 nt, Human
aacgggagaugcaguuuauuuacaccagcagccaugggggcagagggaauacacagcguuuacaaaguu

SEQ ID NO: 19507 - RNA, 60 nt, Human; identical to SEQ ID NO: 2924

SEQ ID NO: 19508 - RNA, 61 nt, Human; identical to SEQ ID NO: 2925

SEQ ID NO: 19509 - RNA, 67 nt, Human
gugugggcacaagaggcagcacucaggacaaucuccagcauggccuggucuccucuccuccucacuc

SEQ ID NO: 19510 - RNA, 69 nt, Human
uccuguacugggaccaacuacaacaucgggacaccuucugauguauauugguaccagcagauuccagga

SEQ ID NO: 19511 - RNA, 63 nt, Human; identical to SEQ ID NO: 6735

SEQ ID NO: 19512 - RNA, 114 nt, Human
cacggcugggcuggucaccaucacgucgggcauccaggacaucggcaccuaccacaccaucuucuugcucaccauccuggcagcccuggcccugcuggugcuuauccugcugug

SEQ ID NO: 19513 - RNA, 63 nt, Human
ccuggggcccacaaggggggggguccaagagcuaaagacccccccaacuauacaggcuuuggg

SEQ ID NO: 19514 - RNA, 68 nt, Human
cuggaacccgccccgucgggggaccccgaggcuccgccuccaggcccccuccacucggccuucuccag

SEQ ID NO: 19515 - RNA, 79 nt, Human
gcccggccgccgagccuuucgggugccccccgggggccagacccccggggcuucaagggcgccucccucggccgagggc

SEQ ID NO: 19516 - RNA, 66 nt, Human
aggcuggacccaucccuguggcuccaaucggaacacucaaaccccagccucagccagucccagccu

SEQ ID NO: 19517 - RNA, 82 nt, Human
agugaauaagaauggauuauuuauguuacagaaaacagcaugggguuucuguaaagagaaaaauuauccugguauauuuacu

SEQ ID NO: 19518 - RNA, 106 nt, Human
gguuaugaggcauuuuuugaaauucauauauccuuacuauaauagugaaucaucaaguguugaauguaagugcaguagaaauuaugaaaucucuugccacagaacc

SEQ ID NO: 19519 - RNA, 117 nt, Human
cgggcuuguaggugucggcuugcuggcccagcaaggccugauaagcaugaagcucuuaucuugguggcuguggucggguguugcuggugcccccagcugaagccaacaagaguucug

SEQ ID NO: 19520 - RNA, 73 nt, Human
accucuagcucgccguuggccgccuccaggacgcgcaccuuguccagguaggaggccaggcggucguugaggu

SEQ ID NO: 19521 - RNA, 91 nt, Human
gcggucaggacgccgccguagccgccggcguagccccccgaggaggacgaggacacaaagcgggcggaggacacggauacgccgcggccgc

SEQ ID NO: 19522 - RNA, 72 nt, Human
gacuccugccccagccccauccucagcuuccaccuaagaaguagugcaggaaaguggugauaagcagauguc

SEQ ID NO: 19523 - RNA, 106 nt, Human
aguugaggguauuaagcgcauacugugugacuccaccgggaaaggacucugggacaccgcaccggguuuccgcgggacuucacaccaugugccuuuugccuuugcu

SEQ ID NO: 19524 - RNA, 62 nt, Human
gcucuguaugcuuucacuguaaugaaucuuacucauggguaagauucauucauaugcugagu

SEQ ID NO: 19525 - RNA, 61 nt, Human; identical to SEQ ID NO: 347

SEQ ID NO: 19526 - RNA, 74 nt, Human; identical to SEQ ID NO: 365

SEQ ID NO: 19527 - RNA, 102 nt, Human; identical to SEQ ID NO: 2172

SEQ ID NO: 19528 - RNA, 77 nt, Human; identical to SEQ ID NO: 3082

SEQ ID NO: 19529 - RNA, 80 nt, Human; identical to SEQ ID NO: 367

SEQ ID NO: 19530 - RNA, 97 nt, Human
aggcaggagaaugguguuaacccaggaggcggagcuugcagugagccgagaucgcgccacugcacuccagccugggagacacagccagacuccgucu

SEQ ID NO: 19531 - RNA, 66 nt, Human
gagacggguggaucacaaggucaggagaucgagacgauccuggcuaacacggugaaacuccgucuc

SEQ ID NO: 19532 - RNA, 79 nt, Human
gucgcugccgcaugugugacaagcugcuuaaugccaaccagccaugagcuuccagauuuaucagacauauugcaccgac

SEQ ID NO: 19533 - RNA, 72 nt, Human; identical to SEQ ID NO: 3662

SEQ ID NO: 19534 - RNA, 102 nt, Human; identical to SEQ ID NO: 2172

SEQ ID NO: 19535 - RNA, 90 nt, Human; identical to SEQ ID NO: 1501

SEQ ID NO: 19536 - RNA, 77 nt, Human; identical to SEQ ID NO: 2332

SEQ ID NO: 19537 - RNA, 84 nt, Human; identical to SEQ ID NO: 286

SEQ ID NO: 19538 - RNA, 89 nt, Human; identical to SEQ ID NO: 288

SEQ ID NO: 19539 - RNA, 91 nt, Human; identical to SEQ ID NO: 15954

SEQ ID NO: 19540 - RNA, 89 nt, Human; identical to SEQ ID NO: 8537

SEQ ID NO: 19541 - RNA, 126 nt, Human
cacauucccauucacuugauuuucuacauguaauuaccuucuuuuguuuaucauuagauuugauggggccaaaguugagauagaauagagggugaugacgguaagagcaagugucccaugaaugug

SEQ ID NO: 19542 - RNA, 96 nt, Human
ccucauaacuggaguagaguuccugguugcuuuucauaagagggagaguuacuuucuuuguaucucugcaagcagagauuucucuuugguuugagg

SEQ ID NO: 19543 - RNA, 64 nt, Human; identical to SEQ ID NO: 287

SEQ ID NO: 19544 - RNA, 79 nt, Human
cucugcaugacuugggcacugacaugguuccugccaucucccuggcuuaugagcaggcugagagugacaucaugaagag

SEQ ID NO: 19545 - RNA, 67 nt, Human
cagaaugucagagcugagucugguguuacugacuaaggaacaaccugacucaggcucuagauggcug

SEQ ID NO: 19546 - RNA, 72 nt, Human
ggcgucugguacucagaugucacgaagcacgccauuggacuaagauggugguuucgcauagugccaagcacc

SEQ ID NO: 19547 - RNA, 78 nt, Human
gugauucagcucugccaggccauuguuucacuuaccugccuccugaaacucugcaagacuugguagaaaaugaaucau

SEQ ID NO: 19548 - RNA, 65 nt, Human
uugacuuguuguuucuucaaaacuuugacugugaccuugaaacugugguucugaaaacaagugaa

SEQ ID NO: 19549 - RNA, 72 nt, Human
gauggaauaguucagaaggaaugguaccaguuccuccuuguaccucugguagaauucggcugugaauccauc

SEQ ID NO: 19550 - RNA, 117 nt, Human
gugucuuuauaguagaaugauuuauauuccuuuggguauauauccaggaaugguauugcugagucaaaugguauuucugguucuagauccuuggggaaucaccauacugucuuccac

SEQ ID NO: 19551 - RNA, 74 nt, Human
agauaggauaguacagaaggaaugguaccaguuccuccuugcaccucugguagaauucggcugugaauccaucu

SEQ ID NO: 19552 - RNA, 68 nt, Human
agucuuugcuacugugaauagugccgcaauaaacauacgugugcaugugucuuuauaguagaaugauu

SEQ ID NO: 19553 - RNA, 66 nt, Human
ccuuuggguauauauccaggaaugguauugcugagucaaaugguauuucugguucuagauccuugg

SEQ ID NO: 19554 - RNA, 70 nt, Human
aagucuuugcuauugugaauagugccgcaauaaacauacgugugcaugugucuuuauaguagaaugauuu

SEQ ID NO: 19555 - RNA, 66 nt, Human; identical to SEQ ID NO: 19553

SEQ ID NO: 19556 - RNA, 67 nt, Human
aaccccagugacagugcagaaaaagaaggguuucauauguggagugugaugcaugucaaugggaguu

SEQ ID NO: 19557 - RNA, 83 nt, Human
ggagagaggguguagagucaugccaguucuuaggugcuccugacaaggagaucugcagcacucugcucacauuccuguuuucc

SEQ ID NO: 19558 - RNA, 81 nt, Human
gcuggaaugccgacauguggccuuuccuuguagaugcuugauuuucucacaacuuggaggcauccucguggcauggcuggc

SEQ ID NO: 19559 - RNA, 70 nt, Human
ggggaggaggugggucgcagaaugggcugacucggagcgaguuuuuaauuuuggcuuuaccugcuucucc

SEQ ID NO: 19560 - RNA, 75 nt, Human
agguaccucaccuaaguggaaucauacaguauuugucuuuuugugacuagcuuauuucacuuagcauuauguccu

SEQ ID NO: 19561 - RNA, 64 nt, Human
uauuuaauggucagcuuuucauguuuaucugccuccuccuccugcagguacugucuaucuagua

SEQ ID NO: 19562 - RNA, 118 nt, Human
uacaaaaacagacaguccacgguggcugcaggcacaugcaggcgggacugggucagacacuccagggcugcacauguuccagcuggccugaguccgacacgucauagcuggcuuugua

SEQ ID NO: 19563 - RNA, 67 nt, Human
uuggccaggauuuucaugaggggccguagcuugagccaccacuguucuuugggaauccugugcucaa

SEQ ID NO: 19564 - RNA, 79 nt, Human
gcaggccggccagcuggcccggcgccucugggaggccucccguaucccccugcucuaggccaagguggccgcagucugc

SEQ ID NO: 19565 - RNA, 64 nt, Human
uacugagcaaggccccagauccuucucucuggaggaagagggaagcccagggguccuguuugua

SEQ ID NO: 19566 - RNA, 67 nt, Human; identical to SEQ ID NO: 12728

SEQ ID NO: 19567 - RNA, 60 nt, Human; identical to SEQ ID NO: 11068

SEQ ID NO: 19568 - RNA, 90 nt, Human; identical to SEQ ID NO: 11069

SEQ ID NO: 19569 - RNA, 68 nt, Human
aggcaaagaaagacuuaagggagcagagggcugucuguugcuaccauuuuuuucaaauucuacugccu

SEQ ID NO: 19570 - RNA, 86 nt, Human
ucuucacccuaaaauauuuugcuauauaucucauaagagcaaagauacugucuuauguagguacaaugcauuuaucaaauugagga

SEQ ID NO: 19571 - RNA, 90 nt, Human
uuuuuccugcuucaggguccaauucaagauuacucuugacauuuauugucaugauauugucuguuuggguaauccuuuauuuugggaaga

SEQ ID NO: 19572 - RNA, 66 nt, Human
aacuggucuuuaaugggggucaccagggauuuguucucuugcuuuaauaccugcuucuggccaguu

SEQ ID NO: 19573 - RNA, 70 nt, Human
uggccuguauguugucugccguagagguauuuguaugucucagaacgguuauacucaaaaacauggguca

SEQ ID NO: 19574 - RNA, 79 nt, Human; identical to SEQ ID NO: 728

SEQ ID NO: 19575 - RNA, 73 nt, Human; identical to SEQ ID NO: 729

SEQ ID NO: 19576 - RNA, 62 nt, Human; identical to SEQ ID NO: 8445

SEQ ID NO: 19577 - RNA, 68 nt, Human
cuggauuugauuucuuuuuaugaaaguuucauaugaauguaacuugauuuuuuacuauuauaaucuag

SEQ ID NO: 19578 - RNA, 60 nt, Human
gggaugugcuguuguugaauucaagauggaagagagcaugaaaaaagcugcggaaguccu

SEQ ID NO: 19579 - RNA, 92 nt, Human
uaauuuaaauuaguggcauauaaagucaucaucuugcuugaacaaacaucuuauuacauugagcaugucuuuuaucccaugaaaugaaauua

SEQ ID NO: 19580 - RNA, 80 nt, Human
gauauauaaaucggggaaaauagaucauuuauugaagacauacuguacagaugaaaaugaucuguugacuccuuuguauc

SEQ ID NO: 19581 - RNA, 69 nt, Human
gcgauagguaaauaacucaauggacaacaauugauaaauuucaacuaugucaagguccuugccaaccgc

SEQ ID NO: 19582 - RNA, 61 nt, Human; identical to SEQ ID NO: 6766

SEQ ID NO: 19583 - RNA, 77 nt, Human
gcccacugugacgaugucaccgaucuggacgucccugaagcagggggacagguguacagacauguuucuuguggcgc

SEQ ID NO: 19584 - RNA, 68 nt, Human
uuuguaaaaaaaaauuccccuuuuuuacucuuaaccuugagagugaagaagagguuuucuuugacaaa

SEQ ID NO: 19585 - RNA, 77 nt, Human; identical to SEQ ID NO: 3082

SEQ ID NO: 19586 - RNA, 68 nt, Human
caugcgcugaaugaugucacggcagucguugaacacacggcggauguucucaguguccacagcgcaug

SEQ ID NO: 19587 - RNA, 63 nt, Human
ccacugcagugcugauccucagaaacucaucucgaaugaguacuuggccccggucacgcgugg

SEQ ID NO: 19588 - RNA, 108 nt, Human
ggaacuuuuguggccuuuuuuccuuuuucuguaggccgccuuaagcuuucuaaauuuggaacaucuaagcaagcugaagggaaaaaggggguuucgcaaaaucacucc

SEQ ID NO: 19589 - RNA, 78 nt, Human
gaaaagcgagcggccggcuagcacgaggugggccugaggauuuagugcccacucgcuagaugguuuucguugcagugc

SEQ ID NO: 19590 - RNA, 70 nt, Human
gcgagucgcgcgagaggguggccgacagcggaggcaaacguugugcgcgcgcacaugagcgcgugcucgu

SEQ ID NO: 19591 - RNA, 73 nt, Human
guucuguuacacaauguuugcacaggcacagugguuucgccacgaaccgguguacacuugucaggggcagagc

SEQ ID NO: 19592 - RNA, 73 nt, Human; identical to SEQ ID NO: 1278

SEQ ID NO: 19593 - RNA, 90 nt, Human; identical to SEQ ID NO: 1280

SEQ ID NO: 19594 - RNA, 70 nt, Human; identical to SEQ ID NO: 1282

SEQ ID NO: 19595 - RNA, 80 nt, Human; identical to SEQ ID NO: 174

SEQ ID NO: 19596 - RNA, 64 nt, Human; identical to SEQ ID NO: 175

SEQ ID NO: 19597 - RNA, 87 nt, Human
ggugaggacauugcgggaggccggcugggagccuuuugugcggccccaggacgcgcaaauucugaccaguccuccaugucucucacc

SEQ ID NO: 19598 - RNA, 67 nt, Human
gugaauguuuaaauaauauuggugacuccucuccucugauuagagccacuguugguauuuugaucac

SEQ ID NO: 19599 - RNA, 91 nt, Human
uggugaagauucugcugagauuuuagacagugauguuuuagaucguccucucaacaucaugauucccaaaauuuuuacaguucuucaagca

SEQ ID NO: 19600 - RNA, 102 nt, Human
caaacugaucaccuggggaugagagcaauggguaacugaagcuuugggcucgggggacaggucagugcccacguuguuguauucccauuuugucucaguuug

SEQ ID NO: 19601 - RNA, 70 nt, Human; identical to SEQ ID NO: 8430

SEQ ID NO: 19602 - RNA, 74 nt, Human
gggcguucuguggcuuucauuaauauaguucuuaguuuuccacuggucuguaucccauucugccuuggacgccu

SEQ ID NO: 19603 - RNA, 97 nt, Human
ggcggggggucuugggggccucucagcucccgcccaugccucccugaugggugggcccaggcggcucucucugaggagaccucacccacuccucgcu

SEQ ID NO: 19604 - RNA, 76 nt, Human
guuugaccacuguaagugccugcacucuguauucuauuaauaaacuaaaauaaagggaagacgcugcuggugaaac

SEQ ID NO: 19605 - RNA, 61 nt, Human; identical to SEQ ID NO: 347

SEQ ID NO: 19606 - RNA, 83 nt, Human
uuuuuuucccccaaaaauuuugggggccccccgcacccacagggggggggcucacccaacacaaauuuugugggggggggaaa

SEQ ID NO: 19607 - RNA, 62 nt, Human
gguggugauaugaucaagguucacacaguuaacaaacuguagugaggauucaacucaucacc

SEQ ID NO: 19608 - RNA, 91 nt, Human
auugggggccauggguagggguuuggggggcggccggugggggaauccccugccuuggccuugccuccccuuccugccacgugccccuagu

SEQ ID NO: 19609 - RNA, 108 nt, Human
gcaccagugaggaagaagacugcguggauucauggggagccucacagcagccacgcagcaggcucuggguggggcugccguuaaggcacguucuuuccuuacuggugc

SEQ ID NO: 19610 - RNA, 62 nt, Human
ucaugguuuaaaugaggaacaaucaguaaaucagauucuguccucuucucugcauaccguga

SEQ ID NO: 19611 - RNA, 69 nt, Human
gggagcagaacagagauugaagacgggugggcacaggaguaagcgccaccaucgaucccggcugcugcc

SEQ ID NO: 19612 - RNA, 68 nt, Human
uggaaaugugauuuucuuaauagcugaguucaugguugcuugaagucaggccuggcuauucauuucca

SEQ ID NO: 19613 - RNA, 61 nt, Human
acuauuuccaagagcaacagcaaaucgaaaaaucuucaugcaaugguuguucuagaaaagu

SEQ ID NO: 19614 - RNA, 128 nt, Human
ccaccagaguaguaauuuuccaaucuauccuuuaaaaguucaaguguauuauugcauuuuuuaaguuguaaaagaaugauguacacauauccuuaaacauaguauauaaaagcaacuacucaaugggg

SEQ ID NO: 19615 - RNA, 88 nt, Human
gagauuacuuacguaaagaaaauuauuugucuuuugauuaauagugcaauuuaaaacuggaagucguuuucuuuaaaaaugcauucuc

SEQ ID NO: 19616 - RNA, 60 nt, Human
guucuguuucugguguuguuuugucaauuaugcugaugccacgggaccauggaacagugc

SEQ ID NO: 19617 - RNA, 69 nt, Human
uagaaaagucuauuacauugguuuaugcuuuaaauauaguuaccaccagaguaguaauuuuccaaucua

SEQ ID NO: 19618 - RNA, 69 nt, Human
caguugaauuauacuauuggcgagguuccaauaucauuuguggaucguguuuauggugaauccaaguug

SEQ ID NO: 19619 - RNA, 77 nt, Human
caugaaagaagccugguuacugauuuguauaaaauguacucuuaaaguauaaaguauaagguaagguaaauuucaug

SEQ ID NO: 19620 - RNA, 73 nt, Human
gugggagcggccgcguuuuuuuuuuuuuuuuuugcaguugcaagauuuaauagagugaaaacagagcucccau

SEQ ID NO: 19621 - RNA, 69 nt, Human; identical to SEQ ID NO: 11308

SEQ ID NO: 19622 - RNA, 87 nt, Human; identical to SEQ ID NO: 11310

SEQ ID NO: 19623 - RNA, 98 nt, Human
ccuagagucuggccucugauucacaaucuucccagccuacgguguuagaggugggguggucaagaagugaagacagaugguccuugacuuacaauagg

SEQ ID NO: 19624 - RNA, 72 nt, Human
ugaggguuuucccgcuugcagauggcuccgauggugaagccagggagggaagcacagugggcagguccuuca

SEQ ID NO: 19625 - RNA, 65 nt, Human
auucgccgagggucagguucagcguaccgcaccguacauugagcgccaugcuuagcucgucgaau

SEQ ID NO: 19626 - RNA, 87 nt, Human
gcuguuucauccucaugcucugaguagggcuguguugcaaaauccucauccacaaacauauccucgauagaaguaagggucagacgc

SEQ ID NO: 19627 - RNA, 83 nt, Human
ggccaugcuuaauacaguuuuauaacaaaauauuucaccuuuucugggcgaauuuguaguaaaaaauguuuaaccaaguagcc

SEQ ID NO: 19628 - RNA, 81 nt, Human
ucucuuuugugagcagugagugccuauuugauuaccuaccugguaaacacacaugccuuaaucugacugcacaugaggagg

SEQ ID NO: 19629 - RNA, 95 nt, Human
ggacgauucugcagaggcauuaagauaacgcuguccagauacauacucucccgugugcaucugggauccuggguccugaggccuuucaggagucc

SEQ ID NO: 19630 - RNA, 60 nt, Human
gcaguugucuauaaucuauccugccaucaggcuaaguauauuuugugauuuagaaacugc

SEQ ID NO: 19631 - RNA, 94 nt, Human
uagcuuaaauaauuaaaauaauggaauuuagugacuuguuaguuuaccuuaaaauuaaaauggaacuuuauuuuguuuaucaguauuuaggcua

SEQ ID NO: 19632 - RNA, 95 nt, Human
gguaaauuuccccaacaguguguaguuagaauuccuucagggugaugccagguucuauuuggaauuuauauacaaccugcuuggguggagaagcc

SEQ ID NO: 19633 - RNA, 82 nt, Human
agcugaggcugccucagagucuucagaggaaggccuuggccuccaaccccacaacucuaagguucugagaaggcagaaugcu

SEQ ID NO: 19634 - RNA, 72 nt, Human
ggaaguguugcugcuggggaugaaagcagcugcuccucugcacgccugcugguuuccuccuuccacgcuucc

SEQ ID NO: 19635 - RNA, 81 nt, Human
gggugaucuaccaaaacaguuugaguuuuaaauuauccagugcagugguuccuagacucacuuugugcauggaggcagccc

SEQ ID NO: 19636 - RNA, 61 nt, Human
ucacuuuggacaccugauucuauaggccaugugcaggcuguguaucugguguguccccuga

SEQ ID NO: 19637 - RNA, 61 nt, Human
gaauagucaagguuuaauuuugcuuuaaucuaauaaagccgaagugggacuuuuauuuuuc

SEQ ID NO: 19638 - RNA, 87 nt, Human
guggggugaagggucauuaagggcacgcaguagccauaaugccacacccuuugugccagccacugcgcuucuggaaaccuaccccac

SEQ ID NO: 19639 - RNA, 64 nt, Human
agaaauucccuggaccagaugcugaaagagaaaagagggguugguaguuggcuauggauuuucu

SEQ ID NO: 19640 - RNA, 73 nt, Human
ggaagaucacucugcucugauuauggaaaagucuucaagggcugcuucaaacucaaacacagagagaaacucu

SEQ ID NO: 19641 - RNA, 90 nt, Human
ggauucagcuuucaguuaaaaaagaagaagaagaaauggcaaagagaaaguuuuuucaaacuucuuucuuuuuuaauuuagauugaguuc

SEQ ID NO: 19642 - RNA, 85 nt, Human
acguaaaugccgcuucgccuucgcgcgcgaauugcaagcucugcauuaaugaaucggccaacgcgcggggagaggcgguuugcgu

SEQ ID NO: 19643 - RNA, 75 nt, Human
ccgcuuccucgcucacugacucgcugcgcucggucguucggcugcggcgagcgguaucagcucacucaaaggcgg

SEQ ID NO: 19644 - RNA, 73 nt, Human
ggguaucuggucucaauaguuuaaguaacauuacaauauaacgcuguuuugacuaauuuuagauugggugucc

SEQ ID NO: 19645 - RNA, 63 nt, Human
gguucuucucuuucuuuaaauguguugccaucaaguagcagcgucaguaggaguuauaauacc

SEQ ID NO: 19646 - RNA, 91 nt, Human
guacgcugugacacaggagagcaagaucacguauuuggaaagagugaugacccaagacugauuaugaaucuccaaguaacacaucaaguac

SEQ ID NO: 19647 - RNA, 94 nt, Human
uguugugaaagugacuauaacccaaacuuuuuuuuuuuuguuaaagaggauugggaagugguauggauuuuuggguuaucuucacuuuacggca

SEQ ID NO: 19648 - RNA, 64 nt, Human
ccuuuauuaguccaccccuuggagcuagacauccuguacuuagucacggggaugguggaagagg

SEQ ID NO: 19649 - RNA, 99 nt, Human; identical to SEQ ID NO: 1699

SEQ ID NO: 19650 - RNA, 62 nt, Human; identical to SEQ ID NO: 3062

SEQ ID NO: 19651 - RNA, 68 nt, Human; identical to SEQ ID NO: 13466

SEQ ID NO: 19652 - RNA, 65 nt, Human
gcauacauggaugaggagacuggcaaccugaaaaaggcugucauucuacagggcucuaaugaugu

SEQ ID NO: 19653 - RNA, 87 nt, Human
gacacacuuggcuuggggcagguguugagguuugauuuuuuuuuuuuuucacccuacaaacaggcccccuacacagcuggauguguu

SEQ ID NO: 19654 - RNA, 62 nt, Human
ugaaggaauaauggaaaauaauggcaauuuauuaaauuguagaaaaugugcuagcugcuuca

SEQ ID NO: 19655 - RNA, 69 nt, Human
gcuguuucucuugucuuuuuacuuagcaaaggaaaacuuuagugaaugcuacuugacaagaagaaaagu

SEQ ID NO: 19656 - RNA, 91 nt, Human
uuuuaauuugcuuauuuaauauauuuguuggccagagaucuauuuuuauaucaaugugccuugcauguauauuaaaaaaaaaaaauuggga

SEQ ID NO: 19657 - RNA, 67 nt, Human
ugagucaaagaaguaagauggugaaaauuaaauuaaguaauauuucauaaucuuaggaauucucuca

SEQ ID NO: 19658 - RNA, 82 nt, Human; identical to SEQ ID NO: 1997

SEQ ID NO: 19659 - RNA, 70 nt, Human
gccugggacgugcccauuuuuacuguaaauuaugauuccguaacugacuuguaguaagcagguuucuggc

SEQ ID NO: 19660 - RNA, 61 nt, Human
gcccuuccaguucacugacaaacauggggcaagugugcccagcugggcuggaaaaccgggc

SEQ ID NO: 19661 - RNA, 62 nt, Human
acugaaaucuuuccagaaaauccaaguccggcguaguacgcgaauuggagaaaaaguucagu

SEQ ID NO: 19662 - RNA, 97 nt, Human
guucaguucgagcgccaagaucgugaagcccaauggcgagaagccggacgaguucgaguccggcaucucccaggcucuucuggagcuggagaugaac

SEQ ID NO: 19663 - RNA, 62 nt, Human; identical to SEQ ID NO: 11219

SEQ ID NO: 19664 - RNA, 69 nt, Human; identical to SEQ ID NO: 12131

SEQ ID NO: 19665 - RNA, 61 nt, Human
cagcguaaggcgggugcgucuucuguacuccucgugucguccagagccucgucguccacug

SEQ ID NO: 19666 - RNA, 83 nt, Human
gugccaccaugaacccaggugaaauaacacaagcauguggcucaucacaaagccuguuugguggucucuucacauggacgcgc

SEQ ID NO: 19667 - RNA, 80 nt, Human
aaguuuaagaagcagccucuugucacagguugacuccuagguagugugccuagugaccaagagggcugcuaagaaagcuu

SEQ ID NO: 19668 - RNA, 62 nt, Human
acagaaaaugauguuacaaacaccagaaaagccacucucuauucuggauguaauaucucugu

SEQ ID NO: 19669 - RNA, 104 nt, Human
gcaccgaggggccaguaccuucuggauaccuccacaugguccgagugcacugaaccaaaccacauguggcaaugggaugauucucugguacuauccuuuggucc

SEQ ID NO: 19670 - RNA, 65 nt, Human
ugguaacuuguucggagaucucgcacgcuuuuaaacgugacaagggcucacgagucgaaauauca

SEQ ID NO: 19671 - RNA, 68 nt, Human
cacuauauugcguaauuccuuucaaauaccguacuuagggaaaacagagcuccagcgugaugacagug

SEQ ID NO: 19672 - RNA, 65 nt, Human
caugcaagcauauuuuucagcaaguacagaaucugugcaacucugcagaaauggcuaagugcaug

SEQ ID NO: 19673 - RNA, 64 nt, Human
ucaugguggaggaggguaaauaugucacucacacugaguagaccaaauuucuucauauccagga

SEQ ID NO: 19674 - RNA, 83 nt, Human
uccaacuuuguggaaugguaaggauuuuuaggguuguuuggccagaacaagagaaauaacugcagaaaacacauaugguugga

SEQ ID NO: 19675 - RNA, 65 nt, Human
gauauaaguucuguucaaggcaagaaguuuccaaucucaaauauuucaugccaacaacuuauguu

SEQ ID NO: 19676 - RNA, 69 nt, Human
uacuaauuuuacauaaacuguuuauguccaaaaauaugcauauaaaacacuuauacagauaaauuagug

SEQ ID NO: 19677 - RNA, 70 nt, Human
guucaacaucauuagagcccuguagaaugacagccuuuuucagguugccagucugcucauccauguaugc

SEQ ID NO: 19678 - RNA, 77 nt, Human; identical to SEQ ID NO: 3082

SEQ ID NO: 19679 - RNA, 80 nt, Human; identical to SEQ ID NO: 367

SEQ ID NO: 19680 - RNA, 105 nt, Human
uucaccaccauggagaaggccuggggcucauuugcaggggggagccaaaagggucaucaucucugcccccucugcugaugcccccauguucgucaugggugugaa

SEQ ID NO: 19681 - RNA, 131 nt, Human; identical to SEQ ID NO: 6294

SEQ ID NO: 19682 - RNA, 61 nt, Human; identical to SEQ ID NO: 776

SEQ ID NO: 19683 - RNA, 96 nt, Human
caugccaagcacgguucagcucccugcggccaagucgaaauguggucuucagcaucaucgagcauuucuggagggagcugcugcugucucagccug

SEQ ID NO: 19684 - RNA, 76 nt, Human
ccccucuccagcauagugagaucaagaaggaggcuucacauuuuaucuucagcuccaucaccauccuggagaaggg

SEQ ID NO: 19685 - RNA, 104 nt, Human
gcuagucauuaacccccaccagcagcacauggaugcauucuauugggugauugacugggaagggaugaucucugucucuagccuggugggacuucuugaaaagc

SEQ ID NO: 19686 - RNA, 96 nt, Human
cgaugcugagaucagaauguggccuggacaacuucggggacuuugacugggucaucgagaaccauggaguugaacagccgccuggaggagcaguug

SEQ ID NO: 19687 - RNA, 108 nt, Human
agcccccgcgccgggggcucaggcucaacugaggguuuugucauuuucaagucugaaaguggcuguucuccugccuuuguuguuucuucuuuuccuggcgucuggguu

SEQ ID NO: 19688 - RNA, 70 nt, Human
ugacauccacaaauuguacauuauuuacaccaaaagcacagggcucgugugggugaacagucugcaguca

SEQ ID NO: 19689 - RNA, 71 nt, Human
ccaaagcugcaaaccauuuagggagucaucaauuacauauuuuguacacuuucaaaaagcuuacagcuggg

SEQ ID NO: 19690 - RNA, 71 nt, Human
gagcuguaaauugcuuaaaucgcuuaaacuggagauuucagugagauuuuuagcaguagauuacuaagcuc

SEQ ID NO: 19691 - RNA, 62 nt, Human; identical to SEQ ID NO: 12047

SEQ ID NO: 19692 - RNA, 64 nt, Human
gaugguguaaaugguaaacgugauaucaugagacauuuccugauucucacaccaacacauuauu

SEQ ID NO: 19693 - RNA, 73 nt, Human
uaguaucauggacuaaacuaggucaaagugaaguauaugcaaaaugaccauuuuguuuuuuuccauuuuauua

SEQ ID NO: 19694 - RNA, 63 nt, Human; identical to SEQ ID NO: 9730

SEQ ID NO: 19695 - RNA, 73 nt, Human
ucaaggaagggcaggcguauggcuaauugguuuugaauuacaugauuggcuugcccaauacauuuggccuuga

SEQ ID NO: 19696 - RNA, 74 nt, Human
guagagaugggaucucacuuuguuguccaaucuguucucaaacucuuggcuucaagugagccuccugccucugc

SEQ ID NO: 19697 - RNA, 67 nt, Human
cgucccaaaggccggcaagaugguguccuggaugaucugucgccugguggugcugguguuugggaug

SEQ ID NO: 19698 - RNA, 98 nt, Human
gaacuccgcccuguagccggugcugguggcccggcgcgcuggaaccgcggcgacccgcuccagcgcgggaccagcagcaagggccgagcgccagguuc

SEQ ID NO: 19699 - RNA, 79 nt, Human
gcagagaucguuacagacauuuuuaucuccugguucccuuucuacuaugagaucaagauggccuucgugcuguggcugc

SEQ ID NO: 19700 - RNA, 74 nt, Human
gcugugaagaccaagaacauucgugaauaugugcgguggaugauguacuggauuguuuuugcacucuucauggc

SEQ ID NO: 19701 - RNA, 94 nt, Human
guuuauuaucuaucuucacaguuuauauuuacugaauuauauauuuuauuucuuaaaauucacauuuaauacaaacuuucuuagauauuuaaac

SEQ ID NO: 19702 - RNA, 103 nt, Human
uaguauaguaguaaggagaaucuuaaaucuuagauucuuggggguaugacuagagcaauuccuaaauccagaugaugauuuuaccauugcuauguauaagcug

SEQ ID NO: 19703 - RNA, 75 nt, Human
aguguuuucauccuucuucauggccuccuucccacaaauaucaggaaaaugggaacugaugaggagaguaacauu

SEQ ID NO: 19704 - RNA, 74 nt, Human
caauuacaguccuacaaguaccuggguugccucccuccugaccuggagaacaguccccugguacacugucauug

SEQ ID NO: 19705 - RNA, 93 nt, Human
gagaggggaauaggagaagaaauaugggguaaaauaauagacccgauguacuuagguaccaccaugguuuucuuuuucuauaguuuucuuuuc

SEQ ID NO: 19706 - RNA, 73 nt, Human
uucuuuuuaggguguuaaucuuuaugugaaaaaucuugaugaugguauugaugaugaacgucuccggaaagag

SEQ ID NO: 19707 - RNA, 98 nt, Human
gccagggccaucagguuccguuuggggcccgucagcagguuggccauuccauaggugacgacuuugcccauggguuucaggagguuguagcccuuggc

SEQ ID NO: 19708 - RNA, 69 nt, Human
gguggaagccacacacagcccgguuggccugcagcagcugcagagcugucacgcugaacugauuccacc

SEQ ID NO: 19709 - RNA, 74 nt, Human
ccucacggccuggcugggugcugagcaggaggucagccuugcuggcaggcuggcgcuggcaggcaggucggagg

SEQ ID NO: 19710 - RNA, 131 nt, Human
cuucaccaugcaggggugacuuuuauuugaaggcagaaaacacccuauuuggggguucacucauaaucugcaacaguuuguuuguuuguuuuuaaaaaagagaaaaaucagaagccaaagggccugggaag

SEQ ID NO: 19711 - RNA, 66 nt, Human
gucacuuccgcccgggccuggccgagguucgggcuccguuggccgagggggccguacggagguggc

SEQ ID NO: 19712 - RNA, 72 nt, Human
agcagguuuaaaaggugcucauuuagagauucuaaccaauuacguggugaauuauaaaauuucuuuccugcu

SEQ ID NO: 19713 - RNA, 76 nt, Human
agugcguaacuggcaugaggacuauuggucuuugagaaauucuggccaacaguuaucaaaugguauuguacacacu

SEQ ID NO: 19714 - RNA, 62 nt, Human; identical to SEQ ID NO: 7958

SEQ ID NO: 19715 - RNA, 81 nt, Human
ucaccucaacuggauucggaaugugcugauuuccauuggacucaaguugaucucacuuauauucugagugccgggagguga

SEQ ID NO: 19716 - RNA, 60 nt, Human
agcugucagggccucacuguggaaggaagguccacagaaaacauccugggguccugagcu

SEQ ID NO: 19717 - RNA, 94 nt, Human
ugugaugggaggaguccucuguaucucagucugauccuggucucccucucggccauggucucacacuagugcugcugggaaaccaucccucaca

SEQ ID NO: 19718 - RNA, 71 nt, Human
ugcucuggcggucgccaaucuggucggcauggcggugaucacgaucuugccgacguuggggguguuaagca

SEQ ID NO: 19719 - RNA, 74 nt, Human
agugcccaggaugauauuuuuacacaagcuguaaauauggcaggauugccagcagugaguaucccuguugcacu

SEQ ID NO: 19720 - RNA, 80 nt, Human
cuuuuaacucuggaguagaugucuugcuaacccccaccaccuugagugaggcaguaccauacuuggaguucaucaaagag

SEQ ID NO: 19721 - RNA, 86 nt, Human; identical to SEQ ID NO: 15806

SEQ ID NO: 19722 - RNA, 64 nt, Human
aggccugggcccgcuuccugcaagaaaacaagcagcuucugcacgacgcacuggcccaggaccu

SEQ ID NO: 19723 - RNA, 64 nt, Human
cuggaugaaggacgagcgugugcccaagaaacuggccacgcagcuggacuccgccuucauccgg

SEQ ID NO: 19724 - RNA, 80 nt, Human; identical to SEQ ID NO: 16857

SEQ ID NO: 19725 - RNA, 123 nt, Human; identical to SEQ ID NO: 6745

SEQ ID NO: 19726 - RNA, 61 nt, Human
aauaaauauauagagagacauaauuuuaguggcaaaaugaagacuagacucuauuauuauu

SEQ ID NO: 19727 - RNA, 73 nt, Human
uuuugagacagagucucacucuguugcccagacuggacggcaguggcaacaagagcgaaacuccaucucaaaa

SEQ ID NO: 19728 - RNA, 89 nt, Human
gagccaaauaugagugaccauggccuguaacacagcccucaggagauccugagaacuaugcccaagguggucggggugcagcuugguuu

SEQ ID NO: 19729 - RNA, 74 nt, Human
gggcuccagguuacagguagauuuaaaauugacugguugacaauugguuaaguuuaucuaaagaucugggacuc

SEQ ID NO: 19730 - RNA, 62 nt, Human
agcuucuccaugcagaaggcugaggugugcuccuguuccaggccuguguuguguggagggcu

SEQ ID NO: 19731 - RNA, 91 nt, Human
cacuuggcuccugagggaucuuuacugaacgcagcaccuugacuaccuggcgcucucucuugaguggggcugucccuccugagcuaaagug

SEQ ID NO: 19732 - RNA, 66 nt, Human
ugaugaggacugggacagguacgugcacccugugcuucaccuaacugccugugccgaucucucuca

SEQ ID NO: 19733 - RNA, 69 nt, Human
ccccguggaauuuuaugaggaguuaugccuaacaacuguugggcaaccucagggggauauuuauggugg

SEQ ID NO: 19734 - RNA, 63 nt, Human
ggugaggcaaaucccuggaaggcuugaacccugcaguucagucucccgggguaaucacucccc

SEQ ID NO: 19735 - RNA, 103 nt, Human
caccacccaugauccaucuguguaguuucugaacagucagcgauuccagguuuuaaauaguuuguaaauuuucaguuucuacacacuuuaucauccacucgug

SEQ ID NO: 19736 - RNA, 122 nt, Human
gguuuuuuuuuuuuggcucaugaauuuuucuguuugacauggaaaugacagaguggaauauuaauacauuuuaguuuaguucugucaugccaggaauuuuuucauacaauuaaaacauggcc

SEQ ID NO: 19737 - RNA, 61 nt, Human
uaaagcguuuuaauuccuuucucuguucagcuguugaugcugagauccauauuuaguuuua

SEQ ID NO: 19738 - RNA, 62 nt, Human
guuuucauccucuaguacugaagugcccucaaggugguaggcacuguauagcaggagaaaac

SEQ ID NO: 19739 - RNA, 84 nt, Human
aucguucagcagugguuagaauacagggugacucaaguagaugggcacuccaguaaaaaugacauccucacacuguugaaggau

SEQ ID NO: 19740 - RNA, 64 nt, Human
uuuugucacauucagcauuauccaggccucaggcaacaucugucuaguguugucuugaucaaga

SEQ ID NO: 19741 - RNA, 86 nt, Human
gaccagcgacauuuuugggucuccggucacugccacuucacgcuuggcacacccaaacaaacccaagucaagguccucggcugguu

SEQ ID NO: 19742 - RNA, 60 nt, Human
guccagaagaagcuacuccuuccagcaggccuaauaggauggcaucuaauauuuuuggac

SEQ ID NO: 19743 - RNA, 83 nt, Human; identical to SEQ ID NO: 5689

SEQ ID NO: 19744 - RNA, 61 nt, Human
augaagaaccacagaauggcugcagauguuccuugucuuuuccaugacugacauuuuucau

SEQ ID NO: 19745 - RNA, 64 nt, Human
ccccaggaggcggcgggggcgcaggggcgcgcgggggcgcccgugccggagccgcccaaggagg

SEQ ID NO: 19746 - RNA, 78 nt, Human
ggagcaguacgggaccaacccauuugacucggcagacagugcuuaguccuauggagaacguccaugauaaacgugccc

SEQ ID NO: 19747 - RNA, 61 nt, Human
ggcgacacccggaaguuagacuugcgacuagggaggcaggauagacauccggggaggcgcc

SEQ ID NO: 19748 - RNA, 92 nt, Human
ucuccgugugcaguaccuccgccagauccacgccaaccacgagacacugcugcgggaggugcagacccugcgcgaccggcucugcacggagg

SEQ ID NO: 19749 - RNA, 64 nt, Human
gcguucgcaaagucuguagucaucacaggcuucccuauugagcucguggacaggcuuagagcgu

SEQ ID NO: 19750 - RNA, 98 nt, Human; identical to SEQ ID NO: 5140

SEQ ID NO: 19751 - RNA, 96 nt, Human
gacuccucgguggacagcaauaauggguugauauacucaaagucuucgaacucugacuggucgauccucuuuauggcauccucaucgucugggguc

SEQ ID NO: 19752 - RNA, 60 nt, Human
gagccaucuucucaucuugguaucaggaaagcaucuuuaucaaagaaguuuguauggcuu

SEQ ID NO: 19753 - RNA, 78 nt, Human
gaggcagaaacuguggaagguaaauauauguuaagaaacuaauaguuucuuguuuguagauuccucuggugcugucuc

SEQ ID NO: 19754 - RNA, 76 nt, Human
gugugguuaugucucuguauaggcaagugucugugucuauagauacuuuugcuuuuuauagugauuaaagcuccac

SEQ ID NO: 19755 - RNA, 74 nt, Human
acuauacauagucauauacguaacaucuauaaccauacauagucacauauguaauaucuauaacuauacauagu

SEQ ID NO: 19756 - RNA, 78 nt, Human
cuauacauagucauauauguaauauauaacuauaugaccauacauagucauauauguaacauauaugacuauacauag

SEQ ID NO: 19757 - RNA, 69 nt, Human
gugguuugcugccuacauucaugauggaagaaaugcuaauuuucaguuugaguuuagugaaaaaauuac

SEQ ID NO: 19758 - RNA, 82 nt, Human
aguagccguaauggguccugcaggagccacccagcugguccagcgggaugggcuccuccucgggagccugugugagguugcu

SEQ ID NO: 19759 - RNA, 81 nt, Human
ccaggcauccugccccccagguaagcccaggcguccucucaggagaugcugguccuugcaugugggcagcagggcuccugg

SEQ ID NO: 19760 - RNA, 68 nt, Human
uuuugcugauaaggagaaaguuuuaguggucuugauacaaaucggccacaauauuccuuuaagccaaa

SEQ ID NO: 19761 - RNA, 68 nt, Human
ggaagugggauugugggaggguacagcugaacauugacuguacuucuauauccaugaucucacuggcc

SEQ ID NO: 19762 - RNA, 102 nt, Human
uuuuuuuuuuuuuggauguaugcuucuuugcauuuauuuuaaaaaugugacauauauugucauggaaugugcaaaagaaaucaauuuuuaaaaaugaaaaaa

SEQ ID NO: 19763 - RNA, 61 nt, Human
gacugaagauacucaggguaaaaagaaauggaaaaaaacauguugucucccaucuuuuguc

SEQ ID NO: 19764 - RNA, 90 nt, Human
gccagagcagacuacuaaagcuuuaccugugagguuuuuguuuacagauuacaauagacuguccaguguagguggagaaacuucucuggc

SEQ ID NO: 19765 - RNA, 69 nt, Human
uucuggcucucuuauauauuucuuuauugucauuuacuuugguggacgaagagaaggagagaguuggaa

SEQ ID NO: 19766 - RNA, 104 nt, Human
ccugccccccugccugccaucugagagcccugcagugugccugcgcccugccuacagccggcgcgcucagccgggcaacuucaaugcagcgggggguccucggg

SEQ ID NO: 19767 - RNA, 72 nt, Human
cgcauagccgccucuucgaccaggccuucgggcugccccugcugccggaggaguggucgcaugugguuagcg

SEQ ID NO: 19768 - RNA, 73 nt, Human
gccccggagacagaagcaugaacgugucaaaagaaccaagugaaugcgcgugcguggaagaauacaccggggc

SEQ ID NO: 19769 - RNA, 124 nt, Human
agaagggugugcuguuuggaguuccuggggccuucaccccuggauguuccaagacacaccugccaggguuuguggagcaggcugaggcucugaaggccaagggaguccaggugguggccugucu

SEQ ID NO: 19770 - RNA, 75 nt, Human
ggugguacaggauggcauagugaaggcccugaauguggaaccagauggcacaggccucaccugcagccuggcacc

SEQ ID NO: 19771 - RNA, 81 nt, Human
ccccaguugucagaggagccagagcagugccaguucuccuaaggagcugguggugcuccucauggaaccuugccguugggg

SEQ ID NO: 19772 - RNA, 63 nt, Human; identical to SEQ ID NO: 18424

SEQ ID NO: 19773 - RNA, 63 nt, Human; identical to SEQ ID NO: 18425

SEQ ID NO: 19774 - RNA, 60 nt, Human
agagggaaguugcaacuuagcauaguauuaucugucuuuaaguccucaucuucuuccucu

SEQ ID NO: 19775 - RNA, 97 nt, Human
ccuuucauaauauggggaaaauguagaugcuugaauguuuagcauuagauagauaguuuugaaacauucauuguuugcauuugacuugcuugaaagg

SEQ ID NO: 19776 - RNA, 60 nt, Human
ggguuaguauagagauguggauguagucucaaaauauacaaauauaauucuuuacagucc

SEQ ID NO: 19777 - RNA, 80 nt, Human
gccgcugggagccuugagagccaugugcaagaggacagauccuguuccugucaccauugcucucgauucacucagcuggc

SEQ ID NO: 19778 - RNA, 68 nt, Human
gcucagcgucaccuggguggauggagccgugcgugccaggcgccgucccaagccuggagacucugagc

SEQ ID NO: 19779 - RNA, 124 nt, Human
gguucgccgugggccuggggacccgcgguccagggcgccaugcgggcaucgcugcugcugucggugcugcuggcccgcaagggcccguggcugugggcaucucccuguggcuucacccugagcc

SEQ ID NO: 19780 - RNA, 75 nt, Human; identical to SEQ ID NO: 74

SEQ ID NO: 19781 - RNA, 97 nt, Human
ugcaaagaugcuguccgugcgcguugcugcggccgugguccgcgcccuuccucggcgggccggacuggucuccagaaaugcuuggguucaucuuuca

SEQ ID NO: 19782 - RNA, 71 nt, Human; identical to SEQ ID NO: 77

SEQ ID NO: 19783 - RNA, 80 nt, Human
cgucgucggcgcugggcaggcacacggcggacacugucugggagaagcggacagguguggccagcuccagcagggggaug

SEQ ID NO: 19784 - RNA, 69 nt, Human
gaacuugggguucuugaaaacauuggagaucuucaagaccugaauguucuccucgucaaagcccugguc

SEQ ID NO: 19785 - RNA, 63 nt, Human
ggggcagggcugccugcugcagcuugccaggggucuuguuggcguuguacuuggucuugcccc

SEQ ID NO: 19786 - RNA, 79 nt, Human
ggguaugagcuuggcgacacgggcguacacagcgggcguggugguaaagcaggugcggcugccccaggacacaaugccc

SEQ ID NO: 19787 - RNA, 94 nt, Human; identical to SEQ ID NO: 4048

SEQ ID NO: 19788 - RNA, 80 nt, Human
agucuaauauagagauuacuggcuuuaacagugaacuggaauaaugagggcuucacugguaaaaugcuucugaauugacu

SEQ ID NO: 19789 - RNA, 88 nt, Human
gaggugccucaguggaggcgcugugucuccuacgcaacuucugagggcuggagggugccaagggcagcugcugaccgccuggugcuuc

SEQ ID NO: 19790 - RNA, 65 nt, Human
accaaugccagaacuguaucaacuugaggguaacaagcgaauaacauguagaaauggacaauggu

SEQ ID NO: 19791 - RNA, 72 nt, Human; identical to SEQ ID NO: 225

SEQ ID NO: 19792 - RNA, 62 nt, Human; identical to SEQ ID NO: 2027

SEQ ID NO: 19793 - RNA, 67 nt, Human
aaacacuauuuuauuuaaauaaggggaagcuuucuaaaaguauacuucuccuaauaaaaauagguuu

SEQ ID NO: 19794 - RNA, 65 nt, Human
aauccugaucugguccauuaaagagugugcgcggacaaaguuucugaaaggauuagagaaggauu

SEQ ID NO: 19795 - RNA, 67 nt, Human
ugccgggagcugggcaugaaagcccuggacaugaauucauguccagagcuuucaugccuuaaaggua

SEQ ID NO: 19796 - RNA, 66 nt, Human
gagacgggguuucaccauguugguuaggcuggucucgaacuccugaccucaugauccacccaccuc

SEQ ID NO: 19797 - RNA, 60 nt, Human
gcuagagugcagauggcaugaucucagacucacugcaaccucugccuccugcguucaagc

SEQ ID NO: 19798 - RNA, 62 nt, Human
gugcugggauuacaggugugagccaucuuuguuuuuagauucacauucauauacucccgcau

SEQ ID NO: 19799 - RNA, 64 nt, Human
agcagcaucuccuggaugcggaccugcuggaugaagagccaggaggugaccaggccaggcugcu

SEQ ID NO: 19800 - RNA, 94 nt, Human
cugcccauugaagcgguagugauaggcauagaaggcgaagugguagagauagaagaaccgcagccaaugccgcuugcuggugcugguguggcag

SEQ ID NO: 19801 - RNA, 67 nt, Human
guaccgcagcagcgggcaggacgcgcuggagaagauccgggcaggggccucccuggugcagcuguac

SEQ ID NO: 19802 - RNA, 68 nt, Human
ccuucguuuucaggccuugucaagaagacaaauuuuuaaaucauuuuccugaccccugagaaagcagg

SEQ ID NO: 19803 - RNA, 63 nt, Human
cugggauguggcugucauuucacaagagcauccgaguuuggggagauaugcagcuguaccaag

SEQ ID NO: 19804 - RNA, 76 nt, Human
gggaucaaaugguggcuguguaaaucucuggagucauuuuauuccaucagacucuucacaacuauuccuaucuccc

SEQ ID NO: 19805 - RNA, 66 nt, Human
ugagaaggucauuacuuagaaguaagaauguagaaaaugcuuacuuuuuguaauuguaacuucuua

SEQ ID NO: 19806 - RNA, 73 nt, Human
gucgugugcgucccucggugccacaugcacgcaacgugugugugugggagaucacugcggcggagcaagcgac

SEQ ID NO: 19807 - RNA, 80 nt, Human
gccccgggggcagucgcgccugugaacgguggggcaggagacccuguaggaggaccccgggccgcaggccccugaggagc

SEQ ID NO: 19808 - RNA, 68 nt, Human
ggaauauaagcuggugguggugggcgccggcggugugggcaagagugcgcugaccauccagcugaucc

SEQ ID NO: 19809 - RNA, 70 nt, Human
gugccuguuggacauccuggauaccgccggccaggaggaguacagcgccaugcgggaccaguacaugcgc

SEQ ID NO: 19810 - RNA, 67 nt, Human
uccaccaguacagggagcagaucaaacgggugaaggacucggaugacgugcccauggugcugguggg

SEQ ID NO: 19811 - RNA, 77 nt, Human
gaaugcuaauacaccaaccaagugggguggauaguaaguaugucugcaauauuaacaguuggguggagacuguauuc

SEQ ID NO: 19812 - RNA, 60 nt, Human
uucucuacgcacguuucuagaucuguauucuauguggugcgagcaugugcguucagagaa

SEQ ID NO: 19813 - RNA, 89 nt, Human
ggaguuuuguucuuguugcccaggcuggagugcaauggcacaauccuggcucacugcaaccuccgccuccuggguucaagcaauucucc

SEQ ID NO: 19814 - RNA, 79 nt, Human; identical to SEQ ID NO: 6024

SEQ ID NO: 19815 - RNA, 79 nt, Human; identical to SEQ ID NO: 6025

SEQ ID NO: 19816 - RNA, 63 nt, Human; identical to SEQ ID NO: 11285

SEQ ID NO: 19817 - RNA, 68 nt, Human; identical to SEQ ID NO: 11792

SEQ ID NO: 19818 - RNA, 67 nt, Human
gguuacagucucuagcuucgccauguacauggcccuuccguguacauggaugggcggggagguaacu

SEQ ID NO: 19819 - RNA, 94 nt, Human
aucgcacgagaaugauucagcaaucacggagugggggcaaugcgcgucgagaaauauuugugugcgccgcucagugagaacaauucuuagcgau

SEQ ID NO: 19820 - RNA, 84 nt, Human
cgagcucgcccagcauaucagguuggugcgccgaaauuguuuguugagauauuggucgauagcaaauauguagugggcgguuug

SEQ ID NO: 19821 - RNA, 76 nt, Human
acuguguuucuuuccuuuuguggaaaauggucauucugaaucuucaggacaaacacaucugggaaggugauacugu

SEQ ID NO: 19822 - RNA, 95 nt, Human
agauucaaagcaacaccaccaccacugaaguauuuuuaguuauauaagauuggaacuaccaagcauguggcuccuggucaguguaauucuaaucu

SEQ ID NO: 19823 - RNA, 61 nt, Human
ggauacagacuucaaaacaaugaggaacaacauuuucauguguuagaacgggggcuggucc

SEQ ID NO: 19824 - RNA, 70 nt, Human; identical to SEQ ID NO: 314

SEQ ID NO: 19825 - RNA, 78 nt, Human
ggcaacuucaggaugacaaaaacaaagucucuucugcugggaaaucccaguacagaucguuucucaucucuaagugcc

SEQ ID NO: 19826 - RNA, 61 nt, Human
gucaugucaccuuucacccagcaauauucagucuaaaagcagcaaggccguggugcauggc

SEQ ID NO: 19827 - RNA, 70 nt, Human; identical to SEQ ID NO: 6895

SEQ ID NO: 19828 - RNA, 64 nt, Human
augcuggacacugccuuaggaaaaccacgagagguguuucgacuuccuacagauuugacagcau

SEQ ID NO: 19829 - RNA, 79 nt, Human
ccgucuuugugcaucuauccauuucucaucuucuaccuggguuaccuugucagauggaacuggaagauguaugucaugg

SEQ ID NO: 19830 - RNA, 85 nt, Human
ugaagaacuuggggauccuuuuauuauaauucacaguaucucacugccuaaaugcugaagaaauuuauaguacccuacuucuucg

SEQ ID NO: 19831 - RNA, 67 nt, Human
caguccaaaccggaagggcagaauuuauuuuugggaaacugaaggaagucccgaccuuccuggauug

SEQ ID NO: 19832 - RNA, 60 nt, Human
gcacacucauggacuuuagguuuagaaaccuccucagccuucauuuguucguggaugugu

SEQ ID NO: 19833 - RNA, 78 nt, Human
gcccggaaaccacacuacgacaucuggggcaauacagucaauguagccagcaggauggaguccacgggggucaugggc

SEQ ID NO: 19834 - RNA, 61 nt, Human
ggggaagggggagcugcugaccuucuucuugaaggggcgggauaagcuagccaccuucccc

SEQ ID NO: 19835 - RNA, 74 nt, Human
cgaugauagagucgccagcagcacgugguucucguaaggaugaaugcuuguagugcugucuaaacguaacaucg

SEQ ID NO: 19836 - RNA, 83 nt, Human
cuggaagaaggaagcugugauagguuaugugaaagagaugucuccucaucucuaauggcuuaccgagacagcucucgauucag

SEQ ID NO: 19837 - RNA, 100 nt, Human
gcucuucaccaucccgcacacucaggaggccuuccgcacccgggaagaguaugaagcccgcuuggaaagguacagugagcgcauuuggacgugcaagagu

SEQ ID NO: 19838 - RNA, 77 nt, Human
ggcucagauucauagccccugaauagucccucauagucccugaguucauaaguagugguuauaguacaaucuaagcu

SEQ ID NO: 19839 - RNA, 88 nt, Human
uccaaaggcuccaacagggcccuccagacucaauggcaggguggugucugcacaagcuggaaguguccuugugaugagcccaucagga

SEQ ID NO: 19840 - RNA, 79 nt, Human; identical to SEQ ID NO: 6903

SEQ ID NO: 19841 - RNA, 85 nt, Human; identical to SEQ ID NO: 6904

SEQ ID NO: 19842 - RNA, 78 nt, Human
cuuccauugccacguagacauugcccagagugaagugguucacagcaaaguguggugcgaucucuacugccauggugg

SEQ ID NO: 19843 - RNA, 83 nt, Human
agagacuauuaaaugugacaugaauuauggaguagaaaaaucugcuugauuuauuaauuuuaugauauaugugaucaguaucu

SEQ ID NO: 19844 - RNA, 76 nt, Human
agucuguuguuagucuuaaaaaugaggaggaaaaugaaaauuccauuucucaguacaaagaauccgugaagagacu

SEQ ID NO: 19845 - RNA, 77 nt, Human
gcuuacauggaagaguauauaugggaaaauagcucaucagaaagaaauauccuggaaacgcuucuccagaugaaagc

SEQ ID NO: 19846 - RNA, 71 nt, Human
agcagcagcccucucucuggaaccgugggauuuggaccauucuccacccugaagugcagaggguugcuguu

SEQ ID NO: 19847 - RNA, 96 nt, Human
ccucccauguacacaggacacgaguacacagucaggucggcuggggcuggcaagucacuuggugcccggggccugugugcugaugcugacgggagg

SEQ ID NO: 19848 - RNA, 80 nt, Human
ucugagucacuagaugaggaggaggaagaugaugaugauuuaugccuuuucuuuucuucuuucuuaacuuuagauuuggg

SEQ ID NO: 19849 - RNA, 70 nt, Human
gggccccaagcucgcuaguccucggaucccagaaacauaacuccgggggugcagaccugcuuggaggccc

SEQ ID NO: 19850 - RNA, 89 nt, Human
agggacauugccuuauuucugcuagaucaaaguagaaguccaguuccucuacuuggcaucuguugauaucuggaaagggugguguuccu

SEQ ID NO: 19851 - RNA, 60 nt, Human
ccuaccgcugccucaaugggcucugcuugagcaagggcaacccugagugugacgggaagg

SEQ ID NO: 19852 - RNA, 61 nt, Human; identical to SEQ ID NO: 1238

SEQ ID NO: 19853 - RNA, 83 nt, Human; identical to SEQ ID NO: 3404

SEQ ID NO: 19854 - RNA, 68 nt, Human
aaaacuguguccaaaaggauuguuucgaaauaugcaugcaaauaguucuguuaauaacccacuguuuu

SEQ ID NO: 19855 - RNA, 60 nt, Human
ccaaacugucucugccucuucccggagaauccagcugggcuagaggcugagcaccuuugg

SEQ ID NO: 19856 - RNA, 85 nt, Human
cuuuuggaaggugacuuuaucaccuuaaugcauauuccccucuccauagaggagaggaaaagguguaggccugccuuaccgagag

SEQ ID NO: 19857 - RNA, 64 nt, Human
ugucuuuaaaaagcaugucgugauguacacauuucgucauuaccuaucauguuguuuuguagca

SEQ ID NO: 19858 - RNA, 76 nt, Human
ucacugugucgcccagguuggagugcaguggcgcgaucuccaccuacugcaaccucugccucccggguucaaguga

SEQ ID NO: 19859 - RNA, 88 nt, Human
ucgcccgucccuuaccuacauuguuccaacaugccagaggcuguuaaccuuggagaccugcugcggauauggguacggcccggcgcga

SEQ ID NO: 19860 - RNA, 77 nt, Human
cggccgucaaccuccucaaguauacuucaaaggacauuuaacuaaaagcccuacgcauuauauagaggagacagucg

SEQ ID NO: 19861 - RNA, 77 nt, Human
gcugagcgacuucgaggggaagaagcccggguaacucagcugauccguggcuuugguaguuccuggaaaucaucagu

SEQ ID NO: 19862 - RNA, 64 nt, Human
gggugugcugauggagcgggcugcagaugacagcaaagagguugagagcuuccagcagcugcuc

SEQ ID NO: 19863 - RNA, 65 nt, Human
uuuacauuagcagggcugggcaagauucuuacauaauucaagaccuaaaaccagccugcaguaga

SEQ ID NO: 19864 - RNA, 91 nt, Human
aggcucggcacagagaaggagguagcuccaccugccuucccugcaggccggcgggguggggguauggcucugcuccuuccuguccuggccu

SEQ ID NO: 19865 - RNA, 85 nt, Human; identical to SEQ ID NO: 10310

SEQ ID NO: 19866 - RNA, 64 nt, Human
aaggaugacaaauuguuuacauauauacuauagaaauacacacugaacuggcaauaacaucuuu

SEQ ID NO: 19867 - RNA, 71 nt, Human
guguauauguguguguguguguguguguagcuugaagugguccauauguacacacacauauacauauauau

SEQ ID NO: 19868 - RNA, 60 nt, Human
uagagagagagagagagagaacgcgagcagacuagguccuuucuugaaagacucucucug

SEQ ID NO: 19869 - RNA, 61 nt, Human
guguuggaaagguuuccuugagcuauuguuuuuacuugauuauaggcagccuugauaacau

SEQ ID NO: 19870 - RNA, 61 nt, Human
uccacuugcugccauugacuucuggccagaaacaaacuucuuugccgcuuggcagcuugga

SEQ ID NO: 19871 - RNA, 80 nt, Human; identical to SEQ ID NO: 4151

SEQ ID NO: 19872 - RNA, 64 nt, Human; identical to SEQ ID NO: 287

SEQ ID NO: 19873 - RNA, 62 nt, Human
ccagacuacuuccuauaaauuucuccugggaaaccugccuuuguauguggaaguauaccugg

SEQ ID NO: 19874 - RNA, 125 nt, Human
ggagggauacaauuggugucaugaucggaaugugguuaccauuuucagugcacccaauuacuguuaucguugugggaaccaggcugcuaucauggaauuagaugacacuuuaaaauauuccuucc

SEQ ID NO: 19875 - RNA, 93 nt, Human
uacuaaugaugagcauuuagcacaauuugagacugaaauuuaguacacuauguucuaggucagucuaacaguuugccugcuguauuuauagua

SEQ ID NO: 19876 - RNA, 68 nt, Human; identical to SEQ ID NO: 223

SEQ ID NO: 19877 - RNA, 67 nt, Human; identical to SEQ ID NO: 4195

SEQ ID NO: 19878 - RNA, 68 nt, Human
gguugccucuuugaucaaacggguaucagaaauccaaaauuccaaaauccacagauccaaagagcucc

SEQ ID NO: 19879 - RNA, 68 nt, Human
gucaagccauccccaagcucauugggcaggaaaaccugaccuguguuggugggagaugacuuacagac

SEQ ID NO: 19880 - RNA, 75 nt, Human
gaaagcuaguaacagguacauagguaaccaaaguauauagcuuauuuggugaaucuucguccucauuacguuuuc

SEQ ID NO: 19881 - RNA, 71 nt, Human
gcccgaggugcacgcuucuugaagcccacuccauggaugcgcuugugaauguugaugguguauucucgggu

SEQ ID NO: 19882 - RNA, 66 nt, Human
cagucgcuccagggccgcagcaguucacucccacacauagaacccaggucacugcuggggcgauug

SEQ ID NO: 19883 - RNA, 76 nt, Human
ugguguggaggccuauguucugccccauacaccccacaggcccugcuuaugggaaggaacacaggccuccagccca

SEQ ID NO: 19884 - RNA, 75 nt, Human
cugggacuacaggugcaugccacccauuuaaaauuuuuuuuuucuuagagaugggagucuugcuauguuucccgg

SEQ ID NO: 19885 - RNA, 90 nt, Human
gggagucuuccucugucgcccaggcuggagugcgguggcaugaucguggcucacugcaaccucagacuucugggcucaggugauucuccc

SEQ ID NO: 19886 - RNA, 65 nt, Human
uggccuuaauuuccugauccuccuuccuuggucuccugaguaacugggauuacggaugugagcca

SEQ ID NO: 19887 - RNA, 81 nt, Human
cugugggcucuggcauauauuagcugugugacugugggugagucacuucacuucauggaggcucaguuuccucgucuguag

SEQ ID NO: 19888 - RNA, 68 nt, Human
ggaauccagggagaacuggagccuguuuuaugcuggcauggaacuuggccucaguacgucuggguucu

SEQ ID NO: 19889 - RNA, 89 nt, Human
ucuuaugguuuauuccucagguaucauucugaucauuguuguuacaggagagaugagaggaaguuagaggggcuagaagaaccaggaga

SEQ ID NO: 19890 - RNA, 87 nt, Human; identical to SEQ ID NO: 841

SEQ ID NO: 19891 - RNA, 66 nt, Human
gggugguggacgagagcuuuguugacacgucccccacagggcccagcucagcagaugccaccacuu

SEQ ID NO: 19892 - RNA, 65 nt, Human
ucauuccuaugcucaaugucaagguuuaaauuaaccaauuuuccuugcagugucaugggaaguga

SEQ ID NO: 19893 - RNA, 88 nt, Human
ucuguuuuguuuuuugguaucacuuauguagugugaacuucaguagcaaacccacaauaccagcuugauauucaaaugaucaaagaga

SEQ ID NO: 19894 - RNA, 78 nt, Human
gcgccuggccuucucguccuuuucaaguggccacaccuuccaagaaggucgccugagacccuccugaggggcaggugc

SEQ ID NO: 19895 - RNA, 86 nt, Human
cuccacuaaggggcccuuggaaaccggacaauguugaaggcugaagcuuccauggggauccgcaguccagagccccuugggagggg

SEQ ID NO: 19896 - RNA, 110 nt, Human
gaggcagcggcaguggaguucgcugcgcgcuguugggggccaccugucuuuucgcuugugucccucuuucuagugucgcgcucgagucccgacgggccgcuccaagccuc

SEQ ID NO: 19897 - RNA, 65 nt, Human
ccucguuugcccucaacggggggagcuuuggcggccgguucccuuuaaggggggggaaaugcagg

SEQ ID NO: 19898 - RNA, 83 nt, Human
ggcgcacccgguggccgcccggaccugcuuauugcugucaagucgguggcagaggacuucgagcggcgccaaggccgugcgcc

SEQ ID NO: 19899 - RNA, 73 nt, Human
gcgcuuuguggcuccuccuggccaggucauacuucgaaguuguccccucgccaaagggacgggucaguagcgu

SEQ ID NO: 19900 - RNA, 78 nt, Human
gggcuuguugcugcucggagccgguggaccuggcugaggcacggcuggcgccgccuguaccugaaaugcagcgaggcu

SEQ ID NO: 19901 - RNA, 70 nt, Human
guuaaaucagaagccauuugugcugagcuuugucuagaaauaaagcauaguguaguggagaugaucaagc

SEQ ID NO: 19902 - RNA, 68 nt, Human
ccuugggaaaaaugagaacauauaacugggcgucccuccaccaucucaugucucuucauauuccaggg

SEQ ID NO: 19903 - RNA, 64 nt, Human
ugugcacguuacacucauccacauugguacaacuaauuuuuaagcguaaauucccccguccaca

SEQ ID NO: 19904 - RNA, 76 nt, Human
cagugaaggaagaaccuguagaagaugaccucguuccggagcuggguaucucaaaucugcuuucauccagccacug

SEQ ID NO: 19905 - RNA, 75 nt, Human
uccccagcugauuagugucuaaggaaugauccaauacuguugcccuuuuccuugacuauuacacugccuggagga

SEQ ID NO: 19906 - RNA, 63 nt, Human
uucagugacauguccucucugcuugguguaaaccauucuugggaggacacuuuugccaaugaa

SEQ ID NO: 19907 - RNA, 66 nt, Human
ucugccauuuauuggagauaggcauauaaaacacugaguuuuauugagcacauaguauguggcagg

SEQ ID NO: 19908 - RNA, 92 nt, Human
aguacaucauaaucggcgacacagguguugguaaaucaugcuuauugcuacaguuuacagacaagagguuucagccagugcaugaccuuacu

SEQ ID NO: 19909 - RNA, 81 nt, Human
cgcggaggcggggcggaggcgccgcggcggcuguuauuguucggcugggcucggucgggcgcugucucccucggcucugcg

SEQ ID NO: 19910 - RNA, 107 nt, Human
cuuccucacagccccucacucccggcggcugacagcagcagcggcggcggcgggcggcgccuggcguuucgaggcugagcggcaccgggguuggggcgcggaggagg

SEQ ID NO: 19911 - RNA, 63 nt, Human
cugguggacgcuugggaacgguuaacucauaaggggucuacgcuuccccaaugggguccccag

SEQ ID NO: 19912 - RNA, 65 nt, Human
ggugcaguaccgcggcgaggugcaggccaugcucggccagagcaccgaggagcugcgggugcgcc

SEQ ID NO: 19913 - RNA, 81 nt, Human
cacacuggugcugacugcauuugguauugcauuccugcugaggaggagaacaagcuggaagaugugguccacaccccugug

SEQ ID NO: 19914 - RNA, 85 nt, Human
gaggcuggcuguacaaacggagcgcugcugaucgacgaacagagauccuguacaacacucaaggggucguuguaaagccagacuc

SEQ ID NO: 19915 - RNA, 61 nt, Human
gcggcugcuccggcuucuggccccuggcgggcuucuuguccgcgcgccgggagccggccgc

SEQ ID NO: 19916 - RNA, 74 nt, Human
gaggucccuuccucagcuguuuugagaagccuucggguugaauguggguccagacggagaggagacgagagcuc

SEQ ID NO: 19917 - RNA, 93 nt, Human
ggcuccuccuguccggggcggagcccugcgucgcgggccuggggaggccccgccagcacccuugacgucugggucccgagcagugcggcagcc

SEQ ID NO: 19918 - RNA, 101 nt, Human
uuugaacuuguccccugaauagcuacagguuuuggaagcugaaucaauguuaucagaugaguuagaauccaaaccagagcuccugguacaguuuguucaga

SEQ ID NO: 19919 - RNA, 63 nt, Human
cucaacgcaaggcuucacagcuuuccaaggacagggaccggcucuggaguggccgugcgugag

SEQ ID NO: 19920 - RNA, 62 nt, Human
uugucucaaaguuaugccuaccuggcucguaggaugccaacguuaggagugaaaauagucaa

SEQ ID NO: 19921 - RNA, 68 nt, Human; identical to SEQ ID NO: 574

SEQ ID NO: 19922 - RNA, 79 nt, Human
uuuuuuuuuuuuacauugugaucuuaauuauacuuuuauuaaaauauagcauacuuaugcacagagugaauagaaaaaa

SEQ ID NO: 19923 - RNA, 93 nt, Human
gagacggccaugcuggucugcaagucagaguccgugccagcugucacugacugggccugguacaagaucacugacucugaggacaaggcccuc

SEQ ID NO: 19924 - RNA, 70 nt, Human
aucugggccaggcugggccaggccugcagggucacgacuggagggugugggcccggccaggcuggcagau

SEQ ID NO: 19925 - RNA, 79 nt, Human
gcagauggggcacucgcugcccucagcgcagagcucacacagcgcagcguguuggcacggcagcacugcccgcuucugu

SEQ ID NO: 19926 - RNA, 89 nt, Human
agcuuccugcaggcccagcugugccaggacgugcugagcagcuuccaggagcuguguggggcccuggggcuggaacccgguggggggcu

SEQ ID NO: 19927 - RNA, 97 nt, Human
gccagccugucuaccagcagggccgggccugcaccagcaccaagugccugguggugggugcuggaccuugcgggcugcgggucgcuguggagcuggc

SEQ ID NO: 19928 - RNA, 60 nt, Human
ccuccucuucugguaccaccgaggccuccuccuagccgccggggccuccaggagcggugg

SEQ ID NO: 19929 - RNA, 89 nt, Human
cgcgacuccgugagcgccuccgccggucccgggacgcgggagcgucgccguucucgcuccuugucucgcucccggcuccgcucucugcg

SEQ ID NO: 19930 - RNA, 73 nt, Human
cucccgcucacggucccggucccggucccugugcggaagcggggaggggccgggccucucaucguagcgggag

SEQ ID NO: 19931 - RNA, 62 nt, Human
aguaguuccugggugcuuugauguuaagucauacauaauucgagaaauaccaggaaucuucu

SEQ ID NO: 19932 - RNA, 63 nt, Human
cgggucgggguuuaacgcguuucugggccgccguaagcccggccuaggggcagcuuugacucg

SEQ ID NO: 19933 - RNA, 107 nt, Human
uuggagaguuauguagccauuuuuacccugagucucuugauuccagcccgugugauuugcuggcagucauagaguucuauccgcucaaggcuaugacagcucuucaa

SEQ ID NO: 19934 - RNA, 75 nt, Human
uguggcucgccagcccugcaguauuugaugugcaguauugcaccacaagcucugcggaccuuggccauugccgca

SEQ ID NO: 19935 - RNA, 73 nt, Human
uuguucccaucaguuuagcccagagauagacaguagaaugcaaauaccucccuccccuaaacugacuggacgg

SEQ ID NO: 19936 - RNA, 60 nt, Human
gucuuuuuuuuucuucuuuuuuuccuuuaauaauaaaaaagaaaaccaaaaaaaaaggac

SEQ ID NO: 19937 - RNA, 68 nt, Human
ggggaccucgggagccucacuggucccagcagacaccucaggaaccguggggacaaccgggauucccc

SEQ ID NO: 19938 - RNA, 64 nt, Human
uuggagcaguuucugaccauccugccuggggagauccagaugugggugcggaaacaguguccag

SEQ ID NO: 19939 - RNA, 87 nt, Human
guggcacccugugggagccccaaauggcgcuauugacuucccuggagucauaggagaaccguuauacaggucaccaagggucuucac

SEQ ID NO: 19940 - RNA, 61 nt, Human
cagcuaugauauuaacgccugggcagcguucgcaauagcagccaggcuguaauguacgcug

SEQ ID NO: 19941 - RNA, 62 nt, Human
gcugcccagcuggaguacaaguaugcgaucaagcucacuggaaacucaccuccugggucagu

SEQ ID NO: 19942 - RNA, 79 nt, Human
ggaggagacaagcaagcugucauguuauaagcagcccuuugagggguccaugugaugucaaggaaugaagucucuagcc

SEQ ID NO: 19943 - RNA, 84 nt, Human; identical to SEQ ID NO: 286

SEQ ID NO: 19944 - RNA, 84 nt, Human; identical to SEQ ID NO: 286

SEQ ID NO: 19945 - RNA, 89 nt, Human; identical to SEQ ID NO: 288

SEQ ID NO: 19946 - RNA, 61 nt, Human; identical to SEQ ID NO: 776

SEQ ID NO: 19947 - RNA, 77 nt, Human
guuucuguuauugcauguuuauuucuucugggcauauccuuaaccuuggccaaauaaacuucaaaacugauugagac

SEQ ID NO: 19948 - RNA, 62 nt, Human; identical to SEQ ID NO: 9865

SEQ ID NO: 19949 - RNA, 78 nt, Human; identical to SEQ ID NO: 5302

SEQ ID NO: 19950 - RNA, 74 nt, Human
agaaccagcugauggccccagugccugaaagugcccuugggcaccuccucagcuggugccaggaucuggucucu

SEQ ID NO: 19951 - RNA, 62 nt, Human; identical to SEQ ID NO: 3237

SEQ ID NO: 19952 - RNA, 64 nt, Human
ggucucauccgaacccugcggauguauuuuucacccaagaaauuucggauuucaacaagagacc

SEQ ID NO: 19953 - RNA, 90 nt, Human
ucagccugcugaacaguuccuuuuucaaaaacauagauaccauccaaaaauuuccugauauccuuguuuuuaacuguuggggcuugcuga

SEQ ID NO: 19954 - RNA, 83 nt, Human
cccgugggcggcacggggggggcgccggauucacccgugggcggcacgggggggggcccggcgucacccuugggcggcacggg

SEQ ID NO: 19955 - RNA, 77 nt, Human
ggggcagccucagagucacccguggggggcacagggggggccccggagucacccgugggcggcacgggggcggucuc

SEQ ID NO: 19956 - RNA, 61 nt, Human
ccagacccauucagccccuuccgcugucuggggugggguuaaggggcacaaugggaaaugg

SEQ ID NO: 19957 - RNA, 65 nt, Human
cugcacaaacauauugauacaaaaacaacacuguuaagaguguuugcaccgucuauguggguaag

SEQ ID NO: 19958 - RNA, 81 nt, Human
agcugccgcgccgccuguccgacucgcccguguucgacgcgccccccagccccccggacucgcugucggaccgcgacagcu

SEQ ID NO: 19959 - RNA, 71 nt, Human
cugagcuccggcagccucagcggcucugagucucccagccucaacccuggccgccgccugccaaucuucag

SEQ ID NO: 19960 - RNA, 68 nt, Human
gaggcuuggucuguaagcgccgcuugauuccuuuguaggggguacaagugguuugggauucagggcuu

SEQ ID NO: 19961 - RNA, 75 nt, Human
gcgguuuaauaaaguugacgggauugcguuucauucucauuuccuuauacaauaccuguuauggccgcugaccgc

SEQ ID NO: 19962 - RNA, 92 nt, Human
ccaucucucagauuacuucauugcucaccggccggcucugaaagaaaaguaucccaaaucggcgcaccuugggcgaauuguuugacaaaugg

SEQ ID NO: 19963 - RNA, 86 nt, Human
aaugcuaauaugauggucuuaggacaugaaccaagacaaacaacuucgaaucugggucacuuaaacaagccaucuauccaggcauu

SEQ ID NO: 19964 - RNA, 66 nt, Human
gagacgggguuucaccguguuagccaggauggucucaaucuccugacuucaugauccgcccgucuc

SEQ ID NO: 19965 - RNA, 70 nt, Human
ggccuugaacgucaucuuuacugugcauuuccuuugaaaauaaagcagcugaagauuucaacacauggcc

SEQ ID NO: 19966 - RNA, 82 nt, Human
guuucuuguaaaggcgucugacaguccugagaauuauugaugguaaggaauaaaaaauguacagaugacuucaugaagauac

SEQ ID NO: 19967 - RNA, 69 nt, Human
uacauuuauugaauauacucuguaaagaaggugcaauccugagcauaauaaaguguagaaaugaaugua

SEQ ID NO: 19968 - RNA, 88 nt, Human
agguugucauacgcauauuugaccuucucucgaaacaggcgcuuggcgucguucagggugugggcgaucagggcgcacuuggcagccu

SEQ ID NO: 19969 - RNA, 86 nt, Human
gggccuugaggaugauguuccgggugugcauccccuggaaguagucgaucugcuccugcgucauccggaagcggaccuucuugccc

SEQ ID NO: 19970 - RNA, 86 nt, Human
agcgggaucgcuucgggugcucgacuccuguugcgcaugcucagcgcgcugcccggcuggggacccgcgcaccugcagcgcccgcu

SEQ ID NO: 19971 - RNA, 85 nt, Human
cucccggucaucaucuucaccacguucuggggccucgucggcaucgccgggcccugguucgugccgaagggacccaaccgcggag

SEQ ID NO: 19972 - RNA, 95 nt, Human
gggauguccugcuccaauacccgcacugcucuggaguauugcccucuuucccaaggagaugcugcugguggagcugguaugggugcggucuuccc

SEQ ID NO: 19973 - RNA, 73 nt, Human
gaaauuuuaguucauauguacacuagccagugguuguggacaaccauuuacuugguguaaagaacuuaauuuc

SEQ ID NO: 19974 - RNA, 66 nt, Human
aagcguuuuaauuccuuucucuguucagcuguuuuugcugagauccauauuuaguuuuauaagcuu

SEQ ID NO: 19975 - RNA, 103 nt, Human; identical to SEQ ID NO: 19735

SEQ ID NO: 19976 - RNA, 75 nt, Human
uggcauggggaccagcuagaacaaugcagauucauccauaaucccuuucugcuguucaccaccacccaugaucca

SEQ ID NO: 19977 - RNA, 63 nt, Human; identical to SEQ ID NO: 981

SEQ ID NO: 19978 - RNA, 88 nt, Human
aguauuuaagauggauauuugguggcucuauuuguucugauaucuuuuggucuaaauuaugagguaccaagauuguuucuuuguuucu

SEQ ID NO: 19979 - RNA, 64 nt, Human
uaaguagaugggagaauauguuuaaaauauuaggaauccuagaccauauuuucaagucaucuua

SEQ ID NO: 19980 - RNA, 63 nt, Human
gccgcauuugcgaggcucuaaaacauggggggugcuccagaaagguuccucgcgcaaaaaggc

SEQ ID NO: 19981 - RNA, 65 nt, Human
ggugagcccugccgcugucccauggcccagggagccacuggugcggacgccggcagauguuuacc

SEQ ID NO: 19982 - RNA, 63 nt, Human; identical to SEQ ID NO: 4175

SEQ ID NO: 19983 - RNA, 131 nt, Human
gaauuugggucccuuugugguacgugcuuuccuucguaguucaacaagugaagguuuauuacugaagauugauccauuguugccuaaagaaguaaaaaaugaagaaagugaaaaagaagaugccuaaaugu

SEQ ID NO: 19984 - RNA, 86 nt, Human
gcugaauuugggucccuuugugguacgugcuuuccuucguaguucaacaagugaagguuuauuacugaagauugauccauuguugc

SEQ ID NO: 19985 - RNA, 97 nt, Human
agacugagaaaaagagcguugaauauaagagaaaauacuuccucuguucucagaucguauuuguuuuaaggccacaccuuuuugaaguuuucaguuu

SEQ ID NO: 19986 - RNA, 75 nt, Human
gccgucuccccugcucccggugcucugcgagaucuccccugaccagaucuccacagcccggacccgggggcuggc

SEQ ID NO: 19987 - RNA, 85 nt, Human
cccagggacuagucuaccaagguuauuuggcagcuaauucuagauuuggaucauugcccagaguugcacuugcuggucucuuggg

SEQ ID NO: 19988 - RNA, 68 nt, Human
gaaguuuuuuaaaccucugaauuuguacacauuuaaaauuucaaguguacuuuaaaauaaaauacuuc

SEQ ID NO: 19989 - RNA, 67 nt, Human
accagguggccuuaguucuccagcaucacaucccuguauaagcuccucugagcagggucgacauggu

SEQ ID NO: 19990 - RNA, 81 nt, Human
aguuuugucaguauuugcauggcuuguacggggcagagaacuucuggagguccuuacuuagccauucuugcugacaucacu

SEQ ID NO: 19991 - RNA, 131 nt, Human
uagucauguacagaacaugaucaaggguguuacacugggcuuccguuacaagaugaggucuguguaugcucacuuccccaucaacguuguuauccaguguaacacccuugaucaugcucuguacaugacua

SEQ ID NO: 19992 - RNA, 65 nt, Human; identical to SEQ ID NO: 476

SEQ ID NO: 19993 - RNA, 62 nt, Human; identical to SEQ ID NO: 9237

SEQ ID NO: 19994 - RNA, 76 nt, Human
uuuguguuguuuuguuuuuauuuuuaaaugaaguuuccaucugugcacguuaagaaaauaaacaaaacaacaggaa

SEQ ID NO: 19995 - RNA, 70 nt, Human
caggcuccaccgguaguuucccgucuuugcaguuucauguuacuauacauuccugccgauccgaguccug

SEQ ID NO: 19996 - RNA, 63 nt, Human
gcuaaggaauggcgcaucuauaaauuuucacacaaucgugguuuuugugccaugcccuguggu

SEQ ID NO: 19997 - RNA, 86 nt, Human
caggggauguucauuuuuuuauuccuguguguuuuaucuagaaagauucaagaagaauauuacagauuguucaaaaauguccccug

SEQ ID NO: 19998 - RNA, 78 nt, Human
gagaacauaaggucuugugcaagaggaggccucgcucuucuguuccuucucggcaccaccuggaucuuugggguucuc

SEQ ID NO: 19999 - RNA, 60 nt, Human
ggcgggggauauagggucgaagccgcacucguaagggguggauuuuucuauguagccguu

SEQ ID NO: 20000 - RNA, 70 nt, Human; identical to SEQ ID NO: 3607

SEQ ID NO: 20001 - RNA, 63 nt, Human; identical to SEQ ID NO: 981

SEQ ID NO: 20002 - RNA, 86 nt, Human
aaaucugauauuuaaaacauuuaugugguaaaauaaucucauuugauuauggauaucauaaauagaauauaaaagauauuacauuu

SEQ ID NO: 20003 - RNA, 78 nt, Human; identical to SEQ ID NO: 11810

SEQ ID NO: 20004 - RNA, 79 nt, Human; identical to SEQ ID NO: 10269

SEQ ID NO: 20005 - RNA, 61 nt, Human
gucccugcagggccgcccgcggcggggcaguguccacucacucgugcucggccccagggac

SEQ ID NO: 20006 - RNA, 110 nt, Human
aggccugcaucaccggccgugauuucuccgcuugcagcuucacuccggagcccgcgaaccggcuaccgccccgcugcagcacgaugaugucgcggucugugaguuugucu

SEQ ID NO: 20007 - RNA, 67 nt, Human
guggugcaaucguagcucaccucucaugccagccuucuguguagcugguguuauaggugugcaccac

SEQ ID NO: 20008 - RNA, 87 nt, Human
ucauaacauucccuaccaguuagauguaccaaaauuuaaugauauauucauaauuuuaugguuugcauuuaaauuuuuaucuuauga

SEQ ID NO: 20009 - RNA, 80 nt, Human
aagcgacuucaaaaauaugggaacacaguuaguuauuuuuacacaguucuuuuuguuuuugugugugugugcugucgcuu

SEQ ID NO: 20010 - RNA, 61 nt, Human; identical to SEQ ID NO: 3291

SEQ ID NO: 20011 - RNA, 80 nt, Human
gcaccucuuggacugaaucguuugucuagacuacauguauuacaaagucucuuuggcaagauugcagcaagaucaugugc

SEQ ID NO: 20012 - RNA, 75 nt, Human
uuuacauuguuuaccaagcuguagugcuuuaagaacacuacuuaaaaagcaaaauaaacuugguuuacauuuaaa

SEQ ID NO: 20013 - RNA, 61 nt, Human
caggcccugccacggucaacucaggucagccagccugaggcuguggccuccaaagggucug

SEQ ID NO: 20014 - RNA, 61 nt, Human
ccccccaggucgcaggugucugaggccagucaaccugcagagcacucgcggcguggguggg

SEQ ID NO: 20015 - RNA, 88 nt, Human
gacccacuuccugcuccagcaccagccccuccagcugaccacccuguuggaccaguacaucagagagcaacgcgagaaggauucuguc

SEQ ID NO: 20016 - RNA, 80 nt, Human
gcaggcagggcuuuaucaacuacuccaagcuccccagccugccccuggugcagggggagcuuguaggaggccucaccugc

SEQ ID NO: 20017 - RNA, 63 nt, Human
gcgagaaggauucugucaugucggccaaugggaagucagauccugacacuguuucggacucgu

SEQ ID NO: 20018 - RNA, 66 nt, Human
gguggugcgcccaucgcugacuggagaggaccugggaucccaccucggccggcgagcgcgcccgcc

SEQ ID NO: 20019 - RNA, 68 nt, Human
aggcaaagaaagccuuaagggagcagagggcuugucuguugcuaccauuucuucaaauucuacugccu

SEQ ID NO: 20020 - RNA, 76 nt, Human
gcacggaacugaccgggauccugaggcugguaacugacccugaaccuaaaacccaggauugauggucuuucucugc

SEQ ID NO: 20021 - RNA, 79 nt, Human
uaagauauuuauuacaugcauaaucuuacuuccuuuucaaaauaaccuuggaagguagguaaagcagguaucgguuuua

SEQ ID NO: 20022 - RNA, 67 nt, Human
ucaccaacuccuuccuuagggacaaaagguagggcuuuauguacaagccuuagggaagaaaugguga

SEQ ID NO: 20023 - RNA, 76 nt, Human
guggcaaguucuuuagccuuugccuuuucgagcuuggcgauacgagccacagacuuaggacccaggacauugccac

SEQ ID NO: 20024 - RNA, 75 nt, Human
gagacugcgggcccagcguuccauguccuuggcaaucuguugagcugucuuggucuugugcuucuccuucuucuc

SEQ ID NO: 20025 - RNA, 69 nt, Human; identical to SEQ ID NO: 5630

SEQ ID NO: 20026 - RNA, 77 nt, Human
gacuucuccuguccauccccuuggcccccucuccucuaguccaugagauuacagcuuugcacacugacaggaggguc

SEQ ID NO: 20027 - RNA, 96 nt, Human
cagacugggccaauguccacaaagaauuccuggucagcaccaccgaugucaaaaggugcaauaucaaggaagggcaaggcgugauggcuuaauuug

SEQ ID NO: 20028 - RNA, 93 nt, Human
auaaacugcuguccagauuguuaauuucauuuauauuuauuuuaauuaauuugucaugaauauggacaaaaccuuuucugggguguggggugu

SEQ ID NO: 20029 - RNA, 63 nt, Human
uugagaaaaagguaauaaugauuuugucagaauucuuugaauuuauauuuacuagcuacuuaa

SEQ ID NO: 20030 - RNA, 85 nt, Human
caugucuugcaugcguguuuucauugguuuucucccuuacugcuucauuuaggaggguguugauuagaggaagcaacaggacaug

SEQ ID NO: 20031 - RNA, 83 nt, Human
cugccaaauauccauuagacauugagugagaaacaggucacaagauugccacucccuuaagcaggaucuagguauuuagguag

SEQ ID NO: 20032 - RNA, 80 nt, Human
gaguuagcaucaugaauuugcuuuucuccucuaaaaugcaaagguuagauucaaauuaucaugauugucagcugucacuc

SEQ ID NO: 20033 - RNA, 97 nt, Human
gcugccuuccuugagcuccccaggagucgguuuccacaucugugagguggagggcugguguggaggugcucauggggugcggugcuugggagacagc

SEQ ID NO: 20034 - RNA, 67 nt, Human
gcuucaaccugaguucugcguuauaaagccuggagaaagcuaagcuuagaacauaacuugcugaagu

SEQ ID NO: 20035 - RNA, 66 nt, Human
ugcuauuguauuauccauuaguucuguaauauuuaauuuuagauucuuuuauuuuuuuaauuggca

SEQ ID NO: 20036 - RNA, 76 nt, Human
uuaucuuuuuguagcaggaauuuaugugccagaggugagagucuuucugguacugauuuuuugagaccaaggauaa

SEQ ID NO: 20037 - RNA, 70 nt, Human
uuauguauauguacugucuaaaacaauacuuuuuuaaaaaaaaggaacaguugggagaaaauaaauauaa

SEQ ID NO: 20038 - RNA, 64 nt, Human
gguccuggauguggugcggaaggagugugaaaacugcgacugccugcagggcuuccagcugacc

SEQ ID NO: 20039 - RNA, 82 nt, Human
ucgcuguggggcggcacgugcuccggcaugggcacguugcucaucagcaaggugcgugaggaguaugccgaccgcaucauga

SEQ ID NO: 20040 - RNA, 71 nt, Human
ccaccucuuuucccccaagcccaacaauccuuugagguacucaugauugagcgcguggugggggggggugg

SEQ ID NO: 20041 - RNA, 92 nt, Human
uuauuuccuggcaacugcucucuguaccgacaaaaucuaucccaaggcauugaccuugugauuagauuuacacagagcuuuugcuuuuauaa

SEQ ID NO: 20042 - RNA, 69 nt, Human
cgcacgcgcuauguggagcauguguguaugagccacacauacacgcagaaaaaguauguagcgacgucg

SEQ ID NO: 20043 - RNA, 65 nt, Human
uagaguguguguauguguguauguuuaaauaauacauuugacuagggcgcaguugcucauaccug

SEQ ID NO: 20044 - RNA, 70 nt, Human
gucgcugggauagaagccuuugaccaagcaggucaggcugaccugguucuuggucagcucaucccgggau

SEQ ID NO: 20045 - RNA, 74 nt, Human; identical to SEQ ID NO: 9061

SEQ ID NO: 20046 - RNA, 66 nt, Human; identical to SEQ ID NO: 2802

SEQ ID NO: 20047 - RNA, 65 nt, Human
gcuccuccagucaccccacagaugccauuucaccaagaaaaugggguggugggaagcuugggagc

SEQ ID NO: 20048 - RNA, 130 nt, Human
ccagugccccuggggcagcugguaguguccagaagaauggacaccugcuccagauuuagaugcccaucugggcuuuuguuugauuugcggcguuccugucuucuguaaagcuagugaguugucccaagag

SEQ ID NO: 20049 - RNA, 76 nt, Human
gaggaguaugggguagagcaauggucugggccaaggaauggugagcuuagggucuuccucugacuccuuacuccuc

SEQ ID NO: 20050 - RNA, 64 nt, Human; identical to SEQ ID NO: 3174

SEQ ID NO: 20051 - RNA, 70 nt, Human; identical to SEQ ID NO: 3175

SEQ ID NO: 20052 - RNA, 99 nt, Human
ugaguuuuuaaacaugcuuuuagacaaaggugcugugaagaccaaaaauugcuuuuuugaaaucauaaagccuuuugacaaguacauaaugagacuuca

SEQ ID NO: 20053 - RNA, 94 nt, Human
uugaacuugaaacagaaaccugugcuaaaaugcuugccucauucaaauguuccuuaaaaccagagcacagagauuuuugcuuuuuuacuaucaa

SEQ ID NO: 20054 - RNA, 72 nt, Human
gagcaucucaagggggccuuauucaauucuagguaacuagccaggugugaaagaaagggcccagggugucuc

SEQ ID NO: 20055 - RNA, 65 nt, Human
gcagaggaagauuggagaccaggaacaugauuuuaaauuaugugccuuuacugcagcuuucuugc

SEQ ID NO: 20056 - RNA, 70 nt, Human
ggagggacagauaacauuguuuuauggggacucagaaagauucauuauuuuauaugucauaugucccuuu

SEQ ID NO: 20057 - RNA, 86 nt, Human
ggagucucacugucacccaggcuggaguguagugcugcgauccugacucgcugcaaccuccaccucuggaguucaggugauucucc

SEQ ID NO: 20058 - RNA, 82 nt, Human
ugcagguuuguuacauagguaaaugugugcuaugguggugugcugcaccuaucaacccaugaccaagguauuaagcucagca

SEQ ID NO: 20059 - RNA, 70 nt, Human
gcaggagagcauacuuggcaaggaugagaauaccugugugauaaacacagcaucugcacauauuuccugc

SEQ ID NO: 20060 - RNA, 75 nt, Human
cuucaguuguccuugugauugggaaauuuguccgugaauucuucagugggauuucucacuccaucauguuugaag

SEQ ID NO: 20061 - RNA, 106 nt, Human
guggaucgaauuuugaaguugugcacagauauuuuuuuaguucgagagacaggagaacuggagcuagaagaagaucucuaugccaaauuaauauuccuauauccgc

SEQ ID NO: 20062 - RNA, 65 nt, Human; identical to SEQ ID NO: 7359

SEQ ID NO: 20063 - RNA, 92 nt, Human
ggacaccaucuuuauaaaaguaaaacuucuagauccugaaauguacuacaguagagucuauaguuuacacuuuuaaucacagauuggaauuc

SEQ ID NO: 20064 - RNA, 64 nt, Human; identical to SEQ ID NO: 7360

SEQ ID NO: 20065 - RNA, 112 nt, Human
gcuaccugccaaaaauucaugcugagccugaacuuccaagugacagcagaacugaaaaugguaugucugcacaaaugccaaggcuaagugagugacacaggcauguuacagc

SEQ ID NO: 20066 - RNA, 99 nt, Human
gguacaagauuuuuaaaauuuuucuuuuaauaaaaaagcuuuacacaaacaagccauuagcuuauuucaagaaagaaaaucgaaaauuagucuaaggcc

SEQ ID NO: 20067 - RNA, 68 nt, Human
ggaggagucggacgaggauaugggauuuggucucuuugacuaaucaccagaaagcaaccaacuuagcc

SEQ ID NO: 20068 - RNA, 69 nt, Human
uggcugcugcccuguggugcugcacacagcugcuccugcugcugcgcaccccagcuaagguugaagcca

SEQ ID NO: 20069 - RNA, 60 nt, Human
gacauucugccagguuuucuugggcaaugacaccaagaaguugacagccaggugaauguu

SEQ ID NO: 20070 - RNA, 81 nt, Human
ggaaucugcuugaucagagacucugaggccaaaaacucaucauaacuugcuggccagcgucuuugaccaguuuaggauucu

SEQ ID NO: 20071 - RNA, 96 nt, Human
aaguccaacaucccgggccguucuguauuuaugucgccacaguugcuuguuuguaguggcauagaugacagcaucucucauccgauggcuggucuu

SEQ ID NO: 20072 - RNA, 68 nt, Human
aguuuaggauaaacacauggcacaguaaccaaauccagucucucauaucccguauuuuuucuuuagcu

SEQ ID NO: 20073 - RNA, 73 nt, Human; identical to SEQ ID NO: 4293

SEQ ID NO: 20074 - RNA, 64 nt, Human; identical to SEQ ID NO: 1642

SEQ ID NO: 20075 - RNA, 93 nt, Human
gccauaugagccacuucucagccaccaugucuuuaaauucaucgacauugaacuuggugaagccccauuucuuugagaaguggaucgucuggc

SEQ ID NO: 20076 - RNA, 70 nt, Human
guucaucucagccacagacaccauccggaagaugaagaacgauuuccggaagauggaggaugagauggac

SEQ ID NO: 20077 - RNA, 72 nt, Human; identical to SEQ ID NO: 6340

SEQ ID NO: 20078 - RNA, 63 nt, Human; identical to SEQ ID NO: 123

SEQ ID NO: 20079 - RNA, 64 nt, Human
ccccacgcucaguccuggucaaaggcugccagaccuuucugagugcccccaggaggggcugggg

SEQ ID NO: 20080 - RNA, 91 nt, Human; identical to SEQ ID NO: 124

SEQ ID NO: 20081 - RNA, 63 nt, Human
guagugcuugucacauaguaagccuuuguuguuguuagcgcuuacuguguaacaaaucacugc

SEQ ID NO: 20082 - RNA, 131 nt, Human
uugccuaagcuggaguacauuggugugaucuuggcucacugcaaccuccaccucccaggggaaucgcuugaaccccggaggcggagguuguggugaacugaaaucgccccauugcacuccagccugggcaa

SEQ ID NO: 20083 - RNA, 67 nt, Human
uccaggacagcauuggaaaagacauagaaaaaggcuuugccaaucuauuuuauucccucuccaugga

SEQ ID NO: 20084 - RNA, 81 nt, Human
gagguuggcccccugaggugugagugaaaugagcuuugcuuuauuuuccaaguuucucucucaccuucaggggcauucuuc

SEQ ID NO: 20085 - RNA, 71 nt, Human
guggccgagguaauugcauugccuguggaacaggggaacuuuccguaccugcagugggugcgccaggucac

SEQ ID NO: 20086 - RNA, 61 nt, Human; identical to SEQ ID NO: 2940

SEQ ID NO: 20087 - RNA, 86 nt, Human
ugguucauggggaaaaacauuaaaauuaaaaaguccaaucaauuauagagguggcuuuaacacuuaaaguuuucucccucaaacca

SEQ ID NO: 20088 - RNA, 122 nt, Human
aauauguucauugcuuguauuuuuaaaacaacagaauuuccaguaugaaacaggcugaaagagcaggaagaaauguucuuuguauaauaaugggaaguuuggaauauaaaaguuuauauauu

SEQ ID NO: 20089 - RNA, 77 nt, Human
gcaucccuaauguucuuccucuagucaguuugcuuugcugaaagcucccuggaauuaguucaagucuaccgggaagc

SEQ ID NO: 20090 - RNA, 82 nt, Human
guuuccauuguguuuugccgaucuucuggcuaaucgugguauccuccauguuauuaguaauucuguauuccauuuuguuaac

SEQ ID NO: 20091 - RNA, 72 nt, Human
uguguuugcuguuuuccaucauguguuauccuaagaguugggguuuuuuuaaaaucuguuucaccaggcgca

SEQ ID NO: 20092 - RNA, 60 nt, Human
gacuaagaacaagacuggaaauaguuuagaaaagaaaugaaaaccggucguggagauguc

SEQ ID NO: 20093 - RNA, 71 nt, Human
gaaaggucauguucccuguccggguggacgcuaggauaaaaaggggucugucggaaugggguuaaccuuuc

SEQ ID NO: 20094 - RNA, 88 nt, Human
augaugcgcgucuucuuguugucccgagccgcguugcccggcgacuccgggaucucggcggucagauaauacgaagccgcagcacugu

SEQ ID NO: 20095 - RNA, 95 nt, Human
uguuaaugccagacugccgaccaugggcgaugagugacuuugaccagcagcuuguucaguuccucgucguugcguauggccagcuggaggugacg

SEQ ID NO: 20096 - RNA, 75 nt, Human
gacaacauaaugagacccccaucucuacagaaaaauuaaaaaauuagccaggcgggguguugcauguuuguaguc

SEQ ID NO: 20097 - RNA, 60 nt, Human; identical to SEQ ID NO: 11695

SEQ ID NO: 20098 - RNA, 86 nt, Human
gcugacacgauggagaagguaugugcaggggacuccuggagggggacgagguuuucagcacagccuucauguuccccgugcucagc

SEQ ID NO: 20099 - RNA, 63 nt, Human; identical to SEQ ID NO: 11697

SEQ ID NO: 20100 - RNA, 94 nt, Human; identical to SEQ ID NO: 15195

SEQ ID NO: 20101 - RNA, 63 nt, Human; identical to SEQ ID NO: 527

SEQ ID NO: 20102 - RNA, 73 nt, Human
uaguaagaacagaaaugcagccuacacacccaauucgucuuggucuggcacuaaauuucucagucuuuuacua

SEQ ID NO: 20103 - RNA, 79 nt, Human
ccgcuggucguggcgaaagagccggcggagccggagacccgcucccggagacgccgacucgcgauccccgcgcgggcgg

SEQ ID NO: 20104 - RNA, 88 nt, Human
cacauaaaucagguuuauuuguuuuucagagaguuuguugcuaaacauuuaccagcacacccuaaagagaggagaaaaaaaauaugug

SEQ ID NO: 20105 - RNA, 66 nt, Human
uaaaguagaaaguuggagucaaacacuggaugcagaaauuuuggauuuuucaucacuuucucuuua

SEQ ID NO: 20106 - RNA, 94 nt, Human
aaguauaguauaguaaauacauaaaccaguaacauagucauuuauugucauuauuaaauauuauguacaggacauaauugcuguacuuuuacuu

SEQ ID NO: 20107 - RNA, 81 nt, Human
cuggcagugcaauagauuuguuuacaccaguaucaccacaaacacgugagugauguauugcaauacauauggcaucacuag

SEQ ID NO: 20108 - RNA, 79 nt, Human
cuuccuccucucugaccgguuggccagggacuaugcagccaucgucuucuuugcuaacaaccgcuuugagacagggaag

SEQ ID NO: 20109 - RNA, 72 nt, Human
gcaucacccucaagagcugccggagacaguuugacaacuuuaaacgggucuucaaggugguagaggaaaugc

SEQ ID NO: 20110 - RNA, 68 nt, Human
gcccucccggcaggcacuacucaucgagagguacuaugccuuugaugaggccuuuguucgggaggugc

SEQ ID NO: 20111 - RNA, 95 nt, Human
gucgccaugaccagugagcuggacaucuucguggggaacacgacccuuaucgacgaggacguguaucgccucuggcucgaugguuacucggugac

SEQ ID NO: 20112 - RNA, 82 nt, Human
uacacucugaucgagauccuauuccagauguuccugcaguauacuuuguaaugccaacugaagaaaauauugacagaaugug

SEQ ID NO: 20113 - RNA, 67 nt, Human
uuauuaagcuccuguuaaauaugcacauacagacacacguugaaauuccauuucaggggcuuuauag

SEQ ID NO: 20114 - RNA, 75 nt, Human
ccucuggccccgucccucuuuucuccggcagggacgcaggaugccuuggugcacucuagagacggggaccggagg

SEQ ID NO: 20115 - RNA, 63 nt, Human
gcccagagcugugguauaaauuuuuuuaauaggcugaaauagaaauaugaauagcauuugggu

SEQ ID NO: 20116 - RNA, 66 nt, Human
ggggccccaacgcgggcuuagccucccgccuuggcucgggcaggcgcccgucgacccuucggcccc

SEQ ID NO: 20117 - RNA, 71 nt, Human
uucacaagacagugaugaugaaaaaaugccagaucuggaguaaggaauaugucaucaccuggauuugagaa

SEQ ID NO: 20118 - RNA, 60 nt, Human
gccagggcaggguguggggacugccacacagcccacguacaucucuccuccuugcuuggc

SEQ ID NO: 20119 - RNA, 78 nt, Human
gugacauccugcacagagucaauuaugaauguguuguuuuaaaccauuauaugaguaccauucugcaaaggauuccau

SEQ ID NO: 20120 - RNA, 75 nt, Human
cauuguccccacugcauugccaucuugaagauuugucacacucugacaggagaaggcuuguuuggcaugacaaug

SEQ ID NO: 20121 - RNA, 60 nt, Human
cgggagccgcauggagccccgggcggcggacggcugcucccugggcgacguggguuucug

SEQ ID NO: 20122 - RNA, 66 nt, Human; identical to SEQ ID NO: 5852

SEQ ID NO: 20123 - RNA, 62 nt, Human; identical to SEQ ID NO: 5854

SEQ ID NO: 20124 - RNA, 62 nt, Human
uucuucauccagaugcugacuuuggguaugauuauccauccguuuugcauuggaaauuagag

SEQ ID NO: 20125 - RNA, 70 nt, Human
acggaggggaggagacucaguuccucuucaucccuuuacuuccugauaaacuugucucacuuuacucugu

SEQ ID NO: 20126 - RNA, 67 nt, Human
ggccugccaucacugugcacccacacaccaccagcuguaacccaggcacaggaccucaaggugggcc

SEQ ID NO: 20127 - RNA, 77 nt, Human
ucugaauuauccuggcugucuuuaguugcuaucgguccuggucuuggcuacuaacaucauccagccagguguucaga

SEQ ID NO: 20128 - RNA, 74 nt, Human
accuacuuugagauggcaagaacugcuggagacacacuggauguuuuuaccaugauugacaucuuuaaguaugu

SEQ ID NO: 20129 - RNA, 78 nt, Human
gcagcgucuggucacucgcucuccucuggggacugcagagaagcaggaccucgggccaugggguguuuugaaugcugu

SEQ ID NO: 20130 - RNA, 84 nt, Human
cucccggucaucaucuucaccacguucuggggccucgucgcaucgccgggcccugguucgugccgaagggacccaaccgcggag

SEQ ID NO: 20131 - RNA, 62 nt, Human
gacauguuuauuaauuaaacuaucacuuaaauaaaaaaaagugcauagaaaauaaacauguu

SEQ ID NO: 20132 - RNA, 60 nt, Human
uuuuccuuuuuuuuuuuucucuuuuucucuaaccagaagcuuggaagaacacaaggaaaa

SEQ ID NO: 20133 - RNA, 75 nt, Human; identical to SEQ ID NO: 74

SEQ ID NO: 20134 - RNA, 67 nt, Human; identical to SEQ ID NO: 836

SEQ ID NO: 20135 - RNA, 87 nt, Human; identical to SEQ ID NO: 76

SEQ ID NO: 20136 - RNA, 71 nt, Human; identical to SEQ ID NO: 77

SEQ ID NO: 20137 - RNA, 87 nt, Human
gcgcgucugugauucuuccuucuugacuuuuugcugccuucucuccccgcagcggacuuuaggggauuacaggaugauaggcugcgu

SEQ ID NO: 20138 - RNA, 76 nt, Human
uccgcagugugagaaguagauaggguuacugguuacgucaguaaaaccgaggcucaguuuaaucuugagaugcggg

SEQ ID NO: 20139 - RNA, 73 nt, Human; identical to SEQ ID NO: 18603

SEQ ID NO: 20140 - RNA, 64 nt, Human; identical to SEQ ID NO: 1642

SEQ ID NO: 20141 - RNA, 70 nt, Human; identical to SEQ ID NO: 3190

SEQ ID NO: 20142 - RNA, 62 nt, Human
gccaucacugccacccagaagacuguuggauggccccuccgggaaaacuguggcgugauggc

SEQ ID NO: 20143 - RNA, 65 nt, Human
gccgcaucuucuuuugcgucgccagccgagccacaucgcucagacaccauggggaaggugaaggu

SEQ ID NO: 20144 - RNA, 72 nt, Human; identical to SEQ ID NO: 3442

SEQ ID NO: 20145 - RNA, 62 nt, Human
ccuuccuguccgcccucuuccccucuaaugcucacgcucccaacacaaggugggcagggagg

SEQ ID NO: 20146 - RNA, 89 nt, Human
ggcugggccaagccagggauggggccacagccagaaccccgagcccuacuuccagguucugguuagcucagccccagcccagcccagcu

SEQ ID NO: 20147 - RNA, 90 nt, Human; identical to SEQ ID NO: 2702

SEQ ID NO: 20148 - RNA, 119 nt, Human
gagaaggagaucggcuugugguuucacccugaggaacugguagauuacacgagcugugcucagaacuggaucuaugaaugacaggagggcagaaccacauugcuuuucacauccauuuc

SEQ ID NO: 20149 - RNA, 73 nt, Human; identical to SEQ ID NO: 721

SEQ ID NO: 20150 - RNA, 82 nt, Human
ggggaccggucucaccgaaugcauccugucgggcaucaugucugugaacgggaagaaggugcugcacauugaccggaacccc

SEQ ID NO: 20151 - RNA, 63 nt, Human; identical to SEQ ID NO: 722

SEQ ID NO: 20152 - RNA, 60 nt, Human; identical to SEQ ID NO: 723

SEQ ID NO: 20153 - RNA, 82 nt, Human
cuggagcagcugcguaaaacauuacaggccggagcuuaucaaagauggcaaguuuggggccuacaugcaggugcacauucag

SEQ ID NO: 20154 - RNA, 65 nt, Human
uucagaaugaugggccugugaccauagagcuggaaucgccagcucccggcacugcuaccucugaa

SEQ ID NO: 20155 - RNA, 68 nt, Human
gaucaacaggcuuauuagaagaaugaacuaaggugucuaccaugauuauuuuucuaagcugguugguu

SEQ ID NO: 20156 - RNA, 94 nt, Human
gccccucucagcagacgcuucaugauaggaaggacugaaaagucuuguggacaccuggucuuucccugauguucucguggcugcuguugggggc

SEQ ID NO: 20157 - RNA, 61 nt, Human
gcgggagagucuguguguaugugucuuccccggaauccacaacacagcacccuccuccugu

SEQ ID NO: 20158 - RNA, 68 nt, Human
ccggggcucugcgggcgccgggcagagaccugcggccaggucgugucccgugugcccgagagcgccgg

SEQ ID NO: 20159 - RNA, 79 nt, Human; identical to SEQ ID NO: 6595

SEQ ID NO: 20160 - RNA, 86 nt, Human; identical to SEQ ID NO: 7823

SEQ ID NO: 20161 - RNA, 73 nt, Human; identical to SEQ ID NO: 7824

SEQ ID NO: 20162 - RNA, 84 nt, Human
ggccgcccggaacaccuucaccuucugcugcacgaaaugcuucuucuuggucuuggaggcgaagccgaaaccugggccggggcc

SEQ ID NO: 20163 - RNA, 98 nt, Human
aggagaagaccuucaagcuuuacauuuggacuuggacgcaagaacuucaggaggauggagucacuugugguauugauguggacuuugagguuuggccu

SEQ ID NO: 20164 - RNA, 68 nt, Human; identical to SEQ ID NO: 10839

SEQ ID NO: 20165 - RNA, 70 nt, Human
ccuccugacacccuucucccacucuccuaggcauucuggaccucuggguugggaucagggguaggaaugg

SEQ ID NO: 20166 - RNA, 130 nt, Human
ggagguccccuucuauuggggcuugugauuccuuuugacggggcuugagguccucagggguuuucuucccauuaccgggcuggcccccuguuuuccgauuuguuugucccugggcgggaguauggccucc

SEQ ID NO: 20167 - RNA, 93 nt, Human
uccauaaauccuugaugauugacaacacccauuuuuccuuuugccgaccccaagaguuuugggaguuguaguuaaucaucaagagaauuuggg

SEQ ID NO: 20168 - RNA, 65 nt, Human
gaggaagacggugcccgauccauccacagaaaaaccuucuaaugucgggacaucaucuucaccuc

SEQ ID NO: 20169 - RNA, 77 nt, Human
uauuccacguggauugggggcuccaucuuugccucccuggacaccuuuaagaagaugugggucuccaaaaaggaaua

SEQ ID NO: 20170 - RNA, 65 nt, Human
gguugcaggaacccaaggcgugaacgauggugacaugcggcuggccgaugggggcgccaccaacc

SEQ ID NO: 20171 - RNA, 64 nt, Human
ugagauccaggucaguugugauuaauuuuucucuguauuaugcaauguauuuuccugcuuuuca

SEQ ID NO: 20172 - RNA, 99 nt, Human
gagaaugaugguucucugcuuuauaucuccaacuggaauaaugcauuauuuaaccauuuucuccauuguuggauccuagaguuguuuccaguuuuucuc

SEQ ID NO: 20173 - RNA, 67 nt, Human
guuuuauuccaucccuguaucaaccuauuuaacacuucagcaggaccuggugcauguggauugauac

SEQ ID NO: 20174 - RNA, 77 nt, Human; identical to SEQ ID NO: 15248

SEQ ID NO: 20175 - RNA, 96 nt, Human
gacaauggcagcaucuacaacccugaagugcuugauaucacagaggaaacucugcauucucgcuuccuggaggguguccgcaauguugccaguguc

SEQ ID NO: 20176 - RNA, 63 nt, Human
gaguccuggccuugucuguggagacggauuacaccuucccacuugcugaaaaggucaaggcuu

SEQ ID NO: 20177 - RNA, 87 nt, Human
gauccauuuucacuuauuggagagagcacgauuuauuguggugacaauucaguguggagucgugcugcuccagaguguaaagugguc

SEQ ID NO: 20178 - RNA, 81 nt, Human
uuacuacaaagcaacaguuauguuugaaugcgauaaggguuuuuaccucgauggcagcgacacaauugucugugacaguaa

SEQ ID NO: 20179 - RNA, 63 nt, Human
guuccuucauucugaccuucaaauguguagagagcuuugcacgucccuauggcagggaggggc

SEQ ID NO: 20180 - RNA, 67 nt, Human
acacugcgcugauggcacgguucucagucgcgcgagacacggaggagacagaggcgauggugcgugu

SEQ ID NO: 20181 - RNA, 74 nt, Human
cgcucuguuacccaggcuggagugcaguggcaagaucuuggcucaccgcaaccuccaccuccagguuucaagcg

SEQ ID NO: 20182 - RNA, 68 nt, Human
gacucguauccacaacuguaguaucauacagaacauguuuuguuuuguuuuguuucugagauggaguc

SEQ ID NO: 20183 - RNA, 63 nt, Human
gucaccucaagucuauaguuuacauuagaguucacucuugguguacauucuguagguuuugac

SEQ ID NO: 20184 - RNA, 77 nt, Human
ugccccguuacucuuagugugauagacuaccacgcugguuuauguucagcguuccccuauauuguuguuucggggca

SEQ ID NO: 20185 - RNA, 61 nt, Human
cuuguuguggaggcugcugcgggcgcaaagggcacuuuucugugauagugucgacggugag

SEQ ID NO: 20186 - RNA, 73 nt, Human
gguguuccugcagcguccacacagaggcagcagcucuaaugaaugauuagcuuguggaguuguggcaaauacc

SEQ ID NO: 20187 - RNA, 99 nt, Human; identical to SEQ ID NO: 18352

SEQ ID NO: 20188 - RNA, 62 nt, Human
ucguggugaucuaggcauugagauuccugcagagaaggucuuccuugcucagaagaugauga

SEQ ID NO: 20189 - RNA, 100 nt, Human
uugcaauuauuugaggaacuccgccgccuggcgcccauuacacagcgaccccacagaagccaccgcgugggugccguggaggccucuucaagugcugcag

SEQ ID NO: 20190 - RNA, 87 nt, Human
gguaggcgcaguaccguguaucguagguagcaguaggaacgggggccgccgcggccugcagccgcucauggcggugaggugugugcc

SEQ ID NO: 20191 - RNA, 68 nt, Human
ccgcgugcaguaccaguucgagauggagagcuucgacuccauccccggccuggugcgcugcuacgugg

SEQ ID NO: 20192 - RNA, 65 nt, Human
gcccagggaaggccaaccgaauugcucacggcagcagaauggagggccagucccggaaucugggc

SEQ ID NO: 20193 - RNA, 72 nt, Human; identical to SEQ ID NO: 2728

SEQ ID NO: 20194 - RNA, 118 nt, Human; identical to SEQ ID NO: 3011

SEQ ID NO: 20195 - RNA, 123 nt, Human
ggugccccucacccugccuauccgcauagcacgccccgccagaacuaccacaggcaauacaagcacuggugccccugaccggcagcugcgcgcacggcaggccugccuaucccucacagcacc

SEQ ID NO: 20196 - RNA, 65 nt, Human
ucaugcugcagcauauuguacuggccugcugcuggcccgcaggcuucucaauagguucggcaugg

SEQ ID NO: 20197 - RNA, 78 nt, Human
guguggagacugagagguuaacugucuugcccagcgcaagucaacagcaaaacggaacuaaaauuucaggcucgacac

SEQ ID NO: 20198 - RNA, 70 nt, Human
ccaccggguaucuagccuguggccaccccggagaugacacgaggcucacaugacucuagacacuuggugg

SEQ ID NO: 20199 - RNA, 67 nt, Human
gcuccagcagcgagggguucgcguuacuuaggaacagcagcucuuuuugcccuucuucuguaggagc

SEQ ID NO: 20200 - RNA, 88 nt, Human; identical to SEQ ID NO: 8544

SEQ ID NO: 20201 - RNA, 76 nt, Human
aaauagugauuccaaagacaagguuucccuggaacccaccagauguacaagaaacaaaucuuuagguuugccauuu

SEQ ID NO: 20202 - RNA, 74 nt, Human
aggaaacagaaaguuugagccuauaagccucuuuaucccaaucaaauggcuaacguccacucuuucuggcuucu

SEQ ID NO: 20203 - RNA, 68 nt, Human
guggauuugacccuccuguugguuaguuagcuucagaauggucuauaaccagacaaagucaaauucac

SEQ ID NO: 20204 - RNA, 66 nt, Human; identical to SEQ ID NO: 4822

SEQ ID NO: 20205 - RNA, 67 nt, Human
auaaugaauuauaaaacuuugauaguuacauuguacuaucauuuaugaggcauuuauuuuucauuau

SEQ ID NO: 20206 - RNA, 73 nt, Human
uacaccugaaagaaacuucauacuuguguguucuguuccccaucucagagcaagauuaugaagagaaggucua

SEQ ID NO: 20207 - RNA, 66 nt, Human; identical to SEQ ID NO: 4823

SEQ ID NO: 20208 - RNA, 71 nt, Human; identical to SEQ ID NO: 2059

SEQ ID NO: 20209 - RNA, 85 nt, Human
caacauuagacauuucuuucaguacugguuuugucccuaucugccaggggcaaagaaagaugaaaagauaauuuauccuauguug

SEQ ID NO: 20210 - RNA, 63 nt, Human
ggcauuagcuagauaagguauaauaaaacuuccuuaccuacaaauuugaaacauguugauguc

SEQ ID NO: 20211 - RNA, 90 nt, Human
gugaguugagcgcugcugcuccgcgguggagucaccgcaccgcucccgggaucaugguguucuacuucaccagcagcagcguuaauucau

SEQ ID NO: 20212 - RNA, 89 nt, Human; identical to SEQ ID NO: 6085

SEQ ID NO: 20213 - RNA, 111 nt, Human
gcugaagcaucagaagaaacagaugaaaaugauuugauccuggaaguaacugcaggaguuggaggucaggaggcaauguuguuuacaucagagauauugauauguaucagc

SEQ ID NO: 20214 - RNA, 74 nt, Human; identical to SEQ ID NO: 521

SEQ ID NO: 20215 - RNA, 61 nt, Human
guugcuugacgggcacccacggccagcccacaaggcuauccuggccgcccgcuccagcuac

SEQ ID NO: 20216 - RNA, 84 nt, Human
aaaauauuuuuuaaauuuuuaaaauuugauuuuaaauuucaaauaaauuuaaauaaauuuuaaauaaauuuuaaauaaaauuuu

SEQ ID NO: 20217 - RNA, 74 nt, Human
ccuuaguuucuuagcccaugaaacgagaucauugccugacaccagggacuaccucaagggcuuuugacuugagg

SEQ ID NO: 20218 - RNA, 68 nt, Human
gcuaagaauucagaugucaggaagucugugaaucuugauggauuuucugagaaaccugacucaauggc

SEQ ID NO: 20219 - RNA, 94 nt, Human
uaagagggaaguaagacuuuuaagaaaagaaaaaguuaugccucauuccucauguggcuuccaauaaguaucuuaggaacuuauuuccuuuuua

SEQ ID NO: 20220 - RNA, 83 nt, Human
ggggggaaggguggucaccgcucagacguccagauagggaagcacgcuucccuaacgccgugccaggguggcgaucucccccc

SEQ ID NO: 20221 - RNA, 67 nt, Human
aagcaaaaaggaauguuuuacaacaaagcuuauuaaaacaucugguuccuggaauauuucuugguuu

SEQ ID NO: 20222 - RNA, 84 nt, Human; identical to SEQ ID NO: 286

SEQ ID NO: 20223 - RNA, 89 nt, Human; identical to SEQ ID NO: 288

SEQ ID NO: 20224 - RNA, 77 nt, Human
acggccgaggggguagcuuuaacugugacgggugucgcccaggugaagaucaugacggagaaggaacuccuggccgu

SEQ ID NO: 20225 - RNA, 85 nt, Human
cgagggcccuccgugccgccggcgccaugggcaauugccacacgguggggcccaacgaggcgcuggugguuucagggggcuguug

SEQ ID NO: 20226 - RNA, 116 nt, Human
uuccgggaagcugaguugaaaaagggaauagugagauguagaaauuucaaggggacacccaagauaugugagauuuaaaggagacauuaaagcuggaaagaagacuucauaaggaa

SEQ ID NO: 20227 - RNA, 73 nt, Human
cugugcccugacccuacaagaugccaagagaagaugcucacuucaucuaugguuaccccaagaaggggcacgg

SEQ ID NO: 20228 - RNA, 67 nt, Human
gccuccuccugaauccucucucaguccuccaacacuaccaagaagaaaagcaauuauucaggauggc

SEQ ID NO: 20229 - RNA, 84 nt, Human; identical to SEQ ID NO: 286

SEQ ID NO: 20230 - RNA, 89 nt, Human; identical to SEQ ID NO: 288

SEQ ID NO: 20231 - RNA, 61 nt, Human; identical to SEQ ID NO: 776

SEQ ID NO: 20232 - RNA, 66 nt, Human; identical to SEQ ID NO: 1888

SEQ ID NO: 20233 - RNA, 69 nt, Human; identical to SEQ ID NO: 10828

SEQ ID NO: 20234 - RNA, 65 nt, Human; identical to SEQ ID NO: 1245

SEQ ID NO: 20235 - RNA, 76 nt, Human; identical to SEQ ID NO: 5199

SEQ ID NO: 20236 - RNA, 84 nt, Human; identical to SEQ ID NO: 1246

SEQ ID NO: 20237 - RNA, 84 nt, Human
cguugauuuugggccuauugaagacaccugcucaguaugacgcuucugagcuaaaagcuuccaugaaggggcugggaaccgacg

SEQ ID NO: 20238 - RNA, 62 nt, Human
gaaucucuacguugcuuaacccuuuuggcguguaccagaggcaagguaaugucgggggaauc

SEQ ID NO: 20239 - RNA, 69 nt, Human
gggucugucacuugauuaugaacugguugaccaagauggucggaucucaugacgcugagugacaggaac

SEQ ID NO: 20240 - RNA, 70 nt, Human
agcuagaagaccuguugcggaagguucgcgccaaggagaccaggaagcgagcacucagcagguuaaagcu

SEQ ID NO: 20241 - RNA, 68 nt, Human; identical to SEQ ID NO: 18170

SEQ ID NO: 20242 - RNA, 74 nt, Human
gugaucucugugggcauuuauaaucugguccagaaggcucucaagccuccuccaauaaagcucuaucgggaaac

SEQ ID NO: 20243 - RNA, 77 nt, Human
gcaccagcucuugggccucaaccuccucuuccugcugucccagaaccggguggcugaguuccacacggaguuggagc

SEQ ID NO: 20244 - RNA, 65 nt, Human
ggcgaguggaaccguaaaagccccaaucuuagcaagugcggggaagagcugggucgacucaagcu

SEQ ID NO: 20245 - RNA, 71 nt, Human
aggacuagagcucaugcugaucaugucggucagggguuugacuggcagaguacggcugcuguuggaguuuu

SEQ ID NO: 20246 - RNA, 74 nt, Human
guuuugaaagcuguacaauuuggugaauggagugaccaaccucgcauaaccaaagaugugauuuguuuucaugc

SEQ ID NO: 20247 - RNA, 63 nt, Human
gggaggccaacuugaaaaaggccccaccaaaaagguagcgcuggccaccaaagagggccuucc

SEQ ID NO: 20248 - RNA, 61 nt, Human
gugggaaccccuuugccugaacgccuuacuaauggcaaguuuaaccccccgggguucccac

SEQ ID NO: 20249 - RNA, 71 nt, Human
ggacuugucuugguuccagaaccugacgacccggcgacggcgacgucucuuuugacuaaaagacagugucc

SEQ ID NO: 20250 - RNA, 71 nt, Human
ggucagcaguccuagcccccaacagccccagagcagggguucuccaaagggggaacuuggagggcugaacc

SEQ ID NO: 20251 - RNA, 73 nt, Human
gcgggccgcugccaugacgaccgccaucuuggagcgccugagcacccugucggucagcgggcagcagcugcgc

SEQ ID NO: 20252 - RNA, 75 nt, Human
accgggggcccccuuauuguuuggggcaaagggccagggccccggaaacgcuccccauauaaaauggcccccggu

SEQ ID NO: 20253 - RNA, 65 nt, Human
gaacaggacccgucgucaugggccgugugauccguggacagaggaagggcgccgggucuguguuc

SEQ ID NO: 20254 - RNA, 79 nt, Human
cugcucuucuucagccauggccagcaaaacagugcagcagacuuguccaugcugguccuggagucccuggagaaggcgg

SEQ ID NO: 20255 - RNA, 60 nt, Human
uggagguggcugacgagcugcuggaaaaucuggcuaaaguguucagccugauggacccca

SEQ ID NO: 20256 - RNA, 97 nt, Human
ggguguguuagccccgccucuucuccuugugggaugcguccggcauauucuugcugggcuucuucccagagguuggagccgcgugcuuuuuuuaccc

SEQ ID NO: 20257 - RNA, 73 nt, Human
gaauuucaacugggugaaucuguaaaauauuuccuggauaacuuggauaaacuuggagaaccagauuauauuc

SEQ ID NO: 20258 - RNA, 98 nt, Human
gguagccggaggggcccgccgaggcggcggcggcggcggcaagauggcggacuuccugccgucgcgguccgugcuguccgugugcuuccccggcugcc

SEQ ID NO: 20259 - RNA, 77 nt, Human
gcagcccgaacaagaucacucaaggugaaggauaaucuacuaauaccagcacuuugaaugaaaauuuguuucucugc

SEQ ID NO: 20260 - RNA, 72 nt, Human
ggcuggcccccaaaguuuccgguucucccccaagugggaaaauaggggggccgaaaccaacagggguuugcc

SEQ ID NO: 20261 - RNA, 70 nt, Human
gagaccgagccauguggcuagaaauccuccucacuucagugcugggcuuugccaucuacugguucaucuc

SEQ ID NO: 20262 - RNA, 70 nt, Human
uuucugggcccugaauucuauuuuaguaaaauaaaauuuuacuaaccagauaggggaugggguuggggaa

SEQ ID NO: 20263 - RNA, 72 nt, Human
gcccuugauguccugcaaaugaaggaggaggauguccuuaaguuccuugcagcaggaacccacuuagguggc

SEQ ID NO: 20264 - RNA, 62 nt, Human
uccccgcuccugaguucacugcuacucaacccugagguugcagacuugggccugaaagggga

SEQ ID NO: 20265 - RNA, 63 nt, Human
ccaccaccaugccugacccauuuggcagcagccucgugugugguggucugguguggacggugg

SEQ ID NO: 20266 - RNA, 67 nt, Human
agggaaagaauugaucgccguuucugguaaaaagcugggaagaugggccuuaaauucuugaaaaccu

SEQ ID NO: 20267 - RNA, 60 nt, Human; identical to SEQ ID NO: 1551

SEQ ID NO: 20268 - RNA, 65 nt, Human
ggcuacguaucccggaggguugcuccuuuugccccguuucggguucuugacccuccaugcuggcc

SEQ ID NO: 20269 - RNA, 64 nt, Human; identical to SEQ ID NO: 3783

SEQ ID NO: 20270 - RNA, 61 nt, Human
gugucacuguagaccccaaauaccaucccaagauuaucgggagaaagggggcaguaauuac

SEQ ID NO: 20271 - RNA, 68 nt, Human
gaagacucucugccuccgccaaaauuuaauuaaaugcauugagaaucuggaggagcuacagagucuuc

SEQ ID NO: 20272 - RNA, 80 nt, Human
gccagggggaaccacgcuugcuugagggcucuggaacugcauccuaccaccaacucggcccaacuggacaagccccuggc

SEQ ID NO: 20273 - RNA, 78 nt, Human; identical to SEQ ID NO: 13410

SEQ ID NO: 20274 - RNA, 79 nt, Human; identical to SEQ ID NO: 1810

SEQ ID NO: 20275 - RNA, 67 nt, Human
cugggcggcggcacgggcucaggcaugggcacgcugcucaucagcaagauccgugaggaguucccgg

SEQ ID NO: 20276 - RNA, 65 nt, Human
gccacacugucggugcaccagcugguggagaauacagacgagaccuacugcaucgacaacgaggc

SEQ ID NO: 20277 - RNA, 88 nt, Human
gccugggcuucgcgggccgcucacccacccgcgggcagcccagcaguaaccgggggcccugaaccguggcccgaacuucaccccaggc

SEQ ID NO: 20278 - RNA, 71 nt, Human
gaagauccucuguagaagaacucggugccccugcgaacucggcaguuaacugcguuccucuggaggacuuu

SEQ ID NO: 20279 - RNA, 67 nt, Human; identical to SEQ ID NO: 3685

SEQ ID NO: 20280 - RNA, 73 nt, Human; identical to SEQ ID NO: 2833

SEQ ID NO: 20281 - RNA, 85 nt, Human
ccaaugcuacacaaccagaaaguaaggcguucuacuugaaaaugaaaggagauuauuuuagguaucuuucugaaguggcaucugg

SEQ ID NO: 20282 - RNA, 90 nt, Human
gggggacugaauggcgcauuccgggcgggagggcaaaacaaccccacugguuuuccccgcccccccuggaaucugccccccguguccccc

SEQ ID NO: 20283 - RNA, 79 nt, Human
ccagccagacaccuccaagcguucaaagugaaggccgugcagagcuggucacugaaaugagccugauaggauaggcugg

SEQ ID NO: 20284 - RNA, 72 nt, Human
gccaucaccccgucugucucccgcaccagcuucaccuccgugucccgguccggggguggcgguggugguggc

SEQ ID NO: 20285 - RNA, 65 nt, Human
ccuuguacacucgcugcgaacacccucguggucuuacgcaucugggugucgcggcgcccacaagg

SEQ ID NO: 20286 - RNA, 63 nt, Human
guggcggggccccggcggccuggggggucuccugggcccccccccacccauggagcccaccgc

SEQ ID NO: 20287 - RNA, 63 nt, Human
cuucuggccuuaugucucaggaaugcaguuuauuuugauuggcaucuucuaccaggccugaag

SEQ ID NO: 20288 - RNA, 63 nt, Human
ucagcccuuacaaucucacaugccuaccucuucugugguaguuccugagccuugaggaguuga

SEQ ID NO: 20289 - RNA, 104 nt, Human
ugcacgcguacguaagcuuggauccucuagagcggucgccuacuacuacuaaauucgcggccgcgucgacaucuggauggcaucuacuucguaugacuauugca

SEQ ID NO: 20290 - RNA, 76 nt, Human; identical to SEQ ID NO: 14654

SEQ ID NO: 20291 - RNA, 73 nt, Human
gagcucagugccuuaccuuugcagggccaggguccccguucuggccaguguuggcuagggacacuugcaguuc

SEQ ID NO: 20292 - RNA, 80 nt, Human
agagguggucugcugaccugugguaucucagaggggacguuccuccuccucccugugcacaggugggcugaccuccugcu

SEQ ID NO: 20293 - RNA, 130 nt, Human
cauuuucuuuucuaauggcauugaaacuuuaaaaaaaauggauucaacuguuuuugcagaauguagaaaguauucuguguccuugguuaaagaaauccacuugugaagugugccuggaaaaugaaaguug

SEQ ID NO: 20294 - RNA, 66 nt, Human
gaggcagguggaucacgaggucaagagaucaagaccauccugaccaacguggugaaacccugucuc

SEQ ID NO: 20295 - RNA, 62 nt, Human
uguuuaucuuuucuuuauucuacuaguugaaacucaauuuuuuaauaugaaacaaauagaca

SEQ ID NO: 20296 - RNA, 67 nt, Human
cuccccaguccucuccuggcaccagcaccuuagaaguuguuggcagaaggcacuuaaacugugggag

SEQ ID NO: 20297 - RNA, 60 nt, Human
gccuccucucccuucugugggucgcucccagagccauggcccaugggaaggacagagugu

SEQ ID NO: 20298 - RNA, 67 nt, Human
uguguccuuggggccuggggggauguugcuccucagcucccucccucagcccugccccucugagaca

SEQ ID NO: 20299 - RNA, 62 nt, Human
gggggugguaaggaggaggcggguuuggacagaaggacaagauacuuccuucuaaagcuuuc

SEQ ID NO: 20300 - RNA, 86 nt, Human
agcuccgcgccgccggcaaugagaguuuccugcaacggccaguacgccgaggccuccgcgcucuacggccgcgcgcugcgggugcu

SEQ ID NO: 20301 - RNA, 76 nt, Human
cacgggggaggaaggaaggagcucccaacucgccuggccuggccacgggauggcccccaaauucccagacucugug

SEQ ID NO: 20302 - RNA, 60 nt, Human
guguucucuacuccaaccgagcagcaugucacuugaaggcauggaaacugcagagacugc

SEQ ID NO: 20303 - RNA, 86 nt, Human
gauggcaagccuagcccccaucccugcccaagaccauccucugcaggacaggccugaugggcgagugguggggcagggcaugccuc

SEQ ID NO: 20304 - RNA, 102 nt, Human; identical to SEQ ID NO: 2172

SEQ ID NO: 20305 - RNA, 80 nt, Human; identical to SEQ ID NO: 367

SEQ ID NO: 20306 - RNA, 78 nt, Human
gagaaugcaaaauucacuuacauuuuaaagacagaacacacuucaugucagugguaggcugauucugauuuugcucuc

SEQ ID NO: 20307 - RNA, 85 nt, Human
gauuuugcucucagaaccccuucccccuucaucaugccccucugcuuuaggguuacgcuaguggaaaaauuugagcagcaaacuc

SEQ ID NO: 20308 - RNA, 111 nt, Human; identical to SEQ ID NO: 1275

SEQ ID NO: 20309 - RNA, 60 nt, Human; identical to SEQ ID NO: 1276

SEQ ID NO: 20310 - RNA, 74 nt, Human; identical to SEQ ID NO: 16717

SEQ ID NO: 20311 - RNA, 105 nt, Human; identical to SEQ ID NO: 11263

SEQ ID NO: 20312 - RNA, 62 nt, Human
agguuuuaggguuaauauacuguuucauauacuguacaaaguuucaucauugcccccaaccu

SEQ ID NO: 20313 - RNA, 74 nt, Human
ggaauuucagagugagagcauauacaauucaaaacacuugcuuugucccuuuucucagagcucugauauuuucc

SEQ ID NO: 20314 - RNA, 78 nt, Human
aggugcaguaaagguccauuguguggcuugagaccuaugaucugaggcuugugcauaauaagauggcagcuguuaccu

SEQ ID NO: 20315 - RNA, 75 nt, Human
ccucaacugcuguucuagacugugggggugcauuccugucucagcaccaaggaucccaacaggcaggcagggagg

SEQ ID NO: 20316 - RNA, 61 nt, Human; identical to SEQ ID NO: 9168

SEQ ID NO: 20317 - RNA, 86 nt, Human; identical to SEQ ID NO: 9092

SEQ ID NO: 20318 - RNA, 65 nt, Human; identical to SEQ ID NO: 247

SEQ ID NO: 20319 - RNA, 65 nt, Human
uagagaauauuugauuuuuguugucaguguauuaaagaaauuuucacauugauaaauguucucua

SEQ ID NO: 20320 - RNA, 75 nt, Human
cuaaucaguuucagcuuugcaggagguuuccugcauaaauugggaaguaacacuggaaaguaggaauuugguuag

SEQ ID NO: 20321 - RNA, 99 nt, Human
ugggaagacuguauauuuauaauuugcauacuacuugcaauuuuuuguuuuucaucacuuguaauaauggaauggaaauguaagcuauaaagacucuca

SEQ ID NO: 20322 - RNA, 70 nt, Human
uucuuaauuuugaugguuggcuauuugacuucucuaaaaaugagaaagagcuauuuuaaaauauaaagaa

SEQ ID NO: 20323 - RNA, 75 nt, Human
acuauucaggcgcaguacaaguuggggcacugcauccuuuguggauggauuuccguugcuguguuccucacaagu

SEQ ID NO: 20324 - RNA, 60 nt, Human
auguaaacuuuuaugaaaaaaauuuaaaguacacuagauuucuucaguaaauuaucacau

SEQ ID NO: 20325 - RNA, 63 nt, Human; identical to SEQ ID NO: 19734

SEQ ID NO: 20326 - RNA, 61 nt, Human
uggggcacugaggcccgggauguaggcacuggacagcagcaacccaggcaucugugcccca

SEQ ID NO: 20327 - RNA, 69 nt, Human
gucucucgaggucaccaugaucccauccaucccuggaccuaggacccucaggcuggccgacgaugaggc

SEQ ID NO: 20328 - RNA, 67 nt, Human
guggucacgcccacaaucuucagcguggccucucccaggucacuguaggagaugcuguagugaccau

SEQ ID NO: 20329 - RNA, 65 nt, Human; identical to SEQ ID NO: 11430

SEQ ID NO: 20330 - RNA, 71 nt, Human
acucauugaaaauggaggcuaugcagaccagaccuaugauggaugggugacacagccccagguuagcgggu

SEQ ID NO: 20331 - RNA, 62 nt, Human
caucuuggucccucucuaggcugugauggaaucugaaaugaaguuugacaaggaccaugaug

SEQ ID NO: 20332 - RNA, 76 nt, Human; identical to SEQ ID NO: 10105

SEQ ID NO: 20333 - RNA, 82 nt, Human
aacagccgaaaccugucuugcaauggggggagggggcguuucgcuuuccuucuucuuggcuuucucucgucuuguggcuguu

SEQ ID NO: 20334 - RNA, 60 nt, Human
gaguuuuuccaugucgagauuuccccuccuuuuccugcggggauucuggacagguugcuc

SEQ ID NO: 20335 - RNA, 106 nt, Human
gugccaggaggugguggacacguacggcaagcuccauccuguccauccugcuggaggaggucagcccugagcuguugugcagcauguugcacuucugcucuggcac

SEQ ID NO: 20336 - RNA, 63 nt, Human
gucugggugcaguuuauucugauuuacucugaggugagcugaaaucaggaccgcagcucgggc

SEQ ID NO: 20337 - RNA, 60 nt, Human; identical to SEQ ID NO: 7400

SEQ ID NO: 20338 - RNA, 66 nt, Human; identical to SEQ ID NO: 2189

SEQ ID NO: 20339 - RNA, 91 nt, Human
augccuggcugggaagucuggggaagggauacagagcuuggugggccuaacaccauucauaucccuuacccucugucucuccucccuguau

SEQ ID NO: 20340 - RNA, 100 nt, Human
gguuagguaacccuugugacccuguaugaagguccacuuccuuccuuuccuccgggagggaauggucuucguggcuuggaauuauaagucaaccugcacc

SEQ ID NO: 20341 - RNA, 69 nt, Human
gcugggcugggcgaguaucucuucgaaagggucacucucaagcacgacuaagagccuucugagcccagc

SEQ ID NO: 20342 - RNA, 98 nt, Human
gugggguaaaacccagacgccaugaaagcggccauggccuuggagaaaaagcuuaaccaggcccuuuuggauuuucaugcccuggguucuugccgcac

SEQ ID NO: 20343 - RNA, 63 nt, Human
ucagaagauugaauugaaaccuuaaaaacuaucauaauaguaggaaugcauguuaagauuuga

SEQ ID NO: 20344 - RNA, 66 nt, Human
ggucuccaugaugauacggggucucuauagucaaagaagaggacuuggcuccccugagugggaacc

SEQ ID NO: 20345 - RNA, 85 nt, Human
guggcagaagaucccagcugaccacggccccuuucucuggggucagagggagaagacaggcgcagucagcaggggcagcuguugc

SEQ ID NO: 20346 - RNA, 116 nt, Human
guggccuuuuuuccuuuuucuguaggccgccuuaagcuuucuaaauuuggaacaucuaagcaagcugaagggaaaaggggguuucgcaaaaucacucgggggaagggaaagguugc

SEQ ID NO: 20347 - RNA, 69 nt, Human
uacugacgaaggugcaugcgcugaaugaugucacggcagucguugaacacacggcggauguucucagug

SEQ ID NO: 20348 - RNA, 75 nt, Human; identical to SEQ ID NO: 1470

SEQ ID NO: 20349 - RNA, 83 nt, Human; identical to SEQ ID NO: 1471

SEQ ID NO: 20350 - RNA, 63 nt, Human
gccaggcaaguggcagagcgaaccugggucuucacacacuuuccucuucuugacuguacuggc

SEQ ID NO: 20351 - RNA, 96 nt, Human
ggaggcccagguccucacccuggcccagcgacucauaaagucaugcaaccaugagcaucacugccuccugggccaaagugagcacaaagguccucu

SEQ ID NO: 20352 - RNA, 63 nt, Human
gcgccggagggcuggcacugcugggggacccauuacacccuccgcagccgcuggcccaggugc

SEQ ID NO: 20353 - RNA, 69 nt, Human
gggcgcccgcacuccucagcucuuggguggucgaugggacugggcgccguggagcaggggguggcgcuc

SEQ ID NO: 20354 - RNA, 81 nt, Human
acaugugaccucgggacgcccaggugugucugcaugugugagcauguacaugagugggugugucuaggugcgugcgcgugu

SEQ ID NO: 20355 - RNA, 69 nt, Human
acaugugcauuggugauuuugaucauccauucuuaauauuugauuucugugucaccuacugucauuugu

SEQ ID NO: 20356 - RNA, 129 nt, Human
gcuggcuuuugucuuuuuaaaaauuucuugaauuugugguuguguccaauuugcaaacauuuccaaaaauguuugcuuugcuuacauaccacaugauuuuaauguuuuuuguauaccauaauaucuagc

SEQ ID NO: 20357 - RNA, 60 nt, Human
uuugauccuguaaucacugaaggguacauacuccauguggacuucccuuaaacaggcaaa

SEQ ID NO: 20358 - RNA, 73 nt, Human
aggcuggagugcaauggcaugaucuuggcucacugcaaccucugccucccagguucaagcaauucuccugccu

SEQ ID NO: 20359 - RNA, 74 nt, Human
gagaaguaccacauaaauauggauucaaagaaacagaaaaaaucuagaaucuugcuauucaaaguguagcucuc

SEQ ID NO: 20360 - RNA, 94 nt, Human
uaucaccugggaguuugugagaaaugcagaaaccugugccccaccuuagacccacagaaucauaaucagcauuuuagcaagaccacaggugaua

SEQ ID NO: 20361 - RNA, 62 nt, Human
gacaaaauauuuggccuaaauuuucaccugcucuauagggauauuuuuacugguguuuuguu

SEQ ID NO: 20362 - RNA, 74 nt, Human
ucaguuuccguagucuauucuuucccucauuuuuuucauuucucugauauuuuuaguuucugcuaucuaacuga

SEQ ID NO: 20363 - RNA, 82 nt, Human
gcguggugggaggcuggggcuggugccugcggacagcuccagauggaaucccaggccacggugcuucuaguauccccccagc

SEQ ID NO: 20364 - RNA, 67 nt, Human; identical to SEQ ID NO: 1347

SEQ ID NO: 20365 - RNA, 66 nt, Human; identical to SEQ ID NO: 3934

SEQ ID NO: 20366 - RNA, 69 nt, Human; identical to SEQ ID NO: 1348

SEQ ID NO: 20367 - RNA, 68 nt, Human; identical to SEQ ID NO: 16754

SEQ ID NO: 20368 - RNA, 65 nt, Human
gcgacccccuccgagaucugcuuauguucccaauggaagauauaucuaucucggugauaggucgu

SEQ ID NO: 20369 - RNA, 67 nt, Human
gccaucugccacuuugugagcucaucaucagucccaaguggaacuagacucacagaccuuagauggc

SEQ ID NO: 20370 - RNA, 82 nt, Human; identical to SEQ ID NO: 11444

SEQ ID NO: 20371 - RNA, 87 nt, Human
gccucaaagcugcauguugagugccgucugcuuucggucccgucauuaucucuguauagacccaguuggcaaucaugcauuuggggc

SEQ ID NO: 20372 - RNA, 77 nt, Human
ucugcaagugugaaaggaaggcacuaaggaaagaccaccugguccugggccugccucuuccccuagcacccaguaga

SEQ ID NO: 20373 - RNA, 91 nt, Human
uguguauauguguauauauauguauguaacacauauacauauauauacacauauauguguguauauauacauauauauacauguacacaca

SEQ ID NO: 20374 - RNA, 96 nt, Human
cccuuccgacugccaccuggaaggggcuggcuguucugcucccucucccaccuggcacuggggugggcagcuggccaggaggcaguguggaggugg

SEQ ID NO: 20375 - RNA, 66 nt, Human
cuggggucaaagugcacagcgggcuggcccagccccaggcagccuuuuccucuuuccaggccccag

SEQ ID NO: 20376 - RNA, 77 nt, Human
cauugcuuccuccgugugauuuccgaagcaaagcaaugggacccuacgcuucagagucuuauugggguggggcagug

SEQ ID NO: 20377 - RNA, 65 nt, Human
cuuuuauuuaguuggauauguuucuuuacagaaugcagaaaacacaucuuaaaaucauauagaag

SEQ ID NO: 20378 - RNA, 86 nt, Human
uccaguugcuauggcaacaggccauucugggccagccacgucucugcauggcagugcccaaugguggaguugcuaugggcaacgga

SEQ ID NO: 20379 - RNA, 68 nt, Human
cuucgcagggaacaauccuuauugcacaggucaggaccugggugggugaggcauuccccaaggcgggg

SEQ ID NO: 20380 - RNA, 66 nt, Human
gagcgagaccuuaaucaauuugaaaauauucacuguauguauuuuggaggauuggguucucagcuu

SEQ ID NO: 20381 - RNA, 71 nt, Human
ggcugaggugggaggauggcuugaacauggggcagugagccuugauugcaccauacucuccagccugggcc

SEQ ID NO: 20382 - RNA, 101 nt, Human
cugagacacaguuucacucugucaccaggcaggagugcaguggcaaaucucggcucgcugcaaccucugcaucccggguucaagugacucuggugccucag

SEQ ID NO: 20383 - RNA, 93 nt, Human
gaguagcugggacuacaggugugcacccccacgccggcuaauuuuuuuuguuguuaguagagacgggguuucaccauguuggucaggcugcuc

SEQ ID NO: 20384 - RNA, 66 nt, Human
ggugcacuccucaaucucuccaaaaacggagaaccucuguuucagcucugaucgagucaugcggcc

SEQ ID NO: 20385 - RNA, 83 nt, Human
gucaagagaaucaaauuugcucuuuacaggugcugggucaaagucuucccgguuggagucaagaucagaauagcuccucuugc

SEQ ID NO: 20386 - RNA, 123 nt, Human
gagcuguuuacaucaugagagaugugucuuuauaaauggauuaaucccauuauugcagaaaugguuuuguuaucaugggagggggucauuauaaaaagacaauuuugccaggugcaguggcuc

SEQ ID NO: 20387 - RNA, 74 nt, Human
ugaaugugucuuccaaaguucauguguuggaaacuugauccccaaugcagaaauguuggaagguggcaccuuua

SEQ ID NO: 20388 - RNA, 78 nt, Human
uacauguagauaugaucagauuuaccauuuuuagggggaagagggaaaaaaagguguuuuuaucaucaacuacaugug

SEQ ID NO: 20389 - RNA, 66 nt, Human
ucccguauuuauaugcaaagcccgugugacuggaagugcacguggcacgcauuuuaauaaacugga

SEQ ID NO: 20390 - RNA, 66 nt, Human
gcuguuggauggaauguucuguaacugccuguuagguccauuugcucuacagugccauuuaacugu

SEQ ID NO: 20391 - RNA, 60 nt, Human
guaucauauaugaucuaucuuagauguuccaugugcuguugagaagaauauguauucugc

SEQ ID NO: 20392 - RNA, 82 nt, Human
ccguaagcaugugacuggccauuugugccgaguucuuauuuuuacggagggcuuguggccuuagacgccaguuugcuuaugg

SEQ ID NO: 20393 - RNA, 73 nt, Human; identical to SEQ ID NO: 16328

SEQ ID NO: 20394 - RNA, 73 nt, Human
ugucuaauuuuagaacauuuucauugccucagucucuuacuuucugucucuaaagauuugucuauuuugaaca

SEQ ID NO: 20395 - RNA, 63 nt, Human; identical to SEQ ID NO: 16329

SEQ ID NO: 20396 - RNA, 64 nt, Human; identical to SEQ ID NO: 1375

SEQ ID NO: 20397 - RNA, 61 nt, Human; identical to SEQ ID NO: 2204

SEQ ID NO: 20398 - RNA, 73 nt, Human
ugggggcuguggcagggccgccugccugggguucccuuacucaucugguaguucaugcaggccacggcccuca

SEQ ID NO: 20399 - RNA, 66 nt, Human
gccaacugaaaaagcugaauuuggaacauaaagucaauaaauccauaaccagcaauacuauggggc

SEQ ID NO: 20400 - RNA, 63 nt, Human
ggcgcugugucuccuacgcaacuucugagggcuggagggugccaagggacgcugcugaccgcc

SEQ ID NO: 20401 - RNA, 68 nt, Human
auuuaagaaaacugauucaguuguguuggaaaaaauaaagaaaucugauauuaaacguuuucuaagau

SEQ ID NO: 20402 - RNA, 79 nt, Human
ggaauaaaccugagaaaggauaguggcucuagagaaacaguaauagcaccuuucuagcaccuuugauuuuucucagucc

SEQ ID NO: 20403 - RNA, 64 nt, Human
ccacgccuggagcgccuucugcaaggcccuggccuaagacaggcuggcacagccccaugcuugg

SEQ ID NO: 20404 - RNA, 61 nt, Human; identical to SEQ ID NO: 2204

SEQ ID NO: 20405 - RNA, 131 nt, Human
cccaccuccgcauggcaggucagagggcaccugggcucugagaaaccguggcaagcugguccuagaggaggaggaccccuggagcacaagguucagcaagggugaccccgggacuugcuggucagacuggg

SEQ ID NO: 20406 - RNA, 95 nt, Human
cugcagcaggccuugcaaagggggcauucuggaugguggugcaagaacagaugagcgaguccagcucuccucaugcucccaagggccuccuggag

SEQ ID NO: 20407 - RNA, 71 nt, Human
uuuggcauuuggaugaaaugauucucacagcaucuuaagaaaaguuagugucaacccaaccaaaaacuaaa

SEQ ID NO: 20408 - RNA, 76 nt, Human; identical to SEQ ID NO: 18346

SEQ ID NO: 20409 - RNA, 80 nt, Human; identical to SEQ ID NO: 7871

SEQ ID NO: 20410 - RNA, 75 nt, Human
guccggggcgaggggcccaucuucuucuacacugggaacgagggcgacgugugggccuucgccaacaacucgggc

SEQ ID NO: 20411 - RNA, 75 nt, Human
cgccggcgccgcgggaggugguggaggccuagccggagccgagaggucucuuguucccgucccacggucccggcg

SEQ ID NO: 20412 - RNA, 77 nt, Human; identical to SEQ ID NO: 2642

SEQ ID NO: 20413 - RNA, 83 nt, Human; identical to SEQ ID NO: 7610

SEQ ID NO: 20414 - RNA, 81 nt, Human
ggacauucagcugguggccgcgcucucugucacccugggccucuuugcaguggagcuggcgguuuccucucaggagucucc

SEQ ID NO: 20415 - RNA, 78 nt, Human
ggcuuuauucgucaccgucuugggcugaaaaagaaacccuucugauuaccuucaugacgggaaccuaaggacgaagcc

SEQ ID NO: 20416 - RNA, 72 nt, Human
gucugagucugggauuaucgcauguauuuagugcuugguaguacaauaugguugguaguaacagaccacaac

SEQ ID NO: 20417 - RNA, 66 nt, Human
ggcuguuugaggaaucuugagccaaguccuagucauuauuuuugccauccucgaacuugaacaguc

SEQ ID NO: 20418 - RNA, 67 nt, Human
accuuucuuuuguuuauuuauauucuuuaguuuugugcacacuuugaggaauugauuuaggacaggu

SEQ ID NO: 20419 - RNA, 68 nt, Human
ggacauuugguggcugaggagagcgcgucacugcuauugaauagcuccauuuaacaccagccaugucu

SEQ ID NO: 20420 - RNA, 72 nt, Human
gagaugaaauguuuuacuucugacugugggacuaauguguuccuacagguugcaacauaaaacggauuucuc

SEQ ID NO: 20421 - RNA, 62 nt, Human
gcaagucuucuuagagcuggggccaagugacuucuccuugacuccucugagcaaagcccagc

SEQ ID NO: 20422 - RNA, 83 nt, Human
gcacagcacaggaaccugggcaggcaguccacccucagggccugccugugaccacugcuaaccugugcggaacaaacaugugc

SEQ ID NO: 20423 - RNA, 73 nt, Human
ggggaacugacuuauagaaaaugcucagcacguggccuagcacaaggcauucuuuaaaucugagucucucccc

SEQ ID NO: 20424 - RNA, 61 nt, Human
accgugggugguucaaugacaugaaaaucaccguaucauuggagauugugccacccaaggu

SEQ ID NO: 20425 - RNA, 66 nt, Human
guagugaacuugcuuuaccccgaaacccaccaauccacaguagggucaaccgauuaaguccacugc

SEQ ID NO: 20426 - RNA, 77 nt, Human
uagaagccauauaauauuuucauuagcacaaggauuuucaaaaccucguagaacacuuaaaaauuauucggcuuuua

SEQ ID NO: 20427 - RNA, 73 nt, Human
aaguauucaacuuaauuuuuacagaaaauucuuucuuuucacacccguauuuucuguguguaugugaauacuu

SEQ ID NO: 20428 - RNA, 64 nt, Human; identical to SEQ ID NO: 2723

SEQ ID NO: 20429 - RNA, 71 nt, Human
gggaugaguacuuaaauaaaucuaugaagcaaucuaagcucagaaauuuucuugauuuguauauuuucccc

SEQ ID NO: 20430 - RNA, 73 nt, Human
gauuuuucuccaggcuguagaaccugccagacuguaguacaguggcaggcaacuuacaucccuuggaaaaguu

SEQ ID NO: 20431 - RNA, 73 nt, Human
guaauuuuauuucaaugucugauuuacacaguacaaaaguguacuaauaaccgucagaaauuuuuaaagcuac

SEQ ID NO: 20432 - RNA, 80 nt, Human
acagaguuccaaaaucuccuuuaucacucgacauacagaacccucuugucuugaguuugggaguuaauuuugcucuuugu

SEQ ID NO: 20433 - RNA, 64 nt, Human
ggacucuuugauugagccguauaaaccaaauuuauuguuuggcuuccacuugguuaaaguguuc

SEQ ID NO: 20434 - RNA, 99 nt, Human
ugggaauuaacaaucaaauauuuggaaauuuuuaaauugagaaaguuaacuguaucauuuuaaacucaaaauuuaaaaaaauauuugauuugaccccua

SEQ ID NO: 20435 - RNA, 86 nt, Human
auagcgccaguuccccagcaaacccccuccagagcugcccccggaugcacagacaaggagggggcuugggagugacuugaagcugu

SEQ ID NO: 20436 - RNA, 62 nt, Human; identical to SEQ ID NO: 4083

SEQ ID NO: 20437 - RNA, 63 nt, Human; identical to SEQ ID NO: 4084

SEQ ID NO: 20438 - RNA, 82 nt, Human
gugcggguuuguuacauagguaaacgugucccauggugguuugcugcaccuaucaaccuaucaccuagguauuaagccccac

SEQ ID NO: 20439 - RNA, 101 nt, Human
ggaauuuccucuguuauauagcuuuucccaaugcuaauuuccaaacaacaacaacaaaauaacuuguuugccuauuaaguuguauaaaaguaggagauucu

SEQ ID NO: 20440 - RNA, 80 nt, Human
gggaaaccuuggcaagcaguuccaguccgagcagccccagaccgcugccgcccgaagcuaagccugccucuggccuuccc

SEQ ID NO: 20441 - RNA, 90 nt, Human
ccaggccgggccaccgccggcccccugggcuguccgcgggagccgacugccugaacagcuuuaccgccggggugccuggcuucgugcugg

SEQ ID NO: 20442 - RNA, 62 nt, Human
auuuuauugcuuugaaugcucaaacuaugggaaaucuuugguaaaaauaaagacaauaaaau

SEQ ID NO: 20443 - RNA, 65 nt, Human
ggggacucaaaaagggaagcagagugggcuguugaugucuggaaagcucccucaccagagugccc

SEQ ID NO: 20444 - RNA, 97 nt, Human
gugggucacacagcaucaugggggaugagcuggggcuggagucggcuguaucugacaccagacccuucauucaagcucccuugaugacaacgcccac

SEQ ID NO: 20445 - RNA, 76 nt, Human
cggccgcucaaaucugccgguagcccagcccgccccgcgugcgggggcuguggcgguuacacggccgggcgcgccg

SEQ ID NO: 20446 - RNA, 119 nt, Human; identical to SEQ ID NO: 10250

SEQ ID NO: 20447 - RNA, 67 nt, Human; identical to SEQ ID NO: 11915

SEQ ID NO: 20448 - RNA, 68 nt, Human; identical to SEQ ID NO: 17608

SEQ ID NO: 20449 - RNA, 73 nt, Human; identical to SEQ ID NO: 7929

SEQ ID NO: 20450 - RNA, 83 nt, Human; identical to SEQ ID NO: 1471

SEQ ID NO: 20451 - RNA, 73 nt, Human; identical to SEQ ID NO: 12049

SEQ ID NO: 20452 - RNA, 69 nt, Human; identical to SEQ ID NO: 12131

SEQ ID NO: 20453 - RNA, 87 nt, Human
auaacauugauuauugauuagauacauaucauuauaguuuaggguaugggauauaguguccaauguagcauuauuaguucaauuuau

SEQ ID NO: 20454 - RNA, 71 nt, Human
aucaacauauccugauucgaaugcgaagauuucuaacucuagacacuugcaguaacauuugggaaguugau

SEQ ID NO: 20455 - RNA, 77 nt, Human
uuggcauggacuaguucaaguaucagugccuccaucaauguuuuuacaagucacuaaauacugaaaguccuugacaa

SEQ ID NO: 20456 - RNA, 68 nt, Human; identical to SEQ ID NO: 3678

SEQ ID NO: 20457 - RNA, 78 nt, Human; identical to SEQ ID NO: 99

SEQ ID NO: 20458 - RNA, 65 nt, Human; identical to SEQ ID NO: 247

SEQ ID NO: 20459 - RNA, 80 nt, Human; identical to SEQ ID NO: 100

SEQ ID NO: 20460 - RNA, 117 nt, Human
uucaauuuguuaacagagcaaauuuaagacuuucaaucaaauauguaacaugcugaaaugaagaaauauuacauauuugauugaaagucuucaauuuguuaacagagcaaauuugaa

SEQ ID NO: 20461 - RNA, 68 nt, Human; identical to SEQ ID NO: 7022

SEQ ID NO: 20462 - RNA, 75 nt, Human; identical to SEQ ID NO: 7023

SEQ ID NO: 20463 - RNA, 89 nt, Human
gagacagggucucacucuguugcccaggcuggaggcgugaccuuggcucacugcacucuagccuaggugacagagcaagacucugucuc

SEQ ID NO: 20464 - RNA, 70 nt, Human
ggcucucgggagaccagaggcauggccuuccuggaucacacaaauugccugaauugcucucccuugggcc

SEQ ID NO: 20465 - RNA, 71 nt, Human
gcgguucugcgcgccgccgaucuugccgaugcugugcaggcugcagagcgcgcacggcucgcuggagccgc

SEQ ID NO: 20466 - RNA, 81 nt, Human
acuuguaucugcuguguagcaucugaucugaauggcaggcuuauaucaagcuuucuuccauauggugcaccggguaugagu

SEQ ID NO: 20467 - RNA, 89 nt, Human
agauucuauauccuaaaacauuuaaaccucacuaggccugcaauuuuggagaggguuagcuaaauauguuggguaucacuucagagucu

SEQ ID NO: 20468 - RNA, 92 nt, Human
cacucggaacaccaccaggcugugugccagaaucuugaauguucaugugcaucaugaccacggguuccacacucuggugggaaauccggaug

SEQ ID NO: 20469 - RNA, 74 nt, Human
gugaauggaggugcucgugauguaaaacuucucauggggggaaccagggcauuacuuuuaaccaaaacauucac

SEQ ID NO: 20470 - RNA, 65 nt, Human
ugauuaaaugguugguuuucauagaugauauguuacucaugguaaagaccacauauuuuuauuca

SEQ ID NO: 20471 - RNA, 76 nt, Human
cuucgugcuggccacccuacagcagauugagccugucaacggacaggugacgguccuggucaugugccacacgagg

SEQ ID NO: 20472 - RNA, 64 nt, Human
gggcuggugugcaggaaguucagccggaauccaggaggguucugggaccacgacagaccagccc

SEQ ID NO: 20473 - RNA, 70 nt, Human
uuggcgcucgugcggaauaggagcuucagccuaaagaaugugaagcacucugugcuggaacgaguguuga

SEQ ID NO: 20474 - RNA, 70 nt, Human
cagcauggugcagccgcagacguccaaagcugaaagcccagccuuggcagcgucuccgaaugcccagaug

SEQ ID NO: 20475 - RNA, 99 nt, Human
agugcaggaugugcggguuuguuacauagguaaacgugucccauggugguuugcugcaccuaucaaccuaucaccuagguauuaagccccacaugcauu

SEQ ID NO: 20476 - RNA, 69 nt, Human
acagaaguaccgagaaugccguucgggggccuuuauggcgacguaagaacgggcuuggacuuggucugu

SEQ ID NO: 20477 - RNA, 107 nt, Human
accucucccagugcaugguugacaaucacugguuuccaucaucaaaucuuaaaaucaaagcauuuuggaagcugagaauguauuggcaauucaucucacucaggggu

SEQ ID NO: 20478 - RNA, 70 nt, Human
cagcacauguggccaaacauggguguacuaaaaucucuugugaaaauaccuauaaugacucacauguaug

SEQ ID NO: 20479 - RNA, 79 nt, Human
uggccaacagguaaagaagucagcuaguauuugcagccacguugaauaucaaauacuauuugguguccuuuguuggcca

SEQ ID NO: 20480 - RNA, 89 nt, Human
aguacccuacaugcagaaaaacccagaguuagauucauugcugaaaacaagagccuggaguagggcucuuuuuuuguuaaaggggagcu

SEQ ID NO: 20481 - RNA, 88 nt, Human
guuguugcuguuuguuauccugagguaugacuuaaaugaagauuuacggagaugagacgaugaugcaggaaaauaggaggacaucagc

SEQ ID NO: 20482 - RNA, 60 nt, Human
cuguugcccaggcucacugcaaccucugccucccaaguucaagugauuccugugccucag

SEQ ID NO: 20483 - RNA, 105 nt, Human
cuguggggggcacaggggcagccucagagucacccguggggggcacagggggggccccggagucacccgugggcggcacgggggcggucucggagucacccgugg

SEQ ID NO: 20484 - RNA, 97 nt, Human
gggguaugaggcuuuauucaggaagagcucaagaugggaggggagccccuggggucccacucuuguggccucuugauaccaaggcucaugggacgcu

SEQ ID NO: 20485 - RNA, 77 nt, Human
gauuuaguacaguuaugcucagaugaacacuggacccauguggcagggucaagcaacuagaacaugauucagaaauc

SEQ ID NO: 20486 - RNA, 65 nt, Human
ugauucagaaaucagugaauuuuucacuuggacaggaccaagaggcauuucacugccaugaaaca

SEQ ID NO: 20487 - RNA, 74 nt, Human
ccuuauuaaagcaucugcaacagccaggaaucauugagcuaugaguaaaacgcugccuuaggugauuugucagg

SEQ ID NO: 20488 - RNA, 68 nt, Human
guagagggcaaugugguugucauggagacagcugucuucaacacaaaccauccugugcaucuaucuac

SEQ ID NO: 20489 - RNA, 62 nt, Human
cuuuugugaguguauauaaugguuuuguuaggauggcaaaaccagguauccaaaggcgaaag

SEQ ID NO: 20490 - RNA, 75 nt, Human
uccuugugagaauuccgacugcacaacccugcacuucagcuguguguaaugaaaaggguugggaugaaucaggga

SEQ ID NO: 20491 - RNA, 67 nt, Human; identical to SEQ ID NO: 1379

SEQ ID NO: 20492 - RNA, 63 nt, Human; identical to SEQ ID NO: 1366

SEQ ID NO: 20493 - RNA, 86 nt, Human; identical to SEQ ID NO: 1381

SEQ ID NO: 20494 - RNA, 64 nt, Human
gcgcuggcuggggucgggcuccaugcucuggaugggacugggccgucgacacgccagccggugc

SEQ ID NO: 20495 - RNA, 69 nt, Human
gucaaggauuuggguuggggcacccaggaagccugaggguuagcuggguggaccuccuggcuccucggc

SEQ ID NO: 20496 - RNA, 62 nt, Human
auguuuuauuucacuggaaaauucuguaaagaacuaaaucugguucccuuggaaaaaaacau

SEQ ID NO: 20497 - RNA, 127 nt, Human
ccucugacucuaaggcccugugggaugaaaagcagguauccaaaagaacucugcuuggcccuuugauacggccuugaggucagcccuggugccugcuuucuggcccacagaccgcugaaauccuagg

SEQ ID NO: 20498 - RNA, 61 nt, Human
acuccucgcugcgguugugggaccuguggaaguauucgcagacacucuccauggcgggggu

SEQ ID NO: 20499 - RNA, 63 nt, Human
agacgaaccggaugucaacgggauccccuaaggcuuggaacccuuuauacaucuggggcaucu

SEQ ID NO: 20500 - RNA, 86 nt, Human
auugaugaagaucaggggugcugaagccugguuccuggggucgcuucugaucuaggcgguucuugccucuggugacuggcguuaau

SEQ ID NO: 20501 - RNA, 78 nt, Human
gcaggagugggaggagggaggacaaguggaagucuaggcuggcugagcuguucugucucgaaaaguuccuaaaacugu

SEQ ID NO: 20502 - RNA, 68 nt, Human; identical to SEQ ID NO: 9690

SEQ ID NO: 20503 - RNA, 67 nt, Human; identical to SEQ ID NO: 3685

SEQ ID NO: 20504 - RNA, 73 nt, Human; identical to SEQ ID NO: 2833

SEQ ID NO: 20505 - RNA, 111 nt, Human
ccuggcaacacugagcacugaaaucuccuuucuuugccugacugcauuuauaugaaagguccagaacaggcaaauuuguagagacagaaaguagauuaguggcugccuagg

SEQ ID NO: 20506 - RNA, 71 nt, Human
cacaacuucggggcagccgggcacaagcccaggcucaggacgcagagcugguccggcugcgcgaggcugug

SEQ ID NO: 20507 - RNA, 67 nt, Human
uggccuggguaaggugccuggcaggaagcaagacaaggccucuggcagagagcaccuuagcaggcca

SEQ ID NO: 20508 - RNA, 73 nt, Human
cgggcacuggaacuuggugcgggaaaagaaacgacagaacaagucguugugccggccuuaguuccaaauuccg

SEQ ID NO: 20509 - RNA, 60 nt, Human
gcguuuugcaaauuggcgcacucugaaaccuugcggggagccccaauuacgcgaucuugc

SEQ ID NO: 20510 - RNA, 76 nt, Human; identical to SEQ ID NO: 4813

SEQ ID NO: 20511 - RNA, 110 nt, Human; identical to SEQ ID NO: 4814

SEQ ID NO: 20512 - RNA, 86 nt, Human
acugugaucgucgugacugugguccuauugaggccagugucugaguuaugggcuuggcacguauaggauccacuauuauucacagu

SEQ ID NO: 20513 - RNA, 88 nt, Human
gcugcagccugggacugaccgggaggcucugauuauuuacccaccacagguagguuguguucugaaucucagguucacagguuaaggc

SEQ ID NO: 20514 - RNA, 60 nt, Human
gauuaguaaaagugcuuuccauguuacuuuauucagagcuaauaagugcuuuccuuaguu

SEQ ID NO: 20515 - RNA, 65 nt, Human
guguugcagcuuuauaguuuuuaaaauauuuuagauaauucuuaaacuaugaaccuucuuaacau

SEQ ID NO: 20516 - RNA, 62 nt, Human
uuguuccguuagucgcuaacuuaguaagugcuuuucuuauagaaccccuucugacugagcaa

SEQ ID NO: 20517 - RNA, 71 nt, Human
aaucaccauguagugugucuucuugaguaggccaauguugcguauagagagaaaaugacuaucaggagauu

SEQ ID NO: 20518 - RNA, 68 nt, Human
ugauauauuguuaagaguaguacauauuuaagaagacgaaaauauguuuuugauccccaauuauauca

SEQ ID NO: 20519 - RNA, 70 nt, Human
uguacaggaugauuuucauauuuugaagggauucaucacuucacaaagcaucuccauucuaucuuguuca

SEQ ID NO: 20520 - RNA, 117 nt, Human
uuagucagugagcuagacccagugccggaguuggucuucucgugacucugauaaaucuagacaccacucuguuggagaaccagcacugccggcagcugggguuagugcacugacuga

SEQ ID NO: 20521 - RNA, 94 nt, Human; identical to SEQ ID NO: 5398

SEQ ID NO: 20522 - RNA, 89 nt, Human
gucaaauccacacauguauauucucucuaugcccaggcccaucugggggagggcagcccagagacacgugugcaccugugugggcugac

SEQ ID NO: 20523 - RNA, 67 nt, Human
uggugugggagaugcgugugagcgagacacccucagcuccaaggguggcacgcugcuccguggacca

SEQ ID NO: 20524 - RNA, 92 nt, Human
gcucaucuugguaugcgggccccugcucgggucaauucgggggacccuuucugccagucccuuacccggcugcgcaggucugauaugauggc

SEQ ID NO: 20525 - RNA, 74 nt, Human; identical to SEQ ID NO: 4179

SEQ ID NO: 20526 - RNA, 102 nt, Human; identical to SEQ ID NO: 2774

SEQ ID NO: 20527 - RNA, 78 nt, Human
cugggguguuuauggcaagucacuuugacagacauuaucguggcaaaugcugucugacuuacugguucaacaaaccag

SEQ ID NO: 20528 - RNA, 65 nt, Human; identical to SEQ ID NO: 247

SEQ ID NO: 20529 - RNA, 80 nt, Human; identical to SEQ ID NO: 100

SEQ ID NO: 20530 - RNA, 68 nt, Human
gguguuuacagugcugcaaauuacaccaaugggagcuuuggaaguaauuuugugucugcugguauacc

SEQ ID NO: 20531 - RNA, 78 nt, Human; identical to SEQ ID NO: 99

SEQ ID NO: 20532 - RNA, 80 nt, Human; identical to SEQ ID NO: 100

SEQ ID NO: 20533 - RNA, 67 nt, Human
ggugcagugguucacgccuguaaucccagcacuuugggaggccaaggcggguggaucaccugaggcc

SEQ ID NO: 20534 - RNA, 86 nt, Human; identical to SEQ ID NO: 1381

SEQ ID NO: 20535 - RNA, 78 nt, Human; identical to SEQ ID NO: 4389

SEQ ID NO: 20536 - RNA, 75 nt, Human
gauaucgaagagcuggagaccaaggccgugggaaugucuaacgauggccgcuuucucaaguuugacaucgaaauc

SEQ ID NO: 20537 - RNA, 62 nt, Human
cucagcucugucccugcccagcugguggguggcguaggccaggaugguguggcagagcuggg

SEQ ID NO: 20538 - RNA, 75 nt, Human
gcaugccgacuacagcugguaccaggcgggcagugcccgcucagggccuguuacagucuaccccuacaugcaugc

SEQ ID NO: 20539 - RNA, 90 nt, Human
guaucuugugcugaccuccuaucucauccggugacuuagaaugccuaacucuuugggaaugcagccuaguaggucucagccuuauuuuac

SEQ ID NO: 20540 - RNA, 84 nt, Human
ugcaucaaggauagugaugaaggugugagacuuucgacaauaaacuuguuuaaaaguuucuguaccaauaucuuucccugagua

SEQ ID NO: 20541 - RNA, 73 nt, Human
cagcuucuccuuccgggacagcuccaccuguuccucguccaugguggugucgaugggccggaaguaggacaug

SEQ ID NO: 20542 - RNA, 60 nt, Human
gauauucuuccagagugaugcggccgucgcuguccgagucguacauguggaacagaaauc

SEQ ID NO: 20543 - RNA, 66 nt, Human
gucggcgauggagcgagcggacuccuucucgaugugaggguuucccgacagcagcuccucgaccac

SEQ ID NO: 20544 - RNA, 78 nt, Human; identical to SEQ ID NO: 99

SEQ ID NO: 20545 - RNA, 65 nt, Human; identical to SEQ ID NO: 247

SEQ ID NO: 20546 - RNA, 80 nt, Human; identical to SEQ ID NO: 100

SEQ ID NO: 20547 - RNA, 67 nt, Human; identical to SEQ ID NO: 1379

SEQ ID NO: 20548 - RNA, 63 nt, Human; identical to SEQ ID NO: 1366

SEQ ID NO: 20549 - RNA, 63 nt, Human
uucuuauauugguguuaaucaucaaggaaucucuucucgauuaaaauacacacaucuuaagaa

SEQ ID NO: 20550 - RNA, 63 nt, Human
gaaguccuugggaugggcgucugcucuggacaccccaaagagcuccugcccucucagcccuuu

SEQ ID NO: 20551 - RNA, 80 nt, Human
gccucagauuucugcucaugaucuacauagauuuggaaacuguuuuccucuguuuuggucucuugggcaacauuuuuggc

SEQ ID NO: 20552 - RNA, 93 nt, Human
uacaacaccucacacuggucagcugguuucuacuugguguuugguuuuucccagccccauuuuaucuucagcggccgcgguguuuguuuugug

SEQ ID NO: 20553 - RNA, 74 nt, Human
ugucccauagagcuuuugcauccucuggauguauugcgaaagaaauguccagacuuugagggcuacaggguaca

SEQ ID NO: 20554 - RNA, 81 nt, Human
ugucuauggaaaugugaauaaaggcaauccaugaauaggucaacuucuuccuggguaaccuccccagguguuuuguggaca

SEQ ID NO: 20555 - RNA, 61 nt, Human; identical to SEQ ID NO: 16752

SEQ ID NO: 20556 - RNA, 96 nt, Human
gccuaggauucuggagccacguacacuguuaaauauuccaagaaaaguccacuguuccuauaaugugucauuguauguggcuccagaauacuaggu

SEQ ID NO: 20557 - RNA, 62 nt, Human
auauggugugagaaauggcuguaggaaacaacacucaacgaaguuauuccaucaucccgugu

SEQ ID NO: 20558 - RNA, 86 nt, Human
cacuggcagcaguucuacuuccugagcaagcggcgccgcaaccuucugcguaacccguguggggaagaggacuuggaaggcuggug

SEQ ID NO: 20559 - RNA, 78 nt, Human
agucaaagauuccacugauugacauuugauaaauaaacaucaggauuauguuuauuguuuguuuucagucuuugcacu

SEQ ID NO: 20560 - RNA, 82 nt, Human
uuuuuaaaucuugaaaaggguuucuguacuuaccugguuugccaaguaugccaguguaaugaaacugcccuuauuuuaaaag

SEQ ID NO: 20561 - RNA, 102 nt, Human
cacuacguugaccugaaggaccauccauucuuugccggccuggugaaauacaugcacucagggccgguaguugccauggucugggaggggcugaauguggug

SEQ ID NO: 20562 - RNA, 87 nt, Human; identical to SEQ ID NO: 4680

SEQ ID NO: 20563 - RNA, 90 nt, Human; identical to SEQ ID NO: 2702

SEQ ID NO: 20564 - RNA, 73 nt, Human; identical to SEQ ID NO: 5663

SEQ ID NO: 20565 - RNA, 87 nt, Human; identical to SEQ ID NO: 76

SEQ ID NO: 20566 - RNA, 71 nt, Human
ugcccgcguacaugggcugaggaauguucaagcagaagaaaugguagaguauucuucaggcuuaaagggua

SEQ ID NO: 20567 - RNA, 62 nt, Human; identical to SEQ ID NO: 5011

SEQ ID NO: 20568 - RNA, 66 nt, Human
ggcgagagagcggcagggugaggcccggccguccguggcauggccaggccucagcgcgaccucgcc

SEQ ID NO: 20569 - RNA, 72 nt, Human; identical to SEQ ID NO: 4935

SEQ ID NO: 20570 - RNA, 78 nt, Human
aaaaccaaaaaacauauauauaauggcuucucugucaccgcuggugacaauaggucuuaaugcaaguuuucauguuuu

SEQ ID NO: 20571 - RNA, 84 nt, Human; identical to SEQ ID NO: 286

SEQ ID NO: 20572 - RNA, 89 nt, Human
ggccaauugaaacaaacaguucugagaccguucuuccaccacugauuaagagugggguggcagguauuagggauaauauucauuuggcc

SEQ ID NO: 20573 - RNA, 80 nt, Human
acauaccaacuuccaaucugccuaaaugugacagccucugcccaagacuggcucacugaggcgucuuggcuacuggaugu

SEQ ID NO: 20574 - RNA, 111 nt, Human; identical to SEQ ID NO: 1275

SEQ ID NO: 20575 - RNA, 94 nt, Human
ucagcaggauuuacacgguggggcgcagcuucgagggccgggagcuccuggucaucgagcuguccgacaacccuggcguccaugagccugguga

SEQ ID NO: 20576 - RNA, 80 nt, Human
uugggaauaugcaugggaaugaggcuguuggacgagaacugcucauuuucuuggcccaguaccuaugcaacgaauaccag

SEQ ID NO: 20577 - RNA, 64 nt, Human
aaagagauuuaagugauuacaguguagaaauaucuuucuguaugugauacagugguuucucuuu

SEQ ID NO: 20578 - RNA, 73 nt, Human
gggauucuccaccaggacaccgccagcguccccaccguccucagcuuggcaaacguuucccgaagaggauucc

SEQ ID NO: 20579 - RNA, 85 nt, Human
gggcacacacguucagccacccaccuucaagcacaaagagaaagcugaauuugcaggaugggagggcucagggugugcguucccc

SEQ ID NO: 20580 - RNA, 79 nt, Human
uaggcgccgggugccgaugacugggccuucuugcucucggucggcuucuuggucucggcgugccccauucccggcccug

SEQ ID NO: 20581 - RNA, 70 nt, Human
ucugugccagguauauuuguauauguaaccaaaucugguuuuugcaucccacgagugaccccgcugcgga

SEQ ID NO: 20582 - RNA, 69 nt, Human
uucccgucugucccccuaccccaagucccccagucccucaaaggaggcagggaguggggacugcaggaa

SEQ ID NO: 20583 - RNA, 94 nt, Human
ucuaucuacaaacugucauucuaugaacauaucaguugggggagauaaaguaacagauggugaugagaauucauggauagaauaacuggaugga

SEQ ID NO: 20584 - RNA, 83 nt, Human
gacaauuaaggacgugggaugaggcuccgagacaggacgcgguucugccuggggauccugaagauaaaaagcuuugaaaaguc

SEQ ID NO: 20585 - RNA, 86 nt, Human
gguggcauugcuggauggccgggacugcacaguggagaugcccauccugaaggacguggccacuguggcugucugcgacgcgcauc

SEQ ID NO: 20586 - RNA, 63 nt, Human
uucauggucguggaagcugagcccauauuaagagaugucaggcguccgaccuccgaucaugaa

SEQ ID NO: 20587 - RNA, 91 nt, Human
caaacacuauuuauccccugaaaaagcagcuuaaaauaugggugcacauuuugcagcuuauguucuuugguuaggcucugaaggguguuug

SEQ ID NO: 20588 - RNA, 64 nt, Human; identical to SEQ ID NO: 18069

SEQ ID NO: 20589 - RNA, 91 nt, Human
cugggcugggcuaggcugggccuagcuuguagagacacaccuaaguuccguucucuguuuggaggcugcacccagccugaguccccaccag

SEQ ID NO: 20590 - RNA, 64 nt, Human; identical to SEQ ID NO: 3818

SEQ ID NO: 20591 - RNA, 60 nt, Human; identical to SEQ ID NO: 10418

SEQ ID NO: 20592 - RNA, 86 nt, Human; identical to SEQ ID NO: 3434

SEQ ID NO: 20593 - RNA, 62 nt, Human; identical to SEQ ID NO: 3436

SEQ ID NO: 20594 - RNA, 91 nt, Human; identical to SEQ ID NO: 1284

SEQ ID NO: 20595 - RNA, 87 nt, Human
cauauaaaaguauuacacaauucuguucagcacaugauucuugauaauaaaugacuauguuauaggguuauguauacuuuuagauug

SEQ ID NO: 20596 - RNA, 74 nt, Human
gggguauaaucaugugucacauagcauuguuuuggucaacaguggaccacauguaugaggacacauauaauccc

SEQ ID NO: 20597 - RNA, 61 nt, Human; identical to SEQ ID NO: 2204

SEQ ID NO: 20598 - RNA, 75 nt, Human; identical to SEQ ID NO: 17800

SEQ ID NO: 20599 - RNA, 69 nt, Human
uuauaaaaggguauuuauuucuuauucaugucaaguccaauaagaauucuacugcccuacuuuuuguaa

SEQ ID NO: 20600 - RNA, 66 nt, Human
accccaugccucacuugugagauuagaguaccauguuuucuuucuuuccacauguggaaguggggu

SEQ ID NO: 20601 - RNA, 61 nt, Human
gacuagaacuaauaucauuuggguuuacaaaaaccaucucaaguccaaacauguucuuguc

SEQ ID NO: 20602 - RNA, 20 nt, Human
cagcaccagaauuucgucgu

SEQ ID NO: 20603 - RNA, 24 nt, Human
ggaaaacaaguacaaagguuacgg

SEQ ID NO: 20604 - RNA, 24 nt, Human
ucgccgccaccgccgccgccgccg

SEQ ID NO: 20605 - RNA, 24 nt, Human
cuuacagucgcgggccaggaugag

SEQ ID NO: 20606 - RNA, 24 nt, Human
auugauggucagccaggugccuuc

SEQ ID NO: 20607 - RNA, 24 nt, Human
ugagaaugaccccaagaccuuuga

SEQ ID NO: 20608 - RNA, 24 nt, Human
caaguacaagaaaaccuccacuga

SEQ ID NO: 20609 - RNA, 24 nt, Human
ugagaaccguuugugauaauagaa

SEQ ID NO: 20610 - RNA, 21 nt, Human
ugggaagugccuggcggggcc

SEQ ID NO: 20611 - RNA, 24 nt, Human
uugcauguggauccugagaacuuc

SEQ ID NO: 20612 - RNA, 24 nt, Human
ugggaugaucucaaggggcaccuu

SEQ ID NO: 20613 - RNA, 24 nt, Human
gaggagaaacccugggaaggcucc

SEQ ID NO: 20614 - RNA, 24 nt, Human
uaggccuaacaugagaucagguaa

SEQ ID NO: 20615 - RNA, 24 nt, Human
aaguaugcacaguccgugucaggg

SEQ ID NO: 20616 - RNA, 24 nt, Human
caaaugacuuaguaaucuaauaug

SEQ ID NO: 20617 - RNA, 24 nt, Human
uuccaguaagaaguucaagaguac

SEQ ID NO: 20618 - RNA, 24 nt, Human
augcuuuuugaaagaccuguucuc

SEQ ID NO: 20619 - RNA, 24 nt, Human
ucauggaggggauacaagacggaa

SEQ ID NO: 20620 - RNA, 24 nt, Human
ucccugcaagucuguuuuauguua

SEQ ID NO: 20621 - RNA, 24 nt, Human
ucacugagcgaguacagccccugg

SEQ ID NO: 20622 - RNA, 24 nt, Human
acuaguagacugaugagcuggauu

SEQ ID NO: 20623 - RNA, 24 nt, Human
uaaaguacaaaaacgccaccuuuu

SEQ ID NO: 20624 - RNA, 24 nt, Human
ucaguaguuguuccuuaguaagcu

SEQ ID NO: 20625 - RNA, 24 nt, Human
ugaggcagggcgaccucaaguuac

SEQ ID NO: 20626 - RNA, 24 nt, Human
caccaccagagaugaccggaaaua

SEQ ID NO: 20627 - RNA, 23 nt, Human
uauaacagggaacaagaagagaa

SEQ ID NO: 20628 - RNA, 24 nt, Human
uuaugcggacacacacucacacga

SEQ ID NO: 20629 - RNA, 24 nt, Human
uauugaguggccaugugauuggga

SEQ ID NO: 20630 - RNA, 24 nt, Human
cggaagcucacacggacagucaca

SEQ ID NO: 20631 - RNA, 20 nt, Human
uuggcaaaaucuacugaagc

SEQ ID NO: 20632 - RNA, 24 nt, Human
uauuugucuuuuugaaauagaguu

SEQ ID NO: 20633 - RNA, 22 nt, Human
uagcugcgaagcugaaagcaga

SEQ ID NO: 20634 - RNA, 17 nt, Human
uacaaugucugcaagag

SEQ ID NO: 20635 - RNA, 24 nt, Human
ucuguaguacgauuuaaauguuuu

SEQ ID NO: 20636 - RNA, 24 nt, Human
ugucaaaauuauaugccauauaca

SEQ ID NO: 20637 - RNA, 24 nt, Human
agagguugcagugagccaagauug

SEQ ID NO: 20638 - RNA, 23 nt, Human
uugaaaaugucaaaauuauaugc

SEQ ID NO: 20639 - RNA, 24 nt, Human
uaaggcaggcagaucaccugaggu

SEQ ID NO: 20640 - RNA, 24 nt, Human
ugugcugguccgacaccugggcua

SEQ ID NO: 20641 - RNA, 24 nt, Human
uugguucuuauugacugaauuuac

SEQ ID NO: 20642 - RNA, 24 nt, Human
ugagagcaccaggagcagguagaa

SEQ ID NO: 20643 - RNA, 24 nt, Human
ugagagcaagaaggcuggaaaugc

SEQ ID NO: 20644 - RNA, 24 nt, Human
ugccuuaaaaaaugaagagggagu

SEQ ID NO: 20645 - RNA, 24 nt, Human
cucacuuuccacccucucuccacc

SEQ ID NO: 20646 - RNA, 24 nt, Human
ucuguccugcguccucuguccccg

SEQ ID NO: 20647 - RNA, 24 nt, Human
aagcagaguugacccagccaagaa

SEQ ID NO: 20648 - RNA, 24 nt, Human
ugagccugggaggguggcagggag

SEQ ID NO: 20649 - RNA, 24 nt, Human
ucacuguaauuauuauuauuuucu

SEQ ID NO: 20650 - RNA, 24 nt, Human
caaaggcccuggcaaacgucaaca

SEQ ID NO: 20651 - RNA, 20 nt, Human
ugaggugacagucacggagg

SEQ ID NO: 20652 - RNA, 24 nt, Human
aggcaggauagugacaguggcucg

SEQ ID NO: 20653 - RNA, 24 nt, Human
uaaucauauaugugacuaacauuu

SEQ ID NO: 20654 - RNA, 24 nt, Human
uugcuggguugauucuaguugugu

SEQ ID NO: 20655 - RNA, 24 nt, Human
aggcagguggaucacgaggucagg

SEQ ID NO: 20656 - RNA, 20 nt, Human
ucaaucucaccuucugauau

SEQ ID NO: 20657 - RNA, 24 nt, Human
ugaggacaaguggagccacaaggg

SEQ ID NO: 20658 - RNA, 24 nt, Human
uucacagaugaggacacugaggcc

SEQ ID NO: 20659 - RNA, 24 nt, Human
cacugagcauuguagcgcgccuuc

SEQ ID NO: 20660 - RNA, 24 nt, Human
uguguacauggcagaguuugugug

SEQ ID NO: 20661 - RNA, 24 nt, Human
cacucuguuauuuagacucaucuu

SEQ ID NO: 20662 - RNA, 24 nt, Human
gcuacugucucacugaaacauuua

SEQ ID NO: 20663 - RNA, 24 nt, Human
ucugcauccacauugucauguccu

SEQ ID NO: 20664 - RNA, 24 nt, Human
aagcaucgcgguguguuucagagc

SEQ ID NO: 20665 - RNA, 24 nt, Human
cacagcgcaggcgcucauccuccc

SEQ ID NO: 20666 - RNA, 22 nt, Human
ucagcugccgcuccagauccag

SEQ ID NO: 20667 - RNA, 24 nt, Human
auugcagcagcagcagcuucuugg

SEQ ID NO: 20668 - RNA, 23 nt, Human
uggcuggggaauuguccacgagg

SEQ ID NO: 20669 - RNA, 24 nt, Human
aagcagugacuccugagagacauu

SEQ ID NO: 20670 - RNA, 22 nt, Human
acuuaucugucuugucagcugg

SEQ ID NO: 20671 - RNA, 24 nt, Human
uggcugacuucgagugggugaugu

SEQ ID NO: 20672 - RNA, 24 nt, Human
accgcucauaaccucaagggggug

SEQ ID NO: 20673 - RNA, 24 nt, Human
ugagaaggcugguacccagugcuu

SEQ ID NO: 20674 - RNA, 21 nt, Human
ucccuguuguccauuguguau

SEQ ID NO: 20675 - RNA, 24 nt, Human
uugaucuugaagaaacugggcgug

SEQ ID NO: 20676 - RNA, 24 nt, Human
uccgugcgcguugcugcggccgug

SEQ ID NO: 20677 - RNA, 24 nt, Human
aggaaggagauauagugaagagga

SEQ ID NO: 20678 - RNA, 24 nt, Human
guagaguuuucuucaggcuuaaag

SEQ ID NO: 20679 - RNA, 24 nt, Human
ugaaagggcacgaauaugggggua

SEQ ID NO: 20680 - RNA, 24 nt, Human
ucaaacagacggacucugcaaggc

SEQ ID NO: 20681 - RNA, 24 nt, Human
cguucagaaugcguuugcugucau

SEQ ID NO: 20682 - RNA, 24 nt, Human
ugagagcacgaguuaguuguaguc

SEQ ID NO: 20683 - RNA, 22 nt, Human
cuccaguacuucuguuugugcc

SEQ ID NO: 20684 - RNA, 24 nt, Human
uauaacauguaugcuuuucagaau

SEQ ID NO: 20685 - RNA, 24 nt, Human
aggcugcagaggacugguccgucu

SEQ ID NO: 20686 - RNA, 24 nt, Human
uuuccacagaagcaccaccuauca

SEQ ID NO: 20687 - RNA, 24 nt, Human
agaaagcugauggugugcccgucu

SEQ ID NO: 20688 - RNA, 24 nt, Human
ugcaugggagaaaugauuucugaa

SEQ ID NO: 20689 - RNA, 24 nt, Human
aguccauuuguaacgcauacuaag

SEQ ID NO: 20690 - RNA, 17 nt, Human
uggcagaccuaagugug

SEQ ID NO: 20691 - RNA, 24 nt, Human
uguguauccacaaccuaguuauuu

SEQ ID NO: 20692 - RNA, 24 nt, Human
aagcaaaucuuagcuauauuuuaa

SEQ ID NO: 20693 - RNA, 22 nt, Human
uggaauuuucugggccgaauac

SEQ ID NO: 20694 - RNA, 24 nt, Human
guggagcgcugguggaagguaccg

SEQ ID NO: 20695 - RNA, 24 nt, Human
uaagcugguggaggacacgaagca

SEQ ID NO: 20696 - RNA, 24 nt, Human
acccagugaggcacgacgugguuu

SEQ ID NO: 20697 - RNA, 24 nt, Human
ugagagcaagaaggcuggaaaugc

SEQ ID NO: 20698 - RNA, 24 nt, Human
acugagcaccuccucuugcaguua

SEQ ID NO: 20699 - RNA, 24 nt, Human
uugcaccucguggcugcuuuguuc

SEQ ID NO: 20700 - RNA, 24 nt, Human
uauggcaagucacuuugacagaca

SEQ ID NO: 20701 - RNA, 24 nt, Human
uacaccacucccaagaagaauaag

SEQ ID NO: 20702 - RNA, 24 nt, Human
ucaaucauuuguacagugacuuau

SEQ ID NO: 20703 - RNA, 23 nt, Human
ugucacagccacagauguugucc

SEQ ID NO: 20704 - RNA, 24 nt, Human
ggggggcccaggccgagcuccuug

SEQ ID NO: 20705 - RNA, 24 nt, Human
ggcccaguguuggagagcugaagg

SEQ ID NO: 20706 - RNA, 24 nt, Human
uaggagcacccuggucagggcuaa

SEQ ID NO: 20707 - RNA, 24 nt, Human
uauggcaagucacuuugacagaca

SEQ ID NO: 20708 - RNA, 24 nt, Human
uacaccacucccaagaagaauaag

SEQ ID NO: 20709 - RNA, 24 nt, Human
ucccaagucucugggugguuggaa

SEQ ID NO: 20710 - RNA, 24 nt, Human
ugguauguguuucuccuggacaag

SEQ ID NO: 20711 - RNA, 24 nt, Human
cugguuccugcccuuuugauguuc

SEQ ID NO: 20712 - RNA, 24 nt, Human
uccccuugcuggaugcccuacgcc

SEQ ID NO: 20713 - RNA, 24 nt, Human
uaacauucauggaugcaaaccacu

SEQ ID NO: 20714 - RNA, 24 nt, Human
cggcaugggguccgggggccuggc

SEQ ID NO: 20715 - RNA, 24 nt, Human
gcucauuugcaggggggagccaaa

SEQ ID NO: 20716 - RNA, 24 nt, Human
uccgagcggucaggcuggggcugc

SEQ ID NO: 20717 - RNA, 24 nt, Human
uggcuccagaggccaccaagaacu

SEQ ID NO: 20718 - RNA, 24 nt, Human
uuuguggaguuuuccauagccucu

SEQ ID NO: 20719 - RNA, 23 nt, Human
ucccgagucagagcggcagagau

SEQ ID NO: 20720 - RNA, 24 nt, Human
ugugaacgggaagaaggugcugca

SEQ ID NO: 20721 - RNA, 18 nt, Human
ugguacccugguuggccu

SEQ ID NO: 20722 - RNA, 24 nt, Human
uuaaugauaggcucuuggggcauc

SEQ ID NO: 20723 - RNA, 24 nt, Human
ccacagggcugcacuagcacagcc

SEQ ID NO: 20724 - RNA, 20 nt, Human
uguccagaauuuccagaagu

SEQ ID NO: 20725 - RNA, 24 nt, Human
uguggcccuucucuuuaaguccga

SEQ ID NO: 20726 - RNA, 24 nt, Human
uaagggaaauauuggugcuuucuc

SEQ ID NO: 20727 - RNA, 24 nt, Human
acucuugucagacuuaacuaagca

SEQ ID NO: 20728 - RNA, 24 nt, Human
cgacaugugagugccauuccuugg

SEQ ID NO: 20729 - RNA, 24 nt, Human
uguguuguggucuggggagaaugu

SEQ ID NO: 20730 - RNA, 24 nt, Human
uucaaauaggagccgauggaucug

SEQ ID NO: 20731 - RNA, 24 nt, Human
ugugauguauugugggacaaaaua

SEQ ID NO: 20732 - RNA, 24 nt, Human
uaauguggggacaaaaaauauacc

SEQ ID NO: 20733 - RNA, 24 nt, Human
uagaaagaaaggagauuauuaccc

SEQ ID NO: 20734 - RNA, 22 nt, Human
uaugauguuucuuugcaaugga

SEQ ID NO: 20735 - RNA, 24 nt, Human
uuuaaauugcugaugcaggaauua

SEQ ID NO: 20736 - RNA, 24 nt, Human
uggggcugcgcggggccgggcgag

SEQ ID NO: 20737 - RNA, 24 nt, Human
ccgcugcuggggcugcugcucggc

SEQ ID NO: 20738 - RNA, 24 nt, Human
agcuggugccccuggcccgggccu

SEQ ID NO: 20739 - RNA, 24 nt, Human
ccuggcuuccucaccaacucugug

SEQ ID NO: 20740 - RNA, 24 nt, Human
ucgagcgggcccugcuggcugcgg

SEQ ID NO: 20741 - RNA, 24 nt, Human
ucacugagcuagugacuauuggga

SEQ ID NO: 20742 - RNA, 24 nt, Human
ugaaaaguucuaggguccgcaaca

SEQ ID NO: 20743 - RNA, 24 nt, Human
ucccccuuauaaaguuugccaaaa

SEQ ID NO: 20744 - RNA, 24 nt, Human
gacaccuaaggugaguucugggcg

SEQ ID NO: 20745 - RNA, 24 nt, Human
uggaugcucuucggccugcacggg

SEQ ID NO: 20746 - RNA, 24 nt, Human
cgauccggguaggagacaaagggc

SEQ ID NO: 20747 - RNA, 24 nt, Human
gaaggugcugggcgugguggcuca

SEQ ID NO: 20748 - RNA, 24 nt, Human
uggaucacuugcggucaggaguuc

SEQ ID NO: 20749 - RNA, 19 nt, Human
ugucacagaacuacagucu

SEQ ID NO: 20750 - RNA, 24 nt, Human
ucacugcaaccucugccucauggg

SEQ ID NO: 20751 - RNA, 24 nt, Human
ucagagcaacggcccaagucuggg

SEQ ID NO: 20752 - RNA, 24 nt, Human
uggcggcagaggaggggaugaguc

SEQ ID NO: 20753 - RNA, 24 nt, Human
uacaggcugcuauccacaccacca

SEQ ID NO: 20754 - RNA, 24 nt, Human
ugaggaacucuucaaugccaaucu

SEQ ID NO: 20755 - RNA, 24 nt, Human
aggcguuguaggcugacuccaggu

SEQ ID NO: 20756 - RNA, 24 nt, Human
uaugauaaaugauuauaacgugug

SEQ ID NO: 20757 - RNA, 24 nt, Human
guagucccggauccuuaguuggcu

SEQ ID NO: 20758 - RNA, 24 nt, Human
ucaugggcugaugguuaucguggc

SEQ ID NO: 20759 - RNA, 24 nt, Human
uuggagugggguuuagccaacucc

SEQ ID NO: 20760 - RNA, 24 nt, Human
uucaaaaauuauugauaaauuuau

SEQ ID NO: 20761 - RNA, 24 nt, Human
uuggacuucgggcccggagccucc

SEQ ID NO: 20762 - RNA, 22 nt, Human
uucaagcuggcccauggccggu

SEQ ID NO: 20763 - RNA, 23 nt, Human
ucacaggggaagcugugguacgu

SEQ ID NO: 20764 - RNA, 24 nt, Human
ugacaccaccccacuccucuuccu

SEQ ID NO: 20765 - RNA, 24 nt, Human
uuccuccaaacuccuaugcaggca

SEQ ID NO: 20766 - RNA, 24 nt, Human
uggggcugaucaagggcagagagc

SEQ ID NO: 20767 - RNA, 24 nt, Human
agaggaagagaggacagagaggcc

SEQ ID NO: 20768 - RNA, 24 nt, Human
ugcacuauucaguuaucuauugag

SEQ ID NO: 20769 - RNA, 24 nt, Human
uugcuugguguaacuaaucacugu

SEQ ID NO: 20770 - RNA, 24 nt, Human
guccuuccuucuccacauaaggcc

SEQ ID NO: 20771 - RNA, 24 nt, Human
uaccgcgucuccaagggucacagu

SEQ ID NO: 20772 - RNA, 24 nt, Human
ccgagcccugcauguggagcccuc

SEQ ID NO: 20773 - RNA, 24 nt, Human
gagccucagcuucuccuggauuug

SEQ ID NO: 20774 - RNA, 24 nt, Human
uaaauugugugaaauagucucccg

SEQ ID NO: 20775 - RNA, 24 nt, Human
uccacuggcgaaagaugccuuucu

SEQ ID NO: 20776 - RNA, 24 nt, Human
uaguucagauugaucuuaggucaa

SEQ ID NO: 20777 - RNA, 24 nt, Human
cggauagagugguggcucccagaa

SEQ ID NO: 20778 - RNA, 24 nt, Human
uuacugcauuuugaaaauguauuc

SEQ ID NO: 20779 - RNA, 24 nt, Human
augguaauggagguaaaguguguc

SEQ ID NO: 20780 - RNA, 24 nt, Human
cagugcuaguguaaacaguaugaa

SEQ ID NO: 20781 - RNA, 24 nt, Human
ugucaaggucuaguaggggaucca

SEQ ID NO: 20782 - RNA, 24 nt, Human
ucccggagcgguggggcggggccu

SEQ ID NO: 20783 - RNA, 24 nt, Human
ucaguucuucccaggugaacagca

SEQ ID NO: 20784 - RNA, 24 nt, Human
uaugagaucuagauacugauacuc

SEQ ID NO: 20785 - RNA, 19 nt, Human
uauuuuguuguuuuguacc

SEQ ID NO: 20786 - RNA, 22 nt, Human
uguggcuggucauggaaggggc

SEQ ID NO: 20787 - RNA, 24 nt, Human
uauuuuauugcaggaggugggggu

SEQ ID NO: 20788 - RNA, 24 nt, Human
uuugccccgggccaccucacucuc

SEQ ID NO: 20789 - RNA, 24 nt, Human
agccagggggaugcggcggccaua

SEQ ID NO: 20790 - RNA, 24 nt, Human
uuuaugagccccaaauuuaggauu

SEQ ID NO: 20791 - RNA, 24 nt, Human
uaguuuucaugaaucguggaauga

SEQ ID NO: 20792 - RNA, 24 nt, Human
uuuaacauaucauuuuuccauuua

SEQ ID NO: 20793 - RNA, 24 nt, Human
uaucaaggaagggcaggcgugaug

SEQ ID NO: 20794 - RNA, 24 nt, Human
uucaaauuucuuucuuuuuuaauu

SEQ ID NO: 20795 - RNA, 24 nt, Human
uaacagguguaagaguguugaaaa

SEQ ID NO: 20796 - RNA, 24 nt, Human
ucccaaccccuguauucccacccc

SEQ ID NO: 20797 - RNA, 24 nt, Human
cagccgcgcgcugcagguggugcg

SEQ ID NO: 20798 - RNA, 24 nt, Human
uuggacaacugccccuuccaugac

SEQ ID NO: 20799 - RNA, 24 nt, Human
agcguauugccuauccauugugau

SEQ ID NO: 20800 - RNA, 24 nt, Human
gaccaguauucaacuuguggggca

SEQ ID NO: 20801 - RNA, 24 nt, Human
uguagaacucagccuucuuggaaa

SEQ ID NO: 20802 - RNA, 24 nt, Human
cuuugauucagcaagccacaacag

SEQ ID NO: 20803 - RNA, 24 nt, Human
uugcugguggcggccuuggcggug

SEQ ID NO: 20804 - RNA, 19 nt, Human
cuccuggauggacaucaua

SEQ ID NO: 20805 - RNA, 20 nt, Human
guggauccggaucuucaugg

SEQ ID NO: 20806 - RNA, 24 nt, Human
guuaacuucuugagcuauuucgug

SEQ ID NO: 20807 - RNA, 24 nt, Human
uauggcaaggaccugauggagaag

SEQ ID NO: 20808 - RNA, 24 nt, Human
aaggagcuuugguucggagacagg

SEQ ID NO: 20809 - RNA, 24 nt, Human
uguccagaccauugucuuccaacc

SEQ ID NO: 20810 - RNA, 24 nt, Human
uauggcaaggaccugauggagaag

SEQ ID NO: 20811 - RNA, 24 nt, Human
aaggagcuuugguucggagacagg

SEQ ID NO: 20812 - RNA, 24 nt, Human
uguccagaccauugucuuccaacc

SEQ ID NO: 20813 - RNA, 24 nt, Human
uauggcaaggaccugauggagaag

SEQ ID NO: 20814 - RNA, 24 nt, Human
aaggagcuuugguucggagacagg

SEQ ID NO: 20815 - RNA, 24 nt, Human
ggacccggcucuccuggcccugug

SEQ ID NO: 20816 - RNA, 24 nt, Human
ucuuucuuuuuuaaaagaagaugg

SEQ ID NO: 20817 - RNA, 24 nt, Human
uuuuuuuuuuccccccccccaccc

SEQ ID NO: 20818 - RNA, 24 nt, Human
gaguuuguuuuuuuuuuuuucccc

SEQ ID NO: 20819 - RNA, 24 nt, Human
ggccgugguccgcgcccuuccucg

SEQ ID NO: 20820 - RNA, 24 nt, Human
uugaucuugaagaaacugggcgug

SEQ ID NO: 20821 - RNA, 24 nt, Human
aggaaggagauauagugaagagga

SEQ ID NO: 20822 - RNA, 24 nt, Human
guagaguuuucuucaggcuuaaag

SEQ ID NO: 20823 - RNA, 24 nt, Human
uuaaauacgcugaguacuaaaaag

SEQ ID NO: 20824 - RNA, 24 nt, Human
uaucagaguauauacacaugaggu

SEQ ID NO: 20825 - RNA, 24 nt, Human
uaggcaccauauuugcugaacuag

SEQ ID NO: 20826 - RNA, 19 nt, Human
uaacauagcauuaaggugg

SEQ ID NO: 20827 - RNA, 24 nt, Human
uuugagaacaggugaaucagcuga

SEQ ID NO: 20828 - RNA, 20 nt, Human
uugaaugcacaaauucuguc

SEQ ID NO: 20829 - RNA, 24 nt, Human
ucauucauugcuacauaauuuggu

SEQ ID NO: 20830 - RNA, 24 nt, Human
ugagcaggccgugucccugaguca

SEQ ID NO: 20831 - RNA, 24 nt, Human
uaccaccagcaccagcacagcugc

SEQ ID NO: 20832 - RNA, 24 nt, Human
uguggccaguaccaagagucggug

SEQ ID NO: 20833 - RNA, 24 nt, Human
cucccuaggcgucccaucucgcuu

SEQ ID NO: 20834 - RNA, 24 nt, Human
uauuguggcuggagacaugagcaa

SEQ ID NO: 20835 - RNA, 24 nt, Human
cagcugcuuccuuguagccaagaa

SEQ ID NO: 20836 - RNA, 20 nt, Human
uggugugaggaugaggagga

SEQ ID NO: 20837 - RNA, 24 nt, Human
ugguauuuuugaagcugcuaucau

SEQ ID NO: 20838 - RNA, 24 nt, Human
auggaucugaacugaaguccugua

SEQ ID NO: 20839 - RNA, 24 nt, Human
uuagauacugucgguaagacucua

SEQ ID NO: 20840 - RNA, 24 nt, Human
uauacaguaaauucucgucucugu

SEQ ID NO: 20841 - RNA, 18 nt, Human
uggugggugauuaacugc

SEQ ID NO: 20842 - RNA, 24 nt, Human
ugucacggcagucguugaacacac

SEQ ID NO: 20843 - RNA, 24 nt, Human
uccuuuuucuguaggccgccuuaa

SEQ ID NO: 20844 - RNA, 24 nt, Human
uggcuagaaacuugucagcaugaa

SEQ ID NO: 20845 - RNA, 24 nt, Human
uuccuuagaggggagucuucaccc

SEQ ID NO: 20846 - RNA, 24 nt, Human
gcccguuuagauaccauggcagag

SEQ ID NO: 20847 - RNA, 24 nt, Human
uauggcaagucacuuugacagaca

SEQ ID NO: 20848 - RNA, 24 nt, Human
ugagaauggcaaaauuagucgccu

SEQ ID NO: 20849 - RNA, 24 nt, Human
uacaccacucccaagaagaauaag

SEQ ID NO: 20850 - RNA, 24 nt, Human
uucaacuaccuagaaauaguuacc

SEQ ID NO: 20851 - RNA, 24 nt, Human
uuuauagugacugaguaugaugcu

SEQ ID NO: 20852 - RNA, 20 nt, Human
ugccccaggcccggaucagc

SEQ ID NO: 20853 - RNA, 24 nt, Human
uuuagggggaaaaaaacggggaaa

SEQ ID NO: 20854 - RNA, 24 nt, Human
uauugaagaacccuucuugggggg

SEQ ID NO: 20855 - RNA, 24 nt, Human
aucccauuaaacaauauguccaca

SEQ ID NO: 20856 - RNA, 24 nt, Human
aacauccuuacgccuauuuaaugu

SEQ ID NO: 20857 - RNA, 24 nt, Human
uuagagaaaggcugauuccaaucu

SEQ ID NO: 20858 - RNA, 24 nt, Human
ugagaaaguccccgggaggugcuc

SEQ ID NO: 20859 - RNA, 24 nt, Human
uagcuuguuuuauuagcauuccgg

SEQ ID NO: 20860 - RNA, 24 nt, Human
ugagguggaacaacuuguugcgga

SEQ ID NO: 20861 - RNA, 24 nt, Human
aaccguguuuuucauucucccuaa

SEQ ID NO: 20862 - RNA, 24 nt, Human
auccuggacccagugcacagcguu

SEQ ID NO: 20863 - RNA, 24 nt, Human
cauuaguaaucagauuccaguuug

SEQ ID NO: 20864 - RNA, 24 nt, Human
acgaugcuuugugugucauccgga

SEQ ID NO: 20865 - RNA, 24 nt, Human
uggcacugaagaacaccugugagu

SEQ ID NO: 20866 - RNA, 24 nt, Human
aggugguggagaccuugcugaagc

SEQ ID NO: 20867 - RNA, 24 nt, Human
ugcgggaaacgaugggcacaacag

SEQ ID NO: 20868 - RNA, 24 nt, Human
gaagagggggucugauaagccauc

SEQ ID NO: 20869 - RNA, 24 nt, Human
ugagauccaucugacugcugccau

SEQ ID NO: 20870 - RNA, 24 nt, Human
aggaaauuacaguuagaggucaca

SEQ ID NO: 20871 - RNA, 24 nt, Human
uaccuucaccuggaacaucaacca

SEQ ID NO: 20872 - RNA, 24 nt, Human
cacucgguguacguccuggaggac

SEQ ID NO: 20873 - RNA, 24 nt, Human
caccgggaggugaccccugaccag

SEQ ID NO: 20874 - RNA, 24 nt, Human
ugaagaacaucaccuaagagauua

SEQ ID NO: 20875 - RNA, 24 nt, Human
ucgaaagugguucuuggaaaacuu

SEQ ID NO: 20876 - RNA, 24 nt, Human
agacuggaucugggcuagagagag

SEQ ID NO: 20877 - RNA, 24 nt, Human
aggaaauuacaguuagaggucaca

SEQ ID NO: 20878 - RNA, 23 nt, Human
ucaagagcacccugauuuggcua

SEQ ID NO: 20879 - RNA, 24 nt, Human
cgaggaagaggaggagcaguuggu

SEQ ID NO: 20880 - RNA, 24 nt, Human
uauuugaagaaaauguugaacaug

SEQ ID NO: 20881 - RNA, 24 nt, Human
auugcaaaauuacaacugagacag

SEQ ID NO: 20882 - RNA, 24 nt, Human
uuuauuggaaaauacccaaauaau

SEQ ID NO: 20883 - RNA, 24 nt, Human
uuaauuguuuaccuagauuauuua

SEQ ID NO: 20884 - RNA, 24 nt, Human
uaacauacaaagcuauaauuaaga

SEQ ID NO: 20885 - RNA, 24 nt, Human
uacagaagaaaucaauacaauaga

SEQ ID NO: 20886 - RNA, 24 nt, Human
ugauaugcuuuuacuucaacuuag

SEQ ID NO: 20887 - RNA, 24 nt, Human
ugcauuguuaucauuaaccagucu

SEQ ID NO: 20888 - RNA, 24 nt, Human
uaaugggucucaaaauucugugac

SEQ ID NO: 20889 - RNA, 24 nt, Human
uauuagggauaauauucauuuagc

SEQ ID NO: 20890 - RNA, 24 nt, Human
gcgcauagguuauuucaaaccagg

SEQ ID NO: 20891 - RNA, 24 nt, Human
caugagacucuucauuuuguccac

SEQ ID NO: 20892 - RNA, 20 nt, Human
uggcugaaggucugcagcug

SEQ ID NO: 20893 - RNA, 24 nt, Human
gaggauccauuuuaugguugaugc

SEQ ID NO: 20894 - RNA, 24 nt, Human
ggcccgggcggccggggcuucugg

SEQ ID NO: 20895 - RNA, 24 nt, Human
uauuagggauaauauucauuuagc

SEQ ID NO: 20896 - RNA, 24 nt, Human
uaaaguagcuucaaaaagacuucu

SEQ ID NO: 20897 - RNA, 24 nt, Human
cuuggcccaccucuaugacccagc

SEQ ID NO: 20898 - RNA, 24 nt, Human
ugaguguagccuuuguaucaugug

SEQ ID NO: 20899 - RNA, 24 nt, Human
ucagccaagaaugcgacagccguc

SEQ ID NO: 20900 - RNA, 24 nt, Human
cuuugugacagaccgggacaaagu

SEQ ID NO: 20901 - RNA, 24 nt, Human
cucgagcaacgguuaccaucaaug

SEQ ID NO: 20902 - RNA, 21 nt, Human
uacaguuucagauaaggacac

SEQ ID NO: 20903 - RNA, 24 nt, Human
agagguccuuagauagagaggaga

SEQ ID NO: 20904 - RNA, 18 nt, Human
uuugucuccaccaccucc

SEQ ID NO: 20905 - RNA, 24 nt, Human
aaccugaggcagaaaguggauaau

SEQ ID NO: 20906 - RNA, 24 nt, Human
ugaggaccuggguaguaguuaguu

SEQ ID NO: 20907 - RNA, 24 nt, Human
ugagcaucaggauuuuauggauga

SEQ ID NO: 20908 - RNA, 24 nt, Human
aaccacaucgccgccuuguccucc

SEQ ID NO: 20909 - RNA, 24 nt, Human
augcauucugggcacuggugcaag

SEQ ID NO: 20910 - RNA, 24 nt, Human
uauggcaagucacuuugacagaca

SEQ ID NO: 20911 - RNA, 24 nt, Human
uacaccacucccaagaagaauaag

SEQ ID NO: 20912 - RNA, 24 nt, Human
ucucugguguuggaugcuuugugu

SEQ ID NO: 20913 - RNA, 24 nt, Human
uggaaaucuccuuacugauccgua

SEQ ID NO: 20914 - RNA, 24 nt, Human
ugaaguuguaaugccaauaaccug

SEQ ID NO: 20915 - RNA, 24 nt, Human
uuguaagaguggaauuaacugccc

SEQ ID NO: 20916 - RNA, 24 nt, Human
aaugucaccuucaccagcaauauu

SEQ ID NO: 20917 - RNA, 24 nt, Human
ugaaaaguuggaagauuuugcauc

SEQ ID NO: 20918 - RNA, 24 nt, Human
ggacugggccgucgcacacgccag

SEQ ID NO: 20919 - RNA, 24 nt, Human
uucgauuacaauggcguaggauag

SEQ ID NO: 20920 - RNA, 24 nt, Human
ugggaucagauaugacauugcacu

SEQ ID NO: 20921 - RNA, 24 nt, Human
gaggaaacagccccacugcauuug

SEQ ID NO: 20922 - RNA, 24 nt, Human
uaauguguuuguguuggcuuugca

SEQ ID NO: 20923 - RNA, 24 nt, Human
cgggauuauuguguguaggcugua

SEQ ID NO: 20924 - RNA, 18 nt, Human
uugguccggagaggcugc

SEQ ID NO: 20925 - RNA, 24 nt, Human
ccuuaccuagacgccggaggggac

SEQ ID NO: 20926 - RNA, 21 nt, Human
agagagaggcauuuagcugau

SEQ ID NO: 20927 - RNA, 24 nt, Human
auuauauuuauucaggaggaccau

SEQ ID NO: 20928 - RNA, 24 nt, Human
uagcguggccacugcguugauguu

SEQ ID NO: 20929 - RNA, 24 nt, Human
acagugguuugauuaauuggauug

SEQ ID NO: 20930 - RNA, 24 nt, Human
uuuuuuuuuuuuuuuuuuguuuuu

SEQ ID NO: 20931 - RNA, 24 nt, Human
accacuuuacaaauuguucuuguc

SEQ ID NO: 20932 - RNA, 24 nt, Human
acuuuggugccguuacuugugaaa

SEQ ID NO: 20933 - RNA, 24 nt, Human
ugaauuaaacaaucguguggagaa

SEQ ID NO: 20934 - RNA, 20 nt, Human
uauuacagauuauuuuuccc

SEQ ID NO: 20935 - RNA, 24 nt, Human
ugccucagugacagcagcauauuu

SEQ ID NO: 20936 - RNA, 21 nt, Human
ggugaucgaggagccuggccu

SEQ ID NO: 20937 - RNA, 24 nt, Human
cagcccacuccccaaacuggcuac

SEQ ID NO: 20938 - RNA, 24 nt, Human
ugggagcucugcaaaaucaguagc

SEQ ID NO: 20939 - RNA, 20 nt, Human
uggcagaggaggaggaguca

SEQ ID NO: 20940 - RNA, 24 nt, Human
uggcaauaaauacuaugggauugu

SEQ ID NO: 20941 - RNA, 21 nt, Human
ugucuccaacuagaaaugauc

SEQ ID NO: 20942 - RNA, 24 nt, Human
ugaaaaaauaagcaauuaucauaa

SEQ ID NO: 20943 - RNA, 24 nt, Human
uuauaaggcuuagacagaauuauu

SEQ ID NO: 20944 - RNA, 24 nt, Human
gaucacagggucuaaggguggcca

SEQ ID NO: 20945 - RNA, 24 nt, Human
ugggauuagaagcagaaggcugac

SEQ ID NO: 20946 - RNA, 24 nt, Human
uacaaugaauauuaauacauauug

SEQ ID NO: 20947 - RNA, 24 nt, Human
uguacaaaaccuaauuuguuguca

SEQ ID NO: 20948 - RNA, 24 nt, Human
uggaagaugcucaacaccuccucc

SEQ ID NO: 20949 - RNA, 24 nt, Human
ucccuguagaagucuccaggaaga

SEQ ID NO: 20950 - RNA, 20 nt, Human
uacaggguuuugguauguuu

SEQ ID NO: 20951 - RNA, 24 nt, Human
uuaaaaaaaaaaaaaagugggaau

SEQ ID NO: 20952 - RNA, 24 nt, Human
aacgcuuuuauacuguauuuugua

SEQ ID NO: 20953 - RNA, 24 nt, Human
uuaccacuuucaauagucauuaau

SEQ ID NO: 20954 - RNA, 21 nt, Human
ucugacaguucugcgacaagc

SEQ ID NO: 20955 - RNA, 24 nt, Human
uggcgcaguccugugggcggcgug

SEQ ID NO: 20956 - RNA, 24 nt, Human
ugaaauucauuuagugaaguagug

SEQ ID NO: 20957 - RNA, 21 nt, Human
cacuguauagcaggagaaaac

SEQ ID NO: 20958 - RNA, 24 nt, Human
aagaguucacaccugaugaaugua

SEQ ID NO: 20959 - RNA, 24 nt, Human
agagaucauaaauuuaugugugau

SEQ ID NO: 20960 - RNA, 24 nt, Human
uuucaguucuguaccuaggccucc

SEQ ID NO: 20961 - RNA, 24 nt, Human
ucaaugcccuccuuuauccucauc

SEQ ID NO: 20962 - RNA, 24 nt, Human
uucauucacuuaaaauacugauua

SEQ ID NO: 20963 - RNA, 24 nt, Human
acuggcuucugcucuugcucuuuc

SEQ ID NO: 20964 - RNA, 24 nt, Human
cucauggaaaauggggagaaaacu

SEQ ID NO: 20965 - RNA, 24 nt, Human
aaccaguuucacuuguaccaagac

SEQ ID NO: 20966 - RNA, 24 nt, Human
ugugcagaagaaauggaaggauuc

SEQ ID NO: 20967 - RNA, 24 nt, Human
aagaagaaaaaagaaauggcacaa

SEQ ID NO: 20968 - RNA, 24 nt, Human
ucaauuuuuauuuugguuuucuua

SEQ ID NO: 20969 - RNA, 24 nt, Human
ugggugugugugugugugugcgug

SEQ ID NO: 20970 - RNA, 24 nt, Human
uagguucuaggggugcaagccucu

SEQ ID NO: 20971 - RNA, 24 nt, Human
acaguacagugugagcccccggga

SEQ ID NO: 20972 - RNA, 24 nt, Human
cugcaagaccucauucaauugaug

SEQ ID NO: 20973 - RNA, 24 nt, Human
agggcacgaugggagcgggagaca

SEQ ID NO: 20974 - RNA, 24 nt, Human
caucccaaugccagaccuuccucc

SEQ ID NO: 20975 - RNA, 24 nt, Human
cuagagaagucagaagaaucagaa

SEQ ID NO: 20976 - RNA, 22 nt, Human
uuuguaaacaugaaguuacuau

SEQ ID NO: 20977 - RNA, 24 nt, Human
uauuuuacuaugauaguugagaaa

SEQ ID NO: 20978 - RNA, 24 nt, Human
aaggaggucauaauggggaaacac

SEQ ID NO: 20979 - RNA, 24 nt, Human
ucuaucacuuucauguaacaaugg

SEQ ID NO: 20980 - RNA, 24 nt, Human
cacaguguuccuaggcuggagugc

SEQ ID NO: 20981 - RNA, 24 nt, Human
cuuagcccucucaguagcugggac

SEQ ID NO: 20982 - RNA, 22 nt, Human
ucuugcuauguugccgggcugg

SEQ ID NO: 20983 - RNA, 24 nt, Human
uuggccucuggacacucaucggcc

SEQ ID NO: 20984 - RNA, 24 nt, Human
ugaaugacuauuuuauucguauuu

SEQ ID NO: 20985 - RNA, 24 nt, Human
ugaggaccagugcacugaguacau

SEQ ID NO: 20986 - RNA, 24 nt, Human
aggcagcggcuguggcagcccggc

SEQ ID NO: 20987 - RNA, 20 nt, Human
ucugaccucccaggaagugu

SEQ ID NO: 20988 - RNA, 24 nt, Human
uauaauaauuaacaacagcaaaga

SEQ ID NO: 20989 - RNA, 24 nt, Human
ugagguguccugugcccugacccu

SEQ ID NO: 20990 - RNA, 24 nt, Human
uugaucaucgggacagcaaagugu

SEQ ID NO: 20991 - RNA, 23 nt, Human
uuagaauacuggugcuuuuggau

SEQ ID NO: 20992 - RNA, 24 nt, Human
uggcucuguaacucuucaaaggcc

SEQ ID NO: 20993 - RNA, 24 nt, Human
uauuuuggcaaguaauaugacuau

SEQ ID NO: 20994 - RNA, 23 nt, Human
auugaugguaguucaguuggggu

SEQ ID NO: 20995 - RNA, 24 nt, Human
uacccauccucugauuuauacaua

SEQ ID NO: 20996 - RNA, 24 nt, Human
caggcauuaucauucuucaccuac

SEQ ID NO: 20997 - RNA, 24 nt, Human
uauacugcauuuuuugagccuauc

SEQ ID NO: 20998 - RNA, 24 nt, Human
ugggaucgaagugacaaagugugu

SEQ ID NO: 20999 - RNA, 24 nt, Human
uacuggagaggaaaugacugcuga

SEQ ID NO: 21000 - RNA, 24 nt, Human
aaaacguagagcgguuccagacuc

SEQ ID NO: 21001 - RNA, 24 nt, Human
ugagggaaaauucaguuguugugc

SEQ ID NO: 21002 - RNA, 24 nt, Human
agcaggacuucucggcgagggagu

SEQ ID NO: 21003 - RNA, 24 nt, Human
uauguauuauaauuucuaaaaugc

SEQ ID NO: 21004 - RNA, 20 nt, Human
uguccagaauuuccagaagu

SEQ ID NO: 21005 - RNA, 24 nt, Human
ugagugcccccagggaggggcugg

SEQ ID NO: 21006 - RNA, 24 nt, Human
uguggcccuucucuuuaaguccga

SEQ ID NO: 21007 - RNA, 23 nt, Human
uccgugcgcguugcugcggccgu

SEQ ID NO: 21008 - RNA, 24 nt, Human
aggaaggagauauagugaagagga

SEQ ID NO: 21009 - RNA, 24 nt, Human
ugauagugucgagcaggaugucaa

SEQ ID NO: 21010 - RNA, 24 nt, Human
aacacuuuguuguagcugcccucc

SEQ ID NO: 21011 - RNA, 24 nt, Human
uugaagaagaggauccggguggcc

SEQ ID NO: 21012 - RNA, 24 nt, Human
ccaaagcucagacuugccaggcuc

SEQ ID NO: 21013 - RNA, 22 nt, Human
uuccucugauuuuggcaugugg

SEQ ID NO: 21014 - RNA, 24 nt, Human
gggcacgcgcgcaggagcucaugu

SEQ ID NO: 21015 - RNA, 24 nt, Human
ucgcaggcggaggggcagccucua

SEQ ID NO: 21016 - RNA, 24 nt, Human
auggagcggaaggcagauuagaca

SEQ ID NO: 21017 - RNA, 24 nt, Human
ugagauuguguggucccggcagcg

SEQ ID NO: 21018 - RNA, 24 nt, Human
gggacaguggacagggacucagaa

SEQ ID NO: 21019 - RNA, 24 nt, Human
gaggaucccgguaagagcgucugu

SEQ ID NO: 21020 - RNA, 24 nt, Human
gaccuuccccuaccuuuuguggaa

SEQ ID NO: 21021 - RNA, 24 nt, Human
aggggauccucaguauagccggug

SEQ ID NO: 21022 - RNA, 24 nt, Human
uacuguaauccccgcugcugcucc

SEQ ID NO: 21023 - RNA, 24 nt, Human
ggugaauucauguguaguacaagc

SEQ ID NO: 21024 - RNA, 24 nt, Human
ugucucgaucccacuuaacuaucu

SEQ ID NO: 21025 - RNA, 24 nt, Human
uuuguagucauuuuaaguagcaug

SEQ ID NO: 21026 - RNA, 24 nt, Human
uucaaguuaaucuagaaauuuauu

SEQ ID NO: 21027 - RNA, 24 nt, Human
ugguugacaaaaaauguaucuuua

SEQ ID NO: 21028 - RNA, 24 nt, Human
uggcauaggcguugaugugaccgu

SEQ ID NO: 21029 - RNA, 24 nt, Human
cagugggugacagagugagacccu

SEQ ID NO: 21030 - RNA, 24 nt, Human
agcccgucgcgagggggaagacag

SEQ ID NO: 21031 - RNA, 24 nt, Human
uagcaggaacacuacacuacgugc

SEQ ID NO: 21032 - RNA, 24 nt, Human
ucagauccagcuuguggaugcucu

SEQ ID NO: 21033 - RNA, 24 nt, Human
uggcgaucuuuuuuuuuuuuuuuu

SEQ ID NO: 21034 - RNA, 24 nt, Human
auggaucugggauuucaauccagc

SEQ ID NO: 21035 - RNA, 24 nt, Human
uauguuguguauaaauguacacuu

SEQ ID NO: 21036 - RNA, 24 nt, Human
uauguuguguauaaauguacacuu

SEQ ID NO: 21037 - RNA, 20 nt, Human
caugagguucagguaggugc

SEQ ID NO: 21038 - RNA, 24 nt, Human
accugguuccccaucacucugugc

SEQ ID NO: 21039 - RNA, 21 nt, Human
ccugaaguuauuaauucuacu

SEQ ID NO: 21040 - RNA, 24 nt, Human
auaauacauuauucauuaucuuuc

SEQ ID NO: 21041 - RNA, 19 nt, Human
guggaucuuuuccaaugcc

SEQ ID NO: 21042 - RNA, 23 nt, Human
uaacuuguaaagcuucccacaau

SEQ ID NO: 21043 - RNA, 24 nt, Human
cuagcauaauaguauuuauuaaag

SEQ ID NO: 21044 - RNA, 24 nt, Human
uaaauuuucaguuucuacacacuu

SEQ ID NO: 21045 - RNA, 24 nt, Human
aucccuuucugcuguucaccacca

SEQ ID NO: 21046 - RNA, 24 nt, Human
uguaauaguuuaugcuguauaguu

SEQ ID NO: 21047 - RNA, 24 nt, Human
ugaccuggcuaaaaacaaaauucc

SEQ ID NO: 21048 - RNA, 24 nt, Human
acggagcaugagaagacguucccc

SEQ ID NO: 21049 - RNA, 24 nt, Human
cggcugcccauugcucucccacuc

SEQ ID NO: 21050 - RNA, 24 nt, Human
ugaagaguggaaguguucaagaac

SEQ ID NO: 21051 - RNA, 24 nt, Human
gggaagcagaacaucuaagaaaga

SEQ ID NO: 21052 - RNA, 24 nt, Human
ugggccagcugcuucgacugcugc

SEQ ID NO: 21053 - RNA, 24 nt, Human
agaguauaaacguaaaaaggaaca

SEQ ID NO: 21054 - RNA, 24 nt, Human
aguggacaauaagacuauacugag

SEQ ID NO: 21055 - RNA, 24 nt, Human
ucccauacuuagaauguuucuagu

SEQ ID NO: 21056 - RNA, 19 nt, Human
uacauuugaggcuuguuuu

SEQ ID NO: 21057 - RNA, 24 nt, Human
uaagaaaaacaaucauauauaugc

SEQ ID NO: 21058 - RNA, 24 nt, Human
uuagcagggcgugguggugggcac

SEQ ID NO: 21059 - RNA, 24 nt, Human
ccacugcacuccagcuugggagac

SEQ ID NO: 21060 - RNA, 24 nt, Human
uccagcuugagugacagagugaga

SEQ ID NO: 21061 - RNA, 24 nt, Human
ugauguuuucuucucucuucauuu

SEQ ID NO: 21062 - RNA, 24 nt, Human
gagcuuguacgaucucuuuguuag

SEQ ID NO: 21063 - RNA, 24 nt, Human
aacccaguuccuuuuauccucaga

SEQ ID NO: 21064 - RNA, 24 nt, Human
accccgucucuacuaaaacuacaa

SEQ ID NO: 21065 - RNA, 24 nt, Human
ccacugcacuccagccugggugac

SEQ ID NO: 21066 - RNA, 24 nt, Human
ucacaagguccggagauugagacc

SEQ ID NO: 21067 - RNA, 24 nt, Human
caggcacccugggcccccuggagg

SEQ ID NO: 21068 - RNA, 17 nt, Human
ucacugggccuccaugc

SEQ ID NO: 21069 - RNA, 24 nt, Human
aguuuuuuuaaaguuuucuuuuuu

SEQ ID NO: 21070 - RNA, 24 nt, Human
uuccugucuuuuuacauuaauaca

SEQ ID NO: 21071 - RNA, 24 nt, Human
uccguugacagugagcgguugcaa

SEQ ID NO: 21072 - RNA, 24 nt, Human
uugcaaauccgcuugacagugagc

SEQ ID NO: 21073 - RNA, 24 nt, Human
uugacagugagcgguugcaaaucc

SEQ ID NO: 21074 - RNA, 20 nt, Human
caguccuuucccuguugagu

SEQ ID NO: 21075 - RNA, 24 nt, Human
uaauauagauuacugccucuaacu

SEQ ID NO: 21076 - RNA, 24 nt, Human
uaaauacaaauccuaaauacaugg

SEQ ID NO: 21077 - RNA, 24 nt, Human
ccccugagggagaggaaaggugaa

SEQ ID NO: 21078 - RNA, 24 nt, Human
ugcaaagacucccccugacccacc

SEQ ID NO: 21079 - RNA, 24 nt, Human
uugcaucgcuuaaguacguugcau

SEQ ID NO: 21080 - RNA, 24 nt, Human
ccgccgcgcccagcccccacaaaa

SEQ ID NO: 21081 - RNA, 24 nt, Human
ugggcaaaagagaaaaagaaggau

SEQ ID NO: 21082 - RNA, 24 nt, Human
caaucauugaauacaaaacaaaua

SEQ ID NO: 21083 - RNA, 24 nt, Human
uaaaaugccagaauauaaaaugag

SEQ ID NO: 21084 - RNA, 21 nt, Human
uugcucccucacuuuguuucc

SEQ ID NO: 21085 - RNA, 24 nt, Human
uaucaagucagcacacaccuuuuc

SEQ ID NO: 21086 - RNA, 21 nt, Human
ugauggaaguaaucugcuuaa

SEQ ID NO: 21087 - RNA, 24 nt, Human
guuuuaguugguguagcaguggga

SEQ ID NO: 21088 - RNA, 24 nt, Human
ugccuuauaaucuuuggcuccagu

SEQ ID NO: 21089 - RNA, 24 nt, Human
ucuaagccucaagucauguuccua

SEQ ID NO: 21090 - RNA, 24 nt, Human
cauaguauauuuuccuuccuuaau

SEQ ID NO: 21091 - RNA, 24 nt, Human
ugacagaugugaugagaagaagaa

SEQ ID NO: 21092 - RNA, 24 nt, Human
gcuaaaguugaacaaucccgguac

SEQ ID NO: 21093 - RNA, 24 nt, Human
aguuguuacugguuugucaagcau

SEQ ID NO: 21094 - RNA, 24 nt, Human
aaacuccaaugguucagugacugu

SEQ ID NO: 21095 - RNA, 19 nt, Human
cacuuugccacugcucuuc

SEQ ID NO: 21096 - RNA, 24 nt, Human
cagcugccucccgagccuccaaga

SEQ ID NO: 21097 - RNA, 24 nt, Human
cagcagcacgcagugagagccucg

SEQ ID NO: 21098 - RNA, 24 nt, Human
uguggcagugagagaauccuggca

SEQ ID NO: 21099 - RNA, 24 nt, Human
ucaaaaaaguuaccucaucaggua

SEQ ID NO: 21100 - RNA, 24 nt, Human
gaccucaacgccccugaccucuau

SEQ ID NO: 21101 - RNA, 24 nt, Human
uacuacguggcgcuggccuggacc

SEQ ID NO: 21102 - RNA, 24 nt, Human
uuaguggaguugaagaucagccag

SEQ ID NO: 21103 - RNA, 24 nt, Human
uugaucuugaagaaacugggcgug

SEQ ID NO: 21104 - RNA, 24 nt, Human
guagaguuuucuucaggcuuaaag

SEQ ID NO: 21105 - RNA, 24 nt, Human
aggaaggagauauagugaagagga

SEQ ID NO: 21106 - RNA, 24 nt, Human
uccgugcgcguugcugcggcgugg

SEQ ID NO: 21107 - RNA, 24 nt, Human
uugaucuugaagaaacugggcgug

SEQ ID NO: 21108 - RNA, 24 nt, Human
aggaaggagauauagugaagagga

SEQ ID NO: 21109 - RNA, 24 nt, Human
guagaguuuucuucaggcuuaaag

SEQ ID NO: 21110 - RNA, 18 nt, Human
aggugcuucuaagcccag

SEQ ID NO: 21111 - RNA, 24 nt, Human
aagcaggaaucugagauuuccaag

SEQ ID NO: 21112 - RNA, 24 nt, Human
acuugcuggcuaguaugcagcugc

SEQ ID NO: 21113 - RNA, 24 nt, Human
cgagcagaggagcggaaggcgagc

SEQ ID NO: 21114 - RNA, 24 nt, Human
uggcaccggcccugccugcgcugc

SEQ ID NO: 21115 - RNA, 24 nt, Human
ucacgcugggagaaugagagggac

SEQ ID NO: 21116 - RNA, 24 nt, Human
acuaacgcgugcuuaagccucuga

SEQ ID NO: 21117 - RNA, 24 nt, Human
aaaggaacuguuaaacugaaaaag

SEQ ID NO: 21118 - RNA, 23 nt, Human
uucauauucaccagguccguauu

SEQ ID NO: 21119 - RNA, 24 nt, Human
acaaaucuucacuaugcauauuac

SEQ ID NO: 21120 - RNA, 24 nt, Human
uacccauugcucucccacuccacg

SEQ ID NO: 21121 - RNA, 24 nt, Human
agaaagcagcuuuuuugaauucua

SEQ ID NO: 21122 - RNA, 24 nt, Human
uggcaggaaugggaggcauccaga

SEQ ID NO: 21123 - RNA, 24 nt, Human
ugagacagagcuggcaugcgccag

SEQ ID NO: 21124 - RNA, 24 nt, Human
cgccaggguccagacacggagaac

SEQ ID NO: 21125 - RNA, 24 nt, Human
ccagggggggcaguggggugggcc

SEQ ID NO: 21126 - RNA, 24 nt, Human
ccagggcgcgucgcguggccguuc

SEQ ID NO: 21127 - RNA, 24 nt, Human
aaggagccacggggugaggcuggu

SEQ ID NO: 21128 - RNA, 24 nt, Human
uguucuggagcuguuggacaaaua

SEQ ID NO: 21129 - RNA, 24 nt, Human
aggcagucacagaacaggggcaug

SEQ ID NO: 21130 - RNA, 24 nt, Human
uaccucagccgugccgcucccugu

SEQ ID NO: 21131 - RNA, 24 nt, Human
ucccuagaccuaagagugccuugg

SEQ ID NO: 21132 - RNA, 24 nt, Human
uugcucccuacgucacacuccgga

SEQ ID NO: 21133 - RNA, 24 nt, Human
uguuguguaucuuuuuuguucuuu

SEQ ID NO: 21134 - RNA, 24 nt, Human
ucuaaugcaguuuguucuguaacu

SEQ ID NO: 21135 - RNA, 24 nt, Human
agauggggagcugauuuucauagu

SEQ ID NO: 21136 - RNA, 19 nt, Human
uggcacaaccacaggcacu

SEQ ID NO: 21137 - RNA, 24 nt, Human
uggcaugacuauagcucacuguaa

SEQ ID NO: 21138 - RNA, 24 nt, Human
uaauggguuaauggguggggggca

SEQ ID NO: 21139 - RNA, 24 nt, Human
uaauaaauaugauauuuaaacgau

SEQ ID NO: 21140 - RNA, 24 nt, Human
auuaugcuaauguuaaaaauaaag

SEQ ID NO: 21141 - RNA, 24 nt, Human
ugauagauacugaguuuuugcuca

SEQ ID NO: 21142 - RNA, 21 nt, Human
uaacauaguggucauuugucc

SEQ ID NO: 21143 - RNA, 24 nt, Human
cuggugcuaguguuucuaucagau

SEQ ID NO: 21144 - RNA, 24 nt, Human
cagcguccagaugaagcucggaca

SEQ ID NO: 21145 - RNA, 24 nt, Human
ucacaaccacggcccuggaggagc

SEQ ID NO: 21146 - RNA, 24 nt, Human
ugccgcagcuguucacuugggcag

SEQ ID NO: 21147 - RNA, 24 nt, Human
ucuuuuguucauuuugagucccca

SEQ ID NO: 21148 - RNA, 21 nt, Human
uugacauugaggaugaagaaa

SEQ ID NO: 21149 - RNA, 24 nt, Human
aggcuguagcaaaguuugcaccau

SEQ ID NO: 21150 - RNA, 24 nt, Human
uagggcaacuucaguucggguuaa

SEQ ID NO: 21151 - RNA, 24 nt, Human
uauuagggauaauauucauuuagc

SEQ ID NO: 21152 - RNA, 24 nt, Human
uuuuaugucuggcuuauuucacuu

SEQ ID NO: 21153 - RNA, 19 nt, Human
ugauuuguaauuauuuucu

SEQ ID NO: 21154 - RNA, 24 nt, Human
ugccuaggcugguaggcuggucuc

SEQ ID NO: 21155 - RNA, 21 nt, Human
uggcaucaaguauuagggcac

SEQ ID NO: 21156 - RNA, 24 nt, Human
cugccaggcugaagccuguuccug

SEQ ID NO: 21157 - RNA, 24 nt, Human
uuuguagugaaguauaguagcaau

SEQ ID NO: 21158 - RNA, 24 nt, Human
uuaguauuaacaaauggcaaugag

SEQ ID NO: 21159 - RNA, 20 nt, Human
uucagagugguagaucuuua

SEQ ID NO: 21160 - RNA, 24 nt, Human
ucaccaggucaccgucuccuucca

SEQ ID NO: 21161 - RNA, 23 nt, Human
agaggcuaucagggcggcucugc

SEQ ID NO: 21162 - RNA, 24 nt, Human
uauugcucacgggggcuccagccg

SEQ ID NO: 21163 - RNA, 24 nt, Human
uccucggucuccgcccugcccccg

SEQ ID NO: 21164 - RNA, 24 nt, Human
uuagagcauacuuuguaggacucu

SEQ ID NO: 21165 - RNA, 24 nt, Human
ucccuguaagaauuuaccuuccaa

SEQ ID NO: 21166 - RNA, 24 nt, Human
uagcacaugacuuaaaaggugcug

SEQ ID NO: 21167 - RNA, 24 nt, Human
ugucaaagugacuugccauaaaca

SEQ ID NO: 21168 - RNA, 24 nt, Human
uuagcaccaccacgaagucucgac

SEQ ID NO: 21169 - RNA, 24 nt, Human
aggaagcuccccaagccucacugu

SEQ ID NO: 21170 - RNA, 24 nt, Human
ugcauuguuaucauuaaccagucu

SEQ ID NO: 21171 - RNA, 24 nt, Human
uuagcacgaaccauauauccauug

SEQ ID NO: 21172 - RNA, 24 nt, Human
ucaguugcugcucaaggcacagcu

SEQ ID NO: 21173 - RNA, 24 nt, Human
guugcuguucucuacaaagaugac

SEQ ID NO: 21174 - RNA, 24 nt, Human
uaaaugauaaauuaggauauguuu

SEQ ID NO: 21175 - RNA, 24 nt, Human
aagcgcugggauuguucugaucuc

SEQ ID NO: 21176 - RNA, 24 nt, Human
agugacaacagggagugacauuug

SEQ ID NO: 21177 - RNA, 24 nt, Human
ccugucuuggucuaaacauguuga

SEQ ID NO: 21178 - RNA, 24 nt, Human
acugucaccauagaaucuagugca

SEQ ID NO: 21179 - RNA, 24 nt, Human
uuaacauuugcaguccuuguguca

SEQ ID NO: 21180 - RNA, 24 nt, Human
gacucuguuuccccauuucuugcu

SEQ ID NO: 21181 - RNA, 24 nt, Human
uuuguuuucuguauguuguugggg

SEQ ID NO: 21182 - RNA, 24 nt, Human
aagaacuaauaacaucuugaguua

SEQ ID NO: 21183 - RNA, 24 nt, Human
cauugcguuacagcuacccacagu

SEQ ID NO: 21184 - RNA, 24 nt, Human
cguaaauauauauagugcuaaguc

SEQ ID NO: 21185 - RNA, 24 nt, Human
ugacaaagcacagaaaaaccagau

SEQ ID NO: 21186 - RNA, 24 nt, Human
uuuaaguagaacaaacuaaauaca

SEQ ID NO: 21187 - RNA, 24 nt, Human
aggcagcucccuucccccaggaag

SEQ ID NO: 21188 - RNA, 24 nt, Human
uacaucaaaaucaagucccuggcu

SEQ ID NO: 21189 - RNA, 24 nt, Human
ugcaaggcggaaaggcuggggcag

SEQ ID NO: 21190 - RNA, 24 nt, Human
gaccgguccgaccuggcguccucc

SEQ ID NO: 21191 - RNA, 24 nt, Human
agcuagccagaaugaacaacacaa

SEQ ID NO: 21192 - RNA, 21 nt, Human
uauuacuguaguccaugugca

SEQ ID NO: 21193 - RNA, 24 nt, Human
agagcacuguccagagcuuccucc

SEQ ID NO: 21194 - RNA, 22 nt, Human
uuggucuuaagcaguguuagaa

SEQ ID NO: 21195 - RNA, 24 nt, Human
agagcacuguccagagcuuccucc

SEQ ID NO: 21196 - RNA, 22 nt, Human
uuggucuuaagcaguguuagaa

SEQ ID NO: 21197 - RNA, 21 nt, Human
cucgugcuucgccguggcccc

SEQ ID NO: 21198 - RNA, 24 nt, Human
cacgguagucuucacuuugaaaca

SEQ ID NO: 21199 - RNA, 24 nt, Human
uucugagugaguuucuuaauccug

SEQ ID NO: 21200 - RNA, 24 nt, Human
uugcugaagaaugcuuuauuucca

SEQ ID NO: 21201 - RNA, 24 nt, Human
uacgguauauuucaagagauucua

SEQ ID NO: 21202 - RNA, 24 nt, Human
uaccggacgggcugggucuauggu

SEQ ID NO: 21203 - RNA, 24 nt, Human
acugaauuuuaaguauuagauuuu

SEQ ID NO: 21204 - RNA, 24 nt, Human
uauuuuaugaaagccuguuuuuuu

SEQ ID NO: 21205 - RNA, 24 nt, Human
uauguaccucucuaaacuaaguuc

SEQ ID NO: 21206 - RNA, 24 nt, Human
agccgguaaugcccucauggaugg

SEQ ID NO: 21207 - RNA, 24 nt, Human
uguggcuuaccaggugaauauugg

SEQ ID NO: 21208 - RNA, 24 nt, Human
uauuagccaucauugaggcacucu

SEQ ID NO: 21209 - RNA, 24 nt, Human
ugagggacaucuaaucuugguucg

SEQ ID NO: 21210 - RNA, 24 nt, Human
cauuaacuuuaaacauggucugcg

SEQ ID NO: 21211 - RNA, 24 nt, Human
ugccuguacaucaacaucuucuca

SEQ ID NO: 21212 - RNA, 24 nt, Human
aaggagcagcucgaggccaggagg

SEQ ID NO: 21213 - RNA, 24 nt, Human
cacggcaggucugaugccccgguu

SEQ ID NO: 21214 - RNA, 24 nt, Human
ugagugcacuugggagaccuggug

SEQ ID NO: 21215 - RNA, 24 nt, Human
aggaagacaggguucuggugccag

SEQ ID NO: 21216 - RNA, 24 nt, Human
ucaaagguagaggggugauucugu

SEQ ID NO: 21217 - RNA, 24 nt, Human
uacacugggacgucagcaaacacc

SEQ ID NO: 21218 - RNA, 24 nt, Human
uugguggugguggugguuuuuuuu

SEQ ID NO: 21219 - RNA, 24 nt, Human
uccaggaggaaugugaugauugcc

SEQ ID NO: 21220 - RNA, 24 nt, Human
aacccauuuuugucuucauaagca

SEQ ID NO: 21221 - RNA, 24 nt, Human
uuaaaguuauaugaagucccugag

SEQ ID NO: 21222 - RNA, 24 nt, Human
ugugucacccuaaagaagcauaua

SEQ ID NO: 21223 - RNA, 24 nt, Human
ugcugcugguaccaaaugugauuu

SEQ ID NO: 21224 - RNA, 24 nt, Human
acgacauuguuccacaaaguccuu

SEQ ID NO: 21225 - RNA, 24 nt, Human
accuugucgcguacuuuuuccaca

SEQ ID NO: 21226 - RNA, 24 nt, Human
uuaaagcuauucaggauuuaguag

SEQ ID NO: 21227 - RNA, 19 nt, Human
uaacucuuucagaaauuca

SEQ ID NO: 21228 - RNA, 24 nt, Human
ucacaggagauacguguuuuauuu

SEQ ID NO: 21229 - RNA, 24 nt, Human
ucuuauugaauuuuuucaucugcu

SEQ ID NO: 21230 - RNA, 19 nt, Human
uuucauggucauauaaugg

SEQ ID NO: 21231 - RNA, 21 nt, Human
uaugucaauucagaaauagag

SEQ ID NO: 21232 - RNA, 24 nt, Human
uacagcacaauauuucaauggaau

SEQ ID NO: 21233 - RNA, 24 nt, Human
gguaaagaaaaaugacauaguaaa

SEQ ID NO: 21234 - RNA, 24 nt, Human
uacccguucucccuuuggucaggg

SEQ ID NO: 21235 - RNA, 24 nt, Human
cagcagccucaacaguaugguauu

SEQ ID NO: 21236 - RNA, 24 nt, Human
ucuuugaaugacuauuccaaguaa

SEQ ID NO: 21237 - RNA, 24 nt, Human
gccaaauuuccacuuucagcaguu

SEQ ID NO: 21238 - RNA, 24 nt, Human
uacaugauuuuuaucuaacaacgu

SEQ ID NO: 21239 - RNA, 24 nt, Human
ccuaacaucaagaaugugagagaa

SEQ ID NO: 21240 - RNA, 24 nt, Human
uuaaagggaaucauuaacagccug

SEQ ID NO: 21241 - RNA, 24 nt, Human
ugaagcagaagcagauucggcgcg

SEQ ID NO: 21242 - RNA, 24 nt, Human
acggaccugggugcagccgcacgu

SEQ ID NO: 21243 - RNA, 24 nt, Human
ucgcgcugccgccgccacugcugc

SEQ ID NO: 21244 - RNA, 24 nt, Human
uaaauugugugaaauagucucccg

SEQ ID NO: 21245 - RNA, 24 nt, Human
gagccucagcuucuccuggauuug

SEQ ID NO: 21246 - RNA, 24 nt, Human
ugaagagauaggcuucauagauua

SEQ ID NO: 21247 - RNA, 24 nt, Human
uguggagugggccagcugaguacc

SEQ ID NO: 21248 - RNA, 24 nt, Human
auagaacaaauauuuacagauaca

SEQ ID NO: 21249 - RNA, 24 nt, Human
uagggucucuagaaggcagguagu

SEQ ID NO: 21250 - RNA, 24 nt, Human
uaauagccaaaagucagaauuuaa

SEQ ID NO: 21251 - RNA, 24 nt, Human
uuccuccuuggucacugccuucuc

SEQ ID NO: 21252 - RNA, 24 nt, Human
ugaauaggcacagagggcaccugu

SEQ ID NO: 21253 - RNA, 24 nt, Human
agggggugggagguguacauaaga

SEQ ID NO: 21254 - RNA, 24 nt, Human
gaagguaggagggagggcagagcg

SEQ ID NO: 21255 - RNA, 24 nt, Human
uggcuggucauggaaggggcaguu

SEQ ID NO: 21256 - RNA, 24 nt, Human
ccaaaaguacuugccgcucuaccc

SEQ ID NO: 21257 - RNA, 24 nt, Human
uuccgguaucguaaaacaucuccu

SEQ ID NO: 21258 - RNA, 24 nt, Human
uaacugagucaucuuuuuuccauu

SEQ ID NO: 21259 - RNA, 20 nt, Human
agagccaaugagggacagga

SEQ ID NO: 21260 - RNA, 24 nt, Human
caccagcguccggaucggggcguc

SEQ ID NO: 21261 - RNA, 24 nt, Human
ugggucuuugugcugaggcaggac

SEQ ID NO: 21262 - RNA, 24 nt, Human
ucucacacuggcaggcgguggcuc

SEQ ID NO: 21263 - RNA, 24 nt, Human
acagcgcuguccaccugcagcugc

SEQ ID NO: 21264 - RNA, 19 nt, Human
cacagcauuaacggcgccc

SEQ ID NO: 21265 - RNA, 24 nt, Human
caggagcguccaggcacugcagcu

SEQ ID NO: 21266 - RNA, 24 nt, Human
cuuggagcuguccauugcagacca

SEQ ID NO: 21267 - RNA, 17 nt, Human
gccccgggaagggcuuc

SEQ ID NO: 21268 - RNA, 24 nt, Human
uaggugugugccacgaugcuggcu

SEQ ID NO: 21269 - RNA, 24 nt, Human
uauccaagauaagaaucugaauuu

SEQ ID NO: 21270 - RNA, 24 nt, Human
aacaggucugugaugcccuuaguu

SEQ ID NO: 21271 - RNA, 24 nt, Human
uuccauggggagauauggccaguu

SEQ ID NO: 21272 - RNA, 24 nt, Human
aggcaauuugauguggacauucuu

SEQ ID NO: 21273 - RNA, 24 nt, Human
uucgaugagaaucugaauuaucca

SEQ ID NO: 21274 - RNA, 24 nt, Human
agugacacgugaaugauaauguga

SEQ ID NO: 21275 - RNA, 24 nt, Human
ugaugaagguuucccauaugguuu

SEQ ID NO: 21276 - RNA, 24 nt, Human
gugaacucagauacuuguuuccac

SEQ ID NO: 21277 - RNA, 24 nt, Human
acgaagcaggagguaagcccaacg

SEQ ID NO: 21278 - RNA, 24 nt, Human
caggggaggccggccacaaaugca

SEQ ID NO: 21279 - RNA, 24 nt, Human
uuuacaauucaguaugauuagacg

SEQ ID NO: 21280 - RNA, 24 nt, Human
ugauuuugggucccuuugugguac

SEQ ID NO: 21281 - RNA, 24 nt, Human
ccuccagcucggacaacuaggcgu

SEQ ID NO: 21282 - RNA, 24 nt, Human
augcagccuaaaaggugguugaaa

SEQ ID NO: 21283 - RNA, 24 nt, Human
ugggagcuggaagagguaggggga

SEQ ID NO: 21284 - RNA, 24 nt, Human
ugggugcagauggcugggccaagg

SEQ ID NO: 21285 - RNA, 24 nt, Human
uaugaggcugaugaauuugagaug

SEQ ID NO: 21286 - RNA, 24 nt, Human
ugcuuguaaucuuggaccagaacg

SEQ ID NO: 21287 - RNA, 24 nt, Human
uauagcaguguggauuuuggauac

SEQ ID NO: 21288 - RNA, 24 nt, Human
ugccguaacgggagcuggucucgg

SEQ ID NO: 21289 - RNA, 24 nt, Human
uuuaaaaaaugaacauauuaagag

SEQ ID NO: 21290 - RNA, 24 nt, Human
uauuaaauaaaauuucagggagcc

SEQ ID NO: 21291 - RNA, 24 nt, Human
auggccuuauuugaggcaguguau

SEQ ID NO: 21292 - RNA, 24 nt, Human
aagcagguuuucucuagucugcuu

SEQ ID NO: 21293 - RNA, 24 nt, Human
ugcgcggggagagcgaggcggggc

SEQ ID NO: 21294 - RNA, 24 nt, Human
cgaaugcaccaugaguuagaguga

SEQ ID NO: 21295 - RNA, 24 nt, Human
cuuuguguacagagguccgggucu

SEQ ID NO: 21296 - RNA, 24 nt, Human
uucauuaggaaugucuucuuguca

SEQ ID NO: 21297 - RNA, 24 nt, Human
ucccaucgagcugguugucuucuu

SEQ ID NO: 21298 - RNA, 24 nt, Human
cagcggcagagagccauccucuau

SEQ ID NO: 21299 - RNA, 24 nt, Human
acaaagcaagagaagaagcagaga

SEQ ID NO: 21300 - RNA, 24 nt, Human
cucccgggccuacagcggcugcgg

SEQ ID NO: 21301 - RNA, 24 nt, Human
agcgauguuuccccucgaaaggcc

SEQ ID NO: 21302 - RNA, 24 nt, Human
uagaaaguccaccugcccucguuc

SEQ ID NO: 21303 - RNA, 24 nt, Human
uucaucaugaucauaggcaguuga

SEQ ID NO: 21304 - RNA, 24 nt, Human
ugcguuuauaaaacuaguuuuuaa

SEQ ID NO: 21305 - RNA, 18 nt, Human
ugaguggacauuauuggc

SEQ ID NO: 21306 - RNA, 24 nt, Human
acugccuugugaugccucccuaga

SEQ ID NO: 21307 - RNA, 24 nt, Human
ugaggucauagccagaaggaguuu

SEQ ID NO: 21308 - RNA, 24 nt, Human
uugaucuugaagaaacugggcgug

SEQ ID NO: 21309 - RNA, 24 nt, Human
guagaguuuucuucaggcuuaaag

SEQ ID NO: 21310 - RNA, 24 nt, Human
guagaguuuucuucaggcuuaaag

SEQ ID NO: 21311 - RNA, 24 nt, Human
gcgcguugcugcggccgugguccg

SEQ ID NO: 21312 - RNA, 24 nt, Human
uugaucuugaagaaacugggcgug

SEQ ID NO: 21313 - RNA, 24 nt, Human
aggaaggagauauagugaagagga

SEQ ID NO: 21314 - RNA, 24 nt, Human
uacuccagguggguguuagcacug

SEQ ID NO: 21315 - RNA, 24 nt, Human
uguggauagcuucugaucccuggg

SEQ ID NO: 21316 - RNA, 24 nt, Human
ugagcaaaccaaggggguuuauag

SEQ ID NO: 21317 - RNA, 24 nt, Human
aacagcuucaaacagugguuggca

SEQ ID NO: 21318 - RNA, 24 nt, Human
uuauucggguggaccgacagaccu

SEQ ID NO: 21319 - RNA, 24 nt, Human
ucuccagaaaugcuuuggguucau

SEQ ID NO: 21320 - RNA, 24 nt, Human
uugaucuugaagaaacugggcgug

SEQ ID NO: 21321 - RNA, 24 nt, Human
guagaguuuucuucaggcuuaaag

SEQ ID NO: 21322 - RNA, 24 nt, Human
ugagaaugaccccaagaccuuuga

SEQ ID NO: 21323 - RNA, 24 nt, Human
cuuccaaucugaugggcauguuug

SEQ ID NO: 21324 - RNA, 22 nt, Human
guggagggcagcuuugucuaca

SEQ ID NO: 21325 - RNA, 22 nt, Human
ccgcagaggcccgaggcaccgg

SEQ ID NO: 21326 - RNA, 24 nt, Human
cagcuccucggguggggccugcgg

SEQ ID NO: 21327 - RNA, 24 nt, Human
ugcgugaaguacugagcaggguga

SEQ ID NO: 21328 - RNA, 24 nt, Human
caugcaacucugccuccgggguuc

SEQ ID NO: 21329 - RNA, 24 nt, Human
gggcacugaagaugaugcgaccca

SEQ ID NO: 21330 - RNA, 24 nt, Human
uacagugcuuguaaaagguuugaa

SEQ ID NO: 21331 - RNA, 24 nt, Human
uucccugacuuggugaaacaugcu

SEQ ID NO: 21332 - RNA, 24 nt, Human
agcagaaguguggccacgggaggg

SEQ ID NO: 21333 - RNA, 24 nt, Human
aaccaggugcucuccaauaaagac

SEQ ID NO: 21334 - RNA, 24 nt, Human
cuggagccgugcgccuccacugca

SEQ ID NO: 21335 - RNA, 24 nt, Human
agagaggugucugugaaguuuuug

SEQ ID NO: 21336 - RNA, 24 nt, Human
ucaaugcagucaccgugguauggg

SEQ ID NO: 21337 - RNA, 24 nt, Human
auguccuugaucauuuuauguucu

SEQ ID NO: 21338 - RNA, 20 nt, Human
uuccugguuagacucuguuc

SEQ ID NO: 21339 - RNA, 24 nt, Human
uuuguuggguuuucugaaacuuaa

SEQ ID NO: 21340 - RNA, 24 nt, Human
caggauccuucagcacugaggugu

SEQ ID NO: 21341 - RNA, 24 nt, Human
uccacagugucagcuauggccaug

SEQ ID NO: 21342 - RNA, 24 nt, Human
acugcucugagauuugagggaaac

SEQ ID NO: 21343 - RNA, 24 nt, Human
ccuggacgagccccagggacaguc

SEQ ID NO: 21344 - RNA, 21 nt, Human
cugcagcagcucuucuccucc

SEQ ID NO: 21345 - RNA, 24 nt, Human
gauuguguuugucacucuagaaga

SEQ ID NO: 21346 - RNA, 24 nt, Human
uaccagaagaccaaugccgugucu

SEQ ID NO: 21347 - RNA, 24 nt, Human
cacgggccgaggaggauguggagc

SEQ ID NO: 21348 - RNA, 24 nt, Human
acaggcgagggcgugaacgaugug

SEQ ID NO: 21349 - RNA, 24 nt, Human
auggaucccucugugcuucuggac

SEQ ID NO: 21350 - RNA, 24 nt, Human
acccuuacacgcuagaugguuggg

SEQ ID NO: 21351 - RNA, 24 nt, Human
caggacaccugguccccagcuccc

SEQ ID NO: 21352 - RNA, 23 nt, Human
uccagguuucuggucagccuggg

SEQ ID NO: 21353 - RNA, 24 nt, Human
uggcaauuucuuagagaucaagaa

SEQ ID NO: 21354 - RNA, 24 nt, Human
uuucauguuuaacauugcagaugg

SEQ ID NO: 21355 - RNA, 24 nt, Human
ugagggcagagagaggggagcccc

SEQ ID NO: 21356 - RNA, 24 nt, Human
acugugcugggaacauguaccacu

SEQ ID NO: 21357 - RNA, 24 nt, Human
uagcauacuuuuguuagcaaccgg

SEQ ID NO: 21358 - RNA, 24 nt, Human
ucccaagccagaaagaaguuaacu

SEQ ID NO: 21359 - RNA, 24 nt, Human
ggacagguguacagacauguucuu

SEQ ID NO: 21360 - RNA, 24 nt, Human
ucgaauggacacauuaccagugaa

SEQ ID NO: 21361 - RNA, 24 nt, Human
uucauuguccagaguccggcuguu

SEQ ID NO: 21362 - RNA, 21 nt, Human
uuccuuggagcucuccauugg

SEQ ID NO: 21363 - RNA, 24 nt, Human
ugcauuguuaucauuaacccaguc

SEQ ID NO: 21364 - RNA, 24 nt, Human
auggaguuccaggggcccaugccc

SEQ ID NO: 21365 - RNA, 24 nt, Human
ugugaacccugucucucugcagcu

SEQ ID NO: 21366 - RNA, 24 nt, Human
ugagaccauucuuccucuuguguu

SEQ ID NO: 21367 - RNA, 24 nt, Human
ucgaggacagcgccgccuaggacc

SEQ ID NO: 21368 - RNA, 24 nt, Human
uaccugaaauauggaguaaccaag

SEQ ID NO: 21369 - RNA, 24 nt, Human
uauggcaagucacuuugacagaca

SEQ ID NO: 21370 - RNA, 24 nt, Human
ugagaauggcaaaauuagucgccu

SEQ ID NO: 21371 - RNA, 24 nt, Human
uacaccacucccaagaagaauaag

SEQ ID NO: 21372 - RNA, 24 nt, Human
aucauccaugagaucucccacagu

SEQ ID NO: 21373 - RNA, 24 nt, Human
accauguacgcccagaggaggauc

SEQ ID NO: 21374 - RNA, 24 nt, Human
uccaaauuacuuucaggauguuuu

SEQ ID NO: 21375 - RNA, 24 nt, Human
ugcauuguuaucauuaaccagucu

SEQ ID NO: 21376 - RNA, 24 nt, Human
uauuagggauaauauucauuuagc

SEQ ID NO: 21377 - RNA, 24 nt, Human
uaaugggucucaaaauucugugac

SEQ ID NO: 21378 - RNA, 24 nt, Human
cagcggaugguguaucggacauag

SEQ ID NO: 21379 - RNA, 24 nt, Human
aggcaguggcaagagggguucagg

SEQ ID NO: 21380 - RNA, 24 nt, Human
uagugcaacaguuuggcuuugcgg

SEQ ID NO: 21381 - RNA, 24 nt, Human
uggcuucacucucacaaacuccuu

SEQ ID NO: 21382 - RNA, 24 nt, Human
ucaguccaguuauauccgcaguau

SEQ ID NO: 21383 - RNA, 24 nt, Human
cagcggauggggcacgacagcuag

SEQ ID NO: 21384 - RNA, 24 nt, Human
uucaccuugaucacggggcccuug

SEQ ID NO: 21385 - RNA, 19 nt, Human
uagcagcaugauuuauaau

SEQ ID NO: 21386 - RNA, 21 nt, Human
ggacaugaacucaucauuuuu

SEQ ID NO: 21387 - RNA, 24 nt, Human
aggcagucacagaacaggggcaug

SEQ ID NO: 21388 - RNA, 24 nt, Human
uaaugggucucaaaauucugugac

SEQ ID NO: 21389 - RNA, 24 nt, Human
uguguuuguagacuuggaacccac

SEQ ID NO: 21390 - RNA, 24 nt, Human
ugcauuguuaucauuaaccagucu

SEQ ID NO: 21391 - RNA, 24 nt, Human
uaaugggucucaaaauucugugac

SEQ ID NO: 21392 - RNA, 24 nt, Human
uauuagggauaauauucauuuagc

SEQ ID NO: 21393 - RNA, 24 nt, Human
uuuagagggagggcgccgugcaaa

SEQ ID NO: 21394 - RNA, 24 nt, Human
uuggccauuacaaagacacaggaa

SEQ ID NO: 21395 - RNA, 24 nt, Human
uggaagcagcggaggaaggagacg

SEQ ID NO: 21396 - RNA, 23 nt, Human
ugcaaaaaguccaggccugggca

SEQ ID NO: 21397 - RNA, 24 nt, Human
ucaguuggaagacacccugaaauc

SEQ ID NO: 21398 - RNA, 24 nt, Human
accaagcuuuguccccucucgcug

SEQ ID NO: 21399 - RNA, 24 nt, Human
uuaguguacagguacaugggcugu

SEQ ID NO: 21400 - RNA, 24 nt, Human
uugaagccagauauugaccucucu

SEQ ID NO: 21401 - RNA, 24 nt, Human
uaggauuuuuggaaugguauauga

SEQ ID NO: 21402 - RNA, 24 nt, Human
caguaggucccaacagcgggcuua

SEQ ID NO: 21403 - RNA, 24 nt, Human
uucaaacauauucugaacauugau

SEQ ID NO: 21404 - RNA, 24 nt, Human
ucccaagccagaaagaaguuaacu

SEQ ID NO: 21405 - RNA, 24 nt, Human
uggcaugacccuggagaguagcug

SEQ ID NO: 21406 - RNA, 24 nt, Human
uaacuugaugaaagaagauugucu

SEQ ID NO: 21407 - RNA, 24 nt, Human
uggaagaucuuagaauugccugcc

SEQ ID NO: 21408 - RNA, 22 nt, Human
uacugggugaauagcacuuucc

SEQ ID NO: 21409 - RNA, 24 nt, Human
ucagcucaccauuuauaccagucc

SEQ ID NO: 21410 - RNA, 24 nt, Human
ugccguggugaaauguuuagauca

SEQ ID NO: 21411 - RNA, 24 nt, Human
cacaccgaccggcccgagguaucg

SEQ ID NO: 21412 - RNA, 24 nt, Human
uuuuguuuacugagaguaagauca

SEQ ID NO: 21413 - RNA, 21 nt, Human
cacuuuguucuuuuucugaag

SEQ ID NO: 21414 - RNA, 24 nt, Human
ccuuacucccucuuuaagauugcg

SEQ ID NO: 21415 - RNA, 24 nt, Human
aguuuggauucugaaaacuaacug

SEQ ID NO: 21416 - RNA, 24 nt, Human
uuagagcuggcagcagcaucucag

SEQ ID NO: 21417 - RNA, 21 nt, Human
ugaaaugcaauaauauguauc

SEQ ID NO: 21418 - RNA, 24 nt, Human
ucacaccagagggaugggguagga

SEQ ID NO: 21419 - RNA, 24 nt, Human
uggaaaguagcccuucuggacaga

SEQ ID NO: 21420 - RNA, 24 nt, Human
ugagauuuuacaagcuuguaaaag

SEQ ID NO: 21421 - RNA, 24 nt, Human
cagcacuucaauugaauauaaucc

SEQ ID NO: 21422 - RNA, 24 nt, Human
auagcagucauaaaucucagggca

SEQ ID NO: 21423 - RNA, 24 nt, Human
uaagguuaaggcuguaccauguac

SEQ ID NO: 21424 - RNA, 21 nt, Human
aaguaugccugggucuuggau

SEQ ID NO: 21425 - RNA, 24 nt, Human
uccccaggccacucgcagucuugc

SEQ ID NO: 21426 - RNA, 24 nt, Human
cagcagccacagcagccgcuucug

SEQ ID NO: 21427 - RNA, 24 nt, Human
uuacugcagcuccagcagcugcuc

SEQ ID NO: 21428 - RNA, 22 nt, Human
uucccuuccucauccugcagcc

SEQ ID NO: 21429 - RNA, 24 nt, Human
uugaucuugaagaaacugggcgug

SEQ ID NO: 21430 - RNA, 24 nt, Human
aggaaggagauauagugaagagga

SEQ ID NO: 21431 - RNA, 24 nt, Human
guagaguuuucuucaggcuuaaag

SEQ ID NO: 21432 - RNA, 24 nt, Human
ucuccagaaaugcuuuggguucau

SEQ ID NO: 21433 - RNA, 24 nt, Human
uugaucuugaagaaacugggcgug

SEQ ID NO: 21434 - RNA, 24 nt, Human
ccccgguaucauuccucgaauuuc

SEQ ID NO: 21435 - RNA, 24 nt, Human
aggaaggagauauagugaagagga

SEQ ID NO: 21436 - RNA, 24 nt, Human
guagaguuuucuucaggcuuaaag

SEQ ID NO: 21437 - RNA, 23 nt, Human
uccgugcgcguugcugcggccgu

SEQ ID NO: 21438 - RNA, 24 nt, Human
aggaaggagauauagugaagagga

SEQ ID NO: 21439 - RNA, 24 nt, Human
uuuguugggauggaagcaugaagg

SEQ ID NO: 21440 - RNA, 24 nt, Human
ucgccgucaccgccgcggcuccgg

SEQ ID NO: 21441 - RNA, 24 nt, Human
ggagugcacgucucucuaggcuuc

SEQ ID NO: 21442 - RNA, 24 nt, Human
uacauggacaccggcgaggagauc

SEQ ID NO: 21443 - RNA, 24 nt, Human
ucgcuggcagcagccccagccuga

SEQ ID NO: 21444 - RNA, 24 nt, Human
uggcaaucuccucaugagaaaacu

SEQ ID NO: 21445 - RNA, 24 nt, Human
ccugcagggcucggccguaggaga

SEQ ID NO: 21446 - RNA, 24 nt, Human
uguuguguuuuuuguuuuuuuccc

SEQ ID NO: 21447 - RNA, 21 nt, Human
uggcagauggaucucuccggc

SEQ ID NO: 21448 - RNA, 24 nt, Human
gggcgcgggccccaccagggcgau

SEQ ID NO: 21449 - RNA, 24 nt, Human
ucacaaagguaacaaaaaacguac

SEQ ID NO: 21450 - RNA, 24 nt, Human
uguaagaaauaagaaucaucaccu

SEQ ID NO: 21451 - RNA, 20 nt, Human
ugugaugauucgguucuugg

SEQ ID NO: 21452 - RNA, 24 nt, Human
cagcaggcgggggcagccuggcag

SEQ ID NO: 21453 - RNA, 24 nt, Human
uuccgcuugggguugcgggccucc

SEQ ID NO: 21454 - RNA, 24 nt, Human
agccggcgucgcugucucgcuugc

SEQ ID NO: 21455 - RNA, 24 nt, Human
uccaccuccuugcgguggcgggag

SEQ ID NO: 21456 - RNA, 24 nt, Human
cuugcugugcggagggccugcuau

SEQ ID NO: 21457 - RNA, 24 nt, Human
auaugcuuugccuaggacagguuu

SEQ ID NO: 21458 - RNA, 24 nt, Human
uggaaagggugguagcccuggaaa

SEQ ID NO: 21459 - RNA, 24 nt, Human
ucccucagcagcguggugaccgug

SEQ ID NO: 21460 - RNA, 24 nt, Human
ucauaaggaauuaacucaugagau

SEQ ID NO: 21461 - RNA, 24 nt, Human
uaccuaaugggcugaggaagggag

SEQ ID NO: 21462 - RNA, 24 nt, Human
gaaaucaccuagggcagccaagcu

SEQ ID NO: 21463 - RNA, 24 nt, Human
uggcuuuggaucugaacuaauggg

SEQ ID NO: 21464 - RNA, 24 nt, Human
uguuauuguccccugccucgccug

SEQ ID NO: 21465 - RNA, 24 nt, Human
cgccugugcccgcggugugccgca

SEQ ID NO: 21466 - RNA, 24 nt, Human
uaaaauaccucuaauaaacacugu

SEQ ID NO: 21467 - RNA, 24 nt, Human
agggauuaaauauagauguaauuu

SEQ ID NO: 21468 - RNA, 24 nt, Human
ugucacagucaaagugccucagaa

SEQ ID NO: 21469 - RNA, 24 nt, Human
uggaaaguucagcaagaucagcaa

SEQ ID NO: 21470 - RNA, 24 nt, Human
ugccugaaaaaauauccuuugugc

SEQ ID NO: 21471 - RNA, 24 nt, Human
uacgugaaacagaagaggcuaagc

SEQ ID NO: 21472 - RNA, 24 nt, Human
ugaaaaguagaauuuccauugaga

SEQ ID NO: 21473 - RNA, 24 nt, Human
uaagguuuuuuuuuuuucuuuaaa

SEQ ID NO: 21474 - RNA, 24 nt, Human
uucaugggcaaaaggaggaaggga

SEQ ID NO: 21475 - RNA, 24 nt, Human
gucacuuucuccgcuuguagauuu

SEQ ID NO: 21476 - RNA, 24 nt, Human
uauggcaaggaccugauggagaag

SEQ ID NO: 21477 - RNA, 23 nt, Human
uaucuuaccaugaagguuguuuu

SEQ ID NO: 21478 - RNA, 24 nt, Human
ggaggaacuugaaaggaggguaaa

SEQ ID NO: 21479 - RNA, 24 nt, Human
cuugcgcuuaguguccuacauggg

SEQ ID NO: 21480 - RNA, 24 nt, Human
ccuugcucuguugcucaggcugaa

SEQ ID NO: 21481 - RNA, 24 nt, Human
uuugaagaaccuaagaaagauuaa

SEQ ID NO: 21482 - RNA, 24 nt, Human
gaccuagaaacaaaugcacuaaga

SEQ ID NO: 21483 - RNA, 22 nt, Human
cauugcaacauguuucauugau

SEQ ID NO: 21484 - RNA, 24 nt, Human
cuagcaccgguaugugcgacccua

SEQ ID NO: 21485 - RNA, 24 nt, Human
uaguugaugccaaccuugaagcca

SEQ ID NO: 21486 - RNA, 24 nt, Human
guccauggcgagcccaggccucag

SEQ ID NO: 21487 - RNA, 24 nt, Human
gggcaucguggcugaggugcuggu

SEQ ID NO: 21488 - RNA, 24 nt, Human
ucagagcuacacauugagaaccug

SEQ ID NO: 21489 - RNA, 24 nt, Human
acccuugaaccauccaugauugca

SEQ ID NO: 21490 - RNA, 24 nt, Human
uuaggcuacgaaacaucacuauug

SEQ ID NO: 21491 - RNA, 24 nt, Human
uauguugccaucaaugaccccuuc

SEQ ID NO: 21492 - RNA, 24 nt, Human
uggauggcccuccgggaaacugug

SEQ ID NO: 21493 - RNA, 24 nt, Human
ucacuggauggcuuccguguccca

SEQ ID NO: 21494 - RNA, 24 nt, Human
uacacugagcaccacgggguuccu

SEQ ID NO: 21495 - RNA, 21 nt, Human
cugcccccucugcugaugccc

SEQ ID NO: 21496 - RNA, 24 nt, Human
uuccugguugagaaaccacuuggg

SEQ ID NO: 21497 - RNA, 24 nt, Human
uggaagaagagggaagucaucaag

SEQ ID NO: 21498 - RNA, 20 nt, Human
ucugucgggcagguggccgu

SEQ ID NO: 21499 - RNA, 24 nt, Human
aggcacgccgagcagggggcggcg

SEQ ID NO: 21500 - RNA, 23 nt, Human
uggugggguccgaagugggagac

SEQ ID NO: 21501 - RNA, 24 nt, Human
caggaucugguacuguucuggagu

SEQ ID NO: 21502 - RNA, 24 nt, Human
cugaaucugaaagaacucccccau

SEQ ID NO: 21503 - RNA, 18 nt, Human
ugagaucaggaaagcggu

SEQ ID NO: 21504 - RNA, 22 nt, Human
ccccugagcccaccuacugcuc

SEQ ID NO: 21505 - RNA, 24 nt, Human
ucccucuggacauacugcugccug

SEQ ID NO: 21506 - RNA, 24 nt, Human
uaugggggcccuaguuaugccucc

SEQ ID NO: 21507 - RNA, 24 nt, Human
ucaaccuucuuaaaauuuuuaaga

SEQ ID NO: 21508 - RNA, 24 nt, Human
aacuaggucauucaccgcaagguc

SEQ ID NO: 21509 - RNA, 24 nt, Human
uccaaagcaucguaaucaggagcc

SEQ ID NO: 21510 - RNA, 24 nt, Human
uggcuguggacaccuuccacaccg

SEQ ID NO: 21511 - RNA, 24 nt, Human
cacagcucggcccccucccgcagc

SEQ ID NO: 21512 - RNA, 24 nt, Human
guugcuagaguaaucucacacaca

SEQ ID NO: 21513 - RNA, 24 nt, Human
uacaucacugcuagaauauuuagc

SEQ ID NO: 21514 - RNA, 24 nt, Human
ucgccaggagccggaccacagacg

SEQ ID NO: 21515 - RNA, 24 nt, Human
uaauguacgggcgccagguccgac

SEQ ID NO: 21516 - RNA, 24 nt, Human
uagggugcuuaaagcuaacuaguc

SEQ ID NO: 21517 - RNA, 24 nt, Human
gauuugagaaaguaggagagacag

SEQ ID NO: 21518 - RNA, 24 nt, Human
gaagugcaaaauggaauaaacuga

SEQ ID NO: 21519 - RNA, 24 nt, Human
uaguauuucauaccgccugaaaug

SEQ ID NO: 21520 - RNA, 24 nt, Human
ugacaaggguaguaaggaggucau

SEQ ID NO: 21521 - RNA, 24 nt, Human
ucucgcuuuucuucuggcauaguu

SEQ ID NO: 21522 - RNA, 24 nt, Human
ugugcaugcccacagcccgaggcc

SEQ ID NO: 21523 - RNA, 24 nt, Human
agggagagggggaaagguccaaag

SEQ ID NO: 21524 - RNA, 24 nt, Human
ugucauugcaauaggauguuacaa

SEQ ID NO: 21525 - RNA, 24 nt, Human
ugcguuaacacgacuuauuuucuu

SEQ ID NO: 21526 - RNA, 24 nt, Human
aaagugcugggaccacaggcagga

SEQ ID NO: 21527 - RNA, 24 nt, Human
ugcagagguuccuccuuguccuug

SEQ ID NO: 21528 - RNA, 24 nt, Human
uuugcaguuguugaaauugucccc

SEQ ID NO: 21529 - RNA, 22 nt, Human
ugggauguggccauucuugugg

SEQ ID NO: 21530 - RNA, 24 nt, Human
uacagcacaauauuucaauggaau

SEQ ID NO: 21531 - RNA, 24 nt, Human
gguaaagaaaaaugacauaguaaa

SEQ ID NO: 21532 - RNA, 21 nt, Human
ucaaucucaccuucugauaua

SEQ ID NO: 21533 - RNA, 24 nt, Human
auggauuguagaguaagguuuugu

SEQ ID NO: 21534 - RNA, 24 nt, Human
agggcgcuguggacgcggugagga

SEQ ID NO: 21535 - RNA, 24 nt, Human
ucggggcggugaggacgcuguggg

SEQ ID NO: 21536 - RNA, 24 nt, Human
aguuaguuuuuuuuuauuauuauu

SEQ ID NO: 21537 - RNA, 24 nt, Human
gggcagagcugagaagccaagggg

SEQ ID NO: 21538 - RNA, 24 nt, Human
uuagugcaugaaaggcuaaugcuc

SEQ ID NO: 21539 - RNA, 24 nt, Human
ccucccagcauucggguagugguc

SEQ ID NO: 21540 - RNA, 24 nt, Human
caccacuaauaucugagauguuau

SEQ ID NO: 21541 - RNA, 18 nt, Human
uguauuaguuuuuauuug

SEQ ID NO: 21542 - RNA, 21 nt, Human
uauugugguaacggacaggaa

SEQ ID NO: 21543 - RNA, 24 nt, Human
ugagccgaggggccagccccacuc

SEQ ID NO: 21544 - RNA, 24 nt, Human
ucuguugugauuauuugaauagcu

SEQ ID NO: 21545 - RNA, 24 nt, Human
uggaauggaggugacagaaagaaa

SEQ ID NO: 21546 - RNA, 24 nt, Human
uguucuggagcuguuggacaaaua

SEQ ID NO: 21547 - RNA, 24 nt, Human
cuaccgccaccgccgccgccgauu

SEQ ID NO: 21548 - RNA, 24 nt, Human
aggcagucacagaacaggggcaug

SEQ ID NO: 21549 - RNA, 24 nt, Human
aaccagaaaguaagguguucuacu

SEQ ID NO: 21550 - RNA, 24 nt, Human
gacacugggguugggaaaucaagc

SEQ ID NO: 21551 - RNA, 24 nt, Human
augcugcugagccccggcacugcc

SEQ ID NO: 21552 - RNA, 24 nt, Human
ugggugcgguaucaucuaagagaa

SEQ ID NO: 21553 - RNA, 24 nt, Human
uguaagaucucuucgagagagcug

SEQ ID NO: 21554 - RNA, 24 nt, Human
uaacuaguggggcuuaaugaaggu

SEQ ID NO: 21555 - RNA, 24 nt, Human
uagguaacuagguaacuuauugug

SEQ ID NO: 21556 - RNA, 24 nt, Human
gguaagaauuagauuccuuauaaa

SEQ ID NO: 21557 - RNA, 24 nt, Human
ugagcuggaggagaagcaacuuug

SEQ ID NO: 21558 - RNA, 24 nt, Human
gggcaagaguuucgccggcgcauc

SEQ ID NO: 21559 - RNA, 24 nt, Human
ugacugcgagucgucugggggagg

SEQ ID NO: 21560 - RNA, 19 nt, Human
uagcagguuggcuuccuuc

SEQ ID NO: 21561 - RNA, 24 nt, Human
ugaggauaaaagcuggugggagcc

SEQ ID NO: 21562 - RNA, 24 nt, Human
ugaaaauucggaugucgcugaucc

SEQ ID NO: 21563 - RNA, 24 nt, Human
aaaguccauugaucaucacaaaaa

SEQ ID NO: 21564 - RNA, 23 nt, Human
uuucucccuccuaauaugcaagg

SEQ ID NO: 21565 - RNA, 24 nt, Human
cugcugcacgugaagcggggcggc

SEQ ID NO: 21566 - RNA, 24 nt, Human
ucccggacugugagcggcuguuag

SEQ ID NO: 21567 - RNA, 24 nt, Human
uccaaagaggagccaguuaccaug

SEQ ID NO: 21568 - RNA, 24 nt, Human
ugugaugauuauuucuucagccau

SEQ ID NO: 21569 - RNA, 24 nt, Human
acgggccgcuuuccacaaugcagu

SEQ ID NO: 21570 - RNA, 24 nt, Human
aggccgagguccgcggccaggugc

SEQ ID NO: 21571 - RNA, 24 nt, Human
uggccggcacgggcagacaacgcg

SEQ ID NO: 21572 - RNA, 24 nt, Human
ucuacaauaauaaauccaaagagg

SEQ ID NO: 21573 - RNA, 24 nt, Human
aggccgagguccgcggccaggugc

SEQ ID NO: 21574 - RNA, 24 nt, Human
uuugcacaagcuugucagugacau

SEQ ID NO: 21575 - RNA, 24 nt, Human
accaugcguacgaguugaaaggau

SEQ ID NO: 21576 - RNA, 24 nt, Human
uaccgugcuugugacagguuugga

SEQ ID NO: 21577 - RNA, 24 nt, Human
gcgcguugcugcggccgugguccg

SEQ ID NO: 21578 - RNA, 21 nt, Human
ugagaaggagaugcugcucuu

SEQ ID NO: 21579 - RNA, 24 nt, Human
agagauuggugaggauuuggauaa

SEQ ID NO: 21580 - RNA, 24 nt, Human
acugguucaccuacaaugagacaa

SEQ ID NO: 21581 - RNA, 23 nt, Human
cucugcuucagagggugcccaga

SEQ ID NO: 21582 - RNA, 24 nt, Human
uaauauguuaaaaacauuuugcuu

SEQ ID NO: 21583 - RNA, 24 nt, Human
uacacaguauuuaagauggauauu

SEQ ID NO: 21584 - RNA, 24 nt, Human
uccaccagaugcagauuuguguuu

SEQ ID NO: 21585 - RNA, 23 nt, Human
uacacggauagaacgagauccgg

SEQ ID NO: 21586 - RNA, 24 nt, Human
ucgcuccuaacgcucccuggcccg

SEQ ID NO: 21587 - RNA, 24 nt, Human
aggcauuuagucaagcagaaagca

SEQ ID NO: 21588 - RNA, 24 nt, Human
ccccgggagcugcgcuaggcgaac

SEQ ID NO: 21589 - RNA, 24 nt, Human
aaggacaucacagguaaacugaag

SEQ ID NO: 21590 - RNA, 24 nt, Human
aagagcacuugaucguacuggcuc

SEQ ID NO: 21591 - RNA, 24 nt, Human
gaguuugcuuacacuuacgcugcc

SEQ ID NO: 21592 - RNA, 21 nt, Human
uaucauauggguuuucauuuu

SEQ ID NO: 21593 - RNA, 24 nt, Human
uuccuacuuugcugagagucucca

SEQ ID NO: 21594 - RNA, 24 nt, Human
ggugcaguggaaauccuugccuug

SEQ ID NO: 21595 - RNA, 24 nt, Human
aggaggaagaaauguuuucuuagg

SEQ ID NO: 21596 - RNA, 24 nt, Human
caagcuccucuccccccucuuuuc

SEQ ID NO: 21597 - RNA, 24 nt, Human
agccacuucccucccaacccuggu

SEQ ID NO: 21598 - RNA, 24 nt, Human
uaguucagauugaucuuaggucaa

SEQ ID NO: 21599 - RNA, 17 nt, Human
ucaagggucguguguuu

SEQ ID NO: 21600 - RNA, 22 nt, Human
uuccauggucaaaaaauggcag

SEQ ID NO: 21601 - RNA, 24 nt, Human
uauuguacacggucaucuguugaa

SEQ ID NO: 21602 - RNA, 24 nt, Human
uuaacuuauaagcccccacuucac

SEQ ID NO: 21603 - RNA, 23 nt, Human
uaccaagggccugguugggccac

SEQ ID NO: 21604 - RNA, 24 nt, Human
ucuccaauuccuucaugucgucgu

SEQ ID NO: 21605 - RNA, 17 nt, Human
ugucugggcccagccag

SEQ ID NO: 21606 - RNA, 24 nt, Human
uguauagcaauaugcuuggagagg

SEQ ID NO: 21607 - RNA, 24 nt, Human
ugagucacaaacugcgucuuggag

SEQ ID NO: 21608 - RNA, 24 nt, Human
uuggcccacaucuguuuaaucuuc

SEQ ID NO: 21609 - RNA, 24 nt, Human
uuuguacaaaaauacugucaaaau

SEQ ID NO: 21610 - RNA, 24 nt, Human
acaguaacuaaaggcagaucuucu

SEQ ID NO: 21611 - RNA, 24 nt, Human
uguugguuuuggccuugcaagagc

SEQ ID NO: 21612 - RNA, 22 nt, Human
caccggaggagaggucucuagu

SEQ ID NO: 21613 - RNA, 24 nt, Human
uguugugccagaagcuggcggagc

SEQ ID NO: 21614 - RNA, 24 nt, Human
cuugcagcccacagggcuggagaa

SEQ ID NO: 21615 - RNA, 24 nt, Human
cggaagcggaauuuccucagcuuu

SEQ ID NO: 21616 - RNA, 24 nt, Human
uaccuggugucugauggagaggcg

SEQ ID NO: 21617 - RNA, 24 nt, Human
ucggcagaugucguugccaaucaa

SEQ ID NO: 21618 - RNA, 24 nt, Human
uaugguauugggagaaguagaucg

SEQ ID NO: 21619 - RNA, 24 nt, Human
uaagaacuguuuuuaauuuucagc

SEQ ID NO: 21620 - RNA, 24 nt, Human
ugacaagaagauauuugcauuuau

SEQ ID NO: 21621 - RNA, 24 nt, Human
uucaagcauguuaggaaauccucu

SEQ ID NO: 21622 - RNA, 24 nt, Human
uuuuaggccuucauauaucuucua

SEQ ID NO: 21623 - RNA, 24 nt, Human
uccugcugucuugguuuugucuug

SEQ ID NO: 21624 - RNA, 24 nt, Human
cuccuguaccuggguacagggucu

SEQ ID NO: 21625 - RNA, 24 nt, Human
uugaucuugaagaaacugggcgug

SEQ ID NO: 21626 - RNA, 24 nt, Human
aggaaggagauauagugaagagga

SEQ ID NO: 21627 - RNA, 24 nt, Human
aggcagagguugcagugagccaag

SEQ ID NO: 21628 - RNA, 24 nt, Human
aauggcucacaccuguaaucccag

SEQ ID NO: 21629 - RNA, 24 nt, Human
ugagauguccucuauucuugaaga

SEQ ID NO: 21630 - RNA, 24 nt, Human
gcgcguugcugcggccgugguccg

SEQ ID NO: 21631 - RNA, 24 nt, Human
uuccaguuggugaggagcuguggg

SEQ ID NO: 21632 - RNA, 24 nt, Human
aggaaggagauauagugaagagga

SEQ ID NO: 21633 - RNA, 24 nt, Human
aacauuuuuuuguuguuguuuuga

SEQ ID NO: 21634 - RNA, 24 nt, Human
ucacugcaaccuccaccuccuggg

SEQ ID NO: 21635 - RNA, 22 nt, Human
auuuauuugcccacuugaucuu

SEQ ID NO: 21636 - RNA, 24 nt, Human
cagcauccacuguucugcccagua

SEQ ID NO: 21637 - RNA, 24 nt, Human
ucucuuagauuuuuugcuguaauu

SEQ ID NO: 21638 - RNA, 24 nt, Human
uagccuuaucaugaacuugagguu

SEQ ID NO: 21639 - RNA, 24 nt, Human
cccaugcuugagcuuccaugggga

SEQ ID NO: 21640 - RNA, 24 nt, Human
uggccggaccccaccugguucuuu

SEQ ID NO: 21641 - RNA, 24 nt, Human
ucauauuguagagcggguguggga

SEQ ID NO: 21642 - RNA, 18 nt, Human
ugacaggcggagcagcau

SEQ ID NO: 21643 - RNA, 24 nt, Human
uggcagccagaucuucaucgagca

SEQ ID NO: 21644 - RNA, 23 nt, Human
ccugcagcagcucauggcccagc

SEQ ID NO: 21645 - RNA, 24 nt, Human
cagcacacggagccgauggaggua

SEQ ID NO: 21646 - RNA, 24 nt, Human
cacagacuauauucgcuucacuga

SEQ ID NO: 21647 - RNA, 24 nt, Human
ggaaugauccacgaacugcucuug

SEQ ID NO: 21648 - RNA, 24 nt, Human
cccgacccagggccggugcgcgug

SEQ ID NO: 21649 - RNA, 24 nt, Human
aggaaggagauauagugaagagga

SEQ ID NO: 21650 - RNA, 24 nt, Human
ucaggcucagauagcugcuggccg

SEQ ID NO: 21651 - RNA, 24 nt, Human
ugggauccugcagcucuagucucc

SEQ ID NO: 21652 - RNA, 24 nt, Human
ucaggcuccugcaaccccaggcau

SEQ ID NO: 21653 - RNA, 24 nt, Human
ucucaaugccguguguucucuuug

SEQ ID NO: 21654 - RNA, 20 nt, Human
uaucuggacuggaaaugauu

SEQ ID NO: 21655 - RNA, 23 nt, Human
ugaagugaugguucgaaugucac

SEQ ID NO: 21656 - RNA, 24 nt, Human
aagggacccagcugggucugggcc

SEQ ID NO: 21657 - RNA, 24 nt, Human
gggcaggcgagccccaccccggcc

SEQ ID NO: 21658 - RNA, 24 nt, Human
aggccauucacaacuucguggagg

SEQ ID NO: 21659 - RNA, 24 nt, Human
aggcggagcugcugaaccugagga

SEQ ID NO: 21660 - RNA, 24 nt, Human
ugcaagccuuggcaagccagcacc

SEQ ID NO: 21661 - RNA, 24 nt, Human
ugggaggccauggccuucgccagc

SEQ ID NO: 21662 - RNA, 24 nt, Human
uggggucaugccgaacacccauga

SEQ ID NO: 21663 - RNA, 24 nt, Human
uugggaaggauguagguguagaca

SEQ ID NO: 21664 - RNA, 24 nt, Human
uccgcagaguaaaccucccccucc

SEQ ID NO: 21665 - RNA, 24 nt, Human
uauagggaguaauuagggaccuaa

SEQ ID NO: 21666 - RNA, 24 nt, Human
guggucccuccauguugucacagc

SEQ ID NO: 21667 - RNA, 24 nt, Human
agacgagauguacuuggaccagaa

SEQ ID NO: 21668 - RNA, 24 nt, Human
ugcuguaggucuuagagccugguu

SEQ ID NO: 21669 - RNA, 24 nt, Human
aaguggcuauuuuagagaaaaaga

SEQ ID NO: 21670 - RNA, 23 nt, Human
uggagaauuugcugaacaucuuu

SEQ ID NO: 21671 - RNA, 24 nt, Human
uaugugauguggucaguaaaauuu

SEQ ID NO: 21672 - RNA, 24 nt, Human
aauuaugguauuaacuugcuacag

SEQ ID NO: 21673 - RNA, 24 nt, Human
agugaagauugaaugucuagauau

SEQ ID NO: 21674 - RNA, 19 nt, Human
uauccugugaaaguuuguu

SEQ ID NO: 21675 - RNA, 24 nt, Human
uaguuuguuuucugguuuaaaaaa

SEQ ID NO: 21676 - RNA, 24 nt, Human
ugggauauugauuucuuguuuuuu

SEQ ID NO: 21677 - RNA, 24 nt, Human
ugagagacugcuccccauugcaga

SEQ ID NO: 21678 - RNA, 24 nt, Human
uaugugaugaaaaaguauagcuuu

SEQ ID NO: 21679 - RNA, 24 nt, Human
uauggugcagcuuuuuuuuaauua

SEQ ID NO: 21680 - RNA, 24 nt, Human
uuugccaaacauuugucgugguua

SEQ ID NO: 21681 - RNA, 24 nt, Human
uaggugaagggauuccagguuagu

SEQ ID NO: 21682 - RNA, 24 nt, Human
acagcacagucugcgucuguggug

SEQ ID NO: 21683 - RNA, 24 nt, Human
uacaagguggggcugcgggacguu

SEQ ID NO: 21684 - RNA, 24 nt, Human
gguuuuguguuuuguuugguuuca

SEQ ID NO: 21685 - RNA, 24 nt, Human
ugcugguaaccuggcguccggugg

SEQ ID NO: 21686 - RNA, 24 nt, Human
ugggaggccauggccuucgccagc

SEQ ID NO: 21687 - RNA, 24 nt, Human
uugccgagaacuccacaaaugcuc

SEQ ID NO: 21688 - RNA, 24 nt, Human
ucucaaaacccuccucaucaucua

SEQ ID NO: 21689 - RNA, 24 nt, Human
caucggaacuggcaccacuauugu

SEQ ID NO: 21690 - RNA, 24 nt, Human
ggaugagacguuugcuguccugag

SEQ ID NO: 21691 - RNA, 24 nt, Human
aagcaguucauggacaucuucucg

SEQ ID NO: 21692 - RNA, 24 nt, Human
ugguauuuucuuuuggcaagaugc

SEQ ID NO: 21693 - RNA, 24 nt, Human
uguggaauauguagauucacuuuu

SEQ ID NO: 21694 - RNA, 24 nt, Human
uaccuggauuuuuauuucaauuua

SEQ ID NO: 21695 - RNA, 24 nt, Human
uguauggauauguguaaauguuau

SEQ ID NO: 21696 - RNA, 24 nt, Human
uauuuuuuccauuuuuuuucucuc

SEQ ID NO: 21697 - RNA, 22 nt, Human
ugccuaauugaaucgaaacuuc

SEQ ID NO: 21698 - RNA, 24 nt, Human
ucucauaucacgaacagcaaagcg

SEQ ID NO: 21699 - RNA, 24 nt, Human
gagugcgucauauguuguuccuag

SEQ ID NO: 21700 - RNA, 18 nt, Human
uaacauguuuaaguagau

SEQ ID NO: 21701 - RNA, 24 nt, Human
agccugaggcuggggaugguggcu

SEQ ID NO: 21702 - RNA, 24 nt, Human
ugcauuguuaucauuaaccagucu

SEQ ID NO: 21703 - RNA, 24 nt, Human
uauuagggauaauauucauuuagc

SEQ ID NO: 21704 - RNA, 24 nt, Human
ccaguacagaucguuucucaucuc

SEQ ID NO: 21705 - RNA, 23 nt, Human
ugaacugacaguuguugcugcug

SEQ ID NO: 21706 - RNA, 24 nt, Human
uauaugauuucaggaguucuuggg

SEQ ID NO: 21707 - RNA, 24 nt, Human
uacugcugggggggcaugggccgu

SEQ ID NO: 21708 - RNA, 24 nt, Human
uugcuccaaauggcugcgcucucu

SEQ ID NO: 21709 - RNA, 24 nt, Human
gcgccccccgccuuccucucacuc

SEQ ID NO: 21710 - RNA, 24 nt, Human
cagcagccaggagauguccucuga

SEQ ID NO: 21711 - RNA, 24 nt, Human
cggggcugcaggcggcgcagagca

SEQ ID NO: 21712 - RNA, 24 nt, Human
uucaaauuucuuucuuuuuuaauu

SEQ ID NO: 21713 - RNA, 24 nt, Human
uaccggcuggccacuucuuccaag

SEQ ID NO: 21714 - RNA, 24 nt, Human
ugucauuggucgaagaguugaagu

SEQ ID NO: 21715 - RNA, 22 nt, Human
uguguuagaagauggaccagag

SEQ ID NO: 21716 - RNA, 24 nt, Human
aggcagaaguugcagugagccaag

SEQ ID NO: 21717 - RNA, 24 nt, Human
uauuugacugcuaaauucuccaca

SEQ ID NO: 21718 - RNA, 24 nt, Human
agacauagaugugaaaauuuuagg

SEQ ID NO: 21719 - RNA, 21 nt, Human
ugaaaucauacagcugugcaa

SEQ ID NO: 21720 - RNA, 24 nt, Human
aggaggaagaaauguuuucuuagg

SEQ ID NO: 21721 - RNA, 24 nt, Human
caagcuccucuccccccucuuuuc

SEQ ID NO: 21722 - RNA, 24 nt, Human
agccacuucccucccaacccuggu

SEQ ID NO: 21723 - RNA, 24 nt, Human
ugcccguacccccucuccucucug

SEQ ID NO: 21724 - RNA, 24 nt, Human
uccagggggagggaggaaaggaag

SEQ ID NO: 21725 - RNA, 22 nt, Human
ugcugagugaugcugugagggu

SEQ ID NO: 21726 - RNA, 24 nt, Human
uaccacaccaaugccuucaugguc

SEQ ID NO: 21727 - RNA, 24 nt, Human
uugaucuugaagaaacugggcgug

SEQ ID NO: 21728 - RNA, 24 nt, Human
gcgcguugcugcggccgugguccg

SEQ ID NO: 21729 - RNA, 24 nt, Human
aggaaggagauauagugaagagga

SEQ ID NO: 21730 - RNA, 24 nt, Human
guagaguuuucuucaggcuuaaag

SEQ ID NO: 21731 - RNA, 23 nt, Human
ugaaaugccuuugugacauuuuu

SEQ ID NO: 21732 - RNA, 24 nt, Human
ugagguggguggaucaccugaggu

SEQ ID NO: 21733 - RNA, 24 nt, Human
uaaguuaaaaaagacacauggucc

SEQ ID NO: 21734 - RNA, 24 nt, Human
aagaagccaagcccacagagacua

SEQ ID NO: 21735 - RNA, 24 nt, Human
uauguuguuuaguguuauauucca

SEQ ID NO: 21736 - RNA, 24 nt, Human
uuaaauguuauucgguuaaacagg

SEQ ID NO: 21737 - RNA, 24 nt, Human
ugcaaauauauaaauuugaguaug

SEQ ID NO: 21738 - RNA, 24 nt, Human
ugaguuacuacuaugguauuguua

SEQ ID NO: 21739 - RNA, 22 nt, Human
ucugcugugcuggcuucccaug

SEQ ID NO: 21740 - RNA, 24 nt, Human
ugcauuguuaucauuaaccagucu

SEQ ID NO: 21741 - RNA, 24 nt, Human
uaaugggucucaaaauucugugac

SEQ ID NO: 21742 - RNA, 24 nt, Human
uauuagggauaauauucauuuagc

SEQ ID NO: 21743 - RNA, 24 nt, Human
cuuugauucagcaagccacaacag

SEQ ID NO: 21744 - RNA, 24 nt, Human
agaguugaugacccgggagagguu

SEQ ID NO: 21745 - RNA, 24 nt, Human
aaguccgccucuuguucucacacu

SEQ ID NO: 21746 - RNA, 24 nt, Human
uggccugaugauccacagcggaga

SEQ ID NO: 21747 - RNA, 24 nt, Human
ugugugccauugcccaggcagagu

SEQ ID NO: 21748 - RNA, 24 nt, Human
ugugugcacgugcuuuauucacaa

SEQ ID NO: 21749 - RNA, 24 nt, Human
aggcaaaaccauuuauauuuugaa

SEQ ID NO: 21750 - RNA, 24 nt, Human
uuagauguucggggcugcacgcgc

SEQ ID NO: 21751 - RNA, 22 nt, Human
uaaaccguugaaacccauucgu

SEQ ID NO: 21752 - RNA, 24 nt, Human
ucuccagaaaugcuuggguucauc

SEQ ID NO: 21753 - RNA, 24 nt, Human
cgugcaaagaagaagcuggccuga

SEQ ID NO: 21754 - RNA, 24 nt, Human
uugaucuugaagaaacugggcgug

SEQ ID NO: 21755 - RNA, 24 nt, Human
guagaguuuucuucaggcuuaaag

SEQ ID NO: 21756 - RNA, 24 nt, Human
uuaaugccaggaacagauuuugca

SEQ ID NO: 21757 - RNA, 24 nt, Human
uuacaccccacccgacguggccau

SEQ ID NO: 21758 - RNA, 19 nt, Human
uccaugggggauuggauuc

SEQ ID NO: 21759 - RNA, 24 nt, Human
uggacugaucuugugcccaauuaa

SEQ ID NO: 21760 - RNA, 24 nt, Human
auuccaguaagcucuuuauugaac

SEQ ID NO: 21761 - RNA, 22 nt, Human
uggcgccauucuucagggcagc

SEQ ID NO: 21762 - RNA, 24 nt, Human
accaucuuguauucaagugcugac

SEQ ID NO: 21763 - RNA, 24 nt, Human
gcacguggggccagguguccuguc

SEQ ID NO: 21764 - RNA, 24 nt, Human
acccucacauccgcgugggccccu

SEQ ID NO: 21765 - RNA, 24 nt, Human
uccccgugggucaagcauuugucu

SEQ ID NO: 21766 - RNA, 24 nt, Human
ugcccgggucugugccagcucuga

SEQ ID NO: 21767 - RNA, 24 nt, Human
cucccaugcuggacuccgacggcu

SEQ ID NO: 21768 - RNA, 24 nt, Human
ugaccaagaaccaggucagccuga

SEQ ID NO: 21769 - RNA, 24 nt, Human
aggaagguuuagcagugcuucaau

SEQ ID NO: 21770 - RNA, 24 nt, Human
ugaccaaagaguggccugucuguu

SEQ ID NO: 21771 - RNA, 24 nt, Human
uagguggguggauauauucaugua

SEQ ID NO: 21772 - RNA, 24 nt, Human
agguuuggggaauuuagaauuauc

SEQ ID NO: 21773 - RNA, 24 nt, Human
uaacagaagggguuuuguaagcug

SEQ ID NO: 21774 - RNA, 24 nt, Human
auuucauucacuggggaggaacaa

SEQ ID NO: 21775 - RNA, 22 nt, Human
uaaggcgaggcggaauuaaacc

SEQ ID NO: 21776 - RNA, 24 nt, Human
ugcaagaaaaaagaaauacaaauu

SEQ ID NO: 21777 - RNA, 24 nt, Human
aggcacaucauggcuugguaucuc

SEQ ID NO: 21778 - RNA, 24 nt, Human
uguuauggaguuuucaacaugggg

SEQ ID NO: 21779 - RNA, 24 nt, Human
auggcccacgugacacuuguucau

SEQ ID NO: 21780 - RNA, 24 nt, Human
uugaucuugaagaaacugggcgug

SEQ ID NO: 21781 - RNA, 24 nt, Human
aggaaggagauauagugaagagga

SEQ ID NO: 21782 - RNA, 24 nt, Human
guagaguuuucuucaggcuuaaag

SEQ ID NO: 21783 - RNA, 24 nt, Human
uguucaguugcugcucacaauagu

SEQ ID NO: 21784 - RNA, 24 nt, Human
aagcguuggcaugaaaaagugaaa

SEQ ID NO: 21785 - RNA, 24 nt, Human
ugccugauaacagggugcaguguu

SEQ ID NO: 21786 - RNA, 20 nt, Human
ucacagauuuguauucucca

SEQ ID NO: 21787 - RNA, 24 nt, Human
aagaagaucuagaacgacuucucu

SEQ ID NO: 21788 - RNA, 24 nt, Human
ugaccgugaucuuguucgucuuuu

SEQ ID NO: 21789 - RNA, 24 nt, Human
ucuguggauugugaaguuuaucua

SEQ ID NO: 21790 - RNA, 24 nt, Human
uauuuuguauuuuuaguagagaca

SEQ ID NO: 21791 - RNA, 24 nt, Human
aagcacaacaacguaaagaaucuu

SEQ ID NO: 21792 - RNA, 24 nt, Human
uuguucagacggugucucuccugu

SEQ ID NO: 21793 - RNA, 22 nt, Human
uaggucuuugucagacauucug

SEQ ID NO: 21794 - RNA, 24 nt, Human
uaugaugauuuuuuucucaauuuu

SEQ ID NO: 21795 - RNA, 24 nt, Human
ccugcagacuugcucugcuccauc

SEQ ID NO: 21796 - RNA, 22 nt, Human
gacacaauucuguauaaucugu

SEQ ID NO: 21797 - RNA, 24 nt, Human
uuuaugguuuaaaaucaauuggug

SEQ ID NO: 21798 - RNA, 21 nt, Human
uacgauguuuccucuauggug

SEQ ID NO: 21799 - RNA, 24 nt, Human
aggcagcaguugcggccgcuuuua

SEQ ID NO: 21800 - RNA, 24 nt, Human
augcugccgggcacuuggcgggcc

SEQ ID NO: 21801 - RNA, 24 nt, Human
gggaagaagauuccggaaugcaga

SEQ ID NO: 21802 - RNA, 24 nt, Human
ucuacauuagcagugcugugcaag

SEQ ID NO: 21803 - RNA, 24 nt, Human
ggccgugguccgcgcccuuccucg

SEQ ID NO: 21804 - RNA, 24 nt, Human
aggaaggagauauagugaagagga

SEQ ID NO: 21805 - RNA, 24 nt, Human
uaccagaaagccauguucauauuu

SEQ ID NO: 21806 - RNA, 24 nt, Human
ugaaauggauaagaugcaugcagg

SEQ ID NO: 21807 - RNA, 24 nt, Human
acuggauucggaaugugcugauuu

SEQ ID NO: 21808 - RNA, 24 nt, Human
uuuaaaaguuucuguaccaauauc

SEQ ID NO: 21809 - RNA, 24 nt, Human
cggcccgggacugguggaucuccc

SEQ ID NO: 21810 - RNA, 24 nt, Human
gcagcugggugcucgccagggccc

SEQ ID NO: 21811 - RNA, 24 nt, Human
agugaaggacggaagcuggagaag

SEQ ID NO: 21812 - RNA, 24 nt, Human
gucaucuuuaaggacaauuuuucu

SEQ ID NO: 21813 - RNA, 24 nt, Human
caccagggaggacagcugcuggca

SEQ ID NO: 21814 - RNA, 24 nt, Human
augcacuguaccuuguacagucau

SEQ ID NO: 21815 - RNA, 24 nt, Human
ugaguacaagauaagcauuuuaug

SEQ ID NO: 21816 - RNA, 24 nt, Human
aaagugcaguaugaugggacacuu

SEQ ID NO: 21817 - RNA, 24 nt, Human
aguuuggauucugaaaacuaacug

SEQ ID NO: 21818 - RNA, 24 nt, Human
uuagagcuggcagcagcaucucag

SEQ ID NO: 21819 - RNA, 24 nt, Human
gggaauugagcuugcgccccaggu

SEQ ID NO: 21820 - RNA, 24 nt, Human
ugccucaacuuguuacagcagagu

SEQ ID NO: 21821 - RNA, 24 nt, Human
uggcagagaugcauuccagagaug

SEQ ID NO: 21822 - RNA, 24 nt, Human
uaccagacauccaaugacagccuc

SEQ ID NO: 21823 - RNA, 24 nt, Human
ugugcagaagaaauggaaggauuc

SEQ ID NO: 21824 - RNA, 24 nt, Human
ucaaaagccugauccugccaaaac

SEQ ID NO: 21825 - RNA, 24 nt, Human
ugacuuccauauggacuuugacuc

SEQ ID NO: 21826 - RNA, 24 nt, Human
uauggcaagucacuuugacagaca

SEQ ID NO: 21827 - RNA, 24 nt, Human
uacaccacucccaagaagaauaag

SEQ ID NO: 21828 - RNA, 24 nt, Human
uauggcaagucacuuugacagaca

SEQ ID NO: 21829 - RNA, 24 nt, Human
uacaccacucccaagaagaauaag

SEQ ID NO: 21830 - RNA, 24 nt, Human
uaauguucaacuuuucacaaaaga

SEQ ID NO: 21831 - RNA, 24 nt, Human
ucauacgguggaacggccauaugu

SEQ ID NO: 21832 - RNA, 24 nt, Human
uaauucacgguguaaagcaagcuu

SEQ ID NO: 21833 - RNA, 24 nt, Human
ugggaggcagagacggacguaucg

SEQ ID NO: 21834 - RNA, 24 nt, Human
ugauauggauaagggagaccagcu

SEQ ID NO: 21835 - RNA, 24 nt, Human
uacagcauuaucuauagauuugua

SEQ ID NO: 21836 - RNA, 24 nt, Human
ugggaggcugaggcuggaggauca

SEQ ID NO: 21837 - RNA, 24 nt, Human
uccauuaauuauuugggguugcaa

SEQ ID NO: 21838 - RNA, 24 nt, Human
uacccagugguacaguucauauag

SEQ ID NO: 21839 - RNA, 24 nt, Human
aagcagaaagggaagagaagcgag

SEQ ID NO: 21840 - RNA, 24 nt, Human
uucccaugccaccaggcuccugca

SEQ ID NO: 21841 - RNA, 24 nt, Human
uugcagccgcugcagcugcugcca

SEQ ID NO: 21842 - RNA, 24 nt, Human
ugcccugguggcagcccccagcac

SEQ ID NO: 21843 - RNA, 24 nt, Human
ugagaaagaugaguuaauccuuuu

SEQ ID NO: 21844 - RNA, 24 nt, Human
ucggaugguggccuggaagagaca

SEQ ID NO: 21845 - RNA, 24 nt, Human
agagcaguucuaccacuacaagga

SEQ ID NO: 21846 - RNA, 24 nt, Human
uucuucacgggcagcaagcuggug

SEQ ID NO: 21847 - RNA, 24 nt, Human
cagcgcgcaccccggcggggcuuu

SEQ ID NO: 21848 - RNA, 24 nt, Human
uucuuggugagaagggccggcgga

SEQ ID NO: 21849 - RNA, 24 nt, Human
caaugcaguccuggauggagccga

SEQ ID NO: 21850 - RNA, 24 nt, Human
uaugguguuugcgucauucauccg

SEQ ID NO: 21851 - RNA, 24 nt, Human
uaagaagccacuauaucaauggug

SEQ ID NO: 21852 - RNA, 20 nt, Human
uaagacgggggucucugagc

SEQ ID NO: 21853 - RNA, 24 nt, Human
cuagaccauauuuucaagucaucu

SEQ ID NO: 21854 - RNA, 24 nt, Human
uauaacauguaugcuuuucagaau

SEQ ID NO: 21855 - RNA, 24 nt, Human
uugaucuugaagaaacugggcgug

SEQ ID NO: 21856 - RNA, 24 nt, Human
aggaaggagauauagugaagagga

SEQ ID NO: 21857 - RNA, 24 nt, Human
guagaguuuucuucaggcuuaaag

SEQ ID NO: 21858 - RNA, 24 nt, Human
aaaugccuggcugagauucagggg

SEQ ID NO: 21859 - RNA, 24 nt, Human
caggucccucccucauuccaagga

SEQ ID NO: 21860 - RNA, 24 nt, Human
agggcgcgcuuaccccggggucua

SEQ ID NO: 21861 - RNA, 24 nt, Human
agaggcaggcgccagggggaaccc

SEQ ID NO: 21862 - RNA, 20 nt, Human
cugcgcccccuccugccagg

SEQ ID NO: 21863 - RNA, 24 nt, Human
uauggcaagucacuuugacagaca

SEQ ID NO: 21864 - RNA, 24 nt, Human
ugagaauggcaaaauuagucgccu

SEQ ID NO: 21865 - RNA, 24 nt, Human
uacaccacucccaagaagaauaag

SEQ ID NO: 21866 - RNA, 24 nt, Human
uauggaguuaaggaaggucacgug

SEQ ID NO: 21867 - RNA, 24 nt, Human
ucuggcaugaauucugccagucug

SEQ ID NO: 21868 - RNA, 24 nt, Human
uacauuguccugacacuggaaaag

SEQ ID NO: 21869 - RNA, 24 nt, Human
uugaucuugaagaaacugggcgug

SEQ ID NO: 21870 - RNA, 24 nt, Human
guagaguuuucuucaggcuuaaag

SEQ ID NO: 21871 - RNA, 24 nt, Human
ucagauaucugguuguuaugugau

SEQ ID NO: 21872 - RNA, 24 nt, Human
auccaguugaugggcugccagauc

SEQ ID NO: 21873 - RNA, 24 nt, Human
ugaguaacaaaaaaaugaaauaag

SEQ ID NO: 21874 - RNA, 24 nt, Human
acuuuaguggacuucugugagauu

SEQ ID NO: 21875 - RNA, 24 nt, Human
uguaaacccugcugaaucuguaac

SEQ ID NO: 21876 - RNA, 24 nt, Human
acuggcugccugcggguggcuccu

SEQ ID NO: 21877 - RNA, 20 nt, Human
cuuggcccaguaccuaugca

SEQ ID NO: 21878 - RNA, 24 nt, Human
uguggauauaguuuucccuguugg

SEQ ID NO: 21879 - RNA, 24 nt, Human
uuggaacuaugaaaagcucuucuc

SEQ ID NO: 21880 - RNA, 24 nt, Human
cucacaguaaccuccaccucccgg

SEQ ID NO: 21881 - RNA, 24 nt, Human
uaguuugauuguagaaaucacauc

SEQ ID NO: 21882 - RNA, 24 nt, Human
agauuagguuagaauaacacugcu

SEQ ID NO: 21883 - RNA, 24 nt, Human
uuuuacagccacuccagauuugua

SEQ ID NO: 21884 - RNA, 24 nt, Human
uuuacauuuacaaauuauaucaua

SEQ ID NO: 21885 - RNA, 24 nt, Human
uugaagcuugaaaauuuuauuuaa

SEQ ID NO: 21886 - RNA, 20 nt, Human
uggccggaagcugggcgggu

SEQ ID NO: 21887 - RNA, 24 nt, Human
uccguaucugcccuguggaauuca

SEQ ID NO: 21888 - RNA, 24 nt, Human
cuugccuaaacuccuccgcccugc

SEQ ID NO: 21889 - RNA, 24 nt, Human
aguugcugaggaacaaugcaccac

SEQ ID NO: 21890 - RNA, 24 nt, Human
uggcugggguuaccguggccugga

SEQ ID NO: 21891 - RNA, 21 nt, Human
uugguagagaccucaucuuug

SEQ ID NO: 21892 - RNA, 24 nt, Human
aacgguuuucuugcuucgagcuca

SEQ ID NO: 21893 - RNA, 24 nt, Human
gaucaucugaggucaggaguucga

SEQ ID NO: 21894 - RNA, 24 nt, Human
aggcgaagguugcagugagccgag

SEQ ID NO: 21895 - RNA, 24 nt, Human
uggcguaauagcgaagaggccccg

SEQ ID NO: 21896 - RNA, 24 nt, Human
ccccggggggggggggggggucua

SEQ ID NO: 21897 - RNA, 24 nt, Human
uugaucuugaagaaacugggcgug

SEQ ID NO: 21898 - RNA, 24 nt, Human
guagaguuuucuucaggcuuaaag

SEQ ID NO: 21899 - RNA, 24 nt, Human
acugccucagccucccgaguagcu

SEQ ID NO: 21900 - RNA, 24 nt, Human
ucccagagauuuugguacguugug

SEQ ID NO: 21901 - RNA, 24 nt, Human
uauugcucaucuguguuugaaaca

SEQ ID NO: 21902 - RNA, 24 nt, Human
uaccgcuaagaagcuaugucaauu

SEQ ID NO: 21903 - RNA, 24 nt, Human
uguucaguugcugcucacaauagu

SEQ ID NO: 21904 - RNA, 24 nt, Human
ugccugauaacagggugcaguguu

SEQ ID NO: 21905 - RNA, 24 nt, Human
ccucagggcuccucauccaggagu

SEQ ID NO: 21906 - RNA, 24 nt, Human
ucggaacgccauucuauccccaaa

SEQ ID NO: 21907 - RNA, 24 nt, Human
gggccgugacaugggggcccgggg

SEQ ID NO: 21908 - RNA, 24 nt, Human
uaaaauauucucuucuccuaucuu

SEQ ID NO: 21909 - RNA, 24 nt, Human
uaauggguuuggccaaauaucauc

SEQ ID NO: 21910 - RNA, 24 nt, Human
uccagguuuauguuuaaaugacag

SEQ ID NO: 21911 - RNA, 24 nt, Human
ucaagacauuaacaugaguagaag

SEQ ID NO: 21912 - RNA, 24 nt, Human
aagcaugccauuucuguuuucuug

SEQ ID NO: 21913 - RNA, 24 nt, Human
ccccgggaagucagaaaucgauca

SEQ ID NO: 21914 - RNA, 24 nt, Human
acccugugguaccgcgccccagag

SEQ ID NO: 21915 - RNA, 24 nt, Human
ugguguguaucggcccagggugac

SEQ ID NO: 21916 - RNA, 24 nt, Human
ggagcaacggcaacaacggcggua

SEQ ID NO: 21917 - RNA, 24 nt, Human
uuggaacgcacagaggaacgagcu

SEQ ID NO: 21918 - RNA, 24 nt, Human
gggaaugugagcacaaugcauaau

SEQ ID NO: 21919 - RNA, 24 nt, Human
uguuaugugucgugcugcgguuca

SEQ ID NO: 21920 - RNA, 24 nt, Human
uaauuuguccaagaaaaaaaaccg

SEQ ID NO: 21921 - RNA, 24 nt, Human
cauccuguuaacuacuacguugac

SEQ ID NO: 21922 - RNA, 24 nt, Human
augcugcccugugacccaacuggu

SEQ ID NO: 21923 - RNA, 23 nt, Human
uccaugggcaacuucuuggccca

SEQ ID NO: 21924 - RNA, 24 nt, Human
auuucauucacuggggaggaacaa

SEQ ID NO: 21925 - RNA, 20 nt, Human
uaaggcgaggcggaauuaaa

SEQ ID NO: 21926 - RNA, 24 nt, Human
uugaucuugaagaaacugggcgug

SEQ ID NO: 21927 - RNA, 20 nt, Human
uccgugcgcguugcugcggc

SEQ ID NO: 21928 - RNA, 24 nt, Human
aggaaggagauauagugaagagga

SEQ ID NO: 21929 - RNA, 24 nt, Human
guagaguuuucuucaggcuuaaag

SEQ ID NO: 21930 - RNA, 24 nt, Human
ugcauuguuaucauuaaccagucu

SEQ ID NO: 21931 - RNA, 24 nt, Human
uaaugggucucaaaauucugugac

SEQ ID NO: 21932 - RNA, 24 nt, Human
uauuagggauaauauucauuuagc

SEQ ID NO: 21933 - RNA, 24 nt, Human
ucucgcgcucggccgccgcccgcu

SEQ ID NO: 21934 - RNA, 24 nt, Human
uagggcacauggauuauaaguauc

SEQ ID NO: 21935 - RNA, 24 nt, Human
auuucauucacuggggaggaacaa

SEQ ID NO: 21936 - RNA, 23 nt, Human
uaaggcgaggcggaauuaaaccc

SEQ ID NO: 21937 - RNA, 24 nt, Human
uagcagaaaaguauuccaauccuc

SEQ ID NO: 21938 - RNA, 24 nt, Human
guuucauucucugauacacacaag

SEQ ID NO: 21939 - RNA, 24 nt, Human
ugaauuaaaauuuguggcuccugg

SEQ ID NO: 21940 - RNA, 24 nt, Human
ugucacaggccgugaggugccugg

SEQ ID NO: 21941 - RNA, 18 nt, Human
cacuugauuuugaaccuu

SEQ ID NO: 21942 - RNA, 24 nt, Human
uguagagaaaagaauuuuuuuucc

SEQ ID NO: 21943 - RNA, 24 nt, Human
ccuagcccugaagccccaggaacc

SEQ ID NO: 21944 - RNA, 24 nt, Human
uuuuuuuuuuaaagcaaguaacuu

SEQ ID NO: 21945 - RNA, 24 nt, Human
auguggcuaaauggggaugaggag

SEQ ID NO: 21946 - RNA, 24 nt, Human
uugcuucggggaaacagccaggaa

SEQ ID NO: 21947 - RNA, 23 nt, Human
uuagacuauagacauaacuacaa

SEQ ID NO: 21948 - RNA, 24 nt, Human
gggaaggaaaggggccugagcugg

SEQ ID NO: 21949 - RNA, 24 nt, Human
ccggagcacauuccugagcgcuga

SEQ ID NO: 21950 - RNA, 24 nt, Human
uauggcaagucacuuugacagaca

SEQ ID NO: 21951 - RNA, 24 nt, Human
uacaccacucccaagaagaauaag

SEQ ID NO: 21952 - RNA, 24 nt, Human
uccuuggacaacaccaaaaacaca

SEQ ID NO: 21953 - RNA, 24 nt, Human
ucacugcaaccuccgccucccggg

SEQ ID NO: 21954 - RNA, 24 nt, Human
cacucugucgcccaggcuagagcg

SEQ ID NO: 21955 - RNA, 22 nt, Human
caucaccggcugagggacuccu

SEQ ID NO: 21956 - RNA, 24 nt, Human
aagaaggcauuuucacacaaggcu

SEQ ID NO: 21957 - RNA, 24 nt, Human
caugaggccgcgccuguguccagc

SEQ ID NO: 21958 - RNA, 24 nt, Human
uagaugaucuuacuuucuugaaag

SEQ ID NO: 21959 - RNA, 24 nt, Human
ccucacagacggccaggagccagg

SEQ ID NO: 21960 - RNA, 24 nt, Human
aagcugccucugcccacuggauuc

SEQ ID NO: 21961 - RNA, 24 nt, Human
acgcagggcgcagaggcggggacg

SEQ ID NO: 21962 - RNA, 24 nt, Human
ucuaaugccacucagcucaggagc

SEQ ID NO: 21963 - RNA, 24 nt, Human
ugggaaaagucuuucacccuggua

SEQ ID NO: 21964 - RNA, 24 nt, Human
ucgaccacagaugcucugaacguu

SEQ ID NO: 21965 - RNA, 24 nt, Human
uguuauggggauaagcuggugagg

SEQ ID NO: 21966 - RNA, 24 nt, Human
aagcagcugcccagcccgcccuuc

SEQ ID NO: 21967 - RNA, 24 nt, Human
cagccuggacuuaccaccacuaaa

SEQ ID NO: 21968 - RNA, 24 nt, Human
caaaaguaauaauggcugaacuua

SEQ ID NO: 21969 - RNA, 24 nt, Human
uagagugcuuuuguagugagcuaa

SEQ ID NO: 21970 - RNA, 24 nt, Human
ugaaauaacaaguuuagugcuuua

SEQ ID NO: 21971 - RNA, 24 nt, Human
uuggcccaagaagggcuggggugc

SEQ ID NO: 21972 - RNA, 24 nt, Human
cguuguuuucaaacuucgagcggc

SEQ ID NO: 21973 - RNA, 24 nt, Human
uagcauguggguuguacagaguau

SEQ ID NO: 21974 - RNA, 24 nt, Human
ugagauccuugguaccccuaaaaa

SEQ ID NO: 21975 - RNA, 24 nt, Human
uauuucaugcgcacagagggaagc

SEQ ID NO: 21976 - RNA, 24 nt, Human
agacaggcuggcacagccccaggc

SEQ ID NO: 21977 - RNA, 24 nt, Human
uggcuuaggcagaauucuccucug

SEQ ID NO: 21978 - RNA, 24 nt, Human
acgcggauucucuugcccacaauu

SEQ ID NO: 21979 - RNA, 24 nt, Human
cuuggauuuucuggaaagauuuca

SEQ ID NO: 21980 - RNA, 22 nt, Human
cgccgggacagcagacugccgg

SEQ ID NO: 21981 - RNA, 24 nt, Human
cagccuggacuuaccaccacuaaa

SEQ ID NO: 21982 - RNA, 24 nt, Human
ggcccggagcggagcgcgcccugc

SEQ ID NO: 21983 - RNA, 24 nt, Human
ucagugauaucccuauacacugcc

SEQ ID NO: 21984 - RNA, 24 nt, Human
acuggaaugcaggcaguggaagcc

SEQ ID NO: 21985 - RNA, 24 nt, Human
ggggauggggagggcggggggcag

SEQ ID NO: 21986 - RNA, 22 nt, Human
ucacggaggccaccaugcccca

SEQ ID NO: 21987 - RNA, 20 nt, Human
caucaggguacauagcgggg

SEQ ID NO: 21988 - RNA, 24 nt, Human
acccuagagaauacuagggcuucu

SEQ ID NO: 21989 - RNA, 24 nt, Human
ucaaaauuacauaguucauuucua

SEQ ID NO: 21990 - RNA, 17 nt, Human
uuaaaggcagauuucau

SEQ ID NO: 21991 - RNA, 24 nt, Human
uacauuuaugaggcaagucagcug

SEQ ID NO: 21992 - RNA, 24 nt, Human
auggauuuauuauuugaaacuaac

SEQ ID NO: 21993 - RNA, 24 nt, Human
ugucauugcaauaggauguuacaa

SEQ ID NO: 21994 - RNA, 24 nt, Human
ugcguuaacacgacuuauuuucuu

SEQ ID NO: 21995 - RNA, 24 nt, Human
ucaaagugccagggcuggagaagu

SEQ ID NO: 21996 - RNA, 24 nt, Human
ucucuggguggccaugcuugguuu

SEQ ID NO: 21997 - RNA, 24 nt, Human
uaaauucagccaguauuuauuuaa

SEQ ID NO: 21998 - RNA, 24 nt, Human
acuaaguaauaucaggaaagaaga

SEQ ID NO: 21999 - RNA, 24 nt, Human
uacaccacucccaagaagaauaag

SEQ ID NO: 22000 - RNA, 24 nt, Human
ggaguccagcuucguacuacaaau

SEQ ID NO: 22001 - RNA, 24 nt, Human
ugauaugcuuuuacuucaacuuag

SEQ ID NO: 22002 - RNA, 24 nt, Human
caugucagccaggcgaacuccuga

SEQ ID NO: 22003 - RNA, 24 nt, Human
ucucgcucuguugcccaggcugga

SEQ ID NO: 22004 - RNA, 24 nt, Human
aggaaggagauauagugaagagga

SEQ ID NO: 22005 - RNA, 24 nt, Human
guagaguuuucuucaggcuuaaag

SEQ ID NO: 22006 - RNA, 24 nt, Human
ugaagucaccaugggguugguagg

SEQ ID NO: 22007 - RNA, 24 nt, Human
aggaaggagauauagugaagagga

SEQ ID NO: 22008 - RNA, 24 nt, Human
guagaguuuucuucaggcuuaaag

SEQ ID NO: 22009 - RNA, 24 nt, Human
gcuaaagcccggagcaggcucugc

SEQ ID NO: 22010 - RNA, 24 nt, Human
ccaaaacggaaaggcccuccccuu

SEQ ID NO: 22011 - RNA, 24 nt, Human
agggauggacccacuuucuccacc

SEQ ID NO: 22012 - RNA, 24 nt, Human
uccauacuacugacuuucccggua

SEQ ID NO: 22013 - RNA, 24 nt, Human
uuccuuguaguucguggucugaga

SEQ ID NO: 22014 - RNA, 24 nt, Human
caguaugguagugggcuacccccu

SEQ ID NO: 22015 - RNA, 24 nt, Human
uccaaguuccuacggugcccagca

SEQ ID NO: 22016 - RNA, 24 nt, Human
guggagggcccuauggacacccca

SEQ ID NO: 22017 - RNA, 24 nt, Human
ugagugggucguagcggaaucggg

SEQ ID NO: 22018 - RNA, 24 nt, Human
ucagaaggggguccggugggucuc

SEQ ID NO: 22019 - RNA, 24 nt, Human
ugacaaaauauuguugguguaaga

SEQ ID NO: 22020 - RNA, 24 nt, Human
ucaccuagagagcauguacuggca

SEQ ID NO: 22021 - RNA, 24 nt, Human
ugaggacuucugagcagagaggug

SEQ ID NO: 22022 - RNA, 22 nt, Human
ugauauggacuuggggaccagc

SEQ ID NO: 22023 - RNA, 24 nt, Human
ugagaauggcaaaauuagucgccu

SEQ ID NO: 22024 - RNA, 24 nt, Human
uuuggauuuuuaaccuccuucccc

SEQ ID NO: 22025 - RNA, 24 nt, Human
uacaccacucccaagaagaauaag

SEQ ID NO: 22026 - RNA, 24 nt, Human
ucaggcccgcgcugagggccgugc

SEQ ID NO: 22027 - RNA, 24 nt, Human
uaccucuagugcaauuuauaagca

SEQ ID NO: 22028 - RNA, 24 nt, Human
uaacauacacauagugaagaaugc

SEQ ID NO: 22029 - RNA, 24 nt, Human
ugcagaaaaacauaucugguaaaa

SEQ ID NO: 22030 - RNA, 24 nt, Human
ccagagugcugggauuacaggcau

SEQ ID NO: 22031 - RNA, 24 nt, Human
uaugucacccaggcuggagugcaa

SEQ ID NO: 22032 - RNA, 24 nt, Human
aacaccuaaauguuuuuauuuuug

SEQ ID NO: 22033 - RNA, 24 nt, Human
uacuuggucaacucaggcaaagcg

SEQ ID NO: 22034 - RNA, 24 nt, Human
caccgagcugaccgggcagggggc

SEQ ID NO: 22035 - RNA, 24 nt, Human
auaccauuccacguuaucaacaag

SEQ ID NO: 22036 - RNA, 24 nt, Human
uugaagaacaagauguucucauau

SEQ ID NO: 22037 - RNA, 24 nt, Human
aagcagcgggagggaacgcgguaa

SEQ ID NO: 22038 - RNA, 24 nt, Human
ugacggugugccaagguccuguuu

SEQ ID NO: 22039 - RNA, 24 nt, Human
gaaaggcuucuugaaagagaauuu

SEQ ID NO: 22040 - RNA, 24 nt, Human
cugaggcugcacuagccucugccc

SEQ ID NO: 22041 - RNA, 24 nt, Human
uuuugcagcuuagagaucacccac

SEQ ID NO: 22042 - RNA, 24 nt, Human
uggcgugcucugggugggugugcg

SEQ ID NO: 22043 - RNA, 23 nt, Human
agauccuaguauagaggaggagg

SEQ ID NO: 22044 - RNA, 24 nt, Human
ucucaugcugaacaguucuccauc

SEQ ID NO: 22045 - RNA, 24 nt, Human
ucuacaauaaccucaacccccuua

SEQ ID NO: 22046 - RNA, 24 nt, Human
aggcagaguggagagaaacaacuc

SEQ ID NO: 22047 - RNA, 24 nt, Human
cgucuauaucaccuugaagaagua

SEQ ID NO: 22048 - RNA, 17 nt, Human
uaacauggauggguuga

SEQ ID NO: 22049 - RNA, 24 nt, Human
caccaaaggcuucaacccacagcc

SEQ ID NO: 22050 - RNA, 24 nt, Human
agccgcaaguuccugcugcuuggu

SEQ ID NO: 22051 - RNA, 24 nt, Human
accccgucggccggcgcauucccc

SEQ ID NO: 22052 - RNA, 19 nt, Human
cagcuccugggcugugcuc

SEQ ID NO: 22053 - RNA, 24 nt, Human
uugaagacucucccucguauguaa

SEQ ID NO: 22054 - RNA, 24 nt, Human
gcagcaacaaaggcggccccgaag

SEQ ID NO: 22055 - RNA, 24 nt, Human
caccugaaaaccuuauuaaaaaac

SEQ ID NO: 22056 - RNA, 24 nt, Human
uuaaagcagacagaacuuuuugca

SEQ ID NO: 22057 - RNA, 24 nt, Human
uggccgugaucgccuccauuguga

SEQ ID NO: 22058 - RNA, 24 nt, Human
ugaguggucuucaggguccccagu

SEQ ID NO: 22059 - RNA, 24 nt, Human
gaccagcacccacacucaggcucu

SEQ ID NO: 22060 - RNA, 20 nt, Human
uguccagaauuuccagaagu

SEQ ID NO: 22061 - RNA, 24 nt, Human
uggaugcagugucucgggacuucg

SEQ ID NO: 22062 - RNA, 24 nt, Human
uguggcccuucucuuuaaguccga

SEQ ID NO: 22063 - RNA, 24 nt, Human
uacguugaggcuuuauagagacgc

SEQ ID NO: 22064 - RNA, 24 nt, Human
uaacauaagcagugagaaugagac

SEQ ID NO: 22065 - RNA, 24 nt, Human
uuccuuuccaugcagcacacaaua

SEQ ID NO: 22066 - RNA, 24 nt, Human
ccuacagacugacuaaguaggggg

SEQ ID NO: 22067 - RNA, 24 nt, Human
caugucaauguagguuaggccagc

SEQ ID NO: 22068 - RNA, 24 nt, Human
uaaaguaauucauuaugacuuuug

SEQ ID NO: 22069 - RNA, 22 nt, Human
ugggguguguuccgggcccggc

SEQ ID NO: 22070 - RNA, 24 nt, Human
uuccgguugaaaucgauggaacug

SEQ ID NO: 22071 - RNA, 24 nt, Human
agggguccggugcugucgcgggaa

SEQ ID NO: 22072 - RNA, 24 nt, Human
uuaguauuauuuauuugacaacuc

SEQ ID NO: 22073 - RNA, 24 nt, Human
aaaaagaaauccagagcuaucaag

SEQ ID NO: 22074 - RNA, 24 nt, Human
uggcuaaaauuuucuggacuucau

SEQ ID NO: 22075 - RNA, 24 nt, Human
gcgaaugucaauuuauugagcauu

SEQ ID NO: 22076 - RNA, 24 nt, Human
caccuggccuaauccacaaacugu

SEQ ID NO: 22077 - RNA, 24 nt, Human
acuacaauaaagauuacauacacc

SEQ ID NO: 22078 - RNA, 24 nt, Human
uauguugcccaggcaagucucaaa

SEQ ID NO: 22079 - RNA, 24 nt, Human
uaccauuugccucucgggcucaag

SEQ ID NO: 22080 - RNA, 24 nt, Human
ugauauuaacuuugaccaccuggc

SEQ ID NO: 22081 - RNA, 24 nt, Human
uaaguccagcccacacucaaggaa

SEQ ID NO: 22082 - RNA, 24 nt, Human
uaucucagcaggcccaauauaauu

SEQ ID NO: 22083 - RNA, 24 nt, Human
cacuggccgcugcacacucgccgc

SEQ ID NO: 22084 - RNA, 24 nt, Human
cuggaccgccgcuucugccccuaa

SEQ ID NO: 22085 - RNA, 23 nt, Human
aacuucuuuuagccccagaccuu

SEQ ID NO: 22086 - RNA, 24 nt, Human
uacuccagcccgggugacagagug

SEQ ID NO: 22087 - RNA, 24 nt, Human
ugggauggugcaugucaugugcuc

SEQ ID NO: 22088 - RNA, 24 nt, Human
ucaccaggguucugccucuggccc

SEQ ID NO: 22089 - RNA, 24 nt, Human
ggcccagaggcucaagaggcacca

SEQ ID NO: 22090 - RNA, 19 nt, Human
uaggauggggguggaggca

SEQ ID NO: 22091 - RNA, 24 nt, Human
aagcgccccagauguggggaacag

SEQ ID NO: 22092 - RNA, 17 nt, Human
ugcaaaagucaaaauau

SEQ ID NO: 22093 - RNA, 24 nt, Human
gucaagcuuugggaggcugaggcu

SEQ ID NO: 22094 - RNA, 17 nt, Human
uccaugaggucaauucc

SEQ ID NO: 22095 - RNA, 24 nt, Human
ugucaugcagaggcuccaggggca

SEQ ID NO: 22096 - RNA, 17 nt, Human
uccaugaggucaauucc

SEQ ID NO: 22097 - RNA, 24 nt, Human
ugucaugcagaggcuccaggggca

SEQ ID NO: 22098 - RNA, 24 nt, Human
ucaggacaguaaggacaaggaaag

SEQ ID NO: 22099 - RNA, 24 nt, Human
gcgcugcgguaguuggggucuccc

SEQ ID NO: 22100 - RNA, 24 nt, Human
ucugaucaauccuucuuuuucucu

SEQ ID NO: 22101 - RNA, 24 nt, Human
uaacagguguaagaguguugaaaa

SEQ ID NO: 22102 - RNA, 24 nt, Human
ucaguuaaaaaagaagaagaagaa

SEQ ID NO: 22103 - RNA, 24 nt, Human
ugugcuguugcucuccgggacuug

SEQ ID NO: 22104 - RNA, 24 nt, Human
ucacugagcuaaugaucuaauccu

SEQ ID NO: 22105 - RNA, 24 nt, Human
ugcccgagggggcuuuggcccugu

SEQ ID NO: 22106 - RNA, 18 nt, Human
ucugcaguugugucccuc

SEQ ID NO: 22107 - RNA, 24 nt, Human
uguacacaaccguguccgaauggu

SEQ ID NO: 22108 - RNA, 24 nt, Human
uaaacgaagagaaccaugagcaau

SEQ ID NO: 22109 - RNA, 24 nt, Human
ugggcucuacaagccuuugugaug

SEQ ID NO: 22110 - RNA, 24 nt, Human
uacccuucaugcaugaaagacaaa

SEQ ID NO: 22111 - RNA, 24 nt, Human
gcagaucgccaaacugaggcagca

SEQ ID NO: 22112 - RNA, 24 nt, Human
ucaguuccuaugccacugucaaau

SEQ ID NO: 22113 - RNA, 18 nt, Human
ugcccuguauaaugggau

SEQ ID NO: 22114 - RNA, 24 nt, Human
caacccaauuuauauguaguagcu

SEQ ID NO: 22115 - RNA, 24 nt, Human
ugagugcaauauaauagucaugaa

SEQ ID NO: 22116 - RNA, 24 nt, Human
uccaaagaggagccaguuaccaug

SEQ ID NO: 22117 - RNA, 24 nt, Human
acgggccgcuuuccacaaugcagu

SEQ ID NO: 22118 - RNA, 24 nt, Human
uggccggcacgggcagacaacgcg

SEQ ID NO: 22119 - RNA, 22 nt, Human
uccgugcgcguugcugcggccg

SEQ ID NO: 22120 - RNA, 24 nt, Human
uugaucuugaagaaacugggcgug

SEQ ID NO: 22121 - RNA, 24 nt, Human
aggaaggagauauagugaagagga

SEQ ID NO: 22122 - RNA, 24 nt, Human
guagaguuuucuucaggcuuaaag

SEQ ID NO: 22123 - RNA, 24 nt, Human
guagugcaggcuggcucuuggaaa

SEQ ID NO: 22124 - RNA, 24 nt, Human
ugagaaaaaaaaaccaccagaagu

SEQ ID NO: 22125 - RNA, 24 nt, Human
ugucaagaaacuucuuaucuucau

SEQ ID NO: 22126 - RNA, 24 nt, Human
gaugcaaaauguuugcaguuugac

SEQ ID NO: 22127 - RNA, 24 nt, Human
aaauggaaucuagaagcuaaauuu

SEQ ID NO: 22128 - RNA, 22 nt, Human
uuuacagaaaauucuagaacaa

SEQ ID NO: 22129 - RNA, 24 nt, Human
ccacugcucuccagccuggguggc

SEQ ID NO: 22130 - RNA, 24 nt, Human
uaucuucaccaccaccgccuucag

SEQ ID NO: 22131 - RNA, 24 nt, Human
uacagagacacuuucuugcuuucu

SEQ ID NO: 22132 - RNA, 24 nt, Human
uauuucuggaauuuucuguuuaau

SEQ ID NO: 22133 - RNA, 24 nt, Human
ccuaaaacaguucuguauauucuu

SEQ ID NO: 22134 - RNA, 24 nt, Human
cggaaguagaauuuagaggaagaa

SEQ ID NO: 22135 - RNA, 24 nt, Human
guggacccgggggccacuggccca

SEQ ID NO: 22136 - RNA, 24 nt, Human
uaaacuguauccuuuaguuuuauc

SEQ ID NO: 22137 - RNA, 24 nt, Human
ucccuggggcuggccagggcagcc

SEQ ID NO: 22138 - RNA, 24 nt, Human
uguucaguugcugcucacaauagu

SEQ ID NO: 22139 - RNA, 24 nt, Human
cuugaaggcuaugugggauuugcc

SEQ ID NO: 22140 - RNA, 20 nt, Human
ucacagauuuguauucucca

SEQ ID NO: 22141 - RNA, 24 nt, Human
ccuugggugucauggaucccagac

SEQ ID NO: 22142 - RNA, 24 nt, Human
uugaucuugaagaaacugggcgug

SEQ ID NO: 22143 - RNA, 24 nt, Human
guagaguuuucuucaggcuuaaag

SEQ ID NO: 22144 - RNA, 24 nt, Human
uacgguucuccaugcccccuccag

SEQ ID NO: 22145 - RNA, 24 nt, Human
gaaagcacaaacauggauccagaa

SEQ ID NO: 22146 - RNA, 24 nt, Human
cguuuugaaauucaucccaacugu

SEQ ID NO: 22147 - RNA, 24 nt, Human
aacaccucuggcuuuucugauguu

SEQ ID NO: 22148 - RNA, 24 nt, Human
ugaguaaaucagauguugaauucu

SEQ ID NO: 22149 - RNA, 24 nt, Human
cgauauggugauuguugguuaaga

SEQ ID NO: 22150 - RNA, 24 nt, Human
ugauguauuugcaaacauuaaugu

SEQ ID NO: 22151 - RNA, 24 nt, Human
ugagaggaagccuucuguacuuga

SEQ ID NO: 22152 - RNA, 21 nt, Human
uucaagggauggaaagucacc

SEQ ID NO: 22153 - RNA, 24 nt, Human
ugaaacuaagagauaucgauugac

SEQ ID NO: 22154 - RNA, 24 nt, Human
uacacuggcagagcucacagauga

SEQ ID NO: 22155 - RNA, 24 nt, Human
uagaagcagacggugugcagaaag

SEQ ID NO: 22156 - RNA, 24 nt, Human
uauaagccguuaccgcagacccga

SEQ ID NO: 22157 - RNA, 24 nt, Human
ucgacaauaaugguuaugcuugag

SEQ ID NO: 22158 - RNA, 24 nt, Human
agcccauuuugaggccagaggugc

SEQ ID NO: 22159 - RNA, 24 nt, Human
cggcugcggagccggcgguccuug

SEQ ID NO: 22160 - RNA, 22 nt, Human
cgccgggacagcagacugccgg

SEQ ID NO: 22161 - RNA, 24 nt, Human
aaguaguuauacucaggaagaacu

SEQ ID NO: 22162 - RNA, 24 nt, Human
uauggcaaggaccugauggagaag

SEQ ID NO: 22163 - RNA, 24 nt, Human
aaggagcuuugguucggagacagg

SEQ ID NO: 22164 - RNA, 24 nt, Human
cggggccccuggccacggcguacc

SEQ ID NO: 22165 - RNA, 24 nt, Human
ugucaagaguuuuucuaauauggg

SEQ ID NO: 22166 - RNA, 24 nt, Human
uaccccgucaagacucccagcuua

SEQ ID NO: 22167 - RNA, 24 nt, Human
ucccaggggguacaugaguuucug

SEQ ID NO: 22168 - RNA, 24 nt, Human
uaccugagucucugagcuuuucag

SEQ ID NO: 22169 - RNA, 24 nt, Human
uacucuggaguugaggugcgaguu

SEQ ID NO: 22170 - RNA, 24 nt, Human
aaguuugucgcugauggcaucuuc

SEQ ID NO: 22171 - RNA, 24 nt, Human
uggccugaugauccacagcggaga

SEQ ID NO: 22172 - RNA, 24 nt, Human
ugugugccauugcccaggcagagu

SEQ ID NO: 22173 - RNA, 24 nt, Human
uuuugaugacgauucuuaacaaua

SEQ ID NO: 22174 - RNA, 24 nt, Human
cugggcuugaaggucuucuuccug

SEQ ID NO: 22175 - RNA, 24 nt, Human
uagaucggggauccaauggugagu

SEQ ID NO: 22176 - RNA, 24 nt, Human
uuuuauaguugaggauuguauuga

SEQ ID NO: 22177 - RNA, 24 nt, Human
gugguuccagcucaacuuuuaaua

SEQ ID NO: 22178 - RNA, 23 nt, Human
uguauagaaguugcuuuccugau

SEQ ID NO: 22179 - RNA, 24 nt, Human
uauaugaugaaaagaauugagaag

SEQ ID NO: 22180 - RNA, 24 nt, Human
aaguagucguucuuauaucuaagc

SEQ ID NO: 22181 - RNA, 24 nt, Human
uucaugugcauaaguugacucauu

SEQ ID NO: 22182 - RNA, 24 nt, Human
acuuguauuuccugauuaaaacaa

SEQ ID NO: 22183 - RNA, 24 nt, Human
uuagagacugguacuuguauuucc

SEQ ID NO: 22184 - RNA, 24 nt, Human
ugggaauuaucaccugcucguucc

SEQ ID NO: 22185 - RNA, 24 nt, Human
agagguggugagguugaucggggg

SEQ ID NO: 22186 - RNA, 24 nt, Human
uuaggccaacauguauuaagcuga

SEQ ID NO: 22187 - RNA, 24 nt, Human
ccaccgaaauguugucaacgucca

SEQ ID NO: 22188 - RNA, 19 nt, Human
uuucaugccguccugaagc

SEQ ID NO: 22189 - RNA, 24 nt, Human
uacucugugccaagcacucugcua

SEQ ID NO: 22190 - RNA, 24 nt, Human
uaaaaucaagucauuguauauauu

SEQ ID NO: 22191 - RNA, 24 nt, Human
gaagaugguauauaagauuucagg

SEQ ID NO: 22192 - RNA, 24 nt, Human
ugaugcagacccuggaagggacac

SEQ ID NO: 22193 - RNA, 24 nt, Human
uaccggcaggcgcaguuugacauc

SEQ ID NO: 22194 - RNA, 24 nt, Human
cacaagccugguuauuugaggaug

SEQ ID NO: 22195 - RNA, 24 nt, Human
acacuguucugaucacuuacaucu

SEQ ID NO: 22196 - RNA, 24 nt, Human
uagcaucaucauuguucuacuacu

SEQ ID NO: 22197 - RNA, 19 nt, Human
ugugaaaaaauaaguccuu

SEQ ID NO: 22198 - RNA, 24 nt, Human
aaagaaacauaauugaaggaaugg

SEQ ID NO: 22199 - RNA, 24 nt, Human
uaccuuaacauaugaccucgagug

SEQ ID NO: 22200 - RNA, 24 nt, Human
acccagacugugucuaagggccaa

SEQ ID NO: 22201 - RNA, 24 nt, Human
uaugguaauuacacgaaggcuuuu

SEQ ID NO: 22202 - RNA, 24 nt, Human
aaaguaaccaagaaaauuaaaaua

SEQ ID NO: 22203 - RNA, 24 nt, Human
uugaugguagccaugaaaauuuuc

SEQ ID NO: 22204 - RNA, 24 nt, Human
uauaaaacaguccaaacaagaaaa

SEQ ID NO: 22205 - RNA, 24 nt, Human
acacuguucugaucacuuacaucu

SEQ ID NO: 22206 - RNA, 24 nt, Human
ugugauaauaaugaaauguuucca

SEQ ID NO: 22207 - RNA, 24 nt, Human
ugugauaauaaugaaauguuucca

SEQ ID NO: 22208 - RNA, 24 nt, Human
uauaagaaggucuucguauacuaa

SEQ ID NO: 22209 - RNA, 24 nt, Human
guuccugacuucaguauaguaugu

SEQ ID NO: 22210 - RNA, 24 nt, Human
ugaaaaguacacaaacaagguaua

SEQ ID NO: 22211 - RNA, 24 nt, Human
aagccuccagacaaaguuaacucc

SEQ ID NO: 22212 - RNA, 19 nt, Human
ugugaaaaaauaaguccuu

SEQ ID NO: 22213 - RNA, 24 nt, Human
acacuguucugaucacuuacaucu

SEQ ID NO: 22214 - RNA, 24 nt, Human
uagcaucaucauuguucuacuacu

SEQ ID NO: 22215 - RNA, 24 nt, Human
ugggaucucuccagauauggucgc

SEQ ID NO: 22216 - RNA, 24 nt, Human
uccgccaguucugcucgggcucug

SEQ ID NO: 22217 - RNA, 24 nt, Human
cgaguaccuugaggauguucugga

SEQ ID NO: 22218 - RNA, 24 nt, Human
uugaucuugaagaaacugggcgug

SEQ ID NO: 22219 - RNA, 24 nt, Human
aggaaggagauauagugaagagga

SEQ ID NO: 22220 - RNA, 24 nt, Human
guagaguuuucuucaggcuuaaag

SEQ ID NO: 22221 - RNA, 24 nt, Human
cuggaggugggcuuuggcauggcc

SEQ ID NO: 22222 - RNA, 24 nt, Human
ugucaugguguagaacuugaacac

SEQ ID NO: 22223 - RNA, 24 nt, Human
gggcaagaguuuaucucuggagag

SEQ ID NO: 22224 - RNA, 24 nt, Human
acugugugcuaaauauuaggcuac

SEQ ID NO: 22225 - RNA, 24 nt, Human
uuuuucaccuugacuggccaucua

SEQ ID NO: 22226 - RNA, 23 nt, Human
ugagagccaccgaguauuugcca

SEQ ID NO: 22227 - RNA, 24 nt, Human
uggaagacucauuauucagagcug

SEQ ID NO: 22228 - RNA, 24 nt, Human
uggcagugaggaaaauauggaaag

SEQ ID NO: 22229 - RNA, 24 nt, Human
ugauaugggauaggagguuucuca

SEQ ID NO: 22230 - RNA, 24 nt, Human
ugucagacauuaauauucacauac

SEQ ID NO: 22231 - RNA, 24 nt, Human
uugaucuugaagaaacugggcgug

SEQ ID NO: 22232 - RNA, 24 nt, Human
ucgcugagccucucuaccccaggu

SEQ ID NO: 22233 - RNA, 24 nt, Human
caggagccugggcgggcuucgcuu

SEQ ID NO: 22234 - RNA, 24 nt, Human
cagcccaugacagcuucccuuccu

SEQ ID NO: 22235 - RNA, 24 nt, Human
acaaauuaagauauucuaaaguau

SEQ ID NO: 22236 - RNA, 24 nt, Human
uccaaguaauuuugcaaaaaaaaa

SEQ ID NO: 22237 - RNA, 24 nt, Human
uauuccuuaaaaguuucaagagcu

SEQ ID NO: 22238 - RNA, 24 nt, Human
ucuccagaaaugcuuuggguucau

SEQ ID NO: 22239 - RNA, 24 nt, Human
aggaaggagauauagugaagagga

SEQ ID NO: 22240 - RNA, 24 nt, Human
guagaguuuucuucaggcuuaaag

SEQ ID NO: 22241 - RNA, 22 nt, Human
uacaaaaaaacccgggccuuuu

SEQ ID NO: 22242 - RNA, 24 nt, Human
gagcagcagcaguggagggggcag

SEQ ID NO: 22243 - RNA, 24 nt, Human
gugcagaaugagggccgaguagau

SEQ ID NO: 22244 - RNA, 24 nt, Human
uguggaaucggccgaggggagguc

SEQ ID NO: 22245 - RNA, 24 nt, Human
ugugcuuauuaaaaauggucaucu

SEQ ID NO: 22246 - RNA, 24 nt, Human
uuguauuuuuuaaagcuauaauuc

SEQ ID NO: 22247 - RNA, 24 nt, Human
ccugcaugaauuggcuccugauuu

SEQ ID NO: 22248 - RNA, 24 nt, Human
ggggaacaugaagaugaagggccu

SEQ ID NO: 22249 - RNA, 24 nt, Human
ugacaaaaccugcaaucacgcacu

SEQ ID NO: 22250 - RNA, 24 nt, Human
ugaagagcuauggccacaccuuug

SEQ ID NO: 22251 - RNA, 24 nt, Human
ucaguuauaauguucuuuuuaagg

SEQ ID NO: 22252 - RNA, 24 nt, Human
ugacuacauacauagauggguagc

SEQ ID NO: 22253 - RNA, 24 nt, Human
aauggcaccuucaaaaggggcgau

SEQ ID NO: 22254 - RNA, 24 nt, Human
uugaucuugaagaaacugggcgug

SEQ ID NO: 22255 - RNA, 24 nt, Human
ggccgugguccgcgcccuuccucg

SEQ ID NO: 22256 - RNA, 24 nt, Human
uagcuuggugccaaucggucgugg

SEQ ID NO: 22257 - RNA, 24 nt, Human
guagaguuuucuucaggcuuaaag

SEQ ID NO: 22258 - RNA, 24 nt, Human
ucggguguuaaaaaacuagagcuu

SEQ ID NO: 22259 - RNA, 24 nt, Human
uugguuggauacuugcuggaaaaa

SEQ ID NO: 22260 - RNA, 24 nt, Human
uugaucuugaagaaacugggcgug

SEQ ID NO: 22261 - RNA, 24 nt, Human
gguuuuguuggcuugggcaacagg

SEQ ID NO: 22262 - RNA, 24 nt, Human
aggugguucauagaacagccacag

SEQ ID NO: 22263 - RNA, 24 nt, Human
aaccagcuuggugcggcauagucu

SEQ ID NO: 22264 - RNA, 24 nt, Human
ggccgugguccgcgcccuuccucg

SEQ ID NO: 22265 - RNA, 24 nt, Human
ugagauguccucuauucuugaaga

SEQ ID NO: 22266 - RNA, 24 nt, Human
ugugugcagauggggcuggauuug

SEQ ID NO: 22267 - RNA, 24 nt, Human
ucacuguugcuacuuuuccucuca

SEQ ID NO: 22268 - RNA, 24 nt, Human
uacguugcuuugauaucaccauuu

SEQ ID NO: 22269 - RNA, 24 nt, Human
uuuuucuuuuuuguacaaaaauac

SEQ ID NO: 22270 - RNA, 24 nt, Human
uugaaaguagggccuacauggguc

SEQ ID NO: 22271 - RNA, 24 nt, Human
aaguacccagcacaauacuuguau

SEQ ID NO: 22272 - RNA, 23 nt, Human
ucacuuggggcuguauaaaaaaa

SEQ ID NO: 22273 - RNA, 24 nt, Human
ugguguguagggucauuauucaug

SEQ ID NO: 22274 - RNA, 24 nt, Human
acccagacugugucuaagggccaa

SEQ ID NO: 22275 - RNA, 24 nt, Human
uaugguaauuacacgaaggcuuuu

SEQ ID NO: 22276 - RNA, 24 nt, Human
ucacuacagaggucauuggguugu

SEQ ID NO: 22277 - RNA, 24 nt, Human
uagcacagugcugacgacucaggu

SEQ ID NO: 22278 - RNA, 24 nt, Human
cacaagccugguuauuugaggaug

SEQ ID NO: 22279 - RNA, 24 nt, Human
uguuucuuuuaauggguuuccaaa

SEQ ID NO: 22280 - RNA, 24 nt, Human
ugaggucauguguuaagguaugua

SEQ ID NO: 22281 - RNA, 24 nt, Human
ugugauaauaaugaaauguuucca

SEQ ID NO: 22282 - RNA, 24 nt, Human
uacagguuagggcaauuuggacuu

SEQ ID NO: 22283 - RNA, 24 nt, Human
auuugagauuuaaaaaugaaauua

SEQ ID NO: 22284 - RNA, 24 nt, Human
ugugcagcuugaucggcggcgccg

SEQ ID NO: 22285 - RNA, 24 nt, Human
ucucauggcucuggggcugggucc

SEQ ID NO: 22286 - RNA, 18 nt, Human
uugguuccgacuggaguc

SEQ ID NO: 22287 - RNA, 24 nt, Human
ugaaccaggaaaacugaagcaccu

SEQ ID NO: 22288 - RNA, 24 nt, Human
uauuauggcugcuguuguccaaca

SEQ ID NO: 22289 - RNA, 24 nt, Human
uacuccacagacagagcugagggu

SEQ ID NO: 22290 - RNA, 24 nt, Human
uaaaugauaccugggguuucuucc

SEQ ID NO: 22291 - RNA, 18 nt, Human
uagcucggcgccuggguu

SEQ ID NO: 22292 - RNA, 24 nt, Human
cacuccgcaggaaaguugagagca

SEQ ID NO: 22293 - RNA, 24 nt, Human
aagugucuuuuugggucgacaucc

SEQ ID NO: 22294 - RNA, 24 nt, Human
gaccuugugauccaccugccucag

SEQ ID NO: 22295 - RNA, 24 nt, Human
ugggaaaauguucauuuaauaaac

SEQ ID NO: 22296 - RNA, 24 nt, Human
uuugcauugaggugguuccggcca

SEQ ID NO: 22297 - RNA, 24 nt, Human
uauuacacacggauguaagcauuu

SEQ ID NO: 22298 - RNA, 24 nt, Human
uugaucuugaagaaacugggcgug

SEQ ID NO: 22299 - RNA, 24 nt, Human
aggaaggagauauagugaagagga

SEQ ID NO: 22300 - RNA, 24 nt, Human
ugagcaguguaugucaggacuugu

SEQ ID NO: 22301 - RNA, 24 nt, Human
uagcuuugggauuuugaauuggua

SEQ ID NO: 22302 - RNA, 24 nt, Human
uagagcuagugaauuagccuauuu

SEQ ID NO: 22303 - RNA, 24 nt, Human
uaaggaaaucuugagugaaaaucc

SEQ ID NO: 22304 - RNA, 24 nt, Human
uuccugagggagugaagucucugg

SEQ ID NO: 22305 - RNA, 24 nt, Human
caugucauguguaugcagcucuuc

SEQ ID NO: 22306 - RNA, 24 nt, Human
agauaggaagauaggagggccuug

SEQ ID NO: 22307 - RNA, 24 nt, Human
ucccgcgcgcgcgcuccguggccg

SEQ ID NO: 22308 - RNA, 24 nt, Human
uaauucaggguguauauuuuuaau

SEQ ID NO: 22309 - RNA, 24 nt, Human
uucauuuuuuauuugugacuguag

SEQ ID NO: 22310 - RNA, 23 nt, Human
ugaguggacccagagggaccugg

SEQ ID NO: 22311 - RNA, 24 nt, Human
uguaaccauguuuucauaggauuu

SEQ ID NO: 22312 - RNA, 24 nt, Human
uucaucauuuccucaagagaaaca

SEQ ID NO: 22313 - RNA, 24 nt, Human
uuagaaguaaauagcagauucaac

SEQ ID NO: 22314 - RNA, 24 nt, Human
uucaucauuuccucaagagaaaca

SEQ ID NO: 22315 - RNA, 24 nt, Human
uguaaccauguuuucauaggauuu

SEQ ID NO: 22316 - RNA, 24 nt, Human
uuagaaguaaauagcagauucaac

SEQ ID NO: 22317 - RNA, 24 nt, Human
augggccacagagauuccacuuuc

SEQ ID NO: 22318 - RNA, 19 nt, Human
aucagguuuuugucugcau

SEQ ID NO: 22319 - RNA, 24 nt, Human
uucgucccgaaguuggugucccgu

SEQ ID NO: 22320 - RNA, 24 nt, Human
agaguuguucauccaggaagacag

SEQ ID NO: 22321 - RNA, 24 nt, Human
agcuacugggugagcuggacuacc

SEQ ID NO: 22322 - RNA, 24 nt, Human
aagccgcgcuguuccugcugcugg

SEQ ID NO: 22323 - RNA, 24 nt, Human
accaggugcugcucguggccugcu

SEQ ID NO: 22324 - RNA, 24 nt, Human
acuccgagugcagcucauccugac

SEQ ID NO: 22325 - RNA, 24 nt, Human
ugaucucguuggacugcguggcua

SEQ ID NO: 22326 - RNA, 24 nt, Human
ugagaaaaacagaagauaaaugua

SEQ ID NO: 22327 - RNA, 24 nt, Human
uaaggaccuguuuggggcagcagg

SEQ ID NO: 22328 - RNA, 23 nt, Human
ugugcagaagaaauggaaggauu

SEQ ID NO: 22329 - RNA, 24 nt, Human
uugucuuuccccaucauuuguccu

SEQ ID NO: 22330 - RNA, 24 nt, Human
ucaauuuuuauuuugguuuucuua

SEQ ID NO: 22331 - RNA, 24 nt, Human
agggcugaaguaccagcugaggug

SEQ ID NO: 22332 - RNA, 24 nt, Human
cccacaaucagacaugggcaacua

SEQ ID NO: 22333 - RNA, 24 nt, Human
caccggugccuccuccaucucccu

SEQ ID NO: 22334 - RNA, 24 nt, Human
agugcuugauggauaaauguuugg

SEQ ID NO: 22335 - RNA, 24 nt, Human
ucagggaaaucuuaaaaggauuau

SEQ ID NO: 22336 - RNA, 24 nt, Human
uggcgugucugaggugcacgaaga

SEQ ID NO: 22337 - RNA, 24 nt, Human
ugaaaugaccaaaguacacaaaug

SEQ ID NO: 22338 - RNA, 24 nt, Human
ugggaccacgggcaugagccacca

SEQ ID NO: 22339 - RNA, 24 nt, Human
aucaaugucaauauccuaguuuug

SEQ ID NO: 22340 - RNA, 22 nt, Human
uacaauuggauagaacuaacac

SEQ ID NO: 22341 - RNA, 24 nt, Human
uuccaguucgagaucaccuucgag

SEQ ID NO: 22342 - RNA, 24 nt, Human
ggacaagaauuauuagaguggcua

SEQ ID NO: 22343 - RNA, 24 nt, Human
ugcauuugauccaggacuauagau

SEQ ID NO: 22344 - RNA, 24 nt, Human
uggcugcguuucauugcauugucu

SEQ ID NO: 22345 - RNA, 21 nt, Human
cgugcuaugacauugacgugg

SEQ ID NO: 22346 - RNA, 24 nt, Human
uacaucaauggggacaaguauuuc

SEQ ID NO: 22347 - RNA, 24 nt, Human
cacgcugcuccucaugcuggacua

SEQ ID NO: 22348 - RNA, 24 nt, Human
ccugcaguucgaggugcucauggc

SEQ ID NO: 22349 - RNA, 24 nt, Human
ucuccauuaggaguggggugcucc

SEQ ID NO: 22350 - RNA, 21 nt, Human
ugcgaggggggggacgcgcac

SEQ ID NO: 22351 - RNA, 24 nt, Human
uccacauacggccaucacuccugc

SEQ ID NO: 22352 - RNA, 23 nt, Human
cugaggcgagccgguagaucucc

SEQ ID NO: 22353 - RNA, 24 nt, Human
uucguucuuaaggcaugauggcgc

SEQ ID NO: 22354 - RNA, 24 nt, Human
ucuaugguggucgccaagucuugg

SEQ ID NO: 22355 - RNA, 24 nt, Human
ugguauggacaaauuauuuaaagu

SEQ ID NO: 22356 - RNA, 22 nt, Human
aauuucuuuuguacaagauugu

SEQ ID NO: 22357 - RNA, 24 nt, Human
ugggauucugagguaucgagugaa

SEQ ID NO: 22358 - RNA, 24 nt, Human
ucuguggugcauaaagacgacaca

SEQ ID NO: 22359 - RNA, 24 nt, Human
gauugcggggugcuauucaggugg

SEQ ID NO: 22360 - RNA, 24 nt, Human
ggguuucuggugacuacccgagaa

SEQ ID NO: 22361 - RNA, 24 nt, Human
ugagaaacccguuaugcauagggu

SEQ ID NO: 22362 - RNA, 24 nt, Human
ggccugaagacggcuuucaucaaa

SEQ ID NO: 22363 - RNA, 24 nt, Human
ggacagguguacagacauguucuu

SEQ ID NO: 22364 - RNA, 24 nt, Human
ucccagcaggacccucuucuuguu

SEQ ID NO: 22365 - RNA, 24 nt, Human
ucgaauggacacauuaccagugaa

SEQ ID NO: 22366 - RNA, 24 nt, Human
ggguagguggugauggugcaguag

SEQ ID NO: 22367 - RNA, 24 nt, Human
ucagugguggcgccugggcucagc

SEQ ID NO: 22368 - RNA, 24 nt, Human
ugucuugagugucaggauuucugg

SEQ ID NO: 22369 - RNA, 24 nt, Human
ucagaauugggaggaguccguagc

SEQ ID NO: 22370 - RNA, 24 nt, Human
ugaaaauacccccuuucuccauua

SEQ ID NO: 22371 - RNA, 24 nt, Human
uccaguaucccaaacuuucuaguc

SEQ ID NO: 22372 - RNA, 24 nt, Human
auaucauuugcgaacaagaauauu

SEQ ID NO: 22373 - RNA, 24 nt, Human
acagcauuugcgccuccauuccau

SEQ ID NO: 22374 - RNA, 24 nt, Human
aaaggcacuuugaaccuccuguaa

SEQ ID NO: 22375 - RNA, 24 nt, Human
uuaauccuuaucaaagcugucauu

SEQ ID NO: 22376 - RNA, 24 nt, Human
uuuaauguuuuuuaaaaugcuguu

SEQ ID NO: 22377 - RNA, 24 nt, Human
uacugugggauaaaagcagguuga

SEQ ID NO: 22378 - RNA, 24 nt, Human
gcccuggcucucugucuccuccca

SEQ ID NO: 22379 - RNA, 24 nt, Human
uauuguguguuaaucaucaaggaa

SEQ ID NO: 22380 - RNA, 24 nt, Human
aggcaggcaggcaggcaggcaucc

SEQ ID NO: 22381 - RNA, 24 nt, Human
ccuaaccccuggcuccauggaggu

SEQ ID NO: 22382 - RNA, 24 nt, Human
ucuagcucuuuuccugugguauug

SEQ ID NO: 22383 - RNA, 24 nt, Human
uaggguccccuccccaaggcucag

SEQ ID NO: 22384 - RNA, 24 nt, Human
uccgggcaccaagacugugccgga

SEQ ID NO: 22385 - RNA, 24 nt, Human
gaggaugccggugcgggcgcccgc

SEQ ID NO: 22386 - RNA, 24 nt, Human
uuaaauggccaauugaaacaaaca

SEQ ID NO: 22387 - RNA, 22 nt, Human
uacccgcgcuuauuuggcugga

SEQ ID NO: 22388 - RNA, 24 nt, Human
uaaugggucucaaaauucugugac

SEQ ID NO: 22389 - RNA, 24 nt, Human
ugagaugggaaagggcuccuucaa

SEQ ID NO: 22390 - RNA, 20 nt, Human
uggcagagccagaccgacuc

SEQ ID NO: 22391 - RNA, 24 nt, Human
ugaccuuggaagggguggcccggu

SEQ ID NO: 22392 - RNA, 24 nt, Human
caucacacugcgucagcgcccgcu

SEQ ID NO: 22393 - RNA, 24 nt, Human
cggcaaggucccagcauuugaggg

SEQ ID NO: 22394 - RNA, 24 nt, Human
ccccggccgcccaugcugcuggcg

SEQ ID NO: 22395 - RNA, 24 nt, Human
uugcaugcuuccuccuuugcucuu

SEQ ID NO: 22396 - RNA, 24 nt, Human
ucacggagauuccggaggcucaga

SEQ ID NO: 22397 - RNA, 24 nt, Human
ugccaggaauuccagguuggaggg

SEQ ID NO: 22398 - RNA, 24 nt, Human
uccauccucaagccacgauaagag

SEQ ID NO: 22399 - RNA, 24 nt, Human
ucccagggcuccagggcccuccuc

SEQ ID NO: 22400 - RNA, 24 nt, Human
cgugaaccaggcuguuaagugcac

SEQ ID NO: 22401 - RNA, 24 nt, Human
ugagauuuccuucgucccugacau

SEQ ID NO: 22402 - RNA, 24 nt, Human
guaggucaucuuggacggugccag

SEQ ID NO: 22403 - RNA, 24 nt, Human
caauccgcaugaaugaugcaccca

SEQ ID NO: 22404 - RNA, 24 nt, Human
uccccaacauggaagcauaugccg

SEQ ID NO: 22405 - RNA, 24 nt, Human
cugcuucguguacccgcuggauuu

SEQ ID NO: 22406 - RNA, 19 nt, Human
uggcaaccgcgauccuccu

SEQ ID NO: 22407 - RNA, 24 nt, Human
ugcuggggacgacgcuccccgagc

SEQ ID NO: 22408 - RNA, 22 nt, Human
uaccaaguacugcgcagaaaug

SEQ ID NO: 22409 - RNA, 24 nt, Human
cauugugggcuacguggaaacccu

SEQ ID NO: 22410 - RNA, 21 nt, Human
uucaagggauggaaagucacc

SEQ ID NO: 22411 - RNA, 24 nt, Human
ucugaucuauaaaugcgguggcau

SEQ ID NO: 22412 - RNA, 24 nt, Human
ucuaaugugauaaggcugcacguu

SEQ ID NO: 22413 - RNA, 24 nt, Human
ugagaucuccuuacccucuguugc

SEQ ID NO: 22414 - RNA, 24 nt, Human
ucccugugcgugaacgaggugccc

SEQ ID NO: 22415 - RNA, 23 nt, Human
uccauucugaucaacuaaagaaa

SEQ ID NO: 22416 - RNA, 19 nt, Human
ugggaccacauugaagggu

SEQ ID NO: 22417 - RNA, 22 nt, Human
uccgugcgcguugcugcggccg

SEQ ID NO: 22418 - RNA, 24 nt, Human
ugcauguaauaauguugaguggca

SEQ ID NO: 22419 - RNA, 24 nt, Human
agcaaucucaggagagcaagaccc

SEQ ID NO: 22420 - RNA, 24 nt, Human
ucccugggaaaugcugcacuucag

SEQ ID NO: 22421 - RNA, 24 nt, Human
ugagaugggaaagggcuccuucaa

SEQ ID NO: 22422 - RNA, 24 nt, Human
accccuggugguggaggucaucca

SEQ ID NO: 22423 - RNA, 24 nt, Human
ggcgaagauggccucaggagugca

SEQ ID NO: 22424 - RNA, 22 nt, Human
uucaaagggauggaaagucacc

SEQ ID NO: 22425 - RNA, 24 nt, Human
ucaaggcgagcgagggcgagagug

SEQ ID NO: 22426 - RNA, 24 nt, Human
gugcugguaguugcagaacucugg

SEQ ID NO: 22427 - RNA, 24 nt, Human
uagugugucuggauucugcaucug

SEQ ID NO: 22428 - RNA, 24 nt, Human
uuugaucaucuaugacgacuuauc

SEQ ID NO: 22429 - RNA, 24 nt, Human
ucgcagggggacuuuuacauuagg

SEQ ID NO: 22430 - RNA, 24 nt, Human
cugcagugauauugaugaguguag

SEQ ID NO: 22431 - RNA, 24 nt, Human
guggguguuuggugugaggcugcg

SEQ ID NO: 22432 - RNA, 22 nt, Human
ggaugcgugcauuuaucagauc

SEQ ID NO: 22433 - RNA, 24 nt, Human
uacagugaaacugcgaauggcuca

SEQ ID NO: 22434 - RNA, 24 nt, Human
ucuagauuuucauauaauguauua

SEQ ID NO: 22435 - RNA, 18 nt, Human
ucaucaguucauccaucu

SEQ ID NO: 22436 - RNA, 23 nt, Human
gacacauuuccuucuaaagguuc

SEQ ID NO: 22437 - RNA, 21 nt, Human
cuccugggucccacugguucu

SEQ ID NO: 22438 - RNA, 24 nt, Human
cgacaggaugcagaaggagaucac

SEQ ID NO: 22439 - RNA, 24 nt, Human
ucacuggaugguaauguaaccuua

SEQ ID NO: 22440 - RNA, 24 nt, Human
uaaauguaaaccaugauuucuuuu

SEQ ID NO: 22441 - RNA, 24 nt, Human
uccgggguagcaggggcugcucug

SEQ ID NO: 22442 - RNA, 24 nt, Human
uagaagagaacggacggcgauggc

SEQ ID NO: 22443 - RNA, 24 nt, Human
aggcagaggggagacuugcagcuc

SEQ ID NO: 22444 - RNA, 24 nt, Human
ugagaugggaaagggcuccuucaa

SEQ ID NO: 22445 - RNA, 24 nt, Human
cuccagggcagguggcugccuccc

SEQ ID NO: 22446 - RNA, 24 nt, Human
ugcuggaaaggcgcccagggccca

SEQ ID NO: 22447 - RNA, 24 nt, Human
gcacguggcggccgccgagcuggg

SEQ ID NO: 22448 - RNA, 24 nt, Human
aaaaaaccuuucgugguaccgacu

SEQ ID NO: 22449 - RNA, 24 nt, Human
uacagaaggaaaacaacuuuuuau

SEQ ID NO: 22450 - RNA, 24 nt, Human
ucugaucuauaaaugcgguggcau

SEQ ID NO: 22451 - RNA, 24 nt, Human
acgcgccugggcaacgacuuccac

SEQ ID NO: 22452 - RNA, 24 nt, Human
ucugaucuauaaaugcgguggcau

SEQ ID NO: 22453 - RNA, 24 nt, Human
ccuuggguucaagggaugggaaag

SEQ ID NO: 22454 - RNA, 24 nt, Human
ucugaucuauaaaugcgguggcau

SEQ ID NO: 22455 - RNA, 18 nt, Human
ugaagcagaaugggagug

SEQ ID NO: 22456 - RNA, 24 nt, Human
cugcggccgacacucaugaaggcc

SEQ ID NO: 22457 - RNA, 24 nt, Human
gcgcaugccguggcugccgguguu

SEQ ID NO: 22458 - RNA, 24 nt, Human
ucaauuuuuauuuugguuuucuua

SEQ ID NO: 22459 - RNA, 24 nt, Human
auagaaaagucccagcaggagguu

SEQ ID NO: 22460 - RNA, 24 nt, Human
gggcaguuuguugaaggccugggc

SEQ ID NO: 22461 - RNA, 24 nt, Human
ugguaguggauuagugaaagucuc

SEQ ID NO: 22462 - RNA, 24 nt, Human
aagcuguaaggccuguagcucugg

SEQ ID NO: 22463 - RNA, 24 nt, Human
ugaucucguuggacugcguggcua

SEQ ID NO: 22464 - RNA, 24 nt, Human
caucggauuuugcagcuucugggc

SEQ ID NO: 22465 - RNA, 24 nt, Human
ugguugaauggguaacaugcauug

SEQ ID NO: 22466 - RNA, 24 nt, Human
uucacaaaaauacacauacagaag

SEQ ID NO: 22467 - RNA, 24 nt, Human
agacgagauguacuuggaccagaa

SEQ ID NO: 22468 - RNA, 24 nt, Human
uggaagguggggggagaugccaca

SEQ ID NO: 22469 - RNA, 24 nt, Human
ugagcugguguaccuggacagggc

SEQ ID NO: 22470 - RNA, 24 nt, Human
agaggagggaagggagaaagggau

SEQ ID NO: 22471 - RNA, 24 nt, Human
ucuucagagaaacagacuguucau

SEQ ID NO: 22472 - RNA, 24 nt, Human
acucagguugaguucuguggccag

SEQ ID NO: 22473 - RNA, 24 nt, Human
uuugcugcugcaggaauucucaag

SEQ ID NO: 22474 - RNA, 24 nt, Human
acccugggugaugugcugcccucg

SEQ ID NO: 22475 - RNA, 24 nt, Human
agacgagauguacuuggaccagaa

SEQ ID NO: 22476 - RNA, 24 nt, Human
uucacaguaguucccagggcagca

SEQ ID NO: 22477 - RNA, 24 nt, Human
uguguugaucaagacuucaaaucc

SEQ ID NO: 22478 - RNA, 24 nt, Human
ccuugugucgcgugcugcucuucc

SEQ ID NO: 22479 - RNA, 24 nt, Human
uagcaggcuuccugcagacuguau

SEQ ID NO: 22480 - RNA, 24 nt, Human
cccugguaggcccauccuccccgu

SEQ ID NO: 22481 - RNA, 24 nt, Human
gagcauugacuuccuuucucuccc

SEQ ID NO: 22482 - RNA, 24 nt, Human
uguuucuuuagcucuccuccaaga

SEQ ID NO: 22483 - RNA, 24 nt, Human
uguggcaacuguggucgcaauguc

SEQ ID NO: 22484 - RNA, 24 nt, Human
uggcugaauuucuagaugaccagg

SEQ ID NO: 22485 - RNA, 24 nt, Human
caggugcuuuaucuuuaaaaaaag

SEQ ID NO: 22486 - RNA, 24 nt, Human
accaagaagucagauggaaacaau

SEQ ID NO: 22487 - RNA, 24 nt, Human
uuuggcaaagacuuggugcagaug

SEQ ID NO: 22488 - RNA, 21 nt, Human
uaccguaucuguaggcauccu

SEQ ID NO: 22489 - RNA, 24 nt, Human
uuuccuguccccugcugcuccuuc

SEQ ID NO: 22490 - RNA, 24 nt, Human
uauggcaagucacuuugacagaca

SEQ ID NO: 22491 - RNA, 24 nt, Human
uacaccacucccaagaagaauaag

SEQ ID NO: 22492 - RNA, 24 nt, Human
ugugccguggcacgauggcgagga

SEQ ID NO: 22493 - RNA, 24 nt, Human
ucacacuaacuuaaaagacagggu

SEQ ID NO: 22494 - RNA, 24 nt, Human
ucagucuuauuugggcagaaggaa

SEQ ID NO: 22495 - RNA, 24 nt, Human
ggggauggguaaaagggaugaugg

SEQ ID NO: 22496 - RNA, 24 nt, Human
ggaaggacuaggagggaaaacugg

SEQ ID NO: 22497 - RNA, 24 nt, Human
uacugcuuuuaccacuuugauacc

SEQ ID NO: 22498 - RNA, 24 nt, Human
uaggaaaagcaaguagacucauca

SEQ ID NO: 22499 - RNA, 24 nt, Human
uuaauucaugaagcuuacuuuuuu

SEQ ID NO: 22500 - RNA, 21 nt, Human
ucccagguucaagcgauucuc

SEQ ID NO: 22501 - RNA, 20 nt, Human
ucauucaaaucuauucacuc

SEQ ID NO: 22502 - RNA, 24 nt, Human
uguugcuuguuuuauuuuuugucc

SEQ ID NO: 22503 - RNA, 24 nt, Human
ugugaugauucuuuugcuuucuac

SEQ ID NO: 22504 - RNA, 24 nt, Human
ugugcagagaaauagcagagugau

SEQ ID NO: 22505 - RNA, 24 nt, Human
gaucaaaggcugguggguguucca

SEQ ID NO: 22506 - RNA, 24 nt, Human
gaccauccgggagagcauccucau

SEQ ID NO: 22507 - RNA, 24 nt, Human
ugguaguggauuagugaaagucuc

SEQ ID NO: 22508 - RNA, 24 nt, Human
aagcuguaaggccuguagcucugg

SEQ ID NO: 22509 - RNA, 24 nt, Human
uuaauauuugcaugcaaugucuaa

SEQ ID NO: 22510 - RNA, 17 nt, Human
uaugacaguuuuugacu

SEQ ID NO: 22511 - RNA, 24 nt, Human
cauuaggaugucagcugacccuug

SEQ ID NO: 22512 - RNA, 24 nt, Human
uuuauaauuaucucauuuguuaag

SEQ ID NO: 22513 - RNA, 24 nt, Human
uaugaaccuuuccccaagaagggc

SEQ ID NO: 22514 - RNA, 24 nt, Human
uaaaagacuuucuucgaaaccuca

SEQ ID NO: 22515 - RNA, 24 nt, Human
uuccuuccugugcacauguaugug

SEQ ID NO: 22516 - RNA, 24 nt, Human
ugugcagucagcuuaugcucagcc

SEQ ID NO: 22517 - RNA, 24 nt, Human
uccaggaagggccugguguugcag

SEQ ID NO: 22518 - RNA, 24 nt, Human
uuagcccaaaaauggcauuugauu

SEQ ID NO: 22519 - RNA, 24 nt, Human
ugugagcccacauucaacauuuuu

SEQ ID NO: 22520 - RNA, 24 nt, Human
uugaagauccauaacuaucuucug

SEQ ID NO: 22521 - RNA, 24 nt, Human
uaacuggguugacauugggcugaa

SEQ ID NO: 22522 - RNA, 24 nt, Human
cugcggcaggacagacacuccacu

SEQ ID NO: 22523 - RNA, 24 nt, Human
uagcaugcugucggguauucguau

SEQ ID NO: 22524 - RNA, 24 nt, Human
aacaccauuuauugauuagggugu

SEQ ID NO: 22525 - RNA, 24 nt, Human
guaguauaauuugaguuuggguaa

SEQ ID NO: 22526 - RNA, 24 nt, Human
uggcauuauuucuggauucucaau

SEQ ID NO: 22527 - RNA, 24 nt, Human
ccgcgccgaccggcugcagccgca

SEQ ID NO: 22528 - RNA, 24 nt, Human
ucgcggcaggcccggcugauggcg

SEQ ID NO: 22529 - RNA, 24 nt, Human
gugcagcagaccuguaaaugucuu

SEQ ID NO: 22530 - RNA, 24 nt, Human
uaaccuggcaacuaaguggauuac

SEQ ID NO: 22531 - RNA, 24 nt, Human
acuggaugggaauuuccacucuuc

SEQ ID NO: 22532 - RNA, 24 nt, Human
ugauuggguuguugugaggauuaa

SEQ ID NO: 22533 - RNA, 24 nt, Human
gucaagaaaggaggggagaaccca

SEQ ID NO: 22534 - RNA, 24 nt, Human
uaccaagaaugcauaauagucuca

SEQ ID NO: 22535 - RNA, 24 nt, Human
uuguacuugacuuucuuuuuuauu

SEQ ID NO: 22536 - RNA, 24 nt, Human
ucagcuaaucaguauuacuuugua

SEQ ID NO: 22537 - RNA, 24 nt, Human
uucaaaaugaaguuauauaacuac

SEQ ID NO: 22538 - RNA, 24 nt, Human
uacaggaagaaguuccuugugcua

SEQ ID NO: 22539 - RNA, 24 nt, Human
uuuguuaggauagaucuuaagcag

SEQ ID NO: 22540 - RNA, 24 nt, Human
aaugggacugcugaagaguggaca

SEQ ID NO: 22541 - RNA, 24 nt, Human
agucuugugaaaguguaaugugcg

SEQ ID NO: 22542 - RNA, 24 nt, Human
uaauaugucucauccucggccuug

SEQ ID NO: 22543 - RNA, 24 nt, Human
uccauaacugauuuccaagcuggu

SEQ ID NO: 22544 - RNA, 24 nt, Human
ucagcaagagggauucgcuggcug

SEQ ID NO: 22545 - RNA, 24 nt, Human
uggaaacugccaaaccuccuguca

SEQ ID NO: 22546 - RNA, 24 nt, Human
agaauccacauaaaagaagaaacu

SEQ ID NO: 22547 - RNA, 24 nt, Human
aauggaauauaaauaucacaaagu

SEQ ID NO: 22548 - RNA, 22 nt, Human
ugccuaggauauuaaaacauaa

SEQ ID NO: 22549 - RNA, 24 nt, Human
ugcaugaaggugaaguaaggaggc

SEQ ID NO: 22550 - RNA, 24 nt, Human
gccacuguacucuagccugggcaa

SEQ ID NO: 22551 - RNA, 24 nt, Human
uuaauaguuagacuuuaucucauu

SEQ ID NO: 22552 - RNA, 24 nt, Human
uuacucauucguuucuuaguguau

SEQ ID NO: 22553 - RNA, 24 nt, Human
ugauaugauagauuuuuguauuga

SEQ ID NO: 22554 - RNA, 24 nt, Human
cauuuuauuuucacuuauggacau

SEQ ID NO: 22555 - RNA, 24 nt, Human
agagcugaaccgauaugagaaagu

SEQ ID NO: 22556 - RNA, 24 nt, Human
uaauuuguuacaguagccauagaa

SEQ ID NO: 22557 - RNA, 24 nt, Human
ugaugagcaguugaaccugugccu

SEQ ID NO: 22558 - RNA, 24 nt, Human
augaagcagauauggcucucccgc

SEQ ID NO: 22559 - RNA, 24 nt, Human
guccugcuggaagcccaugucacu

SEQ ID NO: 22560 - RNA, 24 nt, Human
gagccccagcuccagugccuacug

SEQ ID NO: 22561 - RNA, 24 nt, Human
ugacaacaggacacagaugcaaug

SEQ ID NO: 22562 - RNA, 24 nt, Human
acagaguguuaaugcucaacgaug

SEQ ID NO: 22563 - RNA, 19 nt, Human
ugaaagacaagaggguggc

SEQ ID NO: 22564 - RNA, 24 nt, Human
ccccggcggagcuggcccgcggug

SEQ ID NO: 22565 - RNA, 24 nt, Human
cuucccagcggccccgugcggccc

SEQ ID NO: 22566 - RNA, 24 nt, Human
guaguucucuccaccagcacgggg

SEQ ID NO: 22567 - RNA, 24 nt, Human
agacgagauguacuuggaccagaa

SEQ ID NO: 22568 - RNA, 24 nt, Human
ugcuguaggucuuagagccugguu

SEQ ID NO: 22569 - RNA, 24 nt, Human
agaacucauaaggguaguugggga

SEQ ID NO: 22570 - RNA, 22 nt, Human
uacugggugaauagcacuuucc

SEQ ID NO: 22571 - RNA, 24 nt, Human
agauaggaaguggccuuuagggga

SEQ ID NO: 22572 - RNA, 24 nt, Human
ucaguuggaagacacccugaaauc

SEQ ID NO: 22573 - RNA, 24 nt, Human
uucauuguggacaaaguuauuauu

SEQ ID NO: 22574 - RNA, 24 nt, Human
agacgagauguacuuggaccagaa

SEQ ID NO: 22575 - RNA, 24 nt, Human
ugagaacaucagagugaaaaacau

SEQ ID NO: 22576 - RNA, 24 nt, Human
uguagaguuuuguguuaugagugg

SEQ ID NO: 22577 - RNA, 24 nt, Human
guaguucucuccaccagcacgggg

SEQ ID NO: 22578 - RNA, 24 nt, Human
agacgagauguacuuggaccagaa

SEQ ID NO: 22579 - RNA, 24 nt, Human
aagcuuuauggguguuaauugaaa

SEQ ID NO: 22580 - RNA, 21 nt, Human
uaacucaaaguuuuuaaagaa

SEQ ID NO: 22581 - RNA, 24 nt, Human
gcagggccuguggggagugggcgc

SEQ ID NO: 22582 - RNA, 24 nt, Human
ugccucaaggcaucgcgcucuuca

SEQ ID NO: 22583 - RNA, 24 nt, Human
cagccgguguccgaacugaucgcg

SEQ ID NO: 22584 - RNA, 19 nt, Human
cggcgcaggcggcgcugcc

SEQ ID NO: 22585 - RNA, 24 nt, Human
ugccaguaauaaggaugcuaacaa

SEQ ID NO: 22586 - RNA, 24 nt, Human
aauugcacugauaaaacaaaaaca

SEQ ID NO: 22587 - RNA, 24 nt, Human
cucgucccggccccugcaguccgg

SEQ ID NO: 22588 - RNA, 24 nt, Human
uauguacacccauuauguuuucag

SEQ ID NO: 22589 - RNA, 19 nt, Human
acaaagcaagagaagaagc

SEQ ID NO: 22590 - RNA, 24 nt, Human
cagcggcagagagccauccucuau

SEQ ID NO: 22591 - RNA, 24 nt, Human
ugcccuggagaaagagaggaauga

SEQ ID NO: 22592 - RNA, 24 nt, Human
uuauaaaguucuauuguuacuagu

SEQ ID NO: 22593 - RNA, 24 nt, Human
cuucaccgagagccugggcucagc

SEQ ID NO: 22594 - RNA, 24 nt, Human
uggaaaaacaguuagucuggagcc

SEQ ID NO: 22595 - RNA, 24 nt, Human
uccacagugcugugaucccgaggg

SEQ ID NO: 22596 - RNA, 22 nt, Human
uggaggccccugaacagagggc

SEQ ID NO: 22597 - RNA, 24 nt, Human
ucaggccagcguccuccuccacag

SEQ ID NO: 22598 - RNA, 24 nt, Human
uagguuagaauguaaauuaaagug

SEQ ID NO: 22599 - RNA, 24 nt, Human
ugacuuguaguaagcagguuucug

SEQ ID NO: 22600 - RNA, 24 nt, Human
uugacccuuuguccugcacagcac

SEQ ID NO: 22601 - RNA, 24 nt, Human
ugaggugcuuguccauggcaucga

SEQ ID NO: 22602 - RNA, 22 nt, Human
ugaguugaaagcugcaguugau

SEQ ID NO: 22603 - RNA, 24 nt, Human
gauugugggggcugucguggucgc

SEQ ID NO: 22604 - RNA, 24 nt, Human
agcuguucagcguacucuuuuaga

SEQ ID NO: 22605 - RNA, 19 nt, Human
agggauggacagucaccgu

SEQ ID NO: 22606 - RNA, 24 nt, Human
ggccugaguuugaugacuccgggg

SEQ ID NO: 22607 - RNA, 24 nt, Human
caaccacucuuccgaugaaaagcc

SEQ ID NO: 22608 - RNA, 24 nt, Human
cuccugaaagucuggcugacucug

SEQ ID NO: 22609 - RNA, 24 nt, Human
ucccguguccugaacuuggguccc

SEQ ID NO: 22610 - RNA, 24 nt, Human
uccgaugugaagucuaucucugug

SEQ ID NO: 22611 - RNA, 24 nt, Human
ucagaagaaaauaaucuucucauu

SEQ ID NO: 22612 - RNA, 24 nt, Human
uuugcugaaggaggucaucccuug

SEQ ID NO: 22613 - RNA, 20 nt, Human
uagaauugaaucagacugua

SEQ ID NO: 22614 - RNA, 24 nt, Human
gauuacuuugaggcuugggaguuu

SEQ ID NO: 22615 - RNA, 24 nt, Human
ucagugaauauuugcuaagaacag

SEQ ID NO: 22616 - RNA, 24 nt, Human
ugggaagaauuuuauaagcgauac

SEQ ID NO: 22617 - RNA, 24 nt, Human
uguaaauugugacaccaaacacau

SEQ ID NO: 22618 - RNA, 24 nt, Human
ucacugcaaccucugccuccuggg

SEQ ID NO: 22619 - RNA, 24 nt, Human
ugggaucugcugagcuagaccacu

SEQ ID NO: 22620 - RNA, 24 nt, Human
ucccggagacacugagcugugaaa

SEQ ID NO: 22621 - RNA, 22 nt, Human
uuucacacaauucauguuagcu

SEQ ID NO: 22622 - RNA, 21 nt, Human
uucauuuuuacaagagaagac

SEQ ID NO: 22623 - RNA, 24 nt, Human
uguggcccuucucuuuaaguccga

SEQ ID NO: 22624 - RNA, 24 nt, Human
aaggagcugaagccugugccauag

SEQ ID NO: 22625 - RNA, 24 nt, Human
uucguaugauaucauguucugcau

SEQ ID NO: 22626 - RNA, 24 nt, Human
aggaagucagaggacucagacacc

SEQ ID NO: 22627 - RNA, 19 nt, Human
uaacauagcauuaaggugg

SEQ ID NO: 22628 - RNA, 24 nt, Human
ggauaucgucuuucaucacguucu

SEQ ID NO: 22629 - RNA, 24 nt, Human
uaagggguuauccgagagccagug

SEQ ID NO: 22630 - RNA, 24 nt, Human
cguaagugggcuaucaaauguuag

SEQ ID NO: 22631 - RNA, 24 nt, Human
ugggugcccgcuggcuacgcuugc

SEQ ID NO: 22632 - RNA, 24 nt, Human
ugaggcgcggcugccccggggagg

SEQ ID NO: 22633 - RNA, 24 nt, Human
uguggagcacggagggaaagaagc

SEQ ID NO: 22634 - RNA, 24 nt, Human
gacacguagauucgggcaagucca

SEQ ID NO: 22635 - RNA, 21 nt, Human
uucaagggauggaaagucacc

SEQ ID NO: 22636 - RNA, 24 nt, Human
uccaaaacucauccucuuccccaa

SEQ ID NO: 22637 - RNA, 21 nt, Human
uucaagggauggaaagucacc

SEQ ID NO: 22638 - RNA, 24 nt, Human
uugaucuugaagaaacugggcgug

SEQ ID NO: 22639 - RNA, 24 nt, Human
guauauguauauauauacacuaaa

SEQ ID NO: 22640 - RNA, 24 nt, Human
uccgugcgcguugcugcggccgug

SEQ ID NO: 22641 - RNA, 20 nt, Human
uugaagaaacugggcguguc

SEQ ID NO: 22642 - RNA, 24 nt, Human
aggaaggagauauagugaagagga

SEQ ID NO: 22643 - RNA, 24 nt, Human
guagaguuuucuucaggcuuaaag

SEQ ID NO: 22644 - RNA, 24 nt, Human
uugaucuugaagaaacugggcgug

SEQ ID NO: 22645 - RNA, 24 nt, Human
aggaaggagauauagugaagagga

SEQ ID NO: 22646 - RNA, 24 nt, Human
guagaguuuucuucaggcuuaaag

SEQ ID NO: 22647 - RNA, 24 nt, Human
aggaaggagauauagugaagagga

SEQ ID NO: 22648 - RNA, 24 nt, Human
uugaucuugaagaaacugggcgug

SEQ ID NO: 22649 - RNA, 24 nt, Human
aggaaggagauauagugaagagga

SEQ ID NO: 22650 - RNA, 24 nt, Human
guagaguuuucuucaggcuuaaag

SEQ ID NO: 22651 - RNA, 24 nt, Human
ugacaugaaaguucguaaaugcuc

SEQ ID NO: 22652 - RNA, 21 nt, Human
uucaagggauggaaagucacc

SEQ ID NO: 22653 - RNA, 24 nt, Human
auugugcacgcuuuuaaauagaga

SEQ ID NO: 22654 - RNA, 24 nt, Human
gagccggggagaggaagggugggu

SEQ ID NO: 22655 - RNA, 22 nt, Human
uacugggugaauagcacuuucc

SEQ ID NO: 22656 - RNA, 24 nt, Human
ucaguuggaagacacccugaaauc

SEQ ID NO: 22657 - RNA, 24 nt, Human
agagguucuaggaccucuccuacc

SEQ ID NO: 22658 - RNA, 24 nt, Human
cuccgggccgcgggccgccaaugg

SEQ ID NO: 22659 - RNA, 24 nt, Human
ugcccaggccagguggagcucugc

SEQ ID NO: 22660 - RNA, 24 nt, Human
uaaggccccuaacucuugcuggcu

SEQ ID NO: 22661 - RNA, 24 nt, Human
aaucugcugucuuauuguuccagg

SEQ ID NO: 22662 - RNA, 24 nt, Human
ugaaaggcauaauaauuugaguua

SEQ ID NO: 22663 - RNA, 24 nt, Human
uauuaaguguccauauuucucaag

SEQ ID NO: 22664 - RNA, 24 nt, Human
aguugcugagcugaagggaaagau

SEQ ID NO: 22665 - RNA, 24 nt, Human
ugacucauaacucuaagggccugg

SEQ ID NO: 22666 - RNA, 22 nt, Human
ucccgggaaagagaacuguccu

SEQ ID NO: 22667 - RNA, 21 nt, Human
uucaagggauggaaagucacc

SEQ ID NO: 22668 - RNA, 24 nt, Human
uccaccacuacuggccaucugauc

SEQ ID NO: 22669 - RNA, 22 nt, Human
uucaagggauggcaaagucacc

SEQ ID NO: 22670 - RNA, 24 nt, Human
ucugaucuauaaaugcgguggcau

SEQ ID NO: 22671 - RNA, 24 nt, Human
ucugaucuauaaaugcgguggcau

SEQ ID NO: 22672 - RNA, 24 nt, Human
ucugaucuauaaaugcgguggcau

SEQ ID NO: 22673 - RNA, 24 nt, Human
ucgguggugaugggcaucccgagc

SEQ ID NO: 22674 - RNA, 24 nt, Human
uggggaccccaaggagagagucag

SEQ ID NO: 22675 - RNA, 24 nt, Human
gcggauccgcuucaaaccgucccu

SEQ ID NO: 22676 - RNA, 24 nt, Human
ucugggcuguagcuguggucacgu

SEQ ID NO: 22677 - RNA, 21 nt, Human
uucaagggauggaaagucacc

SEQ ID NO: 22678 - RNA, 24 nt, Human
uccaccacuacuggccaucugauc

SEQ ID NO: 22679 - RNA, 24 nt, Human
cuggucccuucauccucgcugugg

SEQ ID NO: 22680 - RNA, 24 nt, Human
ugacugcguuccaugcggccuaug

SEQ ID NO: 22681 - RNA, 23 nt, Human
uuccagugaugagccccccaugg

SEQ ID NO: 22682 - RNA, 24 nt, Human
uaggugaugugcuugggaaagucc

SEQ ID NO: 22683 - RNA, 20 nt, Human
cacgcucuucagcaccaccc

SEQ ID NO: 22684 - RNA, 24 nt, Human
ucugaucuauaaaugcgguggcau

SEQ ID NO: 22685 - RNA, 24 nt, Human
uuuacaauauuauguuuccuauua

SEQ ID NO: 22686 - RNA, 24 nt, Human
ugcacggggcuuucugcauguaac

SEQ ID NO: 22687 - RNA, 24 nt, Human
ugccauugcuucuugccuguucug

SEQ ID NO: 22688 - RNA, 24 nt, Human
ugccucagagaacuucugcagccg

SEQ ID NO: 22689 - RNA, 24 nt, Human
gcuguggugggucuuguccagcca

SEQ ID NO: 22690 - RNA, 24 nt, Human
cccccagcccccugcuccuuugga

SEQ ID NO: 22691 - RNA, 24 nt, Human
cagccaccauucaggggacuggcg

SEQ ID NO: 22692 - RNA, 24 nt, Human
aggcgguggcuggcgguccgcccg

SEQ ID NO: 22693 - RNA, 24 nt, Human
ucacauggauuucugggcggagcg

SEQ ID NO: 22694 - RNA, 24 nt, Human
uaagagagauggacggagacauuc

SEQ ID NO: 22695 - RNA, 24 nt, Human
cgaggucggguuaggguccuggga

SEQ ID NO: 22696 - RNA, 24 nt, Human
aguuauguugcuuacuaugcacua

SEQ ID NO: 22697 - RNA, 24 nt, Human
cugggccucaaggcuaaaguuuua

SEQ ID NO: 22698 - RNA, 24 nt, Human
cucguggggccugagaaccucacc

SEQ ID NO: 22699 - RNA, 24 nt, Human
uuuuuggcccccuuggaguuuugg

SEQ ID NO: 22700 - RNA, 24 nt, Human
ucugccagucgcccugggagucgg

SEQ ID NO: 22701 - RNA, 24 nt, Human
acccaauacgcgacgugggcgagc

SEQ ID NO: 22702 - RNA, 24 nt, Human
uugaagaagaaggcggcuccuccg

SEQ ID NO: 22703 - RNA, 24 nt, Human
auggaccacauaguuuaagauuac

SEQ ID NO: 22704 - RNA, 24 nt, Human
uacuugguugcaaacucagaucuc

SEQ ID NO: 22705 - RNA, 24 nt, Human
ccuucagaauuuaaggguuuuaaa

SEQ ID NO: 22706 - RNA, 18 nt, Human
ugagaguggagaucugga

SEQ ID NO: 22707 - RNA, 24 nt, Human
ucacaguaugccugggcucuugga

SEQ ID NO: 22708 - RNA, 20 nt, Human
ucccagggcucaagggcugu

SEQ ID NO: 22709 - RNA, 24 nt, Human
ucuaacagauggccaggaggugac

SEQ ID NO: 22710 - RNA, 24 nt, Human
cgacaggaugcagaaggagaucac

SEQ ID NO: 22711 - RNA, 24 nt, Human
uaagauucuugaaggcaaaauuug

SEQ ID NO: 22712 - RNA, 24 nt, Human
ugagaaaacaagcauacuauaagu

SEQ ID NO: 22713 - RNA, 24 nt, Human
acagugcuacucuugaacacuauu

SEQ ID NO: 22714 - RNA, 24 nt, Human
ucagucccuaaaguucugugaaaa

SEQ ID NO: 22715 - RNA, 24 nt, Human
uguguacagugccagcacccacaa

SEQ ID NO: 22716 - RNA, 24 nt, Human
gagcguggguggaucuuggucacc

SEQ ID NO: 22717 - RNA, 24 nt, Human
uaccuaggaacaguacgauuuggg

SEQ ID NO: 22718 - RNA, 24 nt, Human
aaaguuaggucaggcguugacuga

SEQ ID NO: 22719 - RNA, 24 nt, Human
ucucacagaccccaaaacagcugc

SEQ ID NO: 22720 - RNA, 24 nt, Human
uuaauuuuuggggaaaaagcaagu

SEQ ID NO: 22721 - RNA, 23 nt, Human
aaacggaaccagaggauggagcu

SEQ ID NO: 22722 - RNA, 24 nt, Human
uacggugaccaucguggaccagau

SEQ ID NO: 22723 - RNA, 24 nt, Human
uggcaggcgccagcaccagaccug

SEQ ID NO: 22724 - RNA, 23 nt, Human
uucgacaggcuucuucucuggga

SEQ ID NO: 22725 - RNA, 24 nt, Human
ugagcugggcgagagguggcagag

SEQ ID NO: 22726 - RNA, 24 nt, Human
uugaacccaucuuucuauggcaug

SEQ ID NO: 22727 - RNA, 24 nt, Human
cuguacuuuaaguugauuuugaua

SEQ ID NO: 22728 - RNA, 24 nt, Human
uauguggcugggcuugguggcuca

SEQ ID NO: 22729 - RNA, 24 nt, Human
aaggauucggauguagcuuugccc

SEQ ID NO: 22730 - RNA, 24 nt, Human
acuacgggagggacagacacuucg

SEQ ID NO: 22731 - RNA, 24 nt, Human
uacccuguaaccauaaauauguag

SEQ ID NO: 22732 - RNA, 23 nt, Human
ucuuuugggcgccgggccccaga

SEQ ID NO: 22733 - RNA, 24 nt, Human
gggaaggaaaggggccugagcugg

SEQ ID NO: 22734 - RNA, 24 nt, Human
ccggagcacauuccugagcgcuga

SEQ ID NO: 22735 - RNA, 24 nt, Human
aagaagccgcccugguugcacaug

SEQ ID NO: 22736 - RNA, 24 nt, Human
aacauugucaguaaucuauuucuu

SEQ ID NO: 22737 - RNA, 24 nt, Human
uaggaggccagguacaaguucgug

SEQ ID NO: 22738 - RNA, 24 nt, Human
aagaugccaauggacacaguuugc

SEQ ID NO: 22739 - RNA, 24 nt, Human
uguggucagcuccaaagcuaugga

SEQ ID NO: 22740 - RNA, 21 nt, Human
uucaagggauggaaagucacc

SEQ ID NO: 22741 - RNA, 24 nt, Human
ccuggacaugcgucauugcuauuc

SEQ ID NO: 22742 - RNA, 24 nt, Human
uugaucuugaagaaacugggcgug

SEQ ID NO: 22743 - RNA, 24 nt, Human
aggaaggagauauagugaagagga

SEQ ID NO: 22744 - RNA, 24 nt, Human
ccucagcccuggaacaaggcuuca

SEQ ID NO: 22745 - RNA, 24 nt, Human
aaacaugugagagaaaccauaaag

SEQ ID NO: 22746 - RNA, 24 nt, Human
ugaaggguguggcaaggccuucau

SEQ ID NO: 22747 - RNA, 22 nt, Human
gaugucuacaaaauuggugggu

SEQ ID NO: 22748 - RNA, 24 nt, Human
ugagauuaugccugagguugugga

SEQ ID NO: 22749 - RNA, 24 nt, Human
guaguacuugugcugaccaaguau

SEQ ID NO: 22750 - RNA, 24 nt, Human
uaauauuaaauuuuaccauuugag

SEQ ID NO: 22751 - RNA, 24 nt, Human
uuagugaagaagaggaggaugaug

SEQ ID NO: 22752 - RNA, 18 nt, Human
ugugcagccgggacgguu

SEQ ID NO: 22753 - RNA, 24 nt, Human
agcuggugaugcccaacuacccau

SEQ ID NO: 22754 - RNA, 24 nt, Human
ugggauaacauugacgauggacua

SEQ ID NO: 22755 - RNA, 24 nt, Human
uccgugcgcguugcugcggccgug

SEQ ID NO: 22756 - RNA, 24 nt, Human
aggaaggagauauagugaagagga

SEQ ID NO: 22757 - RNA, 24 nt, Human
guagaguuuucuucaggcuuaaag

SEQ ID NO: 22758 - RNA, 24 nt, Human
ggacgccggagcucccacccucuu

SEQ ID NO: 22759 - RNA, 24 nt, Human
uuccgcacaucuuugaaucgcucc

SEQ ID NO: 22760 - RNA, 21 nt, Human
auaaaucuauucugcuaagag

SEQ ID NO: 22761 - RNA, 24 nt, Human
aagcugcauguggauccugagaac

SEQ ID NO: 22762 - RNA, 24 nt, Human
gaggagaaacccugggaaggcucc

SEQ ID NO: 22763 - RNA, 24 nt, Human
uuuuaagaucgugauucuggauga

SEQ ID NO: 22764 - RNA, 24 nt, Human
auuaaacauaacaugcaaauaauc

SEQ ID NO: 22765 - RNA, 23 nt, Human
uaccuuguucuacugcacccugg

SEQ ID NO: 22766 - RNA, 24 nt, Human
uaccuuguucuacugcacccuggu

SEQ ID NO: 22767 - RNA, 17 nt, Human
uggccguaccacuuggc

SEQ ID NO: 22768 - RNA, 24 nt, Human
agaguaagcucuauuaugaaauac

SEQ ID NO: 22769 - RNA, 24 nt, Human
cacugggcuuuugcuuuugugcuu

SEQ ID NO: 22770 - RNA, 24 nt, Human
uuaaucauucaaaucacuaucuga

SEQ ID NO: 22771 - RNA, 18 nt, Human
cugcucagugauugcgga

SEQ ID NO: 22772 - RNA, 24 nt, Human
ugugcagaagaaauggaaggauuc

SEQ ID NO: 22773 - RNA, 24 nt, Human
uaucaaggaagggcaggcgugaug

SEQ ID NO: 22774 - RNA, 24 nt, Human
ugugugcccccccgaggccgugcc

SEQ ID NO: 22775 - RNA, 24 nt, Human
uugaucuugaagaaacugggcgug

SEQ ID NO: 22776 - RNA, 24 nt, Human
uccgugcgcguugcugcggccgug

SEQ ID NO: 22777 - RNA, 24 nt, Human
aggaaggagauauagugaagagga

SEQ ID NO: 22778 - RNA, 24 nt, Human
guagaguuuucuucaggcuuaaag

SEQ ID NO: 22779 - RNA, 22 nt, Human
uagagacaggaucuugcuaugu

SEQ ID NO: 22780 - RNA, 24 nt, Human
caggaucuugcuauguugcccagg

SEQ ID NO: 22781 - RNA, 24 nt, Human
uaagcagcuuccuaucuuuuaaau

SEQ ID NO: 22782 - RNA, 24 nt, Human
uuuaagguagggggggaugaaggg

SEQ ID NO: 22783 - RNA, 24 nt, Human
uuccugagcagguagccugggggg

SEQ ID NO: 22784 - RNA, 24 nt, Human
cugcaacguucagagcaggcccau

SEQ ID NO: 22785 - RNA, 23 nt, Human
uggaacucugguauugcuuucua

SEQ ID NO: 22786 - RNA, 24 nt, Human
uauguuccaaagaaaugcggcuug

SEQ ID NO: 22787 - RNA, 24 nt, Human
cagcacuuugggaggccgaggcag

SEQ ID NO: 22788 - RNA, 24 nt, Human
ugguagaugcauguuuuuuguuac

SEQ ID NO: 22789 - RNA, 24 nt, Human
gggcauggccgcguguguggcagc

SEQ ID NO: 22790 - RNA, 24 nt, Human
aaagcagcaauucuauguucauag

SEQ ID NO: 22791 - RNA, 24 nt, Human
ggaggggaauuauuugaaucgugg

SEQ ID NO: 22792 - RNA, 24 nt, Human
aggccgugaggaccuucagccugu

SEQ ID NO: 22793 - RNA, 24 nt, Human
ugugcacccagcugcaggugcuga

SEQ ID NO: 22794 - RNA, 24 nt, Human
cagcagcagggaggggaggacugg

SEQ ID NO: 22795 - RNA, 24 nt, Human
uccaccuguugacaggacagcagg

SEQ ID NO: 22796 - RNA, 24 nt, Human
uauuaccucuguuguucacaggaa

SEQ ID NO: 22797 - RNA, 24 nt, Human
cauuguuuuacaaaauuuucuaau

SEQ ID NO: 22798 - RNA, 24 nt, Human
gaggagcagcucaguccagcguga

SEQ ID NO: 22799 - RNA, 18 nt, Human
aacagcuuucucaaaugu

SEQ ID NO: 22800 - RNA, 24 nt, Human
ugucagaaaacaaaacaaaaaaag

SEQ ID NO: 22801 - RNA, 24 nt, Human
ucucagucacguggaagccacggg

SEQ ID NO: 22802 - RNA, 24 nt, Human
uuuauaguaucaagugaggcuguu

SEQ ID NO: 22803 - RNA, 24 nt, Human
uauuccccaauguuuuaacugagu

SEQ ID NO: 22804 - RNA, 24 nt, Human
agacaggcuggcacagccccaggc

SEQ ID NO: 22805 - RNA, 24 nt, Human
aagcagcaccaauggggaugaccc

SEQ ID NO: 22806 - RNA, 24 nt, Human
aggaagagauggcagcuuuuuaag

SEQ ID NO: 22807 - RNA, 24 nt, Human
ugguauggaugcccuccugggguu

SEQ ID NO: 22808 - RNA, 24 nt, Human
cagcugccugccuauggucccacu

SEQ ID NO: 22809 - RNA, 24 nt, Human
ugacaguccaaaggguuccucggg

SEQ ID NO: 22810 - RNA, 24 nt, Human
uaacuaggaagguaacuuuuauua

SEQ ID NO: 22811 - RNA, 24 nt, Human
uuuccacaacgguugaacuaauuu

SEQ ID NO: 22812 - RNA, 24 nt, Human
uguaagcauuccuuuuucucugca

SEQ ID NO: 22813 - RNA, 24 nt, Human
uagguggcccuuccaguugaggca

SEQ ID NO: 22814 - RNA, 24 nt, Human
ucuagcuugcuuggacuuucagug

SEQ ID NO: 22815 - RNA, 24 nt, Human
ucacucauacuacagacacuuggc

SEQ ID NO: 22816 - RNA, 24 nt, Human
ugaaggaagggauuucaauuucug

SEQ ID NO: 22817 - RNA, 24 nt, Human
agaugcugaagcuguucagaaguu

SEQ ID NO: 22818 - RNA, 24 nt, Human
ugggaagagcauuaaugcuggagg

SEQ ID NO: 22819 - RNA, 24 nt, Human
uuaauacuguuguccccaguccgu

SEQ ID NO: 22820 - RNA, 24 nt, Human
ucacugcaaccucugccucccggg

SEQ ID NO: 22821 - RNA, 24 nt, Human
ucuacauuauggugaguuguagaa

SEQ ID NO: 22822 - RNA, 24 nt, Human
uagugcaugucuuggugugcuuuu

SEQ ID NO: 22823 - RNA, 24 nt, Human
uauuacagaagugaaacaaacuuc

SEQ ID NO: 22824 - RNA, 21 nt, Human
ugugcagacagaaauuucacc

SEQ ID NO: 22825 - RNA, 24 nt, Human
acuaaauuagaucagauuuugcua

SEQ ID NO: 22826 - RNA, 18 nt, Human
aacagcaugccaccacag

SEQ ID NO: 22827 - RNA, 24 nt, Human
uaagaacgaaagaauaguuaggau

SEQ ID NO: 22828 - RNA, 24 nt, Human
acaguagaccgcugacguuuccca

SEQ ID NO: 22829 - RNA, 24 nt, Human
uacuguaagaaauaguuuuauaaa

SEQ ID NO: 22830 - RNA, 24 nt, Human
uuucacuuuucucgaucacuaaac

SEQ ID NO: 22831 - RNA, 24 nt, Human
auugcaccuaguauuuccagacuu

SEQ ID NO: 22832 - RNA, 24 nt, Human
uaaaugcucauuuaugguuaauga

SEQ ID NO: 22833 - RNA, 24 nt, Human
ugugauggguuuuuugaaauuuga

SEQ ID NO: 22834 - RNA, 24 nt, Human
cacccuuucuuuaaauuuuuaaga

SEQ ID NO: 22835 - RNA, 24 nt, Human
uauuauuaaaguuaccuauuauug

SEQ ID NO: 22836 - RNA, 24 nt, Human
ugcuuggugaccgaauuacuaggu

SEQ ID NO: 22837 - RNA, 24 nt, Human
cuacaggccccucugucuggaaua

SEQ ID NO: 22838 - RNA, 24 nt, Human
aagcagaccuguuucaggguucgg

SEQ ID NO: 22839 - RNA, 23 nt, Human
aacauuuuaucuauucuuuguca

SEQ ID NO: 22840 - RNA, 24 nt, Human
uuaguauacagacgacagugaacu

SEQ ID NO: 22841 - RNA, 24 nt, Human
uuuguaggagacagggucucccug

SEQ ID NO: 22842 - RNA, 24 nt, Human
cucacgcccccccucgcgcgccuc

SEQ ID NO: 22843 - RNA, 24 nt, Human
ccaccaugccccagcccccgcguc

SEQ ID NO: 22844 - RNA, 21 nt, Human
ucccggcgccucguguugccc

SEQ ID NO: 22845 - RNA, 24 nt, Human
ugaacaguaguuaaauagggaaau

SEQ ID NO: 22846 - RNA, 24 nt, Human
uuaguauuaaagauuaggcuauag

SEQ ID NO: 22847 - RNA, 24 nt, Human
uuagcugcugggcuguggggaguu

SEQ ID NO: 22848 - RNA, 24 nt, Human
uuuuuaguaauugaauuucucugc

SEQ ID NO: 22849 - RNA, 24 nt, Human
uagcuagauauuccucacagugaa

SEQ ID NO: 22850 - RNA, 24 nt, Human
uuuccaaaaagccggccgucuaca

SEQ ID NO: 22851 - RNA, 23 nt, Human
ugaaauggaaacuauucaaaaaa

SEQ ID NO: 22852 - RNA, 24 nt, Human
agggauuaaauauagauguaauuu

SEQ ID NO: 22853 - RNA, 24 nt, Human
uguaagauggauaauguguauaag

SEQ ID NO: 22854 - RNA, 24 nt, Human
augcaauuuacuuuuaaagacaaa

SEQ ID NO: 22855 - RNA, 24 nt, Human
ucagugcaccauguguuugcuuug

SEQ ID NO: 22856 - RNA, 24 nt, Human
ugaaaagaucaggagacuaguuga

SEQ ID NO: 22857 - RNA, 24 nt, Human
ucucuuuuuuauaucucuuuggcg

SEQ ID NO: 22858 - RNA, 24 nt, Human
uuugauagagagguacguuugcgg

SEQ ID NO: 22859 - RNA, 24 nt, Human
uuuuuagaggauuuggcuuaaaaa

SEQ ID NO: 22860 - RNA, 24 nt, Human
uaugaggcccuagagcuccgggac

SEQ ID NO: 22861 - RNA, 24 nt, Human
uggcagcaccaggggacacaccug

SEQ ID NO: 22862 - RNA, 24 nt, Human
ggagaugggccaccgcccggcauc

SEQ ID NO: 22863 - RNA, 24 nt, Human
aaaccccccuuuucaacuuuccua

SEQ ID NO: 22864 - RNA, 24 nt, Human
uacuuggagugccugaaaccugua

SEQ ID NO: 22865 - RNA, 18 nt, Human
uggaaggacccccgaggc

SEQ ID NO: 22866 - RNA, 24 nt, Human
ugaaaggaaauauugcacuuucug

SEQ ID NO: 22867 - RNA, 24 nt, Human
uagaagaucuguuuguuuauauau

SEQ ID NO: 22868 - RNA, 24 nt, Human
ugcugcggccuuucaugcgcucca

SEQ ID NO: 22869 - RNA, 20 nt, Human
uggcagagagaagagcuggg

SEQ ID NO: 22870 - RNA, 24 nt, Human
ucucacuuagucaacuccugucaa

SEQ ID NO: 22871 - RNA, 24 nt, Human
gugauucucaccucccuccccacc

SEQ ID NO: 22872 - RNA, 24 nt, Human
uuaaaguggguaaucauaagcucc

SEQ ID NO: 22873 - RNA, 24 nt, Human
uaaaguuugcucgaagccuucagu

SEQ ID NO: 22874 - RNA, 24 nt, Human
uucgccgugguggccgaaaacgcc

SEQ ID NO: 22875 - RNA, 24 nt, Human
uaauauacuguauguuuacauuuu

SEQ ID NO: 22876 - RNA, 24 nt, Human
uauuaagcacuucugucagucuuu

SEQ ID NO: 22877 - RNA, 24 nt, Human
cugcugccuuccagugcugucauu

SEQ ID NO: 22878 - RNA, 24 nt, Human
uccccuggcucuccccugggcaca

SEQ ID NO: 22879 - RNA, 24 nt, Human
gcgaacagggcccucacccugccu

SEQ ID NO: 22880 - RNA, 24 nt, Human
guaguucucuccaccagcacgggg

SEQ ID NO: 22881 - RNA, 24 nt, Human
agacgagauguacuuggaccagaa

SEQ ID NO: 22882 - RNA, 24 nt, Human
uagcaguaaucagcucccagcgac

SEQ ID NO: 22883 - RNA, 24 nt, Human
ugguggucuugagcuuuuggccug

SEQ ID NO: 22884 - RNA, 20 nt, Human
cuugucccucucucacacuu

SEQ ID NO: 22885 - RNA, 24 nt, Human
guaguucucuccaccagcacgggg

SEQ ID NO: 22886 - RNA, 24 nt, Human
agacgagauguacuuggaccagaa

SEQ ID NO: 22887 - RNA, 24 nt, Human
ugcuguaggucuuagagccugguu

SEQ ID NO: 22888 - RNA, 24 nt, Human
ugcaggaacugggugugcacacgg

SEQ ID NO: 22889 - RNA, 24 nt, Human
caguaggcuucuauauauccugga

SEQ ID NO: 22890 - RNA, 24 nt, Human
accagcuucugcuaccuucaugcu

SEQ ID NO: 22891 - RNA, 24 nt, Human
guaguucucuccaccagcacgggg

SEQ ID NO: 22892 - RNA, 24 nt, Human
agacgagauguacuuggaccagaa

SEQ ID NO: 22893 - RNA, 24 nt, Human
gggcaugggucaagggcguccggg

SEQ ID NO: 22894 - RNA, 24 nt, Human
uaccguuuguaaggcgcuugcgca

SEQ ID NO: 22895 - RNA, 24 nt, Human
ugaaugaucaccugcaugucggca

SEQ ID NO: 22896 - RNA, 24 nt, Human
acccggagcggaguggggacuggc

SEQ ID NO: 22897 - RNA, 24 nt, Human
ugggcaaaacgggcuugccagugg

SEQ ID NO: 22898 - RNA, 24 nt, Human
guaguucucuccaccagcacgggg

SEQ ID NO: 22899 - RNA, 24 nt, Human
agacgagauguacuuggaccagaa

SEQ ID NO: 22900 - RNA, 24 nt, Human
ugcuguaggucuuagagccugguu

SEQ ID NO: 22901 - RNA, 24 nt, Human
uaacaguuggacacuauuucuugg

SEQ ID NO: 22902 - RNA, 24 nt, Human
ugcacagaucagugucagaagcau

SEQ ID NO: 22903 - RNA, 24 nt, Human
guaguucucuccaccagcacgggg

SEQ ID NO: 22904 - RNA, 24 nt, Human
agacgagauguacuuggaccagaa

SEQ ID NO: 22905 - RNA, 24 nt, Human
ucacugcaaccuccaccuccuggg

SEQ ID NO: 22906 - RNA, 24 nt, Human
gaccucaggugauccacccaccuc

SEQ ID NO: 22907 - RNA, 24 nt, Human
ugacuugugaggaaaaggaagaac

SEQ ID NO: 22908 - RNA, 24 nt, Human
uuuacaguauauacagucaggccu

SEQ ID NO: 22909 - RNA, 24 nt, Human
ugucaggaaggggaagcggguuuc

SEQ ID NO: 22910 - RNA, 24 nt, Human
guaguucucuccaccagcacgggg

SEQ ID NO: 22911 - RNA, 24 nt, Human
agacgagauguacuuggaccagaa

SEQ ID NO: 22912 - RNA, 24 nt, Human
agacgagauguacuuggaccagaa

SEQ ID NO: 22913 - RNA, 24 nt, Human
ugcuguaggucuuagagccugguu

SEQ ID NO: 22914 - RNA, 24 nt, Human
aaguggcuauuuuagagaaaaaga

SEQ ID NO: 22915 - RNA, 24 nt, Human
guaguucucuccaccagcacgggg

SEQ ID NO: 22916 - RNA, 24 nt, Human
agacgagauguacuuggaccagaa

SEQ ID NO: 22917 - RNA, 23 nt, Human
cuuugugucaccaugggcuaugg

SEQ ID NO: 22918 - RNA, 20 nt, Human
ugucaaguuaccuucugcag

SEQ ID NO: 22919 - RNA, 24 nt, Human
ugugaaggcugggccacgcagagg

SEQ ID NO: 22920 - RNA, 24 nt, Human
uaguucagauugaucuuaggucaa

SEQ ID NO: 22921 - RNA, 24 nt, Human
aggaggaagaaauguuuucuuagg

SEQ ID NO: 22922 - RNA, 24 nt, Human
caagcuccucuccccccucuuuuc

SEQ ID NO: 22923 - RNA, 24 nt, Human
ugugcugaccacaggaauuggauc

SEQ ID NO: 22924 - RNA, 24 nt, Human
aagcuugcuguggccauggugcug

SEQ ID NO: 22925 - RNA, 24 nt, Human
ccggccccgccguuccgacccccg

SEQ ID NO: 22926 - RNA, 24 nt, Human
accauuuuugauuugggcuuccgc

SEQ ID NO: 22927 - RNA, 24 nt, Human
ugagugccaaggacaccacuggaa

SEQ ID NO: 22928 - RNA, 24 nt, Human
uaucagaaggugagauugaauaau

SEQ ID NO: 22929 - RNA, 24 nt, Human
uguucuggagcuguuggacaaaua

SEQ ID NO: 22930 - RNA, 24 nt, Human
aggcagucacagaacaggggcaug

SEQ ID NO: 22931 - RNA, 24 nt, Human
cgggacccccgagcgugaaccccg

SEQ ID NO: 22932 - RNA, 24 nt, Human
uccaccauccaggugugcuuggau

SEQ ID NO: 22933 - RNA, 24 nt, Human
ucugaucaauccuucuuuuucucu

SEQ ID NO: 22934 - RNA, 24 nt, Human
ucaauuuuuauuuugguuuucuua

SEQ ID NO: 22935 - RNA, 24 nt, Human
aauggcucccuuugcccaagugaa

SEQ ID NO: 22936 - RNA, 24 nt, Human
uuagagcuugugucuaaaggguaa

SEQ ID NO: 22937 - RNA, 24 nt, Human
uaccuuugugcacaguugaauggg

SEQ ID NO: 22938 - RNA, 24 nt, Human
uuccacagccagauuugaccaagc

SEQ ID NO: 22939 - RNA, 24 nt, Human
ucacuggaucugcugcccagcauu

SEQ ID NO: 22940 - RNA, 24 nt, Human
uaacaaaccaaacuacuugauagc

SEQ ID NO: 22941 - RNA, 24 nt, Human
ugugugaagucuuaaauguuuuau

SEQ ID NO: 22942 - RNA, 24 nt, Human
aaauugcuguggggaggggggagg

SEQ ID NO: 22943 - RNA, 24 nt, Human
gaauugcaacugucagguuuugug

SEQ ID NO: 22944 - RNA, 24 nt, Human
uuccuauuuucaccaaaauugggg

SEQ ID NO: 22945 - RNA, 24 nt, Human
ucggcccagaacaaugcuaaagua

SEQ ID NO: 22946 - RNA, 20 nt, Human
uggcaccgccggauucuccu

SEQ ID NO: 22947 - RNA, 24 nt, Human
uauggaaucuugcggguucccgag

SEQ ID NO: 22948 - RNA, 24 nt, Human
agggguguuggcuacuccgccagc

SEQ ID NO: 22949 - RNA, 24 nt, Human
uaggaugcaggccuugccagaacu

SEQ ID NO: 22950 - RNA, 24 nt, Human
uaugcugcagcauaugguacuggc

SEQ ID NO: 22951 - RNA, 24 nt, Human
auugauggucagccaggugccuuc

SEQ ID NO: 22952 - RNA, 24 nt, Human
uuaaagggccgucauuuccauuag

SEQ ID NO: 22953 - RNA, 21 nt, Human
uucauuguucacuucuaaacc

SEQ ID NO: 22954 - RNA, 21 nt, Human
uuuucaggguuuuaaacacua

SEQ ID NO: 22955 - RNA, 24 nt, Human
ccccuguagcccaggacuaugcug

SEQ ID NO: 22956 - RNA, 24 nt, Human
ugcccagugaccugggggagccug

SEQ ID NO: 22957 - RNA, 24 nt, Human
uacaaagucauuguuugaacuugg

SEQ ID NO: 22958 - RNA, 24 nt, Human
ugugaugauuugaauuacaaaucc

SEQ ID NO: 22959 - RNA, 24 nt, Human
ugcaaggugaggacaggccccgaa

SEQ ID NO: 22960 - RNA, 20 nt, Human
uagaacaggaaggacucaug

SEQ ID NO: 22961 - RNA, 24 nt, Human
uagcaacagaaaugggccccacag

SEQ ID NO: 22962 - RNA, 24 nt, Human
ucacugagauccagaaaguagcaa

SEQ ID NO: 22963 - RNA, 24 nt, Human
uacacuguggacuggagaaaguca

SEQ ID NO: 22964 - RNA, 24 nt, Human
caagaacaaaauugcacaaggaaa

SEQ ID NO: 22965 - RNA, 24 nt, Human
ugguguugcauuagugaagauacu

SEQ ID NO: 22966 - RNA, 24 nt, Human
uaaaugaacauuugcaauuuuaaa

SEQ ID NO: 22967 - RNA, 24 nt, Human
caaaagcuuuuuauuccuccugcu

SEQ ID NO: 22968 - RNA, 24 nt, Human
uuaauccaagccugauuguacuag

SEQ ID NO: 22969 - RNA, 24 nt, Human
uauuguacacggucaucuguugaa

SEQ ID NO: 22970 - RNA, 24 nt, Human
ugaauggacggguucaggccugau

SEQ ID NO: 22971 - RNA, 24 nt, Human
uuaacuuauaagccucaacuucac

SEQ ID NO: 22972 - RNA, 24 nt, Human
ugcauuguuaucauuaaccagucu

SEQ ID NO: 22973 - RNA, 24 nt, Human
uaaugggucucaaaauucugugac

SEQ ID NO: 22974 - RNA, 24 nt, Human
uauuagggauaauauucauuuagc

SEQ ID NO: 22975 - RNA, 24 nt, Human
aggcaaaauugcagaauaacaaag

SEQ ID NO: 22976 - RNA, 24 nt, Human
uugcuggagcuggccuggugucuc

SEQ ID NO: 22977 - RNA, 24 nt, Human
uaauuuucagcuucgaagguggag

SEQ ID NO: 22978 - RNA, 24 nt, Human
uguugguuuuggccuugcaagagc

SEQ ID NO: 22979 - RNA, 24 nt, Human
ugggcucuuuaaaaaucaaaggua

SEQ ID NO: 22980 - RNA, 24 nt, Human
ggagcucagccagccguggugggg

SEQ ID NO: 22981 - RNA, 24 nt, Human
ggaguccugggggaggggcauggc

SEQ ID NO: 22982 - RNA, 24 nt, Human
uaauacagaguuauccuuuauuuu

SEQ ID NO: 22983 - RNA, 21 nt, Human
uaccccauaaguuuguuucca

SEQ ID NO: 22984 - RNA, 24 nt, Human
aauagugcugauaaaugccuugac

SEQ ID NO: 22985 - RNA, 24 nt, Human
uuuuuagcaacaaaauaauaggaa

SEQ ID NO: 22986 - RNA, 24 nt, Human
uggcucaggguggcuggcgcucac

SEQ ID NO: 22987 - RNA, 24 nt, Human
cuggagccucuguaccugugccca

SEQ ID NO: 22988 - RNA, 20 nt, Human
uuuggcauuuuuuggaccau

SEQ ID NO: 22989 - RNA, 24 nt, Human
uugaugaccuuggaugcuguaaag

SEQ ID NO: 22990 - RNA, 24 nt, Human
uauguaauauuuggguugaucuau

SEQ ID NO: 22991 - RNA, 24 nt, Human
acaguaacuaaaggcagaucuucu

SEQ ID NO: 22992 - RNA, 24 nt, Human
uaggucccaguugucaauuuuuuu

SEQ ID NO: 22993 - RNA, 21 nt, Human
ucuuguggacgcaagcuuccu

SEQ ID NO: 22994 - RNA, 24 nt, Human
uggcagcccuaccucugagauuuu

SEQ ID NO: 22995 - RNA, 24 nt, Human
uacagagugagacuccgucucaaa

SEQ ID NO: 22996 - RNA, 24 nt, Human
ugagaugggaaagggcuccuucaa

SEQ ID NO: 22997 - RNA, 24 nt, Human
cuuggucaagggauuggaagucac

SEQ ID NO: 22998 - RNA, 18 nt, Human
caagggccgcaaugaccu

SEQ ID NO: 22999 - RNA, 24 nt, Human
ugcccgagcccgacgcuaugucca

SEQ ID NO: 23000 - RNA, 24 nt, Human
acgaggcugggaauccuggagaac

SEQ ID NO: 23001 - RNA, 24 nt, Human
ucgcccagcgggagggggccaagu

SEQ ID NO: 23002 - RNA, 24 nt, Human
uuaaugguagauuugagcguauga

SEQ ID NO: 23003 - RNA, 24 nt, Human
cuggucugagccauaaagacugua

SEQ ID NO: 23004 - RNA, 24 nt, Human
uuugccuaucuggggcgccuggcu

SEQ ID NO: 23005 - RNA, 24 nt, Human
ugcguacauccacagguucacuaa

SEQ ID NO: 23006 - RNA, 24 nt, Human
ucacagggcuggugcggacgaacg

SEQ ID NO: 23007 - RNA, 24 nt, Human
ugacaauaggauaaaguuuuuuug

SEQ ID NO: 23008 - RNA, 24 nt, Human
uggggaccacguccugguggcugu

SEQ ID NO: 23009 - RNA, 24 nt, Human
cuugccgugcacggcugcaaguag

SEQ ID NO: 23010 - RNA, 24 nt, Human
uuggagcaaaguucacgaaggcca

SEQ ID NO: 23011 - RNA, 24 nt, Human
acucgguucaccuuugacaccugg

SEQ ID NO: 23012 - RNA, 24 nt, Human
uauugcucagacggucucacgaua

SEQ ID NO: 23013 - RNA, 24 nt, Human
agccgcugcggcccucacaguccg

SEQ ID NO: 23014 - RNA, 24 nt, Human
uucaggguaacaggaggaaaaaug

SEQ ID NO: 23015 - RNA, 24 nt, Human
uaaaauauauucauuucucaauuu

SEQ ID NO: 23016 - RNA, 24 nt, Human
cugugcugccccuuucacaucaaa

SEQ ID NO: 23017 - RNA, 24 nt, Human
ugcuccggauguucgacgcccagg

SEQ ID NO: 23018 - RNA, 24 nt, Human
aggcagcuucggacaggugugguc

SEQ ID NO: 23019 - RNA, 24 nt, Human
ucaacauugucgucauuggacacg

SEQ ID NO: 23020 - RNA, 24 nt, Human
aggaagucagcacuuacauuacga

SEQ ID NO: 23021 - RNA, 24 nt, Human
auggugccuguguccucgaugguc

SEQ ID NO: 23022 - RNA, 24 nt, Human
uuagaacaccagauacaaagcuaa

SEQ ID NO: 23023 - RNA, 24 nt, Human
uuaaaaaaccuuguguagauagga

SEQ ID NO: 23024 - RNA, 23 nt, Human
gaacaguguggccugaugaaacu

SEQ ID NO: 23025 - RNA, 24 nt, Human
acagugcagaaacuuacuuuugaa

SEQ ID NO: 23026 - RNA, 24 nt, Human
aacaaguuuaacugguuuguucca

SEQ ID NO: 23027 - RNA, 24 nt, Human
ugaaggaaaaaauuuugauguaac

SEQ ID NO: 23028 - RNA, 24 nt, Human
ucaguaauaauucauuauucguuu

SEQ ID NO: 23029 - RNA, 24 nt, Human
cgaggaacaucgagccaaggcacc

SEQ ID NO: 23030 - RNA, 24 nt, Human
aaaagccuuucaggaaguuccacc

SEQ ID NO: 23031 - RNA, 24 nt, Human
acagcugggccagacugaguacau

SEQ ID NO: 23032 - RNA, 24 nt, Human
uucccggggcccggggcggucaac

SEQ ID NO: 23033 - RNA, 24 nt, Human
uggcgugauaccaacgagucaaca

SEQ ID NO: 23034 - RNA, 24 nt, Human
ugagagcaagggaacagggcggau

SEQ ID NO: 23035 - RNA, 24 nt, Human
gacacauugacgucagguguacca

SEQ ID NO: 23036 - RNA, 24 nt, Human
ugcaacaauucacccgugcaugcc

SEQ ID NO: 23037 - RNA, 24 nt, Human
ugcugugugcucuuugaaaggaau

SEQ ID NO: 23038 - RNA, 20 nt, Human
uugguccaguuuuacgaaca

SEQ ID NO: 23039 - RNA, 24 nt, Human
gagugcucgccgccgugacguucg

SEQ ID NO: 23040 - RNA, 24 nt, Human
cagcacaguccuuuuuucuguucc

SEQ ID NO: 23041 - RNA, 24 nt, Human
ugccugcugcuggccuauaagauc

SEQ ID NO: 23042 - RNA, 21 nt, Human
acccugggggggguuuugggg

SEQ ID NO: 23043 - RNA, 24 nt, Human
ugaguagggguccaaaccauaggc

SEQ ID NO: 23044 - RNA, 24 nt, Human
uuugauagacaugcaacgugaaau

SEQ ID NO: 23045 - RNA, 24 nt, Human
uaccaagaaugcauaauagucuca

SEQ ID NO: 23046 - RNA, 24 nt, Human
uccacaguccugcauuuacugccu

SEQ ID NO: 23047 - RNA, 24 nt, Human
uauuugguuuugggcuuuagcugg

SEQ ID NO: 23048 - RNA, 24 nt, Human
uuaaaacaguagagcuagcaauga

SEQ ID NO: 23049 - RNA, 24 nt, Human
ugcccuguugcucuacauggccuu

SEQ ID NO: 23050 - RNA, 24 nt, Human
uguggucggguguuugcuggugcc

SEQ ID NO: 23051 - RNA, 24 nt, Human
ucucuuauaaaugacuuuugcaca

SEQ ID NO: 23052 - RNA, 24 nt, Human
uguguuggacaggugauuugcaag

SEQ ID NO: 23053 - RNA, 24 nt, Human
uggcggcggcagcggcggugacug

SEQ ID NO: 23054 - RNA, 22 nt, Human
uuucaagggauggaaagucacc

SEQ ID NO: 23055 - RNA, 24 nt, Human
ucugaucuauaaaugcgguggcau

SEQ ID NO: 23056 - RNA, 24 nt, Human
uauuuaauagagagacgccagcau

SEQ ID NO: 23057 - RNA, 24 nt, Human
uaacugaauaccacucuguaauug

SEQ ID NO: 23058 - RNA, 24 nt, Human
ucgguggugauggugcaucccgag

SEQ ID NO: 23059 - RNA, 24 nt, Human
uggggaccccaaggagagagucag

SEQ ID NO: 23060 - RNA, 24 nt, Human
cgacuccgauacaaccguaccuac

SEQ ID NO: 23061 - RNA, 24 nt, Human
ucugaucuauaaaugcgguggcau

SEQ ID NO: 23062 - RNA, 18 nt, Human
caagggccgcaaugaccu

SEQ ID NO: 23063 - RNA, 19 nt, Human
ucccaacgaucauguuaau

SEQ ID NO: 23064 - RNA, 24 nt, Human
aaugauacuuuucccacagcaaug

SEQ ID NO: 23065 - RNA, 24 nt, Human
cucccggcuuggguggcgcggccg

SEQ ID NO: 23066 - RNA, 24 nt, Human
ucugaucuauaaaugcgguggcau

SEQ ID NO: 23067 - RNA, 24 nt, Human
cacccguaucauuuauggaggcuc

SEQ ID NO: 23068 - RNA, 24 nt, Human
cacccuguaaugguugggaccagg

SEQ ID NO: 23069 - RNA, 24 nt, Human
uggcauuuagaauuuuguuccauu

SEQ ID NO: 23070 - RNA, 24 nt, Human
uccaccacuacuggccaucugauc

SEQ ID NO: 23071 - RNA, 24 nt, Human
ugacuacaaaggaaaauauguugu

SEQ ID NO: 23072 - RNA, 24 nt, Human
uccaaaguauauucucuuuuauug

SEQ ID NO: 23073 - RNA, 24 nt, Human
ugcgguggcagcucugucuggccg

SEQ ID NO: 23074 - RNA, 24 nt, Human
ucuacauugcauugacugggauuc

SEQ ID NO: 23075 - RNA, 24 nt, Human
uuccucagggccuggggaucuggc

SEQ ID NO: 23076 - RNA, 24 nt, Human
aagaagcuggugaucguuggggau

SEQ ID NO: 23077 - RNA, 24 nt, Human
uuaggacggaacagauccggggac

SEQ ID NO: 23078 - RNA, 24 nt, Human
agagguugauaggacugcuugggu

SEQ ID NO: 23079 - RNA, 24 nt, Human
aggcuuuaagaauuuuauccuaau

SEQ ID NO: 23080 - RNA, 24 nt, Human
ugaaucgaaugcgugggggaaauu

SEQ ID NO: 23081 - RNA, 22 nt, Human
uagacugugaaugauaaguuca

SEQ ID NO: 23082 - RNA, 19 nt, Human
cgagaggaggcugcugugu

SEQ ID NO: 23083 - RNA, 24 nt, Human
ugucgugacuacacagaguuacug

SEQ ID NO: 23084 - RNA, 24 nt, Human
uuuacagaggaacuguaguucaca

SEQ ID NO: 23085 - RNA, 24 nt, Human
uaaaaagaagugugaucuguuuuu

SEQ ID NO: 23086 - RNA, 23 nt, Human
uggcaaucaacuuaguagaaguc

SEQ ID NO: 23087 - RNA, 24 nt, Human
uugguuccucccggggcccccacu

SEQ ID NO: 23088 - RNA, 24 nt, Human
aggcaggagguggaaaccccaggg

SEQ ID NO: 23089 - RNA, 24 nt, Human
ucucccauucugagaaucuggguu

SEQ ID NO: 23090 - RNA, 21 nt, Human
uggggugucauuggcuugaaa

SEQ ID NO: 23091 - RNA, 24 nt, Human
uauuugaaggcagaaaacacccua

SEQ ID NO: 23092 - RNA, 24 nt, Human
ccccggguuucaauggcguugccc

SEQ ID NO: 23093 - RNA, 24 nt, Human
gacgaugugcggcggaugaacaag

SEQ ID NO: 23094 - RNA, 24 nt, Human
uuugaaagcuucagcgugccuuag

SEQ ID NO: 23095 - RNA, 22 nt, Human
uaacagguuccauuuuaauguc

SEQ ID NO: 23096 - RNA, 24 nt, Human
ugguaugguccugggaaauuaaac

SEQ ID NO: 23097 - RNA, 24 nt, Human
ucuaucacugucaucauaaacugg

SEQ ID NO: 23098 - RNA, 24 nt, Human
ugccauugucaggaaaggauuuag

SEQ ID NO: 23099 - RNA, 24 nt, Human
uuccugaauagcuaggaccacagg

SEQ ID NO: 23100 - RNA, 24 nt, Human
ugaguuggaauuaaaaggccccuc

SEQ ID NO: 23101 - RNA, 24 nt, Human
uuuaaaaguugauagaauaacugu

SEQ ID NO: 23102 - RNA, 24 nt, Human
gauuugaaacuuuuuaauuaagga

SEQ ID NO: 23103 - RNA, 24 nt, Human
uuggcagugagccgagaucagccc

SEQ ID NO: 23104 - RNA, 21 nt, Human
uuccucaggccucaggaccua

SEQ ID NO: 23105 - RNA, 24 nt, Human
acagcccggaacacuggcaucauc

SEQ ID NO: 23106 - RNA, 24 nt, Human
uaccaugcggagaccaucaagaau

SEQ ID NO: 23107 - RNA, 24 nt, Human
uggcaaauagucauuuuacaauaa

SEQ ID NO: 23108 - RNA, 24 nt, Human
ucuuucagagcuaccccuaaaggc

SEQ ID NO: 23109 - RNA, 24 nt, Human
augaucccauugacuaguuuaaau

SEQ ID NO: 23110 - RNA, 24 nt, Human
ugaaagguacaggcaaguuauuuu

SEQ ID NO: 23111 - RNA, 24 nt, Human
uguuaugucucuuuagucucauuu

SEQ ID NO: 23112 - RNA, 24 nt, Human
cacuuuguccuucuuagguauauc

SEQ ID NO: 23113 - RNA, 24 nt, Human
auucaaguuauaaauuuuucacag

SEQ ID NO: 23114 - RNA, 24 nt, Human
gaacuuguaccauggacuucagac

SEQ ID NO: 23115 - RNA, 24 nt, Human
uuaaauacaacuacaauaugagcg

SEQ ID NO: 23116 - RNA, 24 nt, Human
aggaggaggagcgccgcuacuacc

SEQ ID NO: 23117 - RNA, 24 nt, Human
uggguguaauuaggugaaacacag

SEQ ID NO: 23118 - RNA, 24 nt, Human
uccaugugcuucccuaggcugagc

SEQ ID NO: 23119 - RNA, 24 nt, Human
ucacgaugaaauugaaccugguuu

SEQ ID NO: 23120 - RNA, 24 nt, Human
gagucaguuuuagauuggagcugg

SEQ ID NO: 23121 - RNA, 24 nt, Human
ugagaaagaaauucagauauggga

SEQ ID NO: 23122 - RNA, 24 nt, Human
uugaaaaguaugaagauuaaugaa

SEQ ID NO: 23123 - RNA, 24 nt, Human
gagucaguuuuagauuggagcugg

SEQ ID NO: 23124 - RNA, 24 nt, Human
ugagaaagaaauucagauauggga

SEQ ID NO: 23125 - RNA, 24 nt, Human
uugaaaaguaugaagauuaaugaa

SEQ ID NO: 23126 - RNA, 24 nt, Human
ugagaaagaaauucagauauggga

SEQ ID NO: 23127 - RNA, 24 nt, Human
uugaaaaguaugaagauuaaugaa

SEQ ID NO: 23128 - RNA, 18 nt, Human
uaagucuuggccguuccu

SEQ ID NO: 23129 - RNA, 24 nt, Human
ucuuacagccucugucucuuuauu

SEQ ID NO: 23130 - RNA, 24 nt, Human
uggaagugucuauacagaugugug

SEQ ID NO: 23131 - RNA, 24 nt, Human
ugagaaagaaauucagauauggga

SEQ ID NO: 23132 - RNA, 24 nt, Human
uugaaaaguaugaagauuaaugaa

SEQ ID NO: 23133 - RNA, 17 nt, Human
caggucccguggccgug

SEQ ID NO: 23134 - RNA, 23 nt, Human
caucacagcggcagccggucucc

SEQ ID NO: 23135 - RNA, 24 nt, Human
uguaaauacagaacuaggcacauc

SEQ ID NO: 23136 - RNA, 22 nt, Human
uucauggaauaugugcauuuuc

SEQ ID NO: 23137 - RNA, 24 nt, Human
uucgacuuuaauaagauguaacuc

SEQ ID NO: 23138 - RNA, 22 nt, Human
ugagucuauagaggcaguaggc

SEQ ID NO: 23139 - RNA, 24 nt, Human
ugcuuuguuuaccuacucaagccu

SEQ ID NO: 23140 - RNA, 24 nt, Human
ugggcaguauaauugauuugcagg

SEQ ID NO: 23141 - RNA, 24 nt, Human
uucccauuuugguccucauaauca

SEQ ID NO: 23142 - RNA, 24 nt, Human
ucgcugcguguucauccucucgag

SEQ ID NO: 23143 - RNA, 24 nt, Human
uggaagauggauaugaauuuuuug

SEQ ID NO: 23144 - RNA, 24 nt, Human
ucucugauauaagauacaguccuc

SEQ ID NO: 23145 - RNA, 24 nt, Human
uuaaggcaauuucaaaaaugcucc

SEQ ID NO: 23146 - RNA, 24 nt, Human
ucagugggugcuuggcugugcugg

SEQ ID NO: 23147 - RNA, 24 nt, Human
uacuuuucuuaaguuguuuaauua

SEQ ID NO: 23148 - RNA, 24 nt, Human
caacugaauuacccgguagacuga

SEQ ID NO: 23149 - RNA, 24 nt, Human
aagcuuuugccaaugaucuuuaau

SEQ ID NO: 23150 - RNA, 20 nt, Human
uugguucuguuucucuggag

SEQ ID NO: 23151 - RNA, 24 nt, Human
ugaauacacaucucugucagugug

SEQ ID NO: 23152 - RNA, 24 nt, Human
uuuuuagugcacuuaauauuagcu

SEQ ID NO: 23153 - RNA, 24 nt, Human
uaugugaauuugaguuugcuguuu

SEQ ID NO: 23154 - RNA, 23 nt, Human
ugggagccaggaauggggcuggg

SEQ ID NO: 23155 - RNA, 24 nt, Human
ugcugaagucugaacuugggccuc

SEQ ID NO: 23156 - RNA, 24 nt, Human
aggaaggacuaggcuacagaucag

SEQ ID NO: 23157 - RNA, 24 nt, Human
auuucauucacuggggaggaacaa

SEQ ID NO: 23158 - RNA, 23 nt, Human
uaaggcgaggcggaauuaaaccc

SEQ ID NO: 23159 - RNA, 24 nt, Human
uagcaaaucgagucuuaaauaauc

SEQ ID NO: 23160 - RNA, 24 nt, Human
ugagaaugaccccaagaccuuuga

SEQ ID NO: 23161 - RNA, 24 nt, Human
ugugaacgggaagaaggugcugca

SEQ ID NO: 23162 - RNA, 24 nt, Human
cuuccaaucugaugggcauguuug

SEQ ID NO: 23163 - RNA, 22 nt, Human
guggagggcagcuuugucuaca

SEQ ID NO: 23164 - RNA, 24 nt, Human
uuuaagcauuaucuugcaaaguag

SEQ ID NO: 23165 - RNA, 24 nt, Human
gagcagcaagacugaaacuguuga

SEQ ID NO: 23166 - RNA, 24 nt, Human
aagaagaugaauacaaagcuuucu

SEQ ID NO: 23167 - RNA, 22 nt, Human
caccgcgccccuuuuccagccc

SEQ ID NO: 23168 - RNA, 24 nt, Human
uccugcaucuuuaccgucucaggg

SEQ ID NO: 23169 - RNA, 24 nt, Human
ugcugcugcccaaggaccgcggag

SEQ ID NO: 23170 - RNA, 24 nt, Human
uguucuggagcuguuggacaaaua

SEQ ID NO: 23171 - RNA, 24 nt, Human
uugaucuugaagaaacugggcgug

SEQ ID NO: 23172 - RNA, 24 nt, Human
aggaaggagauauagugaagagga

SEQ ID NO: 23173 - RNA, 24 nt, Human
guagaguuuucuucaggcuuaaag

SEQ ID NO: 23174 - RNA, 24 nt, Human
uaagucuugaggaccuugcuugag

SEQ ID NO: 23175 - RNA, 24 nt, Human
acugcaccacuguacuacagcuug

SEQ ID NO: 23176 - RNA, 24 nt, Human
ugaggaaaacugggauaaugaccc

SEQ ID NO: 23177 - RNA, 22 nt, Human
uccgugcgcguugcugcggccg

SEQ ID NO: 23178 - RNA, 24 nt, Human
uugaucuugaagaaacugggcgug

SEQ ID NO: 23179 - RNA, 24 nt, Human
aggaaggagauauagugaagagga

SEQ ID NO: 23180 - RNA, 24 nt, Human
guagaguuuucuucaggcuuaaag

SEQ ID NO: 23181 - RNA, 24 nt, Human
cagcugcagauucugcuguucgac

SEQ ID NO: 23182 - RNA, 24 nt, Human
ucucuguggacaugaggauuggau

SEQ ID NO: 23183 - RNA, 24 nt, Human
uuagcauguggcaaugaugauugc

SEQ ID NO: 23184 - RNA, 24 nt, Human
acuuggagaaaugggauuugaaau

SEQ ID NO: 23185 - RNA, 22 nt, Human
uggcaaggaagaaaguguuccg

SEQ ID NO: 23186 - RNA, 24 nt, Human
ucacucaauuuaucaguaauggag

SEQ ID NO: 23187 - RNA, 19 nt, Human
ucagaagaggcuggccaca

SEQ ID NO: 23188 - RNA, 24 nt, Human
accaagguguccaaaugaggugac

SEQ ID NO: 23189 - RNA, 24 nt, Human
uauggcaagucacuuugacagaca

SEQ ID NO: 23190 - RNA, 24 nt, Human
ugagaauggcaaaauuagucgccu

SEQ ID NO: 23191 - RNA, 24 nt, Human
uacaccacucccaagaagaauaag

SEQ ID NO: 23192 - RNA, 24 nt, Human
agugacagcgacggcucccagagu

SEQ ID NO: 23193 - RNA, 24 nt, Human
ugagaugggaaagggcuccuucaa

SEQ ID NO: 23194 - RNA, 24 nt, Human
uugaucuugaagaaacugggcgug

SEQ ID NO: 23195 - RNA, 24 nt, Human
uuccaguuggugaggagcuguugg

SEQ ID NO: 23196 - RNA, 24 nt, Human
aggaaggagauauagugaagagga

SEQ ID NO: 23197 - RNA, 24 nt, Human
guagaguuuucuucaggcuuaaag

SEQ ID NO: 23198 - RNA, 24 nt, Human
aggaaggagauauagugaagagga

SEQ ID NO: 23199 - RNA, 22 nt, Human
uccgugcgcguugcugcggccg

SEQ ID NO: 23200 - RNA, 24 nt, Human
guagaguuuucuucaggcuuaaag

SEQ ID NO: 23201 - RNA, 22 nt, Human
uccgugcgcguugcugcggccg

SEQ ID NO: 23202 - RNA, 24 nt, Human
aggaaggagauauagugaagagga

SEQ ID NO: 23203 - RNA, 24 nt, Human
uaauagaaugggcauguauuguaa

SEQ ID NO: 23204 - RNA, 24 nt, Human
uauuaagcacuucugucagucuuu

SEQ ID NO: 23205 - RNA, 22 nt, Human
uccgugcgcguugcugcggccg

SEQ ID NO: 23206 - RNA, 24 nt, Human
uugaucuugaagaaacugggcgug

SEQ ID NO: 23207 - RNA, 24 nt, Human
aggaaggagauauagugaagagga

SEQ ID NO: 23208 - RNA, 24 nt, Human
aggaaggagauauagugaagagga

SEQ ID NO: 23209 - RNA, 24 nt, Human
uugaucuugaagaaacugggcgug

SEQ ID NO: 23210 - RNA, 24 nt, Human
guagaguuuucuucaggcuuaaag

SEQ ID NO: 23211 - RNA, 24 nt, Human
aggaaggagauauagugaagagga

SEQ ID NO: 23212 - RNA, 24 nt, Human
guagaguuuucuucaggcuuaaag

SEQ ID NO: 23213 - RNA, 24 nt, Human
aggaaggagauauagugaagagga

SEQ ID NO: 23214 - RNA, 22 nt, Human
uccgugcgcguugcugcggccg

SEQ ID NO: 23215 - RNA, 24 nt, Human
uugaucuugaagaaacugggcgug

SEQ ID NO: 23216 - RNA, 24 nt, Human
aggaaggagauauagugaagagga

SEQ ID NO: 23217 - RNA, 24 nt, Human
guagaguuuucuucaggcuuaaag

SEQ ID NO: 23218 - RNA, 22 nt, Human
uccgugcgcguugcugcggccg

SEQ ID NO: 23219 - RNA, 24 nt, Human
uugaucuugaagaaacugggcgug

SEQ ID NO: 23220 - RNA, 24 nt, Human
guagaguuuucuucaggcuuaaag

SEQ ID NO: 23221 - RNA, 24 nt, Human
guagaguuuucuucaggcuuaaag

SEQ ID NO: 23222 - RNA, 22 nt, Human
uccgugcgcguugcugcggccg

SEQ ID NO: 23223 - RNA, 24 nt, Human
uugaucuugaagaaacugggcgug

SEQ ID NO: 23224 - RNA, 24 nt, Human
aggaaggagauauagugaagagga

SEQ ID NO: 23225 - RNA, 22 nt, Human
uccgugcgcguugcugcggccg

SEQ ID NO: 23226 - RNA, 24 nt, Human
uugaucuugaagaaacugggcgug

SEQ ID NO: 23227 - RNA, 24 nt, Human
aggaaggagauauagugaagagga

SEQ ID NO: 23228 - RNA, 24 nt, Human
guagaguuuucuucaggcuuaaag

SEQ ID NO: 23229 - RNA, 24 nt, Human
uugaucuugaagaaacugggcgug

SEQ ID NO: 23230 - RNA, 24 nt, Human
aggaaggagauauagugaagagga

SEQ ID NO: 23231 - RNA, 24 nt, Human
guagaguuuucuucaggcuuaaag

SEQ ID NO: 23232 - RNA, 24 nt, Human
uugaucuugaagaaacugggcgug

SEQ ID NO: 23233 - RNA, 24 nt, Human
aggaaggagauauagugaagagga

SEQ ID NO: 23234 - RNA, 24 nt, Human
guagaguuuucuucaggcuuaaag

SEQ ID NO: 23235 - RNA, 22 nt, Human
uccgugcgcguugcugcggccg

SEQ ID NO: 23236 - RNA, 24 nt, Human
uugaucuugaagaaacugggcgug

SEQ ID NO: 23237 - RNA, 24 nt, Human
aggaaggagauauagugaagagga

SEQ ID NO: 23238 - RNA, 24 nt, Human
guagaguuuucuucaggcuuaaag

SEQ ID NO: 23239 - RNA, 22 nt, Human
uccgugcgcguugcugcggccg

SEQ ID NO: 23240 - RNA, 24 nt, Human
uugaucuugaagaaacugggcgug

SEQ ID NO: 23241 - RNA, 24 nt, Human
uuccaguuggugaggagcuguugg

SEQ ID NO: 23242 - RNA, 24 nt, Human
aggaaggagauauagugaagagga

SEQ ID NO: 23243 - RNA, 24 nt, Human
ucaguaaugcguucaggaguccac

SEQ ID NO: 23244 - RNA, 24 nt, Human
uuuuucuuaaccuuauugcaaggg

SEQ ID NO: 23245 - RNA, 18 nt, Human
uaccaucgcacguugguc

SEQ ID NO: 23246 - RNA, 24 nt, Human
aucaagauccuuacguuacucuga

SEQ ID NO: 23247 - RNA, 24 nt, Human
aggaaggagauauagugaagagga

SEQ ID NO: 23248 - RNA, 21 nt, Human
uaccucuguugaucuugaaga

SEQ ID NO: 23249 - RNA, 24 nt, Human
cuuuuaauaaguuuaauguucuuc

SEQ ID NO: 23250 - RNA, 24 nt, Human
ugccagaauuugauaccccugggc

SEQ ID NO: 23251 - RNA, 24 nt, Human
aggaaggagauauagugaagagga

SEQ ID NO: 23252 - RNA, 24 nt, Human
guagaguuuucuucaggcuuaaag

SEQ ID NO: 23253 - RNA, 24 nt, Human
uugaucuugaagaaacugggcgug

SEQ ID NO: 23254 - RNA, 24 nt, Human
aggaaggagauauagugaagagga

SEQ ID NO: 23255 - RNA, 22 nt, Human
uccgugcgcguugcugcggccg

SEQ ID NO: 23256 - RNA, 24 nt, Human
uugaucuugaagaaacugggcgug

SEQ ID NO: 23257 - RNA, 24 nt, Human
aggaaggagauauagugaagagga

SEQ ID NO: 23258 - RNA, 24 nt, Human
guagaguuuucuucaggcuuaaag

SEQ ID NO: 23259 - RNA, 24 nt, Human
ugaagcagaagcagauucggcgcg

SEQ ID NO: 23260 - RNA, 24 nt, Human
accugggugcagccgcaguccaag

SEQ ID NO: 23261 - RNA, 24 nt, Human
aggaaggagauauagugaagagga

SEQ ID NO: 23262 - RNA, 24 nt, Human
uagaacucagcccggcgcuccucu

SEQ ID NO: 23263 - RNA, 24 nt, Human
auggaucuuacuguccagagcacu

SEQ ID NO: 23264 - RNA, 20 nt, Human
uugaucuugaagaaacuggg

SEQ ID NO: 23265 - RNA, 22 nt, Human
uccgugcgcguugcugcggccg

SEQ ID NO: 23266 - RNA, 24 nt, Human
aggaaggagauauagugaagagga

SEQ ID NO: 23267 - RNA, 24 nt, Human
guagaguuuucuucaggcuuaaag

SEQ ID NO: 23268 - RNA, 24 nt, Human
uaagacuuggaagccacagaaaug

SEQ ID NO: 23269 - RNA, 24 nt, Human
uuaggucaaagaggcugcuuggag

SEQ ID NO: 23270 - RNA, 24 nt, Human
uccugugggugggacaagcugggc

SEQ ID NO: 23271 - RNA, 24 nt, Human
ugggauggaacccugcgccucugg

SEQ ID NO: 23272 - RNA, 24 nt, Human
cgcugcugcugguggcgcuacugg

SEQ ID NO: 23273 - RNA, 24 nt, Human
ugucuggagcuugaagaagugggu

SEQ ID NO: 23274 - RNA, 24 nt, Human
uagaagguuaggggcauuuguuga

SEQ ID NO: 23275 - RNA, 24 nt, Human
uauuuuacaaaaaaacaacugaac

SEQ ID NO: 23276 - RNA, 24 nt, Human
ugcgcuggacgcccgcuucuccug

SEQ ID NO: 23277 - RNA, 24 nt, Human
uugcuccaaggcugccacuuucuc

SEQ ID NO: 23278 - RNA, 24 nt, Human
uggaaggcgguguugacccugggg

SEQ ID NO: 23279 - RNA, 24 nt, Human
auggagcugcagagagcuccucca

SEQ ID NO: 23280 - RNA, 19 nt, Human
ugaccaguauucucauuuu

SEQ ID NO: 23281 - RNA, 24 nt, Human
agcggcucaugccuauaaucccag

SEQ ID NO: 23282 - RNA, 24 nt, Human
uuaacacuuguuuaaauuuuuuua

SEQ ID NO: 23283 - RNA, 21 nt, Human
uagggcucucggccgcgucca

SEQ ID NO: 23284 - RNA, 24 nt, Human
cacagcaacuucacucuacacacu

SEQ ID NO: 23285 - RNA, 24 nt, Human
cgccgcagugucuacuccggauca

SEQ ID NO: 23286 - RNA, 24 nt, Human
augcauugaucacaggcccauuug

SEQ ID NO: 23287 - RNA, 24 nt, Human
uaauucuuuuaauuugguuaucug

SEQ ID NO: 23288 - RNA, 24 nt, Human
cagcccgccagcugggccugggcu

SEQ ID NO: 23289 - RNA, 24 nt, Human
aaugguacagcaguuacaagagga

SEQ ID NO: 23290 - RNA, 24 nt, Human
gcccuuguggauacuuggaacugu

SEQ ID NO: 23291 - RNA, 24 nt, Human
ucaguguaaaucuuuaugauagau

SEQ ID NO: 23292 - RNA, 24 nt, Human
ucaggccagcguccuccuccacag

SEQ ID NO: 23293 - RNA, 24 nt, Human
uuucacacugaggacuaaucugcu

SEQ ID NO: 23294 - RNA, 24 nt, Human
uauaauguggauuguggcccugug

SEQ ID NO: 23295 - RNA, 20 nt, Human
ugaauggagacuaacgccca

SEQ ID NO: 23296 - RNA, 24 nt, Human
aaggugcccuuaaauguguugaau

SEQ ID NO: 23297 - RNA, 24 nt, Human
ugaauguuuauguguaauggcuaa

SEQ ID NO: 23298 - RNA, 24 nt, Human
uuagucacaugagccucuuggggu

SEQ ID NO: 23299 - RNA, 24 nt, Human
agugcaaagcgagacucugucuca

SEQ ID NO: 23300 - RNA, 24 nt, Human
ucucaucgcugcucaguacagcgg

SEQ ID NO: 23301 - RNA, 24 nt, Human
ccuggcacggcgguuccugggggg

SEQ ID NO: 23302 - RNA, 21 nt, Human
ugggaggggcugaauguggug

SEQ ID NO: 23303 - RNA, 24 nt, Human
aagcguuuugagcagaaaggauuc

SEQ ID NO: 23304 - RNA, 24 nt, Human
agcugguggugauugcacaaccga

SEQ ID NO: 23305 - RNA, 24 nt, Human
acaaagcaagagaagaagcagaga

SEQ ID NO: 23306 - RNA, 21 nt, Human
cauuggacaggacauccagcc

SEQ ID NO: 23307 - RNA, 24 nt, Human
uucaucuuauuaccacuuagcagc

SEQ ID NO: 23308 - RNA, 24 nt, Human
gggaauggccugcggugucgacag

SEQ ID NO: 23309 - RNA, 24 nt, Human
ucccuuagaaacuugggccaaacc

SEQ ID NO: 23310 - RNA, 24 nt, Human
aaguguccggcuccugggucucac

SEQ ID NO: 23311 - RNA, 24 nt, Human
uauaacaguauaguaaguuuuaga

SEQ ID NO: 23312 - RNA, 24 nt, Human
ucugugacuuccuuggagacucac

SEQ ID NO: 23313 - RNA, 24 nt, Human
ugcaaaaccagcguggcggccgcg

SEQ ID NO: 23314 - RNA, 24 nt, Human
acgccaugaaagcugccuuggccc

SEQ ID NO: 23315 - RNA, 24 nt, Human
cagcauuggugaaaccccgucucu

SEQ ID NO: 23316 - RNA, 24 nt, Human
uuuuguuuguuuguuuuaacuuuu

SEQ ID NO: 23317 - RNA, 24 nt, Human
aaaggaacuguuaaacugaaaaag

SEQ ID NO: 23318 - RNA, 24 nt, Human
agguucccccacguuccccccacc

SEQ ID NO: 23319 - RNA, 24 nt, Human
ccugggguuuccaccuccugccuc

SEQ ID NO: 23320 - RNA, 24 nt, Human
uugacgugccaucgaggacugcug

SEQ ID NO: 23321 - RNA, 20 nt, Human
aaggauggauggauggaugg

SEQ ID NO: 23322 - RNA, 24 nt, Human
ugagcaacgccccgcccuuuguug

SEQ ID NO: 23323 - RNA, 24 nt, Human
uaccucuaaaagccaaggagcagc

SEQ ID NO: 23324 - RNA, 19 nt, Human
ugggaugggugcacaacuc

SEQ ID NO: 23325 - RNA, 24 nt, Human
ugggugguauucugauugggaagg

SEQ ID NO: 23326 - RNA, 24 nt, Human
uauggcaagucacuuugacagaca

SEQ ID NO: 23327 - RNA, 24 nt, Human
ugagaauggcaaaauuagucgccu

SEQ ID NO: 23328 - RNA, 24 nt, Human
uacaccacucccaagaagaauaag

SEQ ID NO: 23329 - RNA, 24 nt, Human
uggcaccauggaugccuucgugaa

SEQ ID NO: 23330 - RNA, 24 nt, Human
ugagcuggugaagagcuggcucaa

SEQ ID NO: 23331 - RNA, 24 nt, Human
uggcucaggguggcuggcgcucac

SEQ ID NO: 23332 - RNA, 24 nt, Human
cuggagccucuguaccugugccca

SEQ ID NO: 23333 - RNA, 24 nt, Human
uuuauuuuucuuacacuuuuaagg

SEQ ID NO: 23334 - RNA, 24 nt, Human
uucauuggcaguauuuugugauga

SEQ ID NO: 23335 - RNA, 22 nt, Human
ucagaacauucugaacugcuga

SEQ ID NO: 23336 - RNA, 24 nt, Human
uuuguagucauuuuaaguagcaug

SEQ ID NO: 23337 - RNA, 24 nt, Human
gggcagucuugcuuuauucauccu

SEQ ID NO: 23338 - RNA, 24 nt, Human
uucaaguuaaucuagaaauuuauu

SEQ ID NO: 23339 - RNA, 24 nt, Human
uauggcaagucacuuugacagaca

SEQ ID NO: 23340 - RNA, 24 nt, Human
uugggggccggggggcccugaugg

SEQ ID NO: 23341 - RNA, 24 nt, Human
uacaccacucccaagaagaauaag

SEQ ID NO: 23342 - RNA, 24 nt, Human
ccagauccagagaaagcgcggaag

SEQ ID NO: 23343 - RNA, 24 nt, Human
uaagucacagcugaaaauaaaaag

SEQ ID NO: 23344 - RNA, 24 nt, Human
ugccuguagucccagcuacucagg

SEQ ID NO: 23345 - RNA, 24 nt, Human
gcucgaaucuuauaaugagauacc

SEQ ID NO: 23346 - RNA, 22 nt, Human
uuagaccgugcaauuauuaagc

SEQ ID NO: 23347 - RNA, 24 nt, Human
uucacaaaacaaguguaguagguu

SEQ ID NO: 23348 - RNA, 24 nt, Human
aacugggagacacuauuuaucugu

SEQ ID NO: 23349 - RNA, 24 nt, Human
aaugucacugucaccaagacugac

SEQ ID NO: 23350 - RNA, 24 nt, Human
uucguaccaagagcaccggugggg

SEQ ID NO: 23351 - RNA, 21 nt, Human
uccccgggaaaacguucguca

SEQ ID NO: 23352 - RNA, 24 nt, Human
ucggugccccucccgcuccagcca

SEQ ID NO: 23353 - RNA, 24 nt, Human
ugucauugguggccaugcugggaa

SEQ ID NO: 23354 - RNA, 24 nt, Human
aggcaucgggcagccacuuucacu

SEQ ID NO: 23355 - RNA, 24 nt, Human
ugagagccaugugcaagaggacag

SEQ ID NO: 23356 - RNA, 24 nt, Human
ugaacaaagagcuggagaucugcc

SEQ ID NO: 23357 - RNA, 24 nt, Human
augcagccuaaaaggugguugaaa

SEQ ID NO: 23358 - RNA, 24 nt, Human
aagaauccgucgcuaugauuucuc

SEQ ID NO: 23359 - RNA, 24 nt, Human
uaaaugauucacuccuuagcucca

SEQ ID NO: 23360 - RNA, 24 nt, Human
uucgcagggacuuccaugcucaug

SEQ ID NO: 23361 - RNA, 24 nt, Human
cuuccuggaguugauggaauaaag

SEQ ID NO: 23362 - RNA, 24 nt, Human
uccgugcugcgugcccagaguagu

SEQ ID NO: 23363 - RNA, 24 nt, Human
ggagaugaggauacaugugugaug

SEQ ID NO: 23364 - RNA, 17 nt, Human
uccaaggucaggugccc

SEQ ID NO: 23365 - RNA, 24 nt, Human
gaucaccugaggucaggaguuuga

SEQ ID NO: 23366 - RNA, 24 nt, Human
aggcagagugcccugaucuucccu

SEQ ID NO: 23367 - RNA, 24 nt, Human
cugggcccagauggccccuucuga

SEQ ID NO: 23368 - RNA, 24 nt, Human
ucugaacucgggccguuaaauaua

SEQ ID NO: 23369 - RNA, 24 nt, Human
uugguucuggaauauaggaggugc

SEQ ID NO: 23370 - RNA, 24 nt, Human
uuuaagaaaacuguaaaagccaag

SEQ ID NO: 23371 - RNA, 24 nt, Human
ccaguggccugucucucccagcgg

SEQ ID NO: 23372 - RNA, 24 nt, Human
uuacaaagaccacuaggaagaggu

SEQ ID NO: 23373 - RNA, 24 nt, Human
cgucauugucucugucauacgugc

SEQ ID NO: 23374 - RNA, 24 nt, Human
ugcugugggaagaagggccugauc

SEQ ID NO: 23375 - RNA, 24 nt, Human
acgcugcggggcgggcggacagac

SEQ ID NO: 23376 - RNA, 24 nt, Human
gggcauuggccuagcuaucucccu

SEQ ID NO: 23377 - RNA, 24 nt, Human
uuugcacacuuucauuggugucuu

SEQ ID NO: 23378 - RNA, 20 nt, Human
aacacggugaaaccccgucu

SEQ ID NO: 23379 - RNA, 20 nt, Human
uuuguaguucugaauacaca

SEQ ID NO: 23380 - RNA, 21 nt, Human
uucaagggauggaaagucacc

SEQ ID NO: 23381 - RNA, 24 nt, Human
gggcgccccaggcaccagggcgug

SEQ ID NO: 23382 - RNA, 24 nt, Human
agcccgugagugugccccagacac

SEQ ID NO: 23383 - RNA, 24 nt, Human
caccagaaagacagaaguuaaucc

SEQ ID NO: 23384 - RNA, 20 nt, Human
ugacuucaagcaauccccca

SEQ ID NO: 23385 - RNA, 24 nt, Human
aauuacauuuauguucuugggagc

SEQ ID NO: 23386 - RNA, 24 nt, Human
gcucaaggagaagaagcuggugaa

SEQ ID NO: 23387 - RNA, 24 nt, Human
uggcaccauggaugccuucgugaa

SEQ ID NO: 23388 - RNA, 24 nt, Human
cuggagccucuguaccugugccca

SEQ ID NO: 23389 - RNA, 24 nt, Human
uuccuacuaagucaaguuucaauu

SEQ ID NO: 23390 - RNA, 24 nt, Human
cauuucaggauaaauggucucugg

SEQ ID NO: 23391 - RNA, 24 nt, Human
uuuaugaagaaaaggugauugucc

SEQ ID NO: 23392 - RNA, 24 nt, Human
uuuuugguccugauaagaagcuga

SEQ ID NO: 23393 - RNA, 24 nt, Human
uuuucagucgccuuggcagaaaua

SEQ ID NO: 23394 - RNA, 24 nt, Human
aguguuuaguguugggauauaagu

SEQ ID NO: 23395 - RNA, 24 nt, Human
uuaguggucuuuuuaauguuuucu

SEQ ID NO: 23396 - RNA, 24 nt, Human
aaggcauuuucggcuucacugaca

SEQ ID NO: 23397 - RNA, 24 nt, Human
uggcuccaggauguauuuaacgug

SEQ ID NO: 23398 - RNA, 24 nt, Human
aucaucuuuccucaccgacagggc

SEQ ID NO: 23399 - RNA, 24 nt, Human
ucaggagagacagucgacaaucag

SEQ ID NO: 23400 - RNA, 17 nt, Human
uagcuccaaagaugcca

SEQ ID NO: 23401 - RNA, 24 nt, Human
uaucccagaggcauccuuccugga

SEQ ID NO: 23402 - RNA, 24 nt, Human
cuuguccccuguguucgugcuggu

SEQ ID NO: 23403 - RNA, 24 nt, Human
acucuguucuuccgccgcuccgcc

SEQ ID NO: 23404 - RNA, 24 nt, Human
ccuacauuucucggugcuacugau

SEQ ID NO: 23405 - RNA, 24 nt, Human
ugagacagagagccaagcuaaugu

SEQ ID NO: 23406 - RNA, 24 nt, Human
ucauugaugccccuuguaauguuu

SEQ ID NO: 23407 - RNA, 24 nt, Human
ucuuucaucauuaaacauccuucu

SEQ ID NO: 23408 - RNA, 24 nt, Human
uagccuuuaaguggaugguuucuc

SEQ ID NO: 23409 - RNA, 24 nt, Human
cauuugggguguuuaaacaauaac

SEQ ID NO: 23410 - RNA, 24 nt, Human
aaggugaccguaaggagucccuug

SEQ ID NO: 23411 - RNA, 24 nt, Human
caacggggaacgcacgcugauggu

SEQ ID NO: 23412 - RNA, 24 nt, Human
ugacgcgacgggaugccagcaaga

SEQ ID NO: 23413 - RNA, 24 nt, Human
ucaacauagggaggggauuugcuc

SEQ ID NO: 23414 - RNA, 24 nt, Human
uucagcaucuuuucaaguucuguc

SEQ ID NO: 23415 - RNA, 24 nt, Human
aacccuuuggggggggccuggguc

SEQ ID NO: 23416 - RNA, 24 nt, Human
caagugccuccgugaggagauuca

SEQ ID NO: 23417 - RNA, 24 nt, Human
ucaggauauagauuugccaccacu

SEQ ID NO: 23418 - RNA, 24 nt, Human
ugaggugccuguaucauuggcaca

SEQ ID NO: 23419 - RNA, 17 nt, Human
ugagguagaauuuacaa

SEQ ID NO: 23420 - RNA, 24 nt, Human
uucacauauugaagaagaucaaag

SEQ ID NO: 23421 - RNA, 24 nt, Human
ccacaggguaucugcacuuuucuu

SEQ ID NO: 23422 - RNA, 22 nt, Human
uccacuggguuggaaaccccaa

SEQ ID NO: 23423 - RNA, 21 nt, Human
uuggauauugggagacuuggc

SEQ ID NO: 23424 - RNA, 24 nt, Human
ugaggucucaacaugggugaugug

SEQ ID NO: 23425 - RNA, 24 nt, Human
aggaaacggcaaaugguguuuuaa

SEQ ID NO: 23426 - RNA, 24 nt, Human
aggcaggagguggaaaccccaggg

SEQ ID NO: 23427 - RNA, 24 nt, Human
aaacugguuuuauuuuaauuuuua

SEQ ID NO: 23428 - RNA, 21 nt, Human
ugccgcugcucugcgccgggg

SEQ ID NO: 23429 - RNA, 24 nt, Human
uauggcccugaggugaggggcagg

SEQ ID NO: 23430 - RNA, 24 nt, Human
uggccagaaacuuugguuuguguu

SEQ ID NO: 23431 - RNA, 24 nt, Human
aacgcguaaacgcggcccacuuua

SEQ ID NO: 23432 - RNA, 22 nt, Human
cacccccccucuuggucaccac

SEQ ID NO: 23433 - RNA, 24 nt, Human
gcgcagcuucaggguccgcaaggg

SEQ ID NO: 23434 - RNA, 19 nt, Human
ucugaccggcuucaagcuc

SEQ ID NO: 23435 - RNA, 24 nt, Human
ugaccaagaucuauugcacgauac

SEQ ID NO: 23436 - RNA, 23 nt, Human
uauguucccaccaguacccgaau

SEQ ID NO: 23437 - RNA, 24 nt, Human
cucuccacauuuugcuuaccgugc

SEQ ID NO: 23438 - RNA, 24 nt, Human
ugauuguuuugacaaguuuuuauu

SEQ ID NO: 23439 - RNA, 24 nt, Human
uauggcaagucacuuugacagaca

SEQ ID NO: 23440 - RNA, 24 nt, Human
ugucagcaggcugaccaaagagug

SEQ ID NO: 23441 - RNA, 24 nt, Human
guccuugucuuguuuaucuauuac

SEQ ID NO: 23442 - RNA, 24 nt, Human
uaccucaaaaaaaaaacaaacaca

SEQ ID NO: 23443 - RNA, 24 nt, Human
uaaaaggaacuaugucuggaaggc

SEQ ID NO: 23444 - RNA, 24 nt, Human
ugccuugcccccagacccaccagc

SEQ ID NO: 23445 - RNA, 24 nt, Human
uuuccggcgccgacucugaggccc

SEQ ID NO: 23446 - RNA, 24 nt, Human
ucucacuccacacggugccccgac

SEQ ID NO: 23447 - RNA, 19 nt, Human
ccccggaggaagcuugggg

SEQ ID NO: 23448 - RNA, 24 nt, Human
ucucgcucgggggucccgcgugcc

SEQ ID NO: 23449 - RNA, 20 nt, Human
uggcagagccagaccgacuc

SEQ ID NO: 23450 - RNA, 24 nt, Human
ugaccuuggaagggguggcccggu

SEQ ID NO: 23451 - RNA, 24 nt, Human
accaacuguggacuuggaauauca

SEQ ID NO: 23452 - RNA, 24 nt, Human
augaugcugagggaccuagugaaa

SEQ ID NO: 23453 - RNA, 24 nt, Human
aguuuggauucugaaaacuaacug

SEQ ID NO: 23454 - RNA, 24 nt, Human
uugcauccucaaucacccaggccu

SEQ ID NO: 23455 - RNA, 24 nt, Human
ucggguggugacuccagcgcagga

SEQ ID NO: 23456 - RNA, 24 nt, Human
uguccuugggaaaugggugaaauu

SEQ ID NO: 23457 - RNA, 24 nt, Human
ucccuggagggacuaggaugcugg

SEQ ID NO: 23458 - RNA, 24 nt, Human
ucucggagggccacuaaccggggu

SEQ ID NO: 23459 - RNA, 22 nt, Human
auggaaguugguucaauugugc

SEQ ID NO: 23460 - RNA, 24 nt, Human
aaauaugguaaguauaaacuucau

SEQ ID NO: 23461 - RNA, 24 nt, Human
gggcgcuggccucacggacgcugg

SEQ ID NO: 23462 - RNA, 24 nt, Human
uaugaacuggccacuuuucagaug

SEQ ID NO: 23463 - RNA, 24 nt, Human
uggaaucuugcggcauccacgaga

SEQ ID NO: 23464 - RNA, 20 nt, Human
uaauuuggggcaagagagua

SEQ ID NO: 23465 - RNA, 24 nt, Human
auacugcgcagggcagggguaggg

SEQ ID NO: 23466 - RNA, 24 nt, Human
ucaggccccugccgcccuacacga

SEQ ID NO: 23467 - RNA, 24 nt, Human
uaagaguaaacccacccaauaugg

SEQ ID NO: 23468 - RNA, 24 nt, Human
ucaaugguaaaaaaaaaaaaaaau

SEQ ID NO: 23469 - RNA, 24 nt, Human
uggcaagaaaagcuggcaacuucu

SEQ ID NO: 23470 - RNA, 24 nt, Human
ugggacugcugauaggaagauguc

SEQ ID NO: 23471 - RNA, 24 nt, Human
ucauucugaugauggauguuugag

SEQ ID NO: 23472 - RNA, 24 nt, Human
uaacaguaguuugcucauuuucau

SEQ ID NO: 23473 - RNA, 24 nt, Human
auagaacagauuaauauagagauu

SEQ ID NO: 23474 - RNA, 24 nt, Human
gcucaacagaugcuaagauuuuuc

SEQ ID NO: 23475 - RNA, 24 nt, Human
cuagugguggaagagaauggcugg

SEQ ID NO: 23476 - RNA, 24 nt, Human
uaacugacaacuguuuucaacucc

SEQ ID NO: 23477 - RNA, 24 nt, Human
ucagugaguggcucuugugccugc

SEQ ID NO: 23478 - RNA, 24 nt, Human
uuucucagaaugaugaugguucca

SEQ ID NO: 23479 - RNA, 24 nt, Human
aaggagccccaaagagaagggacg

SEQ ID NO: 23480 - RNA, 24 nt, Human
ugaaaaguuggaagauuuugcauc

SEQ ID NO: 23481 - RNA, 24 nt, Human
gcuauauuuuuuuuuaauuuuuag

SEQ ID NO: 23482 - RNA, 24 nt, Human
gugguccauuccuuuaauguccuu

SEQ ID NO: 23483 - RNA, 24 nt, Human
ugcuuuggugcucugcccaggagc

SEQ ID NO: 23484 - RNA, 24 nt, Human
ugacugcaaggaggaguucuggag

SEQ ID NO: 23485 - RNA, 24 nt, Human
uaggcgaaacccggcuggauaaua

SEQ ID NO: 23486 - RNA, 24 nt, Human
uaaggcaaaaaaaugguguugaac

SEQ ID NO: 23487 - RNA, 24 nt, Human
uuuaugcauuccccuuaauugugu

SEQ ID NO: 23488 - RNA, 24 nt, Human
cacuaagugcucaauaaauucuga

SEQ ID NO: 23489 - RNA, 24 nt, Human
ugacaguuuaacaagccuuaggaa

SEQ ID NO: 23490 - RNA, 24 nt, Human
uuguauggguuuagaugguaacau

SEQ ID NO: 23491 - RNA, 24 nt, Human
ccgcagcuucagcaccucggccca

SEQ ID NO: 23492 - RNA, 24 nt, Human
gcgcaaacuccucaacaacacucu

SEQ ID NO: 23493 - RNA, 24 nt, Human
aauggugucuuggaggcaaacuac

SEQ ID NO: 23494 - RNA, 24 nt, Human
uaaaaugcaauaugucuguuaguu

SEQ ID NO: 23495 - RNA, 24 nt, Human
aggaagcuaaggcugcguuggggu

SEQ ID NO: 23496 - RNA, 24 nt, Human
uuuuuugaaaagcuaaaugcuuaa

SEQ ID NO: 23497 - RNA, 24 nt, Human
ugagaaaaaauauauaaauucuaa

SEQ ID NO: 23498 - RNA, 19 nt, Human
uguugcccgaguuagucca

SEQ ID NO: 23499 - RNA, 21 nt, Human
uucaagggauggaaagucacc

SEQ ID NO: 23500 - RNA, 24 nt, Human
cccccuuuuuuuuuugccgacccc

SEQ ID NO: 23501 - RNA, 24 nt, Human
cgcccggggguacccagaggcggg

SEQ ID NO: 23502 - RNA, 24 nt, Human
uggguugguuuaaaaaaaaaaaaa

SEQ ID NO: 23503 - RNA, 24 nt, Human
ugcucagugaccuccaggagucug

SEQ ID NO: 23504 - RNA, 21 nt, Human
uaucccagcgacuaugauaug

SEQ ID NO: 23505 - RNA, 24 nt, Human
augaugcugucuuccugauuuuau

SEQ ID NO: 23506 - RNA, 17 nt, Human
ugugaggggguuccggg

SEQ ID NO: 23507 - RNA, 24 nt, Human
uaacugacaacuguuuucaacucc

SEQ ID NO: 23508 - RNA, 23 nt, Human
uuagaaauaaaaucuguuuucuu

SEQ ID NO: 23509 - RNA, 24 nt, Human
uugaucuugaagaaacugggcgug

SEQ ID NO: 23510 - RNA, 24 nt, Human
aggaaggagauauagugaagagga

SEQ ID NO: 23511 - RNA, 24 nt, Human
uagcuuuggugcccauuggcccgu

SEQ ID NO: 23512 - RNA, 24 nt, Human
guagaguuuucuucaggcuuaaag

SEQ ID NO: 23513 - RNA, 24 nt, Human
uagaauaaauauccuauuuaaagc

SEQ ID NO: 23514 - RNA, 24 nt, Human
uuaguauuauuuauuugacaacuc

SEQ ID NO: 23515 - RNA, 24 nt, Human
ucaagaaugaggaccuggagaaga

SEQ ID NO: 23516 - RNA, 24 nt, Human
aggcggcagaaugcagccagagga

SEQ ID NO: 23517 - RNA, 24 nt, Human
gaccgcagccgcugggauuugggg

SEQ ID NO: 23518 - RNA, 24 nt, Human
uacaaaguuccagaugcaacaugg

SEQ ID NO: 23519 - RNA, 24 nt, Human
cacccaucaacaugguuuuucacu

SEQ ID NO: 23520 - RNA, 24 nt, Human
uauaaaguacaacuugcuuuuagc

SEQ ID NO: 23521 - RNA, 23 nt, Human
uaugccacauagugugucaggag

SEQ ID NO: 23522 - RNA, 24 nt, Human
uaucacauuugguauuuagaaacu

SEQ ID NO: 23523 - RNA, 24 nt, Human
ugccucugucuuagaaaccuggag

SEQ ID NO: 23524 - RNA, 24 nt, Human
uaccauggaaacugagugaauggu

SEQ ID NO: 23525 - RNA, 24 nt, Human
uaccuguacagaauggauuacaua

SEQ ID NO: 23526 - RNA, 24 nt, Human
ggccauggaaauuaguacagaacc

SEQ ID NO: 23527 - RNA, 24 nt, Human
ucuuggauugauagcaacaaaggc

SEQ ID NO: 23528 - RNA, 24 nt, Human
gugaaguauuuuguuaccucaguc

SEQ ID NO: 23529 - RNA, 24 nt, Human
uauuauguggugaaauuuuguaaa

SEQ ID NO: 23530 - RNA, 24 nt, Human
ucauuuguaauuuaggggacuuac

SEQ ID NO: 23531 - RNA, 23 nt, Human
uguggugccuaucuccuguccag

SEQ ID NO: 23532 - RNA, 24 nt, Human
uccgcaaguggacaguuaaaggcc

SEQ ID NO: 23533 - RNA, 24 nt, Human
acccagcuggaagggacggauucc

SEQ ID NO: 23534 - RNA, 24 nt, Human
uauuucacuggcccaggugggggg

SEQ ID NO: 23535 - RNA, 24 nt, Human
ucccagggucaccagcaugaaugc

SEQ ID NO: 23536 - RNA, 24 nt, Human
uaccuccuucaccccagaauauuu

SEQ ID NO: 23537 - RNA, 24 nt, Human
ugaaaagcaguucucugaggagcg

SEQ ID NO: 23538 - RNA, 24 nt, Human
aggaggcucaccagcucuucuugg

SEQ ID NO: 23539 - RNA, 24 nt, Human
uggccggaaccuccucagcucucc

SEQ ID NO: 23540 - RNA, 24 nt, Human
gcuuguauaauguaaccguuuggg

SEQ ID NO: 23541 - RNA, 24 nt, Human
ugucuagucuugaagucccucauu

SEQ ID NO: 23542 - RNA, 24 nt, Human
ugagcagugggagcugcagaccag

SEQ ID NO: 23543 - RNA, 24 nt, Human
ccucccuuaaaaacuugggccaaa

SEQ ID NO: 23544 - RNA, 24 nt, Human
ugaaaaggguccggcuccgggguc

SEQ ID NO: 23545 - RNA, 21 nt, Human
ccugcggggcagggggcuguc

SEQ ID NO: 23546 - RNA, 24 nt, Human
aauugggcguggccccgucuucag

SEQ ID NO: 23547 - RNA, 23 nt, Human
ugucacggcauccuuugagauaa

SEQ ID NO: 23548 - RNA, 24 nt, Human
uuccggagccccggcgcgggcggg

SEQ ID NO: 23549 - RNA, 24 nt, Human
cagcugccccagggugugcagguu

SEQ ID NO: 23550 - RNA, 24 nt, Human
aggcggugcgcugggggcgggagc

SEQ ID NO: 23551 - RNA, 24 nt, Human
ccacccagcccaagaggcccaugu

SEQ ID NO: 23552 - RNA, 22 nt, Human
gaggaggccaccucggucuucc

SEQ ID NO: 23553 - RNA, 24 nt, Human
uaaacugcagagauuaaaaguuuc

SEQ ID NO: 23554 - RNA, 24 nt, Human
gcuuuugucagauggagugccggu

SEQ ID NO: 23555 - RNA, 24 nt, Human
cauccaucuucccuggaagucucc

SEQ ID NO: 23556 - RNA, 24 nt, Human
gggcagcacucaagcgcaucuuag

SEQ ID NO: 23557 - RNA, 24 nt, Human
cccucggugacuuccagccggugg

SEQ ID NO: 23558 - RNA, 24 nt, Human
accguguuuugugguuagcuccgu

SEQ ID NO: 23559 - RNA, 24 nt, Human
caccggcaaaguaccgacaucgac

SEQ ID NO: 23560 - RNA, 24 nt, Human
caggagcccgcagcaaggagugug

SEQ ID NO: 23561 - RNA, 18 nt, Human
aggcuugcagacccgcug

SEQ ID NO: 23562 - RNA, 24 nt, Human
agggagcagcguugcgucucagag

SEQ ID NO: 23563 - RNA, 24 nt, Human
uauggcaagucacuuugacagaca

SEQ ID NO: 23564 - RNA, 24 nt, Human
ugagaauggcaaaauuagucgccu

SEQ ID NO: 23565 - RNA, 24 nt, Human
uacaccacucccaagaagaauaag

SEQ ID NO: 23566 - RNA, 24 nt, Human
uugaagauccugcgguaugggaug

SEQ ID NO: 23567 - RNA, 24 nt, Human
uggaagguggauuuccccuaucag

SEQ ID NO: 23568 - RNA, 24 nt, Human
aaccccuuucugcuguucucccau

SEQ ID NO: 23569 - RNA, 24 nt, Human
uacaccuaauggcuuauucccuac

SEQ ID NO: 23570 - RNA, 24 nt, Human
ggaaagcauccuugucuccuuagu

SEQ ID NO: 23571 - RNA, 23 nt, Human
cugcuguuuucuagcccugucca

SEQ ID NO: 23572 - RNA, 22 nt, Human
aaaguuccagauugcaacaugg

SEQ ID NO: 23573 - RNA, 24 nt, Human
uguggaauauguagauucacuuuu

SEQ ID NO: 23574 - RNA, 24 nt, Human
uaacuuggcacuauuuucugcaua

SEQ ID NO: 23575 - RNA, 24 nt, Human
agugcaguggcagugaucacagcu

SEQ ID NO: 23576 - RNA, 24 nt, Human
uugcuugagcccaggagguggagg

SEQ ID NO: 23577 - RNA, 24 nt, Human
ugcauuguuaucauuaaccagucu

SEQ ID NO: 23578 - RNA, 24 nt, Human
uaaugggucucaaaauucugugac

SEQ ID NO: 23579 - RNA, 24 nt, Human
uauuagggauaauauucauuuagc

SEQ ID NO: 23580 - RNA, 24 nt, Human
aagcgacccaaagguggauagucu

SEQ ID NO: 23581 - RNA, 24 nt, Human
uaucaugggaaaauaugucggggu

SEQ ID NO: 23582 - RNA, 24 nt, Human
ugacuagaguugaaaccaaaagaa

SEQ ID NO: 23583 - RNA, 24 nt, Human
ugugaagcacuuacugagugggaa

SEQ ID NO: 23584 - RNA, 20 nt, Human
ugccauaggccggggugcca

SEQ ID NO: 23585 - RNA, 24 nt, Human
ugugguuuuugugugaugaaaugu

SEQ ID NO: 23586 - RNA, 24 nt, Human
gagcacaaccugcuaguuuggaaa

SEQ ID NO: 23587 - RNA, 22 nt, Human
ucugauugucuguuugcugauu

SEQ ID NO: 23588 - RNA, 24 nt, Human
uuccugagugucauuuucuucucu

SEQ ID NO: 23589 - RNA, 24 nt, Human
uggcuuacaaaacauguguuucua

SEQ ID NO: 23590 - RNA, 24 nt, Human
ucaaaguucacuuguauuguaccc

SEQ ID NO: 23591 - RNA, 24 nt, Human
agagagugugauuugguugugaua

SEQ ID NO: 23592 - RNA, 24 nt, Human
uuucucagauuuuuaguaaaugca

SEQ ID NO: 23593 - RNA, 24 nt, Human
uuucuugguuguaugugaucaugu

SEQ ID NO: 23594 - RNA, 24 nt, Human
caggggacuuggaauacaauccuu

SEQ ID NO: 23595 - RNA, 24 nt, Human
acagcccggaacacuggcaucauc

SEQ ID NO: 23596 - RNA, 24 nt, Human
uaccaugcggagaccaucaagaau

SEQ ID NO: 23597 - RNA, 24 nt, Human
ugguaggcaccccgcccucucccg

SEQ ID NO: 23598 - RNA, 24 nt, Human
ugagcaguuauuggaggaagagag

SEQ ID NO: 23599 - RNA, 24 nt, Human
uaugacaucgucaucuuaaaggaa

SEQ ID NO: 23600 - RNA, 19 nt, Human
uccguuuucggggugggua

SEQ ID NO: 23601 - RNA, 24 nt, Human
aggaaaucuacagaagggaaucug

SEQ ID NO: 23602 - RNA, 24 nt, Human
ucaaugaaacaagaugccacacaa

SEQ ID NO: 23603 - RNA, 24 nt, Human
uuaaaacagcagcuuuagggauag

SEQ ID NO: 23604 - RNA, 24 nt, Human
agggauuaucuacaccuucacuuu

SEQ ID NO: 23605 - RNA, 24 nt, Human
uuggaacuggaaaaauggcauaaa

SEQ ID NO: 23606 - RNA, 24 nt, Human
uggaauuuguaaggaaacgagguu

SEQ ID NO: 23607 - RNA, 24 nt, Human
uuucuugugagucagauauuuuua

SEQ ID NO: 23608 - RNA, 24 nt, Human
gggaagguauuaaacaaaaagacc

SEQ ID NO: 23609 - RNA, 24 nt, Human
guugucccuucuuccucccccgcu

SEQ ID NO: 23610 - RNA, 24 nt, Human
uuugucauuaaacaauauagguau

SEQ ID NO: 23611 - RNA, 24 nt, Human
ugacuaaaaacuccuuggauuuau

SEQ ID NO: 23612 - RNA, 24 nt, Human
uggaagacagcuacgggcagcagu

SEQ ID NO: 23613 - RNA, 24 nt, Human
ugaaugagcggcugaucagcaugg

SEQ ID NO: 23614 - RNA, 24 nt, Human
ucccuggcuuaugagcaggcugag

SEQ ID NO: 23615 - RNA, 24 nt, Human
ucugcaaguuugucgugaugcuga

SEQ ID NO: 23616 - RNA, 24 nt, Human
cagcaaccaaugaucccaccauuu

SEQ ID NO: 23617 - RNA, 24 nt, Human
acucugguuacugggcccgcgccg

SEQ ID NO: 23618 - RNA, 24 nt, Human
gagccgcacucuugaguccgaggc

SEQ ID NO: 23619 - RNA, 24 nt, Human
ggacagguguacagacauguucuu

SEQ ID NO: 23620 - RNA, 24 nt, Human
ucgaauggacacauuaccagugaa

SEQ ID NO: 23621 - RNA, 24 nt, Human
uggccugaugauccacagcggaga

SEQ ID NO: 23622 - RNA, 24 nt, Human
ugugugccauugcccaggcagagu

SEQ ID NO: 23623 - RNA, 24 nt, Human
uguguuaggaaugucaacagagca

SEQ ID NO: 23624 - RNA, 24 nt, Human
uuuguucguauuuagaaugggauc

SEQ ID NO: 23625 - RNA, 24 nt, Human
uagcuucuggccugagcuuggccu

SEQ ID NO: 23626 - RNA, 24 nt, Human
aacacguuggaaguguauccuccc

SEQ ID NO: 23627 - RNA, 24 nt, Human
uaacuggugcugccagcuuuauaa

SEQ ID NO: 23628 - RNA, 24 nt, Human
uggcugcagccaaggagcuggggg

SEQ ID NO: 23629 - RNA, 24 nt, Human
ggugaugggggcagccgggaggga

SEQ ID NO: 23630 - RNA, 21 nt, Human
uugcucagugacagagccuca

SEQ ID NO: 23631 - RNA, 20 nt, Human
ugagaugccauaagcugugg

SEQ ID NO: 23632 - RNA, 24 nt, Human
ucccuuagaaacuugggccaaacc

SEQ ID NO: 23633 - RNA, 24 nt, Human
aaguguccggcuccugggucucac

SEQ ID NO: 23634 - RNA, 24 nt, Human
uuccugaggggcuucuuaacuuuu

SEQ ID NO: 23635 - RNA, 17 nt, Human
ucuaguguccccccagc

SEQ ID NO: 23636 - RNA, 24 nt, Human
acccggguugucagcacccuccau

SEQ ID NO: 23637 - RNA, 24 nt, Human
gccccuggggaaucguggucuaua

SEQ ID NO: 23638 - RNA, 24 nt, Human
ucugcacgacgcacuggcccagga

SEQ ID NO: 23639 - RNA, 24 nt, Human
ugaaggacgagcgugugcccaaga

SEQ ID NO: 23640 - RNA, 24 nt, Human
ucugagguugccaucagccagggc

SEQ ID NO: 23641 - RNA, 20 nt, Human
uggguugaucuauaaacacu

SEQ ID NO: 23642 - RNA, 20 nt, Human
uuuggcauuuuuuggaccau

SEQ ID NO: 23643 - RNA, 24 nt, Human
uugaugaccuuggaugcuguaaag

SEQ ID NO: 23644 - RNA, 24 nt, Human
ucaguagagaguuggcgguggcgu

SEQ ID NO: 23645 - RNA, 24 nt, Human
cagaguguacuuagaaacaugaaa

SEQ ID NO: 23646 - RNA, 24 nt, Human
uaagauguguuuauuugguuuugg

SEQ ID NO: 23647 - RNA, 24 nt, Human
caucguggcugaggugcuggugcu

SEQ ID NO: 23648 - RNA, 24 nt, Human
agagcagcgggcagcaccagaaug

SEQ ID NO: 23649 - RNA, 24 nt, Human
uauaucguccauauguaauuauau

SEQ ID NO: 23650 - RNA, 24 nt, Human
uuacauaguuuuaaaacaugcaaa

SEQ ID NO: 23651 - RNA, 24 nt, Human
uucacagggugcuuggacuguacc

SEQ ID NO: 23652 - RNA, 24 nt, Human
uacuucaguuauggacagaaagaa

SEQ ID NO: 23653 - RNA, 24 nt, Human
ugagaauggcaaaauuagucgccu

SEQ ID NO: 23654 - RNA, 24 nt, Human
uacaccacucccaagaagaauaag

SEQ ID NO: 23655 - RNA, 24 nt, Human
uggccgaagagcagaagcgucggg

SEQ ID NO: 23656 - RNA, 24 nt, Human
ucuuuuuuuguaauuagaauacug

SEQ ID NO: 23657 - RNA, 24 nt, Human
acugaccuuuaggacaguagucua

SEQ ID NO: 23658 - RNA, 24 nt, Human
uccacacaaauaggcacacauaua

SEQ ID NO: 23659 - RNA, 18 nt, Human
uaugcaaggcacugcgca

SEQ ID NO: 23660 - RNA, 24 nt, Human
uaucguagggggcggcgcggcggg

SEQ ID NO: 23661 - RNA, 24 nt, Human
uuagauguuugucacuucaaucca

SEQ ID NO: 23662 - RNA, 24 nt, Human
ugagcaguguaugucaggacuugu

SEQ ID NO: 23663 - RNA, 24 nt, Human
uagagcuagugaauuagccuauuu

SEQ ID NO: 23664 - RNA, 24 nt, Human
ucuauggugguaggagaguacagg

SEQ ID NO: 23665 - RNA, 24 nt, Human
agaagcccaaaggaauugcacugu

SEQ ID NO: 23666 - RNA, 24 nt, Human
cagcaugcuggggagugcggucag

SEQ ID NO: 23667 - RNA, 24 nt, Human
cuggauuaccucucuuaaaaugac

SEQ ID NO: 23668 - RNA, 24 nt, Human
uggauaacuauuucuaauaugaaa

SEQ ID NO: 23669 - RNA, 24 nt, Human
ugaucucguuggacugcguggcua

SEQ ID NO: 23670 - RNA, 24 nt, Human
caggugguugcuuugaacuuuauu

SEQ ID NO: 23671 - RNA, 24 nt, Human
ucccguugguuuuacucuaucccu

SEQ ID NO: 23672 - RNA, 24 nt, Human
uaacucuagaaaucccugaaguuc

SEQ ID NO: 23673 - RNA, 24 nt, Human
cagcaugaacgugccuuauauccc

SEQ ID NO: 23674 - RNA, 24 nt, Human
uaagaaaaaagauucauucucugu

SEQ ID NO: 23675 - RNA, 24 nt, Human
uaguucagauugaucuuaggucaa

SEQ ID NO: 23676 - RNA, 24 nt, Human
uacaccacucccaagaagaauaag

SEQ ID NO: 23677 - RNA, 24 nt, Human
uaugacaggucaccguguguaaau

SEQ ID NO: 23678 - RNA, 24 nt, Human
ugaggugcgggugcgcgggccugg

SEQ ID NO: 23679 - RNA, 24 nt, Human
auuguucauuaaagaucuauaauc

SEQ ID NO: 23680 - RNA, 23 nt, Human
uguguacaugccggggcauuugc

SEQ ID NO: 23681 - RNA, 24 nt, Human
ugugcagaagaaauggaaggauuc

SEQ ID NO: 23682 - RNA, 24 nt, Human
uaucaaggaagggcaggcgugaug

SEQ ID NO: 23683 - RNA, 24 nt, Human
uucaaauuucuuucuuuuuuaauu

SEQ ID NO: 23684 - RNA, 24 nt, Human
ucaauuuuuauuuugguuuucuua

SEQ ID NO: 23685 - RNA, 24 nt, Human
uagcggccccgaacggcuaggcuc

SEQ ID NO: 23686 - RNA, 24 nt, Human
agguaggugaagcagagaaagaag

SEQ ID NO: 23687 - RNA, 24 nt, Human
ccuuacucccucuuuaagauugcg

SEQ ID NO: 23688 - RNA, 24 nt, Human
uuagagcuggcagcagcaucucag

SEQ ID NO: 23689 - RNA, 24 nt, Human
uguuuuggggggguugugcugggg

SEQ ID NO: 23690 - RNA, 24 nt, Human
ucgggccucgguggugccuggguc

SEQ ID NO: 23691 - RNA, 19 nt, Human
ccccaaggaguuccucuuu

SEQ ID NO: 23692 - RNA, 19 nt, Human
ugacuugguucguuagugg

SEQ ID NO: 23693 - RNA, 24 nt, Human
gugcauucuccuuguggauuuuug

SEQ ID NO: 23694 - RNA, 24 nt, Human
ugaugcaagccuuuuucaguucaa

SEQ ID NO: 23695 - RNA, 24 nt, Human
caggaucaggaggggagaagaagg

SEQ ID NO: 23696 - RNA, 24 nt, Human
uggggugugcugggagggucacca

SEQ ID NO: 23697 - RNA, 24 nt, Human
uccccagcaaccaggccuggccuc

SEQ ID NO: 23698 - RNA, 24 nt, Human
uacaggacaagggcagccccaccc

SEQ ID NO: 23699 - RNA, 24 nt, Human
acuuaaguucuuaagaaaggauaa

SEQ ID NO: 23700 - RNA, 24 nt, Human
aaagugccacuuugaaugguuguu

SEQ ID NO: 23701 - RNA, 24 nt, Human
ucagugagguaaaucggaaugcac

SEQ ID NO: 23702 - RNA, 24 nt, Human
uugaaugguacaguuugagaucuu

SEQ ID NO: 23703 - RNA, 20 nt, Human
uguccagaauuuccagaagu

SEQ ID NO: 23704 - RNA, 24 nt, Human
uguggcccuucucuuuaaguccga

SEQ ID NO: 23705 - RNA, 24 nt, Human
ugcuaggguguucaaaggucagug

SEQ ID NO: 23706 - RNA, 24 nt, Human
caucaguauuauccauauuuaaaa

SEQ ID NO: 23707 - RNA, 24 nt, Human
uaaagcgaccaacuugaacuuucu

SEQ ID NO: 23708 - RNA, 24 nt, Human
aggcaggagugaaaauugggucug

SEQ ID NO: 23709 - RNA, 24 nt, Human
cagcaggugauuucuuaaugcuuu

SEQ ID NO: 23710 - RNA, 24 nt, Human
uaauugcugugauuucguucaggu

SEQ ID NO: 23711 - RNA, 19 nt, Human
uccaccagaaaacuugauc

SEQ ID NO: 23712 - RNA, 24 nt, Human
agagguggacauggcgugcggcuu

SEQ ID NO: 23713 - RNA, 24 nt, Human
gugcauguccuucaugguagguga

SEQ ID NO: 23714 - RNA, 24 nt, Human
ugagggaaaagcuacaguggccac

SEQ ID NO: 23715 - RNA, 24 nt, Human
aagcucauccauuagcugcguccu

SEQ ID NO: 23716 - RNA, 22 nt, Human
uauguaguguuacuccggacgu

SEQ ID NO: 23717 - RNA, 24 nt, Human
ccgcagcuucagcaccucggccca

SEQ ID NO: 23718 - RNA, 24 nt, Human
uauguugguuuaauuaauaauaug

SEQ ID NO: 23719 - RNA, 24 nt, Human
ugguaguuggaaacaaaucauaau

SEQ ID NO: 23720 - RNA, 24 nt, Human
ugugcagucuugcuuacaaggagg

SEQ ID NO: 23721 - RNA, 24 nt, Human
uaguucagauugaucuuaggucaa

SEQ ID NO: 23722 - RNA, 24 nt, Human
ucggcgcugggucgccaaagcaga

SEQ ID NO: 23723 - RNA, 24 nt, Human
aucagauucuuggcuguuaaggaa

SEQ ID NO: 23724 - RNA, 24 nt, Human
aaauaggagcuaggagacaacaag

SEQ ID NO: 23725 - RNA, 23 nt, Human
guagcaguccacaauggaauaga

SEQ ID NO: 23726 - RNA, 20 nt, Human
ccugcagcacguggggcugu

SEQ ID NO: 23727 - RNA, 24 nt, Human
cuuacagcccugcaggcccagccg

SEQ ID NO: 23728 - RNA, 17 nt, Human
ccccuggggcauacuac

SEQ ID NO: 23729 - RNA, 24 nt, Human
uauuagggagugagggagcacaaa

SEQ ID NO: 23730 - RNA, 24 nt, Human
acuccacuccacuuggcugugauc

SEQ ID NO: 23731 - RNA, 24 nt, Human
uuaggcucuuauuccuggcuaccu

SEQ ID NO: 23732 - RNA, 24 nt, Human
acucguuccugcacuuggccauca

SEQ ID NO: 23733 - RNA, 24 nt, Human
uaccugaucaaguuuauugcagcc

SEQ ID NO: 23734 - RNA, 24 nt, Human
uuaauaaaccgcuaauccgaaaau

SEQ ID NO: 23735 - RNA, 24 nt, Human
uaguucauagaaaacuugaggauc

SEQ ID NO: 23736 - RNA, 24 nt, Human
gggcauccauauagucacuccagg

SEQ ID NO: 23737 - RNA, 24 nt, Human
gggcauucaggauagucagagaaa

SEQ ID NO: 23738 - RNA, 19 nt, Human
aggaagacgggaggauucu

SEQ ID NO: 23739 - RNA, 24 nt, Human
ugaggcaauacuccaacaggguga

SEQ ID NO: 23740 - RNA, 21 nt, Human
aagcuggucuccacacagugc

SEQ ID NO: 23741 - RNA, 24 nt, Human
cgagcaucauccucuccuggcuga

SEQ ID NO: 23742 - RNA, 24 nt, Human
ucagugcagcagcagcuucaucca

SEQ ID NO: 23743 - RNA, 24 nt, Human
aacagcauuaacauccccaucuga

SEQ ID NO: 23744 - RNA, 24 nt, Human
uaauaaguggaagaauuuguuaag

SEQ ID NO: 23745 - RNA, 24 nt, Human
ucucacucuguugccuaggcucgg

SEQ ID NO: 23746 - RNA, 24 nt, Human
caugacaugugaaaaucugacuca

SEQ ID NO: 23747 - RNA, 24 nt, Human
gacacuuuauacuaguuacuuagg

SEQ ID NO: 23748 - RNA, 24 nt, Human
uaauaaggccccugauauucauau

SEQ ID NO: 23749 - RNA, 19 nt, Human
uaguucuccugcccagccu

SEQ ID NO: 23750 - RNA, 24 nt, Human
uacuuuauaagcaaaguuuaaaca

SEQ ID NO: 23751 - RNA, 24 nt, Human
ugucugaauaaaggauacaaggau

SEQ ID NO: 23752 - RNA, 24 nt, Human
uaaaauccacaucaauagcacacg

SEQ ID NO: 23753 - RNA, 24 nt, Human
uuuucauuacuuccauacaaagca

SEQ ID NO: 23754 - RNA, 24 nt, Human
gggcauccuucaucuggacaaggg

SEQ ID NO: 23755 - RNA, 23 nt, Human
uucacauuugaguguccuggaca

SEQ ID NO: 23756 - RNA, 24 nt, Human
uguguacguauguauauacacaua

SEQ ID NO: 23757 - RNA, 24 nt, Human
uauaguaugaaucuaccauuaugu

SEQ ID NO: 23758 - RNA, 24 nt, Human
ugccguggcggcggcugcccuccu

SEQ ID NO: 23759 - RNA, 24 nt, Human
gcguagcuuuccugugguuuucca

SEQ ID NO: 23760 - RNA, 24 nt, Human
uggcgccgcuuuuuagcuuggacu

SEQ ID NO: 23761 - RNA, 24 nt, Human
ucuucauuagcuuggaguggcgca

SEQ ID NO: 23762 - RNA, 24 nt, Human
uaagugccuuuguucacuuggcau

SEQ ID NO: 23763 - RNA, 24 nt, Human
uacaguuuuuuuauccuuuuagau

SEQ ID NO: 23764 - RNA, 24 nt, Human
ggaugagacguuugcuguccugag

SEQ ID NO: 23765 - RNA, 24 nt, Human
uggcaagggucccuccauuaagca

SEQ ID NO: 23766 - RNA, 24 nt, Human
gcacauggugggucccgauuggcg

SEQ ID NO: 23767 - RNA, 24 nt, Human
cauuuuguauauacugggacagcg

SEQ ID NO: 23768 - RNA, 24 nt, Human
accugguggugaggcucuccauga

SEQ ID NO: 23769 - RNA, 24 nt, Human
gaacuucggauuuuuucuaacugg

SEQ ID NO: 23770 - RNA, 24 nt, Human
uacaccacucccaagaagaauaag

SEQ ID NO: 23771 - RNA, 24 nt, Human
ucuagcuucaucaggcauauuuua

SEQ ID NO: 23772 - RNA, 23 nt, Human
uaaggcgaggcggaauuaaaccc

SEQ ID NO: 23773 - RNA, 24 nt, Human
uaaaggaccugagauccgaacugg

SEQ ID NO: 23774 - RNA, 24 nt, Human
ugcaaaaccagcguggcggccgcg

SEQ ID NO: 23775 - RNA, 24 nt, Human
ugucacaccuuugcuuauggccug

SEQ ID NO: 23776 - RNA, 24 nt, Human
cuuggccucuucuuuccggcagga

SEQ ID NO: 23777 - RNA, 24 nt, Human
cucacgggacagaaccacaugcua

SEQ ID NO: 23778 - RNA, 20 nt, Human
aaccccaugacucgccccuc

SEQ ID NO: 23779 - RNA, 24 nt, Human
cucacuguaaccucugccucccgg

SEQ ID NO: 23780 - RNA, 24 nt, Human
uaagaguaguuaucuuuauacagu

SEQ ID NO: 23781 - RNA, 24 nt, Human
uaaauaauccuggcauuauaggga

SEQ ID NO: 23782 - RNA, 24 nt, Human
uagugcaugucuuggugugcuuuu

SEQ ID NO: 23783 - RNA, 24 nt, Human
uucauuuuuuuaauggaaagaaaa

SEQ ID NO: 23784 - RNA, 24 nt, Human
gcgcguggugcggcccgacucgga

SEQ ID NO: 23785 - RNA, 24 nt, Human
gaggacuccaagaacuucgacgag

SEQ ID NO: 23786 - RNA, 24 nt, Human
ugagcaguguaugucaggacuugu

SEQ ID NO: 23787 - RNA, 24 nt, Human
uagagcuagugaauuagccuauuu

SEQ ID NO: 23788 - RNA, 24 nt, Human
aagaacuacaggucagaaauggaa

SEQ ID NO: 23789 - RNA, 20 nt, Human
uauguagggcaucacuuuau

SEQ ID NO: 23790 - RNA, 24 nt, Human
cgccucggccgcccuggacgagcu

SEQ ID NO: 23791 - RNA, 24 nt, Human
ccaggccaaaaaggcucaacauuu

SEQ ID NO: 23792 - RNA, 24 nt, Human
uggcaccauggaugccuucgugaa

SEQ ID NO: 23793 - RNA, 24 nt, Human
uggcucaggguggcuggcgcucac

SEQ ID NO: 23794 - RNA, 24 nt, Human
cuggagccucuguaccugugccca

SEQ ID NO: 23795 - RNA, 24 nt, Human
uaucuaacucaugauuacaaaacu

SEQ ID NO: 23796 - RNA, 24 nt, Human
uugcuguacagauuuuaaaaaacc

SEQ ID NO: 23797 - RNA, 24 nt, Human
uacaucaaaaucaagucccuggcu

SEQ ID NO: 23798 - RNA, 24 nt, Human
uacagcacaauauuucaauggaau

SEQ ID NO: 23799 - RNA, 24 nt, Human
cuggauuugacauccagugggguu

SEQ ID NO: 23800 - RNA, 20 nt, Human
ugcuggggccgugucgaugu

SEQ ID NO: 23801 - RNA, 23 nt, Human
ugagcccagugcugaaggggcuu

SEQ ID NO: 23802 - RNA, 24 nt, Human
uauuccuuuuuucucacauuugag

SEQ ID NO: 23803 - RNA, 24 nt, Human
uuaaugaaaacuaauugaaaguac

SEQ ID NO: 23804 - RNA, 24 nt, Human
uaaggaacuuuuuacugggaacua

SEQ ID NO: 23805 - RNA, 24 nt, Human
caggggaggccggccacaaaugca

SEQ ID NO: 23806 - RNA, 24 nt, Human
acgaacaggggguaagcccaacgc

SEQ ID NO: 23807 - RNA, 24 nt, Human
agagaucagauuaaauauuucuuu

SEQ ID NO: 23808 - RNA, 24 nt, Human
uggaaaagugauguggguagccaa

SEQ ID NO: 23809 - RNA, 24 nt, Human
uuauaaaaaaugaaaguggaguuu

SEQ ID NO: 23810 - RNA, 24 nt, Human
uucuaugguaaugcucuuacggau

SEQ ID NO: 23811 - RNA, 17 nt, Human
uggcucaucugugugua

SEQ ID NO: 23812 - RNA, 24 nt, Human
agggaguggggacuugcaggaagc

SEQ ID NO: 23813 - RNA, 24 nt, Human
gauuguuucucuucacccccaaca

SEQ ID NO: 23814 - RNA, 24 nt, Human
uccacaaugguugaacuaguuuac

SEQ ID NO: 23815 - RNA, 24 nt, Human
aggaaggcuggcaccucuggcucu

SEQ ID NO: 23816 - RNA, 24 nt, Human
ugagaaaugcuaucaacaucugug

SEQ ID NO: 23817 - RNA, 24 nt, Human
gacacugggguugggaaaucaagc

SEQ ID NO: 23818 - RNA, 24 nt, Human
augcugcugagccccggcacugcc

SEQ ID NO: 23819 - RNA, 24 nt, Human
uuccucaucugggacacugcuggu

SEQ ID NO: 23820 - RNA, 24 nt, Human
gggacagauacuggcgauccuuaa

SEQ ID NO: 23821 - RNA, 24 nt, Human
uuccuuggugugggagugagggca

SEQ ID NO: 23822 - RNA, 24 nt, Human
ggccucuggagcuuccgcgccgac

SEQ ID NO: 23823 - RNA, 24 nt, Human
agugguaccggcggccgcuguggg

SEQ ID NO: 23824 - RNA, 24 nt, Human
augauuccaacuuaucagagaccu

SEQ ID NO: 23825 - RNA, 24 nt, Human
ugauaagacucaggaauucugaaa

SEQ ID NO: 23826 - RNA, 24 nt, Human
uagaauauaauuuggcauaugauu

SEQ ID NO: 23827 - RNA, 24 nt, Human
uauugugccugucaggauucuuga

SEQ ID NO: 23828 - RNA, 24 nt, Human
ucacugaugcauaaacuggucacc

SEQ ID NO: 23829 - RNA, 22 nt, Human
ugaagugucggcgugugccggg

SEQ ID NO: 23830 - RNA, 24 nt, Human
ucaccagugaccccagucagugcc

SEQ ID NO: 23831 - RNA, 18 nt, Human
ugaaucacuguuucaaga

SEQ ID NO: 23832 - RNA, 24 nt, Human
ucggaggaagugauaauuuuaagc

SEQ ID NO: 23833 - RNA, 24 nt, Human
ugcaaaaggugguacgaucgaagg

SEQ ID NO: 23834 - RNA, 24 nt, Human
uuagaggaggcggggguccccugg

SEQ ID NO: 23835 - RNA, 24 nt, Human
ucccugggcgcagggugcagggug

SEQ ID NO: 23836 - RNA, 24 nt, Human
agagggaauguucuggagcugcca

SEQ ID NO: 23837 - RNA, 24 nt, Human
cgggagcugaagcccguccuuagc

SEQ ID NO: 23838 - RNA, 24 nt, Human
ucuuaagugucaucuggcaucuuc

SEQ ID NO: 23839 - RNA, 24 nt, Human
ugauauccuuguuuuuaacuguug

SEQ ID NO: 23840 - RNA, 24 nt, Human
aagcauccucaagcucccaguuaa

SEQ ID NO: 23841 - RNA, 24 nt, Human
uacccacuuauaaauagcacugau

SEQ ID NO: 23842 - RNA, 24 nt, Human
uaugaucaaaccuauagucugucg

SEQ ID NO: 23843 - RNA, 24 nt, Human
auuucagcuaugucugauuuuuuu

SEQ ID NO: 23844 - RNA, 24 nt, Human
ugcauuguuaucauuaaccagucu

SEQ ID NO: 23845 - RNA, 24 nt, Human
uaaugggucucaaaauucugugac

SEQ ID NO: 23846 - RNA, 24 nt, Human
ggacagguguacagacauguucuu

SEQ ID NO: 23847 - RNA, 24 nt, Human
ucgaauggacacauuaccagugaa

SEQ ID NO: 23848 - RNA, 24 nt, Human
uccgccaucuucccggccgccuga

SEQ ID NO: 23849 - RNA, 24 nt, Human
ggacagguguacagacauguucuu

SEQ ID NO: 23850 - RNA, 24 nt, Human
cuaccaggucucuaggggccugag

SEQ ID NO: 23851 - RNA, 23 nt, Human
agaggacucggagcucacacuug

SEQ ID NO: 23852 - RNA, 24 nt, Human
ugagaucuugggcaaaucacuuag

SEQ ID NO: 23853 - RNA, 24 nt, Human
uaucagcgucugaugccuucuucc

SEQ ID NO: 23854 - RNA, 24 nt, Human
cggcaucccuccggauucugcugc

SEQ ID NO: 23855 - RNA, 24 nt, Human
uggccugaugauccacagcggaga

SEQ ID NO: 23856 - RNA, 24 nt, Human
ugugugccauugcccaggcagagu

SEQ ID NO: 23857 - RNA, 24 nt, Human
caggaugcccucucaggaucaggg

SEQ ID NO: 23858 - RNA, 20 nt, Human
ugggaagguuuguuuuuuac

SEQ ID NO: 23859 - RNA, 24 nt, Human
acauaggugugaauuuauccauua

SEQ ID NO: 23860 - RNA, 24 nt, Human
uauggcaagucacuuugacagaca

SEQ ID NO: 23861 - RNA, 24 nt, Human
uacaccacucccaagaagaauaag

SEQ ID NO: 23862 - RNA, 24 nt, Human
aggcaggagguggaaaccccaggg

SEQ ID NO: 23863 - RNA, 24 nt, Human
uccccgugacaggugggccugagg

SEQ ID NO: 23864 - RNA, 24 nt, Human
guggauggccugaugauccacagc

SEQ ID NO: 23865 - RNA, 24 nt, Human
uauuacaggagugugccauuagcc

SEQ ID NO: 23866 - RNA, 24 nt, Human
ucuggaauaucugauauagggguu

SEQ ID NO: 23867 - RNA, 24 nt, Human
agccagugaagggcgagucagggc

SEQ ID NO: 23868 - RNA, 24 nt, Human
uguugagaguggaguuacugcagg

SEQ ID NO: 23869 - RNA, 24 nt, Human
uuccuugggagaugccauaaagca

SEQ ID NO: 23870 - RNA, 20 nt, Human
uguuggggcccgggggggcc

SEQ ID NO: 23871 - RNA, 24 nt, Human
uggcagaagauggugacuggagug

SEQ ID NO: 23872 - RNA, 24 nt, Human
aaggaugcugcuagacuaaggaau

SEQ ID NO: 23873 - RNA, 24 nt, Human
acccagagauauuaaaauaauuuu

SEQ ID NO: 23874 - RNA, 24 nt, Human
uguaguuuuaauaagcaugacauu

SEQ ID NO: 23875 - RNA, 24 nt, Human
aguguaaucuuugcaagcguauau

SEQ ID NO: 23876 - RNA, 24 nt, Human
auuucauucacuggggaggaacaa

SEQ ID NO: 23877 - RNA, 23 nt, Human
uaaggcgaggcggaauuaaaccc

SEQ ID NO: 23878 - RNA, 24 nt, Human
uagcaaaucgagucuuaaauaauc

SEQ ID NO: 23879 - RNA, 24 nt, Human
gcuacugugugaauagaaaguaag

SEQ ID NO: 23880 - RNA, 24 nt, Human
uuugcauuuguuuacucuauuuuu

SEQ ID NO: 23881 - RNA, 21 nt, Human
ugagugaggacuccaagaaug

SEQ ID NO: 23882 - RNA, 24 nt, Human
ugcucgugcaguuugaguacugga

SEQ ID NO: 23883 - RNA, 24 nt, Human
ugcuggguggggccaggcauaacc

SEQ ID NO: 23884 - RNA, 24 nt, Human
aggggcacaguucuauugccacca

SEQ ID NO: 23885 - RNA, 24 nt, Human
uggauacagagggccaacuguauu

SEQ ID NO: 23886 - RNA, 24 nt, Human
ugugaauaagcagacagaaagaau

SEQ ID NO: 23887 - RNA, 24 nt, Human
cuaguuaaaaaaaaaaaucaauga

SEQ ID NO: 23888 - RNA, 24 nt, Human
uauacuguauuguuuuuauuugua

SEQ ID NO: 23889 - RNA, 20 nt, Human
gcgcagugguccucgcacgu

SEQ ID NO: 23890 - RNA, 24 nt, Human
uacacuaguuggcccgaacuuggu

SEQ ID NO: 23891 - RNA, 24 nt, Human
uggcuaaguccuggacuggcuuaa

SEQ ID NO: 23892 - RNA, 24 nt, Human
uuaaaaauauuuauccuguuagaa

SEQ ID NO: 23893 - RNA, 24 nt, Human
ugcagcaagaucaugugcauacac

SEQ ID NO: 23894 - RNA, 24 nt, Human
uuaaaaagcaaaauaaacuugguu

SEQ ID NO: 23895 - RNA, 24 nt, Human
aggaggcuauugagggcaccuaca

SEQ ID NO: 23896 - RNA, 24 nt, Human
uggcguggugaccaagaugaagau

SEQ ID NO: 23897 - RNA, 24 nt, Human
uacagaucucuucagcucaccaaa

SEQ ID NO: 23898 - RNA, 24 nt, Human
uaugauguauauuaaauauucuga

SEQ ID NO: 23899 - RNA, 24 nt, Human
auuguccuaaguuccagaaugaaa

SEQ ID NO: 23900 - RNA, 24 nt, Human
uuugaagauuucuuuuuuccauuu

SEQ ID NO: 23901 - RNA, 22 nt, Human
cugccaggagacaaaggcuugc

SEQ ID NO: 23902 - RNA, 24 nt, Human
uugcagaggagcgagcuggaacgc

SEQ ID NO: 23903 - RNA, 24 nt, Human
ugagguuauccucauugauccauu

SEQ ID NO: 23904 - RNA, 24 nt, Human
uucgccgugguggccgaaaacgcc

SEQ ID NO: 23905 - RNA, 24 nt, Human
uuaacauuucuccccucacucccu

SEQ ID NO: 23906 - RNA, 24 nt, Human
uauauaaauguugcaagccauuau

SEQ ID NO: 23907 - RNA, 24 nt, Human
uuccugaauucaguaagcaaguua

SEQ ID NO: 23908 - RNA, 24 nt, Human
uaucaguggauggcauaauuaacu

SEQ ID NO: 23909 - RNA, 24 nt, Human
uuuagacuccauauuaagggggua

SEQ ID NO: 23910 - RNA, 24 nt, Human
accauuuaguguaauuaugguaug

SEQ ID NO: 23911 - RNA, 24 nt, Human
agaugcuaaagaaaacccuuaugg

SEQ ID NO: 23912 - RNA, 24 nt, Human
ucagccaaucagauugcaggcaaa

SEQ ID NO: 23913 - RNA, 24 nt, Human
uucccugggugccacgggucacac

SEQ ID NO: 23914 - RNA, 24 nt, Human
ucagugcaaccagagacccuuucg

SEQ ID NO: 23915 - RNA, 24 nt, Human
cagcaucucagguccucuagaggg

SEQ ID NO: 23916 - RNA, 24 nt, Human
ugguaggugggccccucgcuuucu

SEQ ID NO: 23917 - RNA, 24 nt, Human
aggacccugauccuugcgcucugc

SEQ ID NO: 23918 - RNA, 24 nt, Human
uuucacaggcauuuacucauggcu

SEQ ID NO: 23919 - RNA, 19 nt, Human
uacaguuacucccgggacc

SEQ ID NO: 23920 - RNA, 24 nt, Human
agcuugugaaguuuaaauccaaau

SEQ ID NO: 23921 - RNA, 24 nt, Human
ccaguacagaucguuucucaucuc

SEQ ID NO: 23922 - RNA, 24 nt, Human
uggguuccaaagggggagauauca

SEQ ID NO: 23923 - RNA, 24 nt, Human
ccugaccccugggcuggccuggga

SEQ ID NO: 23924 - RNA, 24 nt, Human
aaagcaaaugaggcagaaaggccc

SEQ ID NO: 23925 - RNA, 24 nt, Human
uauggcaagucacuuugacagaca

SEQ ID NO: 23926 - RNA, 24 nt, Human
ugagaauggcaaaauuagucgccu

SEQ ID NO: 23927 - RNA, 24 nt, Human
uacaccacucccaagaagaauaag

SEQ ID NO: 23928 - RNA, 19 nt, Human
uaaguaauagcuacaauac

SEQ ID NO: 23929 - RNA, 24 nt, Human
caaaagcagcugccugaaugaguu

SEQ ID NO: 23930 - RNA, 24 nt, Human
uauggcaagucacuuugacagaca

SEQ ID NO: 23931 - RNA, 24 nt, Human
ugagaauggcaaaauuagucgccu

SEQ ID NO: 23932 - RNA, 24 nt, Human
uacaccacucccaagaagaauaag

SEQ ID NO: 23933 - RNA, 24 nt, Human
agggauugagccaagaggugaggg

SEQ ID NO: 23934 - RNA, 24 nt, Human
auagcgcaaccuucucacacuaca

SEQ ID NO: 23935 - RNA, 24 nt, Human
ucaagcgcggucguaccugcucgu

SEQ ID NO: 23936 - RNA, 24 nt, Human
gcuuauuuauuuaaaaaaagucaa

SEQ ID NO: 23937 - RNA, 24 nt, Human
aaggauagugucacaugcucaaac

SEQ ID NO: 23938 - RNA, 24 nt, Human
aaagaucauuugaaaccaguuuuu

SEQ ID NO: 23939 - RNA, 24 nt, Human
uugcauguagaguucgacgcugga

SEQ ID NO: 23940 - RNA, 24 nt, Human
uaucuugagguccuggucuuuuaa

SEQ ID NO: 23941 - RNA, 24 nt, Human
gggcaucaucgacagugccuucgg

SEQ ID NO: 23942 - RNA, 24 nt, Human
ugaaaagaagaccagauuuugaac

SEQ ID NO: 23943 - RNA, 24 nt, Human
uauauugugauuuaugcuuuaaga

SEQ ID NO: 23944 - RNA, 24 nt, Human
uaaguaaugaacccaauuccacaa

SEQ ID NO: 23945 - RNA, 24 nt, Human
uucacaguaguucccagggcagca

SEQ ID NO: 23946 - RNA, 24 nt, Human
cuguaccuaugggaagccugucac

SEQ ID NO: 23947 - RNA, 17 nt, Human
cacagauucacugcugu

SEQ ID NO: 23948 - RNA, 24 nt, Human
ucagcaggaggacgacugaugagc

SEQ ID NO: 23949 - RNA, 24 nt, Human
gugaaguugacgcucaagagcagg

SEQ ID NO: 23950 - RNA, 24 nt, Human
cuagagaagucagaagaaucagaa

SEQ ID NO: 23951 - RNA, 22 nt, Human
uuuguaaacaugaaguuacuau

SEQ ID NO: 23952 - RNA, 24 nt, Human
uauuuuacuaugauaguugagaaa

SEQ ID NO: 23953 - RNA, 24 nt, Human
uugaagcaagaccuugcaaagacu

SEQ ID NO: 23954 - RNA, 24 nt, Human
accauggugagcccauuggcaggg

SEQ ID NO: 23955 - RNA, 24 nt, Human
uggcuggggucggggagggguaca

SEQ ID NO: 23956 - RNA, 24 nt, Human
ugggaacgacgcguauccguucug

SEQ ID NO: 23957 - RNA, 24 nt, Human
uguauaaucaucaaagccauucau

SEQ ID NO: 23958 - RNA, 23 nt, Human
uacaccuucuuggcacagcagca

SEQ ID NO: 23959 - RNA, 24 nt, Human
gagcugauuugauggacaauggag

SEQ ID NO: 23960 - RNA, 24 nt, Human
uauggugcggaggcccuggagagg

SEQ ID NO: 23961 - RNA, 24 nt, Human
uugaaagguauauuaaaauuaagg

SEQ ID NO: 23962 - RNA, 24 nt, Human
ucuacagucugugaauauaccaau

SEQ ID NO: 23963 - RNA, 24 nt, Human
gugcagcgcgucacccgggccagc

SEQ ID NO: 23964 - RNA, 24 nt, Human
cauuggaaauuggaagcgguuuau

SEQ ID NO: 23965 - RNA, 24 nt, Human
ucuggugugugaaggucggugggu

SEQ ID NO: 23966 - RNA, 23 nt, Human
cacccuggggcaguagcagggcc

SEQ ID NO: 23967 - RNA, 20 nt, Human
ugcugggagaccuuggccac

SEQ ID NO: 23968 - RNA, 24 nt, Human
uauccagggcagcauugaagucag

SEQ ID NO: 23969 - RNA, 23 nt, Human
gacuguguauccuucaaagaccc

SEQ ID NO: 23970 - RNA, 24 nt, Human
acucccgccuuaccugcgguggca

SEQ ID NO: 23971 - RNA, 24 nt, Human
uauggcaaggaccugauggagaag

SEQ ID NO: 23972 - RNA, 24 nt, Human
aaggagcuugguucggagacaggc

SEQ ID NO: 23973 - RNA, 24 nt, Human
ucuugcugugcaaagagacuggug

SEQ ID NO: 23974 - RNA, 24 nt, Human
uguuguaacauccccccagugggg

SEQ ID NO: 23975 - RNA, 24 nt, Human
acccuugugaacacauguacucca

SEQ ID NO: 23976 - RNA, 24 nt, Human
gggaauaggggaucuggggacagg

SEQ ID NO: 23977 - RNA, 19 nt, Human
aggcaggucacggugggga

SEQ ID NO: 23978 - RNA, 24 nt, Human
acuugcuggauaugauguaccggg

SEQ ID NO: 23979 - RNA, 24 nt, Human
ucuggugggucugauacagguagc

SEQ ID NO: 23980 - RNA, 24 nt, Human
uaaggaaaaaaagggcuuuaaaaa

SEQ ID NO: 23981 - RNA, 24 nt, Human
aggcauuacuauuguucuggucua

SEQ ID NO: 23982 - RNA, 24 nt, Human
uuuaaaaugaauauauguaacaug

SEQ ID NO: 23983 - RNA, 24 nt, Human
aaucuggaccaaguacgaauacac

SEQ ID NO: 23984 - RNA, 24 nt, Human
uucaagcaaaacaguucucaggaa

SEQ ID NO: 23985 - RNA, 24 nt, Human
agugaucugccauaccacugugac

SEQ ID NO: 23986 - RNA, 24 nt, Human
uggaaucugucacacguuuggaac

SEQ ID NO: 23987 - RNA, 24 nt, Human
uggguaauuaagguuuaaaaauau

SEQ ID NO: 23988 - RNA, 24 nt, Human
agggagacuuuguacauuucaggc

SEQ ID NO: 23989 - RNA, 22 nt, Human
uccgugcgcguugcugcggccg

SEQ ID NO: 23990 - RNA, 24 nt, Human
uugaucuugaagaaacugggcgug

SEQ ID NO: 23991 - RNA, 24 nt, Human
ucagugccgggaaccaaugcagac

SEQ ID NO: 23992 - RNA, 24 nt, Human
aggaaggagauauagugaagagga

SEQ ID NO: 23993 - RNA, 24 nt, Human
ugaaagugcucacaaacuucaaga

SEQ ID NO: 23994 - RNA, 24 nt, Human
uguggacgagcaggaggaggcggc

SEQ ID NO: 23995 - RNA, 24 nt, Human
uaagcagccaaaacagaagauuuc

SEQ ID NO: 23996 - RNA, 24 nt, Human
agggggaucccgcguuagaugacc

SEQ ID NO: 23997 - RNA, 24 nt, Human
uggaaguuggaacaauuuugcucc

SEQ ID NO: 23998 - RNA, 24 nt, Human
uggagccccccccgcgaauuuccu

SEQ ID NO: 23999 - RNA, 24 nt, Human
ugaguacacgaugcccacccuccu

SEQ ID NO: 24000 - RNA, 24 nt, Human
cagcagcaauaauuucccagaugc

SEQ ID NO: 24001 - RNA, 24 nt, Human
ugagcagauggaggcagagauagc

SEQ ID NO: 24002 - RNA, 24 nt, Human
acagacacauugacaugggugggu

SEQ ID NO: 24003 - RNA, 24 nt, Human
aucauuuuaggaucaacacuguau

SEQ ID NO: 24004 - RNA, 24 nt, Human
ucccaugguuugaaguaguggguu

SEQ ID NO: 24005 - RNA, 24 nt, Human
uucccaugccccaggcuccugcag

SEQ ID NO: 24006 - RNA, 24 nt, Human
ugugugggcucacugcuuuacuau

SEQ ID NO: 24007 - RNA, 24 nt, Human
cugugcugccccuuucacaucaaa

SEQ ID NO: 24008 - RNA, 24 nt, Human
cacagguacaaacacauucggggg

SEQ ID NO: 24009 - RNA, 24 nt, Human
uaugagcaucuucaacaauauucc

SEQ ID NO: 24010 - RNA, 24 nt, Human
uuggaaggggcguuguccaguucc

SEQ ID NO: 24011 - RNA, 24 nt, Human
uuagggcagguguuuagguggaag

SEQ ID NO: 24012 - RNA, 24 nt, Human
ugaaagucauccucgccagucccg

SEQ ID NO: 24013 - RNA, 24 nt, Human
uauggggaagggugucucaaaggc

SEQ ID NO: 24014 - RNA, 24 nt, Human
uacgccacaucgcugacuguggug

SEQ ID NO: 24015 - RNA, 24 nt, Human
ugaagaggaaucaggaccuggcuc

SEQ ID NO: 24016 - RNA, 24 nt, Human
uuaggguauugugugggaaaaccc

SEQ ID NO: 24017 - RNA, 24 nt, Human
ucaauagugucacagguauuaagc

SEQ ID NO: 24018 - RNA, 24 nt, Human
auauaacuaauaguauuaggaugu

SEQ ID NO: 24019 - RNA, 24 nt, Human
uaacaagaaaaggcaauugguuag

SEQ ID NO: 24020 - RNA, 24 nt, Human
uugaagauccauaacuaucuucug

SEQ ID NO: 24021 - RNA, 24 nt, Human
uaacuggguugacauugggcugaa

SEQ ID NO: 24022 - RNA, 24 nt, Human
ugugcaguugggagauguucagcu

SEQ ID NO: 24023 - RNA, 24 nt, Human
aaucacauuuacuuuuuucuacau

SEQ ID NO: 24024 - RNA, 24 nt, Human
uaugguauccugaagcaccugccc

SEQ ID NO: 24025 - RNA, 24 nt, Human
ugaccaggacaucuacgggcgcga

SEQ ID NO: 24026 - RNA, 24 nt, Human
ucuccugcucggacagcuucucuu

SEQ ID NO: 24027 - RNA, 24 nt, Human
uaacucuccaagccuucugggaug

SEQ ID NO: 24028 - RNA, 24 nt, Human
uuagcaaacagaagcaauugcacc

SEQ ID NO: 24029 - RNA, 24 nt, Human
uugcuuccucccaacaaggcagcu

SEQ ID NO: 24030 - RNA, 19 nt, Human
uaccacauuuacucuggcc

SEQ ID NO: 24031 - RNA, 24 nt, Human
cacuccaugaaguagcugcgguac

SEQ ID NO: 24032 - RNA, 24 nt, Human
ucuuuccggucauaauuuaaccuu

SEQ ID NO: 24033 - RNA, 24 nt, Human
ucugccuucucagccaauugaaau

SEQ ID NO: 24034 - RNA, 20 nt, Human
ucagguggaaaaagaaagaa

SEQ ID NO: 24035 - RNA, 24 nt, Human
uaggucccgagguggagucggggg

SEQ ID NO: 24036 - RNA, 24 nt, Human
uaggauguccucauaugggcuuag

SEQ ID NO: 24037 - RNA, 24 nt, Human
uguauauauuuaacacacacaucu

SEQ ID NO: 24038 - RNA, 24 nt, Human
ugccucagcuuccugaauagcugg

SEQ ID NO: 24039 - RNA, 24 nt, Human
gggaauucuuuauuuaguaauguc

SEQ ID NO: 24040 - RNA, 17 nt, Human
ggggaugggaagucacc

SEQ ID NO: 24041 - RNA, 21 nt, Human
uuuuuuguuugaaguucccag

SEQ ID NO: 24042 - RNA, 18 nt, Human
ugagcagcugcccagccc

SEQ ID NO: 24043 - RNA, 24 nt, Human
gcucauuugcaggggggagccaaa

SEQ ID NO: 24044 - RNA, 24 nt, Human
cuggcgcugaguacgucguggagu

SEQ ID NO: 24045 - RNA, 24 nt, Human
ugauuccaccagggaccauucucc

SEQ ID NO: 24046 - RNA, 24 nt, Human
uaagugaacuuguagucuuauuug

SEQ ID NO: 24047 - RNA, 24 nt, Human
uaguggguuuuuuuucugagguuu

SEQ ID NO: 24048 - RNA, 24 nt, Human
cguacauauauauauauaaacaca

SEQ ID NO: 24049 - RNA, 18 nt, Human
uuuguuguaaugaguuca

SEQ ID NO: 24050 - RNA, 24 nt, Human
gagcgggcuuauaaacccucugug

SEQ ID NO: 24051 - RNA, 24 nt, Human
uugguugugguuaaugaauauguu

SEQ ID NO: 24052 - RNA, 24 nt, Human
accagcugucuuuacaaugauaac

SEQ ID NO: 24053 - RNA, 24 nt, Human
ugagaaugcacauuucuauaaauu

SEQ ID NO: 24054 - RNA, 24 nt, Human
ugagcuggauugacauagcccuug

SEQ ID NO: 24055 - RNA, 23 nt, Human
uagccagccgugaagccaaacug

SEQ ID NO: 24056 - RNA, 24 nt, Human
ucacucgggaggaagaugugccug

SEQ ID NO: 24057 - RNA, 24 nt, Human
ugaguaaagaaaugucguacucca

SEQ ID NO: 24058 - RNA, 24 nt, Human
ugggaugcccccccuuuucaaacc

SEQ ID NO: 24059 - RNA, 19 nt, Human
ugccaaagacucguggggg

SEQ ID NO: 24060 - RNA, 24 nt, Human
gcagcagggaagggcuuugccuga

SEQ ID NO: 24061 - RNA, 24 nt, Human
gagcagcugccuucaggcccugcg

SEQ ID NO: 24062 - RNA, 24 nt, Human
ugcagcagcugccggcgcaccggc

SEQ ID NO: 24063 - RNA, 24 nt, Human
ugaauuggccccguccaaguuaga

SEQ ID NO: 24064 - RNA, 24 nt, Human
ucaggaguugguguccugccugcg

SEQ ID NO: 24065 - RNA, 24 nt, Human
aagcugaccagcgagcucaaguuc

SEQ ID NO: 24066 - RNA, 24 nt, Human
ugauacgagaauagauggucuuga

SEQ ID NO: 24067 - RNA, 24 nt, Human
aggcccaagagcuucugcuaggug

SEQ ID NO: 24068 - RNA, 24 nt, Human
uggcaaagggcugagguucucucg

SEQ ID NO: 24069 - RNA, 21 nt, Human
cauuggacaggacauccagcc

SEQ ID NO: 24070 - RNA, 24 nt, Human
cagcggcagagagccauccucuau

SEQ ID NO: 24071 - RNA, 19 nt, Human
acaaagcaagagaagaagc

SEQ ID NO: 24072 - RNA, 24 nt, Human
cagcggcagagagccauccucuau

SEQ ID NO: 24073 - RNA, 24 nt, Human
uuagugggaagcuccaggcccugc

SEQ ID NO: 24074 - RNA, 24 nt, Human
caucaagauccccgagggcugcgu

SEQ ID NO: 24075 - RNA, 24 nt, Human
ugugacugauugcuuuuccugcag

SEQ ID NO: 24076 - RNA, 21 nt, Human
uggaaggagagcugaucucau

SEQ ID NO: 24077 - RNA, 24 nt, Human
cgccaagauuccagaguaagucag

SEQ ID NO: 24078 - RNA, 24 nt, Human
uauuucacagauaaugagaccuua

SEQ ID NO: 24079 - RNA, 17 nt, Human
agggggccucauuugug

SEQ ID NO: 24080 - RNA, 24 nt, Human
aucccgguguguggcccagcuugu

SEQ ID NO: 24081 - RNA, 23 nt, Human
ugaaaaguuggaaacaguggcac

SEQ ID NO: 24082 - RNA, 19 nt, Human
ucggcagugggguaacgga

SEQ ID NO: 24083 - RNA, 24 nt, Human
agugguaucuggaggacagggcac

SEQ ID NO: 24084 - RNA, 24 nt, Human
gacugcuuccggauccguuacaga

SEQ ID NO: 24085 - RNA, 24 nt, Human
uaccucagcguucacaggccugug

SEQ ID NO: 24086 - RNA, 24 nt, Human
ccuggcuuggucuccgcuuguugu

SEQ ID NO: 24087 - RNA, 24 nt, Human
uagguggcguauuagaauggugcc

SEQ ID NO: 24088 - RNA, 24 nt, Human
uaagaauaugcugccaauuucugu

SEQ ID NO: 24089 - RNA, 24 nt, Human
ugagccuauuuuguggccccugug

SEQ ID NO: 24090 - RNA, 24 nt, Human
uuuuacuucucgccuaugcucaag

SEQ ID NO: 24091 - RNA, 24 nt, Human
acggaguuucaccauguuggccag

SEQ ID NO: 24092 - RNA, 24 nt, Human
uagaugcagacagugaggauggag

SEQ ID NO: 24093 - RNA, 24 nt, Human
uccaugcuguguccugacuggguc

SEQ ID NO: 24094 - RNA, 24 nt, Human
auaguacaaauuagaugcagcgua

SEQ ID NO: 24095 - RNA, 24 nt, Human
ugccucagguuacgaggucuuggc

SEQ ID NO: 24096 - RNA, 24 nt, Human
uuuuauguagucauuaauuuuuag

SEQ ID NO: 24097 - RNA, 24 nt, Human
uguguacagagaaucacauguaua

SEQ ID NO: 24098 - RNA, 24 nt, Human
uaauguucugucacgugaaauauu

SEQ ID NO: 24099 - RNA, 24 nt, Human
cuaggaaaaugccaaaauggaauu

SEQ ID NO: 24100 - RNA, 24 nt, Human
uugaaggggccacaaguguuauua

SEQ ID NO: 24101 - RNA, 24 nt, Human
augaagcagcuuucuguuuucagu

SEQ ID NO: 24102 - RNA, 24 nt, Human
uagaagauaaaaggcauucuguau

SEQ ID NO: 24103 - RNA, 24 nt, Human
aacagauacaagguaaaauucaaa

SEQ ID NO: 24104 - RNA, 24 nt, Human
ugcagcuuucaggaguuugggccc

SEQ ID NO: 24105 - RNA, 24 nt, Human
uggaaacgccaacuauaaccccuc

SEQ ID NO: 24106 - RNA, 24 nt, Human
uugaaggcuucggagacccuguuc

SEQ ID NO: 24107 - RNA, 24 nt, Human
uccacuggcgaaagaugccuuucu

SEQ ID NO: 24108 - RNA, 24 nt, Human
uagagugguggcucccagaauccc

SEQ ID NO: 24109 - RNA, 24 nt, Human
aagaugcucuucaguacucagaau

SEQ ID NO: 24110 - RNA, 24 nt, Human
gcgguuccugcggaagccgaacgu

SEQ ID NO: 24111 - RNA, 24 nt, Human
cccaggagugucugcccuacgcgg

SEQ ID NO: 24112 - RNA, 21 nt, Human
uucaagggauggaaagucacc

SEQ ID NO: 24113 - RNA, 24 nt, Human
ucugaucuauaaaugcgguggcau

SEQ ID NO: 24114 - RNA, 24 nt, Human
ugaaugaguacuuaaaaauaucag

SEQ ID NO: 24115 - RNA, 17 nt, Human
gagcaagacuccgucuc

SEQ ID NO: 24116 - RNA, 18 nt, Human
uagcaaguguuacacaau

SEQ ID NO: 24117 - RNA, 17 nt, Human
uaggcauuccccugugg

SEQ ID NO: 24118 - RNA, 24 nt, Human
uauuccacuuuauguggauuagua

SEQ ID NO: 24119 - RNA, 24 nt, Human
aucaaguuuuaaauccuccuccuu

SEQ ID NO: 24120 - RNA, 24 nt, Human
uuggaagaggagagaugcaucgag

SEQ ID NO: 24121 - RNA, 24 nt, Human
cuuauggucaugcugcaauuuguu

SEQ ID NO: 24122 - RNA, 24 nt, Human
aacaaguaacuccaaagugucaga

SEQ ID NO: 24123 - RNA, 24 nt, Human
ugaaagagacagucgacggaugug

SEQ ID NO: 24124 - RNA, 24 nt, Human
ucaguuacuuucacuaucucaauc

SEQ ID NO: 24125 - RNA, 24 nt, Human
uaaugggucucaaaauucugugac

SEQ ID NO: 24126 - RNA, 24 nt, Human
uaaagcuuaaaacaguaggaguuu

SEQ ID NO: 24127 - RNA, 24 nt, Human
uacaguaucaugggcugagguggg

SEQ ID NO: 24128 - RNA, 24 nt, Human
ucagagcagcccuggagacaggag

SEQ ID NO: 24129 - RNA, 24 nt, Human
uaugcugucugucaguguacagua

SEQ ID NO: 24130 - RNA, 24 nt, Human
uggcacgcggagcuagcgacgguc

SEQ ID NO: 24131 - RNA, 24 nt, Human
augaauuucuucaaucuuuaacuc

SEQ ID NO: 24132 - RNA, 21 nt, Human
aaguaugccugggucuuggau

SEQ ID NO: 24133 - RNA, 24 nt, Human
uccaccacuacuggccaucugauc

SEQ ID NO: 24134 - RNA, 24 nt, Human
aggcaguguccuggaugaaaugcc

SEQ ID NO: 24135 - RNA, 24 nt, Human
uacguggugauauggucagugacu

SEQ ID NO: 24136 - RNA, 24 nt, Human
uccccagugucuuugggggucugu

SEQ ID NO: 24137 - RNA, 24 nt, Human
ugcgaucauggagaguuaaagagg

SEQ ID NO: 24138 - RNA, 24 nt, Human
uuaauccugauaaagaagauuguu

SEQ ID NO: 24139 - RNA, 24 nt, Human
uuuccaccccucaaaccuuggcuc

SEQ ID NO: 24140 - RNA, 24 nt, Human
ugacaagagacuuaacuuaucuug

SEQ ID NO: 24141 - RNA, 22 nt, Human
aacaguguuuucuuuuugggua

SEQ ID NO: 24142 - RNA, 24 nt, Human
uguugauguccaaauugaccagga

SEQ ID NO: 24143 - RNA, 24 nt, Human
agcaaggugguaaaagauacaacc

SEQ ID NO: 24144 - RNA, 24 nt, Human
uaagaucuuaagggguccgagggg

SEQ ID NO: 24145 - RNA, 22 nt, Human
cuuuugguggugcuggaguugg

SEQ ID NO: 24146 - RNA, 22 nt, Human
caccggagaaaacugacgaccc

SEQ ID NO: 24147 - RNA, 24 nt, Human
ucgcaugggacaggcacacgaugc

SEQ ID NO: 24148 - RNA, 18 nt, Human
ggccugguacuguggcug

SEQ ID NO: 24149 - RNA, 24 nt, Human
ucugccauuacuggacaucauucu

SEQ ID NO: 24150 - RNA, 24 nt, Human
agaaaucagaaguugccagcuuuu

SEQ ID NO: 24151 - RNA, 24 nt, Human
uuuaugauuuaugaguuuagaaaa

SEQ ID NO: 24152 - RNA, 24 nt, Human
accuuuuuuuuauuuauuuuuggc

SEQ ID NO: 24153 - RNA, 24 nt, Human
ugcguuuauaaaacuaguuuuuaa

SEQ ID NO: 24154 - RNA, 24 nt, Human
uuugcccacaguaaauguacaacu

SEQ ID NO: 24155 - RNA, 24 nt, Human
aaauucacuuuaugaaucaauaag

SEQ ID NO: 24156 - RNA, 24 nt, Human
uggaacaaagaauagaguucaagu

SEQ ID NO: 24157 - RNA, 24 nt, Human
ccagcaauuugggcucacaaaugg

SEQ ID NO: 24158 - RNA, 24 nt, Human
agaccacucaggcuggacgacgag

SEQ ID NO: 24159 - RNA, 17 nt, Human
uagguugguaccagcag

SEQ ID NO: 24160 - RNA, 24 nt, Human
ucgcucagacggccccaaccgugg

SEQ ID NO: 24161 - RNA, 24 nt, Human
uagaauguuaagaagaggagagau

SEQ ID NO: 24162 - RNA, 24 nt, Human
gaucauuggaagaaucacuuucag

SEQ ID NO: 24163 - RNA, 24 nt, Human
aggaaucauuugguuugggucccu

SEQ ID NO: 24164 - RNA, 24 nt, Human
ugacuggagccaugacuaugauaa

SEQ ID NO: 24165 - RNA, 24 nt, Human
ucagcaccgauauggacggacgac

SEQ ID NO: 24166 - RNA, 24 nt, Human
agcaguuuuuaggucugucaguac

SEQ ID NO: 24167 - RNA, 24 nt, Human
ucgaauaauugaacccgggaacuc

SEQ ID NO: 24168 - RNA, 24 nt, Human
ucgcccaaauguguggaugaaguu

SEQ ID NO: 24169 - RNA, 24 nt, Human
agaggucucaagaaccauggacuc

SEQ ID NO: 24170 - RNA, 24 nt, Human
gaccagugcgagguaugcugcccc

SEQ ID NO: 24171 - RNA, 24 nt, Human
uaccaggcaguugacaggccaccc

SEQ ID NO: 24172 - RNA, 21 nt, Human
gaaguggagaucugugaagug

SEQ ID NO: 24173 - RNA, 24 nt, Human
ugauguggaguggcauuuccuuaa

SEQ ID NO: 24174 - RNA, 23 nt, Human
aucuccuucagcgcgagccaccg

SEQ ID NO: 24175 - RNA, 24 nt, Human
gcgcggcuccaagaaggcauccgc

SEQ ID NO: 24176 - RNA, 19 nt, Human
gucagguucaaccaguacu

SEQ ID NO: 24177 - RNA, 24 nt, Human
uuggggccaauuucugguuggaaa

SEQ ID NO: 24178 - RNA, 18 nt, Human
acucucccagugagggau

SEQ ID NO: 24179 - RNA, 24 nt, Human
acugcagggccuccagggccgggu

SEQ ID NO: 24180 - RNA, 24 nt, Human
gggaaaggggauauuuaaaaaugu

SEQ ID NO: 24181 - RNA, 24 nt, Human
ugaagcuugcuacaguuuucuagg

SEQ ID NO: 24182 - RNA, 22 nt, Human
cauguugggaaaaccaugugcc

SEQ ID NO: 24183 - RNA, 24 nt, Human
uccgucuuuaugcugucacuugca

SEQ ID NO: 24184 - RNA, 24 nt, Human
uacugcgagcaguucuuccaauuc

SEQ ID NO: 24185 - RNA, 17 nt, Human
gggcauggaaagucacc

SEQ ID NO: 24186 - RNA, 24 nt, Human
ucugaucuauaaaugcgguggcau

SEQ ID NO: 24187 - RNA, 24 nt, Human
ucagcaccgaccgggaggccucca

SEQ ID NO: 24188 - RNA, 21 nt, Human
caaccaccaguacaaccuggc

SEQ ID NO: 24189 - RNA, 20 nt, Human
ccgcgccgccuuugugcugc

SEQ ID NO: 24190 - RNA, 24 nt, Human
uuaauauauguacacccauuaugu

SEQ ID NO: 24191 - RNA, 24 nt, Human
cagaggcaaaucagaaagucacgg

SEQ ID NO: 24192 - RNA, 24 nt, Human
acggggcgggggcggggcggcagu

SEQ ID NO: 24193 - RNA, 17 nt, Human
uacacuguagaugugga

SEQ ID NO: 24194 - RNA, 24 nt, Human
accaggcaaauucuuaguccuacu

SEQ ID NO: 24195 - RNA, 22 nt, Human
ugacaagaauuucuacgaagug

SEQ ID NO: 24196 - RNA, 19 nt, Human
ugcccaggagcagaugcgg

SEQ ID NO: 24197 - RNA, 24 nt, Human
uuuagagucuucaaacucuauuuc

SEQ ID NO: 24198 - RNA, 24 nt, Human
ucacuguagaccccaaauaccauc

SEQ ID NO: 24199 - RNA, 24 nt, Human
ucugaucuauaaaugcgguggcau

SEQ ID NO: 24200 - RNA, 21 nt, Human
uucaagggauggaaagucacc

SEQ ID NO: 24201 - RNA, 24 nt, Human
agcgugcugcuucugcaaaagauu

SEQ ID NO: 24202 - RNA, 24 nt, Human
ggagaggaaugaccuguuucuuuc

SEQ ID NO: 24203 - RNA, 24 nt, Human
aucauccuuuucuuuuucuuauua

SEQ ID NO: 24204 - RNA, 24 nt, Human
caggggaggccggccacaaaugca

SEQ ID NO: 24205 - RNA, 24 nt, Human
ccugucaagccccgcagcagcagc

SEQ ID NO: 24206 - RNA, 24 nt, Human
auagcucuagggaucucagcaggg

SEQ ID NO: 24207 - RNA, 24 nt, Human
ggauauagggucgaagccccacuc

SEQ ID NO: 24208 - RNA, 24 nt, Human
uuuguagucacucauaggccagac

SEQ ID NO: 24209 - RNA, 24 nt, Human
ugcgggcaagcgucacccugcugg

SEQ ID NO: 24210 - RNA, 24 nt, Human
cuacggggaugacuaccgggccag

SEQ ID NO: 24211 - RNA, 24 nt, Human
cauugugcuggaggaugagggcag

SEQ ID NO: 24212 - RNA, 24 nt, Human
ugugguuuuaaaagagucccucaa

SEQ ID NO: 24213 - RNA, 24 nt, Human
ucucugguuguucacauuccaaaa

SEQ ID NO: 24214 - RNA, 24 nt, Human
ugucgcaggcugcucugucucuua

SEQ ID NO: 24215 - RNA, 24 nt, Human
gcugcagagagcuuuaauggcaau

SEQ ID NO: 24216 - RNA, 24 nt, Human
uaggggaagucagacuaaucccug

SEQ ID NO: 24217 - RNA, 24 nt, Human
gcugcagugcccuucauugcacga

SEQ ID NO: 24218 - RNA, 24 nt, Human
uccaugugagcauguauuucuuga

SEQ ID NO: 24219 - RNA, 24 nt, Human
aauuucuccucugcagggugagcu

SEQ ID NO: 24220 - RNA, 22 nt, Human
ugggaaccuguguuugucauau

SEQ ID NO: 24221 - RNA, 24 nt, Human
aaggggaccauaaggcauuuuggg

SEQ ID NO: 24222 - RNA, 24 nt, Human
ucugcaggcccaggacagugggcu

SEQ ID NO: 24223 - RNA, 24 nt, Human
agcuguguggccucaagcagccuu

SEQ ID NO: 24224 - RNA, 24 nt, Human
uaauagaccaguuaacccaggagu

SEQ ID NO: 24225 - RNA, 24 nt, Human
caaggcccagaagacgaugauuca

SEQ ID NO: 24226 - RNA, 24 nt, Human
ugggaugauaugggaugauggaag

SEQ ID NO: 24227 - RNA, 24 nt, Human
accaaggaaaacucacuaccauga

SEQ ID NO: 24228 - RNA, 24 nt, Human
agugauuugcuuuugccuccuagg

SEQ ID NO: 24229 - RNA, 24 nt, Human
ucagagaaacuuucguucaguaua

SEQ ID NO: 24230 - RNA, 23 nt, Human
aaauagcugugaaacuagauuuu

SEQ ID NO: 24231 - RNA, 24 nt, Human
acuagauuuuccuauaaaugaucu

SEQ ID NO: 24232 - RNA, 24 nt, Human
uaugcaguucugagucugugccac

SEQ ID NO: 24233 - RNA, 24 nt, Human
uuuuggggguaaaaaaggcaacca

SEQ ID NO: 24234 - RNA, 24 nt, Human
aggguucaguuucuuuuuccccag

SEQ ID NO: 24235 - RNA, 24 nt, Human
ucccuucccuucccaaaauucagg

SEQ ID NO: 24236 - RNA, 24 nt, Human
ugguguuucucucuugggggcuuu

SEQ ID NO: 24237 - RNA, 24 nt, Human
ugagaucgguuccgcaggagcugg

SEQ ID NO: 24238 - RNA, 22 nt, Human
ggcccggccgcgcucaccguca

SEQ ID NO: 24239 - RNA, 24 nt, Human
ugacagcaaaggcacagacauucu

SEQ ID NO: 24240 - RNA, 24 nt, Human
ucccuuacucaaaacaaaaucgaa

SEQ ID NO: 24241 - RNA, 24 nt, Human
acuagauucuguccuguugcacug

SEQ ID NO: 24242 - RNA, 24 nt, Human
acuuucaugccauagaccaggggu

SEQ ID NO: 24243 - RNA, 24 nt, Human
uguuuauuuaucaagguuuacaug

SEQ ID NO: 24244 - RNA, 24 nt, Human
ugaaaugguguaacccuauaaagc

SEQ ID NO: 24245 - RNA, 24 nt, Human
aaagggaacaauuaaggggagacu

SEQ ID NO: 24246 - RNA, 24 nt, Human
uccagguacaccagcugcguaccg

SEQ ID NO: 24247 - RNA, 23 nt, Human
ucgaacugcacgcccugcucggc

SEQ ID NO: 24248 - RNA, 24 nt, Human
aaucacauuuacuuuuuucuacau

SEQ ID NO: 24249 - RNA, 24 nt, Human
uaugguauccugaagcaccugccc

SEQ ID NO: 24250 - RNA, 24 nt, Human
uuagagccguauggugagcagccu

SEQ ID NO: 24251 - RNA, 24 nt, Human
aagcaggccaagcgcuccaacucg

SEQ ID NO: 24252 - RNA, 24 nt, Human
caggugcccaucgaggugucgcuc

SEQ ID NO: 24253 - RNA, 24 nt, Human
uccuuugggccuggccuguucugu

SEQ ID NO: 24254 - RNA, 20 nt, Human
uuagaguuuuaauuguugac

SEQ ID NO: 24255 - RNA, 22 nt, Human
uagaguccuccguuccucuugg

SEQ ID NO: 24256 - RNA, 24 nt, Human
ucagugccugauggaguggccggg

SEQ ID NO: 24257 - RNA, 24 nt, Human
uggaaagagacuaagaacaagacu

SEQ ID NO: 24258 - RNA, 24 nt, Human
uggaagcagcgagggaaaauuuaa

SEQ ID NO: 24259 - RNA, 24 nt, Human
ucagucacacagaaucugcuuugu

SEQ ID NO: 24260 - RNA, 24 nt, Human
ccuugggcuuaaaauggaaagcuu

SEQ ID NO: 24261 - RNA, 24 nt, Human
uguugcuaggaaaugggaaaaggg

SEQ ID NO: 24262 - RNA, 24 nt, Human
guguaucuguaucuauaucauaca

SEQ ID NO: 24263 - RNA, 24 nt, Human
uaacagguguaagaguguugaaaa

SEQ ID NO: 24264 - RNA, 24 nt, Human
ugugcagaagaaaugggaaggauu

SEQ ID NO: 24265 - RNA, 21 nt, Human
auggagacaaggugguggcag

SEQ ID NO: 24266 - RNA, 20 nt, Human
uguccagaauuuccagaagu

SEQ ID NO: 24267 - RNA, 24 nt, Human
ugagugcccccagggaggggcugg

SEQ ID NO: 24268 - RNA, 24 nt, Human
uguaaguaacuucacauuaaaaaa

SEQ ID NO: 24269 - RNA, 22 nt, Human
uggcuucuggguuccacuccuu

SEQ ID NO: 24270 - RNA, 24 nt, Human
aggaaggagauauagugaagagga

SEQ ID NO: 24271 - RNA, 24 nt, Human
ucagugcgggaaccaaugcagacu

SEQ ID NO: 24272 - RNA, 24 nt, Human
guagaguuuucuucaggcuuaaag

SEQ ID NO: 24273 - RNA, 17 nt, Human
ugucucagaaucaacau

SEQ ID NO: 24274 - RNA, 24 nt, Human
uuagugaacagaauugaaaaggug

SEQ ID NO: 24275 - RNA, 24 nt, Human
uuggcugacaccguggaggguaaa

SEQ ID NO: 24276 - RNA, 24 nt, Human
aagaaucuugccuuucuccuucag

SEQ ID NO: 24277 - RNA, 24 nt, Human
ugacugaacuuugggcagaugcuc

SEQ ID NO: 24278 - RNA, 24 nt, Human
ggugcaguggaaggaaaaauaggu

SEQ ID NO: 24279 - RNA, 24 nt, Human
cacaguuucagaacugaguaagga

SEQ ID NO: 24280 - RNA, 24 nt, Human
uguaaagauugccuuuguucuguc

SEQ ID NO: 24281 - RNA, 22 nt, Human
auaaaggucaaacaucagugag

SEQ ID NO: 24282 - RNA, 24 nt, Human
uuaggagccuucugacuuaggguu

SEQ ID NO: 24283 - RNA, 24 nt, Human
uuccugccauccuaauaagagccc

SEQ ID NO: 24284 - RNA, 24 nt, Human
aagguuuuaguuuauuuuucccaa

SEQ ID NO: 24285 - RNA, 24 nt, Human
auaagucgauuuuauacucaaagu

SEQ ID NO: 24286 - RNA, 24 nt, Human
gcgcagcuucaggggccgcaaggg

SEQ ID NO: 24287 - RNA, 19 nt, Human
ucugaccggcuucaagcuc

SEQ ID NO: 24288 - RNA, 24 nt, Human
cacccuuugggaucuugggcuuaa

SEQ ID NO: 24289 - RNA, 24 nt, Human
aucuucuuuaggcccuuuuuguug

SEQ ID NO: 24290 - RNA, 24 nt, Human
aaccauuugagcgcuuggcacaaa

SEQ ID NO: 24291 - RNA, 22 nt, Human
ccucugagauucuggggguggg

SEQ ID NO: 24292 - RNA, 23 nt, Human
uugcggccgcuggagcccgagcc

SEQ ID NO: 24293 - RNA, 24 nt, Human
gccacauuuaccauggucggaauu

SEQ ID NO: 24294 - RNA, 24 nt, Human
gcuuucaucuccagccuucuccau

SEQ ID NO: 24295 - RNA, 23 nt, Human
uacacgugaaguugggugaacac

SEQ ID NO: 24296 - RNA, 24 nt, Human
ccagccccggauaccuggacugcu

SEQ ID NO: 24297 - RNA, 24 nt, Human
ugagaagaguguuccuggccuugc

SEQ ID NO: 24298 - RNA, 24 nt, Human
auaguuuagccucaaaaaaauaaa

SEQ ID NO: 24299 - RNA, 24 nt, Human
acugugcccuuccccuccugaaag

SEQ ID NO: 24300 - RNA, 24 nt, Human
ucacugaggagggggccuuggcgg

SEQ ID NO: 24301 - RNA, 24 nt, Human
uauggagcggcgcuucccggacac

SEQ ID NO: 24302 - RNA, 17 nt, Human
ccccagagacaucggcu

SEQ ID NO: 24303 - RNA, 24 nt, Human
agaaggaaguggucucugcccagc

SEQ ID NO: 24304 - RNA, 24 nt, Human
uuuuucgccgauacucuucacagc

SEQ ID NO: 24305 - RNA, 24 nt, Human
aauggcagagucuggugcugacga

SEQ ID NO: 24306 - RNA, 24 nt, Human
ugagcaguguaugucaggacuugu

SEQ ID NO: 24307 - RNA, 24 nt, Human
uagagcuagugaauuagccuauuu

SEQ ID NO: 24308 - RNA, 24 nt, Human
ugggagcagcagccaaguccgcgg

SEQ ID NO: 24309 - RNA, 24 nt, Human
aaaauucaaccuauacaaaaagga

SEQ ID NO: 24310 - RNA, 24 nt, Human
uucccggagaugcggcgcgcagga

SEQ ID NO: 24311 - RNA, 24 nt, Human
gcgcaaagccgugcggagauugga

SEQ ID NO: 24312 - RNA, 24 nt, Human
uuaaaaucaucaccuacuuuucaa

SEQ ID NO: 24313 - RNA, 24 nt, Human
auggauacaacuauuuggauuggu

SEQ ID NO: 24314 - RNA, 24 nt, Human
ccccauaugccgccccggagcugu

SEQ ID NO: 24315 - RNA, 24 nt, Human
ugacuuuggcuucagcaacgaguu

SEQ ID NO: 24316 - RNA, 24 nt, Human
agggagccaauaauagucuuuauc

SEQ ID NO: 24317 - RNA, 24 nt, Human
cuggaaggccuucccgguuaaccc

SEQ ID NO: 24318 - RNA, 24 nt, Human
aagcagaaccuggaugagcuugga

SEQ ID NO: 24319 - RNA, 24 nt, Human
uugcugccuguuaauuaccauuug

SEQ ID NO: 24320 - RNA, 24 nt, Human
uuugcacaguagaugcagaacuag

SEQ ID NO: 24321 - RNA, 24 nt, Human
uaaggucaucgauacggagcagga

SEQ ID NO: 24322 - RNA, 24 nt, Human
ccugcaggucucgggggugacgcu

SEQ ID NO: 24323 - RNA, 24 nt, Human
uauuccucccugcagcccuugccc

SEQ ID NO: 24324 - RNA, 24 nt, Human
aagguccucuuacuuauuccgccu

SEQ ID NO: 24325 - RNA, 24 nt, Human
aguggaccagagccuucgucugga

SEQ ID NO: 24326 - RNA, 24 nt, Human
uaagaaaacggacucuccccacag

SEQ ID NO: 24327 - RNA, 24 nt, Human
uauggcaagucacuuugacagaca

SEQ ID NO: 24328 - RNA, 24 nt, Human
uacaccacucccaagaagaauaag

SEQ ID NO: 24329 - RNA, 24 nt, Human
uuggucauagucuuuucguaucau

SEQ ID NO: 24330 - RNA, 24 nt, Human
ugguauguauuuauagcaauugua

SEQ ID NO: 24331 - RNA, 24 nt, Human
ucacgcgagacucccacucgagga

SEQ ID NO: 24332 - RNA, 21 nt, Human
guccuuggauuucucuuucuc

SEQ ID NO: 24333 - RNA, 24 nt, Human
acaaaacagcccugcugcaaagau

SEQ ID NO: 24334 - RNA, 24 nt, Human
ggaguagagcacauagguucuuug

SEQ ID NO: 24335 - RNA, 24 nt, Human
uguaauauuuuaggucaucuaauc

SEQ ID NO: 24336 - RNA, 24 nt, Human
ucccagauggcuguugggucaagu

SEQ ID NO: 24337 - RNA, 24 nt, Human
uggaaagcugagccugagagacag

SEQ ID NO: 24338 - RNA, 24 nt, Human
uaugugguuugaaucggauguaga

SEQ ID NO: 24339 - RNA, 24 nt, Human
uuuaaauauacaauacaucauaca

SEQ ID NO: 24340 - RNA, 24 nt, Human
acaccagaaaguuauccaacaguu

SEQ ID NO: 24341 - RNA, 22 nt, Human
uuccccuuuuugucaauaggug

SEQ ID NO: 24342 - RNA, 24 nt, Human
aacucuguacagauuuauuuauug

SEQ ID NO: 24343 - RNA, 24 nt, Human
uguuauggacccccaaauucugag

SEQ ID NO: 24344 - RNA, 24 nt, Human
uaccggguucucggaguacggggg

SEQ ID NO: 24345 - RNA, 24 nt, Human
ucagaaggcacaaagagcuguauu

SEQ ID NO: 24346 - RNA, 24 nt, Human
gggcgcccacaaugucgcgcgcgc

SEQ ID NO: 24347 - RNA, 24 nt, Human
gugcagagaaccauugcaagacuu

SEQ ID NO: 24348 - RNA, 24 nt, Human
gggaaguuuggcgucauuugcuug

SEQ ID NO: 24349 - RNA, 24 nt, Human
cccggaguccgagacugcuugagc

SEQ ID NO: 24350 - RNA, 24 nt, Human
uguaccgaaagaugguguucuaca

SEQ ID NO: 24351 - RNA, 24 nt, Human
ucacggucccgccggcgccaccac

SEQ ID NO: 24352 - RNA, 24 nt, Human
uaugacagcguggagcaggauggc

SEQ ID NO: 24353 - RNA, 24 nt, Human
ugauuguccaaguguacucuucaa

SEQ ID NO: 24354 - RNA, 24 nt, Human
uagcgguaucaugggugguaacau

SEQ ID NO: 24355 - RNA, 24 nt, Human
ucgccgccuaggcggggcagggug

SEQ ID NO: 24356 - RNA, 20 nt, Human
cuggaucgauccugcgauua

SEQ ID NO: 24357 - RNA, 24 nt, Human
aauuguuuguuguuaacuuguaua

SEQ ID NO: 24358 - RNA, 24 nt, Human
ucccuggggggccacccaaaucgg

SEQ ID NO: 24359 - RNA, 24 nt, Human
uuaaaacaggcaauuuaaaaaacc

SEQ ID NO: 24360 - RNA, 24 nt, Human
augguacuuagagucgggaugcac

SEQ ID NO: 24361 - RNA, 24 nt, Human
cuauucuaaagaaaaaaaugggau

SEQ ID NO: 24362 - RNA, 24 nt, Human
uaaguaauugugggucucaaaaac

SEQ ID NO: 24363 - RNA, 24 nt, Human
aaugauacuuuucccacagcaaug

SEQ ID NO: 24364 - RNA, 22 nt, Human
cucccggcuuggguggcgcggc

SEQ ID NO: 24365 - RNA, 20 nt, Human
uaggugguuauguuccaccc

SEQ ID NO: 24366 - RNA, 24 nt, Human
gugggccuguuccuccaugccggc

SEQ ID NO: 24367 - RNA, 24 nt, Human
cuggugcugcugaacgagaugagc

SEQ ID NO: 24368 - RNA, 24 nt, Human
acugcacuccagccugggcaagag

SEQ ID NO: 24369 - RNA, 24 nt, Human
auuaagcagauagggagaagggaa

SEQ ID NO: 24370 - RNA, 24 nt, Human
aaugauacuuuucccacagcaaug

SEQ ID NO: 24371 - RNA, 24 nt, Human
gaccuggacaaguauguggaaaua

SEQ ID NO: 24372 - RNA, 24 nt, Human
cugcggccgacacucaugaaggcc

SEQ ID NO: 24373 - RNA, 24 nt, Human
cucccggcuuggguggcgcggccg

SEQ ID NO: 24374 - RNA, 24 nt, Human
aaugauacuuuucccacagcaaug

SEQ ID NO: 24375 - RNA, 24 nt, Human
uugaagggggccgcgcgcuuggcg

SEQ ID NO: 24376 - RNA, 24 nt, Human
ugcggggugacggugguguagggg

SEQ ID NO: 24377 - RNA, 24 nt, Human
uuacuuugaaaggcucuacaaagu

SEQ ID NO: 24378 - RNA, 20 nt, Human
caucccacuggauccacacc

SEQ ID NO: 24379 - RNA, 21 nt, Human
uacaucucuucuuccuauguu

SEQ ID NO: 24380 - RNA, 24 nt, Human
ggacugaauuuauuguggaaguaa

SEQ ID NO: 24381 - RNA, 22 nt, Human
aacagagucauccagccaaugg

SEQ ID NO: 24382 - RNA, 20 nt, Human
caucccacuggauccacacc

SEQ ID NO: 24383 - RNA, 24 nt, Human
ucccccagcugcucugccccuuuc

SEQ ID NO: 24384 - RNA, 23 nt, Human
uccagcagauuacucgggauuuc

SEQ ID NO: 24385 - RNA, 24 nt, Human
ugggaaacuccgaggacagagggc

SEQ ID NO: 24386 - RNA, 24 nt, Human
ugugugccauugcccaggcagagu

SEQ ID NO: 24387 - RNA, 24 nt, Human
ugucacaggacaaucuuaaaggag

SEQ ID NO: 24388 - RNA, 24 nt, Human
uacaaguaucacaguaacauaccu

SEQ ID NO: 24389 - RNA, 24 nt, Human
cucggggacguggcucccaacuuu

SEQ ID NO: 24390 - RNA, 24 nt, Human
cugcagguagacaggcugagcgcg

SEQ ID NO: 24391 - RNA, 24 nt, Human
ucagaaaagcgcucagcacacagu

SEQ ID NO: 24392 - RNA, 24 nt, Human
uuuuuuguuguuguuguuuuugau

SEQ ID NO: 24393 - RNA, 24 nt, Human
uugguucuuucgucugcuacagug

SEQ ID NO: 24394 - RNA, 19 nt, Human
cacugcguuuaccggugug

SEQ ID NO: 24395 - RNA, 24 nt, Human
uuaguaauuaguuguuagauagcu

SEQ ID NO: 24396 - RNA, 19 nt, Human
uuacuuagauuucaugagg

SEQ ID NO: 24397 - RNA, 24 nt, Human
aagaaguugaucuugugugaugac

SEQ ID NO: 24398 - RNA, 24 nt, Human
caagaggaaagcauuccucaaacc

SEQ ID NO: 24399 - RNA, 22 nt, Human
uagguugcagaagcacagcuga

SEQ ID NO: 24400 - RNA, 24 nt, Human
aucaguugcccuuuaugaucucag

SEQ ID NO: 24401 - RNA, 24 nt, Human
cacaguguuauuuguuguaccuga

SEQ ID NO: 24402 - RNA, 24 nt, Human
uggaauagcgucuuccauguggga

SEQ ID NO: 24403 - RNA, 24 nt, Human
uaaagaaagaaaauuacagccugc

SEQ ID NO: 24404 - RNA, 24 nt, Human
uggaagaugcucaacaccuccucc

SEQ ID NO: 24405 - RNA, 24 nt, Human
ugaccaggaaauacaacgagcugc

SEQ ID NO: 24406 - RNA, 24 nt, Human
uggcuuguagaagggacggcucag

SEQ ID NO: 24407 - RNA, 21 nt, Human
ugggaggggcugaauguggug

SEQ ID NO: 24408 - RNA, 24 nt, Human
aagcguuuugagcagaaaggauuc

SEQ ID NO: 24409 - RNA, 24 nt, Human
uauuauguaugguuguaaauucau

SEQ ID NO: 24410 - RNA, 24 nt, Human
uugcaguuaauuugaaaacuuugg

SEQ ID NO: 24411 - RNA, 24 nt, Human
uaagugaauaucaaugcuucuuuu

SEQ ID NO: 24412 - RNA, 24 nt, Human
uagcuguaacacgaagggcuccga

SEQ ID NO: 24413 - RNA, 24 nt, Human
uaagugagcguuuauuuuauucac

SEQ ID NO: 24414 - RNA, 24 nt, Human
uagguucaacuacucaauuucaug

SEQ ID NO: 24415 - RNA, 24 nt, Human
ggucauuaccuuauugaguuuaga

SEQ ID NO: 24416 - RNA, 24 nt, Human
uuuagacuugacgcaacgggaggu

SEQ ID NO: 24417 - RNA, 24 nt, Human
aaauggaaucuagaagcuaaauuu

SEQ ID NO: 24418 - RNA, 22 nt, Human
uuuacagaaaauucuagaacaa

SEQ ID NO: 24419 - RNA, 24 nt, Human
ucuggcacaggaaauggucuccaa

SEQ ID NO: 24420 - RNA, 24 nt, Human
uauacaguggcacguugcuuauag

SEQ ID NO: 24421 - RNA, 24 nt, Human
uaacaucguggaaagccuggauag

SEQ ID NO: 24422 - RNA, 24 nt, Human
ucauacuuuccuuugauuucccag

SEQ ID NO: 24423 - RNA, 24 nt, Human
uauuaguauuuuuccggugaacag

SEQ ID NO: 24424 - RNA, 24 nt, Human
augguacuuaauuacuuguguggu

SEQ ID NO: 24425 - RNA, 23 nt, Human
cgagcacacgggcuacacggggc

SEQ ID NO: 24426 - RNA, 24 nt, Human
uugcucccugcgggccccgccgag

SEQ ID NO: 24427 - RNA, 24 nt, Human
uaaggaagggucaucauaaucaug

SEQ ID NO: 24428 - RNA, 24 nt, Human
agccccuggccaggugucaccucc

SEQ ID NO: 24429 - RNA, 24 nt, Human
ugucgggggagggcugccgucgag

SEQ ID NO: 24430 - RNA, 24 nt, Human
gaguacacaccaaucauccauacc

SEQ ID NO: 24431 - RNA, 24 nt, Human
uacgcugcauuaucuagugauaga

SEQ ID NO: 24432 - RNA, 24 nt, Human
uuaaagaggguguacgggaguuuc

SEQ ID NO: 24433 - RNA, 24 nt, Human
uccgugcugcgugcccagaguagu

SEQ ID NO: 24434 - RNA, 24 nt, Human
caccgcguauaacuuuccagccca

SEQ ID NO: 24435 - RNA, 24 nt, Human
uuaguaggcguugaucaugaguca

SEQ ID NO: 24436 - RNA, 23 nt, Human
ugacauggaucuauuugaguaca

SEQ ID NO: 24437 - RNA, 24 nt, Human
caguguuuguagacuuggaaccca

SEQ ID NO: 24438 - RNA, 24 nt, Human
gagggaacuggccuuuccuaggga

SEQ ID NO: 24439 - RNA, 24 nt, Human
uacaagcccccgccgagcgaaugu

SEQ ID NO: 24440 - RNA, 24 nt, Human
uccaggcccuuguccugcaggcug

SEQ ID NO: 24441 - RNA, 24 nt, Human
uccacaguuucggacgcaguauau

SEQ ID NO: 24442 - RNA, 24 nt, Human
uugaagcaccuuggggccuuguaa

SEQ ID NO: 24443 - RNA, 24 nt, Human
gagcugcuggaggcuggcuacuug

SEQ ID NO: 24444 - RNA, 24 nt, Human
ucugcaguaggucugccggcgaug

SEQ ID NO: 24445 - RNA, 18 nt, Human
ugggaccucuucagagaa

SEQ ID NO: 24446 - RNA, 24 nt, Human
uaccggaaaagcggcaugucaaaa

SEQ ID NO: 24447 - RNA, 24 nt, Human
uaaaaguuguuuugaaaagacaau

SEQ ID NO: 24448 - RNA, 20 nt, Human
uuuaucugacagugaaucug

SEQ ID NO: 24449 - RNA, 24 nt, Human
ggucuugauccugaaagaauaauu

SEQ ID NO: 24450 - RNA, 24 nt, Human
ugacaauacuugggaaccugaaga

SEQ ID NO: 24451 - RNA, 24 nt, Human
uucaaagccuccacgacucuguuu

SEQ ID NO: 24452 - RNA, 24 nt, Human
ucaguacgagugugcgugagugug

SEQ ID NO: 24453 - RNA, 23 nt, Human
uggaaaauaagcaucuagaaggu

SEQ ID NO: 24454 - RNA, 24 nt, Human
aaucaagcuuuggacuaauuaugc

SEQ ID NO: 24455 - RNA, 24 nt, Human
uccaggaugggucuccaucucuug

SEQ ID NO: 24456 - RNA, 24 nt, Human
uuucagaauucccagaguuuacuc

SEQ ID NO: 24457 - RNA, 24 nt, Human
aagaacucaagucagaaucagcca

SEQ ID NO: 24458 - RNA, 24 nt, Human
uguuuuaagaaaauggcagacaaa

SEQ ID NO: 24459 - RNA, 24 nt, Human
gacaggccgcacgccuauuuugga

SEQ ID NO: 24460 - RNA, 24 nt, Human
uauggcaagucacuuugacagaca

SEQ ID NO: 24461 - RNA, 24 nt, Human
uacaccacucccaagaagaauaag

SEQ ID NO: 24462 - RNA, 24 nt, Human
uuaaauuuuuuagagaugaaugaa

SEQ ID NO: 24463 - RNA, 24 nt, Human
gcgcgcaaaccggaggggucugga

SEQ ID NO: 24464 - RNA, 21 nt, Human
ucaguccacauaggccuuugu

SEQ ID NO: 24465 - RNA, 17 nt, Human
uagcuuagacuaggaua

SEQ ID NO: 24466 - RNA, 24 nt, Human
uucacaaucccuuuacuuuaauuu

SEQ ID NO: 24467 - RNA, 24 nt, Human
uacaggaagugccaaguucaaugc

SEQ ID NO: 24468 - RNA, 24 nt, Human
caacauggcagccuuuuccuuaga

SEQ ID NO: 24469 - RNA, 24 nt, Human
aagaauuucaaacuauguuguaau

SEQ ID NO: 24470 - RNA, 24 nt, Human
uggcaaauggacagaacaaucauu

SEQ ID NO: 24471 - RNA, 24 nt, Human
aggcaaacaaguccagagagagca

SEQ ID NO: 24472 - RNA, 24 nt, Human
uccaugaaaaagaccaagguccug

SEQ ID NO: 24473 - RNA, 19 nt, Human
guggagugugcugugcccc

SEQ ID NO: 24474 - RNA, 24 nt, Human
gaaacuuucacaauguccggagcc

SEQ ID NO: 24475 - RNA, 24 nt, Human
uucauguagaggaaccacaccagg

SEQ ID NO: 24476 - RNA, 24 nt, Human
gauaacauuauuauguugccuucu

SEQ ID NO: 24477 - RNA, 24 nt, Human
aaugugcugguaacugcuuugcuu

SEQ ID NO: 24478 - RNA, 24 nt, Human
ucacaucuugcuguuccggcgccc

SEQ ID NO: 24479 - RNA, 24 nt, Human
gaacacacuuggcagauggaggaa

SEQ ID NO: 24480 - RNA, 24 nt, Human
aggcccggcaggcuugggucggga

SEQ ID NO: 24481 - RNA, 24 nt, Human
uuucauuugaagaacauuuucaau

SEQ ID NO: 24482 - RNA, 24 nt, Human
aaggcucuagaugaguuucuuggu

SEQ ID NO: 24483 - RNA, 24 nt, Human
uccaaaauuuccucccugaucuug

SEQ ID NO: 24484 - RNA, 24 nt, Human
uauaaagugaaauagaacuuauuu

SEQ ID NO: 24485 - RNA, 19 nt, Human
gaugcaaaauguuugcagu

SEQ ID NO: 24486 - RNA, 24 nt, Human
aaauggaaucuagaagcuaaauuu

SEQ ID NO: 24487 - RNA, 22 nt, Human
uuuacagaaaauucuagaacaa

SEQ ID NO: 24488 - RNA, 24 nt, Human
uggcuacgaauggggccgccagaa

SEQ ID NO: 24489 - RNA, 24 nt, Human
caaugggugaucgggcaugacccc

SEQ ID NO: 24490 - RNA, 24 nt, Human
agguuccagcacaaaggagucugu

SEQ ID NO: 24491 - RNA, 19 nt, Human
ccgcugagggaggcacagg

SEQ ID NO: 24492 - RNA, 24 nt, Human
uuuauacaauaggcuuggucaaaa

SEQ ID NO: 24493 - RNA, 24 nt, Human
uauugcacuuggggaaugaguaca

SEQ ID NO: 24494 - RNA, 24 nt, Human
uuuuacauucaucauggcuacagg

SEQ ID NO: 24495 - RNA, 24 nt, Human
agcaaauuuggauguagacugaca

SEQ ID NO: 24496 - RNA, 24 nt, Human
cagcugcaucugcgccaccugcug

SEQ ID NO: 24497 - RNA, 24 nt, Human
uugcauuuauguuuuugcagucaa

SEQ ID NO: 24498 - RNA, 24 nt, Human
uuagaagauauauauaaccaaugc

SEQ ID NO: 24499 - RNA, 24 nt, Human
ucccuguaucucccauggaagaug

SEQ ID NO: 24500 - RNA, 24 nt, Human
ugaggggucaggcagaauauggug

SEQ ID NO: 24501 - RNA, 24 nt, Human
cuccugaggaugcuacucccgagc

SEQ ID NO: 24502 - RNA, 24 nt, Human
uucaccugcgcuguggacacugag

SEQ ID NO: 24503 - RNA, 24 nt, Human
uguguuuguagacuuggaacccac

SEQ ID NO: 24504 - RNA, 24 nt, Human
caccggucuucagggcuucuuggu

SEQ ID NO: 24505 - RNA, 24 nt, Human
cucucgggcucuacucagacuagc

SEQ ID NO: 24506 - RNA, 24 nt, Human
ucuggucgcggcuggcccgccccg

SEQ ID NO: 24507 - RNA, 24 nt, Human
uccaggaggagagccaggccugcc

SEQ ID NO: 24508 - RNA, 24 nt, Human
ucacuuggacuuuaucugggcaau

SEQ ID NO: 24509 - RNA, 24 nt, Human
augcagugcuucuuucuguaauuu

SEQ ID NO: 24510 - RNA, 24 nt, Human
uuaccgaaucacccucuuauuuuu

SEQ ID NO: 24511 - RNA, 24 nt, Human
uuagauuaucuuauuugaaaguau

SEQ ID NO: 24512 - RNA, 24 nt, Human
ggacgaggcugguggcgacgggcu

SEQ ID NO: 24513 - RNA, 24 nt, Human
ucucugcuugguuaggguuagugu

SEQ ID NO: 24514 - RNA, 24 nt, Human
gagcggggcgagggccgaggucgu

SEQ ID NO: 24515 - RNA, 24 nt, Human
uuggacggaacagauccggggacu

SEQ ID NO: 24516 - RNA, 24 nt, Human
uggcagggaaggaaagaauugcau

SEQ ID NO: 24517 - RNA, 24 nt, Human
ucagagugcauuuuuuuuuuuggu

SEQ ID NO: 24518 - RNA, 24 nt, Human
uaagaugcaaagagguuggaucaa

SEQ ID NO: 24519 - RNA, 21 nt, Human
caucccgaggagcaacccgug

SEQ ID NO: 24520 - RNA, 23 nt, Human
cggcuucgacgggacgacgaugc

SEQ ID NO: 24521 - RNA, 24 nt, Human
gcccagagcaagagaggcauccuc

SEQ ID NO: 24522 - RNA, 24 nt, Human
aaugguacagcaguuacaagagga

SEQ ID NO: 24523 - RNA, 24 nt, Human
uugcauuauuccugcauauucagu

SEQ ID NO: 24524 - RNA, 24 nt, Human
aauaagccaauacuuagaucuacu

SEQ ID NO: 24525 - RNA, 24 nt, Human
ucgcuguauguuugccuuggacaa

SEQ ID NO: 24526 - RNA, 24 nt, Human
uguacgccgccagcugggugagca

SEQ ID NO: 24527 - RNA, 24 nt, Human
guagcacugguugccagugcugug

SEQ ID NO: 24528 - RNA, 24 nt, Human
ugagaauggcaaaauuagucgccu

SEQ ID NO: 24529 - RNA, 24 nt, Human
uacaccacucccaagaagaauaag

SEQ ID NO: 24530 - RNA, 24 nt, Human
ugacauuguuggcaguuaaaaucu

SEQ ID NO: 24531 - RNA, 24 nt, Human
uauaagaaaauuauucaaacugau

SEQ ID NO: 24532 - RNA, 24 nt, Human
uguaaaauaaucuucugacaucag

SEQ ID NO: 24533 - RNA, 23 nt, Human
gugcuucguuuuugaaguguuga

SEQ ID NO: 24534 - RNA, 24 nt, Human
gggaaggaaaggggccugagcugg

SEQ ID NO: 24535 - RNA, 24 nt, Human
uggccuggggcugcucccugcccg

SEQ ID NO: 24536 - RNA, 24 nt, Human
ccggagcacauuccugagcgcuga

SEQ ID NO: 24537 - RNA, 24 nt, Human
ucggugcagcaugcggacucacug

SEQ ID NO: 24538 - RNA, 22 nt, Human
caccugagcgccgcaccgcuuc

SEQ ID NO: 24539 - RNA, 24 nt, Human
acaggaccgggcgagcccuggggc

SEQ ID NO: 24540 - RNA, 24 nt, Human
uauggcaagauuugaugggcuaca

SEQ ID NO: 24541 - RNA, 24 nt, Human
cauggcuagcaagccccuucaugu

SEQ ID NO: 24542 - RNA, 24 nt, Human
ccuccgaguuagcuuuugaaugca

SEQ ID NO: 24543 - RNA, 24 nt, Human
ucccugcuccucugugagguggac

SEQ ID NO: 24544 - RNA, 24 nt, Human
ccgcucucucuccaugccggagac

SEQ ID NO: 24545 - RNA, 24 nt, Human
uuccuucgggagagcggccagcgg

SEQ ID NO: 24546 - RNA, 24 nt, Human
ugaaaguguaaaugugcgaugggc

SEQ ID NO: 24547 - RNA, 17 nt, Human
uaaaaaauauuaggaua

SEQ ID NO: 24548 - RNA, 24 nt, Human
caccaggcacuuccuccuugucau

SEQ ID NO: 24549 - RNA, 24 nt, Human
uaaugcauaccuggguucaaacca

SEQ ID NO: 24550 - RNA, 24 nt, Human
caucaaaggauuuucccaucgcuc

SEQ ID NO: 24551 - RNA, 24 nt, Human
ugugcagaagaaauggaaggauuc

SEQ ID NO: 24552 - RNA, 24 nt, Human
uaucaaggaagggcaggcgugaug

SEQ ID NO: 24553 - RNA, 24 nt, Human
uaagaguguugaaaaaaaaauuca

SEQ ID NO: 24554 - RNA, 24 nt, Human
uucaaauuucuuucuuuuuuaauu

SEQ ID NO: 24555 - RNA, 24 nt, Human
uuaguaauuacucuaggagauuuu

SEQ ID NO: 24556 - RNA, 24 nt, Human
ugaauggacggguucaggccugau

SEQ ID NO: 24557 - RNA, 24 nt, Human
gggggacaguaaguuaguuccuuu

SEQ ID NO: 24558 - RNA, 24 nt, Human
uauauggaaauuguauaaaauguu

SEQ ID NO: 24559 - RNA, 24 nt, Human
gaccuuuggaaauauaaggaaaua

SEQ ID NO: 24560 - RNA, 24 nt, Human
aacagguaaccacuugagaggaug

SEQ ID NO: 24561 - RNA, 24 nt, Human
uagaauuacuaaccuuacugcccc

SEQ ID NO: 24562 - RNA, 24 nt, Human
uggaaagugggcgccauuaccuug

SEQ ID NO: 24563 - RNA, 24 nt, Human
ccugcaguuugaaaucauugcuau

SEQ ID NO: 24564 - RNA, 24 nt, Human
aaggaccugcccacugugcuuccu

SEQ ID NO: 24565 - RNA, 24 nt, Human
aaauacgugucgguguggucacaa

SEQ ID NO: 24566 - RNA, 24 nt, Human
ccagugcagggccgggccgagguc

SEQ ID NO: 24567 - RNA, 24 nt, Human
uggguaaaagcuuguugagaaaau

SEQ ID NO: 24568 - RNA, 24 nt, Human
gcgcagccugguccugggggacaa

SEQ ID NO: 24569 - RNA, 24 nt, Human
caucagccgcggcgccuuccagga

SEQ ID NO: 24570 - RNA, 22 nt, Human
uggcucgccgacauccacccac

SEQ ID NO: 24571 - RNA, 22 nt, Human
cuaaagaaagagaacagaaugu

SEQ ID NO: 24572 - RNA, 24 nt, Human
ugcugcuuuuuucacaaaugaacc

SEQ ID NO: 24573 - RNA, 24 nt, Human
aagaaugugguaacaaauucuggg

SEQ ID NO: 24574 - RNA, 24 nt, Human
aguuauuuuauuuuuucuaaaaac

SEQ ID NO: 24575 - RNA, 24 nt, Human
uuaaaguuauuuacauuuaauggc

SEQ ID NO: 24576 - RNA, 24 nt, Human
ugccccaggaugggugaguucaac

SEQ ID NO: 24577 - RNA, 24 nt, Human
uuucugcuggagaucaucgcuggu

SEQ ID NO: 24578 - RNA, 24 nt, Human
uauggcaagucacuuugacagaca

SEQ ID NO: 24579 - RNA, 24 nt, Human
uacaccacucccaagaagaauaag

SEQ ID NO: 24580 - RNA, 22 nt, Human
uguggcaaugcccguugcucag

SEQ ID NO: 24581 - RNA, 24 nt, Human
aacacaauuaguuacuguuaaacu

SEQ ID NO: 24582 - RNA, 20 nt, Human
gacugugugugcuggugugu

SEQ ID NO: 24583 - RNA, 24 nt, Human
ggaguucuuucauguccucugcuu

SEQ ID NO: 24584 - RNA, 24 nt, Human
ugggaugaucucaaggggcaccuu

SEQ ID NO: 24585 - RNA, 24 nt, Human
uggaagaugcuggaggagaaaccc

SEQ ID NO: 24586 - RNA, 24 nt, Human
ugagauuacagggcaugaggccac

SEQ ID NO: 24587 - RNA, 24 nt, Human
ccccggguucaagcaacuuuccug

SEQ ID NO: 24588 - RNA, 23 nt, Human
uggagagguggaaugugucuggc

SEQ ID NO: 24589 - RNA, 24 nt, Human
uggggaaaaacauuaaaauuaaaa

SEQ ID NO: 24590 - RNA, 24 nt, Human
uacagaguacucugaaaaaagaaa

SEQ ID NO: 24591 - RNA, 24 nt, Human
uacuuuauaaauuagucccucauu

SEQ ID NO: 24592 - RNA, 24 nt, Human
uaguagaaucaggcacugcucgca

SEQ ID NO: 24593 - RNA, 24 nt, Human
ugucuaagaaaacaaaaaagagaa

SEQ ID NO: 24594 - RNA, 24 nt, Human
caugacccaccccagcagauagac

SEQ ID NO: 24595 - RNA, 24 nt, Human
cgagcagccucucgccauuucccg

SEQ ID NO: 24596 - RNA, 24 nt, Human
uccuggaagcaaggcggcucuagc

SEQ ID NO: 24597 - RNA, 24 nt, Human
uuuacagacuggagcagcucgauu

SEQ ID NO: 24598 - RNA, 24 nt, Human
cauuggggcuuuccagcucucaca

SEQ ID NO: 24599 - RNA, 19 nt, Human
uguuccggaguucuugcuc

SEQ ID NO: 24600 - RNA, 24 nt, Human
ugccuggccggcgccgcagucggc

SEQ ID NO: 24601 - RNA, 24 nt, Human
aggcaauuugguuaccugcaaugg

SEQ ID NO: 24602 - RNA, 24 nt, Human
ccuuuuuucagggccauaaugaca

SEQ ID NO: 24603 - RNA, 19 nt, Human
uggaauggggguuaaugag

SEQ ID NO: 24604 - RNA, 24 nt, Human
ugaugugccccauggacauaucac

SEQ ID NO: 24605 - RNA, 24 nt, Human
ugugaagcguucccaccggcgccu

SEQ ID NO: 24606 - RNA, 19 nt, Human
uaacauagcauuaaggugg

SEQ ID NO: 24607 - RNA, 24 nt, Human
ggauaucgucuuucaucacguucu

SEQ ID NO: 24608 - RNA, 24 nt, Human
uauccuaagaucagcugggcaugg

SEQ ID NO: 24609 - RNA, 24 nt, Human
ugaaaguaauuaauuuaugacaua

SEQ ID NO: 24610 - RNA, 18 nt, Human
uaucaguagugguccugg

SEQ ID NO: 24611 - RNA, 24 nt, Human
gcgaggcuuuugauggggcucggg

SEQ ID NO: 24612 - RNA, 24 nt, Human
ucacuuccgaccugcuggccugcc

SEQ ID NO: 24613 - RNA, 24 nt, Human
ucaggccagggauacaaagcgggg

SEQ ID NO: 24614 - RNA, 24 nt, Human
ugacccguggauuggcaaguuauu

SEQ ID NO: 24615 - RNA, 22 nt, Human
auuguacucuuucuuuuuaggc

SEQ ID NO: 24616 - RNA, 24 nt, Human
cugcagcagcaugcacuucuuggu

SEQ ID NO: 24617 - RNA, 24 nt, Human
uuauagcugaauuaucccuuuucu

SEQ ID NO: 24618 - RNA, 24 nt, Human
uagaggcagaggagcggaaggcag

SEQ ID NO: 24619 - RNA, 24 nt, Human
uuggagcagaacuacugagaaaaa

SEQ ID NO: 24620 - RNA, 24 nt, Human
ugagauucuugcucaccgucuggg

SEQ ID NO: 24621 - RNA, 24 nt, Human
ucuacaguuucgucuccaggucag

SEQ ID NO: 24622 - RNA, 24 nt, Human
uaccaggugaauauuggcuuggaa

SEQ ID NO: 24623 - RNA, 24 nt, Human
agccgguaaugcccucauggaugg

SEQ ID NO: 24624 - RNA, 24 nt, Human
uaacaucagaucccagaaaacagu

SEQ ID NO: 24625 - RNA, 24 nt, Human
uauagcaagaccccaucucuaaaa

SEQ ID NO: 24626 - RNA, 24 nt, Human
ugaggaaacuaaacucuguggaag

SEQ ID NO: 24627 - RNA, 24 nt, Human
cagcggcagagagccauccucuau

SEQ ID NO: 24628 - RNA, 24 nt, Human
uauggcaagucacuuugacagaca

SEQ ID NO: 24629 - RNA, 24 nt, Human
ugagaauggcaaaauuagucgccu

SEQ ID NO: 24630 - RNA, 24 nt, Human
uacaccacucccaagaagaauaag

SEQ ID NO: 24631 - RNA, 24 nt, Human
ucagcagucuugguuaucacauuu

SEQ ID NO: 24632 - RNA, 23 nt, Human
uaugccacauagugugucaggag

SEQ ID NO: 24633 - RNA, 24 nt, Human
uacaauggaugaggcucuggauuu

SEQ ID NO: 24634 - RNA, 24 nt, Human
ugaguacauggaguagagaggcca

SEQ ID NO: 24635 - RNA, 24 nt, Human
uucucgauuaaaauacacacgauc

SEQ ID NO: 24636 - RNA, 24 nt, Human
uggaauagguacuucucgaaauuc

SEQ ID NO: 24637 - RNA, 24 nt, Human
caccaguaggccuuugugaagugg

SEQ ID NO: 24638 - RNA, 24 nt, Human
cgggaucagugguuuaaacaagcg

SEQ ID NO: 24639 - RNA, 24 nt, Human
uuaguaagagugaaauagauuucc

SEQ ID NO: 24640 - RNA, 24 nt, Human
uauggcaagucacuuugacagaca

SEQ ID NO: 24641 - RNA, 24 nt, Human
ugagaauggcaaaauuagucgccu

SEQ ID NO: 24642 - RNA, 24 nt, Human
uacaccacucccaagaagaauaag

SEQ ID NO: 24643 - RNA, 20 nt, Human
ugcguugaucauucucagau

SEQ ID NO: 24644 - RNA, 24 nt, Human
cauucaucugcggagccaaaacca

SEQ ID NO: 24645 - RNA, 24 nt, Human
acccgcugccucaucaccuucgca

SEQ ID NO: 24646 - RNA, 22 nt, Human
ucauauguagacaugagggucc

SEQ ID NO: 24647 - RNA, 24 nt, Human
ugggagaagccaagaaguggcugc

SEQ ID NO: 24648 - RNA, 24 nt, Human
aggguuauaauaauguuaacaugg

SEQ ID NO: 24649 - RNA, 24 nt, Human
aagaugccgcauuuggauuggaug

SEQ ID NO: 24650 - RNA, 24 nt, Human
aggacaaaaaggaguaggcgacgg

SEQ ID NO: 24651 - RNA, 24 nt, Human
uggacaggcaugauuauugggcca

SEQ ID NO: 24652 - RNA, 24 nt, Human
gauuacaggcaugagucaccauac

SEQ ID NO: 24653 - RNA, 24 nt, Human
ugggcaaguuggugagguucugca

SEQ ID NO: 24654 - RNA, 24 nt, Human
gugcugccccuugaggaagcaaag

SEQ ID NO: 24655 - RNA, 24 nt, Human
uuggacauucucgcuaucuccugu

SEQ ID NO: 24656 - RNA, 24 nt, Human
uacaccacucccaagaagaauaag

SEQ ID NO: 24657 - RNA, 24 nt, Human
uaguucucucucucucccucgggc

SEQ ID NO: 24658 - RNA, 23 nt, Human
uguccaggaugcucaggcuguag

SEQ ID NO: 24659 - RNA, 24 nt, Human
accuugggaucuugugcugugaag

SEQ ID NO: 24660 - RNA, 24 nt, Human
gagcccucagcccuggaacaaggc

SEQ ID NO: 24661 - RNA, 24 nt, Human
ggaccugaggcagaacuggggugg

SEQ ID NO: 24662 - RNA, 24 nt, Human
ucuuuugggauguauuauaugccu

SEQ ID NO: 24663 - RNA, 24 nt, Human
gaguacuuuguaaccacuuugaua

SEQ ID NO: 24664 - RNA, 24 nt, Human
ccagagccugggugcagucaaagg

SEQ ID NO: 24665 - RNA, 24 nt, Human
uugccugggucuuggauuaaacug

SEQ ID NO: 24666 - RNA, 24 nt, Human
caucugaucuauaaaugcgguggc

SEQ ID NO: 24667 - RNA, 24 nt, Human
uuaaagcacaguucuuggauccac

SEQ ID NO: 24668 - RNA, 24 nt, Human
ccacggagaaggguugugggcccc

SEQ ID NO: 24669 - RNA, 24 nt, Human
gcggaccugcaggugccgcggagc

SEQ ID NO: 24670 - RNA, 20 nt, Human
uuagcccacaggccaaggug

SEQ ID NO: 24671 - RNA, 23 nt, Human
uccaagcgagggugcuucugagg

SEQ ID NO: 24672 - RNA, 24 nt, Human
uucccagaagaauaaaaguuucuc

SEQ ID NO: 24673 - RNA, 24 nt, Human
ugacuucauggugcuacaauaacc

SEQ ID NO: 24674 - RNA, 24 nt, Human
aagcugcaucgcuugaaaaaaguu

SEQ ID NO: 24675 - RNA, 24 nt, Human
aaagcccaggaagaagacgaggau

SEQ ID NO: 24676 - RNA, 24 nt, Human
uaagucagccaagugugucgugcc

SEQ ID NO: 24677 - RNA, 19 nt, Human
ugucaaaggagacccuggc

SEQ ID NO: 24678 - RNA, 24 nt, Human
aaggagcagcgacuggacccagag

SEQ ID NO: 24679 - RNA, 24 nt, Human
cagcaggcugcugagcgccuggag

SEQ ID NO: 24680 - RNA, 24 nt, Human
ucccaggaagaucuggccucuguc

SEQ ID NO: 24681 - RNA, 24 nt, Human
ucuggagagcuuuggauccugggu

SEQ ID NO: 24682 - RNA, 24 nt, Human
acuuagcaacuggucacucauccu

SEQ ID NO: 24683 - RNA, 23 nt, Human
ugccaaggaccaggaugauggag

SEQ ID NO: 24684 - RNA, 24 nt, Human
uuacaagugagaacaugugguguu

SEQ ID NO: 24685 - RNA, 24 nt, Human
uagcuaguuauccugaugcucucc

SEQ ID NO: 24686 - RNA, 24 nt, Human
uaucaacguaucaccuagguauua

SEQ ID NO: 24687 - RNA, 24 nt, Human
ucaggagaccauugcaucauuggc

SEQ ID NO: 24688 - RNA, 24 nt, Human
gacgugaagccuuguuugaagagc

SEQ ID NO: 24689 - RNA, 24 nt, Human
aggcauguuggagacuugggcaau

SEQ ID NO: 24690 - RNA, 24 nt, Human
ucuuaauuaauuagaaaauaugug

SEQ ID NO: 24691 - RNA, 24 nt, Human
aggaacucagacaaauaugaaugu

SEQ ID NO: 24692 - RNA, 24 nt, Human
ugcaauagaaguucaugaaguacu

SEQ ID NO: 24693 - RNA, 24 nt, Human
ggggcccaccacccacuuugggag

SEQ ID NO: 24694 - RNA, 24 nt, Human
uaaguccguguggcuuuuucuuac

SEQ ID NO: 24695 - RNA, 24 nt, Human
agccagaaaccaggguggcuucca

SEQ ID NO: 24696 - RNA, 24 nt, Human
uuggugugaggaaggaagacuuua

SEQ ID NO: 24697 - RNA, 24 nt, Human
auuucauucacuggggaggaacaa

SEQ ID NO: 24698 - RNA, 23 nt, Human
uaaggcgaggcggaauuaaaccc

SEQ ID NO: 24699 - RNA, 24 nt, Human
uagcaaaucgagucuuaaauaauc

SEQ ID NO: 24700 - RNA, 24 nt, Human
uauggcaaggaccugauggagaag

SEQ ID NO: 24701 - RNA, 24 nt, Human
uaagcugguuuaugaaaaagaccu

SEQ ID NO: 24702 - RNA, 24 nt, Human
aagacuuuccccuauugauuaucu

SEQ ID NO: 24703 - RNA, 24 nt, Human
ugccauguaggcaucugucuggag

SEQ ID NO: 24704 - RNA, 24 nt, Human
aagggugccucuaaaagcuugaca

SEQ ID NO: 24705 - RNA, 24 nt, Human
uugcaugguucccuuucauacuac

SEQ ID NO: 24706 - RNA, 24 nt, Human
uaagaugcuagaaauucaauggga

SEQ ID NO: 24707 - RNA, 24 nt, Human
agcaagucccuguaauaagauagg

SEQ ID NO: 24708 - RNA, 24 nt, Human
uauguuaucuucugcaauuccaga

SEQ ID NO: 24709 - RNA, 24 nt, Human
ugagaaaaaaauugcacagaauac

SEQ ID NO: 24710 - RNA, 24 nt, Human
uauuucaccauacuauggagaaua

SEQ ID NO: 24711 - RNA, 24 nt, Human
uuccaugguucuccaagcacgggc

SEQ ID NO: 24712 - RNA, 24 nt, Human
uggcguaauaucgaagaggcccgc

SEQ ID NO: 24713 - RNA, 24 nt, Human
ugcgugcaggccuccacggccccg

SEQ ID NO: 24714 - RNA, 24 nt, Human
ugaaauuucugguacuuuguauau

SEQ ID NO: 24715 - RNA, 22 nt, Human
uaaaacauagcaaauggcauca

SEQ ID NO: 24716 - RNA, 24 nt, Human
ugagcccuccagacaauuuuuaag

SEQ ID NO: 24717 - RNA, 24 nt, Human
aggacaguguuccacaggcagauc

SEQ ID NO: 24718 - RNA, 24 nt, Human
uaaguaacauuuggccuuuuggug

SEQ ID NO: 24719 - RNA, 24 nt, Human
caucucaguccuauuuuugaguuu

SEQ ID NO: 24720 - RNA, 20 nt, Human
gacaagcugcaugugggauc

SEQ ID NO: 24721 - RNA, 24 nt, Human
gaggagaaacccugggaaggcucc

SEQ ID NO: 24722 - RNA, 24 nt, Human
ugggcaggaaggaugugaggacuc

SEQ ID NO: 24723 - RNA, 24 nt, Human
uaauuuuucuugcaauuguaaucu

SEQ ID NO: 24724 - RNA, 24 nt, Human
ucucaauacguuuacagagggugc

SEQ ID NO: 24725 - RNA, 24 nt, Human
uauuacuguuguagucccucacuu

SEQ ID NO: 24726 - RNA, 24 nt, Human
ugccugaaguuuucagaaaagcug

SEQ ID NO: 24727 - RNA, 24 nt, Human
ugugaaggcgacauguauaaugac

SEQ ID NO: 24728 - RNA, 24 nt, Human
ugagacuaaggcuuucgacccugg

SEQ ID NO: 24729 - RNA, 24 nt, Human
uggaugcugccucagacaaaggca

SEQ ID NO: 24730 - RNA, 24 nt, Human
ugaccaggcuagaccacacgugcc

SEQ ID NO: 24731 - RNA, 24 nt, Human
ccuccauuuccuugaaaacugaac

SEQ ID NO: 24732 - RNA, 21 nt, Human
cuuugaggaguucucagcgcc

SEQ ID NO: 24733 - RNA, 24 nt, Human
gccauuuggggaaaucgcaugccg

SEQ ID NO: 24734 - RNA, 24 nt, Human
uggguggugguggcuguggccaug

SEQ ID NO: 24735 - RNA, 24 nt, Human
auggugcuuucacaaaauggagag

SEQ ID NO: 24736 - RNA, 24 nt, Human
uaccugugcaugacagaugagggg

SEQ ID NO: 24737 - RNA, 24 nt, Human
uauugugcaccauauggaaguacu

SEQ ID NO: 24738 - RNA, 22 nt, Human
ucagugaaagaauuagucuggg

SEQ ID NO: 24739 - RNA, 24 nt, Human
cagccuauugugggaccucgugau

SEQ ID NO: 24740 - RNA, 24 nt, Human
uuagauagccuacaucuuucuccc

SEQ ID NO: 24741 - RNA, 24 nt, Human
uauuaguucugucccucuaagaga

SEQ ID NO: 24742 - RNA, 24 nt, Human
uuaguauacagacgacagugaacu

SEQ ID NO: 24743 - RNA, 24 nt, Human
uuggaaagagaccagaaccgaagc

SEQ ID NO: 24744 - RNA, 18 nt, Human
uacagguugggaggggag

SEQ ID NO: 24745 - RNA, 24 nt, Human
ccucaagucggguaugaaggagcu

SEQ ID NO: 24746 - RNA, 24 nt, Human
caaaagacaaagccagcccacucc

SEQ ID NO: 24747 - RNA, 24 nt, Human
cagccccugggcagccacguucug

SEQ ID NO: 24748 - RNA, 24 nt, Human
aagaaggcauuuucacacaaggcu

SEQ ID NO: 24749 - RNA, 24 nt, Human
caugaggccgcgccuguguccagc

SEQ ID NO: 24750 - RNA, 24 nt, Human
ugucugugucuaucucccuaucug

SEQ ID NO: 24751 - RNA, 24 nt, Human
uggguuagagccccacccuuagga

SEQ ID NO: 24752 - RNA, 24 nt, Human
aguugcuccagaaaaaccuguaaa

SEQ ID NO: 24753 - RNA, 24 nt, Human
gagccgagcgaagcgaugccuaaa

SEQ ID NO: 24754 - RNA, 24 nt, Human
uuguauguuuggauugcagaagaa

SEQ ID NO: 24755 - RNA, 24 nt, Human
uugaucuugaagaaacugggcgug

SEQ ID NO: 24756 - RNA, 24 nt, Human
aggaaggagauauagugaagagga

SEQ ID NO: 24757 - RNA, 24 nt, Human
guagaguuuucuucaggcuuaaag

SEQ ID NO: 24758 - RNA, 24 nt, Human
cagcagccaagacuguuuagcuga

SEQ ID NO: 24759 - RNA, 24 nt, Human
cuuggaguuauacagguaugaaau

SEQ ID NO: 24760 - RNA, 21 nt, Human
ugggcauguggaucaucuagg

SEQ ID NO: 24761 - RNA, 24 nt, Human
uacuucauaaauaugaauuauguu

SEQ ID NO: 24762 - RNA, 24 nt, Human
guucacaccagcuuguuucaguuu

SEQ ID NO: 24763 - RNA, 24 nt, Human
caaccuuugaaacccuuugcuuau

SEQ ID NO: 24764 - RNA, 24 nt, Human
gauggcagugcaaauauccaagaa

SEQ ID NO: 24765 - RNA, 24 nt, Human
uggccugaugauccacagcggaga

SEQ ID NO: 24766 - RNA, 24 nt, Human
ugugugccauugcccaggcagagu

SEQ ID NO: 24767 - RNA, 24 nt, Human
ucagaacucauuuggugguggcaa

SEQ ID NO: 24768 - RNA, 24 nt, Human
uaaguacauaggucuuuauuuaaa

SEQ ID NO: 24769 - RNA, 18 nt, Human
gucccgguguagaaugcc

SEQ ID NO: 24770 - RNA, 24 nt, Human
uaagaaaugcaguccaauuuuaua

SEQ ID NO: 24771 - RNA, 24 nt, Human
aggcaggggcccuggagaggaugc

SEQ ID NO: 24772 - RNA, 24 nt, Human
auggugccugauuccugcaugguc

SEQ ID NO: 24773 - RNA, 24 nt, Human
ugccauggagcgacaggacggcag

SEQ ID NO: 24774 - RNA, 24 nt, Human
aggggguuugcuggggaacuggcg

SEQ ID NO: 24775 - RNA, 19 nt, Human
ucccauggcccagggagcc

SEQ ID NO: 24776 - RNA, 24 nt, Human
ugacaaggugagagggagaggagg

SEQ ID NO: 24777 - RNA, 24 nt, Human
ugaguaugauuaugugugaaaguu

SEQ ID NO: 24778 - RNA, 24 nt, Human
uaauguguguguauauauguaugu

SEQ ID NO: 24779 - RNA, 24 nt, Human
gugaaaguagucuuguuuuaugag

SEQ ID NO: 24780 - RNA, 24 nt, Human
aaccucuucuguggagucugcgug

SEQ ID NO: 24781 - RNA, 24 nt, Human
ucccucuggcugaagacugagaag

SEQ ID NO: 24782 - RNA, 24 nt, Human
aaccccuuucugcuguucucccau

SEQ ID NO: 24783 - RNA, 24 nt, Human
uuuguaaguguucaguuucuacac

SEQ ID NO: 24784 - RNA, 24 nt, Human
uggccugaugauccacagcuggag

SEQ ID NO: 24785 - RNA, 24 nt, Human
aggcagcucgacaaggaacguguc

SEQ ID NO: 24786 - RNA, 24 nt, Human
caaaauguccuuuaggucccuagg

SEQ ID NO: 24787 - RNA, 24 nt, Human
ucagugaaaguguacuguuuacau

SEQ ID NO: 24788 - RNA, 24 nt, Human
augcaccucacuaaggcucaucug

SEQ ID NO: 24789 - RNA, 23 nt, Human
ucagugcgguucagcucaaggga

SEQ ID NO: 24790 - RNA, 24 nt, Human
uuccucaggaacagagaacuuugc

SEQ ID NO: 24791 - RNA, 24 nt, Human
ucaguugccuuccugguacgcguc

SEQ ID NO: 24792 - RNA, 24 nt, Human
ucuccauuugaccauuguuuaguc

SEQ ID NO: 24793 - RNA, 24 nt, Human
uacgugaggugugcuugggacugu

SEQ ID NO: 24794 - RNA, 24 nt, Human
uguggauauaguuuucccuguugg

SEQ ID NO: 24795 - RNA, 24 nt, Human
ugacuaaagaaaccugcugcacau

SEQ ID NO: 24796 - RNA, 24 nt, Human
gagcaugcaucuucucggugagcc

SEQ ID NO: 24797 - RNA, 24 nt, Human
uuuguaauucuguauauucuauac

SEQ ID NO: 24798 - RNA, 24 nt, Human
uauguggauauuuuuuaaguggac

SEQ ID NO: 24799 - RNA, 24 nt, Human
uuuaucaguuaauaauauuaauca

SEQ ID NO: 24800 - RNA, 24 nt, Human
uccccaaccccagggacuccccuu

SEQ ID NO: 24801 - RNA, 19 nt, Human
uuucgcagagcugaagauc

SEQ ID NO: 24802 - RNA, 24 nt, Human
cgucuggugggaugcgcacccccu

SEQ ID NO: 24803 - RNA, 24 nt, Human
uggaaaaugcgggggccauacaug

SEQ ID NO: 24804 - RNA, 24 nt, Human
ugacagugauggggagcugggauc

SEQ ID NO: 24805 - RNA, 22 nt, Human
uauacugcucuuagccagaguc

SEQ ID NO: 24806 - RNA, 24 nt, Human
acgcggagcccagcgggcgcgcgu

SEQ ID NO: 24807 - RNA, 24 nt, Human
uaacaugaguguacuaacuaccuu

SEQ ID NO: 24808 - RNA, 24 nt, Human
aucagcuuuucaccucuccaguuu

SEQ ID NO: 24809 - RNA, 24 nt, Human
ucccaauacccauuuauccuauuu

SEQ ID NO: 24810 - RNA, 20 nt, Human
uacacuuaacuucuccuaga

SEQ ID NO: 24811 - RNA, 24 nt, Human
augaauccaaacguggugaggggg

SEQ ID NO: 24812 - RNA, 24 nt, Human
uacugggcgccugucacccaggaa

SEQ ID NO: 24813 - RNA, 24 nt, Human
cagcaaccagcagggcuccagcgg

SEQ ID NO: 24814 - RNA, 24 nt, Human
uuucucauccucuggccaauggaa

SEQ ID NO: 24815 - RNA, 24 nt, Human
aaguaucuaucaaucugucguuac

SEQ ID NO: 24816 - RNA, 24 nt, Human
uggcagucagaaaaacccauaucu

SEQ ID NO: 24817 - RNA, 24 nt, Human
ucuaggagcccugaauagaggcgc

SEQ ID NO: 24818 - RNA, 24 nt, Human
ugagucuuccagggucaagucauu

SEQ ID NO: 24819 - RNA, 24 nt, Human
gaggugauucauuaaauuaauaga

SEQ ID NO: 24820 - RNA, 24 nt, Human
ucaaaaauuaccagaaauaauucu

SEQ ID NO: 24821 - RNA, 24 nt, Human
uucaaugccacuauccuucccauc

SEQ ID NO: 24822 - RNA, 24 nt, Human
accaccuucuaucuuugagugcca

SEQ ID NO: 24823 - RNA, 24 nt, Human
gaggaccuggguagcuaaggcagu

SEQ ID NO: 24824 - RNA, 24 nt, Human
agggaagauucgagacagcaaucg

SEQ ID NO: 24825 - RNA, 24 nt, Human
agugguugcagucaugucaacagg

SEQ ID NO: 24826 - RNA, 24 nt, Human
uuacucaaugccuugaauugaggg

SEQ ID NO: 24827 - RNA, 21 nt, Human
ucacagaguuuuccuuuuuuu

SEQ ID NO: 24828 - RNA, 24 nt, Human
agugguaugaucucaguugaaugc

SEQ ID NO: 24829 - RNA, 24 nt, Human
ucacaccaaaauguauuuauuaca

SEQ ID NO: 24830 - RNA, 24 nt, Human
acaaggguucuaaaaacuuggaca

SEQ ID NO: 24831 - RNA, 24 nt, Human
gggaaagacaggggaacaucaaag

SEQ ID NO: 24832 - RNA, 24 nt, Human
aagcacaaaaucugacaaugaaac

SEQ ID NO: 24833 - RNA, 21 nt, Human
uggccgaguggcucauucaga

SEQ ID NO: 24834 - RNA, 24 nt, Human
ugcacauaccacguggcgggaccu

SEQ ID NO: 24835 - RNA, 24 nt, Human
uggaaucuaccaacuguuuagggc

SEQ ID NO: 24836 - RNA, 24 nt, Human
aggcauuggcaugaccaaagcuga

SEQ ID NO: 24837 - RNA, 24 nt, Human
accauggugagcccauuggcaggg

SEQ ID NO: 24838 - RNA, 24 nt, Human
ugggguccaggucgucgccgcccu

SEQ ID NO: 24839 - RNA, 24 nt, Human
cggccaguggucuugucgaagagg

SEQ ID NO: 24840 - RNA, 24 nt, Human
gacagggcuuccaccgcgagcuuc

SEQ ID NO: 24841 - RNA, 24 nt, Human
augcugcccuggggaaccaacugg

SEQ ID NO: 24842 - RNA, 24 nt, Human
uggccugaugauccacagcggaga

SEQ ID NO: 24843 - RNA, 24 nt, Human
gagcguccguccagcaggcuugac

SEQ ID NO: 24844 - RNA, 24 nt, Human
uccaggguauugaaagugccugag

SEQ ID NO: 24845 - RNA, 24 nt, Human
ugcacagauacugaaugggugugu

SEQ ID NO: 24846 - RNA, 24 nt, Human
uuaucauugccuggucaaggaagc

SEQ ID NO: 24847 - RNA, 24 nt, Human
caguggcugcccaaggaagccugc

SEQ ID NO: 24848 - RNA, 24 nt, Human
uugauggcuguggucuaugcaucu

SEQ ID NO: 24849 - RNA, 24 nt, Human
cgaggucauuuguugcguugaauu

SEQ ID NO: 24850 - RNA, 24 nt, Human
cagcauucuggggcuuguaacacu

SEQ ID NO: 24851 - RNA, 24 nt, Human
ucagugguggcgccugggcucagc

SEQ ID NO: 24852 - RNA, 24 nt, Human
uggaaaugaugagauuauuuccug

SEQ ID NO: 24853 - RNA, 24 nt, Human
ucuagaauaccagaaacaucuacu

SEQ ID NO: 24854 - RNA, 24 nt, Human
ugacaaguacauguuccuuuggga

SEQ ID NO: 24855 - RNA, 24 nt, Human
cauugagaaucuguaccaaaaccu

SEQ ID NO: 24856 - RNA, 24 nt, Human
cacccaggaggagugggcuuugcu

SEQ ID NO: 24857 - RNA, 24 nt, Human
aagcaucugaguuugagaccaugg

SEQ ID NO: 24858 - RNA, 24 nt, Human
aaugugcugguaacugcuuugcuu

SEQ ID NO: 24859 - RNA, 24 nt, Human
cguucagcagagucagggaugggu

SEQ ID NO: 24860 - RNA, 20 nt, Human
ugugacgcagugagcgugcu

SEQ ID NO: 24861 - RNA, 24 nt, Human
cgacggcauccggggccuguacca

SEQ ID NO: 24862 - RNA, 17 nt, Human
ucuaccguuccgcugcc

SEQ ID NO: 24863 - RNA, 22 nt, Human
ugccuugggucccuucaguagc

SEQ ID NO: 24864 - RNA, 24 nt, Human
ugucaggaaggggaagcggguuuc

SEQ ID NO: 24865 - RNA, 24 nt, Human
cagcagcagcaaaagaggucagcu

SEQ ID NO: 24866 - RNA, 24 nt, Human
aguuuggauucugaaaacuaacug

SEQ ID NO: 24867 - RNA, 24 nt, Human
cagauccaagagauauauuuggca

SEQ ID NO: 24868 - RNA, 24 nt, Human
ucuggaguucuuccgccaggugau

SEQ ID NO: 24869 - RNA, 23 nt, Human
uucauuggaggguugagcuuuga

SEQ ID NO: 24870 - RNA, 24 nt, Human
uaugccacuguggaggagguggau

SEQ ID NO: 24871 - RNA, 20 nt, Human
uggccggaagcugggcgggu

SEQ ID NO: 24872 - RNA, 17 nt, Human
gaggauggaguccgcgc

SEQ ID NO: 24873 - RNA, 24 nt, Human
cucuccuuugauaaagaugcgaug

SEQ ID NO: 24874 - RNA, 22 nt, Human
ugggcgcauccuugauuggcau

SEQ ID NO: 24875 - RNA, 24 nt, Human
cgaguacaagccccaggaugcuac

SEQ ID NO: 24876 - RNA, 24 nt, Human
ugacgcagcguuuccccccauccc

SEQ ID NO: 24877 - RNA, 24 nt, Human
caugacccccucccgaguggacug

SEQ ID NO: 24878 - RNA, 24 nt, Human
ucccagcuaguucacuccuuucgc

SEQ ID NO: 24879 - RNA, 23 nt, Human
ucagagcggagccgacagagagc

SEQ ID NO: 24880 - RNA, 24 nt, Human
cggcaguccugauggcccggcaug

SEQ ID NO: 24881 - RNA, 24 nt, Human
cuuccaguggaaaaggcauuuugg

SEQ ID NO: 24882 - RNA, 17 nt, Human
uuagcccuuggcccauc

SEQ ID NO: 24883 - RNA, 24 nt, Human
cuccaucccacacccccaggggcu

SEQ ID NO: 24884 - RNA, 24 nt, Human
gugcagagacucuuccaggucaaa

SEQ ID NO: 24885 - RNA, 24 nt, Human
cgaugcgaugcuccaggugcuggg

SEQ ID NO: 24886 - RNA, 24 nt, Human
ccugaaguacaagaaaggaggugu

SEQ ID NO: 24887 - RNA, 24 nt, Human
caaugccaagcuggagauggugcc

SEQ ID NO: 24888 - RNA, 24 nt, Human
caugcagaugaugccguauuuacc

SEQ ID NO: 24889 - RNA, 24 nt, Human
aagcguuaucugucaaagcaauuc

SEQ ID NO: 24890 - RNA, 24 nt, Human
gcuuccuuaucccaccccagagac

SEQ ID NO: 24891 - RNA, 24 nt, Human
agaaggaaguggucucugcccagc

SEQ ID NO: 24892 - RNA, 24 nt, Human
uauuauacuuaaaugaacucaagu

SEQ ID NO: 24893 - RNA, 24 nt, Human
ccaggccaaaaaggcucaacauuu

SEQ ID NO: 24894 - RNA, 24 nt, Human
cuggagcagguccaccggccccua

SEQ ID NO: 24895 - RNA, 24 nt, Human
ucaaaggucuucucggauggaagu

SEQ ID NO: 24896 - RNA, 24 nt, Human
uaugcagccuccugcucucccgag

SEQ ID NO: 24897 - RNA, 24 nt, Human
gcuggagcuauucacuuccagcgu

SEQ ID NO: 24898 - RNA, 24 nt, Human
ugggacuccuguuacccgcaaguc

SEQ ID NO: 24899 - RNA, 24 nt, Human
uucaacuaaugcaauagacuuaaa

SEQ ID NO: 24900 - RNA, 24 nt, Human
cgagcaaaaaggcaaagaccaaga

SEQ ID NO: 24901 - RNA, 24 nt, Human
cuugaacaauaaugagucgcuucu

SEQ ID NO: 24902 - RNA, 24 nt, Human
uguguacauauauguguguauaua

SEQ ID NO: 24903 - RNA, 23 nt, Human
uaaugggaauucuaauaauauga

SEQ ID NO: 24904 - RNA, 24 nt, Human
acuuucaggagaggcaagcagauu

SEQ ID NO: 24905 - RNA, 24 nt, Human
uuugacacugcaaacucaguggau

SEQ ID NO: 24906 - RNA, 24 nt, Human
ucccucaaguuucauuugugaagc

SEQ ID NO: 24907 - RNA, 24 nt, Human
cugaaguaucugaaaaauaugaaa

SEQ ID NO: 24908 - RNA, 24 nt, Human
acaaagcaagagaagaagcagaga

SEQ ID NO: 24909 - RNA, 21 nt, Human
cauuggacaggacauccagcc

SEQ ID NO: 24910 - RNA, 24 nt, Human
cagcggcagagagccauccucuau

SEQ ID NO: 24911 - RNA, 19 nt, Human
ucccauggacuugcccggg

SEQ ID NO: 24912 - RNA, 24 nt, Human
uccccuggaaaaggccucucggcg

SEQ ID NO: 24913 - RNA, 24 nt, Human
ucgcucagccaggagaugagaugc

SEQ ID NO: 24914 - RNA, 24 nt, Human
cucgcuccccacggccgcggugca

SEQ ID NO: 24915 - RNA, 24 nt, Human
ugucccggacagugcgugcgagcg

SEQ ID NO: 24916 - RNA, 24 nt, Human
acugccuugugaugccucccuaga

SEQ ID NO: 24917 - RNA, 19 nt, Human
ugaguggacauuauuggca

SEQ ID NO: 24918 - RNA, 24 nt, Human
aauacaguuuuuagucaaaguggc

SEQ ID NO: 24919 - RNA, 24 nt, Human
uuggugccuauauuguaacaauua

SEQ ID NO: 24920 - RNA, 24 nt, Human
guaguaaauucuguaaaauacuuu

SEQ ID NO: 24921 - RNA, 24 nt, Human
acagaaagguugggcgacguuggg

SEQ ID NO: 24922 - RNA, 24 nt, Human
uugaucuugaagaaacugggcgug

SEQ ID NO: 24923 - RNA, 24 nt, Human
cauuaaggcuguggauaagcuggg

SEQ ID NO: 24924 - RNA, 24 nt, Human
aggaaggagauauagugaagagga

SEQ ID NO: 24925 - RNA, 24 nt, Human
guagaguuuucuucaggcuuaaag

SEQ ID NO: 24926 - RNA, 24 nt, Human
acaguaacagcagcacagacccaa

SEQ ID NO: 24927 - RNA, 24 nt, Human
ugagaauagagucuuucuucuuuc

SEQ ID NO: 24928 - RNA, 24 nt, Human
uugaucuugaagaaacugggcgug

SEQ ID NO: 24929 - RNA, 24 nt, Human
aggaaggagauauagugaagagga

SEQ ID NO: 24930 - RNA, 24 nt, Human
ugaaagcccccgguaucauuccuc

SEQ ID NO: 24931 - RNA, 24 nt, Human
guagaguuuucuucaggcuuaaag

SEQ ID NO: 24932 - RNA, 24 nt, Human
uugaucuugaagaaacugggcgug

SEQ ID NO: 24933 - RNA, 23 nt, Human
uccgugcgcguugcugcggccgu

SEQ ID NO: 24934 - RNA, 24 nt, Human
aggaaggagauauagugaagagga

SEQ ID NO: 24935 - RNA, 24 nt, Human
guagaguuuucuucaggcuuaaag

SEQ ID NO: 24936 - RNA, 24 nt, Human
uugaucuugaagaaacugggcgug

SEQ ID NO: 24937 - RNA, 24 nt, Human
aggaaggagauauagugaagagga

SEQ ID NO: 24938 - RNA, 24 nt, Human
guagaguuuucuucaggcuuaaag

SEQ ID NO: 24939 - RNA, 24 nt, Human
uggaaagcucccucaccagagugc

SEQ ID NO: 24940 - RNA, 24 nt, Human
ugacaccagacccuccauucaagc

SEQ ID NO: 24941 - RNA, 24 nt, Human
uggcaugugccuuaugacccucgu

SEQ ID NO: 24942 - RNA, 20 nt, Human
uagaaugcauuuccugggcu

SEQ ID NO: 24943 - RNA, 24 nt, Human
cauucuugcugucuggauccagag

SEQ ID NO: 24944 - RNA, 24 nt, Human
ccagcaccggcugcggcuccgguu

SEQ ID NO: 24945 - RNA, 24 nt, Human
caccgcugucaacauggcccgcgc

SEQ ID NO: 24946 - RNA, 24 nt, Human
cucgcggggcucccuggcagaucc

SEQ ID NO: 24947 - RNA, 24 nt, Human
cgccguggagcugcagugcuggug

SEQ ID NO: 24948 - RNA, 24 nt, Human
cacuggggugggcaugagcguucu

SEQ ID NO: 24949 - RNA, 24 nt, Human
cggcacggucugaucgcggaaauu

SEQ ID NO: 24950 - RNA, 24 nt, Human
uuccuggggacucccuuuuaguac

SEQ ID NO: 24951 - RNA, 24 nt, Human
agaaauugcccaacucaugucccu

SEQ ID NO: 24952 - RNA, 24 nt, Human
aggcauuggcaugaccaaagcuga

SEQ ID NO: 24953 - RNA, 24 nt, Human
ugugugcgcagagugcaucauuuc

SEQ ID NO: 24954 - RNA, 24 nt, Human
ucccucaggccacccugacccuac

SEQ ID NO: 24955 - RNA, 24 nt, Human
cggcgggcucugcgcuccgccccu

SEQ ID NO: 24956 - RNA, 24 nt, Human
uucuccaugaucccgcuggccggg

SEQ ID NO: 24957 - RNA, 21 nt, Human
ugccgcagaugcccaccggaa

SEQ ID NO: 24958 - RNA, 24 nt, Human
ccagcgcaaauauaagaugacuga

SEQ ID NO: 24959 - RNA, 24 nt, Human
uucaaugugcugugccaugacaug

SEQ ID NO: 24960 - RNA, 24 nt, Human
aagaggacugugcauuuuugcuau

SEQ ID NO: 24961 - RNA, 24 nt, Human
ugcagcaguguguggagcaggggg

SEQ ID NO: 24962 - RNA, 24 nt, Human
uacuccgcguaggcccgugacgug

SEQ ID NO: 24963 - RNA, 24 nt, Human
agacaggcuggcacagccccaggc

SEQ ID NO: 24964 - RNA, 24 nt, Human
aagcagcaccaauggggaugaccc

SEQ ID NO: 24965 - RNA, 24 nt, Human
acgccguguuuccucuuucggccg

SEQ ID NO: 24966 - RNA, 24 nt, Human
uagaaaagagauagcaucuucuuu

SEQ ID NO: 24967 - RNA, 24 nt, Human
agucauggcaaauagaauugggcu

SEQ ID NO: 24968 - RNA, 24 nt, Human
ugaaucgacaguuucuuuuccggc

SEQ ID NO: 24969 - RNA, 24 nt, Human
acgaaguuaaagucugacacggcu

SEQ ID NO: 24970 - RNA, 24 nt, Human
cugcagcgaccacagaccugggcu

SEQ ID NO: 24971 - RNA, 24 nt, Human
caggagaucgcugcgcuggccagg

SEQ ID NO: 24972 - RNA, 24 nt, Human
uacagcaggcuguaccagugcagg

SEQ ID NO: 24973 - RNA, 24 nt, Human
ucaggagaccauugcaucauuggc

SEQ ID NO: 24974 - RNA, 24 nt, Human
ugauuuucucuauuauuuguccuu

SEQ ID NO: 24975 - RNA, 24 nt, Human
uguuugauauaccguuguguuaca

SEQ ID NO: 24976 - RNA, 24 nt, Human
agacugccagugaccaagcaacca

SEQ ID NO: 24977 - RNA, 24 nt, Human
cucccguugcugggagaaucucau

SEQ ID NO: 24978 - RNA, 24 nt, Human
ugucauggcugggugaagagccug

SEQ ID NO: 24979 - RNA, 24 nt, Human
augcuucggaugcacaaucugcau

SEQ ID NO: 24980 - RNA, 24 nt, Human
uccacuggcgaaagaugccuuucu

SEQ ID NO: 24981 - RNA, 24 nt, Human
uagagugguggcucccagaauccc

SEQ ID NO: 24982 - RNA, 24 nt, Human
agauaacuggccccgauuucugcu

SEQ ID NO: 24983 - RNA, 24 nt, Human
ucuggcuucccaauuccugacuug

SEQ ID NO: 24984 - RNA, 19 nt, Human
uagaagacagguggucugc

SEQ ID NO: 24985 - RNA, 24 nt, Human
ugagggagagagagcagcuccaca

SEQ ID NO: 24986 - RNA, 24 nt, Human
uggagggagguuuggcagauggag

SEQ ID NO: 24987 - RNA, 24 nt, Human
aggcugccaucugucuuguagggc

SEQ ID NO: 24988 - RNA, 23 nt, Human
augcagggggggugggggggggc

SEQ ID NO: 24989 - RNA, 24 nt, Human
ugaggacaggcaucgccgagacuc

SEQ ID NO: 24990 - RNA, 24 nt, Human
ccccuggggaacaggccgucgcgg

SEQ ID NO: 24991 - RNA, 24 nt, Human
ccagccuagccuuguggggagcaa

SEQ ID NO: 24992 - RNA, 24 nt, Human
ucgaagagcuggagaccaaggccg

SEQ ID NO: 24993 - RNA, 24 nt, Human
uucgccuccuguuucagcggugac

SEQ ID NO: 24994 - RNA, 24 nt, Human
cuggagcagguccaccggccccua

SEQ ID NO: 24995 - RNA, 24 nt, Human
uuucucgggaggaccgagcaccuu

SEQ ID NO: 24996 - RNA, 24 nt, Human
gaugcaaaauaaccaagaaguuaa

SEQ ID NO: 24997 - RNA, 24 nt, Human
ccacacaggcucauucucaacugg

SEQ ID NO: 24998 - RNA, 24 nt, Human
ugcccauugcucucccacuccacg

SEQ ID NO: 24999 - RNA, 24 nt, Human
uuaguauacagacgacagugaacu

SEQ ID NO: 25000 - RNA, 24 nt, Human
uuggugaccgaauuacuagugacu

SEQ ID NO: 25001 - RNA, 24 nt, Human
caugucaccuaaaugcacuugaug

SEQ ID NO: 25002 - RNA, 24 nt, Human
uauuauuaaaguuaccuauuauug

SEQ ID NO: 25003 - RNA, 24 nt, Human
ugcaaagaauucauagcaguuaau

SEQ ID NO: 25004 - RNA, 24 nt, Human
uucuuuggaaaucuaguuuggaau

SEQ ID NO: 25005 - RNA, 24 nt, Human
auaaaguuucuuggcaguaguuua

SEQ ID NO: 25006 - RNA, 24 nt, Human
uacaccacucccaagaagaauaag

SEQ ID NO: 25007 - RNA, 24 nt, Human
ucgaugaaccggucccugaaguug

SEQ ID NO: 25008 - RNA, 24 nt, Human
gcgcacugauuccgggccccagag

SEQ ID NO: 25009 - RNA, 24 nt, Human
ugaguagaaguaaauacauuauag

SEQ ID NO: 25010 - RNA, 24 nt, Human
uuuaugcuuuaaguacgaaagggu

SEQ ID NO: 25011 - RNA, 24 nt, Human
uaagaaauucugagugucuucuug

SEQ ID NO: 25012 - RNA, 24 nt, Human
uuuuguugugugccauuuugcagc

SEQ ID NO: 25013 - RNA, 24 nt, Human
uacauggaugacugugguggcaug

SEQ ID NO: 25014 - RNA, 24 nt, Human
ugaaaauggaaaguucaaguacag

SEQ ID NO: 25015 - RNA, 24 nt, Human
ugagaccaaaaugucaaaauaaua

SEQ ID NO: 25016 - RNA, 24 nt, Human
uguguguguguuucuccaauccuu

SEQ ID NO: 25017 - RNA, 24 nt, Human
ccugaccucaaguggauaugccug

SEQ ID NO: 25018 - RNA, 24 nt, Human
uaaaagccucuugagccaaggaau

SEQ ID NO: 25019 - RNA, 23 nt, Human
ugcccugggguuucugcccgcac

SEQ ID NO: 25020 - RNA, 21 nt, Human
uaacuaaggcuuuaaaagguc

SEQ ID NO: 25021 - RNA, 24 nt, Human
uacaccacucccaagaagaauaag

SEQ ID NO: 25022 - RNA, 24 nt, Human
uuggaagaauguuauaaugaaugu

SEQ ID NO: 25023 - RNA, 24 nt, Human
uguacagaaugaagccaacaaaua

SEQ ID NO: 25024 - RNA, 24 nt, Human
cuuccaaucugaugggcauguuug

SEQ ID NO: 25025 - RNA, 22 nt, Human
guggagggcagcuuugucuaca

SEQ ID NO: 25026 - RNA, 24 nt, Human
cugacgcugaagcuggugagccug

SEQ ID NO: 25027 - RNA, 24 nt, Human
cgagugugaauucccugcaagaac

SEQ ID NO: 25028 - RNA, 24 nt, Human
uggcuggucggguauugacaucca

SEQ ID NO: 25029 - RNA, 24 nt, Human
uguccagaagauccuggagcacau

SEQ ID NO: 25030 - RNA, 24 nt, Human
uugcuaccccugggcguuugauug

SEQ ID NO: 25031 - RNA, 24 nt, Human
ugagaugggaaagggcuccuucaa

SEQ ID NO: 25032 - RNA, 21 nt, Human
aaguaugccugggucuuggau

SEQ ID NO: 25033 - RNA, 22 nt, Human
uuccaagggauggacagucacc

SEQ ID NO: 25034 - RNA, 24 nt, Human
ucugaucuauaaaugcgguggcau

SEQ ID NO: 25035 - RNA, 24 nt, Human
ucccaaaggcggcaagcuccuucc

SEQ ID NO: 25036 - RNA, 24 nt, Human
acgcuuuguacgcucugcguuccc

SEQ ID NO: 25037 - RNA, 19 nt, Human
agggauggcacacgucacc

SEQ ID NO: 25038 - RNA, 24 nt, Human
uaccugaggugcaccggaggugaa

SEQ ID NO: 25039 - RNA, 24 nt, Human
cuugggacccugggccuucucggg

SEQ ID NO: 25040 - RNA, 24 nt, Human
aguggugcuguggaaugcccagcc

SEQ ID NO: 25041 - RNA, 24 nt, Human
auggcaauauugagaggugggguu

SEQ ID NO: 25042 - RNA, 24 nt, Human
uagcaucuuugugggggauuuuuu

SEQ ID NO: 25043 - RNA, 24 nt, Human
ggcgcuugaggacccggggagacc

SEQ ID NO: 25044 - RNA, 24 nt, Human
agggggcggcggcggcggcggcgg

SEQ ID NO: 25045 - RNA, 24 nt, Human
acuauaacuguuaaacuuaaguuc

SEQ ID NO: 25046 - RNA, 24 nt, Human
uaagggcuuccggaacggggcugu

SEQ ID NO: 25047 - RNA, 24 nt, Human
ucaucgagaaccauggaguugaac

SEQ ID NO: 25048 - RNA, 24 nt, Human
cgacagcagcggggcuggguguuc

SEQ ID NO: 25049 - RNA, 24 nt, Human
cuggggccugcugaggugggggug

SEQ ID NO: 25050 - RNA, 24 nt, Human
gaugauacaugucagugcugugga

SEQ ID NO: 25051 - RNA, 24 nt, Human
ucugucagccaguacucccauuaa

SEQ ID NO: 25052 - RNA, 24 nt, Human
uaaguagaaaugggauguuuuguu

SEQ ID NO: 25053 - RNA, 22 nt, Human
acaaagcuuucaguuucaaauc

SEQ ID NO: 25054 - RNA, 20 nt, Human
ccggccucuacggcuucauc

SEQ ID NO: 25055 - RNA, 24 nt, Human
ucuccagaaaugcuuuggguucau

SEQ ID NO: 25056 - RNA, 24 nt, Human
uugaucuugaagaaacugggcgug

SEQ ID NO: 25057 - RNA, 24 nt, Human
aggaaggagauauagugaagagga

SEQ ID NO: 25058 - RNA, 24 nt, Human
uuagcugacagucagcugugggga

SEQ ID NO: 25059 - RNA, 24 nt, Human
agggagaacuuccuuuccagggcu

SEQ ID NO: 25060 - RNA, 21 nt, Human
acccgcgucuuuguggccccg

SEQ ID NO: 25061 - RNA, 24 nt, Human
gcgacccuuugcgcaaacacacca

SEQ ID NO: 25062 - RNA, 23 nt, Human
uugaaaaauuugagaaggaggcu

SEQ ID NO: 25063 - RNA, 17 nt, Human
agggauggaaagucacc

SEQ ID NO: 25064 - RNA, 24 nt, Human
cagcggcccuuguuucuucuuacc

SEQ ID NO: 25065 - RNA, 24 nt, Human
aggaauuccagaguccuggucagc

SEQ ID NO: 25066 - RNA, 24 nt, Human
uauaguacgaacuugacuggccgu

SEQ ID NO: 25067 - RNA, 24 nt, Human
guguauugacaacagagaaacaga

SEQ ID NO: 25068 - RNA, 24 nt, Human
ucuagauaauuuuauauuuuugag

SEQ ID NO: 25069 - RNA, 24 nt, Human
aguacagugguagcaguuggacug

SEQ ID NO: 25070 - RNA, 24 nt, Human
uggcucagagcuacaauuuauuac

SEQ ID NO: 25071 - RNA, 24 nt, Human
uaacgugguguugugccugcuggc

SEQ ID NO: 25072 - RNA, 24 nt, Human
ucccugggcgaccugcaguuugca

SEQ ID NO: 25073 - RNA, 24 nt, Human
uggguccacgggguggccauggga

SEQ ID NO: 25074 - RNA, 24 nt, Human
uaagaggguaaugaaaccuuccuu

SEQ ID NO: 25075 - RNA, 24 nt, Human
acccuaaaaaaucuucgggugaca

SEQ ID NO: 25076 - RNA, 24 nt, Human
uaauagguaguuuuuauagaacua

SEQ ID NO: 25077 - RNA, 24 nt, Human
ucagugaguaauaauuaaucaacg

SEQ ID NO: 25078 - RNA, 24 nt, Human
uuaaucauguuccgucuguggugc

SEQ ID NO: 25079 - RNA, 21 nt, Human
ugcaauggccaccucuuuaaa

SEQ ID NO: 25080 - RNA, 24 nt, Human
gucaucuuuucauuaaguggauuc

SEQ ID NO: 25081 - RNA, 24 nt, Human
uuagagcucgguuugcaacgcugu

SEQ ID NO: 25082 - RNA, 24 nt, Human
gagaacaccccgggggccaaggac

SEQ ID NO: 25083 - RNA, 24 nt, Human
agaguggaucggugaagugugucg

SEQ ID NO: 25084 - RNA, 18 nt, Human
ucccacauggguugcagg

SEQ ID NO: 25085 - RNA, 24 nt, Human
gcgcacuguggaugugggaaaggc

SEQ ID NO: 25086 - RNA, 24 nt, Human
ucacggguaaaaacucuaaaaggu

SEQ ID NO: 25087 - RNA, 24 nt, Human
auagaaccccuucugacugagcaa

SEQ ID NO: 25088 - RNA, 24 nt, Human
ugaccuggauggcugcccagucug

SEQ ID NO: 25089 - RNA, 24 nt, Human
uggagaguuucucugcauguuuga

SEQ ID NO: 25090 - RNA, 24 nt, Human
ccgcacccgccgccucccgccccc

SEQ ID NO: 25091 - RNA, 24 nt, Human
ucccugggcggccaccuccagaag

SEQ ID NO: 25092 - RNA, 24 nt, Human
agaaaggaguuauugggggaauca

SEQ ID NO: 25093 - RNA, 21 nt, Human
uaccuggccacaguucaagcc

SEQ ID NO: 25094 - RNA, 24 nt, Human
ucgcaagaggugaguccgucuugu

SEQ ID NO: 25095 - RNA, 24 nt, Human
cagcgucaaggguuccacacuguu

SEQ ID NO: 25096 - RNA, 17 nt, Human
ucggacaggcgcugagc

SEQ ID NO: 25097 - RNA, 24 nt, Human
uggcuucgugcuugggguagaucu

SEQ ID NO: 25098 - RNA, 24 nt, Human
agagacuaauuauugcacuuaaau

SEQ ID NO: 25099 - RNA, 24 nt, Human
cuagccccagggaagggagagccu

SEQ ID NO: 25100 - RNA, 24 nt, Human
ucacacucucucucucugcugugu

SEQ ID NO: 25101 - RNA, 24 nt, Human
uguggugugugugcacacucucug

SEQ ID NO: 25102 - RNA, 24 nt, Human
uuugcucugagggguccugucuuc

SEQ ID NO: 25103 - RNA, 24 nt, Human
ucccagauggcuguggggucaagu

SEQ ID NO: 25104 - RNA, 24 nt, Human
gugcgcugccggccgcggcuucag

SEQ ID NO: 25105 - RNA, 24 nt, Human
ucgcuagucuccguauggcccgug

SEQ ID NO: 25106 - RNA, 23 nt, Human
cauccagacuggccccagaggac

SEQ ID NO: 25107 - RNA, 24 nt, Human
uggcaucugguggcuaagcugguc

SEQ ID NO: 25108 - RNA, 24 nt, Human
ucuuugggcggaagacaggucagg

SEQ ID NO: 25109 - RNA, 24 nt, Human
uccaaacuucaccaucuggauacu

SEQ ID NO: 25110 - RNA, 24 nt, Human
ugcaacagauaguucuuccacauc

SEQ ID NO: 25111 - RNA, 19 nt, Human
ugucuagaguuguagcuuc

SEQ ID NO: 25112 - RNA, 24 nt, Human
cugcggccacuggguuucggccuc

SEQ ID NO: 25113 - RNA, 24 nt, Human
ugagcugugccuucgccaccccuu

SEQ ID NO: 25114 - RNA, 24 nt, Human
ugacuucccuauggacaaccucau

SEQ ID NO: 25115 - RNA, 24 nt, Human
caaaggcccuggcaacgucaacau

SEQ ID NO: 25116 - RNA, 20 nt, Human
ugaggugacagucacggagg

SEQ ID NO: 25117 - RNA, 20 nt, Human
ugaggggguguggcacggga

SEQ ID NO: 25118 - RNA, 24 nt, Human
ucaacauuuugugugauccagcau

SEQ ID NO: 25119 - RNA, 18 nt, Human
uauuccagcgucuucagg

SEQ ID NO: 25120 - RNA, 24 nt, Human
uagaaaauuauuguuugucugugc

SEQ ID NO: 25121 - RNA, 24 nt, Human
cuaugcauucauggcucuggacgc

SEQ ID NO: 25122 - RNA, 24 nt, Human
ucgcugaggggguucgugcggcuc

SEQ ID NO: 25123 - RNA, 24 nt, Human
uuuaagcacaguaauagaggugag

SEQ ID NO: 25124 - RNA, 24 nt, Human
gggaccaacugggacucauuaugg

SEQ ID NO: 25125 - RNA, 21 nt, Human
gaacacgggcccgacuucccc

SEQ ID NO: 25126 - RNA, 24 nt, Human
uccacaggaaacgcaaacucaugu

SEQ ID NO: 25127 - RNA, 24 nt, Human
cggcagggcuccgagaccucggcu

SEQ ID NO: 25128 - RNA, 24 nt, Human
caacagaagccuuagugcgaacug

SEQ ID NO: 25129 - RNA, 24 nt, Human
cuucgcgggggcggcgggcggccc

SEQ ID NO: 25130 - RNA, 24 nt, Human
cgggagggcaaggucgagccguug

SEQ ID NO: 25131 - RNA, 24 nt, Human
ugcuguuggcgucgccgcccgccg

SEQ ID NO: 25132 - RNA, 24 nt, Human
cuguaccacacggcgcgguggcac

SEQ ID NO: 25133 - RNA, 24 nt, Human
uuaaugggaaauggagagacuacc

SEQ ID NO: 25134 - RNA, 24 nt, Human
uaugacaaugaaaucuguguguau

SEQ ID NO: 25135 - RNA, 24 nt, Human
cuuucagacuuagaauaauguuga

SEQ ID NO: 25136 - RNA, 24 nt, Human
aggaaaucuacagaagggaaucug

SEQ ID NO: 25137 - RNA, 24 nt, Human
acagacacauugacaugggugggu

SEQ ID NO: 25138 - RNA, 24 nt, Human
ucacacucggcuccgcgccgccuc

SEQ ID NO: 25139 - RNA, 24 nt, Human
gacccugugcgacagcugggcuga

SEQ ID NO: 25140 - RNA, 24 nt, Human
ugccccagcggaagugcuccaucc

SEQ ID NO: 25141 - RNA, 24 nt, Human
agcacugaccgaccauugccauuu

SEQ ID NO: 25142 - RNA, 24 nt, Human
uucacuuuaccuucugccaaaugc

SEQ ID NO: 25143 - RNA, 24 nt, Human
ugcugugugcucuuugaaaggaau

SEQ ID NO: 25144 - RNA, 24 nt, Human
cuccucagagucucuccuauuuuu

SEQ ID NO: 25145 - RNA, 20 nt, Human
uugguccaguuuuacgaaca

SEQ ID NO: 25146 - RNA, 24 nt, Human
agcacuuugggaggcugagguggg

SEQ ID NO: 25147 - RNA, 24 nt, Human
cucgggcagcuagguuugggauuu

SEQ ID NO: 25148 - RNA, 24 nt, Human
caaaccuaugguuaacuuggauaa

SEQ ID NO: 25149 - RNA, 24 nt, Human
uguccagaccauugucuuccaacc

SEQ ID NO: 25150 - RNA, 24 nt, Human
uauggcaaggaccugauggagaag

SEQ ID NO: 25151 - RNA, 24 nt, Human
aaggagcuuugguucggagacagg

SEQ ID NO: 25152 - RNA, 24 nt, Human
gacacgguuguuuacaccagcaaa

SEQ ID NO: 25153 - RNA, 21 nt, Human
ugagaccauugccgcguuugc

SEQ ID NO: 25154 - RNA, 24 nt, Human
aagcauucacuuaauauuuuaguu

SEQ ID NO: 25155 - RNA, 24 nt, Human
ugaggacaaguggagccacaaggg

SEQ ID NO: 25156 - RNA, 21 nt, Human
ucaaucucaccuucugauaua

SEQ ID NO: 25157 - RNA, 24 nt, Human
cgggaccagugcuucggggaccgc

SEQ ID NO: 25158 - RNA, 24 nt, Human
uugacacaguggaucucugugcca

SEQ ID NO: 25159 - RNA, 24 nt, Human
uccaucgggguguuccaacuuuca

SEQ ID NO: 25160 - RNA, 24 nt, Human
ugguauuugagucuccuagaaucu

SEQ ID NO: 25161 - RNA, 24 nt, Human
uucauuuuccaguugguauuugag

SEQ ID NO: 25162 - RNA, 24 nt, Human
acccuguuguugcccaggccuaaa

SEQ ID NO: 25163 - RNA, 24 nt, Human
ugagaucuagggauaccacagaaa

SEQ ID NO: 25164 - RNA, 24 nt, Human
aaaggaacuugcuccauuguuuga

SEQ ID NO: 25165 - RNA, 24 nt, Human
uauugugcuucauccguucagcug

SEQ ID NO: 25166 - RNA, 24 nt, Human
ucuacguauugcaggugguguugg

SEQ ID NO: 25167 - RNA, 24 nt, Human
ugagauagucuuauaagaaucacg

SEQ ID NO: 25168 - RNA, 23 nt, Human
uguuggguugcauguggaguaca

SEQ ID NO: 25169 - RNA, 24 nt, Human
cucuggaaauggugaggcgagggg

SEQ ID NO: 25170 - RNA, 24 nt, Human
ccccgaaaaggcgcucggggagcg

SEQ ID NO: 25171 - RNA, 24 nt, Human
uuuauccuuuauguguguuaaaau

SEQ ID NO: 25172 - RNA, 24 nt, Human
uauguuauuaaaucaaaacaaaac

SEQ ID NO: 25173 - RNA, 24 nt, Human
ccucagugauaagaaagaugccuc

SEQ ID NO: 25174 - RNA, 24 nt, Human
uagucuccaaauauaguguuuuag

SEQ ID NO: 25175 - RNA, 18 nt, Human
uagcaccauggacggggu

SEQ ID NO: 25176 - RNA, 24 nt, Human
agccuuuauugggucagggcuugc

SEQ ID NO: 25177 - RNA, 24 nt, Human
ucuugcaggaagcuugacaaaugc

SEQ ID NO: 25178 - RNA, 24 nt, Human
ugggauggggaucucguuggacug

SEQ ID NO: 25179 - RNA, 24 nt, Human
agccaggggcggcagcaggggggg

SEQ ID NO: 25180 - RNA, 24 nt, Human
uuugaaaaaaacaaaaaauaaaug

SEQ ID NO: 25181 - RNA, 24 nt, Human
ucuuagugcuucauucuauugguu

SEQ ID NO: 25182 - RNA, 24 nt, Human
uauugugcucuuguuggcuccuau

SEQ ID NO: 25183 - RNA, 24 nt, Human
uggggcugcgcggggccgggcgag

SEQ ID NO: 25184 - RNA, 24 nt, Human
ccgcugcuggggcugcugcucggc

SEQ ID NO: 25185 - RNA, 24 nt, Human
uggaaagcucagaauguaaaaaua

SEQ ID NO: 25186 - RNA, 24 nt, Human
uacaaucacagauauccuauggag

SEQ ID NO: 25187 - RNA, 17 nt, Human
cagcauggggggauugg

SEQ ID NO: 25188 - RNA, 24 nt, Human
agagugagaaaacacaaugucuau

SEQ ID NO: 25189 - RNA, 24 nt, Human
uaagguacgagaggcacaaaguga

SEQ ID NO: 25190 - RNA, 24 nt, Human
uacacacugugagacucugcuaca

SEQ ID NO: 25191 - RNA, 24 nt, Human
uggaagaaaagcaaaucgugacga

SEQ ID NO: 25192 - RNA, 24 nt, Human
ggagcacggggugacuugcuuggg

SEQ ID NO: 25193 - RNA, 24 nt, Human
ugccucaggugacgggccgugaga

SEQ ID NO: 25194 - RNA, 22 nt, Human
ugacugcagcucacguccagcc

SEQ ID NO: 25195 - RNA, 24 nt, Human
uguggcaguuacugauguggacca

SEQ ID NO: 25196 - RNA, 24 nt, Human
ugggaagacauccugagcgaugag

SEQ ID NO: 25197 - RNA, 24 nt, Human
uccaggauguuaccguuccugcug

SEQ ID NO: 25198 - RNA, 22 nt, Human
aagcgcccgcuucccacgcccc

SEQ ID NO: 25199 - RNA, 24 nt, Human
ugggaucauucugacagccaguca

SEQ ID NO: 25200 - RNA, 24 nt, Human
uauuuugugguggcaaauguuugg

SEQ ID NO: 25201 - RNA, 24 nt, Human
uuaaagugguuugaauaaaguaga

SEQ ID NO: 25202 - RNA, 24 nt, Human
ucgggccggcuggccgggcgcggg

SEQ ID NO: 25203 - RNA, 24 nt, Human
acgcugagugaccugcucacgggc

SEQ ID NO: 25204 - RNA, 24 nt, Human
ucgguggccgccagcugccuggug

SEQ ID NO: 25205 - RNA, 24 nt, Human
gagcaggccggaaguggcuuuccg

SEQ ID NO: 25206 - RNA, 24 nt, Human
gaucgugccgggcgggggcaugga

SEQ ID NO: 25207 - RNA, 24 nt, Human
ccggagcgagcgcgaggacgaggu

SEQ ID NO: 25208 - RNA, 24 nt, Human
cugccucgaggaugaagugcaaac

SEQ ID NO: 25209 - RNA, 24 nt, Human
uuaguauacagacgacagugaacu

SEQ ID NO: 25210 - RNA, 24 nt, Human
uuugccggaaccagguacagugaa

SEQ ID NO: 25211 - RNA, 23 nt, Human
uucaucucuuguggacagugagc

SEQ ID NO: 25212 - RNA, 24 nt, Human
ucagccucuucccugcccuguggu

SEQ ID NO: 25213 - RNA, 24 nt, Human
ucuccagaaaugcuuuggguucau

SEQ ID NO: 25214 - RNA, 24 nt, Human
aggaaggagauauagugaagagga

SEQ ID NO: 25215 - RNA, 24 nt, Human
uaggugcccaccaccaggcugggc

SEQ ID NO: 25216 - RNA, 24 nt, Human
ggagguugcagugagcagagauug

SEQ ID NO: 25217 - RNA, 24 nt, Human
uuaguugucacaaacaaauucaca

SEQ ID NO: 25218 - RNA, 24 nt, Human
ugggagaaaguaaagaaaaacugg

SEQ ID NO: 25219 - RNA, 19 nt, Human
uauagcauaaagauggaug

SEQ ID NO: 25220 - RNA, 24 nt, Human
uuugagaaggaagccuggcuugcc

SEQ ID NO: 25221 - RNA, 24 nt, Human
uaaaaagagagcuuuaguaaguaa

SEQ ID NO: 25222 - RNA, 24 nt, Human
uugaucuugaagaaacugggcgug

SEQ ID NO: 25223 - RNA, 24 nt, Human
ucagagcuacacauugagaaccug

SEQ ID NO: 25224 - RNA, 24 nt, Human
uacaagaucacugacucugaggac

SEQ ID NO: 25225 - RNA, 24 nt, Human
ucuccagaaaugcuuuggguucau

SEQ ID NO: 25226 - RNA, 24 nt, Human
aggaaggagauauagugaagagga

SEQ ID NO: 25227 - RNA, 24 nt, Human
ugaaagcccccgguaucauuccuc

SEQ ID NO: 25228 - RNA, 23 nt, Human
ugccaaggaccaggaugauggag

SEQ ID NO: 25229 - RNA, 24 nt, Human
aagaagacaagucgcauguuccag

SEQ ID NO: 25230 - RNA, 20 nt, Human
cugcgcccccuccugccagg

SEQ ID NO: 25231 - RNA, 20 nt, Human
gggcacaggcagaggccagc

SEQ ID NO: 25232 - RNA, 17 nt, Human
ucccaaagcuggcugga

SEQ ID NO: 25233 - RNA, 24 nt, Human
ccaggccggcagcaauauggccuc

SEQ ID NO: 25234 - RNA, 24 nt, Human
uccaucgucaugcucaaccagcug

SEQ ID NO: 25235 - RNA, 24 nt, Human
uugaucuugaagaaacugggcgug

SEQ ID NO: 25236 - RNA, 24 nt, Human
guagaguuuucuucaggcuuaaag

SEQ ID NO: 25237 - RNA, 24 nt, Human
uugaauuagaugcaauggaucacu

SEQ ID NO: 25238 - RNA, 22 nt, Human
uaccauguccgcccaggcgcag

SEQ ID NO: 25239 - RNA, 24 nt, Human
ugcaagagucaccuucuggacugc

SEQ ID NO: 25240 - RNA, 24 nt, Human
agagguaaugagaaguaguuggau

SEQ ID NO: 25241 - RNA, 18 nt, Human
aagaagguaaaaucccua

SEQ ID NO: 25242 - RNA, 24 nt, Human
ucuaugggaccaguggcuuggauu

SEQ ID NO: 25243 - RNA, 24 nt, Human
uccagugaaauuguaagcuucaau

SEQ ID NO: 25244 - RNA, 24 nt, Human
uagcugccuggggcuggcccugcu

SEQ ID NO: 25245 - RNA, 24 nt, Human
ggacagguguacagacauguucuu

SEQ ID NO: 25246 - RNA, 24 nt, Human
ucagugggcuggacauggaggaag

SEQ ID NO: 25247 - RNA, 24 nt, Human
gcccuguuuccaaaaacgcguaca

SEQ ID NO: 25248 - RNA, 24 nt, Human
ucugcgggguugagccuggugggc

SEQ ID NO: 25249 - RNA, 24 nt, Human
ccccacacucugagucugcccuau

SEQ ID NO: 25250 - RNA, 24 nt, Human
uggggucggggacagagcggugac

SEQ ID NO: 25251 - RNA, 24 nt, Human
uccuugggcguccuugcuguuuug

SEQ ID NO: 25252 - RNA, 24 nt, Human
uuagagccguauggugagcagccu

SEQ ID NO: 25253 - RNA, 24 nt, Human
cauccucggccgugggcugcagga

SEQ ID NO: 25254 - RNA, 24 nt, Human
ugagaccuaccaccagcaggggca

SEQ ID NO: 25255 - RNA, 23 nt, Human
ggagaacuucucaauauuggaaa

SEQ ID NO: 25256 - RNA, 24 nt, Human
uauggcaagucacuuugacagaca

SEQ ID NO: 25257 - RNA, 24 nt, Human
ugagaauggcaaaauuagucgccu

SEQ ID NO: 25258 - RNA, 24 nt, Human
uacaccacucccaagaagaauaag

SEQ ID NO: 25259 - RNA, 24 nt, Human
uauggcaagucacuuugacagaca

SEQ ID NO: 25260 - RNA, 24 nt, Human
ugagaauggcaaaauuagucgccu

SEQ ID NO: 25261 - RNA, 24 nt, Human
uacaccacucccaagaagaauaag

SEQ ID NO: 25262 - RNA, 24 nt, Human
guggugcgggccuguggucucagc

SEQ ID NO: 25263 - RNA, 24 nt, Human
aagaauuuacaggccgggcgaggu

SEQ ID NO: 25264 - RNA, 24 nt, Human
uacuuggagugccugaaaccugua

SEQ ID NO: 25265 - RNA, 24 nt, Human
uguuacuagcacuuugagaaugag

SEQ ID NO: 25266 - RNA, 24 nt, Human
ucccuccagccucuccuccauucc

SEQ ID NO: 25267 - RNA, 24 nt, Human
uauuaugucuucauuuaguggugu

SEQ ID NO: 25268 - RNA, 24 nt, Human
uaauguacucucuuaauauguuaa

SEQ ID NO: 25269 - RNA, 24 nt, Human
ucgcucagccaggagaugagaugc

SEQ ID NO: 25270 - RNA, 24 nt, Human
ugucccggacagugcgugcgagcg

SEQ ID NO: 25271 - RNA, 21 nt, Human
cauuggacaggacauccagcc

SEQ ID NO: 25272 - RNA, 24 nt, Human
cagcggcagagagccauccucuau

SEQ ID NO: 25273 - RNA, 24 nt, Human
accgaguuaaauaucagagagucc

SEQ ID NO: 25274 - RNA, 24 nt, Human
uuuuccuagcuacaucugguaccu

SEQ ID NO: 25275 - RNA, 24 nt, Human
ugccagugggcuccagcuugggug

SEQ ID NO: 25276 - RNA, 24 nt, Human
ugagagccucaguuuucucgucua

SEQ ID NO: 25277 - RNA, 24 nt, Human
uugaucuugaagaaacugggcgug

SEQ ID NO: 25278 - RNA, 24 nt, Human
aggaaggagauauagugaagagga

SEQ ID NO: 25279 - RNA, 23 nt, Human
ugacaauccccuugacguucuau

SEQ ID NO: 25280 - RNA, 21 nt, Human
ugggaggggcugaauguggug

SEQ ID NO: 25281 - RNA, 24 nt, Human
aaggaaccauggccaacugugagc

SEQ ID NO: 25282 - RNA, 24 nt, Human
aagcguuuugagcagaaaggauuc

SEQ ID NO: 25283 - RNA, 24 nt, Human
ucuccagaaaugcuuuggguucau

SEQ ID NO: 25284 - RNA, 24 nt, Human
uugaucuugaagaaacugggcgug

SEQ ID NO: 25285 - RNA, 24 nt, Human
aggaaggagauauagugaagagga

SEQ ID NO: 25286 - RNA, 24 nt, Human
uugaucuugaagaaacugggcgug

SEQ ID NO: 25287 - RNA, 24 nt, Human
aggaaggagauauagugaagagga

SEQ ID NO: 25288 - RNA, 21 nt, Human
uccgugcgcgugcugcggccg

SEQ ID NO: 25289 - RNA, 24 nt, Human
uugaucuugaagaaacugggcgug

SEQ ID NO: 25290 - RNA, 24 nt, Human
guagaguuuucuucaggcuuaaag

SEQ ID NO: 25291 - RNA, 24 nt, Human
uguggcccuucucuuuaaguccga

SEQ ID NO: 25292 - RNA, 24 nt, Human
cuacauggcaaucgggggcuaugu

SEQ ID NO: 25293 - RNA, 24 nt, Human
uuccaguuggugaggagcuguggg

SEQ ID NO: 25294 - RNA, 24 nt, Human
ggacgugguccgcgcccuuccucg

SEQ ID NO: 25295 - RNA, 24 nt, Human
gagcugauaccucuguugaucuug

SEQ ID NO: 25296 - RNA, 24 nt, Human
aggaaggagauauagugaagagga

SEQ ID NO: 25297 - RNA, 24 nt, Human
cagcacccugccuugucuccagga

SEQ ID NO: 25298 - RNA, 21 nt, Human
cagccccccugcacgcagccc

SEQ ID NO: 25299 - RNA, 24 nt, Human
agcagguguguaaacagaggguuc

SEQ ID NO: 25300 - RNA, 24 nt, Human
ugugggggccaagguuggggugag

SEQ ID NO: 25301 - RNA, 24 nt, Human
agcagguguguaaacagaggguuc

SEQ ID NO: 25302 - RNA, 17 nt, Human
gacaguggcuggucccc

SEQ ID NO: 25303 - RNA, 24 nt, Human
ucauacuuacugccggcugccccg

SEQ ID NO: 25304 - RNA, 24 nt, Human
uggguucgacuucagagcuuuuga

SEQ ID NO: 25305 - RNA, 24 nt, Human
gggccgagggacaauggucaccgu

SEQ ID NO: 25306 - RNA, 24 nt, Human
ugucacaugcaagucucuuuucug

SEQ ID NO: 25307 - RNA, 24 nt, Human
uucgcguaaccugcugauccuuuc

SEQ ID NO: 25308 - RNA, 24 nt, Human
cuggaacuauugcuggucucaaug

SEQ ID NO: 25309 - RNA, 24 nt, Human
ugauaugaaacauuggcccuuuau

SEQ ID NO: 25310 - RNA, 24 nt, Human
ucagaacgugaaaugcaagauagu

SEQ ID NO: 25311 - RNA, 24 nt, Human
ugaggagucaggcuuaaaacuugu

SEQ ID NO: 25312 - RNA, 19 nt, Human
gucacaguaacuggggggu

SEQ ID NO: 25313 - RNA, 24 nt, Human
uacuacagaaaauaugcagcuauc

SEQ ID NO: 25314 - RNA, 24 nt, Human
uugcugccaguccccauccugaag

SEQ ID NO: 25315 - RNA, 19 nt, Human
uaucacacuuacaaacuuu

SEQ ID NO: 25316 - RNA, 24 nt, Human
gggaagacugaagaaguguuaacu

SEQ ID NO: 25317 - RNA, 24 nt, Human
gugcuuagaacuuuaaggugcaaa

SEQ ID NO: 25318 - RNA, 24 nt, Human
uuccgauugcuggccguaguucua

SEQ ID NO: 25319 - RNA, 24 nt, Human
gagcuucggcgggcggcuggacgu

SEQ ID NO: 25320 - RNA, 24 nt, Human
cagcaccgucugccuggcugaugc

SEQ ID NO: 25321 - RNA, 23 nt, Human
uucccggugcuguucaccuauga

SEQ ID NO: 25322 - RNA, 22 nt, Human
uuccucagcuuuguucugugcc

SEQ ID NO: 25323 - RNA, 24 nt, Human
agagaggggcaguuaguauuagug

SEQ ID NO: 25324 - RNA, 24 nt, Human
uugcuuggauguuucuuugguguu

SEQ ID NO: 25325 - RNA, 24 nt, Human
ugaaagacaguauaauugagauua

SEQ ID NO: 25326 - RNA, 24 nt, Human
uagaaagcacuauauaaaaguugu

SEQ ID NO: 25327 - RNA, 24 nt, Human
uuaacuuguagaguuauugugaaa

SEQ ID NO: 25328 - RNA, 24 nt, Human
uucccaguuggaucucagaauugc

SEQ ID NO: 25329 - RNA, 24 nt, Human
uacuaugugccacucauuucucuc

SEQ ID NO: 25330 - RNA, 24 nt, Human
ugugguaauaaucguguaagauac

SEQ ID NO: 25331 - RNA, 24 nt, Human
ugaggcccgcacacauuauggagg

SEQ ID NO: 25332 - RNA, 22 nt, Human
uauuagggucauugugaauagg

SEQ ID NO: 25333 - RNA, 24 nt, Human
uugcagcccccccuagcucucccc

SEQ ID NO: 25334 - RNA, 24 nt, Human
ucagugguuuucggagagggcccu

SEQ ID NO: 25335 - RNA, 24 nt, Human
uguugggaaaaugcugcuuaugag

SEQ ID NO: 25336 - RNA, 18 nt, Human
ugaguggacugaugacca

SEQ ID NO: 25337 - RNA, 24 nt, Human
gagaaucuccucaagggcucagcu

SEQ ID NO: 25338 - RNA, 21 nt, Human
ugagaugauugauugacauga

SEQ ID NO: 25339 - RNA, 24 nt, Human
ucacuggauaucuugguaugugaa

SEQ ID NO: 25340 - RNA, 24 nt, Human
guccuuugggaugaagacuauagg

SEQ ID NO: 25341 - RNA, 24 nt, Human
uuaccaggaauuuuugaaaguuuu

SEQ ID NO: 25342 - RNA, 24 nt, Human
uagcacaacuggucuucagcacug

SEQ ID NO: 25343 - RNA, 24 nt, Human
uauaguucagacagcugcucagcg

SEQ ID NO: 25344 - RNA, 18 nt, Human
ugaggaaauuguucagag

SEQ ID NO: 25345 - RNA, 24 nt, Human
cuacugcuccccgcuggcgcgcag

SEQ ID NO: 25346 - RNA, 24 nt, Human
ggaguaaaaguuguuaaaggcaaa

SEQ ID NO: 25347 - RNA, 24 nt, Human
cgacauuguggacuuggcuucagu

SEQ ID NO: 25348 - RNA, 22 nt, Human
uuuguuaaaauccagugguuuc

SEQ ID NO: 25349 - RNA, 24 nt, Human
uucagagucagagaaagaagaauc

SEQ ID NO: 25350 - RNA, 24 nt, Human
uggaaauguguuuguggcauauag

SEQ ID NO: 25351 - RNA, 24 nt, Human
ucuguguguguagugagagugugu

SEQ ID NO: 25352 - RNA, 20 nt, Human
aauaaaaucuuguacuauga

SEQ ID NO: 25353 - RNA, 24 nt, Human
caauauggaaaauacauuggcuuu

SEQ ID NO: 25354 - RNA, 24 nt, Human
gggaaguguaaaaguuuacacuuu

SEQ ID NO: 25355 - RNA, 24 nt, Human
ucuaguuuuugaaagagaugcgga

SEQ ID NO: 25356 - RNA, 24 nt, Human
uagauuuuaacauauggacaacaa

SEQ ID NO: 25357 - RNA, 24 nt, Human
uuuguaggugcuuaauuuugccac

SEQ ID NO: 25358 - RNA, 24 nt, Human
uaaguugacucauacaguguuuau

SEQ ID NO: 25359 - RNA, 24 nt, Human
uagcguguauccaaauuucauuua

SEQ ID NO: 25360 - RNA, 24 nt, Human
ucucucggacaagcuguagguccu

SEQ ID NO: 25361 - RNA, 24 nt, Human
aauuaucugcuuucugcauuagaa

SEQ ID NO: 25362 - RNA, 24 nt, Human
acugguucaccuacaaugagacaa

SEQ ID NO: 25363 - RNA, 24 nt, Human
ucacauagguugugccaugagugg

SEQ ID NO: 25364 - RNA, 23 nt, Human
cucugcuucagagggugcccaga

SEQ ID NO: 25365 - RNA, 24 nt, Human
uggaagcacugauuguuuaaagau

SEQ ID NO: 25366 - RNA, 24 nt, Human
cacuuuaugggggcagaauggaac

SEQ ID NO: 25367 - RNA, 24 nt, Human
uccaacuuacuuccuucuguuaau

SEQ ID NO: 25368 - RNA, 24 nt, Human
caucgcuacuacaauuuuagaauu

SEQ ID NO: 25369 - RNA, 24 nt, Human
gaccauuuuccaucgccagcgacu

SEQ ID NO: 25370 - RNA, 24 nt, Human
uuaaacaacaaguccuuucaaucc

SEQ ID NO: 25371 - RNA, 24 nt, Human
agcacguucuagggaugggggcag

SEQ ID NO: 25372 - RNA, 24 nt, Human
aaggagcugcaggaaaagaggagg

SEQ ID NO: 25373 - RNA, 24 nt, Human
uggaaguaugauuuuccaacccaa

SEQ ID NO: 25374 - RNA, 24 nt, Human
uuccuuggcauagaccagcgccag

SEQ ID NO: 25375 - RNA, 24 nt, Human
ucccggagcgguggggcggggccu

SEQ ID NO: 25376 - RNA, 24 nt, Human
ucaguucuucccaggugaacagca

SEQ ID NO: 25377 - RNA, 24 nt, Human
gcagcaguuauucucuuguuuaca

SEQ ID NO: 25378 - RNA, 24 nt, Human
ccugcauuuacugccuuucacuua

SEQ ID NO: 25379 - RNA, 23 nt, Human
gugcugccacuuacuugcugccu

SEQ ID NO: 25380 - RNA, 24 nt, Human
uggguuaaagggagcacaugugau

SEQ ID NO: 25381 - RNA, 24 nt, Human
caccuccauccuccugcccagccg

SEQ ID NO: 25382 - RNA, 24 nt, Human
ucacgugauguuucccaggcacug

SEQ ID NO: 25383 - RNA, 22 nt, Human
ugagaagcaaagggaaugugga

SEQ ID NO: 25384 - RNA, 24 nt, Human
caugagaauaauguuuuaaaacca

SEQ ID NO: 25385 - RNA, 24 nt, Human
uauaaaguuugggcacuuagagca

SEQ ID NO: 25386 - RNA, 24 nt, Human
ugcagugauuauuuuuuaaagucu

SEQ ID NO: 25387 - RNA, 24 nt, Human
uaaaaccauuaccuuaaaauuuuu

SEQ ID NO: 25388 - RNA, 24 nt, Human
aacgcucuuuagcagacauggacu

SEQ ID NO: 25389 - RNA, 24 nt, Human
uggcagaaggcauuuacaaucucu

SEQ ID NO: 25390 - RNA, 24 nt, Human
uggcauuguaggugugagcagcca

SEQ ID NO: 25391 - RNA, 24 nt, Human
uggcuggaggugcaguggcgugau

SEQ ID NO: 25392 - RNA, 24 nt, Human
uaccaggaugggacccacagaacu

SEQ ID NO: 25393 - RNA, 24 nt, Human
agccgguaaugcccucauggaugg

SEQ ID NO: 25394 - RNA, 24 nt, Human
uaacuuuuucaccaguauugcacu

SEQ ID NO: 25395 - RNA, 24 nt, Human
uuccucaggcugcaaguggaggga

SEQ ID NO: 25396 - RNA, 24 nt, Human
cgucgggaggcgucguccuccagc

SEQ ID NO: 25397 - RNA, 24 nt, Human
cacccgguguccguccuggagggc

SEQ ID NO: 25398 - RNA, 24 nt, Human
gggcagcgcggaaggcagugcugu

SEQ ID NO: 25399 - RNA, 24 nt, Human
ugccuggagccaugugaaaaaaac

SEQ ID NO: 25400 - RNA, 24 nt, Human
uaugacccagguccaaaaguucca

SEQ ID NO: 25401 - RNA, 24 nt, Human
aggaaucaguacaagucaucaggg

SEQ ID NO: 25402 - RNA, 24 nt, Human
uuuuaugguuguguauguguugcu

SEQ ID NO: 25403 - RNA, 24 nt, Human
ccuggccccaggugauccacccac

SEQ ID NO: 25404 - RNA, 24 nt, Human
ucucgcucuguugcccaggcugga

SEQ ID NO: 25405 - RNA, 24 nt, Human
uauuaaaugaauuugugacuuagg

SEQ ID NO: 25406 - RNA, 24 nt, Human
cagaggguugccuauggugggcac

SEQ ID NO: 25407 - RNA, 22 nt, Human
uccgugcgcguugcugcggccg

SEQ ID NO: 25408 - RNA, 24 nt, Human
uugaucuugaagaaacugggcgug

SEQ ID NO: 25409 - RNA, 24 nt, Human
aggaaggagauauagugaagagga

SEQ ID NO: 25410 - RNA, 24 nt, Human
guagaguuuucuucaggcuuaaag

SEQ ID NO: 25411 - RNA, 24 nt, Human
ucggcacugagucccuggcaccag

SEQ ID NO: 25412 - RNA, 24 nt, Human
uucucaggaagaaguacccgggug

SEQ ID NO: 25413 - RNA, 24 nt, Human
ugaaagugcucacaaacuucaaga

SEQ ID NO: 25414 - RNA, 24 nt, Human
cauuccaugcagccuugcggaacu

SEQ ID NO: 25415 - RNA, 24 nt, Human
uguggacgagcaggaggaggcggc

SEQ ID NO: 25416 - RNA, 24 nt, Human
uauggcaagucacuuugacagaca

SEQ ID NO: 25417 - RNA, 24 nt, Human
uacaccacucccaagaagaauaag

SEQ ID NO: 25418 - RNA, 24 nt, Human
uagauggcuucuuucugauuaugu

SEQ ID NO: 25419 - RNA, 24 nt, Human
gggaaucaaguuugguguuaccau

SEQ ID NO: 25420 - RNA, 24 nt, Human
uacacuggugauuucucaagacaa

SEQ ID NO: 25421 - RNA, 24 nt, Human
uuggucguccaggcccagcgauag

SEQ ID NO: 25422 - RNA, 24 nt, Human
uauaaaacuuugauaguuacauug

SEQ ID NO: 25423 - RNA, 22 nt, Human
uagcaugccucuuaauuuuucu

SEQ ID NO: 25424 - RNA, 24 nt, Human
aacagguaaccacuugagaggaug

SEQ ID NO: 25425 - RNA, 24 nt, Human
uguaauagaaaauggauaaaaaua

SEQ ID NO: 25426 - RNA, 18 nt, Human
cuccugguguuggcgugg

SEQ ID NO: 25427 - RNA, 22 nt, Human
uaaguugacuaaggcaaacacu

SEQ ID NO: 25428 - RNA, 24 nt, Human
uucauagucagauugucaugccuu

SEQ ID NO: 25429 - RNA, 24 nt, Human
aagauugugauccaggagaaguga

SEQ ID NO: 25430 - RNA, 24 nt, Human
uccauucuggcucugguggaugga

SEQ ID NO: 25431 - RNA, 19 nt, Human
uaugcuguucaaaaauggg

SEQ ID NO: 25432 - RNA, 24 nt, Human
cuuugaggaagagggaucugggca

SEQ ID NO: 25433 - RNA, 24 nt, Human
aggaaaguggggaaaggugaaagg

SEQ ID NO: 25434 - RNA, 24 nt, Human
acuagacucuucacuguuagcuuu

SEQ ID NO: 25435 - RNA, 24 nt, Human
uaucaguccagacgggggccuuug

SEQ ID NO: 25436 - RNA, 24 nt, Human
ugagcagagcauucaugccacuga

SEQ ID NO: 25437 - RNA, 24 nt, Human
uacuacuauucucuucugcugagc

SEQ ID NO: 25438 - RNA, 24 nt, Human
uguguggggcacaugugggggggc

SEQ ID NO: 25439 - RNA, 24 nt, Human
uguguauagccucucuuuagagag

SEQ ID NO: 25440 - RNA, 24 nt, Human
ucugucucuucucuguucuccccc

SEQ ID NO: 25441 - RNA, 24 nt, Human
uguggcagaugccucccggccacu

SEQ ID NO: 25442 - RNA, 24 nt, Human
cccugcucccagcuagugggcugg

SEQ ID NO: 25443 - RNA, 24 nt, Human
ugcccuggagggcgggcuuccagu

SEQ ID NO: 25444 - RNA, 24 nt, Human
ucaacauucaacaacauccauaca

SEQ ID NO: 25445 - RNA, 24 nt, Human
ugugcagaccaagagcaccacaga

SEQ ID NO: 25446 - RNA, 24 nt, Human
uaguagcugucuguguaacucucc

SEQ ID NO: 25447 - RNA, 24 nt, Human
uaucacagcaguaacggcacccuu

SEQ ID NO: 25448 - RNA, 24 nt, Human
uaaaaccauuaccuuaaaaugggu

SEQ ID NO: 25449 - RNA, 24 nt, Human
uaucuggauuuuuauguuuuauua

SEQ ID NO: 25450 - RNA, 24 nt, Human
gaugcaaaauguuugcaguuugac

SEQ ID NO: 25451 - RNA, 24 nt, Human
aaauggaaucuagaagcuaaauuu

SEQ ID NO: 25452 - RNA, 22 nt, Human
uuuacagaaaauucuagaacaa

SEQ ID NO: 25453 - RNA, 24 nt, Human
auggagcuugagaucuucuuagcc

SEQ ID NO: 25454 - RNA, 24 nt, Human
accuguuuaugauccuggccucac

SEQ ID NO: 25455 - RNA, 24 nt, Human
uagcuuggaguccagcuucuccca

SEQ ID NO: 25456 - RNA, 24 nt, Human
aagaaaucagaggcuacaccgaaa

SEQ ID NO: 25457 - RNA, 24 nt, Human
uauguuggauucuuacuuacauuu

SEQ ID NO: 25458 - RNA, 24 nt, Human
uuuuccccuccaucuguuucuaga

SEQ ID NO: 25459 - RNA, 24 nt, Human
agucuucggauuucuucuuuucag

SEQ ID NO: 25460 - RNA, 24 nt, Human
uaaguuagacuaugauacuuaguu

SEQ ID NO: 25461 - RNA, 24 nt, Human
uuaguaucuuccauuuuaauaauu

SEQ ID NO: 25462 - RNA, 19 nt, Human
uacugcugaagaucugugg

SEQ ID NO: 25463 - RNA, 24 nt, Human
uaagcggauguacggcaagucgcu

SEQ ID NO: 25464 - RNA, 24 nt, Human
uggcaaaucaguggucagagcugg

SEQ ID NO: 25465 - RNA, 24 nt, Human
aggaccagcaaggaggcagcccua

SEQ ID NO: 25466 - RNA, 24 nt, Human
gagcagcagcaguggagggggcag

SEQ ID NO: 25467 - RNA, 24 nt, Human
uuacugcaaccucugccucccggg

SEQ ID NO: 25468 - RNA, 24 nt, Human
gaccuugugauccaccugccucag

SEQ ID NO: 25469 - RNA, 24 nt, Human
agcggcugucuucuguucaggacu

SEQ ID NO: 25470 - RNA, 24 nt, Human
ugugaggguuaccauuaucuuaaa

SEQ ID NO: 25471 - RNA, 24 nt, Human
aaaucaggggacugacaggugaug

SEQ ID NO: 25472 - RNA, 24 nt, Human
ggaguccagcagggccaguccugc

SEQ ID NO: 25473 - RNA, 24 nt, Human
aaggagaagaccguaccaaugaaa

SEQ ID NO: 25474 - RNA, 24 nt, Human
uugaaggcuugcgggcccacagug

SEQ ID NO: 25475 - RNA, 24 nt, Human
ucuaugcucagaauccaaugcgga

SEQ ID NO: 25476 - RNA, 24 nt, Human
uagaauuucuucuggguauuacag

SEQ ID NO: 25477 - RNA, 24 nt, Human
uggggagagcauccugcccaccac

SEQ ID NO: 25478 - RNA, 24 nt, Human
ucaaugcccuccuuuauccucauc

SEQ ID NO: 25479 - RNA, 24 nt, Human
acuuaaguucaaaggaggccuguu

SEQ ID NO: 25480 - RNA, 24 nt, Human
ugagggcaccggcggcccagaggu

SEQ ID NO: 25481 - RNA, 24 nt, Human
uuuuucaggcugugugggaagugg

SEQ ID NO: 25482 - RNA, 24 nt, Human
aagcaugcugggcccacaucugcu

SEQ ID NO: 25483 - RNA, 24 nt, Human
agagcaaaaaaacuccgucuaaaa

SEQ ID NO: 25484 - RNA, 24 nt, Human
gcgcauucccaagucagaugucgu

SEQ ID NO: 25485 - RNA, 24 nt, Human
uguuaacaugcacgcacuguagac

SEQ ID NO: 25486 - RNA, 24 nt, Human
cggcaugggguccgggggccuggc

SEQ ID NO: 25487 - RNA, 24 nt, Human
ugacauuugguaaauagcuaauug

SEQ ID NO: 25488 - RNA, 24 nt, Human
ucaggaucuggcuuagcggcgccg

SEQ ID NO: 25489 - RNA, 24 nt, Human
cccgccaguguccucagcugccuc

SEQ ID NO: 25490 - RNA, 24 nt, Human
ccucccagcccucuuugccggacg

SEQ ID NO: 25491 - RNA, 24 nt, Human
ugaggaacuuacaaugucucagaa

SEQ ID NO: 25492 - RNA, 24 nt, Human
uaggugcccuauagugugggguug

SEQ ID NO: 25493 - RNA, 24 nt, Human
ucggugugauugaugccccucaaa

SEQ ID NO: 25494 - RNA, 24 nt, Human
ggacugggaggaaacagcuggcca

SEQ ID NO: 25495 - RNA, 22 nt, Human
ugccucagagaacuucugcagc

SEQ ID NO: 25496 - RNA, 24 nt, Human
ucccucgcguuuaaagaggggaug

SEQ ID NO: 25497 - RNA, 24 nt, Human
uauauguguugaaaaccaaaauga

SEQ ID NO: 25498 - RNA, 24 nt, Human
aagaaugagagcuagaucgugacc

SEQ ID NO: 25499 - RNA, 24 nt, Human
gcccuguaugacaucugcuuccgc

SEQ ID NO: 25500 - RNA, 24 nt, Human
ccauccguggggccaucauccugg

SEQ ID NO: 25501 - RNA, 24 nt, Human
aguggcauccggggccggggucgc

SEQ ID NO: 25502 - RNA, 24 nt, Human
ugggggacugcagcccugcugacc

SEQ ID NO: 25503 - RNA, 24 nt, Human
aaguaccccgauagggaggguggg

SEQ ID NO: 25504 - RNA, 24 nt, Human
cuucguuuucuauuuauuuacauu

SEQ ID NO: 25505 - RNA, 24 nt, Human
acagugguaucucuaaauacugag

SEQ ID NO: 25506 - RNA, 24 nt, Human
agacuagaaaaaguucggcugauu

SEQ ID NO: 25507 - RNA, 24 nt, Human
uacaagaagauaauaaggguucuu

SEQ ID NO: 25508 - RNA, 24 nt, Human
aauuccuucacagagucgcguacu

SEQ ID NO: 25509 - RNA, 24 nt, Human
gcccugguuuggggcccggguucg

SEQ ID NO: 25510 - RNA, 24 nt, Human
ccugaccucgugauugaaauucug

SEQ ID NO: 25511 - RNA, 24 nt, Human
uagucugcacaauucaauaugaac

SEQ ID NO: 25512 - RNA, 24 nt, Human
uacaaaagugaaaauuaaaaguca

SEQ ID NO: 25513 - RNA, 24 nt, Human
ugacagagaugaccuaaaauuaau

SEQ ID NO: 25514 - RNA, 24 nt, Human
uugaaguuuaaccuuauuuugggu

SEQ ID NO: 25515 - RNA, 24 nt, Human
ugagggcagcagcgaggcacaggg

SEQ ID NO: 25516 - RNA, 24 nt, Human
cccgaggugggccaucacacucug

SEQ ID NO: 25517 - RNA, 24 nt, Human
ugugagucugaaguauugcccaaa

SEQ ID NO: 25518 - RNA, 24 nt, Human
uggcaagacagcucuggcucuggc

SEQ ID NO: 25519 - RNA, 24 nt, Human
ugucauggaugggccgucaaugaa

SEQ ID NO: 25520 - RNA, 24 nt, Human
augauacaaggaaguuagaaagca

SEQ ID NO: 25521 - RNA, 24 nt, Human
cgguggggcccgcuuguucaccgg

SEQ ID NO: 25522 - RNA, 24 nt, Human
aaguuucuuguucauuugaucugc

SEQ ID NO: 25523 - RNA, 24 nt, Human
ugcagcucucccgggagcagggaa

SEQ ID NO: 25524 - RNA, 24 nt, Human
uaauaaggauauuuugcuccagca

SEQ ID NO: 25525 - RNA, 24 nt, Human
gagccgagcgaagcgaugccuaaa

SEQ ID NO: 25526 - RNA, 24 nt, Human
ggagaagaucuuugggaguaagaa

SEQ ID NO: 25527 - RNA, 20 nt, Human
caccggaguggaguucgugc

SEQ ID NO: 25528 - RNA, 24 nt, Human
cguuaaaaaggggcgauauacggg

SEQ ID NO: 25529 - RNA, 23 nt, Human
cuagugguggcagggaagacuug

SEQ ID NO: 25530 - RNA, 24 nt, Human
ugccaggcagccuggggcagagug

SEQ ID NO: 25531 - RNA, 19 nt, Human
ucaggagcagguggacaag

SEQ ID NO: 25532 - RNA, 22 nt, Human
uccccaggucggcugagggcua

SEQ ID NO: 25533 - RNA, 24 nt, Human
uuccuucuuagguggcucaagcug

SEQ ID NO: 25534 - RNA, 24 nt, Human
caucauaucuaaagaacugcccag

SEQ ID NO: 25535 - RNA, 24 nt, Human
uauaauaauuaacaacagcaaaga

SEQ ID NO: 25536 - RNA, 24 nt, Human
ucacucaguuuuuaauaaaggcca

SEQ ID NO: 25537 - RNA, 24 nt, Human
uguucagaaauugaggcuaacauu

SEQ ID NO: 25538 - RNA, 24 nt, Human
ugagcucacucgggcuuagggagu

SEQ ID NO: 25539 - RNA, 24 nt, Human
ugagaaaaugaauucgagucuuug

SEQ ID NO: 25540 - RNA, 24 nt, Human
ccaugccgcugcagcccuccaucc

SEQ ID NO: 25541 - RNA, 24 nt, Human
ucccggguuaucccucgcuggcac

SEQ ID NO: 25542 - RNA, 24 nt, Human
uaaaagcauucuacaaggggguug

SEQ ID NO: 25543 - RNA, 24 nt, Human
gugguuccuaagccccgcagugaa

SEQ ID NO: 25544 - RNA, 24 nt, Human
gggcauuggccuagcuaucucccu

SEQ ID NO: 25545 - RNA, 24 nt, Human
aaccucuucuguggagucugcgug

SEQ ID NO: 25546 - RNA, 18 nt, Human
uggcaugguuccugacgg

SEQ ID NO: 25547 - RNA, 24 nt, Human
ucccucugcugguguuguuggggc

SEQ ID NO: 25548 - RNA, 24 nt, Human
caccauguuggccagacuguucuc

SEQ ID NO: 25549 - RNA, 24 nt, Human
ucuugcucugucacccaggcugga

SEQ ID NO: 25550 - RNA, 24 nt, Human
uaugccaccaauggugccaaguuc

SEQ ID NO: 25551 - RNA, 24 nt, Human
ucgcuggagcugacugcugcccgc

SEQ ID NO: 25552 - RNA, 24 nt, Human
uauggugcggaggcccuggagagg

SEQ ID NO: 25553 - RNA, 24 nt, Human
guggccgacgcgcugaccaacgcc

SEQ ID NO: 25554 - RNA, 24 nt, Human
ugaguuagccauuucuuuuucuuc

SEQ ID NO: 25555 - RNA, 24 nt, Human
uugaaaccagaacauuuuccccac

SEQ ID NO: 25556 - RNA, 24 nt, Human
agagcugggauuacaggccugagc

SEQ ID NO: 25557 - RNA, 17 nt, Human
ucagagaggacuugauc

SEQ ID NO: 25558 - RNA, 24 nt, Human
uacguucgagacccuccugcacca

SEQ ID NO: 25559 - RNA, 24 nt, Human
ggacagaagcugagauguuuggau

SEQ ID NO: 25560 - RNA, 24 nt, Human
agagauggugaagggccugugcgg

SEQ ID NO: 25561 - RNA, 24 nt, Human
cggcaguccugauggcccggcaug

SEQ ID NO: 25562 - RNA, 24 nt, Human
cuuccaguggaaaaggcauuuugg

SEQ ID NO: 25563 - RNA, 24 nt, Human
cuacuacugcaaggcaugcuuuga

SEQ ID NO: 25564 - RNA, 24 nt, Human
ccugcacuacugacaauggagcag

SEQ ID NO: 25565 - RNA, 24 nt, Human
cacagcaaacguuccaggccuggg

SEQ ID NO: 25566 - RNA, 23 nt, Human
cuggccucuagaacacccacugg

SEQ ID NO: 25567 - RNA, 24 nt, Human
uauggcaaggaccugauggagaag

SEQ ID NO: 25568 - RNA, 24 nt, Human
aaggagcuugguucggagacaggc

SEQ ID NO: 25569 - RNA, 24 nt, Human
uaucaucguggggcagcucaagag

SEQ ID NO: 25570 - RNA, 24 nt, Human
cagagugugguucagucagggagg

SEQ ID NO: 25571 - RNA, 20 nt, Human
uguccagaauuuccagaagu

SEQ ID NO: 25572 - RNA, 24 nt, Human
ugagugcccccagggaggggcugg

SEQ ID NO: 25573 - RNA, 24 nt, Human
uguggcccuucucuuuaaguccga

SEQ ID NO: 25574 - RNA, 18 nt, Human
ucacgcccagacaaugca

SEQ ID NO: 25575 - RNA, 24 nt, Human
uaccuuguguuuucgagccuauag

SEQ ID NO: 25576 - RNA, 24 nt, Human
uguggauauaguuuucccuguugg

SEQ ID NO: 25577 - RNA, 24 nt, Human
ugacuaaagaaaccugcugcacau

SEQ ID NO: 25578 - RNA, 24 nt, Human
gagcaugcaucuucucggugagcc

SEQ ID NO: 25579 - RNA, 24 nt, Human
guguaggugguuugaccagaggcg

SEQ ID NO: 25580 - RNA, 19 nt, Human
uuucucaucuuuuacuugg

SEQ ID NO: 25581 - RNA, 24 nt, Human
agacaggcuggcacagccccaggc

SEQ ID NO: 25582 - RNA, 24 nt, Human
aagcagcaccaauggggaugaccc

SEQ ID NO: 25583 - RNA, 24 nt, Human
uaguucagauugaucuuaggucaa

SEQ ID NO: 25584 - RNA, 24 nt, Human
uuggaucuucaugcccuggguucu

SEQ ID NO: 25585 - RNA, 24 nt, Human
uauuauacuuaaaugaacucaagu

SEQ ID NO: 25586 - RNA, 24 nt, Human
ugcgaaacuugccuuugcaguagg

SEQ ID NO: 25587 - RNA, 23 nt, Human
ugaaaaaaguucauacuaaauau

SEQ ID NO: 25588 - RNA, 24 nt, Human
auugccggguggcccccagcuguc

SEQ ID NO: 25589 - RNA, 24 nt, Human
ugaggugaacaagugcagccgcug

SEQ ID NO: 25590 - RNA, 24 nt, Human
acagcaaaaugaugccugagugcc

SEQ ID NO: 25591 - RNA, 24 nt, Human
uaaugguuuaauuuuauguggacg

SEQ ID NO: 25592 - RNA, 24 nt, Human
aagcaucccuguugguauaaauuu

SEQ ID NO: 25593 - RNA, 24 nt, Human
ugggaagaggagucaacuagaggc

SEQ ID NO: 25594 - RNA, 24 nt, Human
ucgaagaggagggauugcggcaau

SEQ ID NO: 25595 - RNA, 22 nt, Human
ugaaauuucggauugaagguaa

SEQ ID NO: 25596 - RNA, 24 nt, Human
uuccaguucaaagucgugucuuuc

SEQ ID NO: 25597 - RNA, 24 nt, Human
gacugcagggagaggcgucuccag

SEQ ID NO: 25598 - RNA, 24 nt, Human
uggaaggcgguguugacccugggg

SEQ ID NO: 25599 - RNA, 22 nt, Human
ccuggcccacccagguccccug

SEQ ID NO: 25600 - RNA, 24 nt, Human
cagggcccaaggucaacggaacau

SEQ ID NO: 25601 - RNA, 24 nt, Human
aaaugcuguuguaauugaccaaga

SEQ ID NO: 25602 - RNA, 24 nt, Human
uccgugacucuccauacgaguggu

SEQ ID NO: 25603 - RNA, 24 nt, Human
gcucaugguagggcggcugccucu

SEQ ID NO: 25604 - RNA, 24 nt, Human
uaccccuaaaagccaaaaugggaa

SEQ ID NO: 25605 - RNA, 21 nt, Human
aaguaugccugggucuuggau

SEQ ID NO: 25606 - RNA, 24 nt, Human
ucugaucuauaaaugcgguggcau

SEQ ID NO: 25607 - RNA, 24 nt, Human
auuugacucagccaucggggaccc

SEQ ID NO: 25608 - RNA, 24 nt, Human
uuuguuaaauuaauaaaacaugac

SEQ ID NO: 25609 - RNA, 24 nt, Human
ucacauggauuuuuggugggcauu

SEQ ID NO: 25610 - RNA, 24 nt, Human
uguaauguggcagauugugaaggg

SEQ ID NO: 25611 - RNA, 24 nt, Human
ucagggcaguguucugcugauggc

SEQ ID NO: 25612 - RNA, 24 nt, Human
uuaguucauucuucuaauaagccu

SEQ ID NO: 25613 - RNA, 24 nt, Human
uggaggccugagcccucagacccu

SEQ ID NO: 25614 - RNA, 24 nt, Human
ucaagcucccauggaccugugggc

SEQ ID NO: 25615 - RNA, 24 nt, Human
uauggcaaggaccugauggagaag

SEQ ID NO: 25616 - RNA, 24 nt, Human
aaggagcuuugguucggagacagg

SEQ ID NO: 25617 - RNA, 24 nt, Human
uagaggcccugcugagcugcuagc

SEQ ID NO: 25618 - RNA, 24 nt, Human
ugccaguagcuugcuuacgaccuu

SEQ ID NO: 25619 - RNA, 19 nt, Human
ugccugggcugcgcugcag

SEQ ID NO: 25620 - RNA, 24 nt, Human
cauaaagagcaaagcaguuguggu

SEQ ID NO: 25621 - RNA, 24 nt, Human
ugcucugugugcucacaaguguuc

SEQ ID NO: 25622 - RNA, 23 nt, Human
ugccccuuccaggcuugucucug

SEQ ID NO: 25623 - RNA, 24 nt, Human
ugaguuacaggcugugggaagaga

SEQ ID NO: 25624 - RNA, 24 nt, Human
uggcuugggucgagcucugucaca

SEQ ID NO: 25625 - RNA, 24 nt, Human
caccagggaggacagcugcuggca

SEQ ID NO: 25626 - RNA, 24 nt, Human
uuuaaacugugauacuuagccagg

SEQ ID NO: 25627 - RNA, 23 nt, Human
uuaaaauugugguaaugaugccu

SEQ ID NO: 25628 - RNA, 24 nt, Human
uauggcaaggaccugauggagaag

SEQ ID NO: 25629 - RNA, 24 nt, Human
aaggagcuugguucggagacaggc

SEQ ID NO: 25630 - RNA, 24 nt, Human
ugaagagagauugggcuucagccu

SEQ ID NO: 25631 - RNA, 24 nt, Human
caggagcuucugcugcugacccca

SEQ ID NO: 25632 - RNA, 24 nt, Human
ucggccagcguuucugcagucuuu

SEQ ID NO: 25633 - RNA, 24 nt, Human
cgggaucggagucuccucugcugg

SEQ ID NO: 25634 - RNA, 24 nt, Human
uagguuagaauguaaauuaaagug

SEQ ID NO: 25635 - RNA, 24 nt, Human
uaaggcguacggugagaacauugg

SEQ ID NO: 25636 - RNA, 24 nt, Human
gagcauuaucaaggaguaaggggg

SEQ ID NO: 25637 - RNA, 24 nt, Human
uucccaccuaagcccugugcuaua

SEQ ID NO: 25638 - RNA, 24 nt, Human
uuugauggcuuucacaugcucauu

SEQ ID NO: 25639 - RNA, 24 nt, Human
uaauuuguauggguuuagauggua

SEQ ID NO: 25640 - RNA, 24 nt, Human
ugcuuggugaccgaauuacuagug

SEQ ID NO: 25641 - RNA, 24 nt, Human
gagauucuucaagcaaucacuaug

SEQ ID NO: 25642 - RNA, 24 nt, Human
uggcagcccaaggcuuuguuguag

SEQ ID NO: 25643 - RNA, 18 nt, Human
uggaauaggauuuuacau

SEQ ID NO: 25644 - RNA, 24 nt, Human
cuagcaaauugaguauaaagagua

SEQ ID NO: 25645 - RNA, 24 nt, Human
ucaaaguuuuaugcuaaauucuga

SEQ ID NO: 25646 - RNA, 22 nt, Human
ucaaagggccaaugaugaccuu

SEQ ID NO: 25647 - RNA, 22 nt, Human
ucuaaagccuacaaaguuaacc

SEQ ID NO: 25648 - RNA, 24 nt, Human
ccuuuaguaagguggugcagaaac

SEQ ID NO: 25649 - RNA, 23 nt, Human
uuaaaagaucacugaaguuggau

SEQ ID NO: 25650 - RNA, 24 nt, Human
uuauucuccaacaacuggaacuug

SEQ ID NO: 25651 - RNA, 24 nt, Human
uugggcccgagaagagguuuuuuu

SEQ ID NO: 25652 - RNA, 24 nt, Human
auacagcaguguugacaaguuaug

SEQ ID NO: 25653 - RNA, 24 nt, Human
uacaaauaaaaacauugagaaaag

SEQ ID NO: 25654 - RNA, 24 nt, Human
ugugguuuuaaaagagucccucaa

SEQ ID NO: 25655 - RNA, 24 nt, Human
ucucugguuguucacauuccaaaa

SEQ ID NO: 25656 - RNA, 24 nt, Human
ugucgcaggcugcucugucucuua

SEQ ID NO: 25657 - RNA, 24 nt, Human
ugggucuuugugcugaggcaggac

SEQ ID NO: 25658 - RNA, 24 nt, Human
ugagaaaccaaggugugaaucugu

SEQ ID NO: 25659 - RNA, 21 nt, Human
ugggaaagcugcuuggaagcc

SEQ ID NO: 25660 - RNA, 24 nt, Human
acgcguugucuucaucaaaaaguc

SEQ ID NO: 25661 - RNA, 24 nt, Human
ugccaaggguccugacggccucgu

SEQ ID NO: 25662 - RNA, 24 nt, Human
ccugccuggugacagcuucuacau

SEQ ID NO: 25663 - RNA, 24 nt, Human
cagcuuaccccauucuguacagag

SEQ ID NO: 25664 - RNA, 23 nt, Human
cacauguauguccagccuguagu

SEQ ID NO: 25665 - RNA, 24 nt, Human
uguguucacccccgacuuccagga

SEQ ID NO: 25666 - RNA, 24 nt, Human
ucacuuguccaccuuccagcagau

SEQ ID NO: 25667 - RNA, 24 nt, Human
uggaaucuugcggcauccacgaga

SEQ ID NO: 25668 - RNA, 24 nt, Human
caacaagcagacucaaccaggccu

SEQ ID NO: 25669 - RNA, 24 nt, Human
aagcugccacucagugaccaggcc

SEQ ID NO: 25670 - RNA, 24 nt, Human
ugacgcggcauggcaagaacugca

SEQ ID NO: 25671 - RNA, 24 nt, Human
ugacgcaaagggauaugugaagcc

SEQ ID NO: 25672 - RNA, 24 nt, Human
augaaacuuaaagaugaauguuuu

SEQ ID NO: 25673 - RNA, 24 nt, Human
aauaacacaauaacaggagacuuc

SEQ ID NO: 25674 - RNA, 23 nt, Human
uaaggcgaggcggaauuaaaccc

SEQ ID NO: 25675 - RNA, 24 nt, Human
uagcaaaucgagucuuaaauaauc

SEQ ID NO: 25676 - RNA, 24 nt, Human
auuucauucacuggggaggaacaa

SEQ ID NO: 25677 - RNA, 24 nt, Human
aaauguacaauauguauaauuuuu

SEQ ID NO: 25678 - RNA, 24 nt, Human
gaccuuuucuuccuggacuauuga

SEQ ID NO: 25679 - RNA, 24 nt, Human
uuuuaagauucaaggggaacgaau

SEQ ID NO: 25680 - RNA, 24 nt, Human
acuuguacccgggucccgcggaga

SEQ ID NO: 25681 - RNA, 24 nt, Human
uaucugcugcgccugagaugagua

SEQ ID NO: 25682 - RNA, 21 nt, Human
ugccgcagaugcccaccggaa

SEQ ID NO: 25683 - RNA, 24 nt, Human
uggaugauccagcaggaaacaguu

SEQ ID NO: 25684 - RNA, 22 nt, Human
uacaaugucauuguuugggacc

SEQ ID NO: 25685 - RNA, 24 nt, Human
ugaggagauguugcugaagcaucu

SEQ ID NO: 25686 - RNA, 24 nt, Human
ucuaaaccaaacaggaaaggugca

SEQ ID NO: 25687 - RNA, 24 nt, Human
ugccaaugaaagacugagccccuc

SEQ ID NO: 25688 - RNA, 24 nt, Human
ugauucgggagguguguggcuuug

SEQ ID NO: 25689 - RNA, 24 nt, Human
ugaccaagaacgugagcaagccca

SEQ ID NO: 25690 - RNA, 24 nt, Human
ugguguugcauuagugaagauacu

SEQ ID NO: 25691 - RNA, 24 nt, Human
uaaaugaacauuugcaauuuuaaa

SEQ ID NO: 25692 - RNA, 24 nt, Human
ugggagggggcagcugggcugagc

SEQ ID NO: 25693 - RNA, 24 nt, Human
acucgcgcgggggguaauucgggg

SEQ ID NO: 25694 - RNA, 21 nt, Human
uaccgcuuauugagacagucc

SEQ ID NO: 25695 - RNA, 24 nt, Human
uuaguccuauauuuuaauaauuug

SEQ ID NO: 25696 - RNA, 24 nt, Human
uaccagauuucagaacuuauauuu

SEQ ID NO: 25697 - RNA, 23 nt, Human
ugagaacaaggaugagaucucca

SEQ ID NO: 25698 - RNA, 24 nt, Human
uacgucgaacaauguagcagccac

SEQ ID NO: 25699 - RNA, 24 nt, Human
agguggugcaucuaucuauggcaa

SEQ ID NO: 25700 - RNA, 24 nt, Human
ucccguggaagguucaggaagcga

SEQ ID NO: 25701 - RNA, 24 nt, Human
ucccaucgagcugguugucuucuu

SEQ ID NO: 25702 - RNA, 24 nt, Human
acaaagcaagagaagaagcagaga

SEQ ID NO: 25703 - RNA, 21 nt, Human
cauuggacaggacauccagcc

SEQ ID NO: 25704 - RNA, 24 nt, Human
cagcggcagagagccauccucuau

SEQ ID NO: 25705 - RNA, 24 nt, Human
cggcggcaccgaggaccgccuguc

SEQ ID NO: 25706 - RNA, 24 nt, Human
cggcaagguggccuuccgcgacug

SEQ ID NO: 25707 - RNA, 24 nt, Human
cacccguaagcgcuacgcgcaccu

SEQ ID NO: 25708 - RNA, 24 nt, Human
acacaagcacauacugaaggcacu

SEQ ID NO: 25709 - RNA, 24 nt, Human
gagcauuuccuugggugaucauag

SEQ ID NO: 25710 - RNA, 24 nt, Human
ugacaagcaagaccaccucagcug

SEQ ID NO: 25711 - RNA, 22 nt, Human
uauugugucaggccugaaauac

SEQ ID NO: 25712 - RNA, 24 nt, Human
uuggcagcuauggaccucggccug

SEQ ID NO: 25713 - RNA, 24 nt, Human
uggaggaggaugacgaugaugagc

SEQ ID NO: 25714 - RNA, 24 nt, Human
gucgcgccaccucgcgggcgaccc

SEQ ID NO: 25715 - RNA, 24 nt, Human
ugugggaauuguuuuucaucuguu

SEQ ID NO: 25716 - RNA, 24 nt, Human
uaggucuccaacucuuguaaaaag

SEQ ID NO: 25717 - RNA, 24 nt, Human
ugagaugggcaaauaggcuuaacu

SEQ ID NO: 25718 - RNA, 24 nt, Human
uauggcaagucacuuugacagaca

SEQ ID NO: 25719 - RNA, 24 nt, Human
ugagaauggcaaaauuagucgccu

SEQ ID NO: 25720 - RNA, 24 nt, Human
uacaccacucccaagaagaauaag

SEQ ID NO: 25721 - RNA, 23 nt, Human
ugcccggugagcuucuuauagac

SEQ ID NO: 25722 - RNA, 20 nt, Human
ucaguuggaggaacggggaa

SEQ ID NO: 25723 - RNA, 22 nt, Human
gacaggguuccccugugguucc

SEQ ID NO: 25724 - RNA, 21 nt, Human
aaccuggaggccacuggagcu

SEQ ID NO: 25725 - RNA, 24 nt, Human
aggaaggagauauagugaagagga

SEQ ID NO: 25726 - RNA, 24 nt, Human
guagaguuuucuucaggcuuaaag

SEQ ID NO: 25727 - RNA, 24 nt, Human
aggaaggagauauagugaagagga

SEQ ID NO: 25728 - RNA, 24 nt, Human
uaccagaaacguuuccaugauggg

SEQ ID NO: 25729 - RNA, 24 nt, Human
uguguucacccccgacuuccagga

SEQ ID NO: 25730 - RNA, 24 nt, Human
auagugccuuuuuccuuauuucaa

SEQ ID NO: 25731 - RNA, 24 nt, Human
guacuccagccugugugacagagc

SEQ ID NO: 25732 - RNA, 19 nt, Human
uaguauugagcaagucaac

SEQ ID NO: 25733 - RNA, 24 nt, Human
agaaagaccuccugacuccauguu

SEQ ID NO: 25734 - RNA, 24 nt, Human
uuuuuagcuaaggaaaauaagauu

SEQ ID NO: 25735 - RNA, 24 nt, Human
aagaauucaacuaugcaaauuugu

SEQ ID NO: 25736 - RNA, 24 nt, Human
ugaagugucuuguguagucauauu

SEQ ID NO: 25737 - RNA, 24 nt, Human
uggguacguguccuaaaggauucc

SEQ ID NO: 25738 - RNA, 24 nt, Human
gggcauggguguugccgggcccgg

SEQ ID NO: 25739 - RNA, 24 nt, Human
uagcaaacaucuucgugugagcua

SEQ ID NO: 25740 - RNA, 24 nt, Human
uagaaucuuucugugguauauaau

SEQ ID NO: 25741 - RNA, 24 nt, Human
uuaaugaagggauuaaguucauaa

SEQ ID NO: 25742 - RNA, 24 nt, Human
agguucccccacguuccccccacc

SEQ ID NO: 25743 - RNA, 24 nt, Human
ugcaacuacugcaaagacgcgggc

SEQ ID NO: 25744 - RNA, 24 nt, Human
ugagacaacggaaaggcacucucu

SEQ ID NO: 25745 - RNA, 24 nt, Human
uaggcccggcauaugguuccccaa

SEQ ID NO: 25746 - RNA, 24 nt, Human
agaccucgagaaggcuuuggauuu

SEQ ID NO: 25747 - RNA, 24 nt, Human
uuugaaauggucaccaaagagaag

SEQ ID NO: 25748 - RNA, 24 nt, Human
ugaaaagaaacuagucauuuauuu

SEQ ID NO: 25749 - RNA, 24 nt, Human
uuuuacauucaucauggcuacagg

SEQ ID NO: 25750 - RNA, 24 nt, Human
uuuuuaguagcaaauuuggaugua

SEQ ID NO: 25751 - RNA, 24 nt, Human
cgagggaccuggcacguacauccc

SEQ ID NO: 25752 - RNA, 24 nt, Human
ugagggacuagagcgcauuggauu

SEQ ID NO: 25753 - RNA, 24 nt, Human
uaugucagguuaaagggaaaaggu

SEQ ID NO: 25754 - RNA, 24 nt, Human
uucuuggugggacucggcugcccc

SEQ ID NO: 25755 - RNA, 20 nt, Human
uaucacuuuccggagcuggu

SEQ ID NO: 25756 - RNA, 24 nt, Human
ugcaagaccugccagauucugugc

SEQ ID NO: 25757 - RNA, 24 nt, Human
ucuccaaaaauuuggagaaagagc

SEQ ID NO: 25758 - RNA, 24 nt, Human
aagcugccugccuguugccaaagc

SEQ ID NO: 25759 - RNA, 24 nt, Human
ugcuugaaugugcugaugacaggg

SEQ ID NO: 25760 - RNA, 18 nt, Human
aaacaggauuggcgcuuu

SEQ ID NO: 25761 - RNA, 24 nt, Human
ucgcggaccggcguccccggcgcg

SEQ ID NO: 25762 - RNA, 24 nt, Human
uggaaagcagguagaguuggcuuu

SEQ ID NO: 25763 - RNA, 24 nt, Human
uauggcaagucacuuugacagaca

SEQ ID NO: 25764 - RNA, 24 nt, Human
uacaccacucccaagaagaauaag

SEQ ID NO: 25765 - RNA, 24 nt, Human
uauuuuguuuguauguauuuagag

SEQ ID NO: 25766 - RNA, 24 nt, Human
acuuauuggacaauuaugauuuuu

SEQ ID NO: 25767 - RNA, 24 nt, Human
agucugaagaugggcauuaugcaa

SEQ ID NO: 25768 - RNA, 20 nt, Human
ucccugagcggagggguggc

SEQ ID NO: 25769 - RNA, 24 nt, Human
ggccgugguccgcgcccuuccucg

SEQ ID NO: 25770 - RNA, 24 nt, Human
gcacuagaucuggacuccgacccg

SEQ ID NO: 25771 - RNA, 24 nt, Human
aguggcucagcuucucuuauggug

SEQ ID NO: 25772 - RNA, 24 nt, Human
gcgcguugcugcggccgugguccg

SEQ ID NO: 25773 - RNA, 24 nt, Human
uugaucuugaagaaacugggcgug

SEQ ID NO: 25774 - RNA, 24 nt, Human
cauuaaggcuguggauaagcuggg

SEQ ID NO: 25775 - RNA, 24 nt, Human
aggaaggagauauagugaagagga

SEQ ID NO: 25776 - RNA, 24 nt, Human
guagaguuuucuucaggcuuaaag

SEQ ID NO: 25777 - RNA, 24 nt, Human
auuggccucauccugccaaccaca

SEQ ID NO: 25778 - RNA, 24 nt, Human
ucagugccuugccaggaucccauc

SEQ ID NO: 25779 - RNA, 24 nt, Human
uucgagagguucgagacggggacg

SEQ ID NO: 25780 - RNA, 23 nt, Human
cagcggggcagcuugucucccuu

SEQ ID NO: 25781 - RNA, 22 nt, Human
uuccauggucaaaaaauggcag

SEQ ID NO: 25782 - RNA, 21 nt, Human
ucacuguaauguuaaugaaau

SEQ ID NO: 25783 - RNA, 24 nt, Human
uuaauuugacuuggaauugucuua

SEQ ID NO: 25784 - RNA, 24 nt, Human
uuuuauuuuuuuacugaguagaaa

SEQ ID NO: 25785 - RNA, 24 nt, Human
agaguuccaauagcugguucuaua

SEQ ID NO: 25786 - RNA, 24 nt, Human
uaccagcagaaucuucugggugcu

SEQ ID NO: 25787 - RNA, 24 nt, Human
agaggauuuggaauauggaaggca

SEQ ID NO: 25788 - RNA, 24 nt, Human
cagcugagaccuguuccugcaagc

SEQ ID NO: 25789 - RNA, 24 nt, Human
uggagugcagccagagcccugcug

SEQ ID NO: 25790 - RNA, 24 nt, Human
cuuucgggacuggcugaggccuag

SEQ ID NO: 25791 - RNA, 24 nt, Human
ugggaugggcagcugagcuguggg

SEQ ID NO: 25792 - RNA, 24 nt, Human
gcuuguuuuuccaccagaccccga

SEQ ID NO: 25793 - RNA, 24 nt, Human
uguacagucagugaaauugaagaa

SEQ ID NO: 25794 - RNA, 24 nt, Human
uuuuuuauguuggcacgaauugga

SEQ ID NO: 25795 - RNA, 24 nt, Human
uaccucacugcagccuccaacucc

SEQ ID NO: 25796 - RNA, 24 nt, Human
ugggaugcccucauguugggaagc

SEQ ID NO: 25797 - RNA, 24 nt, Human
uuuccggguggugaaaaagcccuc

SEQ ID NO: 25798 - RNA, 24 nt, Human
cagcggcagagagccauccucuau

SEQ ID NO: 25799 - RNA, 24 nt, Human
uucuucacgggcagcaagcuggug

SEQ ID NO: 25800 - RNA, 24 nt, Human
ccggaccccaccucuucccugccg

SEQ ID NO: 25801 - RNA, 24 nt, Human
cagcgcgcaccccggcggggcuuu

SEQ ID NO: 25802 - RNA, 24 nt, Human
ucccugacgcggagcuccaugguc

SEQ ID NO: 25803 - RNA, 24 nt, Human
caagaucgcagucaccguggcggu

SEQ ID NO: 25804 - RNA, 24 nt, Human
caacauggcgcugcacccagauac

SEQ ID NO: 25805 - RNA, 24 nt, Human
uggcaugaaggucuacaacuccac

SEQ ID NO: 25806 - RNA, 24 nt, Human
aucacaauauggucugguccaauc

SEQ ID NO: 25807 - RNA, 24 nt, Human
ugauggggcuccaacagccaggcu

SEQ ID NO: 25808 - RNA, 24 nt, Human
uagauugacuuacagcagggagag

SEQ ID NO: 25809 - RNA, 24 nt, Human
cuggagccucuguaccugugccca

SEQ ID NO: 25810 - RNA, 24 nt, Human
agauguguccauauuauguccaua

SEQ ID NO: 25811 - RNA, 24 nt, Human
uagagcuagugaauuagccuauuu

SEQ ID NO: 25812 - RNA, 24 nt, Human
gcuugcgcugugagcugaggcggu

SEQ ID NO: 25813 - RNA, 23 nt, Human
ucagggaggagcuuuaucuuuau

SEQ ID NO: 25814 - RNA, 18 nt, Human
caccacagcuucuuguag

SEQ ID NO: 25815 - RNA, 24 nt, Human
auuguucugcuguucuuuguccaa

SEQ ID NO: 25816 - RNA, 24 nt, Human
ugacugacacgucugaccccugag

SEQ ID NO: 25817 - RNA, 24 nt, Human
caggaugcaguagaugcccugaug

SEQ ID NO: 25818 - RNA, 24 nt, Human
acaaagcaagagaagaagcagaga

SEQ ID NO: 25819 - RNA, 21 nt, Human
cauuggacaggacauccagcc

SEQ ID NO: 25820 - RNA, 24 nt, Human
cagcggcagagagccauccucuau

SEQ ID NO: 25821 - RNA, 24 nt, Human
uccacguugcugugucgugaggug

SEQ ID NO: 25822 - RNA, 24 nt, Human
caggaucuugcuauguugcccagg

SEQ ID NO: 25823 - RNA, 24 nt, Human
ugaaaacaggauuaaaccguuagu

SEQ ID NO: 25824 - RNA, 24 nt, Human
ugaaagaaagcuauaguggcauag

SEQ ID NO: 25825 - RNA, 24 nt, Human
ugccacugaaaacuuagguccugu

SEQ ID NO: 25826 - RNA, 24 nt, Human
acuacuguucgaagauuuuuggaa

SEQ ID NO: 25827 - RNA, 23 nt, Human
aagaggcugccuugacuuguugg

SEQ ID NO: 25828 - RNA, 24 nt, Human
uagcagugaguacuguguggaaaa

SEQ ID NO: 25829 - RNA, 24 nt, Human
uaaauaauccuggcauuauaggga

SEQ ID NO: 25830 - RNA, 24 nt, Human
uacuuuaguucauuuaauuuuaau

SEQ ID NO: 25831 - RNA, 24 nt, Human
cguggagcggcagccggucuggac

SEQ ID NO: 25832 - RNA, 23 nt, Human
cccggccccuccccucucccucc

SEQ ID NO: 25833 - RNA, 24 nt, Human
agugcagugucgagacuuacaccu

SEQ ID NO: 25834 - RNA, 24 nt, Human
ugggagguccaagaucaaggugcc

SEQ ID NO: 25835 - RNA, 22 nt, Human
uucaucuuucauugcugcaagg

SEQ ID NO: 25836 - RNA, 24 nt, Human
aggaaggagauauagugaagagga

SEQ ID NO: 25837 - RNA, 24 nt, Human
ugcccauugggcguggcaggugaa

SEQ ID NO: 25838 - RNA, 24 nt, Human
cagcagggacagggcaaagggcuc

SEQ ID NO: 25839 - RNA, 24 nt, Human
ugggagggccaggcgucggguuau

SEQ ID NO: 25840 - RNA, 24 nt, Human
ugcugugugcugccagaugaccag

SEQ ID NO: 25841 - RNA, 17 nt, Human
ugugcagccccucagag

SEQ ID NO: 25842 - RNA, 24 nt, Human
ucuccagaaaugcuuuggguucau

SEQ ID NO: 25843 - RNA, 24 nt, Human
uuuggccucuuuccgaaguuccgu

SEQ ID NO: 25844 - RNA, 24 nt, Human
aggaaggagauauagugaagagga

SEQ ID NO: 25845 - RNA, 24 nt, Human
uugaucuugaagaaacugggcgug

SEQ ID NO: 25846 - RNA, 24 nt, Human
aggaaggagauauagugaagagga

SEQ ID NO: 25847 - RNA, 24 nt, Human
guagaguuuucuucaggcuuaaag

SEQ ID NO: 25848 - RNA, 24 nt, Human
ugagaauggcaaaauuagucgccu

SEQ ID NO: 25849 - RNA, 24 nt, Human
uacaccacucccaagaagaauaag

SEQ ID NO: 25850 - RNA, 24 nt, Human
ucuaugauuuucauauauauacga

SEQ ID NO: 25851 - RNA, 24 nt, Human
uugcccacuucccgugcuccaagu

SEQ ID NO: 25852 - RNA, 24 nt, Human
ugcagcaguguguggagcaggggg

SEQ ID NO: 25853 - RNA, 24 nt, Human
ggucaaagugugggggucccccag

SEQ ID NO: 25854 - RNA, 24 nt, Human
agcagguucuucgugaguuccucg

SEQ ID NO: 25855 - RNA, 23 nt, Human
uccacgggccucccagagugaag

SEQ ID NO: 25856 - RNA, 24 nt, Human
uguguuuguagacuuggaacccac

SEQ ID NO: 25857 - RNA, 24 nt, Human
caccggucuucagggcuucuuggu

SEQ ID NO: 25858 - RNA, 24 nt, Human
accccgucgccuccgccggcuacc

SEQ ID NO: 25859 - RNA, 24 nt, Human
ugcaagagucaccuucuggacugc

SEQ ID NO: 25860 - RNA, 24 nt, Human
ugaggagccaaagcuauguaugug

SEQ ID NO: 25861 - RNA, 24 nt, Human
gcgcacgccacagggccaguuuug

SEQ ID NO: 25862 - RNA, 19 nt, Human
uagaacccaggauuaggga

SEQ ID NO: 25863 - RNA, 24 nt, Human
uaguugauuuccaguugcacuauu

SEQ ID NO: 25864 - RNA, 24 nt, Human
ugcuagugaugaucugguaauaua

SEQ ID NO: 25865 - RNA, 24 nt, Human
uuuguuaggauagaucuuaagcag

SEQ ID NO: 25866 - RNA, 24 nt, Human
agucuugugaaaguguaaugugcg

SEQ ID NO: 25867 - RNA, 24 nt, Human
aaugggacugcugaagaguggaca

SEQ ID NO: 25868 - RNA, 24 nt, Human
uggccaggccaccugcaccaggga

SEQ ID NO: 25869 - RNA, 24 nt, Human
uggcuugggucgagcucugucaca

SEQ ID NO: 25870 - RNA, 24 nt, Human
aggcagaccagcuuuauuuuugaa

SEQ ID NO: 25871 - RNA, 24 nt, Human
ggagcagcgagacaagcagccgug

SEQ ID NO: 25872 - RNA, 24 nt, Human
aggaugucuuugauggagaagccc

SEQ ID NO: 25873 - RNA, 24 nt, Human
uauuagggauaauauucauuuagc

SEQ ID NO: 25874 - RNA, 24 nt, Human
uuguccugugcuggggcugacagg

SEQ ID NO: 25875 - RNA, 24 nt, Human
uaaaaaguuguggcaaagauggcu

SEQ ID NO: 25876 - RNA, 23 nt, Human
uuugaccuggggcggaaaaaggc

SEQ ID NO: 25877 - RNA, 24 nt, Human
agccauauuuacaucauccuguuu

SEQ ID NO: 25878 - RNA, 24 nt, Human
ugagaaugaccuuuacuuuccuau

SEQ ID NO: 25879 - RNA, 24 nt, Human
ugucagaucacaccuuuuugccuu

SEQ ID NO: 25880 - RNA, 24 nt, Human
ucucuggacucagucuguuaacau

SEQ ID NO: 25881 - RNA, 24 nt, Human
uugcauucauuacauucaaaaggc

SEQ ID NO: 25882 - RNA, 24 nt, Human
agauauaugcucucgaacagugug

SEQ ID NO: 25883 - RNA, 24 nt, Human
aggcguugagucaccgugcccggc

SEQ ID NO: 25884 - RNA, 24 nt, Human
ucacugcaaccuccaccuccuggg

SEQ ID NO: 25885 - RNA, 24 nt, Human
ggucauuaccuuauugaguuuaga

SEQ ID NO: 25886 - RNA, 24 nt, Human
uuuagacuugacgcaacgggaggu

SEQ ID NO: 25887 - RNA, 24 nt, Human
uugacauuccuuuucugcuuugua

SEQ ID NO: 25888 - RNA, 24 nt, Human
ucuguguugcccaagcuggacuug

SEQ ID NO: 25889 - RNA, 24 nt, Human
gugauucucugugccaaucucugc

SEQ ID NO: 25890 - RNA, 24 nt, Human
guccccgacaccgagacagccagc

SEQ ID NO: 25891 - RNA, 24 nt, Human
gagcgugucccgccggcccugaac

SEQ ID NO: 25892 - RNA, 24 nt, Human
cgacauggacaagaacagcggcuc

SEQ ID NO: 25893 - RNA, 24 nt, Human
uaaguaaugugguuuugccaugac

SEQ ID NO: 25894 - RNA, 24 nt, Human
ucuaaagguaugaaucaaauaggu

SEQ ID NO: 25895 - RNA, 21 nt, Human
ugcccuggugcccaccccugu

SEQ ID NO: 25896 - RNA, 24 nt, Human
ggagguugggggggcaggagcuuc

SEQ ID NO: 25897 - RNA, 24 nt, Human
uggaaucuugcggcauccacgaga

SEQ ID NO: 25898 - RNA, 24 nt, Human
uauggugcggaggcccuggagagg

SEQ ID NO: 25899 - RNA, 24 nt, Human
uaucugaaaacuacaccgcugugg

SEQ ID NO: 25900 - RNA, 24 nt, Human
ugcacauaccacguggcgggaccu

SEQ ID NO: 25901 - RNA, 24 nt, Human
ucuggagaaggagaggaugaugcg

SEQ ID NO: 25902 - RNA, 24 nt, Human
ucauagcguccagcgauccagaca

SEQ ID NO: 25903 - RNA, 24 nt, Human
gaacugguccuuucacuuugagau

SEQ ID NO: 25904 - RNA, 24 nt, Human
uaucaagucagcacacaccuuuuc

SEQ ID NO: 25905 - RNA, 24 nt, Human
ucaaugagucgcuugugaauucuc

SEQ ID NO: 25906 - RNA, 24 nt, Human
ugagaacaacaagccccaaagaca

SEQ ID NO: 25907 - RNA, 24 nt, Human
uacuaaauuauguugcugcaaagu

SEQ ID NO: 25908 - RNA, 24 nt, Human
ucauuuauuuuguacuguguuagg

SEQ ID NO: 25909 - RNA, 24 nt, Human
acauacucaccucuucccauaauc

SEQ ID NO: 25910 - RNA, 24 nt, Human
uuugcaucuggacaaauacuaaau

SEQ ID NO: 25911 - RNA, 24 nt, Human
uuagaaguuaugcuuuaaaauguu

SEQ ID NO: 25912 - RNA, 24 nt, Human
aggaaggcuggcaccucuggcucu

SEQ ID NO: 25913 - RNA, 24 nt, Human
agccuaaucuggaagaucuggcau

SEQ ID NO: 25914 - RNA, 24 nt, Human
cuggcucuuuccaguccuagcagg

SEQ ID NO: 25915 - RNA, 24 nt, Human
ucgacccaucaggacgccagagcu

SEQ ID NO: 25916 - RNA, 24 nt, Human
guugcucuucauggggcggcggcg

SEQ ID NO: 25917 - RNA, 22 nt, Human
ucagacgaaggcucaaggggga

SEQ ID NO: 25918 - RNA, 24 nt, Human
uuggcaguaguuuauguaagucaa

SEQ ID NO: 25919 - RNA, 24 nt, Human
uccacuggcgaaagaugccuuucu

SEQ ID NO: 25920 - RNA, 24 nt, Human
uaguucagauugaucuuaggucaa

SEQ ID NO: 25921 - RNA, 24 nt, Human
uagagugguggcucccagaauccc

SEQ ID NO: 25922 - RNA, 24 nt, Human
uccccgagcugcgcuggcugcccg

SEQ ID NO: 25923 - RNA, 23 nt, Human
uugcggccgcuggagcccgagcc

SEQ ID NO: 25924 - RNA, 24 nt, Human
ugauaugaaacauuggcccuuuau

SEQ ID NO: 25925 - RNA, 24 nt, Human
uaaguauauagauacuauugcauu

SEQ ID NO: 25926 - RNA, 24 nt, Human
uucgcaaaggagguuggaaggaca

SEQ ID NO: 25927 - RNA, 24 nt, Human
uuuuuuuucaaaccaggugucuga

SEQ ID NO: 25928 - RNA, 21 nt, Human
uuggucuuaagcaguguuaga

SEQ ID NO: 25929 - RNA, 24 nt, Human
cuucccuguggcuuagcugguggc

SEQ ID NO: 25930 - RNA, 24 nt, Human
cuggccccucgggugacccuuccc

SEQ ID NO: 25931 - RNA, 24 nt, Human
aauucagagacuucuugauuugga

SEQ ID NO: 25932 - RNA, 24 nt, Human
aguggaaaaaucuggaacucaagg

SEQ ID NO: 25933 - RNA, 24 nt, Human
uggcacacagccuggugguguucc

SEQ ID NO: 25934 - RNA, 24 nt, Human
agcuguugccuccgcgugcgcagu

SEQ ID NO: 25935 - RNA, 24 nt, Human
uuccuguaccguuuucuguuuuug

SEQ ID NO: 25936 - RNA, 24 nt, Human
ucccugcaaagaugacacuccucu

SEQ ID NO: 25937 - RNA, 24 nt, Human
uggcacaacggugacucgcggggc

SEQ ID NO: 25938 - RNA, 24 nt, Human
cggaaacccagcacguguguagag

SEQ ID NO: 25939 - RNA, 24 nt, Human
aaggggacaaaaaaaaaaaaggga

SEQ ID NO: 25940 - RNA, 24 nt, Human
cggccggaggaggccauggagccc

SEQ ID NO: 25941 - RNA, 24 nt, Human
ugauauguuucuuuacagaaugca

SEQ ID NO: 25942 - RNA, 24 nt, Human
ugcauggagugcccaaugggugga

SEQ ID NO: 25943 - RNA, 24 nt, Human
uggaaggccuuucaaaagccucac

SEQ ID NO: 25944 - RNA, 24 nt, Human
uaacauaguuguuucucuggggac

SEQ ID NO: 25945 - RNA, 24 nt, Human
uguaacagcacacugcauuccggg

SEQ ID NO: 25946 - RNA, 24 nt, Human
ucccggcaccaaggccgcaggcgg

SEQ ID NO: 25947 - RNA, 24 nt, Human
cacagcaagcccaggcucuaccag

SEQ ID NO: 25948 - RNA, 24 nt, Human
uuaaaugaacacagaggagagaag

SEQ ID NO: 25949 - RNA, 24 nt, Human
uggaaaucuucuucgaagccaugg

SEQ ID NO: 25950 - RNA, 24 nt, Human
uaauagauuuuuaauuuuacaggg

SEQ ID NO: 25951 - RNA, 24 nt, Human
ucuugcucugucacccaggaugga

SEQ ID NO: 25952 - RNA, 24 nt, Human
ugacugagucggcccauucuguuu

SEQ ID NO: 25953 - RNA, 24 nt, Human
uaccagggccauauuagcagugaa

SEQ ID NO: 25954 - RNA, 18 nt, Human
uggcagaaccacuaagcu

SEQ ID NO: 25955 - RNA, 20 nt, Human
ugguauagugaaugaaugaa

SEQ ID NO: 25956 - RNA, 24 nt, Human
uauuugguuuuguuggagaguguc

SEQ ID NO: 25957 - RNA, 24 nt, Human
gcgcguugcugcggccgugguccg

SEQ ID NO: 25958 - RNA, 24 nt, Human
aggaaggagauauagugaagagga

SEQ ID NO: 25959 - RNA, 24 nt, Human
cuuuauuuguuuuuuucguauagu

SEQ ID NO: 25960 - RNA, 21 nt, Human
ugucuggcggcaccaccaugu

SEQ ID NO: 25961 - RNA, 24 nt, Human
ugaccgcagcucgguggcgagcga

SEQ ID NO: 25962 - RNA, 24 nt, Human
uacaggaauguccuggccauccua

SEQ ID NO: 25963 - RNA, 24 nt, Human
ucagcaagcaggaguaugacgagu

SEQ ID NO: 25964 - RNA, 24 nt, Human
ugccuucuaaaggcugacauaccu

SEQ ID NO: 25965 - RNA, 24 nt, Human
ucuggaacacucucuaaauuuccc

SEQ ID NO: 25966 - RNA, 24 nt, Human
uggaaugugccucugcugacuugu

SEQ ID NO: 25967 - RNA, 24 nt, Human
uguagaacuuaggcuacaagacua

SEQ ID NO: 25968 - RNA, 24 nt, Human
ugggaggaacagggcuaggaugga

SEQ ID NO: 25969 - RNA, 24 nt, Human
ugcauggacaucauccaauucauu

SEQ ID NO: 25970 - RNA, 24 nt, Human
uugaaguagcguauucuuggagcu

SEQ ID NO: 25971 - RNA, 24 nt, Human
aggaaggagauauagugaagagga

SEQ ID NO: 25972 - RNA, 24 nt, Human
uggcagcccaaggcuuuguuguag

SEQ ID NO: 25973 - RNA, 24 nt, Human
cuuugauucagcaagccacaacag

SEQ ID NO: 25974 - RNA, 24 nt, Human
ugguaucuaugucucugaacccag

SEQ ID NO: 25975 - RNA, 22 nt, Human
uccgcaggguucggaugagacc

SEQ ID NO: 25976 - RNA, 24 nt, Human
uuuaaggagauguguuaccgauac

SEQ ID NO: 25977 - RNA, 24 nt, Human
auaaaucuucuauauugagaauug

SEQ ID NO: 25978 - RNA, 24 nt, Human
uuucuagagaaagauacaagggca

SEQ ID NO: 25979 - RNA, 24 nt, Human
uuuauguugcaugucaguuuccua

SEQ ID NO: 25980 - RNA, 24 nt, Human
uauuauggggaaaaaacugcaugu

SEQ ID NO: 25981 - RNA, 24 nt, Human
aaggaaacccuuguauucuuguga

SEQ ID NO: 25982 - RNA, 24 nt, Human
ugugugccauugcccaggcagagu

SEQ ID NO: 25983 - RNA, 24 nt, Human
uguaaugugccugugccuguggcc

SEQ ID NO: 25984 - RNA, 24 nt, Human
augguuauuauuccuaaauuuuca

SEQ ID NO: 25985 - RNA, 24 nt, Human
uaugagguuaguuaagcugcauuu

SEQ ID NO: 25986 - RNA, 24 nt, Human
cuccucccgccgcuuccguaaccu

SEQ ID NO: 25987 - RNA, 24 nt, Human
ucuugcgcuguaugacaucguccu

SEQ ID NO: 25988 - RNA, 24 nt, Human
uagcauuacuauagagauggcgca

SEQ ID NO: 25989 - RNA, 24 nt, Human
ccacaagugaaaaacaugguucag

SEQ ID NO: 25990 - RNA, 24 nt, Human
agggaccugggagccgggcagggg

SEQ ID NO: 25991 - RNA, 23 nt, Human
ucauacaggccaugucuugcaag

SEQ ID NO: 25992 - RNA, 24 nt, Human
uguggucuuguacauuuuggcuag

SEQ ID NO: 25993 - RNA, 22 nt, Human
ucagaucaacccauagucucac

SEQ ID NO: 25994 - RNA, 24 nt, Human
uggaauaaaagauuuuauaaccug

SEQ ID NO: 25995 - RNA, 24 nt, Human
uggcauuagguauuuggcuguuua

SEQ ID NO: 25996 - RNA, 24 nt, Human
ugagucaaagugaagaauuuccuc

SEQ ID NO: 25997 - RNA, 24 nt, Human
uaugguuuugcaauaugauugaug

SEQ ID NO: 25998 - RNA, 24 nt, Human
uauuagggauaauauucauuuagc

SEQ ID NO: 25999 - RNA, 24 nt, Human
uuuaacuuuuuuaaugggucucaa

SEQ ID NO: 26000 - RNA, 24 nt, Human
uuccucaaagguguagccaggagg

SEQ ID NO: 26001 - RNA, 24 nt, Human
ugaugguguagguggucuggcuuu

SEQ ID NO: 26002 - RNA, 24 nt, Human
aaaaguacuguguaauuucuaaau

SEQ ID NO: 26003 - RNA, 24 nt, Human
cagccccccugcacgcagcccgac

SEQ ID NO: 26004 - RNA, 24 nt, Human
ucacugcgcccucagcuggcaagc

SEQ ID NO: 26005 - RNA, 20 nt, Human
uacugggggacaaacaagcu

SEQ ID NO: 26006 - RNA, 24 nt, Human
acuccauuguccccuccucuggcu

SEQ ID NO: 26007 - RNA, 24 nt, Human
uuagugcuuuuaaaccaacuugcg

SEQ ID NO: 26008 - RNA, 24 nt, Human
aaugacccuuuugcuuuaggguuu

SEQ ID NO: 26009 - RNA, 24 nt, Human
gcccugcacauauaccaucucugg

SEQ ID NO: 26010 - RNA, 24 nt, Human
ucccguggaagguucaggaagcga

SEQ ID NO: 26011 - RNA, 21 nt, Human
agcucagugggcggcgugugc

SEQ ID NO: 26012 - RNA, 24 nt, Human
aagcaucugaguuugagaccaugg

SEQ ID NO: 26013 - RNA, 24 nt, Human
aaugugcugguaacugcuuugcuu

SEQ ID NO: 26014 - RNA, 24 nt, Human
ugaaaaguuggaagauuuugcauc

SEQ ID NO: 26015 - RNA, 24 nt, Human
ggacugggccgucgcacacgccag

SEQ ID NO: 26016 - RNA, 24 nt, Human
uccacaucagccaucugcuggccc

SEQ ID NO: 26017 - RNA, 24 nt, Human
ucagccugcucacgcugugaugac

SEQ ID NO: 26018 - RNA, 24 nt, Human
ugugaugcccuuagauguccgggg

SEQ ID NO: 26019 - RNA, 24 nt, Human
ugagaagacggucgaacuugacua

SEQ ID NO: 26020 - RNA, 24 nt, Human
acuccuugcggggcuucaguugca

SEQ ID NO: 26021 - RNA, 24 nt, Human
ccggaccccaccucuucccugccg

SEQ ID NO: 26022 - RNA, 24 nt, Human
cagcgcgcaccccggcggggcuuu

SEQ ID NO: 26023 - RNA, 24 nt, Human
cguguccauggggcgcccagucgc

SEQ ID NO: 26024 - RNA, 24 nt, Human
uuaagugguugaauucgcugcuug

SEQ ID NO: 26025 - RNA, 24 nt, Human
uugaucuugaagaaacugggcgug

SEQ ID NO: 26026 - RNA, 24 nt, Human
guagaguuuucuucaggcuuaaag

SEQ ID NO: 26027 - RNA, 24 nt, Human
aggaaggagauauagugaagagga

SEQ ID NO: 26028 - RNA, 24 nt, Human
guagaguuuucuucaggcuuaaag

SEQ ID NO: 26029 - RNA, 24 nt, Human
uucaucccaacaucuacccugaug

SEQ ID NO: 26030 - RNA, 24 nt, Human
aggcauugaucaugggcccagaag

SEQ ID NO: 26031 - RNA, 24 nt, Human
cgagagcagcgcggagcgguggag

SEQ ID NO: 26032 - RNA, 24 nt, Human
ugcuagccacagguggcugugaug

SEQ ID NO: 26033 - RNA, 23 nt, Human
ccgaggcucgcccggugucgugc

SEQ ID NO: 26034 - RNA, 24 nt, Human
ucggguauuagguuggcuaaccac

SEQ ID NO: 26035 - RNA, 24 nt, Human
aggaaggagauauagugaagagga

SEQ ID NO: 26036 - RNA, 24 nt, Human
aggaaggagauauagugaagagga

SEQ ID NO: 26037 - RNA, 24 nt, Human
cgggcgaauaacagggcugccagu

SEQ ID NO: 26038 - RNA, 24 nt, Human
acccgggaaagaggguaacucccg

SEQ ID NO: 26039 - RNA, 24 nt, Human
ugcagaugcguuucgacgggcugc

SEQ ID NO: 26040 - RNA, 24 nt, Human
cgaggccgacuaccugagcucgca

SEQ ID NO: 26041 - RNA, 24 nt, Human
caugaugcccgaggagaagcuggu

SEQ ID NO: 26042 - RNA, 24 nt, Human
ucgugccacgccaugcuguacgcc

SEQ ID NO: 26043 - RNA, 24 nt, Human
uuaauacuuuuauaauuucuuacg

SEQ ID NO: 26044 - RNA, 24 nt, Human
cagcuuaccccauucuguacagag

SEQ ID NO: 26045 - RNA, 23 nt, Human
cacauguauguccagccuguagu

SEQ ID NO: 26046 - RNA, 24 nt, Human
ugaggaccagugcacugaguacau

SEQ ID NO: 26047 - RNA, 24 nt, Human
ugguagguagggguagggccagag

SEQ ID NO: 26048 - RNA, 24 nt, Human
uuagagugugggagagagaaauag

SEQ ID NO: 26049 - RNA, 24 nt, Human
ugagagaggagauggaaaccuggu

SEQ ID NO: 26050 - RNA, 24 nt, Human
aaggaagugaauaaguuucagaug

SEQ ID NO: 26051 - RNA, 24 nt, Human
ugaccagacuuuuccagaagugcc

SEQ ID NO: 26052 - RNA, 20 nt, Human
uuccaaagaaagguacugug

SEQ ID NO: 26053 - RNA, 24 nt, Human
gcgugucuuaagauauuggugaug

SEQ ID NO: 26054 - RNA, 24 nt, Human
aggaaggagauauagugaagagga

SEQ ID NO: 26055 - RNA, 24 nt, Human
ugagaucaagugcuaggacuggau

SEQ ID NO: 26056 - RNA, 24 nt, Human
ugaaaagugccaggggcaauuucu

SEQ ID NO: 26057 - RNA, 24 nt, Human
uccaaauaguggccaagcugggac

SEQ ID NO: 26058 - RNA, 24 nt, Human
agggaagugugcggagggcuucca

SEQ ID NO: 26059 - RNA, 24 nt, Human
ucuccagaaaugcuuuggguucau

SEQ ID NO: 26060 - RNA, 24 nt, Human
uugaucuugaagaaacugggcgug

SEQ ID NO: 26061 - RNA, 24 nt, Human
guagaguuuucuucaggcuuaaag

SEQ ID NO: 26062 - RNA, 24 nt, Human
caaggccaucucccuaaacccaug

SEQ ID NO: 26063 - RNA, 24 nt, Human
gauaacauuauuauguugccuucu

SEQ ID NO: 26064 - RNA, 24 nt, Human
gaacacacuuggcagauggaggaa

SEQ ID NO: 26065 - RNA, 24 nt, Human
gcgcagccgacgcgggaaugaagc

SEQ ID NO: 26066 - RNA, 22 nt, Human
ccgccgcgggcucguccuccuc

SEQ ID NO: 26067 - RNA, 23 nt, Human
caggauccaaggguuuugaauuc

SEQ ID NO: 26068 - RNA, 24 nt, Human
caucaaacuauguccugggaauac

SEQ ID NO: 26069 - RNA, 24 nt, Human
ucagagaaagaaaaaccaauaucu

SEQ ID NO: 26070 - RNA, 24 nt, Human
uauuggccuucuuuaaaucccuau

SEQ ID NO: 26071 - RNA, 24 nt, Human
cuuucauaaauuguucuuggaggc

SEQ ID NO: 26072 - RNA, 24 nt, Human
gugguccugaacagcaaguggaaa

SEQ ID NO: 26073 - RNA, 24 nt, Human
cuagaccccaauggauugcaagga

SEQ ID NO: 26074 - RNA, 24 nt, Human
ugaggaucuugggaagcagcagca

SEQ ID NO: 26075 - RNA, 24 nt, Human
ugccaugugcucccugaccugaag

SEQ ID NO: 26076 - RNA, 24 nt, Human
uccacuaguuaacugagggacaag

SEQ ID NO: 26077 - RNA, 24 nt, Human
ucccuggaccagcccgguggcacc

SEQ ID NO: 26078 - RNA, 19 nt, Human
ugacauguauacuugcugc

SEQ ID NO: 26079 - RNA, 24 nt, Human
gcucuguucaucuuauucgccagc

SEQ ID NO: 26080 - RNA, 24 nt, Human
ucugagguugccaucagccagggc

SEQ ID NO: 26081 - RNA, 24 nt, Human
uguggugguggggaggguggguac

SEQ ID NO: 26082 - RNA, 24 nt, Human
ugggaaagagcuccggugacagaa

SEQ ID NO: 26083 - RNA, 24 nt, Human
caagaacaagucauugcugugcac

SEQ ID NO: 26084 - RNA, 24 nt, Human
gaguaggcacgucaaaaguuuugg

SEQ ID NO: 26085 - RNA, 24 nt, Human
cauagcaaaugaaucuaaaaaguu

SEQ ID NO: 26086 - RNA, 24 nt, Human
uaacuuuuguuccaccacccauag

SEQ ID NO: 26087 - RNA, 24 nt, Human
aagcguacugcucaucaucgauau

SEQ ID NO: 26088 - RNA, 24 nt, Human
ucuagaauagcccaaucuuauagu

SEQ ID NO: 26089 - RNA, 24 nt, Human
gcucucuuguaaaaagcaaaaucc

SEQ ID NO: 26090 - RNA, 24 nt, Human
uagcuggagaccuugaaaacauug

SEQ ID NO: 26091 - RNA, 24 nt, Human
aggaaggagauauagugaagagga

SEQ ID NO: 26092 - RNA, 24 nt, Human
uaaccaauaggaaaccccuaaagg

SEQ ID NO: 26093 - RNA, 24 nt, Human
uacuguuuuccccaaaguggaaca

SEQ ID NO: 26094 - RNA, 19 nt, Human
ucaguggauuucuuugagc

SEQ ID NO: 26095 - RNA, 24 nt, Human
uugaucuugaagaaacugggcgug

SEQ ID NO: 26096 - RNA, 24 nt, Human
uccgugcgcgugcugcggccgugg

SEQ ID NO: 26097 - RNA, 24 nt, Human
ucaaauggaaagaaguuugauucc

SEQ ID NO: 26098 - RNA, 24 nt, Human
uggcucggguggcagucucccuaa

SEQ ID NO: 26099 - RNA, 22 nt, Human
uccaaaggagagauuuauuuga

SEQ ID NO: 26100 - RNA, 24 nt, Human
ccgcgcccccggccgaccccgacg

SEQ ID NO: 26101 - RNA, 24 nt, Human
aggaagcugcugccgacgcacccg

SEQ ID NO: 26102 - RNA, 24 nt, Human
cagcuccuaguggagaccucgggc

SEQ ID NO: 26103 - RNA, 24 nt, Human
uguguguauacagcgcggaauaau

SEQ ID NO: 26104 - RNA, 24 nt, Human
ugagcccccacccaucccugugcg

SEQ ID NO: 26105 - RNA, 24 nt, Human
uauuguuacugccgcugauuugug

SEQ ID NO: 26106 - RNA, 24 nt, Human
gaccccuucgucagagaaucuggg

SEQ ID NO: 26107 - RNA, 24 nt, Human
aggcauaugugucgugugggcgug

SEQ ID NO: 26108 - RNA, 24 nt, Human
aggaagcacguggaggagggacgg

SEQ ID NO: 26109 - RNA, 24 nt, Human
cuuacacuuaaggccaaauucuuc

SEQ ID NO: 26110 - RNA, 24 nt, Human
uaguucacuuguuuuuccucuuug

SEQ ID NO: 26111 - RNA, 24 nt, Human
aucaguuuccauuucuuaugcagg

SEQ ID NO: 26112 - RNA, 24 nt, Human
uaagacaucagauguucaaaaaag

SEQ ID NO: 26113 - RNA, 24 nt, Human
ugugaaacucuucaaguauaucug

SEQ ID NO: 26114 - RNA, 24 nt, Human
uuaguggacagcacuuaguagcug

SEQ ID NO: 26115 - RNA, 24 nt, Human
uauggcaagucacuuugacagaca

SEQ ID NO: 26116 - RNA, 24 nt, Human
ugagaauggcaaaauuagucgccu

SEQ ID NO: 26117 - RNA, 24 nt, Human
uacaccacucccaagaagaauaag

SEQ ID NO: 26118 - RNA, 24 nt, Human
guagaguuuucuucaggcuuaaag

SEQ ID NO: 26119 - RNA, 24 nt, Human
uugaucuugaagaaacugggcgug

SEQ ID NO: 26120 - RNA, 24 nt, Human
aggaaggagauauagugaagagga

SEQ ID NO: 26121 - RNA, 24 nt, Human
guagaguuuucuucaggcuuaaag

SEQ ID NO: 26122 - RNA, 24 nt, Human
ugaagagcguauucuuggagcuga

SEQ ID NO: 26123 - RNA, 24 nt, Human
aggaaggagauauagugaagagga

SEQ ID NO: 26124 - RNA, 24 nt, Human
guagaguuuucuucaggcuuaaag

SEQ ID NO: 26125 - RNA, 24 nt, Human
ucccggauccaggcguccgggauc

SEQ ID NO: 26126 - RNA, 24 nt, Human
ggacaccagaccaccgccuuccgu

SEQ ID NO: 26127 - RNA, 24 nt, Human
ugugguugugagucugagcuugug

SEQ ID NO: 26128 - RNA, 24 nt, Human
ccgcagcgcggaacccccuaggcg

SEQ ID NO: 26129 - RNA, 21 nt, Human
uacuuuagucuauucuuaguu

SEQ ID NO: 26130 - RNA, 24 nt, Human
ugugaucuugaagaaacugggcgu

SEQ ID NO: 26131 - RNA, 24 nt, Human
gcgcguugcugcggccgugguccg

SEQ ID NO: 26132 - RNA, 24 nt, Human
uagcuuggugccaauggucguggu

SEQ ID NO: 26133 - RNA, 24 nt, Human
uucaagcagaagaaaugguagagu

SEQ ID NO: 26134 - RNA, 24 nt, Human
uuccaguuggugaggagcuguggg

SEQ ID NO: 26135 - RNA, 24 nt, Human
aggaaggagauauagugaagagga

SEQ ID NO: 26136 - RNA, 24 nt, Human
cgaggccgacuaccugagcucgca

SEQ ID NO: 26137 - RNA, 21 nt, Human
uucaauagccaguugcuuguu

SEQ ID NO: 26138 - RNA, 17 nt, Human
gagcaggugguaguggg

SEQ ID NO: 26139 - RNA, 24 nt, Human
aaccagaaaguaagguguucuacu

SEQ ID NO: 26140 - RNA, 24 nt, Human
aggcagucacagaacaggggcaug

SEQ ID NO: 26141 - RNA, 24 nt, Human
ccuuugguuucugccggccucggg

SEQ ID NO: 26142 - RNA, 24 nt, Human
cuggucaccaaaggaagagugcca

SEQ ID NO: 26143 - RNA, 24 nt, Human
gggcuagggcugagccucaggugg

SEQ ID NO: 26144 - RNA, 24 nt, Human
cagcgcauggagggguagugcugg

SEQ ID NO: 26145 - RNA, 24 nt, Human
uggauucuugggagcuggauacuc

SEQ ID NO: 26146 - RNA, 24 nt, Human
cuagcccaggaggggacgccguug

SEQ ID NO: 26147 - RNA, 24 nt, Human
ucgaagacgggauuggccaugagu

SEQ ID NO: 26148 - RNA, 24 nt, Human
agauuacacuguuaccgagauccc

SEQ ID NO: 26149 - RNA, 24 nt, Human
caacagaaaguaagguguucuacu

SEQ ID NO: 26150 - RNA, 24 nt, Human
aggcagucacagaacaggggcaug

SEQ ID NO: 26151 - RNA, 24 nt, Human
gagaagccgagccgaguauccagg

SEQ ID NO: 26152 - RNA, 24 nt, Human
uggcaggggaggacagaacuuuga

SEQ ID NO: 26153 - RNA, 24 nt, Human
aguccagagguucaagagccuggg

SEQ ID NO: 26154 - RNA, 23 nt, Human
uaaccgcaaaacucuagaggggg

SEQ ID NO: 26155 - RNA, 24 nt, Human
uuuuaauugauagcaaaauaguuu

SEQ ID NO: 26156 - RNA, 24 nt, Human
uaacguaguaguugucugcucuuu

SEQ ID NO: 26157 - RNA, 21 nt, Human
aaggggcccgggaacaccugc

SEQ ID NO: 26158 - RNA, 24 nt, Human
aaggggcccggaacaccugucuca

SEQ ID NO: 26159 - RNA, 24 nt, Human
caccgcguuggggacaguugcccc

SEQ ID NO: 26160 - RNA, 18 nt, Human
gccccgggggggcccgcu

SEQ ID NO: 26161 - RNA, 24 nt, Human
ucccgauacaccuuacuuacugug

SEQ ID NO: 26162 - RNA, 20 nt, Human
caccggagcacaccuaggga

SEQ ID NO: 26163 - RNA, 24 nt, Human
ugaagaacaucaccuaagagauua

SEQ ID NO: 26164 - RNA, 24 nt, Human
uaaugagagauccaaacaccaagc

SEQ ID NO: 26165 - RNA, 24 nt, Human
uggaaccaaagagagcugucucca

SEQ ID NO: 26166 - RNA, 24 nt, Human
accaaauuucugcauucgagucuu

SEQ ID NO: 26167 - RNA, 24 nt, Human
gauuagccuuuucucugccuugcu

SEQ ID NO: 26168 - RNA, 24 nt, Human
uaccccucgucacuugcaacuugc

SEQ ID NO: 26169 - RNA, 24 nt, Human
auaguaccaacuuugguugccaga

SEQ ID NO: 26170 - RNA, 24 nt, Human
ccgcguuguccgauguucaugagu

SEQ ID NO: 26171 - RNA, 24 nt, Human
ugaccauagaagagcugacgaccg

SEQ ID NO: 26172 - RNA, 24 nt, Human
guuaagugauagcucgccuucgaa

SEQ ID NO: 26173 - RNA, 24 nt, Human
uugaagccaguggggcaccaauuc

SEQ ID NO: 26174 - RNA, 19 nt, Human
uaccauggcagggucacaa

SEQ ID NO: 26175 - RNA, 23 nt, Human
uaaaauacauuuuauguuaaugu

SEQ ID NO: 26176 - RNA, 24 nt, Human
ucaaaguagaauuauaaagaagau

SEQ ID NO: 26177 - RNA, 24 nt, Human
ugagugcaagagauugaagaguuc

SEQ ID NO: 26178 - RNA, 24 nt, Human
ugacaucguccugcuuaucacuga

SEQ ID NO: 26179 - RNA, 24 nt, Human
ugaguuguuggagcuggacauccg

SEQ ID NO: 26180 - RNA, 24 nt, Human
auggggcuuacuccucugagaaac

SEQ ID NO: 26181 - RNA, 24 nt, Human
cugggccucgugcgggucccgcug

SEQ ID NO: 26182 - RNA, 24 nt, Human
cugccugcgccucaccgaggccga

SEQ ID NO: 26183 - RNA, 24 nt, Human
ugcagaugcguuucgacgggcugc

SEQ ID NO: 26184 - RNA, 24 nt, Human
ucgugccacgccaugcuguacgcc

SEQ ID NO: 26185 - RNA, 24 nt, Human
ucauuagaagagcuuuuuacucuu

SEQ ID NO: 26186 - RNA, 24 nt, Human
cccccagcccaucacccuguguac

SEQ ID NO: 26187 - RNA, 24 nt, Human
ugagaagauagcgaaauacauugg

SEQ ID NO: 26188 - RNA, 24 nt, Human
uaccuugcaccuuaugccaaguau

SEQ ID NO: 26189 - RNA, 24 nt, Human
auaaacuaauuaagugaaggagau

SEQ ID NO: 26190 - RNA, 24 nt, Human
ugagauguccgucuauucuugaag

SEQ ID NO: 26191 - RNA, 24 nt, Human
aaggguccggggcggagugccguu

SEQ ID NO: 26192 - RNA, 24 nt, Human
ucucuuaugacuacaacccaaacc

SEQ ID NO: 26193 - RNA, 21 nt, Human
ugggaggggcugaauguggug

SEQ ID NO: 26194 - RNA, 24 nt, Human
aagcguuuugagcagaaaggauuc

SEQ ID NO: 26195 - RNA, 24 nt, Human
cgacauugauaaauguucuccagg

SEQ ID NO: 26196 - RNA, 21 nt, Human
gauucuguggagagugcagag

SEQ ID NO: 26197 - RNA, 24 nt, Human
ugagaaugaccccaagaccuuuga

SEQ ID NO: 26198 - RNA, 24 nt, Human
ugugaacgggaagaaggugcugca

SEQ ID NO: 26199 - RNA, 24 nt, Human
cuuccaaucugaugggcauguuug

SEQ ID NO: 26200 - RNA, 22 nt, Human
guggagggcagcuuugucuaca

SEQ ID NO: 26201 - RNA, 24 nt, Human
gugcaaccucggccgaggccuucc

SEQ ID NO: 26202 - RNA, 24 nt, Human
gcucauuugcaggggggagccaaa

SEQ ID NO: 26203 - RNA, 24 nt, Human
ugugaggaggaccugaugcccgag

SEQ ID NO: 26204 - RNA, 24 nt, Human
ucccccgucgcugccccgccccug

SEQ ID NO: 26205 - RNA, 24 nt, Human
cuacgggcuguacgacgaccgugg

SEQ ID NO: 26206 - RNA, 24 nt, Human
uaccccuucuagugaggcuaaaga

SEQ ID NO: 26207 - RNA, 24 nt, Human
uaaaacucauagacccaggucucc

SEQ ID NO: 26208 - RNA, 24 nt, Human
uacaggggugagccacugcgcccu

SEQ ID NO: 26209 - RNA, 20 nt, Human
uuuggaaggcgggaaggggg

SEQ ID NO: 26210 - RNA, 24 nt, Human
gcugcacccuaucuuggagaccuu

SEQ ID NO: 26211 - RNA, 24 nt, Human
ugagggaagggagguggaagcuca

SEQ ID NO: 26212 - RNA, 24 nt, Human
accacaguacuccuucuauauagu

SEQ ID NO: 26213 - RNA, 24 nt, Human
uuuacauuuaaaaaauagaaggaa

SEQ ID NO: 26214 - RNA, 24 nt, Human
acauaugaaugcacgauaugaaga

SEQ ID NO: 26215 - RNA, 24 nt, Human
ugugcagaagaaauggaaggauuc

SEQ ID NO: 26216 - RNA, 24 nt, Human
uuuuauuuuucaauuuuuauuuug

SEQ ID NO: 26217 - RNA, 24 nt, Human
uucaaauuucuuucuuuuuuaauu

SEQ ID NO: 26218 - RNA, 24 nt, Human
ucuuaagcuggaccucacugucgg

SEQ ID NO: 26219 - RNA, 23 nt, Human
uugaaggaccacacagguagugg

SEQ ID NO: 26220 - RNA, 24 nt, Human
cuagccucuacgucuucugagauc

SEQ ID NO: 26221 - RNA, 24 nt, Human
uauggcaagucacuuugacagaca

SEQ ID NO: 26222 - RNA, 24 nt, Human
uacaccacucccaagaagaauaag

SEQ ID NO: 26223 - RNA, 24 nt, Human
uccuugggaacgggguucuccguc

SEQ ID NO: 26224 - RNA, 24 nt, Human
ugacucccagucucguuuuauugc

SEQ ID NO: 26225 - RNA, 24 nt, Human
ccuuuuuuuuugaaaaagggcgcc

SEQ ID NO: 26226 - RNA, 24 nt, Human
ugggaaggaccagcaggaggcagc

SEQ ID NO: 26227 - RNA, 22 nt, Human
uccgugcgcguugcugcggccg

SEQ ID NO: 26228 - RNA, 24 nt, Human
uugaucuugaagaaacugggcgug

SEQ ID NO: 26229 - RNA, 24 nt, Human
aggaaggagauauagugaagagga

SEQ ID NO: 26230 - RNA, 24 nt, Human
guagaguuuucuucaggcuuaaag

SEQ ID NO: 26231 - RNA, 24 nt, Human
ugccauaugguuuuucagaaacau

SEQ ID NO: 26232 - RNA, 24 nt, Human
uaauauaggaacaaacuuaggcuc

SEQ ID NO: 26233 - RNA, 24 nt, Human
uaugauauacauaugauacauauc

SEQ ID NO: 26234 - RNA, 22 nt, Human
uuccucaggggugagguuuggg

SEQ ID NO: 26235 - RNA, 24 nt, Human
uaccgugaaccuccagaagccauc

SEQ ID NO: 26236 - RNA, 24 nt, Human
cuuccuccguguuggagaccuggu

SEQ ID NO: 26237 - RNA, 24 nt, Human
ucucugguuguucacauuccaaaa

SEQ ID NO: 26238 - RNA, 24 nt, Human
ugugguuuuaaaagagucccucaa

SEQ ID NO: 26239 - RNA, 24 nt, Human
cuggguccccucugcaagcucaga

SEQ ID NO: 26240 - RNA, 24 nt, Human
uuaguauuauuuauuugacaacuc

SEQ ID NO: 26241 - RNA, 24 nt, Human
ucacauagguugugccaugagugg

SEQ ID NO: 26242 - RNA, 24 nt, Human
acugguucaccuacaaugagacaa

SEQ ID NO: 26243 - RNA, 18 nt, Human
aaggaccccagcuguuuc

SEQ ID NO: 26244 - RNA, 23 nt, Human
cucugcuucagagggugcccaga

SEQ ID NO: 26245 - RNA, 24 nt, Human
cgccguggcuaguggcgcgcacgg

SEQ ID NO: 26246 - RNA, 24 nt, Human
acgcaucgauucgcgguaagacag

SEQ ID NO: 26247 - RNA, 24 nt, Human
aggaaggagauauagugaagagga

SEQ ID NO: 26248 - RNA, 24 nt, Human
uacacggucguggacgagauguuc

SEQ ID NO: 26249 - RNA, 17 nt, Human
ucagugcgggaaccaau

SEQ ID NO: 26250 - RNA, 24 nt, Human
aggaaggagauauagugaagagga

SEQ ID NO: 26251 - RNA, 24 nt, Human
guagaguuuucuucaggcuuaaag

SEQ ID NO: 26252 - RNA, 23 nt, Human
aggaaggagauagugaagaggac

SEQ ID NO: 26253 - RNA, 24 nt, Human
uucaucuuucauugcugcaaggaa

SEQ ID NO: 26254 - RNA, 24 nt, Human
accagcuucugcuaccuucaugcu

SEQ ID NO: 26255 - RNA, 24 nt, Human
uggaaugcuagauggccaagccuc

SEQ ID NO: 26256 - RNA, 24 nt, Human
gggcguugagaaaaggugacucuc

SEQ ID NO: 26257 - RNA, 24 nt, Human
gaggagaaacccugggaaggcucc

SEQ ID NO: 26258 - RNA, 24 nt, Human
uggcaagaaauccaagcuggaguu

SEQ ID NO: 26259 - RNA, 24 nt, Human
cacuacaccauuggcaaggagauc

SEQ ID NO: 26260 - RNA, 24 nt, Human
cuuguaggucuauauuuaucuuca

SEQ ID NO: 26261 - RNA, 24 nt, Human
uacuaaguuuauuuugcaaguguu

SEQ ID NO: 26262 - RNA, 21 nt, Human
ugggaggggcugaauguggug

SEQ ID NO: 26263 - RNA, 24 nt, Human
aagcguuuugagcagaaaggauuc

SEQ ID NO: 26264 - RNA, 24 nt, Human
gcgcggccuggugggcgagaucau

SEQ ID NO: 26265 - RNA, 24 nt, Human
ucuggaguucuuccgccaggguga

SEQ ID NO: 26266 - RNA, 24 nt, Human
uccccgauggcccacugcgugacc

SEQ ID NO: 26267 - RNA, 19 nt, Human
uaccgcuuugagacagucc

SEQ ID NO: 26268 - RNA, 22 nt, Human
ugggagggggcagcugggcuga

SEQ ID NO: 26269 - RNA, 24 nt, Human
uuaacagagggaugagaaaaagua

SEQ ID NO: 26270 - RNA, 24 nt, Human
cagcugccgcaaagucucguccac

SEQ ID NO: 26271 - RNA, 24 nt, Human
aagcugcaccagcgcguggagcag

SEQ ID NO: 26272 - RNA, 24 nt, Human
gcagccccaggcagacccccgcgc

SEQ ID NO: 26273 - RNA, 24 nt, Human
uguagaaugcuuuuaggccuucuu

SEQ ID NO: 26274 - RNA, 24 nt, Human
uggcuuugaacauucacugcgggg

SEQ ID NO: 26275 - RNA, 24 nt, Human
agcuuccauacgagccaggccaau

SEQ ID NO: 26276 - RNA, 24 nt, Human
uaacagcaauguucagggaacaaa

SEQ ID NO: 26277 - RNA, 24 nt, Human
uucauggacacuuaucacuucccc

SEQ ID NO: 26278 - RNA, 24 nt, Human
augcucaacccguauuuucuggcu

SEQ ID NO: 26279 - RNA, 24 nt, Human
uggcacggcaaucgccauccuuuc

SEQ ID NO: 26280 - RNA, 24 nt, Human
ucacugcagcagcgcacucacaug

SEQ ID NO: 26281 - RNA, 24 nt, Human
auaauauuguuugguaaauguuuc

SEQ ID NO: 26282 - RNA, 24 nt, Human
agaaauguugagucuguacuaaac

SEQ ID NO: 26283 - RNA, 24 nt, Human
ucuaagguuuaaauaggaguggug

SEQ ID NO: 26284 - RNA, 21 nt, Human
uauuuugucuuacugaaauug

SEQ ID NO: 26285 - RNA, 24 nt, Human
cgccaagaccugcuucaccuuuug

SEQ ID NO: 26286 - RNA, 24 nt, Human
gucaucuucuacaccuaggcuguc

SEQ ID NO: 26287 - RNA, 21 nt, Human
uugaaccauguguuaccgggc

SEQ ID NO: 26288 - RNA, 21 nt, Human
aaaaggcuuugcacaagagaa

SEQ ID NO: 26289 - RNA, 23 nt, Human
cacacccaaacaaacccaaggau

SEQ ID NO: 26290 - RNA, 24 nt, Human
cgugcagacucgacagcaccugaa

SEQ ID NO: 26291 - RNA, 24 nt, Human
uuaguucauucuucuaauaagccu

SEQ ID NO: 26292 - RNA, 24 nt, Human
uguuucaacugugcuccuguuugu

SEQ ID NO: 26293 - RNA, 24 nt, Human
gugaauuuuugaaacuggacagag

SEQ ID NO: 26294 - RNA, 24 nt, Human
ggggagcgagcacgucgcuccgca

SEQ ID NO: 26295 - RNA, 24 nt, Human
acgcaagcaggaggcgggggaguc

SEQ ID NO: 26296 - RNA, 24 nt, Human
ugccaauauacaguuagaauauca

SEQ ID NO: 26297 - RNA, 24 nt, Human
uaugugcaguuauuaucacaugaa

SEQ ID NO: 26298 - RNA, 24 nt, Human
uacacuguggccucaaccucccag

SEQ ID NO: 26299 - RNA, 24 nt, Human
ucccucuugcuuuauagcuagcug

SEQ ID NO: 26300 - RNA, 24 nt, Human
ucucuuguccucagugucucuucu

SEQ ID NO: 26301 - RNA, 24 nt, Human
ugaagacaccccuuuaauugcuau

SEQ ID NO: 26302 - RNA, 24 nt, Human
caaggguaacucauaaagucaagg

SEQ ID NO: 26303 - RNA, 17 nt, Human
ccagugcaagaaugggg

SEQ ID NO: 26304 - RNA, 24 nt, Human
gccccgaggcccggcggggcggcg

SEQ ID NO: 26305 - RNA, 24 nt, Human
gcccggaggccguggcgcucgcgc

SEQ ID NO: 26306 - RNA, 24 nt, Human
cucugcaucucgcggcgccgcgac

SEQ ID NO: 26307 - RNA, 24 nt, Human
cgggggccgcaccuuggaggagau

SEQ ID NO: 26308 - RNA, 24 nt, Human
uuuacagauccggccaggaccccg

SEQ ID NO: 26309 - RNA, 24 nt, Human
caucgcaauuucuuuguacaauag

SEQ ID NO: 26310 - RNA, 24 nt, Human
uuaguacaguuuuucuggugaccu

SEQ ID NO: 26311 - RNA, 24 nt, Human
uuucuagagcccaagcuccauuag

SEQ ID NO: 26312 - RNA, 24 nt, Human
uaccuuaaucaccugagguucugg

SEQ ID NO: 26313 - RNA, 24 nt, Human
uucaugaacauuuugcccugaacu

SEQ ID NO: 26314 - RNA, 24 nt, Human
uaagagccacucucucgguuggcg

SEQ ID NO: 26315 - RNA, 24 nt, Human
uuucugcuguaggcugggcuacag

SEQ ID NO: 26316 - RNA, 24 nt, Human
cuguucuagauauuugagauuagg

SEQ ID NO: 26317 - RNA, 24 nt, Human
uuguagguauguauaggaaaaaua

SEQ ID NO: 26318 - RNA, 24 nt, Human
gagcgguucauuuauuuggaaacu

SEQ ID NO: 26319 - RNA, 24 nt, Human
uguucuggagcuguuggacaaaua

SEQ ID NO: 26320 - RNA, 24 nt, Human
aaccagaaaguaagguguucuacu

SEQ ID NO: 26321 - RNA, 24 nt, Human
uaccgccaccgccgcgccgauucc

SEQ ID NO: 26322 - RNA, 24 nt, Human
aggcagucacagaacaggggcaug

SEQ ID NO: 26323 - RNA, 24 nt, Human
uguagguaacucuccuccagucgg

SEQ ID NO: 26324 - RNA, 24 nt, Human
ggaggauaaaggaacucuuugcac

SEQ ID NO: 26325 - RNA, 24 nt, Human
aggaaggaguuuggccacauugga

SEQ ID NO: 26326 - RNA, 22 nt, Human
caccggagcacaccuagggauc

SEQ ID NO: 26327 - RNA, 24 nt, Human
uggaguccucgggggccgugcacu

SEQ ID NO: 26328 - RNA, 24 nt, Human
cuccucuagcuuauuuggugucuc

SEQ ID NO: 26329 - RNA, 24 nt, Human
uuggacggaacagauccggggacu

SEQ ID NO: 26330 - RNA, 24 nt, Human
cuacaccuaccucucucugggcuu

SEQ ID NO: 26331 - RNA, 24 nt, Human
cuugccaaccgaaccaugagcucc

SEQ ID NO: 26332 - RNA, 24 nt, Human
uggaucacuggucauuccuacguc

SEQ ID NO: 26333 - RNA, 24 nt, Human
uggcaugagcucaugcaaugaggc

SEQ ID NO: 26334 - RNA, 24 nt, Human
uggcuccacaggcaaacccaaggg

SEQ ID NO: 26335 - RNA, 24 nt, Human
uguucuggagcuguuggacaaaua

SEQ ID NO: 26336 - RNA, 24 nt, Human
aaccagaaaguaagguguucuacu

SEQ ID NO: 26337 - RNA, 22 nt, Human
cacucgguguacguccuggagg

SEQ ID NO: 26338 - RNA, 24 nt, Human
caccgggaggugaccccugaccag

SEQ ID NO: 26339 - RNA, 21 nt, Human
uccugggucccgggagggcuc

SEQ ID NO: 26340 - RNA, 24 nt, Human
uauggcaagucacuuugacagaca

SEQ ID NO: 26341 - RNA, 24 nt, Human
uacaccacucccaagaagaauaag

SEQ ID NO: 26342 - RNA, 24 nt, Human
uaccuuugcacaaagugaaaucuc

SEQ ID NO: 26343 - RNA, 24 nt, Human
uggggugggguccaggaaucuguu

SEQ ID NO: 26344 - RNA, 24 nt, Human
cgugcccccugcgagaagauguug

SEQ ID NO: 26345 - RNA, 22 nt, Human
cucguggugagcguguaaauua

SEQ ID NO: 26346 - RNA, 21 nt, Human
aacacagugaaaccccaucuc

SEQ ID NO: 26347 - RNA, 24 nt, Human
aagaagccgcccugguugcacaug

SEQ ID NO: 26348 - RNA, 24 nt, Human
uagaauuucuucuugguauuaaag

SEQ ID NO: 26349 - RNA, 24 nt, Human
cuaggcccacaaagggggguccaa

SEQ ID NO: 26350 - RNA, 24 nt, Human
uaucuuaauccuuccacauacaga

SEQ ID NO: 26351 - RNA, 23 nt, Human
aaagacaagauaaucaauacaug

SEQ ID NO: 26352 - RNA, 24 nt, Human
ucaaguacauucccagucguggcc

SEQ ID NO: 26353 - RNA, 20 nt, Human
gaccuggggcggaaaaaggc

SEQ ID NO: 26354 - RNA, 24 nt, Human
uuugaucaggagaacgugguuacu

SEQ ID NO: 26355 - RNA, 24 nt, Human
uucucgugugaaugaggguuuuau

SEQ ID NO: 26356 - RNA, 24 nt, Human
uuccuuggcuccucaggcuggggu

SEQ ID NO: 26357 - RNA, 24 nt, Human
ugugaugcaggugaucguguaaug

SEQ ID NO: 26358 - RNA, 24 nt, Human
uaugacacagagacagggggcaau

SEQ ID NO: 26359 - RNA, 24 nt, Human
ccaccgggaccuggucagcacaga

SEQ ID NO: 26360 - RNA, 24 nt, Human
ugaaugcuguaucggcacagggaa

SEQ ID NO: 26361 - RNA, 24 nt, Human
gcuuuguucaaugcuuccacucua

SEQ ID NO: 26362 - RNA, 23 nt, Human
gacugugggguggauugggagaa

SEQ ID NO: 26363 - RNA, 24 nt, Human
guggagugccagcgucacaccuac

SEQ ID NO: 26364 - RNA, 24 nt, Human
gcugcaguccauuggcaccgagaa

SEQ ID NO: 26365 - RNA, 24 nt, Human
agccguagaauuugaccuugcgaa

SEQ ID NO: 26366 - RNA, 20 nt, Human
uuaagggggauaacuugggc

SEQ ID NO: 26367 - RNA, 24 nt, Human
ggccgugguccgcgcccuuccucg

SEQ ID NO: 26368 - RNA, 24 nt, Human
ugaacaaagucagaucuggucaga

SEQ ID NO: 26369 - RNA, 24 nt, Human
aguggagacuguugaaugugagau

SEQ ID NO: 26370 - RNA, 24 nt, Human
uggaacagugugacugagaacauc

SEQ ID NO: 26371 - RNA, 24 nt, Human
cucccggguuaaggcugggguuug

SEQ ID NO: 26372 - RNA, 24 nt, Human
aggccgcacuccacuaccugcguu

SEQ ID NO: 26373 - RNA, 24 nt, Human
ucacugggccugccucaacuguaa

SEQ ID NO: 26374 - RNA, 24 nt, Human
ucuaguaccccuuugcauaccaac

SEQ ID NO: 26375 - RNA, 24 nt, Human
uguugggaaggagccgggcagcag

SEQ ID NO: 26376 - RNA, 24 nt, Human
ucucagggaugccacaaccauggg

SEQ ID NO: 26377 - RNA, 24 nt, Human
ggacuaggccuggaggccgccgcg

SEQ ID NO: 26378 - RNA, 24 nt, Human
ccugccucaugagggcuccaaugu

SEQ ID NO: 26379 - RNA, 23 nt, Human
uuugaccuggggcggaaaaaggc

SEQ ID NO: 26380 - RNA, 24 nt, Human
aauuuuguaacucagaucuugcug

SEQ ID NO: 26381 - RNA, 24 nt, Human
gcucaucguguggcugcuggugaa

SEQ ID NO: 26382 - RNA, 24 nt, Human
uuuuaugcagaugaucagucaaca

SEQ ID NO: 26383 - RNA, 24 nt, Human
ugggacuuugaccugcaauuaggu

SEQ ID NO: 26384 - RNA, 24 nt, Human
cuagaaccacaggagaauggcgug

SEQ ID NO: 26385 - RNA, 20 nt, Human
uaaaggucaugaggcugaag

SEQ ID NO: 26386 - RNA, 24 nt, Human
uccuagggcugucugggcuggucu

SEQ ID NO: 26387 - RNA, 24 nt, Human
cucccaccucccugaaacugucca

SEQ ID NO: 26388 - RNA, 24 nt, Human
uggugccccucccaggcuccuuuu

SEQ ID NO: 26389 - RNA, 19 nt, Human
acgcagccgcacgugguau

SEQ ID NO: 26390 - RNA, 18 nt, Human
cuuggcucuggggagggg

SEQ ID NO: 26391 - RNA, 24 nt, Human
uagaacaaauaggucggacaccgg

SEQ ID NO: 26392 - RNA, 24 nt, Human
ucgacccaucaggacgccagagcu

SEQ ID NO: 26393 - RNA, 24 nt, Human
aacuuuacaaaaaauggcagcaaa

SEQ ID NO: 26394 - RNA, 24 nt, Human
aggcugcgacgcugcacggcacca

SEQ ID NO: 26395 - RNA, 24 nt, Human
uucaaaguaccgaaaaccuucucc

SEQ ID NO: 26396 - RNA, 24 nt, Human
uaguauguugugucucuggaauau

SEQ ID NO: 26397 - RNA, 24 nt, Human
ccuacaaaauucccugucaaugac

SEQ ID NO: 26398 - RNA, 24 nt, Human
ugugcaccgccggccucguuugaa

SEQ ID NO: 26399 - RNA, 23 nt, Human
gacucugugagcugaccccgcuu

SEQ ID NO: 26400 - RNA, 24 nt, Human
cauucgagggccggggucgcggcc

SEQ ID NO: 26401 - RNA, 21 nt, Human
cgugcagcuaagggggcccgg

SEQ ID NO: 26402 - RNA, 24 nt, Human
ucacguggugagccaaucauacca

SEQ ID NO: 26403 - RNA, 24 nt, Human
caggguggccgugagccgcaccca

SEQ ID NO: 26404 - RNA, 24 nt, Human
ucuacaguuuaaugguuuuuuuga

SEQ ID NO: 26405 - RNA, 24 nt, Human
ugauaaaagacaauaauuaaauac

SEQ ID NO: 26406 - RNA, 20 nt, Human
cacuggaaggaacgcccgca

SEQ ID NO: 26407 - RNA, 20 nt, Human
uagcaagcgggggguaaggc

SEQ ID NO: 26408 - RNA, 24 nt, Human
aaauguacccaguauuccuaggua

SEQ ID NO: 26409 - RNA, 23 nt, Human
cuccaggggcgugacaacgucca

SEQ ID NO: 26410 - RNA, 24 nt, Human
aauugcucgacacaaccugcagaa

SEQ ID NO: 26411 - RNA, 24 nt, Human
agcgggugaagcuaucaagcccag

SEQ ID NO: 26412 - RNA, 24 nt, Human
acgagauuuggucguaguggggcg

SEQ ID NO: 26413 - RNA, 24 nt, Human
ucacugccaccagaagacugugga

SEQ ID NO: 26414 - RNA, 21 nt, Human
uaccugggguaagaugccagg

SEQ ID NO: 26415 - RNA, 18 nt, Human
gacccggggucuucaagc

SEQ ID NO: 26416 - RNA, 24 nt, Human
ugucucaggcccagugccccggag

SEQ ID NO: 26417 - RNA, 24 nt, Human
gagcagucuaaccccuaugccugu

SEQ ID NO: 26418 - RNA, 24 nt, Human
ugggauaaccauugcccuacugga

SEQ ID NO: 26419 - RNA, 24 nt, Human
gacaccuuccggcuucuggggucc

SEQ ID NO: 26420 - RNA, 24 nt, Human
uagugggcaccuuuauuuuuagau

SEQ ID NO: 26421 - RNA, 24 nt, Human
ugacucagugcucaggaucuuaug

SEQ ID NO: 26422 - RNA, 24 nt, Human
cagcugccacaggccuggaggagu

SEQ ID NO: 26423 - RNA, 24 nt, Human
agcacugaccgaccauugccauuu

SEQ ID NO: 26424 - RNA, 24 nt, Human
uucacuuuaccuucugccaaaugc

SEQ ID NO: 26425 - RNA, 17 nt, Human
ucugacccagugugcgc

SEQ ID NO: 26426 - RNA, 24 nt, Human
ugagagaagcagcugggggcccuc

SEQ ID NO: 26427 - RNA, 24 nt, Human
aagggccuguaccaaggcuuuaac

SEQ ID NO: 26428 - RNA, 24 nt, Human
ugcaggguauuaucaucuaccgag

SEQ ID NO: 26429 - RNA, 24 nt, Human
uuagaauuuggggggaaaauuugg

SEQ ID NO: 26430 - RNA, 21 nt, Human
aagugcugucuccauggucgg

SEQ ID NO: 26431 - RNA, 24 nt, Human
ucucuuggcacuucaaggguuguu

SEQ ID NO: 26432 - RNA, 24 nt, Human
accaagaucuuccacccgaacgug

SEQ ID NO: 26433 - RNA, 24 nt, Human
aagcuccucccgagcugggccccg

SEQ ID NO: 26434 - RNA, 24 nt, Human
uucuucacgggcagcaagcuggug

SEQ ID NO: 26435 - RNA, 24 nt, Human
ccggaccccaccucuucccugccg

SEQ ID NO: 26436 - RNA, 24 nt, Human
ccaaaguuugccggcugcaaguga

SEQ ID NO: 26437 - RNA, 24 nt, Human
uugaauauuuaucuagagaauaca

SEQ ID NO: 26438 - RNA, 24 nt, Human
uauguacccacuuagucauguaag

SEQ ID NO: 26439 - RNA, 24 nt, Human
cagggacaaauggauagagaagaa

SEQ ID NO: 26440 - RNA, 24 nt, Human
uggcuucgugcuugggguagaucu

SEQ ID NO: 26441 - RNA, 24 nt, Human
uucauuggcaguauuuugugauga

SEQ ID NO: 26442 - RNA, 22 nt, Human
ucagaacauucugaacugcuga

SEQ ID NO: 26443 - RNA, 24 nt, Human
ugaaugacaacuuuauuuuucuua

SEQ ID NO: 26444 - RNA, 19 nt, Human
caucacgcuucccuucugg

SEQ ID NO: 26445 - RNA, 22 nt, Human
ugaaaagguggucuauguuggc

SEQ ID NO: 26446 - RNA, 24 nt, Human
uggcaaacugguacuuugggaacu

SEQ ID NO: 26447 - RNA, 24 nt, Human
cacuggaucacaaguucguuuggu

SEQ ID NO: 26448 - RNA, 24 nt, Human
aaaguuaggcaggaaaaaggaaag

SEQ ID NO: 26449 - RNA, 24 nt, Human
ccuguauuuuaaugagaaaaaaaa

SEQ ID NO: 26450 - RNA, 24 nt, Human
cacacuuuuaauaaugcuucauaa

SEQ ID NO: 26451 - RNA, 24 nt, Human
ugcauuguuaucauuaaccagucu

SEQ ID NO: 26452 - RNA, 24 nt, Human
uauuagggauaauauucauuuagc

SEQ ID NO: 26453 - RNA, 24 nt, Human
aaaguuaaagcgaugccauuaguu

SEQ ID NO: 26454 - RNA, 24 nt, Human
guggugcugccgcugcucccuggc

SEQ ID NO: 26455 - RNA, 17 nt, Human
uauguuaucaggcuaca

SEQ ID NO: 26456 - RNA, 24 nt, Human
uaaugggucucaaaauucugugac

SEQ ID NO: 26457 - RNA, 24 nt, Human
uauuagggauaauauucauuuagc

SEQ ID NO: 26458 - RNA, 24 nt, Human
uaucaaggaagggcaggcgugaug

SEQ ID NO: 26459 - RNA, 24 nt, Human
uucaaauuucuuucuuuuuuaauu

SEQ ID NO: 26460 - RNA, 24 nt, Human
ucaauuuuuauuuugguuuucuua

SEQ ID NO: 26461 - RNA, 24 nt, Human
agaguuguucauccagggagacag

SEQ ID NO: 26462 - RNA, 24 nt, Human
ggccugggcacccuuagaggggag

SEQ ID NO: 26463 - RNA, 24 nt, Human
agcuacugggugagcuggacuacc

SEQ ID NO: 26464 - RNA, 24 nt, Human
auugugcuuguuucaaaaugcuuu

SEQ ID NO: 26465 - RNA, 24 nt, Human
ccacugcacuacagccugggcaac

SEQ ID NO: 26466 - RNA, 24 nt, Human
uaaguugcauacuuuuuacuuuuu

SEQ ID NO: 26467 - RNA, 24 nt, Human
aggcagccgcaccauggagucuuc

SEQ ID NO: 26468 - RNA, 24 nt, Human
ugagucacaaacugcgucuuggag

SEQ ID NO: 26469 - RNA, 24 nt, Human
ugaaaugcuacacaccucuugucu

SEQ ID NO: 26470 - RNA, 24 nt, Human
gaccuggcaacuaauaggacuaga

SEQ ID NO: 26471 - RNA, 24 nt, Human
uacccuggaccaaguuggcuacaa

SEQ ID NO: 26472 - RNA, 24 nt, Human
gcccugauaaugcguugaaagcua

SEQ ID NO: 26473 - RNA, 24 nt, Human
ccagaaaguagucgcagugaagcc

SEQ ID NO: 26474 - RNA, 24 nt, Human
ccaaaguuugccggcugcaaguga

SEQ ID NO: 26475 - RNA, 24 nt, Human
cucgucccggccccugcaguccgg

SEQ ID NO: 26476 - RNA, 24 nt, Human
ucagaugcuccugguguugcuggu

SEQ ID NO: 26477 - RNA, 22 nt, Human
cugcaccugcgacugucgccgc

SEQ ID NO: 26478 - RNA, 24 nt, Human
ccucaaugauguuugcaaaggagc

SEQ ID NO: 26479 - RNA, 24 nt, Human
uuccuugagcacaggaguuccaga

SEQ ID NO: 26480 - RNA, 24 nt, Human
ccucuccgguguggggcgcccgcg

SEQ ID NO: 26481 - RNA, 24 nt, Human
agccauagcuacgugcguucgcua

SEQ ID NO: 26482 - RNA, 24 nt, Human
gaggagucacccaggagucauuug

SEQ ID NO: 26483 - RNA, 24 nt, Human
aggaaggagauauagugaagagga

SEQ ID NO: 26484 - RNA, 24 nt, Human
auuugcucucuucccauuucugau

SEQ ID NO: 26485 - RNA, 24 nt, Human
uuccaaggcccccagugaacuccu

SEQ ID NO: 26486 - RNA, 24 nt, Human
gauccaaucagaugcagagaaugu

SEQ ID NO: 26487 - RNA, 24 nt, Human
aaugguacagcaguuacaagagga

SEQ ID NO: 26488 - RNA, 24 nt, Human
uauuagaguauagacuacaaggag

SEQ ID NO: 26489 - RNA, 24 nt, Human
uucauauagguaaauuccauaggu

SEQ ID NO: 26490 - RNA, 24 nt, Human
gguucagacaaguaauuucacauu

SEQ ID NO: 26491 - RNA, 24 nt, Human
uuaauaggaaaaagcauauaauac

SEQ ID NO: 26492 - RNA, 24 nt, Human
caccacagccauugcugaggccug

SEQ ID NO: 26493 - RNA, 24 nt, Human
uucgauuugauacuuaaacuugag

SEQ ID NO: 26494 - RNA, 21 nt, Human
ucagaauaaagacaucagcca

SEQ ID NO: 26495 - RNA, 24 nt, Human
gcuuugguucaaaaggaaacacua

SEQ ID NO: 26496 - RNA, 24 nt, Human
uguaguuuuuacccagguucuauc

SEQ ID NO: 26497 - RNA, 24 nt, Human
uuagugaacacucugggcccccua

SEQ ID NO: 26498 - RNA, 24 nt, Human
uuacugagaauaaaacuguuacag

SEQ ID NO: 26499 - RNA, 17 nt, Human
uacucuggggaggaacc

SEQ ID NO: 26500 - RNA, 24 nt, Human
uuggugauggagccuguggaaacg

SEQ ID NO: 26501 - RNA, 24 nt, Human
augucucugccaagucgacaaaca

SEQ ID NO: 26502 - RNA, 24 nt, Human
uaucucagaugccacaagaagagc

SEQ ID NO: 26503 - RNA, 24 nt, Human
uuucauggcccuuucaacguccug

SEQ ID NO: 26504 - RNA, 24 nt, Human
gggaagacugaagaaguguuaacu

SEQ ID NO: 26505 - RNA, 24 nt, Human
uuuguacacauuaagcucuuuaga

SEQ ID NO: 26506 - RNA, 24 nt, Human
uuacaugcuuugagguuggguaug

SEQ ID NO: 26507 - RNA, 24 nt, Human
uuuuaaaacuucucauacugaaaa

SEQ ID NO: 26508 - RNA, 24 nt, Human
uugaucuugaagaaacugggcgug

SEQ ID NO: 26509 - RNA, 24 nt, Human
aggaaggagauauagugaagagga

SEQ ID NO: 26510 - RNA, 24 nt, Human
uugguuccaagacgcguaggcgag

SEQ ID NO: 26511 - RNA, 24 nt, Human
ugugcagaagaaauggaaggauuc

SEQ ID NO: 26512 - RNA, 24 nt, Human
uucaaauuucuuucuuuuuuaauu

SEQ ID NO: 26513 - RNA, 24 nt, Human
uaaggaaauguugagggcaagcca

SEQ ID NO: 26514 - RNA, 24 nt, Human
uagaaguaguauguuauuccuggu

SEQ ID NO: 26515 - RNA, 22 nt, Human
cuacuggauaucugacuggagc

SEQ ID NO: 26516 - RNA, 24 nt, Human
aagcagguuagcgugaagguggua

SEQ ID NO: 26517 - RNA, 24 nt, Human
ucagugcacacacugauuuuucac

SEQ ID NO: 26518 - RNA, 21 nt, Human
uugaaacugaaguaggccuac

SEQ ID NO: 26519 - RNA, 24 nt, Human
gagacuuuuuccauucccucacgg

SEQ ID NO: 26520 - RNA, 24 nt, Human
ugaguuuaauuuaauauguaauac

SEQ ID NO: 26521 - RNA, 24 nt, Human
uaagguaguacuuuucuuuuuaua

SEQ ID NO: 26522 - RNA, 24 nt, Human
uguaaagaugcuuuuucucaugca

SEQ ID NO: 26523 - RNA, 24 nt, Human
uugguacaggcaggaucuugccac

SEQ ID NO: 26524 - RNA, 24 nt, Human
uggggcccaagugauccuccuacc

SEQ ID NO: 26525 - RNA, 24 nt, Human
ggacagguguacagacauguucuu

SEQ ID NO: 26526 - RNA, 24 nt, Human
ucgaauggacacauuaccagugaa

SEQ ID NO: 26527 - RNA, 24 nt, Human
cugccagucggugccccucccgcu

SEQ ID NO: 26528 - RNA, 24 nt, Human
ugagaaaugugacagaggcauuua

SEQ ID NO: 26529 - RNA, 24 nt, Human
ucuaaaaacuugauaaaaugaaau

SEQ ID NO: 26530 - RNA, 24 nt, Human
uacccuucaugcaugaaagacaaa

SEQ ID NO: 26531 - RNA, 24 nt, Human
caaguucggaccucuaguacaaua

SEQ ID NO: 26532 - RNA, 24 nt, Human
ugucugggaaagauaucggugaga

SEQ ID NO: 26533 - RNA, 23 nt, Human
uaucagguccaaacucugccagg

SEQ ID NO: 26534 - RNA, 24 nt, Human
gaggaugcccauguggagcacaga

SEQ ID NO: 26535 - RNA, 24 nt, Human
ucacagagucuguccggagcccac

SEQ ID NO: 26536 - RNA, 24 nt, Human
ucccugcaggugucuugccccuau

SEQ ID NO: 26537 - RNA, 24 nt, Human
aggugguugcuuugaacuuuauuu

SEQ ID NO: 26538 - RNA, 21 nt, Human
caucggauuuugcagcuucug

SEQ ID NO: 26539 - RNA, 24 nt, Human
ugaucucguuggacugcguggcua

SEQ ID NO: 26540 - RNA, 24 nt, Human
ggcgaagugguugacauccaggga

SEQ ID NO: 26541 - RNA, 24 nt, Human
cgagugugccagagucuccagaau

SEQ ID NO: 26542 - RNA, 20 nt, Human
uauaguguggaucaggaaaa

SEQ ID NO: 26543 - RNA, 24 nt, Human
uagguggggugaucagauaggccg

SEQ ID NO: 26544 - RNA, 19 nt, Human
uuaacaagaaagguaaucu

SEQ ID NO: 26545 - RNA, 24 nt, Human
aaccagcuucgaggcaagaagucc

SEQ ID NO: 26546 - RNA, 24 nt, Human
ugacuggucugcgccgucaacugg

SEQ ID NO: 26547 - RNA, 24 nt, Human
ugugucaacuguguccagggugug

SEQ ID NO: 26548 - RNA, 24 nt, Human
ucaagaaggagucuuugacauuaa

SEQ ID NO: 26549 - RNA, 24 nt, Human
uacaguuuacagacaagagguuuc

SEQ ID NO: 26550 - RNA, 24 nt, Human
caaggaacacaaaagacucaaaca

SEQ ID NO: 26551 - RNA, 24 nt, Human
uuccagugcauuaugaugagcccg

SEQ ID NO: 26552 - RNA, 24 nt, Human
ugcgcaugagacccuggcuagaga

SEQ ID NO: 26553 - RNA, 22 nt, Human
aagaaucugggacuaccaagug

SEQ ID NO: 26554 - RNA, 24 nt, Human
uggcacagaaucugggaauuugua

SEQ ID NO: 26555 - RNA, 24 nt, Human
uaugagaagauauuuacacuuuua

SEQ ID NO: 26556 - RNA, 20 nt, Human
uggccggaagcugggcgggu

SEQ ID NO: 26557 - RNA, 24 nt, Human
cgaguacaagccccaggaugcuac

SEQ ID NO: 26558 - RNA, 24 nt, Human
ucaguaaacaagugcugaaaaaga

SEQ ID NO: 26559 - RNA, 18 nt, Human
uaggacgucuuccucucc

SEQ ID NO: 26560 - RNA, 24 nt, Human
uguggaagguaucguccccagcgc

SEQ ID NO: 26561 - RNA, 24 nt, Human
uguuauggccgcgccaccgggcgu

SEQ ID NO: 26562 - RNA, 24 nt, Human
ugaaauggcugcaccaugucggcc

SEQ ID NO: 26563 - RNA, 24 nt, Human
ugcccacucccacauccggggacu

SEQ ID NO: 26564 - RNA, 24 nt, Human
caagcccaguaagaggucugaccg

SEQ ID NO: 26565 - RNA, 24 nt, Human
uacaacccacauauugggggcuac

SEQ ID NO: 26566 - RNA, 24 nt, Human
uagaucauuagcucagugaccucc

SEQ ID NO: 26567 - RNA, 24 nt, Human
ucccugcugggcugcugugcagag

SEQ ID NO: 26568 - RNA, 24 nt, Human
uauggaacccaccacaaccccaca

SEQ ID NO: 26569 - RNA, 22 nt, Human
ugccuggauuuuugugcugcag

SEQ ID NO: 26570 - RNA, 24 nt, Human
ugcuguagcuuuucugagugccuc

SEQ ID NO: 26571 - RNA, 24 nt, Human
acugguucaccuacaaugagacaa

SEQ ID NO: 26572 - RNA, 24 nt, Human
agccauugggauccagacaucaga

SEQ ID NO: 26573 - RNA, 24 nt, Human
uuuggaggaguugaugagaaagga

SEQ ID NO: 26574 - RNA, 24 nt, Human
gucacuuguggggcagaccgcaau

SEQ ID NO: 26575 - RNA, 24 nt, Human
ugccuuagcguuuguggacacuuc

SEQ ID NO: 26576 - RNA, 21 nt, Human
uugaacucaucaagauguucg

SEQ ID NO: 26577 - RNA, 24 nt, Human
uucccgcgcugagcuacaggacuc

SEQ ID NO: 26578 - RNA, 24 nt, Human
uagggcauuauuaugcgagaauuu

SEQ ID NO: 26579 - RNA, 24 nt, Human
agggggaggaggggaagugaggcc

SEQ ID NO: 26580 - RNA, 24 nt, Human
uaccccaaugcuauucucgugaua

SEQ ID NO: 26581 - RNA, 24 nt, Human
uuggugcacgacuggcgaaggggg

SEQ ID NO: 26582 - RNA, 24 nt, Human
caccauaggccagaauugggccca

SEQ ID NO: 26583 - RNA, 23 nt, Human
cagcggggcagcuugucucccuu

SEQ ID NO: 26584 - RNA, 24 nt, Human
uggcuacgcccucaaucccugacc

SEQ ID NO: 26585 - RNA, 24 nt, Human
uugaaaaugcuugcaguuugaccu

SEQ ID NO: 26586 - RNA, 24 nt, Human
uccgcacacuugaggaguuacuga

SEQ ID NO: 26587 - RNA, 24 nt, Human
gcccaaauccaaaaaccuucagcc

SEQ ID NO: 26588 - RNA, 24 nt, Human
ugagggcgacguguccucugaacg

SEQ ID NO: 26589 - RNA, 24 nt, Human
uggcaaguuuggggccuacaugca

SEQ ID NO: 26590 - RNA, 24 nt, Human
uggaagagggacuccaaugggcau

SEQ ID NO: 26591 - RNA, 24 nt, Human
aagcagaaagggaagagaagcgag

SEQ ID NO: 26592 - RNA, 24 nt, Human
uucccaugccccaggcuccugcag

SEQ ID NO: 26593 - RNA, 24 nt, Human
agagguacuguugcagccgcugca

SEQ ID NO: 26594 - RNA, 24 nt, Human
agggguggggcugacgucaggagc

SEQ ID NO: 26595 - RNA, 24 nt, Human
ucugcaguccauagaagagcguga

SEQ ID NO: 26596 - RNA, 24 nt, Human
gggcucugugguuccuggcgucuc

SEQ ID NO: 26597 - RNA, 24 nt, Human
uaaucuuaucagaaaaaaacgaca

SEQ ID NO: 26598 - RNA, 24 nt, Human
uccaaacccgaaacacgcgaccag

SEQ ID NO: 26599 - RNA, 24 nt, Human
gacuccuuaggaggagugagacag

SEQ ID NO: 26600 - RNA, 24 nt, Human
ucuuaaguaauugguuaguuaaca

SEQ ID NO: 26601 - RNA, 21 nt, Human
uugcagguggguaguggguca

SEQ ID NO: 26602 - RNA, 24 nt, Human
acgcauagccaaggggaagcgcga

SEQ ID NO: 26603 - RNA, 24 nt, Human
uagaauuucggcguuuugcugcaa

SEQ ID NO: 26604 - RNA, 17 nt, Human
uauccuaggugguugcc

SEQ ID NO: 26605 - RNA, 24 nt, Human
uuggacggaacagauccggggacu

SEQ ID NO: 26606 - RNA, 24 nt, Human
cggcacgaggcugcgaaccacgug

SEQ ID NO: 26607 - RNA, 24 nt, Human
uuggcacaguugaugcugacuuuu

SEQ ID NO: 26608 - RNA, 24 nt, Human
gcucauuugcaggggggagccaaa

SEQ ID NO: 26609 - RNA, 24 nt, Human
cuggcgcugaguacgucguggagu

SEQ ID NO: 26610 - RNA, 24 nt, Human
uaaaguggauauuguugccaucaa

SEQ ID NO: 26611 - RNA, 24 nt, Human
ugagaacgggaagcuugucaucaa

SEQ ID NO: 26612 - RNA, 24 nt, Human
acucaaggccgaccggcggaauag

SEQ ID NO: 26613 - RNA, 24 nt, Human
ugaacaucuccuucccagccacug

SEQ ID NO: 26614 - RNA, 24 nt, Human
gggaagggcugucaacaaugagcc

SEQ ID NO: 26615 - RNA, 24 nt, Human
uucgugagugcuggcgucccgggu

SEQ ID NO: 26616 - RNA, 24 nt, Human
caagaugaccucacuaaccagugg

SEQ ID NO: 26617 - RNA, 24 nt, Human
ugaguggaaucucuaagugcuuug

SEQ ID NO: 26618 - RNA, 24 nt, Human
acaaugacuuuuguaaggauuggu

SEQ ID NO: 26619 - RNA, 24 nt, Human
aagcuuuuuuuuaacaggaaaaga

SEQ ID NO: 26620 - RNA, 24 nt, Human
uaaaaucuacaaaucagcccucga

SEQ ID NO: 26621 - RNA, 24 nt, Human
agccaauggucgagcagauccagu

SEQ ID NO: 26622 - RNA, 24 nt, Human
uaaggucaucgauacggagcagga

SEQ ID NO: 26623 - RNA, 24 nt, Human
ugccuuaaacugggccugaagacg

SEQ ID NO: 26624 - RNA, 24 nt, Human
ugccacuggccuugccuuuggcac

SEQ ID NO: 26625 - RNA, 24 nt, Human
cuuggccuuggccuuggccuuggc

SEQ ID NO: 26626 - RNA, 24 nt, Human
cauuguuggccugcaucuucuuua

SEQ ID NO: 26627 - RNA, 24 nt, Human
gcaaagauugccuuguccccaaga

SEQ ID NO: 26628 - RNA, 24 nt, Human
ugugcaauccucuugggguuggug

SEQ ID NO: 26629 - RNA, 24 nt, Human
uccucagucuccccagagcggugg

SEQ ID NO: 26630 - RNA, 24 nt, Human
ucugcugguaucagaagccgggcg

SEQ ID NO: 26631 - RNA, 24 nt, Human
ugguguguggaacugcugcaagcu

SEQ ID NO: 26632 - RNA, 24 nt, Human
agaguuccuaucagacugagauug

SEQ ID NO: 26633 - RNA, 24 nt, Human
uaacuuuauuuuaagcuucuauua

SEQ ID NO: 26634 - RNA, 24 nt, Human
cgagcagauggccagccacagcgc

SEQ ID NO: 26635 - RNA, 24 nt, Human
agacaugcgggucgcccauacccg

SEQ ID NO: 26636 - RNA, 24 nt, Human
ugcuggggacgacgcuccccgagc

SEQ ID NO: 26637 - RNA, 24 nt, Human
ggggauggcccccgccgaauucuc

SEQ ID NO: 26638 - RNA, 22 nt, Human
ucaguauuucugauugucuaua

SEQ ID NO: 26639 - RNA, 24 nt, Human
ggacagguguacagacauguucuu

SEQ ID NO: 26640 - RNA, 24 nt, Human
ucgaauggacacauuaccagugaa

SEQ ID NO: 26641 - RNA, 24 nt, Human
gcccugugccuuccugaagugcug

SEQ ID NO: 26642 - RNA, 24 nt, Human
uguguccucgccaacccccgaccu

SEQ ID NO: 26643 - RNA, 24 nt, Human
cggaaugggccaacucacucggug

SEQ ID NO: 26644 - RNA, 24 nt, Human
ugugguuuuagcaccuuggggaga

SEQ ID NO: 26645 - RNA, 24 nt, Human
uuggagaaccuguucugacuuuag

SEQ ID NO: 26646 - RNA, 24 nt, Human
uggguuaggguguguguucaccuu

SEQ ID NO: 26647 - RNA, 24 nt, Human
aggccugaggcggggguggacugc

SEQ ID NO: 26648 - RNA, 24 nt, Human
ugcaaggaggggaucaaggacggu

SEQ ID NO: 26649 - RNA, 24 nt, Human
cgcgcgggguuggcugccuauuuu

SEQ ID NO: 26650 - RNA, 24 nt, Human
ucugucucauacuuuggcguugua

SEQ ID NO: 26651 - RNA, 24 nt, Human
ugaauccaugucuuaaccagcagg

SEQ ID NO: 26652 - RNA, 24 nt, Human
ugacuugaauccaaaguguauaca

SEQ ID NO: 26653 - RNA, 24 nt, Human
aaagguccugguucacccuggaga

SEQ ID NO: 26654 - RNA, 24 nt, Human
uugccuggcuccuggcacuugacu

SEQ ID NO: 26655 - RNA, 24 nt, Human
guccagaagcuggcccuguacgag

SEQ ID NO: 26656 - RNA, 24 nt, Human
uaugaacauugaacaaccucucac

SEQ ID NO: 26657 - RNA, 24 nt, Human
uucccuuucacuaagaacacacgg

SEQ ID NO: 26658 - RNA, 24 nt, Human
uacaagcaauaguuauggggaucu

SEQ ID NO: 26659 - RNA, 24 nt, Human
aauuguugggggcuucaggggucc

SEQ ID NO: 26660 - RNA, 18 nt, Human
ugaugguagagacagacu

SEQ ID NO: 26661 - RNA, 20 nt, Human
caccugguuuguccuaaggc

SEQ ID NO: 26662 - RNA, 24 nt, Human
ucgggccccuccaucguccaccgc

SEQ ID NO: 26663 - RNA, 24 nt, Human
ugcagaaggagaucaccgcccugg

SEQ ID NO: 26664 - RNA, 24 nt, Human
uggaaucuugcggcauccacgaga

SEQ ID NO: 26665 - RNA, 24 nt, Human
uccggacauuuaaaauauugauau

SEQ ID NO: 26666 - RNA, 24 nt, Human
ugggacccuccgaaauaacgccgg

SEQ ID NO: 26667 - RNA, 24 nt, Human
gagcaggggugggcggaggucacc

SEQ ID NO: 26668 - RNA, 24 nt, Human
uaauacgagagguaaucagauggu

SEQ ID NO: 26669 - RNA, 24 nt, Human
ucugaucuauaaaugcgguggcau

SEQ ID NO: 26670 - RNA, 24 nt, Human
uauuggacaaauuugguggggagc

SEQ ID NO: 26671 - RNA, 24 nt, Human
uguuuuguuuaucuuucucuuuca

SEQ ID NO: 26672 - RNA, 21 nt, Human
uucaagggauggaaagucacc

SEQ ID NO: 26673 - RNA, 24 nt, Human
ugccaagacugugccgcccccaca

SEQ ID NO: 26674 - RNA, 24 nt, Human
uagccaagcuacaggaagcaguag

SEQ ID NO: 26675 - RNA, 24 nt, Human
uaggauaggugaaaauggugaucc

SEQ ID NO: 26676 - RNA, 24 nt, Human
ucugaucuauaaaugcgguggcau

SEQ ID NO: 26677 - RNA, 21 nt, Human
uucaagggauggaaagucacc

SEQ ID NO: 26678 - RNA, 24 nt, Human
uccaccacuacuggccaucugauc

SEQ ID NO: 26679 - RNA, 21 nt, Human
uucaagggauggaaagucacc

SEQ ID NO: 26680 - RNA, 21 nt, Human
uucaagggauggaaagucacc

SEQ ID NO: 26681 - RNA, 24 nt, Human
ugccgggucccagccccaagccag

SEQ ID NO: 26682 - RNA, 24 nt, Human
cggcuucaucggccucugcuggcu

SEQ ID NO: 26683 - RNA, 24 nt, Human
acgcugagugaccugcucacgggc

SEQ ID NO: 26684 - RNA, 24 nt, Human
ucgguggccgccagcugccuggug

SEQ ID NO: 26685 - RNA, 24 nt, Human
gugguuccuacgggagggccugcu

SEQ ID NO: 26686 - RNA, 24 nt, Human
cuugcggaccuuccucgagcgcca

SEQ ID NO: 26687 - RNA, 24 nt, Human
ugauuugauccuggaaguaacugc

SEQ ID NO: 26688 - RNA, 24 nt, Human
ccagcccgccggcccugagcuccg

SEQ ID NO: 26689 - RNA, 20 nt, Human
uggaacuguccaagucucag

SEQ ID NO: 26690 - RNA, 24 nt, Human
accccaguaaaacccgcgggguga

SEQ ID NO: 26691 - RNA, 24 nt, Human
ugacagccaacaggguuaugauac

SEQ ID NO: 26692 - RNA, 18 nt, Human
uccccgggggggcccgcc

SEQ ID NO: 26693 - RNA, 24 nt, Human
cguggcgaaaaaagaugccacucc

SEQ ID NO: 26694 - RNA, 24 nt, Human
ugucggggaugcugcugggaaagu

SEQ ID NO: 26695 - RNA, 24 nt, Human
cuugcgcccguggaggaacgcugc

SEQ ID NO: 26696 - RNA, 24 nt, Human
aggaaucuuuaauuuaucaacacc

SEQ ID NO: 26697 - RNA, 24 nt, Human
cugcggccgaugagaagaagaagg

SEQ ID NO: 26698 - RNA, 24 nt, Human
agacaccaacgggucccaguucuu

SEQ ID NO: 26699 - RNA, 24 nt, Human
aggguuccuguccaguuucccccu

SEQ ID NO: 26700 - RNA, 24 nt, Human
uguuacagcuguugucggacuggc

SEQ ID NO: 26701 - RNA, 24 nt, Human
uaccaggccccguccccucccccg

SEQ ID NO: 26702 - RNA, 24 nt, Human
uuucuggauccuuggagcuuagcu

SEQ ID NO: 26703 - RNA, 24 nt, Human
ugugagcaagguuugcuguccaag

SEQ ID NO: 26704 - RNA, 21 nt, Human
uucaagggauggaaagucacc

SEQ ID NO: 26705 - RNA, 24 nt, Human
uugaauccuuaugaacggaguuaa

SEQ ID NO: 26706 - RNA, 24 nt, Human
uucaagaaaauauugccuauggcc

SEQ ID NO: 26707 - RNA, 24 nt, Human
gaagcccauugaaaaauuugagaa

SEQ ID NO: 26708 - RNA, 22 nt, Human
uggcaagugggaauggccgaug

SEQ ID NO: 26709 - RNA, 22 nt, Human
gguagagagagaaagguggagc

SEQ ID NO: 26710 - RNA, 24 nt, Human
acuuuguggagugccugaugugca

SEQ ID NO: 26711 - RNA, 24 nt, Human
aaggcacaccgagcaugugguucg

SEQ ID NO: 26712 - RNA, 19 nt, Human
ucagaagaugacuauucau

SEQ ID NO: 26713 - RNA, 24 nt, Human
uguuguuuugguccugauaagaag

SEQ ID NO: 26714 - RNA, 24 nt, Human
ggacauggucugggacuucuggag

SEQ ID NO: 26715 - RNA, 24 nt, Human
agggaucccauauuguuuccaucu

SEQ ID NO: 26716 - RNA, 24 nt, Human
acgagccgaggccuccugcagugu

SEQ ID NO: 26717 - RNA, 24 nt, Human
ucucacgccgcggccucacccggc

SEQ ID NO: 26718 - RNA, 24 nt, Human
uucagccugcaggaccucugcugc

SEQ ID NO: 26719 - RNA, 24 nt, Human
cuggaucaaggagaucgaugagca

SEQ ID NO: 26720 - RNA, 24 nt, Human
ccacugccgacaucugcgccccgc

SEQ ID NO: 26721 - RNA, 24 nt, Human
ugggauuacaggcaugagccacug

SEQ ID NO: 26722 - RNA, 24 nt, Human
uagcaggugcaaacuucauucaaa

SEQ ID NO: 26723 - RNA, 24 nt, Human
aaggacaucgcauguuuaaaaugu

SEQ ID NO: 26724 - RNA, 24 nt, Human
ccccgggggggggggggggggugu

SEQ ID NO: 26725 - RNA, 18 nt, Human
uccacagguguaaacguc

SEQ ID NO: 26726 - RNA, 24 nt, Human
uaagcaugauucucuguggagacu

SEQ ID NO: 26727 - RNA, 21 nt, Human
uuuaaauuuguuuuauuuucc

SEQ ID NO: 26728 - RNA, 24 nt, Human
uuaauugugaauacaugcuguuac

SEQ ID NO: 26729 - RNA, 24 nt, Human
uuucugaucgauauuuuuguguaa

SEQ ID NO: 26730 - RNA, 24 nt, Human
uguuguggugauggaggggggcug

SEQ ID NO: 26731 - RNA, 19 nt, Human
caagggguuggcugguguc

SEQ ID NO: 26732 - RNA, 20 nt, Human
uagcguguauagugcaucuc

SEQ ID NO: 26733 - RNA, 22 nt, Human
uagaaggagccuggacucugau

SEQ ID NO: 26734 - RNA, 24 nt, Human
uuucagaagagucagaugggcuuc

SEQ ID NO: 26735 - RNA, 24 nt, Human
uaguaaccaucagcuuguggccaa

SEQ ID NO: 26736 - RNA, 24 nt, Human
ugcauguaacaagucuuuuuuaca

SEQ ID NO: 26737 - RNA, 24 nt, Human
uaucugcuuuuuuuuauuuugcaa

SEQ ID NO: 26738 - RNA, 24 nt, Human
uuuuauggacaggcaauuuaguca

SEQ ID NO: 26739 - RNA, 24 nt, Human
cauuuuuuguauucuuuaagauuu

SEQ ID NO: 26740 - RNA, 24 nt, Human
uaaggcucuucauuuccccuggag

SEQ ID NO: 26741 - RNA, 24 nt, Human
uagcccaagcccugaagucacugc

SEQ ID NO: 26742 - RNA, 24 nt, Human
uggcaaaauucuacugaagacaca

SEQ ID NO: 26743 - RNA, 24 nt, Human
ucuaagcuauuuacuuauucuagu

SEQ ID NO: 26744 - RNA, 24 nt, Human
uggcaaugugcucccuguggcaac

SEQ ID NO: 26745 - RNA, 24 nt, Human
ucccucacacuucuccgccgccua

SEQ ID NO: 26746 - RNA, 24 nt, Human
uguucuggagcuguuggacaaaua

SEQ ID NO: 26747 - RNA, 24 nt, Human
uaccaggaagcauuugaaauuagu

SEQ ID NO: 26748 - RNA, 24 nt, Human
aaccagaaaguaagguguucuacu

SEQ ID NO: 26749 - RNA, 24 nt, Human
ucugucccuaaagaacugguggca

SEQ ID NO: 26750 - RNA, 24 nt, Human
ucccccagagccaugcccgagaua

SEQ ID NO: 26751 - RNA, 24 nt, Human
ucagugccaggccauccacugcag

SEQ ID NO: 26752 - RNA, 24 nt, Human
agggugcuugggcugguaucuggc

SEQ ID NO: 26753 - RNA, 24 nt, Human
uaguacacuccauuccuggggaag

SEQ ID NO: 26754 - RNA, 21 nt, Human
ucugucaggcuuugggacuga

SEQ ID NO: 26755 - RNA, 24 nt, Human
uucacaguuccccgggcgccuuug

SEQ ID NO: 26756 - RNA, 24 nt, Human
aucaccguaacuucagaacaucag

SEQ ID NO: 26757 - RNA, 24 nt, Human
cuuugagucuuuacagaaaagccu

SEQ ID NO: 26758 - RNA, 24 nt, Human
acugcaagcuacaaagccaccaag

SEQ ID NO: 26759 - RNA, 24 nt, Human
ugggaugcauaaugccagcaaguu

SEQ ID NO: 26760 - RNA, 24 nt, Human
uuucuuguuuuuccuggucuugau

SEQ ID NO: 26761 - RNA, 24 nt, Human
uuuuucaaauuauagaaguuguag

SEQ ID NO: 26762 - RNA, 24 nt, Human
gucacagucuuucccuuacucccu

SEQ ID NO: 26763 - RNA, 24 nt, Human
ugacagcugguagaggcagacauc

SEQ ID NO: 26764 - RNA, 24 nt, Human
aagacuuuuauuuguccagaugac

SEQ ID NO: 26765 - RNA, 24 nt, Human
aggugaugaugggcagccuggugu

SEQ ID NO: 26766 - RNA, 24 nt, Human
aagcugcaccgacugcacuucauc

SEQ ID NO: 26767 - RNA, 24 nt, Human
ucagucaaacuaagcagguacuca

SEQ ID NO: 26768 - RNA, 24 nt, Human
cagaacauaggccuccacaccaaa

SEQ ID NO: 26769 - RNA, 24 nt, Human
acccuguucaaucgccccagcagu

SEQ ID NO: 26770 - RNA, 24 nt, Human
cuggugcuagagggagaggaaacg

SEQ ID NO: 26771 - RNA, 24 nt, Human
cagccgcugccagcccugcuccug

SEQ ID NO: 26772 - RNA, 18 nt, Human
uauuauggagcugggcgu

SEQ ID NO: 26773 - RNA, 19 nt, Human
uaacucccugugucugcau

SEQ ID NO: 26774 - RNA, 23 nt, Human
ccuggcuucaggagggagcggag

SEQ ID NO: 26775 - RNA, 24 nt, Human
cacccauucccuggacagggcugu

SEQ ID NO: 26776 - RNA, 24 nt, Human
ucccugugccagcccccuugucgc

SEQ ID NO: 26777 - RNA, 24 nt, Human
ucacccaggauccaaagcuuuuca

SEQ ID NO: 26778 - RNA, 24 nt, Human
cacugggugggacgggguacugga

SEQ ID NO: 26779 - RNA, 24 nt, Human
ucgacaucugaguucucgcuggcu

SEQ ID NO: 26780 - RNA, 24 nt, Human
gagguuccuucacugugcgugcug

SEQ ID NO: 26781 - RNA, 24 nt, Human
uaucccaucacccuuuauuuggag

SEQ ID NO: 26782 - RNA, 24 nt, Human
uguggcacucucuguggucaucgc

SEQ ID NO: 26783 - RNA, 24 nt, Human
cagcggagcacggagaccgccuug

SEQ ID NO: 26784 - RNA, 24 nt, Human
uauggcaagucacuuugacagaca

SEQ ID NO: 26785 - RNA, 24 nt, Human
uacaccacucccaagaagaauaag

SEQ ID NO: 26786 - RNA, 24 nt, Human
auccaguugggcagcagggaaagg

SEQ ID NO: 26787 - RNA, 24 nt, Human
uuguuguuuguuuuguuuuuuuuu

SEQ ID NO: 26788 - RNA, 24 nt, Human
uccuaggagucugaaggccucgcu

SEQ ID NO: 26789 - RNA, 21 nt, Human
ugugaugagcaggaucagagu

SEQ ID NO: 26790 - RNA, 24 nt, Human
cagcacccacgaguuccugcauga

SEQ ID NO: 26791 - RNA, 24 nt, Human
acaggcuacaucuggauggggaca

SEQ ID NO: 26792 - RNA, 24 nt, Human
gggcagggccugaaguguuggggg

SEQ ID NO: 26793 - RNA, 24 nt, Human
ccugcagggcucggccguaggaga

SEQ ID NO: 26794 - RNA, 24 nt, Human
uuggugcuuuguggcucaccacag

SEQ ID NO: 26795 - RNA, 23 nt, Human
ucaagggucguguguuugaagug

SEQ ID NO: 26796 - RNA, 22 nt, Human
uuccauggucaaaaaauggcag

SEQ ID NO: 26797 - RNA, 24 nt, Human
agaggcuguccaggagcugcccag

SEQ ID NO: 26798 - RNA, 24 nt, Human
aggcggccaaaggcccuuccuguc

SEQ ID NO: 26799 - RNA, 21 nt, Human
uccccagguggccagggcgga

SEQ ID NO: 26800 - RNA, 24 nt, Human
ccugcagggcucggccguaggaga

SEQ ID NO: 26801 - RNA, 24 nt, Human
aaaggaacauaauaaaauggccca

SEQ ID NO: 26802 - RNA, 24 nt, Human
ugggucaucagcuacauauacauc

SEQ ID NO: 26803 - RNA, 23 nt, Human
uuuaacuuugcaaacccauuguc

SEQ ID NO: 26804 - RNA, 24 nt, Human
gcgcuuugagaggccauauacugu

SEQ ID NO: 26805 - RNA, 24 nt, Human
uuagaacaagcauuuaaaaaaaac

SEQ ID NO: 26806 - RNA, 20 nt, Human
uugggcucauuuggaaaucu

SEQ ID NO: 26807 - RNA, 24 nt, Human
ugucaagugcaguggauacgacag

SEQ ID NO: 26808 - RNA, 24 nt, Human
ugacgcgacuuuagggaaagaaac

SEQ ID NO: 26809 - RNA, 24 nt, Human
uaaugugcggacgccgggagcuuc

SEQ ID NO: 26810 - RNA, 24 nt, Human
gugaacgggcagcgacgagugcag

SEQ ID NO: 26811 - RNA, 24 nt, Human
uaucucuuuugcagaaguccaggu

SEQ ID NO: 26812 - RNA, 24 nt, Human
uggaaaagguuuuuaaacaccacu

SEQ ID NO: 26813 - RNA, 24 nt, Human
ggacagguguacagacauguucuu

SEQ ID NO: 26814 - RNA, 24 nt, Human
ucgaauggacacauuaccagugaa

SEQ ID NO: 26815 - RNA, 24 nt, Human
uugguuagaauaaguaaaauuuca

SEQ ID NO: 26816 - RNA, 24 nt, Human
ggguaugggauugaugagggcaug

SEQ ID NO: 26817 - RNA, 24 nt, Human
gugaauuuuugaaacuggacagag

SEQ ID NO: 26818 - RNA, 24 nt, Human
uuucauguuuagguuaacaggcac

SEQ ID NO: 26819 - RNA, 24 nt, Human
agggguuuauaucugaguauauca

SEQ ID NO: 26820 - RNA, 24 nt, Human
uauuuugguuuauuuuuucuucca

SEQ ID NO: 26821 - RNA, 24 nt, Human
caguuuauauucuuaauuccccau

SEQ ID NO: 26822 - RNA, 21 nt, Human
ugugacucaaaugaggggucc

SEQ ID NO: 26823 - RNA, 24 nt, Human
ugaauggacggguucaggccugau

SEQ ID NO: 26824 - RNA, 24 nt, Human
ugugcagaagaaauggaaggauuc

SEQ ID NO: 26825 - RNA, 24 nt, Human
uaucaaggaagggcaggcgugaug

SEQ ID NO: 26826 - RNA, 24 nt, Human
uucaaauuucuuucuuuuuuaauu

SEQ ID NO: 26827 - RNA, 24 nt, Human
ucaauuuuuauuuugguuuucuua

SEQ ID NO: 26828 - RNA, 24 nt, Human
caauuuguugaucucagggcacgu

SEQ ID NO: 26829 - RNA, 24 nt, Human
ccccugugcaccguggacguguga

SEQ ID NO: 26830 - RNA, 24 nt, Human
ugcaugugagggggaaugaggugu

SEQ ID NO: 26831 - RNA, 24 nt, Human
agaaaucucugcauccccagaacu

SEQ ID NO: 26832 - RNA, 24 nt, Human
cugacucaugaacagguggaggaa

SEQ ID NO: 26833 - RNA, 24 nt, Human
ugacagagaggaccagggugagaa

SEQ ID NO: 26834 - RNA, 24 nt, Human
ugaggaaacaugcucaguucaugc

SEQ ID NO: 26835 - RNA, 24 nt, Human
uuucucccuuuaauuauauuccgg

SEQ ID NO: 26836 - RNA, 22 nt, Human
ucaagguguuggcaacauguca

SEQ ID NO: 26837 - RNA, 24 nt, Human
guucaaggggauggaaagucaccg

SEQ ID NO: 26838 - RNA, 24 nt, Human
uauuagggauaauauucauuuagc

SEQ ID NO: 26839 - RNA, 24 nt, Human
uacuuugugauggaguacgugaau

SEQ ID NO: 26840 - RNA, 23 nt, Human
ugacccagcuccacuccugcuuc

SEQ ID NO: 26841 - RNA, 24 nt, Human
ugugaauaauuguauauaucucua

SEQ ID NO: 26842 - RNA, 24 nt, Human
ugccauggccaucuuuuucuuugu

SEQ ID NO: 26843 - RNA, 24 nt, Human
uggucugucgucggcaugauaggg

SEQ ID NO: 26844 - RNA, 24 nt, Human
uugaucuugaagaaacugggcgug

SEQ ID NO: 26845 - RNA, 24 nt, Human
uccgugcgcguugcugcggccgug

SEQ ID NO: 26846 - RNA, 24 nt, Human
guagaguuuucuucaggcuuaaag

SEQ ID NO: 26847 - RNA, 24 nt, Human
aggccgggccugggauagaagagu

SEQ ID NO: 26848 - RNA, 24 nt, Human
uugaagcuuuuacagcuggagacu

SEQ ID NO: 26849 - RNA, 24 nt, Human
uucauuggcaguauuuugugauga

SEQ ID NO: 26850 - RNA, 22 nt, Human
ucagaacauucugaacugcuga

SEQ ID NO: 26851 - RNA, 24 nt, Human
cagugcucuugacauuuuggacca

SEQ ID NO: 26852 - RNA, 24 nt, Human
auuguccuuaaacuggugaaugga

SEQ ID NO: 26853 - RNA, 24 nt, Human
ccugaccucgugauugaaauucug

SEQ ID NO: 26854 - RNA, 24 nt, Human
uagucugcacaauucaauaugaac

SEQ ID NO: 26855 - RNA, 24 nt, Human
uaacuuuucgccauggaacaacga

SEQ ID NO: 26856 - RNA, 24 nt, Human
acaguaccuggaaaaacggggaca

SEQ ID NO: 26857 - RNA, 24 nt, Human
aaccuggccguggcugacuucugu

SEQ ID NO: 26858 - RNA, 24 nt, Human
agaggcuggggugacucauggaua

SEQ ID NO: 26859 - RNA, 21 nt, Human
uuugaagugcuuuucgauggg

SEQ ID NO: 26860 - RNA, 18 nt, Human
ugagaggggagaggagga

SEQ ID NO: 26861 - RNA, 24 nt, Human
ucccaucgagcugguugucuucuu

SEQ ID NO: 26862 - RNA, 24 nt, Human
acaaagcaagagaagaagcagaga

SEQ ID NO: 26863 - RNA, 21 nt, Human
cauuggacaggacauccagcc

SEQ ID NO: 26864 - RNA, 24 nt, Human
cagcggcagagagccauccucuau

SEQ ID NO: 26865 - RNA, 24 nt, Human
uauggcaagucacuuugacagaca

SEQ ID NO: 26866 - RNA, 24 nt, Human
uacaccacucccaagaagaauaag

SEQ ID NO: 26867 - RNA, 24 nt, Human
acacaguaguccccacguggccca

SEQ ID NO: 26868 - RNA, 24 nt, Human
uggacguggguggcuauggcagcc

SEQ ID NO: 26869 - RNA, 17 nt, Human
cagcagccggagugugg

SEQ ID NO: 26870 - RNA, 24 nt, Human
ugugaagagcggagcccauccuuu

SEQ ID NO: 26871 - RNA, 24 nt, Human
agucgggaacaugaagggagacug

SEQ ID NO: 26872 - RNA, 24 nt, Human
ugugggaaaugguggggagugcca

SEQ ID NO: 26873 - RNA, 24 nt, Human
ugugcuggcuacaugugaugcugc

SEQ ID NO: 26874 - RNA, 24 nt, Human
uacccgagaaaagggucgcccguu

SEQ ID NO: 26875 - RNA, 24 nt, Human
aggaagagggagaagcugaggcuu

SEQ ID NO: 26876 - RNA, 24 nt, Human
uuacagcgauuggucaaucucuau

SEQ ID NO: 26877 - RNA, 24 nt, Human
cgagagccagcccugcccuuggaa

SEQ ID NO: 26878 - RNA, 24 nt, Human
ugauggaagcccgguucccugagg

SEQ ID NO: 26879 - RNA, 24 nt, Human
uacaccacucccaagaagaauaag

SEQ ID NO: 26880 - RNA, 24 nt, Human
aacacugguguguuuugaaguuga

SEQ ID NO: 26881 - RNA, 24 nt, Human
uuuagaaaaucuggguuagccuga

SEQ ID NO: 26882 - RNA, 24 nt, Human
ccauuagauaaauaccuuucaagu

SEQ ID NO: 26883 - RNA, 24 nt, Human
cgagugucacuagagguggacgug

SEQ ID NO: 26884 - RNA, 24 nt, Human
gagcagcugaacgagcaguauaac

SEQ ID NO: 26885 - RNA, 23 nt, Human
ugucccagcucugcucccucccg

SEQ ID NO: 26886 - RNA, 24 nt, Human
ugagguaauguggccacggccccc

SEQ ID NO: 26887 - RNA, 24 nt, Human
uaagcucaggucccugcuggugcc

SEQ ID NO: 26888 - RNA, 24 nt, Human
uccauccugagguuuggggggaga

SEQ ID NO: 26889 - RNA, 24 nt, Human
ccagucaaagccgccuuaaauuuc

SEQ ID NO: 26890 - RNA, 24 nt, Human
uuagcugggcgugguggugcacgc

SEQ ID NO: 26891 - RNA, 24 nt, Human
uauaaaaguccacaccuccucaga

SEQ ID NO: 26892 - RNA, 24 nt, Human
acgcgcugcccggccagaaaacgg

SEQ ID NO: 26893 - RNA, 24 nt, Human
uacaagaucacugacucugaggac

SEQ ID NO: 26894 - RNA, 24 nt, Human
uaaugggucucaaaauucugugac

SEQ ID NO: 26895 - RNA, 24 nt, Human
uauuagggauaauauucauuuagc

SEQ ID NO: 26896 - RNA, 24 nt, Human
ccgcugcucugcgccggggccugg

SEQ ID NO: 26897 - RNA, 24 nt, Human
uggaggccccugaacaggagggcu

SEQ ID NO: 26898 - RNA, 24 nt, Human
uccacagugcugugaucccgaggg

SEQ ID NO: 26899 - RNA, 24 nt, Human
ucaggccagcguccuccuccacag

SEQ ID NO: 26900 - RNA, 24 nt, Human
acugguauaaaacacaguuuaaac

SEQ ID NO: 26901 - RNA, 24 nt, Human
uguuaccagcaccaugcuuuucag

SEQ ID NO: 26902 - RNA, 24 nt, Human
ggagaguaaaguaggcaagaauga

SEQ ID NO: 26903 - RNA, 24 nt, Human
uugaucuugaagaaacugggcgug

SEQ ID NO: 26904 - RNA, 24 nt, Human
ucuccagaaaugcuuuggguucau

SEQ ID NO: 26905 - RNA, 24 nt, Human
aggaaggagauauagugaagagga

SEQ ID NO: 26906 - RNA, 20 nt, Human
uaacuguauucaugugauug

SEQ ID NO: 26907 - RNA, 24 nt, Human
uuccugaguucuucaauggaaaaa

SEQ ID NO: 26908 - RNA, 24 nt, Human
uaucuaaggauuauucugcugaag

SEQ ID NO: 26909 - RNA, 24 nt, Human
uggggaccugcgagcuggccuaau

SEQ ID NO: 26910 - RNA, 24 nt, Human
ugugaaagugaaacaagcaugagu

SEQ ID NO: 26911 - RNA, 24 nt, Human
ugccaaggcucagcaucuucucca

SEQ ID NO: 26912 - RNA, 24 nt, Human
ucagugcauuuuuaaaauaguuaa

SEQ ID NO: 26913 - RNA, 24 nt, Human
ggagguugcagugagccgagaucg

SEQ ID NO: 26914 - RNA, 24 nt, Human
ugugugcacguacauacuguauag

SEQ ID NO: 26915 - RNA, 24 nt, Human
ccggcgccggcaucgcggccaacu

SEQ ID NO: 26916 - RNA, 23 nt, Human
acaaagcaagagaagaagcagag

SEQ ID NO: 26917 - RNA, 21 nt, Human
cauuggacaggacauccagcc

SEQ ID NO: 26918 - RNA, 24 nt, Human
cagcggcagagagccauccucuau

SEQ ID NO: 26919 - RNA, 24 nt, Human
cuuugugugaauagcuugcuccac

SEQ ID NO: 26920 - RNA, 22 nt, Human
augaaccaacugggacucaccc

SEQ ID NO: 26921 - RNA, 24 nt, Human
ccugccaaugcaacagccacggaa

SEQ ID NO: 26922 - RNA, 23 nt, Human
ccgccgcgcccccgccgccgccc

SEQ ID NO: 26923 - RNA, 24 nt, Human
uggaaagguuggcaggcagcuccc

SEQ ID NO: 26924 - RNA, 24 nt, Human
acccguuuugccucgugccgaauu

SEQ ID NO: 26925 - RNA, 24 nt, Human
gucccggucaagugguucuucugc

SEQ ID NO: 26926 - RNA, 24 nt, Human
cgugccuuaaaagagauaauuuuc

SEQ ID NO: 26927 - RNA, 24 nt, Human
caccccccacgcccagcuuaauuu

SEQ ID NO: 26928 - RNA, 24 nt, Human
uuauaccagaagaucagggucuca

SEQ ID NO: 26929 - RNA, 24 nt, Human
gacagcagcaggaugaagcuggau

SEQ ID NO: 26930 - RNA, 24 nt, Human
uaucucaaguuagggaaaugagag

SEQ ID NO: 26931 - RNA, 24 nt, Human
ucugaagccaacauggcuuauuuc

SEQ ID NO: 26932 - RNA, 24 nt, Human
uuagauagcuaaaauaucccuuaa

SEQ ID NO: 26933 - RNA, 24 nt, Human
uuacaguggucuuuucaugggagu

SEQ ID NO: 26934 - RNA, 24 nt, Human
uaaguguuugcagccauauguguc

SEQ ID NO: 26935 - RNA, 24 nt, Human
uggaagaugcucaacaccuccucc

SEQ ID NO: 26936 - RNA, 24 nt, Human
uuccgagaguucugugccacgagg

SEQ ID NO: 26937 - RNA, 24 nt, Human
aggcaaaagcaagaaauggcggca

SEQ ID NO: 26938 - RNA, 24 nt, Human
aggccuggggccagaaagggguua

SEQ ID NO: 26939 - RNA, 18 nt, Human
ugggauccccccaacccc

SEQ ID NO: 26940 - RNA, 24 nt, Human
guacuggagucuuuugggaggcca

SEQ ID NO: 26941 - RNA, 23 nt, Human
aagagcacugaucguacuggcuc

SEQ ID NO: 26942 - RNA, 24 nt, Human
cuugacucuguguacauccuaccc

SEQ ID NO: 26943 - RNA, 24 nt, Human
uagcuguucuuuauugacauggaa

SEQ ID NO: 26944 - RNA, 24 nt, Human
ugggagaaaccucccaggugccag

SEQ ID NO: 26945 - RNA, 24 nt, Human
caugugcagucuccauguacaagu

SEQ ID NO: 26946 - RNA, 21 nt, Human
uuaguacuuaugggacuggcu

SEQ ID NO: 26947 - RNA, 24 nt, Human
ucuuauguaaccgaauccauuuac

SEQ ID NO: 26948 - RNA, 24 nt, Human
gcuaacgauguuccuuaugccuaa

SEQ ID NO: 26949 - RNA, 24 nt, Human
ugaauguaaaaucccuuauguugu

SEQ ID NO: 26950 - RNA, 24 nt, Human
uuaaugaugcagacaacuuggugu

SEQ ID NO: 26951 - RNA, 24 nt, Human
uguagccacccuccugggcccggc

SEQ ID NO: 26952 - RNA, 24 nt, Human
aagcugcuuucuucucugccuccu

SEQ ID NO: 26953 - RNA, 24 nt, Human
ugcgcagccuuaacaagggggcac

SEQ ID NO: 26954 - RNA, 24 nt, Human
ugaggcaggagaaucacuugaacc

SEQ ID NO: 26955 - RNA, 24 nt, Human
acuggcucccugcacugugugugc

SEQ ID NO: 26956 - RNA, 24 nt, Human
ugugcaggggcaaaggcgauuauc

SEQ ID NO: 26957 - RNA, 24 nt, Human
ccaggccaaaaaggcucaacauuu

SEQ ID NO: 26958 - RNA, 24 nt, Human
aggaaaaaagcuucugaaaugaag

SEQ ID NO: 26959 - RNA, 24 nt, Human
aagaaucuuuaccuuuacccuuuc

SEQ ID NO: 26960 - RNA, 17 nt, Human
uaggugcugagccuggc

SEQ ID NO: 26961 - RNA, 23 nt, Human
gagaauguauugugugcauugag

SEQ ID NO: 26962 - RNA, 24 nt, Human
ugaggcagagaauugcuugaaccc

SEQ ID NO: 26963 - RNA, 24 nt, Human
uuggauacaaguucuggcauuggu

SEQ ID NO: 26964 - RNA, 24 nt, Human
uauuacacacggauguaagcauuu

SEQ ID NO: 26965 - RNA, 24 nt, Human
ugacuagagagacgggcugacacc

SEQ ID NO: 26966 - RNA, 24 nt, Human
agggaaggagggucgcccggaucc

SEQ ID NO: 26967 - RNA, 24 nt, Human
uuccaguacuccugcccuuccuuc

SEQ ID NO: 26968 - RNA, 24 nt, Human
cuggguccccucugcaagcucaga

SEQ ID NO: 26969 - RNA, 24 nt, Human
uguucuggagcuguuggacaaaua

SEQ ID NO: 26970 - RNA, 24 nt, Human
aaccagaaaguaagguguucuacu

SEQ ID NO: 26971 - RNA, 24 nt, Human
uggaauagcagagacuccggaggg

SEQ ID NO: 26972 - RNA, 24 nt, Human
uugcuccugagccaucuucuuaac

SEQ ID NO: 26973 - RNA, 24 nt, Human
ugggauguccugccugcggagggg

SEQ ID NO: 26974 - RNA, 24 nt, Human
auggagcagugucucagccacuug

SEQ ID NO: 26975 - RNA, 24 nt, Human
ugcauuguuaucauuaaccagucu

SEQ ID NO: 26976 - RNA, 24 nt, Human
uaaugggucucaaaauucugugac

SEQ ID NO: 26977 - RNA, 24 nt, Human
uauuagggauaauauucauuuagc

SEQ ID NO: 26978 - RNA, 24 nt, Human
ucuuugggacaccugaagaaaauc

SEQ ID NO: 26979 - RNA, 17 nt, Human
gacagagcgacugcagc

SEQ ID NO: 26980 - RNA, 24 nt, Human
uauuacacuggaggaucacaaacu

SEQ ID NO: 26981 - RNA, 24 nt, Human
uauaaaauguaauacaagggcaua

SEQ ID NO: 26982 - RNA, 19 nt, Human
uugcuuggcccugacugau

SEQ ID NO: 26983 - RNA, 24 nt, Human
uacugcaugaugcuucugucuauc

SEQ ID NO: 26984 - RNA, 24 nt, Human
ugggcugugggccugcgcugcguc

SEQ ID NO: 26985 - RNA, 24 nt, Human
uauggcaagucacuuugacagaca

SEQ ID NO: 26986 - RNA, 24 nt, Human
ugagaauggcaaaauuagucgccu

SEQ ID NO: 26987 - RNA, 24 nt, Human
uacaccacucccaagaagaauaag

SEQ ID NO: 26988 - RNA, 24 nt, Human
ucugaagagugcuucagcugaugg

SEQ ID NO: 26989 - RNA, 24 nt, Human
uggcgucacuuuccugccaacuuu

SEQ ID NO: 26990 - RNA, 24 nt, Human
uaaacaccagcagauacuauuacu

SEQ ID NO: 26991 - RNA, 24 nt, Human
uuggaccaguuuugaaguuggggu

SEQ ID NO: 26992 - RNA, 24 nt, Human
agcugguuuggaacuccuggccuc

SEQ ID NO: 26993 - RNA, 24 nt, Human
gccucaguuucccaagugacuagg

SEQ ID NO: 26994 - RNA, 24 nt, Human
uacaguauaguauaaauacaacuu

SEQ ID NO: 26995 - RNA, 24 nt, Human
aagcggccucugagggaggcaaac

SEQ ID NO: 26996 - RNA, 24 nt, Human
cuuucucugggucucugugcuuug

SEQ ID NO: 26997 - RNA, 24 nt, Human
ucccaggggcuacccuuuccugcu

SEQ ID NO: 26998 - RNA, 24 nt, Human
ucaguaauguccuguuugcccuuc

SEQ ID NO: 26999 - RNA, 24 nt, Human
uugaagaguucuccugaugauuga

SEQ ID NO: 27000 - RNA, 24 nt, Human
ccaguggaagcuuugacaucauua

SEQ ID NO: 27001 - RNA, 24 nt, Human
ugaggugggaggauuuuuugagcc

SEQ ID NO: 27002 - RNA, 24 nt, Human
uaggagggcaggcucuucacuccc

SEQ ID NO: 27003 - RNA, 24 nt, Human
ccccaguagaagugaugggcugcu

SEQ ID NO: 27004 - RNA, 24 nt, Human
uaucaugaagccucagaaacacug

SEQ ID NO: 27005 - RNA, 24 nt, Human
uacagaaucuaaugcauaacuggu

SEQ ID NO: 27006 - RNA, 24 nt, Human
ugguagagauauauauuuauauau

SEQ ID NO: 27007 - RNA, 21 nt, Human
ugugcagaggguuagaggcca

SEQ ID NO: 27008 - RNA, 21 nt, Human
uacagugaggggugaauggaa

SEQ ID NO: 27009 - RNA, 20 nt, Human
ugacuggaggcaacaagggc

SEQ ID NO: 27010 - RNA, 24 nt, Human
ucacggcgcgggacgugacgcggg

SEQ ID NO: 27011 - RNA, 24 nt, Human
ucccaauguugacguuggccaggg

SEQ ID NO: 27012 - RNA, 24 nt, Human
agaagaagaagaaauggcaaagag

SEQ ID NO: 27013 - RNA, 24 nt, Human
ucugaucaauccuucuuuuucucu

SEQ ID NO: 27014 - RNA, 24 nt, Human
uaacagguguaagaguguugaaaa

SEQ ID NO: 27015 - RNA, 24 nt, Human
agagagcuucagcauguaaaauuu

SEQ ID NO: 27016 - RNA, 24 nt, Human
uuaaaagugagaagaaaaugaguu

SEQ ID NO: 27017 - RNA, 24 nt, Human
ugguauggaauaaacuucccauuu

SEQ ID NO: 27018 - RNA, 24 nt, Human
uaaggauaguuuuaauuuucuuau

SEQ ID NO: 27019 - RNA, 24 nt, Human
cuagugguuuaauaggcuugcuau

SEQ ID NO: 27020 - RNA, 23 nt, Human
uaaaauuguguugggagcaggga

SEQ ID NO: 27021 - RNA, 24 nt, Human
uugaaugucacauaauuucaugga

SEQ ID NO: 27022 - RNA, 24 nt, Human
uuagcaaauagagagaaauauaga

SEQ ID NO: 27023 - RNA, 23 nt, Human
uuccaaauucugggcugguuuuc

SEQ ID NO: 27024 - RNA, 24 nt, Human
ugagucucacucugaccuaugaga

SEQ ID NO: 27025 - RNA, 24 nt, Human
uuuacauaaccucagugggaaaac

SEQ ID NO: 27026 - RNA, 24 nt, Human
ugccguuacagccuuccucccggg

SEQ ID NO: 27027 - RNA, 24 nt, Human
ucauaagugcucugcugcacugua

SEQ ID NO: 27028 - RNA, 24 nt, Human
caucugguucagacucugcucauc

SEQ ID NO: 27029 - RNA, 24 nt, Human
cacugggcaggccugaccuugcug

SEQ ID NO: 27030 - RNA, 24 nt, Human
uauuauuauaaugcagauauuuca

SEQ ID NO: 27031 - RNA, 24 nt, Human
uuagcaauauuuugauaaaacuuu

SEQ ID NO: 27032 - RNA, 24 nt, Human
uacaagguaucauuucagagagug

SEQ ID NO: 27033 - RNA, 24 nt, Human
ugagaaacagucaucucaauaaau

SEQ ID NO: 27034 - RNA, 24 nt, Human
uagcuucccuuugaggguguguga

SEQ ID NO: 27035 - RNA, 20 nt, Human
uaagucuaugaucuuggaau

SEQ ID NO: 27036 - RNA, 24 nt, Human
uuuugcaauagauagauuuaaagu

SEQ ID NO: 27037 - RNA, 24 nt, Human
ucuagaauaauuaaaagccacaaa

SEQ ID NO: 27038 - RNA, 24 nt, Human
uacauuuugugauaacuuuuucuu

SEQ ID NO: 27039 - RNA, 24 nt, Human
auugcauacuggaaaagaagccaa

SEQ ID NO: 27040 - RNA, 24 nt, Human
aaaaaucugauugguggggaucuc

SEQ ID NO: 27041 - RNA, 24 nt, Human
uaacccagagagagucuggguucu

SEQ ID NO: 27042 - RNA, 24 nt, Human
guaaaacaagauuuggaugacaug

SEQ ID NO: 27043 - RNA, 24 nt, Human
ucagcaacuuuguggccccaagug

SEQ ID NO: 27044 - RNA, 24 nt, Human
ccaggccaaaaaggcucaacauuu

SEQ ID NO: 27045 - RNA, 24 nt, Human
ugacugugcgggguggucugucug

SEQ ID NO: 27046 - RNA, 24 nt, Human
uuaauuaucuggauaacagcaaaa

SEQ ID NO: 27047 - RNA, 24 nt, Human
uuagucccagguuguucucauucg

SEQ ID NO: 27048 - RNA, 24 nt, Human
cuugcagaaaaucacggugggcac

SEQ ID NO: 27049 - RNA, 24 nt, Human
acuuugucauuuguuucuuuaagu

SEQ ID NO: 27050 - RNA, 24 nt, Human
uauaagagucauggaaaaagacag

SEQ ID NO: 27051 - RNA, 20 nt, Human
ucuguacugagcucuguuuu

SEQ ID NO: 27052 - RNA, 24 nt, Human
agaccgggauccauucucuccucg

SEQ ID NO: 27053 - RNA, 24 nt, Human
ugggggacugcagcccugcugacc

SEQ ID NO: 27054 - RNA, 24 nt, Human
aaguaccccgauagggaggguggg

SEQ ID NO: 27055 - RNA, 24 nt, Human
uucgaaguucaugcaaccaacuaa

SEQ ID NO: 27056 - RNA, 24 nt, Human
acgacauuccacacccuauuauca

SEQ ID NO: 27057 - RNA, 24 nt, Human
acacagcucucgucuaagcaaugg

SEQ ID NO: 27058 - RNA, 24 nt, Human
aggcaugacuaagggguaaggguu

SEQ ID NO: 27059 - RNA, 24 nt, Human
cgcccagaaacgucaguggugcug

SEQ ID NO: 27060 - RNA, 24 nt, Human
uggaaggcuggacuacuuccuccu

SEQ ID NO: 27061 - RNA, 24 nt, Human
aggcagcucccuucccccaggaag

SEQ ID NO: 27062 - RNA, 24 nt, Human
uacaucaaaaucaagucccuggcu

SEQ ID NO: 27063 - RNA, 24 nt, Human
cgcccagaucaaggcucauguagc

SEQ ID NO: 27064 - RNA, 24 nt, Human
gcccggaagaucaagucgugcucc

SEQ ID NO: 27065 - RNA, 24 nt, Human
cuuacgcuuugaucucagcacaac

SEQ ID NO: 27066 - RNA, 24 nt, Human
uaauuuuuuaauauuuguauuuuu

SEQ ID NO: 27067 - RNA, 24 nt, Human
cagcuucgaucuccugggcugaag

SEQ ID NO: 27068 - RNA, 24 nt, Human
aaaggaacuugcuccauuguuuga

SEQ ID NO: 27069 - RNA, 24 nt, Human
caaggaagcaaacuuggacuuucc

SEQ ID NO: 27070 - RNA, 24 nt, Human
acauguaugacucauggccacaaa

SEQ ID NO: 27071 - RNA, 24 nt, Human
acgcagcuuggaucggugcugggg

SEQ ID NO: 27072 - RNA, 24 nt, Human
uggccagugaguuggcaaucagcu

SEQ ID NO: 27073 - RNA, 24 nt, Human
uggggugggagcagaaggaaggcu

SEQ ID NO: 27074 - RNA, 24 nt, Human
ugagagccuggcgcagcugggacu

SEQ ID NO: 27075 - RNA, 19 nt, Human
uccacgguuacaauccagc

SEQ ID NO: 27076 - RNA, 24 nt, Human
aguggcgcugagcaguagcuuuaa

SEQ ID NO: 27077 - RNA, 24 nt, Human
ugauuuaaaagaaggaaaaaaaaa

SEQ ID NO: 27078 - RNA, 24 nt, Human
uuagagugaaguaauugggaaacu

SEQ ID NO: 27079 - RNA, 24 nt, Human
ugagagccuggcgcagcugggacu

SEQ ID NO: 27080 - RNA, 19 nt, Human
uagaagggaugucaguggc

SEQ ID NO: 27081 - RNA, 19 nt, Human
uccacgguuacaauccagc

SEQ ID NO: 27082 - RNA, 24 nt, Human
gagucaguuuuagauuggagcugg

SEQ ID NO: 27083 - RNA, 24 nt, Human
ugagaaagaaauucagauauggga

SEQ ID NO: 27084 - RNA, 24 nt, Human
uugaaaaguaugaagauuaaugaa

SEQ ID NO: 27085 - RNA, 24 nt, Human
gagccggacaagccgauucccagc

SEQ ID NO: 27086 - RNA, 24 nt, Human
cgucgcgguggaggccacggggga

SEQ ID NO: 27087 - RNA, 18 nt, Human
aacauggucuucccccuc

SEQ ID NO: 27088 - RNA, 24 nt, Human
gagucaguuuuagauuggagcugg

SEQ ID NO: 27089 - RNA, 24 nt, Human
ugagaaagaaauucagauauggga

SEQ ID NO: 27090 - RNA, 24 nt, Human
uugaaaaguaugaagauuaaugaa

SEQ ID NO: 27091 - RNA, 24 nt, Human
gagucaguuuuagauuggagcugg

SEQ ID NO: 27092 - RNA, 24 nt, Human
ugagaaagaaauucagauauggga

SEQ ID NO: 27093 - RNA, 24 nt, Human
ugagaaagaaauucagauauggga

SEQ ID NO: 27094 - RNA, 24 nt, Human
uugaaaaguaugaagauuaaugaa

SEQ ID NO: 27095 - RNA, 24 nt, Human
gagucaguuuuagauuggagcugg

SEQ ID NO: 27096 - RNA, 24 nt, Human
uaaggagcuugaugggcagcuaga

SEQ ID NO: 27097 - RNA, 24 nt, Human
uaaaaugaaagucaaagaaaagga

SEQ ID NO: 27098 - RNA, 24 nt, Human
uuggaucuccacguuuaaguacug

SEQ ID NO: 27099 - RNA, 21 nt, Human
ugugguggaagauaaugacaa

SEQ ID NO: 27100 - RNA, 24 nt, Human
uguguuagaagaagaggauccggg

SEQ ID NO: 27101 - RNA, 24 nt, Human
aacacuuuguuguagcugcccucc

SEQ ID NO: 27102 - RNA, 24 nt, Human
gcccucaggagccucugcuccccu

SEQ ID NO: 27103 - RNA, 24 nt, Human
ugggaucggcacucagggggucug

SEQ ID NO: 27104 - RNA, 24 nt, Human
ucucaggaaagcuggugucugauu

SEQ ID NO: 27105 - RNA, 24 nt, Human
uugaagccaguaauuagagacauc

SEQ ID NO: 27106 - RNA, 24 nt, Human
uaguagagacgggguuucaccaug

SEQ ID NO: 27107 - RNA, 24 nt, Human
uugaaauuaguaauaucuguagaa

SEQ ID NO: 27108 - RNA, 24 nt, Human
cagcggcagagagccauccucuau

SEQ ID NO: 27109 - RNA, 24 nt, Human
uuagaaguggcuauuaagagacga

SEQ ID NO: 27110 - RNA, 22 nt, Human
uccgugcgcguugcugcggccg

SEQ ID NO: 27111 - RNA, 24 nt, Human
uugaucuugaagaaacugggcgug

SEQ ID NO: 27112 - RNA, 24 nt, Human
aggaaggagauauagugaagagga

SEQ ID NO: 27113 - RNA, 24 nt, Human
guagaguuuucuucaggcuuaaag

SEQ ID NO: 27114 - RNA, 24 nt, Human
uaccuguggugacuuucagauuua

SEQ ID NO: 27115 - RNA, 24 nt, Human
uuuggccaaauguaggauggaugg

SEQ ID NO: 27116 - RNA, 24 nt, Human
uuggauggaggccuggcaggaggg

SEQ ID NO: 27117 - RNA, 24 nt, Human
aguggauccggcgcaccauccccu

SEQ ID NO: 27118 - RNA, 24 nt, Human
aaaguacagaaccaauuuagaaag

SEQ ID NO: 27119 - RNA, 20 nt, Human
uaccucaauguuccucggag

SEQ ID NO: 27120 - RNA, 24 nt, Human
accuugauugaagcccuguugaag

SEQ ID NO: 27121 - RNA, 21 nt, Human
ucccgggucucuguugcucuc

SEQ ID NO: 27122 - RNA, 24 nt, Human
agcuauugaaagaguucugagcag

SEQ ID NO: 27123 - RNA, 24 nt, Human
uguucaggauacggcugauuugau

SEQ ID NO: 27124 - RNA, 24 nt, Human
acaaagugaguaacugugccaaau

SEQ ID NO: 27125 - RNA, 24 nt, Human
uggguuuuuggcauguagcaguuu

SEQ ID NO: 27126 - RNA, 24 nt, Human
ugaggaaugggaucagauaucgag

SEQ ID NO: 27127 - RNA, 24 nt, Human
uucauaaucacaggccacaggggu

SEQ ID NO: 27128 - RNA, 24 nt, Human
uaugguauccugaagcaccugccc

SEQ ID NO: 27129 - RNA, 24 nt, Human
gaugcaaaauguuugcaguuugac

SEQ ID NO: 27130 - RNA, 24 nt, Human
aaauggaaucuagaagcuaaauuu

SEQ ID NO: 27131 - RNA, 24 nt, Human
uauuucacuggaaaauucuguaaa

SEQ ID NO: 27132 - RNA, 24 nt, Human
ucuaaggcccugugggaugaaaag

SEQ ID NO: 27133 - RNA, 24 nt, Human
auggcgccaguuccccagcaaacc

SEQ ID NO: 27134 - RNA, 24 nt, Human
uaaagcucaaauugcucuuaaacu

SEQ ID NO: 27135 - RNA, 24 nt, Human
acugugcccuuccccuccugaaag

SEQ ID NO: 27136 - RNA, 24 nt, Human
ucaguuaagguuauuguugugggu

SEQ ID NO: 27137 - RNA, 24 nt, Human
uaacaugacuguauguguggacug

SEQ ID NO: 27138 - RNA, 17 nt, Human
ucaggcucccuuguaag

SEQ ID NO: 27139 - RNA, 24 nt, Human
gugcacaaguucccauaagccuag

SEQ ID NO: 27140 - RNA, 24 nt, Human
uaaggauuuuuccucgaacuuggg

SEQ ID NO: 27141 - RNA, 24 nt, Human
ccaggggacucuggucgguuacug

SEQ ID NO: 27142 - RNA, 24 nt, Human
aagaaccaugguggauagacuaga

SEQ ID NO: 27143 - RNA, 24 nt, Human
cccuggggacccuagagagggugu

SEQ ID NO: 27144 - RNA, 24 nt, Human
aggcaucuggggguggaugugacg

SEQ ID NO: 27145 - RNA, 24 nt, Human
agugaagagaaccagaaaaagucu

SEQ ID NO: 27146 - RNA, 24 nt, Human
cgggcaccuggaguugauucagcu

SEQ ID NO: 27147 - RNA, 24 nt, Human
cccucagcggccgcgaccgaguca

SEQ ID NO: 27148 - RNA, 24 nt, Human
cauugcaucugaggacuuguuuuc

SEQ ID NO: 27149 - RNA, 24 nt, Human
aaggcuucuugaaguaaauguucu

SEQ ID NO: 27150 - RNA, 24 nt, Human
uugcaaaaaaguuuucuggaauag

SEQ ID NO: 27151 - RNA, 24 nt, Human
uaccaggaagauccaugaucuggg

SEQ ID NO: 27152 - RNA, 24 nt, Human
ccuugguuugauuaccuccccugg

SEQ ID NO: 27153 - RNA, 24 nt, Human
ggagauggcucugcuguccugugu

SEQ ID NO: 27154 - RNA, 24 nt, Human
cauccugaacuuccagcaguuccc

SEQ ID NO: 27155 - RNA, 22 nt, Human
cuccaguggauguauggcugcg

SEQ ID NO: 27156 - RNA, 22 nt, Human
acgcugcagcgcgcggaaaacc

SEQ ID NO: 27157 - RNA, 24 nt, Human
uuacaucgcccuugaacgaggacc

SEQ ID NO: 27158 - RNA, 24 nt, Human
ugauuagcaaauauaucaucugaa

SEQ ID NO: 27159 - RNA, 24 nt, Human
acagggaaaaauauauuuuuuuca

SEQ ID NO: 27160 - RNA, 24 nt, Human
uauacaauauauuuauaguauuac

SEQ ID NO: 27161 - RNA, 24 nt, Human
aauuuuaguuauaaauuagugaag

SEQ ID NO: 27162 - RNA, 24 nt, Human
acccagugaggcacgacgugguuu

SEQ ID NO: 27163 - RNA, 24 nt, Human
ugagagcaagaaggcuggaaaugc

SEQ ID NO: 27164 - RNA, 24 nt, Human
ugcacgggagaccaaaacgagucc

SEQ ID NO: 27165 - RNA, 24 nt, Human
gccccggguucccguggcuaccgg

SEQ ID NO: 27166 - RNA, 24 nt, Human
aggcuggcgccgggggucugcggg

SEQ ID NO: 27167 - RNA, 24 nt, Human
agccaggaaccccaaacguccggc

SEQ ID NO: 27168 - RNA, 24 nt, Human
aauggcacucugauuaaacugcau

SEQ ID NO: 27169 - RNA, 20 nt, Human
uagacagaugggaaaggcag

SEQ ID NO: 27170 - RNA, 24 nt, Human
caugucuuaagagcgggaagaaaa

SEQ ID NO: 27171 - RNA, 21 nt, Human
uaccacagcaaacuucauuca

SEQ ID NO: 27172 - RNA, 24 nt, Human
uuaucugugagacugaagagccuc

SEQ ID NO: 27173 - RNA, 24 nt, Human
uagaauggauguaaauuaccugcu

SEQ ID NO: 27174 - RNA, 24 nt, Human
ugaaaagagccaugcugucuaguc

SEQ ID NO: 27175 - RNA, 20 nt, Human
cucccgagucuggcccucug

SEQ ID NO: 27176 - RNA, 24 nt, Human
gcggaaggcccggcggccgcgcug

SEQ ID NO: 27177 - RNA, 24 nt, Human
ugcccaggccagguggagcucugc

SEQ ID NO: 27178 - RNA, 24 nt, Human
uguuccgccugaggcgagugacgc

SEQ ID NO: 27179 - RNA, 24 nt, Human
aggggaugacugugaauggcuuca

SEQ ID NO: 27180 - RNA, 24 nt, Human
uuccuugggagaugccauaaagca

SEQ ID NO: 27181 - RNA, 24 nt, Human
gaggagaaacccugggaaggcucc

SEQ ID NO: 27182 - RNA, 24 nt, Human
ugagugaacugcacugugacaagc

SEQ ID NO: 27183 - RNA, 24 nt, Human
uaacagguguaagaguguugaaaa

SEQ ID NO: 27184 - RNA, 24 nt, Human
ucaguuaaaaaagaagaagaagaa

SEQ ID NO: 27185 - RNA, 24 nt, Human
gagcugauaccucuguugaucuug

SEQ ID NO: 27186 - RNA, 24 nt, Human
ucuccagaaaugcuuuggguucau

SEQ ID NO: 27187 - RNA, 24 nt, Human
aggaaggagauauagugaagagga

SEQ ID NO: 27188 - RNA, 24 nt, Human
caagcuccucuccccccucuuuuc

SEQ ID NO: 27189 - RNA, 24 nt, Human
ugcccguacccccucuccucucug

SEQ ID NO: 27190 - RNA, 24 nt, Human
gggcaggaacaagcuccagccuuc

SEQ ID NO: 27191 - RNA, 24 nt, Human
uagcugagccagccagcucugccu

SEQ ID NO: 27192 - RNA, 24 nt, Human
ucagugagaggggggcagcagggg

SEQ ID NO: 27193 - RNA, 24 nt, Human
cuagcauccugggaguccuuuucu

SEQ ID NO: 27194 - RNA, 24 nt, Human
uuuuuugucaagcaugucagacaa

SEQ ID NO: 27195 - RNA, 20 nt, Human
uacaagcacacccaugaggg

SEQ ID NO: 27196 - RNA, 24 nt, Human
uuccauugacauucuuagcacagc

SEQ ID NO: 27197 - RNA, 24 nt, Human
agagauuggugaggauuuggauaa

SEQ ID NO: 27198 - RNA, 24 nt, Human
ugggcgaaggaaaaggccuggccu

SEQ ID NO: 27199 - RNA, 24 nt, Human
cagcggcgcgggaucggccaaagc

SEQ ID NO: 27200 - RNA, 24 nt, Human
cugacgcugaagcuggugagccug

SEQ ID NO: 27201 - RNA, 24 nt, Human
ccugaucugcgcagcccggcgggc

SEQ ID NO: 27202 - RNA, 23 nt, Human
cgagcagcucagaccaugucgcc

SEQ ID NO: 27203 - RNA, 24 nt, Human
agaaagccgguccugggcugaaga

SEQ ID NO: 27204 - RNA, 24 nt, Human
uauggcaagucacuuugacagaca

SEQ ID NO: 27205 - RNA, 24 nt, Human
uuaaagaacaucuauaaauacaua

SEQ ID NO: 27206 - RNA, 24 nt, Human
ugaaugcuuguggcaucugcccca

SEQ ID NO: 27207 - RNA, 24 nt, Human
ccucccgucacuccacgcagcugg

SEQ ID NO: 27208 - RNA, 24 nt, Human
cgugggaaccuguccccaggcugg

SEQ ID NO: 27209 - RNA, 24 nt, Human
aggaauguuuggguggcgucaagg

SEQ ID NO: 27210 - RNA, 24 nt, Human
ggguacguggcgcaugcgguaaca

SEQ ID NO: 27211 - RNA, 24 nt, Human
uguuaauauacucgaaguuccucu

SEQ ID NO: 27212 - RNA, 24 nt, Human
ucaagaguucagauauacagauaa

SEQ ID NO: 27213 - RNA, 20 nt, Human
uacaagaugcgcugcagcag

SEQ ID NO: 27214 - RNA, 24 nt, Human
cagcuuauauaccuccagggccau

SEQ ID NO: 27215 - RNA, 24 nt, Human
acacagaggaugauuaauaauuuc

SEQ ID NO: 27216 - RNA, 24 nt, Human
aggugguggugauaaaggauaaau

SEQ ID NO: 27217 - RNA, 24 nt, Human
ugaaaguuuucauuuccuuuuuaa

SEQ ID NO: 27218 - RNA, 24 nt, Human
ucugucauuauuuacacauaugua

SEQ ID NO: 27219 - RNA, 24 nt, Human
uugcacugcauggagggcauuggc

SEQ ID NO: 27220 - RNA, 21 nt, Human
ucuugggaagcucuuaauugu

SEQ ID NO: 27221 - RNA, 24 nt, Human
aguugauucccauuuuccuuugga

SEQ ID NO: 27222 - RNA, 22 nt, Human
ugaggaagagugagggaaggcg

SEQ ID NO: 27223 - RNA, 24 nt, Human
ccgcagggcaucugccuccuggcu

SEQ ID NO: 27224 - RNA, 21 nt, Human
cagcagccucgaggaagagug

SEQ ID NO: 27225 - RNA, 24 nt, Human
cgugggcagcagcacaggccaggc

SEQ ID NO: 27226 - RNA, 24 nt, Human
ucaguagagacaggguuuugccau

SEQ ID NO: 27227 - RNA, 24 nt, Human
ugguuuggaguuaauguaaugagg

SEQ ID NO: 27228 - RNA, 24 nt, Human
ucacugcaaccucugccuccuggg

SEQ ID NO: 27229 - RNA, 24 nt, Human
accccaauccuucaucuacauaaa

SEQ ID NO: 27230 - RNA, 24 nt, Human
cuucaaaggugaguccucaacuga

SEQ ID NO: 27231 - RNA, 24 nt, Human
aguucuguggaggacaggccuagu

SEQ ID NO: 27232 - RNA, 24 nt, Human
uccuuggagaagacagcacaaugg

SEQ ID NO: 27233 - RNA, 24 nt, Human
ugucacuaacauuaaagaaagagg

SEQ ID NO: 27234 - RNA, 21 nt, Human
ucaguaagugauuaaaaguac

SEQ ID NO: 27235 - RNA, 24 nt, Human
uuaaaucaaguuuaccuaucaaau

SEQ ID NO: 27236 - RNA, 24 nt, Human
uuagcaauuuuuuucauaauauaa

SEQ ID NO: 27237 - RNA, 24 nt, Human
uaaggagaaaccacauaggauaaa

SEQ ID NO: 27238 - RNA, 18 nt, Human
uggcuggauuugggcgcc

SEQ ID NO: 27239 - RNA, 18 nt, Human
uagcucggcgccuggguu

SEQ ID NO: 27240 - RNA, 24 nt, Human
uaugacgcagccacccaggaguuu

SEQ ID NO: 27241 - RNA, 24 nt, Human
cacuccgcaggaaaguugagagca

SEQ ID NO: 27242 - RNA, 24 nt, Human
uagaauaugggccuggaggcucca

SEQ ID NO: 27243 - RNA, 24 nt, Human
ugggacagauguucacuuuaaugu

SEQ ID NO: 27244 - RNA, 24 nt, Human
uuuugcaucaacaaauuuucgaga

SEQ ID NO: 27245 - RNA, 24 nt, Human
aucauuguaaaaaaagcaccugga

SEQ ID NO: 27246 - RNA, 24 nt, Human
uagaccacauauuacucuuuaauu

SEQ ID NO: 27247 - RNA, 24 nt, Human
uuccaguaaaaaguucuuauuccu

SEQ ID NO: 27248 - RNA, 24 nt, Human
cauggcucuuaggaaugacgccaa

SEQ ID NO: 27249 - RNA, 24 nt, Human
ugcgcagccuuaaaagggggcaca

SEQ ID NO: 27250 - RNA, 24 nt, Human
cauugcacuccagccuggugacaa

SEQ ID NO: 27251 - RNA, 24 nt, Human
ugaaugcaaucucugcuuccuggg

SEQ ID NO: 27252 - RNA, 24 nt, Human
uggugggugcaaauugguaugcuc

SEQ ID NO: 27253 - RNA, 24 nt, Human
uuccagagucucuguagaaaccuu

SEQ ID NO: 27254 - RNA, 24 nt, Human
ugggagcagaggauggagcaccaa

SEQ ID NO: 27255 - RNA, 24 nt, Human
acacugugccaugaucuguaggag

SEQ ID NO: 27256 - RNA, 24 nt, Human
uacauaauuacucagucauggaaa

SEQ ID NO: 27257 - RNA, 24 nt, Human
agaaggaccauagugaucauuuaa

SEQ ID NO: 27258 - RNA, 24 nt, Human
ugacagugugcaacucucauugga

SEQ ID NO: 27259 - RNA, 23 nt, Human
gaccuucccggcccagccugugg

SEQ ID NO: 27260 - RNA, 24 nt, Human
cucccguguucccggcugguuguc

SEQ ID NO: 27261 - RNA, 24 nt, Human
cccaaaagaccggcugccgccugc

SEQ ID NO: 27262 - RNA, 22 nt, Human
uggcaccgggccaccgccaccc

SEQ ID NO: 27263 - RNA, 24 nt, Human
ugaaaaaagguauccguuaugaaa

SEQ ID NO: 27264 - RNA, 24 nt, Human
ugguaguggauuagugaaagucuc

SEQ ID NO: 27265 - RNA, 24 nt, Human
ugaaagcacuggcagccaggaaca

SEQ ID NO: 27266 - RNA, 24 nt, Human
aagcuguaaggccuguagcucugg

SEQ ID NO: 27267 - RNA, 24 nt, Human
ugcauuguuaucauuaaccagucu

SEQ ID NO: 27268 - RNA, 24 nt, Human
ugaggggaucuuggccucacggug

SEQ ID NO: 27269 - RNA, 24 nt, Human
ucaaguggauacaagucuggcauu

SEQ ID NO: 27270 - RNA, 24 nt, Human
uauuacacacggauguaagcauuu

SEQ ID NO: 27271 - RNA, 24 nt, Human
uguguuuguagacuuggaacccac

SEQ ID NO: 27272 - RNA, 24 nt, Human
caccggucuucagggcuucuuggu

SEQ ID NO: 27273 - RNA, 23 nt, Human
gugaauggggcaaaaaaacaaaa

SEQ ID NO: 27274 - RNA, 17 nt, Human
gcuggcagcuuccaugu

SEQ ID NO: 27275 - RNA, 24 nt, Human
uccuggguuaaccuuuguuggcug

SEQ ID NO: 27276 - RNA, 24 nt, Human
aaggauaguucucucugguuauca

SEQ ID NO: 27277 - RNA, 24 nt, Human
uauuccaauuacuaucucuuccug

SEQ ID NO: 27278 - RNA, 24 nt, Human
uggaagacagcuguuugugcacua

SEQ ID NO: 27279 - RNA, 24 nt, Human
uuaguaauuaguuguuagauagcu

SEQ ID NO: 27280 - RNA, 24 nt, Human
ucaaauuaagacuuuuccaaaaca

SEQ ID NO: 27281 - RNA, 24 nt, Human
uucaugaggaaacauguauuugca

SEQ ID NO: 27282 - RNA, 24 nt, Human
uuugucagauugcuuaugcccgua

SEQ ID NO: 27283 - RNA, 24 nt, Human
auugauggucagccaggugccuuc

SEQ ID NO: 27284 - RNA, 24 nt, Human
ugacagugugcaacucucauugga

SEQ ID NO: 27285 - RNA, 24 nt, Human
uguuucaagcuccugauucuuucu

SEQ ID NO: 27286 - RNA, 24 nt, Human
ggacagguguacagacauguucuu

SEQ ID NO: 27287 - RNA, 24 nt, Human
ucgaauggacacauuaccagugaa

SEQ ID NO: 27288 - RNA, 24 nt, Human
uucguuaggaacugagaugccuuc

SEQ ID NO: 27289 - RNA, 24 nt, Human
uaauugaaauaaaauucuaggcug

SEQ ID NO: 27290 - RNA, 24 nt, Human
acgaaaaucagguaguuggugaag

SEQ ID NO: 27291 - RNA, 24 nt, Human
uagugugccuucacguuguucuug

SEQ ID NO: 27292 - RNA, 24 nt, Human
cugcaagcccugcucgucuggcug

SEQ ID NO: 27293 - RNA, 24 nt, Human
ugcauuguuaucauuaaccagucu

SEQ ID NO: 27294 - RNA, 24 nt, Human
uauuagggauaauauucauuuagc

SEQ ID NO: 27295 - RNA, 24 nt, Human
uaaugggucucaaaauucugugac

SEQ ID NO: 27296 - RNA, 22 nt, Human
uagcaugccucuuaauuuuucu

SEQ ID NO: 27297 - RNA, 24 nt, Human
uauaaaacuuugauaguuacauug

SEQ ID NO: 27298 - RNA, 24 nt, Human
aacagguaaccacuugagaggaug

SEQ ID NO: 27299 - RNA, 24 nt, Human
ggagcauaguuuuuuccauuuaaa

SEQ ID NO: 27300 - RNA, 24 nt, Human
uuugcguaggccacuggguuuucu

SEQ ID NO: 27301 - RNA, 24 nt, Human
uggcaguccaaagaccaagaauca

SEQ ID NO: 27302 - RNA, 24 nt, Human
ugaccaggcuagaccacacgugcc

SEQ ID NO: 27303 - RNA, 24 nt, Human
ugagacuaaggcuuucgacccugg

SEQ ID NO: 27304 - RNA, 24 nt, Human
gaugcaaaauguuugcaguuugac

SEQ ID NO: 27305 - RNA, 24 nt, Human
uauaagauuuuagcaauacuucca

SEQ ID NO: 27306 - RNA, 24 nt, Human
uaauauaucauauagaucacagga

SEQ ID NO: 27307 - RNA, 24 nt, Human
aggaagucaaaauaauaucacuuu

SEQ ID NO: 27308 - RNA, 21 nt, Human
ucagcaagcugggauaauaag

SEQ ID NO: 27309 - RNA, 24 nt, Human
uuuacaguauauacagucaggccu

SEQ ID NO: 27310 - RNA, 22 nt, Human
ugccuugggucccuucaguagc

SEQ ID NO: 27311 - RNA, 24 nt, Human
ugucaggaaggggaagcggguuuc

SEQ ID NO: 27312 - RNA, 24 nt, Human
uauggcaagucacuuugacagaca

SEQ ID NO: 27313 - RNA, 24 nt, Human
ugagaauggcaaaauuagucgccu

SEQ ID NO: 27314 - RNA, 24 nt, Human
uacaccacucccaagaagaauaag

SEQ ID NO: 27315 - RNA, 24 nt, Human
ucccuguggccuguacccgucccu

SEQ ID NO: 27316 - RNA, 24 nt, Human
uuucacagcuaacauucauuuaau

SEQ ID NO: 27317 - RNA, 24 nt, Human
uuagauucuccagauaguguagga

SEQ ID NO: 27318 - RNA, 24 nt, Human
uuaaaggaaacauccagggccccu

SEQ ID NO: 27319 - RNA, 24 nt, Human
uuuaucacauaguaaggaaugcug

SEQ ID NO: 27320 - RNA, 24 nt, Human
acaaagcaagagaagaagcagaga

SEQ ID NO: 27321 - RNA, 21 nt, Human
cauuggacaggacauccagcc

SEQ ID NO: 27322 - RNA, 24 nt, Human
cagcggcagagagccauccucuau

SEQ ID NO: 27323 - RNA, 24 nt, Human
uauggcaagucacuuugacagaca

SEQ ID NO: 27324 - RNA, 24 nt, Human
ugagaauggcaaaauuagucgccu

SEQ ID NO: 27325 - RNA, 24 nt, Human
uacaccacucccaagaagaauaag

SEQ ID NO: 27326 - RNA, 24 nt, Human
ucccaucgagcugguugucuucuu

SEQ ID NO: 27327 - RNA, 24 nt, Human
acaaagcaagagaagaagcagaga

SEQ ID NO: 27328 - RNA, 21 nt, Human
cauuggacaggacauccagcc

SEQ ID NO: 27329 - RNA, 24 nt, Human
cagcggcagagagccauccucuau

SEQ ID NO: 27330 - RNA, 21 nt, Human
caccgagucgccucacucgag

SEQ ID NO: 27331 - RNA, 24 nt, Human
uguuguguacaauguuugaaagac

SEQ ID NO: 27332 - RNA, 24 nt, Human
ugauaguaacucacuucucucuca

SEQ ID NO: 27333 - RNA, 21 nt, Human
ucugacaguucugcgacaagc

SEQ ID NO: 27334 - RNA, 24 nt, Human
gcugaacccccugcucaccgccag

SEQ ID NO: 27335 - RNA, 24 nt, Human
uucaaauuucuuucuuuuuuaauu

SEQ ID NO: 27336 - RNA, 22 nt, Human
ugugcagaagaaauggaaggau

SEQ ID NO: 27337 - RNA, 24 nt, Human
gugcauuuucaaggaagggcaggc

SEQ ID NO: 27338 - RNA, 24 nt, Human
uaagaguguugaaaaaaaaauuca

SEQ ID NO: 27339 - RNA, 24 nt, Human
ugugcagaagaaauggaaggauuc

SEQ ID NO: 27340 - RNA, 24 nt, Human
uaucaaggaagggcaggcgugaug

SEQ ID NO: 27341 - RNA, 24 nt, Human
uucaaauuucuuucuuuuuuaauu

SEQ ID NO: 27342 - RNA, 24 nt, Human
ucaauuuuuauuuugguuuucuua

SEQ ID NO: 27343 - RNA, 24 nt, Human
uaacagguguaagaguguugaaaa

SEQ ID NO: 27344 - RNA, 24 nt, Human
ugugcagaagaaauggaaggauuc

SEQ ID NO: 27345 - RNA, 24 nt, Human
aagaagaagaagaaauggcaaaga

SEQ ID NO: 27346 - RNA, 24 nt, Human
uggcuuauuuguuuuguauucaau

SEQ ID NO: 27347 - RNA, 24 nt, Human
uccaggacuguuuuccuacagcgu

SEQ ID NO: 27348 - RNA, 24 nt, Human
uguguacggugcacacacacagug

SEQ ID NO: 27349 - RNA, 24 nt, Human
gcucaggguuuuuagaacuucagc

SEQ ID NO: 27350 - RNA, 24 nt, Human
uguucauauuuaugcagugccucu

SEQ ID NO: 27351 - RNA, 20 nt, Human
ucugaggaugcggaugucgu

SEQ ID NO: 27352 - RNA, 24 nt, Human
uacaauucucuguuauuagggaga

SEQ ID NO: 27353 - RNA, 24 nt, Human
uugaucucacuuauauucugagug

SEQ ID NO: 27354 - RNA, 24 nt, Human
ugucugaggcggucaugagacacu

SEQ ID NO: 27355 - RNA, 24 nt, Human
uguaauccaucccuugaguuuuuu

SEQ ID NO: 27356 - RNA, 24 nt, Human
uguagaacucagccuucuuggaaa

SEQ ID NO: 27357 - RNA, 24 nt, Human
ucuccgaguuugcgacucgcggac

SEQ ID NO: 27358 - RNA, 24 nt, Human
uggaaagcagguagaguuggcuug

SEQ ID NO: 27359 - RNA, 24 nt, Human
uaaaugcagauaugugugugcgcu

SEQ ID NO: 27360 - RNA, 24 nt, Human
uaccaggaagcagcuguagguggg

SEQ ID NO: 27361 - RNA, 24 nt, Human
ucccugguggcccucaacugccuu

SEQ ID NO: 27362 - RNA, 24 nt, Human
ugcauuguuaucauuaaccagucu

SEQ ID NO: 27363 - RNA, 24 nt, Human
uaaugggucucaaaauucugugac

SEQ ID NO: 27364 - RNA, 24 nt, Human
uauuagggauaauauucauuuagc

SEQ ID NO: 27365 - RNA, 24 nt, Human
cgugcaucuuggucucaaugucga

SEQ ID NO: 27366 - RNA, 24 nt, Human
gucaaguuguuuccauuaaaaagu

SEQ ID NO: 27367 - RNA, 24 nt, Human
ucgaauggacacauuaccagugaa

SEQ ID NO: 27368 - RNA, 24 nt, Human
ggacagguguacagacauguucuu

SEQ ID NO: 27369 - RNA, 24 nt, Human
aagcagcugcccagcccgcccuuc

SEQ ID NO: 27370 - RNA, 24 nt, Human
cagccuggacuuaccaccacuaaa

SEQ ID NO: 27371 - RNA, 24 nt, Human
gaggugagaacaaagcugcgugug

SEQ ID NO: 27372 - RNA, 24 nt, Human
ugacaagaggcagggaugcuggaa

SEQ ID NO: 27373 - RNA, 24 nt, Human
ucccuggaccagcccgguggcacc

SEQ ID NO: 27374 - RNA, 24 nt, Human
ccccugaggcuggagcccccaugg

SEQ ID NO: 27375 - RNA, 24 nt, Human
aaagauggucggcugcuuuuggua

SEQ ID NO: 27376 - RNA, 24 nt, Human
ggacagguguacagacauguucuu

SEQ ID NO: 27377 - RNA, 24 nt, Human
uggcaccauggaugccuucgugaa

SEQ ID NO: 27378 - RNA, 24 nt, Human
ugacguggugaagguucgccugca

SEQ ID NO: 27379 - RNA, 24 nt, Human
uaccuccuucaccccagaauauuu

SEQ ID NO: 27380 - RNA, 24 nt, Human
ugaaaagcaguucucugaggagcg

SEQ ID NO: 27381 - RNA, 24 nt, Human
caugccccaacguggccuggaggu

SEQ ID NO: 27382 - RNA, 24 nt, Human
ugcuagcucaagauucacaauguu

SEQ ID NO: 27383 - RNA, 24 nt, Human
gaacuggaagauugcucuccgagu

SEQ ID NO: 27384 - RNA, 24 nt, Human
uucacaagcuaacuuccacuaauc

SEQ ID NO: 27385 - RNA, 24 nt, Human
uaugaucaaggauauggaaauuac

SEQ ID NO: 27386 - RNA, 24 nt, Human
uaaaguaacccaucuugcaggacg

SEQ ID NO: 27387 - RNA, 24 nt, Human
ugggagggguaggaguauucaggu

SEQ ID NO: 27388 - RNA, 24 nt, Human
ucgcaggcuuaucuugcauuuuga

SEQ ID NO: 27389 - RNA, 24 nt, Human
cagccgguguccgaacugaucgcg

SEQ ID NO: 27390 - RNA, 19 nt, Human
cggcgcaggcggcgcugcc

SEQ ID NO: 27391 - RNA, 24 nt, Human
ccuugcuuguuaaauuuuuuuuuu

SEQ ID NO: 27392 - RNA, 24 nt, Human
agagaagcgggguuauaaagagag

SEQ ID NO: 27393 - RNA, 24 nt, Human
auccaguugaugggcugccagauc

SEQ ID NO: 27394 - RNA, 24 nt, Human
aguccuuuugugaacuuuuaacgg

SEQ ID NO: 27395 - RNA, 24 nt, Human
ucuggccucugaaacacuaccacu

SEQ ID NO: 27396 - RNA, 24 nt, Human
ucggugcucagcggcggcaggcca

SEQ ID NO: 27397 - RNA, 24 nt, Human
uguagauagucuacauuaugauau

SEQ ID NO: 27398 - RNA, 24 nt, Human
aaaaacuaaaaacaaaugucaacu

SEQ ID NO: 27399 - RNA, 24 nt, Human
agaauacuauagagcaaguaaacc

SEQ ID NO: 27400 - RNA, 24 nt, Human
uguuuggagaacauacauguguga

SEQ ID NO: 27401 - RNA, 20 nt, Human
uaccugguauuaauaaaaug

SEQ ID NO: 27402 - RNA, 24 nt, Human
uaacagaaggaccuuucuuaaaug

SEQ ID NO: 27403 - RNA, 18 nt, Human
aggugcuucuaagcccag

SEQ ID NO: 27404 - RNA, 24 nt, Human
uacuauguaauccggauccaggau

SEQ ID NO: 27405 - RNA, 24 nt, Human
aagcaggaaucugagauuuccaag

SEQ ID NO: 27406 - RNA, 24 nt, Human
guagcccuggggccccgcugugcc

SEQ ID NO: 27407 - RNA, 24 nt, Human
ucagcucccucuugaacuccaggg

SEQ ID NO: 27408 - RNA, 24 nt, Human
cagcauaagaauuaaaaacaguua

SEQ ID NO: 27409 - RNA, 24 nt, Human
uugaaaagcuggaaaauauggagu

SEQ ID NO: 27410 - RNA, 21 nt, Human
ugggauccuaaagaaagcauc

SEQ ID NO: 27411 - RNA, 24 nt, Human
uccgcaccgagggggcggggggca

SEQ ID NO: 27412 - RNA, 24 nt, Human
uguugggcaacuggggugaaggga

SEQ ID NO: 27413 - RNA, 24 nt, Human
gcgccuggcgcucagccuccagcu

SEQ ID NO: 27414 - RNA, 24 nt, Human
uggcaggaagggggcagccugcaa

SEQ ID NO: 27415 - RNA, 24 nt, Human
ccucccgggccagcugccccagcc

SEQ ID NO: 27416 - RNA, 24 nt, Human
uacuguguggugacguccccuaug

SEQ ID NO: 27417 - RNA, 24 nt, Human
uaggcuucucauauaaggccccgu

SEQ ID NO: 27418 - RNA, 24 nt, Human
ugcaugaagaaauuucgguuuccc

SEQ ID NO: 27419 - RNA, 24 nt, Human
aggcagucacagaacaggggcaug

SEQ ID NO: 27420 - RNA, 24 nt, Human
ucccgaaggauccgcacgcagucc

SEQ ID NO: 27421 - RNA, 24 nt, Human
uuucagcgugauccgugcgcaucc

SEQ ID NO: 27422 - RNA, 24 nt, Human
guccgagugagccgcguguggaac

SEQ ID NO: 27423 - RNA, 24 nt, Human
cguuacaucuguuuuuauuucacu

SEQ ID NO: 27424 - RNA, 24 nt, Human
uaaaugaagauucagacuuuguaa

SEQ ID NO: 27425 - RNA, 19 nt, Human
ugaauauacauacacugca

SEQ ID NO: 27426 - RNA, 24 nt, Human
aguaagugguggagaauuguacaa

SEQ ID NO: 27427 - RNA, 24 nt, Human
ugggguuggcuggcccugcuucug

SEQ ID NO: 27428 - RNA, 24 nt, Human
uggcaggcggcgaagcgcucugga

SEQ ID NO: 27429 - RNA, 24 nt, Human
cauugcacuccaggccugggcaac

SEQ ID NO: 27430 - RNA, 24 nt, Human
acccucauagccgccuacuccggg

SEQ ID NO: 27431 - RNA, 24 nt, Human
ugggagauggggccacuggaucca

SEQ ID NO: 27432 - RNA, 24 nt, Human
ucagugcuccaguuggguacuagu

SEQ ID NO: 27433 - RNA, 21 nt, Human
uaagcuagucguucuuggcuc

SEQ ID NO: 27434 - RNA, 24 nt, Human
uugaauguuugauacaaaggaugg

SEQ ID NO: 27435 - RNA, 24 nt, Human
ucgcccagauucaggcguguaaac

SEQ ID NO: 27436 - RNA, 24 nt, Human
uaacugcugaacuaguuccucagg

SEQ ID NO: 27437 - RNA, 24 nt, Human
cgcugcuggcccucgggcugcggg

SEQ ID NO: 27438 - RNA, 24 nt, Human
ugcgggagccgggcuaggacgccg

SEQ ID NO: 27439 - RNA, 24 nt, Human
ucugucuucaggaaagcaaaacua

SEQ ID NO: 27440 - RNA, 24 nt, Human
augaaguucugguugcuggauuug

SEQ ID NO: 27441 - RNA, 24 nt, Human
uugaagccaaacagccaaauucug

SEQ ID NO: 27442 - RNA, 24 nt, Human
gugaacuuaauuugcauuuaugcc

SEQ ID NO: 27443 - RNA, 24 nt, Human
cagcagcccaagcugucaggaucu

SEQ ID NO: 27444 - RNA, 24 nt, Human
caggaccaaggaucagacaaaggu

SEQ ID NO: 27445 - RNA, 22 nt, Human
uggcaugaagaaggaauagagc

SEQ ID NO: 27446 - RNA, 24 nt, Human
uucacugcccggagguuggagugc

SEQ ID NO: 27447 - RNA, 24 nt, Human
cauugugcgggccucugaggcugu

SEQ ID NO: 27448 - RNA, 24 nt, Human
ucagucagaaauagguauugcuua

SEQ ID NO: 27449 - RNA, 24 nt, Human
ucccucggagugccaggaaagguc

SEQ ID NO: 27450 - RNA, 24 nt, Human
ucagcccccugagggcaaugccuc

SEQ ID NO: 27451 - RNA, 24 nt, Human
uaugacgagacggcaggcaugcug

SEQ ID NO: 27452 - RNA, 24 nt, Human
uggcagagacgcucuaugacacca

SEQ ID NO: 27453 - RNA, 24 nt, Human
ugaaagaaaaugagagcagaaagu

SEQ ID NO: 27454 - RNA, 24 nt, Human
ugaaaguauuggcauucaaaaaga

SEQ ID NO: 27455 - RNA, 24 nt, Human
uauaaaauaaaaaguccacaauga

SEQ ID NO: 27456 - RNA, 24 nt, Human
ugagaaugaccccaagaccuuuga

SEQ ID NO: 27457 - RNA, 24 nt, Human
cuuccaaucugaugggcauguuug

SEQ ID NO: 27458 - RNA, 22 nt, Human
guggagggcagcuuugucuaca

SEQ ID NO: 27459 - RNA, 24 nt, Human
ugggaugcccucauguugggaagc

SEQ ID NO: 27460 - RNA, 22 nt, Human
ucacuugggacaggaggucauc

SEQ ID NO: 27461 - RNA, 24 nt, Human
caccugaaggugcuguaugacgcc

SEQ ID NO: 27462 - RNA, 24 nt, Human
agguggugcuggcugaaggcaucc

SEQ ID NO: 27463 - RNA, 24 nt, Human
uugaaugguugcugcacuuugguc

SEQ ID NO: 27464 - RNA, 20 nt, Human
cagcccgugggcgccuggcg

SEQ ID NO: 27465 - RNA, 20 nt, Human
uacuucacgcuaucuaagug

SEQ ID NO: 27466 - RNA, 20 nt, Human
ugcauuguagacaacaucga

SEQ ID NO: 27467 - RNA, 24 nt, Human
ggccgagugggcaccaucauggga

SEQ ID NO: 27468 - RNA, 24 nt, Human
uuugauggaugcauuuccaugaug

SEQ ID NO: 27469 - RNA, 24 nt, Human
cuuugagacuggguucccaucgcu

SEQ ID NO: 27470 - RNA, 24 nt, Human
uuaaagcagcuuagauugcauguu

SEQ ID NO: 27471 - RNA, 24 nt, Human
ugucgagugaugaguuugcuaaua

SEQ ID NO: 27472 - RNA, 18 nt, Human
uaugguauaaucuuuaau

SEQ ID NO: 27473 - RNA, 24 nt, Human
cacccgcaguaaccacugaacguc

SEQ ID NO: 27474 - RNA, 24 nt, Human
gugaaguauuuuguuaccucaguc

SEQ ID NO: 27475 - RNA, 24 nt, Human
cagcggcuuagcuccggcgucugc

SEQ ID NO: 27476 - RNA, 24 nt, Human
uuguccugugcuggggcugacagg

SEQ ID NO: 27477 - RNA, 23 nt, Human
uuugaccuggggcggaaaaaggc

SEQ ID NO: 27478 - RNA, 24 nt, Human
uuugaccauuugcuauggacauug

SEQ ID NO: 27479 - RNA, 20 nt, Human
uacuguggaccucacucagg

SEQ ID NO: 27480 - RNA, 24 nt, Human
agugcaggaguucaggugcgguac

SEQ ID NO: 27481 - RNA, 21 nt, Human
ucauugggaucaagaacucga

SEQ ID NO: 27482 - RNA, 24 nt, Human
uaaguacauaggucuuuauuuaaa

SEQ ID NO: 27483 - RNA, 24 nt, Human
acgaaaauugaacauucugacucg

SEQ ID NO: 27484 - RNA, 24 nt, Human
agcccgucacacucgcuucaagga

SEQ ID NO: 27485 - RNA, 24 nt, Human
ucuauucaugaacaaugcuauuuc

SEQ ID NO: 27486 - RNA, 24 nt, Human
uugaucuugaagaaacugggcgug

SEQ ID NO: 27487 - RNA, 24 nt, Human
uugguuccaagacgcguaggcgag

SEQ ID NO: 27488 - RNA, 24 nt, Human
guagaguuuucuucaggcuuaaag

SEQ ID NO: 27489 - RNA, 24 nt, Human
aggaaggagauauagugaagagga

SEQ ID NO: 27490 - RNA, 24 nt, Human
aggcaccacagugggaggcuggua

SEQ ID NO: 27491 - RNA, 18 nt, Human
ucagcagagaugacaggc

SEQ ID NO: 27492 - RNA, 24 nt, Human
uugaagccaguggggcaccaaucc

SEQ ID NO: 27493 - RNA, 24 nt, Human
ucugcaggcccaggacagugggcu

SEQ ID NO: 27494 - RNA, 24 nt, Human
ucgcacugucuuaaaauuccuaau

SEQ ID NO: 27495 - RNA, 24 nt, Human
uauuacucaggauuggaauucugc

SEQ ID NO: 27496 - RNA, 24 nt, Human
uacccuuggaagaauuaugaauuu

SEQ ID NO: 27497 - RNA, 24 nt, Human
guugcaauuggguuguuuuugauu

SEQ ID NO: 27498 - RNA, 24 nt, Human
uaucaaguaagcuuagugaaaauc

SEQ ID NO: 27499 - RNA, 24 nt, Human
auccaguugggcagcagggaaagg

SEQ ID NO: 27500 - RNA, 24 nt, Human
uagcgggguacuaggcagauuuua

SEQ ID NO: 27501 - RNA, 24 nt, Human
ucagucagguuggaauggaucuga

SEQ ID NO: 27502 - RNA, 24 nt, Human
uugacauuugaaggggcgaugacc

SEQ ID NO: 27503 - RNA, 24 nt, Human
uaagggaagaguagacagggaagg

SEQ ID NO: 27504 - RNA, 24 nt, Human
ucuggauucgguucuuggcuggga

SEQ ID NO: 27505 - RNA, 24 nt, Human
ugguguggcgcauagugcagagcc

SEQ ID NO: 27506 - RNA, 24 nt, Human
cuuggccagagcggagggggcucg

SEQ ID NO: 27507 - RNA, 24 nt, Human
ugcaaguuguggagagaaggagca

SEQ ID NO: 27508 - RNA, 24 nt, Human
uuuccaguucucuguguugucuuu

SEQ ID NO: 27509 - RNA, 24 nt, Human
aaggugaacuugucacuugguaug

SEQ ID NO: 27510 - RNA, 24 nt, Human
ugguggucuugagcuuuuggccug

SEQ ID NO: 27511 - RNA, 24 nt, Human
uucauaaaauuaagaccauguaag

SEQ ID NO: 27512 - RNA, 24 nt, Human
uuuguuggaaggugauggcucucc

SEQ ID NO: 27513 - RNA, 24 nt, Human
uaaaacauuuuauuuuaauuguua

SEQ ID NO: 27514 - RNA, 24 nt, Human
gggcacugaagaugaugcgaccca

SEQ ID NO: 27515 - RNA, 24 nt, Human
uuccugauguauacagugcuugua

SEQ ID NO: 27516 - RNA, 24 nt, Human
cugcaugcaucugcugcuggaggc

SEQ ID NO: 27517 - RNA, 24 nt, Human
cugcugcacuggccgccaaguaug

SEQ ID NO: 27518 - RNA, 24 nt, Human
gcagccuucggugcagucgucacu

SEQ ID NO: 27519 - RNA, 24 nt, Human
uaagguucucuggaguccccuugg

SEQ ID NO: 27520 - RNA, 24 nt, Human
uguuggauuggcaccugcugcaca

SEQ ID NO: 27521 - RNA, 24 nt, Human
ugacauggcuuuagauccuguuua

SEQ ID NO: 27522 - RNA, 24 nt, Human
uagcgcgcaguccgagagggccgg

SEQ ID NO: 27523 - RNA, 24 nt, Human
gcacuauugugaugaggcgccccu

SEQ ID NO: 27524 - RNA, 24 nt, Human
uagcgugcuuccgcacggcgagcc

SEQ ID NO: 27525 - RNA, 24 nt, Human
ggauaacaggauuauuuggucuuc

SEQ ID NO: 27526 - RNA, 24 nt, Human
ugagggaggaccggauuuauacau

SEQ ID NO: 27527 - RNA, 24 nt, Human
ugagcaaagaggccaagcagagac

SEQ ID NO: 27528 - RNA, 24 nt, Human
uagcagaguggaucuuguacuaac

SEQ ID NO: 27529 - RNA, 24 nt, Human
ucaguauaauaguugaauguguua

SEQ ID NO: 27530 - RNA, 24 nt, Human
uaagaaaacaggcuugaauuucac

SEQ ID NO: 27531 - RNA, 24 nt, Human
cuuggcccuggagaacaaaaaaaa

SEQ ID NO: 27532 - RNA, 24 nt, Human
uuucaccauguuggccaggcucgu

SEQ ID NO: 27533 - RNA, 23 nt, Human
uacaguuuguaguguuaaccucu

SEQ ID NO: 27534 - RNA, 24 nt, Human
gguggaggucacgcgcuugucgcu

SEQ ID NO: 27535 - RNA, 24 nt, Human
gugguugguguaaaugagugaggc

SEQ ID NO: 27536 - RNA, 19 nt, Human
cuuggauuaaggcgacagc

SEQ ID NO: 27537 - RNA, 24 nt, Human
ugagaaggcagguuccauugaaga

SEQ ID NO: 27538 - RNA, 24 nt, Human
auaauacacguuuccuaauguggg

SEQ ID NO: 27539 - RNA, 24 nt, Human
ugcaauggaccugauucuaguuua

SEQ ID NO: 27540 - RNA, 18 nt, Human
cccucggugccugcugug

SEQ ID NO: 27541 - RNA, 24 nt, Human
ugcauuguuaucauuaaccagucu

SEQ ID NO: 27542 - RNA, 24 nt, Human
uauuagggauaauauucauuuagc

SEQ ID NO: 27543 - RNA, 24 nt, Human
ggggagcagacaaguaccacuccg

SEQ ID NO: 27544 - RNA, 24 nt, Human
uaguuuagagucucauuaggaagc

SEQ ID NO: 27545 - RNA, 24 nt, Human
agcacuuugugcuggacgagugug

SEQ ID NO: 27546 - RNA, 24 nt, Human
uacaagcuacaaaauagcaucucu

SEQ ID NO: 27547 - RNA, 24 nt, Human
aaggaaacccuuguauucuuguga

SEQ ID NO: 27548 - RNA, 22 nt, Human
guggagggcagcuuugucuaca

SEQ ID NO: 27549 - RNA, 24 nt, Human
ugcccguaggacguaccuguugcc

SEQ ID NO: 27550 - RNA, 24 nt, Human
ucccccaguaccuccaagcaagua

SEQ ID NO: 27551 - RNA, 24 nt, Human
acccugguuugugaguugccccgg

SEQ ID NO: 27552 - RNA, 24 nt, Human
uggaggaggaugacgaugaugagc

SEQ ID NO: 27553 - RNA, 24 nt, Human
ugaagaaauggaagucuggagagg

SEQ ID NO: 27554 - RNA, 24 nt, Human
aagcaaacccaacccucgugauua

SEQ ID NO: 27555 - RNA, 24 nt, Human
ucuagagggguuggaugguccuau

SEQ ID NO: 27556 - RNA, 24 nt, Human
ugucucagccuugccaggguuaua

SEQ ID NO: 27557 - RNA, 24 nt, Human
uugcuugaaccugagaggcggagg

SEQ ID NO: 27558 - RNA, 24 nt, Human
ugugaaggcccugaacucugggag

SEQ ID NO: 27559 - RNA, 18 nt, Human
caucaaguguuuaguuua

SEQ ID NO: 27560 - RNA, 24 nt, Human
cugcagcacugucauccuugcucc

SEQ ID NO: 27561 - RNA, 24 nt, Human
ucuugcugaucagagcuugguugg

SEQ ID NO: 27562 - RNA, 24 nt, Human
aguugcuccagaaaaaccuguaaa

SEQ ID NO: 27563 - RNA, 24 nt, Human
gagcugagcgaagcgaugccuaaa

SEQ ID NO: 27564 - RNA, 24 nt, Human
uuguauguuuggauugcagaagaa

SEQ ID NO: 27565 - RNA, 24 nt, Human
gugaagugacugcuacccgguugc

SEQ ID NO: 27566 - RNA, 24 nt, Human
uggcuuuuauguaugauaccuaau

SEQ ID NO: 27567 - RNA, 24 nt, Human
gagcagcaacccacaguagguagg

SEQ ID NO: 27568 - RNA, 24 nt, Human
gagcagucaggguggaugggaagu

SEQ ID NO: 27569 - RNA, 24 nt, Human
uggucagggggcugcuggcugagc

SEQ ID NO: 27570 - RNA, 22 nt, Human
uuggacaacugccccuuccaug

SEQ ID NO: 27571 - RNA, 24 nt, Human
acaaagcaagagaagaagcagaga

SEQ ID NO: 27572 - RNA, 21 nt, Human
cauuggacaggacauccagcc

SEQ ID NO: 27573 - RNA, 24 nt, Human
cagcggcagagagccauccucuau

SEQ ID NO: 27574 - RNA, 24 nt, Human
agggagcgugggauuccggacugu

SEQ ID NO: 27575 - RNA, 24 nt, Human
gcucaaggugcagcgccucugcuc

SEQ ID NO: 27576 - RNA, 24 nt, Human
uuuucaaaaauuaccguggggggc

SEQ ID NO: 27577 - RNA, 24 nt, Human
aauugcgcuuaagaaaaauacuac

SEQ ID NO: 27578 - RNA, 24 nt, Human
gagccugcgggcggaagaggaagc

SEQ ID NO: 27579 - RNA, 24 nt, Human
ggacacgaggauacgcagcaagag

SEQ ID NO: 27580 - RNA, 24 nt, Human
agcccgagccaguccugagugggu

SEQ ID NO: 27581 - RNA, 24 nt, Human
uucuaggaggguggggucugccug

SEQ ID NO: 27582 - RNA, 24 nt, Human
ugccucaagcucuucucugccuca

SEQ ID NO: 27583 - RNA, 24 nt, Human
acgcgcugcccggccagaaaacgg

SEQ ID NO: 27584 - RNA, 24 nt, Human
gggcaucguggcugaggugcuggu

SEQ ID NO: 27585 - RNA, 24 nt, Human
gggcaaucuuccuggccaucaucc

SEQ ID NO: 27586 - RNA, 23 nt, Human
ccgccgcgcccccgccgccgccc

SEQ ID NO: 27587 - RNA, 24 nt, Human
uaggcccagguuuggcuggaaggu

SEQ ID NO: 27588 - RNA, 24 nt, Human
acgggaguggcccuucggcucccg

SEQ ID NO: 27589 - RNA, 24 nt, Human
uauauuguaacuauugaaguuacc

SEQ ID NO: 27590 - RNA, 24 nt, Human
uuaguuggugaauauguauuuucu

SEQ ID NO: 27591 - RNA, 24 nt, Human
accagauugaaaugguuugccauc

SEQ ID NO: 27592 - RNA, 23 nt, Human
cucgugccgcacugaacuggacc

SEQ ID NO: 27593 - RNA, 23 nt, Human
aggcccuagaacaaggugaagug

SEQ ID NO: 27594 - RNA, 24 nt, Human
agaacgcgccaaaggguagccccg

SEQ ID NO: 27595 - RNA, 24 nt, Human
ugucuugaguguugcgccucggcu

SEQ ID NO: 27596 - RNA, 24 nt, Human
cauuacuuccgggcacaugcccac

SEQ ID NO: 27597 - RNA, 24 nt, Human
uuccuaugugucucagcuuggggc

SEQ ID NO: 27598 - RNA, 22 nt, Human
uaucaggggccaucggaaaggc

SEQ ID NO: 27599 - RNA, 24 nt, Human
gucaugaaggcccugugggugcag

SEQ ID NO: 27600 - RNA, 24 nt, Human
uguggauggccccuccgggaaacu

SEQ ID NO: 27601 - RNA, 24 nt, Human
uauugugccaucaaugaccccuuc

SEQ ID NO: 27602 - RNA, 24 nt, Human
gcucauuugcaggggggagccaaa

SEQ ID NO: 27603 - RNA, 24 nt, Human
uggcucaggguggcuggcgcucac

SEQ ID NO: 27604 - RNA, 24 nt, Human
ugaggagucugcaguuccugagag

SEQ ID NO: 27605 - RNA, 24 nt, Human
ucugcagccauccugaaccccagu

SEQ ID NO: 27606 - RNA, 22 nt, Human
ucugaagaugucgaugucugug

SEQ ID NO: 27607 - RNA, 24 nt, Human
uaguaguugguggguaaauagaaa

SEQ ID NO: 27608 - RNA, 24 nt, Human
uaacagguuuccuuaugugccuca

SEQ ID NO: 27609 - RNA, 24 nt, Human
agaggacagaagcagaccacucug

SEQ ID NO: 27610 - RNA, 24 nt, Human
ugaauuggcuguguucaaggcaug

SEQ ID NO: 27611 - RNA, 21 nt, Human
uccgguagguggagguugcag

SEQ ID NO: 27612 - RNA, 24 nt, Human
ugacaaaaauggauguauuaauug

SEQ ID NO: 27613 - RNA, 24 nt, Human
cucugcucaaaaaaaaaacaauuc

SEQ ID NO: 27614 - RNA, 24 nt, Human
ucuccagagagugggaaggcugau

SEQ ID NO: 27615 - RNA, 24 nt, Human
uguaauccccccuguacuuaccua

SEQ ID NO: 27616 - RNA, 24 nt, Human
uauuuuguugcugaucaaauacug

SEQ ID NO: 27617 - RNA, 24 nt, Human
ucaguagccguccccccggaaagg

SEQ ID NO: 27618 - RNA, 24 nt, Human
uccacugauuucucaucuuccucc

SEQ ID NO: 27619 - RNA, 23 nt, Human
gcaguggaggggccacaucugga

SEQ ID NO: 27620 - RNA, 23 nt, Human
aagcaggcacaaaugcaugagca

SEQ ID NO: 27621 - RNA, 22 nt, Human
auaaaguuuaaugaccucaucc

SEQ ID NO: 27622 - RNA, 24 nt, Human
uucaucuuguuuuuccuuggcuuc

SEQ ID NO: 27623 - RNA, 24 nt, Human
ucuuucuuuuuaauguguccagcu

SEQ ID NO: 27624 - RNA, 24 nt, Human
guggaaugacucuuugaccacgcg

SEQ ID NO: 27625 - RNA, 24 nt, Human
agguagcaaauuccucccuguaaa

SEQ ID NO: 27626 - RNA, 24 nt, Human
auggagcaguagucaaguuuggcc

SEQ ID NO: 27627 - RNA, 24 nt, Human
ugugcaaaguguggacugccgcuc

SEQ ID NO: 27628 - RNA, 24 nt, Human
ggcccgggcccccuuuuuaaaacc

SEQ ID NO: 27629 - RNA, 24 nt, Human
aggaguuucuuccaaacuucacca

SEQ ID NO: 27630 - RNA, 24 nt, Human
uaggggcacuaguuucagaaaaaa

SEQ ID NO: 27631 - RNA, 24 nt, Human
ugaguuguuggugccugcccuucc

SEQ ID NO: 27632 - RNA, 24 nt, Human
aagcguuaucugcaaagcaauucg

SEQ ID NO: 27633 - RNA, 24 nt, Human
cuggcugggcccaagugggguggg

SEQ ID NO: 27634 - RNA, 24 nt, Human
uguguuuguagacuuggaacccac

SEQ ID NO: 27635 - RNA, 24 nt, Human
uguggauauaguuuucccuguugg

SEQ ID NO: 27636 - RNA, 24 nt, Human
ugacuaaagaaaccugcugcacau

SEQ ID NO: 27637 - RNA, 24 nt, Human
gagcaugcaucuucucggugagcc

SEQ ID NO: 27638 - RNA, 24 nt, Human
caugcacggaggacacgcccauug

SEQ ID NO: 27639 - RNA, 24 nt, Human
uucauccgcgggcaaacuauaggc

SEQ ID NO: 27640 - RNA, 24 nt, Human
uaaccacaacgaggcggcgggaau

SEQ ID NO: 27641 - RNA, 24 nt, Human
acugcagccugggagacagaguga

SEQ ID NO: 27642 - RNA, 24 nt, Human
uagaaguauacgugugugucucca

SEQ ID NO: 27643 - RNA, 24 nt, Human
augcaguucacuuuugcagugccc

SEQ ID NO: 27644 - RNA, 24 nt, Human
ucaaauccgugacacuggagcagu

SEQ ID NO: 27645 - RNA, 24 nt, Human
uaacagguguaagaguguugaaaa

SEQ ID NO: 27646 - RNA, 24 nt, Human
uggcuuauuuguuuuguauucaau

SEQ ID NO: 27647 - RNA, 24 nt, Human
ucaguuaaaaaagaagaagaagaa

SEQ ID NO: 27648 - RNA, 24 nt, Human
ucugaucaauccuucuuuuucucu

SEQ ID NO: 27649 - RNA, 24 nt, Human
uaaugggucucaaaauucugugac

SEQ ID NO: 27650 - RNA, 24 nt, Human
uauuagggauaauauucauuuagc

SEQ ID NO: 27651 - RNA, 24 nt, Human
agggauuaaauauagauguaauuu

SEQ ID NO: 27652 - RNA, 22 nt, Human
ugacacggugaaacccugucuc

SEQ ID NO: 27653 - RNA, 24 nt, Human
cucacgccuguaaucccagcacuu

SEQ ID NO: 27654 - RNA, 24 nt, Human
uaacagguguaagaguguugaaaa

SEQ ID NO: 27655 - RNA, 24 nt, Human
ugugcagaagaaauggaaggauuc

SEQ ID NO: 27656 - RNA, 24 nt, Human
uaucaaggaagggcaggcgugaug

SEQ ID NO: 27657 - RNA, 24 nt, Human
agaggaagaagaaauggcaaagag

SEQ ID NO: 27658 - RNA, 24 nt, Human
aaguauauaguaaugaaaagccuu

SEQ ID NO: 27659 - RNA, 24 nt, Human
uaauaugcccuauggcuggaaauu

SEQ ID NO: 27660 - RNA, 24 nt, Human
agcuggggggcaagaaccccuaua

SEQ ID NO: 27661 - RNA, 24 nt, Human
ugugaagcccgagaugcaggaagg

SEQ ID NO: 27662 - RNA, 24 nt, Human
uggcauguauagugagguuaagga

SEQ ID NO: 27663 - RNA, 24 nt, Human
cgcccguaauccgcuaccaggaag

SEQ ID NO: 27664 - RNA, 24 nt, Human
uggugugagggaaucaagaagaac

SEQ ID NO: 27665 - RNA, 20 nt, Human
aacauggugaaacuccaucu

SEQ ID NO: 27666 - RNA, 24 nt, Human
ugggaggcugaggcacaagaauca

SEQ ID NO: 27667 - RNA, 24 nt, Human
uuccuggaaggguagauucugcua

SEQ ID NO: 27668 - RNA, 24 nt, Human
ucuuguggugguagagccagaaga

SEQ ID NO: 27669 - RNA, 24 nt, Human
aagcuucaagugaccagucagcac

SEQ ID NO: 27670 - RNA, 24 nt, Human
ugaaguggucugcucauaguuugu

SEQ ID NO: 27671 - RNA, 24 nt, Human
cagcaguaccaacaccugcccucg

SEQ ID NO: 27672 - RNA, 24 nt, Human
acaccauccggaagaugaagaacg

SEQ ID NO: 27673 - RNA, 24 nt, Human
uugaucuugaagaaacugggcgug

SEQ ID NO: 27674 - RNA, 24 nt, Human
guagaguuuucuucaggcuuaaag

SEQ ID NO: 27675 - RNA, 24 nt, Human
uauuuuuaaaacuuuauuuuaaaa

SEQ ID NO: 27676 - RNA, 21 nt, Human
uuuguaagcuucugagauugc

SEQ ID NO: 27677 - RNA, 24 nt, Human
cuggaaggcauacccuacaauuua

SEQ ID NO: 27678 - RNA, 24 nt, Human
ugccucaagcucuucucugccuca

SEQ ID NO: 27679 - RNA, 24 nt, Human
aauugauuaaugacaugagggcac

SEQ ID NO: 27680 - RNA, 24 nt, Human
uuagaaaaacuaggaaaaaagaua

SEQ ID NO: 27681 - RNA, 24 nt, Human
ugcauuguuaucauuaaccagucu

SEQ ID NO: 27682 - RNA, 24 nt, Human
cauuucaaauauaguuuuaaugac

SEQ ID NO: 27683 - RNA, 24 nt, Human
uaguagagaugcgacucacggaga

SEQ ID NO: 27684 - RNA, 24 nt, Human
ugcucugugugcucacaaguguuc

SEQ ID NO: 27685 - RNA, 23 nt, Human
ugccccuuccaggcuugucucug

SEQ ID NO: 27686 - RNA, 24 nt, Human
cagcucacgcgguugucguggcca

SEQ ID NO: 27687 - RNA, 24 nt, Human
ccagccccgcagcccuggccugua

SEQ ID NO: 27688 - RNA, 24 nt, Human
ucauaguggcaggguggggguggg

SEQ ID NO: 27689 - RNA, 24 nt, Human
ugccaggaaagggacauggaccca

SEQ ID NO: 27690 - RNA, 24 nt, Human
aggcugcagccucaugccaugucu

SEQ ID NO: 27691 - RNA, 24 nt, Human
gaggauccuguccuggcuguagcc

SEQ ID NO: 27692 - RNA, 24 nt, Human
ucuaccagcguucuuuugaguucu

SEQ ID NO: 27693 - RNA, 24 nt, Human
guccuggaauuguaaagauguguc

SEQ ID NO: 27694 - RNA, 24 nt, Human
uugcuuccuguauuggcugcaagu

SEQ ID NO: 27695 - RNA, 24 nt, Human
caucacagaggcucuuaaagugug

SEQ ID NO: 27696 - RNA, 24 nt, Human
ucuaacagccugcccgugcuuucc

SEQ ID NO: 27697 - RNA, 24 nt, Human
ugcgggaagccggacucugggcgu

SEQ ID NO: 27698 - RNA, 24 nt, Human
auggugcuuugcucuguguuugug

SEQ ID NO: 27699 - RNA, 24 nt, Human
uguuaaauuaaaauuuuuuuuuuu

SEQ ID NO: 27700 - RNA, 24 nt, Human
gagguucuggaugaaggcugaaca

SEQ ID NO: 27701 - RNA, 24 nt, Human
aucgcccucuacauggcuucgcag

SEQ ID NO: 27702 - RNA, 24 nt, Human
uuaguucuugaaacaaaauacuuc

SEQ ID NO: 27703 - RNA, 24 nt, Human
uguucuggagcuguuggacaaaua

SEQ ID NO: 27704 - RNA, 24 nt, Human
aggcagucacagaacaggggcaug

SEQ ID NO: 27705 - RNA, 24 nt, Human
aaccagaaaguaagguguucuacu

SEQ ID NO: 27706 - RNA, 24 nt, Human
cggccaggcugggcgcgcagggcc

SEQ ID NO: 27707 - RNA, 24 nt, Human
gugcaaccucggccgaggccuucc

SEQ ID NO: 27708 - RNA, 24 nt, Human
ugcgauguuuuaccuggcugcggc

SEQ ID NO: 27709 - RNA, 20 nt, Human
cugcgcccccuccugccagg

SEQ ID NO: 27710 - RNA, 24 nt, Human
gcagcagaaaggccgcggcauggg

SEQ ID NO: 27711 - RNA, 24 nt, Human
uucuguguucuggugaggccaugg

SEQ ID NO: 27712 - RNA, 24 nt, Human
cuugucaucuuuccagcuuccugu

SEQ ID NO: 27713 - RNA, 24 nt, Human
uuaguucuaaagaucagagaaaaa

SEQ ID NO: 27714 - RNA, 24 nt, Human
uaagaagaacuuaaagguagaggc

SEQ ID NO: 27715 - RNA, 24 nt, Human
cagagaguauaaugaagaaucuua

SEQ ID NO: 27716 - RNA, 24 nt, Human
uccaaaaggagcugcaauuuuaaa

SEQ ID NO: 27717 - RNA, 24 nt, Human
gagcagaagacagagcuggugugc

SEQ ID NO: 27718 - RNA, 24 nt, Human
uccccaagcugcugcccaaggucc

SEQ ID NO: 27719 - RNA, 24 nt, Human
uggaacacuacaucuuggaaacag

SEQ ID NO: 27720 - RNA, 20 nt, Human
ugagagaacacuccacgaug

SEQ ID NO: 27721 - RNA, 24 nt, Human
aaagcaaaugaggcagaaaggccc

SEQ ID NO: 27722 - RNA, 17 nt, Human
ugucacgguccgcggag

SEQ ID NO: 27723 - RNA, 24 nt, Human
gcuuuugggaagcaggacguucuc

SEQ ID NO: 27724 - RNA, 24 nt, Human
gccccuggcuugggcgaccauguc

SEQ ID NO: 27725 - RNA, 23 nt, Human
uaggaagauaggcgacucugggc

SEQ ID NO: 27726 - RNA, 24 nt, Human
uuccuggguauggaguccuguccu

SEQ ID NO: 27727 - RNA, 24 nt, Human
caggagccaaacaggccgcaagag

SEQ ID NO: 27728 - RNA, 24 nt, Human
uguggauauaguuuucccuguugg

SEQ ID NO: 27729 - RNA, 24 nt, Human
ugacuaaagaaaccugcugcacau

SEQ ID NO: 27730 - RNA, 24 nt, Human
gagcaugcaucuucucggugagcc

SEQ ID NO: 27731 - RNA, 22 nt, Human
ugagacagaauuugaaauuguu

SEQ ID NO: 27732 - RNA, 24 nt, Human
agggaccaggagcugcugcgaacu

SEQ ID NO: 27733 - RNA, 24 nt, Human
uccuugggcgcggggcuucaucau

SEQ ID NO: 27734 - RNA, 24 nt, Human
aggggucacuuccagaacugaguc

SEQ ID NO: 27735 - RNA, 24 nt, Human
caugcgccugguggaggccugugg

SEQ ID NO: 27736 - RNA, 24 nt, Human
aaccuuuguacuuguuuuccuccu

SEQ ID NO: 27737 - RNA, 17 nt, Human
uccaugagagaauauaa

SEQ ID NO: 27738 - RNA, 24 nt, Human
cagccuggacuuaccaccacuaaa

SEQ ID NO: 27739 - RNA, 24 nt, Human
ggcccggagcggagcgcgcccugc

SEQ ID NO: 27740 - RNA, 24 nt, Human
cgacggaaagaucggggaaacucc

SEQ ID NO: 27741 - RNA, 24 nt, Human
uuggcacacucuauccgaaauuug

SEQ ID NO: 27742 - RNA, 24 nt, Human
ucuggccucugaaacacuaccacu

SEQ ID NO: 27743 - RNA, 24 nt, Human
acucgcugcacaagaacagcguca

SEQ ID NO: 27744 - RNA, 24 nt, Human
gcccccucccucuuaauuuaauuc

SEQ ID NO: 27745 - RNA, 24 nt, Human
uaugucaccaugcaguugccagug

SEQ ID NO: 27746 - RNA, 23 nt, Human
gaugacacuuaagaccuacuugu

SEQ ID NO: 27747 - RNA, 24 nt, Human
cuggugcagagccgcgagggugug

SEQ ID NO: 27748 - RNA, 24 nt, Human
ugagucaagagucauggauccagg

SEQ ID NO: 27749 - RNA, 24 nt, Human
uugaaucuuucuggaagaaauggu

SEQ ID NO: 27750 - RNA, 24 nt, Human
uccacuggcgaaagaugccuuucu

SEQ ID NO: 27751 - RNA, 24 nt, Human
uaguucagauugaucuuaggucaa

SEQ ID NO: 27752 - RNA, 21 nt, Human
guggaucccagaaucccgaag

SEQ ID NO: 27753 - RNA, 24 nt, Human
acgcguguuguugggacucuggga

SEQ ID NO: 27754 - RNA, 24 nt, Human
uaagagguuggaacgccugggccu

SEQ ID NO: 27755 - RNA, 24 nt, Human
cguaaguugccauuggccuuuggg

SEQ ID NO: 27756 - RNA, 24 nt, Human
agucgauacucggacgccgagagc

SEQ ID NO: 27757 - RNA, 24 nt, Human
ccuggcuaagaaguugcuuccugu

SEQ ID NO: 27758 - RNA, 24 nt, Human
uguggccaguaccaagagucggug

SEQ ID NO: 27759 - RNA, 24 nt, Human
cucccuaggcgucccaucucgcuu

SEQ ID NO: 27760 - RNA, 24 nt, Human
uuuugaaaucguacucuucaaagg

SEQ ID NO: 27761 - RNA, 24 nt, Human
ucugcauuggcugcugggcauaug

SEQ ID NO: 27762 - RNA, 23 nt, Human
uucaugcccucuugcaucguuaa

SEQ ID NO: 27763 - RNA, 24 nt, Human
guccccuucagcaaggagggcggc

SEQ ID NO: 27764 - RNA, 24 nt, Human
acgcagccccagcccggccccccu

SEQ ID NO: 27765 - RNA, 24 nt, Human
ugcauuguuaucauuaaccagucu

SEQ ID NO: 27766 - RNA, 24 nt, Human
uauuagggauaauauucauuuagc

SEQ ID NO: 27767 - RNA, 24 nt, Human
uaaugggucucaaaauucugugac

SEQ ID NO: 27768 - RNA, 24 nt, Human
ccagugcagucucuggcaucucua

SEQ ID NO: 27769 - RNA, 24 nt, Human
uggcaguacgggcccugcaccggg

SEQ ID NO: 27770 - RNA, 24 nt, Human
gcgcaugguggcccggcccccuau

SEQ ID NO: 27771 - RNA, 24 nt, Human
uuggaaccgaucuuguaauaagaa

SEQ ID NO: 27772 - RNA, 23 nt, Human
ucauaggucacauuccacaagga

SEQ ID NO: 27773 - RNA, 24 nt, Human
cagcgguauucuggugcuuauggu

SEQ ID NO: 27774 - RNA, 22 nt, Human
accguggugaagggcauccggc

SEQ ID NO: 27775 - RNA, 24 nt, Human
uuugcagacuaugaagccuacaug

SEQ ID NO: 27776 - RNA, 24 nt, Human
ggcgccaacguggagauggccgag

SEQ ID NO: 27777 - RNA, 24 nt, Human
gggcaaguucuccagugaccggac

SEQ ID NO: 27778 - RNA, 24 nt, Human
ucagugccugauggaguggccggg

SEQ ID NO: 27779 - RNA, 24 nt, Human
uuugcaauugggucagauggucuu

SEQ ID NO: 27780 - RNA, 24 nt, Human
cuccucccaacugauauccaggcu

SEQ ID NO: 27781 - RNA, 24 nt, Human
uaccaugcaggccuuuuuggaccu

SEQ ID NO: 27782 - RNA, 24 nt, Human
uggcaggccaugggcccucaggau

SEQ ID NO: 27783 - RNA, 24 nt, Human
ggaguggugggcaauuagccuguc

SEQ ID NO: 27784 - RNA, 24 nt, Human
ugcuggaaucacuuuugccaaagg

SEQ ID NO: 27785 - RNA, 24 nt, Human
ugaagucauuuuccuuugugagag

SEQ ID NO: 27786 - RNA, 24 nt, Human
ugugcagaagaaauggaaggauuc

SEQ ID NO: 27787 - RNA, 24 nt, Human
uggcaauaucaaggaagggcaggc

SEQ ID NO: 27788 - RNA, 24 nt, Human
uucaaauuucuuucuuuuuuaauu

SEQ ID NO: 27789 - RNA, 24 nt, Human
ucaauuuuuauuuugguuuucuua

SEQ ID NO: 27790 - RNA, 24 nt, Human
ucuuuuggcuuaauuuagaauacu

SEQ ID NO: 27791 - RNA, 24 nt, Human
uucccaugccccaggcuccugcag

SEQ ID NO: 27792 - RNA, 24 nt, Human
uuccuagauaacaucuagucuuag

SEQ ID NO: 27793 - RNA, 24 nt, Human
ccuccaagcagugugaugucgacu

SEQ ID NO: 27794 - RNA, 24 nt, Human
uacauggagagccuccaguuucuc

SEQ ID NO: 27795 - RNA, 24 nt, Human
ccccgaaucagugacucggaaagu

SEQ ID NO: 27796 - RNA, 24 nt, Human
uggacagaaaaaaguuucacaguu

SEQ ID NO: 27797 - RNA, 19 nt, Human
uauaagaagacacuguauc

SEQ ID NO: 27798 - RNA, 24 nt, Human
cuuuagcuguaaacugaaaacaau

SEQ ID NO: 27799 - RNA, 24 nt, Human
uguauacauauuauauauaaauau

SEQ ID NO: 27800 - RNA, 24 nt, Human
cuggagcagguccaccggccccua

SEQ ID NO: 27801 - RNA, 24 nt, Human
ccaggccaaaaaagcucaacauuu

SEQ ID NO: 27802 - RNA, 18 nt, Human
caccgcaguucaguaugc

SEQ ID NO: 27803 - RNA, 22 nt, Human
cgccgggacagcagacugccgg

SEQ ID NO: 27804 - RNA, 24 nt, Human
ccggagcggagcgcgcccugcccu

SEQ ID NO: 27805 - RNA, 24 nt, Human
gaaggugcugacuuccuugggaga

SEQ ID NO: 27806 - RNA, 24 nt, Human
gugaagauuguccccaguggaugg

SEQ ID NO: 27807 - RNA, 24 nt, Human
uagcaaaggugcaucugucauccg

SEQ ID NO: 27808 - RNA, 24 nt, Human
uaccuggaccaaacaaaugggauu

SEQ ID NO: 27809 - RNA, 24 nt, Human
ucccuuuuccccucaaaggagaac

SEQ ID NO: 27810 - RNA, 24 nt, Human
uugggauuauagguaugagucucc

SEQ ID NO: 27811 - RNA, 24 nt, Human
uauagaacgucccggcccauacuu

SEQ ID NO: 27812 - RNA, 24 nt, Human
agguggguuucagggcgcugagaa

SEQ ID NO: 27813 - RNA, 22 nt, Human
uaaguguagacgcggcccaggc

SEQ ID NO: 27814 - RNA, 24 nt, Human
uugaucuugaagaaacugggcgug

SEQ ID NO: 27815 - RNA, 23 nt, Human
uccgugcgcguugcugcggccgu

SEQ ID NO: 27816 - RNA, 24 nt, Human
ucaagcuacuuccugagcuucucu

SEQ ID NO: 27817 - RNA, 19 nt, Human
ucugaagccuuguucacuu

SEQ ID NO: 27818 - RNA, 24 nt, Human
ugaagcugaggccauuuuuacaag

SEQ ID NO: 27819 - RNA, 23 nt, Human
uauuucgccccaggagagagagg

SEQ ID NO: 27820 - RNA, 24 nt, Human
gcgccuuugaaggggggggggggu

SEQ ID NO: 27821 - RNA, 19 nt, Human
guccuuuuucccccccccu

SEQ ID NO: 27822 - RNA, 24 nt, Human
uuuuugggaaaaaaacaaaauuuu

SEQ ID NO: 27823 - RNA, 24 nt, Human
ugugaugaugaagcaugguuacau

SEQ ID NO: 27824 - RNA, 24 nt, Human
ccgccgggaagcugguuuuacccg

SEQ ID NO: 27825 - RNA, 24 nt, Human
cgguauggagagcggcacacgccg

SEQ ID NO: 27826 - RNA, 19 nt, Human
uaucugagcuccugcugcc

SEQ ID NO: 27827 - RNA, 18 nt, Human
ugccaaggaaauuugggg

SEQ ID NO: 27828 - RNA, 24 nt, Human
guggagggcccuauggacacccca

SEQ ID NO: 27829 - RNA, 24 nt, Human
ugagaaugaccccaagaccuuuga

SEQ ID NO: 27830 - RNA, 24 nt, Human
cuuccaaucugaugggcauguuug

SEQ ID NO: 27831 - RNA, 22 nt, Human
guggagggcagcuuugucuaca

SEQ ID NO: 27832 - RNA, 20 nt, Human
uacaacguuuggggaccaau

SEQ ID NO: 27833 - RNA, 24 nt, Human
uucgaugguuaagaaaggggcgug

SEQ ID NO: 27834 - RNA, 24 nt, Human
ugcagcaguguguggagcaggggg

SEQ ID NO: 27835 - RNA, 24 nt, Human
ugagguugugcaauggguugugaa

SEQ ID NO: 27836 - RNA, 24 nt, Human
caagucccaggacccccggaaucc

SEQ ID NO: 27837 - RNA, 19 nt, Human
uccucggggccgcuugugg

SEQ ID NO: 27838 - RNA, 24 nt, Human
aggcggagcugcugaaccugagga

SEQ ID NO: 27839 - RNA, 23 nt, Human
uuggcauuuuacuagggagcagg

SEQ ID NO: 27840 - RNA, 24 nt, Human
acuaggaauucugucauccccagu

SEQ ID NO: 27841 - RNA, 24 nt, Human
uuuuugguuuugacaucauucauu

SEQ ID NO: 27842 - RNA, 24 nt, Human
ucagaacucauuuggugguggcaa

SEQ ID NO: 27843 - RNA, 24 nt, Human
uuagcuguggccacuguggauuuu

SEQ ID NO: 27844 - RNA, 24 nt, Human
aauauuauuacaagguuucagagg

SEQ ID NO: 27845 - RNA, 24 nt, Human
uaaguucugauuuauuuucuuacu

SEQ ID NO: 27846 - RNA, 24 nt, Human
uagaauucauuauuuaauuuaccu

SEQ ID NO: 27847 - RNA, 24 nt, Human
guggcccgcuauagucguuagccg

SEQ ID NO: 27848 - RNA, 24 nt, Human
acgcaauuccuuugucgcgaugcc

SEQ ID NO: 27849 - RNA, 24 nt, Human
agccugggcaauauagugagaccu

SEQ ID NO: 27850 - RNA, 24 nt, Human
ccaguguaggcugggagugguggc

SEQ ID NO: 27851 - RNA, 24 nt, Human
ucaaagaaccucuggguccauggg

SEQ ID NO: 27852 - RNA, 24 nt, Human
caggauccacaugcagcuugucac

SEQ ID NO: 27853 - RNA, 24 nt, Human
ucccaaggaagucagcaccuucuu

SEQ ID NO: 27854 - RNA, 24 nt, Human
cgggagcaccagcucgcuaucaag

SEQ ID NO: 27855 - RNA, 24 nt, Human
uggcuaaagaaggaaaacuccauu

SEQ ID NO: 27856 - RNA, 24 nt, Human
uucccuggagguaagcggcccuca

SEQ ID NO: 27857 - RNA, 24 nt, Human
ucucgcuauguugaugaggcuggu

SEQ ID NO: 27858 - RNA, 24 nt, Human
aguggaacguugguacccuuggau

SEQ ID NO: 27859 - RNA, 24 nt, Human
uaccuuacagugcuacauuaucuc

SEQ ID NO: 27860 - RNA, 24 nt, Human
ugaacguuggacccuuggauuugc

SEQ ID NO: 27861 - RNA, 24 nt, Human
uaagcuccaccauuaccccugaag

SEQ ID NO: 27862 - RNA, 24 nt, Human
cauuaaagcuguggauagcuuggu

SEQ ID NO: 27863 - RNA, 24 nt, Human
uugaucuugaagaaacugggcgug

SEQ ID NO: 27864 - RNA, 24 nt, Human
uuccaguuggugaggagcuguugg

SEQ ID NO: 27865 - RNA, 24 nt, Human
guagaguuuucuucaggcuuaaag

SEQ ID NO: 27866 - RNA, 24 nt, Human
uauggcaagucacuuugacagaca

SEQ ID NO: 27867 - RNA, 24 nt, Human
uacaccacucccaagaagaauaag

SEQ ID NO: 27868 - RNA, 24 nt, Human
uuaaugcaguauguucuuuuuauu

SEQ ID NO: 27869 - RNA, 24 nt, Human
cagcaucagucuuaguuuguauag

SEQ ID NO: 27870 - RNA, 24 nt, Human
uauggcaagucacuuugacagaca

SEQ ID NO: 27871 - RNA, 24 nt, Human
ugagaauggcaaaauuagucgccu

SEQ ID NO: 27872 - RNA, 24 nt, Human
uacaccacucccaagaagaauaag

SEQ ID NO: 27873 - RNA, 24 nt, Human
aggaaggagauauagugaagagga

SEQ ID NO: 27874 - RNA, 24 nt, Human
guagaguuuucuuuaggcuuaaag

SEQ ID NO: 27875 - RNA, 24 nt, Human
aagccagcacuauccuuggggaca

SEQ ID NO: 27876 - RNA, 24 nt, Human
uauuuugaggguggaaaauuaaaa

SEQ ID NO: 27877 - RNA, 24 nt, Human
uaaggaauugagcgcagaaaaguu

SEQ ID NO: 27878 - RNA, 24 nt, Human
aaggaaccauggccaacugugagc

SEQ ID NO: 27879 - RNA, 24 nt, Human
ugaaugacaggagggcagaccaca

SEQ ID NO: 27880 - RNA, 24 nt, Human
ucaggccugaccaacaguugugug

SEQ ID NO: 27881 - RNA, 24 nt, Human
uuuuauuuauuuuuuuuuuggguc

SEQ ID NO: 27882 - RNA, 24 nt, Human
ugugcauacuuaaagcucaguaca

SEQ ID NO: 27883 - RNA, 24 nt, Human
uugcugaaucuauaguugcuuccu

SEQ ID NO: 27884 - RNA, 24 nt, Human
acuugcagagagaguuuucuacug

SEQ ID NO: 27885 - RNA, 24 nt, Human
ucggaacugaacaguggaauucca

SEQ ID NO: 27886 - RNA, 24 nt, Human
acagaacaaagggcgagcucuaaa

SEQ ID NO: 27887 - RNA, 24 nt, Human
agaccggagcacuggccaguggag

SEQ ID NO: 27888 - RNA, 24 nt, Human
uggcugcaaggacccggcccaggg

SEQ ID NO: 27889 - RNA, 24 nt, Human
ugggcagaaacugcaggggcccca

SEQ ID NO: 27890 - RNA, 24 nt, Human
augcuguucgacgacaccaagugu

SEQ ID NO: 27891 - RNA, 24 nt, Human
cauuccagacaggacaaggaccau

SEQ ID NO: 27892 - RNA, 24 nt, Human
ucagccccccaacagcuuccucag

SEQ ID NO: 27893 - RNA, 24 nt, Human
guuccuguaaacauccaucgcagc

SEQ ID NO: 27894 - RNA, 24 nt, Human
ccuuuaguggaacucuucuccuca

SEQ ID NO: 27895 - RNA, 24 nt, Human
guacagcaagcacugacagugagu

SEQ ID NO: 27896 - RNA, 24 nt, Human
uauggcaagucacuuugacagaca

SEQ ID NO: 27897 - RNA, 24 nt, Human
uacaccacucccaagaagaauaag

SEQ ID NO: 27898 - RNA, 24 nt, Human
augcagccuaaaaggugguugaaa

SEQ ID NO: 27899 - RNA, 24 nt, Human
ugccaguucccccuggugaaccau

SEQ ID NO: 27900 - RNA, 24 nt, Human
agaccuggaauccaaccgcacaau

SEQ ID NO: 27901 - RNA, 24 nt, Human
ucugcaggagugcaaugcuauggc

SEQ ID NO: 27902 - RNA, 23 nt, Human
uuccagaggaggagcagggaucu

SEQ ID NO: 27903 - RNA, 24 nt, Human
caugaggccagccgugccucccag

SEQ ID NO: 27904 - RNA, 21 nt, Human
uggguguggacgucuaugacc

SEQ ID NO: 27905 - RNA, 21 nt, Human
aaguauguaaugauuuaauua

SEQ ID NO: 27906 - RNA, 24 nt, Human
uuaaaacugcaagaaaaugcuaca

SEQ ID NO: 27907 - RNA, 24 nt, Human
ugugguggcgacuggcgcgaccca

SEQ ID NO: 27908 - RNA, 24 nt, Human
caagaucgugcgcggggaccagcc

SEQ ID NO: 27909 - RNA, 18 nt, Human
ugaaagcauucaggucug

SEQ ID NO: 27910 - RNA, 24 nt, Human
ugcuuggagagaccccgcagagcc

SEQ ID NO: 27911 - RNA, 24 nt, Human
ucuggcaggaagcauccagggccc

SEQ ID NO: 27912 - RNA, 24 nt, Human
caggguuucaccauguuggccagg

SEQ ID NO: 27913 - RNA, 24 nt, Human
ccuugcccacagcccuuccagcug

SEQ ID NO: 27914 - RNA, 24 nt, Human
uuuuguauaacuuuuauucuuaga

SEQ ID NO: 27915 - RNA, 24 nt, Human
acaguccaaaugaaguuaaagugg

SEQ ID NO: 27916 - RNA, 24 nt, Human
aggcagcgcgcccggcucccgcgc

SEQ ID NO: 27917 - RNA, 24 nt, Human
uggaagcgacggcccguacaaaga

SEQ ID NO: 27918 - RNA, 24 nt, Human
uuccuggucggguccagugugaaa

SEQ ID NO: 27919 - RNA, 24 nt, Human
ucuccagugaacuguuuuagaaaa

SEQ ID NO: 27920 - RNA, 24 nt, Human
uugcuucuacuuuugaggcgcuuc

SEQ ID NO: 27921 - RNA, 24 nt, Human
uagcaacagaaaugggccccacag

SEQ ID NO: 27922 - RNA, 24 nt, Human
gugcggcggcgcaaggggucagca

SEQ ID NO: 27923 - RNA, 24 nt, Human
ugcauuguuaucauuaaccagucu

SEQ ID NO: 27924 - RNA, 24 nt, Human
uaaugggucucaaaauucugugac

SEQ ID NO: 27925 - RNA, 24 nt, Human
aaccagcgcguuucucaccggcuu

SEQ ID NO: 27926 - RNA, 21 nt, Human
ugaccaggguacggcaggcgc

SEQ ID NO: 27927 - RNA, 22 nt, Human
ucacuuccggaucggggucgac

SEQ ID NO: 27928 - RNA, 24 nt, Human
aagcggcagcggaggcggcgggcc

SEQ ID NO: 27929 - RNA, 24 nt, Human
uggcuuaguacaaaaauccauagu

SEQ ID NO: 27930 - RNA, 24 nt, Human
caagguguuuuuauugaggucuca

SEQ ID NO: 27931 - RNA, 24 nt, Human
uucaagcugacagagaagcugacg

SEQ ID NO: 27932 - RNA, 21 nt, Human
aagcuggucuccacacagugc

SEQ ID NO: 27933 - RNA, 24 nt, Human
ucagagcaacggcccaagucuggg

SEQ ID NO: 27934 - RNA, 24 nt, Human
ucagugugcaaaagugcuuugaag

SEQ ID NO: 27935 - RNA, 24 nt, Human
uugguacuugagucaaagacgaca

SEQ ID NO: 27936 - RNA, 24 nt, Human
caccauaggaguugccaucagaga

SEQ ID NO: 27937 - RNA, 24 nt, Human
uaccccaguccacgguguucuggc

SEQ ID NO: 27938 - RNA, 24 nt, Human
uggggucaugccgaacacccauga

SEQ ID NO: 27939 - RNA, 24 nt, Human
uggaagacagcuacgggcagcagu

SEQ ID NO: 27940 - RNA, 24 nt, Human
uugaucuugaagaaacugggcgug

SEQ ID NO: 27941 - RNA, 24 nt, Human
aggaaggagauauagugaagagga

SEQ ID NO: 27942 - RNA, 24 nt, Human
uagcuuggugccaauuggucgugg

SEQ ID NO: 27943 - RNA, 24 nt, Human
guagaguuuucuucaggcuuaaag

SEQ ID NO: 27944 - RNA, 24 nt, Human
ccugucuaaccucuucuguggagu

SEQ ID NO: 27945 - RNA, 18 nt, Human
uggcaugguuccugacgg

SEQ ID NO: 27946 - RNA, 24 nt, Human
ucugugguuggggcagccuggggc

SEQ ID NO: 27947 - RNA, 24 nt, Human
uuuguagcuccggccccgccguuc

SEQ ID NO: 27948 - RNA, 24 nt, Human
aggcuguggccaucuacggcauca

SEQ ID NO: 27949 - RNA, 24 nt, Human
cugcggccguugaguaguuuucaa

SEQ ID NO: 27950 - RNA, 24 nt, Human
cagcagcuccaagaaggaaccaag

SEQ ID NO: 27951 - RNA, 24 nt, Human
gacacauuacggcaggcaaggaca

SEQ ID NO: 27952 - RNA, 24 nt, Human
uaacuuagcuaagcccuuugcaca

SEQ ID NO: 27953 - RNA, 24 nt, Human
ucuuuauucauuuauuuauuuauu

SEQ ID NO: 27954 - RNA, 24 nt, Human
aaucaaguucaccgaaaaucagug

SEQ ID NO: 27955 - RNA, 24 nt, Human
ugugauaaauugauuaauguuaga

SEQ ID NO: 27956 - RNA, 24 nt, Human
agacuggaaucaugagcaacaaug

SEQ ID NO: 27957 - RNA, 24 nt, Human
acuggcacguagugggcggaucgc

SEQ ID NO: 27958 - RNA, 24 nt, Human
uucaaaguuauuuuuuagucgcug

SEQ ID NO: 27959 - RNA, 24 nt, Human
uaagguccagguugauucacucca

SEQ ID NO: 27960 - RNA, 24 nt, Human
auaucauuuaaacgaaugagcaau

SEQ ID NO: 27961 - RNA, 24 nt, Human
uucaauaauuaacucuagcacgua

SEQ ID NO: 27962 - RNA, 24 nt, Human
uugccagguuauaaaaaugagggc

SEQ ID NO: 27963 - RNA, 23 nt, Human
aacacuucuugcuaccagggaug

SEQ ID NO: 27964 - RNA, 24 nt, Human
ucaaacggaacacaacccacucuc

SEQ ID NO: 27965 - RNA, 24 nt, Human
uauaaagauauauguguaagguuu

SEQ ID NO: 27966 - RNA, 24 nt, Human
uuaacaaaauuucuguagucaaau

SEQ ID NO: 27967 - RNA, 24 nt, Human
aucaaguuucuuuuuuauuuuuuu

SEQ ID NO: 27968 - RNA, 24 nt, Human
accaguaggucagccaucuggaaa

SEQ ID NO: 27969 - RNA, 24 nt, Human
gggauuggucauauagguggacag

SEQ ID NO: 27970 - RNA, 24 nt, Human
acccuuacaaggcaauuuuguggg

SEQ ID NO: 27971 - RNA, 24 nt, Human
ugcauuguuaucauuaaccagucu

SEQ ID NO: 27972 - RNA, 24 nt, Human
uaaugggucucaaaauucugugac

SEQ ID NO: 27973 - RNA, 24 nt, Human
uauuagggauaauauucauuuagc

SEQ ID NO: 27974 - RNA, 24 nt, Human
uugcugaaucuauaguugcuuccu

SEQ ID NO: 27975 - RNA, 24 nt, Human
acuugcagagagaguuuucuacug

SEQ ID NO: 27976 - RNA, 24 nt, Human
ucggaacugaacaguggaauucca

SEQ ID NO: 27977 - RNA, 24 nt, Human
gcuuuuuuuuccuccacgauuaaa

SEQ ID NO: 27978 - RNA, 24 nt, Human
ugguauaaaauauguagaguauaa

SEQ ID NO: 27979 - RNA, 24 nt, Human
agagugagugggauuuaugaguua

SEQ ID NO: 27980 - RNA, 24 nt, Human
accagucuguacaaaccuuacagc

SEQ ID NO: 27981 - RNA, 24 nt, Human
uauugcaaauacuuaaaauucuua

SEQ ID NO: 27982 - RNA, 24 nt, Human
uaaaugguguugacaccaacuucu

SEQ ID NO: 27983 - RNA, 24 nt, Human
uagauggcuucuuucugauuaugu

SEQ ID NO: 27984 - RNA, 24 nt, Human
uaauauuaagccugauauucuuau

SEQ ID NO: 27985 - RNA, 21 nt, Human
caguguaccagaacauaugua

SEQ ID NO: 27986 - RNA, 24 nt, Human
cucguucaauuucuauaacauuua

SEQ ID NO: 27987 - RNA, 24 nt, Human
uuuaauaugacuucuucaauugga

SEQ ID NO: 27988 - RNA, 24 nt, Human
cuuaaaauguuauuugauaaauuu

SEQ ID NO: 27989 - RNA, 24 nt, Human
uuaguggauuuggcuguuacuauu

SEQ ID NO: 27990 - RNA, 24 nt, Human
aguaaucuuuuguaacaagccuca

SEQ ID NO: 27991 - RNA, 24 nt, Human
uuagcaaagguuggaggugucuug

SEQ ID NO: 27992 - RNA, 24 nt, Human
cuggaagugcaaaugguguguuug

SEQ ID NO: 27993 - RNA, 24 nt, Human
ucaguguggucaguguuaccaucc

SEQ ID NO: 27994 - RNA, 24 nt, Human
ucuguaauccucuauucguggcga

SEQ ID NO: 27995 - RNA, 24 nt, Human
ugacugagaaggcaccuuggaacu

SEQ ID NO: 27996 - RNA, 24 nt, Human
ucucacugcgcuggcaccuggggc

SEQ ID NO: 27997 - RNA, 24 nt, Human
cuccagggggguggcacuggcagu

SEQ ID NO: 27998 - RNA, 24 nt, Human
uggaaguauuauagaaaaagaagg

SEQ ID NO: 27999 - RNA, 24 nt, Human
aagcagcugcccagcccgcccuuc

SEQ ID NO: 28000 - RNA, 24 nt, Human
ucaaaaaaggaaagaaaaauaggc

SEQ ID NO: 28001 - RNA, 24 nt, Human
ucugcaauuugguauaaauguuag

SEQ ID NO: 28002 - RNA, 21 nt, Human
gaggugccagucaugcugacg

SEQ ID NO: 28003 - RNA, 24 nt, Human
uacaccacucccaagaagaauaag

SEQ ID NO: 28004 - RNA, 24 nt, Human
uauggcaagucacuuugacagaca

SEQ ID NO: 28005 - RNA, 24 nt, Human
ugagaauggcaaaauuagucgccu

SEQ ID NO: 28006 - RNA, 24 nt, Human
uacaccacucccaagaagaauaag

SEQ ID NO: 28007 - RNA, 17 nt, Human
uauccgaccuucaggcc

SEQ ID NO: 28008 - RNA, 24 nt, Human
uucaaguugauguugacgaugaca

SEQ ID NO: 28009 - RNA, 24 nt, Human
gagguggcugacgaggacaagcag

SEQ ID NO: 28010 - RNA, 24 nt, Human
ccagccgaacuuccauccgcagcu

SEQ ID NO: 28011 - RNA, 24 nt, Human
ugggaguaucuuuucuaccugugg

SEQ ID NO: 28012 - RNA, 24 nt, Human
uaugugaugaaaaaguauagcuuu

SEQ ID NO: 28013 - RNA, 24 nt, Human
ucuugguuaugacaaagucauuac

SEQ ID NO: 28014 - RNA, 24 nt, Human
ugacaugacagcacggacgggcga

SEQ ID NO: 28015 - RNA, 24 nt, Human
ugguauguacggagccaccgggac

SEQ ID NO: 28016 - RNA, 24 nt, Human
aggcggcggcgcccccggcccgag

SEQ ID NO: 28017 - RNA, 24 nt, Human
aagcagaaagggaagagaagcgag

SEQ ID NO: 28018 - RNA, 24 nt, Human
uucccaugccccaggcuccugcag

SEQ ID NO: 28019 - RNA, 24 nt, Human
cagcuugcuucccuggcaguggag

SEQ ID NO: 28020 - RNA, 24 nt, Human
uggcucaggaaggauucagccugg

SEQ ID NO: 28021 - RNA, 24 nt, Human
aacagcuuccagagccgaaaacca

SEQ ID NO: 28022 - RNA, 24 nt, Human
uuccccuauaauaggaaacaagca

SEQ ID NO: 28023 - RNA, 24 nt, Human
auaaagcuguuuaagaaaaauguu

SEQ ID NO: 28024 - RNA, 24 nt, Human
uagccgguucugauccacguugca

SEQ ID NO: 28025 - RNA, 24 nt, Human
ucugcaggcccaggacagugggcu

SEQ ID NO: 28026 - RNA, 24 nt, Human
ucccuguggcucugaauuuuuauu

SEQ ID NO: 28027 - RNA, 24 nt, Human
ugagauggcccagucuugauacag

SEQ ID NO: 28028 - RNA, 24 nt, Human
ugcauuguuaucauuaaccagucu

SEQ ID NO: 28029 - RNA, 24 nt, Human
uauuagggauaauauucauuuagc

SEQ ID NO: 28030 - RNA, 24 nt, Human
uuuaacuuuuuuaaugggucucaa

SEQ ID NO: 28031 - RNA, 24 nt, Human
ucacaaccacggcccuggaggagc

SEQ ID NO: 28032 - RNA, 24 nt, Human
ccuccuucccaggcucuggggcag

SEQ ID NO: 28033 - RNA, 24 nt, Human
agguaguaaacuccccaggugggc

SEQ ID NO: 28034 - RNA, 24 nt, Human
ugacccgugagugugcugcuggag

SEQ ID NO: 28035 - RNA, 24 nt, Human
ucgcaggaccuugugcugacagac

SEQ ID NO: 28036 - RNA, 24 nt, Human
ugcaagcuuucauacugacuacua

SEQ ID NO: 28037 - RNA, 17 nt, Human
uguggcagcgauggcgc

SEQ ID NO: 28038 - RNA, 24 nt, Human
gggccggggcgggcccgaggccuc

SEQ ID NO: 28039 - RNA, 24 nt, Human
ugaggucaggaaaggggaaggacg

SEQ ID NO: 28040 - RNA, 20 nt, Human
uagaacaggaaggacucaug

SEQ ID NO: 28041 - RNA, 24 nt, Human
ccugucugcucuccucuaacuagg

SEQ ID NO: 28042 - RNA, 24 nt, Human
cagcggccucuagcuccgucuccc

SEQ ID NO: 28043 - RNA, 24 nt, Human
ucugacagugaaaagcagcaacaa

SEQ ID NO: 28044 - RNA, 24 nt, Human
aacccauugccugugcucuccggg

SEQ ID NO: 28045 - RNA, 24 nt, Human
uguaagacguuaaaguguugcuua

SEQ ID NO: 28046 - RNA, 24 nt, Human
uacuugaauagcuugguuaaauga

SEQ ID NO: 28047 - RNA, 23 nt, Human
uaccacacaaaggcauuggcugc

SEQ ID NO: 28048 - RNA, 24 nt, Human
ucugcacgacgcacuggcccagga

SEQ ID NO: 28049 - RNA, 24 nt, Human
ucugagguugccaucagccagggc

SEQ ID NO: 28050 - RNA, 24 nt, Human
cucacauauauauaaaaaugaacu

SEQ ID NO: 28051 - RNA, 24 nt, Human
uggaaggcugaagcggguagauca

SEQ ID NO: 28052 - RNA, 21 nt, Human
ucaaauccugugcugcuguuc

SEQ ID NO: 28053 - RNA, 24 nt, Human
uacagcauguuguccagagccaac

SEQ ID NO: 28054 - RNA, 24 nt, Human
uugacuuugagcaggaggcaguug

SEQ ID NO: 28055 - RNA, 24 nt, Human
gcagcagcagccugcuccccgcac

SEQ ID NO: 28056 - RNA, 24 nt, Human
ugcauuguuaucauuaaccagucu

SEQ ID NO: 28057 - RNA, 24 nt, Human
uauuagggauaauauucauuuagc

SEQ ID NO: 28058 - RNA, 24 nt, Human
aggcuccgggcuguuccacuuucu

SEQ ID NO: 28059 - RNA, 24 nt, Human
ugugcagaagaaauggaaggauuc

SEQ ID NO: 28060 - RNA, 24 nt, Human
uaucaaggaagggcaggcgugaug

SEQ ID NO: 28061 - RNA, 24 nt, Human
uucaaauuucuuucuuuuuuaauu

SEQ ID NO: 28062 - RNA, 24 nt, Human
ucaauuuuuauuuugguuuucuua

SEQ ID NO: 28063 - RNA, 24 nt, Human
uauauuaccaauagcugauuuuuu

SEQ ID NO: 28064 - RNA, 24 nt, Human
aaugauacuucucuuuuuuugcug

SEQ ID NO: 28065 - RNA, 24 nt, Human
gcuauaauaaauaaacuucaacac

SEQ ID NO: 28066 - RNA, 24 nt, Human
ugagagcagauuggcugaugcccc

SEQ ID NO: 28067 - RNA, 24 nt, Human
uggaggaggaugacgaugaugagc

SEQ ID NO: 28068 - RNA, 24 nt, Human
caggacacaauguggcugaccugg

SEQ ID NO: 28069 - RNA, 24 nt, Human
ugaagaggaaucaggaccuggcuc

SEQ ID NO: 28070 - RNA, 18 nt, Human
uccacaagaacuguacaa

SEQ ID NO: 28071 - RNA, 24 nt, Human
uaccagacccuuggccuccugaca

SEQ ID NO: 28072 - RNA, 24 nt, Human
uggaaagagcagaauggcuuccuc

SEQ ID NO: 28073 - RNA, 24 nt, Human
uauuuuauugcaggaggugggggu

SEQ ID NO: 28074 - RNA, 24 nt, Human
ugacuaggcagacuguaucccuga

SEQ ID NO: 28075 - RNA, 24 nt, Human
uuuugagugacauuuauuuagcag

SEQ ID NO: 28076 - RNA, 24 nt, Human
uccacuggcgaaagaugccuuucu

SEQ ID NO: 28077 - RNA, 24 nt, Human
uaguucagauugaucuuaggucaa

SEQ ID NO: 28078 - RNA, 24 nt, Human
uaaugcuauugauggaaagggucc

SEQ ID NO: 28079 - RNA, 24 nt, Human
ccagcgagguaccuguguccuggg

SEQ ID NO: 28080 - RNA, 24 nt, Human
ccugaaguacaagaaaggaggugu

SEQ ID NO: 28081 - RNA, 24 nt, Human
uccaggugcugggccccaagccgg

SEQ ID NO: 28082 - RNA, 24 nt, Human
ugaugagaaccccuucgcccaggg

SEQ ID NO: 28083 - RNA, 24 nt, Human
ccguggcgcgcauccucugacucu

SEQ ID NO: 28084 - RNA, 24 nt, Human
agcccuuggaggcucagagcagcu

SEQ ID NO: 28085 - RNA, 24 nt, Human
ggguauggggagggagggagccag

SEQ ID NO: 28086 - RNA, 24 nt, Human
ugccuccuucugugccucuaccau

SEQ ID NO: 28087 - RNA, 24 nt, Human
agaauaaagggggggauggacagg

SEQ ID NO: 28088 - RNA, 24 nt, Human
ccugccgccggaauccugaagccc

SEQ ID NO: 28089 - RNA, 24 nt, Human
acccagugccugugacuuugagua

SEQ ID NO: 28090 - RNA, 24 nt, Human
augaaugucucccccaaaacuggc

SEQ ID NO: 28091 - RNA, 24 nt, Human
uuuguuguuuucucuucccuaccu

SEQ ID NO: 28092 - RNA, 24 nt, Human
cugucagaaugcugugugggaagg

SEQ ID NO: 28093 - RNA, 24 nt, Human
aggcauggccauucagaggguacu

SEQ ID NO: 28094 - RNA, 24 nt, Human
uaauuccacagaagugaauaaagc

SEQ ID NO: 28095 - RNA, 24 nt, Human
uuggaggaccagaugggugggagc

SEQ ID NO: 28096 - RNA, 24 nt, Human
aagcacacugucuuucucagcguu

SEQ ID NO: 28097 - RNA, 24 nt, Human
uuuguuccuaaagccaccucucag

SEQ ID NO: 28098 - RNA, 24 nt, Human
uauuguguaaaguuuauagaagua

SEQ ID NO: 28099 - RNA, 24 nt, Human
uuaaaagucuugaaacgauguuug

SEQ ID NO: 28100 - RNA, 24 nt, Human
uggaacccuuucacuucaaacuca

SEQ ID NO: 28101 - RNA, 24 nt, Human
cccaugaugaauagcaagaaagua

SEQ ID NO: 28102 - RNA, 24 nt, Human
ggacugggaaggaggggugugggc

SEQ ID NO: 28103 - RNA, 24 nt, Human
ugguauggaugcccuccuggguuu

SEQ ID NO: 28104 - RNA, 24 nt, Human
gggaggcucuggccggcguagucc

SEQ ID NO: 28105 - RNA, 24 nt, Human
uggaauuacaggugugagccacug

SEQ ID NO: 28106 - RNA, 24 nt, Human
cugggcccagagccagccacacuc

SEQ ID NO: 28107 - RNA, 24 nt, Human
agguggguaguggggaggagagcu

SEQ ID NO: 28108 - RNA, 24 nt, Human
uuaucuuguguuuagagguuguuu

SEQ ID NO: 28109 - RNA, 24 nt, Human
uucccaugccucccucucauugga

SEQ ID NO: 28110 - RNA, 24 nt, Human
uucgagcaaguuuuggugcuacug

SEQ ID NO: 28111 - RNA, 24 nt, Human
ugcuagaauuauugagauauuuau

SEQ ID NO: 28112 - RNA, 24 nt, Human
ucagcagcgugccacauggccacc

SEQ ID NO: 28113 - RNA, 24 nt, Human
aggaaacaugggcagaggggccca

SEQ ID NO: 28114 - RNA, 24 nt, Human
uuuuuugucccuuuuauauccuau

SEQ ID NO: 28115 - RNA, 24 nt, Human
uagaacuauaaaacagguuuccau

SEQ ID NO: 28116 - RNA, 24 nt, Human
ucagggauggucacaguccagcca

SEQ ID NO: 28117 - RNA, 24 nt, Human
ugcccuggcccuugaccccguccu

SEQ ID NO: 28118 - RNA, 24 nt, Human
aagcugccagcccacugccuccau

SEQ ID NO: 28119 - RNA, 24 nt, Human
cugggcccugggcgcuccauuuug

SEQ ID NO: 28120 - RNA, 24 nt, Human
uaggagcagcugcaauugcaccug

SEQ ID NO: 28121 - RNA, 24 nt, Human
acuggccucugcuguuccugucuu

SEQ ID NO: 28122 - RNA, 24 nt, Human
ccaguccaggccuucguacagccc

SEQ ID NO: 28123 - RNA, 24 nt, Human
uauacugggcaccauuugagcacg

SEQ ID NO: 28124 - RNA, 24 nt, Human
ugacaugcuguucuggaagagcaa

SEQ ID NO: 28125 - RNA, 24 nt, Human
uaacaggaacaaggauuccgugcu

SEQ ID NO: 28126 - RNA, 24 nt, Human
uucgugcagucugcaaauuuuccc

SEQ ID NO: 28127 - RNA, 20 nt, Human
uaaaacaacauaauaccaua

SEQ ID NO: 28128 - RNA, 24 nt, Human
uucguauuauugucuuuauuucgu

SEQ ID NO: 28129 - RNA, 24 nt, Human
uauaaagcauucagaaaacauuuu

SEQ ID NO: 28130 - RNA, 22 nt, Human
uucaaucgaugcuuuacaugca

SEQ ID NO: 28131 - RNA, 24 nt, Human
acuuugggugguguagauacagau

SEQ ID NO: 28132 - RNA, 18 nt, Human
uauuuaggaacauuccau

SEQ ID NO: 28133 - RNA, 24 nt, Human
ucguacgugcugugcuacgacccg

SEQ ID NO: 28134 - RNA, 24 nt, Human
ugaagaacaucaccuaagagauua

SEQ ID NO: 28135 - RNA, 24 nt, Human
uucauuggaggguugagcuuugaa

SEQ ID NO: 28136 - RNA, 23 nt, Human
cagcgcaggaauaucucuggaag

SEQ ID NO: 28137 - RNA, 24 nt, Human
uguguuuguagacuuggaacccac

SEQ ID NO: 28138 - RNA, 24 nt, Human
uugcaugaaacauucuuaacguga

SEQ ID NO: 28139 - RNA, 24 nt, Human
aggcagguuaaguuccuugaugcc

SEQ ID NO: 28140 - RNA, 24 nt, Human
ugagcccagaacgaaggaacacgg

SEQ ID NO: 28141 - RNA, 24 nt, Human
ugggcuagcugcgugcggagccug

SEQ ID NO: 28142 - RNA, 24 nt, Human
ugcgauggcacgccagugcuggag

SEQ ID NO: 28143 - RNA, 24 nt, Human
aaggagcugucggugcugucgcuc

SEQ ID NO: 28144 - RNA, 24 nt, Human
cuccugcuucuacacacagccgca

SEQ ID NO: 28145 - RNA, 24 nt, Human
cucuccuccccacccaagaagaag

SEQ ID NO: 28146 - RNA, 24 nt, Human
uaguguacuuuguggccuccguag

SEQ ID NO: 28147 - RNA, 21 nt, Human
ccgcugccgccccacgugcgc

SEQ ID NO: 28148 - RNA, 24 nt, Human
uggcaggagcagcuccccuccugg

SEQ ID NO: 28149 - RNA, 24 nt, Human
ggacugggccgucgcacacgccag

SEQ ID NO: 28150 - RNA, 24 nt, Human
ugaaaaguuggaagauuuugcauc

SEQ ID NO: 28151 - RNA, 23 nt, Human
uaaaaucucugcaaugcaaaaga

SEQ ID NO: 28152 - RNA, 24 nt, Human
ugagaauguccgagaauucuucuu

SEQ ID NO: 28153 - RNA, 24 nt, Human
cgggggccgcaccuuggaggagau

SEQ ID NO: 28154 - RNA, 24 nt, Human
uuuacagauccggccaggaccccg

SEQ ID NO: 28155 - RNA, 24 nt, Human
cgaggcagcagcugccggcguucu

SEQ ID NO: 28156 - RNA, 24 nt, Human
uugaaccaaaugggauuuguuugg

SEQ ID NO: 28157 - RNA, 24 nt, Human
caaccgggcauuugguuacgugug

SEQ ID NO: 28158 - RNA, 24 nt, Human
uauggcaagucacuuugacagaca

SEQ ID NO: 28159 - RNA, 24 nt, Human
ugagaauggcaaaauuagucgccu

SEQ ID NO: 28160 - RNA, 24 nt, Human
uacaccacucccaagaagaauaag

SEQ ID NO: 28161 - RNA, 24 nt, Human
aagcugcagaguguggaauacgug

SEQ ID NO: 28162 - RNA, 24 nt, Human
aaggagcuaggcaaguucacuggc

SEQ ID NO: 28163 - RNA, 24 nt, Human
gagcggcucaagacccacagugcc

SEQ ID NO: 28164 - RNA, 17 nt, Human
gugcauguggcugugga

SEQ ID NO: 28165 - RNA, 24 nt, Human
uuauagggucaccuucgagucacc

SEQ ID NO: 28166 - RNA, 24 nt, Human
ccagcacucgaagcugcuggacuu

SEQ ID NO: 28167 - RNA, 24 nt, Human
caccaggugguagaagacggcuac

SEQ ID NO: 28168 - RNA, 19 nt, Human
uaacccacccgcauuccgc

SEQ ID NO: 28169 - RNA, 24 nt, Human
auugugcucuuuccagauccucaa

SEQ ID NO: 28170 - RNA, 24 nt, Human
ucgaccacagaugcucugaacguu

SEQ ID NO: 28171 - RNA, 24 nt, Human
uguuauggggauaagcuggugagg

SEQ ID NO: 28172 - RNA, 24 nt, Human
uccacggggaguuuguuguaaagg

SEQ ID NO: 28173 - RNA, 24 nt, Human
acggagcaugaaaagacuuucccc

SEQ ID NO: 28174 - RNA, 24 nt, Human
uucgaugggggcugggagggcuuu

SEQ ID NO: 28175 - RNA, 24 nt, Human
ugccaagcuuuuuuuugcaaccgg

SEQ ID NO: 28176 - RNA, 24 nt, Human
gagaaggguguuuggaugggcccu

SEQ ID NO: 28177 - RNA, 24 nt, Human
ugagaaugaccccaagaccuuuga

SEQ ID NO: 28178 - RNA, 20 nt, Human
uaggguuuuuucuuuccuug

SEQ ID NO: 28179 - RNA, 24 nt, Human
uaagucacauggcuucugucuugg

SEQ ID NO: 28180 - RNA, 24 nt, Human
uccgcagagaacagacuuggcccu

SEQ ID NO: 28181 - RNA, 24 nt, Human
uuguauuguucuuuuugcaucgug

SEQ ID NO: 28182 - RNA, 24 nt, Human
ugcgauugacuggggcgacuuugg

SEQ ID NO: 28183 - RNA, 24 nt, Human
ggcugguggacagaaggcacugca

SEQ ID NO: 28184 - RNA, 24 nt, Human
ucagagcucugcugcagggccugc

SEQ ID NO: 28185 - RNA, 24 nt, Human
uguggccgacccgccugcgacgcu

SEQ ID NO: 28186 - RNA, 24 nt, Human
uguaugcagcggcugugcugcugg

SEQ ID NO: 28187 - RNA, 24 nt, Human
uaaguaggagaaaccaaaccauaa

SEQ ID NO: 28188 - RNA, 24 nt, Human
aagcaggaaagaauggucuugaug

SEQ ID NO: 28189 - RNA, 24 nt, Human
uggccugaugauccacagcggaga

SEQ ID NO: 28190 - RNA, 24 nt, Human
uacuguacuuuaagacauggaauu

SEQ ID NO: 28191 - RNA, 24 nt, Human
agaccauagcaggauuuaacauuu

SEQ ID NO: 28192 - RNA, 24 nt, Human
uauuagguagcccuugggaagaga

SEQ ID NO: 28193 - RNA, 24 nt, Human
uacuugggcgugcgggagaaagaa

SEQ ID NO: 28194 - RNA, 19 nt, Human
cguuggguguuagucugca

SEQ ID NO: 28195 - RNA, 24 nt, Human
uacaagaucacugacucugaggac

SEQ ID NO: 28196 - RNA, 21 nt, Human
caccgagucgccucacucgag

SEQ ID NO: 28197 - RNA, 24 nt, Human
ccaccacccgggccugccgccuga

SEQ ID NO: 28198 - RNA, 24 nt, Human
ccccccagagccggcgcccucucc

SEQ ID NO: 28199 - RNA, 24 nt, Human
cuccugcagcccagucccuacgug

SEQ ID NO: 28200 - RNA, 24 nt, Human
ugcagugcacaugauccggaaggu

SEQ ID NO: 28201 - RNA, 24 nt, Human
acagaagaauugaaaaucggaugg

SEQ ID NO: 28202 - RNA, 24 nt, Human
agauacugacagaugagagccuca

SEQ ID NO: 28203 - RNA, 24 nt, Human
uguucuggagcuguuggacaaaua

SEQ ID NO: 28204 - RNA, 24 nt, Human
aaccagaaaguaagguguucuacu

SEQ ID NO: 28205 - RNA, 24 nt, Human
acccugagcuuccugcggcgcguc

SEQ ID NO: 28206 - RNA, 24 nt, Human
ugucauguggagcccuguccagag

SEQ ID NO: 28207 - RNA, 24 nt, Human
agugcagaccucugacccuggagu

SEQ ID NO: 28208 - RNA, 24 nt, Human
aagcagauuguguggaaugguccu

SEQ ID NO: 28209 - RNA, 24 nt, Human
ugaaagcagcaagaaguaugcuga

SEQ ID NO: 28210 - RNA, 24 nt, Human
ucaguaaugcguucaggaguccac

SEQ ID NO: 28211 - RNA, 24 nt, Human
acgcuuugucaugcuucuucagua

SEQ ID NO: 28212 - RNA, 22 nt, Human
cgagaucugcgucaacgugcuc

SEQ ID NO: 28213 - RNA, 24 nt, Human
uacaccacucccaagaagaauaag

SEQ ID NO: 28214 - RNA, 24 nt, Human
caagagagacggggccggaggggu

SEQ ID NO: 28215 - RNA, 24 nt, Human
cccgcuccguggccuccuuccucc

SEQ ID NO: 28216 - RNA, 24 nt, Human
cgucacaggugcagcucguggguu

SEQ ID NO: 28217 - RNA, 24 nt, Human
uuuuaauuuauuugugaggagucg

SEQ ID NO: 28218 - RNA, 21 nt, Human
uggggagugggguggggggag

SEQ ID NO: 28219 - RNA, 24 nt, Human
acccuuuaaacagagagaguuuau

SEQ ID NO: 28220 - RNA, 24 nt, Human
ccccgguuuucuuuguuccaaggg

SEQ ID NO: 28221 - RNA, 24 nt, Human
aacauuuuuuuuuuuccccggggg

SEQ ID NO: 28222 - RNA, 24 nt, Human
uuucggggagagggagacccuuuu

SEQ ID NO: 28223 - RNA, 24 nt, Human
uuaguagagaugggguuucaacuu

SEQ ID NO: 28224 - RNA, 22 nt, Human
uccaccuuucugaaacugcagu

SEQ ID NO: 28225 - RNA, 24 nt, Human
aagcagcccaucuguguuccauca

SEQ ID NO: 28226 - RNA, 24 nt, Human
cguccagacuacggaccugucugg

SEQ ID NO: 28227 - RNA, 24 nt, Human
ucacuuugagggcaagccuucucg

SEQ ID NO: 28228 - RNA, 21 nt, Human
ucuugguucuuugcugucugg

SEQ ID NO: 28229 - RNA, 24 nt, Human
uuccguuucugagacuuugccagc

SEQ ID NO: 28230 - RNA, 24 nt, Human
ugaauauuguuuucauacugcugu

SEQ ID NO: 28231 - RNA, 24 nt, Human
uucaacuaccuagaaauaguuacc

SEQ ID NO: 28232 - RNA, 23 nt, Human
uacagcacauaccucucagaauc

SEQ ID NO: 28233 - RNA, 24 nt, Human
ugagugaaccuagagacaaaugcu

SEQ ID NO: 28234 - RNA, 24 nt, Human
acuaaaaaagagacauagaagccg

SEQ ID NO: 28235 - RNA, 20 nt, Human
ugagaugccauaagcugugg

SEQ ID NO: 28236 - RNA, 24 nt, Human
uaaugggucucaaaauucugugac

SEQ ID NO: 28237 - RNA, 24 nt, Human
uggcagcgggauggggaggaccag

SEQ ID NO: 28238 - RNA, 24 nt, Human
ugugauguggcaggaggaaacaga

SEQ ID NO: 28239 - RNA, 24 nt, Human
ucacccugagaugggagccaucuu

SEQ ID NO: 28240 - RNA, 23 nt, Human
acgcugcagcgcacggacccccc

SEQ ID NO: 28241 - RNA, 24 nt, Human
agcucuuuagcccacagcagauuc

SEQ ID NO: 28242 - RNA, 24 nt, Human
ugagagagacagaagguaaaauug

SEQ ID NO: 28243 - RNA, 24 nt, Human
uuuaaagucagcaagaaugaggag

SEQ ID NO: 28244 - RNA, 24 nt, Human
ugggaugaacaguuugacaaggag

SEQ ID NO: 28245 - RNA, 24 nt, Human
cugaagccagacaaagagaucgug

SEQ ID NO: 28246 - RNA, 24 nt, Human
uaggaacuacaucauggacuucca

SEQ ID NO: 28247 - RNA, 24 nt, Human
ugcaagcaaguauucaagaaggug

SEQ ID NO: 28248 - RNA, 24 nt, Human
uacuggaagauguuggucaacgag

SEQ ID NO: 28249 - RNA, 24 nt, Human
aggaaggagauauagugaagagga

SEQ ID NO: 28250 - RNA, 24 nt, Human
ugagugcaugucugguacagauaa

SEQ ID NO: 28251 - RNA, 24 nt, Human
uccuugaccucugacccgccgacc

SEQ ID NO: 28252 - RNA, 24 nt, Human
uguccaagcugagcccugaggagg

SEQ ID NO: 28253 - RNA, 24 nt, Human
uucaugacaucuacccagcuggau

SEQ ID NO: 28254 - RNA, 21 nt, Human
ugacauggagguggagcugcu

SEQ ID NO: 28255 - RNA, 18 nt, Human
uaagauccuaaagggccc

SEQ ID NO: 28256 - RNA, 24 nt, Human
aggcaagucuucugaaaaccugug

SEQ ID NO: 28257 - RNA, 24 nt, Human
ugcuaaaacagaauaccauaaauu

SEQ ID NO: 28258 - RNA, 24 nt, Human
ugggauuacaggcaugagccaccg

SEQ ID NO: 28259 - RNA, 24 nt, Human
uaauuugcagcuuaauguauaacu

SEQ ID NO: 28260 - RNA, 24 nt, Human
uuaaaggauuguugugauuuggcg

SEQ ID NO: 28261 - RNA, 24 nt, Human
ucauuggguaaucucaucugcuuu

SEQ ID NO: 28262 - RNA, 24 nt, Human
ugaggaccagugcacugaguacau

SEQ ID NO: 28263 - RNA, 24 nt, Human
aggcagcggcuguggcagcccggc

SEQ ID NO: 28264 - RNA, 24 nt, Human
uguuacugugucuaucuaggaaaa

SEQ ID NO: 28265 - RNA, 24 nt, Human
ugggaagugaggagcgccucuucc

SEQ ID NO: 28266 - RNA, 24 nt, Human
uugaacagcgccuggaggagcagu

SEQ ID NO: 28267 - RNA, 24 nt, Human
cgacagcagcggggcuggguguuc

SEQ ID NO: 28268 - RNA, 24 nt, Human
uggcagagcuugaggaugcggucc

SEQ ID NO: 28269 - RNA, 24 nt, Human
gccacgcugcccagcaggccggcu

SEQ ID NO: 28270 - RNA, 24 nt, Human
uggcagagcuugaggaugcggucc

SEQ ID NO: 28271 - RNA, 24 nt, Human
uguauaaauaaaacauuuuuuaau

SEQ ID NO: 28272 - RNA, 24 nt, Human
aggaaggagauauagugaagagga

SEQ ID NO: 28273 - RNA, 24 nt, Human
ugccucgauaguggcagcuuucaa

SEQ ID NO: 28274 - RNA, 24 nt, Human
uagcucuauguuggcgucguauga

SEQ ID NO: 28275 - RNA, 24 nt, Human
cacuguacuuaaacuccagaaaga

SEQ ID NO: 28276 - RNA, 24 nt, Human
uaauguuuauacugggcuagauuu

SEQ ID NO: 28277 - RNA, 24 nt, Human
ggagacuggggcuccggcagaggc

SEQ ID NO: 28278 - RNA, 20 nt, Human
uagaacaggaaggacucaug

SEQ ID NO: 28279 - RNA, 24 nt, Human
uagcaacagaaaugggccccacag

SEQ ID NO: 28280 - RNA, 24 nt, Human
uaacucuuuucacucucaucuucc

SEQ ID NO: 28281 - RNA, 24 nt, Human
uggguugaacaguuugaauuggcu

SEQ ID NO: 28282 - RNA, 24 nt, Human
ucugcauuggcugcugggcauaug

SEQ ID NO: 28283 - RNA, 23 nt, Human
uucaugccucuuugcaucguuaa

SEQ ID NO: 28284 - RNA, 24 nt, Human
cacuucuuggcuaccuugcaguuc

SEQ ID NO: 28285 - RNA, 24 nt, Human
aagcagcuuauuguagguguggcg

SEQ ID NO: 28286 - RNA, 22 nt, Human
uagcaugccucuuaauuuuucu

SEQ ID NO: 28287 - RNA, 24 nt, Human
aacagguaaccacuugagaggaug

SEQ ID NO: 28288 - RNA, 24 nt, Human
ugcauuguuaucauuaaccagucu

SEQ ID NO: 28289 - RNA, 24 nt, Human
uaaugggucucaaaauucugugac

SEQ ID NO: 28290 - RNA, 24 nt, Human
uauuagggauaauauucauuuagc

SEQ ID NO: 28291 - RNA, 24 nt, Human
uauaaaacuuugauaguuacauug

SEQ ID NO: 28292 - RNA, 22 nt, Human
uagcaugccucuuaauuuuucu

SEQ ID NO: 28293 - RNA, 24 nt, Human
aacagguaaccacuugagaggaug

SEQ ID NO: 28294 - RNA, 24 nt, Human
ucccuguaauaagauaggcacaac

SEQ ID NO: 28295 - RNA, 24 nt, Human
ugagaccguacucagagugaggau

SEQ ID NO: 28296 - RNA, 24 nt, Human
uaucucagucucugcauaagagga

SEQ ID NO: 28297 - RNA, 24 nt, Human
aaggagcccagaucauaaugcagu

SEQ ID NO: 28298 - RNA, 19 nt, Human
cuccucaguacguuuuggc

SEQ ID NO: 28299 - RNA, 24 nt, Human
aacuguguuuggaacugguauaaa

SEQ ID NO: 28300 - RNA, 24 nt, Human
ucccuguaaugcccgucuuuccug

SEQ ID NO: 28301 - RNA, 24 nt, Human
ugaggaguuccggaaccccaaggc

SEQ ID NO: 28302 - RNA, 18 nt, Human
ugugucuuuaccaaggga

SEQ ID NO: 28303 - RNA, 24 nt, Human
uaaugggucucaaaauucugugac

SEQ ID NO: 28304 - RNA, 24 nt, Human
uucaaauuucuuucuuuuuuaauu

SEQ ID NO: 28305 - RNA, 24 nt, Human
uccaguaucccaaacuuucuaguc

SEQ ID NO: 28306 - RNA, 24 nt, Human
ugucaaggaggaguuuaaggccuu

SEQ ID NO: 28307 - RNA, 24 nt, Human
ucacuggggugccauuguucagcu

SEQ ID NO: 28308 - RNA, 24 nt, Human
uggcaggacuuggaggcugucccu

SEQ ID NO: 28309 - RNA, 24 nt, Human
uuugccccuggucccucccaaauc

SEQ ID NO: 28310 - RNA, 24 nt, Human
auggugcugugucaagaaggaccu

SEQ ID NO: 28311 - RNA, 24 nt, Human
uaguauguaaauguuacuugaauc

SEQ ID NO: 28312 - RNA, 24 nt, Human
uacucuguggauauccccuuggac

SEQ ID NO: 28313 - RNA, 24 nt, Human
uacaagacaggcaagaacaagugg

SEQ ID NO: 28314 - RNA, 24 nt, Human
gaggauccaagcuuacguacgcgu

SEQ ID NO: 28315 - RNA, 24 nt, Human
ccgccuucugagcaguuuugauuu

SEQ ID NO: 28316 - RNA, 24 nt, Human
uaaggaaagcagauguuuaauuuc

SEQ ID NO: 28317 - RNA, 24 nt, Human
uauauuaaauucuauauaaaauau

SEQ ID NO: 28318 - RNA, 24 nt, Human
uucaaguacugcauaaaagcugau

SEQ ID NO: 28319 - RNA, 24 nt, Human
guugcauuugcugagucuguucuc

SEQ ID NO: 28320 - RNA, 23 nt, Human
ugagagcuuucucuggagugaug

SEQ ID NO: 28321 - RNA, 17 nt, Human
cauggcccagaaucugg

SEQ ID NO: 28322 - RNA, 24 nt, Human
ugacaggaugcagaaggagaucac

SEQ ID NO: 28323 - RNA, 24 nt, Human
uagcauuugcugcauggguuaauu

SEQ ID NO: 28324 - RNA, 24 nt, Human
uggaaucuugcggcauccacgaga

SEQ ID NO: 28325 - RNA, 24 nt, Human
ucaccaguaucuuuuuucugaagg

SEQ ID NO: 28326 - RNA, 24 nt, Human
ugacgagggugcacacgccgcugg

SEQ ID NO: 28327 - RNA, 24 nt, Human
ugacgugcuggaacucagagaggu

SEQ ID NO: 28328 - RNA, 24 nt, Human
uccgucaucaucaaagucaaagau

SEQ ID NO: 28329 - RNA, 24 nt, Human
uguguccucgcccucucccgugag

SEQ ID NO: 28330 - RNA, 24 nt, Human
ugacuggucuaguuuuaaugccag

SEQ ID NO: 28331 - RNA, 24 nt, Human
uguccagguguucagaccucuugg

SEQ ID NO: 28332 - RNA, 24 nt, Human
caccauguuggccaggcuggucuc

SEQ ID NO: 28333 - RNA, 24 nt, Human
uauuuuauuuuuuggauggagucu

SEQ ID NO: 28334 - RNA, 24 nt, Human
ucacucaguuuuuaauaaaggcca

SEQ ID NO: 28335 - RNA, 24 nt, Human
uguucagaaauugaggcuaacauu

SEQ ID NO: 28336 - RNA, 24 nt, Human
ucccugacuguccgcaggccuggg

SEQ ID NO: 28337 - RNA, 24 nt, Human
uucaccugcagccgggcaugagcc

SEQ ID NO: 28338 - RNA, 24 nt, Human
aggguuccuguccaguuucccccu

SEQ ID NO: 28339 - RNA, 24 nt, Human
gggcagcgccuggcgggcggcccg

SEQ ID NO: 28340 - RNA, 24 nt, Human
uugaucagccugcacacaguggag

SEQ ID NO: 28341 - RNA, 24 nt, Human
aaaucauugcaguaccucaaccug

SEQ ID NO: 28342 - RNA, 23 nt, Human
caccaccuugcaucuucgagaca

SEQ ID NO: 28343 - RNA, 24 nt, Human
uccacacaaauaggcacacauaua

SEQ ID NO: 28344 - RNA, 24 nt, Human
cagcaguaggggcugggcuuccag

SEQ ID NO: 28345 - RNA, 18 nt, Human
uaugcaaggcacugcgca

SEQ ID NO: 28346 - RNA, 24 nt, Human
uacuugaauagcuugguuaaauga

SEQ ID NO: 28347 - RNA, 24 nt, Human
ugggaugacugcauccuuuuuuuu

SEQ ID NO: 28348 - RNA, 24 nt, Human
gccccgagcccggcccccuccacc

SEQ ID NO: 28349 - RNA, 24 nt, Human
cagcagcauucaccaagcccuacu

SEQ ID NO: 28350 - RNA, 24 nt, Human
agguguuguaggcauagucacaga

SEQ ID NO: 28351 - RNA, 24 nt, Human
cugcgccccaaggcuuugacccag

SEQ ID NO: 28352 - RNA, 24 nt, Human
ucugcuguguauguaugccaagga

SEQ ID NO: 28353 - RNA, 20 nt, Human
ugccauagccaguaacaucu

SEQ ID NO: 28354 - RNA, 24 nt, Human
gcagaugcucugugugauuuguac

SEQ ID NO: 28355 - RNA, 24 nt, Human
cacagcacaauuuuacuccaggga

SEQ ID NO: 28356 - RNA, 23 nt, Human
aaagaguauuugaacuuguugac

SEQ ID NO: 28357 - RNA, 23 nt, Human
agaguccuaucuggggucuccuc

SEQ ID NO: 28358 - RNA, 19 nt, Human
uauagcccaagaggguuuu

SEQ ID NO: 28359 - RNA, 24 nt, Human
uguacuguaaaccuuugaccugug

SEQ ID NO: 28360 - RNA, 24 nt, Human
ugaaugacaacuuuauuuuucuua

SEQ ID NO: 28361 - RNA, 24 nt, Human
guaaugcuaugauggaaagggucc

SEQ ID NO: 28362 - RNA, 24 nt, Human
aggaaggagauauagugaagagga

SEQ ID NO: 28363 - RNA, 24 nt, Human
uauuacaauucacuggccgucguu

SEQ ID NO: 28364 - RNA, 24 nt, Human
guguauggggcagaacauaggccu

SEQ ID NO: 28365 - RNA, 24 nt, Human
uauuacaauucacuggccgucguu

SEQ ID NO: 28366 - RNA, 24 nt, Human
uggcguaauagcgaagaggcccgc

SEQ ID NO: 28367 - RNA, 24 nt, Human
augguccacaaaggcggaagauga

SEQ ID NO: 28368 - RNA, 24 nt, Human
agagaccuuuaaacagcagaagag

SEQ ID NO: 28369 - RNA, 24 nt, Human
augaacacugauugaauaccuaug

SEQ ID NO: 28370 - RNA, 24 nt, Human
uuccaguacuccugcccuuccuuc

SEQ ID NO: 28371 - RNA, 24 nt, Human
cuggguccccucugcaagcucaga

SEQ ID NO: 28372 - RNA, 21 nt, Human
ucucugggagauacucagucc

SEQ ID NO: 28373 - RNA, 24 nt, Human
uccugcgccugcccuuuccgcgcc

SEQ ID NO: 28374 - RNA, 24 nt, Human
accccgauccugcugcgccgccuu

SEQ ID NO: 28375 - RNA, 24 nt, Human
uccccgaggccgcgccgggagcuc

SEQ ID NO: 28376 - RNA, 24 nt, Human
ugccuggucaaucaguccucggga

SEQ ID NO: 28377 - RNA, 24 nt, Human
uugaacgguuauccauagcauuuu

SEQ ID NO: 28378 - RNA, 19 nt, Human
uaagauggcugauuuacua

SEQ ID NO: 28379 - RNA, 24 nt, Human
agaaaacauuguguguauaagauc

SEQ ID NO: 28380 - RNA, 24 nt, Human
gagcggccgcgaagaggugacacc

SEQ ID NO: 28381 - RNA, 24 nt, Human
uagaauguaaaaagucauuuuaga

SEQ ID NO: 28382 - RNA, 24 nt, Human
uuagaauuggaauuacuuccuuac

SEQ ID NO: 28383 - RNA, 24 nt, Human
ugugccaaggagggaccacaggag

SEQ ID NO: 28384 - RNA, 19 nt, Human
caacaggaggaacgggugg

SEQ ID NO: 28385 - RNA, 24 nt, Human
uuucacaccaugcuguccaggcug

SEQ ID NO: 28386 - RNA, 24 nt, Human
cuucaagaugaccaagcgggagga

SEQ ID NO: 28387 - RNA, 24 nt, Human
aagcacaaggcgccugucaucgac

SEQ ID NO: 28388 - RNA, 24 nt, Human
acgcugcuguaucucccugugggc

SEQ ID NO: 28389 - RNA, 24 nt, Human
ugaaugggucuaguccaguuuauu

SEQ ID NO: 28390 - RNA, 24 nt, Human
cugccgggaaagagcuccugaagu

SEQ ID NO: 28391 - RNA, 24 nt, Human
uagcucccccagcggcuucucugu

SEQ ID NO: 28392 - RNA, 24 nt, Human
caacugauuaccauuuacagugau

SEQ ID NO: 28393 - RNA, 24 nt, Human
aguguucgacuacaguuauagaga

SEQ ID NO: 28394 - RNA, 17 nt, Human
uuaaaguugucugcaau

SEQ ID NO: 28395 - RNA, 24 nt, Human
cagccgcccgccgcccgccgggga

SEQ ID NO: 28396 - RNA, 24 nt, Human
ugccggagcccgcgcgcccagccg

SEQ ID NO: 28397 - RNA, 24 nt, Human
cucugcaggggaggaagcaccugg

SEQ ID NO: 28398 - RNA, 24 nt, Human
uauggcaagucacuuugacagaca

SEQ ID NO: 28399 - RNA, 24 nt, Human
ugagaauggcaaaauuagucgccu

SEQ ID NO: 28400 - RNA, 24 nt, Human
uacaccacucccaagaagaauaag

SEQ ID NO: 28401 - RNA, 24 nt, Human
ugaguucauugaacuauuucuuaa

SEQ ID NO: 28402 - RNA, 24 nt, Human
ccuugaguuccuucauggcaauga

SEQ ID NO: 28403 - RNA, 24 nt, Human
gggcacugaagaugaugcgaccca

SEQ ID NO: 28404 - RNA, 24 nt, Human
uacagugcuuguaaaagguuugaa

SEQ ID NO: 28405 - RNA, 22 nt, Human
ucccuaaagaaaaagaugaaaa

SEQ ID NO: 28406 - RNA, 22 nt, Human
cgccgggacagcagacugccgg

SEQ ID NO: 28407 - RNA, 24 nt, Human
cagccuggacuuaccaccacuaaa

SEQ ID NO: 28408 - RNA, 24 nt, Human
ggcccggagcggagcgcgcccugc

SEQ ID NO: 28409 - RNA, 24 nt, Human
ucacucagcgggggacacaggaag

SEQ ID NO: 28410 - RNA, 24 nt, Human
uccacaacaacuucggagugcucu

SEQ ID NO: 28411 - RNA, 24 nt, Human
uuucacagaacaggaaaccucccc

SEQ ID NO: 28412 - RNA, 19 nt, Human
gggaaugggaaugaaggga

SEQ ID NO: 28413 - RNA, 24 nt, Human
uuuuuuguuucuaaaagauguuua

SEQ ID NO: 28414 - RNA, 24 nt, Human
gaugguaugaaaacuuauuaggaa

SEQ ID NO: 28415 - RNA, 19 nt, Human
cuucaagaagggcuggucc

SEQ ID NO: 28416 - RNA, 24 nt, Human
ggaaauggucuuaaaagauacugc

SEQ ID NO: 28417 - RNA, 24 nt, Human
cuugcacugcaccccagacaguuu

SEQ ID NO: 28418 - RNA, 24 nt, Human
acgcaaccagggccggcugggagc

SEQ ID NO: 28419 - RNA, 24 nt, Human
cugacacacggagagucacaggcu

SEQ ID NO: 28420 - RNA, 24 nt, Human
uaggucaggagccuugggauggcu

SEQ ID NO: 28421 - RNA, 24 nt, Human
ggauaaaagcggucgaagaagccg

SEQ ID NO: 28422 - RNA, 24 nt, Human
cuggccgugugggacccgggcccg

SEQ ID NO: 28423 - RNA, 24 nt, Human
uuccauugacauucuuagcacagc

SEQ ID NO: 28424 - RNA, 24 nt, Human
uauaaugaggcacggcuuauugca

SEQ ID NO: 28425 - RNA, 24 nt, Human
gucccaaaggcagaaggcaguauu

SEQ ID NO: 28426 - RNA, 24 nt, Human
ugauaaguugccauuguucaccuu

SEQ ID NO: 28427 - RNA, 24 nt, Human
uaucaaaagauauauuucaggauc

SEQ ID NO: 28428 - RNA, 24 nt, Human
aggaaagugcuccauagaaaguaa

SEQ ID NO: 28429 - RNA, 24 nt, Human
uuuaagaucacucuaggaucccca

SEQ ID NO: 28430 - RNA, 24 nt, Human
uggcuucauuauuaacauccugua

SEQ ID NO: 28431 - RNA, 24 nt, Human
cagcagaaaaauuaacacaguuga

SEQ ID NO: 28432 - RNA, 24 nt, Human
aucaugcuuuuaugcaagacuugg

SEQ ID NO: 28433 - RNA, 24 nt, Human
aggggcuccugaaagaccuacugc

SEQ ID NO: 28434 - RNA, 20 nt, Human
ucccucugggaucugagccu

SEQ ID NO: 28435 - RNA, 24 nt, Human
uuccgcacaucuuugaaucgcucc

SEQ ID NO: 28436 - RNA, 24 nt, Human
ucggaucagcuucuugggggccuc

SEQ ID NO: 28437 - RNA, 24 nt, Human
uggaaaacgugagaggucagacuc

SEQ ID NO: 28438 - RNA, 24 nt, Human
agagauggcagcagcagcugcagg

SEQ ID NO: 28439 - RNA, 24 nt, Human
cagcugcagcugagacugcggcgg

SEQ ID NO: 28440 - RNA, 24 nt, Human
uugaaugcaucuuguuuauaacug

SEQ ID NO: 28441 - RNA, 24 nt, Human
augcagcaggugucacagaaggac

SEQ ID NO: 28442 - RNA, 24 nt, Human
cuuuuccaaaauuaugacaacaaa

SEQ ID NO: 28443 - RNA, 24 nt, Human
uuuguacuguucuuuggucuguug

SEQ ID NO: 28444 - RNA, 22 nt, Human
uacauucugaaauauuuacaga

SEQ ID NO: 28445 - RNA, 24 nt, Human
uugaaaguuuuuaauauuuauuga

SEQ ID NO: 28446 - RNA, 24 nt, Human
uguacaggcagaugaaaccagguc

SEQ ID NO: 28447 - RNA, 24 nt, Human
uguauggauauguguaaauguuau

SEQ ID NO: 28448 - RNA, 24 nt, Human
ugacugugcgggguggucugucug

SEQ ID NO: 28449 - RNA, 24 nt, Human
ucccugaaccucugccagaagcuc

SEQ ID NO: 28450 - RNA, 23 nt, Human
uuuguggucucuuccacuuucuc

SEQ ID NO: 28451 - RNA, 24 nt, Human
cucccuggccucauccuagagagg

SEQ ID NO: 28452 - RNA, 24 nt, Human
gcgccguggggugggugcuccugg

SEQ ID NO: 28453 - RNA, 24 nt, Human
uggaauauaguaguauggagacca

SEQ ID NO: 28454 - RNA, 24 nt, Human
uuagcaaauagagagaaauauaga

SEQ ID NO: 28455 - RNA, 17 nt, Human
cagcagggacuuuuauc

SEQ ID NO: 28456 - RNA, 24 nt, Human
ugaaagcuuuugaacagcugagaa

SEQ ID NO: 28457 - RNA, 18 nt, Human
ugccagguaggaagcccc

SEQ ID NO: 28458 - RNA, 24 nt, Human
ugugcagaagaaauggaaggauuc

SEQ ID NO: 28459 - RNA, 24 nt, Human
uaucaaggaagggcaggcgugaug

SEQ ID NO: 28460 - RNA, 24 nt, Human
uaagaguguugaaaaaaaaauuca

SEQ ID NO: 28461 - RNA, 24 nt, Human
uucaaauuucuuucuuuuuuaauu

SEQ ID NO: 28462 - RNA, 24 nt, Human
aguuuggauucugaaaacuaacug

SEQ ID NO: 28463 - RNA, 24 nt, Human
uugcauccucaaucacccaggccu

SEQ ID NO: 28464 - RNA, 18 nt, Human
cagcggcggcgcgaggag

SEQ ID NO: 28465 - RNA, 24 nt, Human
uagcaaaucgagucuuaaauaauc

SEQ ID NO: 28466 - RNA, 20 nt, Human
uaaggcgaggcggaauuaaa

SEQ ID NO: 28467 - RNA, 24 nt, Human
ucacaagggccggcacuucugcag

SEQ ID NO: 28468 - RNA, 18 nt, Human
aaacgggcuucacaaacc

SEQ ID NO: 28469 - RNA, 24 nt, Human
cuuuggaugacacccaccggcaac

SEQ ID NO: 28470 - RNA, 24 nt, Human
ugaucucguuggacugcguggcua

SEQ ID NO: 28471 - RNA, 24 nt, Human
uucuggguccggggcgaggggccc

SEQ ID NO: 28472 - RNA, 22 nt, Human
ucgcugccguucggugcgcagu

SEQ ID NO: 28473 - RNA, 24 nt, Human
ucccugaauaucugaacuucauua

SEQ ID NO: 28474 - RNA, 24 nt, Human
uuagaacucuuuacugaacuggcg

SEQ ID NO: 28475 - RNA, 24 nt, Human
uagcuuggugccaauaggucgugg

SEQ ID NO: 28476 - RNA, 24 nt, Human
uugaucuugaagaaacugggcgug

SEQ ID NO: 28477 - RNA, 23 nt, Human
uccgugcgcguugcugcggccgu

SEQ ID NO: 28478 - RNA, 24 nt, Human
aggaaggagauauagugaagagga

SEQ ID NO: 28479 - RNA, 24 nt, Human
uauguauacuuuuuucacuggcuu

SEQ ID NO: 28480 - RNA, 24 nt, Human
ccuaaggauaccuauuuucuuuau

SEQ ID NO: 28481 - RNA, 24 nt, Human
acaggccccaccacccaccacgac

SEQ ID NO: 28482 - RNA, 24 nt, Human
uggaaggaacaauuuaaaagcacu

SEQ ID NO: 28483 - RNA, 24 nt, Human
ucucacucugucaccuaggcugaa

SEQ ID NO: 28484 - RNA, 24 nt, Human
uuuacaguauggauagcuccuccu

SEQ ID NO: 28485 - RNA, 23 nt, Human
ucagggcgccuccucuccugugc

SEQ ID NO: 28486 - RNA, 24 nt, Human
uggccaggcuggucucgaacuccu

SEQ ID NO: 28487 - RNA, 24 nt, Human
aggcaugucacaagggcuggggcg

SEQ ID NO: 28488 - RNA, 24 nt, Human
agucuguggcgaccagaacacaga

SEQ ID NO: 28489 - RNA, 24 nt, Human
gggaagaucuaggagaagaggaag

SEQ ID NO: 28490 - RNA, 24 nt, Human
cuagggcgggguggggaggagggg

SEQ ID NO: 28491 - RNA, 24 nt, Human
ugagggcaaaauggguugacgcga

SEQ ID NO: 28492 - RNA, 24 nt, Human
uaacuaaaauuucagacagcgaug

SEQ ID NO: 28493 - RNA, 24 nt, Human
guccaguucacagacauuguggaa

SEQ ID NO: 28494 - RNA, 24 nt, Human
agcaggcgaguccaggaggggccg

SEQ ID NO: 28495 - RNA, 24 nt, Human
ugagggaaggacugcuggguuggc

SEQ ID NO: 28496 - RNA, 24 nt, Human
ugccuugucuccaggagguccgaa

SEQ ID NO: 28497 - RNA, 24 nt, Human
cagccccccugcacgcagcccgac

SEQ ID NO: 28498 - RNA, 24 nt, Human
ucccucggugacaucuugcccgcc

SEQ ID NO: 28499 - RNA, 24 nt, Human
uccaaagcaucguaaucaggagcc

SEQ ID NO: 28500 - RNA, 24 nt, Human
uucuucuuuuuguggcuguggaca

SEQ ID NO: 28501 - RNA, 24 nt, Human
uacacaacauacuuuuauguuucu

SEQ ID NO: 28502 - RNA, 22 nt, Human
uuuguccauuuguaauaugaga

SEQ ID NO: 28503 - RNA, 24 nt, Human
ugccugaagcuaaaaauauauacg

SEQ ID NO: 28504 - RNA, 23 nt, Human
aaaggaggauguucaggacucug

SEQ ID NO: 28505 - RNA, 24 nt, Human
uucucuguuuggaggcugcaccca

SEQ ID NO: 28506 - RNA, 24 nt, Human
ccacacaggcucauucucaacugg

SEQ ID NO: 28507 - RNA, 24 nt, Human
uuuucuguguagucuucauuaacg

SEQ ID NO: 28508 - RNA, 24 nt, Human
ugggggugggaagauggaauacug

SEQ ID NO: 28509 - RNA, 24 nt, Human
guucgugucuuuggcaucaacaaa

SEQ ID NO: 28510 - RNA, 24 nt, Human
ggcccaguccugcuaguggcaagu

SEQ ID NO: 28511 - RNA, 24 nt, Human
gggaaggcacugaaacagaggacu

SEQ ID NO: 28512 - RNA, 24 nt, Human
ucacugaugcauaaacuggucacc

SEQ ID NO: 28513 - RNA, 24 nt, Human
ucuacaaucuaagaaggauuucag

SEQ ID NO: 28514 - RNA, 24 nt, Human
uggcagcaggugccucucagcugg

SEQ ID NO: 28515 - RNA, 24 nt, Human
cagucggcgauccaccagguucug

SEQ ID NO: 28516 - RNA, 24 nt, Human
ucuugguacucacagauuucagcc

SEQ ID NO: 28517 - RNA, 24 nt, Human
uuaacagaccauugaaaaacagua

SEQ ID NO: 28518 - RNA, 24 nt, Human
acgcacggaccgacgggaagguuu

SEQ ID NO: 28519 - RNA, 24 nt, Human
gggcauuucuuggcaaauguaggg

SEQ ID NO: 28520 - RNA, 24 nt, Human
ggacagguguacagacauguucuu

SEQ ID NO: 28521 - RNA, 24 nt, Human
uauuugaaggcagaaaacacccua

SEQ ID NO: 28522 - RNA, 24 nt, Human
uaguggaggcuaaauuuaaauugu

SEQ ID NO: 28523 - RNA, 24 nt, Human
ugaaauugggauuggagacaggua

SEQ ID NO: 28524 - RNA, 24 nt, Human
auaaugauaaaaauagauguaucc

SEQ ID NO: 28525 - RNA, 24 nt, Human
ucccuggagcugagcccacccugg

SEQ ID NO: 28526 - RNA, 24 nt, Human
uaaaugcgcuugauggccucggcu

SEQ ID NO: 28527 - RNA, 24 nt, Human
uucaccuuuaucugaccaaaccgc

SEQ ID NO: 28528 - RNA, 24 nt, Human
ucuaucauaugugucaaauccaag

SEQ ID NO: 28529 - RNA, 24 nt, Human
gugcugggcccccccaggugaagc

SEQ ID NO: 28530 - RNA, 24 nt, Human
agggguccggugcugucgcgggaa

SEQ ID NO: 28531 - RNA, 24 nt, Human
uuaguauuauuuauuugacaacuc

SEQ ID NO: 28532 - RNA, 24 nt, Human
aaggugaacuugucacuugguaug

SEQ ID NO: 28533 - RNA, 24 nt, Human
ugguggucuugagcuuuuggccug

SEQ ID NO: 28534 - RNA, 24 nt, Human
ugaguugaaacucuuggaggaagc

SEQ ID NO: 28535 - RNA, 24 nt, Human
guuaucaggcacggaaucuaucuc

SEQ ID NO: 28536 - RNA, 24 nt, Human
aaggagcaugauaguaucuauuua

SEQ ID NO: 28537 - RNA, 24 nt, Human
cauuacuagcaacacuggaguggc

SEQ ID NO: 28538 - RNA, 22 nt, Human
uuuacugucuauaccauugaaa

SEQ ID NO: 28539 - RNA, 24 nt, Human
ugcauuguuaucauuaaccagucu

SEQ ID NO: 28540 - RNA, 24 nt, Human
uauuagggauaauauucauuuagc

SEQ ID NO: 28541 - RNA, 24 nt, Human
uaaugggucucaaaauucugugac

SEQ ID NO: 28542 - RNA, 24 nt, Human
uauuugguucaaaauauaaagggc

SEQ ID NO: 28543 - RNA, 24 nt, Human
uauaguuuagggaggcaaaaucaa

SEQ ID NO: 28544 - RNA, 24 nt, Human
ucgcaucaucagcaccaucacgag

SEQ ID NO: 28545 - RNA, 24 nt, Human
ucagcccuccccacccuagcucuc

SEQ ID NO: 28546 - RNA, 24 nt, Human
agaguugagucccgggucaggagu

SEQ ID NO: 28547 - RNA, 24 nt, Human
ugggacauaagcaaagauuuggug

SEQ ID NO: 28548 - RNA, 24 nt, Human
uuggucacugguccaggaaacagg

SEQ ID NO: 28549 - RNA, 24 nt, Human
uggguguauaacuacaguauuaau

SEQ ID NO: 28550 - RNA, 22 nt, Human
ugauacaaguucuggcauuggu

SEQ ID NO: 28551 - RNA, 24 nt, Human
uauuacacacggauguaagcauuu

SEQ ID NO: 28552 - RNA, 24 nt, Human
ggcccggggggaggcaucaaaguc

SEQ ID NO: 28553 - RNA, 24 nt, Human
aggcuucgcugggagcugagaaca

SEQ ID NO: 28554 - RNA, 24 nt, Human
ugaggccgcauguauauaagcaaa

SEQ ID NO: 28555 - RNA, 24 nt, Human
uaggaaauucuguugcgugcuaac

SEQ ID NO: 28556 - RNA, 24 nt, Human
uucauuuuauauauauauauauau

SEQ ID NO: 28557 - RNA, 24 nt, Human
uaaguugccuacaguauucagccc

SEQ ID NO: 28558 - RNA, 24 nt, Human
guugcaauggugagaucucaaaaa

SEQ ID NO: 28559 - RNA, 18 nt, Human
uguggaggaucaaggcug

SEQ ID NO: 28560 - RNA, 24 nt, Human
acuggauucggaaugugcugauuu

SEQ ID NO: 28561 - RNA, 24 nt, Human
uuuaaaaguuucuguaccaauauc

SEQ ID NO: 28562 - RNA, 24 nt, Human
uuggaugcauaucaaucugcuaag

SEQ ID NO: 28563 - RNA, 24 nt, Human
agcuugucacgccugugcacagcg

SEQ ID NO: 28564 - RNA, 24 nt, Human
gggcaggaguuaauauggccagaa

SEQ ID NO: 28565 - RNA, 24 nt, Human
uaaugggucucaaaauucugugac

SEQ ID NO: 28566 - RNA, 24 nt, Human
uaaugggucucaaaauucugugac

SEQ ID NO: 28567 - RNA, 24 nt, Human
uauuagggauaauauucauuuagc

SEQ ID NO: 28568 - RNA, 24 nt, Human
ugcauuguuaucauuaaccagucu

SEQ ID NO: 28569 - RNA, 24 nt, Human
uaaugggucucaaaauucugugac

SEQ ID NO: 28570 - RNA, 24 nt, Human
uauuagggauaauauucauuuagc

SEQ ID NO: 28571 - RNA, 24 nt, Human
uaaugggucucaaaauucugugac

SEQ ID NO: 28572 - RNA, 24 nt, Human
uauuagggauaauauucauuuagc

SEQ ID NO: 28573 - RNA, 22 nt, Human
uuccauggucaaaaaauggcag

SEQ ID NO: 28574 - RNA, 24 nt, Human
gaccagcaccauggcgguuggcaa

SEQ ID NO: 28575 - RNA, 18 nt, Human
acugaagacauuggggac

SEQ ID NO: 28576 - RNA, 24 nt, Human
caccaggcgaugaccucgcccccc

SEQ ID NO: 28577 - RNA, 24 nt, Human
uuggacggcggccggcugcggccu

SEQ ID NO: 28578 - RNA, 24 nt, Human
ucccugagaggcccgggcccgcag

SEQ ID NO: 28579 - RNA, 24 nt, Human
uagaggguuggauuuugauuugga

SEQ ID NO: 28580 - RNA, 24 nt, Human
uggaguuggauuuucagugacuuc

SEQ ID NO: 28581 - RNA, 24 nt, Human
ugcauuguuaucauuaaccagucu

SEQ ID NO: 28582 - RNA, 24 nt, Human
uaaugggucucaaaauucugugac

SEQ ID NO: 28583 - RNA, 24 nt, Human
uauuagggauaauauucauuuagc

SEQ ID NO: 28584 - RNA, 24 nt, Human
cuccuucccgugugagaagggcca

SEQ ID NO: 28585 - RNA, 24 nt, Human
ugccaagcacgcagaucccaugga

SEQ ID NO: 28586 - RNA, 24 nt, Human
ccuggaccaaaugagcugaagcug

SEQ ID NO: 28587 - RNA, 24 nt, Human
ugacaauacuugggaaccugaaga

SEQ ID NO: 28588 - RNA, 24 nt, Human
ugaaguguccucaaauguaaugcu

SEQ ID NO: 28589 - RNA, 17 nt, Human
ucugacagugaaucuga

SEQ ID NO: 28590 - RNA, 24 nt, Human
uuucucaggauuacugugguuucu

SEQ ID NO: 28591 - RNA, 24 nt, Human
uaccagucuaaucuugccuuaaau

SEQ ID NO: 28592 - RNA, 19 nt, Human
uggcuaguugggccacugc

SEQ ID NO: 28593 - RNA, 22 nt, Human
uggcaugaagaaggaauagagc

SEQ ID NO: 28594 - RNA, 24 nt, Human
uuuuugggaguuauuaauucuuua

SEQ ID NO: 28595 - RNA, 24 nt, Human
agcuggugcaggccugccgccugg

SEQ ID NO: 28596 - RNA, 24 nt, Human
gagcgugcggaggaccagcaggag

SEQ ID NO: 28597 - RNA, 24 nt, Human
ucgaaagggcuuggguucaaaaaa

SEQ ID NO: 28598 - RNA, 24 nt, Human
uggcaggaucagcauugaagaaug

SEQ ID NO: 28599 - RNA, 24 nt, Human
caagugccucucgagcgcuacgug

SEQ ID NO: 28600 - RNA, 24 nt, Human
gugaggcgccggggcccacugagu

SEQ ID NO: 28601 - RNA, 24 nt, Human
agucaagaaaaggaagaugaacuu

SEQ ID NO: 28602 - RNA, 24 nt, Human
uaaaucgagacuuggccaugaacc

SEQ ID NO: 28603 - RNA, 24 nt, Human
gggggugggugaggggcgaggcug

SEQ ID NO: 28604 - RNA, 20 nt, Human
accugcuggugaaccacuuc

SEQ ID NO: 28605 - RNA, 24 nt, Human
ugaaaucguccgcccucugccccg

SEQ ID NO: 28606 - RNA, 24 nt, Human
aaauaccauaccaucaaaugguca

SEQ ID NO: 28607 - RNA, 24 nt, Human
cugcaagaccucauucaaauugau

SEQ ID NO: 28608 - RNA, 24 nt, Human
gggaaaugguuccuuuccguuaag

SEQ ID NO: 28609 - RNA, 19 nt, Human
acaaagcaagagaagaagc

SEQ ID NO: 28610 - RNA, 21 nt, Human
cauuggacaggacauccagcc

SEQ ID NO: 28611 - RNA, 22 nt, Human
ucacuugggacaggaggucauc

SEQ ID NO: 28612 - RNA, 24 nt, Human
ccagagcggggucgccucugggcc

SEQ ID NO: 28613 - RNA, 24 nt, Human
caccugaaggugcuguaugacgcc

SEQ ID NO: 28614 - RNA, 24 nt, Human
guggaucuuucucagccugagccg

SEQ ID NO: 28615 - RNA, 24 nt, Human
ucuuugacaauaguagcuuacuaa

SEQ ID NO: 28616 - RNA, 24 nt, Human
uaacaaaauccguucucucucuuc

SEQ ID NO: 28617 - RNA, 24 nt, Human
ccagaaugggacauggguucaucu

SEQ ID NO: 28618 - RNA, 24 nt, Human
cuagugcacacgccuugcaagcga

SEQ ID NO: 28619 - RNA, 20 nt, Human
aaacacacccaccaccaaca

SEQ ID NO: 28620 - RNA, 24 nt, Human
aagcagaccucuccagggggaggu

SEQ ID NO: 28621 - RNA, 24 nt, Human
uucaacuagaaaggagcuaaagcc

SEQ ID NO: 28622 - RNA, 24 nt, Human
ucagacuaaaggaagaauuagaug

SEQ ID NO: 28623 - RNA, 24 nt, Human
ggaaaacaaaguacaaagguuacg

SEQ ID NO: 28624 - RNA, 24 nt, Human
uacccggguccgugggaaguuggc

SEQ ID NO: 28625 - RNA, 24 nt, Human
cugcagguugucagcgaugccggc

SEQ ID NO: 28626 - RNA, 24 nt, Human
uuccaaaguuuauacgggaagaca

SEQ ID NO: 28627 - RNA, 24 nt, Human
ucaaaucuccccaaauugauguau

SEQ ID NO: 28628 - RNA, 24 nt, Human
ugaagggcacaagguugggccugg

SEQ ID NO: 28629 - RNA, 24 nt, Human
cgcccuaaccccaaccccaacgug

SEQ ID NO: 28630 - RNA, 24 nt, Human
uggaagaagccgaggagggggagg

SEQ ID NO: 28631 - RNA, 24 nt, Human
cgaacacacaugcgcgacgcagcg

SEQ ID NO: 28632 - RNA, 24 nt, Human
ugcaguugcccuaaggaaaaauaa

SEQ ID NO: 28633 - RNA, 18 nt, Human
ugccuggggcccacugca

SEQ ID NO: 28634 - RNA, 24 nt, Human
acaggaucugacuggugggcacaa

SEQ ID NO: 28635 - RNA, 24 nt, Human
uaagaaaugcaguccaauuuuaua

SEQ ID NO: 28636 - RNA, 24 nt, Human
cauuuuacauaaaagggaaguauc

SEQ ID NO: 28637 - RNA, 24 nt, Human
ucuggcgccuccugcaggcguccc

SEQ ID NO: 28638 - RNA, 24 nt, Human
caugauggcgcggcugaggcacga

SEQ ID NO: 28639 - RNA, 24 nt, Human
cugacaguuggugagagggacgga

SEQ ID NO: 28640 - RNA, 24 nt, Human
uaaaaagcaguugggacuaagaua

SEQ ID NO: 28641 - RNA, 24 nt, Human
uucaccuugaucacggggcccuug

SEQ ID NO: 28642 - RNA, 24 nt, Human
ugaccaugcgcacgugaggcucug

SEQ ID NO: 28643 - RNA, 24 nt, Human
aggaaaccugcaaggcaaguucuc

SEQ ID NO: 28644 - RNA, 24 nt, Human
ugaaugucaaccaguuuuugcuuu

SEQ ID NO: 28645 - RNA, 23 nt, Human
cagcugguuuugggggugaaggg

SEQ ID NO: 28646 - RNA, 24 nt, Human
uccccuaagcuccagggcccaggg

SEQ ID NO: 28647 - RNA, 24 nt, Human
ugaccgcgcagaccaccucgccau

SEQ ID NO: 28648 - RNA, 24 nt, Human
aggcagucacagaacaggggcaug

SEQ ID NO: 28649 - RNA, 24 nt, Human
aaccagaaaguaagguguucuacu

SEQ ID NO: 28650 - RNA, 24 nt, Human
ccgcguucgcgcuuucgaccagag

SEQ ID NO: 28651 - RNA, 24 nt, Human
ugacaagugccguggguugggcuu

SEQ ID NO: 28652 - RNA, 24 nt, Human
cauuguaacgcaaggugccauucc

SEQ ID NO: 28653 - RNA, 24 nt, Human
uagcacacacacaugaggaacuuu

SEQ ID NO: 28654 - RNA, 24 nt, Human
ggucuagggugaggcauaggcauu

SEQ ID NO: 28655 - RNA, 24 nt, Human
uguuuuuuuuuuuuuuggaccgga

SEQ ID NO: 28656 - RNA, 24 nt, Human
cgagcagcgccacccgcccugggc

SEQ ID NO: 28657 - RNA, 24 nt, Human
uggagcccuggaugccccaccaug

SEQ ID NO: 28658 - RNA, 24 nt, Human
uuugauguuucugguccauggggu

SEQ ID NO: 28659 - RNA, 24 nt, Human
uggcugcaguguugcggaggccag

SEQ ID NO: 28660 - RNA, 24 nt, Human
ucagaaagguagcccugugucuuc

SEQ ID NO: 28661 - RNA, 24 nt, Human
aacgugaaaaaaaggauggaauaa

SEQ ID NO: 28662 - RNA, 20 nt, Human
ucacugggcggggggaggag

SEQ ID NO: 28663 - RNA, 24 nt, Human
uucgucaugcccguggaccuugag

SEQ ID NO: 28664 - RNA, 24 nt, Human
agucugaguuuacuuaugccugcu

SEQ ID NO: 28665 - RNA, 24 nt, Human
guuugcgugacgguuccacgucac

SEQ ID NO: 28666 - RNA, 24 nt, Human
uugcucaggcuugagugcacuggc

SEQ ID NO: 28667 - RNA, 24 nt, Human
guucgggugaugaugguuccacgu

SEQ ID NO: 28668 - RNA, 24 nt, Human
agggagagccgggcuuccgaggac

SEQ ID NO: 28669 - RNA, 24 nt, Human
cgggaccagcaaggagcucccagg

SEQ ID NO: 28670 - RNA, 22 nt, Human
aaccgggcagcaucuucagccc

SEQ ID NO: 28671 - RNA, 20 nt, Human
cuugucccucucucacacuu

SEQ ID NO: 28672 - RNA, 24 nt, Human
aaggugaacuugucacuugguaug

SEQ ID NO: 28673 - RNA, 24 nt, Human
ugguggucuugagcuuuuggccug

SEQ ID NO: 28674 - RNA, 24 nt, Human
ugagacaagccaugaggaacucug

SEQ ID NO: 28675 - RNA, 24 nt, Human
gacacguuaugaacgaucgggucc

SEQ ID NO: 28676 - RNA, 24 nt, Human
uuugcacagccacacugcggccuu

SEQ ID NO: 28677 - RNA, 24 nt, Human
ugcaacaacucgagacaacagaga

SEQ ID NO: 28678 - RNA, 24 nt, Human
ugagaacuccaggauuguccugca

SEQ ID NO: 28679 - RNA, 24 nt, Human
uaccggcugcaggagcaugugcgu

SEQ ID NO: 28680 - RNA, 24 nt, Human
ccggugccgugucccgguucgcuc

SEQ ID NO: 28681 - RNA, 24 nt, Human
cagcagcgucuacuuccgcagcgu

SEQ ID NO: 28682 - RNA, 24 nt, Human
ucaagagcacccugauuuggcuag

SEQ ID NO: 28683 - RNA, 24 nt, Human
cggccugacuuaggccgagcgcgg

SEQ ID NO: 28684 - RNA, 24 nt, Human
uggcggccgggccggguugggggg

SEQ ID NO: 28685 - RNA, 18 nt, Human
cauucuguaauaauagcu

SEQ ID NO: 28686 - RNA, 24 nt, Human
ugaaagucgugcuuuaaaccuaac

SEQ ID NO: 28687 - RNA, 24 nt, Human
uacauugacuauggaaauacugaa

SEQ ID NO: 28688 - RNA, 24 nt, Human
aguaagauuaucuccagccaaaau

SEQ ID NO: 28689 - RNA, 24 nt, Human
aacccggcauucccaguuuaauug

SEQ ID NO: 28690 - RNA, 24 nt, Human
aggggucugcggccucgucuccag

SEQ ID NO: 28691 - RNA, 24 nt, Human
gauuguugggaaccugaggucugc

SEQ ID NO: 28692 - RNA, 24 nt, Human
agugcagacuucccugcuuagguu

SEQ ID NO: 28693 - RNA, 24 nt, Human
cucacauugucuccagggccucgg

SEQ ID NO: 28694 - RNA, 24 nt, Human
ugacugaguuucuggagucccaca

SEQ ID NO: 28695 - RNA, 24 nt, Human
ccagccuucgagagcuaugagucc

SEQ ID NO: 28696 - RNA, 24 nt, Human
ucugcaggcgugccccggcggcgg

SEQ ID NO: 28697 - RNA, 23 nt, Human
gaccgcuucccugcagugccccg

SEQ ID NO: 28698 - RNA, 24 nt, Human
ugggaaacgcgagcgcaggcggca

SEQ ID NO: 28699 - RNA, 24 nt, Human
agaggacuucggcgacgcuucccc

SEQ ID NO: 28700 - RNA, 24 nt, Human
cuggccccugcgcugccagcugga

SEQ ID NO: 28701 - RNA, 24 nt, Human
ugacuggaccggaagcggguuagu

SEQ ID NO: 28702 - RNA, 24 nt, Human
uccuaagucuuauuccaagcuaag

SEQ ID NO: 28703 - RNA, 24 nt, Human
acacugggcuuuuaacacaagacu

SEQ ID NO: 28704 - RNA, 24 nt, Human
uucaaaugaaucuucaaauuggaa

SEQ ID NO: 28705 - RNA, 24 nt, Human
uaaugggucucaaauucugugaca

SEQ ID NO: 28706 - RNA, 24 nt, Human
uuaaauggccaauugaaacaaaca

SEQ ID NO: 28707 - RNA, 24 nt, Human
ucacucaguuuuuaauaaaggcca

SEQ ID NO: 28708 - RNA, 24 nt, Human
uguucagaaauugaggcuaacauu

SEQ ID NO: 28709 - RNA, 24 nt, Human
ugagaaacuuuugauuguuuucaa

SEQ ID NO: 28710 - RNA, 24 nt, Human
uuccugguugcuuuucauaagagg

SEQ ID NO: 28711 - RNA, 24 nt, Human
cucacccacuccucagccuccagg

SEQ ID NO: 28712 - RNA, 24 nt, Human
ugccucagaggcucugggcagcca

SEQ ID NO: 28713 - RNA, 24 nt, Human
ucauagcguccagcgauccagaca

SEQ ID NO: 28714 - RNA, 24 nt, Human
ucccugagugggucgggggaggca

SEQ ID NO: 28715 - RNA, 24 nt, Human
uggcaggaaggggaggcaaggcca

SEQ ID NO: 28716 - RNA, 24 nt, Human
uaaaauagacuuuuaaaauuacaa

SEQ ID NO: 28717 - RNA, 20 nt, Human
aaucagguugaacagggcca

SEQ ID NO: 28718 - RNA, 24 nt, Human
ucauucaggagcagguuauuuaac

SEQ ID NO: 28719 - RNA, 24 nt, Human
ucauuuuuuucuucugcugcguuu

SEQ ID NO: 28720 - RNA, 24 nt, Human
aacacauuacugauagaggaaguc

SEQ ID NO: 28721 - RNA, 24 nt, Human
aagcccauacauaacaguggaggu

SEQ ID NO: 28722 - RNA, 24 nt, Human
uaaguauagaaucuuaaugguugc

SEQ ID NO: 28723 - RNA, 21 nt, Human
uauacaaguuaugagagcauu

SEQ ID NO: 28724 - RNA, 24 nt, Human
aucagauuacauaaauuauacaau

SEQ ID NO: 28725 - RNA, 24 nt, Human
ugaccacagcuguaggauugccag

SEQ ID NO: 28726 - RNA, 24 nt, Human
uuccagcgucucgggcuccuugca

SEQ ID NO: 28727 - RNA, 24 nt, Human
ugggagcggcggcagcuguugggg

SEQ ID NO: 28728 - RNA, 24 nt, Human
uacagaagaugcuuccugauguau

SEQ ID NO: 28729 - RNA, 24 nt, Human
uuggaugugaaaaggaugucaggg

SEQ ID NO: 28730 - RNA, 24 nt, Human
ucccccugucacucaggcugucca

SEQ ID NO: 28731 - RNA, 24 nt, Human
ucuggauucgguucuuggcuggga

SEQ ID NO: 28732 - RNA, 24 nt, Human
ugguguggcgcauagugcaaagcc

SEQ ID NO: 28733 - RNA, 24 nt, Human
uucacagcaaaguguggugcgauc

SEQ ID NO: 28734 - RNA, 21 nt, Human
uccccggaggcgcuuucccuu

SEQ ID NO: 28735 - RNA, 24 nt, Human
agugaaucaggccggcuucaccuu

SEQ ID NO: 28736 - RNA, 24 nt, Human
ucaguuggagagagcguugaggag

SEQ ID NO: 28737 - RNA, 19 nt, Human
uaagucgcauuaauauccu

SEQ ID NO: 28738 - RNA, 24 nt, Human
ggccaaagaacuaaagggcaagca

SEQ ID NO: 28739 - RNA, 24 nt, Human
uccaucauaauuauuuacuguuga

SEQ ID NO: 28740 - RNA, 24 nt, Human
uaacugcauuugcgccaccugcug

SEQ ID NO: 28741 - RNA, 24 nt, Human
cagcauucuggggcuuguaacacu

SEQ ID NO: 28742 - RNA, 24 nt, Human
ucagugguggcgccugggcucagc

SEQ ID NO: 28743 - RNA, 24 nt, Human
ucacuauggugguugacuacagaa

SEQ ID NO: 28744 - RNA, 24 nt, Human
aggaagacauccccagcgaaaaga

SEQ ID NO: 28745 - RNA, 24 nt, Human
ugccaaggauguagaauaaauaag

SEQ ID NO: 28746 - RNA, 24 nt, Human
acgcuccgcuccagcccgggcauc

SEQ ID NO: 28747 - RNA, 24 nt, Human
ccagggggggcaguggggugggcc

SEQ ID NO: 28748 - RNA, 24 nt, Human
ccagggcgcgucgcgcuggccguu

SEQ ID NO: 28749 - RNA, 24 nt, Human
aggcagaguggagagaaacaacuc

SEQ ID NO: 28750 - RNA, 24 nt, Human
uucagcugcaucugcgccaccugc

SEQ ID NO: 28751 - RNA, 24 nt, Human
ucagugguggcgccugggcucagc

SEQ ID NO: 28752 - RNA, 22 nt, Human
ugucaaggggucucugggaagu

SEQ ID NO: 28753 - RNA, 24 nt, Human
ccuuacugucccaggaaacugcag

SEQ ID NO: 28754 - RNA, 24 nt, Human
uagcuuggugccaauuggucgugg

SEQ ID NO: 28755 - RNA, 23 nt, Human
uccgugcgcguugcugcggccgu

SEQ ID NO: 28756 - RNA, 24 nt, Human
aggaaggagauauagugaagagga

SEQ ID NO: 28757 - RNA, 21 nt, Human
aagagcgucaacaauuuacgg

SEQ ID NO: 28758 - RNA, 24 nt, Human
ucuguccugcguccucuguccccg

SEQ ID NO: 28759 - RNA, 24 nt, Human
cagugggugauccccuacaucagg

SEQ ID NO: 28760 - RNA, 24 nt, Human
ucagagcuacacauugagaaccug

SEQ ID NO: 28761 - RNA, 24 nt, Human
caucguggcugaggugcuggugcu

SEQ ID NO: 28762 - RNA, 24 nt, Human
ucagccccacacauuagccucgcu

SEQ ID NO: 28763 - RNA, 24 nt, Human
uuccugaggggcuucuuaacuuuu

SEQ ID NO: 28764 - RNA, 17 nt, Human
ucuaguguccccccagc

SEQ ID NO: 28765 - RNA, 21 nt, Human
gucgucgacacgccgggagcg

SEQ ID NO: 28766 - RNA, 24 nt, Human
ggacucaacuccacccacuaccuc

SEQ ID NO: 28767 - RNA, 24 nt, Human
uguggugguggggaggguggguac

SEQ ID NO: 28768 - RNA, 24 nt, Human
uauauggauuuaccucauucuuuu

SEQ ID NO: 28769 - RNA, 22 nt, Human
cgccgggacagcagacugccgg

SEQ ID NO: 28770 - RNA, 24 nt, Human
cagccuggacuuaccaccacuaaa

SEQ ID NO: 28771 - RNA, 24 nt, Human
ggcccggagcggagcgcgcccugc

SEQ ID NO: 28772 - RNA, 24 nt, Human
uggccugaugauccacagcggaga

SEQ ID NO: 28773 - RNA, 24 nt, Human
ugugugccauugcccaggcagagu

SEQ ID NO: 28774 - RNA, 24 nt, Human
ucccugcugaggccuguccccacc

SEQ ID NO: 28775 - RNA, 24 nt, Human
ugcugcggcccgcagggcccgugg

SEQ ID NO: 28776 - RNA, 24 nt, Human
gcggcgcgccggcccaacaucgga

SEQ ID NO: 28777 - RNA, 24 nt, Human
ugcucuggggguucgccggggccg

SEQ ID NO: 28778 - RNA, 24 nt, Human
ugggcugccuccaggugacagcaa

SEQ ID NO: 28779 - RNA, 24 nt, Human
acucugguggauauggccaggaug

SEQ ID NO: 28780 - RNA, 24 nt, Human
uguuauguggaucuguguggaaag

SEQ ID NO: 28781 - RNA, 24 nt, Human
agaagaagaagaaauggcaaagag

SEQ ID NO: 28782 - RNA, 24 nt, Human
caugagaauaauguuuuaaaacca

SEQ ID NO: 28783 - RNA, 24 nt, Human
uauaaaguuugggcacuuagagca

SEQ ID NO: 28784 - RNA, 24 nt, Human
uuacuguacauagagagacagguu

SEQ ID NO: 28785 - RNA, 24 nt, Human
auggugcaauaauuuaaguggcau

SEQ ID NO: 28786 - RNA, 24 nt, Human
cgaggccgcgguuucccccugggc

SEQ ID NO: 28787 - RNA, 24 nt, Human
gagcuggcagugccugacggcgcg

SEQ ID NO: 28788 - RNA, 24 nt, Human
uggcgccgaagcaggacccgaagc

SEQ ID NO: 28789 - RNA, 24 nt, Human
ugugcagaagaaauggaaggauuc

SEQ ID NO: 28790 - RNA, 24 nt, Human
uaucaaggaagggcaggcgugaug

SEQ ID NO: 28791 - RNA, 24 nt, Human
uucaaauuucuuucuuuuuuaauu

SEQ ID NO: 28792 - RNA, 24 nt, Human
caggucacuccauuugaaaacuag

SEQ ID NO: 28793 - RNA, 24 nt, Human
cauuguaucaaauguuuugggcac

SEQ ID NO: 28794 - RNA, 20 nt, Human
ucccucugggaucugagccu

SEQ ID NO: 28795 - RNA, 24 nt, Human
ucggaucagcuucuugggggccuc

SEQ ID NO: 28796 - RNA, 22 nt, Human
aggcaggcuaagcgggauggcu

SEQ ID NO: 28797 - RNA, 24 nt, Human
ggagacaguaaaggugaugggggc

SEQ ID NO: 28798 - RNA, 21 nt, Human
uugcucagugacagagccuca

SEQ ID NO: 28799 - RNA, 24 nt, Human
ugaaccuaggagggugggaauggc

SEQ ID NO: 28800 - RNA, 24 nt, Human
ugccaugguuuugcacuaugauua

SEQ ID NO: 28801 - RNA, 24 nt, Human
aacuguaucccguugaugcacuaa

SEQ ID NO: 28802 - RNA, 24 nt, Human
aaagcagcaauucuauguucauag

SEQ ID NO: 28803 - RNA, 24 nt, Human
ugccaagaugcgggagugguuuuc

SEQ ID NO: 28804 - RNA, 24 nt, Human
aggcacuuuucggggccgucuggc

SEQ ID NO: 28805 - RNA, 24 nt, Human
uguaguaguuguuggggcccagga

SEQ ID NO: 28806 - RNA, 24 nt, Human
aacacuuuguugaagcugcccuuc

SEQ ID NO: 28807 - RNA, 24 nt, Human
uugaagaagaggauccggguggcc

SEQ ID NO: 28808 - RNA, 24 nt, Human
gcgcagcuucaggggccgcaaggg

SEQ ID NO: 28809 - RNA, 24 nt, Human
uuugcuccugacgucccucagaug

SEQ ID NO: 28810 - RNA, 24 nt, Human
uguaaaggguguccucucagauuu

SEQ ID NO: 28811 - RNA, 18 nt, Human
uaguucauagggaaggga

SEQ ID NO: 28812 - RNA, 24 nt, Human
ucuaugauaguguggguggagaua

SEQ ID NO: 28813 - RNA, 24 nt, Human
accacagagagcccuuacaaagac

SEQ ID NO: 28814 - RNA, 24 nt, Human
ucacugcacuccagccugggauac

SEQ ID NO: 28815 - RNA, 24 nt, Human
ugaagaaaaauugagaaaguagaa

SEQ ID NO: 28816 - RNA, 24 nt, Human
cacacuguuaaaggguuuuuuggg

SEQ ID NO: 28817 - RNA, 24 nt, Human
uucacuuccuacuuaggcuaggcc

SEQ ID NO: 28818 - RNA, 24 nt, Human
ugugguuuuaaaagagucccucaa

SEQ ID NO: 28819 - RNA, 24 nt, Human
ucucugguuguucacauuccaaaa

SEQ ID NO: 28820 - RNA, 24 nt, Human
ugucgcaggcugcucugucucuua

SEQ ID NO: 28821 - RNA, 24 nt, Human
ugauggugaaugugugcggacaca

SEQ ID NO: 28822 - RNA, 24 nt, Human
uuucuuggaagaaguggaagaaau

SEQ ID NO: 28823 - RNA, 24 nt, Human
ucccugcaggcacgacauagcaca

SEQ ID NO: 28824 - RNA, 17 nt, Human
uacugcauuugcucucu

SEQ ID NO: 28825 - RNA, 24 nt, Human
gggaacaaggcaguguucuuuacc

SEQ ID NO: 28826 - RNA, 24 nt, Human
ucuuugguuuuaagaguaaauucu

SEQ ID NO: 28827 - RNA, 24 nt, Human
cauucugccucuuccuucucuugu

SEQ ID NO: 28828 - RNA, 24 nt, Human
ugacucaggaccacgcugacuagg

SEQ ID NO: 28829 - RNA, 24 nt, Human
cugcagcucccucacagugcuucg

SEQ ID NO: 28830 - RNA, 22 nt, Human
ucugucuuggaggaggaucgac

SEQ ID NO: 28831 - RNA, 24 nt, Human
ccuggaaauccccuccccuucccc

SEQ ID NO: 28832 - RNA, 24 nt, Human
ugacaagagcaaccggucuacaac

SEQ ID NO: 28833 - RNA, 24 nt, Human
agugagugugugcuuauaaagguc

SEQ ID NO: 28834 - RNA, 24 nt, Human
gcuuauguguauaauccagcccuu

SEQ ID NO: 28835 - RNA, 24 nt, Human
caggugccucugccauagcuucug

SEQ ID NO: 28836 - RNA, 24 nt, Human
uccaucggggagggcgaaggcccu

SEQ ID NO: 28837 - RNA, 24 nt, Human
auagaugaaguaaaaguuugguag

SEQ ID NO: 28838 - RNA, 24 nt, Human
ucaauuuuuauuuugguuuucuua

SEQ ID NO: 28839 - RNA, 24 nt, Human
aggcauaggccccucaugaccugc

SEQ ID NO: 28840 - RNA, 17 nt, Human
uaauaugucugugcagc

SEQ ID NO: 28841 - RNA, 24 nt, Human
ugaugaggccagagugaugugaag

SEQ ID NO: 28842 - RNA, 24 nt, Human
ucuuuguuguuuaaauauaaacag

SEQ ID NO: 28843 - RNA, 24 nt, Human
accauguaaaagugagcucagacg

SEQ ID NO: 28844 - RNA, 24 nt, Human
aggcaucccguaaaguuguaguug

SEQ ID NO: 28845 - RNA, 24 nt, Human
uacauuagccaccaguggcaaaga

SEQ ID NO: 28846 - RNA, 24 nt, Human
ucuguauuuugcaagccucgaaac

SEQ ID NO: 28847 - RNA, 24 nt, Human
uagcaucauuugggaaagucaagc

SEQ ID NO: 28848 - RNA, 24 nt, Human
cggcugcccauugcucucccacuc

SEQ ID NO: 28849 - RNA, 24 nt, Human
cucgaucggggcugggagggcuuu

SEQ ID NO: 28850 - RNA, 24 nt, Human
uugaagcuuuuacagcuggagacu

SEQ ID NO: 28851 - RNA, 24 nt, Human
uucauuggcaguauuuugugauga

SEQ ID NO: 28852 - RNA, 22 nt, Human
ucagaacauucugaacugcuga

SEQ ID NO: 28853 - RNA, 24 nt, Human
ugaaugacaacuuuauuuuucuua

SEQ ID NO: 28854 - RNA, 24 nt, Human
uauuagggauaauauucauuuagc

SEQ ID NO: 28855 - RNA, 24 nt, Human
uaaugggucucaaaauucugugac

SEQ ID NO: 28856 - RNA, 24 nt, Human
gguggugacgauggugaaguacac

SEQ ID NO: 28857 - RNA, 24 nt, Human
caagauguuugccaaacuuuguaa

SEQ ID NO: 28858 - RNA, 24 nt, Human
uauaggaauacauacaaucuauau

SEQ ID NO: 28859 - RNA, 24 nt, Human
uaaaugguguugacaccaacuucu

SEQ ID NO: 28860 - RNA, 24 nt, Human
uagcuugugguuaauaagucaauu

SEQ ID NO: 28861 - RNA, 24 nt, Human
uuuuuuuuauuuucacuuuuaaug

SEQ ID NO: 28862 - RNA, 24 nt, Human
ucugcaauuugguauaaauguuag

SEQ ID NO: 28863 - RNA, 23 nt, Human
ugaaaaaaguucauacuaaauau

SEQ ID NO: 28864 - RNA, 24 nt, Human
ucacuagugcugagauuacaggca

SEQ ID NO: 28865 - RNA, 24 nt, Human
gacagauucucgcuuugucaccag

SEQ ID NO: 28866 - RNA, 24 nt, Human
uccucuguuuguauguauuugaag

SEQ ID NO: 28867 - RNA, 24 nt, Human
ucaaaaaaucgaugggacugaaga

SEQ ID NO: 28868 - RNA, 24 nt, Human
ccccaguagaagugaugggcugcu

SEQ ID NO: 28869 - RNA, 24 nt, Human
uuaguucuuaaagcaaaaaacaga

SEQ ID NO: 28870 - RNA, 24 nt, Human
uaccuggaaaggaccgugggcacu

SEQ ID NO: 28871 - RNA, 24 nt, Human
acugaaucgaugguaauaauguug

SEQ ID NO: 28872 - RNA, 24 nt, Human
gugcuccuuguggccuuccuugag

SEQ ID NO: 28873 - RNA, 24 nt, Human
ugagggccaucauucugguuccca

SEQ ID NO: 28874 - RNA, 24 nt, Human
ugagauugcuguccucccaaaggu

SEQ ID NO: 28875 - RNA, 24 nt, Human
cuggaaggcauacccuacaauuua

SEQ ID NO: 28876 - RNA, 24 nt, Human
accuggugguguuugucugugguc

SEQ ID NO: 28877 - RNA, 24 nt, Human
caggaacacaugagcaucuggucc

SEQ ID NO: 28878 - RNA, 18 nt, Human
uuugaggaaaggagagaa

SEQ ID NO: 28879 - RNA, 24 nt, Human
ugaguacauuuuaaugggcuuucu

SEQ ID NO: 28880 - RNA, 24 nt, Human
agagaaucauaaauucugcaaagu

SEQ ID NO: 28881 - RNA, 24 nt, Human
ucgccguggucucccaaaaugcua

SEQ ID NO: 28882 - RNA, 24 nt, Human
ucuggaccuaggcuggucucaaca

SEQ ID NO: 28883 - RNA, 23 nt, Human
cacugcagucaccaucuucugcc

SEQ ID NO: 28884 - RNA, 24 nt, Human
agagaagcagagcuuucugaacua

SEQ ID NO: 28885 - RNA, 24 nt, Human
ugugaucauauugauucuuaagac

SEQ ID NO: 28886 - RNA, 24 nt, Human
aauuucucaaacuauaucaauauc

SEQ ID NO: 28887 - RNA, 24 nt, Human
ucaaaggugcuagaacaaaucguc

SEQ ID NO: 28888 - RNA, 24 nt, Human
uauuugcaacuacaugauuucaca

SEQ ID NO: 28889 - RNA, 24 nt, Human
ugcccuugacuuugggggguugcc

SEQ ID NO: 28890 - RNA, 24 nt, Human
aggaaccaugggaaagaauaugau

SEQ ID NO: 28891 - RNA, 22 nt, Human
uuagauccuaggugaugccugg

SEQ ID NO: 28892 - RNA, 24 nt, Human
ucagaccaucacaauguccacucu

SEQ ID NO: 28893 - RNA, 24 nt, Human
aggccgagguccgcggccaggugc

SEQ ID NO: 28894 - RNA, 24 nt, Human
acgggccgcuuuccacaaugcagu

SEQ ID NO: 28895 - RNA, 24 nt, Human
uggccggcacgggcagacaacgcg

SEQ ID NO: 28896 - RNA, 24 nt, Human
gagcuugucuuuuugcccuugggc

SEQ ID NO: 28897 - RNA, 24 nt, Human
uacuugaaaauuaauaaguuugaa

SEQ ID NO: 28898 - RNA, 24 nt, Human
augacccagcaaaccaaugguagg

SEQ ID NO: 28899 - RNA, 24 nt, Human
uauuuguuuuacuguauauuuaaa

SEQ ID NO: 28900 - RNA, 24 nt, Human
uggugcuugugucccgaggugcca

SEQ ID NO: 28901 - RNA, 24 nt, Human
uaugcaggcccuggaacuagaagg

SEQ ID NO: 28902 - RNA, 17 nt, Human
uuacaugggaauugucc

SEQ ID NO: 28903 - RNA, 24 nt, Human
ugcuuggugaccgaauuacuagug

SEQ ID NO: 28904 - RNA, 24 nt, Human
uuagaagaagagaugcugucuugg

SEQ ID NO: 28905 - RNA, 24 nt, Human
ucacuugguuggucguauuguagc

SEQ ID NO: 28906 - RNA, 24 nt, Human
uuuugaucacaaggggaaauuuaa

SEQ ID NO: 28907 - RNA, 24 nt, Human
ggugcaaaaauucuuaagacuucu

SEQ ID NO: 28908 - RNA, 24 nt, Human
uucaauuagcagucuagacauuuc

SEQ ID NO: 28909 - RNA, 24 nt, Human
ugaaagccucuuucuuuucaggcu

SEQ ID NO: 28910 - RNA, 24 nt, Human
ugugcuaaucuaaagaacgaauca

SEQ ID NO: 28911 - RNA, 24 nt, Human
uucauuggcaguauuuugugauga

SEQ ID NO: 28912 - RNA, 22 nt, Human
ucagaacauucugaacugcuga

SEQ ID NO: 28913 - RNA, 24 nt, Human
ugaaugacaacuuuauuuuucuua

SEQ ID NO: 28914 - RNA, 24 nt, Human
uauuaggcaaguuaggugcacuga

SEQ ID NO: 28915 - RNA, 24 nt, Human
uaucuuguauucauuaaaaauauu

SEQ ID NO: 28916 - RNA, 24 nt, Human
aagcuuccauguauauugauaaau

SEQ ID NO: 28917 - RNA, 24 nt, Human
uguaaauuccaguggcuuuaccuc

SEQ ID NO: 28918 - RNA, 24 nt, Human
ccagccccgcagcccuggccugua

SEQ ID NO: 28919 - RNA, 24 nt, Human
uguaaugagaauuuuuaaaaaauu

SEQ ID NO: 28920 - RNA, 24 nt, Human
auuauuuuccuuucuggacuucca

SEQ ID NO: 28921 - RNA, 24 nt, Human
uacccuugaacuucugggcucagg

SEQ ID NO: 28922 - RNA, 22 nt, Human
ugggauuacagguguaagccac

SEQ ID NO: 28923 - RNA, 24 nt, Human
uugagggacaguugccuccuucag

SEQ ID NO: 28924 - RNA, 23 nt, Human
uugcuaguguuauugauauugug

SEQ ID NO: 28925 - RNA, 24 nt, Human
uacaaggauauauuaaugauauua

SEQ ID NO: 28926 - RNA, 24 nt, Human
ugagccucuguucuaaauccuccg

SEQ ID NO: 28927 - RNA, 24 nt, Human
cagcgugccaucaugcugcuggag

SEQ ID NO: 28928 - RNA, 24 nt, Human
aaggagcgucugcuggacgagcug

SEQ ID NO: 28929 - RNA, 20 nt, Human
uggcagagccagaccgacuc

SEQ ID NO: 28930 - RNA, 24 nt, Human
ugacgagccuccccuguaugccug

SEQ ID NO: 28931 - RNA, 24 nt, Human
uuucagggauaggaacuguuaaua

SEQ ID NO: 28932 - RNA, 24 nt, Human
ugaggauaauggcuuccagcuuca

SEQ ID NO: 28933 - RNA, 24 nt, Human
uuacauagguaaacgugucccaug

SEQ ID NO: 28934 - RNA, 24 nt, Human
ucuggauucgguucuuggcuggga

SEQ ID NO: 28935 - RNA, 24 nt, Human
ugguguggcgcauagugcagagcc

SEQ ID NO: 28936 - RNA, 24 nt, Human
uucacagcaaaguguggugcgauc

SEQ ID NO: 28937 - RNA, 24 nt, Human
auaaaaccaauaaaagaucuccca

SEQ ID NO: 28938 - RNA, 20 nt, Human
uguccagaauuuccagaagu

SEQ ID NO: 28939 - RNA, 24 nt, Human
ugagugcccccagggaggggcugg

SEQ ID NO: 28940 - RNA, 24 nt, Human
uguggcccuucucuuuaaguccga

SEQ ID NO: 28941 - RNA, 24 nt, Human
cgaggcccuggagcaggccaucau

SEQ ID NO: 28942 - RNA, 19 nt, Human
ucaguccccuuuggaagcu

SEQ ID NO: 28943 - RNA, 24 nt, Human
ugcaaaaccagcguggcggccgcg

SEQ ID NO: 28944 - RNA, 24 nt, Human
gagcagugcguacaugguugugcg

SEQ ID NO: 28945 - RNA, 24 nt, Human
ugucacaaaaacucacucaucaac

SEQ ID NO: 28946 - RNA, 24 nt, Human
uuaguaugcuguguccuucauaag

SEQ ID NO: 28947 - RNA, 24 nt, Human
uuagugcuacuucugugaauucau

SEQ ID NO: 28948 - RNA, 24 nt, Human
aagcaaacgaagggcaagauugug

SEQ ID NO: 28949 - RNA, 18 nt, Human
uacagggccuuggcuucc

SEQ ID NO: 28950 - RNA, 24 nt, Human
ugccaguagcaaccguucucuaug

SEQ ID NO: 28951 - RNA, 24 nt, Human
caccucuucccuucaucuccaggg

SEQ ID NO: 28952 - RNA, 18 nt, Human
uauaaagugaaggaaaga

SEQ ID NO: 28953 - RNA, 24 nt, Human
ccagaagccucucuccugcaauua

SEQ ID NO: 28954 - RNA, 22 nt, Human
uggcaagcaagaagcgggagcu

SEQ ID NO: 28955 - RNA, 24 nt, Human
uauaugucucuuuaaauuuaaauc

SEQ ID NO: 28956 - RNA, 24 nt, Human
caagcauacucaucauuucuuugu

SEQ ID NO: 28957 - RNA, 24 nt, Human
uccagagucucaaggggcuggggc

SEQ ID NO: 28958 - RNA, 24 nt, Human
cugccacagcugcaaggaccaggc

SEQ ID NO: 28959 - RNA, 23 nt, Human
ugagguggcuaggcuugacacac

SEQ ID NO: 28960 - RNA, 24 nt, Human
uggguacaucaccgcgugucggca

SEQ ID NO: 28961 - RNA, 24 nt, Human
ucucaaguagcugggacuacaggc

SEQ ID NO: 28962 - RNA, 17 nt, Human
uacaaggaguagauuau

SEQ ID NO: 28963 - RNA, 21 nt, Human
aggaaaccuggaggcuacuac

SEQ ID NO: 28964 - RNA, 24 nt, Human
gugaauuguaccuauuucugauga

SEQ ID NO: 28965 - RNA, 24 nt, Human
ucuaucuguccaccaucuugccuu

SEQ ID NO: 28966 - RNA, 24 nt, Human
uauguuccacaggcuggucuugaa

SEQ ID NO: 28967 - RNA, 24 nt, Human
uacacuguucuccagcacucucug

SEQ ID NO: 28968 - RNA, 24 nt, Human
gaucauacuccacugugguccuga

SEQ ID NO: 28969 - RNA, 24 nt, Human
ugugguuuuaaaagagucccucaa

SEQ ID NO: 28970 - RNA, 24 nt, Human
ucucugguuguucacauuccaaaa

SEQ ID NO: 28971 - RNA, 24 nt, Human
ugucgcaggcugcucugucucuua

SEQ ID NO: 28972 - RNA, 24 nt, Human
aucacuuuacaauuacugaaaaag

SEQ ID NO: 28973 - RNA, 24 nt, Human
uggaaaggaugucccuacccuagg

SEQ ID NO: 28974 - RNA, 24 nt, Human
uuaaaaguaguaacuagaacaguu

SEQ ID NO: 28975 - RNA, 24 nt, Human
uggcagcacccacgaugcgggacc

SEQ ID NO: 28976 - RNA, 24 nt, Human
cuuggacuggccuccaggcagccc

SEQ ID NO: 28977 - RNA, 24 nt, Human
cgugcagagggcccgcuggggccc

SEQ ID NO: 28978 - RNA, 24 nt, Human
acugguuuucugguuuuccaucug

SEQ ID NO: 28979 - RNA, 24 nt, Human
guccuuagagaugggaaucuugac

SEQ ID NO: 28980 - RNA, 24 nt, Human
ugagugcaacggaaagggcuauca

SEQ ID NO: 28981 - RNA, 24 nt, Human
uugcauagcucaaaaaguuugaaa

SEQ ID NO: 28982 - RNA, 24 nt, Human
aggaagacccacagagcuguauua

SEQ ID NO: 28983 - RNA, 24 nt, Human
uucagauacuugguaaguggucaa

SEQ ID NO: 28984 - RNA, 17 nt, Human
ugucaaguaaaaaaaaa

SEQ ID NO: 28985 - RNA, 24 nt, Human
gcucaaggagaagaagcuggugaa

SEQ ID NO: 28986 - RNA, 24 nt, Human
uaggcacugagggaucugaguagg

SEQ ID NO: 28987 - RNA, 24 nt, Human
gggcagggucuauggggacgaaag

SEQ ID NO: 28988 - RNA, 23 nt, Human
caccccucccucccucuuuccca

SEQ ID NO: 28989 - RNA, 24 nt, Human
uugcuuaggggucccaggcuugcg

SEQ ID NO: 28990 - RNA, 24 nt, Human
uaaacaggaugcccuccaccucuc

SEQ ID NO: 28991 - RNA, 24 nt, Human
gggaccuggccgagcacaaaccug

SEQ ID NO: 28992 - RNA, 23 nt, Human
ucagcaggccagcggccuuggga

SEQ ID NO: 28993 - RNA, 24 nt, Human
gggcaucugcugucgcugccucgg

SEQ ID NO: 28994 - RNA, 24 nt, Human
aggaaauggggugugaugggucaa

SEQ ID NO: 28995 - RNA, 24 nt, Human
ugcaaccaaacucauaacuaauac

SEQ ID NO: 28996 - RNA, 24 nt, Human
uggcagcugguuuucccuacaaca

SEQ ID NO: 28997 - RNA, 24 nt, Human
uaagcuacuuuuccaguaguuugc

SEQ ID NO: 28998 - RNA, 24 nt, Human
uaaaaaacaaaucaauguaaggac

SEQ ID NO: 28999 - RNA, 24 nt, Human
ugccagguugagaauaucccaggu

SEQ ID NO: 29000 - RNA, 24 nt, Human
ugaucagguggcagcgguggcggc

SEQ ID NO: 29001 - RNA, 24 nt, Human
ugccugagcaaacuggaaacuggu

SEQ ID NO: 29002 - RNA, 24 nt, Human
acaauggccauacucuguugagga

SEQ ID NO: 29003 - RNA, 24 nt, Human
uuggcacagacauuuuaaucuugu

SEQ ID NO: 29004 - RNA, 24 nt, Human
uuuguuuuugaguauuccugaaag

SEQ ID NO: 29005 - RNA, 24 nt, Human
uagaagaugcucaguguccuggau

SEQ ID NO: 29006 - RNA, 24 nt, Human
agaaagacaaagaauuauuacugg

SEQ ID NO: 29007 - RNA, 20 nt, Human
uuuguggucgaaagagucgg

SEQ ID NO: 29008 - RNA, 24 nt, Human
ggaggagaaugagggaggagaggg

SEQ ID NO: 29009 - RNA, 24 nt, Human
ucccuaagggacuggcauaggguu

SEQ ID NO: 29010 - RNA, 24 nt, Human
agcuauugcuauucaauggagacg

SEQ ID NO: 29011 - RNA, 24 nt, Human
ucucuacucugauuuaacuguucu

SEQ ID NO: 29012 - RNA, 24 nt, Human
ugcugugugccccacuccaaccug

SEQ ID NO: 29013 - RNA, 24 nt, Human
uauggugcugcaugcccaagauuu

SEQ ID NO: 29014 - RNA, 24 nt, Human
uuagugugggccuaacccaagggg

SEQ ID NO: 29015 - RNA, 24 nt, Human
uuucccagucugucgauuuaugcc

SEQ ID NO: 29016 - RNA, 24 nt, Human
ugagauuggccuggaugcagcugc

SEQ ID NO: 29017 - RNA, 18 nt, Human
uaagugccaacaugacug

SEQ ID NO: 29018 - RNA, 24 nt, Human
uugccggcucaacuucuccgacuc

SEQ ID NO: 29019 - RNA, 24 nt, Human
caacucaggcucuagcuucuccag

SEQ ID NO: 29020 - RNA, 24 nt, Human
gucccauuugucuuaaguccuggu

SEQ ID NO: 29021 - RNA, 24 nt, Human
aagcagaaggcaguuaugaugaca

SEQ ID NO: 29022 - RNA, 24 nt, Human
ugaccagacuuuuccagaagugcc

SEQ ID NO: 29023 - RNA, 17 nt, Human
uaacauggauggguuga

SEQ ID NO: 29024 - RNA, 22 nt, Human
uuccaaagaaagguacugugga

SEQ ID NO: 29025 - RNA, 24 nt, Human
ucucuugugggcaggggugggggu

SEQ ID NO: 29026 - RNA, 24 nt, Human
aggaaggagauauagugaagagga

SEQ ID NO: 29027 - RNA, 24 nt, Human
guagaguuuucuucaggcuuaaag

SEQ ID NO: 29028 - RNA, 24 nt, Human
uaaaacaaaacaaaagucauuuca

SEQ ID NO: 29029 - RNA, 24 nt, Human
uagagucagugacagggaggcagc

SEQ ID NO: 29030 - RNA, 24 nt, Human
uauagagugagcugauuugggcuc

SEQ ID NO: 29031 - RNA, 24 nt, Human
cuuggcacaggucacuugcacaua

SEQ ID NO: 29032 - RNA, 24 nt, Human
ucacaucguuguuggggaugacgg

SEQ ID NO: 29033 - RNA, 24 nt, Human
uagaaugccuauaccuacauuggu

SEQ ID NO: 29034 - RNA, 24 nt, Human
aucguuuuaaaguuaugaaggcaa

SEQ ID NO: 29035 - RNA, 24 nt, Human
aggcggcguggacagcggcccggc

SEQ ID NO: 29036 - RNA, 24 nt, Human
uuaguccccucucccaccacucag

SEQ ID NO: 29037 - RNA, 24 nt, Human
uggcuccaaggaaucuucccacgg

SEQ ID NO: 29038 - RNA, 24 nt, Human
ucuuaaggcacaccugcugccugu

SEQ ID NO: 29039 - RNA, 24 nt, Human
uauuaugucaguuuauucucuuua

SEQ ID NO: 29040 - RNA, 24 nt, Human
cgaggaggaggcugcgguggcggc

SEQ ID NO: 29041 - RNA, 21 nt, Human
cugugcguggcgagcagugga

SEQ ID NO: 29042 - RNA, 24 nt, Human
ugagggaaauugaggcccugcagu

SEQ ID NO: 29043 - RNA, 24 nt, Human
cagaagaagcagacucagccuuca

SEQ ID NO: 29044 - RNA, 24 nt, Human
agggguccggugcugucgcgggaa

SEQ ID NO: 29045 - RNA, 24 nt, Human
uaaggugaauaagcuugauuguuu

SEQ ID NO: 29046 - RNA, 22 nt, Human
ucccuaaagaaaaagaugaaaa

SEQ ID NO: 29047 - RNA, 24 nt, Human
aagccggacucuauggggcgggac

SEQ ID NO: 29048 - RNA, 24 nt, Human
uuggaucaucucagugggggaaau

SEQ ID NO: 29049 - RNA, 24 nt, Human
uaacuugccaucucaguuuccccg

SEQ ID NO: 29050 - RNA, 24 nt, Human
ucagguccuggggugcugaggaaa

SEQ ID NO: 29051 - RNA, 24 nt, Human
uguugggggcacucccaucuggag

SEQ ID NO: 29052 - RNA, 24 nt, Human
cuggggcuggugggugcaccccug

SEQ ID NO: 29053 - RNA, 24 nt, Human
ucgaccacagaugcucugaacguu

SEQ ID NO: 29054 - RNA, 24 nt, Human
ugugaccaugucggugggaaaagu

SEQ ID NO: 29055 - RNA, 24 nt, Human
uguuauggggauaagcuggugagg

SEQ ID NO: 29056 - RNA, 24 nt, Human
uacaguaugggacaaacagcugac

SEQ ID NO: 29057 - RNA, 19 nt, Human
ugcggauauacaggaucug

SEQ ID NO: 29058 - RNA, 24 nt, Human
uggcucugcccagguggggugggg

SEQ ID NO: 29059 - RNA, 24 nt, Human
uagaggcagaggagcggaaggcag

SEQ ID NO: 29060 - RNA, 24 nt, Human
uuggagcagaacuacugagaaaaa

SEQ ID NO: 29061 - RNA, 24 nt, Human
aggcagugcaccccugggcagagc

SEQ ID NO: 29062 - RNA, 24 nt, Human
uugaucuugaagaaacugggcgug

SEQ ID NO: 29063 - RNA, 24 nt, Human
guagaguuuucuucaggcuuaaag

SEQ ID NO: 29064 - RNA, 24 nt, Human
aacauuauuuauuguaaauguagu

SEQ ID NO: 29065 - RNA, 24 nt, Human
gacaggacgggggugagggaauga

SEQ ID NO: 29066 - RNA, 24 nt, Human
aaccgcuggcccuucccgagugug

SEQ ID NO: 29067 - RNA, 24 nt, Human
uggaugaaucuggcucguuuuaaa

SEQ ID NO: 29068 - RNA, 24 nt, Human
ucugucagacccugugaccugcga

SEQ ID NO: 29069 - RNA, 24 nt, Human
cuuucccccuccuuuuucucuuuu

SEQ ID NO: 29070 - RNA, 23 nt, Human
cguuuggggucccaugauuguuc

SEQ ID NO: 29071 - RNA, 24 nt, Human
uaggggaacaagauagaacacugg

SEQ ID NO: 29072 - RNA, 24 nt, Human
cauuguguuuucucagaaacuaau

SEQ ID NO: 29073 - RNA, 22 nt, Human
cgccgggacagcagacugccgg

SEQ ID NO: 29074 - RNA, 24 nt, Human
cagccuggacuuaccaccacuaaa

SEQ ID NO: 29075 - RNA, 24 nt, Human
ggcccggagcggagcgcgcccugc

SEQ ID NO: 29076 - RNA, 24 nt, Human
cagcucaauucacagaucagacug

SEQ ID NO: 29077 - RNA, 24 nt, Human
cuuuaaauuaaaccaaagaaaaaa

SEQ ID NO: 29078 - RNA, 24 nt, Human
ugacauugagggagucguugugcu

SEQ ID NO: 29079 - RNA, 24 nt, Human
uaccuugaugacccccuccagccc

SEQ ID NO: 29080 - RNA, 24 nt, Human
uccccgauggcccacugcgugacc

SEQ ID NO: 29081 - RNA, 22 nt, Human
ugggagggggcagcugggcuga

SEQ ID NO: 29082 - RNA, 24 nt, Human
ucccaucgagcugguugucuucuu

SEQ ID NO: 29083 - RNA, 20 nt, Human
uggaaugccaucaccggaua

SEQ ID NO: 29084 - RNA, 24 nt, Human
uuagucauugauccuggaguucug

SEQ ID NO: 29085 - RNA, 24 nt, Human
aagcugccuaggugccugacccag

SEQ ID NO: 29086 - RNA, 24 nt, Human
uauugggauuaacacuugugaaaa

SEQ ID NO: 29087 - RNA, 24 nt, Human
agccagaauugcccaucauggugu

SEQ ID NO: 29088 - RNA, 24 nt, Human
ugccuggaaagaggaugugggugg

SEQ ID NO: 29089 - RNA, 24 nt, Human
accagucuguacaaaccuuacagc

SEQ ID NO: 29090 - RNA, 24 nt, Human
uauugcaaauacuuaaaauucuua

SEQ ID NO: 29091 - RNA, 24 nt, Human
uaaaugguguugacaccaacuucu

SEQ ID NO: 29092 - RNA, 24 nt, Human
aggcaggggcagaauccuggaggg

SEQ ID NO: 29093 - RNA, 24 nt, Human
acccucggcggccugauucccagg

SEQ ID NO: 29094 - RNA, 24 nt, Human
agcaagaaggcacgagguccccuc

SEQ ID NO: 29095 - RNA, 24 nt, Human
agguuccagcacaaaggagucugu

SEQ ID NO: 29096 - RNA, 24 nt, Human
uauguggcaucgguccaagcaucc

SEQ ID NO: 29097 - RNA, 24 nt, Human
uugaucuugaagaaacugggcgug

SEQ ID NO: 29098 - RNA, 24 nt, Human
aggaaggagauauagugaagagga

SEQ ID NO: 29099 - RNA, 24 nt, Human
guagaguuuucuucaggcuuaaag

SEQ ID NO: 29100 - RNA, 24 nt, Human
uugaagcuuuuacagcuggagacu

SEQ ID NO: 29101 - RNA, 24 nt, Human
uucauuggcaguauuuugugauga

SEQ ID NO: 29102 - RNA, 24 nt, Human
ugaaugacaacuuuauuuuucuua

SEQ ID NO: 29103 - RNA, 24 nt, Human
acgagguuuggagaaucgaaacug

SEQ ID NO: 29104 - RNA, 24 nt, Human
uuccugaggggcuucuuaacuuuu

SEQ ID NO: 29105 - RNA, 17 nt, Human
ucuaguguccccccagc

SEQ ID NO: 29106 - RNA, 24 nt, Human
uguccaguagccgaacaguuuguu

SEQ ID NO: 29107 - RNA, 24 nt, Human
gaggagaaacccugggaaggcucc

SEQ ID NO: 29108 - RNA, 24 nt, Human
uucgucucaguuguuccuguuuuu

SEQ ID NO: 29109 - RNA, 24 nt, Human
ugaguucgggaucauucuuuuaca

SEQ ID NO: 29110 - RNA, 24 nt, Human
uaaugggucucaaaauucugugac

SEQ ID NO: 29111 - RNA, 24 nt, Human
uauuagggauaauauucauuuagc

SEQ ID NO: 29112 - RNA, 24 nt, Human
uccacuggcgaaagaugccuuucu

SEQ ID NO: 29113 - RNA, 24 nt, Human
uaguucagauugaucuuaggucaa

SEQ ID NO: 29114 - RNA, 24 nt, Human
cggauagagugguggcuuccagaa

SEQ ID NO: 29115 - RNA, 24 nt, Human
uacaggggugagccacugcgcccu

SEQ ID NO: 29116 - RNA, 24 nt, Human
ugccuaggcuggagugcaguggug

SEQ ID NO: 29117 - RNA, 24 nt, Human
ugaucucguuggacugcguggcua

SEQ ID NO: 29118 - RNA, 24 nt, Human
uuuuuuuuuuuuuuuuugacaggg

SEQ ID NO: 29119 - RNA, 24 nt, Human
ugcauuguuaucauuaaccagucu

SEQ ID NO: 29120 - RNA, 24 nt, Human
uaaugggucucaaaauucugugac

SEQ ID NO: 29121 - RNA, 24 nt, Human
uuagugcaguccuucaagccacaa

SEQ ID NO: 29122 - RNA, 24 nt, Human
uggaauggugguaggauuucacag

SEQ ID NO: 29123 - RNA, 24 nt, Human
uuccuggacucggggguauuuugg

SEQ ID NO: 29124 - RNA, 18 nt, Human
ccggucgcccacucccag

SEQ ID NO: 29125 - RNA, 24 nt, Human
uuuguccuccugggucagggagaa

SEQ ID NO: 29126 - RNA, 22 nt, Human
uaaugugguacacauauguccc

SEQ ID NO: 29127 - RNA, 24 nt, Human
uggcuuccucugaacacacaaacc

SEQ ID NO: 29128 - RNA, 24 nt, Human
uccacuggcgaaagaugccuuucu

SEQ ID NO: 29129 - RNA, 24 nt, Human
uucaaauugaucuuaggucaaugg

SEQ ID NO: 29130 - RNA, 21 nt, Human
guggaucccagaaucccgaag

SEQ ID NO: 29131 - RNA, 24 nt, Human
ucacauggauucacuggcuaauaa

SEQ ID NO: 29132 - RNA, 24 nt, Human
caauuggugguuuuuaaaacuggu

SEQ ID NO: 29133 - RNA, 24 nt, Human
uaaaauaauaugaaaugcagacuu

SEQ ID NO: 29134 - RNA, 24 nt, Human
caacugaaccacugucuugacuuu

SEQ ID NO: 29135 - RNA, 24 nt, Human
uuccuggcucugcaguuggguacu

SEQ ID NO: 29136 - RNA, 24 nt, Human
uguggacucagacuggaauuuaca

SEQ ID NO: 29137 - RNA, 24 nt, Human
uuucugggugugucuguggggaug

SEQ ID NO: 29138 - RNA, 24 nt, Human
gaagugaaaauuguucaguccaag

SEQ ID NO: 29139 - RNA, 24 nt, Human
aaaaagaccugcgcugcgaacccu

SEQ ID NO: 29140 - RNA, 24 nt, Human
acccuuuuggcauuguugccacca

SEQ ID NO: 29141 - RNA, 24 nt, Human
guccugcuggcaacggaaucgcgg

SEQ ID NO: 29142 - RNA, 22 nt, Human
uuccgugaccuucugaguggcu

SEQ ID NO: 29143 - RNA, 24 nt, Human
caagggccuggcuccucuuccugu

SEQ ID NO: 29144 - RNA, 24 nt, Human
agcagcucuuuuuucccuucuucu

SEQ ID NO: 29145 - RNA, 24 nt, Human
uugaagccaauuguuuuccaaaua

SEQ ID NO: 29146 - RNA, 24 nt, Human
caccugagcugcagucugacauca

SEQ ID NO: 29147 - RNA, 24 nt, Human
ucacuguagaccccaaauaccauc

SEQ ID NO: 29148 - RNA, 24 nt, Human
uuggucauaagucuuuucguauca

SEQ ID NO: 29149 - RNA, 24 nt, Human
ucggaccccuaccagcuccagacc

SEQ ID NO: 29150 - RNA, 24 nt, Human
cucgugccgcacugaacuggaccu

SEQ ID NO: 29151 - RNA, 24 nt, Human
uaguuguuuuagggcuuuuuauug

SEQ ID NO: 29152 - RNA, 24 nt, Human
cugcagggggccguggacccuccu

SEQ ID NO: 29153 - RNA, 24 nt, Human
gacaguucuauucuuucucauucg

SEQ ID NO: 29154 - RNA, 24 nt, Human
ucuccagaaaugcuuuggguucau

SEQ ID NO: 29155 - RNA, 24 nt, Human
uacagggccaugucagaauauguc

SEQ ID NO: 29156 - RNA, 24 nt, Human
uuugucagucuugggaucucuuuu

SEQ ID NO: 29157 - RNA, 24 nt, Human
uggaaagggagggggauucacuac

SEQ ID NO: 29158 - RNA, 24 nt, Human
uucagcugcaucugcgccaccugc

SEQ ID NO: 29159 - RNA, 24 nt, Human
ucagugguggcgccugggcucagc

SEQ ID NO: 29160 - RNA, 24 nt, Human
gaucacuaaagccucagacuccug

SEQ ID NO: 29161 - RNA, 24 nt, Human
gaaugugugugugccaaggcccca

SEQ ID NO: 29162 - RNA, 24 nt, Human
ugaaugcacaauugaaagagugaa

SEQ ID NO: 29163 - RNA, 24 nt, Human
uuuccuagacugaauugaagaaug

SEQ ID NO: 29164 - RNA, 24 nt, Human
gugacacucuggaaaucuuggaug

SEQ ID NO: 29165 - RNA, 24 nt, Human
ugccugccccucucuggcccacug

SEQ ID NO: 29166 - RNA, 24 nt, Human
ugugaaaauuuugcuguagcgaug

SEQ ID NO: 29167 - RNA, 24 nt, Human
ccucccagccccgguguggagucc

SEQ ID NO: 29168 - RNA, 24 nt, Human
uaaguccccaaucugguugccggc

SEQ ID NO: 29169 - RNA, 17 nt, Human
ugugaugaacacaucuc

SEQ ID NO: 29170 - RNA, 24 nt, Human
uuggcggccgagagccccugcacu

SEQ ID NO: 29171 - RNA, 24 nt, Human
uucuucugaaagcuguuaaagaug

SEQ ID NO: 29172 - RNA, 24 nt, Human
uaaugggucucaaaauucugugac

SEQ ID NO: 29173 - RNA, 24 nt, Human
ugcauuguuaucauuaaccagucu

SEQ ID NO: 29174 - RNA, 24 nt, Human
uaaugggucucaaaauucugugac

SEQ ID NO: 29175 - RNA, 24 nt, Human
uauuagggauaauauucauuuagc

SEQ ID NO: 29176 - RNA, 17 nt, Human
ccuugggguguaggcug

SEQ ID NO: 29177 - RNA, 24 nt, Human
uacaagccccugaugagcuugcca

SEQ ID NO: 29178 - RNA, 24 nt, Human
uagcauagguccugcucuguggau

SEQ ID NO: 29179 - RNA, 24 nt, Human
gacuccucucugguuuagggggug

SEQ ID NO: 29180 - RNA, 24 nt, Human
ucauucugcauggaucuguguuuc

SEQ ID NO: 29181 - RNA, 24 nt, Human
cauuggagggggcagcugugccau

SEQ ID NO: 29182 - RNA, 24 nt, Human
cggcaucggcuucggucugggugg

SEQ ID NO: 29183 - RNA, 24 nt, Human
ucccuggggucagccgcucuggcu

SEQ ID NO: 29184 - RNA, 24 nt, Human
ccuugcugguggcuuugggggccc

SEQ ID NO: 29185 - RNA, 24 nt, Human
uucacuuuaccuucugccaaaugc

SEQ ID NO: 29186 - RNA, 17 nt, Human
ucugacccagugugcgc

SEQ ID NO: 29187 - RNA, 24 nt, Human
guggaccugccacugguggaggug

SEQ ID NO: 29188 - RNA, 24 nt, Human
ucuggauucgguucuuggcuggga

SEQ ID NO: 29189 - RNA, 24 nt, Human
ugaguaaagagaaagagagaagga

SEQ ID NO: 29190 - RNA, 17 nt, Human
caccggagccugucccu

SEQ ID NO: 29191 - RNA, 24 nt, Human
uccacagcgccuggcucccgugcu

SEQ ID NO: 29192 - RNA, 24 nt, Human
ccacugggcaguggucacugggcu

SEQ ID NO: 29193 - RNA, 24 nt, Human
ucaaugcugccauugccaccauca

SEQ ID NO: 29194 - RNA, 24 nt, Human
caccacagccauugcugaggccug

SEQ ID NO: 29195 - RNA, 24 nt, Human
gggcacugaagaugaugcgaccca

SEQ ID NO: 29196 - RNA, 24 nt, Human
acuccacuccacuuggcugugauc

SEQ ID NO: 29197 - RNA, 24 nt, Human
acucguuccugcacuuggccauca

SEQ ID NO: 29198 - RNA, 24 nt, Human
aaggaacagcuugcacaugugccc

SEQ ID NO: 29199 - RNA, 19 nt, Human
uaccugcgcauugggaacu

SEQ ID NO: 29200 - RNA, 24 nt, Human
uuccaugguccagaagugcaagcu

SEQ ID NO: 29201 - RNA, 19 nt, Human
ugagugccggggccuugaa

SEQ ID NO: 29202 - RNA, 24 nt, Human
uuuguacaaaaauacugucaaaau

SEQ ID NO: 29203 - RNA, 24 nt, Human
cuggaaggcauacccuacaauuua

SEQ ID NO: 29204 - RNA, 23 nt, Human
uugaaagguauauuaaaauuaag

SEQ ID NO: 29205 - RNA, 22 nt, Human
uaacagccugcccgugcuuucc

SEQ ID NO: 29206 - RNA, 24 nt, Human
ugagaauuagugguuuagcccuua

SEQ ID NO: 29207 - RNA, 24 nt, Human
ucugaaauauucgauucaauugca

SEQ ID NO: 29208 - RNA, 24 nt, Human
aucauuuacacucccaagaacagu

SEQ ID NO: 29209 - RNA, 24 nt, Human
ucucugauaaccagugaugaugag

SEQ ID NO: 29210 - RNA, 24 nt, Human
ugagaugguaucucauugugguuu

SEQ ID NO: 29211 - RNA, 20 nt, Human
uugccuguucacucugauga

SEQ ID NO: 29212 - RNA, 24 nt, Human
guugcugggagugccuaucauugu

SEQ ID NO: 29213 - RNA, 24 nt, Human
ugcccgaauucggccucgagaucu

SEQ ID NO: 29214 - RNA, 24 nt, Human
ucacgucguucuaagggcauugcc

SEQ ID NO: 29215 - RNA, 24 nt, Human
uaaguacauaggucuuuauuuaaa

SEQ ID NO: 29216 - RNA, 18 nt, Human
guccagguguauaaugcc

SEQ ID NO: 29217 - RNA, 24 nt, Human
ucgcagcugcaaauaaucagaagc

SEQ ID NO: 29218 - RNA, 24 nt, Human
caucaaacggagcugggagucgcu

SEQ ID NO: 29219 - RNA, 24 nt, Human
ucagccccccaacagcuuccucag

SEQ ID NO: 29220 - RNA, 24 nt, Human
guuccuguaaacacccaucgcagc

SEQ ID NO: 29221 - RNA, 24 nt, Human
uaccuguacagaauggauuacaua

SEQ ID NO: 29222 - RNA, 24 nt, Human
uaaccaaaaacauaaagcgauaau

SEQ ID NO: 29223 - RNA, 24 nt, Human
uauauauacacacauauauauacg

SEQ ID NO: 29224 - RNA, 24 nt, Human
uguaaaaagcuuaguuuuguuuua

SEQ ID NO: 29225 - RNA, 24 nt, Human
cuaggucuguggggcauuacuggu

SEQ ID NO: 29226 - RNA, 24 nt, Human
uccccgaaagcacuggagaagggg

SEQ ID NO: 29227 - RNA, 24 nt, Human
uuguauagcauuccaccacaugaa

SEQ ID NO: 29228 - RNA, 24 nt, Human
ccuaccgcgacuucacaccuacga

SEQ ID NO: 29229 - RNA, 24 nt, Human
aaggcgccguacgaccccgagcgu

SEQ ID NO: 29230 - RNA, 24 nt, Human
uggcgugguuuaauacucgauaug

SEQ ID NO: 29231 - RNA, 24 nt, Human
cuccacagguagcucuagcauggg

SEQ ID NO: 29232 - RNA, 24 nt, Human
uaaguuaacagugugcugugccac

SEQ ID NO: 29233 - RNA, 24 nt, Human
uccacgaagcuggcuaaggaggug

SEQ ID NO: 29234 - RNA, 24 nt, Human
guugccauaacaaaguaguacaga

SEQ ID NO: 29235 - RNA, 24 nt, Human
uggaaagccauuucucuuuaaaaa

SEQ ID NO: 29236 - RNA, 24 nt, Human
ugugcaaaagaaauggaaggauuc

SEQ ID NO: 29237 - RNA, 24 nt, Human
uaucaaggaagggcaggcgugaug

SEQ ID NO: 29238 - RNA, 24 nt, Human
uucaaauuucuuucuuuuuuaauu

SEQ ID NO: 29239 - RNA, 24 nt, Human
uaagaguguugaaaaaaaaauuca

SEQ ID NO: 29240 - RNA, 24 nt, Human
cauggcuaagcaggcucaggugcc

SEQ ID NO: 29241 - RNA, 24 nt, Human
aaagaccaagggaaugcaaguccc

SEQ ID NO: 29242 - RNA, 21 nt, Human
ucccaaagauucaucuugaag

SEQ ID NO: 29243 - RNA, 24 nt, Human
uccggcagaggcggaggccugcuc

SEQ ID NO: 29244 - RNA, 24 nt, Human
aaggggccgcggcucggagcuggg

SEQ ID NO: 29245 - RNA, 24 nt, Human
ggacccggccggucccccgagggu

SEQ ID NO: 29246 - RNA, 24 nt, Human
ucucaacucguucgccuacucagc

SEQ ID NO: 29247 - RNA, 24 nt, Human
cagcgggagauucaccaggacugg

SEQ ID NO: 29248 - RNA, 24 nt, Human
ugcaaauuaugccuaugacauugg

SEQ ID NO: 29249 - RNA, 24 nt, Human
uaaguuugaacagaaggguugauc

SEQ ID NO: 29250 - RNA, 24 nt, Human
uacauuguguuaaaacagaagaua

SEQ ID NO: 29251 - RNA, 24 nt, Human
uuugacaucuuguaaauuuuaggu

SEQ ID NO: 29252 - RNA, 21 nt, Human
caaggguuucggacaacgugg

SEQ ID NO: 29253 - RNA, 24 nt, Human
ucagucaucaaaacaauguccauc

SEQ ID NO: 29254 - RNA, 24 nt, Human
uacaccacucccaagaagaauaag

SEQ ID NO: 29255 - RNA, 24 nt, Human
ugugguggcaggccccucaaagcc

SEQ ID NO: 29256 - RNA, 24 nt, Human
uuagugcaugguauuauaaaacaa

SEQ ID NO: 29257 - RNA, 24 nt, Human
ucccagaguacugggauuaugggc

SEQ ID NO: 29258 - RNA, 24 nt, Human
uccuuggucccuuugaauuuguau

SEQ ID NO: 29259 - RNA, 24 nt, Human
ucuaagggcaaacuccagcagcca

SEQ ID NO: 29260 - RNA, 24 nt, Human
acguggguguauccugcgacugcg

SEQ ID NO: 29261 - RNA, 24 nt, Human
cacccgcguauugcagggacguac

SEQ ID NO: 29262 - RNA, 24 nt, Human
aacugcuucugcauaccuuuugug

SEQ ID NO: 29263 - RNA, 24 nt, Human
cuugcauaucuuaaucgacauucc

SEQ ID NO: 29264 - RNA, 24 nt, Human
uaccuuguuauugcugucucaaca

SEQ ID NO: 29265 - RNA, 24 nt, Human
uggcauccggggccgggggucgcg

SEQ ID NO: 29266 - RNA, 24 nt, Human
ugagaaacauaguuaaauaacuga

SEQ ID NO: 29267 - RNA, 24 nt, Human
ucuugugcaguucauuggugauua

SEQ ID NO: 29268 - RNA, 24 nt, Human
uagaauguaucucuuugauuaaua

SEQ ID NO: 29269 - RNA, 24 nt, Human
uagacgucauuccucuugugacuu

SEQ ID NO: 29270 - RNA, 24 nt, Human
ugaagucaguaaccuaacugcaau

SEQ ID NO: 29271 - RNA, 24 nt, Human
ggacagguguacagacauguucuu

SEQ ID NO: 29272 - RNA, 24 nt, Human
ucgaauggacacauuaccagugaa

SEQ ID NO: 29273 - RNA, 24 nt, Human
uuuaaaaaaaugaagaaucaaacu

SEQ ID NO: 29274 - RNA, 17 nt, Human
caucaaguuacaaaagg

SEQ ID NO: 29275 - RNA, 24 nt, Human
ugaacacauacagaacugaauuaa

SEQ ID NO: 29276 - RNA, 24 nt, Human
gaagaagacaacauacauaaaaag

SEQ ID NO: 29277 - RNA, 24 nt, Human
aggaagacauguccagugugucca

SEQ ID NO: 29278 - RNA, 24 nt, Human
aagcagcugcucccgcgcacgugu

SEQ ID NO: 29279 - RNA, 24 nt, Human
ugacaggagccucugacgggacga

SEQ ID NO: 29280 - RNA, 24 nt, Human
gaggaucccuuagcuguguauuac

SEQ ID NO: 29281 - RNA, 24 nt, Human
ugggcacgguuaugaaauauuuug

SEQ ID NO: 29282 - RNA, 24 nt, Human
uaaaucaugugcucuguaaucaag

SEQ ID NO: 29283 - RNA, 20 nt, Human
ucccacugaggaucaucuuc

SEQ ID NO: 29284 - RNA, 24 nt, Human
acuuuuuuuuuuuuuugcuuuuaa

SEQ ID NO: 29285 - RNA, 24 nt, Human
ucaccacuggggaccagucaaagg

SEQ ID NO: 29286 - RNA, 24 nt, Human
cagcuuccucgccaccagggagaa

SEQ ID NO: 29287 - RNA, 22 nt, Human
ugauacaaguucuggcauuggu

SEQ ID NO: 29288 - RNA, 24 nt, Human
uauuacacacggauguaagcauuu

SEQ ID NO: 29289 - RNA, 24 nt, Human
uaucucuaccagugguucucaaac

SEQ ID NO: 29290 - RNA, 24 nt, Human
uaccgcauccuucuuuuccucagc

SEQ ID NO: 29291 - RNA, 24 nt, Human
auccagguggcccccaaauccagu

SEQ ID NO: 29292 - RNA, 24 nt, Human
cagcauucuggggcuuguaacacu

SEQ ID NO: 29293 - RNA, 24 nt, Human
ugcauuguuaucauuaaccagucu

SEQ ID NO: 29294 - RNA, 24 nt, Human
uauuagggauaauauucauuuagc

SEQ ID NO: 29295 - RNA, 24 nt, Human
uccaugagucacaugcuucccuua

SEQ ID NO: 29296 - RNA, 21 nt, Human
ucacaggccagcugcggacac

SEQ ID NO: 29297 - RNA, 24 nt, Human
agaagaagaagaaauggcaaagag

SEQ ID NO: 29298 - RNA, 24 nt, Human
uggcuuauuuguuuuguauucaau

SEQ ID NO: 29299 - RNA, 24 nt, Human
ucugaucaauccuucuuuuucucu

SEQ ID NO: 29300 - RNA, 24 nt, Human
ucuuuuuuuuuucacuuggaauua

SEQ ID NO: 29301 - RNA, 24 nt, Human
uucacauuuccuuauuugcuuaug

SEQ ID NO: 29302 - RNA, 24 nt, Human
aucauccuagaaagcccgcccugu

SEQ ID NO: 29303 - RNA, 24 nt, Human
uagcgugugccuauggucccagcu

SEQ ID NO: 29304 - RNA, 24 nt, Human
agccaggaggucaaggcugcagug

SEQ ID NO: 29305 - RNA, 24 nt, Human
aguacaaugcugagaagccuaaga

SEQ ID NO: 29306 - RNA, 24 nt, Human
uauuuugguuuucuuacaaagguu

SEQ ID NO: 29307 - RNA, 24 nt, Human
uaggagcaaugaucagaugggugc

SEQ ID NO: 29308 - RNA, 24 nt, Human
uauuacggauucaaagacuuauuu

SEQ ID NO: 29309 - RNA, 24 nt, Human
uugcuucuccaaggucauucuuaa

SEQ ID NO: 29310 - RNA, 24 nt, Human
cuuuauggguacuucucaucuugu

SEQ ID NO: 29311 - RNA, 24 nt, Human
aucauauacauuaaaauaccacca

SEQ ID NO: 29312 - RNA, 24 nt, Human
agggauaggcucacuuuguuaaua

SEQ ID NO: 29313 - RNA, 24 nt, Human
ugcauuguuaucauuaaccagucu

SEQ ID NO: 29314 - RNA, 24 nt, Human
uauuagggauaauauucauuuagc

SEQ ID NO: 29315 - RNA, 24 nt, Human
uuuaacuuuuuuaaugggucucaa

SEQ ID NO: 29316 - RNA, 24 nt, Human
agguaguagucguacuucuucucg

SEQ ID NO: 29317 - RNA, 24 nt, Human
uggugggaggguaggaggugcagc

SEQ ID NO: 29318 - RNA, 24 nt, Human
uaaggaaauguugagggcaagcca

SEQ ID NO: 29319 - RNA, 21 nt, Human
gagaaucugagacaucuugcc

SEQ ID NO: 29320 - RNA, 24 nt, Human
cagccagcaccucuuuauagaacc

SEQ ID NO: 29321 - RNA, 24 nt, Human
uggcauaguggugauaauugacau

SEQ ID NO: 29322 - RNA, 23 nt, Human
uggcaguaucuugugacuuuggu

SEQ ID NO: 29323 - RNA, 24 nt, Human
ugacuauaucaucaaccaguuuuc

SEQ ID NO: 29324 - RNA, 24 nt, Human
gccaauuaucuagcuuuuugucau

SEQ ID NO: 29325 - RNA, 24 nt, Human
uagguugagagaaugugacuauga

SEQ ID NO: 29326 - RNA, 24 nt, Human
ugcauuguuaucauuaaccagucu

SEQ ID NO: 29327 - RNA, 24 nt, Human
uauuagggauaauauucauuuagc

SEQ ID NO: 29328 - RNA, 24 nt, Human
uuuaacuuuuuuaaugggucucaa

SEQ ID NO: 29329 - RNA, 24 nt, Human
ugagcuccauacauggguguuauu

SEQ ID NO: 29330 - RNA, 24 nt, Human
uaucaaggaagggcaggcgugaug

SEQ ID NO: 29331 - RNA, 24 nt, Human
agaagaagaagaaauggcaaagag

SEQ ID NO: 29332 - RNA, 24 nt, Human
uguggauauaguuuucccuguugg

SEQ ID NO: 29333 - RNA, 24 nt, Human
ugacuaaagaaaccugcugcacau

SEQ ID NO: 29334 - RNA, 24 nt, Human
gagcaugcaucuucucggugagcc

SEQ ID NO: 29335 - RNA, 24 nt, Human
ucgacgcucaaggucugggcgccu

SEQ ID NO: 29336 - RNA, 24 nt, Human
cucugccuuucucagggccuggag

SEQ ID NO: 29337 - RNA, 24 nt, Human
caccugcacagcaguuaacagcag

SEQ ID NO: 29338 - RNA, 24 nt, Human
ccccggagcccagccagcucugcc

SEQ ID NO: 29339 - RNA, 24 nt, Human
uaaaagaccauccauccagucugc

SEQ ID NO: 29340 - RNA, 24 nt, Human
ugggagucucgggcagaucaccau

SEQ ID NO: 29341 - RNA, 24 nt, Human
ucagcccacaugagcaacaccacc

SEQ ID NO: 29342 - RNA, 24 nt, Human
ugaauggacggguucaggccugau

SEQ ID NO: 29343 - RNA, 24 nt, Human
acaggaacaccagcggccucuccu

SEQ ID NO: 29344 - RNA, 24 nt, Human
ugcauuguuaucauuaaccagucu

SEQ ID NO: 29345 - RNA, 24 nt, Human
uauuagggauaauauucauuuagc

SEQ ID NO: 29346 - RNA, 21 nt, Human
uaugacaccagcuucugcgug

SEQ ID NO: 29347 - RNA, 24 nt, Human
ugucguugcagagcucuguaguua

SEQ ID NO: 29348 - RNA, 24 nt, Human
uuaaaaaucugcaucuuccacuau

SEQ ID NO: 29349 - RNA, 24 nt, Human
uuuuccuagcuacaucugguaccu

SEQ ID NO: 29350 - RNA, 24 nt, Human
acugguugcuucuggugggaucau

SEQ ID NO: 29351 - RNA, 24 nt, Human
uucgaaguucaugcaaccaacuaa

SEQ ID NO: 29352 - RNA, 24 nt, Human
uuuguacaaaaauacugucaaaau

SEQ ID NO: 29353 - RNA, 24 nt, Human
guggauguuuauuuaaaacaaaaa

SEQ ID NO: 29354 - RNA, 24 nt, Human
uguggauauaguuuucccuguugg

SEQ ID NO: 29355 - RNA, 24 nt, Human
ugacuaaagaaaccugcugcacau

SEQ ID NO: 29356 - RNA, 24 nt, Human
gagcaugcaucuucucggugagcc

SEQ ID NO: 29357 - RNA, 24 nt, Human
uaucccacugugucugguaugugu

SEQ ID NO: 29358 - RNA, 24 nt, Human
ccgggucgacccacgcguccgcac

SEQ ID NO: 29359 - RNA, 24 nt, Human
ugacuaaagaaaccugcugcacau

SEQ ID NO: 29360 - RNA, 24 nt, Human
gagcaugcaucuucucggugagcc

SEQ ID NO: 29361 - RNA, 24 nt, Human
ugggagcguguggguucuuaaaca

SEQ ID NO: 29362 - RNA, 19 nt, Human
uaccagaguuaagcugucc

SEQ ID NO: 29363 - RNA, 24 nt, Human
ucaguucccagacuagauugauac

SEQ ID NO: 29364 - RNA, 24 nt, Human
uggcugcgagggcgaggacguggu

SEQ ID NO: 29365 - RNA, 20 nt, Human
ucagcagagaugacaggggc

SEQ ID NO: 29366 - RNA, 24 nt, Human
uugaagccaguggggcaccaaucc

SEQ ID NO: 29367 - RNA, 24 nt, Human
uugugggagccuaguggagagcag

SEQ ID NO: 29368 - RNA, 24 nt, Human
aaguagcugggauuacaggcaugu

SEQ ID NO: 29369 - RNA, 22 nt, Human
cgccgggacagcagacugccgg

SEQ ID NO: 29370 - RNA, 24 nt, Human
guuccuguaaaauccaucgcagcu

SEQ ID NO: 29371 - RNA, 24 nt, Human
ggacuggagcugcuugccaaggua

SEQ ID NO: 29372 - RNA, 24 nt, Human
uggcugagcaucauggaccuuccu

SEQ ID NO: 29373 - RNA, 24 nt, Human
ucugcaauuugguauaaauguuag

SEQ ID NO: 29374 - RNA, 24 nt, Human
ucaggccaaaguagccaugguaag

SEQ ID NO: 29375 - RNA, 24 nt, Human
cuuggagaccucccucucagucaa

SEQ ID NO: 29376 - RNA, 24 nt, Human
aaaaaacauuauaaaaaauucaua

SEQ ID NO: 29377 - RNA, 24 nt, Human
uacaagguuuguugaauacuaguu

SEQ ID NO: 29378 - RNA, 24 nt, Human
ucuaaagugcauucuugcagcuaa

SEQ ID NO: 29379 - RNA, 24 nt, Human
uauuauggucaaugaaaaaaccgg

SEQ ID NO: 29380 - RNA, 24 nt, Human
aagggccccccacccuccaccuuu

SEQ ID NO: 29381 - RNA, 24 nt, Human
aaagggacauuuuuaacggggggg

SEQ ID NO: 29382 - RNA, 24 nt, Human
acgaggggucccaagucuagcccg

SEQ ID NO: 29383 - RNA, 24 nt, Human
gcgcguugcugcggccgugguccg

SEQ ID NO: 29384 - RNA, 24 nt, Human
ugcauuguuaucauuaaccagucu

SEQ ID NO: 29385 - RNA, 24 nt, Human
uaaugggucucaaaauucugugac

SEQ ID NO: 29386 - RNA, 24 nt, Human
uauuagggauaauauucauuuagc

SEQ ID NO: 29387 - RNA, 24 nt, Human
gcacaacucccucagcccacagug

SEQ ID NO: 29388 - RNA, 24 nt, Human
ggagacagaugagaaaugagaaca

SEQ ID NO: 29389 - RNA, 24 nt, Human
cagcacaagccucaugcacaguag

SEQ ID NO: 29390 - RNA, 24 nt, Human
agguguuggagguugcacugagcu

SEQ ID NO: 29391 - RNA, 24 nt, Human
cgucaugucuaagucagagucucc

SEQ ID NO: 29392 - RNA, 24 nt, Human
augaauuuuguuuuguacugucac

SEQ ID NO: 29393 - RNA, 24 nt, Human
uaaaugaacauuugcaauuuuaaa

SEQ ID NO: 29394 - RNA, 24 nt, Human
gcugaaguauguccuguuuuucuu

SEQ ID NO: 29395 - RNA, 24 nt, Human
uccacaacaacuucggagugcucu

SEQ ID NO: 29396 - RNA, 24 nt, Human
agguggaggcugcaaugagccaag

SEQ ID NO: 29397 - RNA, 24 nt, Human
ugagagguggagguugcagugagc

SEQ ID NO: 29398 - RNA, 24 nt, Human
ugaaaaaugucacuucaguaaaaa

SEQ ID NO: 29399 - RNA, 24 nt, Human
uuuaaguauuuacuuuaaaaaauu

SEQ ID NO: 29400 - RNA, 24 nt, Human
uauaaaauuuaccuuuaaguauuu

SEQ ID NO: 29401 - RNA, 24 nt, Human
uucaacuguccuuauuguccauua

SEQ ID NO: 29402 - RNA, 24 nt, Human
uccccgauggcccacugcgugacc

SEQ ID NO: 29403 - RNA, 19 nt, Human
uaccgcuuugagacagucc

SEQ ID NO: 29404 - RNA, 24 nt, Human
ucauacucagacaauuguauuacu

SEQ ID NO: 29405 - RNA, 24 nt, Human
uguauacaugaagcuuagauuaau

SEQ ID NO: 29406 - RNA, 19 nt, Human
uacuuauguuuaauuguac

SEQ ID NO: 29407 - RNA, 24 nt, Human
uggaaaugguuuuaaaggauuacu

SEQ ID NO: 29408 - RNA, 24 nt, Human
uguguuguggucuggggagaaugu

SEQ ID NO: 29409 - RNA, 22 nt, Human
ugauagcaacaacaggaaucuc

SEQ ID NO: 29410 - RNA, 24 nt, Human
uagguucagacuucagguaucucu

SEQ ID NO: 29411 - RNA, 24 nt, Human
ugagcuucucgccaaguucuuuau

SEQ ID NO: 29412 - RNA, 24 nt, Human
ugugaggucucuaacuagcuguau

SEQ ID NO: 29413 - RNA, 24 nt, Human
ucuugugcagccuuuaugagggca

SEQ ID NO: 29414 - RNA, 24 nt, Human
aaggacccuggguucuucugucag

SEQ ID NO: 29415 - RNA, 24 nt, Human
ucccggaaccacaagauugucaau

SEQ ID NO: 29416 - RNA, 24 nt, Human
agugcauagugaggccacugcugc

SEQ ID NO: 29417 - RNA, 20 nt, Human
uucguggaugccacaggacu

SEQ ID NO: 29418 - RNA, 24 nt, Human
aaagauggucggcugcuuuuggua

SEQ ID NO: 29419 - RNA, 24 nt, Human
ggacagguguacagacauguucuu

SEQ ID NO: 29420 - RNA, 24 nt, Human
uguggauauaguuuucccuguugg

SEQ ID NO: 29421 - RNA, 24 nt, Human
ugacuaaagaaaccugcugcacau

SEQ ID NO: 29422 - RNA, 24 nt, Human
gagcaugcaucuucucggugagcc

SEQ ID NO: 29423 - RNA, 24 nt, Human
aggcaaggugacgggacuggaagc

SEQ ID NO: 29424 - RNA, 24 nt, Human
aacaguguaggucuuggugaagcc

SEQ ID NO: 29425 - RNA, 24 nt, Human
acugaaucgaugguaauaauguug

SEQ ID NO: 29426 - RNA, 24 nt, Human
ccuuugaucucccacaccaaaaga

SEQ ID NO: 29427 - RNA, 24 nt, Human
uagguaauuuuagagaguauaauu

SEQ ID NO: 29428 - RNA, 24 nt, Human
gcucuuauugcaaaagacauuaau

SEQ ID NO: 29429 - RNA, 24 nt, Human
ugugaauuuaaccucucccgaucu

SEQ ID NO: 29430 - RNA, 24 nt, Human
agugguagauugguucauacgaug

SEQ ID NO: 29431 - RNA, 24 nt, Human
ugccagagggagggccaugggccg

SEQ ID NO: 29432 - RNA, 24 nt, Human
guggugcaggggacaagaggcugu

SEQ ID NO: 29433 - RNA, 24 nt, Human
cugggcgcccucuuaccgcucacg

SEQ ID NO: 29434 - RNA, 24 nt, Human
uucaaggcaauggcuuuuuaaauc

SEQ ID NO: 29435 - RNA, 24 nt, Human
uugcugccuguuguuuccucugga

SEQ ID NO: 29436 - RNA, 24 nt, Human
uauguucuuugucuuaaucuuagc

SEQ ID NO: 29437 - RNA, 24 nt, Human
aucaauuuuugguguauugauuuc

SEQ ID NO: 29438 - RNA, 24 nt, Human
cacccguucccagggcuccuaagu

SEQ ID NO: 29439 - RNA, 24 nt, Human
uaccaguuucuuauuuuuacacau

SEQ ID NO: 29440 - RNA, 17 nt, Human
uuagagagaggauaugu

SEQ ID NO: 29441 - RNA, 21 nt, Human
cauuggacaggacauccagcc

SEQ ID NO: 29442 - RNA, 24 nt, Human
cagcggcagagagccauccucuau

SEQ ID NO: 29443 - RNA, 24 nt, Human
aggaauugaaaguuaaagcaucuc

SEQ ID NO: 29444 - RNA, 22 nt, Human
ugaaacagacagauaaaguucc

SEQ ID NO: 29445 - RNA, 24 nt, Human
uugcgggucugucagguuuggaaa

SEQ ID NO: 29446 - RNA, 24 nt, Human
aggcaggggguggggaaggcggug

SEQ ID NO: 29447 - RNA, 24 nt, Human
ucuugcuggggucgaagcaguugg

SEQ ID NO: 29448 - RNA, 24 nt, Human
cacccugucuccccuggucucacu

SEQ ID NO: 29449 - RNA, 19 nt, Human
ugccuuggauguuuucagc

SEQ ID NO: 29450 - RNA, 23 nt, Human
ccaccaggccuucuagagcagca

SEQ ID NO: 29451 - RNA, 22 nt, Human
uagcaugccucuuaauuuuucu

SEQ ID NO: 29452 - RNA, 24 nt, Human
uauaaaacuuugauaguuacauug

SEQ ID NO: 29453 - RNA, 24 nt, Human
aacagguaaccacuugagaggaug

SEQ ID NO: 29454 - RNA, 24 nt, Human
caccugaaagaaacuucauacuug

SEQ ID NO: 29455 - RNA, 24 nt, Human
ucgaccacagaugcucugaacguu

SEQ ID NO: 29456 - RNA, 24 nt, Human
uguuauggggauaagcuggugagg

SEQ ID NO: 29457 - RNA, 21 nt, Human
ugggaggggcugaauguggug

SEQ ID NO: 29458 - RNA, 24 nt, Human
aagcguuuugagcagaaaggauuc

SEQ ID NO: 29459 - RNA, 24 nt, Human
aaggaaccauggccaacugugagc

SEQ ID NO: 29460 - RNA, 24 nt, Human
aauuuuaguuauaaauuagugaag

SEQ ID NO: 29461 - RNA, 24 nt, Human
uaaaugcgcuugauggccucggcu

SEQ ID NO: 29462 - RNA, 24 nt, Human
ucucucaucuuugaaaggccauaa

SEQ ID NO: 29463 - RNA, 24 nt, Human
aggggucacuuccagaacugaguc

SEQ ID NO: 29464 - RNA, 24 nt, Human
uaccgugcagcuggaugacguacc

SEQ ID NO: 29465 - RNA, 24 nt, Human
caaaggcccuggcaaacgucaaca

SEQ ID NO: 29466 - RNA, 20 nt, Human
ugaggugacagucacggagg

SEQ ID NO: 29467 - RNA, 24 nt, Human
uggcaagucacuuugacagacauu

SEQ ID NO: 29468 - RNA, 24 nt, Human
ugagaauggcaaaauuagucgccu

SEQ ID NO: 29469 - RNA, 24 nt, Human
uacaccacucccaagaagaauaag

SEQ ID NO: 29470 - RNA, 19 nt, Human
gaccauuucuacccugccu

SEQ ID NO: 29471 - RNA, 24 nt, Human
ugucucagggacggucacccauua

SEQ ID NO: 29472 - RNA, 24 nt, Human
ugcauuguuaucauuaaccagucu

SEQ ID NO: 29473 - RNA, 24 nt, Human
uaaugggucucaaaauucugugac

SEQ ID NO: 29474 - RNA, 24 nt, Human
ggaaaacaaguacaaagguuacgg

SEQ ID NO: 29475 - RNA, 24 nt, Human
caagcuccucuccccccucuuuuc

SEQ ID NO: 29476 - RNA, 24 nt, Human
cagcaguagcagccccucccacag

SEQ ID NO: 29477 - RNA, 24 nt, Human
uaccuaaaaauguggaaauggcuu

SEQ ID NO: 29478 - RNA, 24 nt, Human
uggagugcaguggcacaaucuugg

SEQ ID NO: 29479 - RNA, 24 nt, Human
ugugacucuucucucaaccuuggg

SEQ ID NO: 29480 - RNA, 17 nt, Human
gggaauccugcggcagg

SEQ ID NO: 29481 - RNA, 24 nt, Human
ugccaccacccuugucuuccucug

SEQ ID NO: 29482 - RNA, 24 nt, Human
uauuagggauaauauucauuuagc

SEQ ID NO: 29483 - RNA, 24 nt, Human
uuuaacuuuuuuaaugggucucaa

SEQ ID NO: 29484 - RNA, 24 nt, Human
cuaacccuggcugcacauuggaag

SEQ ID NO: 29485 - RNA, 24 nt, Human
uuccugaggcccgagccacacccu

SEQ ID NO: 29486 - RNA, 24 nt, Human
aauuuuguucaggucccuuuuaau

SEQ ID NO: 29487 - RNA, 24 nt, Human
caaggcaacccagggacuacaacu

SEQ ID NO: 29488 - RNA, 20 nt, Human
uguccagaauuuccagaagu

SEQ ID NO: 29489 - RNA, 24 nt, Human
gccccguguuggaugcagugucuc

SEQ ID NO: 29490 - RNA, 24 nt, Human
ugagugcccccagggaggggcugg

SEQ ID NO: 29491 - RNA, 24 nt, Human
uguggcccuucucuuuaaguccga

SEQ ID NO: 29492 - RNA, 24 nt, Human
acugguucaccuacaaugagacaa

SEQ ID NO: 29493 - RNA, 24 nt, Human
ucacauagguugugccaugagugg

SEQ ID NO: 29494 - RNA, 24 nt, Human
ucuacagccauggggauccagaca

SEQ ID NO: 29495 - RNA, 20 nt, Human
cagagggugcccagagcucc

SEQ ID NO: 29496 - RNA, 24 nt, Human
uccccgcguagccgcugcuccucc

SEQ ID NO: 29497 - RNA, 24 nt, Human
uguccugguuuauguuaccagcaa

SEQ ID NO: 29498 - RNA, 24 nt, Human
cauugaaacuucccccaaaucuga

SEQ ID NO: 29499 - RNA, 24 nt, Human
uuggcccacaucuguuuaaucuuc

SEQ ID NO: 29500 - RNA, 24 nt, Human
uucgaaguucaugcaaccaacuaa

SEQ ID NO: 29501 - RNA, 24 nt, Human
uuuguacaaaaauacugucaaaau

SEQ ID NO: 29502 - RNA, 24 nt, Human
acgacauuccacacccuauuauca

SEQ ID NO: 29503 - RNA, 24 nt, Human
agaauaccuggcgcugaaacagcc

SEQ ID NO: 29504 - RNA, 22 nt, Human
uagaguccuccguuccucuugg

SEQ ID NO: 29505 - RNA, 24 nt, Human
ucagugccugauggaguggccggg

SEQ ID NO: 29506 - RNA, 24 nt, Human
cgagcaguaagugguuuuguuguu

SEQ ID NO: 29507 - RNA, 23 nt, Human
uauuuugcauguuucaacuguuc

SEQ ID NO: 29508 - RNA, 24 nt, Human
cuuguugucuucauaguauuuguu

SEQ ID NO: 29509 - RNA, 24 nt, Human
uggaaaaacuaagggaugcuuuag

SEQ ID NO: 29510 - RNA, 24 nt, Human
cgaccugcgcuaccugucggagga

SEQ ID NO: 29511 - RNA, 24 nt, Human
aacacuguuucagucaagaaugaa

SEQ ID NO: 29512 - RNA, 24 nt, Human
uuucuaguugcuaagauuugccaa

SEQ ID NO: 29513 - RNA, 24 nt, Human
uuugccagucagccuaguucuucu

SEQ ID NO: 29514 - RNA, 24 nt, Human
uguucagccccuaaacgaauggca

SEQ ID NO: 29515 - RNA, 19 nt, Human
agggauggaacgucaccgu

SEQ ID NO: 29516 - RNA, 24 nt, Human
ucaguuuuauugacuuccagcauu

SEQ ID NO: 29517 - RNA, 18 nt, Human
uguguuaaauuaauuugu

SEQ ID NO: 29518 - RNA, 24 nt, Human
ugaaaacguccccauuuugggacu

SEQ ID NO: 29519 - RNA, 24 nt, Human
acuccaauugcuuggaugacaguc

SEQ ID NO: 29520 - RNA, 24 nt, Human
ugagaagagugaaguuuuaugaug

SEQ ID NO: 29521 - RNA, 20 nt, Human
gagcaggcucagucacucca

SEQ ID NO: 29522 - RNA, 24 nt, Human
uuuauggccaagucacuuugacag

SEQ ID NO: 29523 - RNA, 24 nt, Human
uacaccacucccaagaagaauaag

SEQ ID NO: 29524 - RNA, 24 nt, Human
aaaugcuaacaucccugccuggua

SEQ ID NO: 29525 - RNA, 24 nt, Human
uuuaaauaucucaagagcauacca

SEQ ID NO: 29526 - RNA, 24 nt, Human
ucuaccucugagaguuuuucauca

SEQ ID NO: 29527 - RNA, 24 nt, Human
ugaagucauuuuccuuugugagag

SEQ ID NO: 29528 - RNA, 24 nt, Human
ucugcaauuugguauaaauguuag

SEQ ID NO: 29529 - RNA, 23 nt, Human
ugaaaaaaguucauacuaaauau

SEQ ID NO: 29530 - RNA, 24 nt, Human
aacuguaucccguugaugcacuaa

SEQ ID NO: 29531 - RNA, 24 nt, Human
aaagcagcaauucuauguucauag

SEQ ID NO: 29532 - RNA, 19 nt, Human
ugccccguuuaaggucagg

SEQ ID NO: 29533 - RNA, 24 nt, Human
uuucugaacugacucccaguuaug

SEQ ID NO: 29534 - RNA, 24 nt, Human
agcgcucuucuucggaguugcgcc

SEQ ID NO: 29535 - RNA, 24 nt, Human
cgccagugagcagugagagggaac

SEQ ID NO: 29536 - RNA, 24 nt, Human
uaagagaucuaggaaugaggaguc

SEQ ID NO: 29537 - RNA, 24 nt, Human
uaaguaacaccuccucaccuaugg

SEQ ID NO: 29538 - RNA, 24 nt, Human
ucuguacaucuuacuggguuuaau

SEQ ID NO: 29539 - RNA, 24 nt, Human
ccagggggggcaguggggugggcc

SEQ ID NO: 29540 - RNA, 24 nt, Human
gcgcuggccguuccagccgggguc

SEQ ID NO: 29541 - RNA, 24 nt, Human
cuacggggaugacuaccgggccag

SEQ ID NO: 29542 - RNA, 24 nt, Human
cauugugcuggaggaugagggcag

SEQ ID NO: 29543 - RNA, 24 nt, Human
guggggccagagugagccccuucc

SEQ ID NO: 29544 - RNA, 24 nt, Human
auggaaccuggggggguucucucc

SEQ ID NO: 29545 - RNA, 24 nt, Human
acuggauugacaguauccuggccu

SEQ ID NO: 29546 - RNA, 24 nt, Human
ucagugguggaggaguucucggug

SEQ ID NO: 29547 - RNA, 24 nt, Human
ucuccaggugaagcagaaaggugc

SEQ ID NO: 29548 - RNA, 23 nt, Human
uucacaguaugaguuagaaugca

SEQ ID NO: 29549 - RNA, 24 nt, Human
uuugaucaggagaacgugguuacu

SEQ ID NO: 29550 - RNA, 24 nt, Human
ugcauuguuaucauuaaccagucu

SEQ ID NO: 29551 - RNA, 24 nt, Human
uauuagggauaauauucauuuagc

SEQ ID NO: 29552 - RNA, 24 nt, Human
ugcauuguuaucauuaaccagucu

SEQ ID NO: 29553 - RNA, 24 nt, Human
uauuagggauaauauucauuuagc

SEQ ID NO: 29554 - RNA, 24 nt, Human
uuuaacuuuuuuaaugggucucaa

SEQ ID NO: 29555 - RNA, 24 nt, Human
ugcauuguuaucauuaaccagucu

SEQ ID NO: 29556 - RNA, 24 nt, Human
uauuagggauaauauucauuuagc

SEQ ID NO: 29557 - RNA, 24 nt, Human
uuuaacuuuuuuaaugggucucaa

SEQ ID NO: 29558 - RNA, 24 nt, Human
ugugcagaagaaauggaaggauuc

SEQ ID NO: 29559 - RNA, 24 nt, Human
uggcuuauuuguuuuguauucaau

SEQ ID NO: 29560 - RNA, 18 nt, Human
uaucaaggaagggcaggc

SEQ ID NO: 29561 - RNA, 24 nt, Human
ucaguuaaaaaagaagaagaagaa

SEQ ID NO: 29562 - RNA, 24 nt, Human
ucaguuaaaaaagaagaagaagaa

SEQ ID NO: 29563 - RNA, 24 nt, Human
ucugaucaauccuucuuuuucucu

SEQ ID NO: 29564 - RNA, 24 nt, Human
ucaaugcuucauacuuuuucuugg

SEQ ID NO: 29565 - RNA, 24 nt, Human
aggcagcucacgcgguugucgugg

SEQ ID NO: 29566 - RNA, 24 nt, Human
uugcaguugaagucgucguagcca

SEQ ID NO: 29567 - RNA, 21 nt, Human
uaucaaguggcauccacgcuu

SEQ ID NO: 29568 - RNA, 24 nt, Human
ugcuagagaggaaauggcugcuuc

SEQ ID NO: 29569 - RNA, 24 nt, Human
uucagugucucagaccuugcccca

SEQ ID NO: 29570 - RNA, 23 nt, Human
cacccuuuaugguuucggcgguu

SEQ ID NO: 29571 - RNA, 24 nt, Human
uaggauccuguuuuauaguauaga

SEQ ID NO: 29572 - RNA, 24 nt, Human
uguaaagaaugcuucuuguucauu

SEQ ID NO: 29573 - RNA, 24 nt, Human
ugaaugaaugugaaggccuaggac

SEQ ID NO: 29574 - RNA, 24 nt, Human
caugauaauccauuaaucuaucaa

SEQ ID NO: 29575 - RNA, 24 nt, Human
ugagaaguccaagguugagggcca

SEQ ID NO: 29576 - RNA, 24 nt, Human
ucaggucuucaucuucuuacaaag

SEQ ID NO: 29577 - RNA, 24 nt, Human
uguaagauuuguuauauauccuua

SEQ ID NO: 29578 - RNA, 24 nt, Human
uacaccguccggaaggcauuggcc

SEQ ID NO: 29579 - RNA, 24 nt, Human
ccccggccagcccgccugagauga

SEQ ID NO: 29580 - RNA, 24 nt, Human
uagcuccgguagaaggccccaacc

SEQ ID NO: 29581 - RNA, 21 nt, Human
ugccuuugaaguagccggcca

SEQ ID NO: 29582 - RNA, 24 nt, Human
uauuacagauacaaauaagaguac

SEQ ID NO: 29583 - RNA, 24 nt, Human
augaauuuuugugaacaggagugu

SEQ ID NO: 29584 - RNA, 19 nt, Human
ucgcauagaguggaugcua

SEQ ID NO: 29585 - RNA, 24 nt, Human
uagcauaauagaaaaguggagaau

SEQ ID NO: 29586 - RNA, 22 nt, Human
auggacacagagucccagacgu

SEQ ID NO: 29587 - RNA, 22 nt, Human
cacccuuugggaucuugggcuu

SEQ ID NO: 29588 - RNA, 24 nt, Human
cuuggccuuggccuuggccuuggc

SEQ ID NO: 29589 - RNA, 24 nt, Human
cauuguuggccugcaucuucuuua

SEQ ID NO: 29590 - RNA, 24 nt, Human
ggaggagauaaaauaauucauucu

SEQ ID NO: 29591 - RNA, 24 nt, Human
accaguuuccaucaggauuuauca

SEQ ID NO: 29592 - RNA, 24 nt, Human
agcaguucuuuuuuuuuuuccuuu

SEQ ID NO: 29593 - RNA, 24 nt, Human
auguagguuuuacaauauuccaug

SEQ ID NO: 29594 - RNA, 24 nt, Human
uauuuugggggguaggaaacgggu

SEQ ID NO: 29595 - RNA, 24 nt, Human
uguuuugucuauaugugcggcuuu

SEQ ID NO: 29596 - RNA, 24 nt, Human
uugaagccaguggggcaccaaucc

SEQ ID NO: 29597 - RNA, 24 nt, Human
uaccauggggagggucacauuuca

SEQ ID NO: 29598 - RNA, 20 nt, Human
ucccacacaauaaugucuuc

SEQ ID NO: 29599 - RNA, 24 nt, Human
aagaacacagaauuuauuuguagc

SEQ ID NO: 29600 - RNA, 24 nt, Human
agccuaaucuggaagaucuggcau

SEQ ID NO: 29601 - RNA, 24 nt, Human
uuguaagaguggaauuaacugccc

SEQ ID NO: 29602 - RNA, 24 nt, Human
ccaguacagaucguuucucaucuc

SEQ ID NO: 29603 - RNA, 24 nt, Human
ugaucucguuggacugcguggcua

SEQ ID NO: 29604 - RNA, 24 nt, Human
caggugguugcuuugaacuuuauu

SEQ ID NO: 29605 - RNA, 24 nt, Human
ggcccuugacauugugcgaaacug

SEQ ID NO: 29606 - RNA, 24 nt, Human
uguguuuguagacuuggaacccac

SEQ ID NO: 29607 - RNA, 24 nt, Human
ugauggacgcguguguucaacuau

SEQ ID NO: 29608 - RNA, 24 nt, Human
uggcaagcaguccaagcggagucu

SEQ ID NO: 29609 - RNA, 24 nt, Human
gguaugcuuauacacuuacacuuu

SEQ ID NO: 29610 - RNA, 24 nt, Human
ucgcuccguggccuuagcugugcu

SEQ ID NO: 29611 - RNA, 18 nt, Human
uaucaaggaagggcaggc

SEQ ID NO: 29612 - RNA, 24 nt, Human
ucaguuaaaaaagaagaagaagaa

SEQ ID NO: 29613 - RNA, 24 nt, Human
ucaauuuuuauuuugguuuucuua

SEQ ID NO: 29614 - RNA, 24 nt, Human
uccacaggccuuggccagcggggg

SEQ ID NO: 29615 - RNA, 24 nt, Human
uaggaccucgccaucucccuuaau

SEQ ID NO: 29616 - RNA, 21 nt, Human
cauuggggaagaauccaacug

SEQ ID NO: 29617 - RNA, 24 nt, Human
uagagugguggcucccagaauccc

SEQ ID NO: 29618 - RNA, 20 nt, Human
ugagagaacacuccacgaug

SEQ ID NO: 29619 - RNA, 24 nt, Human
ccugaccccugggcuggccuggga

SEQ ID NO: 29620 - RNA, 24 nt, Human
aaagcaaaugaggcagaaaggccc

SEQ ID NO: 29621 - RNA, 24 nt, Human
uauuaugcuugguuauaauuuuuc

SEQ ID NO: 29622 - RNA, 24 nt, Human
cgguaagguugucagguaguaagg

SEQ ID NO: 29623 - RNA, 19 nt, Human
uacaagguuuuuuccuagu

SEQ ID NO: 29624 - RNA, 24 nt, Human
accucauuccuauaucauugcagu

SEQ ID NO: 29625 - RNA, 24 nt, Human
ggaggauaaaggaacucuuugcac

SEQ ID NO: 29626 - RNA, 24 nt, Human
uuaaagguccucagggugcucucc

SEQ ID NO: 29627 - RNA, 24 nt, Human
uuuacaguuuauuauuuuacuccu

SEQ ID NO: 29628 - RNA, 24 nt, Human
cagcgccccgcgcggcccugcaag

SEQ ID NO: 29629 - RNA, 24 nt, Human
ucgcagcgccagggguuggcgccc

SEQ ID NO: 29630 - RNA, 24 nt, Human
guaggcccugaagaacacccucau

SEQ ID NO: 29631 - RNA, 24 nt, Human
uagcaguacaaaaucuuugacuau

SEQ ID NO: 29632 - RNA, 24 nt, Human
uuuugcucuuguugcccaggcuga

SEQ ID NO: 29633 - RNA, 24 nt, Human
ugaggacugugaagauaacuuuca

SEQ ID NO: 29634 - RNA, 24 nt, Human
uauuaaauuuugauguugccucag

SEQ ID NO: 29635 - RNA, 24 nt, Human
ugcaguaggaaaggaggcugcagg

SEQ ID NO: 29636 - RNA, 24 nt, Human
ugagugcaacggaaagggcuauca

SEQ ID NO: 29637 - RNA, 22 nt, Human
ucaggucggggagccggucggg

SEQ ID NO: 29638 - RNA, 24 nt, Human
cugcaucguccacuccggucggcg

SEQ ID NO: 29639 - RNA, 24 nt, Human
uuggcggggccuuggacuaccacu

SEQ ID NO: 29640 - RNA, 24 nt, Human
uuguaugcagaaauagauaugaaa

SEQ ID NO: 29641 - RNA, 24 nt, Human
uuagagauuugcauauguaaaaca

SEQ ID NO: 29642 - RNA, 24 nt, Human
ccgccgccuccgggccgcguccgu

SEQ ID NO: 29643 - RNA, 24 nt, Human
ugguaugugaguuuuaucucaauc

SEQ ID NO: 29644 - RNA, 24 nt, Human
uucagauauuggucuguuucacua

SEQ ID NO: 29645 - RNA, 24 nt, Human
augccugcugcuaguugacuacag

SEQ ID NO: 29646 - RNA, 20 nt, Human
ucugaccucccaggaagugu

SEQ ID NO: 29647 - RNA, 24 nt, Human
uauaauaauuaacaacagcaaaga

SEQ ID NO: 29648 - RNA, 24 nt, Human
uauuucguugagcagugguuucgu

SEQ ID NO: 29649 - RNA, 24 nt, Human
agagguugcacugagcugagaucg

SEQ ID NO: 29650 - RNA, 24 nt, Human
caucacuugaggccaggaguucaa

SEQ ID NO: 29651 - RNA, 24 nt, Human
ugugcagaagaaauggaaggauuc

SEQ ID NO: 29652 - RNA, 24 nt, Human
uaucaaggaagggcaggcgugaug

SEQ ID NO: 29653 - RNA, 24 nt, Human
uucaaauuucuuucuuuuuuaauu

SEQ ID NO: 29654 - RNA, 24 nt, Human
uacaauuuuaacaaucacuuaaaa

SEQ ID NO: 29655 - RNA, 24 nt, Human
ccuauagccaauauaagcagucac

SEQ ID NO: 29656 - RNA, 24 nt, Human
aggcugcaggacaugagcaccagc

SEQ ID NO: 29657 - RNA, 24 nt, Human
cacccgacagcuucgugcacaugu

SEQ ID NO: 29658 - RNA, 24 nt, Human
aguggagagccacacgugugaaau

SEQ ID NO: 29659 - RNA, 24 nt, Human
aggaguuucauugccagugggaga

SEQ ID NO: 29660 - RNA, 24 nt, Human
gaggagaaacccugggaaggcucc

SEQ ID NO: 29661 - RNA, 24 nt, Human
accuuuugcccagcuugagugaac

SEQ ID NO: 29662 - RNA, 24 nt, Human
aaggacuccuacgugggcgacgag

SEQ ID NO: 29663 - RNA, 24 nt, Human
guggggcacgucucgguugucggg

SEQ ID NO: 29664 - RNA, 24 nt, Human
agccauugaaacagaugaucugac

SEQ ID NO: 29665 - RNA, 24 nt, Human
aagaagaaaacgaaaagaagaaac

SEQ ID NO: 29666 - RNA, 24 nt, Human
ugccauaggccggggugccaaguc

SEQ ID NO: 29667 - RNA, 24 nt, Human
ugcauuguuaucauugaccagucu

SEQ ID NO: 29668 - RNA, 24 nt, Human
aaguaugucuaauuuaaacguaua

SEQ ID NO: 29669 - RNA, 24 nt, Human
ugcauuguuaucauuaaccagucu

SEQ ID NO: 29670 - RNA, 24 nt, Human
gagcuuccugaaugccuuuccgaa

SEQ ID NO: 29671 - RNA, 24 nt, Human
cagcgugacuccugcaccuugugc

SEQ ID NO: 29672 - RNA, 24 nt, Human
uaacugaaaguuggggaagaccac

SEQ ID NO: 29673 - RNA, 24 nt, Human
caugcaccacaucccagcucugcu

SEQ ID NO: 29674 - RNA, 22 nt, Human
ccucaggaagagaaucgaggcu

SEQ ID NO: 29675 - RNA, 24 nt, Human
ucgcuggggggacacuagaagcac

SEQ ID NO: 29676 - RNA, 24 nt, Human
uaguagagaugggguuucaccaug

SEQ ID NO: 29677 - RNA, 24 nt, Human
ccaaagugccgggauuacagacau

SEQ ID NO: 29678 - RNA, 24 nt, Human
ucacugcaaccuccaccuccuggg

SEQ ID NO: 29679 - RNA, 23 nt, Human
uacuaugcauaugguccaauauc

SEQ ID NO: 29680 - RNA, 24 nt, Human
uagcauugaaggacucggggauau

SEQ ID NO: 29681 - RNA, 24 nt, Human
uguaaugugccugugccuguggcc

SEQ ID NO: 29682 - RNA, 24 nt, Human
ugaaacaguaugaaugcaaagaau

SEQ ID NO: 29683 - RNA, 24 nt, Human
uucagccagacgucaaacuucacc

SEQ ID NO: 29684 - RNA, 24 nt, Human
aagcuuucuuucugaguucauacc

SEQ ID NO: 29685 - RNA, 24 nt, Human
ucuguucugaguguccccaaaaaa

SEQ ID NO: 29686 - RNA, 24 nt, Human
aaucaguaaagucugauguuuuga

SEQ ID NO: 29687 - RNA, 18 nt, Human
uaccuaauggccuugucu

SEQ ID NO: 29688 - RNA, 24 nt, Human
ucgcugguggauugugggguccgc

SEQ ID NO: 29689 - RNA, 24 nt, Human
agggaccuaagacaggcaggaggg

SEQ ID NO: 29690 - RNA, 24 nt, Human
uaccugaaaccaaaccguuaacaa

SEQ ID NO: 29691 - RNA, 24 nt, Human
ucgaagauaugaggcggugaagug

SEQ ID NO: 29692 - RNA, 24 nt, Human
ugcugcggugagcgugagacccgc

SEQ ID NO: 29693 - RNA, 24 nt, Human
ugagagaauaaaguauuuuggaaa

SEQ ID NO: 29694 - RNA, 23 nt, Human
uuacuaguaucgguuaccacugc

SEQ ID NO: 29695 - RNA, 24 nt, Human
uaucauacauuaauccaucuuagc

SEQ ID NO: 29696 - RNA, 24 nt, Human
agcauguaguauacagacauucug

SEQ ID NO: 29697 - RNA, 24 nt, Human
augaauuaauguuuuucccuguuu

SEQ ID NO: 29698 - RNA, 24 nt, Human
uacacguuaagaaaauaaacaaaa

SEQ ID NO: 29699 - RNA, 24 nt, Human
augaaucuuucauuugguagaccg

SEQ ID NO: 29700 - RNA, 24 nt, Human
ugagaacauuccugcaaagucucc

SEQ ID NO: 29701 - RNA, 24 nt, Human
ccuggccccaggugauccacccac

SEQ ID NO: 29702 - RNA, 24 nt, Human
ucucgcucuguugcccaggcugga

SEQ ID NO: 29703 - RNA, 24 nt, Human
uugaaagguauauuaaaauuaagg

SEQ ID NO: 29704 - RNA, 24 nt, Human
ucuacagucugugaauauaccaau

SEQ ID NO: 29705 - RNA, 24 nt, Human
gugaaacuuuucuagaauuauuuu

SEQ ID NO: 29706 - RNA, 24 nt, Human
agauguguuugucuugacucacua

SEQ ID NO: 29707 - RNA, 24 nt, Human
agauugcuauuacuggacaugauc

SEQ ID NO: 29708 - RNA, 24 nt, Human
cugguuccaacaguucuucucaga

SEQ ID NO: 29709 - RNA, 24 nt, Human
uauggugcggaggcccuggagagg

SEQ ID NO: 29710 - RNA, 24 nt, Human
gcugcagucagcuaccuugaccua

SEQ ID NO: 29711 - RNA, 24 nt, Human
uaggacaagacaagugccagccag

SEQ ID NO: 29712 - RNA, 24 nt, Human
gagcaggaagaugugccacuuccu

SEQ ID NO: 29713 - RNA, 24 nt, Human
uugcagcugaggcacagcaaugac

SEQ ID NO: 29714 - RNA, 24 nt, Human
ugaaacaguaacuugauuuaaagu

SEQ ID NO: 29715 - RNA, 24 nt, Human
uggaaacccagcucuccugucucc

SEQ ID NO: 29716 - RNA, 17 nt, Human
ugggauaggcugguucc

SEQ ID NO: 29717 - RNA, 24 nt, Human
ugaccaaggauugcccuugugcuu

SEQ ID NO: 29718 - RNA, 24 nt, Human
ucuaccagcuaacacauccaccac

SEQ ID NO: 29719 - RNA, 24 nt, Human
caccagcacugcacccuaaucaaa

SEQ ID NO: 29720 - RNA, 24 nt, Human
cacacggcauguucucucuuugca

SEQ ID NO: 29721 - RNA, 24 nt, Human
aacuguaucccguugaugcacuaa

SEQ ID NO: 29722 - RNA, 24 nt, Human
aaagcagcaauucuauguucauag

SEQ ID NO: 29723 - RNA, 24 nt, Human
ggaggggaauuauuugaaucgugg

SEQ ID NO: 29724 - RNA, 24 nt, Human
uucucugugguuggggaaaaggug

SEQ ID NO: 29725 - RNA, 24 nt, Human
ucaggaacgaagauucagggaaug

SEQ ID NO: 29726 - RNA, 23 nt, Human
uaagacugaaaaaaaccucgugc

SEQ ID NO: 29727 - RNA, 24 nt, Human
acauggcauuuucucugugucucu

SEQ ID NO: 29728 - RNA, 22 nt, Human
aagagcuaaaacugaugacagu

SEQ ID NO: 29729 - RNA, 24 nt, Human
aacccuuuggcuuuuuucagagaa

SEQ ID NO: 29730 - RNA, 24 nt, Human
ucugguuuuauuauucaaauuaag

SEQ ID NO: 29731 - RNA, 24 nt, Human
uaugccauugucuuuguaauucuu

SEQ ID NO: 29732 - RNA, 24 nt, Human
agagaauucucuuauccaacauca

SEQ ID NO: 29733 - RNA, 24 nt, Human
aagaugccgcauugggaugggaug

SEQ ID NO: 29734 - RNA, 24 nt, Human
ugaggugacgaggaagcccaaggc

SEQ ID NO: 29735 - RNA, 24 nt, Human
cggcugcccauugcucucccacuc

SEQ ID NO: 29736 - RNA, 24 nt, Human
ucgauggaggacgggaggccuuug

SEQ ID NO: 29737 - RNA, 24 nt, Human
ucucugggccgccaggcuuucagc

SEQ ID NO: 29738 - RNA, 24 nt, Human
gaggagaaacccugggaaggcucc

SEQ ID NO: 29739 - RNA, 24 nt, Human
uccagggcuggaccaggcgccucc

SEQ ID NO: 29740 - RNA, 24 nt, Human
cucccggccagcaggaugugccau

SEQ ID NO: 29741 - RNA, 24 nt, Human
acuagaacacuugacuaaaauuau

SEQ ID NO: 29742 - RNA, 21 nt, Human
uaccagguaauuaaugcucau

SEQ ID NO: 29743 - RNA, 24 nt, Human
uaaauucuguuaguugcuaagaag

SEQ ID NO: 29744 - RNA, 24 nt, Human
ggacgcggaguccgugugcgguuc

SEQ ID NO: 29745 - RNA, 24 nt, Human
uuuuccguuccuacagucccgguu

SEQ ID NO: 29746 - RNA, 24 nt, Human
ugcagaguccuuacuuuaucgcca

SEQ ID NO: 29747 - RNA, 24 nt, Human
ucugaagugcacuuuuuugaaaca

SEQ ID NO: 29748 - RNA, 24 nt, Human
accauacagguggcccauguauaa

SEQ ID NO: 29749 - RNA, 24 nt, Human
uacaaggaugaccaacucuuggau

SEQ ID NO: 29750 - RNA, 24 nt, Human
uccgggcagaugacaccuuugagg

SEQ ID NO: 29751 - RNA, 23 nt, Human
uucaguguuuauuauccuccagg

SEQ ID NO: 29752 - RNA, 24 nt, Human
uuccuugcagcaggaacccacuua

SEQ ID NO: 29753 - RNA, 24 nt, Human
ucaaggauaggcuuuauucugcaa

SEQ ID NO: 29754 - RNA, 24 nt, Human
uauuuuauacacucuaugcugagu

SEQ ID NO: 29755 - RNA, 24 nt, Human
ugaaaggugaguuucauuguuuag

SEQ ID NO: 29756 - RNA, 23 nt, Human
ucacacuguagccacaaagggug

SEQ ID NO: 29757 - RNA, 24 nt, Human
ucccugaguggcugcaucucuucu

SEQ ID NO: 29758 - RNA, 18 nt, Human
ccacgggugaaccaggug

SEQ ID NO: 29759 - RNA, 24 nt, Human
cuggaacagacacuggcucucugu

SEQ ID NO: 29760 - RNA, 24 nt, Human
aggcggccuccccgaagggccagc

SEQ ID NO: 29761 - RNA, 24 nt, Human
uucaaauuucuuucuuuuuuaauu

SEQ ID NO: 29762 - RNA, 24 nt, Human
ucaauuuuuauuuugguuuucuua

SEQ ID NO: 29763 - RNA, 24 nt, Human
ucccugggaguaauuuuggugaag

SEQ ID NO: 29764 - RNA, 24 nt, Human
ucccccagcagccaggaacggggc

SEQ ID NO: 29765 - RNA, 24 nt, Human
ugcagaaaaucugcccugaaauuc

SEQ ID NO: 29766 - RNA, 24 nt, Human
ucacugggacaguugcuuuuauua

SEQ ID NO: 29767 - RNA, 24 nt, Human
cccuugaaaaaagcuuugccuccu

SEQ ID NO: 29768 - RNA, 24 nt, Human
uggcuuauuuguuuuguauucaau

SEQ ID NO: 29769 - RNA, 24 nt, Human
ugcccagauaaaguccaagugauu

SEQ ID NO: 29770 - RNA, 24 nt, Human
uaaauaauccuggcauuauaggga

SEQ ID NO: 29771 - RNA, 24 nt, Human
ucccccaggcaacuaaaccugcag

SEQ ID NO: 29772 - RNA, 24 nt, Human
uacuuuaguucauuuaauuuuaau

SEQ ID NO: 29773 - RNA, 23 nt, Human
uugaaagguauauuaaaauuaag

SEQ ID NO: 29774 - RNA, 24 nt, Human
uauuuuuaaaacuuuauuuuaaaa

SEQ ID NO: 29775 - RNA, 21 nt, Human
uuuguaagcuucugagauugc

SEQ ID NO: 29776 - RNA, 24 nt, Human
cuggaaggcauacccuacaauuua

SEQ ID NO: 29777 - RNA, 24 nt, Human
uuccuggccaucaccaccgacugc

SEQ ID NO: 29778 - RNA, 24 nt, Human
ugacuuguuuuuguuuucuggauu

SEQ ID NO: 29779 - RNA, 24 nt, Human
uguuuccccuucuaaagcucaaga

SEQ ID NO: 29780 - RNA, 24 nt, Human
gggaaggaaaggggccugagcugg

SEQ ID NO: 29781 - RNA, 24 nt, Human
ugccagggcguguugggcaggaau

SEQ ID NO: 29782 - RNA, 24 nt, Human
uaaguacauaggucuuuauuuaaa

SEQ ID NO: 29783 - RNA, 24 nt, Human
ugaaagcaccauggcauaaagucu

SEQ ID NO: 29784 - RNA, 24 nt, Human
ccucuguucaacaauacaguccuu

SEQ ID NO: 29785 - RNA, 24 nt, Human
caucgugugaacuauagaguuugu

SEQ ID NO: 29786 - RNA, 24 nt, Human
uuagaggacugcuuugccuuuuga

SEQ ID NO: 29787 - RNA, 24 nt, Human
uggccagugaguuggcaaucagcu

SEQ ID NO: 29788 - RNA, 24 nt, Human
cacuguuugaggaccaguguuccg

SEQ ID NO: 29789 - RNA, 18 nt, Human
cauugcacuugcuuuugc

SEQ ID NO: 29790 - RNA, 21 nt, Human
ugggccucugguccugcccag

SEQ ID NO: 29791 - RNA, 24 nt, Human
ugaggcagggggaucaugagguca

SEQ ID NO: 29792 - RNA, 24 nt, Human
ucucuaaaauaaauaaauaggccg

SEQ ID NO: 29793 - RNA, 24 nt, Human
ucgcugugccacaucugcagcuca

SEQ ID NO: 29794 - RNA, 24 nt, Human
uguggaaaaccuggaagauggcug

SEQ ID NO: 29795 - RNA, 20 nt, Human
ugagagaacacuccacgaug

SEQ ID NO: 29796 - RNA, 24 nt, Human
ccugaccccugggcuggccuggga

SEQ ID NO: 29797 - RNA, 24 nt, Human
aaagcaaaugaggcagaaaggccc

SEQ ID NO: 29798 - RNA, 22 nt, Human
uaucccuuuuuaucaggucagg

SEQ ID NO: 29799 - RNA, 22 nt, Human
uguaauugugaaaaaagaacuc

SEQ ID NO: 29800 - RNA, 24 nt, Human
ucucaugauaauaguuuccuucac

SEQ ID NO: 29801 - RNA, 24 nt, Human
ugaucucguuggacugcguggcua

SEQ ID NO: 29802 - RNA, 24 nt, Human
agguauguauguuuucacaguuag

SEQ ID NO: 29803 - RNA, 24 nt, Human
acaggguuucaucauguuggcgca

SEQ ID NO: 29804 - RNA, 24 nt, Human
ucccagaauuuaaaauuuccuugc

SEQ ID NO: 29805 - RNA, 24 nt, Human
ugaaguugucggaguccccaucgg

SEQ ID NO: 29806 - RNA, 24 nt, Human
cuggagcagguccaccggccccua

SEQ ID NO: 29807 - RNA, 24 nt, Human
ccaggccaaaaaggcucaacauuu

SEQ ID NO: 29808 - RNA, 24 nt, Human
acggagaagaagcccuggugugug

SEQ ID NO: 29809 - RNA, 18 nt, Human
ugaauagauuuaugaauu

SEQ ID NO: 29810 - RNA, 24 nt, Human
uagggugcuuaaagcuaacuaguc

SEQ ID NO: 29811 - RNA, 24 nt, Human
aggagauaaauacuuuauuucaaa

SEQ ID NO: 29812 - RNA, 18 nt, Human
ucaaggguaugcaugugu

SEQ ID NO: 29813 - RNA, 24 nt, Human
acagugcccugccuuggcugucag

SEQ ID NO: 29814 - RNA, 24 nt, Human
uggaauucgagguaggccggccuc

SEQ ID NO: 29815 - RNA, 24 nt, Human
ucugcaccucacccugaucuccuc

SEQ ID NO: 29816 - RNA, 24 nt, Human
cgagcagaacucucugcccgcauc

SEQ ID NO: 29817 - RNA, 24 nt, Human
uccccugauaaugcaucaccuucc

SEQ ID NO: 29818 - RNA, 24 nt, Human
aggaagccccgugccacuccagug

SEQ ID NO: 29819 - RNA, 24 nt, Human
ugggagcgcagguagucaaggacg

SEQ ID NO: 29820 - RNA, 24 nt, Human
ucagaguacauauuuggggugcgg

SEQ ID NO: 29821 - RNA, 24 nt, Human
uugugcuaaagggaaaggaggauc

SEQ ID NO: 29822 - RNA, 24 nt, Human
ugaaaaaauuuagacuguaaccgc

SEQ ID NO: 29823 - RNA, 24 nt, Human
uugaaugaaaccauaacuccacuu

SEQ ID NO: 29824 - RNA, 22 nt, Human
aacaugcuuaugaugcauagga

SEQ ID NO: 29825 - RNA, 24 nt, Human
cauaagauuauuccaugauuaaaa

SEQ ID NO: 29826 - RNA, 24 nt, Human
gaugcaaaauguuugcaguuugac

SEQ ID NO: 29827 - RNA, 24 nt, Human
aaauggaaucuagaagcuaaauuu

SEQ ID NO: 29828 - RNA, 24 nt, Human
uggaucucgggacuugaggauuuu

SEQ ID NO: 29829 - RNA, 24 nt, Human
uaucaguacuuucuguuugaaaaa

SEQ ID NO: 29830 - RNA, 24 nt, Human
uaauauuggguauagauguaaguc

SEQ ID NO: 29831 - RNA, 24 nt, Human
aacacugcccagcuuugaggagau

SEQ ID NO: 29832 - RNA, 24 nt, Human
uggcuaaacuggugucaucacuac

SEQ ID NO: 29833 - RNA, 24 nt, Human
ggugaugggggcagccgggaggga

SEQ ID NO: 29834 - RNA, 24 nt, Human
ucagugccuugccaggaucccauc

SEQ ID NO: 29835 - RNA, 24 nt, Human
caggagccggaaagcagccuugcu

SEQ ID NO: 29836 - RNA, 24 nt, Human
ccccugagggagaggaaaggugaa

SEQ ID NO: 29837 - RNA, 24 nt, Human
ugcaaagacucccccugacccacc

SEQ ID NO: 29838 - RNA, 23 nt, Human
uuacaacaaucgagugcuggaca

SEQ ID NO: 29839 - RNA, 24 nt, Human
ugcuagcugaggugccaacuaugg

SEQ ID NO: 29840 - RNA, 24 nt, Human
ugagauucuugcucaccgucuggg

SEQ ID NO: 29841 - RNA, 24 nt, Human
agaaugcaaauauauuuuuacugu

SEQ ID NO: 29842 - RNA, 24 nt, Human
agagauaaaaugaaguguuaacag

SEQ ID NO: 29843 - RNA, 24 nt, Human
uaucaaggaagggcaggcgugaug

SEQ ID NO: 29844 - RNA, 24 nt, Human
agaagaagaagaaauggcaaagag

SEQ ID NO: 29845 - RNA, 24 nt, Human
uaagaguguugaaaaaaaaauuca

SEQ ID NO: 29846 - RNA, 24 nt, Human
cuagguuuauagauaguugggugg

SEQ ID NO: 29847 - RNA, 24 nt, Human
ugaguagguggccugcaguaaugu

SEQ ID NO: 29848 - RNA, 24 nt, Human
aaagaacaagaguugaagaucuau

SEQ ID NO: 29849 - RNA, 24 nt, Human
aaggauucucgugccucagccucc

SEQ ID NO: 29850 - RNA, 24 nt, Human
gggcagugucucucacccagucug

SEQ ID NO: 29851 - RNA, 24 nt, Human
gugcagaauugagggccgaguaga

SEQ ID NO: 29852 - RNA, 24 nt, Human
ccaggccaaaaaggcucaacauuu

SEQ ID NO: 29853 - RNA, 24 nt, Human
ugggagaaaggcgcugagcguggc

SEQ ID NO: 29854 - RNA, 24 nt, Human
gcccuggaacagaguuacagauac

SEQ ID NO: 29855 - RNA, 24 nt, Human
ugaguagaaugggcucaugggcaa

SEQ ID NO: 29856 - RNA, 22 nt, Human
cgccgggacagcagacugccgg

SEQ ID NO: 29857 - RNA, 24 nt, Human
cacccguaacuguaaccuauccuu

SEQ ID NO: 29858 - RNA, 24 nt, Human
ccagcacacacacgugucuagcca

SEQ ID NO: 29859 - RNA, 24 nt, Human
ucucagggacucuggcugggccag

SEQ ID NO: 29860 - RNA, 19 nt, Human
ugugaugggaagaggggcu

SEQ ID NO: 29861 - RNA, 24 nt, Human
ggucaaggauuguaauauugccag

SEQ ID NO: 29862 - RNA, 23 nt, Human
ggaguucuugggaaaggguuggg

SEQ ID NO: 29863 - RNA, 24 nt, Human
cauuguuugccauugccugcuuug

SEQ ID NO: 29864 - RNA, 24 nt, Human
uugcuugaacccgggaggcggagg

SEQ ID NO: 29865 - RNA, 19 nt, Human
uagauuguauauugaaaau

SEQ ID NO: 29866 - RNA, 24 nt, Human
gugcuuccaaggccuauaacauag

SEQ ID NO: 29867 - RNA, 24 nt, Human
uugaaaaugcugaauuauuguaau

SEQ ID NO: 29868 - RNA, 24 nt, Human
uaccccaugagagggcagcuccug

SEQ ID NO: 29869 - RNA, 24 nt, Human
ugucacaaauacaucauuuauagg

SEQ ID NO: 29870 - RNA, 24 nt, Human
uucauguuuacgcugauauauauc

SEQ ID NO: 29871 - RNA, 24 nt, Human
uuugugaacacaaauucuccacaa

SEQ ID NO: 29872 - RNA, 24 nt, Human
ugagccgagaucgcgccacugugc

SEQ ID NO: 29873 - RNA, 24 nt, Human
ccacaaggagaagacucucggggg

SEQ ID NO: 29874 - RNA, 24 nt, Human
uucgagcacuggccuacuggcacu

SEQ ID NO: 29875 - RNA, 24 nt, Human
agggaaggagggucgcccggaucc

SEQ ID NO: 29876 - RNA, 24 nt, Human
uacuucuagcuuuuuuccuauuuu

SEQ ID NO: 29877 - RNA, 24 nt, Human
gcccugugccuggcacuugugcug

SEQ ID NO: 29878 - RNA, 24 nt, Human
gacaguuugaugcaucucaauuca

SEQ ID NO: 29879 - RNA, 24 nt, Human
ugagaauggcaaaauuagucgccu

SEQ ID NO: 29880 - RNA, 24 nt, Human
uacaccacucccaagaagaauaag

SEQ ID NO: 29881 - RNA, 24 nt, Human
uagaaaaacauaaagacagaagaa

SEQ ID NO: 29882 - RNA, 24 nt, Human
aggcgguccugaacuccugaccuc

SEQ ID NO: 29883 - RNA, 24 nt, Human
ucucgcucuuuuugcccaggcugg

SEQ ID NO: 29884 - RNA, 24 nt, Human
ugagaaugaccccaagaccuuuga

SEQ ID NO: 29885 - RNA, 24 nt, Human
uaccuggaccagcccugccuugag

SEQ ID NO: 29886 - RNA, 24 nt, Human
cgagcgggcgcuggcaccgaggcc

SEQ ID NO: 29887 - RNA, 24 nt, Human
ugugaacgggaagaaggugcugca

SEQ ID NO: 29888 - RNA, 22 nt, Human
guggagggcagcuuugucuaca

SEQ ID NO: 29889 - RNA, 24 nt, Human
uggcaggaacggagugguugguag

SEQ ID NO: 29890 - RNA, 18 nt, Human
ugaguuggcugcgagggg

SEQ ID NO: 29891 - RNA, 24 nt, Human
aagcauuuuaaaaaagaggugauc

SEQ ID NO: 29892 - RNA, 24 nt, Human
ucuccagaaaugcuuuggguucau

SEQ ID NO: 29893 - RNA, 24 nt, Human
uugaucuugaagaaacugggcgug

SEQ ID NO: 29894 - RNA, 24 nt, Human
guagaguuuucuucaggcuuaaag

SEQ ID NO: 29895 - RNA, 24 nt, Human
uagcucugaagauaacuuaucaua

SEQ ID NO: 29896 - RNA, 24 nt, Human
guuucaggcccugggccaggcacu

SEQ ID NO: 29897 - RNA, 24 nt, Human
aagcaccccugccccagggucccg

SEQ ID NO: 29898 - RNA, 24 nt, Human
agaguuacaggacagaaggauaau

SEQ ID NO: 29899 - RNA, 24 nt, Human
uucaaauaacaaaaguagauucug

SEQ ID NO: 29900 - RNA, 24 nt, Human
ugccucagugacagcagcauauuu

SEQ ID NO: 29901 - RNA, 24 nt, Human
ucuacagcuguuaucauguugacc

SEQ ID NO: 29902 - RNA, 17 nt, Human
cagcagccggagugugg

SEQ ID NO: 29903 - RNA, 24 nt, Human
gugcucaguccuacagcugcaugg

SEQ ID NO: 29904 - RNA, 24 nt, Human
aaagagcccacccaaggcuguuac

SEQ ID NO: 29905 - RNA, 19 nt, Human
ugggaaaaugcaggucugg

SEQ ID NO: 29906 - RNA, 24 nt, Human
agucauuguauguagagguggagu

SEQ ID NO: 29907 - RNA, 22 nt, Human
uaacucaggcaucucuggaucc

SEQ ID NO: 29908 - RNA, 24 nt, Human
aaggaggacacuggggauaauucc

SEQ ID NO: 29909 - RNA, 24 nt, Human
aggcagaccagcuuuauuuuugaa

SEQ ID NO: 29910 - RNA, 24 nt, Human
ugcguucagugagagagacaaagu

SEQ ID NO: 29911 - RNA, 24 nt, Human
cguggagcggagcaaggccaggcg

SEQ ID NO: 29912 - RNA, 19 nt, Human
cuuuguguggcuacaugac

SEQ ID NO: 29913 - RNA, 24 nt, Human
uaugcuucaacaccuucuucaacu

SEQ ID NO: 29914 - RNA, 24 nt, Human
ugcauguagugauccggggcuccc

SEQ ID NO: 29915 - RNA, 24 nt, Human
uaaauuguuuuaaaugagauagga

SEQ ID NO: 29916 - RNA, 24 nt, Human
uuagugaauaucaaguuuugauuu

SEQ ID NO: 29917 - RNA, 24 nt, Human
uggcaagaucaucagagagaucuu

SEQ ID NO: 29918 - RNA, 24 nt, Human
uugcuucggugggugacgcgguac

SEQ ID NO: 29919 - RNA, 24 nt, Human
uuacccuacgcugccagguggagg

SEQ ID NO: 29920 - RNA, 23 nt, Human
cucgugccgcacugaacuggacc

SEQ ID NO: 29921 - RNA, 24 nt, Human
gcugaaguauguccuguuuuucuu

SEQ ID NO: 29922 - RNA, 24 nt, Human
cagcauccaccguuaccacucaga

SEQ ID NO: 29923 - RNA, 24 nt, Human
uccacaacaacuucggagugcucu

SEQ ID NO: 29924 - RNA, 24 nt, Human
cuccggugugucuccucuuccuug

SEQ ID NO: 29925 - RNA, 24 nt, Human
ugaggauaaauggcuuucagcccu

SEQ ID NO: 29926 - RNA, 24 nt, Human
uggcuggacuaugucagggcucgu

SEQ ID NO: 29927 - RNA, 23 nt, Human
uggaugagcugcccagccuugca

SEQ ID NO: 29928 - RNA, 24 nt, Human
caccaguagggagcuagcuggcug

SEQ ID NO: 29929 - RNA, 24 nt, Human
aaauaggaaauagccguauaugua

SEQ ID NO: 29930 - RNA, 23 nt, Human
ugagggugcccgcccggaccguc

SEQ ID NO: 29931 - RNA, 24 nt, Human
cacagguaggaggcugggcacaaa

SEQ ID NO: 29932 - RNA, 24 nt, Human
guccauggaaauagagcugugguu

SEQ ID NO: 29933 - RNA, 24 nt, Human
guacaggggcugguaggaguacgc

SEQ ID NO: 29934 - RNA, 24 nt, Human
uaggacgcagcuguugccaugacg

SEQ ID NO: 29935 - RNA, 24 nt, Human
uuucaggguuuuggucuaucucau

SEQ ID NO: 29936 - RNA, 24 nt, Human
ggccgagugggcaccaucauggga

SEQ ID NO: 29937 - RNA, 24 nt, Human
ucauuggcaucaugggagggcccc

SEQ ID NO: 29938 - RNA, 24 nt, Human
ugcauuguuaucauuaaccagucu

SEQ ID NO: 29939 - RNA, 24 nt, Human
uauuagggauaauauucauuuagc

SEQ ID NO: 29940 - RNA, 24 nt, Human
uuuaacuuuuuuaaugggucucaa

SEQ ID NO: 29941 - RNA, 24 nt, Human
uucaaauuucuuucuuuuuuaauu

SEQ ID NO: 29942 - RNA, 24 nt, Human
agcuccuugauuugugaccuugac

SEQ ID NO: 29943 - RNA, 24 nt, Human
aaagggacugaacuagccucuggu

SEQ ID NO: 29944 - RNA, 24 nt, Human
uggaggagcacggugcaagcugcg

SEQ ID NO: 29945 - RNA, 24 nt, Human
ugacuguauuucaauugggcaugu

SEQ ID NO: 29946 - RNA, 24 nt, Human
ugcuaggggcuguguacagagugc

SEQ ID NO: 29947 - RNA, 24 nt, Human
ucgcguaccgugcggcuugcugac

SEQ ID NO: 29948 - RNA, 24 nt, Human
ugacccagggacacguggggugug

SEQ ID NO: 29949 - RNA, 19 nt, Human
uaacucccugugucugcau

SEQ ID NO: 29950 - RNA, 24 nt, Human
ucguugcugcuucugccugugcug

SEQ ID NO: 29951 - RNA, 24 nt, Human
gauggcuccggcggcuuggggaaa

SEQ ID NO: 29952 - RNA, 24 nt, Human
cugcucccuggccagcccccuugu

SEQ ID NO: 29953 - RNA, 24 nt, Human
uugaagcuuuuacagcuggagacu

SEQ ID NO: 29954 - RNA, 22 nt, Human
ucagaacauucugaacugcuga

SEQ ID NO: 29955 - RNA, 24 nt, Human
ugaaugacaacuuuauuuuucuua

SEQ ID NO: 29956 - RNA, 24 nt, Human
gucaccuugggcaaggacuucgca

SEQ ID NO: 29957 - RNA, 24 nt, Human
cucguccagagcccagguaauccg

SEQ ID NO: 29958 - RNA, 24 nt, Human
ugagguagggacgugccguaggcc

SEQ ID NO: 29959 - RNA, 24 nt, Human
ucccaagccagaaagaaguuaacu

SEQ ID NO: 29960 - RNA, 24 nt, Human
uuuugguucucagccucucucgaa

SEQ ID NO: 29961 - RNA, 24 nt, Human
ucuauguugaugaccauaacuggg

SEQ ID NO: 29962 - RNA, 24 nt, Human
ucauugauuuuuuuuuuuuuuuuu

SEQ ID NO: 29963 - RNA, 19 nt, Human
uugaauuacagggggguuu

SEQ ID NO: 29964 - RNA, 24 nt, Human
ucacggguccaaauguacaaaaaa

SEQ ID NO: 29965 - RNA, 24 nt, Human
agagggcaucguggcccaggcagg

SEQ ID NO: 29966 - RNA, 24 nt, Human
ugagaagggagggacuuggcuccc

SEQ ID NO: 29967 - RNA, 24 nt, Human
agaggagaugccaucccagcacgg

SEQ ID NO: 29968 - RNA, 24 nt, Human
ugagguggccuccugcccugauca

SEQ ID NO: 29969 - RNA, 24 nt, Human
uugcauggcgccugcuggaggagg

SEQ ID NO: 29970 - RNA, 24 nt, Human
uuugcuagaaacugguccaaagau

SEQ ID NO: 29971 - RNA, 24 nt, Human
uaaugcacaguaugagaaaugaac

SEQ ID NO: 29972 - RNA, 17 nt, Human
ccgccgccgccgccucg

SEQ ID NO: 29973 - RNA, 24 nt, Human
uuggacauauuuuaggaagauuuu

SEQ ID NO: 29974 - RNA, 24 nt, Human
aaaugcagugucagcaaaccgaaa

SEQ ID NO: 29975 - RNA, 18 nt, Human
cauugggucuaagggaga

SEQ ID NO: 29976 - RNA, 24 nt, Human
uaacaguauuuccagugacaaugc

SEQ ID NO: 29977 - RNA, 24 nt, Human
uuuacagugagcuuucccauguuu

SEQ ID NO: 29978 - RNA, 24 nt, Human
uugggccgaucagggcuucaguua

SEQ ID NO: 29979 - RNA, 24 nt, Human
ggacagguguacagacauguucuu

SEQ ID NO: 29980 - RNA, 24 nt, Human
ucgaauggacacauuaccagugaa

SEQ ID NO: 29981 - RNA, 24 nt, Human
uaaaaccucaauuacugguaauug

SEQ ID NO: 29982 - RNA, 24 nt, Human
ucacuccauaauaagaaguuaagg

SEQ ID NO: 29983 - RNA, 24 nt, Human
ugaaaaauaaagccaaaaugccaa

SEQ ID NO: 29984 - RNA, 24 nt, Human
aagcaggccauugagcugaguccu

SEQ ID NO: 29985 - RNA, 24 nt, Human
aggaaggguggacacaacugaagu

SEQ ID NO: 29986 - RNA, 24 nt, Human
aguuuguugaagaagccuuggaaa

SEQ ID NO: 29987 - RNA, 24 nt, Human
ugagaaugucauguugauccaucc

SEQ ID NO: 29988 - RNA, 24 nt, Human
uuggucagcggcauuaucuuggcc

SEQ ID NO: 29989 - RNA, 24 nt, Human
ugaaaacuuggcuuccucacugaa

SEQ ID NO: 29990 - RNA, 22 nt, Human
ugucagugagcagaagagugaa

SEQ ID NO: 29991 - RNA, 24 nt, Human
agauuucggaaauucuaaaagguu

SEQ ID NO: 29992 - RNA, 24 nt, Human
ucucugggccgccaggcuuucagc

SEQ ID NO: 29993 - RNA, 24 nt, Human
ccugaaaggcaggguucuguggaa

SEQ ID NO: 29994 - RNA, 22 nt, Human
uccuguugcguuuaggcaccca

SEQ ID NO: 29995 - RNA, 24 nt, Human
ucacugacucccugaagccgagac

SEQ ID NO: 29996 - RNA, 24 nt, Human
ccgggcccucucucccacuuuuuc

SEQ ID NO: 29997 - RNA, 24 nt, Human
agaagaagaagaaauggcaaagag

SEQ ID NO: 29998 - RNA, 24 nt, Human
ucugaucaauccuucuuuuucucu

SEQ ID NO: 29999 - RNA, 24 nt, Human
ucaauuuuuauuuugguuuucuua

SEQ ID NO: 30000 - RNA, 24 nt, Human
gaggauccaagcuuacguacgcgu

SEQ ID NO: 30001 - RNA, 24 nt, Human
uggcguaauagcgaagaggcccgc

SEQ ID NO: 30002 - RNA, 24 nt, Human
cagcagcgccggcgggcuaagccc

SEQ ID NO: 30003 - RNA, 24 nt, Human
uuguauccuguugugaugucacug

SEQ ID NO: 30004 - RNA, 22 nt, Human
uuuguuauacuuuuggagcugu

SEQ ID NO: 30005 - RNA, 24 nt, Human
uuuuugaacacuuuugcuuuaaca

SEQ ID NO: 30006 - RNA, 24 nt, Human
uacuggguuuuugguuuuagaaac

SEQ ID NO: 30007 - RNA, 24 nt, Human
uguucagccccuaaacgaauggca

SEQ ID NO: 30008 - RNA, 24 nt, Human
uauagggaaagcugguacgccugc

SEQ ID NO: 30009 - RNA, 24 nt, Human
gaggauccaagcuuacguacgcgu

SEQ ID NO: 30010 - RNA, 24 nt, Human
ugguaaagacuauauuuuguacuu

SEQ ID NO: 30011 - RNA, 24 nt, Human
agagcacugagcuccacccuuuuc

SEQ ID NO: 30012 - RNA, 24 nt, Human
ugaguucacaauagauguauggau

SEQ ID NO: 30013 - RNA, 24 nt, Human
uauuacugugaagacgguuauuug

SEQ ID NO: 30014 - RNA, 24 nt, Human
ccgggucgacccacgcguccgauu

SEQ ID NO: 30015 - RNA, 24 nt, Human
uguuuugguuaccauagauuucua

SEQ ID NO: 30016 - RNA, 24 nt, Human
uucacaauagauguauggauuugu

SEQ ID NO: 30017 - RNA, 24 nt, Human
ccgggucgacccacgcguccgcuu

SEQ ID NO: 30018 - RNA, 24 nt, Human
uuccuuguagaaaaccuaucucca

SEQ ID NO: 30019 - RNA, 17 nt, Human
ugguuuguuucaagcag

SEQ ID NO: 30020 - RNA, 24 nt, Human
agagaagauccuuggaagaauugu

SEQ ID NO: 30021 - RNA, 24 nt, Human
ugcggaggaagagcagcaggacag

SEQ ID NO: 30022 - RNA, 24 nt, Human
caggagcccaggacagaggucaaa

SEQ ID NO: 30023 - RNA, 24 nt, Human
aggccuguaugcugggccagugag

SEQ ID NO: 30024 - RNA, 24 nt, Human
aaggagcgguuccaugccagcgug

SEQ ID NO: 30025 - RNA, 24 nt, Human
ugugcagaagaaauggaaggauuc

SEQ ID NO: 30026 - RNA, 24 nt, Human
uaucaaggaagggcaggcgugaug

SEQ ID NO: 30027 - RNA, 24 nt, Human
uucaaauuucuuucuuuuuuaauu

SEQ ID NO: 30028 - RNA, 24 nt, Human
acuuuguucaggaagaaauccgug

SEQ ID NO: 30029 - RNA, 24 nt, Human
aagcaggaggcagacccagcugga

SEQ ID NO: 30030 - RNA, 24 nt, Human
aagcauucacuuaauauuuuaguu

SEQ ID NO: 30031 - RNA, 21 nt, Human
ucaaucucaccuucugauaua

SEQ ID NO: 30032 - RNA, 24 nt, Human
acuugcuggucaugcucugaaacu

SEQ ID NO: 30033 - RNA, 24 nt, Human
aagcgcucagaucggcaaggggca

SEQ ID NO: 30034 - RNA, 24 nt, Human
aucaucccccacuaccuggauucc

SEQ ID NO: 30035 - RNA, 24 nt, Human
cgccugaagagacucggucacgga

SEQ ID NO: 30036 - RNA, 24 nt, Human
uaguguuugcagaaauuuuuaaaa

SEQ ID NO: 30037 - RNA, 24 nt, Human
uacaggauuugcaggauuggaaac

SEQ ID NO: 30038 - RNA, 24 nt, Human
uggcagagauaacaaaugacaacu

SEQ ID NO: 30039 - RNA, 23 nt, Human
uuuguaguaucaggacagugaga

SEQ ID NO: 30040 - RNA, 24 nt, Human
uagguuuucuaguauggaauuauc

SEQ ID NO: 30041 - RNA, 24 nt, Human
uuaaagauuuuauauuauuuuuaa

SEQ ID NO: 30042 - RNA, 24 nt, Human
uaguggaucuggcacguggguguu

SEQ ID NO: 30043 - RNA, 24 nt, Human
gcccugaaggauggagaugguagu

SEQ ID NO: 30044 - RNA, 24 nt, Human
uguuuaguuuauauaaauguauau

SEQ ID NO: 30045 - RNA, 24 nt, Human
uauaaaaagaaaacuuaaaggccc

SEQ ID NO: 30046 - RNA, 24 nt, Human
acaaagcaagagaagaagcagaga

SEQ ID NO: 30047 - RNA, 21 nt, Human
cauuggacaggacauccagcc

SEQ ID NO: 30048 - RNA, 24 nt, Human
cagcggcagagagccauccucuau

SEQ ID NO: 30049 - RNA, 24 nt, Human
gggaacacucauuucccuacaggu

SEQ ID NO: 30050 - RNA, 24 nt, Human
cuuggccuucgccuccuuaugaug

SEQ ID NO: 30051 - RNA, 24 nt, Human
cgagcaguaagugguuuuguuguu

SEQ ID NO: 30052 - RNA, 23 nt, Human
uauuuugcauguuucaacuguuc

SEQ ID NO: 30053 - RNA, 24 nt, Human
cuuguugucuucauaguauuuguu

SEQ ID NO: 30054 - RNA, 22 nt, Human
uacugggugaauagcacuuucc

SEQ ID NO: 30055 - RNA, 24 nt, Human
agauaggaaguggccuuuagggga

SEQ ID NO: 30056 - RNA, 24 nt, Human
ucaguuggaagacacccugaaauc

SEQ ID NO: 30057 - RNA, 24 nt, Human
uaaguuucucucucuguugauuac

SEQ ID NO: 30058 - RNA, 24 nt, Human
uuuauucaacccauauuuacuggg

SEQ ID NO: 30059 - RNA, 24 nt, Human
caugaaccacaugaauuaccuccc

SEQ ID NO: 30060 - RNA, 24 nt, Human
uaucuucaaggucuacauguucaa

SEQ ID NO: 30061 - RNA, 20 nt, Human
cauucauuacugggggaggu

SEQ ID NO: 30062 - RNA, 22 nt, Human
ugcccuguggccucgcuccucg

SEQ ID NO: 30063 - RNA, 24 nt, Human
cagcauggaggaugaggugcagcg

SEQ ID NO: 30064 - RNA, 24 nt, Human
uugcccgggagggcagccaugagg

SEQ ID NO: 30065 - RNA, 24 nt, Human
aggcugcuauaacaaaauuccuuc

SEQ ID NO: 30066 - RNA, 24 nt, Human
cccuaagguccugaucuaugaggc

SEQ ID NO: 30067 - RNA, 22 nt, Human
uuccgugucugcaucuguggga

SEQ ID NO: 30068 - RNA, 24 nt, Human
gcagugcucgccgacucggugcac

SEQ ID NO: 30069 - RNA, 22 nt, Human
ugcaucagagauggauauucaa

SEQ ID NO: 30070 - RNA, 24 nt, Human
uccacuggcgaaagaugccuuucu

SEQ ID NO: 30071 - RNA, 24 nt, Human
uaguucagauugaucuuaggucaa

SEQ ID NO: 30072 - RNA, 24 nt, Human
gcucugggucgcccaaagcagaau

SEQ ID NO: 30073 - RNA, 24 nt, Human
uauugcuuucauaauuuauacuaa

SEQ ID NO: 30074 - RNA, 24 nt, Human
auuugcucuuucugacaucucggu

SEQ ID NO: 30075 - RNA, 22 nt, Human
uauugugucaggccugaaauac

SEQ ID NO: 30076 - RNA, 24 nt, Human
uuggcagcuauggaccucggccug

SEQ ID NO: 30077 - RNA, 24 nt, Human
uggaggaggaugacgaugaugagc

SEQ ID NO: 30078 - RNA, 24 nt, Human
uucuucacgggcagcaagcuggug

SEQ ID NO: 30079 - RNA, 24 nt, Human
ugggauggguagaagaggcccggg

SEQ ID NO: 30080 - RNA, 24 nt, Human
ucugcagucuuauccaggcucucc

SEQ ID NO: 30081 - RNA, 24 nt, Human
ugaaaucagcaaagagcagaugca

SEQ ID NO: 30082 - RNA, 24 nt, Human
uuugcaaugauguccugucucugc

SEQ ID NO: 30083 - RNA, 18 nt, Human
ugccauagcugagcugga

SEQ ID NO: 30084 - RNA, 22 nt, Human
ucgcucagcuccuggggcuccu

SEQ ID NO: 30085 - RNA, 24 nt, Human
ucccaggugccagaugugacaucc

SEQ ID NO: 30086 - RNA, 21 nt, Human
cagcggcaguggaucugggac

SEQ ID NO: 30087 - RNA, 24 nt, Human
ucuauucagacuucaucaguuuuu

SEQ ID NO: 30088 - RNA, 24 nt, Human
aagaagcacauugcauuuggcuca

SEQ ID NO: 30089 - RNA, 24 nt, Human
ugcauuguuaucauuaaccagucu

SEQ ID NO: 30090 - RNA, 24 nt, Human
uauuagggauaauauucauuuagc

SEQ ID NO: 30091 - RNA, 24 nt, Human
uaaugggucucaaaauucugugac

SEQ ID NO: 30092 - RNA, 24 nt, Human
ugugaaggguuugcugggggccaa

SEQ ID NO: 30093 - RNA, 24 nt, Human
accagguacaugcacuggguaccc

SEQ ID NO: 30094 - RNA, 17 nt, Human
uguaaagacccugggua

SEQ ID NO: 30095 - RNA, 24 nt, Human
caacggagacugccuacuggggcc

SEQ ID NO: 30096 - RNA, 24 nt, Human
uaggagaaaaaguccuacuuuucu

SEQ ID NO: 30097 - RNA, 24 nt, Human
cuggccggccagggagcccacagu

SEQ ID NO: 30098 - RNA, 24 nt, Human
cguucagugauugucgcugggcac

SEQ ID NO: 30099 - RNA, 24 nt, Human
uaaugggucucaaaauucugugac

SEQ ID NO: 30100 - RNA, 24 nt, Human
aggggcugggcggggugguggggg

SEQ ID NO: 30101 - RNA, 24 nt, Human
uuacccuacgcugccagguggagg

SEQ ID NO: 30102 - RNA, 24 nt, Human
ucccaagggcuggagcuguuugag

SEQ ID NO: 30103 - RNA, 23 nt, Human
cucgugccgcacugaacuggacc

SEQ ID NO: 30104 - RNA, 24 nt, Human
ucagucuauagugggaaagcaggu

SEQ ID NO: 30105 - RNA, 24 nt, Human
ugaaggucaaagucacguuguucu

SEQ ID NO: 30106 - RNA, 24 nt, Human
aaauaggaaauagccguauaugua

SEQ ID NO: 30107 - RNA, 24 nt, Human
acuacuuccuauaaauuucuccug

SEQ ID NO: 30108 - RNA, 24 nt, Human
uuuaaccaugccaaugucucacac

SEQ ID NO: 30109 - RNA, 24 nt, Human
ugcugugcggccugggcgcuggcg

SEQ ID NO: 30110 - RNA, 24 nt, Human
uacgguuccauccccaaggcggcc

SEQ ID NO: 30111 - RNA, 24 nt, Human
ucgagucccgggcgcucaccuguu

SEQ ID NO: 30112 - RNA, 24 nt, Human
gggaagucggaggagugggcggac

SEQ ID NO: 30113 - RNA, 24 nt, Human
uaugagcacucgcugggcaagcuu

SEQ ID NO: 30114 - RNA, 24 nt, Human
aggaaggagauauagugaagagga

SEQ ID NO: 30115 - RNA, 24 nt, Human
aucgcgcucgcugggacccgaguu

SEQ ID NO: 30116 - RNA, 24 nt, Human
ugcccgugccaccugcccugcccu

SEQ ID NO: 30117 - RNA, 24 nt, Human
ugcuugcugcucuguguguugcgc

SEQ ID NO: 30118 - RNA, 24 nt, Human
ccugcacaccccugagcugccugu

SEQ ID NO: 30119 - RNA, 24 nt, Human
uauggcaagucacuuugacagaca

SEQ ID NO: 30120 - RNA, 24 nt, Human
ugagaauggcaaaauuagucgccu

SEQ ID NO: 30121 - RNA, 24 nt, Human
uacaccacucccaagaagaauaag

SEQ ID NO: 30122 - RNA, 24 nt, Human
uccaaagcaucguaaucaggagcc

SEQ ID NO: 30123 - RNA, 24 nt, Human
uugaacuuggccacaucaauguca

SEQ ID NO: 30124 - RNA, 17 nt, Human
ucuuguagcaaccugga

SEQ ID NO: 30125 - RNA, 18 nt, Human
uauugcuuccguggagug

SEQ ID NO: 30126 - RNA, 24 nt, Human
uaugguagcggaggugaaauaugc

SEQ ID NO: 30127 - RNA, 24 nt, Human
uuugucccucauccuuguuuacuc

SEQ ID NO: 30128 - RNA, 24 nt, Human
cccccauuucgagcggggcuucuc

SEQ ID NO: 30129 - RNA, 24 nt, Human
cggccucgggccugggagccgggc

SEQ ID NO: 30130 - RNA, 24 nt, Human
cacacaguuuccauaaaaaaacau

SEQ ID NO: 30131 - RNA, 24 nt, Human
ucccuguaauucugugggucccuu

SEQ ID NO: 30132 - RNA, 24 nt, Human
ugagguggguggaucacaagguca

SEQ ID NO: 30133 - RNA, 24 nt, Human
aggaaacaguaaaggugauggggg

SEQ ID NO: 30134 - RNA, 24 nt, Human
uauuagggauaauauucauuuagc

SEQ ID NO: 30135 - RNA, 24 nt, Human
ugccggcaccaagaagcaguucca

SEQ ID NO: 30136 - RNA, 24 nt, Human
aggaggcuauugagggcaccuaca

SEQ ID NO: 30137 - RNA, 24 nt, Human
uggcguggugaccaagaugaagau

SEQ ID NO: 30138 - RNA, 24 nt, Human
ugaguuuugggauggucacaugac

SEQ ID NO: 30139 - RNA, 24 nt, Human
acuuguguuuuguguuucaaaguu

SEQ ID NO: 30140 - RNA, 24 nt, Human
uaaugggucucaaaauucugugac

SEQ ID NO: 30141 - RNA, 24 nt, Human
uggaagaaagaggaaaucagaguc

SEQ ID NO: 30142 - RNA, 24 nt, Human
uaaguucuacuauacgcgugacuu

SEQ ID NO: 30143 - RNA, 24 nt, Human
uaucacaggccuuaggcuggaaga

SEQ ID NO: 30144 - RNA, 24 nt, Human
uuugacacugucuugccuucuucu

SEQ ID NO: 30145 - RNA, 22 nt, Human
caugaaccacagaaggggccuu

SEQ ID NO: 30146 - RNA, 24 nt, Human
uggccuggacagccuccuucagcc

SEQ ID NO: 30147 - RNA, 24 nt, Human
uacucggagauccagagggagcgg

SEQ ID NO: 30148 - RNA, 18 nt, Human
uggaagccaagcggcugc

SEQ ID NO: 30149 - RNA, 24 nt, Human
ugccugaggagccuguguuacuca

SEQ ID NO: 30150 - RNA, 22 nt, Human
aggcagggcuccgcugcgccuc

SEQ ID NO: 30151 - RNA, 24 nt, Human
cagcuuaagcucauuugcuauuuu

SEQ ID NO: 30152 - RNA, 24 nt, Human
accacauuaggcauuaccaguaca

SEQ ID NO: 30153 - RNA, 24 nt, Human
ucuuaaggugguaacauuuuaugg

SEQ ID NO: 30154 - RNA, 24 nt, Human
aaccuuuuuaaaaaauggagauga

SEQ ID NO: 30155 - RNA, 24 nt, Human
uuucugguaacuuacuugaaucuu

SEQ ID NO: 30156 - RNA, 24 nt, Human
uaccuuuaauugucaucuaagaua

SEQ ID NO: 30157 - RNA, 24 nt, Human
ucugccuccuccucccuuucuccc

SEQ ID NO: 30158 - RNA, 24 nt, Human
uugaaugucuguuucuucguuccu

SEQ ID NO: 30159 - RNA, 24 nt, Human
uagcuucauauaucuggaaugagc

SEQ ID NO: 30160 - RNA, 24 nt, Human
ccacugcacucuagccugggggag

SEQ ID NO: 30161 - RNA, 24 nt, Human
uuuuugguaaagaaaaaauauuug

SEQ ID NO: 30162 - RNA, 24 nt, Human
ucagugagauacaaaaagcuccuu

SEQ ID NO: 30163 - RNA, 24 nt, Human
uccaaagugagcgauacgaauagu

SEQ ID NO: 30164 - RNA, 24 nt, Human
ugaccagacuuuuccagaagugcc

SEQ ID NO: 30165 - RNA, 17 nt, Human
uaacauggauggguuga

SEQ ID NO: 30166 - RNA, 24 nt, Human
ucuuguguagagaucuauaaaauc

SEQ ID NO: 30167 - RNA, 24 nt, Human
uggcagggaagguccuuccaacag

SEQ ID NO: 30168 - RNA, 23 nt, Human
ugucuuggaaaucugaagccugc

SEQ ID NO: 30169 - RNA, 24 nt, Human
ucacugccuccugccuuccuuaug

SEQ ID NO: 30170 - RNA, 24 nt, Human
uggggauuggccagcugacaugcu

SEQ ID NO: 30171 - RNA, 24 nt, Human
acaggagugguccuuauccgguuu

SEQ ID NO: 30172 - RNA, 24 nt, Human
cugcccccucggucacucucuucc

SEQ ID NO: 30173 - RNA, 24 nt, Human
ccugagcgauucucuggcuccagc

SEQ ID NO: 30174 - RNA, 24 nt, Human
uggaucguguagaucgagaaauug

SEQ ID NO: 30175 - RNA, 24 nt, Human
acuugaugcuccauccucuccaau

SEQ ID NO: 30176 - RNA, 24 nt, Human
caagugauuuauugaugagacauc

SEQ ID NO: 30177 - RNA, 24 nt, Human
uuuuaagauagucuucugcaguua

SEQ ID NO: 30178 - RNA, 24 nt, Human
uccccaaggugucagagaagacca

SEQ ID NO: 30179 - RNA, 24 nt, Human
uccaccaacaaccccucccaggcu

SEQ ID NO: 30180 - RNA, 24 nt, Human
uggaagaugcucaacaccuccucc

SEQ ID NO: 30181 - RNA, 24 nt, Human
ugaccaggaaauacaacgagcugc

SEQ ID NO: 30182 - RNA, 24 nt, Human
ccgcaaccuccaccucccagguuc

SEQ ID NO: 30183 - RNA, 24 nt, Human
aaaaguacuaaaugaaucccuaua

SEQ ID NO: 30184 - RNA, 24 nt, Human
ucuagggaaagaauacaggcggau

SEQ ID NO: 30185 - RNA, 24 nt, Human
ugguaucgcuguacacgacagagg

SEQ ID NO: 30186 - RNA, 24 nt, Human
ugagucaaagucacaucauaagca

SEQ ID NO: 30187 - RNA, 24 nt, Human
agacaggcuggcacagccccaggc

SEQ ID NO: 30188 - RNA, 24 nt, Human
aaaaggacauauuaaauguauuua

SEQ ID NO: 30189 - RNA, 19 nt, Human
ccguacacgcucagcgucg

SEQ ID NO: 30190 - RNA, 24 nt, Human
ccgggucgacccacgcguccgcug

SEQ ID NO: 30191 - RNA, 24 nt, Human
uacacgacucccaucuaggcugaa

SEQ ID NO: 30192 - RNA, 17 nt, Human
ucucguugcuucauggu

SEQ ID NO: 30193 - RNA, 24 nt, Human
aagcgccccagauguggggaacag

SEQ ID NO: 30194 - RNA, 24 nt, Human
uggcacguuuguugaaacccagca

SEQ ID NO: 30195 - RNA, 24 nt, Human
ugacuucuuauuaccaaggacacu

SEQ ID NO: 30196 - RNA, 24 nt, Human
ugccaagguuacuaacaucacgaa

SEQ ID NO: 30197 - RNA, 24 nt, Human
ucuuuguuguuuaaauauaaacag

SEQ ID NO: 30198 - RNA, 24 nt, Human
accauguaaaagugagcucagacg

SEQ ID NO: 30199 - RNA, 24 nt, Human
uaaugggucucaaaauucugugac

SEQ ID NO: 30200 - RNA, 24 nt, Human
uauuagggauaauauucauuuagc

SEQ ID NO: 30201 - RNA, 24 nt, Human
uuaaagagguuaucucugauuaaa

SEQ ID NO: 30202 - RNA, 24 nt, Human
uaauauuugauauuuuaaccuacc

SEQ ID NO: 30203 - RNA, 24 nt, Human
uuucugcugauuuacaucuuuccu

SEQ ID NO: 30204 - RNA, 24 nt, Human
uuccaugacccugacaagcagguu

SEQ ID NO: 30205 - RNA, 24 nt, Human
uuaugauuauuuuauuuaaaaaaa

SEQ ID NO: 30206 - RNA, 24 nt, Human
uggaagaaugacacgggcucagga

SEQ ID NO: 30207 - RNA, 24 nt, Human
uauuccggcuggaguccccagaaa

SEQ ID NO: 30208 - RNA, 24 nt, Human
aggcaucgggcagccacuuucacu

SEQ ID NO: 30209 - RNA, 24 nt, Human
ucagauggcaacucccagggccca

SEQ ID NO: 30210 - RNA, 24 nt, Human
aaggacucacaggagggagggaca

SEQ ID NO: 30211 - RNA, 21 nt, Human
aaguaugccugggucuuggau

SEQ ID NO: 30212 - RNA, 24 nt, Human
uacagggacaucucaggcugacug

SEQ ID NO: 30213 - RNA, 24 nt, Human
uaguucagauugaucuuaggucaa

SEQ ID NO: 30214 - RNA, 24 nt, Human
uagagugguggcucccaaaauccc

SEQ ID NO: 30215 - RNA, 24 nt, Human
gugcaaugaauguguuacuuucgu

SEQ ID NO: 30216 - RNA, 24 nt, Human
ucaggaacggaaugugauccaauc

SEQ ID NO: 30217 - RNA, 18 nt, Human
aaggagcuaguagauuuc

SEQ ID NO: 30218 - RNA, 24 nt, Human
uaugagagugugcuuuacugagaa

SEQ ID NO: 30219 - RNA, 24 nt, Human
ucacaaccacggcccuggaggagc

SEQ ID NO: 30220 - RNA, 24 nt, Human
ccuccuucccaggcucuggggcag

SEQ ID NO: 30221 - RNA, 24 nt, Human
agguaguaaacuccccaggugggc

SEQ ID NO: 30222 - RNA, 24 nt, Human
agaaguaugaggaauacuugacca

SEQ ID NO: 30223 - RNA, 23 nt, Human
ucccuaaguaggaagacaguuug

SEQ ID NO: 30224 - RNA, 24 nt, Human
cuuguaaaaaucaaugaauggcaa

SEQ ID NO: 30225 - RNA, 17 nt, Human
uacgugguugagaaggu

SEQ ID NO: 30226 - RNA, 24 nt, Human
uaacaagaaaaggcaauugguuag

SEQ ID NO: 30227 - RNA, 24 nt, Human
uugaagauccauaacuaucuucug

SEQ ID NO: 30228 - RNA, 24 nt, Human
uggcaaguuuggggccuacaugca

SEQ ID NO: 30229 - RNA, 24 nt, Human
gugcagcgcgucacccgggccagc

SEQ ID NO: 30230 - RNA, 24 nt, Human
ugaagggcaaacaguuuaguucaa

SEQ ID NO: 30231 - RNA, 24 nt, Human
caugucuuaagagcgggaagaaaa

SEQ ID NO: 30232 - RNA, 24 nt, Human
cuagaguugugagaaaaccagaga

SEQ ID NO: 30233 - RNA, 24 nt, Human
aaggggccuggggcaccaaacaau

SEQ ID NO: 30234 - RNA, 24 nt, Human
cuggacccccucauccugacgcuc

SEQ ID NO: 30235 - RNA, 21 nt, Human
uggguugacaaauaucagggu

SEQ ID NO: 30236 - RNA, 24 nt, Human
aggcuguagauggagcagauguug

SEQ ID NO: 30237 - RNA, 24 nt, Human
guguagcugucccagaugaugagc

SEQ ID NO: 30238 - RNA, 24 nt, Human
ccgcaauccuuccaacucucagcc

SEQ ID NO: 30239 - RNA, 20 nt, Human
ggccugggggaaccgagcuc

SEQ ID NO: 30240 - RNA, 18 nt, Human
uaacguagcgaucuuggc

SEQ ID NO: 30241 - RNA, 22 nt, Human
uaaggugaacucgguggcgccc

SEQ ID NO: 30242 - RNA, 24 nt, Human
uggcauccggggccggggucgcgg

SEQ ID NO: 30243 - RNA, 24 nt, Human
ugucacacccacaagcuccuuggg

SEQ ID NO: 30244 - RNA, 18 nt, Human
aacagcuuucucaaaugu

SEQ ID NO: 30245 - RNA, 24 nt, Human
ugucagaaaacaaaacaaaaaaag

SEQ ID NO: 30246 - RNA, 24 nt, Human
agccccgacaccgucucgcccucc

SEQ ID NO: 30247 - RNA, 24 nt, Human
uaucccagaggcauccuuccugga

SEQ ID NO: 30248 - RNA, 24 nt, Human
uugaaaagguauaagaauacaaau

SEQ ID NO: 30249 - RNA, 24 nt, Human
augacucucgugauggaggaaagg

SEQ ID NO: 30250 - RNA, 24 nt, Human
agagcgugcccggccaggccaucc

SEQ ID NO: 30251 - RNA, 24 nt, Human
uccgcagaguuugggcgccaggcg

SEQ ID NO: 30252 - RNA, 24 nt, Human
uuugcagauauuauguguauauau

SEQ ID NO: 30253 - RNA, 24 nt, Human
ugccaucaccaucuauguguccaa

SEQ ID NO: 30254 - RNA, 24 nt, Human
acacguauagugaaaaaauuuauu

SEQ ID NO: 30255 - RNA, 24 nt, Human
uuagagacaagaguaccaaagcgg

SEQ ID NO: 30256 - RNA, 24 nt, Human
ugaggcuuagagagaggaggcagc

SEQ ID NO: 30257 - RNA, 24 nt, Human
uccaccacuacuggccaucugauc

SEQ ID NO: 30258 - RNA, 24 nt, Human
accacuuuugugcaccugucccca

SEQ ID NO: 30259 - RNA, 24 nt, Human
agccuagaaaugucuguguuaagu

SEQ ID NO: 30260 - RNA, 24 nt, Human
ugacugaauucuucaaaaauguca

SEQ ID NO: 30261 - RNA, 24 nt, Human
ugccucagagaguccacguccaga

SEQ ID NO: 30262 - RNA, 24 nt, Human
ccagggcagaauugaugugugauu

SEQ ID NO: 30263 - RNA, 22 nt, Human
uaacagacaggguuccuguggu

SEQ ID NO: 30264 - RNA, 24 nt, Human
aggaacuugucugacuuuaagugu

SEQ ID NO: 30265 - RNA, 24 nt, Human
ugacaugacgggguacacuccgga

SEQ ID NO: 30266 - RNA, 24 nt, Human
uucucuguauccccuuacaggcag

SEQ ID NO: 30267 - RNA, 24 nt, Human
ugcaagggcgggcuguauugagaa

SEQ ID NO: 30268 - RNA, 22 nt, Human
gggguugggccugugucuccag

SEQ ID NO: 30269 - RNA, 18 nt, Human
uauuauggagcugggcgu

SEQ ID NO: 30270 - RNA, 24 nt, Human
cuccaaagcuugagaaggaaaugg

SEQ ID NO: 30271 - RNA, 24 nt, Human
ugauuaguaucuacaaggcacuua

SEQ ID NO: 30272 - RNA, 24 nt, Human
uagaaguauguuacuggcucuuaa

SEQ ID NO: 30273 - RNA, 24 nt, Human
uuugugcuagggugaugucaauug

SEQ ID NO: 30274 - RNA, 24 nt, Human
ucaguuaaaaaagaagaagaagaa

SEQ ID NO: 30275 - RNA, 24 nt, Human
ucugaucaauccuucuuuuucucu

SEQ ID NO: 30276 - RNA, 24 nt, Human
ucaauuuuuauuuugguuuucuua

SEQ ID NO: 30277 - RNA, 24 nt, Human
uucacucuaagucauguauguuuc

SEQ ID NO: 30278 - RNA, 21 nt, Human
uaaaacauagcaaauggcaaa

SEQ ID NO: 30279 - RNA, 24 nt, Human
caucugguguugagacuucggggu

SEQ ID NO: 30280 - RNA, 24 nt, Human
uaaguuggcugugcugaaauacua

SEQ ID NO: 30281 - RNA, 24 nt, Human
uucaugggaagccacuuugacagg

SEQ ID NO: 30282 - RNA, 24 nt, Human
uaccgccaguccauguucagugcu

SEQ ID NO: 30283 - RNA, 22 nt, Human
uaagggcaucgucgugggcauc

SEQ ID NO: 30284 - RNA, 24 nt, Human
acgcugugcccaauacaagaagga

SEQ ID NO: 30285 - RNA, 24 nt, Human
uaaugcucauuuagacugacacag

SEQ ID NO: 30286 - RNA, 24 nt, Human
uacuccucauggggcuugaccauu

SEQ ID NO: 30287 - RNA, 24 nt, Human
ucuccaaaagacaaaacagaacaa

SEQ ID NO: 30288 - RNA, 24 nt, Human
ugacauggagccuuugauuaguuu

SEQ ID NO: 30289 - RNA, 24 nt, Human
ugaaaagauaggaaaaaauagaaa

SEQ ID NO: 30290 - RNA, 24 nt, Human
aguuggcugauguuggaauuuuug

SEQ ID NO: 30291 - RNA, 24 nt, Human
ucggaagcggagcaaggucgaggc

SEQ ID NO: 30292 - RNA, 24 nt, Human
gcgcagcuucaggggccgcaaggg

SEQ ID NO: 30293 - RNA, 24 nt, Human
uguaagcucucagcacugaucaug

SEQ ID NO: 30294 - RNA, 24 nt, Human
caggacccuugaccagccaggccu

SEQ ID NO: 30295 - RNA, 24 nt, Human
uccaccacuacuggccaucugauc

SEQ ID NO: 30296 - RNA, 22 nt, Human
uagcagcaaaguccgguuccau

SEQ ID NO: 30297 - RNA, 24 nt, Human
ucacuguuggacgauuggcagaau

SEQ ID NO: 30298 - RNA, 22 nt, Human
uccccaucucuuuuuccccaca

SEQ ID NO: 30299 - RNA, 21 nt, Human
uucaagggauggaaagucacc

SEQ ID NO: 30300 - RNA, 24 nt, Human
gaccauuggaccucgaggggcacg

SEQ ID NO: 30301 - RNA, 22 nt, Human
gacccuguuaacuacuacguug

SEQ ID NO: 30302 - RNA, 24 nt, Human
ugugugccauugcccaggcagagu

SEQ ID NO: 30303 - RNA, 24 nt, Human
uucagaagagguuggcuuuccaga

SEQ ID NO: 30304 - RNA, 24 nt, Human
ugcucggacggaaagcggggcugc

SEQ ID NO: 30305 - RNA, 24 nt, Human
uggccuggcugaaggagcaucugu

SEQ ID NO: 30306 - RNA, 24 nt, Human
uugcugggccccauggaaggcagc

SEQ ID NO: 30307 - RNA, 24 nt, Human
caaccagagacccccaggcccaag

SEQ ID NO: 30308 - RNA, 24 nt, Human
caccagggccucaucagcaaccug

SEQ ID NO: 30309 - RNA, 24 nt, Human
cuucaagggcauggaacacgucac

SEQ ID NO: 30310 - RNA, 24 nt, Human
uccacuggcgaaagaugccuuucu

SEQ ID NO: 30311 - RNA, 24 nt, Human
uaguucagauugaucuuaggucaa

SEQ ID NO: 30312 - RNA, 21 nt, Human
guggaucccagaaucccgaag

SEQ ID NO: 30313 - RNA, 20 nt, Human
uagcacaagugccagucgga

SEQ ID NO: 30314 - RNA, 20 nt, Human
ucccuaaaugcaguagauua

SEQ ID NO: 30315 - RNA, 21 nt, Human
gggcaggggugaggcagguuu

SEQ ID NO: 30316 - RNA, 24 nt, Human
uugcucccugucgucugcaccaua

SEQ ID NO: 30317 - RNA, 24 nt, Human
cagcggcagagagccauccucuau

SEQ ID NO: 30318 - RNA, 24 nt, Human
aggcgguguccgagcccacgacgg

SEQ ID NO: 30319 - RNA, 24 nt, Human
cuugcaggguggcugaagcccugg

SEQ ID NO: 30320 - RNA, 24 nt, Human
ugucaaggacucccaagcugcucu

SEQ ID NO: 30321 - RNA, 24 nt, Human
caauuccagaucaaaggcaucauu

SEQ ID NO: 30322 - RNA, 24 nt, Human
ugccuugcccccagacccaccagc

SEQ ID NO: 30323 - RNA, 24 nt, Human
uuuccggcgccgacucugaggccc

SEQ ID NO: 30324 - RNA, 24 nt, Human
ucucacuccacacggugccccgac

SEQ ID NO: 30325 - RNA, 24 nt, Human
aaacaguaguacaagcuccccuca

SEQ ID NO: 30326 - RNA, 21 nt, Human
cucccgcugcccaccaacacc

SEQ ID NO: 30327 - RNA, 24 nt, Human
cuggacaaggugaagcuggacucc

SEQ ID NO: 30328 - RNA, 24 nt, Human
uggggacauuccuguagcaaccag

SEQ ID NO: 30329 - RNA, 24 nt, Human
ugguaacgucccccaggcaaagcu

SEQ ID NO: 30330 - RNA, 24 nt, Human
uaaaugguaaacgugauaucauga

SEQ ID NO: 30331 - RNA, 22 nt, Human
gucaauauccauaaaugaaggg

SEQ ID NO: 30332 - RNA, 24 nt, Human
agcgcucagccaccaccgcgggac

SEQ ID NO: 30333 - RNA, 24 nt, Human
uaccgugcauccuugcagauggaa

SEQ ID NO: 30334 - RNA, 24 nt, Human
uuccugggaacuucaaacaaaaaa

SEQ ID NO: 30335 - RNA, 24 nt, Human
uggaugagcagagggagcggguac

SEQ ID NO: 30336 - RNA, 24 nt, Human
cuauccagggcucuucccacagcu

SEQ ID NO: 30337 - RNA, 19 nt, Human
ucccugcggugugggcaga

SEQ ID NO: 30338 - RNA, 24 nt, Human
uaggcccccugaauaaaggcuaug

SEQ ID NO: 30339 - RNA, 24 nt, Human
uggacagagaaugaaauaucaugu

SEQ ID NO: 30340 - RNA, 24 nt, Human
cagugcugagggguuagggccaga

SEQ ID NO: 30341 - RNA, 24 nt, Human
cagguccagcccuggggcaaguaa

SEQ ID NO: 30342 - RNA, 24 nt, Human
ccugucaccccaccauggagaaaa

SEQ ID NO: 30343 - RNA, 24 nt, Human
caugccaccuggauuggcucauca

SEQ ID NO: 30344 - RNA, 24 nt, Human
ucacaggauccuuagggugucacu

SEQ ID NO: 30345 - RNA, 24 nt, Human
uagcacugacagaagcccugaggc

SEQ ID NO: 30346 - RNA, 24 nt, Human
ugagauacugaacacaaaguugcu

SEQ ID NO: 30347 - RNA, 24 nt, Human
ggccagcggaaaguuuuauuuacc

SEQ ID NO: 30348 - RNA, 24 nt, Human
aaggacaccaaccacgagugacac

SEQ ID NO: 30349 - RNA, 24 nt, Human
uggaucaccugaggucaggaguuc

SEQ ID NO: 30350 - RNA, 24 nt, Human
aguggaaacuggcagucccaaacc

SEQ ID NO: 30351 - RNA, 21 nt, Human
uucaagggauggaaagucacc

SEQ ID NO: 30352 - RNA, 24 nt, Human
ucugaucuauaaaugcgguggcau

SEQ ID NO: 30353 - RNA, 24 nt, Human
ucaaguuguaugccaaaaauaaca

SEQ ID NO: 30354 - RNA, 23 nt, Human
ucccagccagcccgggcccuggg

SEQ ID NO: 30355 - RNA, 17 nt, Human
ugacguugggccuuugg

SEQ ID NO: 30356 - RNA, 24 nt, Human
ccacccagcccaagaggcccaugu

SEQ ID NO: 30357 - RNA, 24 nt, Human
cuggaggacgacccuaagaaccgg

SEQ ID NO: 30358 - RNA, 24 nt, Human
agaaaacgugagguggccaugaug

SEQ ID NO: 30359 - RNA, 24 nt, Human
uccaccacuacuggccaucugauc

SEQ ID NO: 30360 - RNA, 24 nt, Human
cuugguccacggcgaugcgcaagu

SEQ ID NO: 30361 - RNA, 24 nt, Human
acgggaugcaguacagcaccgauu

SEQ ID NO: 30362 - RNA, 24 nt, Human
cuguguuuuuagcaucuuugggag

SEQ ID NO: 30363 - RNA, 24 nt, Human
agagaaaagccuguuuaccaagga

SEQ ID NO: 30364 - RNA, 24 nt, Human
aggaaucagagaucauugauuucu

SEQ ID NO: 30365 - RNA, 24 nt, Human
ugggaugaccugugaacgagacag

SEQ ID NO: 30366 - RNA, 24 nt, Human
ucaaauccaccaaugaaaucaaag

SEQ ID NO: 30367 - RNA, 24 nt, Human
ucuuaagggcuccuugauggaugc

SEQ ID NO: 30368 - RNA, 24 nt, Human
aacgugcacaugggauccaugggc

SEQ ID NO: 30369 - RNA, 21 nt, Human
uucauucuuaauuuauguaag

SEQ ID NO: 30370 - RNA, 24 nt, Human
uuuaagauugaagauguccaauau

SEQ ID NO: 30371 - RNA, 24 nt, Human
uuugagcaugaaaauaaaucuuua

SEQ ID NO: 30372 - RNA, 24 nt, Human
uauucaguugagacauguauuaca

SEQ ID NO: 30373 - RNA, 20 nt, Human
aggcuucacuagcauacagu

SEQ ID NO: 30374 - RNA, 24 nt, Human
aagcauuucauggggugagagggg

SEQ ID NO: 30375 - RNA, 24 nt, Human
aagcaaacauucaaaaccccaagg

SEQ ID NO: 30376 - RNA, 24 nt, Human
ugcguuuauccacaggauaaagcc

SEQ ID NO: 30377 - RNA, 24 nt, Human
ugagccuggacggacgggggcugg

SEQ ID NO: 30378 - RNA, 24 nt, Human
auuguauucaucaccagucaccuc

SEQ ID NO: 30379 - RNA, 22 nt, Human
uaucugaaaaaaucauagaaaa

SEQ ID NO: 30380 - RNA, 24 nt, Human
uucacauaaauauaaauuauauau

SEQ ID NO: 30381 - RNA, 24 nt, Human
uauaacaguuaucuuacuuaacag

SEQ ID NO: 30382 - RNA, 24 nt, Human
ucuauggugggagccuuaaaaggg

SEQ ID NO: 30383 - RNA, 24 nt, Human
uuaccuggcggcgggcgggcgcgg

SEQ ID NO: 30384 - RNA, 24 nt, Human
cgccugggcacuugggcuccgggc

SEQ ID NO: 30385 - RNA, 24 nt, Human
ugcuggugggcgucgggcggcggc

SEQ ID NO: 30386 - RNA, 24 nt, Human
auaaccuugcuguuugucuauuuu

SEQ ID NO: 30387 - RNA, 24 nt, Human
uugguuuuuguugcuuucuggaau

SEQ ID NO: 30388 - RNA, 24 nt, Human
agccauugaaacagaugaucugac

SEQ ID NO: 30389 - RNA, 24 nt, Human
aagaagaaacaaaagaaagcauca

SEQ ID NO: 30390 - RNA, 24 nt, Human
ugggaggccgaaguggguggauug

SEQ ID NO: 30391 - RNA, 24 nt, Human
aggcagugggcugacuggugaaaa

SEQ ID NO: 30392 - RNA, 24 nt, Human
uuuuuugguagagacaggguuucg

SEQ ID NO: 30393 - RNA, 24 nt, Human
aucacuguguucauucuaaacuuc

SEQ ID NO: 30394 - RNA, 24 nt, Human
uguaugcauagacaccuaucuaaa

SEQ ID NO: 30395 - RNA, 24 nt, Human
ugcauuguuaucauuaaccagucu

SEQ ID NO: 30396 - RNA, 24 nt, Human
uauuagggauaauauucauuuagc

SEQ ID NO: 30397 - RNA, 24 nt, Human
uuuaacuuuuuuaaugggucucaa

SEQ ID NO: 30398 - RNA, 19 nt, Human
uaggcacgauggccaggug

SEQ ID NO: 30399 - RNA, 24 nt, Human
uauuagggauaauauucauuuagc

SEQ ID NO: 30400 - RNA, 24 nt, Human
uaauuuuuguauuuuuaguagaga

SEQ ID NO: 30401 - RNA, 24 nt, Human
ugugugaugagaacauguuugggc

SEQ ID NO: 30402 - RNA, 24 nt, Human
uaaugggucucaaaauucugugac

SEQ ID NO: 30403 - RNA, 24 nt, Human
ugggauguggaaauacuggcuuca

SEQ ID NO: 30404 - RNA, 24 nt, Human
aagcagcccaggggccugaaauac

SEQ ID NO: 30405 - RNA, 24 nt, Human
uggcaaggagguaaggaaaugaaa

SEQ ID NO: 30406 - RNA, 24 nt, Human
ugcauuguuaucauuaaccagucu

SEQ ID NO: 30407 - RNA, 24 nt, Human
uuuaacuuuuuuaaugggucucaa

SEQ ID NO: 30408 - RNA, 24 nt, Human
uuccucauaaauaguuccuuauuu

SEQ ID NO: 30409 - RNA, 24 nt, Human
uaggggcuuuccaugugcagggca

SEQ ID NO: 30410 - RNA, 24 nt, Human
ucuuuggaacguuguccuggacuu

SEQ ID NO: 30411 - RNA, 19 nt, Human
ucauacucaccuuccucgc

SEQ ID NO: 30412 - RNA, 24 nt, Human
uuuauuuuugccuuuuuuuuuuuu

SEQ ID NO: 30413 - RNA, 22 nt, Human
uggaguauguucuugaguucug

SEQ ID NO: 30414 - RNA, 24 nt, Human
ccuuucgccagcugccguaauagc

SEQ ID NO: 30415 - RNA, 24 nt, Human
acugcacuccagccugggcaacag

SEQ ID NO: 30416 - RNA, 24 nt, Human
uacuugaaagaacacacugcuugg

SEQ ID NO: 30417 - RNA, 24 nt, Human
uuggaucugcuucaaugguuucuc

SEQ ID NO: 30418 - RNA, 24 nt, Human
uaguauaguggggaguuagguagu

SEQ ID NO: 30419 - RNA, 24 nt, Human
uugcaccauuguugaacagggaau

SEQ ID NO: 30420 - RNA, 24 nt, Human
ugaagaucagauagcuauaggugu

SEQ ID NO: 30421 - RNA, 24 nt, Human
aggcagaaaacaccaggauuccuu

SEQ ID NO: 30422 - RNA, 24 nt, Human
ugugugcuaggagcuggagcgcua

SEQ ID NO: 30423 - RNA, 24 nt, Human
ugaagaacaucaccuaagagauua

SEQ ID NO: 30424 - RNA, 24 nt, Human
uccccaacgcgaucucaaguucag

SEQ ID NO: 30425 - RNA, 24 nt, Human
uccacgguuagccugcuguagagg

SEQ ID NO: 30426 - RNA, 24 nt, Human
gaccaggcagggucaggcugaccu

SEQ ID NO: 30427 - RNA, 24 nt, Human
ugacacgaggggaggggucugugu

SEQ ID NO: 30428 - RNA, 24 nt, Human
uguuguacuugaggaacacucggu

SEQ ID NO: 30429 - RNA, 24 nt, Human
uauugggcagauaaagagaagaaa

SEQ ID NO: 30430 - RNA, 24 nt, Human
acuugcuggucaugcucugaaacu

SEQ ID NO: 30431 - RNA, 24 nt, Human
ucugcagucaauuuguuuuguacc

SEQ ID NO: 30432 - RNA, 24 nt, Human
aggcaguccugggaccuccuguuc

SEQ ID NO: 30433 - RNA, 21 nt, Human
cgcugcuuaaaaaccgagaug

SEQ ID NO: 30434 - RNA, 24 nt, Human
uagauuauuggauaauugucauua

SEQ ID NO: 30435 - RNA, 24 nt, Human
auggaucccugauggauucaccau

SEQ ID NO: 30436 - RNA, 24 nt, Human
gaacugguccuuucacuuugagau

SEQ ID NO: 30437 - RNA, 24 nt, Human
uaucaagucagcacacaccuuuuc

SEQ ID NO: 30438 - RNA, 24 nt, Human
ucaaugagucgcuugugaauucuc

SEQ ID NO: 30439 - RNA, 24 nt, Human
ugugauuuaucuuuuugcugaggg

SEQ ID NO: 30440 - RNA, 24 nt, Human
ugaauguacauuaagaugaaguca

SEQ ID NO: 30441 - RNA, 24 nt, Human
ugaagggaagcaguccgaacauau

SEQ ID NO: 30442 - RNA, 24 nt, Human
cauuggcucuugaacugauggcug

SEQ ID NO: 30443 - RNA, 24 nt, Human
aaagguaccacucacuacauuaca

SEQ ID NO: 30444 - RNA, 24 nt, Human
ucucacccuagagugacagcuauc

SEQ ID NO: 30445 - RNA, 21 nt, Human
uagcuacaugugcuuuggccc

SEQ ID NO: 30446 - RNA, 23 nt, Human
uggcucaagaucagauuccugac

SEQ ID NO: 30447 - RNA, 24 nt, Human
agggauuaaauauagauguaauuu

SEQ ID NO: 30448 - RNA, 24 nt, Human
uguaagauggauaauguguauaag

SEQ ID NO: 30449 - RNA, 24 nt, Human
uaaugggucucaaaauucugugac

SEQ ID NO: 30450 - RNA, 24 nt, Human
ugcauuguuaucauuaaccagucu

SEQ ID NO: 30451 - RNA, 24 nt, Human
uaaugggucucaaaauucugugac

SEQ ID NO: 30452 - RNA, 24 nt, Human
uauuagggauaauauucauuuagc

SEQ ID NO: 30453 - RNA, 24 nt, Human
cuagacaggaaaucagcugagacc

SEQ ID NO: 30454 - RNA, 24 nt, Human
ugccagggggaagagcgauggguc

SEQ ID NO: 30455 - RNA, 24 nt, Human
uucggggaaguaguccuugaccag

SEQ ID NO: 30456 - RNA, 24 nt, Human
ucgcugacgaaugaugacaagaca

SEQ ID NO: 30457 - RNA, 24 nt, Human
ugaaagaagaagauggggaaaagg

SEQ ID NO: 30458 - RNA, 24 nt, Human
uccugggucccgggagggcuccuu

SEQ ID NO: 30459 - RNA, 24 nt, Human
uggggccaggacagggaagcugga

SEQ ID NO: 30460 - RNA, 24 nt, Human
ccagauccagagaaagcgcggaag

SEQ ID NO: 30461 - RNA, 17 nt, Human
uccacguucaugucaca

SEQ ID NO: 30462 - RNA, 24 nt, Human
uggcaagucacuuugacagacauu

SEQ ID NO: 30463 - RNA, 24 nt, Human
uacaccacucccaagaagaauaag

SEQ ID NO: 30464 - RNA, 24 nt, Human
ugccagggcaucuggaaguucugg

SEQ ID NO: 30465 - RNA, 24 nt, Human
gugcagugaguggccucaaaguug

SEQ ID NO: 30466 - RNA, 22 nt, Human
ugccugguaggagcggaggaca

SEQ ID NO: 30467 - RNA, 24 nt, Human
uaaguacauaggucuuuauuuaaa

SEQ ID NO: 30468 - RNA, 24 nt, Human
uggaggagggagaggggagagcag

SEQ ID NO: 30469 - RNA, 24 nt, Human
ucccacagaagcuacagcugccag

SEQ ID NO: 30470 - RNA, 24 nt, Human
aaggagacagucuuggaggugcug

SEQ ID NO: 30471 - RNA, 24 nt, Human
ugagcguuagucaaagguacagga

SEQ ID NO: 30472 - RNA, 24 nt, Human
augcagagggagcaggagcugagg

SEQ ID NO: 30473 - RNA, 23 nt, Human
uugggugauugaaccggauagcu

SEQ ID NO: 30474 - RNA, 24 nt, Human
uguaaaagaaaguguuauaaaagc

SEQ ID NO: 30475 - RNA, 24 nt, Human
ugcauuguuaucauuaaccagucu

SEQ ID NO: 30476 - RNA, 24 nt, Human
uauuagggauaauauucauuuagc

SEQ ID NO: 30477 - RNA, 24 nt, Human
uuuaacuuuuuuaaugggucucaa

SEQ ID NO: 30478 - RNA, 24 nt, Human
ucaauagauauaucgaacguaagc

SEQ ID NO: 30479 - RNA, 24 nt, Human
ggagcaccuggagcgcaugaagcg

SEQ ID NO: 30480 - RNA, 21 nt, Human
aucaugcuuuauaggcucucc

SEQ ID NO: 30481 - RNA, 18 nt, Human
cugugcuuccaguuuugc

SEQ ID NO: 30482 - RNA, 24 nt, Human
ugccuggagugacagagccuuccu

SEQ ID NO: 30483 - RNA, 24 nt, Human
uauggcaagucacuuugacagaca

SEQ ID NO: 30484 - RNA, 24 nt, Human
aagcuggcuguccugaaauauuau

SEQ ID NO: 30485 - RNA, 24 nt, Human
uacaccacucccaagaagaauaag

SEQ ID NO: 30486 - RNA, 24 nt, Human
uguaaugacaacaauuuaggcauc

SEQ ID NO: 30487 - RNA, 24 nt, Human
uauguagagaaaauugcaugacuu

SEQ ID NO: 30488 - RNA, 24 nt, Human
uuaauguucgcugcugcaguuaug

SEQ ID NO: 30489 - RNA, 24 nt, Human
uguuauggggauaagcuggugagg

SEQ ID NO: 30490 - RNA, 24 nt, Human
aguuacuuauuaaaaaaaaaacac

SEQ ID NO: 30491 - RNA, 24 nt, Human
uuuauucuaguaacuggcuacaag

SEQ ID NO: 30492 - RNA, 24 nt, Human
ccagcaaucccgcgcgguuuguca

SEQ ID NO: 30493 - RNA, 24 nt, Human
aaugcaggguguaagggguccggg

SEQ ID NO: 30494 - RNA, 24 nt, Human
aacgugaaaaaaaggauggaauaa

SEQ ID NO: 30495 - RNA, 24 nt, Human
ggugaugggggcagccgggaggga

SEQ ID NO: 30496 - RNA, 21 nt, Human
uugcucagugacagagccuca

SEQ ID NO: 30497 - RNA, 24 nt, Human
agcccaugguaucggaagaaauuc

SEQ ID NO: 30498 - RNA, 24 nt, Human
aagaagcauuuauuagcaugcagg

SEQ ID NO: 30499 - RNA, 24 nt, Human
ugaagacaaccuugaggagggagc

SEQ ID NO: 30500 - RNA, 24 nt, Human
uacaagugauucuccugccucagc

SEQ ID NO: 30501 - RNA, 24 nt, Human
uugcauggacaucaggauuccucu

SEQ ID NO: 30502 - RNA, 24 nt, Human
uguuauggucuuuaugaaaacaaa

SEQ ID NO: 30503 - RNA, 24 nt, Human
ugggagcgagaaaguaguugugaa

SEQ ID NO: 30504 - RNA, 24 nt, Human
uaguggagauaggguuucaccaug

SEQ ID NO: 30505 - RNA, 24 nt, Human
acccaguaaccauucuguccaauu

SEQ ID NO: 30506 - RNA, 24 nt, Human
uucccauucagauucuucuugaua

SEQ ID NO: 30507 - RNA, 24 nt, Human
ccaaagcuguccaccagccccacu

SEQ ID NO: 30508 - RNA, 24 nt, Human
aggcaugcuuugagggaagacucc

SEQ ID NO: 30509 - RNA, 24 nt, Human
uuuaagaacuuauuuuuauuuuau

SEQ ID NO: 30510 - RNA, 24 nt, Human
aggaaaugucaaaaaggcaaaaug

SEQ ID NO: 30511 - RNA, 24 nt, Human
ucaguuggaaaacccccugaaauu

SEQ ID NO: 30512 - RNA, 24 nt, Human
uuuguggugccaccgcaguugcag

SEQ ID NO: 30513 - RNA, 19 nt, Human
uaucugagcuccugcugcc

SEQ ID NO: 30514 - RNA, 24 nt, Human
uuggcuagcacggugaaacccugu

SEQ ID NO: 30515 - RNA, 24 nt, Human
cagcuccaccccucacuaacuguu

SEQ ID NO: 30516 - RNA, 24 nt, Human
ugaggugaacaagugcagccgcug

SEQ ID NO: 30517 - RNA, 24 nt, Human
aagacguugccuucaaagaccugg

SEQ ID NO: 30518 - RNA, 24 nt, Human
uacacuguggccucaaccucccag

SEQ ID NO: 30519 - RNA, 24 nt, Human
ucccucuugcuuuauagcuagcug

SEQ ID NO: 30520 - RNA, 24 nt, Human
uuggaccaccacaugacaucauuu

SEQ ID NO: 30521 - RNA, 24 nt, Human
uaaaagcaguuuccauguguuuuc

SEQ ID NO: 30522 - RNA, 22 nt, Human
ucccuuauguuuucaguauauu

SEQ ID NO: 30523 - RNA, 24 nt, Human
uccacggugagcuugcuguagagg

SEQ ID NO: 30524 - RNA, 24 nt, Human
ucgcugggauagaagccuuugacc

SEQ ID NO: 30525 - RNA, 20 nt, Human
ugcguguagugguugugcag

SEQ ID NO: 30526 - RNA, 24 nt, Human
cauucgggagaucuuccggaccaa

SEQ ID NO: 30527 - RNA, 24 nt, Human
cugaagcugucugggggagaugau

SEQ ID NO: 30528 - RNA, 22 nt, Human
gagcugaagggaacugugcgcc

SEQ ID NO: 30529 - RNA, 24 nt, Human
uauaauaauuaacaacagcaaaga

SEQ ID NO: 30530 - RNA, 24 nt, Human
ugaaguggucugcucauaguuugu

SEQ ID NO: 30531 - RNA, 24 nt, Human
ugagaccgcuuguuuucugcaggu

SEQ ID NO: 30532 - RNA, 24 nt, Human
ugccuuugcauugguuuggcuuug

SEQ ID NO: 30533 - RNA, 24 nt, Human
uuuuccuagcuacaucugguaccu

SEQ ID NO: 30534 - RNA, 24 nt, Human
ucuccaacgacucugcccccgaug

SEQ ID NO: 30535 - RNA, 24 nt, Human
cuggagcagguccaccggccccua

SEQ ID NO: 30536 - RNA, 24 nt, Human
auugaaggaauaggaaaagaggag

SEQ ID NO: 30537 - RNA, 24 nt, Human
auggagcuaaaaguugauuuucau

SEQ ID NO: 30538 - RNA, 24 nt, Human
ugaucucguuggacugcguggcua

SEQ ID NO: 30539 - RNA, 24 nt, Human
cuuugggaugcaaggcaguuguuc

SEQ ID NO: 30540 - RNA, 24 nt, Human
cuaauucuggagugaaauauuagc

SEQ ID NO: 30541 - RNA, 24 nt, Human
uaagaagccagucagccugcccau

SEQ ID NO: 30542 - RNA, 24 nt, Human
ucugaacuuaaaagaggaagaaag

SEQ ID NO: 30543 - RNA, 24 nt, Human
guccugaguggccuggaagaagac

SEQ ID NO: 30544 - RNA, 24 nt, Human
cacaguuuaggucuaggguugucu

SEQ ID NO: 30545 - RNA, 24 nt, Human
uuaguuaacccugaguaauuacua

SEQ ID NO: 30546 - RNA, 24 nt, Human
uuagaacauagaauauuaucaauu

SEQ ID NO: 30547 - RNA, 24 nt, Human
acccaaagguggauagucugagaa

SEQ ID NO: 30548 - RNA, 24 nt, Human
uaaugggucucaaaauucugugac

SEQ ID NO: 30549 - RNA, 24 nt, Human
uauuagggauaauauucauuuagc

SEQ ID NO: 30550 - RNA, 24 nt, Human
acggagggcuccgggcucuguaug

SEQ ID NO: 30551 - RNA, 24 nt, Human
uacuucauauuacacauacuuuuc

SEQ ID NO: 30552 - RNA, 24 nt, Human
ugugcagaagaaauggaaggauuc

SEQ ID NO: 30553 - RNA, 24 nt, Human
uaucaaggaagggcaggcgugaug

SEQ ID NO: 30554 - RNA, 24 nt, Human
uucaaauuucuuucuuuuuuaauu

SEQ ID NO: 30555 - RNA, 24 nt, Human
ucaauuuuuauuuugguuuucuua

SEQ ID NO: 30556 - RNA, 24 nt, Human
ugcacauuuccucaucugucugac

SEQ ID NO: 30557 - RNA, 24 nt, Human
ugaaaaaggagaauuucaagucag

SEQ ID NO: 30558 - RNA, 24 nt, Human
uaaugggucucaaaauucugugac

SEQ ID NO: 30559 - RNA, 24 nt, Human
uauuagggauaauauucauuuagc

SEQ ID NO: 30560 - RNA, 24 nt, Human
accaccgaggagggagccguggcc

SEQ ID NO: 30561 - RNA, 24 nt, Human
ugugucuuuuagcuacagaggagg

SEQ ID NO: 30562 - RNA, 24 nt, Human
ugguugggugugcguucuucuuug

SEQ ID NO: 30563 - RNA, 24 nt, Human
uacgucgucagcaagacguugaac

SEQ ID NO: 30564 - RNA, 24 nt, Human
uggaaguggccugccgccauuuug

SEQ ID NO: 30565 - RNA, 24 nt, Human
ugacucaaugcaagcaaggccuuu

SEQ ID NO: 30566 - RNA, 24 nt, Human
gagcaggugugaguugccuuccau

SEQ ID NO: 30567 - RNA, 24 nt, Human
uucauguuaacuucuuuucuggaa

SEQ ID NO: 30568 - RNA, 24 nt, Human
uggcaguaaguguuuaucuggccu

SEQ ID NO: 30569 - RNA, 24 nt, Human
uaaacuagaaugacauuugcucag

SEQ ID NO: 30570 - RNA, 24 nt, Human
ugugcagaagaaauggaaggauuc

SEQ ID NO: 30571 - RNA, 24 nt, Human
uucaaauuucuuucuuuuuuaauu

SEQ ID NO: 30572 - RNA, 24 nt, Human
ugugcagaagaaauggaaggauuc

SEQ ID NO: 30573 - RNA, 24 nt, Human
uaucaaggaagggcaggcgugaug

SEQ ID NO: 30574 - RNA, 24 nt, Human
uucaaauuucuuucuuuuuuaauu

SEQ ID NO: 30575 - RNA, 24 nt, Human
ucaauuuuuauuuugguuuucuua

SEQ ID NO: 30576 - RNA, 20 nt, Human
uauuuuagauuacuugguug

SEQ ID NO: 30577 - RNA, 24 nt, Human
agcuguaggugccauucggaccag

SEQ ID NO: 30578 - RNA, 24 nt, Human
ccagcagugcaaugagacagacag

SEQ ID NO: 30579 - RNA, 24 nt, Human
uagcaagauaauuuggggcaagag

SEQ ID NO: 30580 - RNA, 24 nt, Human
aguugcuauguuuuauuuugcuag

SEQ ID NO: 30581 - RNA, 24 nt, Human
uaugauaauuuauuagguuauacu

SEQ ID NO: 30582 - RNA, 24 nt, Human
gacccuaucucagaaagagggagu

SEQ ID NO: 30583 - RNA, 24 nt, Human
cuacagcaccagagguacuuagua

SEQ ID NO: 30584 - RNA, 24 nt, Human
ucagaaggucuaggugagcuuuuc

SEQ ID NO: 30585 - RNA, 24 nt, Human
aaaggugcucaguuagagauucua

SEQ ID NO: 30586 - RNA, 24 nt, Human
uaaaagcagcaauaucaugucuug

SEQ ID NO: 30587 - RNA, 24 nt, Human
gcucauuugcaggggggagccaaa

SEQ ID NO: 30588 - RNA, 24 nt, Human
ugguaucuguagauggcuacauga

SEQ ID NO: 30589 - RNA, 24 nt, Human
uagcaucuuugugggggauuuuuu

SEQ ID NO: 30590 - RNA, 24 nt, Human
ucuuggguuaucuguggggugaga

SEQ ID NO: 30591 - RNA, 18 nt, Human
ugccaugacgugucccac

SEQ ID NO: 30592 - RNA, 24 nt, Human
cgagucugcaccgaccucuucagg

SEQ ID NO: 30593 - RNA, 24 nt, Human
aagaacuacaggucagaaauggaa

SEQ ID NO: 30594 - RNA, 20 nt, Human
uauguagggcaucacuuuau

SEQ ID NO: 30595 - RNA, 24 nt, Human
aguaguugugagcucuauucuaaa

SEQ ID NO: 30596 - RNA, 24 nt, Human
uuauuguugcuguuguuaauuaca

SEQ ID NO: 30597 - RNA, 21 nt, Human
uaaaaugcauuauaucuggag

SEQ ID NO: 30598 - RNA, 22 nt, Human
agcacuauuuguuuacugcacu

SEQ ID NO: 30599 - RNA, 24 nt, Human
aaauaugguaaguauaaacuucau

SEQ ID NO: 30600 - RNA, 21 nt, Human
ugggaggggcugaauguggug

SEQ ID NO: 30601 - RNA, 24 nt, Human
aaggaaccauggccaacugugagc

SEQ ID NO: 30602 - RNA, 24 nt, Human
aagcguuuugagcagaaaggauuc

SEQ ID NO: 30603 - RNA, 21 nt, Human
gauucuguggagagugcagag

SEQ ID NO: 30604 - RNA, 24 nt, Human
uauggcaagucacuuugacagaca

SEQ ID NO: 30605 - RNA, 24 nt, Human
ugagaauggcaaaauuagucgccu

SEQ ID NO: 30606 - RNA, 24 nt, Human
uacaccacucccaagaagaauaag

SEQ ID NO: 30607 - RNA, 24 nt, Human
cuccugaccucgugauccgcccgc

SEQ ID NO: 30608 - RNA, 24 nt, Human
ugggauugcggggggcgcgaccuc

SEQ ID NO: 30609 - RNA, 24 nt, Human
ugucauacagcuucuucacagccu

SEQ ID NO: 30610 - RNA, 24 nt, Human
uagcuguaguacauguuuucauug

SEQ ID NO: 30611 - RNA, 24 nt, Human
uauuucacuggaaaauucuguaaa

SEQ ID NO: 30612 - RNA, 17 nt, Human
uaccuuaccucugacuc

SEQ ID NO: 30613 - RNA, 24 nt, Human
ugaaaagcagguauccaaaagaac

SEQ ID NO: 30614 - RNA, 22 nt, Human
ugggacaagacucuaugaaagc

SEQ ID NO: 30615 - RNA, 24 nt, Human
gagcugggugagcgagcgggcggg

SEQ ID NO: 30616 - RNA, 24 nt, Human
ccgcaggcugaucccgccguccac

SEQ ID NO: 30617 - RNA, 24 nt, Human
uuucuaguugcuaagauuugccaa

SEQ ID NO: 30618 - RNA, 24 nt, Human
uuugccagucagccuaguucuucu

SEQ ID NO: 30619 - RNA, 24 nt, Human
uguucagccccuaaacgaauggca

SEQ ID NO: 30620 - RNA, 24 nt, Human
uuggcccacaucuguuuaaucuuc

SEQ ID NO: 30621 - RNA, 24 nt, Human
uucgaaguucaugcaaccaacuaa

SEQ ID NO: 30622 - RNA, 24 nt, Human
uuuguacaaaaauacugucaaaau

SEQ ID NO: 30623 - RNA, 24 nt, Human
acgacauuccacacccuauuauca

SEQ ID NO: 30624 - RNA, 24 nt, Human
uagggaguuuucacacguuucuug

SEQ ID NO: 30625 - RNA, 24 nt, Human
caguucauuccuauaucuuuagac

SEQ ID NO: 30626 - RNA, 24 nt, Human
uccacacaaauaggcacacauaua

SEQ ID NO: 30627 - RNA, 24 nt, Human
uacucuaguucaacaaagaguuau

SEQ ID NO: 30628 - RNA, 24 nt, Human
uguuucuuauagcaaacuguuguu

SEQ ID NO: 30629 - RNA, 24 nt, Human
uaaagcuaacaaaucaaaggcaca

SEQ ID NO: 30630 - RNA, 24 nt, Human
ccgggucgacccacgcguccgcau

SEQ ID NO: 30631 - RNA, 24 nt, Human
ugcagauuccuuuggccacuguau

SEQ ID NO: 30632 - RNA, 23 nt, Human
uuugauguaaguuacugacaagc

SEQ ID NO: 30633 - RNA, 24 nt, Human
ugaguccacuugucccuccacaga

SEQ ID NO: 30634 - RNA, 24 nt, Human
uugcaccucguggcugcuuuguuc

SEQ ID NO: 30635 - RNA, 24 nt, Human
uugcuggugagagugucuuuuagu

SEQ ID NO: 30636 - RNA, 18 nt, Human
ucucaaaaaaagagaaag

SEQ ID NO: 30637 - RNA, 24 nt, Human
gaggauccaagcuuacguacgcgu

SEQ ID NO: 30638 - RNA, 24 nt, Human
gggaaagcugguacgccugcaggu

SEQ ID NO: 30639 - RNA, 24 nt, Human
ugauuggauuauuagauuuuuacc

SEQ ID NO: 30640 - RNA, 24 nt, Human
uggcagagggugguagcccuuacu

SEQ ID NO: 30641 - RNA, 24 nt, Human
uggcguaauagcgaagaggcccgc

SEQ ID NO: 30642 - RNA, 24 nt, Human
gaggauccaagcuuacguacgcgu

SEQ ID NO: 30643 - RNA, 24 nt, Human
ggagguguugagcaucuuccacug

SEQ ID NO: 30644 - RNA, 24 nt, Human
accacauuuucuuuauccacucgu

SEQ ID NO: 30645 - RNA, 24 nt, Human
uaaaagccagaguuggagacacag

SEQ ID NO: 30646 - RNA, 24 nt, Human
agccauugggauccagacaucaga

SEQ ID NO: 30647 - RNA, 23 nt, Human
gcaggacaacugaggucgccucc

SEQ ID NO: 30648 - RNA, 24 nt, Human
cgcccggaacuggcucgggcacgc

SEQ ID NO: 30649 - RNA, 24 nt, Human
uauggcaagucacuuugacagaca

SEQ ID NO: 30650 - RNA, 24 nt, Human
ugagaauggcaaaauuagucgccu

SEQ ID NO: 30651 - RNA, 24 nt, Human
uauggcaagucacuugacagacau

SEQ ID NO: 30652 - RNA, 24 nt, Human
ugagaauggcaaaauuagucgccu

SEQ ID NO: 30653 - RNA, 24 nt, Human
uacaccacucccaagaagaauaag

SEQ ID NO: 30654 - RNA, 24 nt, Human
ugcaucagaagaagaaaugucagg

SEQ ID NO: 30655 - RNA, 24 nt, Human
aggacuuucucauguaauucuaug

SEQ ID NO: 30656 - RNA, 24 nt, Human
cagcaugagacuagaggcugggga

SEQ ID NO: 30657 - RNA, 24 nt, Human
cagcuggggucacggcuacagagg

SEQ ID NO: 30658 - RNA, 24 nt, Human
ugggauuggcacaagacucugcua

SEQ ID NO: 30659 - RNA, 24 nt, Human
cgcacauauucuccaacaucguga

SEQ ID NO: 30660 - RNA, 24 nt, Human
ggacuggagcugcuugccaaggua

SEQ ID NO: 30661 - RNA, 24 nt, Human
ugccacggcucacccccaacgguc

SEQ ID NO: 30662 - RNA, 24 nt, Human
uuggagcgaaugcggaauccaacu

SEQ ID NO: 30663 - RNA, 24 nt, Human
ugccugggguguuguccucuucuu

SEQ ID NO: 30664 - RNA, 24 nt, Human
uugguguaucgagcauggagaccg

SEQ ID NO: 30665 - RNA, 24 nt, Human
uccccaaaccaguccucggcccug

SEQ ID NO: 30666 - RNA, 24 nt, Human
uauuagggauaauauucauuuagc

SEQ ID NO: 30667 - RNA, 22 nt, Human
ccucauggacugaguucuggga

SEQ ID NO: 30668 - RNA, 24 nt, Human
cacuguuugucagcuuaaaauuca

SEQ ID NO: 30669 - RNA, 24 nt, Human
uguaaacaccaaagaaccauuacc

SEQ ID NO: 30670 - RNA, 24 nt, Human
cgacagcagcggggcuggguguuc

SEQ ID NO: 30671 - RNA, 24 nt, Human
cuggggccugcugaggugggggug

SEQ ID NO: 30672 - RNA, 24 nt, Human
uuaauggaagaagaugaagaugcu

SEQ ID NO: 30673 - RNA, 22 nt, Human
uagaguucuccgagugcuuuuc

SEQ ID NO: 30674 - RNA, 24 nt, Human
gaccaguagccacuuuaacuuuuu

SEQ ID NO: 30675 - RNA, 24 nt, Human
uucaugauguagaucacauaccgg

SEQ ID NO: 30676 - RNA, 24 nt, Human
aacccuuuaaucgagccaugcuuu

SEQ ID NO: 30677 - RNA, 24 nt, Human
ucacauagguugugccaugagugg

SEQ ID NO: 30678 - RNA, 24 nt, Human
agccauugggauccagacaucaga

SEQ ID NO: 30679 - RNA, 24 nt, Human
uggcacgauggcggaugugaccuu

SEQ ID NO: 30680 - RNA, 24 nt, Human
ccggcacgcuggcugauggcgugg

SEQ ID NO: 30681 - RNA, 24 nt, Human
uacgccgaguuuuuuccgggugau

SEQ ID NO: 30682 - RNA, 24 nt, Human
uugaucuugaagaaacugggcgug

SEQ ID NO: 30683 - RNA, 24 nt, Human
aggaaggagauauagugaagagga

SEQ ID NO: 30684 - RNA, 24 nt, Human
guagaguuuucuucaggcuuaaag

SEQ ID NO: 30685 - RNA, 20 nt, Human
gagcagcuuguccuccagga

SEQ ID NO: 30686 - RNA, 24 nt, Human
ggccaggggcucggccuggcucag

SEQ ID NO: 30687 - RNA, 24 nt, Human
uggcaacuuugggaguacucuuuu

SEQ ID NO: 30688 - RNA, 24 nt, Human
uagaauggggagaguaacaauagc

SEQ ID NO: 30689 - RNA, 24 nt, Human
uagaaguuccaccuccuaggcugg

SEQ ID NO: 30690 - RNA, 24 nt, Human
uaacauggugaaacucugacucua

SEQ ID NO: 30691 - RNA, 24 nt, Human
uaaugggucucaaaauucugugac

SEQ ID NO: 30692 - RNA, 24 nt, Human
ugagaaacagucaucucaauaaau

SEQ ID NO: 30693 - RNA, 24 nt, Human
uagcuucccuuugaggguguguga

SEQ ID NO: 30694 - RNA, 24 nt, Human
ugcauuguuaucauuaaccagucu

SEQ ID NO: 30695 - RNA, 24 nt, Human
uauuagggauaauauucauuuagc

SEQ ID NO: 30696 - RNA, 24 nt, Human
uauacgguaccaucacaucauuug

SEQ ID NO: 30697 - RNA, 24 nt, Human
auugcacaugucaugugaguugga

SEQ ID NO: 30698 - RNA, 24 nt, Human
uggaaaaucuacaacauggagugu

SEQ ID NO: 30699 - RNA, 24 nt, Human
uuuccaaggcuuguuuuccaugaa

SEQ ID NO: 30700 - RNA, 24 nt, Human
ugcuggagauggagggcugcaugc

SEQ ID NO: 30701 - RNA, 24 nt, Human
cacgcugugucgcgccucuccucc

SEQ ID NO: 30702 - RNA, 23 nt, Human
cuggaaccagcugucuguggaga

SEQ ID NO: 30703 - RNA, 23 nt, Human
ucggaaggcgagaacuggucucu

SEQ ID NO: 30704 - RNA, 24 nt, Human
ugaggcccgggauguaggcacugg

SEQ ID NO: 30705 - RNA, 19 nt, Human
uaaaaggaggcgacuguuu

SEQ ID NO: 30706 - RNA, 20 nt, Human
uagcuggcauugauaaggca

SEQ ID NO: 30707 - RNA, 24 nt, Human
cgcccagaucaaggcucauguagc

SEQ ID NO: 30708 - RNA, 24 nt, Human
gcccggaagaucaagucgugcucc

SEQ ID NO: 30709 - RNA, 24 nt, Human
ucaauuuuuauuuugguuuucuua

SEQ ID NO: 30710 - RNA, 24 nt, Human
ccagccccgcagcccuggccugua

SEQ ID NO: 30711 - RNA, 24 nt, Human
aggcagcucacgcgguugucgugg

SEQ ID NO: 30712 - RNA, 24 nt, Human
uugcaguugaagucgucguagcca

SEQ ID NO: 30713 - RNA, 24 nt, Human
ugagaauggcaaaauuagucgccu

SEQ ID NO: 30714 - RNA, 24 nt, Human
ucuggccccggagaaaaguuuuuu

SEQ ID NO: 30715 - RNA, 24 nt, Human
uacaccacucccaagaagaauaag

SEQ ID NO: 30716 - RNA, 24 nt, Human
aaguacuccuguuggugcgaaagg

SEQ ID NO: 30717 - RNA, 24 nt, Human
ugcuuggugaccgaauuacuagug

SEQ ID NO: 30718 - RNA, 24 nt, Human
gugaaggggauggccuaauauggg

SEQ ID NO: 30719 - RNA, 24 nt, Human
cagcauucuggggcuuguaacacu

SEQ ID NO: 30720 - RNA, 24 nt, Human
ucagugguggcgccugggcucagc

SEQ ID NO: 30721 - RNA, 24 nt, Human
ugugcagaagaaauggaaggauuc

SEQ ID NO: 30722 - RNA, 24 nt, Human
uaucaaggaagggcaggcgugaug

SEQ ID NO: 30723 - RNA, 24 nt, Human
uucaaauuucuuucuuuuuuaauu

SEQ ID NO: 30724 - RNA, 24 nt, Human
ucaauuuuuauuuugguuuucuua

SEQ ID NO: 30725 - RNA, 20 nt, Human
ccgcccuucagccgguccug

SEQ ID NO: 30726 - RNA, 24 nt, Human
cagccuggacuuaccaccacuaaa

SEQ ID NO: 30727 - RNA, 24 nt, Human
cagucggcgauccaccagguucug

SEQ ID NO: 30728 - RNA, 23 nt, Human
ucagaaaaagagagagcaccauu

SEQ ID NO: 30729 - RNA, 24 nt, Human
uggggcacuggccuggcucacgug

SEQ ID NO: 30730 - RNA, 24 nt, Human
ccccaguagaagugaugggcugcu

SEQ ID NO: 30731 - RNA, 24 nt, Human
uaucaugaagccucagaaacacug

SEQ ID NO: 30732 - RNA, 24 nt, Human
uacagaaucuaaugcauaacuggu

SEQ ID NO: 30733 - RNA, 24 nt, Human
uaggucccgagguggagucggggg

SEQ ID NO: 30734 - RNA, 24 nt, Human
uguauauauuuaacacacacaucu

SEQ ID NO: 30735 - RNA, 24 nt, Human
cagagcacuguacuuuuuuuuuuu

SEQ ID NO: 30736 - RNA, 23 nt, Human
gugcauccauugucagaggucug

SEQ ID NO: 30737 - RNA, 24 nt, Human
ucucuggggagaagagcaaaugca

SEQ ID NO: 30738 - RNA, 24 nt, Human
uuagucacaugagccucuuggggu

SEQ ID NO: 30739 - RNA, 24 nt, Human
agugcaaagcgagacucugucuca

SEQ ID NO: 30740 - RNA, 24 nt, Human
ugucuauacuucucgugguuccac

SEQ ID NO: 30741 - RNA, 20 nt, Human
uucuggguggcagugauggc

SEQ ID NO: 30742 - RNA, 24 nt, Human
uucgggccgggucucggccgccgg

SEQ ID NO: 30743 - RNA, 24 nt, Human
ccgagggggguucggaggcgucug

SEQ ID NO: 30744 - RNA, 24 nt, Human
ucgcacccugaggaacugcggcuc

SEQ ID NO: 30745 - RNA, 17 nt, Human
caggacauauugcaucu

SEQ ID NO: 30746 - RNA, 24 nt, Human
acuaaaguacaacaggaauucuuc

SEQ ID NO: 30747 - RNA, 24 nt, Human
ugacuauagaauauaauuggcaua

SEQ ID NO: 30748 - RNA, 24 nt, Human
uaucuggucuuugcaagcagucuu

SEQ ID NO: 30749 - RNA, 24 nt, Human
uaguuuguuucuguacuuuuaaau

SEQ ID NO: 30750 - RNA, 24 nt, Human
ugacggugguauagaccucuccug

SEQ ID NO: 30751 - RNA, 24 nt, Human
cacuaugucgccuuuggguagcaa

SEQ ID NO: 30752 - RNA, 24 nt, Human
aaaguuaucgguauuaccagcuau

SEQ ID NO: 30753 - RNA, 24 nt, Human
aaccuguaacauaagcauuuccca

SEQ ID NO: 30754 - RNA, 24 nt, Human
uuuauagaaaaauaaagaaaauaa

SEQ ID NO: 30755 - RNA, 23 nt, Human
ccgccgcgcccccgccgccgccc

SEQ ID NO: 30756 - RNA, 24 nt, Human
ugcccacauguaccucgccacaac

SEQ ID NO: 30757 - RNA, 24 nt, Human
agaagaagaagaaauggcaaagag

SEQ ID NO: 30758 - RNA, 24 nt, Human
ucugaucaauccuucuuuuucucu

SEQ ID NO: 30759 - RNA, 24 nt, Human
ucaauuuuuauuuugguuuucuua

SEQ ID NO: 30760 - RNA, 24 nt, Human
uguacaguguguauauauauacau

SEQ ID NO: 30761 - RNA, 24 nt, Human
agcaagaugaacagaaucuguauu

SEQ ID NO: 30762 - RNA, 24 nt, Human
ucagaugcgagaucaacucuaaua

SEQ ID NO: 30763 - RNA, 24 nt, Human
uccccaugaguucagaauuauuua

SEQ ID NO: 30764 - RNA, 24 nt, Human
ugaagacaccauugacgccccaac

SEQ ID NO: 30765 - RNA, 24 nt, Human
uggguugacuuuugagcaggaggc

SEQ ID NO: 30766 - RNA, 23 nt, Human
aagcagcaagugacagaggaggg

SEQ ID NO: 30767 - RNA, 19 nt, Human
acaaaguuaauuuuuacag

SEQ ID NO: 30768 - RNA, 24 nt, Human
uuuaagcaauaaaaauuggcaugu

SEQ ID NO: 30769 - RNA, 24 nt, Human
ccaccugggucuggacugcaugag

SEQ ID NO: 30770 - RNA, 24 nt, Human
aaggugcagacgcccggcccgugc

SEQ ID NO: 30771 - RNA, 24 nt, Human
uagcgcagucucggccucgccguu

SEQ ID NO: 30772 - RNA, 24 nt, Human
aauuucagaccuuugacaucagug

SEQ ID NO: 30773 - RNA, 24 nt, Human
caguaugaauuuuccgaugucgug

SEQ ID NO: 30774 - RNA, 24 nt, Human
uuuguaguuucuaucccauaugaa

SEQ ID NO: 30775 - RNA, 24 nt, Human
cugcucugccaauuucuggauuuc

SEQ ID NO: 30776 - RNA, 24 nt, Human
ucucaaggccugacagacagaagg

SEQ ID NO: 30777 - RNA, 23 nt, Human
uaccucugcaccccuggaaaguc

SEQ ID NO: 30778 - RNA, 24 nt, Human
uccguagucuggugggccucugua

SEQ ID NO: 30779 - RNA, 24 nt, Human
ugacucagauuuuaauuuugauuu

SEQ ID NO: 30780 - RNA, 24 nt, Human
cauuuuacauaaaagggaaguauc

SEQ ID NO: 30781 - RNA, 24 nt, Human
uaagaaaugcaguccaauuuuaua

SEQ ID NO: 30782 - RNA, 24 nt, Human
ugguagagaugggguuucaccaug

SEQ ID NO: 30783 - RNA, 19 nt, Human
ucccugagcaccgccaggc

SEQ ID NO: 30784 - RNA, 24 nt, Human
uagauuaugaagcaaugugugaag

SEQ ID NO: 30785 - RNA, 24 nt, Human
uagaaggcuggagucuaaauuggg

SEQ ID NO: 30786 - RNA, 24 nt, Human
accacauucgaaggcuugaugcag

SEQ ID NO: 30787 - RNA, 24 nt, Human
uacaucuccacggugaagacgcug

SEQ ID NO: 30788 - RNA, 24 nt, Human
caccagaaggagugaugaucaacg

SEQ ID NO: 30789 - RNA, 24 nt, Human
ucucugcgaacauuccuuuuaacc

SEQ ID NO: 30790 - RNA, 24 nt, Human
uggucagaacccgggagggccugc

SEQ ID NO: 30791 - RNA, 24 nt, Human
ugccugggcugggaggcaaggaca

SEQ ID NO: 30792 - RNA, 24 nt, Human
uuccuggucgaguccagugugaaa

SEQ ID NO: 30793 - RNA, 24 nt, Human
uguggagagaaaucagcauuauua

SEQ ID NO: 30794 - RNA, 24 nt, Human
cuggugcagcgagcccgggaguug

SEQ ID NO: 30795 - RNA, 24 nt, Human
aggaggcuauugagggcaccuaca

SEQ ID NO: 30796 - RNA, 24 nt, Human
uggcguggugaccaagaugaagau

SEQ ID NO: 30797 - RNA, 24 nt, Human
aaagaggauucauucaaacccuag

SEQ ID NO: 30798 - RNA, 24 nt, Human
cgaggggaccugcacauucagucc

SEQ ID NO: 30799 - RNA, 24 nt, Human
uggcugggcagggccaugucacgg

SEQ ID NO: 30800 - RNA, 24 nt, Human
uagccucacucuccauucucugcc

SEQ ID NO: 30801 - RNA, 24 nt, Human
agauggagaaccgugauuaccggg

SEQ ID NO: 30802 - RNA, 24 nt, Human
cugccaugcccccuggcuugguca

SEQ ID NO: 30803 - RNA, 24 nt, Human
uggcacgaaagcuacaggauguau

SEQ ID NO: 30804 - RNA, 24 nt, Human
ucccauauauauaaccauauccau

SEQ ID NO: 30805 - RNA, 24 nt, Human
uauauguauguguguguguauaua

SEQ ID NO: 30806 - RNA, 24 nt, Human
uccaaucuaaaugcagagagacau

SEQ ID NO: 30807 - RNA, 24 nt, Human
ugcaagaaccggucacuuaucagu

SEQ ID NO: 30808 - RNA, 21 nt, Human
uggcccagcucugagggcggg

SEQ ID NO: 30809 - RNA, 24 nt, Human
gggagccugggucgacaugcucuu

SEQ ID NO: 30810 - RNA, 24 nt, Human
acgcaaccgggcgacugcugggug

SEQ ID NO: 30811 - RNA, 24 nt, Human
ugagacaaaugugggcccuccuga

SEQ ID NO: 30812 - RNA, 23 nt, Human
uucgaagggcacgaguucgaggc

SEQ ID NO: 30813 - RNA, 24 nt, Human
acuuagagaaauagccacauucaa

SEQ ID NO: 30814 - RNA, 24 nt, Human
uaauugcaucaguguuuaccucuc

SEQ ID NO: 30815 - RNA, 20 nt, Human
cagcacccgaaugccugcug

SEQ ID NO: 30816 - RNA, 24 nt, Human
gucacguugagagccaacaccaug

SEQ ID NO: 30817 - RNA, 24 nt, Human
acccaguggcuugacggcaaacac

SEQ ID NO: 30818 - RNA, 24 nt, Human
uaacgcgucacuggagaaacccaa

SEQ ID NO: 30819 - RNA, 24 nt, Human
uucaugcauuacugcguuuauuuc

SEQ ID NO: 30820 - RNA, 24 nt, Human
aagggaacuuccaggcuuucaguc

SEQ ID NO: 30821 - RNA, 24 nt, Human
auaggccagugagcccaggccccu

SEQ ID NO: 30822 - RNA, 24 nt, Human
uugcuguuuggcagauggugaggg

SEQ ID NO: 30823 - RNA, 24 nt, Human
ugugcagaagaaauggaaggauuc

SEQ ID NO: 30824 - RNA, 24 nt, Human
uaucaaggaagggcaggcgugaug

SEQ ID NO: 30825 - RNA, 24 nt, Human
uucaaauuucuuucuuuuuuaauu

SEQ ID NO: 30826 - RNA, 24 nt, Human
ucaauuuuuauuuugguuuucuua

SEQ ID NO: 30827 - RNA, 24 nt, Human
agguuccagcacaaaggagucugu

SEQ ID NO: 30828 - RNA, 19 nt, Human
ccgcugagggaggcacagg

SEQ ID NO: 30829 - RNA, 24 nt, Human
uauuuggaaaagagacaguugaau

SEQ ID NO: 30830 - RNA, 24 nt, Human
uauuugaaggcagaaaacacccua

SEQ ID NO: 30831 - RNA, 24 nt, Human
gcgcucugcagcuugguccucaca

SEQ ID NO: 30832 - RNA, 24 nt, Human
acaaucuugccuuccaugccccag

SEQ ID NO: 30833 - RNA, 24 nt, Human
ugcauuguuaucauuaaccagucu

SEQ ID NO: 30834 - RNA, 24 nt, Human
uaaugggucucaaaauucugugac

SEQ ID NO: 30835 - RNA, 24 nt, Human
uauuagggauaauauucauuuagc

SEQ ID NO: 30836 - RNA, 24 nt, Human
uaagugauuuacaauuucuguuuc

SEQ ID NO: 30837 - RNA, 24 nt, Human
gugcugccuccucugaggcuggca

SEQ ID NO: 30838 - RNA, 22 nt, Human
ugugccugcagaggagcugcuc

SEQ ID NO: 30839 - RNA, 22 nt, Human
uuuguacaaacuaaaugaggug

SEQ ID NO: 30840 - RNA, 24 nt, Human
ugaagaaaccaagacccugaaaag

SEQ ID NO: 30841 - RNA, 24 nt, Human
ucugcaauuugguauaaauguuag

SEQ ID NO: 30842 - RNA, 24 nt, Human
cacacggcauguucucucuuugca

SEQ ID NO: 30843 - RNA, 24 nt, Human
aacuguaucccguugaugcacuaa

SEQ ID NO: 30844 - RNA, 24 nt, Human
aaagcagcaauucuauguucauag

SEQ ID NO: 30845 - RNA, 24 nt, Human
ggaggggaauuauuugaaucgugg

SEQ ID NO: 30846 - RNA, 22 nt, Human
ucuuccucagugaugacucgag

SEQ ID NO: 30847 - RNA, 24 nt, Human
ccucccgucacuccacgcagcugg

SEQ ID NO: 30848 - RNA, 24 nt, Human
ugugcagaagaaauggaaggauuc

SEQ ID NO: 30849 - RNA, 24 nt, Human
uaucaaggaagggcaggcgugaug

SEQ ID NO: 30850 - RNA, 24 nt, Human
uucaaauuucuuucuuuuuuaauu

SEQ ID NO: 30851 - RNA, 24 nt, Human
ugagguaucguuuacugcaaagaa

SEQ ID NO: 30852 - RNA, 24 nt, Human
agaagaagaagaaauggcaaagag

SEQ ID NO: 30853 - RNA, 22 nt, Human
ugugcaaaagaaauggaaggau

SEQ ID NO: 30854 - RNA, 24 nt, Human
ugcagaggaauuccacggggcggg

SEQ ID NO: 30855 - RNA, 24 nt, Human
uggcagacaauccccggcugagcg

SEQ ID NO: 30856 - RNA, 24 nt, Human
ugcauuguuaucauuaaccagucu

SEQ ID NO: 30857 - RNA, 24 nt, Human
uauuagggauaauauucauuuagc

SEQ ID NO: 30858 - RNA, 24 nt, Human
uuuaacuuuuuuaaugggucucaa

SEQ ID NO: 30859 - RNA, 24 nt, Human
uagaaaauuacuacaaaguaaaac

SEQ ID NO: 30860 - RNA, 24 nt, Human
ucagcaguuggaaagcucucuauu

SEQ ID NO: 30861 - RNA, 24 nt, Human
uuugacccaggguugucuccccuc

SEQ ID NO: 30862 - RNA, 24 nt, Human
ggacaagaaguacuaccccagcuc

SEQ ID NO: 30863 - RNA, 24 nt, Human
ugagcgggucaauggggcaacacg

SEQ ID NO: 30864 - RNA, 24 nt, Human
uaagggguauaccuggcccggggc

SEQ ID NO: 30865 - RNA, 24 nt, Human
ugaccucaagugauccgcucgcuc

SEQ ID NO: 30866 - RNA, 24 nt, Human
ucacucaguuuuuaauaaaggcca

SEQ ID NO: 30867 - RNA, 17 nt, Human
uacugcauuugcucucu

SEQ ID NO: 30868 - RNA, 24 nt, Human
gggaacaaggcaguguucuuuacc

SEQ ID NO: 30869 - RNA, 24 nt, Human
uaaugcgugggaggauugaaaaug

SEQ ID NO: 30870 - RNA, 24 nt, Human
cacuguguucaauuuugaguuucc

SEQ ID NO: 30871 - RNA, 24 nt, Human
uagaagaucuguuuguuuauauau

SEQ ID NO: 30872 - RNA, 24 nt, Human
ggccugggcacccuuagaggggag

SEQ ID NO: 30873 - RNA, 24 nt, Human
acgcugaauuauaauuagccacac

SEQ ID NO: 30874 - RNA, 24 nt, Human
uuggaucuuuuggauuucuuuuuu

SEQ ID NO: 30875 - RNA, 24 nt, Human
ggccugggcacccuuagaggggag

SEQ ID NO: 30876 - RNA, 24 nt, Human
aggcugggaugccaauguucucgu

SEQ ID NO: 30877 - RNA, 24 nt, Human
uggagccaggcaaggcaaagugau

SEQ ID NO: 30878 - RNA, 23 nt, Human
ccgggccgaggcgucaggucgcc

SEQ ID NO: 30879 - RNA, 24 nt, Human
cuagcaccagccugggccgcacac

SEQ ID NO: 30880 - RNA, 24 nt, Human
uuaguuggcccuucuuucagcacu

SEQ ID NO: 30881 - RNA, 24 nt, Human
ucagucucaaguauaacuacaaua

SEQ ID NO: 30882 - RNA, 24 nt, Human
uggcuuggcuugggcucagaggcc

SEQ ID NO: 30883 - RNA, 24 nt, Human
gacaagaaaaaaacauguuuggua

SEQ ID NO: 30884 - RNA, 24 nt, Human
ucaaagauaaauccaaauacugca

SEQ ID NO: 30885 - RNA, 24 nt, Human
uacgugcaagucacagggaaugcc

SEQ ID NO: 30886 - RNA, 24 nt, Human
uggcagugguggaggugggcauug

SEQ ID NO: 30887 - RNA, 24 nt, Human
aaggcuuugcacagcuauuguuca

SEQ ID NO: 30888 - RNA, 24 nt, Human
aagcaggcagcggggauguagcuc

SEQ ID NO: 30889 - RNA, 24 nt, Human
ucucagguuuuaaauguugcaaau

SEQ ID NO: 30890 - RNA, 24 nt, Human
ucuagccagagcccuucacugcca

SEQ ID NO: 30891 - RNA, 24 nt, Human
ugaguaaugugaaauugaguuuuu

SEQ ID NO: 30892 - RNA, 18 nt, Human
cauugguugaaaugccug

SEQ ID NO: 30893 - RNA, 23 nt, Human
aaggaagauggugaucagacagc

SEQ ID NO: 30894 - RNA, 24 nt, Human
caaugguaaaaaaugcagccgggg

SEQ ID NO: 30895 - RNA, 24 nt, Human
cucucggucggccuaggcuuucug

SEQ ID NO: 30896 - RNA, 24 nt, Human
cucucggcccguuccucgcguucc

SEQ ID NO: 30897 - RNA, 24 nt, Human
auaacuguagcaaugaacuuuuag

SEQ ID NO: 30898 - RNA, 24 nt, Human
uauuuuuuuaauacaauagcugcc

SEQ ID NO: 30899 - RNA, 24 nt, Human
ggggacuacaaugugccacgucgg

SEQ ID NO: 30900 - RNA, 24 nt, Human
ggagguuucggcaguggcauccgg

SEQ ID NO: 30901 - RNA, 24 nt, Human
aucuugguuuuguuucuggaggga

SEQ ID NO: 30902 - RNA, 24 nt, Human
uggacagaagucaugaugaugggg

SEQ ID NO: 30903 - RNA, 24 nt, Human
uuuaaacuuuugcauuguaaaaag

SEQ ID NO: 30904 - RNA, 24 nt, Human
uuggauauuuucaccucugggaua

SEQ ID NO: 30905 - RNA, 24 nt, Human
uaaauggaauguaucuuugucauu

SEQ ID NO: 30906 - RNA, 24 nt, Human
gucccuuuguuuauccuacauaug

SEQ ID NO: 30907 - RNA, 24 nt, Human
ugccuuaauaucauuguuggcuaa

SEQ ID NO: 30908 - RNA, 24 nt, Human
uacaagcccccgccgagcgaaugu

SEQ ID NO: 30909 - RNA, 24 nt, Human
ggaggacacgaagcaaaugaugag

SEQ ID NO: 30910 - RNA, 24 nt, Human
ucucagaaugcuucuuucuugucu

SEQ ID NO: 30911 - RNA, 24 nt, Human
ugucauaggcaucgacgaggggca

SEQ ID NO: 30912 - RNA, 21 nt, Human
ucccccuuuccccaaccuggg

SEQ ID NO: 30913 - RNA, 24 nt, Human
aggaggucaaggaccgcugcaccc

SEQ ID NO: 30914 - RNA, 24 nt, Human
uagcaguaauuuaucagaggucac

SEQ ID NO: 30915 - RNA, 24 nt, Human
uuagcaaauagagagaaauauaga

SEQ ID NO: 30916 - RNA, 24 nt, Human
ugagucuagagauauuugugaaau

SEQ ID NO: 30917 - RNA, 24 nt, Human
uguuucaccgcccugccuagaucu

SEQ ID NO: 30918 - RNA, 24 nt, Human
uaaaccgcgcaccauacagacagc

SEQ ID NO: 30919 - RNA, 24 nt, Human
ucccagggcugggggacuuccuuc

SEQ ID NO: 30920 - RNA, 24 nt, Human
acuccuuuucagaagcagccuguu

SEQ ID NO: 30921 - RNA, 24 nt, Human
ucuuaauuugauuuucuuuuucuu

SEQ ID NO: 30922 - RNA, 23 nt, Human
cagcacacaaccagaaccuagag

SEQ ID NO: 30923 - RNA, 24 nt, Human
uccacuuucaguuugcaauaccac

SEQ ID NO: 30924 - RNA, 24 nt, Human
uggaagcauuccaccaugaggagc

SEQ ID NO: 30925 - RNA, 18 nt, Human
uacuguauuuuuauguug

SEQ ID NO: 30926 - RNA, 24 nt, Human
uuugugguuaccaguuauuuuuac

SEQ ID NO: 30927 - RNA, 24 nt, Human
uauaggaauaaucucagugaauuc

SEQ ID NO: 30928 - RNA, 24 nt, Human
uucucaagcuucuauaaacaguuc

SEQ ID NO: 30929 - RNA, 24 nt, Human
cccacguaccugcaggacaccguc

SEQ ID NO: 30930 - RNA, 23 nt, Human
uuggagccugucagccccagcac

SEQ ID NO: 30931 - RNA, 24 nt, Human
uaguuuguuuauguacccccacca

SEQ ID NO: 30932 - RNA, 24 nt, Human
uggaaugcuaaaccaacggcccgg

SEQ ID NO: 30933 - RNA, 24 nt, Human
aauggcacucugauuaaacugcau

SEQ ID NO: 30934 - RNA, 24 nt, Human
ugaaaggggcagcacagucauuua

SEQ ID NO: 30935 - RNA, 24 nt, Human
cugaagacuacugugacucugucc

SEQ ID NO: 30936 - RNA, 21 nt, Human
uggcuaaagaggaccuguggg

SEQ ID NO: 30937 - RNA, 24 nt, Human
uuuggcaauugguagaguaaaucc

SEQ ID NO: 30938 - RNA, 24 nt, Human
uggggaccccaagggagagaguca

SEQ ID NO: 30939 - RNA, 24 nt, Human
gagaagccuacugcgcgagauucu

SEQ ID NO: 30940 - RNA, 24 nt, Human
ccgggucgacccacgcguccgaca

SEQ ID NO: 30941 - RNA, 24 nt, Human
uccccagaaauugacugagagaca

SEQ ID NO: 30942 - RNA, 24 nt, Human
gggcaggaguaggugccaaaucug

SEQ ID NO: 30943 - RNA, 22 nt, Human
uucaugcaauuuggaauuggug

SEQ ID NO: 30944 - RNA, 21 nt, Human
uaaaagauauuucuccaugcc

SEQ ID NO: 30945 - RNA, 24 nt, Human
auagcccacugagccccgagacag

SEQ ID NO: 30946 - RNA, 24 nt, Human
uuccuguucccugaucaacuuccu

SEQ ID NO: 30947 - RNA, 24 nt, Human
uggcagugagguggcccagacccu

SEQ ID NO: 30948 - RNA, 24 nt, Human
gaaguuaugacagacuucgaacua

SEQ ID NO: 30949 - RNA, 24 nt, Human
uuccagaagugugauugggaauaa

SEQ ID NO: 30950 - RNA, 20 nt, Human
uaucacuuuccggagcuggu

SEQ ID NO: 30951 - RNA, 21 nt, Human
uugcuggggccuaauguucuc

SEQ ID NO: 30952 - RNA, 24 nt, Human
uuaacccaugcagcaaaugcuacg

SEQ ID NO: 30953 - RNA, 24 nt, Human
gugcagaaugagggccgaguagau

SEQ ID NO: 30954 - RNA, 24 nt, Human
ugguggugcgugccuguaguccca

SEQ ID NO: 30955 - RNA, 24 nt, Human
cauggcacugaacuugucgugguc

SEQ ID NO: 30956 - RNA, 24 nt, Human
ucuggcacaggaaauggucuccaa

SEQ ID NO: 30957 - RNA, 24 nt, Human
accauggugagcccauuggcaggg

SEQ ID NO: 30958 - RNA, 24 nt, Human
ccucgagaggggggaucucaucag

SEQ ID NO: 30959 - RNA, 24 nt, Human
cuuuugggcaucauauaccccaug

SEQ ID NO: 30960 - RNA, 24 nt, Human
ugcauuguuaucauuaaccagucu

SEQ ID NO: 30961 - RNA, 24 nt, Human
uaaugggucucaaaauucugugac

SEQ ID NO: 30962 - RNA, 24 nt, Human
uauuagggauaauauucauuuagc

SEQ ID NO: 30963 - RNA, 24 nt, Human
uugcaugccaugugacccgugugc

SEQ ID NO: 30964 - RNA, 24 nt, Human
uggaagguaguagauucuggacaa

SEQ ID NO: 30965 - RNA, 24 nt, Human
uagaaggugguagauuucucacuc

SEQ ID NO: 30966 - RNA, 24 nt, Human
aaguauaggcgauagaaauugaaa

SEQ ID NO: 30967 - RNA, 24 nt, Human
cagcccccagaaagggucaauuga

SEQ ID NO: 30968 - RNA, 24 nt, Human
ugagcucaguaacaucuuagcgag

SEQ ID NO: 30969 - RNA, 24 nt, Human
aaagguucuagggcagggaaaaug

SEQ ID NO: 30970 - RNA, 24 nt, Human
uggcaugggcuuucgugucccacu

SEQ ID NO: 30971 - RNA, 24 nt, Human
gcgggccgucaagccacgcggcga

SEQ ID NO: 30972 - RNA, 24 nt, Human
uucacagaggccaggagucgcaga

SEQ ID NO: 30973 - RNA, 21 nt, Human
uuccuggaauagguaagaaaa

SEQ ID NO: 30974 - RNA, 21 nt, Human
uguugcaggguauugcauggu

SEQ ID NO: 30975 - RNA, 21 nt, Human
uccugcugcugcugcugcugc

SEQ ID NO: 30976 - RNA, 24 nt, Human
uuccagaaaccacugggugguccu

SEQ ID NO: 30977 - RNA, 24 nt, Human
aagcggacaggggaguauccuucg

SEQ ID NO: 30978 - RNA, 24 nt, Human
uugaauuuauugagcuagauauug

SEQ ID NO: 30979 - RNA, 18 nt, Human
uaacagggaggggcgcgg

SEQ ID NO: 30980 - RNA, 24 nt, Human
aaugggauggauaauuaucguaua

SEQ ID NO: 30981 - RNA, 24 nt, Human
cacccaugugaccaaggaacguug

SEQ ID NO: 30982 - RNA, 22 nt, Human
aacacugugauuaagggaacau

SEQ ID NO: 30983 - RNA, 24 nt, Human
aacaguauaauagcauuuacaaua

SEQ ID NO: 30984 - RNA, 24 nt, Human
ccucccugcuccuugcagucauuu

SEQ ID NO: 30985 - RNA, 24 nt, Human
uuuaaaaucccaugccaaacuguc

SEQ ID NO: 30986 - RNA, 22 nt, Human
uacagcuuagccucuguccuuu

SEQ ID NO: 30987 - RNA, 20 nt, Human
uccacaauuuccacuuuuaa

SEQ ID NO: 30988 - RNA, 24 nt, Human
uaguuuaaaacauuuugaucacag

SEQ ID NO: 30989 - RNA, 24 nt, Human
uauucuguaguauuuuucugauuc

SEQ ID NO: 30990 - RNA, 24 nt, Human
uacauaauuagccugagcuagggu

SEQ ID NO: 30991 - RNA, 24 nt, Human
uguggauauaguuuucccuguugg

SEQ ID NO: 30992 - RNA, 24 nt, Human
ugacuaaagaaaccugcugcacau

SEQ ID NO: 30993 - RNA, 24 nt, Human
gagcaugcaucuucucggugagcc

SEQ ID NO: 30994 - RNA, 24 nt, Human
aguuaaguuuuucccuucaucugg

SEQ ID NO: 30995 - RNA, 24 nt, Human
uccaacauuucuccaaaaguuauc

SEQ ID NO: 30996 - RNA, 23 nt, Human
ugagaugcaguuugcaggugggu

SEQ ID NO: 30997 - RNA, 24 nt, Human
ugugaccuugagaaccucaucuca

SEQ ID NO: 30998 - RNA, 23 nt, Human
uggguuucuucccugacccuccc

SEQ ID NO: 30999 - RNA, 24 nt, Human
aauggcacauggacugguguuagc

SEQ ID NO: 31000 - RNA, 23 nt, Human
uugcuuguuaucagucuguucag

SEQ ID NO: 31001 - RNA, 24 nt, Human
agucauuuuggccuccauugugga

SEQ ID NO: 31002 - RNA, 24 nt, Human
ccagcaccggcugcggcuccgguu

SEQ ID NO: 31003 - RNA, 23 nt, Human
uggaaugcugggggugguggcgc

SEQ ID NO: 31004 - RNA, 24 nt, Human
uuuauaauugcuauaggaaauaau

SEQ ID NO: 31005 - RNA, 24 nt, Human
ugaguacaguucagccuuacucug

SEQ ID NO: 31006 - RNA, 24 nt, Human
uccacagcaguuucaucaguuucc

SEQ ID NO: 31007 - RNA, 24 nt, Human
uaccuuaguaggcacagaguacac

SEQ ID NO: 31008 - RNA, 24 nt, Human
ugggaggccaagacgagcagauca

SEQ ID NO: 31009 - RNA, 24 nt, Human
uuuccugugggauugguggugaua

SEQ ID NO: 31010 - RNA, 24 nt, Human
uaggagguaagagaacacuguggg

SEQ ID NO: 31011 - RNA, 24 nt, Human
acgcuucauccuggcuccuggauu

SEQ ID NO: 31012 - RNA, 22 nt, Human
ucagaccaacauguccccugcc

SEQ ID NO: 31013 - RNA, 22 nt, Human
uuguaaguuuacauuuuaauga

SEQ ID NO: 31014 - RNA, 24 nt, Human
augguacuauguagcuggugugcu

SEQ ID NO: 31015 - RNA, 24 nt, Human
aagaguccaccuugcagcuggugc

SEQ ID NO: 31016 - RNA, 24 nt, Human
acaaagccugccaggcugagcccu

SEQ ID NO: 31017 - RNA, 24 nt, Human
cauuuggaaaaucuacuguacagg

SEQ ID NO: 31018 - RNA, 24 nt, Human
uggauggaggcgcucagagccagc

SEQ ID NO: 31019 - RNA, 24 nt, Human
gaaugggguugggggccccaccuc

SEQ ID NO: 31020 - RNA, 24 nt, Human
uaggucccgagguggagucggggg

SEQ ID NO: 31021 - RNA, 24 nt, Human
uguauauauuuaacacacacaucu

SEQ ID NO: 31022 - RNA, 24 nt, Human
uugcaccucguggcugcuuuguuc

SEQ ID NO: 31023 - RNA, 23 nt, Human
uaccgcauguccugugccagccu

SEQ ID NO: 31024 - RNA, 24 nt, Human
ucaggccgggugugguggcucaug

SEQ ID NO: 31025 - RNA, 21 nt, Human
ucaguauaaguuccacaaggc

SEQ ID NO: 31026 - RNA, 24 nt, Human
uuugggggugggagugagagaacg

SEQ ID NO: 31027 - RNA, 24 nt, Human
ucagggguuucucacucucuuccu

SEQ ID NO: 31028 - RNA, 24 nt, Human
ugagauguacagucauccuggauc

SEQ ID NO: 31029 - RNA, 24 nt, Human
ugucaaagugacuugccauaaaca

SEQ ID NO: 31030 - RNA, 24 nt, Human
ucucuugugcuuauucuucuuggg

SEQ ID NO: 31031 - RNA, 17 nt, Human
ucuggcuggaugugcug

SEQ ID NO: 31032 - RNA, 21 nt, Human
ucaggaacugaugagguucuc

SEQ ID NO: 31033 - RNA, 24 nt, Human
aagcacaaaaucugacaaugaaac

SEQ ID NO: 31034 - RNA, 24 nt, Human
accuugugguagcagggaccaugc

SEQ ID NO: 31035 - RNA, 24 nt, Human
ucgggggaguucagugaccuuuug

SEQ ID NO: 31036 - RNA, 19 nt, Human
ucaguguguguguaaguga

SEQ ID NO: 31037 - RNA, 24 nt, Human
uguuguguuuuuagaggugcuauc

SEQ ID NO: 31038 - RNA, 24 nt, Human
uaucaagucagcacacaccuuuuc

SEQ ID NO: 31039 - RNA, 22 nt, Human
ugagucaggagcaggagcgugc

SEQ ID NO: 31040 - RNA, 24 nt, Human
ucucaaagucuugguacgcauucc

SEQ ID NO: 31041 - RNA, 24 nt, Human
gcccauggucaucuguggagggac

SEQ ID NO: 31042 - RNA, 24 nt, Human
cuagaccuacucgauuucuucguu

SEQ ID NO: 31043 - RNA, 24 nt, Human
ugagucucgacagaacgcuguucu

SEQ ID NO: 31044 - RNA, 24 nt, Human
uaggcuacgcuuacagagcccuuu

SEQ ID NO: 31045 - RNA, 18 nt, Human
uagcucggcgccuggguu

SEQ ID NO: 31046 - RNA, 24 nt, Human
uaugacgcagccacccaggaguuu

SEQ ID NO: 31047 - RNA, 24 nt, Human
aagccaccuaugacgcagccaccc

SEQ ID NO: 31048 - RNA, 24 nt, Human
caggagccaggcggggcaugcacg

SEQ ID NO: 31049 - RNA, 24 nt, Human
ugagaguugcauuuuuauuuuuua

SEQ ID NO: 31050 - RNA, 24 nt, Human
ugcauuguuaucauuaaccagucu

SEQ ID NO: 31051 - RNA, 24 nt, Human
uauuagggauaauauucauuuagc

SEQ ID NO: 31052 - RNA, 24 nt, Human
uuuaacuuuuuuaaugggucucaa

SEQ ID NO: 31053 - RNA, 24 nt, Human
uauuaugaacaauacaaaugcauu

SEQ ID NO: 31054 - RNA, 24 nt, Human
uaauacacguaaaccacaaaagag

SEQ ID NO: 31055 - RNA, 24 nt, Human
cugacacacggagagucacaggcu

SEQ ID NO: 31056 - RNA, 24 nt, Human
ucaaaauuuuaauauaaaaaagug

SEQ ID NO: 31057 - RNA, 24 nt, Human
uaaguuaaggcuaugguugcucua

SEQ ID NO: 31058 - RNA, 24 nt, Human
ugaaugacaauauauggaguagca

SEQ ID NO: 31059 - RNA, 24 nt, Human
cucucaggccaccugccuucagcu

SEQ ID NO: 31060 - RNA, 23 nt, Human
uguggcugugaagauguaucgaa

SEQ ID NO: 31061 - RNA, 24 nt, Human
ucaggaaaggaggaugaaauuaga

SEQ ID NO: 31062 - RNA, 24 nt, Human
uauuaaggaacugaugcaucugag

SEQ ID NO: 31063 - RNA, 24 nt, Human
ugaguuacuagaaagcuuccugga

SEQ ID NO: 31064 - RNA, 24 nt, Human
uaguuugcuuuuaaguagaaaaac

SEQ ID NO: 31065 - RNA, 24 nt, Human
uaagguuucgagagcauuccuacu

SEQ ID NO: 31066 - RNA, 24 nt, Human
uugaagaagacugaugagacuagg

SEQ ID NO: 31067 - RNA, 24 nt, Human
ugagaaaacuucugagugcagcau

SEQ ID NO: 31068 - RNA, 24 nt, Human
cuaagacuuuaagggcccacacag

SEQ ID NO: 31069 - RNA, 24 nt, Human
ucacugcagcugccccucccuggc

SEQ ID NO: 31070 - RNA, 24 nt, Human
uuucacacucagaauuuaauuucu

SEQ ID NO: 31071 - RNA, 24 nt, Human
ucuacagucugugaauauaccaau

SEQ ID NO: 31072 - RNA, 24 nt, Human
ugccugaaaagcuggguguccuug

SEQ ID NO: 31073 - RNA, 24 nt, Human
ccaccgagcucuggacgcugagga

SEQ ID NO: 31074 - RNA, 21 nt, Human
uaccguguuggccaggcuggu

SEQ ID NO: 31075 - RNA, 24 nt, Human
ugggaauacaggcaugagccacca

SEQ ID NO: 31076 - RNA, 23 nt, Human
ucagccuuccgaguagcuggagc

SEQ ID NO: 31077 - RNA, 24 nt, Human
uugaaugcacaaaagcaacagguc

SEQ ID NO: 31078 - RNA, 24 nt, Human
aucuggccugcuuccaggcugcag

SEQ ID NO: 31079 - RNA, 24 nt, Human
uaccaggaugguuaccaggaugac

SEQ ID NO: 31080 - RNA, 24 nt, Human
augucaaauccugguauccuuccc

SEQ ID NO: 31081 - RNA, 24 nt, Human
uauguaaccuuagacucagccagu

SEQ ID NO: 31082 - RNA, 24 nt, Human
uaugaacauagacuagagaaaccg

SEQ ID NO: 31083 - RNA, 24 nt, Human
uacacuuuugagacuuuuuggugg

SEQ ID NO: 31084 - RNA, 24 nt, Human
aauuauauucuggaaauugcagua

SEQ ID NO: 31085 - RNA, 24 nt, Human
uggaauugaaaugucauuauugua

SEQ ID NO: 31086 - RNA, 24 nt, Human
uaguauauauuuuaacaacuugaa

SEQ ID NO: 31087 - RNA, 24 nt, Human
aguuguuuuaccuauuagacugua

SEQ ID NO: 31088 - RNA, 24 nt, Human
ucgcucccguccggcccggguccc

SEQ ID NO: 31089 - RNA, 24 nt, Human
ucgcucuggaacaccugggaucug

SEQ ID NO: 31090 - RNA, 24 nt, Human
caauugauaaaucuuauaccauuu

SEQ ID NO: 31091 - RNA, 24 nt, Human
aucaugcuuaaugggagaaaacug

SEQ ID NO: 31092 - RNA, 24 nt, Human
uacagguuagaaaauuugaggcac

SEQ ID NO: 31093 - RNA, 24 nt, Human
uggugguaaauauaaaugaguuuc

SEQ ID NO: 31094 - RNA, 18 nt, Human
aacagcuuucucaaaugu

SEQ ID NO: 31095 - RNA, 24 nt, Human
ugucagaaaacaaaacaaaaaagu

SEQ ID NO: 31096 - RNA, 24 nt, Human
ugcaggagugaguaggccugcugu

SEQ ID NO: 31097 - RNA, 24 nt, Human
uucacaguguaaagcaggaaaugg

SEQ ID NO: 31098 - RNA, 23 nt, Human
uaaagagagugaggcgcaacaca

SEQ ID NO: 31099 - RNA, 24 nt, Human
ugcaggagugaguaggccugcugu

SEQ ID NO: 31100 - RNA, 24 nt, Human
uaaagagagugaggcacaacacaa

SEQ ID NO: 31101 - RNA, 24 nt, Human
uuuacaucccucauucacagugua

SEQ ID NO: 31102 - RNA, 24 nt, Human
uagagcuagugaauuagccuauuu

SEQ ID NO: 31103 - RNA, 24 nt, Human
uauguuauauuaaaaccuuguucc

SEQ ID NO: 31104 - RNA, 24 nt, Human
gucuccacaugagccagaaacaca

SEQ ID NO: 31105 - RNA, 24 nt, Human
cccugagugagcaccugguuacca

SEQ ID NO: 31106 - RNA, 24 nt, Human
ugcauuguuaucauuaaccagucu

SEQ ID NO: 31107 - RNA, 23 nt, Human
uggcacagauuucagcuccuacu

SEQ ID NO: 31108 - RNA, 24 nt, Human
ucuuugaccugagguauagaguug

SEQ ID NO: 31109 - RNA, 24 nt, Human
caaguccaaacuaaauauuuaaug

SEQ ID NO: 31110 - RNA, 24 nt, Human
ugaauagucaggucuugcaguaca

SEQ ID NO: 31111 - RNA, 24 nt, Human
uucacuuccuacuuaggcuaggcc

SEQ ID NO: 31112 - RNA, 24 nt, Human
ccuugaguuccuucauggcaauga

SEQ ID NO: 31113 - RNA, 19 nt, Human
uauaaagugagaaugaaaa

SEQ ID NO: 31114 - RNA, 24 nt, Human
ucugcaauuugguauaaauguuag

SEQ ID NO: 31115 - RNA, 24 nt, Human
cacacggcauguucucucuuugca

SEQ ID NO: 31116 - RNA, 24 nt, Human
aacuguaucccguugaugcacuaa

SEQ ID NO: 31117 - RNA, 24 nt, Human
aaagcagcaauucuauguucauag

SEQ ID NO: 31118 - RNA, 24 nt, Human
ggaggggaauuauuugaaucgugg

SEQ ID NO: 31119 - RNA, 24 nt, Human
aagguguaguacuuggcaggguuc

SEQ ID NO: 31120 - RNA, 24 nt, Human
caacgagcuaaagcucaaauugcu

SEQ ID NO: 31121 - RNA, 24 nt, Human
acugugcccuuccccuccugaaag

SEQ ID NO: 31122 - RNA, 24 nt, Human
ucaguuaagguuauuguugugggu

SEQ ID NO: 31123 - RNA, 24 nt, Human
agggauacacuuguccaggggcuu

SEQ ID NO: 31124 - RNA, 24 nt, Human
aagcaugggauggcaggagaaaga

SEQ ID NO: 31125 - RNA, 24 nt, Human
aggcauuugaagaugaaaugaaaa

SEQ ID NO: 31126 - RNA, 24 nt, Human
ucggggauucugcugggcaacugg

SEQ ID NO: 31127 - RNA, 24 nt, Human
accccuuaccaccaaaggaaguaa

SEQ ID NO: 31128 - RNA, 24 nt, Human
ugccucgggccccccucgcgcgcc

SEQ ID NO: 31129 - RNA, 24 nt, Human
uacaggaugugcccgagcucgugg

SEQ ID NO: 31130 - RNA, 24 nt, Human
uggcaccauggaugccuucgugaa

SEQ ID NO: 31131 - RNA, 24 nt, Human
uggcucaggguggcuggcgcucac

SEQ ID NO: 31132 - RNA, 24 nt, Human
uguccaagauuguccagaccuacc

SEQ ID NO: 31133 - RNA, 24 nt, Human
gcaaaugggaccacgugcggcagu

SEQ ID NO: 31134 - RNA, 24 nt, Human
ucaguugacuggcggcuauaaacc

SEQ ID NO: 31135 - RNA, 22 nt, Human
cugcccccucugcugaugcccc

SEQ ID NO: 31136 - RNA, 24 nt, Human
uauguugccaucaaugaccccuuc

SEQ ID NO: 31137 - RNA, 24 nt, Human
ugggauuacaggcgugagcaccau

SEQ ID NO: 31138 - RNA, 24 nt, Human
uauuagggauaauauucauuuagc

SEQ ID NO: 31139 - RNA, 24 nt, Human
uaaugggucucaaaauucugugac

SEQ ID NO: 31140 - RNA, 24 nt, Human
ugaaaugucuuuaaaggaugaauu

SEQ ID NO: 31141 - RNA, 24 nt, Human
uugcuggagggaaucaguagcacu

SEQ ID NO: 31142 - RNA, 24 nt, Human
cauggacccugacuggcucauugg

SEQ ID NO: 31143 - RNA, 24 nt, Human
ucugucccugccccuagucaccua

SEQ ID NO: 31144 - RNA, 24 nt, Human
ucccgagacaacgaucucucucuu

SEQ ID NO: 31145 - RNA, 24 nt, Human
cuccuuuuuaccauuuuacagucc

SEQ ID NO: 31146 - RNA, 24 nt, Human
gugggacgcggccugugcccugau

SEQ ID NO: 31147 - RNA, 24 nt, Human
ucucgaguagcugggauuacaggc

SEQ ID NO: 31148 - RNA, 24 nt, Human
ucacgcccggccccaucucuuuga

SEQ ID NO: 31149 - RNA, 24 nt, Human
uuaguaccuuaaaaaauacacccu

SEQ ID NO: 31150 - RNA, 24 nt, Human
uaaaugcauacaugauuuugguua

SEQ ID NO: 31151 - RNA, 24 nt, Human
cggcaagguuuuauguacauaugu

SEQ ID NO: 31152 - RNA, 24 nt, Human
uggcaagaaaagcuggcaacuucu

SEQ ID NO: 31153 - RNA, 24 nt, Human
ucaauggagugagcccaaagguuc

SEQ ID NO: 31154 - RNA, 24 nt, Human
uggucagacacauuuagggaugac

SEQ ID NO: 31155 - RNA, 24 nt, Human
cgagggccgccccuacugccgccg

SEQ ID NO: 31156 - RNA, 24 nt, Human
ucuuauugcuuauuuggucguaau

SEQ ID NO: 31157 - RNA, 24 nt, Human
ucggaacagucauuucaccuacua

SEQ ID NO: 31158 - RNA, 24 nt, Human
uuccuauguguuaauaugaagauc

SEQ ID NO: 31159 - RNA, 24 nt, Human
ugggauuucaccauguuggccagg

SEQ ID NO: 31160 - RNA, 24 nt, Human
ugugguauuugaaauuuaauaagu

SEQ ID NO: 31161 - RNA, 24 nt, Human
cccuggcugaaggccuuacucgag

SEQ ID NO: 31162 - RNA, 24 nt, Human
guacggaggccuggcugugcugcu

SEQ ID NO: 31163 - RNA, 24 nt, Human
uaggaaccgaugccagugggaggg

SEQ ID NO: 31164 - RNA, 24 nt, Human
ugguugcauuucauuuuuggagaa

SEQ ID NO: 31165 - RNA, 24 nt, Human
uuccaaguuucaaagaaaugucaa

SEQ ID NO: 31166 - RNA, 24 nt, Human
uaaguuaaugaauaguuuuuguuu

SEQ ID NO: 31167 - RNA, 24 nt, Human
uauugcaaauacuuaaaauucuua

SEQ ID NO: 31168 - RNA, 24 nt, Human
uaaaugguguugacaccaacuucu

SEQ ID NO: 31169 - RNA, 24 nt, Human
cuauauguguccuguggcauuccu

SEQ ID NO: 31170 - RNA, 24 nt, Human
uccuucaguucagauugcagaggu

SEQ ID NO: 31171 - RNA, 24 nt, Human
uaaguucaucaucaaaaggaaagu

SEQ ID NO: 31172 - RNA, 24 nt, Human
gcucugugcccugggugugcagug

SEQ ID NO: 31173 - RNA, 24 nt, Human
ucuggacaggacccacgaggagac

SEQ ID NO: 31174 - RNA, 24 nt, Human
uauaguguuaggucagacacggcu

SEQ ID NO: 31175 - RNA, 24 nt, Human
aggaagaguccuggggggaccgcg

SEQ ID NO: 31176 - RNA, 24 nt, Human
gaggcgccggccggcuggcgcagu

SEQ ID NO: 31177 - RNA, 24 nt, Human
uguguacuagaacgacugagcgug

SEQ ID NO: 31178 - RNA, 24 nt, Human
ugcuguguacuagaacgacugagc

SEQ ID NO: 31179 - RNA, 24 nt, Human
agagucccugcuguguacuagaac

SEQ ID NO: 31180 - RNA, 24 nt, Human
uaaaauccauuuauguugcuuuca

SEQ ID NO: 31181 - RNA, 24 nt, Human
uacacaguucauucuaccugugag

SEQ ID NO: 31182 - RNA, 24 nt, Human
uagaauuucuagggcugggaagca

SEQ ID NO: 31183 - RNA, 23 nt, Human
ugaguugaccaagagaaagagaa

SEQ ID NO: 31184 - RNA, 24 nt, Human
ucccucgguccggcggcggcggcg

SEQ ID NO: 31185 - RNA, 23 nt, Human
uuuuaagcacagaccuggggaga

SEQ ID NO: 31186 - RNA, 24 nt, Human
cgugcagaagugagccaucaucgc

SEQ ID NO: 31187 - RNA, 24 nt, Human
uguugcuauggggcaaaagagauc

SEQ ID NO: 31188 - RNA, 24 nt, Human
uugaucuugaagaaacugggcgug

SEQ ID NO: 31189 - RNA, 24 nt, Human
aggaaggagauauagugaagagga

SEQ ID NO: 31190 - RNA, 24 nt, Human
guagaguuuucuucaggcuuaaag

SEQ ID NO: 31191 - RNA, 24 nt, Human
agagaggaugagaggcaggagagc

SEQ ID NO: 31192 - RNA, 24 nt, Human
ugccaaggcaaccagcuuccagag

SEQ ID NO: 31193 - RNA, 24 nt, Human
uauggcaagucacuuugacagaca

SEQ ID NO: 31194 - RNA, 24 nt, Human
ugagaauggcaaaauuagucgccu

SEQ ID NO: 31195 - RNA, 24 nt, Human
uacaccacucccaagaagaauaag

SEQ ID NO: 31196 - RNA, 24 nt, Human
uuggacaacccugcucgaaucccu

SEQ ID NO: 31197 - RNA, 24 nt, Human
uuuuucuuagugccucugugcauu

SEQ ID NO: 31198 - RNA, 24 nt, Human
cccugcgccaguucuucgaccggg

SEQ ID NO: 31199 - RNA, 24 nt, Human
acccgguggucagcgccaagagca

SEQ ID NO: 31200 - RNA, 21 nt, Human
gacaucuucaggcuugcuuca

SEQ ID NO: 31201 - RNA, 24 nt, Human
guuauguauuagaggcagaaggcc

SEQ ID NO: 31202 - RNA, 24 nt, Human
accugguucgugaacagcucgggu

SEQ ID NO: 31203 - RNA, 24 nt, Human
ugaagugcaguggugggcacgauc

SEQ ID NO: 31204 - RNA, 24 nt, Human
uugaucuugaagaaacugggcgug

SEQ ID NO: 31205 - RNA, 23 nt, Human
uccgugcgcguugcugcggccgu

SEQ ID NO: 31206 - RNA, 24 nt, Human
aggaaggagauauagugaagagga

SEQ ID NO: 31207 - RNA, 24 nt, Human
guagaguuuucuucaggcuuaaag

SEQ ID NO: 31208 - RNA, 24 nt, Human
aaggacacaugguccuugguuucu

SEQ ID NO: 31209 - RNA, 19 nt, Human
ugaaacagcacaucuccag

SEQ ID NO: 31210 - RNA, 20 nt, Human
uaacaaagguacuaagcaca

SEQ ID NO: 31211 - RNA, 22 nt, Human
ugccugagccugcugcuagccc

SEQ ID NO: 31212 - RNA, 24 nt, Human
uggcugaauugaucccuagggcac

SEQ ID NO: 31213 - RNA, 24 nt, Human
aacuuuuuggucacacucucaaca

SEQ ID NO: 31214 - RNA, 24 nt, Human
uguucagaaauugaggcuaacauu

SEQ ID NO: 31215 - RNA, 24 nt, Human
aggaagcggcuguaugugcugaca

SEQ ID NO: 31216 - RNA, 24 nt, Human
cuggaacugagggacaaagguuuu

SEQ ID NO: 31217 - RNA, 24 nt, Human
uguagauagucuacauuaugauau

SEQ ID NO: 31218 - RNA, 24 nt, Human
uucaacauauguaacguuauucuc

SEQ ID NO: 31219 - RNA, 24 nt, Human
ugcauuguuaucauuaaccagucu

SEQ ID NO: 31220 - RNA, 24 nt, Human
uauuagggauaauauucauuuagc

SEQ ID NO: 31221 - RNA, 24 nt, Human
uuuaacuuuuuuaaugggucucaa

SEQ ID NO: 31222 - RNA, 24 nt, Human
uugaagcuuuuacagcuggagacu

SEQ ID NO: 31223 - RNA, 24 nt, Human
uucauuggcaguauuuugugauga

SEQ ID NO: 31224 - RNA, 22 nt, Human
ucagaacauucugaacugcuga

SEQ ID NO: 31225 - RNA, 24 nt, Human
ugaaugacaacuuuauuuuucuua

SEQ ID NO: 31226 - RNA, 24 nt, Human
ccgggucgacccacgcguccgguu

SEQ ID NO: 31227 - RNA, 24 nt, Human
ggagcucaggguggccggcauuca

SEQ ID NO: 31228 - RNA, 24 nt, Human
uagcuccacuccggggaacggacu

SEQ ID NO: 31229 - RNA, 24 nt, Human
ggggagaagagcggagcgugugag

SEQ ID NO: 31230 - RNA, 24 nt, Human
uaucuggaucgaugguacuggaga

SEQ ID NO: 31231 - RNA, 24 nt, Human
uaguaagaacagaaagguuaucuu

SEQ ID NO: 31232 - RNA, 19 nt, Human
ugucaaggcccggucugug

SEQ ID NO: 31233 - RNA, 24 nt, Human
ucuaaagccugauuuaguauuguc

SEQ ID NO: 31234 - RNA, 24 nt, Human
uucaaauuucuuucuuuuuuaauu

SEQ ID NO: 31235 - RNA, 24 nt, Human
ucaauuuuuauuuugguuuucuua

SEQ ID NO: 31236 - RNA, 21 nt, Human
ugggaggggcugaauguggug

SEQ ID NO: 31237 - RNA, 24 nt, Human
gaagauagagaacagauuagaaau

SEQ ID NO: 31238 - RNA, 24 nt, Human
uguuuguuuaaaaaauaagaaacc

SEQ ID NO: 31239 - RNA, 24 nt, Human
uacauuugguggaguuugagacca

SEQ ID NO: 31240 - RNA, 24 nt, Human
aguuguuguuuuuccugucuaaug

SEQ ID NO: 31241 - RNA, 24 nt, Human
ugauagaguuggcuuucugagucc

SEQ ID NO: 31242 - RNA, 20 nt, Human
ccgcccagcgagugcgugag

SEQ ID NO: 31243 - RNA, 24 nt, Human
ugagguccccguaggugggcguug

SEQ ID NO: 31244 - RNA, 23 nt, Human
uggugcuauaccuucacagcagc

SEQ ID NO: 31245 - RNA, 22 nt, Human
ugccuugggucccuucaguagc

SEQ ID NO: 31246 - RNA, 24 nt, Human
ugucaggaaggggaagcggguuuc

SEQ ID NO: 31247 - RNA, 24 nt, Human
uuccuuaaccuccucaugccgccu

SEQ ID NO: 31248 - RNA, 24 nt, Human
ugaggaaaaacgcuugaagggcaa

SEQ ID NO: 31249 - RNA, 24 nt, Human
ucagagucagaacaggauuaaaga

SEQ ID NO: 31250 - RNA, 24 nt, Human
ucgaaacaccuguguuaggaccca

SEQ ID NO: 31251 - RNA, 24 nt, Human
uacguguucccgccauagccccuu

SEQ ID NO: 31252 - RNA, 19 nt, Human
ucuguacgugguugagaag

SEQ ID NO: 31253 - RNA, 24 nt, Human
acgccggaccgcguaagagacgau

SEQ ID NO: 31254 - RNA, 24 nt, Human
uugaaguauucaagucaaacaacg

SEQ ID NO: 31255 - RNA, 22 nt, Human
cggugugacuuccaggggagga

SEQ ID NO: 31256 - RNA, 24 nt, Human
agucaugguuuguuuuugcuucug

SEQ ID NO: 31257 - RNA, 24 nt, Human
agccugugguccucagggauggga

SEQ ID NO: 31258 - RNA, 24 nt, Human
aaaccagcggucucaauggacaga

SEQ ID NO: 31259 - RNA, 24 nt, Human
ggggaggaucagccucggcauuau

SEQ ID NO: 31260 - RNA, 24 nt, Human
uaucuuaccuugcuagauuuagac

SEQ ID NO: 31261 - RNA, 24 nt, Human
auguugcuaaauaacuguuucuag

SEQ ID NO: 31262 - RNA, 24 nt, Human
uagagcucgaaugggcauugggcu

SEQ ID NO: 31263 - RNA, 24 nt, Human
gugaaguaccuuuuggcuaaagac

SEQ ID NO: 31264 - RNA, 19 nt, Human
ucugaccggcuucaagcuc

SEQ ID NO: 31265 - RNA, 24 nt, Human
cacccuugguucucucaguuucac

SEQ ID NO: 31266 - RNA, 24 nt, Human
auugcaauuaaacauggacagaaa

SEQ ID NO: 31267 - RNA, 24 nt, Human
ugggaaaaagcuaucugggugcaa

SEQ ID NO: 31268 - RNA, 18 nt, Human
uuugaugguggugucuag

SEQ ID NO: 31269 - RNA, 24 nt, Human
ugaagucuugcucuuucacccaug

SEQ ID NO: 31270 - RNA, 20 nt, Human
ugagagaacacuccacgaug

SEQ ID NO: 31271 - RNA, 24 nt, Human
aaagcaaaugaggcagaaaggucc

SEQ ID NO: 31272 - RNA, 24 nt, Human
uggaaucuuggguuuuguuuuugu

SEQ ID NO: 31273 - RNA, 24 nt, Human
ucccucagugauccuuuuacucuc

SEQ ID NO: 31274 - RNA, 24 nt, Human
uuccccccuucuaaaagggaaagc

SEQ ID NO: 31275 - RNA, 24 nt, Human
uaacuuuagcuccaggguaaaauc

SEQ ID NO: 31276 - RNA, 24 nt, Human
augccuuuccagauuuucuucugg

SEQ ID NO: 31277 - RNA, 17 nt, Human
cauggcccaguggaggc

SEQ ID NO: 31278 - RNA, 24 nt, Human
aaggauucugcuuguagauugcuu

SEQ ID NO: 31279 - RNA, 20 nt, Human
ucagaaaguaaaggugacug

SEQ ID NO: 31280 - RNA, 24 nt, Human
cguggcuaccgggcgcggcgcccc

SEQ ID NO: 31281 - RNA, 24 nt, Human
ucugaucuauaaaugcgguggcau

SEQ ID NO: 31282 - RNA, 24 nt, Human
acuaccauccuggcuggacugucc

SEQ ID NO: 31283 - RNA, 23 nt, Human
uuggacugcuuaaguuggcuaau

SEQ ID NO: 31284 - RNA, 24 nt, Human
agcgagaggacgcgucacucugcc

SEQ ID NO: 31285 - RNA, 24 nt, Human
ugacacggccacccuacugccugg

SEQ ID NO: 31286 - RNA, 24 nt, Human
aguuggguuuaacagaugacuuug

SEQ ID NO: 31287 - RNA, 22 nt, Human
uagcauugaaggacucgugagg

SEQ ID NO: 31288 - RNA, 24 nt, Human
uagcauugaaggacucggggauau

SEQ ID NO: 31289 - RNA, 24 nt, Human
caagggacuucugcaauccaugga

SEQ ID NO: 31290 - RNA, 24 nt, Human
cgccuggacgccuaccccagugga

SEQ ID NO: 31291 - RNA, 24 nt, Human
uuuuauggguuuuaaguggggaag

SEQ ID NO: 31292 - RNA, 24 nt, Human
ucacaccacgugcacuucagccug

SEQ ID NO: 31293 - RNA, 24 nt, Human
gagccgagcgaagcgaugccuaaa

SEQ ID NO: 31294 - RNA, 24 nt, Human
uccauuagcuuugcaggauggaca

SEQ ID NO: 31295 - RNA, 24 nt, Human
uggacggaacagauccggggacuc

SEQ ID NO: 31296 - RNA, 21 nt, Human
uaagagccuucugagcccagc

SEQ ID NO: 31297 - RNA, 24 nt, Human
ucacuccauagccagauucaauuu

SEQ ID NO: 31298 - RNA, 24 nt, Human
ugacgaggcauuuggcuaccuuaa

SEQ ID NO: 31299 - RNA, 24 nt, Human
uuggcugcguacuccacuggucug

SEQ ID NO: 31300 - RNA, 24 nt, Human
ugcacuguugcugacuacuacucu

SEQ ID NO: 31301 - RNA, 24 nt, Human
uacccgugccggcaggaauacacc

SEQ ID NO: 31302 - RNA, 24 nt, Human
aggcauccaugggcacccugguga

SEQ ID NO: 31303 - RNA, 24 nt, Human
uugaucagaugggaagaugguuug

SEQ ID NO: 31304 - RNA, 24 nt, Human
ugcuuggugaccgaauuacuagug

SEQ ID NO: 31305 - RNA, 24 nt, Human
gagauucuucaagcaaucacuaug

SEQ ID NO: 31306 - RNA, 24 nt, Human
ucucugcaaaaugucauagcuuau

SEQ ID NO: 31307 - RNA, 24 nt, Human
uuuauguugcaugucaguuuccua

SEQ ID NO: 31308 - RNA, 24 nt, Human
ucgccgagggggcugagauaguga

SEQ ID NO: 31309 - RNA, 24 nt, Human
cgacgugugacuuuuucccccggg

SEQ ID NO: 31310 - RNA, 24 nt, Human
uccugcugcuuucauugacaguau

SEQ ID NO: 31311 - RNA, 24 nt, Human
ugaagagccgaauagcaagcuguu

SEQ ID NO: 31312 - RNA, 24 nt, Human
accggguggucgggcugugauaga

SEQ ID NO: 31313 - RNA, 24 nt, Human
uguucaaacgccggcggguguuga

SEQ ID NO: 31314 - RNA, 24 nt, Human
gccagagugagaguuuccacacuc

SEQ ID NO: 31315 - RNA, 24 nt, Human
uuaguuauauaagugaaauuucua

SEQ ID NO: 31316 - RNA, 24 nt, Human
ggugaugguugucauguguggguc

SEQ ID NO: 31317 - RNA, 24 nt, Human
gacccaggcaccaugcacaggcau

SEQ ID NO: 31318 - RNA, 24 nt, Human
ucuagauuuggccauuugaugaug

SEQ ID NO: 31319 - RNA, 24 nt, Human
aauuucgugaagaaccagguugcu

SEQ ID NO: 31320 - RNA, 24 nt, Human
cgaguugugugaugcuacauauga

SEQ ID NO: 31321 - RNA, 24 nt, Human
uaggaaauucuguugcgugcuaac

SEQ ID NO: 31322 - RNA, 24 nt, Human
ugcauuguuaucauuaaccagucu

SEQ ID NO: 31323 - RNA, 24 nt, Human
uaaugggucucaaaauucugugac

SEQ ID NO: 31324 - RNA, 24 nt, Human
uauuagggauaauauucauuuagc

SEQ ID NO: 31325 - RNA, 24 nt, Human
uuacuggggagugcugaaggcucc

SEQ ID NO: 31326 - RNA, 24 nt, Human
uuaaugcuaguccucaggauuuaa

SEQ ID NO: 31327 - RNA, 23 nt, Human
ugugcagaagaaauggaaggauu

SEQ ID NO: 31328 - RNA, 18 nt, Human
uaucaaggaagggcaggc

SEQ ID NO: 31329 - RNA, 24 nt, Human
uucaaauuucuuucuuuuuuuaau

SEQ ID NO: 31330 - RNA, 24 nt, Human
ugcauuguuaucauuaaccagucu

SEQ ID NO: 31331 - RNA, 24 nt, Human
uaaugggucucaaaauucugugac

SEQ ID NO: 31332 - RNA, 24 nt, Human
uggcagguauuagggauaauauuc

SEQ ID NO: 31333 - RNA, 24 nt, Human
ugcauuguuaucauuaaccagucu

SEQ ID NO: 31334 - RNA, 24 nt, Human
uaaugggucucaaaauucugugac

SEQ ID NO: 31335 - RNA, 24 nt, Human
uauuagggauaauauucauuuagc

SEQ ID NO: 31336 - RNA, 22 nt, Human
gagcugguucuucaccuguggc

SEQ ID NO: 31337 - RNA, 24 nt, Human
uggaagcccgagaagucuguccca

SEQ ID NO: 31338 - RNA, 24 nt, Human
gacccuguuccugcaccaguuggu

SEQ ID NO: 31339 - RNA, 24 nt, Human
cucgugugucuacgucuauuccua

SEQ ID NO: 31340 - RNA, 24 nt, Human
ugucuagugaugaguuugcuaaua

SEQ ID NO: 31341 - RNA, 24 nt, Human
ccuaccaccaacucguccaacuga

SEQ ID NO: 31342 - RNA, 24 nt, Human
ugugcagaagaaauggaaggauuc

SEQ ID NO: 31343 - RNA, 24 nt, Human
uucaaauuucuuucuuuuuuaauu

SEQ ID NO: 31344 - RNA, 24 nt, Human
ucaauuuuuauuuugguuuucuua

SEQ ID NO: 31345 - RNA, 24 nt, Human
caucagacagguccgucaaaaucu

SEQ ID NO: 31346 - RNA, 24 nt, Human
ucccugcugacuuacaccggggaa

SEQ ID NO: 31347 - RNA, 21 nt, Human
aucacaguuacuuucucagca

SEQ ID NO: 31348 - RNA, 24 nt, Human
caccugcaaaacaaaacaccagca

SEQ ID NO: 31349 - RNA, 17 nt, Human
uuaccuggguuccuggc

SEQ ID NO: 31350 - RNA, 24 nt, Human
uacaaugaauauuaauacauauug

SEQ ID NO: 31351 - RNA, 21 nt, Human
uaaauuuuaacuauuguacag

SEQ ID NO: 31352 - RNA, 24 nt, Human
ugcaauguauuuuccugcuuuuca

SEQ ID NO: 31353 - RNA, 24 nt, Human
uaggguggugggaacaggcccuac

SEQ ID NO: 31354 - RNA, 24 nt, Human
ucacugcagccuugaacuccuggg

SEQ ID NO: 31355 - RNA, 20 nt, Human
cugguaccaccacacccaca

SEQ ID NO: 31356 - RNA, 24 nt, Human
uuggcgccgagagccccugcacuc

SEQ ID NO: 31357 - RNA, 24 nt, Human
uaccgcgugcucaaugggcucugc

SEQ ID NO: 31358 - RNA, 24 nt, Human
ccugcaugcucugggccagggcca

SEQ ID NO: 31359 - RNA, 24 nt, Human
uaacaggcuuaauaaauucuuuaa

SEQ ID NO: 31360 - RNA, 24 nt, Human
uagcagauugguauaaggauugua

SEQ ID NO: 31361 - RNA, 24 nt, Human
ugaaauguacacuugaauaguuug

SEQ ID NO: 31362 - RNA, 24 nt, Human
ggagcaagagcaagaucaccguga

SEQ ID NO: 31363 - RNA, 24 nt, Human
uggaaaauuucguaugaguucuga

SEQ ID NO: 31364 - RNA, 21 nt, Human
ugcacugggggucccaggugu

SEQ ID NO: 31365 - RNA, 19 nt, Human
ucagugucaggauccaggu

SEQ ID NO: 31366 - RNA, 24 nt, Human
cagaaggaaauagauuaaggaaau

SEQ ID NO: 31367 - RNA, 24 nt, Human
uggacucugcucagcuguguccgu

SEQ ID NO: 31368 - RNA, 21 nt, Human
uacuaugccauguaaauagac

SEQ ID NO: 31369 - RNA, 24 nt, Human
acugaaagggaaaacccacaaucu

SEQ ID NO: 31370 - RNA, 24 nt, Human
ugccaagaaagacugagccccucc

SEQ ID NO: 31371 - RNA, 24 nt, Human
ggacagguguacagacauguucuu

SEQ ID NO: 31372 - RNA, 24 nt, Human
ccagaccgauguucuuguaguacc

SEQ ID NO: 31373 - RNA, 24 nt, Human
ucgaauggacacauuaccagugaa

SEQ ID NO: 31374 - RNA, 24 nt, Human
uaacaaaaggaaaaugugacuuaa

SEQ ID NO: 31375 - RNA, 24 nt, Human
uggguaacauaugcaccaaaaaga

SEQ ID NO: 31376 - RNA, 24 nt, Human
uucauauagucuuguauuauauac

SEQ ID NO: 31377 - RNA, 24 nt, Human
uccuugagccauuucucuguguaa

SEQ ID NO: 31378 - RNA, 24 nt, Human
ucuguuuuguuucuguuuucugug

SEQ ID NO: 31379 - RNA, 24 nt, Human
uaaaaguaagcauguagaaggagg

SEQ ID NO: 31380 - RNA, 24 nt, Human
acuggcugaaggaaaauuuguauu

SEQ ID NO: 31381 - RNA, 24 nt, Human
uuggagagccagcaaaccaagaag

SEQ ID NO: 31382 - RNA, 24 nt, Human
uuaguuuugcaaacggcaugauuc

SEQ ID NO: 31383 - RNA, 24 nt, Human
uuugcagaacuucuuuguccuugg

SEQ ID NO: 31384 - RNA, 24 nt, Human
ugagaaacagucaucucaauaaau

SEQ ID NO: 31385 - RNA, 24 nt, Human
uagcuucccuuugaggguguguga

SEQ ID NO: 31386 - RNA, 24 nt, Human
uccccugcaccuacagagcccuag

SEQ ID NO: 31387 - RNA, 22 nt, Human
ugggacaagacucuaugaaagc

SEQ ID NO: 31388 - RNA, 24 nt, Human
aggaaaauuuguauuauuucaauu

SEQ ID NO: 31389 - RNA, 22 nt, Human
uacgacacagggcagggcaaga

SEQ ID NO: 31390 - RNA, 24 nt, Human
gaaguucaguuguggagaauggga

SEQ ID NO: 31391 - RNA, 24 nt, Human
ugccccagaccaaaacagcucgca

SEQ ID NO: 31392 - RNA, 24 nt, Human
ggagcugguuguacuuggcaagcg

SEQ ID NO: 31393 - RNA, 24 nt, Human
uccaauguccuuugucuuaagauu

SEQ ID NO: 31394 - RNA, 24 nt, Human
uaacagaaugaaguuaauuuuuau

SEQ ID NO: 31395 - RNA, 24 nt, Human
uugguuuuugcaauaaugcuagca

SEQ ID NO: 31396 - RNA, 24 nt, Human
uuuguugucguucccccugcuuaa

SEQ ID NO: 31397 - RNA, 24 nt, Human
cuuaucuucuucaugcugggucug

SEQ ID NO: 31398 - RNA, 24 nt, Human
uauuucacaaaccgccuggacaug

SEQ ID NO: 31399 - RNA, 24 nt, Human
agcgcuggagacguugcugcaugu

SEQ ID NO: 31400 - RNA, 24 nt, Human
uaccggcugcaggagcaugugcgu

SEQ ID NO: 31401 - RNA, 24 nt, Human
cagcagcgucuacuuccgcagcgu

SEQ ID NO: 31402 - RNA, 24 nt, Human
cuuugaguuucacaaacuccucuu

SEQ ID NO: 31403 - RNA, 24 nt, Human
uaaggagcaaauggaauaggggau

SEQ ID NO: 31404 - RNA, 24 nt, Human
uugaugcucgaugaaugcugggaa

SEQ ID NO: 31405 - RNA, 24 nt, Human
uuccaaggcccccagugaacuccu

SEQ ID NO: 31406 - RNA, 24 nt, Human
aggggcuaacaauggacacccaga

SEQ ID NO: 31407 - RNA, 24 nt, Human
uggguagacgccacccgccccguc

SEQ ID NO: 31408 - RNA, 24 nt, Human
uccauaaauaccauaguuaaaugu

SEQ ID NO: 31409 - RNA, 24 nt, Human
ugugaagcuacagacuccauuaua

SEQ ID NO: 31410 - RNA, 22 nt, Human
uaguuccaugaaacaagcuaaa

SEQ ID NO: 31411 - RNA, 24 nt, Human
ccuuuaguguaguguaugguuaau

SEQ ID NO: 31412 - RNA, 24 nt, Human
uugggugguugguguaaaugagug

SEQ ID NO: 31413 - RNA, 24 nt, Human
ugaguagguggccugcaguaaugu

SEQ ID NO: 31414 - RNA, 24 nt, Human
uagaagcauuugcgguggacaaug

SEQ ID NO: 31415 - RNA, 24 nt, Human
ucagagcuuuggcuaggaaugauu

SEQ ID NO: 31416 - RNA, 24 nt, Human
aagcagccgugcugccaggucacc

SEQ ID NO: 31417 - RNA, 24 nt, Human
ucaccacugccuuuucuuccucug

SEQ ID NO: 31418 - RNA, 20 nt, Human
uguccagaauuuccagaagu

SEQ ID NO: 31419 - RNA, 24 nt, Human
uguggcccuucucuuuaaguccga

SEQ ID NO: 31420 - RNA, 23 nt, Human
ugaauugugucaaaaaaaaaaac

SEQ ID NO: 31421 - RNA, 24 nt, Human
uuaguauuuugcuucaugucuuca

SEQ ID NO: 31422 - RNA, 24 nt, Human
uuaguaauaaccagaauaauucau

SEQ ID NO: 31423 - RNA, 24 nt, Human
uaaguaacuuuuuauagcaagaug

SEQ ID NO: 31424 - RNA, 21 nt, Human
caccacgccuucaccugcagu

SEQ ID NO: 31425 - RNA, 24 nt, Human
ucccggcaugcagugcuuugcgcc

SEQ ID NO: 31426 - RNA, 24 nt, Human
cuguccggucgcgcuucacuucug

SEQ ID NO: 31427 - RNA, 24 nt, Human
ggccuggaggagggggucgcgcga

SEQ ID NO: 31428 - RNA, 24 nt, Human
aaauggaaucuagaagcuaaauuu

SEQ ID NO: 31429 - RNA, 24 nt, Human
ugaagcaagcuccggagacuucuu

SEQ ID NO: 31430 - RNA, 24 nt, Human
ucagguccuccucccccuccacca

SEQ ID NO: 31431 - RNA, 24 nt, Human
uccaccacuacuggccaucugauc

SEQ ID NO: 31432 - RNA, 24 nt, Human
ccauccguggggccaucauccugg

SEQ ID NO: 31433 - RNA, 24 nt, Human
aguggcauccggggccggggucgc

SEQ ID NO: 31434 - RNA, 24 nt, Human
uuacugcuggucauggucaaaaag

SEQ ID NO: 31435 - RNA, 24 nt, Human
uaaggcagguuuuauagaaccauu

SEQ ID NO: 31436 - RNA, 24 nt, Human
uuagaacaucuaagcacgucaccu

SEQ ID NO: 31437 - RNA, 24 nt, Human
uccaccacuacuggccaucugauc

SEQ ID NO: 31438 - RNA, 21 nt, Human
uucaagggauggaaagucacc

SEQ ID NO: 31439 - RNA, 24 nt, Human
ucugaucuauaaaugcgguggcau

SEQ ID NO: 31440 - RNA, 24 nt, Human
uugcuggggacgacgcuccccgag

SEQ ID NO: 31441 - RNA, 24 nt, Human
acucuguucuuccgccgcuccgcc

SEQ ID NO: 31442 - RNA, 24 nt, Human
gcuacagcuucaccaccacggccg

SEQ ID NO: 31443 - RNA, 22 nt, Human
ucgggggcccgcaggggaugcc

SEQ ID NO: 31444 - RNA, 24 nt, Human
agggagcaggucacaggucaccau

SEQ ID NO: 31445 - RNA, 21 nt, Human
uucaagggauggaaagucacc

SEQ ID NO: 31446 - RNA, 24 nt, Human
uggaaucuugcgggauccaaggag

SEQ ID NO: 31447 - RNA, 21 nt, Human
ucuuagguuuccuguaccgcu

SEQ ID NO: 31448 - RNA, 21 nt, Human
uucaagggauggaaagucacc

SEQ ID NO: 31449 - RNA, 24 nt, Human
ucagguggaccaucuucuagggcc

SEQ ID NO: 31450 - RNA, 24 nt, Human
uggaaugccugagaggccaguggg

SEQ ID NO: 31451 - RNA, 24 nt, Human
cggcaucgggggcggcaucggggg

SEQ ID NO: 31452 - RNA, 24 nt, Human
ugaccaugcagaaccucaacgacc

SEQ ID NO: 31453 - RNA, 24 nt, Human
uacacuguggccucaaccucccag

SEQ ID NO: 31454 - RNA, 24 nt, Human
ucccucuugcuuuauagcuagcug

SEQ ID NO: 31455 - RNA, 24 nt, Human
uaaagcaaguugucugacuuaauu

SEQ ID NO: 31456 - RNA, 24 nt, Human
uuucuaguuuuguauuuuaaaaag

SEQ ID NO: 31457 - RNA, 24 nt, Human
acgagaagaauggccccccuccuc

SEQ ID NO: 31458 - RNA, 22 nt, Human
ugccucagagaacuucugcagc

SEQ ID NO: 31459 - RNA, 24 nt, Human
uagcauugaaggacucggggauau

SEQ ID NO: 31460 - RNA, 22 nt, Human
augguccgaucguagucgccgu

SEQ ID NO: 31461 - RNA, 24 nt, Human
uuuuggguuuaccaccucauagau

SEQ ID NO: 31462 - RNA, 24 nt, Human
aguggauccggcgcaccauccccu

SEQ ID NO: 31463 - RNA, 24 nt, Human
ggaguagggagguuuggggaggga

SEQ ID NO: 31464 - RNA, 24 nt, Human
cugcagugggacuccaccggaucc

SEQ ID NO: 31465 - RNA, 24 nt, Human
acuguucucugcagugaaucugag

SEQ ID NO: 31466 - RNA, 20 nt, Human
ugagaaagaagggauguugc

SEQ ID NO: 31467 - RNA, 24 nt, Human
uggaagcuaagaaucuccuggggu

SEQ ID NO: 31468 - RNA, 20 nt, Human
ucaaaggugugagagggaaa

SEQ ID NO: 31469 - RNA, 24 nt, Human
uggaaggauuucgcugcuucccga

SEQ ID NO: 31470 - RNA, 21 nt, Human
cggcuugguggagguggccag

SEQ ID NO: 31471 - RNA, 24 nt, Human
ugacaucgcccugcaaauccacuu

SEQ ID NO: 31472 - RNA, 24 nt, Human
gggcaugcagcgccuggcgcagcu

SEQ ID NO: 31473 - RNA, 24 nt, Human
agucaugguccccaucaugcagga

SEQ ID NO: 31474 - RNA, 24 nt, Human
ucagagccuuguagacagcagcca

SEQ ID NO: 31475 - RNA, 24 nt, Human
uaggugucccuuuugguaaaaaau

SEQ ID NO: 31476 - RNA, 24 nt, Human
ugaguagguggcccgcaguaaugu

SEQ ID NO: 31477 - RNA, 24 nt, Human
uguaacaaaaaggaguuaucgcau

SEQ ID NO: 31478 - RNA, 24 nt, Human
ucugaaauauuuacuuuacauuaa

SEQ ID NO: 31479 - RNA, 24 nt, Human
uuaauucuuaucuaccuucuacau

SEQ ID NO: 31480 - RNA, 24 nt, Human
aaguguacuuaaaacauaguaguu

SEQ ID NO: 31481 - RNA, 24 nt, Human
ugaacagaguucaaauacaggacu

SEQ ID NO: 31482 - RNA, 24 nt, Human
aaagcuaugaaacuguauagggcu

SEQ ID NO: 31483 - RNA, 24 nt, Human
ugugcaagagugaaccgggaggga

SEQ ID NO: 31484 - RNA, 24 nt, Human
ggggaagaaaugauaagggggggu

SEQ ID NO: 31485 - RNA, 24 nt, Human
uauuaccaaaaaaggcauauacuu

SEQ ID NO: 31486 - RNA, 24 nt, Human
acuacuguguuauccgggauauca

SEQ ID NO: 31487 - RNA, 20 nt, Human
uaaguccagugcucgcugcc

SEQ ID NO: 31488 - RNA, 24 nt, Human
agagccaucugguccucagacaug

SEQ ID NO: 31489 - RNA, 24 nt, Human
cagcaccaccaccaucaaggucau

SEQ ID NO: 31490 - RNA, 24 nt, Human
uguggucggguguuugcuggugcc

SEQ ID NO: 31491 - RNA, 24 nt, Human
ugaguugagcugauugaugcccuc

SEQ ID NO: 31492 - RNA, 24 nt, Human
aaaggaaacauaaagugcuucuag

SEQ ID NO: 31493 - RNA, 24 nt, Human
uggcauggacuguggucaugaguc

SEQ ID NO: 31494 - RNA, 17 nt, Human
cagcguagggcuggggu

SEQ ID NO: 31495 - RNA, 24 nt, Human
uauaaaguuguucacacguagguc

SEQ ID NO: 31496 - RNA, 24 nt, Human
uguagaugcuaacacuggccaauu

SEQ ID NO: 31497 - RNA, 24 nt, Human
uuaaaggugaaauuugggugggaa

SEQ ID NO: 31498 - RNA, 24 nt, Human
aaccuguagagagaccuuaaggau

SEQ ID NO: 31499 - RNA, 24 nt, Human
uagguuauucagcccaggauacug

SEQ ID NO: 31500 - RNA, 24 nt, Human
ugacaguaaauccuggcaccaaag

SEQ ID NO: 31501 - RNA, 24 nt, Human
agcguuuaacccgugugggcuuug

SEQ ID NO: 31502 - RNA, 24 nt, Human
uuccuccccuuguaggaccaaccg

SEQ ID NO: 31503 - RNA, 24 nt, Human
uucagcaaccaggagaccugugug

SEQ ID NO: 31504 - RNA, 24 nt, Human
ugaguggaggaacugcacuauggu

SEQ ID NO: 31505 - RNA, 24 nt, Human
ggagacugucuccucaaguucucg

SEQ ID NO: 31506 - RNA, 24 nt, Human
ucucuugggaccaccuguuggggc

SEQ ID NO: 31507 - RNA, 24 nt, Human
ugggaaaucuacuccuuugggcga

SEQ ID NO: 31508 - RNA, 24 nt, Human
cauuggccaucuccugacugcccu

SEQ ID NO: 31509 - RNA, 24 nt, Human
uaaugagcuccuaugaaagaaugc

SEQ ID NO: 31510 - RNA, 22 nt, Human
uggaaugugucuggcacagaaa

SEQ ID NO: 31511 - RNA, 24 nt, Human
auggcggagcugugcccagggcug

SEQ ID NO: 31512 - RNA, 24 nt, Human
acccuguggaucugggaguguggc

SEQ ID NO: 31513 - RNA, 24 nt, Human
ugccagggccugaaggacuccccc

SEQ ID NO: 31514 - RNA, 20 nt, Human
ugacagcaagaggaaccacu

SEQ ID NO: 31515 - RNA, 24 nt, Human
cguccguggccaucugaucuauaa

SEQ ID NO: 31516 - RNA, 24 nt, Human
aagcauuucagacaggcauuccuu

SEQ ID NO: 31517 - RNA, 24 nt, Human
uuuaaaauauacaugauagacaca

SEQ ID NO: 31518 - RNA, 24 nt, Human
ucuacagacaccacauggcuugca

SEQ ID NO: 31519 - RNA, 24 nt, Human
uaugcaaggucaagagcggagggg

SEQ ID NO: 31520 - RNA, 24 nt, Human
ucuagcaccuguccgguuccccac

SEQ ID NO: 31521 - RNA, 24 nt, Human
ugaggcaggcuguucugagguccc

SEQ ID NO: 31522 - RNA, 24 nt, Human
acagcacagacauaacugaagaaa

SEQ ID NO: 31523 - RNA, 24 nt, Human
uguauuguacuuuuaaucacuuac

SEQ ID NO: 31524 - RNA, 24 nt, Human
ugggcagugccacccgcagaugac

SEQ ID NO: 31525 - RNA, 24 nt, Human
cacaggguaccagcgacuaguaug

SEQ ID NO: 31526 - RNA, 24 nt, Human
ugggaagcaguaugcaagauaugg

SEQ ID NO: 31527 - RNA, 24 nt, Human
ccugcagugcacgguuucuuccag

SEQ ID NO: 31528 - RNA, 24 nt, Human
aggcggccaaaacagccgcgggcg

SEQ ID NO: 31529 - RNA, 24 nt, Human
cgggcacagccagccgcggggcgu

SEQ ID NO: 31530 - RNA, 22 nt, Human
uugguggugcuggagucggcaa

SEQ ID NO: 31531 - RNA, 17 nt, Human
cggcaaguacgugcccc

SEQ ID NO: 31532 - RNA, 24 nt, Human
gugcugccgacgugauucccuggg

SEQ ID NO: 31533 - RNA, 24 nt, Human
uccccuuuuguuauguaaaaaugu

SEQ ID NO: 31534 - RNA, 24 nt, Human
cacuccggacgugauuaaccagcc

SEQ ID NO: 31535 - RNA, 24 nt, Human
cgggggaagcaacaaagcaugggc

SEQ ID NO: 31536 - RNA, 24 nt, Human
uuccagugggggacugguuuggca

SEQ ID NO: 31537 - RNA, 24 nt, Human
ucugaucuauaaaugcgguggcau

SEQ ID NO: 31538 - RNA, 24 nt, Human
aagcauuugauacuggagaaaguu

SEQ ID NO: 31539 - RNA, 24 nt, Human
gaggaccuucaggggucucaggag

SEQ ID NO: 31540 - RNA, 24 nt, Human
uagaagguggagaugcuggcaaca

SEQ ID NO: 31541 - RNA, 24 nt, Human
uagaagaaugaauaaggugucuac

SEQ ID NO: 31542 - RNA, 24 nt, Human
aggcggucugcguggcacugaagu

SEQ ID NO: 31543 - RNA, 19 nt, Human
cacacaguggggcagugac

SEQ ID NO: 31544 - RNA, 21 nt, Human
uucaagggauggaaagucacc

SEQ ID NO: 31545 - RNA, 21 nt, Human
uucaagggauggaaagucacc

SEQ ID NO: 31546 - RNA, 24 nt, Human
ucgguggugaugggcaucccgagc

SEQ ID NO: 31547 - RNA, 24 nt, Human
gcgcuccaaggagcucaaccuggu

SEQ ID NO: 31548 - RNA, 24 nt, Human
uaugaaauucauaaauaaagaauu

SEQ ID NO: 31549 - RNA, 24 nt, Human
ugccguggaggccuccuucaagug

SEQ ID NO: 31550 - RNA, 17 nt, Human
aguacagaugcagagga

SEQ ID NO: 31551 - RNA, 24 nt, Human
acggaucuuccgacuucuggaugu

SEQ ID NO: 31552 - RNA, 24 nt, Human
uguaucaaucagcugacuguucug

SEQ ID NO: 31553 - RNA, 24 nt, Human
uugaagcugagucaauucaagaua

SEQ ID NO: 31554 - RNA, 24 nt, Human
ugcaaagagaaacuaggggaaaau

SEQ ID NO: 31555 - RNA, 24 nt, Human
ugccuugcuugcuugagcuucagc

SEQ ID NO: 31556 - RNA, 24 nt, Human
uaccccucgucacuugcaacuugc

SEQ ID NO: 31557 - RNA, 24 nt, Human
uugcccggcccacuccuccacagg

SEQ ID NO: 31558 - RNA, 24 nt, Human
uuggcccagauggugagcggccuu

SEQ ID NO: 31559 - RNA, 24 nt, Human
ugacuucuugcaggcacaccgcac

SEQ ID NO: 31560 - RNA, 24 nt, Human
agggaucccauauuguuccaucuu

SEQ ID NO: 31561 - RNA, 24 nt, Human
ucccugggcccugauggcuagccu

SEQ ID NO: 31562 - RNA, 24 nt, Human
gagcagccaucagagcccagugcu

SEQ ID NO: 31563 - RNA, 24 nt, Human
aggcugcaggaagaggcaggugug

SEQ ID NO: 31564 - RNA, 24 nt, Human
ugagguggggguggggcugacucu

SEQ ID NO: 31565 - RNA, 24 nt, Human
ugaaugacaacuuuauuuuucuua

SEQ ID NO: 31566 - RNA, 19 nt, Human
uggcucaaaagcagcacac

SEQ ID NO: 31567 - RNA, 24 nt, Human
uggcagaguaaagauuauuccugu

SEQ ID NO: 31568 - RNA, 24 nt, Human
uccuggugcaaaauggcaacucuu

SEQ ID NO: 31569 - RNA, 24 nt, Human
acccaauggcacugccacgcuauc

SEQ ID NO: 31570 - RNA, 24 nt, Human
ugccuguguggaguggucgugaag

SEQ ID NO: 31571 - RNA, 24 nt, Human
cucggguuucucgccuuuggccgg

SEQ ID NO: 31572 - RNA, 20 nt, Human
uguccagaauuuccagaagu

SEQ ID NO: 31573 - RNA, 24 nt, Human
ugggauuagugagaaaugaacuuc

SEQ ID NO: 31574 - RNA, 24 nt, Human
gacacugucuggguacuguugcag

SEQ ID NO: 31575 - RNA, 24 nt, Human
gcgaaaauuaacccuucuggauca

SEQ ID NO: 31576 - RNA, 24 nt, Human
auacugcaucuuaaagguagcaaa

SEQ ID NO: 31577 - RNA, 24 nt, Human
uggaauuucugggguauagcacau

SEQ ID NO: 31578 - RNA, 24 nt, Human
acccgcagcugcccccuuuguucc

SEQ ID NO: 31579 - RNA, 24 nt, Human
uggcucgagguugcaggacucuuu

SEQ ID NO: 31580 - RNA, 21 nt, Human
gucaccuuggcuugcugaguu

SEQ ID NO: 31581 - RNA, 24 nt, Human
uaauuggcuuacagaucugaucgc

SEQ ID NO: 31582 - RNA, 24 nt, Human
guuuuauuucucucuuucuugagu

SEQ ID NO: 31583 - RNA, 24 nt, Human
uaacugggggggacaucucgugca

SEQ ID NO: 31584 - RNA, 24 nt, Human
ugggaccggcuucauucccuuugg

SEQ ID NO: 31585 - RNA, 24 nt, Human
ugccgcaaugaugaaccgcagaac

SEQ ID NO: 31586 - RNA, 24 nt, Human
ugccaaggauguagaauaaauaag

SEQ ID NO: 31587 - RNA, 24 nt, Human
acgcuccgcuccagcccgggcauc

SEQ ID NO: 31588 - RNA, 24 nt, Human
ugacauccagacugcuguacggac

SEQ ID NO: 31589 - RNA, 24 nt, Human
ucugcaauugcuauccacaugaug

SEQ ID NO: 31590 - RNA, 24 nt, Human
uccugcuccugacucaccgcuguu

SEQ ID NO: 31591 - RNA, 24 nt, Human
cacucuguucccgcccuccucuga

SEQ ID NO: 31592 - RNA, 24 nt, Human
cggcagggaacggccugggacaac

SEQ ID NO: 31593 - RNA, 18 nt, Human
ugacguggacauccgcaa

SEQ ID NO: 31594 - RNA, 19 nt, Human
ugucuggacgggugugggg

SEQ ID NO: 31595 - RNA, 21 nt, Human
uccaguggauguauggcugcg

SEQ ID NO: 31596 - RNA, 24 nt, Human
cgucacgccacccgggcgggcgag

SEQ ID NO: 31597 - RNA, 24 nt, Human
cuacguugcuguggacauauugau

SEQ ID NO: 31598 - RNA, 24 nt, Human
ugauugggggaaauaauuuucaca

SEQ ID NO: 31599 - RNA, 24 nt, Human
uccguggauacagaaaucucugca

SEQ ID NO: 31600 - RNA, 24 nt, Human
aacauuuuucugauaauucugcua

SEQ ID NO: 31601 - RNA, 20 nt, Human
uaccuugagucuaggccugg

SEQ ID NO: 31602 - RNA, 24 nt, Human
aucaccuuucccaccugcacggaa

SEQ ID NO: 31603 - RNA, 18 nt, Human
ugaaaggcccuggucucu

SEQ ID NO: 31604 - RNA, 24 nt, Human
ugacugguggauauagaacgaggg

SEQ ID NO: 31605 - RNA, 20 nt, Human
ugagagaacacuccacgaug

SEQ ID NO: 31606 - RNA, 24 nt, Human
ccugaccccugggcuggccuggga

SEQ ID NO: 31607 - RNA, 24 nt, Human
aaagcaaaugaggcagaaaggccc

SEQ ID NO: 31608 - RNA, 24 nt, Human
uguuuuggggccccuuuccccggc

SEQ ID NO: 31609 - RNA, 24 nt, Human
uguaggguaacuuuugaaguagau

SEQ ID NO: 31610 - RNA, 24 nt, Human
uagugcuccuuaggccuuuaagcu

SEQ ID NO: 31611 - RNA, 24 nt, Human
ugugacugauugcuuuuccugcag

SEQ ID NO: 31612 - RNA, 21 nt, Human
uggaaggagagcugaucucau

SEQ ID NO: 31613 - RNA, 24 nt, Human
cgccaagauuccaaaguaagucag

SEQ ID NO: 31614 - RNA, 18 nt, Human
ugccugggauggccaggc

SEQ ID NO: 31615 - RNA, 24 nt, Human
cgucaagaccaugaccaucucuuc

SEQ ID NO: 31616 - RNA, 24 nt, Human
gugcugcccaaggaugaccaggag

SEQ ID NO: 31617 - RNA, 24 nt, Human
uaaaagaccuugaaauccaugacg

SEQ ID NO: 31618 - RNA, 24 nt, Human
uaggucccgagguggagucggggg

SEQ ID NO: 31619 - RNA, 24 nt, Human
uguauauauuuaacacacacaucu

SEQ ID NO: 31620 - RNA, 24 nt, Human
ucagcagggccuucaagcacagcc

SEQ ID NO: 31621 - RNA, 24 nt, Human
uccacacaaauaggcacacauaua

SEQ ID NO: 31622 - RNA, 24 nt, Human
cagcaguaggggcugggcuuccag

SEQ ID NO: 31623 - RNA, 18 nt, Human
uaugcaaggcacugcgca

SEQ ID NO: 31624 - RNA, 24 nt, Human
uacuuuguaaguccguuugcgaga

SEQ ID NO: 31625 - RNA, 24 nt, Human
uccccgugcugcuccuuccguaag

SEQ ID NO: 31626 - RNA, 24 nt, Human
uaaacgguaaagagauuuuuacuu

SEQ ID NO: 31627 - RNA, 24 nt, Human
cggcucggcugugccccacgcuuc

SEQ ID NO: 31628 - RNA, 24 nt, Human
ccagaagcaccuagcagagcugaa

SEQ ID NO: 31629 - RNA, 24 nt, Human
aggcugccaucagaggggccccgg

SEQ ID NO: 31630 - RNA, 24 nt, Human
uugcugggcaccccgcaaugaccu

SEQ ID NO: 31631 - RNA, 24 nt, Human
cacccugucaaaacggaccaauca

SEQ ID NO: 31632 - RNA, 24 nt, Human
ugugucuagcucaggguuuguaaa

SEQ ID NO: 31633 - RNA, 22 nt, Human
aaacuccaaacguuugcuggca

SEQ ID NO: 31634 - RNA, 24 nt, Human
cagcagcagcuucagcgggaaugc

SEQ ID NO: 31635 - RNA, 19 nt, Human
guggagugugcugugcccc

SEQ ID NO: 31636 - RNA, 24 nt, Human
ugcuuggagagagauaaugacugc

SEQ ID NO: 31637 - RNA, 17 nt, Human
uggcucuggcgggcccc

SEQ ID NO: 31638 - RNA, 24 nt, Human
uaucccaaucacagacacaggccg

SEQ ID NO: 31639 - RNA, 23 nt, Human
cguggaacccuaggggcaagggg

SEQ ID NO: 31640 - RNA, 24 nt, Human
gucacgcuucacggcgcaucgugg

SEQ ID NO: 31641 - RNA, 24 nt, Human
uuuaaagaaagguggucguucucg

SEQ ID NO: 31642 - RNA, 24 nt, Human
gucaauguuccauucccgauucau

SEQ ID NO: 31643 - RNA, 24 nt, Human
gcgaaaccucggagcucgcagggc

SEQ ID NO: 31644 - RNA, 24 nt, Human
uacgugauggccauauaauaguga

SEQ ID NO: 31645 - RNA, 24 nt, Human
uccaaugugugaggauggcuggac

SEQ ID NO: 31646 - RNA, 24 nt, Human
cugaagcuguggcuggugucccug

SEQ ID NO: 31647 - RNA, 18 nt, Human
uuccucuggcucggcucc

SEQ ID NO: 31648 - RNA, 24 nt, Human
ugacgaaugggcaaaauuagucgc

SEQ ID NO: 31649 - RNA, 24 nt, Human
uacaccacucccaagaagaauaag

SEQ ID NO: 31650 - RNA, 24 nt, Human
ccgccgcgcccccgccgccgcccu

SEQ ID NO: 31651 - RNA, 24 nt, Human
gcucucuuuuucuaauguaaaugu

SEQ ID NO: 31652 - RNA, 24 nt, Human
cagagugguuagcuguccgguugg

SEQ ID NO: 31653 - RNA, 24 nt, Human
cagcagaaccugugucaggccgcu

SEQ ID NO: 31654 - RNA, 24 nt, Human
agggagcuaaccauggccacaaug

SEQ ID NO: 31655 - RNA, 24 nt, Human
aaauggaaucuagaagcuaaauuu

SEQ ID NO: 31656 - RNA, 24 nt, Human
guggccccacacaccagucccagc

SEQ ID NO: 31657 - RNA, 24 nt, Human
ucccucugggcagcagcucccuuc

SEQ ID NO: 31658 - RNA, 24 nt, Human
uggaaacuuugaaagcacugguag

SEQ ID NO: 31659 - RNA, 21 nt, Human
uacacacucuuacauugugcu

SEQ ID NO: 31660 - RNA, 24 nt, Human
ugugcauagugcugggauggaggg

SEQ ID NO: 31661 - RNA, 24 nt, Human
ugggaugaaugaaaaaaaaaaaaa

SEQ ID NO: 31662 - RNA, 24 nt, Human
uaaacuaccagugaaaagcgaaua

SEQ ID NO: 31663 - RNA, 24 nt, Human
uggaagaugcucaacaccuccucc

SEQ ID NO: 31664 - RNA, 24 nt, Human
uguguuuguagacuuggaacccac

SEQ ID NO: 31665 - RNA, 17 nt, Human
uacaauauuugcaacuu

SEQ ID NO: 31666 - RNA, 21 nt, Human
uuccucugauguauaauaaau

SEQ ID NO: 31667 - RNA, 24 nt, Human
uuuggcuucccugggccccagucg

SEQ ID NO: 31668 - RNA, 24 nt, Human
aagcuucgcuggcuugccggcccc

SEQ ID NO: 31669 - RNA, 24 nt, Human
gagcuuguuuuccugcaacuagac

SEQ ID NO: 31670 - RNA, 24 nt, Human
uaaggagcgugcaaccuacauccc

SEQ ID NO: 31671 - RNA, 19 nt, Human
caaccagcggccaagccag

SEQ ID NO: 31672 - RNA, 24 nt, Human
uggcuagacagaguucuuucucag

SEQ ID NO: 31673 - RNA, 24 nt, Human
ucccuuggggguggcuugccccca

SEQ ID NO: 31674 - RNA, 24 nt, Human
ugugucggcucugcuacuucaaga

SEQ ID NO: 31675 - RNA, 24 nt, Human
uggcugggggcaagagcuccacaa

SEQ ID NO: 31676 - RNA, 24 nt, Human
guggacccgggggccacuggccca

SEQ ID NO: 31677 - RNA, 24 nt, Human
cauuaggggcucggcgcccccgac

SEQ ID NO: 31678 - RNA, 19 nt, Human
uaccauguccgcccaggcg

SEQ ID NO: 31679 - RNA, 24 nt, Human
gggcaugggggugcgguggugggg

SEQ ID NO: 31680 - RNA, 24 nt, Human
aagcuucugcuggggauaggaauu

SEQ ID NO: 31681 - RNA, 24 nt, Human
cccuuuguaccuuccaaaaaauua

SEQ ID NO: 31682 - RNA, 24 nt, Human
aacggcugagggugggggcagugu

SEQ ID NO: 31683 - RNA, 24 nt, Human
uccuugagcacccugauaugcaac

SEQ ID NO: 31684 - RNA, 17 nt, Human
ucaaguggaugaagcgg

SEQ ID NO: 31685 - RNA, 24 nt, Human
ucgcuggcucagcacugucuaugc

SEQ ID NO: 31686 - RNA, 24 nt, Human
aggaggcuauugagggcaccuaca

SEQ ID NO: 31687 - RNA, 24 nt, Human
uguuaugggcgaugcaaaccugau

SEQ ID NO: 31688 - RNA, 24 nt, Human
aaagaaagagaaauagaaagcgac

SEQ ID NO: 31689 - RNA, 24 nt, Human
ucuuuuuuuuuuuuuuuuccccuu

SEQ ID NO: 31690 - RNA, 24 nt, Human
uuggagaugcacaacagucaguga

SEQ ID NO: 31691 - RNA, 24 nt, Human
ugagaaaauagcagaaacagauuu

SEQ ID NO: 31692 - RNA, 24 nt, Human
agucuguggcuagugacauucuac

SEQ ID NO: 31693 - RNA, 24 nt, Human
uuauauaguuaguuuuaaaaaucu

SEQ ID NO: 31694 - RNA, 24 nt, Human
uaggcccccuuugcaggcagucuu

SEQ ID NO: 31695 - RNA, 24 nt, Human
ugagaccaucgcucaauaauggaa

SEQ ID NO: 31696 - RNA, 24 nt, Human
agaaaccaaccgggcccaccgucu

SEQ ID NO: 31697 - RNA, 24 nt, Human
uggccugaugauccacagcggaga

SEQ ID NO: 31698 - RNA, 24 nt, Human
uucauuggcaguauuuugugauga

SEQ ID NO: 31699 - RNA, 24 nt, Human
aggaagugauaauaguggcaacau

SEQ ID NO: 31700 - RNA, 24 nt, Human
uugaagccaguggggcaccaaucc

SEQ ID NO: 31701 - RNA, 24 nt, Human
uaccauggcgaggucacauuucac

SEQ ID NO: 31702 - RNA, 24 nt, Human
cauuuugcaacauccugcaacacc

SEQ ID NO: 31703 - RNA, 24 nt, Human
uaaauggccgggaccuugguuggu

SEQ ID NO: 31704 - RNA, 24 nt, Human
acauugacaaucuaggguauauau

SEQ ID NO: 31705 - RNA, 24 nt, Human
ugugguuuuaaaagagucccucaa

SEQ ID NO: 31706 - RNA, 24 nt, Human
ucucugguuguucacauuccaaaa

SEQ ID NO: 31707 - RNA, 24 nt, Human
ugucgcaggcugcucugucucuua

SEQ ID NO: 31708 - RNA, 24 nt, Human
accaaguaauugccaauauucaca

SEQ ID NO: 31709 - RNA, 24 nt, Human
uagguuagaauucuucuuuaaauu

SEQ ID NO: 31710 - RNA, 24 nt, Human
agagcaaaagccuuggguuucucg

SEQ ID NO: 31711 - RNA, 24 nt, Human
uaguauuuuaaagaaagaacagau

SEQ ID NO: 31712 - RNA, 24 nt, Human
uguuuaauguuaagucaugacaau

SEQ ID NO: 31713 - RNA, 24 nt, Human
uuaaaacucaaaaucauuaguugg

SEQ ID NO: 31714 - RNA, 24 nt, Human
ugauaauucuugagacaaaaggug

SEQ ID NO: 31715 - RNA, 24 nt, Human
guaaagaacaauauaagauuucgg

SEQ ID NO: 31716 - RNA, 24 nt, Human
uauggcaagucacuuuugacagac

SEQ ID NO: 31717 - RNA, 24 nt, Human
ugagaauggcaaaauuagucgccu

SEQ ID NO: 31718 - RNA, 24 nt, Human
uacaccacucccaagaagaauaag

SEQ ID NO: 31719 - RNA, 24 nt, Human
aagagcaccaccauuauuaccacc

SEQ ID NO: 31720 - RNA, 24 nt, Human
ucuuuauuuccuccguuccaauga

SEQ ID NO: 31721 - RNA, 24 nt, Human
ucuccagcagcggcaccucagugu

SEQ ID NO: 31722 - RNA, 24 nt, Human
aagaaucuguuacuucgaguugcu

SEQ ID NO: 31723 - RNA, 24 nt, Human
agucauugaacuucagcucuggaa

SEQ ID NO: 31724 - RNA, 24 nt, Human
uaaugaguaggugagagggucugg

SEQ ID NO: 31725 - RNA, 24 nt, Human
ucaguucgggaccgcaccacgcca

SEQ ID NO: 31726 - RNA, 24 nt, Human
ggcugguggccugagcgggaggcc

SEQ ID NO: 31727 - RNA, 24 nt, Human
uggaagaaaagagcaucgacuuga

SEQ ID NO: 31728 - RNA, 24 nt, Human
cuggaaggcauacccuacaauuua

SEQ ID NO: 31729 - RNA, 20 nt, Human
uuuguaagcuucugagauug

SEQ ID NO: 31730 - RNA, 24 nt, Human
uugaaagguauauuaaaauuaagg

SEQ ID NO: 31731 - RNA, 24 nt, Human
uccagccugugugagcagagcgag

SEQ ID NO: 31732 - RNA, 24 nt, Human
ugagguaugauaauugccugaacc

SEQ ID NO: 31733 - RNA, 24 nt, Human
aaggugcuuuuguccuuccaauug

SEQ ID NO: 31734 - RNA, 24 nt, Human
cccccuguucggggaacccucccg

SEQ ID NO: 31735 - RNA, 24 nt, Human
cacaccuuuugacaacacuguuug

SEQ ID NO: 31736 - RNA, 19 nt, Human
ucgccgggcacgcagggaa

SEQ ID NO: 31737 - RNA, 24 nt, Human
ugagcaguucggugagaggaccac

SEQ ID NO: 31738 - RNA, 24 nt, Human
uaugaaguuaaaugacugguucag

SEQ ID NO: 31739 - RNA, 24 nt, Human
aaaaaucuggugaaauugccggca

SEQ ID NO: 31740 - RNA, 24 nt, Human
cuugcccuucuggaaauuaccccg

SEQ ID NO: 31741 - RNA, 24 nt, Human
gugcagcugagccacaaagcaaac

SEQ ID NO: 31742 - RNA, 24 nt, Human
uuuaauuauuccucuagcucuccc

SEQ ID NO: 31743 - RNA, 24 nt, Human
ucuagagucuguugccaacauguu

SEQ ID NO: 31744 - RNA, 23 nt, Human
uguaaagcuguuacacccauuuc

SEQ ID NO: 31745 - RNA, 21 nt, Human
cagaagccaugauggugaaaa

SEQ ID NO: 31746 - RNA, 24 nt, Human
aaauagugaauuugauaugaaauc

SEQ ID NO: 31747 - RNA, 24 nt, Human
ugggaggccaguggcagcagcagg

SEQ ID NO: 31748 - RNA, 24 nt, Human
ugaaaugauacacauguuuuaaau

SEQ ID NO: 31749 - RNA, 24 nt, Human
uguugccaacaccuugagaagcau

SEQ ID NO: 31750 - RNA, 24 nt, Human
uuaguucauucuucuaauaagccu

SEQ ID NO: 31751 - RNA, 24 nt, Human
aagcguuaucugucaaagcaauuc

SEQ ID NO: 31752 - RNA, 24 nt, Human
uuucccaguggaguaaagaaaguc

SEQ ID NO: 31753 - RNA, 22 nt, Human
ggagccaaugacuccacaaguc

SEQ ID NO: 31754 - RNA, 24 nt, Human
uugaaagguauauuaaaauuaagg

SEQ ID NO: 31755 - RNA, 24 nt, Human
cuggaaggcauacccuacacuuua

SEQ ID NO: 31756 - RNA, 21 nt, Human
uuuguaagcuucugagauugc

SEQ ID NO: 31757 - RNA, 24 nt, Human
uaagauagauauauaugaguagaa

SEQ ID NO: 31758 - RNA, 24 nt, Human
uguacaaaaccuaauuuguuguca

SEQ ID NO: 31759 - RNA, 24 nt, Human
ugcauuguuaucauuaaccagucu

SEQ ID NO: 31760 - RNA, 24 nt, Human
ucuagcaauauuugaagugcuggc

SEQ ID NO: 31761 - RNA, 24 nt, Human
uuccagggcucguuuuuuggcuuc

SEQ ID NO: 31762 - RNA, 24 nt, Human
ugugcagaagaaauggaaggauuc

SEQ ID NO: 31763 - RNA, 24 nt, Human
uucaaauuucuuucuuuuuuaauu

SEQ ID NO: 31764 - RNA, 24 nt, Human
auaaauuuaaauuccauuccucag

SEQ ID NO: 31765 - RNA, 24 nt, Human
gugguugguguaaaugagugaggc

SEQ ID NO: 31766 - RNA, 24 nt, Human
cgcagguagaggcuuacuagaagu

SEQ ID NO: 31767 - RNA, 24 nt, Human
uuuguuuugagguuaguuugauua

SEQ ID NO: 31768 - RNA, 24 nt, Human
ugaguagguggccugcaguaaugu

SEQ ID NO: 31769 - RNA, 24 nt, Human
ugcauuguuaucauuaaccagucu

SEQ ID NO: 31770 - RNA, 24 nt, Human
uauuagggauaauauucauuuagc

SEQ ID NO: 31771 - RNA, 24 nt, Human
uuuaacuuuuuuaaugggucucaa

SEQ ID NO: 31772 - RNA, 24 nt, Human
ucuauaggccuaacuucauuuuua

SEQ ID NO: 31773 - RNA, 24 nt, Human
uagcaugccacuaaaagaggcaga

SEQ ID NO: 31774 - RNA, 24 nt, Human
uccuugguaguuuaacucuggaag

SEQ ID NO: 31775 - RNA, 24 nt, Human
cgugaccccuguccccacacugac

SEQ ID NO: 31776 - RNA, 24 nt, Human
cuaggagcuaugguggcuguugug

SEQ ID NO: 31777 - RNA, 24 nt, Human
ugagaugcaggauuucuucacacc

SEQ ID NO: 31778 - RNA, 24 nt, Human
agaguuguucauccagggagacag

SEQ ID NO: 31779 - RNA, 24 nt, Human
ggccugggcacccuuagaggggag

SEQ ID NO: 31780 - RNA, 24 nt, Human
agcuacugggugagcuggacuacc

SEQ ID NO: 31781 - RNA, 22 nt, Human
aggcagggaaaagaggccaggu

SEQ ID NO: 31782 - RNA, 24 nt, Human
gucacguugagagccaacaccaug

SEQ ID NO: 31783 - RNA, 20 nt, Human
cagcacccgaaugccugcug

SEQ ID NO: 31784 - RNA, 24 nt, Human
uuugugaggcgguucaauggugaa

SEQ ID NO: 31785 - RNA, 24 nt, Human
uggaggcugaauggggucucgucc

SEQ ID NO: 31786 - RNA, 24 nt, Human
agcccgcgccaguccgacgucaug

SEQ ID NO: 31787 - RNA, 24 nt, Human
agcuggaugaccucgucaacuggg

SEQ ID NO: 31788 - RNA, 24 nt, Human
gggaaucagucuaaagcugugcuc

SEQ ID NO: 31789 - RNA, 24 nt, Human
auagaaccauuauaguaacgucaa

SEQ ID NO: 31790 - RNA, 24 nt, Human
gggaaaauuuuuuuuuuuucucuc

SEQ ID NO: 31791 - RNA, 24 nt, Human
gacccuggccauggcccugauggg

SEQ ID NO: 31792 - RNA, 24 nt, Human
acaaccuucagaugagaacugcuu

SEQ ID NO: 31793 - RNA, 24 nt, Human
agaggcuacagcgaaccaacauca

SEQ ID NO: 31794 - RNA, 24 nt, Human
uuuuaaggaaaauuaggagaaaua

SEQ ID NO: 31795 - RNA, 24 nt, Human
aggcagggugaucacuugaaggca

SEQ ID NO: 31796 - RNA, 24 nt, Human
uguguauaaagauggggggagcuu

SEQ ID NO: 31797 - RNA, 24 nt, Human
ggacaagggcugcccgcgugucca

SEQ ID NO: 31798 - RNA, 24 nt, Human
ugauagguggguccaagcagaguu

SEQ ID NO: 31799 - RNA, 24 nt, Human
gaguacauaaucagugccacacag

SEQ ID NO: 31800 - RNA, 24 nt, Human
gcccacuuuuugaugggguuguuu

SEQ ID NO: 31801 - RNA, 24 nt, Human
uccacaaggguugaacuaauuuac

SEQ ID NO: 31802 - RNA, 24 nt, Human
uauggcaagucacuuugacagaca

SEQ ID NO: 31803 - RNA, 24 nt, Human
ugagaauggcaaaauuagucgccu

SEQ ID NO: 31804 - RNA, 24 nt, Human
uacaccacucccaagaagaauaag

SEQ ID NO: 31805 - RNA, 24 nt, Human
uuagccuccagaggcggcuccucu

SEQ ID NO: 31806 - RNA, 24 nt, Human
uggcgggggugguggggccucagc

SEQ ID NO: 31807 - RNA, 24 nt, Human
cuccuugccuucggcacuggcggg

SEQ ID NO: 31808 - RNA, 24 nt, Human
uaucugaggaacaaccaacuaguu

SEQ ID NO: 31809 - RNA, 24 nt, Human
uggaaaucugcagaggccuccgga

SEQ ID NO: 31810 - RNA, 24 nt, Human
uaggugcaauguccuaauaccuug

SEQ ID NO: 31811 - RNA, 24 nt, Human
ugcauuguuaucauuaaccagucu

SEQ ID NO: 31812 - RNA, 24 nt, Human
uauuagggauaauauucauuuagc

SEQ ID NO: 31813 - RNA, 24 nt, Human
uuuaacuuuuuuaaugggucucaa

SEQ ID NO: 31814 - RNA, 24 nt, Human
ugcauuguuaucauuaaccagucu

SEQ ID NO: 31815 - RNA, 24 nt, Human
uauuagggauaauauucauuuagc

SEQ ID NO: 31816 - RNA, 24 nt, Human
uuuaacuuuuuuaaugggucucaa

SEQ ID NO: 31817 - RNA, 24 nt, Human
uauuagggauaauauucauuuagc

SEQ ID NO: 31818 - RNA, 24 nt, Human
aggcacuauggccuugucugggau

SEQ ID NO: 31819 - RNA, 24 nt, Human
uaaccaaaaacauaaagcgauaau

SEQ ID NO: 31820 - RNA, 24 nt, Human
ugcgggaaaugggggggucugaaa

SEQ ID NO: 31821 - RNA, 24 nt, Human
uuggccauuacaaagacacaggaa

SEQ ID NO: 31822 - RNA, 24 nt, Human
uggaagcagcggaggaaggagacg

SEQ ID NO: 31823 - RNA, 22 nt, Human
uuugaacuaugauuuaguagca

SEQ ID NO: 31824 - RNA, 24 nt, Human
ccuugcugcaaacugcuuuucuug

SEQ ID NO: 31825 - RNA, 24 nt, Human
gucacguugcaaccuuuuguuucc

SEQ ID NO: 31826 - RNA, 23 nt, Human
uguccaggaugcucaggcuguag

SEQ ID NO: 31827 - RNA, 24 nt, Human
ggaccugaggcagaacuggggugg

SEQ ID NO: 31828 - RNA, 22 nt, Human
uccgugcgcguugcugcggccg

SEQ ID NO: 31829 - RNA, 24 nt, Human
aggaaggagauauagugaagagga

SEQ ID NO: 31830 - RNA, 24 nt, Human
aggaaggagauauagugaagagga

SEQ ID NO: 31831 - RNA, 24 nt, Human
ccgggucgacccacgcguccgguu

SEQ ID NO: 31832 - RNA, 24 nt, Human
uggacagccaugcggagcuucuag

SEQ ID NO: 31833 - RNA, 24 nt, Human
uggaaagugggcgccauuaccuug

SEQ ID NO: 31834 - RNA, 24 nt, Human
ucuggagccaucgcgauugauucc

SEQ ID NO: 31835 - RNA, 24 nt, Human
accacggauaacaccccucccccu

SEQ ID NO: 31836 - RNA, 24 nt, Human
caccuuuugcuuuuugcacuguuu

SEQ ID NO: 31837 - RNA, 24 nt, Human
uauggcaagucacuuugacagaca

SEQ ID NO: 31838 - RNA, 24 nt, Human
ugagaauggcaaaauuagucgccu

SEQ ID NO: 31839 - RNA, 24 nt, Human
uacaccacucccaagaagaauaag

SEQ ID NO: 31840 - RNA, 24 nt, Human
auacaccauucauuguaggaaaau

SEQ ID NO: 31841 - RNA, 24 nt, Human
uugcugcugagacucaggcaugca

SEQ ID NO: 31842 - RNA, 21 nt, Human
uaagaaacuccauuuugaucu

SEQ ID NO: 31843 - RNA, 24 nt, Human
uauauugucacaucugccuugagu

SEQ ID NO: 31844 - RNA, 24 nt, Human
uauguuuguuuucucaucccaaaa

SEQ ID NO: 31845 - RNA, 18 nt, Human
ugagcgaagcacgagugu

SEQ ID NO: 31846 - RNA, 24 nt, Human
acggaaccacaucuaggccacaaa

SEQ ID NO: 31847 - RNA, 24 nt, Human
agccugcaucgaagaaguacugcc

SEQ ID NO: 31848 - RNA, 24 nt, Human
agccagaugcgccugacugccgcg

SEQ ID NO: 31849 - RNA, 22 nt, Human
gugcguggccgucaccugcggg

SEQ ID NO: 31850 - RNA, 24 nt, Human
gcggagcgaggaggagugggcuca

SEQ ID NO: 31851 - RNA, 24 nt, Human
ucgggugcgcugcuggcuguugcg

SEQ ID NO: 31852 - RNA, 24 nt, Human
aagcugauugucucucccugcagc

SEQ ID NO: 31853 - RNA, 20 nt, Human
cagcgccccggcagggugcc

SEQ ID NO: 31854 - RNA, 24 nt, Human
acuugauuuucauuaauccagagc

SEQ ID NO: 31855 - RNA, 24 nt, Human
uugcagcacgucagcaucaauauc

SEQ ID NO: 31856 - RNA, 24 nt, Human
uucccggacaucgacugaggccca

SEQ ID NO: 31857 - RNA, 24 nt, Human
uuugacacguguauccacggguca

SEQ ID NO: 31858 - RNA, 24 nt, Human
uuagggaaauuacuacacuguugu

SEQ ID NO: 31859 - RNA, 24 nt, Human
uuuaaugugaaugcuaaaugaaua

SEQ ID NO: 31860 - RNA, 24 nt, Human
guagcugugcugccuuaacaucga

SEQ ID NO: 31861 - RNA, 24 nt, Human
uagcagcauggacuuacuuucaca

SEQ ID NO: 31862 - RNA, 17 nt, Human
uguggagugaaggcggc

SEQ ID NO: 31863 - RNA, 24 nt, Human
ucaguguagcuccuggggacuuca

SEQ ID NO: 31864 - RNA, 24 nt, Human
cacaaccacggccgucuuguuuuc

SEQ ID NO: 31865 - RNA, 22 nt, Human
ugaaggggacaguggugcaagu

SEQ ID NO: 31866 - RNA, 24 nt, Human
cagccuggacuuaccaccacuaaa

SEQ ID NO: 31867 - RNA, 24 nt, Human
ggcccggagcggagcgcgcccugc

SEQ ID NO: 31868 - RNA, 24 nt, Human
acuccaugcccaagugccuguaau

SEQ ID NO: 31869 - RNA, 20 nt, Human
ucguugggucacgccuuucc

SEQ ID NO: 31870 - RNA, 24 nt, Human
uaacagguguaagaguguugaaaa

SEQ ID NO: 31871 - RNA, 24 nt, Human
ugugcagaagaaauggaaggauuc

SEQ ID NO: 31872 - RNA, 24 nt, Human
uaucaaggaagggcaggcgugaug

SEQ ID NO: 31873 - RNA, 24 nt, Human
uucaaauuucuuucuuuuuuaauu

SEQ ID NO: 31874 - RNA, 24 nt, Human
uugaaacaccuuaacccuguugcc

SEQ ID NO: 31875 - RNA, 24 nt, Human
agagguacuguugcagccgcugca

SEQ ID NO: 31876 - RNA, 24 nt, Human
uucccaugccccaggcuccugcag

SEQ ID NO: 31877 - RNA, 24 nt, Human
ugggccgaggagcacccccuccag

SEQ ID NO: 31878 - RNA, 24 nt, Human
ucccccauuuugcaggggagggaa

SEQ ID NO: 31879 - RNA, 24 nt, Human
uuuggccaucauauagcccauggu

SEQ ID NO: 31880 - RNA, 24 nt, Human
caugaagggcuacuuaacucaugu

SEQ ID NO: 31881 - RNA, 24 nt, Human
ccccuguugccaccuguuuuuguc

SEQ ID NO: 31882 - RNA, 24 nt, Human
ugaccugguuuuuggucaacucau

SEQ ID NO: 31883 - RNA, 24 nt, Human
ugugguucucggggcugcccuuug

SEQ ID NO: 31884 - RNA, 24 nt, Human
cuuggccuuggccuuggccuuggc

SEQ ID NO: 31885 - RNA, 24 nt, Human
cauuguuggccugcaucuucuuua

SEQ ID NO: 31886 - RNA, 24 nt, Human
gagcuugcggcugacacccuuugg

SEQ ID NO: 31887 - RNA, 24 nt, Human
uugaucuugaagaaacugggcgug

SEQ ID NO: 31888 - RNA, 24 nt, Human
aggaaggagauauagugaagagga

SEQ ID NO: 31889 - RNA, 24 nt, Human
guagaguuuucuucaggcuuaaag

SEQ ID NO: 31890 - RNA, 24 nt, Human
caccuuuucuaucauacacaauau

SEQ ID NO: 31891 - RNA, 24 nt, Human
agccuccagaauagcuaggaguag

SEQ ID NO: 31892 - RNA, 24 nt, Human
uuuauaucugauuuuuuuuuuuaa

SEQ ID NO: 31893 - RNA, 24 nt, Human
uagaaggaauuauagauguugagu

SEQ ID NO: 31894 - RNA, 24 nt, Human
ucugcguucccucccucugggccu

SEQ ID NO: 31895 - RNA, 24 nt, Human
uaccagugugcuuggguuugccau

SEQ ID NO: 31896 - RNA, 24 nt, Human
ucccaagcugccaagccccugccu

SEQ ID NO: 31897 - RNA, 24 nt, Human
ugggcuggacccaguggggagaau

SEQ ID NO: 31898 - RNA, 24 nt, Human
cacucucuuccaagaaagaccuug

SEQ ID NO: 31899 - RNA, 24 nt, Human
ugcuacagcuuuggcucugguggu

SEQ ID NO: 31900 - RNA, 24 nt, Human
ggaguauguauucccgugugccag

SEQ ID NO: 31901 - RNA, 24 nt, Human
acccugagaguguggcuggggagu

SEQ ID NO: 31902 - RNA, 24 nt, Human
agaggaccaagagcauguuccaga

SEQ ID NO: 31903 - RNA, 21 nt, Human
uggaauguucauaguguccuc

SEQ ID NO: 31904 - RNA, 24 nt, Human
uauggcaagucacuuugacagaca

SEQ ID NO: 31905 - RNA, 24 nt, Human
uacaccacucccaagaagaauaag

SEQ ID NO: 31906 - RNA, 24 nt, Human
uaaugggucucaaaauucugugac

SEQ ID NO: 31907 - RNA, 24 nt, Human
uauuagggauaauauucauuuagc

SEQ ID NO: 31908 - RNA, 24 nt, Human
augggccccaccagugcaacugcc

SEQ ID NO: 31909 - RNA, 24 nt, Human
aaaguacuugccgcucuaccccug

SEQ ID NO: 31910 - RNA, 24 nt, Human
uggaaaccgagccuguaggugaca

SEQ ID NO: 31911 - RNA, 24 nt, Human
cuccauggccaaagcgagagcauu

SEQ ID NO: 31912 - RNA, 24 nt, Human
aaccagaaaguaagguguucuacu

SEQ ID NO: 31913 - RNA, 24 nt, Human
uggccugaugauccacagcggaga

SEQ ID NO: 31914 - RNA, 24 nt, Human
ugugugccauugcccaggcagagu

SEQ ID NO: 31915 - RNA, 24 nt, Human
uauggggaacgggugucucaaagg

SEQ ID NO: 31916 - RNA, 24 nt, Human
uuggcacagauaaucgcaucugug

SEQ ID NO: 31917 - RNA, 24 nt, Human
uaaguugguugcuuuuuggugauu

SEQ ID NO: 31918 - RNA, 23 nt, Human
ucuguggggaguaacaagggcuc

SEQ ID NO: 31919 - RNA, 24 nt, Human
guaauguuacucuucuccugccug

SEQ ID NO: 31920 - RNA, 24 nt, Human
uacccaaaugugacacugggcuca

SEQ ID NO: 31921 - RNA, 24 nt, Human
cuguacccauguuaugugacucuc

SEQ ID NO: 31922 - RNA, 24 nt, Human
aacccuuuggcuuuuuucagagaa

SEQ ID NO: 31923 - RNA, 24 nt, Human
uaugccauugucuuuguaauucuu

SEQ ID NO: 31924 - RNA, 24 nt, Human
ucugguuuuauuauucaaauuaag

SEQ ID NO: 31925 - RNA, 24 nt, Human
agaagaaaaagaaauggcaaagag

SEQ ID NO: 31926 - RNA, 24 nt, Human
ucaauuuuuauuuugguuuucuua

SEQ ID NO: 31927 - RNA, 24 nt, Human
uaggguggagggcagggugggcag

SEQ ID NO: 31928 - RNA, 23 nt, Human
uguagggagugggggcugcuaga

SEQ ID NO: 31929 - RNA, 24 nt, Human
uauucauguaaagugauuaucaca

SEQ ID NO: 31930 - RNA, 24 nt, Human
uuccggaucauccgggaaagggac

SEQ ID NO: 31931 - RNA, 24 nt, Human
uggcacgcucgaacuuccggcccu

SEQ ID NO: 31932 - RNA, 24 nt, Human
ucuucaguaccagaggugccugau

SEQ ID NO: 31933 - RNA, 24 nt, Human
uuaacagauuaauccuaaugguac

SEQ ID NO: 31934 - RNA, 21 nt, Human
ucgaagagauacucgcccagc

SEQ ID NO: 31935 - RNA, 24 nt, Human
caccccagggucugcucaggugug

SEQ ID NO: 31936 - RNA, 24 nt, Human
ggucaacaggagucgggccucucu

SEQ ID NO: 31937 - RNA, 24 nt, Human
uauuuuacuaugauaguugagaaa

SEQ ID NO: 31938 - RNA, 24 nt, Human
uaccggcuucagcagaggcgcaag

SEQ ID NO: 31939 - RNA, 24 nt, Human
uacagaguaacuugauaaccugug

SEQ ID NO: 31940 - RNA, 24 nt, Human
uuugcuguaacuugaagauuuacc

SEQ ID NO: 31941 - RNA, 24 nt, Human
ucgaagauagcaacuucaucaggg

SEQ ID NO: 31942 - RNA, 21 nt, Human
uucaagggauggaaagucacc

SEQ ID NO: 31943 - RNA, 24 nt, Human
agcaagcucaagcuuuuuauacgu

SEQ ID NO: 31944 - RNA, 24 nt, Human
ucuccauguccacagcugauuucc

SEQ ID NO: 31945 - RNA, 24 nt, Human
uagcauaaguuugagggugaugca

SEQ ID NO: 31946 - RNA, 24 nt, Human
uagauggcagaacuuuugaggugc

SEQ ID NO: 31947 - RNA, 24 nt, Human
aguuauugaagauuaggaucaagg

SEQ ID NO: 31948 - RNA, 19 nt, Human
caugucacuagcuuccugu

SEQ ID NO: 31949 - RNA, 24 nt, Human
auccgggugaagaagcaggucugg

SEQ ID NO: 31950 - RNA, 24 nt, Human
auaggucacaagucugauauaagu

SEQ ID NO: 31951 - RNA, 24 nt, Human
gggcagugcugguaguagggugua

SEQ ID NO: 31952 - RNA, 24 nt, Human
uuugcuccugacgucccucagaug

SEQ ID NO: 31953 - RNA, 24 nt, Human
uaaagggaaauaguggaaagccug

SEQ ID NO: 31954 - RNA, 24 nt, Human
uggccaggaaugcagcggccgugc

SEQ ID NO: 31955 - RNA, 24 nt, Human
acgcugccaagcuccccaugucca

SEQ ID NO: 31956 - RNA, 24 nt, Human
guccaguuuguacccuuccgggac

SEQ ID NO: 31957 - RNA, 24 nt, Human
uccacaggggauguggccggaggg

SEQ ID NO: 31958 - RNA, 24 nt, Human
cuuugagggggcugaugcggagga

SEQ ID NO: 31959 - RNA, 24 nt, Human
uggcgagggacucguuaccaucac

SEQ ID NO: 31960 - RNA, 24 nt, Human
uucagcaccaucgccuccagcuac

SEQ ID NO: 31961 - RNA, 24 nt, Human
ucagguauugcuguuagauauccc

SEQ ID NO: 31962 - RNA, 24 nt, Human
ucauaugcauaguaccgagaaacu

SEQ ID NO: 31963 - RNA, 24 nt, Human
uacccaacuuaaucggccuugugg

SEQ ID NO: 31964 - RNA, 24 nt, Human
ucggaauuccagcuuaauuuggcc

SEQ ID NO: 31965 - RNA, 24 nt, Human
uauaaaguugguugcugcaaaauc

SEQ ID NO: 31966 - RNA, 24 nt, Human
uagcauugaaggacucggggauau

SEQ ID NO: 31967 - RNA, 24 nt, Human
uagcauugaaggacucggggauau

SEQ ID NO: 31968 - RNA, 24 nt, Human
uagcauugaaggacucggggauau

SEQ ID NO: 31969 - RNA, 24 nt, Human
agugcagucacuuuggggaaaugc

SEQ ID NO: 31970 - RNA, 24 nt, Human
ugccuggaguaggucaguaaagaa

SEQ ID NO: 31971 - RNA, 24 nt, Human
ucagcagaaauuaaaacuaaugaa

SEQ ID NO: 31972 - RNA, 24 nt, Human
uguaaauucuaccuucugcaaaua

SEQ ID NO: 31973 - RNA, 24 nt, Human
aaagggaaugauagcauugaagga

SEQ ID NO: 31974 - RNA, 22 nt, Human
uagcauugaaggacucgugagg

SEQ ID NO: 31975 - RNA, 24 nt, Human
uagcauugaaggacucggggauau

SEQ ID NO: 31976 - RNA, 24 nt, Human
uuccgguuuaagagaugggcauuu

SEQ ID NO: 31977 - RNA, 24 nt, Human
uggcaucgcuguccucccgcuccu

SEQ ID NO: 31978 - RNA, 20 nt, Human
uggcgcagcuggcggacagc

SEQ ID NO: 31979 - RNA, 24 nt, Human
aggcuuuggagaaagagggcagcc

SEQ ID NO: 31980 - RNA, 21 nt, Human
uggggucagcccucuucccgg

SEQ ID NO: 31981 - RNA, 22 nt, Human
uaucccagcgacuaugauaugc

SEQ ID NO: 31982 - RNA, 24 nt, Human
ucccuuggguagacaaaauccaac

SEQ ID NO: 31983 - RNA, 24 nt, Human
ugaggaacuucaucucuauggauu

SEQ ID NO: 31984 - RNA, 24 nt, Human
ucgcccaggaugaggauggcaucc

SEQ ID NO: 31985 - RNA, 24 nt, Human
ucgguucgcuggagagaggcgagc

SEQ ID NO: 31986 - RNA, 24 nt, Human
ugggcccagcugcggcgggggcug

SEQ ID NO: 31987 - RNA, 24 nt, Human
ugccaucaccaucuauguguccaa

SEQ ID NO: 31988 - RNA, 24 nt, Human
uacaggacacuguuggcuuuagag

SEQ ID NO: 31989 - RNA, 24 nt, Human
ccaccacccgggccugccgccuga

SEQ ID NO: 31990 - RNA, 24 nt, Human
ccccccagagccggcgcccucucc

SEQ ID NO: 31991 - RNA, 24 nt, Human
uguuagagaguucgguuaacuuag

SEQ ID NO: 31992 - RNA, 24 nt, Human
ucgcaguaauuuaugcucuuugcu

SEQ ID NO: 31993 - RNA, 24 nt, Human
ugugucaggcaugacaugaauggu

SEQ ID NO: 31994 - RNA, 24 nt, Human
uuuguaaucacuggcaaugucucu

SEQ ID NO: 31995 - RNA, 21 nt, Human
uucaagggauggaaagucacc

SEQ ID NO: 31996 - RNA, 24 nt, Human
ucugaucuauaaaugcgguggcau

SEQ ID NO: 31997 - RNA, 24 nt, Human
ugggaaaaacuugggggcccaggg

SEQ ID NO: 31998 - RNA, 24 nt, Human
caggacccgucgccaugggccgug

SEQ ID NO: 31999 - RNA, 20 nt, Human
ucaguaggccaguccaggug

SEQ ID NO: 32000 - RNA, 24 nt, Human
aaacaccuacagaugcaucuugca

SEQ ID NO: 32001 - RNA, 24 nt, Human
uuagcagaugacuuugcuggcaag

SEQ ID NO: 32002 - RNA, 24 nt, Human
ggaggagauaaaauaauucauucu

SEQ ID NO: 32003 - RNA, 24 nt, Human
agcaguucuuuuuuuuuuuccuuu

SEQ ID NO: 32004 - RNA, 24 nt, Human
auguagguuuuacaauauuccaug

SEQ ID NO: 32005 - RNA, 24 nt, Human
ugaacaggaggcucaagccccagg

SEQ ID NO: 32006 - RNA, 24 nt, Human
aggcaggugaagugucuccccgca

SEQ ID NO: 32007 - RNA, 24 nt, Human
ucucuggcuguucgucccaucguc

SEQ ID NO: 32008 - RNA, 24 nt, Human
ugaggccaugugaguaggauccug

SEQ ID NO: 32009 - RNA, 24 nt, Human
aaguaaauaggcuauuuuuucuua

SEQ ID NO: 32010 - RNA, 17 nt, Human
ucugaaagaacuagugg

SEQ ID NO: 32011 - RNA, 24 nt, Human
ugccugaaaacuuccuuaagcagc

SEQ ID NO: 32012 - RNA, 24 nt, Human
cagcggacccuuggacggcagcgc

SEQ ID NO: 32013 - RNA, 24 nt, Human
caccuugaugagaccauugccgcg

SEQ ID NO: 32014 - RNA, 24 nt, Human
ugggagauuuaucaagcguuuuga

SEQ ID NO: 32015 - RNA, 24 nt, Human
guagcccagcagacaggacacucc

SEQ ID NO: 32016 - RNA, 24 nt, Human
agagcugugggccagcagccagca

SEQ ID NO: 32017 - RNA, 24 nt, Human
uguuuccucauuuauuauaaacac

SEQ ID NO: 32018 - RNA, 23 nt, Human
ucugaacugcuccacucugguga

SEQ ID NO: 32019 - RNA, 21 nt, Human
cacucgguugaagacggguca

SEQ ID NO: 32020 - RNA, 24 nt, Human
uggcaggaaugggaggcauccaga

SEQ ID NO: 32021 - RNA, 24 nt, Human
cgagaagaagcuaaaacaagaccu

SEQ ID NO: 32022 - RNA, 24 nt, Human
acuggagggguucaaagguucgcg

SEQ ID NO: 32023 - RNA, 24 nt, Human
ugauauggcgaccuauuuugggcg

SEQ ID NO: 32024 - RNA, 24 nt, Human
aggcguugucccuuugccgagaca

SEQ ID NO: 32025 - RNA, 24 nt, Human
ccuuuguucccaggacuuuaaggc

SEQ ID NO: 32026 - RNA, 24 nt, Human
ugaaacauaugaaauugcugcauu

SEQ ID NO: 32027 - RNA, 24 nt, Human
cccccguuuuaaacccguauccaa

SEQ ID NO: 32028 - RNA, 24 nt, Human
uggaggcugagugccguuugcggu

SEQ ID NO: 32029 - RNA, 24 nt, Human
agugcaguucucaaauggcugccu

SEQ ID NO: 32030 - RNA, 24 nt, Human
uugguggugaagugaguagcugca

SEQ ID NO: 32031 - RNA, 24 nt, Human
ucuguaguggauguacuacagcuc

SEQ ID NO: 32032 - RNA, 24 nt, Human
ucugaaacauuuuacuucauauua

SEQ ID NO: 32033 - RNA, 24 nt, Human
acggagggcuccgggcucuguaug

SEQ ID NO: 32034 - RNA, 24 nt, Human
ugaagagauaggcuucauagauua

SEQ ID NO: 32035 - RNA, 24 nt, Human
uccaccacuacuggccaucugauc

SEQ ID NO: 32036 - RNA, 24 nt, Human
uucaaugcuguuuaauuauggauu

SEQ ID NO: 32037 - RNA, 24 nt, Human
uugcaguuacaaagcuaccaggaa

SEQ ID NO: 32038 - RNA, 24 nt, Human
uuaaugauuauaaaucaggaucua

SEQ ID NO: 32039 - RNA, 24 nt, Human
caggcccucccguugggugauggc

SEQ ID NO: 32040 - RNA, 24 nt, Human
ccccugagggagaggaaaggugaa

SEQ ID NO: 32041 - RNA, 22 nt, Human
uuacaacaaucgagugcuggac

SEQ ID NO: 32042 - RNA, 24 nt, Human
ugcaaagacucccccugacccacc

SEQ ID NO: 32043 - RNA, 24 nt, Human
cacuuugugagcucaucaucaguc

SEQ ID NO: 32044 - RNA, 18 nt, Human
cagcugggccaucugcca

SEQ ID NO: 32045 - RNA, 24 nt, Human
uggcagccucaucaagaugacuga

SEQ ID NO: 32046 - RNA, 24 nt, Human
uggcugccgacgugauucccuggg

SEQ ID NO: 32047 - RNA, 24 nt, Human
accuuuugcugugauggccgcguc

SEQ ID NO: 32048 - RNA, 19 nt, Human
cuuggauuaaggcgacagc

SEQ ID NO: 32049 - RNA, 24 nt, Human
ugguugauauugcuaggguggcgc

SEQ ID NO: 32050 - RNA, 24 nt, Human
aagcagaaagggaagagaagcgag

SEQ ID NO: 32051 - RNA, 24 nt, Human
uacaaugaauauuaauacauauug

SEQ ID NO: 32052 - RNA, 24 nt, Human
uguacaaaaccuaauuuguuguca

SEQ ID NO: 32053 - RNA, 24 nt, Human
uaggccccagcuccaacauuggga

SEQ ID NO: 32054 - RNA, 24 nt, Human
ugggaacucacagagaggacugca

SEQ ID NO: 32055 - RNA, 22 nt, Human
uaagaugagugcuagagacuug

SEQ ID NO: 32056 - RNA, 24 nt, Human
uccagagcaggaccauguagucac

SEQ ID NO: 32057 - RNA, 21 nt, Human
aaguaugccugggucuuggau

SEQ ID NO: 32058 - RNA, 21 nt, Human
uucaagggauggaaagucacc

SEQ ID NO: 32059 - RNA, 24 nt, Human
aagcagggugucuugacccauggc

SEQ ID NO: 32060 - RNA, 20 nt, Human
agaucaggacucugaaagac

SEQ ID NO: 32061 - RNA, 24 nt, Human
uccgucguagaggcuccgugcgga

SEQ ID NO: 32062 - RNA, 24 nt, Human
ugagaugggaaagggcuccuucaa

SEQ ID NO: 32063 - RNA, 24 nt, Human
uacagggacaucucaggcugacug

SEQ ID NO: 32064 - RNA, 21 nt, Human
uucaagggauggaaagucacc

SEQ ID NO: 32065 - RNA, 21 nt, Human
uucaagggauggaaagucacc

SEQ ID NO: 32066 - RNA, 24 nt, Human
ucugaucuauaaaugcgguggcau

SEQ ID NO: 32067 - RNA, 24 nt, Human
ugagaauggcaaaauuagucgccu

SEQ ID NO: 32068 - RNA, 24 nt, Human
uacaccacucccaagaagaauaag

SEQ ID NO: 32069 - RNA, 24 nt, Human
ucugaucuauaaaugcgguggcau

SEQ ID NO: 32070 - RNA, 24 nt, Human
aggcagcuuugccuucucuccccu

SEQ ID NO: 32071 - RNA, 24 nt, Human
gcccuuuuucccuuuucuccaugc

SEQ ID NO: 32072 - RNA, 24 nt, Human
uugaugcaugugguuaauguugca

SEQ ID NO: 32073 - RNA, 24 nt, Human
uauuaagcacuucugucagucuuu

SEQ ID NO: 32074 - RNA, 24 nt, Human
aaugacuccgucaccaagagcagu

SEQ ID NO: 32075 - RNA, 24 nt, Human
ucugaggagaccacgacugggguc

SEQ ID NO: 32076 - RNA, 21 nt, Human
uuacuuugauccucgugaggc

SEQ ID NO: 32077 - RNA, 24 nt, Human
ugaacagguuguucuggaauugau

SEQ ID NO: 32078 - RNA, 24 nt, Human
uacugugucuccagggcuauacgg

SEQ ID NO: 32079 - RNA, 24 nt, Human
ugagaugggaaagggcuccuucaa

SEQ ID NO: 32080 - RNA, 21 nt, Human
uucaagggauggaaagucacc

SEQ ID NO: 32081 - RNA, 24 nt, Human
uggaauggagaccccugaacucau

SEQ ID NO: 32082 - RNA, 24 nt, Human
ugaaaaugaaaacuguuccucucu

SEQ ID NO: 32083 - RNA, 24 nt, Human
cggcgaaacucuccuccccucggc

SEQ ID NO: 32084 - RNA, 24 nt, Human
gagcuuguucagcuuuucauccuc

SEQ ID NO: 32085 - RNA, 24 nt, Human
cauuguuucugguucucuucgucu

SEQ ID NO: 32086 - RNA, 21 nt, Human
cacagcucggucagcagcgcu

SEQ ID NO: 32087 - RNA, 24 nt, Human
uucauaguuacuuaauuaucuaaa

SEQ ID NO: 32088 - RNA, 24 nt, Human
uuuguauuuaccccaaaaucuuuu

SEQ ID NO: 32089 - RNA, 24 nt, Human
ugagcaccgaggauucaccaugga

SEQ ID NO: 32090 - RNA, 24 nt, Human
ugagaugggaaagggcuccuucaa

SEQ ID NO: 32091 - RNA, 22 nt, Human
uucaagggauggaaaagucacc

SEQ ID NO: 32092 - RNA, 24 nt, Human
aggcugugcagacgguggaccccu

SEQ ID NO: 32093 - RNA, 24 nt, Human
uucaugaggacaacggacagcugg

SEQ ID NO: 32094 - RNA, 24 nt, Human
ucaggagaccauugcaucauuggc

SEQ ID NO: 32095 - RNA, 23 nt, Human
ucaagggucguguguuugaagug

SEQ ID NO: 32096 - RNA, 22 nt, Human
uuccauggucaaaaaauggcag

SEQ ID NO: 32097 - RNA, 24 nt, Human
aggcagagaggcaugcaggcgggg

SEQ ID NO: 32098 - RNA, 24 nt, Human
ccgcagcuucagcaccucggccca

SEQ ID NO: 32099 - RNA, 24 nt, Human
ugagaugggaaagggcuccuucaa

SEQ ID NO: 32100 - RNA, 21 nt, Human
uucaagggauggaaagucacc

SEQ ID NO: 32101 - RNA, 24 nt, Human
ucccauagacacucaggucccucc

SEQ ID NO: 32102 - RNA, 24 nt, Human
ggugcggacuccaaggaggugcac

SEQ ID NO: 32103 - RNA, 24 nt, Human
ccccggagucuagaucugcugggg

SEQ ID NO: 32104 - RNA, 24 nt, Human
ugcgguaaugauggccuggacgcu

SEQ ID NO: 32105 - RNA, 24 nt, Human
acugcauucuaacaccaaucgguc

SEQ ID NO: 32106 - RNA, 24 nt, Human
ucugaucuauaaaugcgguggcau

SEQ ID NO: 32107 - RNA, 24 nt, Human
uuaaugcucugucuuccauuuguu

SEQ ID NO: 32108 - RNA, 24 nt, Human
uaccagguuuaaauguagucuucu

SEQ ID NO: 32109 - RNA, 22 nt, Human
ugucaugguugcagcauuugaa

SEQ ID NO: 32110 - RNA, 24 nt, Human
cuggagcucacguucauguugugc

SEQ ID NO: 32111 - RNA, 24 nt, Human
cuaagacuuuaagggcccacacag

SEQ ID NO: 32112 - RNA, 24 nt, Human
ucacugcagcugccccucccuggc

SEQ ID NO: 32113 - RNA, 24 nt, Human
gaagucacacucagaauuuaauuu

SEQ ID NO: 32114 - RNA, 24 nt, Human
uaugcuagcccucaucauagaugu

SEQ ID NO: 32115 - RNA, 24 nt, Human
accgcaccuguccacgucaugcuc

SEQ ID NO: 32116 - RNA, 24 nt, Human
agagagucuaucccggaccuauuc

SEQ ID NO: 32117 - RNA, 21 nt, Human
uggaauccugguggucccacc

SEQ ID NO: 32118 - RNA, 24 nt, Human
ugcauuguuaucauuaaccagucu

SEQ ID NO: 32119 - RNA, 24 nt, Human
uauuagggauaauauucauuuagc

SEQ ID NO: 32120 - RNA, 24 nt, Human
agaaagcugauggugugcccgucu

SEQ ID NO: 32121 - RNA, 24 nt, Human
uucgucacccgcaggauacccgcc

SEQ ID NO: 32122 - RNA, 24 nt, Human
uagcaacagaaaugggccccacag

SEQ ID NO: 32123 - RNA, 24 nt, Human
ucccaagaagaaccuuuucuucag

SEQ ID NO: 32124 - RNA, 24 nt, Human
ugcauuguuaucauuaaccagucu

SEQ ID NO: 32125 - RNA, 24 nt, Human
uauuagggauaauauucauuuagc

SEQ ID NO: 32126 - RNA, 24 nt, Human
uuuaacuuuuuuaaugggucucaa

SEQ ID NO: 32127 - RNA, 24 nt, Human
uugaagccaguggggcaccaaucc

SEQ ID NO: 32128 - RNA, 24 nt, Human
uaccauggcgaggguacauuucac

SEQ ID NO: 32129 - RNA, 24 nt, Human
ccgaagauguuaguuaauagauau

SEQ ID NO: 32130 - RNA, 24 nt, Human
ugacacaaaagcaccguaaaagag

SEQ ID NO: 32131 - RNA, 24 nt, Human
uuuguacaaaaauacugucaaaau

SEQ ID NO: 32132 - RNA, 24 nt, Human
acgacauuccacacccuauuauca

SEQ ID NO: 32133 - RNA, 24 nt, Human
uggaagaugcucaacaccuccucc

SEQ ID NO: 32134 - RNA, 24 nt, Human
ugagguggucgugaagcucuuuga

SEQ ID NO: 32135 - RNA, 24 nt, Human
uaaugggucucaaaauucugugac

SEQ ID NO: 32136 - RNA, 24 nt, Human
uucauauuguuccagagucaugua

SEQ ID NO: 32137 - RNA, 24 nt, Human
uucaaauauuuccauuuuuuaaac

SEQ ID NO: 32138 - RNA, 24 nt, Human
uaccaaguaccaguuucuuauauu

SEQ ID NO: 32139 - RNA, 24 nt, Human
ucccuggaccagcccgguggcacc

SEQ ID NO: 32140 - RNA, 24 nt, Human
ugagaaugcuguuacagaugcugu

SEQ ID NO: 32141 - RNA, 24 nt, Human
uggguuuuuuggucuucgacgcuc

SEQ ID NO: 32142 - RNA, 24 nt, Human
ccccggagcccagccagcucugcc

SEQ ID NO: 32143 - RNA, 24 nt, Human
uauagggaguaauuagggaccuaa

SEQ ID NO: 32144 - RNA, 24 nt, Human
uguugucuuucacccaaaauuugu

SEQ ID NO: 32145 - RNA, 24 nt, Human
ugcauuguuaucauuaaccagucu

SEQ ID NO: 32146 - RNA, 24 nt, Human
uauuagggauaauauucauuuagc

SEQ ID NO: 32147 - RNA, 24 nt, Human
uaaugggucucaaaauucugugac

SEQ ID NO: 32148 - RNA, 24 nt, Human
uuaguuauuagguuucuucaagug

SEQ ID NO: 32149 - RNA, 24 nt, Human
ucccucuguccccugccagcuccc

SEQ ID NO: 32150 - RNA, 24 nt, Human
uggguucucugucgcagagccugg

SEQ ID NO: 32151 - RNA, 24 nt, Human
uuagauggagacggguaagcaaug

SEQ ID NO: 32152 - RNA, 24 nt, Human
ucuggccucaccugugccuggucu

SEQ ID NO: 32153 - RNA, 24 nt, Human
ugggacucuggggccugcucccag

SEQ ID NO: 32154 - RNA, 24 nt, Human
aggcuacaacccauuugccccauu

SEQ ID NO: 32155 - RNA, 24 nt, Human
cuugccguugggagucuccuguau

SEQ ID NO: 32156 - RNA, 24 nt, Human
uauguguauauauauguacguaac

SEQ ID NO: 32157 - RNA, 24 nt, Human
uguauagacccaguuggcaaucau

SEQ ID NO: 32158 - RNA, 24 nt, Human
uaguaggacucuuuaaaccuuuug

SEQ ID NO: 32159 - RNA, 24 nt, Human
acaaagucaguucucgaucaaggu

SEQ ID NO: 32160 - RNA, 24 nt, Human
aggcaggaaggggguaugaucugg

SEQ ID NO: 32161 - RNA, 24 nt, Human
ccccagaggguuucccaaguuggg

SEQ ID NO: 32162 - RNA, 22 nt, Human
cucacauucugcugacugagcg

SEQ ID NO: 32163 - RNA, 24 nt, Human
ucuugggguggaacggggaccacc

SEQ ID NO: 32164 - RNA, 24 nt, Human
uccaagaauuuuugugauggaagc

SEQ ID NO: 32165 - RNA, 24 nt, Human
gggaaagcugguacgccugcaggu

SEQ ID NO: 32166 - RNA, 24 nt, Human
ugucaaguccuggacccuucccug

SEQ ID NO: 32167 - RNA, 24 nt, Human
uauggcaagucacuuugacagaca

SEQ ID NO: 32168 - RNA, 24 nt, Human
uacaccacucccaagaagaauaag

SEQ ID NO: 32169 - RNA, 24 nt, Human
cauugcuagaagccggucgaggag

SEQ ID NO: 32170 - RNA, 24 nt, Human
uugcuucagacuauuacaaagaca

SEQ ID NO: 32171 - RNA, 24 nt, Human
uauggcaagucacuuugacagaca

SEQ ID NO: 32172 - RNA, 24 nt, Human
ugagaauggcaaaauuagucgccu

SEQ ID NO: 32173 - RNA, 24 nt, Human
uacaccacucccaagaagaauaag

SEQ ID NO: 32174 - RNA, 24 nt, Human
uuccccugauagcaagaaaaagac

SEQ ID NO: 32175 - RNA, 24 nt, Human
aggggggugggaagguuaacaaaa

SEQ ID NO: 32176 - RNA, 24 nt, Human
aggcagccagaaaccugcggaaaa

SEQ ID NO: 32177 - RNA, 24 nt, Human
uacaggauuugagcaccauacagg

SEQ ID NO: 32178 - RNA, 22 nt, Human
uauuaaacugaacacugucagc

SEQ ID NO: 32179 - RNA, 24 nt, Human
cgacaccgaggugguuugugcucc

SEQ ID NO: 32180 - RNA, 24 nt, Human
uggaguuuucagccaaaaagagcc

SEQ ID NO: 32181 - RNA, 24 nt, Human
uuauauguuauuauaaaagcuaau

SEQ ID NO: 32182 - RNA, 24 nt, Human
aacacuucugucccuaacgaaucu

SEQ ID NO: 32183 - RNA, 24 nt, Human
aagaguguuauucucaaggcuuua

SEQ ID NO: 32184 - RNA, 24 nt, Human
ugcaagaagccccggaggcuaucc

SEQ ID NO: 32185 - RNA, 24 nt, Human
ugccagcacggugguuaaagggga

SEQ ID NO: 32186 - RNA, 24 nt, Human
ucccugugggcucccuuugggggu

SEQ ID NO: 32187 - RNA, 24 nt, Human
uuuuaaacuuauuuuacgaauuuu

SEQ ID NO: 32188 - RNA, 24 nt, Human
uauggcaagucacuuugacagaca

SEQ ID NO: 32189 - RNA, 24 nt, Human
ugagaauggcaaaauuagucgccu

SEQ ID NO: 32190 - RNA, 24 nt, Human
uacaccacucccaagaagaauaag

SEQ ID NO: 32191 - RNA, 24 nt, Human
auggccccaguuccccagcaaacc

SEQ ID NO: 32192 - RNA, 24 nt, Human
caaagugcugggauugccggugug

SEQ ID NO: 32193 - RNA, 22 nt, Human
gaccucgugauccacucaucuc

SEQ ID NO: 32194 - RNA, 24 nt, Human
uaccucgcgaacacguuuccaaaa

SEQ ID NO: 32195 - RNA, 24 nt, Human
ugguauugggaauaauaccucaca

SEQ ID NO: 32196 - RNA, 24 nt, Human
uacuccagccugagugacagagcg

SEQ ID NO: 32197 - RNA, 24 nt, Human
uggagugggacaaccagacccgau

SEQ ID NO: 32198 - RNA, 24 nt, Human
uaacggaccuggaaauccaugacg

SEQ ID NO: 32199 - RNA, 24 nt, Human
acugguuggcggccggcaagaaaa

SEQ ID NO: 32200 - RNA, 24 nt, Human
uagcuguuuucgcuuuuauguacu

SEQ ID NO: 32201 - RNA, 24 nt, Human
uggcaaggcgagggcacccuggcc

SEQ ID NO: 32202 - RNA, 24 nt, Human
cugcggccgaugagaagaagaagg

SEQ ID NO: 32203 - RNA, 24 nt, Human
guagggcaaaggacaucuuccuuu

SEQ ID NO: 32204 - RNA, 24 nt, Human
agacaccaacggguccaguucuuc

SEQ ID NO: 32205 - RNA, 24 nt, Human
uucauguugcacccuuguuucuac

SEQ ID NO: 32206 - RNA, 24 nt, Human
ucaaugauuguguagccaaugccu

SEQ ID NO: 32207 - RNA, 24 nt, Human
ugagaauggcaaaauuagucgccu

SEQ ID NO: 32208 - RNA, 24 nt, Human
uacaccacucccaagaagaauaag

SEQ ID NO: 32209 - RNA, 24 nt, Human
agcacugaccgaccauugccauuu

SEQ ID NO: 32210 - RNA, 24 nt, Human
uucacuuuaccuucugccaaaugc

SEQ ID NO: 32211 - RNA, 24 nt, Human
uggcugaggagcagcuuuagguau

SEQ ID NO: 32212 - RNA, 24 nt, Human
cagaaucccgggcuugggagcccc

SEQ ID NO: 32213 - RNA, 24 nt, Human
ugccaaggagguagcugaugaggu

SEQ ID NO: 32214 - RNA, 24 nt, Human
aaggacuccuacgugggcgacgag

SEQ ID NO: 32215 - RNA, 24 nt, Human
acucuguucuuccgccgcuccgcc

SEQ ID NO: 32216 - RNA, 24 nt, Human
gcuacagcuucaccaccacggccg

SEQ ID NO: 32217 - RNA, 24 nt, Human
ugacgagcuaugcauacugaacaa

SEQ ID NO: 32218 - RNA, 24 nt, Human
uccuggggccacuguugggggugg

SEQ ID NO: 32219 - RNA, 24 nt, Human
ucagaacacaugggugcaucauca

SEQ ID NO: 32220 - RNA, 24 nt, Human
caagaccggggaggugccgcugga

SEQ ID NO: 32221 - RNA, 24 nt, Human
ucaaaguacuguaaucccagcguu

SEQ ID NO: 32222 - RNA, 24 nt, Human
ccuugguucaagggauggaaaguc

SEQ ID NO: 32223 - RNA, 24 nt, Human
cuuguaccucuuuuugguuggcua

SEQ ID NO: 32224 - RNA, 24 nt, Human
uacuugcuccccgccggcucaggc

SEQ ID NO: 32225 - RNA, 24 nt, Human
uggcuucuaaguaauuccaauuuu

SEQ ID NO: 32226 - RNA, 24 nt, Human
ggagaagccagucuggggcuuggg

SEQ ID NO: 32227 - RNA, 24 nt, Human
acagugagaucuggaugucauuac

SEQ ID NO: 32228 - RNA, 24 nt, Human
uaggguaacguggacucauuccag

SEQ ID NO: 32229 - RNA, 24 nt, Human
uuggagcagggacuguggaguuua

SEQ ID NO: 32230 - RNA, 22 nt, Human
ugcuaugcugaucgagaaguuu

SEQ ID NO: 32231 - RNA, 24 nt, Human
ucugugguccggcuccuggugaca

SEQ ID NO: 32232 - RNA, 23 nt, Human
gaccggcuucucccgccccggcc

SEQ ID NO: 32233 - RNA, 24 nt, Human
agaggaacacaaggacugcccaga

SEQ ID NO: 32234 - RNA, 24 nt, Human
cagcagggggggcgggagcucuac

SEQ ID NO: 32235 - RNA, 24 nt, Human
uauuagggauaauauucauuuagc

SEQ ID NO: 32236 - RNA, 24 nt, Human
uaaugggucucaaaauucugugac

SEQ ID NO: 32237 - RNA, 23 nt, Human
gagcagcagaacaagguccugga

SEQ ID NO: 32238 - RNA, 24 nt, Human
ucuccggucauuccugguagauau

SEQ ID NO: 32239 - RNA, 24 nt, Human
agacuauaucuguagaaacuuuau

SEQ ID NO: 32240 - RNA, 24 nt, Human
uugauugcguggcccaugugaugc

SEQ ID NO: 32241 - RNA, 24 nt, Human
uaaugggucucaaaauucugugac

SEQ ID NO: 32242 - RNA, 23 nt, Human
ucuugcuuacaaggagggguuac

SEQ ID NO: 32243 - RNA, 23 nt, Human
ugugcagaagaaauggaaggauu

SEQ ID NO: 32244 - RNA, 24 nt, Human
uugccagucuccucauccauguau

SEQ ID NO: 32245 - RNA, 18 nt, Human
uaucaaggaagggcaggc

SEQ ID NO: 32246 - RNA, 24 nt, Human
uucaaauuucuuucuuuuuuaauu

SEQ ID NO: 32247 - RNA, 24 nt, Human
uuaaugccugugcaauugccauua

SEQ ID NO: 32248 - RNA, 24 nt, Human
gggcaaugaugagacuguggcacu

SEQ ID NO: 32249 - RNA, 18 nt, Human
uaacuggcuucuguccca

SEQ ID NO: 32250 - RNA, 24 nt, Human
acaaagcaagagaagaagcagaga

SEQ ID NO: 32251 - RNA, 21 nt, Human
cauuggacaggacauccagcc

SEQ ID NO: 32252 - RNA, 24 nt, Human
aaggacaucacagguaaacugaag

SEQ ID NO: 32253 - RNA, 23 nt, Human
aagagcacugaucguacuggcuc

SEQ ID NO: 32254 - RNA, 24 nt, Human
gaguuugcuuacacuuacgcugcc

SEQ ID NO: 32255 - RNA, 24 nt, Human
uacuaagugacuaaggggcaggua

SEQ ID NO: 32256 - RNA, 24 nt, Human
uucaucacucaggauggcuuguga

SEQ ID NO: 32257 - RNA, 24 nt, Human
uuaucugcuguuccgacuugguuu

SEQ ID NO: 32258 - RNA, 24 nt, Human
aauuaagcacauuccucgauucca

SEQ ID NO: 32259 - RNA, 22 nt, Human
ucuccagcgacaaggcuaaggc

SEQ ID NO: 32260 - RNA, 24 nt, Human
ucccuccaacaacagcaaggagga

SEQ ID NO: 32261 - RNA, 24 nt, Human
gaggugauucauuaaauuaauaga

SEQ ID NO: 32262 - RNA, 24 nt, Human
ugagucuuccagggucaagucauu

SEQ ID NO: 32263 - RNA, 24 nt, Human
agaagaagaagaaauggcaaagag

SEQ ID NO: 32264 - RNA, 24 nt, Human
uugaagcccuguagaaugacacgc

SEQ ID NO: 32265 - RNA, 24 nt, Human
uagaauacaaugauugucuguccg

SEQ ID NO: 32266 - RNA, 20 nt, Human
uaucaaggaagggcaggccu

SEQ ID NO: 32267 - RNA, 24 nt, Human
ucugaucaauccuucuuuuucucu

SEQ ID NO: 32268 - RNA, 24 nt, Human
ucaauuuuuauuuugguuuucuua

SEQ ID NO: 32269 - RNA, 24 nt, Human
uaaugggucucaaaauucugugac

SEQ ID NO: 32270 - RNA, 24 nt, Human
uuucugaagcucugaagcucauuc

SEQ ID NO: 32271 - RNA, 24 nt, Human
ucaccuggugaugaaaucccauca

SEQ ID NO: 32272 - RNA, 24 nt, Human
uugaaauuaggaucauuuuaccau

SEQ ID NO: 32273 - RNA, 24 nt, Human
uaccauacauuuuguaaaaaacac

SEQ ID NO: 32274 - RNA, 24 nt, Human
ugaauaaaaaugacauuucuuugu

SEQ ID NO: 32275 - RNA, 20 nt, Human
ugaauacggcaucgaggaua

SEQ ID NO: 32276 - RNA, 24 nt, Human
uaguauuugggcuccacuucacug

SEQ ID NO: 32277 - RNA, 24 nt, Human
ugagcucggaggggaauugccuuu

SEQ ID NO: 32278 - RNA, 24 nt, Human
uuuggggucucgcugaccucgcug

SEQ ID NO: 32279 - RNA, 23 nt, Human
uggccagguggcgaauucgggac

SEQ ID NO: 32280 - RNA, 24 nt, Human
ucaucauggcuuacgcacugaaga

SEQ ID NO: 32281 - RNA, 24 nt, Human
uauuaggguaauauucauuuagcc

SEQ ID NO: 32282 - RNA, 24 nt, Human
ucccugugaaaggcaggcucgggu

SEQ ID NO: 32283 - RNA, 24 nt, Human
cccccauucuccaacccccaagcu

SEQ ID NO: 32284 - RNA, 24 nt, Human
cugggcccgcgcgcugcuccggga

SEQ ID NO: 32285 - RNA, 17 nt, Human
ucaguugguaacauccc

SEQ ID NO: 32286 - RNA, 19 nt, Human
uacguuauuugagucuagc

SEQ ID NO: 32287 - RNA, 24 nt, Human
ugcacuguggucuugccccuuggc

SEQ ID NO: 32288 - RNA, 24 nt, Human
ucccucagacggccuugggccagu

SEQ ID NO: 32289 - RNA, 24 nt, Human
ccccugguggcagcgaccagaucc

SEQ ID NO: 32290 - RNA, 24 nt, Human
uaacauaggggucaagauccaggg

SEQ ID NO: 32291 - RNA, 23 nt, Human
ccagcgaauuacaggcggcggaa

SEQ ID NO: 32292 - RNA, 24 nt, Human
uggcauggugcccaucguggagcc

SEQ ID NO: 32293 - RNA, 24 nt, Human
uggcuuuuauguaugauaccuaau

SEQ ID NO: 32294 - RNA, 24 nt, Human
uccccagcauuuucucaccuggau

SEQ ID NO: 32295 - RNA, 24 nt, Human
uacacaggugccuaugcaaguaca

SEQ ID NO: 32296 - RNA, 23 nt, Human
ccagaaaaggugucacacuuuug

SEQ ID NO: 32297 - RNA, 24 nt, Human
agguaugugcaggggacuccugga

SEQ ID NO: 32298 - RNA, 24 nt, Human
uguggagacucagucugugaagcu

SEQ ID NO: 32299 - RNA, 21 nt, Human
uucaagggauggaaagucacc

SEQ ID NO: 32300 - RNA, 20 nt, Human
ucacugguauugccccccuc

SEQ ID NO: 32301 - RNA, 24 nt, Human
ugccgaguggccugacuggcagcc

SEQ ID NO: 32302 - RNA, 24 nt, Human
ucaugguggagcugguagaugagc

SEQ ID NO: 32303 - RNA, 24 nt, Human
gcgcagcuucaggggccgcaaggg

SEQ ID NO: 32304 - RNA, 19 nt, Human
ucugaccggcuucaagcuc

SEQ ID NO: 32305 - RNA, 24 nt, Human
uuccugguggcgcagaugagugag

SEQ ID NO: 32306 - RNA, 24 nt, Human
uaacacacauggagcugccaccuc

SEQ ID NO: 32307 - RNA, 24 nt, Human
ugacaauacuugggaaccugaaga

SEQ ID NO: 32308 - RNA, 17 nt, Human
ucugacagugaaucuga

SEQ ID NO: 32309 - RNA, 24 nt, Human
cggauagacacuacacaccuccug

SEQ ID NO: 32310 - RNA, 24 nt, Human
uggugucgaccuugcaggcagcgg

SEQ ID NO: 32311 - RNA, 24 nt, Human
cccccgacuguccagagaagguug

SEQ ID NO: 32312 - RNA, 24 nt, Human
ggugcaauugacgcagcuugguau

SEQ ID NO: 32313 - RNA, 24 nt, Human
uccaccacuacuggccaucugauc

SEQ ID NO: 32314 - RNA, 24 nt, Human
ccuugggucacagggauggaaagu

SEQ ID NO: 32315 - RNA, 24 nt, Human
uaccugguuggaaggcugugucgu

SEQ ID NO: 32316 - RNA, 24 nt, Human
ugauaucgaucgguaccugcgaga

SEQ ID NO: 32317 - RNA, 24 nt, Human
ugccugaauuuucggcauuggcgu

SEQ ID NO: 32318 - RNA, 20 nt, Human
ccgcgccgccuuugugcugc

SEQ ID NO: 32319 - RNA, 24 nt, Human
uggcaucacugagaagguguuuuc

SEQ ID NO: 32320 - RNA, 24 nt, Human
uacaaagugacuaauggggcuuuu

SEQ ID NO: 32321 - RNA, 23 nt, Human
ccgcauaccuaccagcauaaucu

SEQ ID NO: 32322 - RNA, 24 nt, Human
agaguaguuucauguaguacuuau

SEQ ID NO: 32323 - RNA, 24 nt, Human
aaucucagcaaacauauuucuuuc

SEQ ID NO: 32324 - RNA, 24 nt, Human
uggggccacacuaguccccaccag

SEQ ID NO: 32325 - RNA, 24 nt, Human
cagcgggcagggcugcccuguaac

SEQ ID NO: 32326 - RNA, 20 nt, Human
gcccaugugugcacauccug

SEQ ID NO: 32327 - RNA, 24 nt, Human
agggauaccucagaguuuccaaag

SEQ ID NO: 32328 - RNA, 20 nt, Human
ugauaugcuccagaauaaag

SEQ ID NO: 32329 - RNA, 24 nt, Human
uuagagaagagcggcauugugcuc

SEQ ID NO: 32330 - RNA, 23 nt, Human
uucgcuccccuuugucaaggccg

SEQ ID NO: 32331 - RNA, 24 nt, Human
gcugcaguuccucccucuucccua

SEQ ID NO: 32332 - RNA, 24 nt, Human
ugcauggaucugccaaauuuuaua

SEQ ID NO: 32333 - RNA, 24 nt, Human
uuggaauaucgacuuggaaggagc

SEQ ID NO: 32334 - RNA, 24 nt, Human
uuggagaaacaaagggcccgcagg

SEQ ID NO: 32335 - RNA, 24 nt, Human
ucuuguguucacuuuaaaacccau

SEQ ID NO: 32336 - RNA, 24 nt, Human
ugucagaggcuccuguggauuugg

SEQ ID NO: 32337 - RNA, 24 nt, Human
uuuugcauuccuguggauuauucu

SEQ ID NO: 32338 - RNA, 24 nt, Human
ucuauauacuggugaguuuauggg

SEQ ID NO: 32339 - RNA, 24 nt, Human
cauuuacucuugagggaacagguc

SEQ ID NO: 32340 - RNA, 24 nt, Human
uggaggcugagugccguuugcggu

SEQ ID NO: 32341 - RNA, 24 nt, Human
aagaaacucacagauaaguccauu

SEQ ID NO: 32342 - RNA, 24 nt, Human
uuaguggcuuugggguaguuuaug

SEQ ID NO: 32343 - RNA, 24 nt, Human
uuggaaguguggagucaccagaag

SEQ ID NO: 32344 - RNA, 24 nt, Human
uuagaaauguucugaagggaguac

SEQ ID NO: 32345 - RNA, 24 nt, Human
ucaauaauagagacuuuaaguaca

SEQ ID NO: 32346 - RNA, 24 nt, Human
ucacuugaagcuaucauugguggg

SEQ ID NO: 32347 - RNA, 24 nt, Human
ugccagacuuccguugagucacau

SEQ ID NO: 32348 - RNA, 18 nt, Human
ugucucuucccgccgccc

SEQ ID NO: 32349 - RNA, 24 nt, Human
uccuucacuccaguuaauggcacu

SEQ ID NO: 32350 - RNA, 24 nt, Human
uugaagaauuugacuguuagguuu

SEQ ID NO: 32351 - RNA, 24 nt, Human
ucuggaguucuguuuccuccuguu

SEQ ID NO: 32352 - RNA, 24 nt, Human
ccuacagucccagcuacuaggcag

SEQ ID NO: 32353 - RNA, 18 nt, Human
aaccuguacccgugcaca

SEQ ID NO: 32354 - RNA, 24 nt, Human
ucccgggguaaucacuccccaaua

SEQ ID NO: 32355 - RNA, 24 nt, Human
ugaggcccggggauguaggcacug

SEQ ID NO: 32356 - RNA, 24 nt, Human
gauuauggcuucagcacucugccg

SEQ ID NO: 32357 - RNA, 24 nt, Human
uagcaaagggcagccagugugugc

SEQ ID NO: 32358 - RNA, 24 nt, Human
gcucaagugugauaaggaugagca

SEQ ID NO: 32359 - RNA, 24 nt, Human
aggcguuuaguuggaucauaucau

SEQ ID NO: 32360 - RNA, 24 nt, Human
uccuugguuccagaacccagcaau

SEQ ID NO: 32361 - RNA, 24 nt, Human
ugaaauacacccguggucuccgga

SEQ ID NO: 32362 - RNA, 24 nt, Human
cauugaacuaaaugcugagguuuu

SEQ ID NO: 32363 - RNA, 24 nt, Human
aaggacccaagagcgcggggcgau

SEQ ID NO: 32364 - RNA, 21 nt, Human
uggcauggucauguguaugca

SEQ ID NO: 32365 - RNA, 23 nt, Human
uuccucguaauuuucgcuugugg

SEQ ID NO: 32366 - RNA, 24 nt, Human
uacaacuuauagaaaagguaaagg

SEQ ID NO: 32367 - RNA, 24 nt, Human
cacaguucugucuuggccagggac

SEQ ID NO: 32368 - RNA, 24 nt, Human
ccgccgcccgaggucagccgcucc

SEQ ID NO: 32369 - RNA, 21 nt, Human
ucuggagaaacugcugccuca

SEQ ID NO: 32370 - RNA, 24 nt, Human
ggggagggugagugucuguguagg

SEQ ID NO: 32371 - RNA, 24 nt, Human
gagccccauccccgcgcugguggg

SEQ ID NO: 32372 - RNA, 24 nt, Human
uggccugaugauccacagcggaga

SEQ ID NO: 32373 - RNA, 24 nt, Human
ugugugccauugcccaggcagagu

SEQ ID NO: 32374 - RNA, 24 nt, Human
uauggcaagucacuuugacagaca

SEQ ID NO: 32375 - RNA, 24 nt, Human
uacaccacucccaagaagaauaag

SEQ ID NO: 32376 - RNA, 24 nt, Human
ugacagaggccucccuggccaggu

SEQ ID NO: 32377 - RNA, 24 nt, Human
caagguucacucguuagccccuca

SEQ ID NO: 32378 - RNA, 24 nt, Human
ucccugagacuuccuuagguuguc

SEQ ID NO: 32379 - RNA, 24 nt, Human
uuugcuccugacgucccucagaug

SEQ ID NO: 32380 - RNA, 24 nt, Human
uacaccacucccaagaagaauaag

SEQ ID NO: 32381 - RNA, 21 nt, Human
uaugacaucucaugcugaccc

SEQ ID NO: 32382 - RNA, 24 nt, Human
uuacuccagaaagacauauacgga

SEQ ID NO: 32383 - RNA, 23 nt, Human
aaagagccagugguuguugagac

SEQ ID NO: 32384 - RNA, 24 nt, Human
uuaguauucgggagaaaaacgugg

SEQ ID NO: 32385 - RNA, 24 nt, Human
aaccuuuuuaaaaaauggagauga

SEQ ID NO: 32386 - RNA, 24 nt, Human
uguacagucgacugcaaaugaaac

SEQ ID NO: 32387 - RNA, 24 nt, Human
uuucauggagaaguuacaugcggu

SEQ ID NO: 32388 - RNA, 24 nt, Human
uaagaugccccugaaagauguucc

SEQ ID NO: 32389 - RNA, 21 nt, Human
uugguccugaaauuuaagucu

SEQ ID NO: 32390 - RNA, 24 nt, Human
uuagauggcugauauuuucaaucu

SEQ ID NO: 32391 - RNA, 24 nt, Human
ugauagcauuuuccccaugcuccu

SEQ ID NO: 32392 - RNA, 24 nt, Human
uggcuaugguuccucuuccgcauc

SEQ ID NO: 32393 - RNA, 24 nt, Human
cgagguuccuugggucauggugcc

SEQ ID NO: 32394 - RNA, 22 nt, Human
aggcaggacucggcugagggcc

SEQ ID NO: 32395 - RNA, 24 nt, Human
uggaauuuuguguaucugggcuuc

SEQ ID NO: 32396 - RNA, 24 nt, Human
acagagcuuuucuccaugagcuau

SEQ ID NO: 32397 - RNA, 24 nt, Human
aucaccuauuuaauaaagacgaaa

SEQ ID NO: 32398 - RNA, 22 nt, Human
ucagggccaaacccggggagga

SEQ ID NO: 32399 - RNA, 24 nt, Human
cuccggggccacgguccuaaacgg

SEQ ID NO: 32400 - RNA, 24 nt, Human
uacguaguaaaauuuucuuuauca

SEQ ID NO: 32401 - RNA, 24 nt, Human
uccuugaggagcgaaggcuaguga

SEQ ID NO: 32402 - RNA, 22 nt, Human
uuuggccuggcacggggggggg

SEQ ID NO: 32403 - RNA, 24 nt, Human
uaugcaaauugcaagaaaucgcag

SEQ ID NO: 32404 - RNA, 24 nt, Human
uaugauagauguggccgucuugua

SEQ ID NO: 32405 - RNA, 24 nt, Human
cucgauuaaaauacacacaucuua

SEQ ID NO: 32406 - RNA, 24 nt, Human
gcucuugggaugcaggcucagccc

SEQ ID NO: 32407 - RNA, 20 nt, Human
ucccgggguuaucacucccc

SEQ ID NO: 32408 - RNA, 24 nt, Human
gcagcaacccaggcauuugugccc

SEQ ID NO: 32409 - RNA, 24 nt, Human
uaaugggucucaaaauucugugac

SEQ ID NO: 32410 - RNA, 24 nt, Human
ugagcacuuuaacuggcacauucu

SEQ ID NO: 32411 - RNA, 24 nt, Human
ugaccugaaauuuuuaguauuuac

SEQ ID NO: 32412 - RNA, 19 nt, Human
uagaauauaaaagauauua

SEQ ID NO: 32413 - RNA, 24 nt, Human
ugcauguguauuaucacacacaua

SEQ ID NO: 32414 - RNA, 24 nt, Human
acgaagaucugagugcuagguaua

SEQ ID NO: 32415 - RNA, 24 nt, Human
acucaguuucccuacaggugaucu

SEQ ID NO: 32416 - RNA, 24 nt, Human
ccaggccaucgaagcucgcgcgcc

SEQ ID NO: 32417 - RNA, 21 nt, Human
acgcggccaaugugggcugga

SEQ ID NO: 32418 - RNA, 21 nt, Human
uucaagggauggaaagucacc

SEQ ID NO: 32419 - RNA, 24 nt, Human
ucaacacccggcuucggaagcugg

SEQ ID NO: 32420 - RNA, 24 nt, Human
uugcuggggacgacgcuccccgag

SEQ ID NO: 32421 - RNA, 24 nt, Human
cuuuucaugaacuauucuggucgu

SEQ ID NO: 32422 - RNA, 19 nt, Human
aaggaggugugcgacgcgu

SEQ ID NO: 32423 - RNA, 24 nt, Human
augcauaguauaguaggaagcuau

SEQ ID NO: 32424 - RNA, 24 nt, Human
ugacaagcccuugcgccugccucu

SEQ ID NO: 32425 - RNA, 21 nt, Human
uucaagggauggaaagucacc

SEQ ID NO: 32426 - RNA, 24 nt, Human
uccaccacuacuggccaucugauc

SEQ ID NO: 32427 - RNA, 21 nt, Human
uucaagggauggaaagucacc

SEQ ID NO: 32428 - RNA, 21 nt, Human
uucaagggauggaaagucacc

SEQ ID NO: 32429 - RNA, 24 nt, Human
ugagaugggaaagggcuccuucaa

SEQ ID NO: 32430 - RNA, 21 nt, Human
uucaagggauggaaagucacc

SEQ ID NO: 32431 - RNA, 24 nt, Human
agaagguaauauucaguuaccaga

SEQ ID NO: 32432 - RNA, 24 nt, Human
ugggacuugagcuggacccauggg

SEQ ID NO: 32433 - RNA, 24 nt, Human
cugcauuccacucaucagcuucac

SEQ ID NO: 32434 - RNA, 24 nt, Human
agugugaaguauagggaagaacaa

SEQ ID NO: 32435 - RNA, 24 nt, Human
ucuguaugcucaccacgguguagg

SEQ ID NO: 32436 - RNA, 24 nt, Human
ugagaugggaaagggcuccuucaa

SEQ ID NO: 32437 - RNA, 21 nt, Human
aaguaugccugggucuuggau

SEQ ID NO: 32438 - RNA, 21 nt, Human
uucaagggauggaaagucacc

SEQ ID NO: 32439 - RNA, 21 nt, Human
uucaagggauggaaagucacc

SEQ ID NO: 32440 - RNA, 21 nt, Human
aaguaugccugggucuuggau

SEQ ID NO: 32441 - RNA, 21 nt, Human
uucaagggauggaaagucacc

SEQ ID NO: 32442 - RNA, 23 nt, Human
uugaaaaauuugagaaggaggcu

SEQ ID NO: 32443 - RNA, 24 nt, Human
ccauccguggggccaucauccugg

SEQ ID NO: 32444 - RNA, 24 nt, Human
ggccggggccgaggccgcggagcu

SEQ ID NO: 32445 - RNA, 24 nt, Human
cacuauuugagaauaagagguccc

SEQ ID NO: 32446 - RNA, 24 nt, Human
uacacugaagauaaagcaaaaggc

SEQ ID NO: 32447 - RNA, 20 nt, Human
acuugggucugguuucuuuc

SEQ ID NO: 32448 - RNA, 24 nt, Human
uuccucagguuuguuuguagagca

SEQ ID NO: 32449 - RNA, 18 nt, Human
uggcugggauguuucuug

SEQ ID NO: 32450 - RNA, 24 nt, Human
cauuuucuuuugguaguuguuucu

SEQ ID NO: 32451 - RNA, 24 nt, Human
ugcucuggcaaccucgcaguguca

SEQ ID NO: 32452 - RNA, 24 nt, Human
ugacaguggcuuugguuugcuccu

SEQ ID NO: 32453 - RNA, 24 nt, Human
uuugaugugcacgucggcuugagu

SEQ ID NO: 32454 - RNA, 24 nt, Human
uugggggcccucgcuguguguugu

SEQ ID NO: 32455 - RNA, 24 nt, Human
uaaugggucucaaaauucugugac

SEQ ID NO: 32456 - RNA, 24 nt, Human
ucugaucuauaaaugcgguggcau

SEQ ID NO: 32457 - RNA, 21 nt, Human
uucaagggauggaaagucacc

SEQ ID NO: 32458 - RNA, 21 nt, Human
uucaagggauggaaagucacc

SEQ ID NO: 32459 - RNA, 24 nt, Human
ucugaucuauaaaugcgguggcgu

SEQ ID NO: 32460 - RNA, 24 nt, Human
ucccggagaguaaauccucuuucc

SEQ ID NO: 32461 - RNA, 24 nt, Human
ugggaggaagaucuccagcuucag

SEQ ID NO: 32462 - RNA, 24 nt, Human
agagaacaaaacuaauguuaauau

SEQ ID NO: 32463 - RNA, 24 nt, Human
uauauggauccaauggcaagauca

SEQ ID NO: 32464 - RNA, 24 nt, Human
uguguagggcuggaagcauuaccc

SEQ ID NO: 32465 - RNA, 21 nt, Human
uucaagggauggaaagucacc

SEQ ID NO: 32466 - RNA, 24 nt, Human
ucugaucuauaaaugcgguggcau

SEQ ID NO: 32467 - RNA, 24 nt, Human
gagugcgucauauguuguuccuag

SEQ ID NO: 32468 - RNA, 24 nt, Human
ugagaugggaaagggcuccuucaa

SEQ ID NO: 32469 - RNA, 21 nt, Human
uucaagggauggaaagucacc

SEQ ID NO: 32470 - RNA, 24 nt, Human
uaauuuuuuuuauaacuacacaga

SEQ ID NO: 32471 - RNA, 24 nt, Human
cuccccgacccauacagggccucc

SEQ ID NO: 32472 - RNA, 24 nt, Human
ggagcggagugggucgggcggggc

SEQ ID NO: 32473 - RNA, 24 nt, Human
gccugcuuuggccgcucaagggaa

SEQ ID NO: 32474 - RNA, 24 nt, Human
ucgaccauuuuccgcaccucucca

SEQ ID NO: 32475 - RNA, 21 nt, Human
gucaagggauggaaagucacc

SEQ ID NO: 32476 - RNA, 24 nt, Human
ucugaucuauaaaugcgguggcau

SEQ ID NO: 32477 - RNA, 24 nt, Human
uguugaauuuuuaucaaaagcuuu

SEQ ID NO: 32478 - RNA, 24 nt, Human
ucaaggagaaugcuuccaguuuuu

SEQ ID NO: 32479 - RNA, 24 nt, Human
uaaugggucucaaaauucugugac

SEQ ID NO: 32480 - RNA, 24 nt, Human
ugguggucauccuggcagcuggug

SEQ ID NO: 32481 - RNA, 24 nt, Human
uggaaagugagguauuaauacuug

SEQ ID NO: 32482 - RNA, 24 nt, Human
uaaaggcccuuauucccacaaauc

SEQ ID NO: 32483 - RNA, 24 nt, Human
gggaagccaaaggucagcucaaaa

SEQ ID NO: 32484 - RNA, 24 nt, Human
uuccaggaucgcgaggcagcagcg

SEQ ID NO: 32485 - RNA, 24 nt, Human
ucucaaacuugaucaggugcaacc

SEQ ID NO: 32486 - RNA, 24 nt, Human
cagcugcucggcugucccuaggag

SEQ ID NO: 32487 - RNA, 24 nt, Human
cuggcccccagaucugccccucca

SEQ ID NO: 32488 - RNA, 24 nt, Human
ugaacacagagguggaucaggcug

SEQ ID NO: 32489 - RNA, 23 nt, Human
uaaguagaagggaaguguaaggu

SEQ ID NO: 32490 - RNA, 24 nt, Human
ucaaagcuuaacauuugaaaccug

SEQ ID NO: 32491 - RNA, 24 nt, Human
uugcaugaaacauucuuaacguga

SEQ ID NO: 32492 - RNA, 17 nt, Human
ugagggaaaaaggacuu

SEQ ID NO: 32493 - RNA, 24 nt, Human
uguuuggauaaaaguugaugugug

SEQ ID NO: 32494 - RNA, 24 nt, Human
ugcauucuuaucaccuaguauaua

SEQ ID NO: 32495 - RNA, 24 nt, Human
ugaaggaaauuacaaaaaaaaaac

SEQ ID NO: 32496 - RNA, 24 nt, Human
ucaaagcacaugacuaaaaugaaa

SEQ ID NO: 32497 - RNA, 24 nt, Human
guggacuguccucuacagaaggaa

SEQ ID NO: 32498 - RNA, 24 nt, Human
uaucagacagcaauuagugaaaac

SEQ ID NO: 32499 - RNA, 24 nt, Human
cugggccaccugucagccccucgu

SEQ ID NO: 32500 - RNA, 24 nt, Human
ugagaagaccuuccgcaucgagag

SEQ ID NO: 32501 - RNA, 24 nt, Human
cucggcaucuguggacucugcgcu

SEQ ID NO: 32502 - RNA, 24 nt, Human
cauaccagcucaacagguucaauu

SEQ ID NO: 32503 - RNA, 24 nt, Human
gaaccacaccaucacgaucccgug

SEQ ID NO: 32504 - RNA, 24 nt, Human
uaacucggccgugaccagugcccc

SEQ ID NO: 32505 - RNA, 17 nt, Human
cauugcugaaagguggu

SEQ ID NO: 32506 - RNA, 24 nt, Human
uaccuuaucaaggacggaagguug

SEQ ID NO: 32507 - RNA, 24 nt, Human
uucaagacaugaugagaggaaguu

SEQ ID NO: 32508 - RNA, 24 nt, Human
acucugugcuuauaucaucacaga

SEQ ID NO: 32509 - RNA, 20 nt, Human
ugacuuauguaauucccuuu

SEQ ID NO: 32510 - RNA, 24 nt, Human
ugaagaacauuaccuaagagauua

SEQ ID NO: 32511 - RNA, 24 nt, Human
ucccugaggccaacucuuccugau

SEQ ID NO: 32512 - RNA, 24 nt, Human
uaaaaggagcagacuauuuuaaaa

SEQ ID NO: 32513 - RNA, 24 nt, Human
uaccggaucauacaauuaacugag

SEQ ID NO: 32514 - RNA, 24 nt, Human
uaggaacuguagaccccaaguuga

SEQ ID NO: 32515 - RNA, 24 nt, Human
ugagguauaauuuacugcaaagaa

SEQ ID NO: 32516 - RNA, 24 nt, Human
ugaaaacaaaagaacuucacugag

SEQ ID NO: 32517 - RNA, 24 nt, Human
ucugaucuauaaaugcgguggcau

SEQ ID NO: 32518 - RNA, 24 nt, Human
uauuuugucauauuuuuguaaaac

SEQ ID NO: 32519 - RNA, 24 nt, Human
cgcgcggacuggacgccacgccgc

SEQ ID NO: 32520 - RNA, 24 nt, Human
ccgccgcaccuuuguacgagccug

SEQ ID NO: 32521 - RNA, 24 nt, Human
cgggcacaggugggguccgucagg

SEQ ID NO: 32522 - RNA, 24 nt, Human
aacgccguugccaccgaggaggcg

SEQ ID NO: 32523 - RNA, 24 nt, Human
aucuauguuagcguuccuggaucc

SEQ ID NO: 32524 - RNA, 24 nt, Human
ugugaaggugaugagauuuccauc

SEQ ID NO: 32525 - RNA, 24 nt, Human
uaggaaagguuuacaagaaguuag

SEQ ID NO: 32526 - RNA, 24 nt, Human
uaaguaaaaacgcugggucaaaac

SEQ ID NO: 32527 - RNA, 24 nt, Human
ccagcuggucuuaugguaaaguua

SEQ ID NO: 32528 - RNA, 24 nt, Human
ugagagagcuuucucgugggcacc

SEQ ID NO: 32529 - RNA, 24 nt, Human
caccgcaacgggcaaacaugagcc

SEQ ID NO: 32530 - RNA, 24 nt, Human
gugaauauaacuucagagcuucgu

SEQ ID NO: 32531 - RNA, 24 nt, Human
uggcaacguuaggcacagucagac

SEQ ID NO: 32532 - RNA, 24 nt, Human
ccagugcagucucuuggcaucucu

SEQ ID NO: 32533 - RNA, 24 nt, Human
uggcaguacgggcccugcaccggg

SEQ ID NO: 32534 - RNA, 24 nt, Human
ugcggaucaagggccuguaccaag

SEQ ID NO: 32535 - RNA, 24 nt, Human
uguaauccccccuguacuuaccua

SEQ ID NO: 32536 - RNA, 24 nt, Human
uauuuuguugcugaucaaauacug

SEQ ID NO: 32537 - RNA, 24 nt, Human
aagcugccccccauuucuguaacc

SEQ ID NO: 32538 - RNA, 24 nt, Human
aaccugcaggcagaaccugaaagg

SEQ ID NO: 32539 - RNA, 24 nt, Human
cauugcacuccagccugggcgaca

SEQ ID NO: 32540 - RNA, 24 nt, Human
ugaguggaucaucugaggucagga

SEQ ID NO: 32541 - RNA, 19 nt, Human
uacuauguggccacaugcc

SEQ ID NO: 32542 - RNA, 24 nt, Human
uguauauuacacuggcuacuacuu

SEQ ID NO: 32543 - RNA, 23 nt, Human
ugucauaaacugccccagcucuu

SEQ ID NO: 32544 - RNA, 24 nt, Human
acacugcacuccagccugggcaag

SEQ ID NO: 32545 - RNA, 24 nt, Human
ucccuguacaguguuaccaucccc

SEQ ID NO: 32546 - RNA, 21 nt, Human
ugggaggggcugaauguggug

SEQ ID NO: 32547 - RNA, 24 nt, Human
aaggaaccauggccaacugugagc

SEQ ID NO: 32548 - RNA, 24 nt, Human
aagcguuuugagcagaaaggauuc

SEQ ID NO: 32549 - RNA, 21 nt, Human
gauucuguggagagugcagag

SEQ ID NO: 32550 - RNA, 24 nt, Human
ucaaagguagcacuuguugaaacu

SEQ ID NO: 32551 - RNA, 24 nt, Human
uagccacacaaauaaugagaguuu

SEQ ID NO: 32552 - RNA, 24 nt, Human
ugacuuuggcuucagcaacgaguu

SEQ ID NO: 32553 - RNA, 24 nt, Human
ucuggagccugggagucauccugu

SEQ ID NO: 32554 - RNA, 24 nt, Human
uugugggggauggaagaaugggau

SEQ ID NO: 32555 - RNA, 24 nt, Human
aagaaccaacccaggacagagcca

SEQ ID NO: 32556 - RNA, 24 nt, Human
uucaucuugugucuuauucaagua

SEQ ID NO: 32557 - RNA, 24 nt, Human
uauggcaagucacuuugacagaca

SEQ ID NO: 32558 - RNA, 24 nt, Human
ugagaauggcaaaauuagucgccu

SEQ ID NO: 32559 - RNA, 24 nt, Human
uacaccacucccaagaagaauaag

SEQ ID NO: 32560 - RNA, 24 nt, Human
ggaggccaacgagagugaggaggu

SEQ ID NO: 32561 - RNA, 24 nt, Human
uaagagaaagguccucaaagauuc

SEQ ID NO: 32562 - RNA, 24 nt, Human
uuggugccuucuuucaucaugccu

SEQ ID NO: 32563 - RNA, 24 nt, Human
cugcggccgaugagaagaagaagg

SEQ ID NO: 32564 - RNA, 24 nt, Human
uaccugaaaaaccggauuugauuc

SEQ ID NO: 32565 - RNA, 24 nt, Human
ugagauacgauaugauaaacaggc

SEQ ID NO: 32566 - RNA, 24 nt, Human
ugggaugaggguggagcaccacuc

SEQ ID NO: 32567 - RNA, 24 nt, Human
uugauuguaucauggugauuuaug

SEQ ID NO: 32568 - RNA, 24 nt, Human
uaagacccaaccagauaccaugau

SEQ ID NO: 32569 - RNA, 24 nt, Human
uuaaccuaagcuaguguguaugug

SEQ ID NO: 32570 - RNA, 24 nt, Human
aguagguagugucaagccagagau

SEQ ID NO: 32571 - RNA, 24 nt, Human
uaaggaccuguuuggugcagcagg

SEQ ID NO: 32572 - RNA, 24 nt, Human
aucauuguaaccaauccugucaga

SEQ ID NO: 32573 - RNA, 24 nt, Human
ugcauuguuaucauuaaccagucu

SEQ ID NO: 32574 - RNA, 24 nt, Human
uauuagggauaauauucauuuagc

SEQ ID NO: 32575 - RNA, 24 nt, Human
uaaugggucucaaaauucugugac

SEQ ID NO: 32576 - RNA, 24 nt, Human
ugugauaaacuggugacacgccuc

SEQ ID NO: 32577 - RNA, 24 nt, Human
uauuaaacacuucauuauaaaaua

SEQ ID NO: 32578 - RNA, 24 nt, Human
uaagauaggcuaggcuaagcuggg

SEQ ID NO: 32579 - RNA, 24 nt, Human
uacacauucaguuaaaaacuguac

SEQ ID NO: 32580 - RNA, 24 nt, Human
uguugugaaugggaaugggguaua

SEQ ID NO: 32581 - RNA, 24 nt, Human
uaaucugggggcgggguauagggg

SEQ ID NO: 32582 - RNA, 24 nt, Human
uuaccaccuugucagaauuuuuuc

SEQ ID NO: 32583 - RNA, 24 nt, Human
uaggaucaacauuggauaaagguc

SEQ ID NO: 32584 - RNA, 23 nt, Human
gaugacacuuaagaacuacuugu

SEQ ID NO: 32585 - RNA, 24 nt, Human
cuuugauucagcaagccacaacag

SEQ ID NO: 32586 - RNA, 21 nt, Human
uaucucaagcccagaaagaug

SEQ ID NO: 32587 - RNA, 24 nt, Human
ugaugugcggucgccugcccuucu

SEQ ID NO: 32588 - RNA, 24 nt, Human
ucacauggauggaauaaacuugug

SEQ ID NO: 32589 - RNA, 24 nt, Human
cauucuucacugagugcugcugac

SEQ ID NO: 32590 - RNA, 24 nt, Human
guaguacuuuuacacguuguauga

SEQ ID NO: 32591 - RNA, 24 nt, Human
ugggcacaagggcuuaauuuaugg

SEQ ID NO: 32592 - RNA, 24 nt, Human
acaaagcaagagaagaagcagaga

SEQ ID NO: 32593 - RNA, 21 nt, Human
cauuggacaggacauccagcc

SEQ ID NO: 32594 - RNA, 24 nt, Human
cagcggcagagagccauccucuau

SEQ ID NO: 32595 - RNA, 24 nt, Human
agcuggaagcgcaaggcagccgcc

SEQ ID NO: 32596 - RNA, 24 nt, Human
gacaccacuccucucugcagcacu

SEQ ID NO: 32597 - RNA, 24 nt, Human
cuccggguuuguuuggaaaauuuu

SEQ ID NO: 32598 - RNA, 24 nt, Human
acccgaguauggcugaccuuccug

SEQ ID NO: 32599 - RNA, 24 nt, Human
ucccccagacgugaugucucucuc

SEQ ID NO: 32600 - RNA, 24 nt, Human
cucccucaucccgucagcagcuag

SEQ ID NO: 32601 - RNA, 24 nt, Human
cacagaguauggaaguagcuccga

SEQ ID NO: 32602 - RNA, 24 nt, Human
uucccaugccccaggcuccugcag

SEQ ID NO: 32603 - RNA, 24 nt, Human
uaugggucccccaauggggauccc

SEQ ID NO: 32604 - RNA, 24 nt, Human
ugagaacuccaggauuguccugca

SEQ ID NO: 32605 - RNA, 23 nt, Human
ugcagguagguaggggauggcag

SEQ ID NO: 32606 - RNA, 24 nt, Human
ugagugcccagggcugaggguggc

SEQ ID NO: 32607 - RNA, 24 nt, Human
ucaggugguuuuuagugucugcaa

SEQ ID NO: 32608 - RNA, 24 nt, Human
uauccugccaacucuaucgugguc

SEQ ID NO: 32609 - RNA, 24 nt, Human
uugcaaaggccuuuucgccgcgaa

SEQ ID NO: 32610 - RNA, 24 nt, Human
ucaccccucccccgaaggaaaaac

SEQ ID NO: 32611 - RNA, 24 nt, Human
gcccagggccccuccacaccagcc

SEQ ID NO: 32612 - RNA, 24 nt, Human
ugugugccauugcccaggcagagu

SEQ ID NO: 32613 - RNA, 24 nt, Human
auccugccagucccggcguucaau

SEQ ID NO: 32614 - RNA, 24 nt, Human
uaaugggucucaaaauucugugac

SEQ ID NO: 32615 - RNA, 24 nt, Human
uuagcaacauggcugagccuuuca

SEQ ID NO: 32616 - RNA, 24 nt, Human
uaccaugcaggcuacuccauguuu

SEQ ID NO: 32617 - RNA, 24 nt, Human
cguuccgagcccccgccgccgucg

SEQ ID NO: 32618 - RNA, 24 nt, Human
ugcauuguuaucauuaaccagucu

SEQ ID NO: 32619 - RNA, 24 nt, Human
uaaugggucucaaaauucugugac

SEQ ID NO: 32620 - RNA, 24 nt, Human
uauuagggauaauauucauuuagc

SEQ ID NO: 32621 - RNA, 24 nt, Human
ugccaguaucacauaaugauaauc

SEQ ID NO: 32622 - RNA, 24 nt, Human
ugggaaggaccagcaggaggcagc

SEQ ID NO: 32623 - RNA, 24 nt, Human
uguggaugagagguuuccaggcug

SEQ ID NO: 32624 - RNA, 24 nt, Human
ugagauccucaucacgggacaccu

SEQ ID NO: 32625 - RNA, 24 nt, Human
acgcgcugcccggccagaaaacgg

SEQ ID NO: 32626 - RNA, 24 nt, Human
agcccggagcgcgccggcuggacc

SEQ ID NO: 32627 - RNA, 24 nt, Human
ccuuacucccucuuuaagauugcg

SEQ ID NO: 32628 - RNA, 24 nt, Human
ugaaggcacaccacugaaauggca

SEQ ID NO: 32629 - RNA, 24 nt, Human
ugagauaacugaaagggaagcaga

SEQ ID NO: 32630 - RNA, 24 nt, Human
uagcagagauuaccaaugcuugcu

SEQ ID NO: 32631 - RNA, 23 nt, Human
auggagcccugaauguugaccug

SEQ ID NO: 32632 - RNA, 23 nt, Human
uaccguggugacgugguuuccca

SEQ ID NO: 32633 - RNA, 24 nt, Human
aucacuguccuuccacuaaucacu

SEQ ID NO: 32634 - RNA, 24 nt, Human
uuacugcuuccauuuuaggacacu

SEQ ID NO: 32635 - RNA, 24 nt, Human
aaugugauccugcuuacuguaacu

SEQ ID NO: 32636 - RNA, 24 nt, Human
cuggcccuucucuucaucaaaucc

SEQ ID NO: 32637 - RNA, 24 nt, Human
aucauuguaaaucuuuuuuuuuuu

SEQ ID NO: 32638 - RNA, 24 nt, Human
gugaagaucagauauguaugaaug

SEQ ID NO: 32639 - RNA, 23 nt, Human
uucaaauaguccugggcgugcuu

SEQ ID NO: 32640 - RNA, 24 nt, Human
ucagguggaugcgagaaauaucca

SEQ ID NO: 32641 - RNA, 24 nt, Human
ucccugcuuccccuucaccauucc

SEQ ID NO: 32642 - RNA, 24 nt, Human
auaguucuuaacgguuuuucucug

SEQ ID NO: 32643 - RNA, 24 nt, Human
uggaagacucagaguccccagagu

SEQ ID NO: 32644 - RNA, 20 nt, Human
cagccgaagaguugcaggug

SEQ ID NO: 32645 - RNA, 20 nt, Human
cuggagcagccgggcggagg

SEQ ID NO: 32646 - RNA, 24 nt, Human
uugauucugcuuuaccacauaugu

SEQ ID NO: 32647 - RNA, 21 nt, Human
gucaauauccauaaaugaagg

SEQ ID NO: 32648 - RNA, 24 nt, Human
uguuagucaagaguccucaguagg

SEQ ID NO: 32649 - RNA, 24 nt, Human
uaaaugguaaacgugauaucauga

SEQ ID NO: 32650 - RNA, 24 nt, Human
ucauggacuaaacuaggucagagu

SEQ ID NO: 32651 - RNA, 24 nt, Human
cuccugccgguucccgagggcugg

SEQ ID NO: 32652 - RNA, 24 nt, Human
uugaugcuucgugucucuugcggg

SEQ ID NO: 32653 - RNA, 24 nt, Human
ucuuucuucucucuucgguccucc

SEQ ID NO: 32654 - RNA, 24 nt, Human
ugaaagggggaaacaaagaacagc

SEQ ID NO: 32655 - RNA, 24 nt, Human
uuucuauuuuagugguuaaaaugu

SEQ ID NO: 32656 - RNA, 23 nt, Human
uggccugaugauccacagcggag

SEQ ID NO: 32657 - RNA, 24 nt, Human
ugugugccauugcccaggcagagu

SEQ ID NO: 32658 - RNA, 24 nt, Human
caugaagacaauguugugcuccuc

SEQ ID NO: 32659 - RNA, 22 nt, Human
ucccugaggagaaagguguggc

SEQ ID NO: 32660 - RNA, 20 nt, Human
uacaacuugcuguuacuuga

SEQ ID NO: 32661 - RNA, 24 nt, Human
uggcaggaaugggaggcauccaga

SEQ ID NO: 32662 - RNA, 24 nt, Human
uugggcccaugaagaaagugcugg

SEQ ID NO: 32663 - RNA, 24 nt, Human
cagcuuccuuauguacagcgauga

SEQ ID NO: 32664 - RNA, 24 nt, Human
ugccgugugacuggugggaugaac

SEQ ID NO: 32665 - RNA, 24 nt, Human
ugaaggagacgaauguauuuggug

SEQ ID NO: 32666 - RNA, 24 nt, Human
agccagagauucggggcaguagau

SEQ ID NO: 32667 - RNA, 24 nt, Human
uuaacauugcauaaacacuuuuca

SEQ ID NO: 32668 - RNA, 24 nt, Human
uaagaaaacacacucuuuuuuaca

SEQ ID NO: 32669 - RNA, 24 nt, Human
cugguccacguacuccuguagcuc

SEQ ID NO: 32670 - RNA, 24 nt, Human
ugccugggugcugcgggagaaguc

SEQ ID NO: 32671 - RNA, 24 nt, Human
gucucuuuuuuggggaugagagca

SEQ ID NO: 32672 - RNA, 20 nt, Human
ccccugaggcgcagccgccu

SEQ ID NO: 32673 - RNA, 24 nt, Human
aaggucuaugugaucggaggcuuu

SEQ ID NO: 32674 - RNA, 24 nt, Human
agugcaguggcgugaucucggcuc

SEQ ID NO: 32675 - RNA, 24 nt, Human
ugcauuguuaucauuaaccagucu

SEQ ID NO: 32676 - RNA, 24 nt, Human
uauuagggauaauauucauuuagc

SEQ ID NO: 32677 - RNA, 24 nt, Human
ucucgcuuugucacccuggcugga

SEQ ID NO: 32678 - RNA, 21 nt, Human
uaccacuggcacuucuauagg

SEQ ID NO: 32679 - RNA, 24 nt, Human
augaagaugaaccuacuguaguac

SEQ ID NO: 32680 - RNA, 24 nt, Human
ugugcagaagaaauggaaggauuc

SEQ ID NO: 32681 - RNA, 24 nt, Human
uucaaauuucuuucuuuuuuaauu

SEQ ID NO: 32682 - RNA, 22 nt, Human
uggcuuauuuguuuguauucaa

SEQ ID NO: 32683 - RNA, 24 nt, Human
uauuuuggguuucuuacaaagggu

SEQ ID NO: 32684 - RNA, 24 nt, Human
ugcauuguuaucauuaaccagucu

SEQ ID NO: 32685 - RNA, 24 nt, Human
uaaugggucucaaaauucugugac

SEQ ID NO: 32686 - RNA, 24 nt, Human
uauuagggauaauauucauuuagc

SEQ ID NO: 32687 - RNA, 24 nt, Human
uaaguguuugcagccauauguguc

SEQ ID NO: 32688 - RNA, 24 nt, Human
uauugccuugcacagaaguuuuua

SEQ ID NO: 32689 - RNA, 24 nt, Human
aagcgcuccaaggauuuuuugauu

SEQ ID NO: 32690 - RNA, 24 nt, Human
uaccugucaacgguuuguggagaa

SEQ ID NO: 32691 - RNA, 24 nt, Human
gggccggggugcugaaggagaagc

SEQ ID NO: 32692 - RNA, 24 nt, Human
uacaaugcugcuggcuucaaagcc

SEQ ID NO: 32693 - RNA, 24 nt, Human
accaguauugucacuuuauuuuuu

SEQ ID NO: 32694 - RNA, 24 nt, Human
cacuccagccuggugugacagagc

SEQ ID NO: 32695 - RNA, 17 nt, Human
uacaacccuuucauuuu

SEQ ID NO: 32696 - RNA, 24 nt, Human
cggcaucgggggcggcaucggggg

SEQ ID NO: 32697 - RNA, 24 nt, Human
ucucugugugaugaccuuggaugc

SEQ ID NO: 32698 - RNA, 24 nt, Human
uaccagggugauuggauggauuuc

SEQ ID NO: 32699 - RNA, 24 nt, Human
ucccaaauuaacuuguguccaaaa

SEQ ID NO: 32700 - RNA, 24 nt, Human
ugacuucagugaauauuuugguau

SEQ ID NO: 32701 - RNA, 24 nt, Human
uguaagauggauaauguguauaag

SEQ ID NO: 32702 - RNA, 24 nt, Human
cagaaugugcuugccauaggugua

SEQ ID NO: 32703 - RNA, 24 nt, Human
uguaacauguauacuuggucuuga

SEQ ID NO: 32704 - RNA, 20 nt, Human
uguaaaagcuucaauuccug

SEQ ID NO: 32705 - RNA, 24 nt, Human
ugaaucaucaaaugcauugaaaag

SEQ ID NO: 32706 - RNA, 23 nt, Human
uugaaaaauuugagaaggaggcu

SEQ ID NO: 32707 - RNA, 21 nt, Human
caccggcauggacaagucacc

SEQ ID NO: 32708 - RNA, 23 nt, Human
uagauugucaaauucuucuuacu

SEQ ID NO: 32709 - RNA, 24 nt, Human
uauuuuguauucuucauggugccc

SEQ ID NO: 32710 - RNA, 24 nt, Human
uugguggugaagugaguagcugca

SEQ ID NO: 32711 - RNA, 24 nt, Human
ucuguaguggauguacuacagcuc

SEQ ID NO: 32712 - RNA, 23 nt, Human
ucaagggucguguguuugaagug

SEQ ID NO: 32713 - RNA, 24 nt, Human
augaagauccugugaacucuggcg

SEQ ID NO: 32714 - RNA, 24 nt, Human
uguggagggacucaguggccuccg

SEQ ID NO: 32715 - RNA, 24 nt, Human
caucacacgccucuuugugguguc

SEQ ID NO: 32716 - RNA, 24 nt, Human
auuaauuucacugacugacaggcu

SEQ ID NO: 32717 - RNA, 24 nt, Human
cagcaggcgggggcagccuggcag

SEQ ID NO: 32718 - RNA, 24 nt, Human
ucguucugccaucguuuccugaac

SEQ ID NO: 32719 - RNA, 24 nt, Human
uaaaugguaaacgugauaucauga

SEQ ID NO: 32720 - RNA, 21 nt, Human
gucaauauccauaaaugaagg

SEQ ID NO: 32721 - RNA, 24 nt, Human
ucauggacuaaacuaggucagagu

SEQ ID NO: 32722 - RNA, 24 nt, Human
cugggccucugauuuccccaucug

SEQ ID NO: 32723 - RNA, 24 nt, Human
ugggggacacaggcacagggcaag

SEQ ID NO: 32724 - RNA, 24 nt, Human
cucccggguggcaucaagugacuc

SEQ ID NO: 32725 - RNA, 24 nt, Human
aacaaaacaaagaaauaagggucu

SEQ ID NO: 32726 - RNA, 24 nt, Human
ugaggcuagggaggguccuccucc

SEQ ID NO: 32727 - RNA, 24 nt, Human
uauuauuggaccaacuccgaaagu

SEQ ID NO: 32728 - RNA, 24 nt, Human
gaguguguguuaucuucauaaccc

SEQ ID NO: 32729 - RNA, 24 nt, Human
guccuuuuaguaugaacugggaug

SEQ ID NO: 32730 - RNA, 24 nt, Human
accaggggccaaccgggauaaaau

SEQ ID NO: 32731 - RNA, 24 nt, Human
uauugcuuucaauuuauccacugu

SEQ ID NO: 32732 - RNA, 24 nt, Human
uaaccaaaaacauaaagcgauaau

SEQ ID NO: 32733 - RNA, 24 nt, Human
ucccggagcccuuagagagacuca

SEQ ID NO: 32734 - RNA, 24 nt, Human
guuccaggccaccccugcccccag

SEQ ID NO: 32735 - RNA, 22 nt, Human
ugaaggaguggggcugccggug

SEQ ID NO: 32736 - RNA, 24 nt, Human
ugacagggagucugcccaaaguug

SEQ ID NO: 32737 - RNA, 24 nt, Human
uucguccaggugcuggaagaugcu

SEQ ID NO: 32738 - RNA, 24 nt, Human
ugaaguagagccauucaaaaugcc

SEQ ID NO: 32739 - RNA, 24 nt, Human
ucucgcucuguugcccaggcugga

SEQ ID NO: 32740 - RNA, 24 nt, Human
aaagugcuggcguuacagguauga

SEQ ID NO: 32741 - RNA, 24 nt, Human
ucuggauucgguucuuggcuggga

SEQ ID NO: 32742 - RNA, 24 nt, Human
ugguguggcgcauagugcagagcc

SEQ ID NO: 32743 - RNA, 24 nt, Human
uucacagcaaaguguggugcgauc

SEQ ID NO: 32744 - RNA, 24 nt, Human
uagcauguccuccuccccuacuug

SEQ ID NO: 32745 - RNA, 24 nt, Human
uccuugaucaucuuccucugcagu

SEQ ID NO: 32746 - RNA, 24 nt, Human
ucuguucuuagaauuucugucucu

SEQ ID NO: 32747 - RNA, 24 nt, Human
ucccuaagucagcaagaggaacau

SEQ ID NO: 32748 - RNA, 24 nt, Human
uuacugcuagaacggagugaacgg

SEQ ID NO: 32749 - RNA, 24 nt, Human
agacaauuuuuggagauacugagg

SEQ ID NO: 32750 - RNA, 24 nt, Human
aaaugccaaggugagacucguaca

SEQ ID NO: 32751 - RNA, 24 nt, Human
agagguggacuauuuguacacaua

SEQ ID NO: 32752 - RNA, 24 nt, Human
ugugcagaagaaauggaaggauuc

SEQ ID NO: 32753 - RNA, 24 nt, Human
uucaaauuucuuucuuuuuuaauu

SEQ ID NO: 32754 - RNA, 24 nt, Human
uguaaucuuauugucuccugagua

SEQ ID NO: 32755 - RNA, 24 nt, Human
uagcuuuucuuacuucaguuuuua

SEQ ID NO: 32756 - RNA, 24 nt, Human
uugaaaauagucauuuugaauccu

SEQ ID NO: 32757 - RNA, 23 nt, Human
cguggcuaaaucuuuaccuucuc

SEQ ID NO: 32758 - RNA, 24 nt, Human
ugccccgucugauugccaagguug

SEQ ID NO: 32759 - RNA, 24 nt, Human
aggcaauggaaucaagacaguuau

SEQ ID NO: 32760 - RNA, 24 nt, Human
cuagaacauuccagaggucgccca

SEQ ID NO: 32761 - RNA, 24 nt, Human
uccgugcgcguugcugcggccgug

SEQ ID NO: 32762 - RNA, 24 nt, Human
uugaucuugaagaaacugggcgug

SEQ ID NO: 32763 - RNA, 24 nt, Human
aggaaggagauauagugaagagga

SEQ ID NO: 32764 - RNA, 24 nt, Human
uacagauuguccacacaguauacu

SEQ ID NO: 32765 - RNA, 24 nt, Human
uggaauggauagguaacuugggug

SEQ ID NO: 32766 - RNA, 24 nt, Human
cauuuuuguuuuaagaguuggggg

SEQ ID NO: 32767 - RNA, 24 nt, Human
cuagugccaguuuucuuguuugcc

SEQ ID NO: 32768 - RNA, 21 nt, Human
uggaauagauaaauucaugga

SEQ ID NO: 32769 - RNA, 24 nt, Human
gcccguugcuguggcucuagacac

SEQ ID NO: 32770 - RNA, 24 nt, Human
gacuaugguguuugcgucauucau

SEQ ID NO: 32771 - RNA, 24 nt, Human
gggcagcaacgaacgggugugaac

SEQ ID NO: 32772 - RNA, 24 nt, Human
uggaagugggcagcaagaucuacg

SEQ ID NO: 32773 - RNA, 24 nt, Human
auaggacaauacaaaguaucuuca

SEQ ID NO: 32774 - RNA, 24 nt, Human
ccgcaggucauaacuggccgaugg

SEQ ID NO: 32775 - RNA, 24 nt, Human
cuggaugggagggguccccucgga

SEQ ID NO: 32776 - RNA, 24 nt, Human
cacagguucugccucagauucucc

SEQ ID NO: 32777 - RNA, 24 nt, Human
ucugugggcaccugcugcucugga

SEQ ID NO: 32778 - RNA, 23 nt, Human
cacuguuuggucugaggggcauc

SEQ ID NO: 32779 - RNA, 24 nt, Human
uuguucagacggugucucuccugu

SEQ ID NO: 32780 - RNA, 24 nt, Human
ucuauggugggagccuuaaaaggg

SEQ ID NO: 32781 - RNA, 24 nt, Human
gggaugcauuuuaccacgcuguau

SEQ ID NO: 32782 - RNA, 17 nt, Human
aacccucugugucgccu

SEQ ID NO: 32783 - RNA, 24 nt, Human
guucauuagcgugaagauguugga

SEQ ID NO: 32784 - RNA, 24 nt, Human
ucggcagugggguaacggaaaaag

SEQ ID NO: 32785 - RNA, 24 nt, Human
ugggacagguaucgguuugucacc

SEQ ID NO: 32786 - RNA, 24 nt, Human
uggguagccacuauccuugucuag

SEQ ID NO: 32787 - RNA, 24 nt, Human
aauguuuuuaaagcuguucaugau

SEQ ID NO: 32788 - RNA, 24 nt, Human
uaauuuaaaaaggcaaaacaaugc

SEQ ID NO: 32789 - RNA, 24 nt, Human
ucguacuuucuugcuauucacaac

SEQ ID NO: 32790 - RNA, 24 nt, Human
uguggugggcagggcacuguugau

SEQ ID NO: 32791 - RNA, 24 nt, Human
uguuuucccaaaucaccuaaauau

SEQ ID NO: 32792 - RNA, 24 nt, Human
cagcgugucaggaaccucagagca

SEQ ID NO: 32793 - RNA, 24 nt, Human
uauuacaauucacuggccgcguuu

SEQ ID NO: 32794 - RNA, 24 nt, Human
aauuagccaaccaugagucauuua

SEQ ID NO: 32795 - RNA, 24 nt, Human
ccagagguggaggccacggaggca

SEQ ID NO: 32796 - RNA, 24 nt, Human
gggcaugaaaaccggcaggguguu

SEQ ID NO: 32797 - RNA, 24 nt, Human
uuuagaguaucuuggcaaaauggu

SEQ ID NO: 32798 - RNA, 24 nt, Human
ucuuuggucuuuggaagugggcag

SEQ ID NO: 32799 - RNA, 24 nt, Human
guacuccacaguucauuucuucac

SEQ ID NO: 32800 - RNA, 24 nt, Human
ggccgagugggcaccaucauggga

SEQ ID NO: 32801 - RNA, 24 nt, Human
uugacaauuuuauuuucacauuuc

SEQ ID NO: 32802 - RNA, 24 nt, Human
uuucuaguugcuaagauuugccaa

SEQ ID NO: 32803 - RNA, 24 nt, Human
uuugccagucagccuaguucuucu

SEQ ID NO: 32804 - RNA, 24 nt, Human
uguucagccccuaaacgaauggca

SEQ ID NO: 32805 - RNA, 24 nt, Human
cucugguuuaggcgcccgaaaggc

SEQ ID NO: 32806 - RNA, 24 nt, Human
uacaagcugucagccccaaggcag

SEQ ID NO: 32807 - RNA, 24 nt, Human
uggccugaugauccacagcggaga

SEQ ID NO: 32808 - RNA, 24 nt, Human
ugugugccauugcccaggcagagu

SEQ ID NO: 32809 - RNA, 24 nt, Human
ucagaacuuuagauaggauguugg

SEQ ID NO: 32810 - RNA, 24 nt, Human
ugaauggaaguaaggacuuuuuuu

SEQ ID NO: 32811 - RNA, 24 nt, Human
ugcauuguuaucauuaaccagucu

SEQ ID NO: 32812 - RNA, 24 nt, Human
ucuacaaguguuugcuauuuacaa

SEQ ID NO: 32813 - RNA, 24 nt, Human
gcugaaguauguccuguuuuucuu

SEQ ID NO: 32814 - RNA, 24 nt, Human
cagcauccaccguuaccacucaga

SEQ ID NO: 32815 - RNA, 24 nt, Human
ugaaggguuuuguguguuuaggcc

SEQ ID NO: 32816 - RNA, 24 nt, Human
gugaauuguaccuauuucugauga

SEQ ID NO: 32817 - RNA, 24 nt, Human
agagguuuuguauugagggccagu

SEQ ID NO: 32818 - RNA, 24 nt, Human
agccuggauggugcagacagcacu

SEQ ID NO: 32819 - RNA, 22 nt, Human
ugaggagaacauuaacucuuca

SEQ ID NO: 32820 - RNA, 24 nt, Human
ucccuuugcuuugucuacccgcug

SEQ ID NO: 32821 - RNA, 24 nt, Human
ucauugauuguguggugagaaucc

SEQ ID NO: 32822 - RNA, 24 nt, Human
caugucccuucgcgggaaggcugu

SEQ ID NO: 32823 - RNA, 21 nt, Human
ucuggagaaacugcugccuca

SEQ ID NO: 32824 - RNA, 24 nt, Human
gggcacuccgugauggccccugcc

SEQ ID NO: 32825 - RNA, 24 nt, Human
ggacuuagguguggcccuuccaca

SEQ ID NO: 32826 - RNA, 24 nt, Human
aagcauuuggaccgagccucuuuc

SEQ ID NO: 32827 - RNA, 24 nt, Human
ccuuuugggauggccccaucuguu

SEQ ID NO: 32828 - RNA, 24 nt, Human
gggaggccggauuacaauucacug

SEQ ID NO: 32829 - RNA, 24 nt, Human
uggaaaaaucgcggaaaauuuuug

SEQ ID NO: 32830 - RNA, 21 nt, Human
uaaaugagagagaacgaagac

SEQ ID NO: 32831 - RNA, 24 nt, Human
ugagaagcaaaauacaaaaguuag

SEQ ID NO: 32832 - RNA, 24 nt, Human
cagcucaaauggaauauugucgca

SEQ ID NO: 32833 - RNA, 24 nt, Human
uggaauccaguucccuuuagaccu

SEQ ID NO: 32834 - RNA, 24 nt, Human
ugguaguggauuagugaaagucuc

SEQ ID NO: 32835 - RNA, 24 nt, Human
uccgagggccggcccggcgggggg

SEQ ID NO: 32836 - RNA, 24 nt, Human
agggaaguugggacgaagcccagg

SEQ ID NO: 32837 - RNA, 24 nt, Human
ugcuguacuucaucagaaaacacc

SEQ ID NO: 32838 - RNA, 24 nt, Human
ugagagccuggaacacaugacccu

SEQ ID NO: 32839 - RNA, 24 nt, Human
cuugcacaaguugcggcagcugcc

SEQ ID NO: 32840 - RNA, 24 nt, Human
cagcggcagagagccauuccucua

SEQ ID NO: 32841 - RNA, 24 nt, Human
uauggcaagucacuuugacagaca

SEQ ID NO: 32842 - RNA, 24 nt, Human
ugagaauggcaaaauuagucgccu

SEQ ID NO: 32843 - RNA, 24 nt, Human
uacaccacucccaagaagaauaag

SEQ ID NO: 32844 - RNA, 24 nt, Human
aauuaauuauuuaacacgaauuca

SEQ ID NO: 32845 - RNA, 24 nt, Human
uuaaaccuguuuuauggauggcag

SEQ ID NO: 32846 - RNA, 24 nt, Human
uguguaaagccaguuuuuaugauu

SEQ ID NO: 32847 - RNA, 24 nt, Human
ugaauagcaaauucugguauaucg

SEQ ID NO: 32848 - RNA, 24 nt, Human
auggagcauggacuuuugcuaacu

SEQ ID NO: 32849 - RNA, 24 nt, Human
cuuuucaacaguuucacauccagc

SEQ ID NO: 32850 - RNA, 24 nt, Human
gugcagcaccaccagcguguccag

SEQ ID NO: 32851 - RNA, 24 nt, Human
accuaguacuuugagaaaguuaua

SEQ ID NO: 32852 - RNA, 24 nt, Human
aaagugcugagauuacacgcauga

SEQ ID NO: 32853 - RNA, 24 nt, Human
uagaggaggcugaagugcuugaca

SEQ ID NO: 32854 - RNA, 24 nt, Human
ucuguaauucaguguuccaaccac

SEQ ID NO: 32855 - RNA, 19 nt, Human
gggaaugucuguguccuug

SEQ ID NO: 32856 - RNA, 24 nt, Human
ccuguccccacaacucucccuggg

SEQ ID NO: 32857 - RNA, 24 nt, Human
uaaauagggggccaugggaggggg

SEQ ID NO: 32858 - RNA, 24 nt, Human
uguaaaauucauugcuuguggaau

SEQ ID NO: 32859 - RNA, 24 nt, Human
aaaguuaccagaauuuauaauuua

SEQ ID NO: 32860 - RNA, 24 nt, Human
ugcauuguuaucauuaaccagucu

SEQ ID NO: 32861 - RNA, 24 nt, Human
uauuagggauaauauucauuuagc

SEQ ID NO: 32862 - RNA, 24 nt, Human
uaaugggucucaaaauucugugac

SEQ ID NO: 32863 - RNA, 24 nt, Human
cccacguuuuccucuucuccucuu

SEQ ID NO: 32864 - RNA, 24 nt, Human
aagcacacccuuuuaagacuacuu

SEQ ID NO: 32865 - RNA, 24 nt, Human
acagacuacgagggaguuugacag

SEQ ID NO: 32866 - RNA, 24 nt, Human
uaagagaaggccaaaguuucuuga

SEQ ID NO: 32867 - RNA, 24 nt, Human
uuacagaacggguuggggucgaga

SEQ ID NO: 32868 - RNA, 24 nt, Human
ucagauaguggccuaaaaaaauuu

SEQ ID NO: 32869 - RNA, 24 nt, Human
gucacauuaagcaaacaacauagg

SEQ ID NO: 32870 - RNA, 24 nt, Human
uauuguccauacaguagcgggaau

SEQ ID NO: 32871 - RNA, 24 nt, Human
uucccuuuugggggccccuuuauu

SEQ ID NO: 32872 - RNA, 24 nt, Human
uguguuguuugccccccggcugau

SEQ ID NO: 32873 - RNA, 24 nt, Human
augaagcaucacauaggucgguga

SEQ ID NO: 32874 - RNA, 24 nt, Human
uccacuugcugaacaggucaaggc

SEQ ID NO: 32875 - RNA, 24 nt, Human
ucugcauucucgcuuccuggaggg

SEQ ID NO: 32876 - RNA, 21 nt, Human
ucuggagaaacugcugccuca

SEQ ID NO: 32877 - RNA, 24 nt, Human
uguguaugcucugguggugguguc

SEQ ID NO: 32878 - RNA, 24 nt, Human
uaaaauuuccuucugggauuaaca

SEQ ID NO: 32879 - RNA, 19 nt, Human
uguguugaggagggcugcc

SEQ ID NO: 32880 - RNA, 24 nt, Human
ugggaugaauuccaaauucuguug

SEQ ID NO: 32881 - RNA, 24 nt, Human
ugugauaugcuuauacacuuacac

SEQ ID NO: 32882 - RNA, 24 nt, Human
ugaaagucucguggcggcgggacc

SEQ ID NO: 32883 - RNA, 24 nt, Human
ccccaggugcugccucagccaggg

SEQ ID NO: 32884 - RNA, 24 nt, Human
agagaggauggaucacagggucua

SEQ ID NO: 32885 - RNA, 24 nt, Human
uauaucaaguuugucucugaaaua

SEQ ID NO: 32886 - RNA, 24 nt, Human
ugcaguugguggaggcucgcgggc

SEQ ID NO: 32887 - RNA, 24 nt, Human
uaaaggcaucauucaaaaggauuu

SEQ ID NO: 32888 - RNA, 24 nt, Human
uuuagacuugacgcaacgggaggu

SEQ ID NO: 32889 - RNA, 24 nt, Human
aacuguaucccguugaugcacuaa

SEQ ID NO: 32890 - RNA, 24 nt, Human
aaagcagcaauucuauguucauag

SEQ ID NO: 32891 - RNA, 24 nt, Human
auguaccagugcugccacgggagc

SEQ ID NO: 32892 - RNA, 24 nt, Human
caccccucauccugucucggauug

SEQ ID NO: 32893 - RNA, 24 nt, Human
uggugcuggacgccuggcacgggg

SEQ ID NO: 32894 - RNA, 24 nt, Human
ucuaggaauacuaguauaucgcuc

SEQ ID NO: 32895 - RNA, 20 nt, Human
augacccugugcaaguuuuc

SEQ ID NO: 32896 - RNA, 24 nt, Human
uaagggaacuauuauguccauguu

SEQ ID NO: 32897 - RNA, 24 nt, Human
uaaguuuaauguuaauuccaugcu

SEQ ID NO: 32898 - RNA, 23 nt, Human
ucugcuggucucccaccucccgc

SEQ ID NO: 32899 - RNA, 24 nt, Human
cucccuugaaacccugggccacuc

SEQ ID NO: 32900 - RNA, 24 nt, Human
ugcccgaagcgcgugccgcaguuc

SEQ ID NO: 32901 - RNA, 24 nt, Human
ucccgaggugcaucugcaggagcu

SEQ ID NO: 32902 - RNA, 20 nt, Human
ugcuggggggucgggggcag

SEQ ID NO: 32903 - RNA, 24 nt, Human
cgagggcaaggguggcccugaagg

SEQ ID NO: 32904 - RNA, 24 nt, Human
cgaugugggcucuguuuuggguuc

SEQ ID NO: 32905 - RNA, 24 nt, Human
uaacggccgcgguacccuaaaccg

SEQ ID NO: 32906 - RNA, 24 nt, Human
cuaugaguguggcgaaaaaaggga

SEQ ID NO: 32907 - RNA, 24 nt, Human
cagccuccugaguaccuaagggag

SEQ ID NO: 32908 - RNA, 24 nt, Human
guucgggugaugaugguuccacgu

SEQ ID NO: 32909 - RNA, 24 nt, Human
guucgggugaugaugguuccacgu

SEQ ID NO: 32910 - RNA, 24 nt, Human
ugaaaauguuaaaguguuugaguc

SEQ ID NO: 32911 - RNA, 24 nt, Human
uggaagcauuuucugugcuuugau

SEQ ID NO: 32912 - RNA, 24 nt, Human
aggaagcacaaaagacuuguugag

SEQ ID NO: 32913 - RNA, 24 nt, Human
ugagguccccagucuacguaggaa

SEQ ID NO: 32914 - RNA, 24 nt, Human
aaggagcuggcuuuguggggcugc

SEQ ID NO: 32915 - RNA, 24 nt, Human
aggcaggagaaucacuugaacccg

SEQ ID NO: 32916 - RNA, 24 nt, Human
uauuacagggaaauaagaacacug

SEQ ID NO: 32917 - RNA, 24 nt, Human
ucuacagucuucacaugccccacu

SEQ ID NO: 32918 - RNA, 24 nt, Human
uaauuugagaggaaaaacuauuaa

SEQ ID NO: 32919 - RNA, 24 nt, Human
uucaagcuaugucauaccugccuc

SEQ ID NO: 32920 - RNA, 24 nt, Human
uuaguagagaugggauuucaccau

SEQ ID NO: 32921 - RNA, 24 nt, Human
uacccugcacccagaacuuaguag

SEQ ID NO: 32922 - RNA, 24 nt, Human
ucucacuuugucacccaggcugga

SEQ ID NO: 32923 - RNA, 24 nt, Human
ccagggaaaucaaaguugcuacaa

SEQ ID NO: 32924 - RNA, 24 nt, Human
cuggaucuugaucuucugcgagug

SEQ ID NO: 32925 - RNA, 24 nt, Human
acugaaguccuggaccuugaccgu

SEQ ID NO: 32926 - RNA, 24 nt, Human
uccacuggcgaaagaugccuuucu

SEQ ID NO: 32927 - RNA, 24 nt, Human
uaguucagauugaucuuaggucaa

SEQ ID NO: 32928 - RNA, 24 nt, Human
uagagugguggcucccagaauccc

SEQ ID NO: 32929 - RNA, 24 nt, Human
ugucagggugggcacaggguccuc

SEQ ID NO: 32930 - RNA, 24 nt, Human
uggcagagaauacagucagucagg

SEQ ID NO: 32931 - RNA, 24 nt, Human
ucccugagccaugacugcuugacu

SEQ ID NO: 32932 - RNA, 24 nt, Human
gggaagguauuuauugauccacac

SEQ ID NO: 32933 - RNA, 24 nt, Human
agagcugaaccaugucaaggguag

SEQ ID NO: 32934 - RNA, 24 nt, Human
cuuuuaaacaaccagaucccacaa

SEQ ID NO: 32935 - RNA, 24 nt, Human
aggcaggcaagcggauuuuugguc

SEQ ID NO: 32936 - RNA, 24 nt, Human
ucgaauggacacauuaccagugaa

SEQ ID NO: 32937 - RNA, 24 nt, Human
ggagcaccuggagcgcaugaagcg

SEQ ID NO: 32938 - RNA, 24 nt, Human
ugaaaaacugaauucugcaacaga

SEQ ID NO: 32939 - RNA, 23 nt, Human
uuacaacaaucgagugcuggaca

SEQ ID NO: 32940 - RNA, 24 nt, Human
aagggcuuugagaaaaggcuuuga

SEQ ID NO: 32941 - RNA, 24 nt, Human
agaaaccacgaguucccuccauuu

SEQ ID NO: 32942 - RNA, 24 nt, Human
cuaguuuaaucugcuaauaugaaa

SEQ ID NO: 32943 - RNA, 18 nt, Human
ucaauaucacuuaucaaa

SEQ ID NO: 32944 - RNA, 24 nt, Human
uccagcagauucaaagccaggcac

SEQ ID NO: 32945 - RNA, 21 nt, Human
uucacagucugggacguggga

SEQ ID NO: 32946 - RNA, 24 nt, Human
uaguuaccagaguguacagauuuu

SEQ ID NO: 32947 - RNA, 24 nt, Human
aaagaggccccugagagcauguuu

SEQ ID NO: 32948 - RNA, 24 nt, Human
aggcggcauggaucucagcgagcu

SEQ ID NO: 32949 - RNA, 24 nt, Human
cauaugguccaauaucaaagggaa

SEQ ID NO: 32950 - RNA, 24 nt, Human
uagcauugaaggacucggggauau

SEQ ID NO: 32951 - RNA, 24 nt, Human
uagcauucgaaggacucggggaua

SEQ ID NO: 32952 - RNA, 24 nt, Human
ugaaggacucguggauaucuaaca

SEQ ID NO: 32953 - RNA, 24 nt, Human
uagcauucgaaggacucggggaua

SEQ ID NO: 32954 - RNA, 24 nt, Human
uagcauugaaggacucggggauau

SEQ ID NO: 32955 - RNA, 24 nt, Human
uaucagaguaacgagaagacaaac

SEQ ID NO: 32956 - RNA, 24 nt, Human
uaaagugccuucagccaagaccau

SEQ ID NO: 32957 - RNA, 24 nt, Human
aagaggccaggguggccacgggug

SEQ ID NO: 32958 - RNA, 24 nt, Human
cuccccuacucggggcacaggggu

SEQ ID NO: 32959 - RNA, 24 nt, Human
uuauauccauuugagagaugagga

SEQ ID NO: 32960 - RNA, 24 nt, Human
uucacugccgcucugucugcaaac

SEQ ID NO: 32961 - RNA, 24 nt, Human
uacucgggauuuuuccuacaaaaa

SEQ ID NO: 32962 - RNA, 24 nt, Human
uucacauuauuucccucaucuuag

SEQ ID NO: 32963 - RNA, 24 nt, Human
uaguagguugcucaccaauuucug

SEQ ID NO: 32964 - RNA, 20 nt, Human
ugggaugcuggccuuaagau

SEQ ID NO: 32965 - RNA, 24 nt, Human
gggaacucacacgcugacccccga

SEQ ID NO: 32966 - RNA, 24 nt, Human
ugaggaguaaguguacaaugugau

SEQ ID NO: 32967 - RNA, 24 nt, Human
uuuuucuuuggggauucgguccgg

SEQ ID NO: 32968 - RNA, 24 nt, Human
aacaaguaugcuuggggagucuuc

SEQ ID NO: 32969 - RNA, 24 nt, Human
aagaacacuuuuuggggcagccuu

SEQ ID NO: 32970 - RNA, 24 nt, Human
acuuugagggguguuggagagggg

SEQ ID NO: 32971 - RNA, 24 nt, Human
caacgagcuaaagcucagauuguc

SEQ ID NO: 32972 - RNA, 24 nt, Human
acugugcccuuccccuccugaaag

SEQ ID NO: 32973 - RNA, 24 nt, Human
ucaguuaagguuauuguugugggu

SEQ ID NO: 32974 - RNA, 22 nt, Human
uuugaacuaugauuuaguagca

SEQ ID NO: 32975 - RNA, 24 nt, Human
ccuugcugcaaacugcuuuucuug

SEQ ID NO: 32976 - RNA, 24 nt, Human
aagcaggagaaucacuugaaccca

SEQ ID NO: 32977 - RNA, 22 nt, Human
uggguccuggucuccucugugc

SEQ ID NO: 32978 - RNA, 24 nt, Human
ucagucuucuccuaagagugacaa

SEQ ID NO: 32979 - RNA, 24 nt, Human
uaauuuuuagacagaagcaggaca

SEQ ID NO: 32980 - RNA, 23 nt, Human
uuaagaccuuuuuuucuugagua

SEQ ID NO: 32981 - RNA, 24 nt, Human
uguccaggaucaacgggauaccau

SEQ ID NO: 32982 - RNA, 24 nt, Human
ucccucacaugcacaguucacagu

SEQ ID NO: 32983 - RNA, 24 nt, Human
ucugcagccuguggaccccagccc

SEQ ID NO: 32984 - RNA, 24 nt, Human
agacuauaucuguagaaacuuuau

SEQ ID NO: 32985 - RNA, 24 nt, Human
uugauugcguggcccaugugaugc

SEQ ID NO: 32986 - RNA, 24 nt, Human
uuugcuauuucuucuagcaaauuu

SEQ ID NO: 32987 - RNA, 24 nt, Human
uguaaaacaucaacucagccaggc

SEQ ID NO: 32988 - RNA, 24 nt, Human
uacgcgagcgcgcgcgcccucugg

SEQ ID NO: 32989 - RNA, 24 nt, Human
cauaaccagggacaccaaacaguu

SEQ ID NO: 32990 - RNA, 24 nt, Human
gggaauauuuugaggguuuuuauu

SEQ ID NO: 32991 - RNA, 24 nt, Human
agcuguuuuggccugugucucccu

SEQ ID NO: 32992 - RNA, 24 nt, Human
uuuguuaaauuaauaaaacaugac

SEQ ID NO: 32993 - RNA, 24 nt, Human
uugaagccaguaauuagagacauc

SEQ ID NO: 32994 - RNA, 24 nt, Human
uuaguauacagacgacagugaacu

SEQ ID NO: 32995 - RNA, 21 nt, Human
ucacgagggggauguggcacc

SEQ ID NO: 32996 - RNA, 24 nt, Human
ugagaagugggugagggcaugcaa

SEQ ID NO: 32997 - RNA, 24 nt, Human
uaguaugcagguuggucagggcag

SEQ ID NO: 32998 - RNA, 24 nt, Human
ugcauuguuaucauuaaccagucu

SEQ ID NO: 32999 - RNA, 24 nt, Human
uauuagggauaauauucauuuagc

SEQ ID NO: 33000 - RNA, 24 nt, Human
uuuaacuuuuuuaaugggucucaa

SEQ ID NO: 33001 - RNA, 24 nt, Human
ucccugggcagagcuaggacaggg

SEQ ID NO: 33002 - RNA, 24 nt, Human
uaccuggauuuuaggacuggauuu

SEQ ID NO: 33003 - RNA, 24 nt, Human
uacaguggacucagcccugcaacu

SEQ ID NO: 33004 - RNA, 24 nt, Human
uauuggcaucacucaccagagaag

SEQ ID NO: 33005 - RNA, 24 nt, Human
aacuguaucccguugaugcacuaa

SEQ ID NO: 33006 - RNA, 24 nt, Human
aaagcagcaauucuauguucauag

SEQ ID NO: 33007 - RNA, 24 nt, Human
uaagacuaggggcuugguauauau

SEQ ID NO: 33008 - RNA, 24 nt, Human
ucacuguaagcauccaguaggcag

SEQ ID NO: 33009 - RNA, 24 nt, Human
ucagcuuuugggucaucugggucc

SEQ ID NO: 33010 - RNA, 24 nt, Human
uacucuugucuaauauuaacuagu

SEQ ID NO: 33011 - RNA, 24 nt, Human
uaauguacagaacuaaauuuuuua

SEQ ID NO: 33012 - RNA, 24 nt, Human
uuaacauucacugauguagauuaa

SEQ ID NO: 33013 - RNA, 24 nt, Human
uugaaagguauauuaaaauuaagg

SEQ ID NO: 33014 - RNA, 17 nt, Human
uauagcauguuugaauu

SEQ ID NO: 33015 - RNA, 24 nt, Human
ucugccagccaaaauucuuugccu

SEQ ID NO: 33016 - RNA, 24 nt, Human
uagcagcuacggguccucuggcuc

SEQ ID NO: 33017 - RNA, 17 nt, Human
uaccuggcugcgugugc

SEQ ID NO: 33018 - RNA, 24 nt, Human
uuuaagcuaaauugccuuuuaaau

SEQ ID NO: 33019 - RNA, 24 nt, Human
cagcauucuggggcuuguaacacu

SEQ ID NO: 33020 - RNA, 24 nt, Human
cauucagagacagaguuucaccgu

SEQ ID NO: 33021 - RNA, 24 nt, Human
uaugaccaacugaaagagugggaa

SEQ ID NO: 33022 - RNA, 24 nt, Human
ugugcagaagaaauggaaggauuc

SEQ ID NO: 33023 - RNA, 24 nt, Human
uaucaaggaagggcaggcgugaug

SEQ ID NO: 33024 - RNA, 24 nt, Human
uucaaauuucuuucuuuuuuaauu

SEQ ID NO: 33025 - RNA, 24 nt, Human
cccaguagcccggccgcgugacca

SEQ ID NO: 33026 - RNA, 24 nt, Human
cacgcuguagaacacgcggccgug

SEQ ID NO: 33027 - RNA, 23 nt, Human
uggaaaaaaaaauaaaaaucuga

SEQ ID NO: 33028 - RNA, 23 nt, Human
aagcgacccaaagguggauaguc

SEQ ID NO: 33029 - RNA, 24 nt, Human
accacaauggauuuaugcauucaa

SEQ ID NO: 33030 - RNA, 24 nt, Human
uggcaagaugaugaagaaagcugg

SEQ ID NO: 33031 - RNA, 24 nt, Human
ugccugggcugaggucuugggggc

SEQ ID NO: 33032 - RNA, 24 nt, Human
ucccagucuccucuuccaacucug

SEQ ID NO: 33033 - RNA, 24 nt, Human
ugauggggcgaggaggggugcugg

SEQ ID NO: 33034 - RNA, 24 nt, Human
uggcaaacacgguauaaaacaagu

SEQ ID NO: 33035 - RNA, 21 nt, Human
aacauuuuuuacagcaaaacc

SEQ ID NO: 33036 - RNA, 24 nt, Human
ggagaguaaaguaggcaagaauga

SEQ ID NO: 33037 - RNA, 24 nt, Human
uagguuauuggggaacagguggug

SEQ ID NO: 33038 - RNA, 24 nt, Human
ucaggagugcaacgagguaaaagc

SEQ ID NO: 33039 - RNA, 24 nt, Human
caggacaccagccccaucuugcag

SEQ ID NO: 33040 - RNA, 19 nt, Human
uacaggcucgcaccugggg

SEQ ID NO: 33041 - RNA, 24 nt, Human
ucaccaagucuggaugaccacuac

SEQ ID NO: 33042 - RNA, 24 nt, Human
uuuguauuuugaacaaaaauagca

SEQ ID NO: 33043 - RNA, 24 nt, Human
uagaaaguuaacauuucaggagca

SEQ ID NO: 33044 - RNA, 24 nt, Human
uucgcgcguuacggcgccgccucc

SEQ ID NO: 33045 - RNA, 24 nt, Human
gccccggguucccguggcuaccgg

SEQ ID NO: 33046 - RNA, 24 nt, Human
ggagcagaugauaggcucggccug

SEQ ID NO: 33047 - RNA, 24 nt, Human
gauggcaccaugccagacacgggu

SEQ ID NO: 33048 - RNA, 24 nt, Human
uuagaauuggaauuacuuccuuac

SEQ ID NO: 33049 - RNA, 24 nt, Human
aggaaugccugggagugggggugc

SEQ ID NO: 33050 - RNA, 24 nt, Human
ugacgggaaccaggaacuaugaag

SEQ ID NO: 33051 - RNA, 23 nt, Human
ugagaggaacgcaagcgaggggu

SEQ ID NO: 33052 - RNA, 18 nt, Human
uacaccgugacgugugug

SEQ ID NO: 33053 - RNA, 24 nt, Human
cagcaggcugaacccagaagggua

SEQ ID NO: 33054 - RNA, 24 nt, Human
uccgcuccaucauggaggagugcg

SEQ ID NO: 33055 - RNA, 17 nt, Human
ugaaugagcaacauggg

SEQ ID NO: 33056 - RNA, 24 nt, Human
uguaaauaaaguuucauauguacc

SEQ ID NO: 33057 - RNA, 24 nt, Human
caucaaaauccaccaugaucaagu

SEQ ID NO: 33058 - RNA, 24 nt, Human
ccgcugcccgacgcuucuguucgg

SEQ ID NO: 33059 - RNA, 24 nt, Human
caccguggagcuuguugaugagcu

SEQ ID NO: 33060 - RNA, 24 nt, Human
ucccugggaagcccaaaggacuuu

SEQ ID NO: 33061 - RNA, 24 nt, Human
uacacuuuguaaaucuaaagagaa

SEQ ID NO: 33062 - RNA, 24 nt, Human
aggaagcgagaaugcagaguuucc

SEQ ID NO: 33063 - RNA, 23 nt, Human
ucgcuggcucccacuuugucucc

SEQ ID NO: 33064 - RNA, 24 nt, Human
gauuugcagcuacgaaaucaucac

SEQ ID NO: 33065 - RNA, 24 nt, Human
aagcaguacgacagcauuuugagg

SEQ ID NO: 33066 - RNA, 24 nt, Human
acagaagauguuggugaagaucag

SEQ ID NO: 33067 - RNA, 21 nt, Human
ugaccaggguacggcaggcgc

SEQ ID NO: 33068 - RNA, 24 nt, Human
gagcagauaaccauuguuucucgg

SEQ ID NO: 33069 - RNA, 24 nt, Human
aagcggcagcggaggcggcgggcc

SEQ ID NO: 33070 - RNA, 18 nt, Human
uggcuaaauauuucauuc

SEQ ID NO: 33071 - RNA, 23 nt, Human
caggagccuguguacacagggcc

SEQ ID NO: 33072 - RNA, 24 nt, Human
cugguggguuucaucccaggcaga

SEQ ID NO: 33073 - RNA, 24 nt, Human
uggcucacgccuguaaucccggca

SEQ ID NO: 33074 - RNA, 24 nt, Human
uggaggcacugaaagaccagcaga

SEQ ID NO: 33075 - RNA, 24 nt, Human
ccaggacacuucugaguacaucau

SEQ ID NO: 33076 - RNA, 24 nt, Human
aagacccccaauaguggagagggc

SEQ ID NO: 33077 - RNA, 24 nt, Human
aaggugccauuuuaaauuuuauuu

SEQ ID NO: 33078 - RNA, 24 nt, Human
guuuacuuuuuggcuggagcggag

SEQ ID NO: 33079 - RNA, 24 nt, Human
uuggcggacacugggggaggagag

SEQ ID NO: 33080 - RNA, 24 nt, Human
ugcgguuuggcccgcgggagaggg

SEQ ID NO: 33081 - RNA, 24 nt, Human
ucaggauuuuauacuaguugcuga

SEQ ID NO: 33082 - RNA, 24 nt, Human
uggaagcaagagugauuuuggagg

SEQ ID NO: 33083 - RNA, 24 nt, Human
ucacaaggauucauggauggaaaa

SEQ ID NO: 33084 - RNA, 24 nt, Human
ucagugcaaccagagacccuuucg

SEQ ID NO: 33085 - RNA, 24 nt, Human
uggggugggggccgccugaggcug

SEQ ID NO: 33086 - RNA, 24 nt, Human
ugccuuaguaucucgggcccacug

SEQ ID NO: 33087 - RNA, 24 nt, Human
ccugcagcgcucuguaccguuuag

SEQ ID NO: 33088 - RNA, 24 nt, Human
ucagaccccgggcagcuggugguu

SEQ ID NO: 33089 - RNA, 18 nt, Human
caccacagcuucuuguag

SEQ ID NO: 33090 - RNA, 24 nt, Human
ugccgcuuccuuccuguggcuuuc

SEQ ID NO: 33091 - RNA, 24 nt, Human
cugaagacuacugugacucugucc

SEQ ID NO: 33092 - RNA, 21 nt, Human
uggcuaaagaggaccuguggg

SEQ ID NO: 33093 - RNA, 24 nt, Human
gaauuggaaguauuuuucaaagac

SEQ ID NO: 33094 - RNA, 24 nt, Human
uaagggcuuggggucuuagaagcu

SEQ ID NO: 33095 - RNA, 24 nt, Human
ucuagcacucucagucgcuguaca

SEQ ID NO: 33096 - RNA, 24 nt, Human
cuuuccuucauaugguuugaugug

SEQ ID NO: 33097 - RNA, 24 nt, Human
uagcauucaguguaccauaccuau

SEQ ID NO: 33098 - RNA, 24 nt, Human
uauaaaauguaauacaagggcaua

SEQ ID NO: 33099 - RNA, 24 nt, Human
ucacuacaaucuccaccucccagg

SEQ ID NO: 33100 - RNA, 24 nt, Human
caccaaguccagcuaauuuuugua

SEQ ID NO: 33101 - RNA, 24 nt, Human
gguuguggaucuguuuguuucugc

SEQ ID NO: 33102 - RNA, 22 nt, Human
uggaaacuuuaccugguaccua

SEQ ID NO: 33103 - RNA, 24 nt, Human
cauugggcgaagcugggccaugcu

SEQ ID NO: 33104 - RNA, 24 nt, Human
ucccugaguguggaagagcagcug

SEQ ID NO: 33105 - RNA, 22 nt, Human
aucgagugaucuuaagcaguuc

SEQ ID NO: 33106 - RNA, 20 nt, Human
uucccagucacaugauguug

SEQ ID NO: 33107 - RNA, 24 nt, Human
ugucuuguccacaugugaggaaag

SEQ ID NO: 33108 - RNA, 24 nt, Human
gaugcaaaauguuugcaguuugac

SEQ ID NO: 33109 - RNA, 24 nt, Human
agaaagcaggcaccagggcugacc

SEQ ID NO: 33110 - RNA, 24 nt, Human
agggaaccagauuuaguucuuuac

SEQ ID NO: 33111 - RNA, 24 nt, Human
uagcggccuggguuguuaccagcu

SEQ ID NO: 33112 - RNA, 24 nt, Human
uggcaggaaugggaggcauccaga

SEQ ID NO: 33113 - RNA, 24 nt, Human
ugagacagagcugggcaugcgcca

SEQ ID NO: 33114 - RNA, 24 nt, Human
ucagcacacucgagcucugaagug

SEQ ID NO: 33115 - RNA, 23 nt, Human
ucaagggucguguguuugaagug

SEQ ID NO: 33116 - RNA, 24 nt, Human
uccaaggguuuaguucuuggcuuu

SEQ ID NO: 33117 - RNA, 18 nt, Human
ucccuggaccucucuugc

SEQ ID NO: 33118 - RNA, 24 nt, Human
uggcagggcccagugcugggccgg

SEQ ID NO: 33119 - RNA, 24 nt, Human
agccagcagaacucacccuggggu

SEQ ID NO: 33120 - RNA, 24 nt, Human
ucuuugguggcuguggucgggugu

SEQ ID NO: 33121 - RNA, 24 nt, Human
ugcccuguugcucuacauggccuu

SEQ ID NO: 33122 - RNA, 24 nt, Human
cuuucuauccacuagcguucggac

SEQ ID NO: 33123 - RNA, 24 nt, Human
aguuacuaguuuaaugggugaaaa

SEQ ID NO: 33124 - RNA, 21 nt, Human
cggcauggagaaacccaucuc

SEQ ID NO: 33125 - RNA, 24 nt, Human
gucaguuuuuguaagaagggguaa

SEQ ID NO: 33126 - RNA, 23 nt, Human
ugagucaggggcccagccuaggc

SEQ ID NO: 33127 - RNA, 24 nt, Human
uguggggggcugggggagguccaa

SEQ ID NO: 33128 - RNA, 24 nt, Human
uuuuugguuauugguuuuuuugua

SEQ ID NO: 33129 - RNA, 24 nt, Human
aggaagauggacacauggucacug

SEQ ID NO: 33130 - RNA, 24 nt, Human
ugguagcagguccaccggccccua

SEQ ID NO: 33131 - RNA, 24 nt, Human
gugcagaaugagggccgaguagau

SEQ ID NO: 33132 - RNA, 24 nt, Human
ccaggccaaaaaggcucaacauuu

SEQ ID NO: 33133 - RNA, 24 nt, Human
uauaaaagaaugaaauggaaaaau

SEQ ID NO: 33134 - RNA, 24 nt, Human
uagaagguguucacuuuuuacaca

SEQ ID NO: 33135 - RNA, 24 nt, Human
uuaacauaugucaugcuuacagga

SEQ ID NO: 33136 - RNA, 24 nt, Human
ugacaagugaaucuccaugugggu

SEQ ID NO: 33137 - RNA, 24 nt, Human
agagguauaccugucucuaaagga

SEQ ID NO: 33138 - RNA, 24 nt, Human
uuugcagauuccggauacgacagc

SEQ ID NO: 33139 - RNA, 24 nt, Human
gucacguugagagccaacaccaug

SEQ ID NO: 33140 - RNA, 24 nt, Human
uaugguaauauuacagcccgacac

SEQ ID NO: 33141 - RNA, 24 nt, Human
uauuagggauaauauucauuuagc

SEQ ID NO: 33142 - RNA, 24 nt, Human
uaaugggucucaaaauucugugac

SEQ ID NO: 33143 - RNA, 24 nt, Human
uaaccaagcagauggagaaaacca

SEQ ID NO: 33144 - RNA, 24 nt, Human
ugguacagaccaaguauguggaag

SEQ ID NO: 33145 - RNA, 24 nt, Human
ucccugggaagcugcaugaugugg

SEQ ID NO: 33146 - RNA, 24 nt, Human
uaggaucucacuauguugcccagg

SEQ ID NO: 33147 - RNA, 24 nt, Human
cagcagcaacuuucgcgguggccu

SEQ ID NO: 33148 - RNA, 24 nt, Human
uuugccuccuucauagacaaggua

SEQ ID NO: 33149 - RNA, 24 nt, Human
ugaagauaacagcuguggacaaga

SEQ ID NO: 33150 - RNA, 24 nt, Human
cggaaacaagugaaaaaguccaag

SEQ ID NO: 33151 - RNA, 24 nt, Human
ugcaaaaccagcguggcggcgcgc

SEQ ID NO: 33152 - RNA, 24 nt, Human
ugccagcaccguuuugugguuagc

SEQ ID NO: 33153 - RNA, 22 nt, Human
agaaacuggaagaagggucuuu

SEQ ID NO: 33154 - RNA, 24 nt, Human
uugaugauaugaaugaucuggauu

SEQ ID NO: 33155 - RNA, 24 nt, Human
uauuagggauaauauucauuuagc

SEQ ID NO: 33156 - RNA, 24 nt, Human
aaccuuuuuaaaaaauggagauga

SEQ ID NO: 33157 - RNA, 24 nt, Human
uugcaauuuuacuguaaguuugaa

SEQ ID NO: 33158 - RNA, 24 nt, Human
uggcaagcucauccucauuuccac

SEQ ID NO: 33159 - RNA, 24 nt, Human
uaccggacugugugccgggggauc

SEQ ID NO: 33160 - RNA, 24 nt, Human
ugacaugaaguugcaaggucaccu

SEQ ID NO: 33161 - RNA, 24 nt, Human
ucuagaccugccugcuuuaucuaa

SEQ ID NO: 33162 - RNA, 24 nt, Human
ucagaguguagucaacaguaaguu

SEQ ID NO: 33163 - RNA, 24 nt, Human
uaugauacagagaugucuaaaaac

SEQ ID NO: 33164 - RNA, 24 nt, Human
uggcauggggcuggaaggggggau

SEQ ID NO: 33165 - RNA, 24 nt, Human
ugcaaaaccagcguggcggccgcg

SEQ ID NO: 33166 - RNA, 24 nt, Human
uccuggagacucacuuccuagaug

SEQ ID NO: 33167 - RNA, 24 nt, Human
aggccuuuguggaucuucaugccc

SEQ ID NO: 33168 - RNA, 24 nt, Human
aaggucccaccauccccgcaggaa

SEQ ID NO: 33169 - RNA, 24 nt, Human
ugggguccuagccucaguuugaag

SEQ ID NO: 33170 - RNA, 24 nt, Human
agggcagcucgggagguccaguag

SEQ ID NO: 33171 - RNA, 24 nt, Human
gcccagugcugaguugucuucgag

SEQ ID NO: 33172 - RNA, 24 nt, Human
caggccccuuggccccccuggagg

SEQ ID NO: 33173 - RNA, 17 nt, Human
ugaccaguuccugccgc

SEQ ID NO: 33174 - RNA, 17 nt, Human
ucgcaaagaucaagagc

SEQ ID NO: 33175 - RNA, 24 nt, Human
ggucauuaccuuauugaguuuaga

SEQ ID NO: 33176 - RNA, 24 nt, Human
uuuagacuugacgcaacgggaggu

SEQ ID NO: 33177 - RNA, 21 nt, Human
cuugucgugugucccugaagu

SEQ ID NO: 33178 - RNA, 24 nt, Human
uugaagccacgcccucuuucccac

SEQ ID NO: 33179 - RNA, 24 nt, Human
ccacccagcccaagaggcccaugu

SEQ ID NO: 33180 - RNA, 24 nt, Human
acacugagcaccuggugaauggcc

SEQ ID NO: 33181 - RNA, 24 nt, Human
uaaggucacaugcacagguacuga

SEQ ID NO: 33182 - RNA, 24 nt, Human
uacuagguuagagcucacccucau

SEQ ID NO: 33183 - RNA, 21 nt, Human
gucacguuguccagcuccacc

SEQ ID NO: 33184 - RNA, 24 nt, Human
uuuccagguacucaggaacuaggc

SEQ ID NO: 33185 - RNA, 24 nt, Human
cacugagugaaagcugcucauugc

SEQ ID NO: 33186 - RNA, 24 nt, Human
augcucccagagauacaagccaau

SEQ ID NO: 33187 - RNA, 24 nt, Human
guggacuguucuugcggcgauuuu

SEQ ID NO: 33188 - RNA, 24 nt, Human
uguaaacccagcuaacagaaaaau

SEQ ID NO: 33189 - RNA, 24 nt, Human
aggguguuauuacggaaaaagcua

SEQ ID NO: 33190 - RNA, 24 nt, Human
uggauaaauaugguaacggguauu

SEQ ID NO: 33191 - RNA, 24 nt, Human
aaggcgccacagggggccaucagg

SEQ ID NO: 33192 - RNA, 24 nt, Human
caccagggaggacagcugcuggca

SEQ ID NO: 33193 - RNA, 24 nt, Human
aagauugcuuuucuugaaaugcuc

SEQ ID NO: 33194 - RNA, 24 nt, Human
uacuuuguaaacaaacaacuguga

SEQ ID NO: 33195 - RNA, 24 nt, Human
ugcaaagucuucugcuggugggug

SEQ ID NO: 33196 - RNA, 20 nt, Human
uuucuuguacaucuuucuac

SEQ ID NO: 33197 - RNA, 24 nt, Human
uuaggugucugucaaucuuggccu

SEQ ID NO: 33198 - RNA, 24 nt, Human
cagccuggacuuaccaccacuaaa

SEQ ID NO: 33199 - RNA, 24 nt, Human
ggcccggagcggagcgcgcccugc

SEQ ID NO: 33200 - RNA, 24 nt, Human
uugaacaggagaugaccuucaggc

SEQ ID NO: 33201 - RNA, 24 nt, Human
cuugccuucguucaguauguuaau

SEQ ID NO: 33202 - RNA, 24 nt, Human
cuucaguaggcagcgagcaucugu

SEQ ID NO: 33203 - RNA, 22 nt, Human
ugauacaaguucuggcauuggu

SEQ ID NO: 33204 - RNA, 24 nt, Human
uauuacacacggauguaagcauuu

SEQ ID NO: 33205 - RNA, 24 nt, Human
cacacggguucucacgcaacaacg

SEQ ID NO: 33206 - RNA, 22 nt, Human
ugucacaguuccgaggcagcag

SEQ ID NO: 33207 - RNA, 24 nt, Human
auagaggcuguuggcgcuggacag

SEQ ID NO: 33208 - RNA, 24 nt, Human
ccucccagcugacagguccugccc

SEQ ID NO: 33209 - RNA, 24 nt, Human
uucaaauuucuuucuuuuuuaauu

SEQ ID NO: 33210 - RNA, 24 nt, Human
uggauacauaucuauguuuacgcg

SEQ ID NO: 33211 - RNA, 24 nt, Human
uggcguaauagcgaagaggcccgc

SEQ ID NO: 33212 - RNA, 24 nt, Human
agagcaaaagccuuggguuucucg

SEQ ID NO: 33213 - RNA, 24 nt, Human
uguaaaguuguuguguuuuuuuuu

SEQ ID NO: 33214 - RNA, 24 nt, Human
uggccugaugauccacagcggaga

SEQ ID NO: 33215 - RNA, 24 nt, Human
ugugugccauugcccaggcagagu

SEQ ID NO: 33216 - RNA, 24 nt, Human
acagagaguuacccguacagagag

SEQ ID NO: 33217 - RNA, 24 nt, Human
uagcucagagagaggucacuacua

SEQ ID NO: 33218 - RNA, 24 nt, Human
cagcucccaggauguguucgggaa

SEQ ID NO: 33219 - RNA, 24 nt, Human
agugggugaggaggucgguugagu

SEQ ID NO: 33220 - RNA, 24 nt, Human
cugaccuucaaguccuagauggca

SEQ ID NO: 33221 - RNA, 24 nt, Human
uggcguaauagcgaagaggccgca

SEQ ID NO: 33222 - RNA, 19 nt, Human
uucucagugguuccaacac

SEQ ID NO: 33223 - RNA, 24 nt, Human
uggugggugggaguggguagauaa

SEQ ID NO: 33224 - RNA, 24 nt, Human
uacacauuauaaaauguaucagau

SEQ ID NO: 33225 - RNA, 24 nt, Human
uaaaagauguauaagguuaaguuu

SEQ ID NO: 33226 - RNA, 22 nt, Human
gccacaguucagaagccaggcu

SEQ ID NO: 33227 - RNA, 24 nt, Human
ugucaaggggucaguguaggguag

SEQ ID NO: 33228 - RNA, 24 nt, Human
ucaccaaagaacaaaccagaccac

SEQ ID NO: 33229 - RNA, 24 nt, Human
ugagagcccugaacagagauuuac

SEQ ID NO: 33230 - RNA, 24 nt, Human
ccccugaaggcaaggccagggaga

SEQ ID NO: 33231 - RNA, 24 nt, Human
cagcccagggcaagcugagagaug

SEQ ID NO: 33232 - RNA, 24 nt, Human
gagcacucugaggggccugugggc

SEQ ID NO: 33233 - RNA, 24 nt, Human
uuuauacauacagacacucccuug

SEQ ID NO: 33234 - RNA, 24 nt, Human
uaacauggugaaaccccgucucua

SEQ ID NO: 33235 - RNA, 22 nt, Human
ugggauauguuagaagugucau

SEQ ID NO: 33236 - RNA, 24 nt, Human
agggguccggugcugucgcgggaa

SEQ ID NO: 33237 - RNA, 24 nt, Human
uuaguauuauuuauuugacaacuc

SEQ ID NO: 33238 - RNA, 24 nt, Human
ucuaaaaacaggaaaaauaucagu

SEQ ID NO: 33239 - RNA, 24 nt, Human
agaucuguugccaucauggccccu

SEQ ID NO: 33240 - RNA, 24 nt, Human
uagaauuaucuaaauguuucuuga

SEQ ID NO: 33241 - RNA, 24 nt, Human
aaaaagccaaaacuaaaaggucaa

SEQ ID NO: 33242 - RNA, 24 nt, Human
cuaccacaccuggcuuaaaggugc

SEQ ID NO: 33243 - RNA, 24 nt, Human
uguuacaacuuuagaauuuuagua

SEQ ID NO: 33244 - RNA, 24 nt, Human
uucaaguucaguccauguguccuc

SEQ ID NO: 33245 - RNA, 24 nt, Human
ucggagcuguggcugccggugugu

SEQ ID NO: 33246 - RNA, 24 nt, Human
cuccugaucaggcggccgucuggu

SEQ ID NO: 33247 - RNA, 24 nt, Human
accgagcgcucguccagggaaggc

SEQ ID NO: 33248 - RNA, 24 nt, Human
ucacugcaguccacgaggccacac

SEQ ID NO: 33249 - RNA, 24 nt, Human
aggcggggaggaucgcuugaggcc

SEQ ID NO: 33250 - RNA, 24 nt, Human
ugaggcagagaggcccacugucug

SEQ ID NO: 33251 - RNA, 24 nt, Human
uagccacuccccacacaccccagg

SEQ ID NO: 33252 - RNA, 22 nt, Human
agggaccaagaugucuauuacu

SEQ ID NO: 33253 - RNA, 24 nt, Human
ucaguaggccuggaaucucuucuc

SEQ ID NO: 33254 - RNA, 24 nt, Human
aggcggggaggaucgcuugaggcc

SEQ ID NO: 33255 - RNA, 24 nt, Human
ugaggcagagaggcccacugucug

SEQ ID NO: 33256 - RNA, 24 nt, Human
uagccacuccccacacaccccagg

SEQ ID NO: 33257 - RNA, 24 nt, Human
uucaagccugacuguguaaacguu

SEQ ID NO: 33258 - RNA, 24 nt, Human
uaauuuacaaccaguuaagaauua

SEQ ID NO: 33259 - RNA, 24 nt, Human
uugaaugaaaccauaacuccacuu

SEQ ID NO: 33260 - RNA, 22 nt, Human
aacaugcuuaugaugcauagga

SEQ ID NO: 33261 - RNA, 24 nt, Human
uuccugggcccccugcaccccucc

SEQ ID NO: 33262 - RNA, 24 nt, Human
agacguggaacaucucguucgcgg

SEQ ID NO: 33263 - RNA, 24 nt, Human
uacuacgucggcguggccuccugc

SEQ ID NO: 33264 - RNA, 24 nt, Human
uucauaauuuucagcuacaaaaua

SEQ ID NO: 33265 - RNA, 24 nt, Human
uucaucaugcaaacaucauagagu

SEQ ID NO: 33266 - RNA, 24 nt, Human
aaugguauuguuuuaaauuuuuau

SEQ ID NO: 33267 - RNA, 24 nt, Human
ucgguguaugccuucucggcgcgc

SEQ ID NO: 33268 - RNA, 24 nt, Human
cgccccuucuaccccggugguuug

SEQ ID NO: 33269 - RNA, 24 nt, Human
uaugggaggugcuaugggcauaaa

SEQ ID NO: 33270 - RNA, 24 nt, Human
uuuaagccugaaauuguccuguga

SEQ ID NO: 33271 - RNA, 24 nt, Human
uagcaaggcuccacuuugccccag

SEQ ID NO: 33272 - RNA, 24 nt, Human
accccaggacaugcaagagccuca

SEQ ID NO: 33273 - RNA, 24 nt, Human
ccucaucgucgugcagaaugaggg

SEQ ID NO: 33274 - RNA, 24 nt, Human
gagcagcagcaguggagggggcag

SEQ ID NO: 33275 - RNA, 24 nt, Human
ucccaauguugacguuggccaggg

SEQ ID NO: 33276 - RNA, 24 nt, Human
guccagucaccaccugcagccucg

SEQ ID NO: 33277 - RNA, 24 nt, Human
agaagaagaagaaauggcaaagag

SEQ ID NO: 33278 - RNA, 24 nt, Human
ugugcagaagaaauggaaggauuc

SEQ ID NO: 33279 - RNA, 24 nt, Human
uaucaaggaagggcaggcgugaug

SEQ ID NO: 33280 - RNA, 24 nt, Human
uauuuuuuaauuuuacaccugaac

SEQ ID NO: 33281 - RNA, 18 nt, Human
ucuuacaucacuugguac

SEQ ID NO: 33282 - RNA, 24 nt, Human
ugaggagagagugugcucagaacu

SEQ ID NO: 33283 - RNA, 24 nt, Human
uggcauccagcaggucgcugggug

SEQ ID NO: 33284 - RNA, 24 nt, Human
ggacaugugcuucagaaccuggau

SEQ ID NO: 33285 - RNA, 19 nt, Human
ucgaguacugguuccgcug

SEQ ID NO: 33286 - RNA, 24 nt, Human
uagaggcagaaaagugcagaagga

SEQ ID NO: 33287 - RNA, 24 nt, Human
gaaggcuggacagcauggccaucg

SEQ ID NO: 33288 - RNA, 24 nt, Human
uacaggaguggccauuugcaccua

SEQ ID NO: 33289 - RNA, 24 nt, Human
ugcaagaacgcggcagguggcugg

SEQ ID NO: 33290 - RNA, 24 nt, Human
uacaagcacgcguuacccuuccug

SEQ ID NO: 33291 - RNA, 24 nt, Human
ugccugggcacagcucacgggcag

SEQ ID NO: 33292 - RNA, 24 nt, Human
ucugucuucgaccaacugaagcaa

SEQ ID NO: 33293 - RNA, 24 nt, Human
ccuggccaacauggugaaacccca

SEQ ID NO: 33294 - RNA, 24 nt, Human
uggaauuggaggccgggcgcagug

SEQ ID NO: 33295 - RNA, 20 nt, Human
ugagagaacacuccacgaug

SEQ ID NO: 33296 - RNA, 24 nt, Human
ccugaccccugggcuggccuggga

SEQ ID NO: 33297 - RNA, 24 nt, Human
aaagcaaaugaggcagaaaggccc

SEQ ID NO: 33298 - RNA, 24 nt, Human
uuugccaaaaccacgcuuguagau

SEQ ID NO: 33299 - RNA, 24 nt, Human
uuaguucauucuucuaauaagccu

SEQ ID NO: 33300 - RNA, 24 nt, Human
caugcagaugaugccguauuuacc

SEQ ID NO: 33301 - RNA, 24 nt, Human
ccucacaaauauucagcugggaag

SEQ ID NO: 33302 - RNA, 24 nt, Human
ggcccagaacuuuguccucagagc

SEQ ID NO: 33303 - RNA, 24 nt, Human
gaguacugaauacaaugagaaguu

SEQ ID NO: 33304 - RNA, 24 nt, Human
ccuccagcacagccuauauggagc

SEQ ID NO: 33305 - RNA, 24 nt, Human
ugaggcagacgccugaacagggac

SEQ ID NO: 33306 - RNA, 24 nt, Human
gcccugggauucgagcaggagaug

SEQ ID NO: 33307 - RNA, 24 nt, Human
acucuguucuuccgccgcuccgcc

SEQ ID NO: 33308 - RNA, 24 nt, Human
ccgcuucgccaacuacaucgacaa

SEQ ID NO: 33309 - RNA, 24 nt, Human
ugaugggggugauauacgugccuu

SEQ ID NO: 33310 - RNA, 21 nt, Human
gcccgguguucaccgggcugg

SEQ ID NO: 33311 - RNA, 21 nt, Human
uagaggccaugugugagguag

SEQ ID NO: 33312 - RNA, 24 nt, Human
gcccccugagguccaugcagcccu

SEQ ID NO: 33313 - RNA, 24 nt, Human
caacguugaaggucagugugaugg

SEQ ID NO: 33314 - RNA, 24 nt, Human
ucgcagcagcucugccaguagcgc

SEQ ID NO: 33315 - RNA, 24 nt, Human
ucccggacgaagacgcugccauug

SEQ ID NO: 33316 - RNA, 24 nt, Human
gacgcuguugggcuugaacuuccc

SEQ ID NO: 33317 - RNA, 24 nt, Human
gcuugcucacguucuuggucacuu

SEQ ID NO: 33318 - RNA, 24 nt, Human
agcacugaccgaccauugccauuu

SEQ ID NO: 33319 - RNA, 24 nt, Human
uucacuuuaccuucugccaaaugc

SEQ ID NO: 33320 - RNA, 24 nt, Human
agaaagacguuuuccaaaaugcuu

SEQ ID NO: 33321 - RNA, 24 nt, Human
aggaaggagauuaggagacucuga

SEQ ID NO: 33322 - RNA, 24 nt, Human
ucuuacagcccccaggcaugugga

SEQ ID NO: 33323 - RNA, 20 nt, Human
ccgcgccgccuuggugcugc

SEQ ID NO: 33324 - RNA, 24 nt, Human
cugcccggccugcccugguugggg

SEQ ID NO: 33325 - RNA, 24 nt, Human
augcauuuccuggagaauauaucc

SEQ ID NO: 33326 - RNA, 24 nt, Human
aggcggcguggacagcggccccgg

SEQ ID NO: 33327 - RNA, 24 nt, Human
uaugcaggccaucaaguguguggu

SEQ ID NO: 33328 - RNA, 24 nt, Human
ugaccagauuacgcccccuaaucc

SEQ ID NO: 33329 - RNA, 24 nt, Human
gacugcuugcaauccuugacuagu

SEQ ID NO: 33330 - RNA, 24 nt, Human
gagcuuguuuuccugcaacuagac

SEQ ID NO: 33331 - RNA, 24 nt, Human
uaaggagcgugcaaccuacauccc

SEQ ID NO: 33332 - RNA, 24 nt, Human
ccggccccuaaccugcugugcacc

SEQ ID NO: 33333 - RNA, 24 nt, Human
uauuuugucuucauggaauauauc

SEQ ID NO: 33334 - RNA, 22 nt, Human
cgccgggacagcagacugccgg

SEQ ID NO: 33335 - RNA, 24 nt, Human
cagccuggacuuaccaccacuaaa

SEQ ID NO: 33336 - RNA, 24 nt, Human
aagcagcaccaauggggaugaccc

SEQ ID NO: 33337 - RNA, 24 nt, Human
acugcaguggugcaaucucagcuc

SEQ ID NO: 33338 - RNA, 24 nt, Human
ugugcagaagaaauggaaggauuc

SEQ ID NO: 33339 - RNA, 24 nt, Human
uucaaauuucuuucuuuuuuaauu

SEQ ID NO: 33340 - RNA, 24 nt, Human
ucaauuuuuauuuugguuuucuua

SEQ ID NO: 33341 - RNA, 24 nt, Human
uuaguauuauuuauuugacaacuc

SEQ ID NO: 33342 - RNA, 17 nt, Human
uaauaugucugugcagc

SEQ ID NO: 33343 - RNA, 24 nt, Human
ugaggaggauaccgaugucagagg

SEQ ID NO: 33344 - RNA, 24 nt, Human
cauacaaggcgacguguggguucu

SEQ ID NO: 33345 - RNA, 18 nt, Human
uccggaaaugugucaugg

SEQ ID NO: 33346 - RNA, 24 nt, Human
uguuguacggcugugggaccggcg

SEQ ID NO: 33347 - RNA, 24 nt, Human
agaguccauucuggucccucaggc

SEQ ID NO: 33348 - RNA, 24 nt, Human
ucugagguugccaucagccagggc

SEQ ID NO: 33349 - RNA, 21 nt, Human
ugggauggguucaaagugugg

SEQ ID NO: 33350 - RNA, 24 nt, Human
ugauaacgacaggagaaaguuuca

SEQ ID NO: 33351 - RNA, 24 nt, Human
ugggagcggcggcagcuguugggg

SEQ ID NO: 33352 - RNA, 24 nt, Human
ucacuagugauugugagcugagau

SEQ ID NO: 33353 - RNA, 24 nt, Human
auacuccaaguucaaacugcuucc

SEQ ID NO: 33354 - RNA, 17 nt, Human
uaccuagaccuucacac

SEQ ID NO: 33355 - RNA, 24 nt, Human
cacccccacuuaggcuccugcacu

SEQ ID NO: 33356 - RNA, 24 nt, Human
cacaccuguaaucccagcacuuug

SEQ ID NO: 33357 - RNA, 24 nt, Human
ucacugagcgagguacaguucaca

SEQ ID NO: 33358 - RNA, 24 nt, Human
cacugauuuuauauauuaccccgu

SEQ ID NO: 33359 - RNA, 24 nt, Human
uaauagguuguggaaaguggguaa

SEQ ID NO: 33360 - RNA, 24 nt, Human
aauaaguauucauuggaauauaug

SEQ ID NO: 33361 - RNA, 24 nt, Human
gagcuucccaggagcaggucuggg

SEQ ID NO: 33362 - RNA, 24 nt, Human
uacuacuccucucauuauauaugu

SEQ ID NO: 33363 - RNA, 19 nt, Human
gggcguggugcugaaggag

SEQ ID NO: 33364 - RNA, 24 nt, Human
uacaagaucacugacucugaggac

SEQ ID NO: 33365 - RNA, 24 nt, Human
ugaagagauaccugaagucugaac

SEQ ID NO: 33366 - RNA, 24 nt, Human
gccccuugguguggucauuguaag

SEQ ID NO: 33367 - RNA, 24 nt, Human
cugcugcacgugaagcggggcgac

SEQ ID NO: 33368 - RNA, 19 nt, Human
acaaagcaagagaagaagc

SEQ ID NO: 33369 - RNA, 21 nt, Human
cauuggacaggacauccagcc

SEQ ID NO: 33370 - RNA, 24 nt, Human
cagcggcagagagccauccucuau

SEQ ID NO: 33371 - RNA, 24 nt, Human
ugggacaagcuggucaagguaugg

SEQ ID NO: 33372 - RNA, 24 nt, Human
cauggacccugacuggcucauugg

SEQ ID NO: 33373 - RNA, 24 nt, Human
gcaggagaggaugggcgcagcccu

SEQ ID NO: 33374 - RNA, 24 nt, Human
ugacaaguguguuugagcuggaag

SEQ ID NO: 33375 - RNA, 23 nt, Human
caugagcauaacacgcacgggca

SEQ ID NO: 33376 - RNA, 24 nt, Human
uaauuguauagaaccucucagcag

SEQ ID NO: 33377 - RNA, 22 nt, Human
acuauauuaagauaaauuggcc

SEQ ID NO: 33378 - RNA, 24 nt, Human
uggaaugcuaaacguaugccauuu

SEQ ID NO: 33379 - RNA, 24 nt, Human
ucggaccuggaggaggaccugggc

SEQ ID NO: 33380 - RNA, 24 nt, Human
uaauagacagagugggagaugcca

SEQ ID NO: 33381 - RNA, 24 nt, Human
uaagugccuuuguggacagauuau

SEQ ID NO: 33382 - RNA, 24 nt, Human
gcgcauucgucuuccgagcgcuac

SEQ ID NO: 33383 - RNA, 24 nt, Human
gaccgcgaggaggacggcuugggg

SEQ ID NO: 33384 - RNA, 23 nt, Human
ucccaggguugacgaauucgcag

SEQ ID NO: 33385 - RNA, 24 nt, Human
ugaggagcugcagagccugggcug

SEQ ID NO: 33386 - RNA, 24 nt, Human
ucagaaccuggacugcgggguccc

SEQ ID NO: 33387 - RNA, 17 nt, Human
cacccugcucuccgagc

SEQ ID NO: 33388 - RNA, 24 nt, Human
uguauaaaggucgauuguaagacu

SEQ ID NO: 33389 - RNA, 24 nt, Human
ucugaagugaggguggagguggag

SEQ ID NO: 33390 - RNA, 24 nt, Human
uggcagcccaggccaagcugagca

SEQ ID NO: 33391 - RNA, 24 nt, Human
gagcacucugaggggccugugggc

SEQ ID NO: 33392 - RNA, 24 nt, Human
ugcaaggagcuccccaagggcccg

SEQ ID NO: 33393 - RNA, 24 nt, Human
aggcaaggccacgggagacuggug

SEQ ID NO: 33394 - RNA, 24 nt, Human
aguggcaacugccaaaagugauuc

SEQ ID NO: 33395 - RNA, 24 nt, Human
ggagaucacgccacugcacuccag

SEQ ID NO: 33396 - RNA, 24 nt, Human
agagagaaaacaguaaguuggaaa

SEQ ID NO: 33397 - RNA, 24 nt, Human
ucacaaggucaggagaucgagacc

SEQ ID NO: 33398 - RNA, 24 nt, Human
uuaaugauuaauguaaagggucug

SEQ ID NO: 33399 - RNA, 24 nt, Human
uacugggugaauagcacuuuccuu

SEQ ID NO: 33400 - RNA, 24 nt, Human
uggaagaucuuagaauugccugcc

SEQ ID NO: 33401 - RNA, 24 nt, Human
ucacuuggaagacucccugaaauc

SEQ ID NO: 33402 - RNA, 24 nt, Human
uuuaaaguguacaauucaguguug

SEQ ID NO: 33403 - RNA, 24 nt, Human
uggcuucuuucauuuacauguuua

SEQ ID NO: 33404 - RNA, 24 nt, Human
ugacaaaaggagggguacuuuuuc

SEQ ID NO: 33405 - RNA, 24 nt, Human
uacccuggcuggagugcagugacg

SEQ ID NO: 33406 - RNA, 24 nt, Human
ugaccaggaaauacaacgagcugc

SEQ ID NO: 33407 - RNA, 24 nt, Human
uaucaaggaagggcaggcgugaug

SEQ ID NO: 33408 - RNA, 24 nt, Human
uucaaauuucuuucuuuuuuaauu

SEQ ID NO: 33409 - RNA, 24 nt, Human
ucugaucaauccuucuuuuucucu

SEQ ID NO: 33410 - RNA, 24 nt, Human
ucaauuuuuauuuugguuuucuua

SEQ ID NO: 33411 - RNA, 24 nt, Human
acaccagccuguuacuaacagccu

SEQ ID NO: 33412 - RNA, 24 nt, Human
uaaugggucucaaaauucugugac

SEQ ID NO: 33413 - RNA, 24 nt, Human
uuggugggucuugguggggcccag

SEQ ID NO: 33414 - RNA, 24 nt, Human
ccgguccugggcuuaucccugcaa

SEQ ID NO: 33415 - RNA, 24 nt, Human
caguguugaggaccaucuugccug

SEQ ID NO: 33416 - RNA, 24 nt, Human
uguuguuuugguccugauaggaag

SEQ ID NO: 33417 - RNA, 24 nt, Human
agaaaacuugucacauguaugguu

SEQ ID NO: 33418 - RNA, 24 nt, Human
uggacgguuggugcaagugcaucc

SEQ ID NO: 33419 - RNA, 24 nt, Human
aacccuuucuccuuccuggggccu

SEQ ID NO: 33420 - RNA, 24 nt, Human
uggaggccccuggagccagauggc

SEQ ID NO: 33421 - RNA, 24 nt, Human
ucccaaaccuggcuuggggucaag

SEQ ID NO: 33422 - RNA, 20 nt, Human
uguccagaauuuccagaagu

SEQ ID NO: 33423 - RNA, 24 nt, Human
ugagugcccccagggagggugcug

SEQ ID NO: 33424 - RNA, 24 nt, Human
uguggcccuucucuuuaaguccga

SEQ ID NO: 33425 - RNA, 24 nt, Human
uaacuacaauuuaauuucacguug

SEQ ID NO: 33426 - RNA, 24 nt, Human
aacauuccaacccuuaaagcuaaa

SEQ ID NO: 33427 - RNA, 24 nt, Human
uguauaguaauggccuucagcauc

SEQ ID NO: 33428 - RNA, 24 nt, Human
aacaggauguuuaacucuuuuauc

SEQ ID NO: 33429 - RNA, 20 nt, Human
ugggauuuuuuuuuuuuuuu

SEQ ID NO: 33430 - RNA, 24 nt, Human
acagugcucuucgccagaaguugg

SEQ ID NO: 33431 - RNA, 24 nt, Human
caugugguuugcgguaacaccacc

SEQ ID NO: 33432 - RNA, 24 nt, Human
uaccauggucuagaagugcacugg

SEQ ID NO: 33433 - RNA, 24 nt, Human
uggaaugauauuuuaggaauaacg

SEQ ID NO: 33434 - RNA, 24 nt, Human
ugcaaggaggggaucaaggacggu

SEQ ID NO: 33435 - RNA, 24 nt, Human
aggacagagaagcaaacagagcuc

SEQ ID NO: 33436 - RNA, 24 nt, Human
uacuacgccaugaagauccucaag

SEQ ID NO: 33437 - RNA, 24 nt, Human
ggggagcagacaaguaccacuccg

SEQ ID NO: 33438 - RNA, 24 nt, Human
ccacacagauucugcauggccccu

SEQ ID NO: 33439 - RNA, 24 nt, Human
gaccguaauuguggcugcacugga

SEQ ID NO: 33440 - RNA, 24 nt, Human
ugucauaggcaucgacgaggggca

SEQ ID NO: 33441 - RNA, 20 nt, Human
uucacaaauucucucugcgg

SEQ ID NO: 33442 - RNA, 24 nt, Human
uaauuaguuuuggucaucguauuu

SEQ ID NO: 33443 - RNA, 24 nt, Human
uaaaucuaaggauggugggcuuuc

SEQ ID NO: 33444 - RNA, 24 nt, Human
uccacauuccaggagcugugcgac

SEQ ID NO: 33445 - RNA, 20 nt, Human
uacaagcaaagacccgacgu

SEQ ID NO: 33446 - RNA, 24 nt, Human
cgaggucaguaccacgcccgaccc

SEQ ID NO: 33447 - RNA, 24 nt, Human
ugagaaaagccaacuuagacaaga

SEQ ID NO: 33448 - RNA, 24 nt, Human
ggaugagacguuugcuguccugag

SEQ ID NO: 33449 - RNA, 24 nt, Human
uggcaagggucccuccauuaagca

SEQ ID NO: 33450 - RNA, 24 nt, Human
gcacauggugggucccgauuggcg

SEQ ID NO: 33451 - RNA, 24 nt, Human
uacaccguuaaaacccugagugga

SEQ ID NO: 33452 - RNA, 24 nt, Human
uuguguguguguuucuccaauccu

SEQ ID NO: 33453 - RNA, 24 nt, Human
uauacacccuuuuuuuccuucucu

SEQ ID NO: 33454 - RNA, 24 nt, Human
uugcaugggccuuacuucuauaac

SEQ ID NO: 33455 - RNA, 22 nt, Human
ugauagggucuaccacaucugu

SEQ ID NO: 33456 - RNA, 24 nt, Human
ugguaggagugcucaugguucugu

SEQ ID NO: 33457 - RNA, 24 nt, Human
ucuucaguaaucgacauuccacua

SEQ ID NO: 33458 - RNA, 22 nt, Human
uuccuguggaccugacaguuaa

SEQ ID NO: 33459 - RNA, 24 nt, Human
guccuuguccucuccaaacaccag

SEQ ID NO: 33460 - RNA, 24 nt, Human
uucagggacaaggagaaugcgugg

SEQ ID NO: 33461 - RNA, 24 nt, Human
cgaguucaguccugcucuccgcac

SEQ ID NO: 33462 - RNA, 19 nt, Human
cauggcucuaacgacaggu

SEQ ID NO: 33463 - RNA, 24 nt, Human
uaguagacuacagugaggaaaauu

SEQ ID NO: 33464 - RNA, 24 nt, Human
ugaggauaugcuuggucggguauu

SEQ ID NO: 33465 - RNA, 24 nt, Human
ugguuugguaaagaaauccaaaga

SEQ ID NO: 33466 - RNA, 24 nt, Human
uggcaaggagcggcccgaaguggu

SEQ ID NO: 33467 - RNA, 24 nt, Human
caguggccucugugagccccagcc

SEQ ID NO: 33468 - RNA, 24 nt, Human
ugauggucucaagggucguguguu

SEQ ID NO: 33469 - RNA, 22 nt, Human
ugucaagacuaccgaugguuac

SEQ ID NO: 33470 - RNA, 20 nt, Human
cauggaucuuacccgugaca

SEQ ID NO: 33471 - RNA, 24 nt, Human
ugugauugaagauuucagagaggu

SEQ ID NO: 33472 - RNA, 24 nt, Human
agguacgagccuggcuuguuuauu

SEQ ID NO: 33473 - RNA, 24 nt, Human
ugaguggcuuugcaggccuggugg

SEQ ID NO: 33474 - RNA, 24 nt, Human
caccuuguggccccuagcaggccc

SEQ ID NO: 33475 - RNA, 24 nt, Human
cgugaccucaaguguccacugcug

SEQ ID NO: 33476 - RNA, 24 nt, Human
cacuacaccauuggcaaggagauc

SEQ ID NO: 33477 - RNA, 24 nt, Human
uaucuugguuuuccacagcuauug

SEQ ID NO: 33478 - RNA, 24 nt, Human
ugauuauaggcaggaaauccaagc

SEQ ID NO: 33479 - RNA, 21 nt, Human
uaccauagcuaaaggauugcu

SEQ ID NO: 33480 - RNA, 24 nt, Human
cuuaaauucucuggguuuuguuuu

SEQ ID NO: 33481 - RNA, 24 nt, Human
cacacgguggagccaacggaggcc

SEQ ID NO: 33482 - RNA, 22 nt, Human
ucccugaccuccagagccaagg

SEQ ID NO: 33483 - RNA, 24 nt, Human
uggagugauggugcucagcgcaac

SEQ ID NO: 33484 - RNA, 24 nt, Human
acucgauucuguagccggcucugc

SEQ ID NO: 33485 - RNA, 24 nt, Human
cgugcacauucacaccccagcagg

SEQ ID NO: 33486 - RNA, 24 nt, Human
ugugcagaagaaauggaaggauuc

SEQ ID NO: 33487 - RNA, 24 nt, Human
uucaaauuucuuucuuuuuuaauu

SEQ ID NO: 33488 - RNA, 24 nt, Human
uaccagagauggggugaugauuau

SEQ ID NO: 33489 - RNA, 24 nt, Human
auuaugcugcaaauagaucccagg

SEQ ID NO: 33490 - RNA, 24 nt, Human
uuggcccguuuggaagcggcacgc

SEQ ID NO: 33491 - RNA, 24 nt, Human
uagccuggcuagguaaggaaaggg

SEQ ID NO: 33492 - RNA, 24 nt, Human
uccugguagggagugcguagcagg

SEQ ID NO: 33493 - RNA, 21 nt, Human
ugacaagaguugcccugcagg

SEQ ID NO: 33494 - RNA, 22 nt, Human
ugacuuugguuuuggggaaagg

SEQ ID NO: 33495 - RNA, 24 nt, Human
ucuuucacuggaauugcaaaggga

SEQ ID NO: 33496 - RNA, 24 nt, Human
ucaguuaaaaaagaagaagaagaa

SEQ ID NO: 33497 - RNA, 24 nt, Human
ucugaucaauccuucuuuuucucu

SEQ ID NO: 33498 - RNA, 24 nt, Human
ucaauuuuuauuuugguuuucuua

SEQ ID NO: 33499 - RNA, 22 nt, Human
ugccuugggucccuucaguagc

SEQ ID NO: 33500 - RNA, 24 nt, Human
ugucaggaaggggaagcggguuuc

SEQ ID NO: 33501 - RNA, 24 nt, Human
ugucuaagaucguguuuacuaccu

SEQ ID NO: 33502 - RNA, 24 nt, Human
ugagaauggcaaaauuagucgccu

SEQ ID NO: 33503 - RNA, 24 nt, Human
uacaccacucccaagaagaauaag

SEQ ID NO: 33504 - RNA, 24 nt, Human
augaacucagggccgguuguggcc

SEQ ID NO: 33505 - RNA, 24 nt, Human
ugacuacaagucuugugcucauga

SEQ ID NO: 33506 - RNA, 24 nt, Human
uccagcagauucaaagccaggcac

SEQ ID NO: 33507 - RNA, 24 nt, Human
uugaagccaguggggcaccaaucc

SEQ ID NO: 33508 - RNA, 24 nt, Human
uaccauggcgagggucacauuuca

SEQ ID NO: 33509 - RNA, 24 nt, Human
uaucaaggaagggcaggcgugaug

SEQ ID NO: 33510 - RNA, 24 nt, Human
uaagaguguugaaaaaaaaauuca

SEQ ID NO: 33511 - RNA, 24 nt, Human
uaaugggucucaaaauucugugac

SEQ ID NO: 33512 - RNA, 24 nt, Human
ugagaauggcaaaauuagucgccu

SEQ ID NO: 33513 - RNA, 24 nt, Human
acagugcagaaacuuacuuugaaa

SEQ ID NO: 33514 - RNA, 24 nt, Human
ucacagaagaaaagccugguucau

SEQ ID NO: 33515 - RNA, 24 nt, Human
ugugaaguggauaucaaucauugu

SEQ ID NO: 33516 - RNA, 24 nt, Human
uccacauuuauuuauugauuuuuc

SEQ ID NO: 33517 - RNA, 24 nt, Human
uguaaucauaagcaucugcgaaug

SEQ ID NO: 33518 - RNA, 24 nt, Human
gcagcgcaaacuugaccugcaaag

SEQ ID NO: 33519 - RNA, 24 nt, Human
aagugcccgccaaagcuguggccc

SEQ ID NO: 33520 - RNA, 24 nt, Human
gagcguuuccuaagcuccacugaa

SEQ ID NO: 33521 - RNA, 24 nt, Human
uccggaggugucacccucaauggc

SEQ ID NO: 33522 - RNA, 24 nt, Human
guaaaguuugucggcaaagaagag

SEQ ID NO: 33523 - RNA, 24 nt, Human
uucauuggcaguauuuugugauga

SEQ ID NO: 33524 - RNA, 24 nt, Human
ugguauauuuauguaugugugugu

SEQ ID NO: 33525 - RNA, 24 nt, Human
ugauuugaauauugugguacaacu

SEQ ID NO: 33526 - RNA, 24 nt, Human
gagcguuuccuaagcuccacugaa

SEQ ID NO: 33527 - RNA, 24 nt, Human
uccggaggugucacccucaauggc

SEQ ID NO: 33528 - RNA, 24 nt, Human
uaucacggaaucuuuuccagaguu

SEQ ID NO: 33529 - RNA, 24 nt, Human
uauuuuaaaauggcugguaauuau

SEQ ID NO: 33530 - RNA, 24 nt, Human
augcaucacucaagucaaagccug

SEQ ID NO: 33531 - RNA, 24 nt, Human
ugggcagaagaaaaggggcguucu

SEQ ID NO: 33532 - RNA, 24 nt, Human
uugacggaaaaggcacuuaaaugu

SEQ ID NO: 33533 - RNA, 24 nt, Human
uggcacgcucgaacuuccggcccu

SEQ ID NO: 33534 - RNA, 24 nt, Human
uacaccuuuuggcccuugcgagga

SEQ ID NO: 33535 - RNA, 24 nt, Human
cacaaccacggccgucuuguuuuc

SEQ ID NO: 33536 - RNA, 24 nt, Human
cagcauggaggacugugacugaug

SEQ ID NO: 33537 - RNA, 24 nt, Human
uuaggagucucaggucuccccggg

SEQ ID NO: 33538 - RNA, 24 nt, Human
ccgcugcccugccgccagggcuug

SEQ ID NO: 33539 - RNA, 24 nt, Human
uggaaugcaguggcacgaucucgg

SEQ ID NO: 33540 - RNA, 24 nt, Human
cagccuucagucugauccaccaga

SEQ ID NO: 33541 - RNA, 24 nt, Human
guuuucuuggugaagagcagaauu

SEQ ID NO: 33542 - RNA, 24 nt, Human
agcuggacuucuggcgggggccug

SEQ ID NO: 33543 - RNA, 21 nt, Human
uuuuuuggcaaugaauucugg

SEQ ID NO: 33544 - RNA, 24 nt, Human
aggcggaagugcaggguugugauc

SEQ ID NO: 33545 - RNA, 21 nt, Human
aaaugggaacaauaucaauau

SEQ ID NO: 33546 - RNA, 24 nt, Human
auuuauuuuuaaaauaauuuauca

SEQ ID NO: 33547 - RNA, 24 nt, Human
auagccuguugcgucaugugauuc

SEQ ID NO: 33548 - RNA, 24 nt, Human
aggcacagcacaguccuccggcuu

SEQ ID NO: 33549 - RNA, 24 nt, Human
ugagaauggcaaaauuagucgccu

SEQ ID NO: 33550 - RNA, 24 nt, Human
uacaccacucccaagaagaauaag

SEQ ID NO: 33551 - RNA, 24 nt, Human
ucccugugucuccccagguaguaa

SEQ ID NO: 33552 - RNA, 24 nt, Human
uuuuguggagugauggguaacgau

SEQ ID NO: 33553 - RNA, 24 nt, Human
ugacgucacucacucugagaccua

SEQ ID NO: 33554 - RNA, 24 nt, Human
uggcauagucaauccaacaauaag

SEQ ID NO: 33555 - RNA, 24 nt, Human
uggcauccgagagagacuggagca

SEQ ID NO: 33556 - RNA, 24 nt, Human
cccccauuaaggcacuauggcgug

SEQ ID NO: 33557 - RNA, 24 nt, Human
uggguucuuuggagaaaauaauga

SEQ ID NO: 33558 - RNA, 24 nt, Human
ugccugcgccugcuccuguuauca

SEQ ID NO: 33559 - RNA, 24 nt, Human
gaacaugcuacuuagacauggaga

SEQ ID NO: 33560 - RNA, 24 nt, Human
gucggcucucccaccugccccucu

SEQ ID NO: 33561 - RNA, 20 nt, Human
ucccacuuaaacacaggccc

SEQ ID NO: 33562 - RNA, 24 nt, Human
uuggggcagaacuagguaccaagc

SEQ ID NO: 33563 - RNA, 24 nt, Human
uaauguaguaggagaugggguaaa

SEQ ID NO: 33564 - RNA, 24 nt, Human
ucccuggaccagcccgguggcacc

SEQ ID NO: 33565 - RNA, 24 nt, Human
ugaggacaaggcagacgugcaguc

SEQ ID NO: 33566 - RNA, 24 nt, Human
agccuggauggugcagacagcacu

SEQ ID NO: 33567 - RNA, 22 nt, Human
gcugcagccccacaccucuccu

SEQ ID NO: 33568 - RNA, 24 nt, Human
agaggcuacaucuacacagggcgg

SEQ ID NO: 33569 - RNA, 24 nt, Human
gaccuggucuuuggcgucagggau

SEQ ID NO: 33570 - RNA, 24 nt, Human
uaaaauuuuauaaaucuccccuau

SEQ ID NO: 33571 - RNA, 24 nt, Human
uauguguauauauacauauauaca

SEQ ID NO: 33572 - RNA, 22 nt, Human
uacauuauguuaccugaugaua

SEQ ID NO: 33573 - RNA, 24 nt, Human
ugaaagugcucacaaacuucaaga

SEQ ID NO: 33574 - RNA, 24 nt, Human
uguggacgagcaggaggaggcggc

SEQ ID NO: 33575 - RNA, 24 nt, Human
uugaucuugaagaaacugggcgug

SEQ ID NO: 33576 - RNA, 24 nt, Human
aggaaggagauauagugaagagga

SEQ ID NO: 33577 - RNA, 24 nt, Human
guagaguuuucuucaggcuuaaag

SEQ ID NO: 33578 - RNA, 24 nt, Human
uaaccgaaaacguucagguugguc

SEQ ID NO: 33579 - RNA, 24 nt, Human
ucaagaaaccccuucuccuaaccc

SEQ ID NO: 33580 - RNA, 24 nt, Human
ucucgcucugucacccaggcugga

SEQ ID NO: 33581 - RNA, 24 nt, Human
ugcauuguuaucauuaaccagucu

SEQ ID NO: 33582 - RNA, 24 nt, Human
uauuagggauaauauucauuuagc

SEQ ID NO: 33583 - RNA, 24 nt, Human
uaaugggucucaaaauucugugac

SEQ ID NO: 33584 - RNA, 24 nt, Human
ucacugcauuccagccugggugac

SEQ ID NO: 33585 - RNA, 24 nt, Human
ugacaugcgucaugucuggguucu

SEQ ID NO: 33586 - RNA, 24 nt, Human
guagcggaaccagauugcagggau

SEQ ID NO: 33587 - RNA, 24 nt, Human
aagccccccaaagaacaagggaaa

SEQ ID NO: 33588 - RNA, 24 nt, Human
aaguggccuugugaucaugagggu

SEQ ID NO: 33589 - RNA, 24 nt, Human
cuuccggucuggcuuccaaaagga

SEQ ID NO: 33590 - RNA, 24 nt, Human
uagcauugaaggacucggggauau

SEQ ID NO: 33591 - RNA, 24 nt, Human
uagcauugaaggacucggggauau

SEQ ID NO: 33592 - RNA, 24 nt, Human
uuaaacccgucaauuuuuaaccug

SEQ ID NO: 33593 - RNA, 24 nt, Human
ggggauuucuggcucuuuccucuu

SEQ ID NO: 33594 - RNA, 24 nt, Human
uugcauggcgccugcuggaggagg

SEQ ID NO: 33595 - RNA, 24 nt, Human
gccccuggcagacauagcugcuuc

SEQ ID NO: 33596 - RNA, 24 nt, Human
uggacuugcccuuugacaaggggc

SEQ ID NO: 33597 - RNA, 24 nt, Human
cgaggugggcggaucacuugaggu

SEQ ID NO: 33598 - RNA, 24 nt, Human
uagaagcauuucucacuguccuca

SEQ ID NO: 33599 - RNA, 24 nt, Human
ugacaugagauacccaaugccguc

SEQ ID NO: 33600 - RNA, 24 nt, Human
ucugcauaguacuugauuuugggc

SEQ ID NO: 33601 - RNA, 24 nt, Human
ugauauguauauuaucauauuaua

SEQ ID NO: 33602 - RNA, 24 nt, Human
cugucugcaaguugaggagcaagg

SEQ ID NO: 33603 - RNA, 24 nt, Human
ucaggagaccauugcaucauuggc

SEQ ID NO: 33604 - RNA, 24 nt, Human
uacccuguucaacuacuggcuucg

SEQ ID NO: 33605 - RNA, 24 nt, Human
uggaaacauauuagaucuuuguac

SEQ ID NO: 33606 - RNA, 24 nt, Human
cuugacacuuccauugcccaugaa

SEQ ID NO: 33607 - RNA, 24 nt, Human
uggaacgggaugauauuuaugugu

SEQ ID NO: 33608 - RNA, 24 nt, Human
aucacuuacggucagcccuuucuu

SEQ ID NO: 33609 - RNA, 22 nt, Human
agccagcgccugcagcuccugg

SEQ ID NO: 33610 - RNA, 24 nt, Human
ccugcagauccucaucaaggucaa

SEQ ID NO: 33611 - RNA, 24 nt, Human
uugaaaacggcaaggccaacuccg

SEQ ID NO: 33612 - RNA, 24 nt, Human
ccugacacugcccgcuacuacaag

SEQ ID NO: 33613 - RNA, 24 nt, Human
uccaccaacaaccccucccaggcu

SEQ ID NO: 33614 - RNA, 24 nt, Human
uggaagaugcucaacaccuccucc

SEQ ID NO: 33615 - RNA, 24 nt, Human
ugaccaggaaauacaacgagcugc

SEQ ID NO: 33616 - RNA, 24 nt, Human
ccuggcacccagcucagcucccac

SEQ ID NO: 33617 - RNA, 24 nt, Human
ugcucauugguacggcgggguuuc

SEQ ID NO: 33618 - RNA, 24 nt, Human
uccaccaacaaccccucccaggcu

SEQ ID NO: 33619 - RNA, 24 nt, Human
uggaagaugcucaacaccuccucc

SEQ ID NO: 33620 - RNA, 24 nt, Human
ugaccaggaaauacaacgagcugc

SEQ ID NO: 33621 - RNA, 24 nt, Human
acugaacugcgcugccagugcuug

SEQ ID NO: 33622 - RNA, 24 nt, Human
uuuuagguguaaaauaauuaaggg

SEQ ID NO: 33623 - RNA, 24 nt, Human
accacguuccuugccuuucgauug

SEQ ID NO: 33624 - RNA, 24 nt, Human
cuggucccccuugaaacggcuguc

SEQ ID NO: 33625 - RNA, 24 nt, Human
uguugcagugaagccaacagagac

SEQ ID NO: 33626 - RNA, 24 nt, Human
ugagaagaauguaauccaagugau

SEQ ID NO: 33627 - RNA, 24 nt, Human
uaacacucacaacaaaagcuaagu

SEQ ID NO: 33628 - RNA, 22 nt, Human
aggcagccaccuggcgagucug

SEQ ID NO: 33629 - RNA, 24 nt, Human
ucucuccaauucgcugagccaucc

SEQ ID NO: 33630 - RNA, 21 nt, Human
gaccccuucaaccugggcgga

SEQ ID NO: 33631 - RNA, 24 nt, Human
uuccugaacagucagcgauuccag

SEQ ID NO: 33632 - RNA, 24 nt, Human
uucaacuuugauguucaugacgau

SEQ ID NO: 33633 - RNA, 24 nt, Human
ccaugcaggcaagguggugcugag

SEQ ID NO: 33634 - RNA, 24 nt, Human
uacacagaaucgccagaucgacag

SEQ ID NO: 33635 - RNA, 24 nt, Human
ugggaagugguuaagugugcccac

SEQ ID NO: 33636 - RNA, 17 nt, Human
ugcaguggccuaccgag

SEQ ID NO: 33637 - RNA, 20 nt, Human
cacugagucacaucauuccc

SEQ ID NO: 33638 - RNA, 24 nt, Human
ucauucauuuggcccaaaaucacg

SEQ ID NO: 33639 - RNA, 24 nt, Human
uacugcacacgucccuagagccua

SEQ ID NO: 33640 - RNA, 20 nt, Human
cacuguguggccggcagggu

SEQ ID NO: 33641 - RNA, 24 nt, Human
ugaaccuaagagcagguccucgag

SEQ ID NO: 33642 - RNA, 24 nt, Human
uaggaggauguggcuguugggguu

SEQ ID NO: 33643 - RNA, 24 nt, Human
ugggggaacuggagccugcugacc

SEQ ID NO: 33644 - RNA, 24 nt, Human
uuucggggcuccgggcccuagagg

SEQ ID NO: 33645 - RNA, 24 nt, Human
uuaggucugcuacucaaaugaacu

SEQ ID NO: 33646 - RNA, 24 nt, Human
agccaggaacauggacugaaguau

SEQ ID NO: 33647 - RNA, 24 nt, Human
ugccacagaacacuugacagugcu

SEQ ID NO: 33648 - RNA, 24 nt, Human
uuaccgguauuguaagaacaagcc

SEQ ID NO: 33649 - RNA, 24 nt, Human
uccaugagggcuucccaaugugcu

SEQ ID NO: 33650 - RNA, 23 nt, Human
uuugaccuggggcggaaaaaggc

SEQ ID NO: 33651 - RNA, 23 nt, Human
ugccuuuggaaagccccaggcac

SEQ ID NO: 33652 - RNA, 23 nt, Human
ucggauucuucuuucuuugcuuc

SEQ ID NO: 33653 - RNA, 24 nt, Human
uaggagcagguccaccggccccua

SEQ ID NO: 33654 - RNA, 24 nt, Human
ccaggccaaaaaggcucaacauuu

SEQ ID NO: 33655 - RNA, 24 nt, Human
ugaguagcuugccaaccugacccu

SEQ ID NO: 33656 - RNA, 24 nt, Human
uguccuggguggguggcuggccag

SEQ ID NO: 33657 - RNA, 24 nt, Human
uggcagcugcagaaacagcaguuc

SEQ ID NO: 33658 - RNA, 24 nt, Human
acucgcgccaguggaggugacauc

SEQ ID NO: 33659 - RNA, 24 nt, Human
cugcaguguuccccgagccuguua

SEQ ID NO: 33660 - RNA, 24 nt, Human
uggaugguggccucacccagauug

SEQ ID NO: 33661 - RNA, 24 nt, Human
ugagaugggaaagggcuccuucaa

SEQ ID NO: 33662 - RNA, 24 nt, Human
aggccauuaacuguuugaugcgag

SEQ ID NO: 33663 - RNA, 24 nt, Human
acucgcaguccuucuucucuggcc

SEQ ID NO: 33664 - RNA, 24 nt, Human
aggaagugguccccugauuccaaa

SEQ ID NO: 33665 - RNA, 19 nt, Human
ugccucaucccuuaguuuc

SEQ ID NO: 33666 - RNA, 18 nt, Human
cagccgggguauucaggc

SEQ ID NO: 33667 - RNA, 24 nt, Human
cuggcgccucagcuccucgcgcuc

SEQ ID NO: 33668 - RNA, 24 nt, Human
ucgccgguccaggucguagggccg

SEQ ID NO: 33669 - RNA, 24 nt, Human
cacuguguucaauuuugaguuucc

SEQ ID NO: 33670 - RNA, 24 nt, Human
uggauggauauacucguauuuccu

SEQ ID NO: 33671 - RNA, 24 nt, Human
ucacugcaaccuccgccucccagg

SEQ ID NO: 33672 - RNA, 24 nt, Human
uaaugggucucaaaauucugugac

SEQ ID NO: 33673 - RNA, 24 nt, Human
ucagucacuugcacaauuaauccu

SEQ ID NO: 33674 - RNA, 24 nt, Human
uuccaucggcuuuuccagggccca

SEQ ID NO: 33675 - RNA, 24 nt, Human
uccacuggcgaaagaugccuuucu

SEQ ID NO: 33676 - RNA, 24 nt, Human
uaguucagauugaucuuaggucaa

SEQ ID NO: 33677 - RNA, 24 nt, Human
uaacaagcuuaugaaguuaguauu

SEQ ID NO: 33678 - RNA, 24 nt, Human
gaagagccaggagcuacucagcaa

SEQ ID NO: 33679 - RNA, 24 nt, Human
acaggagugguccuuauccgguuu

SEQ ID NO: 33680 - RNA, 24 nt, Human
cugcccccucggucacucucuucc

SEQ ID NO: 33681 - RNA, 24 nt, Human
uuagauuguaauucuguaucaaug

SEQ ID NO: 33682 - RNA, 24 nt, Human
ugugaccaaagccuaagaagccag

SEQ ID NO: 33683 - RNA, 24 nt, Human
cacuggaccggggggcuggccgac

SEQ ID NO: 33684 - RNA, 24 nt, Human
uaugucaagucauuuccucagucc

SEQ ID NO: 33685 - RNA, 24 nt, Human
ugcacuacuuggaggucuaccuga

SEQ ID NO: 33686 - RNA, 22 nt, Human
augcuuccggcaggagacacaa

SEQ ID NO: 33687 - RNA, 24 nt, Human
aggaguagggagagcugagacuag

SEQ ID NO: 33688 - RNA, 24 nt, Human
ucagcucuauuccaggggcuccac

SEQ ID NO: 33689 - RNA, 23 nt, Human
aaauauguagaaaugaagagggu

SEQ ID NO: 33690 - RNA, 24 nt, Human
gagcugccaucugugguuuuccag

SEQ ID NO: 33691 - RNA, 24 nt, Human
uucuguccaaacagggggcauaua

SEQ ID NO: 33692 - RNA, 24 nt, Human
uauggcaagucacuuugacagaca

SEQ ID NO: 33693 - RNA, 24 nt, Human
ugagaauggcaaaauuagucgccu

SEQ ID NO: 33694 - RNA, 24 nt, Human
uacaccacucccaagaagaauaag

SEQ ID NO: 33695 - RNA, 24 nt, Human
uaacuugcuuaaggaaugucacaa

SEQ ID NO: 33696 - RNA, 24 nt, Human
uaccguagaaaacaggaccaagag

SEQ ID NO: 33697 - RNA, 24 nt, Human
ucuccgaguuugcgacucgcggac

SEQ ID NO: 33698 - RNA, 24 nt, Human
uggaaagcagguagaguuggcuuu

SEQ ID NO: 33699 - RNA, 24 nt, Human
agacagcacuguguuggcguacag

SEQ ID NO: 33700 - RNA, 24 nt, Human
ucucugguuguucacauuccaaaa

SEQ ID NO: 33701 - RNA, 24 nt, Human
ugucgcaggcugcucugucucuua

SEQ ID NO: 33702 - RNA, 24 nt, Human
aggcaacccuuucacaaaaccagg

SEQ ID NO: 33703 - RNA, 24 nt, Human
uucaaauuucuuucuuuuuuaauu

SEQ ID NO: 33704 - RNA, 24 nt, Human
ucaauuuuuauuuuggguuucuua

SEQ ID NO: 33705 - RNA, 24 nt, Human
uguugauacugcuggaauccagag

SEQ ID NO: 33706 - RNA, 24 nt, Human
uaaaaccuccuuuauggguuuguu

SEQ ID NO: 33707 - RNA, 24 nt, Human
uggaaucuugcggcauccacgaga

SEQ ID NO: 33708 - RNA, 24 nt, Human
uacuugaauagcuugguuaaauga

SEQ ID NO: 33709 - RNA, 24 nt, Human
agagaaaauguuagacguuaagug

SEQ ID NO: 33710 - RNA, 23 nt, Human
uaccacacaaaggcauuggcugc

SEQ ID NO: 33711 - RNA, 24 nt, Human
uagaagucugcggucugaggcucu

SEQ ID NO: 33712 - RNA, 24 nt, Human
ugagacuaaggcuuucgacccugg

SEQ ID NO: 33713 - RNA, 24 nt, Human
ucccaaagugcugggauuacaggc

SEQ ID NO: 33714 - RNA, 24 nt, Human
aaggaagugaauaaguuucagaug

SEQ ID NO: 33715 - RNA, 24 nt, Human
agacuuuuccagaagugccggacg

SEQ ID NO: 33716 - RNA, 21 nt, Human
uuugucagggaaacccggccc

SEQ ID NO: 33717 - RNA, 24 nt, Human
aggcaggaugggcagcucaggugg

SEQ ID NO: 33718 - RNA, 24 nt, Human
acugccagagggguugggaccagc

SEQ ID NO: 33719 - RNA, 24 nt, Human
uuugauacuauccuucugaaaagu

SEQ ID NO: 33720 - RNA, 24 nt, Human
acgggguuucaccauguuggccag

SEQ ID NO: 33721 - RNA, 24 nt, Human
uguucuggagcuguuggacaaaua

SEQ ID NO: 33722 - RNA, 24 nt, Human
uaccaggaagcauuugaaauuagu

SEQ ID NO: 33723 - RNA, 24 nt, Human
aaccagaaaguaagguguucuacu

SEQ ID NO: 33724 - RNA, 24 nt, Human
aacaugauuuaagguugaaauggc

SEQ ID NO: 33725 - RNA, 24 nt, Human
cuuuucacacaguuauuuuauuuu

SEQ ID NO: 33726 - RNA, 21 nt, Human
ugggaggggcugaauguggug

SEQ ID NO: 33727 - RNA, 24 nt, Human
aagcguuuugagcagaaaggauuc

SEQ ID NO: 33728 - RNA, 24 nt, Human
guagauuacacgagcugugcucag

SEQ ID NO: 33729 - RNA, 22 nt, Human
aagaaccuuccagcgcacucac

SEQ ID NO: 33730 - RNA, 24 nt, Human
ugugugccauugcccaggcagagu

SEQ ID NO: 33731 - RNA, 24 nt, Human
ugacuggaccggucccaacugcga

SEQ ID NO: 33732 - RNA, 24 nt, Human
ugugcacacauguaaccucuguga

SEQ ID NO: 33733 - RNA, 24 nt, Human
uagauuacauauccuuagcuaaaa

SEQ ID NO: 33734 - RNA, 24 nt, Human
uucacugucuccauuuguauugca

SEQ ID NO: 33735 - RNA, 24 nt, Human
uucugugucugagauuucuguaua

SEQ ID NO: 33736 - RNA, 24 nt, Human
ucuguacuuugugauaaguaagag

SEQ ID NO: 33737 - RNA, 20 nt, Human
uuuuccacaaauacuuacug

SEQ ID NO: 33738 - RNA, 24 nt, Human
uuuauauuuuugcaaaugucagga

SEQ ID NO: 33739 - RNA, 23 nt, Human
uuggcuccuacaaaugagugaaa

SEQ ID NO: 33740 - RNA, 24 nt, Human
uuuauauuuuugcaaaugucagga

SEQ ID NO: 33741 - RNA, 23 nt, Human
uuggcuccuacaaaugagugaaa

SEQ ID NO: 33742 - RNA, 24 nt, Human
ugcaagucgaguucgggaccacgc

SEQ ID NO: 33743 - RNA, 19 nt, Human
uauuacuaugagaagauag

SEQ ID NO: 33744 - RNA, 21 nt, Human
ugaggaaacaaccaggucccc

SEQ ID NO: 33745 - RNA, 24 nt, Human
uaugagaccauugggaaaacuacc

SEQ ID NO: 33746 - RNA, 24 nt, Human
uggcaaggucuguggugaagcaga

SEQ ID NO: 33747 - RNA, 22 nt, Human
ugauguuggagcugggcucuca

SEQ ID NO: 33748 - RNA, 24 nt, Human
aggcugauuccuuccuucuucucu

SEQ ID NO: 33749 - RNA, 24 nt, Human
ccgcccagggccuuccuguaagcu

SEQ ID NO: 33750 - RNA, 24 nt, Human
cuggccccaugcagccucccuggg

SEQ ID NO: 33751 - RNA, 24 nt, Human
aggaggcuuucccagcaggugcac

SEQ ID NO: 33752 - RNA, 24 nt, Human
uucacucuuucuagaagaggacuc

SEQ ID NO: 33753 - RNA, 22 nt, Human
uagguucucucgucgugaggca

SEQ ID NO: 33754 - RNA, 24 nt, Human
uaucaugccacucuccccuggccu

SEQ ID NO: 33755 - RNA, 24 nt, Human
guagaacacgucugguguggauaa

SEQ ID NO: 33756 - RNA, 24 nt, Human
aagguugucucaacuacagcuauc

SEQ ID NO: 33757 - RNA, 24 nt, Human
ugugaaguucaguauuauacuuau

SEQ ID NO: 33758 - RNA, 24 nt, Human
ugaauacacaucucugucagugug

SEQ ID NO: 33759 - RNA, 24 nt, Human
uuuuuagugcacuuaauauuagcu

SEQ ID NO: 33760 - RNA, 24 nt, Human
uaugugaauuugaguuugcuguuu

SEQ ID NO: 33761 - RNA, 24 nt, Human
uagcgucgccguuacuccgaggag

SEQ ID NO: 33762 - RNA, 24 nt, Human
uuucuggggcuugcgcgcaaaauc

SEQ ID NO: 33763 - RNA, 24 nt, Human
cgggcagaaggaggcugagaaagu

SEQ ID NO: 33764 - RNA, 24 nt, Human
accccagugugaccggcaaaauug

SEQ ID NO: 33765 - RNA, 24 nt, Human
gagcugcugcaggcggcggccggc

SEQ ID NO: 33766 - RNA, 24 nt, Human
uuccuggguucucacugucuuugc

SEQ ID NO: 33767 - RNA, 24 nt, Human
uggaucagagauuucuaugacagu

SEQ ID NO: 33768 - RNA, 24 nt, Human
uaucuggaucaucagauugugcuu

SEQ ID NO: 33769 - RNA, 24 nt, Human
acgcagcaucucagggcucaaagc

SEQ ID NO: 33770 - RNA, 24 nt, Human
ugcccaccuugcugcugugagugc

SEQ ID NO: 33771 - RNA, 24 nt, Human
uuaguucauagacccugucugcuc

SEQ ID NO: 33772 - RNA, 23 nt, Human
augaagcccuguguggucuggaa

SEQ ID NO: 33773 - RNA, 24 nt, Human
acccaguauccacaugcggugggg

SEQ ID NO: 33774 - RNA, 22 nt, Human
ugggaugguggccgauccugau

SEQ ID NO: 33775 - RNA, 24 nt, Human
cagcggcccuuguuucuucuuacc

SEQ ID NO: 33776 - RNA, 24 nt, Human
uggguguacggagcagcucuaagc

SEQ ID NO: 33777 - RNA, 24 nt, Human
aaccagaaaguaagguguucuacu

SEQ ID NO: 33778 - RNA, 17 nt, Human
uuucucagucuuuacua

SEQ ID NO: 33779 - RNA, 21 nt, Human
ucuacaguauucgguacagua

SEQ ID NO: 33780 - RNA, 22 nt, Human
cagacggucaucgucuagcaug

SEQ ID NO: 33781 - RNA, 21 nt, Human
cacugugcuugccgcccgggc

SEQ ID NO: 33782 - RNA, 24 nt, Human
ugagcgccccacccaugccugccu

SEQ ID NO: 33783 - RNA, 24 nt, Human
ucccggaacuccuucagguagcug

SEQ ID NO: 33784 - RNA, 24 nt, Human
ugagauaaagugccagucugccag

SEQ ID NO: 33785 - RNA, 24 nt, Human
aucaucuugaguuacuccuuuaag

SEQ ID NO: 33786 - RNA, 24 nt, Human
uagcucauucuuugcugugcccuu

SEQ ID NO: 33787 - RNA, 24 nt, Human
cacccgggagcggagguugcguga

SEQ ID NO: 33788 - RNA, 24 nt, Human
uagaacucagcccggcgcuccucu

SEQ ID NO: 33789 - RNA, 24 nt, Human
auggaucuuacuguccagagcacu

SEQ ID NO: 33790 - RNA, 23 nt, Human
aaagaagagagccgggggcugcc

SEQ ID NO: 33791 - RNA, 22 nt, Human
ucccgaagagccaggguuacca

SEQ ID NO: 33792 - RNA, 24 nt, Human
uauuuuggauuucucagaaguuga

SEQ ID NO: 33793 - RNA, 24 nt, Human
aggaaugcuaaaaguauggggagu

SEQ ID NO: 33794 - RNA, 21 nt, Human
uagguggcgacagggccuuga

SEQ ID NO: 33795 - RNA, 24 nt, Human
ucagguggcuccccgcggcgggcc

SEQ ID NO: 33796 - RNA, 21 nt, Human
uaucauuuuuguuacauauau

SEQ ID NO: 33797 - RNA, 24 nt, Human
ugaauggaagcuuuacauagaacc

SEQ ID NO: 33798 - RNA, 24 nt, Human
uccaucaccugcaacuuaaaugaa

SEQ ID NO: 33799 - RNA, 20 nt, Human
uauucagagaaucuaaagca

SEQ ID NO: 33800 - RNA, 24 nt, Human
uucagaguuaaaaagaagacuaac

SEQ ID NO: 33801 - RNA, 24 nt, Human
uccagagcuuuguuugaguucuca

SEQ ID NO: 33802 - RNA, 24 nt, Human
ggagcgcgaggaugaggcgaauga

SEQ ID NO: 33803 - RNA, 24 nt, Human
caggcagacgccaacggacacgca

SEQ ID NO: 33804 - RNA, 21 nt, Human
agggaaguauacaagcagagc

SEQ ID NO: 33805 - RNA, 18 nt, Human
ugccuggagcguggacag

SEQ ID NO: 33806 - RNA, 24 nt, Human
uuggucuuauuauguauuuccuga

SEQ ID NO: 33807 - RNA, 24 nt, Human
ugaaaaaggcgguauauaagcuga

SEQ ID NO: 33808 - RNA, 24 nt, Human
cauuguguguaacuuauucucaaa

SEQ ID NO: 33809 - RNA, 24 nt, Human
agagcagaagagcaguuuuaaaug

SEQ ID NO: 33810 - RNA, 24 nt, Human
uauuaggucccuguugaaggcuag

SEQ ID NO: 33811 - RNA, 24 nt, Human
uucauaaucuggucaugugggaau

SEQ ID NO: 33812 - RNA, 24 nt, Human
uggcuuagaguccuccugucuucc

SEQ ID NO: 33813 - RNA, 24 nt, Human
uaaccauuuugucaucuagcaagc

SEQ ID NO: 33814 - RNA, 24 nt, Human
uaaguugaaaacucaguaucuaug

SEQ ID NO: 33815 - RNA, 24 nt, Human
ugggugccaagauugaauaugaag

SEQ ID NO: 33816 - RNA, 24 nt, Human
uuuugcuggaagauucaacuaaag

SEQ ID NO: 33817 - RNA, 24 nt, Human
uuuaaauauauauauauuuaaugu

SEQ ID NO: 33818 - RNA, 24 nt, Human
ugaauguacauccagugacaucug

SEQ ID NO: 33819 - RNA, 24 nt, Human
uuuaaauaucucaagagcauacca

SEQ ID NO: 33820 - RNA, 24 nt, Human
ugaagucauuuuccuuugugagag

SEQ ID NO: 33821 - RNA, 24 nt, Human
ccuuacgaaccaugccuuccucag

SEQ ID NO: 33822 - RNA, 24 nt, Human
uucauguaaucuuugauguacuuc

SEQ ID NO: 33823 - RNA, 24 nt, Human
uaccuuaacgucagaauucccuaa

SEQ ID NO: 33824 - RNA, 19 nt, Human
uccagcuguccagcaugac

SEQ ID NO: 33825 - RNA, 24 nt, Human
ugagagguggaggaguucugaucc

SEQ ID NO: 33826 - RNA, 21 nt, Human
uucaagggauggaaagucacc

SEQ ID NO: 33827 - RNA, 24 nt, Human
ucugaucuauaaaugcgguggcau

SEQ ID NO: 33828 - RNA, 20 nt, Human
ugcccaggaagacagggcga

SEQ ID NO: 33829 - RNA, 24 nt, Human
ugaaaaggucaaaaugcggcaaau

SEQ ID NO: 33830 - RNA, 24 nt, Human
ucucuacugccgcugauggucaaa

SEQ ID NO: 33831 - RNA, 24 nt, Human
gauuagccuuuucucugccuugcu

SEQ ID NO: 33832 - RNA, 24 nt, Human
uagcggcgacggggagggugggcu

SEQ ID NO: 33833 - RNA, 24 nt, Human
cuggaaggcauacccuacaauuua

SEQ ID NO: 33834 - RNA, 23 nt, Human
uugaaagguauauuaaaauuaag

SEQ ID NO: 33835 - RNA, 24 nt, Human
uggccgaaucuuccuucaggauau

SEQ ID NO: 33836 - RNA, 24 nt, Human
ucuaaacuaaauuaggcaaauagu

SEQ ID NO: 33837 - RNA, 17 nt, Human
uacacugggcuuuugcc

SEQ ID NO: 33838 - RNA, 24 nt, Human
uguguuuguagacuuggaacccac

SEQ ID NO: 33839 - RNA, 24 nt, Human
cugccgggaaagagcuccugaagu

SEQ ID NO: 33840 - RNA, 24 nt, Human
caacugauuaccauuuacagugau

SEQ ID NO: 33841 - RNA, 24 nt, Human
agguagugcagugguuguaaagug

SEQ ID NO: 33842 - RNA, 24 nt, Human
ucaccauuaaaucuaucaguguuu

SEQ ID NO: 33843 - RNA, 24 nt, Human
ugagcugcaaggaaggaagaguag

SEQ ID NO: 33844 - RNA, 24 nt, Human
ugauuugcuucgacuagaaacucc

SEQ ID NO: 33845 - RNA, 21 nt, Human
uucaagggauggaaagucacc

SEQ ID NO: 33846 - RNA, 24 nt, Human
caguauguacacgcggugacacuc

SEQ ID NO: 33847 - RNA, 24 nt, Human
uucaccuuuaucugaccaaaccgc

SEQ ID NO: 33848 - RNA, 20 nt, Human
agcuauguaaaagagaacca

SEQ ID NO: 33849 - RNA, 24 nt, Human
agaagaagaagaaauggcaaagag

SEQ ID NO: 33850 - RNA, 24 nt, Human
uaucaaggaagggcaggcgugaug

SEQ ID NO: 33851 - RNA, 24 nt, Human
ucaauuuuuauuuugguuuucuua

SEQ ID NO: 33852 - RNA, 24 nt, Human
ggaucaggcuuuucugccagcagc

SEQ ID NO: 33853 - RNA, 24 nt, Human
aggcagggaggacucaggacuaca

SEQ ID NO: 33854 - RNA, 23 nt, Human
uucguagcucuuguagggugguc

SEQ ID NO: 33855 - RNA, 19 nt, Human
uaccgcuuugagacagucc

SEQ ID NO: 33856 - RNA, 22 nt, Human
uccccgauggcccacugcguga

SEQ ID NO: 33857 - RNA, 22 nt, Human
ugggagggggcagcugggcuga

SEQ ID NO: 33858 - RNA, 21 nt, Human
uggcaagcaugugguguuugg

SEQ ID NO: 33859 - RNA, 24 nt, Human
aauggcacugggggcaaguccauc

SEQ ID NO: 33860 - RNA, 24 nt, Human
ucagagcuacacauugagaaccug

SEQ ID NO: 33861 - RNA, 24 nt, Human
caccaucaucuucaucuacgagaa

SEQ ID NO: 33862 - RNA, 24 nt, Human
uacaagaucacugacucugaggac

SEQ ID NO: 33863 - RNA, 24 nt, Human
uacgcugggaccccgccaaggagc

SEQ ID NO: 33864 - RNA, 24 nt, Human
uaagcgaacgcccuuuggagcuua

SEQ ID NO: 33865 - RNA, 24 nt, Human
uggacagugggccgcaaagaaccu

SEQ ID NO: 33866 - RNA, 24 nt, Human
ccagagugcugggauuacaggcau

SEQ ID NO: 33867 - RNA, 24 nt, Human
caagaaggcuaauugguggugaga

SEQ ID NO: 33868 - RNA, 24 nt, Human
ucaauuuuuauuuugguuuucuua

SEQ ID NO: 33869 - RNA, 24 nt, Human
aagaguguugagcuaguuccuggu

SEQ ID NO: 33870 - RNA, 24 nt, Human
ugcaggaaugagagugauuuuaug

SEQ ID NO: 33871 - RNA, 24 nt, Human
ucgaauggacacauuaccagugaa

SEQ ID NO: 33872 - RNA, 24 nt, Human
ucccagcaggacccucuucuuguu

SEQ ID NO: 33873 - RNA, 24 nt, Human
ggacagguguacagacauguucuu

SEQ ID NO: 33874 - RNA, 24 nt, Human
uaggugcccucaauagccuccuug

SEQ ID NO: 33875 - RNA, 24 nt, Human
uuuguauucaguacaguugucauu

SEQ ID NO: 33876 - RNA, 24 nt, Human
uaccacacaauucauguaucuaaa

SEQ ID NO: 33877 - RNA, 23 nt, Human
uuuaacguuuucaugguaaugca

SEQ ID NO: 33878 - RNA, 24 nt, Human
ugcauuguuaucauuaaccagucu

SEQ ID NO: 33879 - RNA, 24 nt, Human
uauuagggauaauauucauuuagc

SEQ ID NO: 33880 - RNA, 24 nt, Human
uaaugggucucaaaauucugggac

SEQ ID NO: 33881 - RNA, 24 nt, Human
uaggaucaugaugguaaggcaaau

SEQ ID NO: 33882 - RNA, 24 nt, Human
uucacauuuuuuaaaaaguguauu

SEQ ID NO: 33883 - RNA, 24 nt, Human
uuccagguccucgaggucccacuc

SEQ ID NO: 33884 - RNA, 24 nt, Human
ugugcaugcccacagcccgaggcc

SEQ ID NO: 33885 - RNA, 24 nt, Human
guuuguuuaagguuuucuccaugg

SEQ ID NO: 33886 - RNA, 24 nt, Human
ucccucuuuaagauugcguaccca

SEQ ID NO: 33887 - RNA, 24 nt, Human
uuagagcuggcagcagcaucucag

SEQ ID NO: 33888 - RNA, 24 nt, Human
uggcucagaguccaguuuucuuaa

SEQ ID NO: 33889 - RNA, 24 nt, Human
agggagcuauuuuuugaagaugau

SEQ ID NO: 33890 - RNA, 24 nt, Human
uucaaauaggagccgauggaucug

SEQ ID NO: 33891 - RNA, 24 nt, Human
ucuugcgggagauugcugaagagu

SEQ ID NO: 33892 - RNA, 24 nt, Human
cgagaggcacagaaggagcuggag

SEQ ID NO: 33893 - RNA, 24 nt, Human
gagcacgugucaucuucccugcgg

SEQ ID NO: 33894 - RNA, 22 nt, Human
cauuucuuggcaauguggugcc

SEQ ID NO: 33895 - RNA, 17 nt, Human
uuucuaggauagucagu

SEQ ID NO: 33896 - RNA, 24 nt, Human
uuuggucguggacguggucagcca

SEQ ID NO: 33897 - RNA, 24 nt, Human
uauccaguaucuccgugauuaccu

SEQ ID NO: 33898 - RNA, 24 nt, Human
uggcaggccucggcuaaaggucug

SEQ ID NO: 33899 - RNA, 24 nt, Human
acgcggauucucuugcccacaauu

SEQ ID NO: 33900 - RNA, 24 nt, Human
cuuggauuuucuggaaagauuuca

SEQ ID NO: 33901 - RNA, 24 nt, Human
ugaaaccuccuauuccaugcguaa

SEQ ID NO: 33902 - RNA, 18 nt, Human
uguaauagacauccaaag

SEQ ID NO: 33903 - RNA, 23 nt, Human
ugugaauaccaccucugcaugcu

SEQ ID NO: 33904 - RNA, 24 nt, Human
uucucuguggacauugacucggag

SEQ ID NO: 33905 - RNA, 24 nt, Human
gaagugcggcuucuucaagcgagc

SEQ ID NO: 33906 - RNA, 21 nt, Human
acaaagcaaagaggaagaagc

SEQ ID NO: 33907 - RNA, 24 nt, Human
cagcggcagagagccauccucuau

SEQ ID NO: 33908 - RNA, 24 nt, Human
cuggaggugggcuuuggcauggcc

SEQ ID NO: 33909 - RNA, 24 nt, Human
ggggagcagacaaguaccacuccg

SEQ ID NO: 33910 - RNA, 24 nt, Human
gaccguaauuguggcugcacugga

SEQ ID NO: 33911 - RNA, 24 nt, Human
ugucauaggcaucgacgaggggca

SEQ ID NO: 33912 - RNA, 24 nt, Human
agauuacacuguuaccgagauccc

SEQ ID NO: 33913 - RNA, 24 nt, Human
ugagcaguguaugucaggacuugu

SEQ ID NO: 33914 - RNA, 24 nt, Human
uucauuguggacaaaguuauuauu

SEQ ID NO: 33915 - RNA, 24 nt, Human
uagagcuagugaauuagccuauuu

SEQ ID NO: 33916 - RNA, 24 nt, Human
uucacucaagacuaaaaacuaaag

SEQ ID NO: 33917 - RNA, 24 nt, Human
uguggggggcugggggagguccaa

SEQ ID NO: 33918 - RNA, 24 nt, Human
ccggaccccaccucuucccugccg

SEQ ID NO: 33919 - RNA, 24 nt, Human
caccugcagcuaugaugcccuucc

SEQ ID NO: 33920 - RNA, 24 nt, Human
uccccugcuaugcaagugccccug

SEQ ID NO: 33921 - RNA, 24 nt, Human
uaugauguggaagcugguuucagc

SEQ ID NO: 33922 - RNA, 24 nt, Human
uacaagguuccuuccacugaagca

SEQ ID NO: 33923 - RNA, 18 nt, Human
uuccuagguguaugugcc

SEQ ID NO: 33924 - RNA, 24 nt, Human
uaagaaauucgauugcgggucaag

SEQ ID NO: 33925 - RNA, 24 nt, Human
ugggagcggguggggaggucgagg

SEQ ID NO: 33926 - RNA, 24 nt, Human
ugacacgaggggaggggucugugu

SEQ ID NO: 33927 - RNA, 17 nt, Human
uggaaagugaggcgaga

SEQ ID NO: 33928 - RNA, 24 nt, Human
aguuuggauucugaaaacuaacug

SEQ ID NO: 33929 - RNA, 24 nt, Human
ccuuacucccucuuuaagauugcg

SEQ ID NO: 33930 - RNA, 24 nt, Human
cagauccaagagauauauuuggca

SEQ ID NO: 33931 - RNA, 24 nt, Human
ucccuggcuuaugagcaggcugag

SEQ ID NO: 33932 - RNA, 24 nt, Human
uaaugaguaggugagagggucugg

SEQ ID NO: 33933 - RNA, 24 nt, Human
gugauccacccgccucagccuccc

SEQ ID NO: 33934 - RNA, 24 nt, Human
caccgcguuccagccaccagcccu

SEQ ID NO: 33935 - RNA, 24 nt, Human
cuggaccagcuucaaguacauguc

SEQ ID NO: 33936 - RNA, 24 nt, Human
uucauggaaguaggagagaagacu

SEQ ID NO: 33937 - RNA, 24 nt, Human
ggagcagcuguaagugccauugcc

SEQ ID NO: 33938 - RNA, 24 nt, Human
uguuggggaugcugacgccucccc

SEQ ID NO: 33939 - RNA, 24 nt, Human
cagcugccaggcaggagucgguag

SEQ ID NO: 33940 - RNA, 24 nt, Human
ucacucaguuuuuaauaaaggcca

SEQ ID NO: 33941 - RNA, 24 nt, Human
uguucagaaauugaggcuaacauu

SEQ ID NO: 33942 - RNA, 24 nt, Human
auugcaaaauuacaacugagacag

SEQ ID NO: 33943 - RNA, 24 nt, Human
uuuauuggaaaauacccaaauaau

SEQ ID NO: 33944 - RNA, 24 nt, Human
uuaauuguuuaccuagauuauuua

SEQ ID NO: 33945 - RNA, 24 nt, Human
ucacaaccacggcccuggaggagc

SEQ ID NO: 33946 - RNA, 24 nt, Human
ccuccuucccaggcucuggggcag

SEQ ID NO: 33947 - RNA, 24 nt, Human
agguaguaaacuccccaggugggc

SEQ ID NO: 33948 - RNA, 24 nt, Human
ucgaauggacacauuaccagugaa

SEQ ID NO: 33949 - RNA, 23 nt, Human
ucucacaguucugggcuaggacu

SEQ ID NO: 33950 - RNA, 23 nt, Human
ucccauggcuuucaauguggggc

SEQ ID NO: 33951 - RNA, 24 nt, Human
agaguucugugucuggacuuggag

SEQ ID NO: 33952 - RNA, 24 nt, Human
gccccuuucgguuuuuuuuaaaaa

SEQ ID NO: 33953 - RNA, 24 nt, Human
uaucaugccacucuccccuggccu

SEQ ID NO: 33954 - RNA, 24 nt, Human
guagaacacgucugguguggauaa

SEQ ID NO: 33955 - RNA, 22 nt, Human
aagaaucaugaaauuuauaugg

SEQ ID NO: 33956 - RNA, 24 nt, Human
cgggaacagcuggcagcugugagg

SEQ ID NO: 33957 - RNA, 24 nt, Human
ugucccagcugagggccuuugucc

SEQ ID NO: 33958 - RNA, 24 nt, Human
ccacugggcccagccuauuugcaa

SEQ ID NO: 33959 - RNA, 24 nt, Human
auagcucacugcagccucuaccuc

SEQ ID NO: 33960 - RNA, 24 nt, Human
uagaagcuagcucccggcagcaug

SEQ ID NO: 33961 - RNA, 24 nt, Human
ucccugaauucccauccagaaauc

SEQ ID NO: 33962 - RNA, 24 nt, Human
ugaaaacuagcgaggucugcugua

SEQ ID NO: 33963 - RNA, 24 nt, Human
uaugugcaguuauuaucacaugaa

SEQ ID NO: 33964 - RNA, 24 nt, Human
cggcacgcgggggccccggggcgg

SEQ ID NO: 33965 - RNA, 23 nt, Human
gagcacagcgcagcgcgggcggc

SEQ ID NO: 33966 - RNA, 24 nt, Human
uuucuguauaugaauuuguuaaua

SEQ ID NO: 33967 - RNA, 17 nt, Human
ucuguccucuguagcac

SEQ ID NO: 33968 - RNA, 23 nt, Human
ugacaaggggcugcuucuggggu

SEQ ID NO: 33969 - RNA, 24 nt, Human
uccaccacuacuggccaucugauc

SEQ ID NO: 33970 - RNA, 24 nt, Human
uuucacgccgguuuuagucccgac

SEQ ID NO: 33971 - RNA, 23 nt, Human
ugggucagacguaggugacaagc

SEQ ID NO: 33972 - RNA, 24 nt, Human
uagguggcaccaaucuugacuauc

SEQ ID NO: 33973 - RNA, 24 nt, Human
ggggaacgauggccauggagucca

SEQ ID NO: 33974 - RNA, 24 nt, Human
acccuggcaguucuggcccucccg

SEQ ID NO: 33975 - RNA, 24 nt, Human
caggccacggcagaggcugagugu

SEQ ID NO: 33976 - RNA, 24 nt, Human
gugaagcucuacuacccgccccgu

SEQ ID NO: 33977 - RNA, 22 nt, Human
uuggaugcuugauaugaacauc

SEQ ID NO: 33978 - RNA, 24 nt, Human
ugaguacaccaugacgccccaacc

SEQ ID NO: 33979 - RNA, 21 nt, Human
uauccugcacuggcugugaac

SEQ ID NO: 33980 - RNA, 24 nt, Human
guggcagauuucacgaaaucuagc

SEQ ID NO: 33981 - RNA, 24 nt, Human
uaggugccauuagcucuuagggag

SEQ ID NO: 33982 - RNA, 24 nt, Human
aagcaguacgacagcauuuugagg

SEQ ID NO: 33983 - RNA, 24 nt, Human
gauuugcagcuacgaaaucaucac

SEQ ID NO: 33984 - RNA, 24 nt, Human
acagaagauguuucggugaagauc

SEQ ID NO: 33985 - RNA, 19 nt, Human
accacggccuggaggugcu

SEQ ID NO: 33986 - RNA, 24 nt, Human
ucagugaguaccccgaucuugacu

SEQ ID NO: 33987 - RNA, 24 nt, Human
gccgcgguccuagcgccgcucggc

SEQ ID NO: 33988 - RNA, 24 nt, Human
uucaagggauggaaagucaaccgu

SEQ ID NO: 33989 - RNA, 24 nt, Human
aaucauaugauggcaaaaauugag

SEQ ID NO: 33990 - RNA, 24 nt, Human
cguacaaaccuuccgaggcccucg

SEQ ID NO: 33991 - RNA, 24 nt, Human
uggguacgcaccccaggacccgga

SEQ ID NO: 33992 - RNA, 24 nt, Human
aaugagccuaaagaaaagcuguug

SEQ ID NO: 33993 - RNA, 21 nt, Human
uucaagggauggaaagucacc

SEQ ID NO: 33994 - RNA, 24 nt, Human
ucugaucuauaaaugcgguggcau

SEQ ID NO: 33995 - RNA, 24 nt, Human
aaccgugauucgacuacgucaagc

SEQ ID NO: 33996 - RNA, 24 nt, Human
uaucagguggcauagcgucuguug

SEQ ID NO: 33997 - RNA, 24 nt, Human
uagaaaguuaagaugggcuugaaa

SEQ ID NO: 33998 - RNA, 24 nt, Human
cccagcaggcucguaccaaaguca

SEQ ID NO: 33999 - RNA, 24 nt, Human
ugaaauauaugcauguaaaaacuu

SEQ ID NO: 34000 - RNA, 23 nt, Human
auggagcccugaauguugaccug

SEQ ID NO: 34001 - RNA, 24 nt, Human
cauugcuggcuauguguuuagaga

SEQ ID NO: 34002 - RNA, 24 nt, Human
aaccggauuuauuuuuuucacgac

SEQ ID NO: 34003 - RNA, 24 nt, Human
agggaguggaguggcacagaccua

SEQ ID NO: 34004 - RNA, 22 nt, Human
uucaagggauggaaaagucacc

SEQ ID NO: 34005 - RNA, 24 nt, Human
ucugaucuauaaaugcgguggcau

SEQ ID NO: 34006 - RNA, 24 nt, Human
uggaaugaagucugacuccuccag

SEQ ID NO: 34007 - RNA, 24 nt, Human
uguuuaaugaaugcauaugaggug

SEQ ID NO: 34008 - RNA, 24 nt, Human
gacgguacaagugacaauagcaau

SEQ ID NO: 34009 - RNA, 24 nt, Human
cagcaguaagcaacaauggcugau

SEQ ID NO: 34010 - RNA, 24 nt, Human
cgugguguccuaccccuucgacac

SEQ ID NO: 34011 - RNA, 24 nt, Human
uacauuaagaaaauuggcuacaac

SEQ ID NO: 34012 - RNA, 24 nt, Human
ucugaucuauaaaugcgguggcau

SEQ ID NO: 34013 - RNA, 24 nt, Human
ucugaucuauaaaugcgguggcau

SEQ ID NO: 34014 - RNA, 24 nt, Human
uagaauacaaaaagaaaguaaaaa

SEQ ID NO: 34015 - RNA, 22 nt, Human
ucccuaagcaggugguuuacua

SEQ ID NO: 34016 - RNA, 24 nt, Human
cagcccaguccaaaaggugccugc

SEQ ID NO: 34017 - RNA, 24 nt, Human
uguccugaugcugguggcauaggc

SEQ ID NO: 34018 - RNA, 18 nt, Human
uguugcggggggaauaac

SEQ ID NO: 34019 - RNA, 24 nt, Human
uuucucuuaacacaccccuuaaug

SEQ ID NO: 34020 - RNA, 24 nt, Human
agaugucuucaggaaaugcuaaaa

SEQ ID NO: 34021 - RNA, 17 nt, Human
cagcugguggaacugga

SEQ ID NO: 34022 - RNA, 24 nt, Human
uuucgggguagugugagcuuuuaa

SEQ ID NO: 34023 - RNA, 24 nt, Human
uaauagggguucccaaauucuguu

SEQ ID NO: 34024 - RNA, 24 nt, Human
uuuauuguggguuacagaucauaa

SEQ ID NO: 34025 - RNA, 17 nt, Human
ugcuaaggagggccccc

SEQ ID NO: 34026 - RNA, 24 nt, Human
gaaggcaaacauguucagaaguca

SEQ ID NO: 34027 - RNA, 24 nt, Human
ucaagcacaaaccaauuuguguug

SEQ ID NO: 34028 - RNA, 24 nt, Human
uuugugcaugcagaucgaaaacaa

SEQ ID NO: 34029 - RNA, 24 nt, Human
uaguaucuuuguacaucauaggac

SEQ ID NO: 34030 - RNA, 24 nt, Human
ugaguacacguagaccaagcaauc

SEQ ID NO: 34031 - RNA, 24 nt, Human
ucagugagcgugugggaacugaga

SEQ ID NO: 34032 - RNA, 24 nt, Human
acuuugaugauuugaaaggagaac

SEQ ID NO: 34033 - RNA, 21 nt, Human
uucaagggauggaaagucacc

SEQ ID NO: 34034 - RNA, 24 nt, Human
ugcauuguuaucauuaaccagucu

SEQ ID NO: 34035 - RNA, 24 nt, Human
uauuagggauaauauucauuuagc

SEQ ID NO: 34036 - RNA, 24 nt, Human
uuuaacuuuuuuaaugggucucaa

SEQ ID NO: 34037 - RNA, 24 nt, Human
ugcauuguuaucauuaaccagucu

SEQ ID NO: 34038 - RNA, 24 nt, Human
uaaugggucucaaaauucugugac

SEQ ID NO: 34039 - RNA, 24 nt, Human
acucagaguccggcagcauccucc

SEQ ID NO: 34040 - RNA, 24 nt, Human
uaggaggcacagggacgcugacua

SEQ ID NO: 34041 - RNA, 24 nt, Human
uguaaggcauugagauguuuaugu

SEQ ID NO: 34042 - RNA, 24 nt, Human
cagaagaagggauucacucaguac

SEQ ID NO: 34043 - RNA, 24 nt, Human
agcgagcggguagcggaccuugac

SEQ ID NO: 34044 - RNA, 23 nt, Human
gaaacaguuuggcucugguucuu

SEQ ID NO: 34045 - RNA, 17 nt, Human
ucccugggaacgggcug

SEQ ID NO: 34046 - RNA, 24 nt, Human
uuugcauucuucauucccuaucuu

SEQ ID NO: 34047 - RNA, 24 nt, Human
uauacaauucuuuauuuagguaac

SEQ ID NO: 34048 - RNA, 24 nt, Human
uaauuuagggaacauggggauaac

SEQ ID NO: 34049 - RNA, 24 nt, Human
aggccgaggcgggcaggugaucac

SEQ ID NO: 34050 - RNA, 24 nt, Human
gagcagucugaaugccagaaugga

SEQ ID NO: 34051 - RNA, 24 nt, Human
ugguaaauauucagaauguggucg

SEQ ID NO: 34052 - RNA, 24 nt, Human
gggaauugucucggaugcaucugg

SEQ ID NO: 34053 - RNA, 24 nt, Human
uaaguuguuuuauuaaguuaauuu

SEQ ID NO: 34054 - RNA, 24 nt, Human
ucuugcgggagauugcugaagagu

SEQ ID NO: 34055 - RNA, 24 nt, Human
cgagaggcacagaaggagcuggag

SEQ ID NO: 34056 - RNA, 24 nt, Human
cggcaaaauucgcaaggugcgcga

SEQ ID NO: 34057 - RNA, 24 nt, Human
ggguugggaccugccaugcaucuu

SEQ ID NO: 34058 - RNA, 24 nt, Human
ucugaucuauaaaugcgguggcau

SEQ ID NO: 34059 - RNA, 24 nt, Human
cugcagguugucagcgaugccggc

SEQ ID NO: 34060 - RNA, 20 nt, Human
cagcagugccuggcugcggc

SEQ ID NO: 34061 - RNA, 24 nt, Human
uuugcagcuuaacuucaaaugcaa

SEQ ID NO: 34062 - RNA, 24 nt, Human
uuagaguguauuucugaaacuagc

SEQ ID NO: 34063 - RNA, 24 nt, Human
uuugaugcaagaaaggccucucuu

SEQ ID NO: 34064 - RNA, 24 nt, Human
aguugcuccagaaaaaccuguaaa

SEQ ID NO: 34065 - RNA, 24 nt, Human
gagccgagcgaagcgaugccuaaa

SEQ ID NO: 34066 - RNA, 24 nt, Human
ucagggagggacucagcaaaugau

SEQ ID NO: 34067 - RNA, 24 nt, Human
caaucauugaauacaaaacaaaua

SEQ ID NO: 34068 - RNA, 24 nt, Human
uguucuugcccaagagugugucug

SEQ ID NO: 34069 - RNA, 24 nt, Human
ucaccaaggagaaccugcuggacu

SEQ ID NO: 34070 - RNA, 19 nt, Human
uguggaguucuaugcccca

SEQ ID NO: 34071 - RNA, 24 nt, Human
gggaaucuucaaugcaaucuuuuu

SEQ ID NO: 34072 - RNA, 18 nt, Human
caccgggguuagcccagg

SEQ ID NO: 34073 - RNA, 24 nt, Human
uaaaagaaggcaggugucucuuua

SEQ ID NO: 34074 - RNA, 24 nt, Human
acacugagcaccuggugaauggcc

SEQ ID NO: 34075 - RNA, 24 nt, Human
cgaccagugcugcugccuauggca

SEQ ID NO: 34076 - RNA, 24 nt, Human
ucauugaaaaaguccuggugggaa

SEQ ID NO: 34077 - RNA, 24 nt, Human
uagcuguuggcagcuaugguguuc

SEQ ID NO: 34078 - RNA, 24 nt, Human
acuccaggcuuggucuucugggca

SEQ ID NO: 34079 - RNA, 24 nt, Human
uugcugguaaucuuuccaggguag

SEQ ID NO: 34080 - RNA, 24 nt, Human
uaaauagugagacauaaauagagu

SEQ ID NO: 34081 - RNA, 24 nt, Human
uucaauuuguuaacagagcaaauu

SEQ ID NO: 34082 - RNA, 24 nt, Human
gugaugcugcugcugcugcuuucc

SEQ ID NO: 34083 - RNA, 24 nt, Human
aagcuccaggucccuucuccagcc

SEQ ID NO: 34084 - RNA, 21 nt, Human
ugucucaggacucugacacug

SEQ ID NO: 34085 - RNA, 24 nt, Human
cgcuccaagacguuguguguucgc

SEQ ID NO: 34086 - RNA, 24 nt, Human
uguggcuuuuuuaaggauaacuac

SEQ ID NO: 34087 - RNA, 24 nt, Human
uuaggaaaaaaauauuauaaucau

SEQ ID NO: 34088 - RNA, 19 nt, Human
uguaaauagucugccuucc

SEQ ID NO: 34089 - RNA, 24 nt, Human
ucugcuguguauguaugccaagga

SEQ ID NO: 34090 - RNA, 24 nt, Human
uggggucagaaaagagaaaugacc

SEQ ID NO: 34091 - RNA, 24 nt, Human
acucugguuauggggacacugacg

SEQ ID NO: 34092 - RNA, 24 nt, Human
ccgcugcccgacgcuucuguucgg

SEQ ID NO: 34093 - RNA, 24 nt, Human
ucuccagguucuucaauaucagug

SEQ ID NO: 34094 - RNA, 24 nt, Human
ugccuagaguuuaagcuaccucag

SEQ ID NO: 34095 - RNA, 24 nt, Human
ucuuuugugcugcugucauccuag

SEQ ID NO: 34096 - RNA, 24 nt, Human
gaugcagaguagcagaagcuccuc

SEQ ID NO: 34097 - RNA, 24 nt, Human
ucaguuaaaaaagaagaagaagaa

SEQ ID NO: 34098 - RNA, 24 nt, Human
uggcuuauuuguuuuguauucaau

SEQ ID NO: 34099 - RNA, 24 nt, Human
ggugaugggggcagccgggaggga

SEQ ID NO: 34100 - RNA, 20 nt, Human
gagcaauggaggaggcuagg

SEQ ID NO: 34101 - RNA, 23 nt, Human
ugccuuagauauuccuaauuacu

SEQ ID NO: 34102 - RNA, 24 nt, Human
ucgucuggagauauuuuugguugu

SEQ ID NO: 34103 - RNA, 24 nt, Human
auggugcacaggauagccccccac

SEQ ID NO: 34104 - RNA, 24 nt, Human
uauugcugcgaguuaucuaaacaa

SEQ ID NO: 34105 - RNA, 24 nt, Human
ugugcagaagaaauggaaggauuc

SEQ ID NO: 34106 - RNA, 24 nt, Human
uauuuugguuuucuuacaaagguu

SEQ ID NO: 34107 - RNA, 24 nt, Human
uaacagguguaagaguguugaaaa

SEQ ID NO: 34108 - RNA, 24 nt, Human
ugugcagaagaaauggaaggauuc

SEQ ID NO: 34109 - RNA, 24 nt, Human
uaucaaggaagggcaggcgugaug

SEQ ID NO: 34110 - RNA, 24 nt, Human
uucaaauuucuuucuuuuuuaauu

SEQ ID NO: 34111 - RNA, 24 nt, Human
acgcaggugccccgcgcuccccgc

SEQ ID NO: 34112 - RNA, 24 nt, Human
uggauccgucucucuaggcuuguc

SEQ ID NO: 34113 - RNA, 24 nt, Human
caucaggaugcaucacgaucauua

SEQ ID NO: 34114 - RNA, 24 nt, Human
gugcaggacuuugaugcuuggggu

SEQ ID NO: 34115 - RNA, 24 nt, Human
ccagacagcccuaccugugccaga

SEQ ID NO: 34116 - RNA, 23 nt, Human
cagcgcacugccacaagccccuc

SEQ ID NO: 34117 - RNA, 24 nt, Human
uaucaaggaagggcaggcgugaug

SEQ ID NO: 34118 - RNA, 24 nt, Human
ucaguuaaaaaagaagaagaagaa

SEQ ID NO: 34119 - RNA, 24 nt, Human
ucugaucaauccuucuuuuucucu

SEQ ID NO: 34120 - RNA, 24 nt, Human
ucaauuuuuauuuugguuuucuua

SEQ ID NO: 34121 - RNA, 18 nt, Human
uauugcuguuagauaucc

SEQ ID NO: 34122 - RNA, 24 nt, Human
uuagcugggcaugguggugugugc

SEQ ID NO: 34123 - RNA, 24 nt, Human
uggccuggucauggcugauccugc

SEQ ID NO: 34124 - RNA, 24 nt, Human
ugccaagcugcucuauagcaaugu

SEQ ID NO: 34125 - RNA, 24 nt, Human
ugaaggaagcuaucaacuccuaua

SEQ ID NO: 34126 - RNA, 24 nt, Human
ugccugcauggauggacaagaguu

SEQ ID NO: 34127 - RNA, 24 nt, Human
uaaagcacuaagguugauuuuugu

SEQ ID NO: 34128 - RNA, 20 nt, Human
acgcaucggauguauucuuu

SEQ ID NO: 34129 - RNA, 24 nt, Human
aagcagcagaggguccggcagggg

SEQ ID NO: 34130 - RNA, 24 nt, Human
ugagugauaaaggcugaguguuga

SEQ ID NO: 34131 - RNA, 24 nt, Human
uggcaaguaaaugcaguacuguuc

SEQ ID NO: 34132 - RNA, 24 nt, Human
aaaguuguguuccccaaugcuugg

SEQ ID NO: 34133 - RNA, 24 nt, Human
ugguggugggaggggacugaagcc

SEQ ID NO: 34134 - RNA, 24 nt, Human
gugcaucccugagagagugggcag

SEQ ID NO: 34135 - RNA, 24 nt, Human
uagguacccccaaucucacuuugg

SEQ ID NO: 34136 - RNA, 24 nt, Human
ucuauagcauuuuguugcuuccaa

SEQ ID NO: 34137 - RNA, 22 nt, Human
uguggcaagccaugucucggcg

SEQ ID NO: 34138 - RNA, 24 nt, Human
uuuaaagcacuuuucuguaaaagc

SEQ ID NO: 34139 - RNA, 24 nt, Human
ugauugcauuugaccuuuugaccu

SEQ ID NO: 34140 - RNA, 24 nt, Human
ugggaggcuggugcagccagaagg

SEQ ID NO: 34141 - RNA, 24 nt, Human
augaggcguggcggaagaugcguu

SEQ ID NO: 34142 - RNA, 24 nt, Human
uaagacacaaugaaaucuacaggg

SEQ ID NO: 34143 - RNA, 24 nt, Human
acccugugucugauaagucucaga

SEQ ID NO: 34144 - RNA, 21 nt, Human
cauagcacugucagcagucug

SEQ ID NO: 34145 - RNA, 22 nt, Human
ucauuugggaaauguaaaugug

SEQ ID NO: 34146 - RNA, 24 nt, Human
ggugauggcguugguaaaggcuuc

SEQ ID NO: 34147 - RNA, 24 nt, Human
cggguuggggggaaaguugguugg

SEQ ID NO: 34148 - RNA, 24 nt, Human
uauaaccaaauucuguaauuggga

SEQ ID NO: 34149 - RNA, 24 nt, Human
uaagugauuuuuggcuugcauacc

SEQ ID NO: 34150 - RNA, 24 nt, Human
ugccauucuguguuuccucuaaaa

SEQ ID NO: 34151 - RNA, 22 nt, Human
uguggacgagcaggaggaggcg

SEQ ID NO: 34152 - RNA, 24 nt, Human
cauuccaugcagccuugcggaacu

SEQ ID NO: 34153 - RNA, 24 nt, Human
ugagugguucuugugccuagccca

SEQ ID NO: 34154 - RNA, 24 nt, Human
ugaacagaugcuuaaccccacaug

SEQ ID NO: 34155 - RNA, 24 nt, Human
cagcccagggcaagcugagagaug

SEQ ID NO: 34156 - RNA, 24 nt, Human
gagcacucugaggggccugugggc

SEQ ID NO: 34157 - RNA, 24 nt, Human
ugaaggcaaggcagguagacggug

SEQ ID NO: 34158 - RNA, 22 nt, Human
aggugcaucaagagcccggggc

SEQ ID NO: 34159 - RNA, 24 nt, Human
uaggaccgucgugagacaugguca

SEQ ID NO: 34160 - RNA, 24 nt, Human
cgagcacccguuagaaagagcgug

SEQ ID NO: 34161 - RNA, 24 nt, Human
gagacaguggcgcgggcucugagc

SEQ ID NO: 34162 - RNA, 17 nt, Human
ugccagagccccuggac

SEQ ID NO: 34163 - RNA, 24 nt, Human
uugaagauccauaacuaucuucug

SEQ ID NO: 34164 - RNA, 24 nt, Human
uaacuggguugacauugggcugaa

SEQ ID NO: 34165 - RNA, 24 nt, Human
aagcugcugggacuggagcuaagc

SEQ ID NO: 34166 - RNA, 24 nt, Human
uauccggagucgauugagggccag

SEQ ID NO: 34167 - RNA, 24 nt, Human
ucagaagauaguuauggaucuuca

SEQ ID NO: 34168 - RNA, 24 nt, Human
uuaaugcuguguaaaaugguugaa

SEQ ID NO: 34169 - RNA, 24 nt, Human
uaggagacugggcaaaaccuguac

SEQ ID NO: 34170 - RNA, 24 nt, Human
ucagauaaccaaauuaaaagaauu

SEQ ID NO: 34171 - RNA, 24 nt, Human
cuaccggggaccgggacccggcgg

SEQ ID NO: 34172 - RNA, 24 nt, Human
cucgggcuucggaacacggagugg

SEQ ID NO: 34173 - RNA, 24 nt, Human
aggaaggagauauagugaagagga

SEQ ID NO: 34174 - RNA, 24 nt, Human
ugcauuguuaucauuaaccagucu

SEQ ID NO: 34175 - RNA, 24 nt, Human
uaaugggucucaaaauucugugac

SEQ ID NO: 34176 - RNA, 24 nt, Human
uauuagggauaauauucauuuagc

SEQ ID NO: 34177 - RNA, 24 nt, Human
uauaaugguacauucaaaacacau

SEQ ID NO: 34178 - RNA, 24 nt, Human
cggaaauaaaauuuuagaagauca

SEQ ID NO: 34179 - RNA, 24 nt, Human
uacugcuuucugcuuucaauggcu

SEQ ID NO: 34180 - RNA, 24 nt, Human
uacacugagaaguguuaaaaucau

SEQ ID NO: 34181 - RNA, 24 nt, Human
ugagguggucgugaagcucuuuga

SEQ ID NO: 34182 - RNA, 24 nt, Human
ucccggcuggcaaaccucacgcaa

SEQ ID NO: 34183 - RNA, 24 nt, Human
uggaagaugcucaacaccuccucc

SEQ ID NO: 34184 - RNA, 24 nt, Human
ugaccaggaaauacaacgagcugc

SEQ ID NO: 34185 - RNA, 24 nt, Human
ugguggggucccugccgccgcaga

SEQ ID NO: 34186 - RNA, 24 nt, Human
ucagccaguuguauccacagcuuc

SEQ ID NO: 34187 - RNA, 24 nt, Human
gccguguauguucagaacgugguc

SEQ ID NO: 34188 - RNA, 17 nt, Human
gagcaucugcaggaacc

SEQ ID NO: 34189 - RNA, 24 nt, Human
ugugcuggacucugaauucugggg

SEQ ID NO: 34190 - RNA, 24 nt, Human
uaaaugaagauaaagugguuucuu

SEQ ID NO: 34191 - RNA, 24 nt, Human
cagaaaacaguuggaaaaggcaag

SEQ ID NO: 34192 - RNA, 24 nt, Human
aucgcucauuuccuacggcccagg

SEQ ID NO: 34193 - RNA, 24 nt, Human
ugagcccguuugucagccgcagau

SEQ ID NO: 34194 - RNA, 24 nt, Human
guucaugggucgcuugaugugccc

SEQ ID NO: 34195 - RNA, 20 nt, Human
uacuauagaccaggauaggg

SEQ ID NO: 34196 - RNA, 24 nt, Human
uuaguguaagaguuugugggagug

SEQ ID NO: 34197 - RNA, 24 nt, Human
uaucacaaaaguccuaucaugggu

SEQ ID NO: 34198 - RNA, 24 nt, Human
uuaaaucaaguuuaccuauaucaa

SEQ ID NO: 34199 - RNA, 24 nt, Human
agagguagcaaaugaaaauuaaag

SEQ ID NO: 34200 - RNA, 24 nt, Human
aggcagaguggagagaaacaacuc

SEQ ID NO: 34201 - RNA, 24 nt, Human
ucuacaauaaccucaacccccuua

SEQ ID NO: 34202 - RNA, 24 nt, Human
ugagugcccccagggaggggcugg

SEQ ID NO: 34203 - RNA, 24 nt, Human
cgagggccccaacccagaacgaug

SEQ ID NO: 34204 - RNA, 22 nt, Human
uacucauugucauggaagggag

SEQ ID NO: 34205 - RNA, 24 nt, Human
gcccuggcucucugucuccuccca

SEQ ID NO: 34206 - RNA, 24 nt, Human
cucgauuaaaauacacacaucuua

SEQ ID NO: 34207 - RNA, 24 nt, Human
uuuaaacaaauuccauggaguuua

SEQ ID NO: 34208 - RNA, 24 nt, Human
caggauaguaagaaaaguacuacc

SEQ ID NO: 34209 - RNA, 24 nt, Human
uauaauaauuaacaacagcaaaga

SEQ ID NO: 34210 - RNA, 24 nt, Human
ugcuggaaaugcugacuuuuaacc

SEQ ID NO: 34211 - RNA, 21 nt, Human
uucaagggauggaaagucacc

SEQ ID NO: 34212 - RNA, 24 nt, Human
acggagcaugagaagacguucccc

SEQ ID NO: 34213 - RNA, 24 nt, Human
aagcauccucgcgcgacccgagag

SEQ ID NO: 34214 - RNA, 24 nt, Human
ucugcaccagcuggcccagucugu

SEQ ID NO: 34215 - RNA, 24 nt, Human
uaucaaggaagggcaggcgugaug

SEQ ID NO: 34216 - RNA, 24 nt, Human
ugugcagaagaaauggaaggauuc

SEQ ID NO: 34217 - RNA, 24 nt, Human
uaucaaggaagggcaggcgugaug

SEQ ID NO: 34218 - RNA, 24 nt, Human
uucaaauuucuuucuuuuuuaauu

SEQ ID NO: 34219 - RNA, 24 nt, Human
uuaaaguaaugaaugacguuuuaa

SEQ ID NO: 34220 - RNA, 24 nt, Human
uaugggacugauucugaaauucuu

SEQ ID NO: 34221 - RNA, 24 nt, Human
uaucaaggaagggcaggcgugaug

SEQ ID NO: 34222 - RNA, 24 nt, Human
gaaggcaccagcaaggacauuggu

SEQ ID NO: 34223 - RNA, 24 nt, Human
gagcagcaucugcugaagagacag

SEQ ID NO: 34224 - RNA, 24 nt, Human
uuaaagcaugagaaugugauaauu

SEQ ID NO: 34225 - RNA, 24 nt, Human
uaacagguguaagaguguugaaaa

SEQ ID NO: 34226 - RNA, 24 nt, Human
ugugcagaagaaauggaaggauuc

SEQ ID NO: 34227 - RNA, 24 nt, Human
uaucaaggaagggcaggcgugaug

SEQ ID NO: 34228 - RNA, 24 nt, Human
uucaaauuucuuucuuuuuuaauu

SEQ ID NO: 34229 - RNA, 24 nt, Human
gaccagccggaaagcauuggggau

SEQ ID NO: 34230 - RNA, 24 nt, Human
cggugcaggguggcucccaggagg

SEQ ID NO: 34231 - RNA, 24 nt, Human
aguaagccaauuguucucaaguau

SEQ ID NO: 34232 - RNA, 24 nt, Human
uauguugcccaggcuguucucaaa

SEQ ID NO: 34233 - RNA, 24 nt, Human
aacagcucuuuuacaaacaaguua

SEQ ID NO: 34234 - RNA, 24 nt, Human
gaucgggggaaaagggagauguag

SEQ ID NO: 34235 - RNA, 24 nt, Human
ugggauauccaauaaacugagaau

SEQ ID NO: 34236 - RNA, 21 nt, Human
aucacaguuacuuucucagca

SEQ ID NO: 34237 - RNA, 24 nt, Human
uauggcaagucacuuugacagaca

SEQ ID NO: 34238 - RNA, 24 nt, Human
ugagaauggcaaaauuagucgccu

SEQ ID NO: 34239 - RNA, 24 nt, Human
uacaccacucccaagaagaauaag

SEQ ID NO: 34240 - RNA, 24 nt, Human
ggacagguguacagacauguucuu

SEQ ID NO: 34241 - RNA, 24 nt, Human
ucgaauggacacauuaccagugaa

SEQ ID NO: 34242 - RNA, 24 nt, Human
uacaguaucauggcugagguggau

SEQ ID NO: 34243 - RNA, 24 nt, Human
uucaugcguuuaaucauugucucu

SEQ ID NO: 34244 - RNA, 24 nt, Human
aggaaagaaaaaaugucuacucag

SEQ ID NO: 34245 - RNA, 24 nt, Human
uaccugucacucuagaauguaggc

SEQ ID NO: 34246 - RNA, 24 nt, Human
agugacagaagaggccauuaggug

SEQ ID NO: 34247 - RNA, 24 nt, Human
uuuaauaguaccccaauucaguaa

SEQ ID NO: 34248 - RNA, 24 nt, Human
uagacuucguaguaugucacucuu

SEQ ID NO: 34249 - RNA, 24 nt, Human
gggcggaagacaggucaggccccu

SEQ ID NO: 34250 - RNA, 24 nt, Human
accacaauccgguuggucucugcc

SEQ ID NO: 34251 - RNA, 24 nt, Human
ccccggggucugcugugcaggcgc

SEQ ID NO: 34252 - RNA, 24 nt, Human
aagcuuuacaaaaaagauucuaac

SEQ ID NO: 34253 - RNA, 24 nt, Human
cuggcaccuuuacucucgccggcc

SEQ ID NO: 34254 - RNA, 24 nt, Human
cagagcccaagacccaggggagcc

SEQ ID NO: 34255 - RNA, 24 nt, Human
gaauugauuuccaagaaucggcau

SEQ ID NO: 34256 - RNA, 24 nt, Human
ugaaaaaaauucacuuuuagagga

SEQ ID NO: 34257 - RNA, 24 nt, Human
uuagcagcuguuuaauuccaauau

SEQ ID NO: 34258 - RNA, 24 nt, Human
aaugacaagaaaaaagucuguaaa

SEQ ID NO: 34259 - RNA, 24 nt, Human
acagcagcaacaguggcuucgggc

SEQ ID NO: 34260 - RNA, 24 nt, Human
aucccaucgggacccagauggcug

SEQ ID NO: 34261 - RNA, 24 nt, Human
ucucuuaucuaaaucucucuguuc

SEQ ID NO: 34262 - RNA, 24 nt, Human
guagcccuggggccccgcugugcc

SEQ ID NO: 34263 - RNA, 24 nt, Human
ugccccagcggaagugcuccaucc

SEQ ID NO: 34264 - RNA, 24 nt, Human
cugugcuccaggucggccugggcc

SEQ ID NO: 34265 - RNA, 24 nt, Human
aguagguagugucaagccagagau

SEQ ID NO: 34266 - RNA, 24 nt, Human
uaaggaccuguuuggggcagcagg

SEQ ID NO: 34267 - RNA, 24 nt, Human
ugacaucagccgacgccuggcacu

SEQ ID NO: 34268 - RNA, 24 nt, Human
uauuuuauugcccgaggugggggu

SEQ ID NO: 34269 - RNA, 24 nt, Human
ugccucguuguccccuggcgcuac

SEQ ID NO: 34270 - RNA, 22 nt, Human
caggcucagcgaagaaggaccc

SEQ ID NO: 34271 - RNA, 24 nt, Human
uuccauugugaagucucuuauggu

SEQ ID NO: 34272 - RNA, 24 nt, Human
uggcaagggacagcacucacacuc

SEQ ID NO: 34273 - RNA, 24 nt, Human
uaguauauuaggaaauccuaggau

SEQ ID NO: 34274 - RNA, 24 nt, Human
ugagaaugaccccaagaccuuuga

SEQ ID NO: 34275 - RNA, 24 nt, Human
ugugaacgggaagaaggugcugca

SEQ ID NO: 34276 - RNA, 24 nt, Human
cuuccaaucugaugggcauguuug

SEQ ID NO: 34277 - RNA, 22 nt, Human
guggagggcagcuuugucuaca

SEQ ID NO: 34278 - RNA, 24 nt, Human
ucgaauggacacauuaccagugaa

SEQ ID NO: 34279 - RNA, 24 nt, Human
ggacagguguacagacauguucuu

SEQ ID NO: 34280 - RNA, 24 nt, Human
accuuggugaccuugagcacguug

SEQ ID NO: 34281 - RNA, 24 nt, Human
ucuccagaaaugcuuuggguucau

SEQ ID NO: 34282 - RNA, 24 nt, Human
uugaucuugaagaaacugggcgug

SEQ ID NO: 34283 - RNA, 24 nt, Human
aggaaggagauauagugaagagga

SEQ ID NO: 34284 - RNA, 24 nt, Human
guagaguuuucuucaggcuuaaag

SEQ ID NO: 34285 - RNA, 21 nt, Human
aaccagagccugcugagcccc

SEQ ID NO: 34286 - RNA, 24 nt, Human
ugcccagugaccugggggagccug

SEQ ID NO: 34287 - RNA, 24 nt, Human
uaagagguuacagaacuauuagcu

SEQ ID NO: 34288 - RNA, 24 nt, Human
uggagcagauucggcggaucaugc

SEQ ID NO: 34289 - RNA, 24 nt, Human
caccaggugguagaagacgggcua

SEQ ID NO: 34290 - RNA, 24 nt, Human
acaaagcaagagaagaagcagaga

SEQ ID NO: 34291 - RNA, 21 nt, Human
cauuggacaggacauccagcc

SEQ ID NO: 34292 - RNA, 24 nt, Human
uggaaaugggaccuccagauccca

SEQ ID NO: 34293 - RNA, 24 nt, Human
aagaacccaccucuugugcuaccc

SEQ ID NO: 34294 - RNA, 24 nt, Human
uuacacuaaacauguauguagcuc

SEQ ID NO: 34295 - RNA, 24 nt, Human
ugagaugaagauacguuuccaaag

SEQ ID NO: 34296 - RNA, 24 nt, Human
ucuaaagcaaauccuuuguuaguu

SEQ ID NO: 34297 - RNA, 24 nt, Human
uaguagcagaucuccuuucuugau

SEQ ID NO: 34298 - RNA, 24 nt, Human
agagguuacaagucaaaaguuuua

SEQ ID NO: 34299 - RNA, 24 nt, Human
uaaguguuugcagccauauguguc

SEQ ID NO: 34300 - RNA, 24 nt, Human
agugcagagggcucauugggaaaa

SEQ ID NO: 34301 - RNA, 24 nt, Human
uaacugcgugcagaucaggggugg

SEQ ID NO: 34302 - RNA, 22 nt, Human
ugccauggugaugguaaacugg

SEQ ID NO: 34303 - RNA, 24 nt, Human
augccuccucuggguggugauacc

SEQ ID NO: 34304 - RNA, 24 nt, Human
ugggugcgugaugccuccucuggg

SEQ ID NO: 34305 - RNA, 22 nt, Human
uuucaagggauggaaaagucac

SEQ ID NO: 34306 - RNA, 24 nt, Human
ucugaucuauaaaugcgguggcau

SEQ ID NO: 34307 - RNA, 21 nt, Human
uucaagggauggcaagucacc

SEQ ID NO: 34308 - RNA, 24 nt, Human
uccaccacuacuggccaucugauc

SEQ ID NO: 34309 - RNA, 24 nt, Human
ugagacggcucucuugucuucucc

SEQ ID NO: 34310 - RNA, 24 nt, Human
ugagaugggaaagggcuccuucaa

SEQ ID NO: 34311 - RNA, 23 nt, Human
uucaagggauggcaagucaccgu

SEQ ID NO: 34312 - RNA, 21 nt, Human
aaguaugccugggucuuggau

SEQ ID NO: 34313 - RNA, 24 nt, Human
uggccaauuggaaccggguguugu

SEQ ID NO: 34314 - RNA, 22 nt, Human
ugacuaaggaauucugagacag

SEQ ID NO: 34315 - RNA, 24 nt, Human
ugcccguguguggugggaccucuu

SEQ ID NO: 34316 - RNA, 19 nt, Human
ggggauggaaagucaccgu

SEQ ID NO: 34317 - RNA, 24 nt, Human
agaaccauugaaaaauuugagaag

SEQ ID NO: 34318 - RNA, 24 nt, Human
aagaagccgcccugguugcacaug

SEQ ID NO: 34319 - RNA, 24 nt, Human
agagcacauuuuuguauaaacaaa

SEQ ID NO: 34320 - RNA, 24 nt, Human
uacuggguaugcugggaucauuaa

SEQ ID NO: 34321 - RNA, 24 nt, Human
uucccuuguccuauacagaugauc

SEQ ID NO: 34322 - RNA, 24 nt, Human
uagugcccaauaacuaguuuuguu

SEQ ID NO: 34323 - RNA, 20 nt, Human
uccaccagucacccauggag

SEQ ID NO: 34324 - RNA, 24 nt, Human
ugaaugaacucagugucaaauaac

SEQ ID NO: 34325 - RNA, 24 nt, Human
aaacaugcugagggcuuuguucau

SEQ ID NO: 34326 - RNA, 24 nt, Human
uggcauagaaaagaacauguucag

SEQ ID NO: 34327 - RNA, 24 nt, Human
cugcucccuggccagcccccuugu

SEQ ID NO: 34328 - RNA, 24 nt, Human
agaggaagaagccaagcacaggug

SEQ ID NO: 34329 - RNA, 24 nt, Human
gagaauucaccaaguggggcagga

SEQ ID NO: 34330 - RNA, 24 nt, Human
accgggucuugaacagcugguacc

SEQ ID NO: 34331 - RNA, 24 nt, Human
uagaaugcuguaaaaacuguuagg

SEQ ID NO: 34332 - RNA, 24 nt, Human
ugagguccaagcuguugcuguugu

SEQ ID NO: 34333 - RNA, 24 nt, Human
uggaaugccgacauguggccuuuc

SEQ ID NO: 34334 - RNA, 24 nt, Human
ucgcagaaugggcugacucggagg

SEQ ID NO: 34335 - RNA, 24 nt, Human
uagcauaguggucaagcuuguuuc

SEQ ID NO: 34336 - RNA, 24 nt, Human
agccuguuuaaucuggugcuuguu

SEQ ID NO: 34337 - RNA, 24 nt, Human
uucuucuuuuuguggcuguggaca

SEQ ID NO: 34338 - RNA, 24 nt, Human
uccgguaguugccuuugcgcagag

SEQ ID NO: 34339 - RNA, 24 nt, Human
accgcagccauguagacgggcgcg

SEQ ID NO: 34340 - RNA, 24 nt, Human
aggcaggagaaucgcuugaaccug

SEQ ID NO: 34341 - RNA, 24 nt, Human
aacuggcuauuucacguuuauggu

SEQ ID NO: 34342 - RNA, 24 nt, Human
uaaguuauuuauuucuggguuuua

SEQ ID NO: 34343 - RNA, 24 nt, Human
aggaaggagauauagugaagagga

SEQ ID NO: 34344 - RNA, 24 nt, Human
uccgugcgcguugcugcggccgug

SEQ ID NO: 34345 - RNA, 24 nt, Human
aggaaggagauauagugaagagga

SEQ ID NO: 34346 - RNA, 24 nt, Human
cauccgucguaacguguguccucc

SEQ ID NO: 34347 - RNA, 22 nt, Human
cgacacaccuuugggaaaugcc

SEQ ID NO: 34348 - RNA, 24 nt, Human
cggcagagaaguguggcuaagggg

SEQ ID NO: 34349 - RNA, 24 nt, Human
aaggagcgccuguaccuccuggcg

SEQ ID NO: 34350 - RNA, 24 nt, Human
cagcagcgcagucacagucggccc

SEQ ID NO: 34351 - RNA, 24 nt, Human
agaaucuucguuuucauuaaauau

SEQ ID NO: 34352 - RNA, 24 nt, Human
uagcagaauugcuugcagcaaacu

SEQ ID NO: 34353 - RNA, 24 nt, Human
uaugucuuuucugguuuguuguug

SEQ ID NO: 34354 - RNA, 24 nt, Human
uaagugcuuuuaaugucaaguuuu

SEQ ID NO: 34355 - RNA, 24 nt, Human
caagugccgucucaagcuccugcu

SEQ ID NO: 34356 - RNA, 24 nt, Human
uguggcuuuuggggagccagugug

SEQ ID NO: 34357 - RNA, 24 nt, Human
ggagaacgugcugggugagguugg

SEQ ID NO: 34358 - RNA, 24 nt, Human
uacccaguuuggggagaaaauuca

SEQ ID NO: 34359 - RNA, 24 nt, Human
uccacagaguuuaguuuccucauu

SEQ ID NO: 34360 - RNA, 22 nt, Human
uccgugcgcguugcugcggccg

SEQ ID NO: 34361 - RNA, 24 nt, Human
uugaucuugaagaaacugggcgug

SEQ ID NO: 34362 - RNA, 24 nt, Human
aggaaggagauauagugaagagga

SEQ ID NO: 34363 - RNA, 24 nt, Human
guagaguuuucuucaggcuuaaag

SEQ ID NO: 34364 - RNA, 24 nt, Human
cagcgugcaccuucacccgcugcu

SEQ ID NO: 34365 - RNA, 24 nt, Human
uggcaaagugggcuucagcaaggc

SEQ ID NO: 34366 - RNA, 20 nt, Human
cguggaggccgcggaggccg

SEQ ID NO: 34367 - RNA, 24 nt, Human
gagcagcagcggcgacucgaggcc

SEQ ID NO: 34368 - RNA, 24 nt, Human
uugaaugacgcccgggaccugcau

SEQ ID NO: 34369 - RNA, 24 nt, Human
uagaggccgcgcaaacuguuguga

SEQ ID NO: 34370 - RNA, 24 nt, Human
ccauggcaccugcccagcacccac

SEQ ID NO: 34371 - RNA, 24 nt, Human
gggcagugggcaccgucaaaguau

SEQ ID NO: 34372 - RNA, 24 nt, Human
cauuggaauggauuuggaacccac

SEQ ID NO: 34373 - RNA, 24 nt, Human
accgcacugucaugggccguaucg

SEQ ID NO: 34374 - RNA, 24 nt, Human
auagugcugucacaguugaaugua

SEQ ID NO: 34375 - RNA, 24 nt, Human
uaaaacaaccagcaugagcaauca

SEQ ID NO: 34376 - RNA, 24 nt, Human
ucacugguuuuguggcugccuccc

SEQ ID NO: 34377 - RNA, 24 nt, Human
ggacugcagaagugacugucuaua

SEQ ID NO: 34378 - RNA, 20 nt, Human
cccccgcgccgccuccccgc

SEQ ID NO: 34379 - RNA, 24 nt, Human
ugaugugcuaauuacagugcuagg

SEQ ID NO: 34380 - RNA, 24 nt, Human
ugcagaaaacacaucuuaaaauca

SEQ ID NO: 34381 - RNA, 24 nt, Human
uagcugcugcgggacuaccacuga

SEQ ID NO: 34382 - RNA, 17 nt, Human
ugaguguguggagacug

SEQ ID NO: 34383 - RNA, 24 nt, Human
caucggauuuugcagcuucugggc

SEQ ID NO: 34384 - RNA, 24 nt, Human
uggccugaugauccacagcggaga

SEQ ID NO: 34385 - RNA, 24 nt, Human
ugugugccauugcccaggcagagu

SEQ ID NO: 34386 - RNA, 24 nt, Human
ugagaacgagccagacuuggccag

SEQ ID NO: 34387 - RNA, 24 nt, Human
caaggaccaccgcaucucuacauu

SEQ ID NO: 34388 - RNA, 24 nt, Human
gugaauuuuugaaacuggaccaga

SEQ ID NO: 34389 - RNA, 20 nt, Human
uuugguugacagugcggugg

SEQ ID NO: 34390 - RNA, 24 nt, Human
agaagccaaguaucuucaagaccu

SEQ ID NO: 34391 - RNA, 24 nt, Human
uguugcuuuuuugcaguugucuuu

SEQ ID NO: 34392 - RNA, 24 nt, Human
uaccuuguuauugcugucucaaca

SEQ ID NO: 34393 - RNA, 24 nt, Human
uaguauuaauuuuuuuugguuggg

SEQ ID NO: 34394 - RNA, 22 nt, Human
aagaagccuugcagcuuccacc

SEQ ID NO: 34395 - RNA, 24 nt, Human
auggauuguagaguaagguuuugu

SEQ ID NO: 34396 - RNA, 24 nt, Human
ugccguaguugacgauguuguugu

SEQ ID NO: 34397 - RNA, 24 nt, Human
uguaugcagggcccggcaguaagc

SEQ ID NO: 34398 - RNA, 24 nt, Human
gggaaaguguucggcagggcagaa

SEQ ID NO: 34399 - RNA, 24 nt, Human
cauuguagauaagauguuauagca

SEQ ID NO: 34400 - RNA, 24 nt, Human
uggcagacagccaggcgauuuagg

SEQ ID NO: 34401 - RNA, 24 nt, Human
caugucaaccuuucugcauccuua

SEQ ID NO: 34402 - RNA, 24 nt, Human
ugaauucaaaaucagcaaaggucu

SEQ ID NO: 34403 - RNA, 22 nt, Human
ugucauagagagucccugucuc

SEQ ID NO: 34404 - RNA, 24 nt, Human
acccaguuaauguaauuccagaag

SEQ ID NO: 34405 - RNA, 24 nt, Human
caacaggaaguuuugggacuaagc

SEQ ID NO: 34406 - RNA, 24 nt, Human
uagcuuggccaacauggagaaacc

SEQ ID NO: 34407 - RNA, 24 nt, Human
ugaauaguuaugacagagaccaua

SEQ ID NO: 34408 - RNA, 24 nt, Human
ccaaagugcuggaauuacaggcau

SEQ ID NO: 34409 - RNA, 24 nt, Human
agugcaguggagugaccuugguuc

SEQ ID NO: 34410 - RNA, 24 nt, Human
uguggccagucuguaaguugugag

SEQ ID NO: 34411 - RNA, 24 nt, Human
ugcuggggucgcgcggcuuuggaa

SEQ ID NO: 34412 - RNA, 24 nt, Human
uuccaagagaagcacgguuuucuc

SEQ ID NO: 34413 - RNA, 24 nt, Human
agagguccuuaccucucugacagu

SEQ ID NO: 34414 - RNA, 24 nt, Human
uauuuguucucgaggaccagcuua

SEQ ID NO: 34415 - RNA, 24 nt, Human
ccacaaggacaaagggagcggcac

SEQ ID NO: 34416 - RNA, 24 nt, Human
aaaaccuaucaaggugcuccauug

SEQ ID NO: 34417 - RNA, 24 nt, Human
ucauucaaggguuaggaugcaggu

SEQ ID NO: 34418 - RNA, 24 nt, Human
uaggcuacuacucaucaauuaacu

SEQ ID NO: 34419 - RNA, 24 nt, Human
ugaaugcccuuguuuagaaugggu

SEQ ID NO: 34420 - RNA, 24 nt, Human
aucaaguuggcucuucaucuauau

SEQ ID NO: 34421 - RNA, 24 nt, Human
uggcagcaaugaaggcgcggguaa

SEQ ID NO: 34422 - RNA, 24 nt, Human
uaguaacuuuugugcauucugcaa

SEQ ID NO: 34423 - RNA, 24 nt, Human
aaaaaucauugaacauuuccucca

SEQ ID NO: 34424 - RNA, 24 nt, Human
ugcuggguagagaggcacuuucag

SEQ ID NO: 34425 - RNA, 24 nt, Human
ugaggucucccugcucuugguggc

SEQ ID NO: 34426 - RNA, 24 nt, Human
gcggguagacauggagggcuuucg

SEQ ID NO: 34427 - RNA, 24 nt, Human
ggggauugggcagcagagggcccc

SEQ ID NO: 34428 - RNA, 24 nt, Human
uuuaccauaauguuccuuaguggu

SEQ ID NO: 34429 - RNA, 24 nt, Human
ugagcacugguaaacaaucugcuu

SEQ ID NO: 34430 - RNA, 23 nt, Human
uaagugguguauuuacagggcua

SEQ ID NO: 34431 - RNA, 24 nt, Human
aggcuucuugggagagugaggaug

SEQ ID NO: 34432 - RNA, 24 nt, Human
aggaaggccgaccaggcaagaagc

SEQ ID NO: 34433 - RNA, 24 nt, Human
uggaagacauggcucguccggaca

SEQ ID NO: 34434 - RNA, 24 nt, Human
uuucccggaagcugcccggggggu

SEQ ID NO: 34435 - RNA, 24 nt, Human
uauagcaccaugaucacgcugucg

SEQ ID NO: 34436 - RNA, 24 nt, Human
uaagugacaaugcuuauggaaagc

SEQ ID NO: 34437 - RNA, 21 nt, Human
uucaagggauggaaagucacc

SEQ ID NO: 34438 - RNA, 24 nt, Human
caccuggguagggauuggcacacg

SEQ ID NO: 34439 - RNA, 24 nt, Human
uacgaaaauuggcuacaagcccga

SEQ ID NO: 34440 - RNA, 24 nt, Human
ugauugaaaagauacuaagaacua

SEQ ID NO: 34441 - RNA, 24 nt, Human
cauuucgaaugcuuuaaucaacag

SEQ ID NO: 34442 - RNA, 24 nt, Human
aagugcgcgaugagcuggagggcc

SEQ ID NO: 34443 - RNA, 24 nt, Human
cugcugcaggcagauuccuucugc

SEQ ID NO: 34444 - RNA, 24 nt, Human
cgggaagguaggcggcugcaggau

SEQ ID NO: 34445 - RNA, 24 nt, Human
gaggaccugguagcuaaggcagug

SEQ ID NO: 34446 - RNA, 24 nt, Human
uucaaugccacuauccuucccauc

SEQ ID NO: 34447 - RNA, 24 nt, Human
uggaagcugagcagaggccaguuc

SEQ ID NO: 34448 - RNA, 24 nt, Human
ucuuuuuuuugaaacagggucugg

SEQ ID NO: 34449 - RNA, 24 nt, Human
ucggaaggucucuuuacauguuag

SEQ ID NO: 34450 - RNA, 24 nt, Human
ugagucugcucaucuucuucaguu

SEQ ID NO: 34451 - RNA, 24 nt, Human
aggcuuugucauuuuuaugcaauu

SEQ ID NO: 34452 - RNA, 24 nt, Human
aacguggagcuuggcagcgagcug

SEQ ID NO: 34453 - RNA, 24 nt, Human
ugaggaccagaggcccuauugcuu

SEQ ID NO: 34454 - RNA, 24 nt, Human
uaugagaacauuucuaccucugga

SEQ ID NO: 34455 - RNA, 22 nt, Human
agucggugguuaucagugucuu

SEQ ID NO: 34456 - RNA, 24 nt, Human
cggcaguagaaauagcacaggccu

SEQ ID NO: 34457 - RNA, 24 nt, Human
uggaagacagcuacgggcagcagu

SEQ ID NO: 34458 - RNA, 24 nt, Human
ucccuggcuuaugagcaggcugag

SEQ ID NO: 34459 - RNA, 24 nt, Human
uacacacuguauugauccaaguau

SEQ ID NO: 34460 - RNA, 24 nt, Human
uagcagcuuuauucauaauugcca

SEQ ID NO: 34461 - RNA, 24 nt, Human
aggcauguguuggcaaaggcuguu

SEQ ID NO: 34462 - RNA, 24 nt, Human
uacagguuccaaaucgaggccgag

SEQ ID NO: 34463 - RNA, 24 nt, Human
cacgggccaggcccuccucucagg

SEQ ID NO: 34464 - RNA, 24 nt, Human
ugaagaaguaaaaaguggcaucaa

SEQ ID NO: 34465 - RNA, 24 nt, Human
ugacccaccuuuuauugaguccug

SEQ ID NO: 34466 - RNA, 24 nt, Human
ugagaggauacaaaaugucaucgu

SEQ ID NO: 34467 - RNA, 24 nt, Human
uaaaugguaaacgugauaucauga

SEQ ID NO: 34468 - RNA, 24 nt, Human
aaaugaccauuuuguuguuuucca

SEQ ID NO: 34469 - RNA, 21 nt, Human
ugccauggcuccagcucagau

SEQ ID NO: 34470 - RNA, 24 nt, Human
gaaagggauucucguuuugucgcc

SEQ ID NO: 34471 - RNA, 21 nt, Human
aaguaugccugggucuuggau

SEQ ID NO: 34472 - RNA, 24 nt, Human
uauauuguauuuaauauuggauuc

SEQ ID NO: 34473 - RNA, 18 nt, Human
ugauuggaaaacaagacg

SEQ ID NO: 34474 - RNA, 24 nt, Human
ugguguuuucucuuuuucucuguc

SEQ ID NO: 34475 - RNA, 24 nt, Human
accuaguacuuugagaaaguuaua

SEQ ID NO: 34476 - RNA, 24 nt, Human
aaagugcugagauuacacgcauga

SEQ ID NO: 34477 - RNA, 24 nt, Human
uuaaccacacaaucacauaaucaa

SEQ ID NO: 34478 - RNA, 24 nt, Human
ucuuugguaccucugcuuacugcc

SEQ ID NO: 34479 - RNA, 24 nt, Human
uguuuguuucuauucaaccaauuu

SEQ ID NO: 34480 - RNA, 24 nt, Human
ugagcagaggcuccugcuucuugg

SEQ ID NO: 34481 - RNA, 24 nt, Human
cucaucccccacggccucaguaaa

SEQ ID NO: 34482 - RNA, 24 nt, Human
caccagcaggagguccugcccccu

SEQ ID NO: 34483 - RNA, 20 nt, Human
ugaggugacagucacggagg

SEQ ID NO: 34484 - RNA, 24 nt, Human
uaccuggagguuggagacaggggc

SEQ ID NO: 34485 - RNA, 18 nt, Human
ccagagcaggagggaaga

SEQ ID NO: 34486 - RNA, 24 nt, Human
cugcugcccauggucuugaacuga

SEQ ID NO: 34487 - RNA, 24 nt, Human
uauccuagaaggacucacauucua

SEQ ID NO: 34488 - RNA, 24 nt, Human
uaguaccugugggcaguuggcuaa

SEQ ID NO: 34489 - RNA, 24 nt, Human
augcagccuaaaaggugguugaaa

SEQ ID NO: 34490 - RNA, 24 nt, Human
ugccaguucccccuggugaaccau

SEQ ID NO: 34491 - RNA, 24 nt, Human
aggccaugugggccaugaggucca

SEQ ID NO: 34492 - RNA, 24 nt, Human
ugcauuguuaucauuaaccagucu

SEQ ID NO: 34493 - RNA, 24 nt, Human
uuggaugaucuacggaaucugacc

SEQ ID NO: 34494 - RNA, 24 nt, Human
cucccaugcuggacuccgacggcu

SEQ ID NO: 34495 - RNA, 24 nt, Human
ugucacagcuguagaucaugcugc

SEQ ID NO: 34496 - RNA, 24 nt, Human
cgagccaauaccaucacuccuaug

SEQ ID NO: 34497 - RNA, 24 nt, Human
cugggccagggucaggaaaggggc

SEQ ID NO: 34498 - RNA, 24 nt, Human
cagccccccaugcggcaagcugga

SEQ ID NO: 34499 - RNA, 24 nt, Human
ugguggcucaugccuguaauccca

SEQ ID NO: 34500 - RNA, 24 nt, Human
uccacuuaaaaugaagagcauucc

SEQ ID NO: 34501 - RNA, 24 nt, Human
uguaaaaaaacccucugcacuucc

SEQ ID NO: 34502 - RNA, 24 nt, Human
aaguaugucuaauuuaaacguaua

SEQ ID NO: 34503 - RNA, 24 nt, Human
uauuguuaauuuucauacuuaaaa

SEQ ID NO: 34504 - RNA, 24 nt, Human
uuuguaaacuuacucaugcaaaau

SEQ ID NO: 34505 - RNA, 24 nt, Human
ccacccagguagcggggacuacag

SEQ ID NO: 34506 - RNA, 24 nt, Human
aagcaguccucccacuuggccucc

SEQ ID NO: 34507 - RNA, 24 nt, Human
cccccuggaggggcagggcaggca

SEQ ID NO: 34508 - RNA, 17 nt, Human
ccccugggcucagcagg

SEQ ID NO: 34509 - RNA, 24 nt, Human
ugggauguggauauacuggcuuca

SEQ ID NO: 34510 - RNA, 24 nt, Human
ucuguguuccugggacaccgcuga

SEQ ID NO: 34511 - RNA, 24 nt, Human
ugggagcagggauuggcugccauu

SEQ ID NO: 34512 - RNA, 24 nt, Human
uuaguucuuuuuuccagucuuccu

SEQ ID NO: 34513 - RNA, 22 nt, Human
guggucucguggaugccgcaag

SEQ ID NO: 34514 - RNA, 24 nt, Human
ugacauguuucuuuguuuuggaca

SEQ ID NO: 34515 - RNA, 21 nt, Human
uuaccagggguucgggacagc

SEQ ID NO: 34516 - RNA, 24 nt, Human
uuucacaacgauuuucugcuccuc

SEQ ID NO: 34517 - RNA, 24 nt, Human
ggacagguguacagacauguucuu

SEQ ID NO: 34518 - RNA, 24 nt, Human
ucgaauggacacauuaccagugaa

SEQ ID NO: 34519 - RNA, 24 nt, Human
aaacuccaaugguucagugacugu

SEQ ID NO: 34520 - RNA, 24 nt, Human
ggagaagcagagagccagaccaaa

SEQ ID NO: 34521 - RNA, 24 nt, Human
uauauuguuguuaaucaucaagga

SEQ ID NO: 34522 - RNA, 24 nt, Human
aacagguaauauaaaaccgauaca

SEQ ID NO: 34523 - RNA, 24 nt, Human
uugacaauuuuauuuucacauuug

SEQ ID NO: 34524 - RNA, 24 nt, Human
uuucgaaaacgggugauugguugc

SEQ ID NO: 34525 - RNA, 24 nt, Human
uccaugggggggaucucucguaga

SEQ ID NO: 34526 - RNA, 24 nt, Human
uauccuuucagaaccaccaaaaag

SEQ ID NO: 34527 - RNA, 24 nt, Human
uuuaugcucgcuugcugagacuuc

SEQ ID NO: 34528 - RNA, 24 nt, Human
uaccuccaccugaguuggaugaua

SEQ ID NO: 34529 - RNA, 24 nt, Human
aaccagccgaauggaguccuuuac

SEQ ID NO: 34530 - RNA, 24 nt, Human
ccagggguggggcugaucaagggc

SEQ ID NO: 34531 - RNA, 24 nt, Human
ugacaccaccccacuccucuuccu

SEQ ID NO: 34532 - RNA, 24 nt, Human
ucggugcuugguaccuggucucuc

SEQ ID NO: 34533 - RNA, 20 nt, Human
ucccagaguccgaccuggug

SEQ ID NO: 34534 - RNA, 24 nt, Human
uccucuggauucuggccaaugaaa

SEQ ID NO: 34535 - RNA, 24 nt, Human
guccucuucuuuucccagagcucc

SEQ ID NO: 34536 - RNA, 24 nt, Human
caauaccacuuccgcugucacggu

SEQ ID NO: 34537 - RNA, 21 nt, Human
accccgcucagcaccagggag

SEQ ID NO: 34538 - RNA, 24 nt, Human
agggcacagaccccgccagccugc

SEQ ID NO: 34539 - RNA, 24 nt, Human
ucacuacaaccuccgccuccuggc

SEQ ID NO: 34540 - RNA, 24 nt, Human
ucuccagguuagggugagccgccg

SEQ ID NO: 34541 - RNA, 24 nt, Human
uucacguccguucgcagcgucacc

SEQ ID NO: 34542 - RNA, 24 nt, Human
agacuauaucuguagaaacuuuau

SEQ ID NO: 34543 - RNA, 24 nt, Human
uacuucaggaacucuuuuucaaac

SEQ ID NO: 34544 - RNA, 24 nt, Human
ucucgcucuguugcccaggcugga

SEQ ID NO: 34545 - RNA, 24 nt, Human
aaagugcuggcguuacagguauga

SEQ ID NO: 34546 - RNA, 24 nt, Human
gggcugggccaguccaggagccgc

SEQ ID NO: 34547 - RNA, 24 nt, Human
uugguuggcucaccgagcugcagg

SEQ ID NO: 34548 - RNA, 24 nt, Human
ccaggacacuucugaguacaucau

SEQ ID NO: 34549 - RNA, 24 nt, Human
uuugagaauaacuuuaaugagaca

SEQ ID NO: 34550 - RNA, 24 nt, Human
uggcauuguacucuuucaucagga

SEQ ID NO: 34551 - RNA, 24 nt, Human
aggcaagagaaaugcuuguuucuu

SEQ ID NO: 34552 - RNA, 24 nt, Human
uaauguacagaacuaaauuuuuua

SEQ ID NO: 34553 - RNA, 24 nt, Human
acugcagucgagcuugggcgacag

SEQ ID NO: 34554 - RNA, 24 nt, Human
ggcgguugugaucaugaggucagg

SEQ ID NO: 34555 - RNA, 24 nt, Human
ugauggaagcggggcugcaggacg

SEQ ID NO: 34556 - RNA, 23 nt, Human
aggcagccguggaaucagggcag

SEQ ID NO: 34557 - RNA, 24 nt, Human
caaugcccaugaauauacccaaag

SEQ ID NO: 34558 - RNA, 18 nt, Human
ugacguggacauccgcaa

SEQ ID NO: 34559 - RNA, 24 nt, Human
uccagagcuuuguuugaguucuca

SEQ ID NO: 34560 - RNA, 24 nt, Human
ugcauuguuaucauuaaccagucu

SEQ ID NO: 34561 - RNA, 24 nt, Human
aagcgaccccaaaguggauagucu

SEQ ID NO: 34562 - RNA, 24 nt, Human
ucagugccacgcuugcagggugca

SEQ ID NO: 34563 - RNA, 24 nt, Human
uuggagggguggacaaucaucacg

SEQ ID NO: 34564 - RNA, 24 nt, Human
acguaagcaugagguuguugggga

SEQ ID NO: 34565 - RNA, 24 nt, Human
uccauagucuccuaccccuccugg

SEQ ID NO: 34566 - RNA, 24 nt, Human
gggcagagaacuccuugauguucu

SEQ ID NO: 34567 - RNA, 24 nt, Human
uuaguugaugaauucuugaagagc

SEQ ID NO: 34568 - RNA, 24 nt, Human
ucgcaccgccguagcgcacauacu

SEQ ID NO: 34569 - RNA, 24 nt, Human
uacccugugaucgcugaccgcaug

SEQ ID NO: 34570 - RNA, 17 nt, Human
ugccaggaaaagaugag

SEQ ID NO: 34571 - RNA, 21 nt, Human
ugagaugggguggggacacag

SEQ ID NO: 34572 - RNA, 24 nt, Human
uguacaagagugguauauuuuaca

SEQ ID NO: 34573 - RNA, 24 nt, Human
uauggcaagucacuuugacagaca

SEQ ID NO: 34574 - RNA, 24 nt, Human
ugagaauggcaaaauuagucgccu

SEQ ID NO: 34575 - RNA, 24 nt, Human
uacaccacucccaagaagaauaag

SEQ ID NO: 34576 - RNA, 24 nt, Human
uugagauaaucuucauuagguaua

SEQ ID NO: 34577 - RNA, 21 nt, Human
uggagggaaauagaagggcug

SEQ ID NO: 34578 - RNA, 24 nt, Human
aggaaucuguaaaccaaaugcagc

SEQ ID NO: 34579 - RNA, 24 nt, Human
uggaaaacugggcuaaauauauaa

SEQ ID NO: 34580 - RNA, 18 nt, Human
ucuuacagucugacuaac

SEQ ID NO: 34581 - RNA, 24 nt, Human
gaagaagacaacauacauaaaaag

SEQ ID NO: 34582 - RNA, 24 nt, Human
ugaacacauacagaacugaauuaa

SEQ ID NO: 34583 - RNA, 24 nt, Human
gacuguguuuuaccugugccagca

SEQ ID NO: 34584 - RNA, 24 nt, Human
aucauuuugagcaaaauaucuguu

SEQ ID NO: 34585 - RNA, 24 nt, Human
ugagguucagaacaugaacauuuu

SEQ ID NO: 34586 - RNA, 24 nt, Human
uggcagccgcauggacaggcagac

SEQ ID NO: 34587 - RNA, 24 nt, Human
aggcacugcuuauuccagugcagc

SEQ ID NO: 34588 - RNA, 24 nt, Human
cuuuaugucucacauucaugucau

SEQ ID NO: 34589 - RNA, 24 nt, Human
guggaucuaccauucugguguuug

SEQ ID NO: 34590 - RNA, 24 nt, Human
gucaggaugucugucaccgcugcg

SEQ ID NO: 34591 - RNA, 24 nt, Human
ugccacagagccuccauccagcuc

SEQ ID NO: 34592 - RNA, 24 nt, Human
uccggggagcaggaguuucaauuu

SEQ ID NO: 34593 - RNA, 24 nt, Human
uuuucaggaaagucuccuuugcac

SEQ ID NO: 34594 - RNA, 24 nt, Human
uuggaauauuaaggauagaaggaa

SEQ ID NO: 34595 - RNA, 24 nt, Human
acgaagaugaugaacuaaagccuu

SEQ ID NO: 34596 - RNA, 24 nt, Human
uccauggguuauacacgggaggag

SEQ ID NO: 34597 - RNA, 24 nt, Human
cgacgcguucauugcagccggcga

SEQ ID NO: 34598 - RNA, 18 nt, Human
aacagcuuucucaaaugu

SEQ ID NO: 34599 - RNA, 24 nt, Human
agacagaaaguuuggaucuuuagu

SEQ ID NO: 34600 - RNA, 24 nt, Human
ugucagaaaacaaaacaaaaaaag

SEQ ID NO: 34601 - RNA, 24 nt, Human
cgucaagacgcuggggcagcagca

SEQ ID NO: 34602 - RNA, 24 nt, Human
aaggagucaccuguaaucaaggug

SEQ ID NO: 34603 - RNA, 24 nt, Human
aaguauccagccuugauacccauu

SEQ ID NO: 34604 - RNA, 24 nt, Human
ucucuguggcagugcuuguugcuu

SEQ ID NO: 34605 - RNA, 24 nt, Human
agagauacuggaugcuuugcaaaa

SEQ ID NO: 34606 - RNA, 24 nt, Human
ugaaaaccugggcucagcaguuaa

SEQ ID NO: 34607 - RNA, 24 nt, Human
uaacuuagcuaagcccuuugcaca

SEQ ID NO: 34608 - RNA, 24 nt, Human
aaugaaccaggacuauuugaaugg

SEQ ID NO: 34609 - RNA, 24 nt, Human
uggcauuguguaagggcagccagc

SEQ ID NO: 34610 - RNA, 24 nt, Human
uggauuaagaaaaaacaccuaguc

SEQ ID NO: 34611 - RNA, 24 nt, Human
uccgcuccaucauggaggagugcg

SEQ ID NO: 34612 - RNA, 24 nt, Human
uuagcacagguccaauauccaugg

SEQ ID NO: 34613 - RNA, 24 nt, Human
ugcuccugucccuuccacuuccuc

SEQ ID NO: 34614 - RNA, 24 nt, Human
uuuccuggccccucacucauuuca

SEQ ID NO: 34615 - RNA, 24 nt, Human
ugaaaaaacugaggauuagagaag

SEQ ID NO: 34616 - RNA, 24 nt, Human
uauacaguuuguuuuuaaauuguc

SEQ ID NO: 34617 - RNA, 24 nt, Human
augauucucugagguuaaacaugg

SEQ ID NO: 34618 - RNA, 24 nt, Human
ggugaugggggcagccgggaggga

SEQ ID NO: 34619 - RNA, 24 nt, Human
uaaaaaggauuuaaaggcuuuuuu

SEQ ID NO: 34620 - RNA, 24 nt, Human
uaaaacaacuuguuuaggguuuua

SEQ ID NO: 34621 - RNA, 24 nt, Human
uugcugggccgguugggguacuug

SEQ ID NO: 34622 - RNA, 24 nt, Human
cuugaaguugcgcaugcagaugcg

SEQ ID NO: 34623 - RNA, 17 nt, Human
cagcagccggagugugg

SEQ ID NO: 34624 - RNA, 24 nt, Human
ugugaagagcggagcccauccuuu

SEQ ID NO: 34625 - RNA, 24 nt, Human
cgggagagggggccauaccggacc

SEQ ID NO: 34626 - RNA, 24 nt, Human
cuuggaccaugccagagggaaguc

SEQ ID NO: 34627 - RNA, 24 nt, Human
agucgggaacaugaagggagacug

SEQ ID NO: 34628 - RNA, 24 nt, Human
gcgccuuggucuggggggucugcg

SEQ ID NO: 34629 - RNA, 24 nt, Human
ugacuauagaauauaauuggcaua

SEQ ID NO: 34630 - RNA, 24 nt, Human
uggaaggaaaggcacgcgggccgg

SEQ ID NO: 34631 - RNA, 24 nt, Human
ccugugcagcaccgcgaggugcag

SEQ ID NO: 34632 - RNA, 24 nt, Human
ccugcauguguggcggguggagaa

SEQ ID NO: 34633 - RNA, 24 nt, Human
uuggauccaaagaacagaaucugu

SEQ ID NO: 34634 - RNA, 24 nt, Human
ugacuauagaauauaauuuggcau

SEQ ID NO: 34635 - RNA, 24 nt, Human
uacaguagugagaagaauauguuc

SEQ ID NO: 34636 - RNA, 24 nt, Human
aauugcauggguuuguagguacuu

SEQ ID NO: 34637 - RNA, 24 nt, Human
uaaguuccaucuaugccuauuuug

SEQ ID NO: 34638 - RNA, 19 nt, Human
uacaacacaauaacaaaau

SEQ ID NO: 34639 - RNA, 21 nt, Human
ugaaaggucuuagugucuguu

SEQ ID NO: 34640 - RNA, 24 nt, Human
ugauuacagaaaauguucuauuua

SEQ ID NO: 34641 - RNA, 24 nt, Human
ugggauauuucuaauaucuaguau

SEQ ID NO: 34642 - RNA, 23 nt, Human
ucugcauaggccucuagcgcacc

SEQ ID NO: 34643 - RNA, 24 nt, Human
uaaacuaccagugaaaagcgaaua

SEQ ID NO: 34644 - RNA, 24 nt, Human
uuguaagaguggaauuaacugccc

SEQ ID NO: 34645 - RNA, 24 nt, Human
uucaguauuuggaccugacauuuc

SEQ ID NO: 34646 - RNA, 24 nt, Human
uauguuaacuuuuacagaaaaaau

SEQ ID NO: 34647 - RNA, 24 nt, Human
caucugcucuuuucucuguccucc

SEQ ID NO: 34648 - RNA, 17 nt, Human
uaccaguaacccccgag

SEQ ID NO: 34649 - RNA, 24 nt, Human
uuugaaaguuuauuguuuucuuua

SEQ ID NO: 34650 - RNA, 23 nt, Human
aacagguuuauauaaaauaggag

SEQ ID NO: 34651 - RNA, 23 nt, Human
ccagcagucaagcgugccugugu

SEQ ID NO: 34652 - RNA, 24 nt, Human
caagacaagcacaaaagcaccacc

SEQ ID NO: 34653 - RNA, 24 nt, Human
uaaggcagaauuaucucccugcaa

SEQ ID NO: 34654 - RNA, 24 nt, Human
uaaguuucaagaguucagauauac

SEQ ID NO: 34655 - RNA, 22 nt, Human
ucccagagaaaguuggucagcu

SEQ ID NO: 34656 - RNA, 24 nt, Human
acucagcuggagcugaaggggaac

SEQ ID NO: 34657 - RNA, 21 nt, Human
uacccuguguacaacagcaag

SEQ ID NO: 34658 - RNA, 21 nt, Human
uaacugguugcucuuccuauu

SEQ ID NO: 34659 - RNA, 24 nt, Human
aucaguuuuuuugacauaauaacu

SEQ ID NO: 34660 - RNA, 19 nt, Human
uagaauaucucucgucugg

SEQ ID NO: 34661 - RNA, 19 nt, Human
uucaucuuucgcuuggcuc

SEQ ID NO: 34662 - RNA, 24 nt, Human
uccacuggcgaaagaugccuuucu

SEQ ID NO: 34663 - RNA, 24 nt, Human
uaugacuuaagaucuuuucuuuuu

SEQ ID NO: 34664 - RNA, 24 nt, Human
caggaggcugcuuagcaguuuuga

SEQ ID NO: 34665 - RNA, 24 nt, Human
ucuuauguuucuauggcuuugaag

SEQ ID NO: 34666 - RNA, 24 nt, Human
uuugcagaaaauaacagaagcauc

SEQ ID NO: 34667 - RNA, 24 nt, Human
uaaaagcuguauuuggaauaugug

SEQ ID NO: 34668 - RNA, 24 nt, Human
acuagauuuaaaauagugguuuua

SEQ ID NO: 34669 - RNA, 24 nt, Human
uugccgggggugugggccccgggc

SEQ ID NO: 34670 - RNA, 24 nt, Human
ucgccgccgccaugacugagcaga

SEQ ID NO: 34671 - RNA, 24 nt, Human
ugggauggaacccugcgccucugg

SEQ ID NO: 34672 - RNA, 24 nt, Human
ugucgcgguuuuucaccaccgguu

SEQ ID NO: 34673 - RNA, 23 nt, Human
agaaggcucuucagaaugaggau

SEQ ID NO: 34674 - RNA, 24 nt, Human
uggcaggaacauaaacagcaauuc

SEQ ID NO: 34675 - RNA, 24 nt, Human
ggauccugucagaacgcaaauuga

SEQ ID NO: 34676 - RNA, 24 nt, Human
caggggcauggccagauuguuucc

SEQ ID NO: 34677 - RNA, 24 nt, Human
ugggguaaugaaguauuucaguuu

SEQ ID NO: 34678 - RNA, 24 nt, Human
ugagggcagacugccaaguccugg

SEQ ID NO: 34679 - RNA, 24 nt, Human
aaauuccaaaucaaaacauaacuc

SEQ ID NO: 34680 - RNA, 24 nt, Human
uugaaguucacaagacgggaggcc

SEQ ID NO: 34681 - RNA, 24 nt, Human
uauuauauaauuaucuuccuuaua

SEQ ID NO: 34682 - RNA, 22 nt, Human
uaaguccugggugucuggugcc

SEQ ID NO: 34683 - RNA, 18 nt, Human
ucacuggggcucaggcgg

SEQ ID NO: 34684 - RNA, 24 nt, Human
uagguucugugguuucuucugagc

SEQ ID NO: 34685 - RNA, 24 nt, Human
accagcagaagccaggacaggccc

SEQ ID NO: 34686 - RNA, 17 nt, Human
ugcuguuuacucugcau

SEQ ID NO: 34687 - RNA, 24 nt, Human
uauugcuaggguggcgcuccaauu

SEQ ID NO: 34688 - RNA, 24 nt, Human
uaucaugucgcccacgcgggucac

SEQ ID NO: 34689 - RNA, 24 nt, Human
agggaauacaaauuuuggaggagg

SEQ ID NO: 34690 - RNA, 21 nt, Human
cugcugcccuccuucagcagc

SEQ ID NO: 34691 - RNA, 22 nt, Human
ucccaggguauacuccaccuuc

SEQ ID NO: 34692 - RNA, 24 nt, Human
aggcauuuugguuuuuuaaaaucu

SEQ ID NO: 34693 - RNA, 24 nt, Human
aaggcuucuugaaguaaauguucu

SEQ ID NO: 34694 - RNA, 24 nt, Human
uaacuuuagugaccuuuuaaaagu

SEQ ID NO: 34695 - RNA, 24 nt, Human
cauccagggucggacucccggggc

SEQ ID NO: 34696 - RNA, 24 nt, Human
agguuccagcacaaaggagucugu

SEQ ID NO: 34697 - RNA, 19 nt, Human
ccgcugagggaggcacagg

SEQ ID NO: 34698 - RNA, 24 nt, Human
uauuuggaaaagagacaguugaau

SEQ ID NO: 34699 - RNA, 23 nt, Human
uaaagcaugaccaggaucuucag

SEQ ID NO: 34700 - RNA, 24 nt, Human
uaaguaaugggauggucuucaguu

SEQ ID NO: 34701 - RNA, 24 nt, Human
cggguuggggggaaaguugguugg

SEQ ID NO: 34702 - RNA, 24 nt, Human
uggucaaagauaaaaacuaaguuu

SEQ ID NO: 34703 - RNA, 24 nt, Human
ugcccugguaucucaucuagaugg

SEQ ID NO: 34704 - RNA, 17 nt, Human
uacgugagaucugcucc

SEQ ID NO: 34705 - RNA, 24 nt, Human
uucguccugcaagggcaguggaug

SEQ ID NO: 34706 - RNA, 24 nt, Human
uguaggguuucucuccggagugga

SEQ ID NO: 34707 - RNA, 24 nt, Human
ugagaaguagcuucuggauguguu

SEQ ID NO: 34708 - RNA, 24 nt, Human
ugggcagacuuggugaccugucga

SEQ ID NO: 34709 - RNA, 24 nt, Human
uccaucuugguuuaauuagagaau

SEQ ID NO: 34710 - RNA, 24 nt, Human
uagaagcauuucuuuacugaaccu

SEQ ID NO: 34711 - RNA, 21 nt, Human
uucacugugaguuacugaugc

SEQ ID NO: 34712 - RNA, 24 nt, Human
cuuccaggcucacucagugguugu

SEQ ID NO: 34713 - RNA, 24 nt, Human
agugguucuuacuugauccaaaaa

SEQ ID NO: 34714 - RNA, 24 nt, Human
ccuggccaacauugugaaaccccg

SEQ ID NO: 34715 - RNA, 24 nt, Human
ugacaauacuugggaaccugaaga

SEQ ID NO: 34716 - RNA, 24 nt, Human
ugaaguguccucaaauuguaauug

SEQ ID NO: 34717 - RNA, 18 nt, Human
ugacagugaaucugauga

SEQ ID NO: 34718 - RNA, 24 nt, Human
auccugaaagaauaauuggugcca

SEQ ID NO: 34719 - RNA, 24 nt, Human
uuccuuggcauagaccagcgccag

SEQ ID NO: 34720 - RNA, 24 nt, Human
ccacagggucgcuggagccgccau

SEQ ID NO: 34721 - RNA, 20 nt, Human
caggaucugugccucaaccc

SEQ ID NO: 34722 - RNA, 20 nt, Human
uaccuugagggggggaagag

SEQ ID NO: 34723 - RNA, 24 nt, Human
uguagaacaaauguuugggguuac

SEQ ID NO: 34724 - RNA, 24 nt, Human
aggcagucacagaacaggggcaug

SEQ ID NO: 34725 - RNA, 24 nt, Human
aaccagaaaguaagguguucuacu

SEQ ID NO: 34726 - RNA, 24 nt, Human
aaggagcuggccguguuccgggag

SEQ ID NO: 34727 - RNA, 24 nt, Human
uggcaagcaucaccuuggccugga

SEQ ID NO: 34728 - RNA, 20 nt, Human
acagugggaauaauguuggc

SEQ ID NO: 34729 - RNA, 24 nt, Human
ucuaaaaucuucucacuuuuauaa

SEQ ID NO: 34730 - RNA, 24 nt, Human
ugcuuuguuuuuggcagucuuuau

SEQ ID NO: 34731 - RNA, 24 nt, Human
uugaaaggcaugugggcugcucau

SEQ ID NO: 34732 - RNA, 24 nt, Human
aaaauccucuaaaugauucugacu

SEQ ID NO: 34733 - RNA, 24 nt, Human
uucaccuuggcauucacacuuugu

SEQ ID NO: 34734 - RNA, 24 nt, Human
ucggugcaccugcuuuuuuucugc

SEQ ID NO: 34735 - RNA, 24 nt, Human
agaaggcccuggagaaguugcucc

SEQ ID NO: 34736 - RNA, 24 nt, Human
ugcccgaggagaagcugguugagg

SEQ ID NO: 34737 - RNA, 24 nt, Human
ugugaagggcuuccggaaugucau

SEQ ID NO: 34738 - RNA, 20 nt, Human
uguccagaauuuccagaagu

SEQ ID NO: 34739 - RNA, 24 nt, Human
ugagugcccccagggaggggcugg

SEQ ID NO: 34740 - RNA, 24 nt, Human
uguggcccuucucuuuaaguccga

SEQ ID NO: 34741 - RNA, 24 nt, Human
caucaagaaggcggggcuccggaa

SEQ ID NO: 34742 - RNA, 24 nt, Human
uacccuccacuaugaccgcuauac

SEQ ID NO: 34743 - RNA, 19 nt, Human
uaccgcacccagguucggc

SEQ ID NO: 34744 - RNA, 24 nt, Human
ugggauggguaugauguacagugg

SEQ ID NO: 34745 - RNA, 24 nt, Human
ucaggagccuccacuuuccccagu

SEQ ID NO: 34746 - RNA, 24 nt, Human
ugggggguguucugcuuggcacca

SEQ ID NO: 34747 - RNA, 24 nt, Human
uggaagagaaauggaagucggcuc

SEQ ID NO: 34748 - RNA, 24 nt, Human
ugccuaaagccacagguuuuauug

SEQ ID NO: 34749 - RNA, 22 nt, Human
uccgugcgcguugcugcggccg

SEQ ID NO: 34750 - RNA, 24 nt, Human
uugaucuugaagaaacugggcgug

SEQ ID NO: 34751 - RNA, 24 nt, Human
uauuagggauaauauucauuuagc

SEQ ID NO: 34752 - RNA, 24 nt, Human
uaaugggucucaaaauucugugac

SEQ ID NO: 34753 - RNA, 24 nt, Human
agaaagccgguccugggcugaaga

SEQ ID NO: 34754 - RNA, 24 nt, Human
uacacaucaauuugaguuguucag

SEQ ID NO: 34755 - RNA, 24 nt, Human
acaggauuuuuuuaaagagcaaga

SEQ ID NO: 34756 - RNA, 24 nt, Human
ucagucccacuccaggcuucaccc

SEQ ID NO: 34757 - RNA, 24 nt, Human
aagagcucauguugugccaccacc

SEQ ID NO: 34758 - RNA, 24 nt, Human
uacauugacguuauaaaggucuca

SEQ ID NO: 34759 - RNA, 24 nt, Human
aggcaucgcugugugaggacggca

SEQ ID NO: 34760 - RNA, 24 nt, Human
cagggcccugugguuggacuucac

SEQ ID NO: 34761 - RNA, 22 nt, Human
uagaagacaauggauuaccauc

SEQ ID NO: 34762 - RNA, 24 nt, Human
caccugcaguacuguggaguuuua

SEQ ID NO: 34763 - RNA, 23 nt, Human
uucacaggauggcaaguccccgu

SEQ ID NO: 34764 - RNA, 24 nt, Human
gacacguagauucgggcaagucca

SEQ ID NO: 34765 - RNA, 24 nt, Human
uggcauugagacuguauugacccu

SEQ ID NO: 34766 - RNA, 24 nt, Human
uaaugaacaaagguuauuuuuaaa

SEQ ID NO: 34767 - RNA, 24 nt, Human
ucugcaaaaccaauaaauacaaga

SEQ ID NO: 34768 - RNA, 24 nt, Human
uccaagauaucugaaaaaggaaac

SEQ ID NO: 34769 - RNA, 24 nt, Human
ugugacucaucugugggagggcag

SEQ ID NO: 34770 - RNA, 23 nt, Human
uuauaauggccauguuaauaagu

SEQ ID NO: 34771 - RNA, 24 nt, Human
uuccuuggaccacgaccagcuauc

SEQ ID NO: 34772 - RNA, 24 nt, Human
cucugcauucggcugugagugcca

SEQ ID NO: 34773 - RNA, 24 nt, Human
cauggugugcgccuuccugccaca

SEQ ID NO: 34774 - RNA, 24 nt, Human
ugugcagcgcgcggcccgggcagc

SEQ ID NO: 34775 - RNA, 24 nt, Human
uauagggcaagcgugcaggccauc

SEQ ID NO: 34776 - RNA, 24 nt, Human
ugguaugcuaaggagucaguacuu

SEQ ID NO: 34777 - RNA, 24 nt, Human
gugaagcuacucaauacgcgccac

SEQ ID NO: 34778 - RNA, 24 nt, Human
ugaccagggccugcugugugaccu

SEQ ID NO: 34779 - RNA, 24 nt, Human
caccaggugguagaagacgguacg

SEQ ID NO: 34780 - RNA, 24 nt, Human
aggcggcccuugucguuggugaug

SEQ ID NO: 34781 - RNA, 24 nt, Human
ccagaaccuucuucuuguccgacu

SEQ ID NO: 34782 - RNA, 24 nt, Human
ucgaaggucacucgaucuggggca

SEQ ID NO: 34783 - RNA, 24 nt, Human
ucgcugaucuugcccuugagcccc

SEQ ID NO: 34784 - RNA, 24 nt, Human
uaaaaaguuguggcaaagauggcu

SEQ ID NO: 34785 - RNA, 24 nt, Human
uuguccugugcuggggcugacaga

SEQ ID NO: 34786 - RNA, 20 nt, Human
uuugcagaauccuggagcag

SEQ ID NO: 34787 - RNA, 24 nt, Human
uuuguaguugaaaacauuucacca

SEQ ID NO: 34788 - RNA, 19 nt, Human
ugccauacuuauucagaaa

SEQ ID NO: 34789 - RNA, 19 nt, Human
uuggucgacuuuguuagaa

SEQ ID NO: 34790 - RNA, 24 nt, Human
aaggacacaaaaggaagcugugug

SEQ ID NO: 34791 - RNA, 20 nt, Human
uaccuuguccacuguggcau

SEQ ID NO: 34792 - RNA, 24 nt, Human
ugagaaccuuaguauacugauuga

SEQ ID NO: 34793 - RNA, 24 nt, Human
ugaccagacuuuuccagaagugcc

SEQ ID NO: 34794 - RNA, 17 nt, Human
uaacauggaugggcuga

SEQ ID NO: 34795 - RNA, 22 nt, Human
uuccaaagaaagguacugugga

SEQ ID NO: 34796 - RNA, 24 nt, Human
uuuguaggagcucuuuauauauug

SEQ ID NO: 34797 - RNA, 24 nt, Human
cagcauagccugauaggccucugg

SEQ ID NO: 34798 - RNA, 24 nt, Human
uggcauagcucagcacccaggaaa

SEQ ID NO: 34799 - RNA, 24 nt, Human
ccaccgagguaccuguguccuggg

SEQ ID NO: 34800 - RNA, 24 nt, Human
gcccgagugcacgugucugaggag

SEQ ID NO: 34801 - RNA, 24 nt, Human
ugcgagucagagcacucacgcccg

SEQ ID NO: 34802 - RNA, 24 nt, Human
uucaucgucaccuccagcuaguca

SEQ ID NO: 34803 - RNA, 24 nt, Human
ugggaaauaauucaguuugagagc

SEQ ID NO: 34804 - RNA, 24 nt, Human
acaacuuauccaaaugaauguguu

SEQ ID NO: 34805 - RNA, 24 nt, Human
aagaaccugacuuauuucaugcca

SEQ ID NO: 34806 - RNA, 24 nt, Human
aagcguuuugagcagaaaggauuc

SEQ ID NO: 34807 - RNA, 18 nt, Human
ugcguaauaacggggccc

SEQ ID NO: 34808 - RNA, 24 nt, Human
uacaggacaagggcagccccaccc

SEQ ID NO: 34809 - RNA, 24 nt, Human
uccccagcaaccaggccuggccuc

SEQ ID NO: 34810 - RNA, 24 nt, Human
ugagucuggagcagagaggggaga

SEQ ID NO: 34811 - RNA, 24 nt, Human
gugaggcagaacgcugccauccgu

SEQ ID NO: 34812 - RNA, 24 nt, Human
caugccaggcgccuuugugcauga

SEQ ID NO: 34813 - RNA, 24 nt, Human
caccuguaaucccagcuacuccga

SEQ ID NO: 34814 - RNA, 24 nt, Human
cuguacuuuuacacuccuuugucu

SEQ ID NO: 34815 - RNA, 21 nt, Human
uaccguggugacgugguuccc

SEQ ID NO: 34816 - RNA, 24 nt, Human
uggauuggugccccacuggcuuca

SEQ ID NO: 34817 - RNA, 24 nt, Human
uaccacagcuguugccgaggccug

SEQ ID NO: 34818 - RNA, 24 nt, Human
aaaaacuaaaaacaaaugucaacu

SEQ ID NO: 34819 - RNA, 24 nt, Human
agaauacuauagagcaaguaaacc

SEQ ID NO: 34820 - RNA, 24 nt, Human
ugagauacuuuuuuaugugugcuu

SEQ ID NO: 34821 - RNA, 24 nt, Human
uucauuguagauucuggauauuag

SEQ ID NO: 34822 - RNA, 24 nt, Human
uuguagguugccuguucacucaga

SEQ ID NO: 34823 - RNA, 24 nt, Human
ugggacagguaucgguuugucacc

SEQ ID NO: 34824 - RNA, 24 nt, Human
gagcagcagcagggugggcgagca

SEQ ID NO: 34825 - RNA, 24 nt, Human
auugauggucagccaggugccuuc

SEQ ID NO: 34826 - RNA, 23 nt, Human
gaugacacuuaagaccuacuugu

SEQ ID NO: 34827 - RNA, 24 nt, Human
uguagaacucagccuucuuggaaa

SEQ ID NO: 34828 - RNA, 21 nt, Human
uaucucaagcccagaaagaug

SEQ ID NO: 34829 - RNA, 19 nt, Human
uggcugcgcugugcccucg

SEQ ID NO: 34830 - RNA, 24 nt, Human
uauaagaaccugaucuccaagugu

SEQ ID NO: 34831 - RNA, 24 nt, Human
uagaccagccacagugccugauug

SEQ ID NO: 34832 - RNA, 24 nt, Human
uagcuuccugucucaggcuuucua

SEQ ID NO: 34833 - RNA, 24 nt, Human
aagcagcaggaacagaguugcuuu

SEQ ID NO: 34834 - RNA, 24 nt, Human
auccuguuuugaaauuccauucac

SEQ ID NO: 34835 - RNA, 24 nt, Human
ugccucugcagccuaauaauuuuu

SEQ ID NO: 34836 - RNA, 24 nt, Human
uacccuugaacuucugggcucagg

SEQ ID NO: 34837 - RNA, 24 nt, Human
ugguggucuugagcuuuuggccug

SEQ ID NO: 34838 - RNA, 24 nt, Human
gcagugggccuuggcucaagauca

SEQ ID NO: 34839 - RNA, 24 nt, Human
ucuuugauuucucuucaguagcac

SEQ ID NO: 34840 - RNA, 24 nt, Human
uaucugagucacuagaugaggagg

SEQ ID NO: 34841 - RNA, 24 nt, Human
ugaccagagauuacuuguccaaaa

SEQ ID NO: 34842 - RNA, 24 nt, Human
uaguggguggcauucucugagccu

SEQ ID NO: 34843 - RNA, 24 nt, Human
cguugcugugauagaacuuguggc

SEQ ID NO: 34844 - RNA, 24 nt, Human
uuggggcuucaacaugggaauuua

SEQ ID NO: 34845 - RNA, 24 nt, Human
cuucuccucuuggcuuguaggugg

SEQ ID NO: 34846 - RNA, 24 nt, Human
uaccccauaaauauguagagagca

SEQ ID NO: 34847 - RNA, 24 nt, Human
uugaagccacgcccucuuucccac

SEQ ID NO: 34848 - RNA, 24 nt, Human
uaucaaggaagggcaggcgugaug

SEQ ID NO: 34849 - RNA, 24 nt, Human
uucaaauuucuuucuuuuuuaauu

SEQ ID NO: 34850 - RNA, 24 nt, Human
uugaagccaguaauuagagacauc

SEQ ID NO: 34851 - RNA, 24 nt, Human
uguaauauuguuaagaaagaaagg

SEQ ID NO: 34852 - RNA, 24 nt, Human
ucuuguagcccacgaggaugaugg

SEQ ID NO: 34853 - RNA, 24 nt, Human
gugcacugccgcugaugucucaau

SEQ ID NO: 34854 - RNA, 24 nt, Human
uccagcuguucuuuccccuuagca

SEQ ID NO: 34855 - RNA, 24 nt, Human
uggaaaggaaacucugaagcgccg

SEQ ID NO: 34856 - RNA, 23 nt, Human
ccgccgcgcccccgccgccgccc

SEQ ID NO: 34857 - RNA, 24 nt, Human
ucugccacaaugcugauaacccag

SEQ ID NO: 34858 - RNA, 24 nt, Human
ugaggugagaccagcccuggcagg

SEQ ID NO: 34859 - RNA, 24 nt, Human
uuuugcuuacaaaguauauuuaag

SEQ ID NO: 34860 - RNA, 24 nt, Human
uagcgugggauagauugguuucuu

SEQ ID NO: 34861 - RNA, 24 nt, Human
ugguauacuacugcuuugcggaau

SEQ ID NO: 34862 - RNA, 24 nt, Human
uugaucuugaagaaacugggcgug

SEQ ID NO: 34863 - RNA, 24 nt, Human
aggaaggagauauagugaagagga

SEQ ID NO: 34864 - RNA, 24 nt, Human
guagaguuuucuucaggcuuaaag

SEQ ID NO: 34865 - RNA, 24 nt, Human
accugguggugaggcucuccauga

SEQ ID NO: 34866 - RNA, 24 nt, Human
gaacuucggauuuuuucuaacugg

SEQ ID NO: 34867 - RNA, 24 nt, Human
uaccugucuguaucgguucagagu

SEQ ID NO: 34868 - RNA, 24 nt, Human
uccuaggccuauuaauauuccgga

SEQ ID NO: 34869 - RNA, 24 nt, Human
uacgcguaucgauggcgccagcug

SEQ ID NO: 34870 - RNA, 24 nt, Human
aggcauagugagucaucauuacau

SEQ ID NO: 34871 - RNA, 24 nt, Human
uuaguaauauguucccuuaaaauu

SEQ ID NO: 34872 - RNA, 24 nt, Human
ugaaaagcgaagagaagaucaaag

SEQ ID NO: 34873 - RNA, 24 nt, Human
cagcagcuggacgcugagcugagg

SEQ ID NO: 34874 - RNA, 24 nt, Human
uuuuauucuugguaguuuuuggga

SEQ ID NO: 34875 - RNA, 24 nt, Human
ugcuuagaguaucagaaauaucuc

SEQ ID NO: 34876 - RNA, 24 nt, Human
uaccggaguccccacuggggcagc

SEQ ID NO: 34877 - RNA, 23 nt, Human
uccaccuuccucaggaaaaacca

SEQ ID NO: 34878 - RNA, 24 nt, Human
ugguagguggucugcuggguggcu

SEQ ID NO: 34879 - RNA, 21 nt, Human
gucaauauccauaaaugaagg

SEQ ID NO: 34880 - RNA, 24 nt, Human
uaaaugguaaacgugauaucauga

SEQ ID NO: 34881 - RNA, 24 nt, Human
ucauggacuaaacuaggucagagu

SEQ ID NO: 34882 - RNA, 24 nt, Human
ugacgaggggaagagaugagaaga

SEQ ID NO: 34883 - RNA, 24 nt, Human
aacauuuugugcagaaggcugaag

SEQ ID NO: 34884 - RNA, 24 nt, Human
ugauuuuagaucuauucaagagag

SEQ ID NO: 34885 - RNA, 24 nt, Human
uaagacgugcucaaucuguguucc

SEQ ID NO: 34886 - RNA, 24 nt, Human
uugaucuugaagaaacugggcgug

SEQ ID NO: 34887 - RNA, 24 nt, Human
aggaaggagauauagugaagagga

SEQ ID NO: 34888 - RNA, 24 nt, Human
guagaguuuucuucaggcuuaaag

SEQ ID NO: 34889 - RNA, 23 nt, Human
uggcagugcugauccucagaaac

SEQ ID NO: 34890 - RNA, 17 nt, Human
ucaguguccacagcgca

SEQ ID NO: 34891 - RNA, 17 nt, Human
ucgcugccccucgaggc

SEQ ID NO: 34892 - RNA, 22 nt, Human
ugugcaguuccucuccaauugc

SEQ ID NO: 34893 - RNA, 24 nt, Human
ugaggacaaguggagccacaaggg

SEQ ID NO: 34894 - RNA, 24 nt, Human
gucagggucaucaugauguacaaa

SEQ ID NO: 34895 - RNA, 24 nt, Human
uauacuuuggaggaucacagauug

SEQ ID NO: 34896 - RNA, 24 nt, Human
ucccuugcaguuguucgccccucu

SEQ ID NO: 34897 - RNA, 24 nt, Human
uuuuucguaagaagauuucgcucg

SEQ ID NO: 34898 - RNA, 24 nt, Human
ucuaucccauggagacugugaugu

SEQ ID NO: 34899 - RNA, 24 nt, Human
uugguugugauauguuaaccugca

SEQ ID NO: 34900 - RNA, 24 nt, Human
uggcauggccgaacaggcgcgucg

SEQ ID NO: 34901 - RNA, 24 nt, Human
uaggaucaugaugguaaggcaaau

SEQ ID NO: 34902 - RNA, 24 nt, Human
acgcagccugcugaggucgacuug

SEQ ID NO: 34903 - RNA, 24 nt, Human
aggcaggcagaucacaaggucagg

SEQ ID NO: 34904 - RNA, 24 nt, Human
ugagaguuacagacuagcaagucu

SEQ ID NO: 34905 - RNA, 24 nt, Human
uguauacaugaagcuuagauuaau

SEQ ID NO: 34906 - RNA, 24 nt, Human
uuagcuagguuaaaaacacauaau

SEQ ID NO: 34907 - RNA, 24 nt, Human
uaauggaagaacagaguauuuuaa

SEQ ID NO: 34908 - RNA, 24 nt, Human
ggccgugguggugaagcuguagcc

SEQ ID NO: 34909 - RNA, 24 nt, Human
ggaguccaucacgaugccaguggu

SEQ ID NO: 34910 - RNA, 24 nt, Human
uggcuagugagucuuccacaaaag

SEQ ID NO: 34911 - RNA, 24 nt, Human
aucaagacaugaauagcuaagguu

SEQ ID NO: 34912 - RNA, 17 nt, Human
ucaguguccacagcgca

SEQ ID NO: 34913 - RNA, 24 nt, Human
uauuuaguccaauaacauugaguu

SEQ ID NO: 34914 - RNA, 22 nt, Human
uuacuccuuaauaugugccaaa

SEQ ID NO: 34915 - RNA, 24 nt, Human
ugaggcagacgccugaacagggac

SEQ ID NO: 34916 - RNA, 20 nt, Human
aagcugcagcaguaaggaac

SEQ ID NO: 34917 - RNA, 24 nt, Human
uacaguagaaauggaaaacuacag

SEQ ID NO: 34918 - RNA, 24 nt, Human
uugaaagguauauuaaaauuaagg

SEQ ID NO: 34919 - RNA, 24 nt, Human
ucuacagucugugaauauaccaau

SEQ ID NO: 34920 - RNA, 24 nt, Human
cuggaaggcauacccuacaauuua

SEQ ID NO: 34921 - RNA, 24 nt, Human
uugaucuuuucuuucuucagcagu

SEQ ID NO: 34922 - RNA, 24 nt, Human
uccacagcuguuuucuuauuugga

SEQ ID NO: 34923 - RNA, 24 nt, Human
gaagguggaguaaaauuccuggca

SEQ ID NO: 34924 - RNA, 24 nt, Human
ugagggaaaccauagugaaccuca

SEQ ID NO: 34925 - RNA, 24 nt, Human
ugggagggggcagcugggcugagc

SEQ ID NO: 34926 - RNA, 19 nt, Human
uaccgcuuugagacagucc

SEQ ID NO: 34927 - RNA, 24 nt, Human
uccccgauggcccacugcgugacc

SEQ ID NO: 34928 - RNA, 24 nt, Human
ugaaagaaccuggaggcuauuaaa

SEQ ID NO: 34929 - RNA, 24 nt, Human
ccucauggccccaguccacaauug

SEQ ID NO: 34930 - RNA, 22 nt, Human
ugggaagggccaaagaggagua

SEQ ID NO: 34931 - RNA, 24 nt, Human
agccugcggagacagggcggccgg

SEQ ID NO: 34932 - RNA, 24 nt, Human
cccgcgagggggcgagcccggggg

SEQ ID NO: 34933 - RNA, 24 nt, Human
aagucgguuucuucuuaaucuccu

SEQ ID NO: 34934 - RNA, 24 nt, Human
uaaagaucaguaugacugcguaag

SEQ ID NO: 34935 - RNA, 24 nt, Human
aggcauauuccucccuuuccaaag

SEQ ID NO: 34936 - RNA, 24 nt, Human
guuugcgugacgguuccacaucac

SEQ ID NO: 34937 - RNA, 24 nt, Human
uugcucaggcuugagugcacuggc

SEQ ID NO: 34938 - RNA, 24 nt, Human
uucacuagguaaguaugcaaauuc

SEQ ID NO: 34939 - RNA, 23 nt, Human
caguacuguaacaagccauuugu

SEQ ID NO: 34940 - RNA, 24 nt, Human
uguagagacggggccuugccaugu

SEQ ID NO: 34941 - RNA, 24 nt, Human
ugaggacagacacucagggaauuu

SEQ ID NO: 34942 - RNA, 24 nt, Human
ugucauaggcggccuucuucaguu

SEQ ID NO: 34943 - RNA, 24 nt, Human
gcugcuccucaaucugcugcuuag

SEQ ID NO: 34944 - RNA, 24 nt, Human
ccuccagcuccuucucccgccggg

SEQ ID NO: 34945 - RNA, 24 nt, Human
uagcagcuauuauguauuuuucca

SEQ ID NO: 34946 - RNA, 24 nt, Human
uacuucauuuccagugaugggcug

SEQ ID NO: 34947 - RNA, 24 nt, Human
uaaugggucucaaaauuuugugac

SEQ ID NO: 34948 - RNA, 24 nt, Human
uauuagggauaauauucauuuagc

SEQ ID NO: 34949 - RNA, 24 nt, Human
augcauuuuuaauuuggaaaaaac

SEQ ID NO: 34950 - RNA, 21 nt, Human
uguuacagaggagcagaauca

SEQ ID NO: 34951 - RNA, 24 nt, Human
acuggauugacaguauccuggccu

SEQ ID NO: 34952 - RNA, 24 nt, Human
uucaugcauuucaucauuucucaa

SEQ ID NO: 34953 - RNA, 23 nt, Human
uucugugcccuuuaugauguguc

SEQ ID NO: 34954 - RNA, 24 nt, Human
uauuagggauaauauucauuuagc

SEQ ID NO: 34955 - RNA, 24 nt, Human
ggaucugucuagcuuuuggccacu

SEQ ID NO: 34956 - RNA, 24 nt, Human
uuaucugcuguuccgacuugguuu

SEQ ID NO: 34957 - RNA, 24 nt, Human
ucagcauguccagccuggggucug

SEQ ID NO: 34958 - RNA, 24 nt, Human
uauggcaagucacuuugacagaca

SEQ ID NO: 34959 - RNA, 24 nt, Human
ugagaauggcaaaauuagucgccu

SEQ ID NO: 34960 - RNA, 24 nt, Human
uacaccacucccaagaagaauaag

SEQ ID NO: 34961 - RNA, 24 nt, Human
gaagauggaggagaggcggcccaa

SEQ ID NO: 34962 - RNA, 24 nt, Human
uggggcucaacaaauggaaugugu

SEQ ID NO: 34963 - RNA, 24 nt, Human
uaccaggccggggccguguuggca

SEQ ID NO: 34964 - RNA, 24 nt, Human
cagcagugggcaccacugguccgc

SEQ ID NO: 34965 - RNA, 24 nt, Human
uaaugggucucaaaauucugugac

SEQ ID NO: 34966 - RNA, 24 nt, Human
ugcauuguuaucauuaaccagucu

SEQ ID NO: 34967 - RNA, 18 nt, Human
cauggcaacgucaccguu

SEQ ID NO: 34968 - RNA, 24 nt, Human
uguagagacgugcucgcgagucag

SEQ ID NO: 34969 - RNA, 24 nt, Human
ucacaaacuuccauuuguuuuucu

SEQ ID NO: 34970 - RNA, 24 nt, Human
uggccucgucugauccuacguucu

SEQ ID NO: 34971 - RNA, 24 nt, Human
uuguuuuuucuuuuggaccaguuc

SEQ ID NO: 34972 - RNA, 20 nt, Human
augauggugucacgugccuu

SEQ ID NO: 34973 - RNA, 24 nt, Human
aaaggagcugggagguccugauua

SEQ ID NO: 34974 - RNA, 23 nt, Human
ugaguaggcaaacuccaggccug

SEQ ID NO: 34975 - RNA, 24 nt, Human
ucugcaccagauggacaguggugc

SEQ ID NO: 34976 - RNA, 24 nt, Human
uguaagcgcuccaucuccaggacu

SEQ ID NO: 34977 - RNA, 24 nt, Human
gggcagugcagccagcccccgggc

SEQ ID NO: 34978 - RNA, 19 nt, Human
cagcaccuggaagcgcccc

SEQ ID NO: 34979 - RNA, 24 nt, Human
uauaaaacuuugauaguuacauug

SEQ ID NO: 34980 - RNA, 22 nt, Human
uagcaugccucuuaauuuuucu

SEQ ID NO: 34981 - RNA, 24 nt, Human
aacagguaaccacuugagaggaug

SEQ ID NO: 34982 - RNA, 24 nt, Human
ucccggaguggccgugaaacggug

SEQ ID NO: 34983 - RNA, 24 nt, Human
uauaugcacuuauugguauuggaa

SEQ ID NO: 34984 - RNA, 24 nt, Human
cgugcagucaggugggcgggugug

SEQ ID NO: 34985 - RNA, 24 nt, Human
uaugagaagcuggacuuccuuggg

SEQ ID NO: 34986 - RNA, 24 nt, Human
ucuaauauuagccuugucuuugau

SEQ ID NO: 34987 - RNA, 20 nt, Human
ugagagaacacuccacgaug

SEQ ID NO: 34988 - RNA, 24 nt, Human
aaagcaaaugaggcagaaaggccc

SEQ ID NO: 34989 - RNA, 24 nt, Human
uuucacggucgcagccaucuugcu

SEQ ID NO: 34990 - RNA, 24 nt, Human
uaacuguaaccgaaaguuuuuuca

SEQ ID NO: 34991 - RNA, 24 nt, Human
caggagcaaccacuggcccuaccg

SEQ ID NO: 34992 - RNA, 24 nt, Human
ugcgggcgccgggcugaagcuccg

SEQ ID NO: 34993 - RNA, 24 nt, Human
uuugcucacucgcaucagugggca

SEQ ID NO: 34994 - RNA, 24 nt, Human
ucaaagaccguaaagagaucccuc

SEQ ID NO: 34995 - RNA, 24 nt, Human
gagcagcgauggagaaauuaaaua

SEQ ID NO: 34996 - RNA, 24 nt, Human
gaagauugaggacuacuuuccaga

SEQ ID NO: 34997 - RNA, 24 nt, Human
uaaguccugauggaggcuuucuga

SEQ ID NO: 34998 - RNA, 24 nt, Human
gagcugccaaagccauccugccac

SEQ ID NO: 34999 - RNA, 24 nt, Human
uggaagaagauauccccauagcga

SEQ ID NO: 35000 - RNA, 17 nt, Human
ucaguguccacagcgca

SEQ ID NO: 35001 - RNA, 24 nt, Human
cagaagaacagcacccuccaccac

SEQ ID NO: 35002 - RNA, 24 nt, Human
ucaaugucauucuaccccucgcua

SEQ ID NO: 35003 - RNA, 22 nt, Human
cugcuccugccugcuucgauca

SEQ ID NO: 35004 - RNA, 24 nt, Human
uuagaaaaugcuuguuuccuccua

SEQ ID NO: 35005 - RNA, 24 nt, Human
ucgaccgggccgucgauggccaug

SEQ ID NO: 35006 - RNA, 24 nt, Human
uggaagacuuuuuuuucuuauuuu

SEQ ID NO: 35007 - RNA, 24 nt, Human
caugacaccaacagaagggaucaa

SEQ ID NO: 35008 - RNA, 24 nt, Human
ucuagacuauuuaaccaaagguau

SEQ ID NO: 35009 - RNA, 24 nt, Human
uuacaccugugccccacgacgggu

SEQ ID NO: 35010 - RNA, 24 nt, Human
ucaaugccacacaugagcccucag

SEQ ID NO: 35011 - RNA, 24 nt, Human
uaagaaauguguacuuggaacaag

SEQ ID NO: 35012 - RNA, 24 nt, Human
uagcagcucguuguauuuccuggu

SEQ ID NO: 35013 - RNA, 24 nt, Human
ggagguguugagcaucuuccacug

SEQ ID NO: 35014 - RNA, 24 nt, Human
uggaacuguguuugggagccucau

SEQ ID NO: 35015 - RNA, 24 nt, Human
caagggacaucgacacagcagcca

SEQ ID NO: 35016 - RNA, 24 nt, Human
uguggacagagccacuuggugcug

SEQ ID NO: 35017 - RNA, 24 nt, Human
ugugaccaauccuguuuuuccuau

SEQ ID NO: 35018 - RNA, 24 nt, Human
ugguauacuacugcuuugcggaau

SEQ ID NO: 35019 - RNA, 24 nt, Human
uauuuaaggauuauucugcugaag

SEQ ID NO: 35020 - RNA, 24 nt, Human
ugcccugugguguuuggcaugugc

SEQ ID NO: 35021 - RNA, 24 nt, Human
ucaguguuuuguacuucacugaau

SEQ ID NO: 35022 - RNA, 24 nt, Human
aucagauucaaaagggaauuuagu

SEQ ID NO: 35023 - RNA, 24 nt, Human
ugagaacuggcuccggggaaagaa

SEQ ID NO: 35024 - RNA, 24 nt, Human
ucccggcaccaaggccgcaggcgg

SEQ ID NO: 35025 - RNA, 24 nt, Human
uguaacagcacacugcauuccggg

SEQ ID NO: 35026 - RNA, 24 nt, Human
cacagcaagcccaggcucuaccag

SEQ ID NO: 35027 - RNA, 24 nt, Human
gagaagcagaaggaggucugggag

SEQ ID NO: 35028 - RNA, 24 nt, Human
uggcucacgccuguaaucccagca

SEQ ID NO: 35029 - RNA, 24 nt, Human
uuaaacccguauaaacuguuaagg

SEQ ID NO: 35030 - RNA, 24 nt, Human
uaguacuggcaggacauggggaug

SEQ ID NO: 35031 - RNA, 24 nt, Human
uuggugaugaugcagcacccuggg

SEQ ID NO: 35032 - RNA, 20 nt, Human
uuuggcauuuuuuggaccau

SEQ ID NO: 35033 - RNA, 24 nt, Human
ugaccuuggaugcuguaaagugau

SEQ ID NO: 35034 - RNA, 24 nt, Human
uauguaauauuuggguugaucuau

SEQ ID NO: 35035 - RNA, 24 nt, Human
ucaugaguucucauauuuuccaua

SEQ ID NO: 35036 - RNA, 24 nt, Human
ucuguuaucuccuuuugcgcgaca

SEQ ID NO: 35037 - RNA, 24 nt, Human
uaaaggaagaauuaaaccgcuguu

SEQ ID NO: 35038 - RNA, 24 nt, Human
ccugaaauucuuaaaggaugggag

SEQ ID NO: 35039 - RNA, 24 nt, Human
cuugaccccgcugccucagccucc

SEQ ID NO: 35040 - RNA, 24 nt, Human
ugcaagaaaaugaggaaucugaga

SEQ ID NO: 35041 - RNA, 24 nt, Human
uggcagggccauguggugguggua

SEQ ID NO: 35042 - RNA, 24 nt, Human
ggacagguguacagacauguucuu

SEQ ID NO: 35043 - RNA, 24 nt, Human
cagcaggacccucuuuuuguuuug

SEQ ID NO: 35044 - RNA, 24 nt, Human
ucgaauggacacauuaccagugaa

SEQ ID NO: 35045 - RNA, 24 nt, Human
uccaugagaauuuggaaugacagu

SEQ ID NO: 35046 - RNA, 20 nt, Human
ugaaagaagggagaagagua

SEQ ID NO: 35047 - RNA, 23 nt, Human
uacuguguuuucacucaaaccac

SEQ ID NO: 35048 - RNA, 24 nt, Human
uaacauguacuaaauauuacaguu

SEQ ID NO: 35049 - RNA, 24 nt, Human
agccaguguuauuugaaguaugua

SEQ ID NO: 35050 - RNA, 24 nt, Human
cuugcucauagucuucagcaagga

SEQ ID NO: 35051 - RNA, 24 nt, Human
ccggcgcgaagaggcuggacucgg

SEQ ID NO: 35052 - RNA, 24 nt, Human
caugacauuaggaacuuagcauuu

SEQ ID NO: 35053 - RNA, 24 nt, Human
ugggagcagcagccaaguccgcgg

SEQ ID NO: 35054 - RNA, 18 nt, Human
uggcguagcuucacuucu

SEQ ID NO: 35055 - RNA, 24 nt, Human
acugguuucuucacucugaagcag

SEQ ID NO: 35056 - RNA, 24 nt, Human
uucaaguaugucuguuguaaccaa

SEQ ID NO: 35057 - RNA, 17 nt, Human
uaauguguguguauauc

SEQ ID NO: 35058 - RNA, 24 nt, Human
uacaguuuauugucuaauacuagc

SEQ ID NO: 35059 - RNA, 24 nt, Human
uuuguccccugacagagauuccau

SEQ ID NO: 35060 - RNA, 24 nt, Human
uuggaagccacagaaaugcagaau

SEQ ID NO: 35061 - RNA, 24 nt, Human
ugccuggaaguuuaggucaaagag

SEQ ID NO: 35062 - RNA, 24 nt, Human
uagauacuuucaaaauuucuguua

SEQ ID NO: 35063 - RNA, 24 nt, Human
ucauugcugucauguucucuagcg

SEQ ID NO: 35064 - RNA, 24 nt, Human
uaauucuuuuaauuugguuaucug

SEQ ID NO: 35065 - RNA, 24 nt, Human
uauggcaagucacuuugacagaca

SEQ ID NO: 35066 - RNA, 24 nt, Human
aggcaaacaaauuucgaagagguu

SEQ ID NO: 35067 - RNA, 24 nt, Human
uacguggcccuccugcgagucacu

SEQ ID NO: 35068 - RNA, 24 nt, Human
acauaugaaugcacgauaugaaga

SEQ ID NO: 35069 - RNA, 24 nt, Human
uaagagcagacacaaccugagaug

SEQ ID NO: 35070 - RNA, 24 nt, Human
uagaagccuuugaccaagcauguc

SEQ ID NO: 35071 - RNA, 24 nt, Human
ucucugcagcuggacucuugacgu

SEQ ID NO: 35072 - RNA, 24 nt, Human
accgacuagcaccgcggccagucu

SEQ ID NO: 35073 - RNA, 24 nt, Human
gaggacucccaacccuggcuuggu

SEQ ID NO: 35074 - RNA, 24 nt, Human
uggaggccccuggagccagauggc

SEQ ID NO: 35075 - RNA, 24 nt, Human
ccagagccuggcugcccaucaugu

SEQ ID NO: 35076 - RNA, 20 nt, Human
uuagucaggcaauaaaaugc

SEQ ID NO: 35077 - RNA, 24 nt, Human
uagcugaaaagaacgcuagaccaa

SEQ ID NO: 35078 - RNA, 24 nt, Human
uauuacaauucacuggccgucguu

SEQ ID NO: 35079 - RNA, 24 nt, Human
augaccuucaggccauucagaaag

SEQ ID NO: 35080 - RNA, 24 nt, Human
uucauaagggcuuugccuucguuc

SEQ ID NO: 35081 - RNA, 24 nt, Human
ugagagugugggggaagagccuug

SEQ ID NO: 35082 - RNA, 24 nt, Human
uauggcaacaggccauucugggcc

SEQ ID NO: 35083 - RNA, 24 nt, Human
caccuggaacauugggaauuguuu

SEQ ID NO: 35084 - RNA, 24 nt, Human
acuguuuuuauuuaguuugauaug

SEQ ID NO: 35085 - RNA, 24 nt, Human
ccguucacccaacauuugcuuuug

SEQ ID NO: 35086 - RNA, 24 nt, Human
uugcauuguaacuuguggugugca

SEQ ID NO: 35087 - RNA, 24 nt, Human
ugugauguugaguuucucacuuac

SEQ ID NO: 35088 - RNA, 24 nt, Human
uauggcaagucacuuugacagaca

SEQ ID NO: 35089 - RNA, 24 nt, Human
ugaggugggaggacugcuuaaggc

SEQ ID NO: 35090 - RNA, 24 nt, Human
ugagaaacuugaucuaauauuuaa

SEQ ID NO: 35091 - RNA, 24 nt, Human
cgagaccauccuggccaacauagu

SEQ ID NO: 35092 - RNA, 24 nt, Human
ucuguguuuucauucguuuguacc

SEQ ID NO: 35093 - RNA, 24 nt, Human
uuugugagcuucgguguauuugcc

SEQ ID NO: 35094 - RNA, 24 nt, Human
uggcuggaguagcaaggaucuuca

SEQ ID NO: 35095 - RNA, 24 nt, Human
uauuguauugaugaugguuauucu

SEQ ID NO: 35096 - RNA, 24 nt, Human
ucagcagccucaggccuggaugca

SEQ ID NO: 35097 - RNA, 24 nt, Human
uaacucaugcauaccaaacauagc

SEQ ID NO: 35098 - RNA, 24 nt, Human
ugcaugaagggcaucccaucuugc

SEQ ID NO: 35099 - RNA, 24 nt, Human
ugacgccaaugaugacugcuagga

SEQ ID NO: 35100 - RNA, 24 nt, Human
ugaccugaaauuuuuaguauuuac

SEQ ID NO: 35101 - RNA, 19 nt, Human
uagaauauaaaagauauua

SEQ ID NO: 35102 - RNA, 24 nt, Human
ucacugcguucaauuuugaguuuc

SEQ ID NO: 35103 - RNA, 24 nt, Human
uaagcaggcagaguggaugaacgu

SEQ ID NO: 35104 - RNA, 24 nt, Human
caaugcaugaagggguuggugccg

SEQ ID NO: 35105 - RNA, 24 nt, Human
ugacugcacaggacucuggguucc

SEQ ID NO: 35106 - RNA, 24 nt, Human
gggcagugggguccgcaucguggu

SEQ ID NO: 35107 - RNA, 24 nt, Human
ucauugaggccauccgaagagcca

SEQ ID NO: 35108 - RNA, 18 nt, Human
uggcagaaccacuaagcu

SEQ ID NO: 35109 - RNA, 20 nt, Human
ugguauagugaaugaaugaa

SEQ ID NO: 35110 - RNA, 24 nt, Human
aggcaggagaaucgcuuaaacccg

SEQ ID NO: 35111 - RNA, 24 nt, Human
auugcacugcagccugggcaauaa

SEQ ID NO: 35112 - RNA, 24 nt, Human
gcccucuuucuccugggaucuugc

SEQ ID NO: 35113 - RNA, 24 nt, Human
uaagguauccgcuucaaggccucc

SEQ ID NO: 35114 - RNA, 24 nt, Human
uaguaguaucucauuuugguuuua

SEQ ID NO: 35115 - RNA, 24 nt, Human
uggcagauugauaccugccugguc

SEQ ID NO: 35116 - RNA, 24 nt, Human
uuccacgggcaugugacagucacc

SEQ ID NO: 35117 - RNA, 24 nt, Human
gcugaacccccugcucaccgccag

SEQ ID NO: 35118 - RNA, 24 nt, Human
gcgcagcuucaggggccgcaaggg

SEQ ID NO: 35119 - RNA, 24 nt, Human
caguguccgcugcagccagucgga

SEQ ID NO: 35120 - RNA, 24 nt, Human
uuucuacuaaaaauacaaaaaacu

SEQ ID NO: 35121 - RNA, 24 nt, Human
uuaucugcuguuccgacuugguuu

SEQ ID NO: 35122 - RNA, 24 nt, Human
ucagcauguccagccuggggucug

SEQ ID NO: 35123 - RNA, 24 nt, Human
ugaaguggucugcucauaguuugu

SEQ ID NO: 35124 - RNA, 24 nt, Human
ccuugaguuccuucauggcaauga

SEQ ID NO: 35125 - RNA, 24 nt, Human
ugguguggugauucgcuucugguu

SEQ ID NO: 35126 - RNA, 24 nt, Human
gccauguuucuucugugccuacca

SEQ ID NO: 35127 - RNA, 24 nt, Human
uacaugcauauauuucagcuuaug

SEQ ID NO: 35128 - RNA, 24 nt, Human
ucccuuguggugguaccucuaugu

SEQ ID NO: 35129 - RNA, 24 nt, Human
ugugaagaccuuuccugucccaca

SEQ ID NO: 35130 - RNA, 24 nt, Human
aagaaaauagggcuuuuggcauuc

SEQ ID NO: 35131 - RNA, 24 nt, Human
cuuucuugcucuuuaaaaaaaucc

SEQ ID NO: 35132 - RNA, 24 nt, Human
uucacauuuuaauguuucaguagc

SEQ ID NO: 35133 - RNA, 24 nt, Human
ucccuaauagaguuaagaagcuua

SEQ ID NO: 35134 - RNA, 24 nt, Human
uggguccugggcagauacagccuu

SEQ ID NO: 35135 - RNA, 24 nt, Human
ucauuuuuaaggucgggaguuaga

SEQ ID NO: 35136 - RNA, 24 nt, Human
ucuguaucuucucugguuuccugu

SEQ ID NO: 35137 - RNA, 24 nt, Human
uuaauacugugccuuugauaaguu

SEQ ID NO: 35138 - RNA, 24 nt, Human
agccuggugacaagaaucggacug

SEQ ID NO: 35139 - RNA, 17 nt, Human
ugacacagauggugucc

SEQ ID NO: 35140 - RNA, 24 nt, Human
ugcuaugagaaucuaaggcugcca

SEQ ID NO: 35141 - RNA, 24 nt, Human
ugggaucaaacgugggugauggua

SEQ ID NO: 35142 - RNA, 24 nt, Human
uaauauuaguuacccuuguuuuaa

SEQ ID NO: 35143 - RNA, 24 nt, Human
aggaaaacaguguuuuagaugaga

SEQ ID NO: 35144 - RNA, 19 nt, Human
ggagaagggggugggugcu

SEQ ID NO: 35145 - RNA, 24 nt, Human
uggggagggaagaggaggagaggg

SEQ ID NO: 35146 - RNA, 24 nt, Human
uccccguguugccuauuagcccuu

SEQ ID NO: 35147 - RNA, 24 nt, Human
uucguuguugcacaaaaucagcca

SEQ ID NO: 35148 - RNA, 24 nt, Human
guggaucccguggagccacauggc

SEQ ID NO: 35149 - RNA, 24 nt, Human
uacccaaggcccuuucaauuucua

SEQ ID NO: 35150 - RNA, 24 nt, Human
uuuaauuuucuucggugcuccuuc

SEQ ID NO: 35151 - RNA, 24 nt, Human
aggaaggaagucccaccaguguuu

SEQ ID NO: 35152 - RNA, 24 nt, Human
cccacauacuucccauucaucuca

SEQ ID NO: 35153 - RNA, 24 nt, Human
ucgcugggguccuugaagcugacg

SEQ ID NO: 35154 - RNA, 24 nt, Human
uacagguaagguccccaggagagc

SEQ ID NO: 35155 - RNA, 24 nt, Human
ugggaagugaugagucauuuugca

SEQ ID NO: 35156 - RNA, 24 nt, Human
acccaauugacuuuaguauuuuua

SEQ ID NO: 35157 - RNA, 24 nt, Human
ccucacuugagccugggaggcgga

SEQ ID NO: 35158 - RNA, 24 nt, Human
aaagugcugggauuacaggcauga

SEQ ID NO: 35159 - RNA, 24 nt, Human
uuuuuaguagagaugggguuucac

SEQ ID NO: 35160 - RNA, 24 nt, Human
acucgaguugauaauucccucuau

SEQ ID NO: 35161 - RNA, 24 nt, Human
gggcugggagagagagauuagauu

SEQ ID NO: 35162 - RNA, 24 nt, Human
ucggaaccacauaauuaaagacca

SEQ ID NO: 35163 - RNA, 24 nt, Human
ugagcgguugacccuccuggcucc

SEQ ID NO: 35164 - RNA, 24 nt, Human
ucagcuccagggugagccugcacc

SEQ ID NO: 35165 - RNA, 24 nt, Human
ucccuuggggggccuaagagcagc

SEQ ID NO: 35166 - RNA, 24 nt, Human
uaccuuagaagcuaaaugugucac

SEQ ID NO: 35167 - RNA, 24 nt, Human
ugaaaucuagucauuaaagagucu

SEQ ID NO: 35168 - RNA, 24 nt, Human
uaagucauugugucuaugaugcca

SEQ ID NO: 35169 - RNA, 23 nt, Human
ugaagucauaaacaguaaacaau

SEQ ID NO: 35170 - RNA, 20 nt, Human
cacuguguggccggcagggu

SEQ ID NO: 35171 - RNA, 24 nt, Human
ugaaccuaagagcagguccucgag

SEQ ID NO: 35172 - RNA, 24 nt, Human
uccaagauucuggagcaaucugac

SEQ ID NO: 35173 - RNA, 24 nt, Human
cuuggccuuggcucuggccuuggc

SEQ ID NO: 35174 - RNA, 24 nt, Human
gagcuugcggcugacacccuuugg

SEQ ID NO: 35175 - RNA, 24 nt, Human
uucaauuggcaaauguuuuucaau

SEQ ID NO: 35176 - RNA, 23 nt, Human
aggucuuucacggggauuggcug

SEQ ID NO: 35177 - RNA, 24 nt, Human
ucucauuguugcugaaugccccuc

SEQ ID NO: 35178 - RNA, 24 nt, Human
cacucggcaagccaggguuccagc

SEQ ID NO: 35179 - RNA, 24 nt, Human
ugaaaaaauaugaugacgacauuu

SEQ ID NO: 35180 - RNA, 19 nt, Human
gggcaaggaauccagcagc

SEQ ID NO: 35181 - RNA, 23 nt, Human
ugagcagucuguggcucaacugg

SEQ ID NO: 35182 - RNA, 24 nt, Human
uguauaguuucuguuauguaauac

SEQ ID NO: 35183 - RNA, 24 nt, Human
ugaaaacgaauuucuucuaaacau

SEQ ID NO: 35184 - RNA, 24 nt, Human
ccaggcuguggacuggaacuggac

SEQ ID NO: 35185 - RNA, 24 nt, Human
ccuugagucucggcuucgguccca

SEQ ID NO: 35186 - RNA, 24 nt, Human
uccaagcaaggugggcuggcuaac

SEQ ID NO: 35187 - RNA, 24 nt, Human
ccugaaauucuuaaaggaugggag

SEQ ID NO: 35188 - RNA, 24 nt, Human
ucgauguugcauguuauuuuuauc

SEQ ID NO: 35189 - RNA, 24 nt, Human
ccagagccgccuccaggaguagaa

SEQ ID NO: 35190 - RNA, 24 nt, Human
ucucuggccgccaccuccaggacc

SEQ ID NO: 35191 - RNA, 24 nt, Human
ugaauuguguuucagucacucugc

SEQ ID NO: 35192 - RNA, 24 nt, Human
caagaacaagccucucucgucuuc

SEQ ID NO: 35193 - RNA, 19 nt, Human
uaucugagcuccugcugcc

SEQ ID NO: 35194 - RNA, 24 nt, Human
ucacugcaagcuccggcuugguaa

SEQ ID NO: 35195 - RNA, 24 nt, Human
aaacguaucugguuuggguccuaa

SEQ ID NO: 35196 - RNA, 24 nt, Human
ucaguauuucuuugaaauucuaca

SEQ ID NO: 35197 - RNA, 24 nt, Human
agagggcaaggaaggagagaacag

SEQ ID NO: 35198 - RNA, 24 nt, Human
ugacuuauucccaucagcaccaaa

SEQ ID NO: 35199 - RNA, 24 nt, Human
ucuuuaggaucucucuugcacugu

SEQ ID NO: 35200 - RNA, 24 nt, Human
uauggcaagucacuugauacauua

SEQ ID NO: 35201 - RNA, 24 nt, Human
ugagaauggcaaaauuagucgccu

SEQ ID NO: 35202 - RNA, 24 nt, Human
uacaccacucccaagaagaauaag

SEQ ID NO: 35203 - RNA, 24 nt, Human
augguggcccuugcaaccuuaaga

SEQ ID NO: 35204 - RNA, 24 nt, Human
caaacagauguggcaccacuuggg

SEQ ID NO: 35205 - RNA, 23 nt, Human
uuagagcgaaaccuauaaucacu

SEQ ID NO: 35206 - RNA, 23 nt, Human
uggugaguguaaaugagugaggc

SEQ ID NO: 35207 - RNA, 24 nt, Human
ugaguagguggccugcaguaaugu

SEQ ID NO: 35208 - RNA, 24 nt, Human
ucccggaggacaagcggucucugc

SEQ ID NO: 35209 - RNA, 24 nt, Human
aggcauggcgcggggugacuuggc

SEQ ID NO: 35210 - RNA, 24 nt, Human
accagucuguacaaaccuuacagc

SEQ ID NO: 35211 - RNA, 24 nt, Human
uauugcaaauacuuaaaauucuua

SEQ ID NO: 35212 - RNA, 24 nt, Human
uaaaugguguugacaccaacuucu

SEQ ID NO: 35213 - RNA, 24 nt, Human
uguuaacguuauuggaaugcugcu

SEQ ID NO: 35214 - RNA, 24 nt, Human
aauguuauuuuauuagaucuaacu

SEQ ID NO: 35215 - RNA, 20 nt, Human
gauaacgucucagagcaugc

SEQ ID NO: 35216 - RNA, 24 nt, Human
ugguauggacugguacugccccaa

SEQ ID NO: 35217 - RNA, 24 nt, Human
cugcucccuggccagcccccuugu

SEQ ID NO: 35218 - RNA, 24 nt, Human
uuugacuguguccucacccaaauc

SEQ ID NO: 35219 - RNA, 24 nt, Human
ugaguuaagacuuucggagacugu

SEQ ID NO: 35220 - RNA, 24 nt, Human
ugagugcguggauccacaauucau

SEQ ID NO: 35221 - RNA, 24 nt, Human
uauaagauuuuagcaauacuucca

SEQ ID NO: 35222 - RNA, 24 nt, Human
uggaaugcaggacccucugugaca

SEQ ID NO: 35223 - RNA, 24 nt, Human
ugagaggcagaggcaggcuccugg

SEQ ID NO: 35224 - RNA, 24 nt, Human
ugcauggagggucuugucugcugu

SEQ ID NO: 35225 - RNA, 24 nt, Human
caagacaagcacaaaagcaccacc

SEQ ID NO: 35226 - RNA, 24 nt, Human
augcggcggcgaacggugucaaau

SEQ ID NO: 35227 - RNA, 24 nt, Human
ccucugagaacauuggaccaugca

SEQ ID NO: 35228 - RNA, 24 nt, Human
ucccaauguugacguuggccaggg

SEQ ID NO: 35229 - RNA, 24 nt, Human
gcgcagcugugcgggcugaggcgg

SEQ ID NO: 35230 - RNA, 24 nt, Human
acggauccugccagcuguuugugu

SEQ ID NO: 35231 - RNA, 21 nt, Human
uacguaguuagaaaaaggagg

SEQ ID NO: 35232 - RNA, 23 nt, Human
ugagaagugccaucauuuuaugc

SEQ ID NO: 35233 - RNA, 24 nt, Human
ugagaggcagaggcaggcuccugg

SEQ ID NO: 35234 - RNA, 24 nt, Human
uggaaugcaggacccucugugaca

SEQ ID NO: 35235 - RNA, 24 nt, Human
uaauuuuuguauuuuuaguagaga

SEQ ID NO: 35236 - RNA, 24 nt, Human
ugggauuacaggagcaugccacca

SEQ ID NO: 35237 - RNA, 19 nt, Human
uagcauugaaggacucgug

SEQ ID NO: 35238 - RNA, 24 nt, Human
uaacagcauacugaucacuacuuc

SEQ ID NO: 35239 - RNA, 24 nt, Human
uagcauugaaggacucggggauau

SEQ ID NO: 35240 - RNA, 24 nt, Human
augguccaauaucaaagggaauga

SEQ ID NO: 35241 - RNA, 24 nt, Human
uucaagcuccuggggaaauguugc

SEQ ID NO: 35242 - RNA, 24 nt, Human
gcagcagauucuaguagcugauuu

SEQ ID NO: 35243 - RNA, 24 nt, Human
uggccagaaguaaaagcacagcug

SEQ ID NO: 35244 - RNA, 24 nt, Human
ugucagagggaagucaaaguggag

SEQ ID NO: 35245 - RNA, 24 nt, Human
agacuauaucuguagaaacuuuau

SEQ ID NO: 35246 - RNA, 24 nt, Human
uugauugcguggcccaugugaugc

SEQ ID NO: 35247 - RNA, 24 nt, Human
uguauauauuuaacacacacaucu

SEQ ID NO: 35248 - RNA, 24 nt, Human
ucauucauuacauucuugaguuuu

SEQ ID NO: 35249 - RNA, 24 nt, Human
aguuuggauucugaaaacuaacug

SEQ ID NO: 35250 - RNA, 24 nt, Human
cagauccaagagauauauuuggca

SEQ ID NO: 35251 - RNA, 24 nt, Human
uccagcauccagcagaugagaagu

SEQ ID NO: 35252 - RNA, 24 nt, Human
uuuuacgaauuuucucagagguua

SEQ ID NO: 35253 - RNA, 24 nt, Human
uuucuggggcuugcgcgcaaaauc

SEQ ID NO: 35254 - RNA, 24 nt, Human
cgggcagaaggaggcugagaaagu

SEQ ID NO: 35255 - RNA, 24 nt, Human
acagugcugcaggcugagcugaca

SEQ ID NO: 35256 - RNA, 24 nt, Human
uccaucaucuuggggucuucuucu

SEQ ID NO: 35257 - RNA, 24 nt, Human
uauuaaggagcucauuaauuuugg

SEQ ID NO: 35258 - RNA, 24 nt, Human
acugguucaccuacaaugagacaa

SEQ ID NO: 35259 - RNA, 24 nt, Human
uaauuuccaucgugcaagaaugua

SEQ ID NO: 35260 - RNA, 24 nt, Human
agagaauaaucucuuuugacuucg

SEQ ID NO: 35261 - RNA, 24 nt, Human
uucaagugauuuuucuaccucugc

SEQ ID NO: 35262 - RNA, 24 nt, Human
ugugcugugcguagugccuacugc

SEQ ID NO: 35263 - RNA, 22 nt, Human
cgccgggacagcagacugccgg

SEQ ID NO: 35264 - RNA, 24 nt, Human
cagccuggacuuaccaccacuaaa

SEQ ID NO: 35265 - RNA, 24 nt, Human
ggcccggagcggagcgcgcccugc

SEQ ID NO: 35266 - RNA, 24 nt, Human
uaaauuauuauaccuaagaaaagg

SEQ ID NO: 35267 - RNA, 22 nt, Human
uuguuuguaacuucaauuuuug

SEQ ID NO: 35268 - RNA, 24 nt, Human
uauggcaguaauagucauuccuau

SEQ ID NO: 35269 - RNA, 24 nt, Human
uauuucauaaaaauacaaaaauau

SEQ ID NO: 35270 - RNA, 24 nt, Human
uuacuuggaauuuccucuguuaua

SEQ ID NO: 35271 - RNA, 22 nt, Human
uccacgaggcaaacgggucauc

SEQ ID NO: 35272 - RNA, 24 nt, Human
gaucauuugaggucaggcguuuga

SEQ ID NO: 35273 - RNA, 24 nt, Human
cauuacaugaaauuuuaagucuuu

SEQ ID NO: 35274 - RNA, 24 nt, Human
uaacugguuggaaaaacugugauc

SEQ ID NO: 35275 - RNA, 24 nt, Human
uuggaaggcugaggcugagaauca

SEQ ID NO: 35276 - RNA, 24 nt, Human
ucuccaguguaccuagggaacccu

SEQ ID NO: 35277 - RNA, 24 nt, Human
caucauuuaauuucuggggggggc

SEQ ID NO: 35278 - RNA, 22 nt, Human
ugucagaguucgauagaaauga

SEQ ID NO: 35279 - RNA, 24 nt, Human
uaccccagagccuagcaggccgac

SEQ ID NO: 35280 - RNA, 24 nt, Human
ccaggacuuacuucuuugacaugg

SEQ ID NO: 35281 - RNA, 24 nt, Human
ucacuuguuauuuauuaaguuuaa

SEQ ID NO: 35282 - RNA, 24 nt, Human
ucucugauuuguccaaagcuggaa

SEQ ID NO: 35283 - RNA, 24 nt, Human
ugggauuacaggcgugagacaccg

SEQ ID NO: 35284 - RNA, 24 nt, Human
uggccuagucagugccucgaggag

SEQ ID NO: 35285 - RNA, 22 nt, Human
ugugcaguggaguuguuaaguu

SEQ ID NO: 35286 - RNA, 18 nt, Human
ugaguagagauaaucaug

SEQ ID NO: 35287 - RNA, 20 nt, Human
ucaguccgugagauccugcc

SEQ ID NO: 35288 - RNA, 24 nt, Human
uucuugaucacuguggcuggggac

SEQ ID NO: 35289 - RNA, 24 nt, Human
aagcugcuucacgaaggcagauga

SEQ ID NO: 35290 - RNA, 24 nt, Human
uccccgaagacuuggccagguugg

SEQ ID NO: 35291 - RNA, 24 nt, Human
caaggggaucgagggcuggcgggg

SEQ ID NO: 35292 - RNA, 24 nt, Human
uggauugggggauagaggaacggu

SEQ ID NO: 35293 - RNA, 24 nt, Human
cagcugguuaauuuuucuccaaua

SEQ ID NO: 35294 - RNA, 21 nt, Human
uuuuaaggacuugagauaacu

SEQ ID NO: 35295 - RNA, 24 nt, Human
uggagugcaguggcaugaucucgg

SEQ ID NO: 35296 - RNA, 24 nt, Human
aggcagcucacgcgguugucgugg

SEQ ID NO: 35297 - RNA, 24 nt, Human
uugcaguugaagucgucguagcca

SEQ ID NO: 35298 - RNA, 24 nt, Human
ugaaagcuggcggggccugcuggg

SEQ ID NO: 35299 - RNA, 24 nt, Human
uuuacauuuacaaauuauaucaua

SEQ ID NO: 35300 - RNA, 24 nt, Human
uugaagcuugaaaauuuuauuuaa

SEQ ID NO: 35301 - RNA, 24 nt, Human
uuagaguagccuagcaguuuucaa

SEQ ID NO: 35302 - RNA, 24 nt, Human
cagcggcagagagccauccucuau

SEQ ID NO: 35303 - RNA, 24 nt, Human
auugauggucagccaggugccuuc

SEQ ID NO: 35304 - RNA, 24 nt, Human
gcugcagcauauuguacuggccug

SEQ ID NO: 35305 - RNA, 24 nt, Human
auguagccaucuacagauaccaga

SEQ ID NO: 35306 - RNA, 24 nt, Human
uucaagcacagagauacaaaucuu

SEQ ID NO: 35307 - RNA, 24 nt, Human
uaacauacaaagcuauaauuaaga

SEQ ID NO: 35308 - RNA, 24 nt, Human
uacagaagaaaucaauacaauaga

SEQ ID NO: 35309 - RNA, 18 nt, Human
ugagugucaguguuucuu

SEQ ID NO: 35310 - RNA, 24 nt, Human
ucuucaguuauuccacagcuaucu

SEQ ID NO: 35311 - RNA, 24 nt, Human
uauagagcugugccuuaaauauuu

SEQ ID NO: 35312 - RNA, 24 nt, Human
uaaguccugggggaaaaugaaaaa

SEQ ID NO: 35313 - RNA, 24 nt, Human
aagaagacugcacucacugcauuu

SEQ ID NO: 35314 - RNA, 24 nt, Human
uaaauaaauugcuuaaaaguguuc

SEQ ID NO: 35315 - RNA, 17 nt, Human
cagcccaauuaucuagc

SEQ ID NO: 35316 - RNA, 24 nt, Human
uucaucagugacacaaggauuuau

SEQ ID NO: 35317 - RNA, 24 nt, Human
uauguacauaguguuuucaauguu

SEQ ID NO: 35318 - RNA, 24 nt, Human
ccuuuuauacaaugcucaugaauc

SEQ ID NO: 35319 - RNA, 24 nt, Human
cuggccccacgcuuaccaaccuug

SEQ ID NO: 35320 - RNA, 24 nt, Human
ugacguuaguuauuauacugccgu

SEQ ID NO: 35321 - RNA, 24 nt, Human
caagggccuggcuccucuuccugu

SEQ ID NO: 35322 - RNA, 24 nt, Human
agcagcucuuuuuucccuucuucu

SEQ ID NO: 35323 - RNA, 24 nt, Human
uugaagccaauuguuuuccaaaua

SEQ ID NO: 35324 - RNA, 24 nt, Human
uggaagaugcucaacaccuccucc

SEQ ID NO: 35325 - RNA, 24 nt, Human
ugaccaggaaauacaacgagcugc

SEQ ID NO: 35326 - RNA, 17 nt, Human
ucugacagugaaucuga

SEQ ID NO: 35327 - RNA, 24 nt, Human
ugagcaaagaacugaagaagcaag

SEQ ID NO: 35328 - RNA, 24 nt, Human
agacaggguacgaccaucuuccag

SEQ ID NO: 35329 - RNA, 24 nt, Human
uauggagcaaagaaacuggugucc

SEQ ID NO: 35330 - RNA, 24 nt, Human
ugaucucguuggacugcguggcua

SEQ ID NO: 35331 - RNA, 24 nt, Human
caggugguugcuuugaacuuuauu

SEQ ID NO: 35332 - RNA, 20 nt, Human
cccacugugggaucugaggc

SEQ ID NO: 35333 - RNA, 24 nt, Human
uaacucccaacuugaaggcaguua

SEQ ID NO: 35334 - RNA, 21 nt, Human
uggcggaggcagagagucuuc

SEQ ID NO: 35335 - RNA, 24 nt, Human
uagaugcaggugagcucggugaca

SEQ ID NO: 35336 - RNA, 24 nt, Human
ucaagaauaccaaagcccauguca

SEQ ID NO: 35337 - RNA, 24 nt, Human
ugaguggggcuggggcaugguagu

SEQ ID NO: 35338 - RNA, 24 nt, Human
ugggauccugcagcucuagucucc

SEQ ID NO: 35339 - RNA, 24 nt, Human
ucaggcucagauagcugcuggccg

SEQ ID NO: 35340 - RNA, 24 nt, Human
agggggugggaggugugcauaaga

SEQ ID NO: 35341 - RNA, 24 nt, Human
uauuuuauugcaggaggugggggu

SEQ ID NO: 35342 - RNA, 24 nt, Human
ugggaugaucucaagggcaccuuu

SEQ ID NO: 35343 - RNA, 24 nt, Human
gaccguuuugggcaauccauuuuc

SEQ ID NO: 35344 - RNA, 24 nt, Human
gaggagaaacccugggaaggcucc

SEQ ID NO: 35345 - RNA, 24 nt, Human
uuccugaggggcuucuuaacuuuu

SEQ ID NO: 35346 - RNA, 17 nt, Human
ucuaguguccccccagc

SEQ ID NO: 35347 - RNA, 24 nt, Human
uuuccagaucuacgcugugccuug

SEQ ID NO: 35348 - RNA, 24 nt, Human
ugaguaaaucaaacuauauaauuu

SEQ ID NO: 35349 - RNA, 23 nt, Human
ucauuugggaaauguaaaugugc

SEQ ID NO: 35350 - RNA, 24 nt, Human
cuguguuuuuagcaucuuugggag

SEQ ID NO: 35351 - RNA, 24 nt, Human
gggaaggaaaggggccugagcugg

SEQ ID NO: 35352 - RNA, 24 nt, Human
uggccuggggcugcucccugcccg

SEQ ID NO: 35353 - RNA, 24 nt, Human
ccggagcacauuccugagcgcuga

SEQ ID NO: 35354 - RNA, 20 nt, Human
aaaguacuugccgcucuacc

SEQ ID NO: 35355 - RNA, 24 nt, Human
uucgcacaguaguauacagccgug

SEQ ID NO: 35356 - RNA, 24 nt, Human
ucuaaaacuacgaauacuaccuga

SEQ ID NO: 35357 - RNA, 24 nt, Human
gcgcagcuucaggggccgcaaggg

SEQ ID NO: 35358 - RNA, 20 nt, Human
ugagagaacacuccacgaug

SEQ ID NO: 35359 - RNA, 24 nt, Human
ccugaccccugggcuggccuggga

SEQ ID NO: 35360 - RNA, 24 nt, Human
aaagcaaaugaggcagaaaggccc

SEQ ID NO: 35361 - RNA, 20 nt, Human
uaagaaaauugggucagagg

SEQ ID NO: 35362 - RNA, 24 nt, Human
ugaacaccaguacuaggacuggau

SEQ ID NO: 35363 - RNA, 24 nt, Human
uccaaguaguugggacuacaggca

SEQ ID NO: 35364 - RNA, 24 nt, Human
auagcuuacuguagccucgaccuc

SEQ ID NO: 35365 - RNA, 24 nt, Human
uggcaugugcuuaugacccucgug

SEQ ID NO: 35366 - RNA, 24 nt, Human
cacccuaugucgucacuggcagcg

SEQ ID NO: 35367 - RNA, 24 nt, Human
uuugaacacugaaaccauuguugg

SEQ ID NO: 35368 - RNA, 24 nt, Human
uauacaguacaagcagaucauucu

SEQ ID NO: 35369 - RNA, 24 nt, Human
uuuguccgcuaucaguucacaccg

SEQ ID NO: 35370 - RNA, 24 nt, Human
uggccacccacugagccgcugcua

SEQ ID NO: 35371 - RNA, 24 nt, Human
aacauuauucccacugccagauag

SEQ ID NO: 35372 - RNA, 24 nt, Human
ugccuggacauugaugcuaacaug

SEQ ID NO: 35373 - RNA, 24 nt, Human
uuccugagcagguagccugggggg

SEQ ID NO: 35374 - RNA, 24 nt, Human
uaagcagcuuccuaucuuuuaaau

SEQ ID NO: 35375 - RNA, 17 nt, Human
uguguaggaagugcugg

SEQ ID NO: 35376 - RNA, 19 nt, Human
ugguauguuuguacgucuc

SEQ ID NO: 35377 - RNA, 24 nt, Human
ugugcauacuguagaaugguagua

SEQ ID NO: 35378 - RNA, 22 nt, Human
uaccucaggucauagacaucau

SEQ ID NO: 35379 - RNA, 24 nt, Human
aagucguagaaauuuauuuggaau

SEQ ID NO: 35380 - RNA, 24 nt, Human
aagcaacagcagguauuuuuguac

SEQ ID NO: 35381 - RNA, 24 nt, Human
ucggugaggugaguugccugcggc

SEQ ID NO: 35382 - RNA, 24 nt, Human
uagucuuaggaguaauacgcguuc

SEQ ID NO: 35383 - RNA, 24 nt, Human
ucccccagucagccuggcccugcu

SEQ ID NO: 35384 - RNA, 24 nt, Human
uguaauacccuuccugacacuggu

SEQ ID NO: 35385 - RNA, 24 nt, Human
ugagaugggaaagggcuccuucaa

SEQ ID NO: 35386 - RNA, 24 nt, Human
ccuugggucaagggauggcaaguc

SEQ ID NO: 35387 - RNA, 24 nt, Human
ucacuggaugguccuguaggcgag

SEQ ID NO: 35388 - RNA, 24 nt, Human
aagcacucacuuccugguuuccag

SEQ ID NO: 35389 - RNA, 24 nt, Human
uggcugggccaugccaugcaccuc

SEQ ID NO: 35390 - RNA, 24 nt, Human
uccuucucucuggugucuucaggc

SEQ ID NO: 35391 - RNA, 20 nt, Human
ugagagaacacuccacgaug

SEQ ID NO: 35392 - RNA, 24 nt, Human
aaugguaccauccugggagcccac

SEQ ID NO: 35393 - RNA, 24 nt, Human
uguguaaacaauagaauggaauga

SEQ ID NO: 35394 - RNA, 22 nt, Human
uccgugcgcguugcugcggccg

SEQ ID NO: 35395 - RNA, 24 nt, Human
uugaucuugaagaaacugggcgug

SEQ ID NO: 35396 - RNA, 24 nt, Human
aggaaggagauauagugaagagga

SEQ ID NO: 35397 - RNA, 24 nt, Human
guagaguuuucuucaggcuuaaag

SEQ ID NO: 35398 - RNA, 24 nt, Human
aagcgccugcgcaaggccaagaag

SEQ ID NO: 35399 - RNA, 24 nt, Human
uauaauaauuaacaacagcaaaga

SEQ ID NO: 35400 - RNA, 24 nt, Human
uggugcaguguaacgaugcacuuu

SEQ ID NO: 35401 - RNA, 24 nt, Human
uaaucugacuucucacuuccuaag

SEQ ID NO: 35402 - RNA, 24 nt, Human
aagcagauguggugauacugagau

SEQ ID NO: 35403 - RNA, 24 nt, Human
ugggaaggagcuggcugagucuug

SEQ ID NO: 35404 - RNA, 24 nt, Human
uagcaguacccucagguagucucc

SEQ ID NO: 35405 - RNA, 24 nt, Human
cagcacuuugggaggccaaggcgg

SEQ ID NO: 35406 - RNA, 24 nt, Human
uuucuuguguuuccgggaacguuc

SEQ ID NO: 35407 - RNA, 23 nt, Human
uacagcauauucuguucaaguau

SEQ ID NO: 35408 - RNA, 24 nt, Human
uggaagaagauugucuuugggcau

SEQ ID NO: 35409 - RNA, 24 nt, Human
ugacguucucagaauaguggcuag

SEQ ID NO: 35410 - RNA, 24 nt, Human
ugaggagaauggucggaaaagaga

SEQ ID NO: 35411 - RNA, 24 nt, Human
uuauacguaagaauaugcaguauu

SEQ ID NO: 35412 - RNA, 24 nt, Human
uacccaauagugaucucuucugcu

SEQ ID NO: 35413 - RNA, 24 nt, Human
uccaucaauuccaucguuuacguu

SEQ ID NO: 35414 - RNA, 24 nt, Human
ugaagggugcuugguuuuuucaaa

SEQ ID NO: 35415 - RNA, 24 nt, Human
ugagagaauguaagaacauauaga

SEQ ID NO: 35416 - RNA, 24 nt, Human
uacauucuccucuuuuccgugagu

SEQ ID NO: 35417 - RNA, 24 nt, Human
ccagaucgaggugaaucccuucag

SEQ ID NO: 35418 - RNA, 24 nt, Human
gugccgcccgcuuaggcagguucc

SEQ ID NO: 35419 - RNA, 24 nt, Human
uggcauacuaccucucaacauuga

SEQ ID NO: 35420 - RNA, 24 nt, Human
uuuuacucagugguggaguagacu

SEQ ID NO: 35421 - RNA, 24 nt, Human
cauagcaaaugaaucuaaaaaguu

SEQ ID NO: 35422 - RNA, 19 nt, Human
uagcuggaugcaguggaac

SEQ ID NO: 35423 - RNA, 24 nt, Human
uaugaggcccuagagcuccgggac

SEQ ID NO: 35424 - RNA, 24 nt, Human
ccccuguagcagcacaucgcugac

SEQ ID NO: 35425 - RNA, 24 nt, Human
ugagcagguccaccggccccuaca

SEQ ID NO: 35426 - RNA, 24 nt, Human
ccaggccaaaaaggcucaacauuu

SEQ ID NO: 35427 - RNA, 24 nt, Human
ucuggcacaggaaauggucuccaa

SEQ ID NO: 35428 - RNA, 24 nt, Human
ugugguggucuuggacaguaugug

SEQ ID NO: 35429 - RNA, 24 nt, Human
aucauggaaguuucauuuguugcg

SEQ ID NO: 35430 - RNA, 24 nt, Human
ugugcauggcagcuguuuuccuuu

SEQ ID NO: 35431 - RNA, 24 nt, Human
aggaauaauugcaucuaggggcug

SEQ ID NO: 35432 - RNA, 24 nt, Human
gggaagcagaaaaaccaagugcug

SEQ ID NO: 35433 - RNA, 24 nt, Human
uggaucacuugaggucaggaguuu

SEQ ID NO: 35434 - RNA, 24 nt, Human
uuagaagacauguuugaugcuuag

SEQ ID NO: 35435 - RNA, 24 nt, Human
ugaauaggcacagagggcaccugu

SEQ ID NO: 35436 - RNA, 24 nt, Human
auacugcgcgacaacaauuaacgc

SEQ ID NO: 35437 - RNA, 24 nt, Human
ugccugaaaaucgacaaacagaug

SEQ ID NO: 35438 - RNA, 24 nt, Human
uggaguauucugacugcgguugcu

SEQ ID NO: 35439 - RNA, 24 nt, Human
ucuaaagcuugucuuguagguucg

SEQ ID NO: 35440 - RNA, 24 nt, Human
auggugccaaaagacugguuuccc

SEQ ID NO: 35441 - RNA, 24 nt, Human
ucaugguuuuugaacguucgaacg

SEQ ID NO: 35442 - RNA, 24 nt, Human
uuacagaaguuauaaaaaaccaga

SEQ ID NO: 35443 - RNA, 24 nt, Human
ugacuucacggaggcgguacagcu

SEQ ID NO: 35444 - RNA, 24 nt, Human
cuagccucaagagggggaaguggc

SEQ ID NO: 35445 - RNA, 24 nt, Human
ugagaaguaggugagggcaugcaa

SEQ ID NO: 35446 - RNA, 24 nt, Human
uuggaacacauguuuacgaagaag

SEQ ID NO: 35447 - RNA, 24 nt, Human
uagcagagacugguggcauuuugc

SEQ ID NO: 35448 - RNA, 24 nt, Human
uagcaguaugagaaugaacuaaca

SEQ ID NO: 35449 - RNA, 24 nt, Human
uaaaugauacagaaauacguuuau

SEQ ID NO: 35450 - RNA, 24 nt, Human
uuaucaguauuuucucaauuuuag

SEQ ID NO: 35451 - RNA, 24 nt, Human
uugcagugagcugagaccaggcug

SEQ ID NO: 35452 - RNA, 24 nt, Human
ccccccuucccccuuuuuuguccc

SEQ ID NO: 35453 - RNA, 24 nt, Human
ucaggugccugggucugggucuca

SEQ ID NO: 35454 - RNA, 18 nt, Human
uagaagguauucuguucc

SEQ ID NO: 35455 - RNA, 24 nt, Human
uuuauuggguguuuacucugcccc

SEQ ID NO: 35456 - RNA, 24 nt, Human
ugacauaaagacugaaagaagccu

SEQ ID NO: 35457 - RNA, 24 nt, Human
guccuuguggccuuccuugaggag

SEQ ID NO: 35458 - RNA, 24 nt, Human
aacacugucaucuucuuauucacg

SEQ ID NO: 35459 - RNA, 24 nt, Human
uaggaugguuccugggcugauuga

SEQ ID NO: 35460 - RNA, 24 nt, Human
uccaugcaauuuucagaugaaaaa

SEQ ID NO: 35461 - RNA, 24 nt, Human
uagcuuguaauguccauuuaaauu

SEQ ID NO: 35462 - RNA, 18 nt, Human
uaucaaggaagggcaggc

SEQ ID NO: 35463 - RNA, 24 nt, Human
uaagaguguugaaaaaaaaauuca

SEQ ID NO: 35464 - RNA, 24 nt, Human
uucaaauuucuuucuuuuuuaauu

SEQ ID NO: 35465 - RNA, 24 nt, Human
gcuaaauuugcuagagaugugcug

SEQ ID NO: 35466 - RNA, 24 nt, Human
ucacugcaaccuccgccucccggg

SEQ ID NO: 35467 - RNA, 24 nt, Human
ugaaaaauuaaauugagauccagg

SEQ ID NO: 35468 - RNA, 24 nt, Human
uaugccaaugcaaccgugacuacu

SEQ ID NO: 35469 - RNA, 24 nt, Human
ugacaugcacagaaguggagagga

SEQ ID NO: 35470 - RNA, 24 nt, Human
cuggacuagcugggauuacaggug

SEQ ID NO: 35471 - RNA, 24 nt, Human
uagcaauaccuugugugcugacug

SEQ ID NO: 35472 - RNA, 19 nt, Human
ucaguggaauaccugcaga

SEQ ID NO: 35473 - RNA, 24 nt, Human
ugggaggccauggccuucgccagc

SEQ ID NO: 35474 - RNA, 24 nt, Human
ggccagggccucggggccgcuugu

SEQ ID NO: 35475 - RNA, 24 nt, Human
ccggucccgaaccucugaccuuau

SEQ ID NO: 35476 - RNA, 24 nt, Human
acacuggucugauuauuucuggaa

SEQ ID NO: 35477 - RNA, 22 nt, Human
ugucuugguuggcuugucagau

SEQ ID NO: 35478 - RNA, 17 nt, Human
ucccuuggacauugccc

SEQ ID NO: 35479 - RNA, 24 nt, Human
uagcguccgcuaggcugucugccu

SEQ ID NO: 35480 - RNA, 24 nt, Human
uacgccucuucauucccguccaug

SEQ ID NO: 35481 - RNA, 24 nt, Human
uugguacuugagucaaagacgaca

SEQ ID NO: 35482 - RNA, 24 nt, Human
aggaguugccaucagggauaacac

SEQ ID NO: 35483 - RNA, 24 nt, Human
agcggguggcccucucuggaacag

SEQ ID NO: 35484 - RNA, 24 nt, Human
aaggagccccaaagagaagggacg

SEQ ID NO: 35485 - RNA, 22 nt, Human
uuucagggcccugccuuuccca

SEQ ID NO: 35486 - RNA, 24 nt, Human
uggcugcgggaguccucauagaug

SEQ ID NO: 35487 - RNA, 23 nt, Human
ugccauggaggguaugaagugac

SEQ ID NO: 35488 - RNA, 24 nt, Human
caagccccagaaagacggcugggg

SEQ ID NO: 35489 - RNA, 24 nt, Human
cacugggcccgcccuggguaggca

SEQ ID NO: 35490 - RNA, 24 nt, Human
gggcagagggggcgugcggccucu

SEQ ID NO: 35491 - RNA, 24 nt, Human
ccuucuguugcuauuuugagaguc

SEQ ID NO: 35492 - RNA, 24 nt, Human
uguuuauuuaucaagguuuacaug

SEQ ID NO: 35493 - RNA, 24 nt, Human
ugaaaugguguaacccuauaaagc

SEQ ID NO: 35494 - RNA, 24 nt, Human
ugaggacaaggcagacgugcaguc

SEQ ID NO: 35495 - RNA, 24 nt, Human
ugccaugugcucccugaccugaag

SEQ ID NO: 35496 - RNA, 24 nt, Human
ugacuuaauauuuuggaguugaga

SEQ ID NO: 35497 - RNA, 24 nt, Human
uccauauuaaccacagacuguccu

SEQ ID NO: 35498 - RNA, 24 nt, Human
uaaaaaguugugggcaaagauggc

SEQ ID NO: 35499 - RNA, 24 nt, Human
aagaaaccuuuagaaggacuuaga

SEQ ID NO: 35500 - RNA, 24 nt, Human
uaucuuaauguagauuauaauuug

SEQ ID NO: 35501 - RNA, 24 nt, Human
uaguaugugccuacugugauuuuu

SEQ ID NO: 35502 - RNA, 24 nt, Human
uagaaaauuauggacauuuuuggu

SEQ ID NO: 35503 - RNA, 24 nt, Human
uaaaucaaacaugauugauuuaaa

SEQ ID NO: 35504 - RNA, 23 nt, Human
uaaggcgaggcggaauuaaaccc

SEQ ID NO: 35505 - RNA, 24 nt, Human
uagcaaaucgagucuuaaauaauc

SEQ ID NO: 35506 - RNA, 24 nt, Human
aguccuuuugugaacuuuuaaagg

SEQ ID NO: 35507 - RNA, 24 nt, Human
uauuacaccagaguugcuucguau

SEQ ID NO: 35508 - RNA, 24 nt, Human
gaucauacagucugccauggagaa

SEQ ID NO: 35509 - RNA, 24 nt, Human
ugucaagaguuauuuacauaugua

SEQ ID NO: 35510 - RNA, 24 nt, Human
ugugcagaagaaauggaaggauuc

SEQ ID NO: 35511 - RNA, 24 nt, Human
uaucaaggaagggcaggcgugaug

SEQ ID NO: 35512 - RNA, 24 nt, Human
uucaaauuucuuucuuuuuuaauu

SEQ ID NO: 35513 - RNA, 24 nt, Human
uaaauuauccuauuuuuuauucug

SEQ ID NO: 35514 - RNA, 24 nt, Human
uauccagagguaaagcccauugug

SEQ ID NO: 35515 - RNA, 24 nt, Human
cagcgugggcucccuuccaagcuu

SEQ ID NO: 35516 - RNA, 24 nt, Human
uaucaaggaagggcaggcgugaug

SEQ ID NO: 35517 - RNA, 24 nt, Human
uaacagguguaagaguguugaaaa

SEQ ID NO: 35518 - RNA, 24 nt, Human
ugcauuguuaucauuaaccagucu

SEQ ID NO: 35519 - RNA, 24 nt, Human
uguuaguuauuuuaggagacaguc

SEQ ID NO: 35520 - RNA, 24 nt, Human
uaccuguuuauagcggccggacag

SEQ ID NO: 35521 - RNA, 24 nt, Human
uucaucaauuggcaauuaagaugu

SEQ ID NO: 35522 - RNA, 24 nt, Human
acgacaguugguggcuugguggga

SEQ ID NO: 35523 - RNA, 24 nt, Human
uaucaaggaagggcaggcgugaug

SEQ ID NO: 35524 - RNA, 24 nt, Human
uauggcaagucacuuugacagaca

SEQ ID NO: 35525 - RNA, 24 nt, Human
ugagaauggcaaaauuagucgccu

SEQ ID NO: 35526 - RNA, 24 nt, Human
auguaacuugacgaguuaguaggg

SEQ ID NO: 35527 - RNA, 24 nt, Human
ucccucaugagugaccuuggugcc

SEQ ID NO: 35528 - RNA, 24 nt, Human
agucauugcugugggaguuuuccu

SEQ ID NO: 35529 - RNA, 23 nt, Human
ucgcuuugucauguuggccaggu

SEQ ID NO: 35530 - RNA, 24 nt, Human
ugggcccugccgcugacuggcugu

SEQ ID NO: 35531 - RNA, 24 nt, Human
uaaguaugaucaauaaauuuuaau

SEQ ID NO: 35532 - RNA, 24 nt, Human
aagcagcggcgccgcacacucaaa

SEQ ID NO: 35533 - RNA, 24 nt, Human
gcgccuggagcucgacgcgcugcg

SEQ ID NO: 35534 - RNA, 21 nt, Human
gucaauauccauaaaugaagg

SEQ ID NO: 35535 - RNA, 23 nt, Human
ugaaaggcuguccaccuugguug

SEQ ID NO: 35536 - RNA, 24 nt, Human
uuaguccugacuagacagcaaaag

SEQ ID NO: 35537 - RNA, 24 nt, Human
caccacagccauugcugaggccug

SEQ ID NO: 35538 - RNA, 24 nt, Human
acucugcacggcuacucggaccuc

SEQ ID NO: 35539 - RNA, 24 nt, Human
ggaccgggggcugggcuggccgca

SEQ ID NO: 35540 - RNA, 24 nt, Human
uacgugcugcccaucggcgacgcg

SEQ ID NO: 35541 - RNA, 24 nt, Human
ucauggacuaaacuaggucagagu

SEQ ID NO: 35542 - RNA, 24 nt, Human
ucaguaccuggccagagggguccu

SEQ ID NO: 35543 - RNA, 24 nt, Human
uaacuggggaaaacuaugaugcuu

SEQ ID NO: 35544 - RNA, 24 nt, Human
uugguaggggagcuuuuucuuuuc

SEQ ID NO: 35545 - RNA, 24 nt, Human
agaaggcccuggagaaguugcucc

SEQ ID NO: 35546 - RNA, 24 nt, Human
gggacugacauuccugaaccccug

SEQ ID NO: 35547 - RNA, 24 nt, Human
ucuuucgccaggcuggggacccgc

SEQ ID NO: 35548 - RNA, 24 nt, Human
aguuguguucuuugaugccuguga

SEQ ID NO: 35549 - RNA, 19 nt, Human
ugcggcaaccaaaucggcg

SEQ ID NO: 35550 - RNA, 24 nt, Human
uucggucagaguggugcugggaac

SEQ ID NO: 35551 - RNA, 24 nt, Human
ccucuggaggcugaagagggauuc

SEQ ID NO: 35552 - RNA, 24 nt, Human
ucuccaggcccaagucgugcucuc

SEQ ID NO: 35553 - RNA, 24 nt, Human
ccacugcucuccgggccucuccug

SEQ ID NO: 35554 - RNA, 24 nt, Human
ugcccaaagggagugacugucuuc

SEQ ID NO: 35555 - RNA, 22 nt, Human
uagcauucugguccuggcugca

SEQ ID NO: 35556 - RNA, 24 nt, Human
uacuguggcuaugagagcauuuaa

SEQ ID NO: 35557 - RNA, 24 nt, Human
caguacgugccccgcgccgugcuc

SEQ ID NO: 35558 - RNA, 24 nt, Human
aggcaggcuuagcagcuaagggag

SEQ ID NO: 35559 - RNA, 24 nt, Human
aagcauuuaauugaauuucucaau

SEQ ID NO: 35560 - RNA, 24 nt, Human
ugacaucgugguaggcuucaagca

SEQ ID NO: 35561 - RNA, 17 nt, Human
ccuggcuguuggguagg

SEQ ID NO: 35562 - RNA, 24 nt, Human
cagggcacgggugaggcacaagcg

SEQ ID NO: 35563 - RNA, 24 nt, Human
ugguuugugacuucugugauuuaa

SEQ ID NO: 35564 - RNA, 24 nt, Human
uuggaucaaauguuguccccgagu

SEQ ID NO: 35565 - RNA, 24 nt, Human
uccaagaacuaguucaccccagcu

SEQ ID NO: 35566 - RNA, 24 nt, Human
uguggcacaugucgucucuugcuu

SEQ ID NO: 35567 - RNA, 24 nt, Human
cuuuccuuuucauauguggcuggu

SEQ ID NO: 35568 - RNA, 24 nt, Human
gagcugcgggucgcggccggcgcc

SEQ ID NO: 35569 - RNA, 24 nt, Human
ggaggaagccgguuucuccuuucu

SEQ ID NO: 35570 - RNA, 24 nt, Human
gcucuuugcccacccgcgucaggc

SEQ ID NO: 35571 - RNA, 24 nt, Human
aguccuuuuuuauuuuuuuucccu

SEQ ID NO: 35572 - RNA, 24 nt, Human
ucuaaauuuuuaaaccuucuauca

SEQ ID NO: 35573 - RNA, 24 nt, Human
uuaaaguucauuuagaaacaucug

SEQ ID NO: 35574 - RNA, 24 nt, Human
aggcagcucacgcgguugucgugg

SEQ ID NO: 35575 - RNA, 24 nt, Human
uugcaguugaagucgucguagcca

SEQ ID NO: 35576 - RNA, 24 nt, Human
uucaucuaggggcagcgcacgguc

SEQ ID NO: 35577 - RNA, 24 nt, Human
gcaguucaggguggauucugugcu

SEQ ID NO: 35578 - RNA, 24 nt, Human
ucggaagccccccaucaaggugac

SEQ ID NO: 35579 - RNA, 22 nt, Human
aacaugcuuaugaugcauagga

SEQ ID NO: 35580 - RNA, 24 nt, Human
uaauuuacaaccaguuaagaauua

SEQ ID NO: 35581 - RNA, 24 nt, Human
ugguguggaggaagcaugauauuu

SEQ ID NO: 35582 - RNA, 24 nt, Human
aaaugcuuauuuccugaaguuccu

SEQ ID NO: 35583 - RNA, 24 nt, Human
uggcuggguggaacugagucuuuu

SEQ ID NO: 35584 - RNA, 20 nt, Human
ugagagaacacuccacgaug

SEQ ID NO: 35585 - RNA, 24 nt, Human
aaagcaaaugaggcagaaaggccc

SEQ ID NO: 35586 - RNA, 24 nt, Human
uccuugugauccacccaccuuggc

SEQ ID NO: 35587 - RNA, 24 nt, Human
uaucauuauaugucgagguugagu

SEQ ID NO: 35588 - RNA, 24 nt, Human
ucguauucuucgcuguuuccagaa

SEQ ID NO: 35589 - RNA, 24 nt, Human
uuuacaacaacuaagggaguguau

SEQ ID NO: 35590 - RNA, 24 nt, Human
guugcagaguguacaugaaacugu

SEQ ID NO: 35591 - RNA, 24 nt, Human
ugaaagguugagaaaggaaugguu

SEQ ID NO: 35592 - RNA, 24 nt, Human
gguuauuaagauacaggcugcugu

SEQ ID NO: 35593 - RNA, 24 nt, Human
uaguggacuucugugagauuguag

SEQ ID NO: 35594 - RNA, 24 nt, Human
ucgagaauuucucacaaugggugg

SEQ ID NO: 35595 - RNA, 21 nt, Human
ugcuaagcaaaggaccuguga

SEQ ID NO: 35596 - RNA, 24 nt, Human
uuuugcacagguacgugauccgac

SEQ ID NO: 35597 - RNA, 20 nt, Human
aagcucacaaacaauaggac

SEQ ID NO: 35598 - RNA, 24 nt, Human
aagaguuuaaaagacuugaaugga

SEQ ID NO: 35599 - RNA, 24 nt, Human
aaggugcuugugggccacaccaag

SEQ ID NO: 35600 - RNA, 24 nt, Human
uugcugcagucuggggcaugugag

SEQ ID NO: 35601 - RNA, 21 nt, Human
cagcaggguggacaaauaagc

SEQ ID NO: 35602 - RNA, 24 nt, Human
aagcauuuugagaacagguuggca

SEQ ID NO: 35603 - RNA, 24 nt, Human
acccaauuaaguuuuuuauauacu

SEQ ID NO: 35604 - RNA, 24 nt, Human
uagucugcugugaguuuuuauugg

SEQ ID NO: 35605 - RNA, 24 nt, Human
cuuggcuccccuuucuuccuucug

SEQ ID NO: 35606 - RNA, 24 nt, Human
aggaggccaccgaagcucggggac

SEQ ID NO: 35607 - RNA, 24 nt, Human
ugaaaguaggcugcacagcuaaau

SEQ ID NO: 35608 - RNA, 24 nt, Human
uacaauccugagaaccuggccacc

SEQ ID NO: 35609 - RNA, 24 nt, Human
ugugcagaagaaauggaaggauuc

SEQ ID NO: 35610 - RNA, 24 nt, Human
uaucaaggaagggcaggcgugaug

SEQ ID NO: 35611 - RNA, 24 nt, Human
uucaaauuucuuucuuuuuuaauu

SEQ ID NO: 35612 - RNA, 24 nt, Human
aggcacaguggcucacgccuguaa

SEQ ID NO: 35613 - RNA, 17 nt, Human
cacaggguuuagucucu

SEQ ID NO: 35614 - RNA, 24 nt, Human
uggcuuccauuugcuucaaauuug

SEQ ID NO: 35615 - RNA, 22 nt, Human
uaaacucucaaauuccccucgu

SEQ ID NO: 35616 - RNA, 24 nt, Human
ucugugguccagaagaaauuauuu

SEQ ID NO: 35617 - RNA, 24 nt, Human
uacgguagugaugaaauuauaagu

SEQ ID NO: 35618 - RNA, 23 nt, Human
ugugucauaugaguccucaagcu

SEQ ID NO: 35619 - RNA, 18 nt, Human
ugagaaugauuuaguagg

SEQ ID NO: 35620 - RNA, 24 nt, Human
uuugaacuggaagacuucuaaguu

SEQ ID NO: 35621 - RNA, 24 nt, Human
gugaagcaggauguauguggccuu

SEQ ID NO: 35622 - RNA, 24 nt, Human
uacgugagcguauaaucccaagau

SEQ ID NO: 35623 - RNA, 22 nt, Human
ucgcgguggccucuccaggguc

SEQ ID NO: 35624 - RNA, 24 nt, Human
ucuggccgacuccaggucccaaca

SEQ ID NO: 35625 - RNA, 24 nt, Human
uagcauugaaggacucggggauau

SEQ ID NO: 35626 - RNA, 24 nt, Human
uagcauugaaggacucggggauau

SEQ ID NO: 35627 - RNA, 24 nt, Human
uguauuggcucauuuauuugcaaa

SEQ ID NO: 35628 - RNA, 24 nt, Human
accacuguuggagguggggccugg

SEQ ID NO: 35629 - RNA, 24 nt, Human
uaaaauggccagagguuggggggc

SEQ ID NO: 35630 - RNA, 24 nt, Human
ggccugggcacccuuagaggggag

SEQ ID NO: 35631 - RNA, 24 nt, Human
agcuacugggugagcuggacuacc

SEQ ID NO: 35632 - RNA, 20 nt, Human
uacgcuggggcccaugcaga

SEQ ID NO: 35633 - RNA, 17 nt, Human
ugccaggaagcucuuug

SEQ ID NO: 35634 - RNA, 24 nt, Human
ugucauaggcaucgacgaggggca

SEQ ID NO: 35635 - RNA, 24 nt, Human
acaaggguucuaaaaacuuggaca

SEQ ID NO: 35636 - RNA, 18 nt, Human
ugaaaaagaaaaggaagg

SEQ ID NO: 35637 - RNA, 24 nt, Human
ugaggcaggagacuggcaugaacc

SEQ ID NO: 35638 - RNA, 22 nt, Human
uaacuuggugaaaccccggcuc

SEQ ID NO: 35639 - RNA, 24 nt, Human
cauggcacugagcagcuucuuuua

SEQ ID NO: 35640 - RNA, 24 nt, Human
uaugcuuucauucuggguggaaua

SEQ ID NO: 35641 - RNA, 24 nt, Human
ccagaacacagucacgaggauaau

SEQ ID NO: 35642 - RNA, 24 nt, Human
cacaaguugcagugugcuguuggc

SEQ ID NO: 35643 - RNA, 24 nt, Human
uggccuggcugaaggagcaucugu

SEQ ID NO: 35644 - RNA, 24 nt, Human
gggcagggaccuggacccccuuua

SEQ ID NO: 35645 - RNA, 24 nt, Human
gacccagcucucccccugcagcca

SEQ ID NO: 35646 - RNA, 24 nt, Human
ucacuggagccugcugggaacgug

SEQ ID NO: 35647 - RNA, 24 nt, Human
agaggagagugcuuggggcuugaa

SEQ ID NO: 35648 - RNA, 21 nt, Human
cuaaaguagcgugcuaggggc

SEQ ID NO: 35649 - RNA, 24 nt, Human
aggcaucgggcagccacuuucacu

SEQ ID NO: 35650 - RNA, 24 nt, Human
ucacuucuuugcagagccuuuuac

SEQ ID NO: 35651 - RNA, 24 nt, Human
ggcuaagugggacauuaguaacug

SEQ ID NO: 35652 - RNA, 24 nt, Human
uggcauggcucccuuuguccuucc

SEQ ID NO: 35653 - RNA, 24 nt, Human
agggagccuucaagcgagccuggc

SEQ ID NO: 35654 - RNA, 24 nt, Human
uaagguccugauccugaggaaguc

SEQ ID NO: 35655 - RNA, 24 nt, Human
ugagaugggugaccucugaaggag

SEQ ID NO: 35656 - RNA, 24 nt, Human
ccuuucuuucuguuuugagucgga

SEQ ID NO: 35657 - RNA, 24 nt, Human
uaagccauuuuaaggaguuucaug

SEQ ID NO: 35658 - RNA, 24 nt, Human
ugaaauacuaccuaguuacuucuu

SEQ ID NO: 35659 - RNA, 24 nt, Human
guuccaagcuacuucuuucuuugc

SEQ ID NO: 35660 - RNA, 24 nt, Human
aaaaggaaaauaaggggggugggg

SEQ ID NO: 35661 - RNA, 21 nt, Human
uuacuugaacacuugaguggc

SEQ ID NO: 35662 - RNA, 24 nt, Human
acccccuuguagggauggaccacg

SEQ ID NO: 35663 - RNA, 24 nt, Human
uaaauggaaucauccaauaugugg

SEQ ID NO: 35664 - RNA, 24 nt, Human
auggauggguaccauguuccuuug

SEQ ID NO: 35665 - RNA, 24 nt, Human
uggaagaugcucaacaccuccucc

SEQ ID NO: 35666 - RNA, 24 nt, Human
ugaccaggaaauacaacgagcugc

SEQ ID NO: 35667 - RNA, 24 nt, Human
uggaagaugcucaacaccuccucc

SEQ ID NO: 35668 - RNA, 24 nt, Human
ugaccaggaaauacaacgagcugc

SEQ ID NO: 35669 - RNA, 24 nt, Human
ugaggaccagugcacugaguacau

SEQ ID NO: 35670 - RNA, 24 nt, Human
aggcagcggcuguggcagcccggc

SEQ ID NO: 35671 - RNA, 24 nt, Human
gcgcagcuucaggggccgcaaggg

SEQ ID NO: 35672 - RNA, 19 nt, Human
ucugaccggcuucaagcuc

SEQ ID NO: 35673 - RNA, 24 nt, Human
uauugcauagugacuaccauuuca

SEQ ID NO: 35674 - RNA, 24 nt, Human
uaaagugaagauaauauuccuuaa

SEQ ID NO: 35675 - RNA, 24 nt, Human
uccuugggaaaagggguagcaaag

SEQ ID NO: 35676 - RNA, 24 nt, Human
ugugucggcucugcuacuucaaga

SEQ ID NO: 35677 - RNA, 24 nt, Human
gaccguaauuguggcugcacugga

SEQ ID NO: 35678 - RNA, 24 nt, Human
ugucauaggcaucgacgaggggca

SEQ ID NO: 35679 - RNA, 24 nt, Human
ccuuauggggggccgaauaacauu

SEQ ID NO: 35680 - RNA, 24 nt, Human
uagaacucaguuccaguacuguaa

SEQ ID NO: 35681 - RNA, 24 nt, Human
cuaggagacaaaaauguugauccc

SEQ ID NO: 35682 - RNA, 24 nt, Human
ucugcaaugaaaucauguugacug

SEQ ID NO: 35683 - RNA, 24 nt, Human
ucacuuaggggucaggaguucaag

SEQ ID NO: 35684 - RNA, 24 nt, Human
uugaaucugggaggcggagguugc

SEQ ID NO: 35685 - RNA, 24 nt, Human
ucaugcccgguaauccccagcacu

SEQ ID NO: 35686 - RNA, 24 nt, Human
ggaucugucuagcuuuuggccacu

SEQ ID NO: 35687 - RNA, 24 nt, Human
uuaucugcuguuccgacuugguuu

SEQ ID NO: 35688 - RNA, 24 nt, Human
uggguggaaaacauuggcucuucc

SEQ ID NO: 35689 - RNA, 24 nt, Human
uggcuugcaaccuggagaccucug

SEQ ID NO: 35690 - RNA, 24 nt, Human
ucucaggguccauaauuuguguag

SEQ ID NO: 35691 - RNA, 24 nt, Human
auggcagcuauucuuuggguaaac

SEQ ID NO: 35692 - RNA, 24 nt, Human
cguaagcagugguuauaaagagcu

SEQ ID NO: 35693 - RNA, 24 nt, Human
uacugaauuugaaacugaccuuuu

SEQ ID NO: 35694 - RNA, 24 nt, Human
cauggcuucuguuuccuuggggcc

SEQ ID NO: 35695 - RNA, 24 nt, Human
ugaggaacuaacugauuaguuguu

SEQ ID NO: 35696 - RNA, 24 nt, Human
gcccuucggaagccccggcgccag

SEQ ID NO: 35697 - RNA, 24 nt, Human
uaccgaugggaaguccuuauuauu

SEQ ID NO: 35698 - RNA, 24 nt, Human
cuccuggguuaguggccgcucaca

SEQ ID NO: 35699 - RNA, 24 nt, Human
uauuuuguugcugaucaaauacug

SEQ ID NO: 35700 - RNA, 24 nt, Human
uuguuuuguuuuuaaauaagaaua

SEQ ID NO: 35701 - RNA, 24 nt, Human
uguggucggguguuugcuggugcc

SEQ ID NO: 35702 - RNA, 23 nt, Human
cuugcauauuggagagugcaugu

SEQ ID NO: 35703 - RNA, 24 nt, Human
uaugccauauucauaaauuuaaaa

SEQ ID NO: 35704 - RNA, 24 nt, Human
uaggguauuucuccuugauaaaug

SEQ ID NO: 35705 - RNA, 21 nt, Human
uaccagugccacucugacagg

SEQ ID NO: 35706 - RNA, 24 nt, Human
ccaggacacuucugaguacaucau

SEQ ID NO: 35707 - RNA, 20 nt, Human
ccgcgccgccuuugugcugc

SEQ ID NO: 35708 - RNA, 24 nt, Human
agggagcuugagaaucagaucugu

SEQ ID NO: 35709 - RNA, 24 nt, Human
uagcaugcccagcccacagagagc

SEQ ID NO: 35710 - RNA, 24 nt, Human
ccacagagcagggggcaaaguucu

SEQ ID NO: 35711 - RNA, 24 nt, Human
uugagagcuguauuuagguaaaug

SEQ ID NO: 35712 - RNA, 24 nt, Human
ucacugcaaccucugccucccggg

SEQ ID NO: 35713 - RNA, 19 nt, Human
ccagucuacuagaaggggg

SEQ ID NO: 35714 - RNA, 23 nt, Human
uagggaccaaacucaaagguuuc

SEQ ID NO: 35715 - RNA, 24 nt, Human
aacacuugauacuagucugaugau

SEQ ID NO: 35716 - RNA, 24 nt, Human
uccuuuuuauucaaaugaaucaga

SEQ ID NO: 35717 - RNA, 24 nt, Human
aauugggccaaucagaaugguuau

SEQ ID NO: 35718 - RNA, 24 nt, Human
gagcaggaccggggcugaguaaau

SEQ ID NO: 35719 - RNA, 24 nt, Human
ucccggggcgucuucgugcagugg

SEQ ID NO: 35720 - RNA, 24 nt, Human
aggaaucagagaucauugauuucu

SEQ ID NO: 35721 - RNA, 24 nt, Human
uaagugcuccaaggagguggccac

SEQ ID NO: 35722 - RNA, 24 nt, Human
uuuuccuccugguccuccaaaaug

SEQ ID NO: 35723 - RNA, 24 nt, Human
uccacaggccuuggccagcggggg

SEQ ID NO: 35724 - RNA, 24 nt, Human
uaggaccucgccaucucccuuaau

SEQ ID NO: 35725 - RNA, 19 nt, Human
uuugcauaaaacaugcauu

SEQ ID NO: 35726 - RNA, 24 nt, Human
ugaguuaacugaucgguacuauug

SEQ ID NO: 35727 - RNA, 24 nt, Human
ucacugugcugcgugguggugugg

SEQ ID NO: 35728 - RNA, 24 nt, Human
ugugaaagaggcccacagguacuu

SEQ ID NO: 35729 - RNA, 24 nt, Human
gaauguacccgauguccacuaaca

SEQ ID NO: 35730 - RNA, 24 nt, Human
ggagguugcagugagcugagaugg

SEQ ID NO: 35731 - RNA, 24 nt, Human
ugccagaagacacucagcgaccug

SEQ ID NO: 35732 - RNA, 24 nt, Human
ucagagacaucuauuuuucugggc

SEQ ID NO: 35733 - RNA, 24 nt, Human
ucgccggccguucccguucccggc

SEQ ID NO: 35734 - RNA, 24 nt, Human
ccccuuuucccaguauuacugaau

SEQ ID NO: 35735 - RNA, 24 nt, Human
cccacacuaaaccugggacuacac

SEQ ID NO: 35736 - RNA, 24 nt, Human
uggcuugggacaagcuggucaggu

SEQ ID NO: 35737 - RNA, 24 nt, Human
ugagaauggcaaaauuagucgccu

SEQ ID NO: 35738 - RNA, 24 nt, Human
uacaccacucccaagaagaauaag

SEQ ID NO: 35739 - RNA, 24 nt, Human
ccucgagaggggggaucucaucag

SEQ ID NO: 35740 - RNA, 22 nt, Human
cauuaguggggaggaggguggg

SEQ ID NO: 35741 - RNA, 24 nt, Human
gauuacaaauaaggccucucauuu

SEQ ID NO: 35742 - RNA, 24 nt, Human
uaaaugcauuuuauuuuuagacaa

SEQ ID NO: 35743 - RNA, 24 nt, Human
caggacccgucgccaugggccgug

SEQ ID NO: 35744 - RNA, 24 nt, Human
uugaaggcuggccgggcguaccac

SEQ ID NO: 35745 - RNA, 24 nt, Human
uccagugcuuugagaagccgacgu

SEQ ID NO: 35746 - RNA, 24 nt, Human
accacauuuaaaauugcuuagaau

SEQ ID NO: 35747 - RNA, 24 nt, Human
aggcugcagucucccaaguagcug

SEQ ID NO: 35748 - RNA, 24 nt, Human
uaaaaugacugggugaagccgaac

SEQ ID NO: 35749 - RNA, 24 nt, Human
ccagggccauggcgaacccgaagc

SEQ ID NO: 35750 - RNA, 24 nt, Human
uagcucaaccuggugcuggacgag

SEQ ID NO: 35751 - RNA, 24 nt, Human
uaggagaacguaggguagucaagc

SEQ ID NO: 35752 - RNA, 24 nt, Human
ugaucuggcuggcuaggcgggugu

SEQ ID NO: 35753 - RNA, 24 nt, Human
ccucgagaggggggaucucaucag

SEQ ID NO: 35754 - RNA, 18 nt, Human
ugaagaaaauaaaauaaa

SEQ ID NO: 35755 - RNA, 24 nt, Human
uugcugcucaaacgaacccccaau

SEQ ID NO: 35756 - RNA, 24 nt, Human
ggccggagaagugcgccugggugc

SEQ ID NO: 35757 - RNA, 19 nt, Human
cccgccccccggccggggc

SEQ ID NO: 35758 - RNA, 23 nt, Human
uaacggguggauugccaccuggg

SEQ ID NO: 35759 - RNA, 18 nt, Human
ccagcggcagacucccag

SEQ ID NO: 35760 - RNA, 22 nt, Human
uucacggauggcaagucaccgu

SEQ ID NO: 35761 - RNA, 24 nt, Human
ucugaucuauaaaugcgguggcau

SEQ ID NO: 35762 - RNA, 24 nt, Human
ugagcgcgcagcugcgcgaggccg

SEQ ID NO: 35763 - RNA, 24 nt, Human
aaccaugcuggagaccagagcaac

SEQ ID NO: 35764 - RNA, 24 nt, Human
uauuagaagaaugaacuaacgugu

SEQ ID NO: 35765 - RNA, 24 nt, Human
uugcauggcccaccggggucgaag

SEQ ID NO: 35766 - RNA, 24 nt, Human
caccccaaucucugcccugccugc

SEQ ID NO: 35767 - RNA, 24 nt, Human
caugcccccuuuggcuugggggcc

SEQ ID NO: 35768 - RNA, 24 nt, Human
aaguggcagcaggacauacggcaa

SEQ ID NO: 35769 - RNA, 24 nt, Human
caccaaaagacauagagauucuua

SEQ ID NO: 35770 - RNA, 24 nt, Human
agcuaugacacaguggugcaaaca

SEQ ID NO: 35771 - RNA, 24 nt, Human
cacagcuuccuaauccuuaucuca

SEQ ID NO: 35772 - RNA, 24 nt, Human
uauggcaagucacuuugacagaca

SEQ ID NO: 35773 - RNA, 24 nt, Human
ugagaauggcaaaauuagucgccu

SEQ ID NO: 35774 - RNA, 24 nt, Human
uacaccacucccaagaagaauaag

SEQ ID NO: 35775 - RNA, 24 nt, Human
aacacguucuucugaaagguagcu

SEQ ID NO: 35776 - RNA, 24 nt, Human
uguaacaauacauuccaggccuuu

SEQ ID NO: 35777 - RNA, 24 nt, Human
cauuaccauucguuaugaaauaac

SEQ ID NO: 35778 - RNA, 17 nt, Human
cacacugucaaauuugc

SEQ ID NO: 35779 - RNA, 24 nt, Human
uaucgugaacagaaggcgccuggu

SEQ ID NO: 35780 - RNA, 24 nt, Human
aaggagcagcgccucugcugcugc

SEQ ID NO: 35781 - RNA, 24 nt, Human
aagcagcccaggacacuguugaau

SEQ ID NO: 35782 - RNA, 24 nt, Human
ugaggugugugaccacuuuacaga

SEQ ID NO: 35783 - RNA, 24 nt, Human
uauuacugcacaaaucuggaagga

SEQ ID NO: 35784 - RNA, 24 nt, Human
uaucagacuaaguaauuucccuuu

SEQ ID NO: 35785 - RNA, 24 nt, Human
uuucauaguuaaguaucauguuug

SEQ ID NO: 35786 - RNA, 24 nt, Human
aacccagaagaaacgagggagccc

SEQ ID NO: 35787 - RNA, 24 nt, Human
cagcgggcuggccugggguccccc

SEQ ID NO: 35788 - RNA, 24 nt, Human
ucaguaaauguauaaaaacacuuu

SEQ ID NO: 35789 - RNA, 24 nt, Human
ugaggaggaauucgcuuccagccu

SEQ ID NO: 35790 - RNA, 24 nt, Human
uagaaaaaagaaaaaaauccuggu

SEQ ID NO: 35791 - RNA, 24 nt, Human
ucgcccaggcuggagugcaguguc

SEQ ID NO: 35792 - RNA, 24 nt, Human
uaaguaauuauuuucacuugguug

SEQ ID NO: 35793 - RNA, 24 nt, Human
ccaaagugcugggauuacaggcgu

SEQ ID NO: 35794 - RNA, 24 nt, Human
cagaagccuguggacaggcccgug

SEQ ID NO: 35795 - RNA, 23 nt, Human
uuuucagaagggagccuguugac

SEQ ID NO: 35796 - RNA, 24 nt, Human
uuaguauuauuuauuugacaacuc

SEQ ID NO: 35797 - RNA, 24 nt, Human
uuuagaggcagacaacagcagggu

SEQ ID NO: 35798 - RNA, 24 nt, Human
cuucaggggcugcugcgccucucu

SEQ ID NO: 35799 - RNA, 24 nt, Human
ggacuuggaaggcuggugugacgu

SEQ ID NO: 35800 - RNA, 24 nt, Human
aagcacaggucauagacccugagg

SEQ ID NO: 35801 - RNA, 24 nt, Human
ugaguucaagauuuggcaaugucu

SEQ ID NO: 35802 - RNA, 23 nt, Human
aaggaagauggugaucagacagc

SEQ ID NO: 35803 - RNA, 19 nt, Human
ccccggggcccugguuggg

SEQ ID NO: 35804 - RNA, 24 nt, Human
uccccgaggccuggcuuauggugg

SEQ ID NO: 35805 - RNA, 22 nt, Human
aucucuuuaaugauuauuaaau

SEQ ID NO: 35806 - RNA, 24 nt, Human
agugcagaccucugacccuggagu

SEQ ID NO: 35807 - RNA, 24 nt, Human
ccuugggucgucgccugggccgcc

SEQ ID NO: 35808 - RNA, 24 nt, Human
ugucauguggagcccuguccagag

SEQ ID NO: 35809 - RNA, 24 nt, Human
caggacccgucgccaugggccgug

SEQ ID NO: 35810 - RNA, 24 nt, Human
cucauuguaaccuccaccucuugg

SEQ ID NO: 35811 - RNA, 24 nt, Human
gagaugggguuucaucauauuggu

SEQ ID NO: 35812 - RNA, 24 nt, Human
aucacacuauuugugaacacauua

SEQ ID NO: 35813 - RNA, 24 nt, Human
agaguuguucauccagggagacag

SEQ ID NO: 35814 - RNA, 24 nt, Human
ggccugggcacccuuagaggggag

SEQ ID NO: 35815 - RNA, 24 nt, Human
agcuacugggugagcuggacuacc

SEQ ID NO: 35816 - RNA, 24 nt, Human
uaaugggucucaaaauucugggac

SEQ ID NO: 35817 - RNA, 24 nt, Human
uauuagggauaauauucauuuagc

SEQ ID NO: 35818 - RNA, 19 nt, Human
ucguguggaguauggaagg

SEQ ID NO: 35819 - RNA, 20 nt, Human
aagaagcggauuagugcccc

SEQ ID NO: 35820 - RNA, 24 nt, Human
ugccaaggauguagaauaaauaag

SEQ ID NO: 35821 - RNA, 24 nt, Human
uguccuggaaagccacaaagucga

SEQ ID NO: 35822 - RNA, 22 nt, Human
ugagauuaucaaaagauguguc

SEQ ID NO: 35823 - RNA, 24 nt, Human
ugagaaggagaugagauucaguac

SEQ ID NO: 35824 - RNA, 24 nt, Human
agacauaauggggagagggauggc

SEQ ID NO: 35825 - RNA, 23 nt, Human
uuuguggaggccuucagaccccc

SEQ ID NO: 35826 - RNA, 24 nt, Human
uggaaaccccuccaccucccacuu

SEQ ID NO: 35827 - RNA, 24 nt, Human
ugacguggaggagccgaggcccac

SEQ ID NO: 35828 - RNA, 24 nt, Human
ucagcaccccucggcccgacgcac

SEQ ID NO: 35829 - RNA, 24 nt, Human
uagaggacuccaaaacaaaacggg

SEQ ID NO: 35830 - RNA, 24 nt, Human
aacacuugauacuagucugaugau

SEQ ID NO: 35831 - RNA, 24 nt, Human
gugcugggauaacuggcuaucaca

SEQ ID NO: 35832 - RNA, 24 nt, Human
uccuaagaaugugggaagauuagc

SEQ ID NO: 35833 - RNA, 24 nt, Human
uacugggugaauagcacuuuccuu

SEQ ID NO: 35834 - RNA, 24 nt, Human
uggcuagauguuuuguggaagauc

SEQ ID NO: 35835 - RNA, 24 nt, Human
ucaguuggaagacacccugaaauc

SEQ ID NO: 35836 - RNA, 24 nt, Human
ucgguucgcuggagagaggcgagc

SEQ ID NO: 35837 - RNA, 24 nt, Human
ugggcccagcugcggcgggggcug

SEQ ID NO: 35838 - RNA, 24 nt, Human
auggugccgagugguaacauggga

SEQ ID NO: 35839 - RNA, 24 nt, Human
ugcaaaaccagcguggcggccgcg

SEQ ID NO: 35840 - RNA, 24 nt, Human
acgccaugaaagcugccauggccu

SEQ ID NO: 35841 - RNA, 24 nt, Human
cgugaaggcuaucacagaagaugg

SEQ ID NO: 35842 - RNA, 23 nt, Human
ucugcgaaacucacacagcaaag

SEQ ID NO: 35843 - RNA, 20 nt, Human
uaacauagauggaaacaagu

SEQ ID NO: 35844 - RNA, 20 nt, Human
ucaugggagagaaaacauga

SEQ ID NO: 35845 - RNA, 24 nt, Human
guugcaccaucccugguuucucca

SEQ ID NO: 35846 - RNA, 24 nt, Human
gugaucagguaugcuguuagauau

SEQ ID NO: 35847 - RNA, 20 nt, Human
uaagaugacuauaguagagg

SEQ ID NO: 35848 - RNA, 24 nt, Human
uguugugaggaucaaauggaagga

SEQ ID NO: 35849 - RNA, 24 nt, Human
uuagcauuggaauucugaaggcuu

SEQ ID NO: 35850 - RNA, 24 nt, Human
uuagucagguuugagaaagcuuuu

SEQ ID NO: 35851 - RNA, 21 nt, Human
ugauaugcuguuagguuccug

SEQ ID NO: 35852 - RNA, 24 nt, Human
augaaguacaaauuuuuauaaaau

SEQ ID NO: 35853 - RNA, 24 nt, Human
ugagaauggaagaaauggauuuau

SEQ ID NO: 35854 - RNA, 20 nt, Human
uuaguccuugaaguuuuaag

SEQ ID NO: 35855 - RNA, 24 nt, Human
uaccuuaugggaaccuugcauggg

SEQ ID NO: 35856 - RNA, 24 nt, Human
ucccagaccgacgcuuuguucccc

SEQ ID NO: 35857 - RNA, 24 nt, Human
uaugaugccaacauuacucaaagc

SEQ ID NO: 35858 - RNA, 24 nt, Human
uacuuuagucauauguugauaaaa

SEQ ID NO: 35859 - RNA, 24 nt, Human
uccaggacaagaaccuguguucca

SEQ ID NO: 35860 - RNA, 24 nt, Human
ugccagggaccacaggcacccucg

SEQ ID NO: 35861 - RNA, 24 nt, Human
ucgcaguauggucugcaggucggg

SEQ ID NO: 35862 - RNA, 24 nt, Human
uuaguggcagguuaguugugugua

SEQ ID NO: 35863 - RNA, 24 nt, Human
agggggcaaaggcuacgggucaga

SEQ ID NO: 35864 - RNA, 24 nt, Human
cguuggaggccgccuuuucagaag

SEQ ID NO: 35865 - RNA, 24 nt, Human
uguacaguuucuccuaagaagaag

SEQ ID NO: 35866 - RNA, 22 nt, Human
uucaucuuguagcagcucugcc

SEQ ID NO: 35867 - RNA, 24 nt, Human
ggacaaggggcagacgagagcugu

SEQ ID NO: 35868 - RNA, 24 nt, Human
uuaagaguuguuuuguguccuauc

SEQ ID NO: 35869 - RNA, 24 nt, Human
ucacucaggagcauguuauucaau

SEQ ID NO: 35870 - RNA, 24 nt, Human
acuuagcuucaccuuugccauauc

SEQ ID NO: 35871 - RNA, 24 nt, Human
uagguugugucacuauuauuguuc

SEQ ID NO: 35872 - RNA, 24 nt, Human
uccaccaacaaccccucccaggcu

SEQ ID NO: 35873 - RNA, 17 nt, Human
uguccuggaugcugggc

SEQ ID NO: 35874 - RNA, 24 nt, Human
uagaauacauugauacaaaguaca

SEQ ID NO: 35875 - RNA, 24 nt, Human
cauugugugggaauucgcaguguu

SEQ ID NO: 35876 - RNA, 24 nt, Human
agacaggcuggcacagccccaggc

SEQ ID NO: 35877 - RNA, 24 nt, Human
aagcagcaccaauggggaugaccc

SEQ ID NO: 35878 - RNA, 24 nt, Human
uaccuaguaagaguagacuucuuu

SEQ ID NO: 35879 - RNA, 24 nt, Human
cugcagugaccccuccuggccagc

SEQ ID NO: 35880 - RNA, 24 nt, Human
uauaaaccuuggcuuuucauaagc

SEQ ID NO: 35881 - RNA, 24 nt, Human
ccagucuugcaagguuaacuucuc

SEQ ID NO: 35882 - RNA, 24 nt, Human
uacuuuuuucggaguuagggaggg

SEQ ID NO: 35883 - RNA, 24 nt, Human
uucaggcacauccaaagaguuccu

SEQ ID NO: 35884 - RNA, 24 nt, Human
ugcugcguaaucacgguuccucga

SEQ ID NO: 35885 - RNA, 24 nt, Human
gugaagcuuggaguccauacuuug

SEQ ID NO: 35886 - RNA, 24 nt, Human
gcgcgucgaccugcgccaucugcc

SEQ ID NO: 35887 - RNA, 24 nt, Human
acgacauuccccacgucuggccga

SEQ ID NO: 35888 - RNA, 24 nt, Human
cagcaggaagugcuggugaccccg

SEQ ID NO: 35889 - RNA, 24 nt, Human
cggcauggagaucgaugucgcgcu

SEQ ID NO: 35890 - RNA, 24 nt, Human
uuaaaauauauuagcaggucauua

SEQ ID NO: 35891 - RNA, 24 nt, Human
ugaguugguggaaaugugggcguu

SEQ ID NO: 35892 - RNA, 24 nt, Human
agacuggaguuuguuacugcaaac

SEQ ID NO: 35893 - RNA, 24 nt, Human
ugaggcggcauggaucucagcgag

SEQ ID NO: 35894 - RNA, 24 nt, Human
uguuauuguccccugccucgccug

SEQ ID NO: 35895 - RNA, 24 nt, Human
cgccugugcccgcggugugccgca

SEQ ID NO: 35896 - RNA, 24 nt, Human
gcggcggaacuuugcuacaagggg

SEQ ID NO: 35897 - RNA, 24 nt, Human
gaucacagggucuaaggguggcca

SEQ ID NO: 35898 - RNA, 24 nt, Human
aguggccauggcuagagggguaaa

SEQ ID NO: 35899 - RNA, 24 nt, Human
ugugaaagugaaacaagcaugagu

SEQ ID NO: 35900 - RNA, 24 nt, Human
gggcaggagaggcccagggcgugc

SEQ ID NO: 35901 - RNA, 24 nt, Human
uugcaugggaagcuugaguauugc

SEQ ID NO: 35902 - RNA, 24 nt, Human
uaccuucgugagggacuccguagg

SEQ ID NO: 35903 - RNA, 24 nt, Human
ugagaauggcaaaauuagucgccu

SEQ ID NO: 35904 - RNA, 24 nt, Human
uacaccacucccaagaagaauaag

SEQ ID NO: 35905 - RNA, 24 nt, Human
gagcggccgcgaagaggugacacc

SEQ ID NO: 35906 - RNA, 24 nt, Human
uggaaaaauucagaggccuaaagu

SEQ ID NO: 35907 - RNA, 24 nt, Human
uagaauguaaaaagucauuuuaga

SEQ ID NO: 35908 - RNA, 24 nt, Human
uauuuuaucacaggcuuacacuac

SEQ ID NO: 35909 - RNA, 24 nt, Human
aggcagaucacaaggucaggaguu

SEQ ID NO: 35910 - RNA, 24 nt, Human
acccuggucuggucucagaaauca

SEQ ID NO: 35911 - RNA, 24 nt, Human
caggugaagagugagguugucaug

SEQ ID NO: 35912 - RNA, 24 nt, Human
uuuaaguauucagcauuuuccagg

SEQ ID NO: 35913 - RNA, 24 nt, Human
uaugagcaguggaagaauuucgau

SEQ ID NO: 35914 - RNA, 24 nt, Human
cgccaaguuuuucgauuauagcua

SEQ ID NO: 35915 - RNA, 24 nt, Human
ucgaauggacacauuaccagugaa

SEQ ID NO: 35916 - RNA, 24 nt, Human
uccaccaacaaccccucccaggcu

SEQ ID NO: 35917 - RNA, 24 nt, Human
cuacggguggcucccagaacaucc

SEQ ID NO: 35918 - RNA, 24 nt, Human
ucacuguaaccuugaacuccuggg

SEQ ID NO: 35919 - RNA, 24 nt, Human
gcggacccaggccuggggcgagcg

SEQ ID NO: 35920 - RNA, 23 nt, Human
uggaacagggccgugugcgggcc

SEQ ID NO: 35921 - RNA, 24 nt, Human
cuuucaggcccgucucaagagcug

SEQ ID NO: 35922 - RNA, 24 nt, Human
uggaaugcagugauacuaacaugg

SEQ ID NO: 35923 - RNA, 24 nt, Human
cauccugggcucaaccuauccucc

SEQ ID NO: 35924 - RNA, 24 nt, Human
ucuaagucaguuguuucucgggcu

SEQ ID NO: 35925 - RNA, 24 nt, Human
uugguccugacuacuaccauuucg

SEQ ID NO: 35926 - RNA, 24 nt, Human
aaagauuuuuuuuuucuuaagaga

SEQ ID NO: 35927 - RNA, 24 nt, Human
cagcaguaggggcugggcuuccag

SEQ ID NO: 35928 - RNA, 24 nt, Human
uugaagccaguggggcaccaaucc

SEQ ID NO: 35929 - RNA, 19 nt, Human
uaccauggcgagggucaca

SEQ ID NO: 35930 - RNA, 24 nt, Human
gugguugguguaaaugagugaggc

SEQ ID NO: 35931 - RNA, 24 nt, Human
ugaguagguggccugcaguaaugu

SEQ ID NO: 35932 - RNA, 24 nt, Human
uugcaggcugagggagagaaagcu

SEQ ID NO: 35933 - RNA, 24 nt, Human
uggcauuugcagauguucagcccc

SEQ ID NO: 35934 - RNA, 24 nt, Human
ucccugaauuuucccccgggacaa

SEQ ID NO: 35935 - RNA, 24 nt, Human
aagaugccaguggcggugauggcg

SEQ ID NO: 35936 - RNA, 24 nt, Human
uggcagagagauuucccugggauc

SEQ ID NO: 35937 - RNA, 24 nt, Human
guguauggucagcuucuagcuuua

SEQ ID NO: 35938 - RNA, 24 nt, Human
uauuguugauuaaagaaaaucuag

SEQ ID NO: 35939 - RNA, 24 nt, Human
gaaggcacaacaguuaauggcugu

SEQ ID NO: 35940 - RNA, 18 nt, Human
ucaggcagugauaugagc

SEQ ID NO: 35941 - RNA, 24 nt, Human
augaagaucaucaagggcuccagu

SEQ ID NO: 35942 - RNA, 24 nt, Human
acguaggucaacucaguuaccuug

SEQ ID NO: 35943 - RNA, 24 nt, Human
ugagggaucuaaggcaccacuaug

SEQ ID NO: 35944 - RNA, 24 nt, Human
acguaggucaacucaguuaccuug

SEQ ID NO: 35945 - RNA, 24 nt, Human
uaugagggguguugucgucggugg

SEQ ID NO: 35946 - RNA, 24 nt, Human
ugggguaggggagaauauauugag

SEQ ID NO: 35947 - RNA, 24 nt, Human
uuggucaagggaaaacggggguau

SEQ ID NO: 35948 - RNA, 19 nt, Human
ccccagcaguccaagcucu

SEQ ID NO: 35949 - RNA, 24 nt, Human
aaagucacuuucacgaggugguca

SEQ ID NO: 35950 - RNA, 24 nt, Human
uuuguuggaauauauuuuaaaaau

SEQ ID NO: 35951 - RNA, 24 nt, Human
cauucuagcccauuaggcucccag

SEQ ID NO: 35952 - RNA, 24 nt, Human
uuaaagcaaauuaugauucacuca

SEQ ID NO: 35953 - RNA, 24 nt, Human
aggcagcucacgcgguugucgugg

SEQ ID NO: 35954 - RNA, 24 nt, Human
uugcaguugaagucgucguagcca

SEQ ID NO: 35955 - RNA, 24 nt, Human
uaaugggucucaaaauucugugac

SEQ ID NO: 35956 - RNA, 24 nt, Human
uauuagggauaauauucauuuagc

SEQ ID NO: 35957 - RNA, 24 nt, Human
uuaaauggccaauugaaacaaaca

SEQ ID NO: 35958 - RNA, 24 nt, Human
ugcauuguuaucauuaaccagucu

SEQ ID NO: 35959 - RNA, 24 nt, Human
uggcauggacuggcuuaacgacac

SEQ ID NO: 35960 - RNA, 24 nt, Human
uucauccccuaccucaucccaggc

SEQ ID NO: 35961 - RNA, 19 nt, Human
gugguuguccuuguuaucc

SEQ ID NO: 35962 - RNA, 24 nt, Human
uggggaaggguaugagguccuaug

SEQ ID NO: 35963 - RNA, 22 nt, Human
cucgggguucuccggggaaucc

SEQ ID NO: 35964 - RNA, 24 nt, Human
agaucagucgaugaucuaguaggc

SEQ ID NO: 35965 - RNA, 20 nt, Human
gggcuggggagcagaucuuc

SEQ ID NO: 35966 - RNA, 24 nt, Human
agggaucaccucagccaacucugc

SEQ ID NO: 35967 - RNA, 24 nt, Human
aaugguacagcaguuacaagagga

SEQ ID NO: 35968 - RNA, 24 nt, Human
gccuugugauacuguggaacugua

SEQ ID NO: 35969 - RNA, 24 nt, Human
ugagagagggcuaguaacugaaau

SEQ ID NO: 35970 - RNA, 24 nt, Human
ucaggaacagcuucuucuaaggga

SEQ ID NO: 35971 - RNA, 24 nt, Human
aaagaacuguaaaugcaauguaaa

SEQ ID NO: 35972 - RNA, 24 nt, Human
ugagaagaaaauaacagacaauau

SEQ ID NO: 35973 - RNA, 24 nt, Human
uaguuuuugugcugagaacagaua

SEQ ID NO: 35974 - RNA, 24 nt, Human
aggcaucccagucuucggucucca

SEQ ID NO: 35975 - RNA, 24 nt, Human
cguuuguugugaaucguacaggcu

SEQ ID NO: 35976 - RNA, 24 nt, Human
agagcucgggggaauaggggugug

SEQ ID NO: 35977 - RNA, 24 nt, Human
aggcagaugccacaccccaauuuc

SEQ ID NO: 35978 - RNA, 22 nt, Human
uucucauuuguucuccacgccc

SEQ ID NO: 35979 - RNA, 24 nt, Human
gaacugguccuuucacuuugagau

SEQ ID NO: 35980 - RNA, 24 nt, Human
uaucaagucagcacacaccuuuuc

SEQ ID NO: 35981 - RNA, 24 nt, Human
aucaugaguaucaaauuaaaugua

SEQ ID NO: 35982 - RNA, 24 nt, Human
acuccauugugguccauuuucuaa

SEQ ID NO: 35983 - RNA, 24 nt, Human
aagcagaggcuucucuccccaaga

SEQ ID NO: 35984 - RNA, 24 nt, Human
uguuuugugcccaggcuaccuugu

SEQ ID NO: 35985 - RNA, 24 nt, Human
gggcaucguggcgaccgaugcagg

SEQ ID NO: 35986 - RNA, 17 nt, Human
caucacagggugggccu

SEQ ID NO: 35987 - RNA, 23 nt, Human
ucacuuagucccugcgggugccu

SEQ ID NO: 35988 - RNA, 24 nt, Human
uguugaggaacuccccgaagugca

SEQ ID NO: 35989 - RNA, 24 nt, Human
aggggguggugcuuaccggugaac

SEQ ID NO: 35990 - RNA, 24 nt, Human
ugggugcuccaugaagagaugggg

SEQ ID NO: 35991 - RNA, 22 nt, Human
uaagugacuacgacggguuguu

SEQ ID NO: 35992 - RNA, 24 nt, Human
uccacaguuucuccggagggcuau

SEQ ID NO: 35993 - RNA, 24 nt, Human
caccggcagccgcagaggcacccc

SEQ ID NO: 35994 - RNA, 24 nt, Human
ccaggacccagaggacacaugcag

SEQ ID NO: 35995 - RNA, 21 nt, Human
uccaagggauggaaagucacc

SEQ ID NO: 35996 - RNA, 24 nt, Human
caagguguuaacaggccugggaau

SEQ ID NO: 35997 - RNA, 24 nt, Human
uccgucaugaucaacaaggccacg

SEQ ID NO: 35998 - RNA, 24 nt, Human
gcgcgggucaaccuggccacgugc

SEQ ID NO: 35999 - RNA, 24 nt, Human
ugcuuguggggaagcaggcccggg

SEQ ID NO: 36000 - RNA, 24 nt, Human
ugagaucaauaagaaauguucagg

SEQ ID NO: 36001 - RNA, 24 nt, Human
uggaagugcuucacgaggaaugcc

SEQ ID NO: 36002 - RNA, 24 nt, Human
gguuacgccaucuuuaagguucua

SEQ ID NO: 36003 - RNA, 24 nt, Human
uaaagcuaaaacauuugagaaauu

SEQ ID NO: 36004 - RNA, 24 nt, Human
cuugcucauuuauuugaaagaguc

SEQ ID NO: 36005 - RNA, 24 nt, Human
uagccuaguaauuagugguaagca

SEQ ID NO: 36006 - RNA, 24 nt, Human
cggaggucgagagggggcguucuc

SEQ ID NO: 36007 - RNA, 24 nt, Human
uggcauccuccuugccacaggucu

SEQ ID NO: 36008 - RNA, 24 nt, Human
uuuauccgcuuagcauggcccccg

SEQ ID NO: 36009 - RNA, 24 nt, Human
ucacauggggagaaaccuuggaca

SEQ ID NO: 36010 - RNA, 24 nt, Human
ugugcuaacuuuaauugauuccua

SEQ ID NO: 36011 - RNA, 24 nt, Human
ugaggguaaaacgggaaccgagga

SEQ ID NO: 36012 - RNA, 24 nt, Human
augcugcccugggacccaacuggu

SEQ ID NO: 36013 - RNA, 24 nt, Human
uggccugaugauccacagcggaga

SEQ ID NO: 36014 - RNA, 24 nt, Human
ucgcugacuggcauuuucacucgg

SEQ ID NO: 36015 - RNA, 24 nt, Human
caccgguguggcgccuggccgcgu

SEQ ID NO: 36016 - RNA, 24 nt, Human
uugaucuugaagaaacugggcgug

SEQ ID NO: 36017 - RNA, 23 nt, Human
uccgugcgcguugcugcggccgu

SEQ ID NO: 36018 - RNA, 24 nt, Human
ucauugguggugggaccauaauca

SEQ ID NO: 36019 - RNA, 24 nt, Human
aggaaggagauauagugaagagga

SEQ ID NO: 36020 - RNA, 24 nt, Human
ucagugcgggaaccaugcagacug

SEQ ID NO: 36021 - RNA, 24 nt, Human
uaggacacuuaacugcagggcacu

SEQ ID NO: 36022 - RNA, 24 nt, Human
ccucuguuccgaccuuucccgugc

SEQ ID NO: 36023 - RNA, 24 nt, Human
ucucaugucagaugugggccaaac

SEQ ID NO: 36024 - RNA, 24 nt, Human
cgagaagaacacaugguacuccag

SEQ ID NO: 36025 - RNA, 21 nt, Human
uagaaggcaaaugcaauuaua

SEQ ID NO: 36026 - RNA, 24 nt, Human
uuccaugauuuaaucuugccgccc

SEQ ID NO: 36027 - RNA, 24 nt, Human
uacugggucuugagcucuagagag

SEQ ID NO: 36028 - RNA, 24 nt, Human
uuaauacauuugugauuauggaau

SEQ ID NO: 36029 - RNA, 24 nt, Human
aggcugcuuucuugaagaaaacuu

SEQ ID NO: 36030 - RNA, 24 nt, Human
uggcaguagacucugaagcuaagg

SEQ ID NO: 36031 - RNA, 24 nt, Human
ccugccagucgugccucaucgcuu

SEQ ID NO: 36032 - RNA, 24 nt, Human
uggcaauguagagugacugugcug

SEQ ID NO: 36033 - RNA, 23 nt, Human
ugagcccaggagccugaaaccag

SEQ ID NO: 36034 - RNA, 24 nt, Human
uggaaaauuaguuaagggaaacgg

SEQ ID NO: 36035 - RNA, 24 nt, Human
augccuguaaggguuaacacauug

SEQ ID NO: 36036 - RNA, 24 nt, Human
uucagcuagaaaaaaaggagcaua

SEQ ID NO: 36037 - RNA, 24 nt, Human
uguguuuguagacuuggaacccac

SEQ ID NO: 36038 - RNA, 24 nt, Human
cacuacaccauuggcaaggagauc

SEQ ID NO: 36039 - RNA, 24 nt, Human
caccggucuucagggcuucuuggu

SEQ ID NO: 36040 - RNA, 24 nt, Human
uagcuugucggggacgguaaccgg

SEQ ID NO: 36041 - RNA, 24 nt, Human
acccagcaccccagguuuccacag

SEQ ID NO: 36042 - RNA, 24 nt, Human
uguuuauauuucuugguggugaaa

SEQ ID NO: 36043 - RNA, 24 nt, Human
aggcagucauauaggcacagaugc

SEQ ID NO: 36044 - RNA, 24 nt, Human
cguugcucaccgccgugcgccgca

SEQ ID NO: 36045 - RNA, 24 nt, Human
uauuucagauguuccugcaguaua

SEQ ID NO: 36046 - RNA, 24 nt, Human
uacugcuuccauucauuguuuacg

SEQ ID NO: 36047 - RNA, 24 nt, Human
uuacuguacacagaagugugugca

SEQ ID NO: 36048 - RNA, 20 nt, Human
uggaauguaaguaaaacuua

SEQ ID NO: 36049 - RNA, 24 nt, Human
uaaguuguaaacgucuuuuuaagc

SEQ ID NO: 36050 - RNA, 24 nt, Human
ugcagauuccuuuggccacuguau

SEQ ID NO: 36051 - RNA, 24 nt, Human
ucugaccacucuccugucauccag

SEQ ID NO: 36052 - RNA, 24 nt, Human
ugacuucaaagcccaugcaguagu

SEQ ID NO: 36053 - RNA, 24 nt, Human
ucuagcacauguaucaagacauca

SEQ ID NO: 36054 - RNA, 24 nt, Human
ugaggugaugaagaaaaucauuga

SEQ ID NO: 36055 - RNA, 24 nt, Human
uaagagcaguucagaugaugauca

SEQ ID NO: 36056 - RNA, 24 nt, Human
acugcagaaaauuauguguaucca

SEQ ID NO: 36057 - RNA, 22 nt, Human
uggaauuuucugggccgaauac

SEQ ID NO: 36058 - RNA, 24 nt, Human
ucuguggauugugaaguuuaucua

SEQ ID NO: 36059 - RNA, 24 nt, Human
uaauauguuaaaaacauuuugcuu

SEQ ID NO: 36060 - RNA, 24 nt, Human
ugucacauuccaagcagauuggcc

SEQ ID NO: 36061 - RNA, 24 nt, Human
uauaacauguaugcuuuucagaau

SEQ ID NO: 36062 - RNA, 24 nt, Human
uugaagccuuuugcaacuguccuu

SEQ ID NO: 36063 - RNA, 24 nt, Human
uguacauauacauaugcauacacu

SEQ ID NO: 36064 - RNA, 24 nt, Human
uucaagaaguagaugaaaaauuca

SEQ ID NO: 36065 - RNA, 24 nt, Human
agauauuuuuauagaaagcaauga

SEQ ID NO: 36066 - RNA, 24 nt, Human
ugagaacaaggucacggucagcug

SEQ ID NO: 36067 - RNA, 24 nt, Human
aauuugucagguggggauuucacc

SEQ ID NO: 36068 - RNA, 24 nt, Human
uagcuucauguuuguuucuaauga

SEQ ID NO: 36069 - RNA, 24 nt, Human
uuacauuaagcagaguaauuccag

SEQ ID NO: 36070 - RNA, 24 nt, Human
ugcaugggaagauuguaguuacuc

SEQ ID NO: 36071 - RNA, 24 nt, Human
uugcguggugcccgaagggcucuu

SEQ ID NO: 36072 - RNA, 24 nt, Human
ugccugugaaauccaaauuccagu

SEQ ID NO: 36073 - RNA, 24 nt, Human
uuuuccaugcacccugucauccuc

SEQ ID NO: 36074 - RNA, 24 nt, Human
ugggaauaccauagccaccuuuua

SEQ ID NO: 36075 - RNA, 24 nt, Human
gucaggugaaugacaaccaagugg

SEQ ID NO: 36076 - RNA, 24 nt, Human
uaacaguagauauguauauauuuu

SEQ ID NO: 36077 - RNA, 24 nt, Human
ugagaauuuuuuaacguaacuucc

SEQ ID NO: 36078 - RNA, 24 nt, Human
cacuguguucaauuuugaguuucc

SEQ ID NO: 36079 - RNA, 24 nt, Human
ugaaguggugaaaggaguuucuca

SEQ ID NO: 36080 - RNA, 21 nt, Human
ugagaacuugaaagcugcaga

SEQ ID NO: 36081 - RNA, 24 nt, Human
agauuacaggcaugagccacugca

SEQ ID NO: 36082 - RNA, 24 nt, Human
gcccugugaauaaugcugaaauga

SEQ ID NO: 36083 - RNA, 24 nt, Human
gaacugguccuuucacuuugagau

SEQ ID NO: 36084 - RNA, 24 nt, Human
uuaccagggguucgggacagccua

SEQ ID NO: 36085 - RNA, 24 nt, Human
uucuauagucauaucaucauguca

SEQ ID NO: 36086 - RNA, 24 nt, Human
uaaaugccacauuucguaacaaga

SEQ ID NO: 36087 - RNA, 24 nt, Human
agugguauguaguuuguuuacugu

SEQ ID NO: 36088 - RNA, 24 nt, Human
ugaaguggugaaaggaguuucuca

SEQ ID NO: 36089 - RNA, 21 nt, Human
ugagaacuugaaagcugcaga

SEQ ID NO: 36090 - RNA, 24 nt, Human
ucacugcguguugcgcaggagggu

SEQ ID NO: 36091 - RNA, 24 nt, Human
acucccauggcaucgaacuuuugu

SEQ ID NO: 36092 - RNA, 24 nt, Human
ugggaucgccugugaauugggaug

SEQ ID NO: 36093 - RNA, 24 nt, Human
gcagugggccccuagagagagcau

SEQ ID NO: 36094 - RNA, 24 nt, Human
ugugauguuugcaaaguaguucag

SEQ ID NO: 36095 - RNA, 24 nt, Human
gacugcuuucuugguggcgguggg

SEQ ID NO: 36096 - RNA, 24 nt, Human
uuuacagguaacuuacuuacuccu

SEQ ID NO: 36097 - RNA, 24 nt, Human
ugaaaaugaccaauauauagcugc

SEQ ID NO: 36098 - RNA, 24 nt, Human
uacagguaugagccaccacaccca

SEQ ID NO: 36099 - RNA, 24 nt, Human
aggcaauccacccgccuuggccuc

SEQ ID NO: 36100 - RNA, 24 nt, Human
uggaaugcuggauccuaucguaau

SEQ ID NO: 36101 - RNA, 24 nt, Human
auuccagugagauaaggaauuucu

SEQ ID NO: 36102 - RNA, 24 nt, Human
ugggguugggggcuaaauuaauug

SEQ ID NO: 36103 - RNA, 22 nt, Human
uauagcagugcuagcucugucu

SEQ ID NO: 36104 - RNA, 24 nt, Human
ugacauggugugagugugugggug

SEQ ID NO: 36105 - RNA, 24 nt, Human
ugugucggcucugcuacuucaaga

SEQ ID NO: 36106 - RNA, 24 nt, Human
ugucauaggcaucgacgaggggca

SEQ ID NO: 36107 - RNA, 20 nt, Human
ucacggcagcgagcgcacgc

SEQ ID NO: 36108 - RNA, 24 nt, Human
ugaaaggaaggaggaggaaaggaa

SEQ ID NO: 36109 - RNA, 24 nt, Human
uagaauagagggugaugacgguaa

SEQ ID NO: 36110 - RNA, 24 nt, Human
ugagaaacuuuugauuguuuucaa

SEQ ID NO: 36111 - RNA, 24 nt, Human
uccccuggguuuccauuaggguag

SEQ ID NO: 36112 - RNA, 24 nt, Human
ucauagggacaaaccgaggggguu

SEQ ID NO: 36113 - RNA, 24 nt, Human
ugguggucuugagcuuuuggccug

SEQ ID NO: 36114 - RNA, 24 nt, Human
aaggugaacuugucacuugguaug

SEQ ID NO: 36115 - RNA, 24 nt, Human
uuuuaauaggacugucuccaaagu

SEQ ID NO: 36116 - RNA, 24 nt, Human
ucccugaaagagauggucuccaag

SEQ ID NO: 36117 - RNA, 24 nt, Human
uucaccauuugcauuuauuugaua

SEQ ID NO: 36118 - RNA, 24 nt, Human
uuauuagaucucaaacucagcugc

SEQ ID NO: 36119 - RNA, 24 nt, Human
aagaagucauaccuuuuucuuaaa

SEQ ID NO: 36120 - RNA, 24 nt, Human
uguggcgcgacugggagcugagcc

SEQ ID NO: 36121 - RNA, 24 nt, Human
ugaaaggaaggggucagaguacau

SEQ ID NO: 36122 - RNA, 24 nt, Human
guaguucucuccaccagcacgggg

SEQ ID NO: 36123 - RNA, 24 nt, Human
agacgagauguacuuggaccagaa

SEQ ID NO: 36124 - RNA, 24 nt, Human
ugcuguaggucuuaaagccugguu

SEQ ID NO: 36125 - RNA, 20 nt, Human
uggacugggcugggcuaggc

SEQ ID NO: 36126 - RNA, 24 nt, Human
ucaggcuccugcuucccagagagu

SEQ ID NO: 36127 - RNA, 24 nt, Human
uguggcuccaaggaaucuucccac

SEQ ID NO: 36128 - RNA, 24 nt, Human
uggcugguggggaaccggguggac

SEQ ID NO: 36129 - RNA, 18 nt, Human
uguggaggaucaaggcug

SEQ ID NO: 36130 - RNA, 24 nt, Human
uuagugauuuuuuuuuucguaggu

SEQ ID NO: 36131 - RNA, 24 nt, Human
aucacaucaccaaaaagggggagg

SEQ ID NO: 36132 - RNA, 24 nt, Human
ucacuuugccauguuuccuucaca

SEQ ID NO: 36133 - RNA, 24 nt, Human
aaaacaguaucuuuagucacuuuc

SEQ ID NO: 36134 - RNA, 23 nt, Human
uggaaaguguuucauuuuguggc

SEQ ID NO: 36135 - RNA, 24 nt, Human
ccugcaguccccacucccugccuc

SEQ ID NO: 36136 - RNA, 24 nt, Human
ugaaggaagugagcacauuauuug

SEQ ID NO: 36137 - RNA, 24 nt, Human
ugagcaucaggauuuuauggauga

SEQ ID NO: 36138 - RNA, 24 nt, Human
uuuauugucuuuccacauauggag

SEQ ID NO: 36139 - RNA, 24 nt, Human
auccgguuacauguggcugguuuc

SEQ ID NO: 36140 - RNA, 24 nt, Human
cauguuaauuaaauggugguccuu

SEQ ID NO: 36141 - RNA, 24 nt, Human
caauugauaaaucuuauaccauuu

SEQ ID NO: 36142 - RNA, 24 nt, Human
ucacaaccacggcccuggaggagc

SEQ ID NO: 36143 - RNA, 24 nt, Human
agguaguaaacuccccaggugggc

SEQ ID NO: 36144 - RNA, 24 nt, Human
aaggaccuuuucaaaaaagcaagc

SEQ ID NO: 36145 - RNA, 24 nt, Human
ugaugagaaacaggauauuuugaa

SEQ ID NO: 36146 - RNA, 24 nt, Human
gggaaucagucuaaagcugugcuc

SEQ ID NO: 36147 - RNA, 24 nt, Human
auuuaauuuuuauuuuuuuaaacu

SEQ ID NO: 36148 - RNA, 24 nt, Human
auagaaccaaaauaguaacgucaa

SEQ ID NO: 36149 - RNA, 24 nt, Human
ucaguguuuuguacuucacugaau

SEQ ID NO: 36150 - RNA, 24 nt, Human
aaaauuaaaauaagaaaaccaaag

SEQ ID NO: 36151 - RNA, 24 nt, Human
ucuugcucugucgccuuggcucac

SEQ ID NO: 36152 - RNA, 24 nt, Human
agccugggcaacauagugagacuc

SEQ ID NO: 36153 - RNA, 24 nt, Human
uauggcaagucacuuugacagaca

SEQ ID NO: 36154 - RNA, 24 nt, Human
uacaccacucccaagaagaauaag

SEQ ID NO: 36155 - RNA, 24 nt, Human
uguuauuguccccugccucgccug

SEQ ID NO: 36156 - RNA, 24 nt, Human
cggcauggaucucagcgagcugga

SEQ ID NO: 36157 - RNA, 24 nt, Human
uaaaaaguuguggcaaagauggcu

SEQ ID NO: 36158 - RNA, 17 nt, Human
ugcauuggauauuagug

SEQ ID NO: 36159 - RNA, 22 nt, Human
uguuauguuuuaauagucaaug

SEQ ID NO: 36160 - RNA, 24 nt, Human
uguugaguuuugguuacuuguaca

SEQ ID NO: 36161 - RNA, 24 nt, Human
gaucacuuuugcccaggaguugaa

SEQ ID NO: 36162 - RNA, 24 nt, Human
ucaccugagccugggagaucaagu

SEQ ID NO: 36163 - RNA, 24 nt, Human
uaccuccuucaccccagaauauuu

SEQ ID NO: 36164 - RNA, 24 nt, Human
ugaaaagcaguucucugaggagcg

SEQ ID NO: 36165 - RNA, 24 nt, Human
aggaggcucaccagcucuucuugg

SEQ ID NO: 36166 - RNA, 24 nt, Human
cuuugggguuauuuuacgguacaa

SEQ ID NO: 36167 - RNA, 24 nt, Human
ugaaaacaaaagaacuucacugag

SEQ ID NO: 36168 - RNA, 24 nt, Human
gugaagcagacggcuguggugaug

SEQ ID NO: 36169 - RNA, 24 nt, Human
ucaccaggagcacgcccaugcaug

SEQ ID NO: 36170 - RNA, 24 nt, Human
agagacuauuuuauauucuguacu

SEQ ID NO: 36171 - RNA, 24 nt, Human
ugggagauggggagucaacauugg

SEQ ID NO: 36172 - RNA, 24 nt, Human
uauuuuauauucuguacuugccug

SEQ ID NO: 36173 - RNA, 24 nt, Human
ugccaugaagcucauuaaagccau

SEQ ID NO: 36174 - RNA, 24 nt, Human
ugagaaaacagauuuagagaaaua

SEQ ID NO: 36175 - RNA, 24 nt, Human
auaaaugucuggagccaaccuugg

SEQ ID NO: 36176 - RNA, 20 nt, Human
uggcacggcucuccucugcc

SEQ ID NO: 36177 - RNA, 24 nt, Human
ucacggaggggaaguagaugccaa

SEQ ID NO: 36178 - RNA, 24 nt, Human
aucaaguuuuaaauccuccuccuu

SEQ ID NO: 36179 - RNA, 21 nt, Human
uuuguuagaauaauagggauc

SEQ ID NO: 36180 - RNA, 24 nt, Human
uguugaaaagugguuuaaaccuga

SEQ ID NO: 36181 - RNA, 24 nt, Human
uguuacuugcuuugaguuggaagc

SEQ ID NO: 36182 - RNA, 24 nt, Human
ucuguggcuuggugagucugugug

SEQ ID NO: 36183 - RNA, 24 nt, Human
agccuuagaauaagaaaagcuuuu

SEQ ID NO: 36184 - RNA, 24 nt, Human
gaggaugccgcacagagauugacu

SEQ ID NO: 36185 - RNA, 24 nt, Human
ucauuguuuuuaaaacuguuuuau

SEQ ID NO: 36186 - RNA, 24 nt, Human
aggcaucccuagugaccauagccu

SEQ ID NO: 36187 - RNA, 24 nt, Human
cacuggaguaggacucuugcugca

SEQ ID NO: 36188 - RNA, 24 nt, Human
uagcagcauuaggucuauaggugg

SEQ ID NO: 36189 - RNA, 24 nt, Human
ugcuauaaauguugguuuaacacu

SEQ ID NO: 36190 - RNA, 24 nt, Human
gacccuucacuucugcugguguga

SEQ ID NO: 36191 - RNA, 24 nt, Human
uauuuuuuuauuauugugauagca

SEQ ID NO: 36192 - RNA, 24 nt, Human
ugagagagaagaaaaacuguguug

SEQ ID NO: 36193 - RNA, 23 nt, Human
uaccuggccccccgucaccacgu

SEQ ID NO: 36194 - RNA, 24 nt, Human
ccccgcagguccgggcacuagcac

SEQ ID NO: 36195 - RNA, 24 nt, Human
ugacuuguggagagauggccgucu

SEQ ID NO: 36196 - RNA, 24 nt, Human
acccgcugccgcuguccccgaggg

SEQ ID NO: 36197 - RNA, 22 nt, Human
ugaacuagagaaacaugguuau

SEQ ID NO: 36198 - RNA, 24 nt, Human
gucacucgcgcgcauacccaagga

SEQ ID NO: 36199 - RNA, 24 nt, Human
uccccggggauccugcagcucuag

SEQ ID NO: 36200 - RNA, 24 nt, Human
cccgccuuaauggggcauuuaaac

SEQ ID NO: 36201 - RNA, 24 nt, Human
uccacugucaagccuugggcgcgu

SEQ ID NO: 36202 - RNA, 24 nt, Human
ucugaucuauaaaugcgguggcau

SEQ ID NO: 36203 - RNA, 24 nt, Human
uaaaggaccugagauccgaacugg

SEQ ID NO: 36204 - RNA, 24 nt, Human
guaccagugcggagaccaucaaga

SEQ ID NO: 36205 - RNA, 21 nt, Human
ugacaguagguguauaugaca

SEQ ID NO: 36206 - RNA, 24 nt, Human
ugccagagggaggguguuacgagc

SEQ ID NO: 36207 - RNA, 21 nt, Human
uugcagggcgagcugccuguc

SEQ ID NO: 36208 - RNA, 21 nt, Human
ugacaguagguguauaugaca

SEQ ID NO: 36209 - RNA, 21 nt, Human
ugacaguagguguauaugaca

SEQ ID NO: 36210 - RNA, 24 nt, Human
aggcauuuuuauuuuuccuggcua

SEQ ID NO: 36211 - RNA, 24 nt, Human
uacaguacacaggaaugguuacga

SEQ ID NO: 36212 - RNA, 24 nt, Human
uggcaucuggagguggugggguug

SEQ ID NO: 36213 - RNA, 21 nt, Human
ugacaguagguguauaugaca

SEQ ID NO: 36214 - RNA, 24 nt, Human
uuccugauguauacagugcuugua

SEQ ID NO: 36215 - RNA, 24 nt, Human
uggguccguaccuucugauucagg

SEQ ID NO: 36216 - RNA, 18 nt, Human
uacacaggcuucuguggg

SEQ ID NO: 36217 - RNA, 24 nt, Human
ucggaucagcuucuugggggccuc

SEQ ID NO: 36218 - RNA, 24 nt, Human
agcgguacuuucuggcuggcuuga

SEQ ID NO: 36219 - RNA, 24 nt, Human
uuaauauuuuggagcuaaggagua

SEQ ID NO: 36220 - RNA, 24 nt, Human
ugaggaccagugcacugaguacau

SEQ ID NO: 36221 - RNA, 24 nt, Human
aggcagcggcuguggcagcccggc

SEQ ID NO: 36222 - RNA, 24 nt, Human
ucgaaaguggucuuggccagagag

SEQ ID NO: 36223 - RNA, 24 nt, Human
uagaagacccggcucucggcgucc

SEQ ID NO: 36224 - RNA, 24 nt, Human
uagcugauguccauggccucaugg

SEQ ID NO: 36225 - RNA, 24 nt, Human
uuuucuguguagucuucauuaacg

SEQ ID NO: 36226 - RNA, 24 nt, Human
uaucuuauuugcuuuguagucugc

SEQ ID NO: 36227 - RNA, 22 nt, Human
uuuacaauaaugaagcuacaaa

SEQ ID NO: 36228 - RNA, 19 nt, Human
ccgcugagggaggcacagg

SEQ ID NO: 36229 - RNA, 24 nt, Human
uggaggucguuggagucacuuccg

SEQ ID NO: 36230 - RNA, 24 nt, Human
aggcauggaggagcugugugguca

SEQ ID NO: 36231 - RNA, 24 nt, Human
ugugcagaagaaauggaaggauuc

SEQ ID NO: 36232 - RNA, 24 nt, Human
uucaaauuucuuucuuuuuuaauu

SEQ ID NO: 36233 - RNA, 24 nt, Human
ugcaagugacagcugaaagcaaac

SEQ ID NO: 36234 - RNA, 24 nt, Human
acaaagcuaauggguuaaugggug

SEQ ID NO: 36235 - RNA, 24 nt, Human
uggcaugacuauagcucacuguaa

SEQ ID NO: 36236 - RNA, 24 nt, Human
guucagcgcgggcucgcuuccaac

SEQ ID NO: 36237 - RNA, 23 nt, Human
uccaccuuccucaggaaaaacca

SEQ ID NO: 36238 - RNA, 24 nt, Human
cggcgcucuagaggcagagggagg

SEQ ID NO: 36239 - RNA, 24 nt, Human
cacccucuucuccaggcacacaca

SEQ ID NO: 36240 - RNA, 24 nt, Human
gccugcuucuccaccagcaccgcc

SEQ ID NO: 36241 - RNA, 24 nt, Human
ugggaugggcgguggcggcccggg

SEQ ID NO: 36242 - RNA, 24 nt, Human
aggcaggagucugacggcagcagc

SEQ ID NO: 36243 - RNA, 24 nt, Human
agagcccaucccuguccggggacu

SEQ ID NO: 36244 - RNA, 24 nt, Human
uggguucaggucguaugccaggug

SEQ ID NO: 36245 - RNA, 24 nt, Human
ucagaggcagcucaagcugggacc

SEQ ID NO: 36246 - RNA, 23 nt, Human
uacagcaaguaagucuugccuuu

SEQ ID NO: 36247 - RNA, 24 nt, Human
uaaucucccucuucaaucacaagc

SEQ ID NO: 36248 - RNA, 24 nt, Human
ucagaacucaagcaggagcugcug

SEQ ID NO: 36249 - RNA, 24 nt, Human
uacuuuauacacugaguguagaaa

SEQ ID NO: 36250 - RNA, 24 nt, Human
cucuccuuucuuuccuggagccuu

SEQ ID NO: 36251 - RNA, 24 nt, Human
ugaggcauaaagcagaaagagcaa

SEQ ID NO: 36252 - RNA, 24 nt, Human
uuuaauagccugaaaguggaaaac

SEQ ID NO: 36253 - RNA, 23 nt, Human
ugugcagaagaaauggaaggauu

SEQ ID NO: 36254 - RNA, 24 nt, Human
uaucaaggaagggcaggcgugaug

SEQ ID NO: 36255 - RNA, 24 nt, Human
ucaauuuuuauuuugguuuucuua

SEQ ID NO: 36256 - RNA, 24 nt, Human
ugagaauggcaaaauuagucgccu

SEQ ID NO: 36257 - RNA, 24 nt, Human
uaaguaacauuaacacaauguuga

SEQ ID NO: 36258 - RNA, 24 nt, Human
uuaggaaauaauuauuaaaacaug

SEQ ID NO: 36259 - RNA, 24 nt, Human
uggucaggcgagcccaagccuugg

SEQ ID NO: 36260 - RNA, 24 nt, Human
cuagaacagaacugaugauuacuc

SEQ ID NO: 36261 - RNA, 24 nt, Human
guccaguggcagacgugugacuca

SEQ ID NO: 36262 - RNA, 24 nt, Human
cauuggagaaauuaagaacgagga

SEQ ID NO: 36263 - RNA, 24 nt, Human
ugcauuguuaucauuaaccagucu

SEQ ID NO: 36264 - RNA, 24 nt, Human
uaaugggucucaaaauucugugac

SEQ ID NO: 36265 - RNA, 24 nt, Human
uauuagggauaauauucauuuagc

SEQ ID NO: 36266 - RNA, 24 nt, Human
ucacaaccacggcccuggaggagc

SEQ ID NO: 36267 - RNA, 24 nt, Human
aucucguuggacugcguggcuagc

SEQ ID NO: 36268 - RNA, 24 nt, Human
uuugaaaaaaacagaaaauaaaug

SEQ ID NO: 36269 - RNA, 24 nt, Human
ugacaccaccccacuccucuuccu

SEQ ID NO: 36270 - RNA, 24 nt, Human
ugauuuggucauuaccacauccag

SEQ ID NO: 36271 - RNA, 24 nt, Human
ucagccccacccaguccacguggu

SEQ ID NO: 36272 - RNA, 24 nt, Human
ucccuguuugguucauuguauugu

SEQ ID NO: 36273 - RNA, 24 nt, Human
uaugacuuaagaucuuuucuuuuu

SEQ ID NO: 36274 - RNA, 24 nt, Human
acagggcccugaugagcuguggag

SEQ ID NO: 36275 - RNA, 24 nt, Human
uucacguagcucuuuucugccuuu

SEQ ID NO: 36276 - RNA, 24 nt, Human
aucuuucuuuugauuaacuuguga

SEQ ID NO: 36277 - RNA, 24 nt, Human
ccacagucauaggcagugacgguc

SEQ ID NO: 36278 - RNA, 24 nt, Human
uaugagacuuuuucacguuggugc

SEQ ID NO: 36279 - RNA, 24 nt, Human
aaaaugcugucguacugcuucccc

SEQ ID NO: 36280 - RNA, 24 nt, Human
uggaacaaaucuugaaucuccaau

SEQ ID NO: 36281 - RNA, 24 nt, Human
ugcaauagaggcagaggcugagaa

SEQ ID NO: 36282 - RNA, 23 nt, Human
aacugugugggagggggcugugg

SEQ ID NO: 36283 - RNA, 24 nt, Human
ugcuaggggcuggccucagcccug

SEQ ID NO: 36284 - RNA, 23 nt, Human
ucuguccucuguagcacuuuuag

SEQ ID NO: 36285 - RNA, 24 nt, Human
uaagaacaugcuuauugauaaauc

SEQ ID NO: 36286 - RNA, 24 nt, Human
acagacacauugacaugggugggu

SEQ ID NO: 36287 - RNA, 24 nt, Human
uauuucuccaucuccaggucugga

SEQ ID NO: 36288 - RNA, 24 nt, Human
caugaagacagucgggugauggug

SEQ ID NO: 36289 - RNA, 24 nt, Human
aaacuccaaugguucagugacugu

SEQ ID NO: 36290 - RNA, 19 nt, Human
aaacagaugucuggacucu

SEQ ID NO: 36291 - RNA, 24 nt, Human
cucgauuaaaauacacacaucuua

SEQ ID NO: 36292 - RNA, 24 nt, Human
ugugcgcgcgcgcgugugcauuua

SEQ ID NO: 36293 - RNA, 18 nt, Human
uggcagaaccacuaagcu

SEQ ID NO: 36294 - RNA, 24 nt, Human
ugguauaguucuugagcaauuucc

SEQ ID NO: 36295 - RNA, 24 nt, Human
gcgcagcuucaggggccgcaaggg

SEQ ID NO: 36296 - RNA, 19 nt, Human
ucugaccggcuucaagcuc

SEQ ID NO: 36297 - RNA, 24 nt, Human
ccacagaagcuacagcugccaggu

SEQ ID NO: 36298 - RNA, 24 nt, Human
cauugcacuccacccugggcaaca

SEQ ID NO: 36299 - RNA, 24 nt, Human
cagagcuaggagaaggagaggggg

SEQ ID NO: 36300 - RNA, 24 nt, Human
uauuggcacuaguauaaaacagag

SEQ ID NO: 36301 - RNA, 24 nt, Human
aaugauuuuuucuaacuaauaaag

SEQ ID NO: 36302 - RNA, 24 nt, Human
gggcaaugcagccagcccccgggc

SEQ ID NO: 36303 - RNA, 24 nt, Human
ugcauuguuaucauuaaccagucu

SEQ ID NO: 36304 - RNA, 24 nt, Human
uaaugggucucaaaauucugugac

SEQ ID NO: 36305 - RNA, 24 nt, Human
uauuagggauaauauucauuuagc

SEQ ID NO: 36306 - RNA, 24 nt, Human
uaaugggucucaaaauucugugac

SEQ ID NO: 36307 - RNA, 24 nt, Human
ucgcgcugcuucucccgcuucuuc

SEQ ID NO: 36308 - RNA, 24 nt, Human
uacuaguccacgguuggcuacuag

SEQ ID NO: 36309 - RNA, 24 nt, Human
caugaugugcuccuccgcgaugcg

SEQ ID NO: 36310 - RNA, 24 nt, Human
cuaguccacgguuggcuacuaguc

SEQ ID NO: 36311 - RNA, 24 nt, Human
aggcagcggcuguggcagcccggc

SEQ ID NO: 36312 - RNA, 24 nt, Human
ugagaacuccucaugcacccugug

SEQ ID NO: 36313 - RNA, 24 nt, Human
uagcagcuaaugaagcccagcuuc

SEQ ID NO: 36314 - RNA, 24 nt, Human
caacguagagcgguuccagacucu

SEQ ID NO: 36315 - RNA, 24 nt, Human
uuuacaaaauaaaaggaaaaguga

SEQ ID NO: 36316 - RNA, 24 nt, Human
uaacagguguaagaguguugaaaa

SEQ ID NO: 36317 - RNA, 24 nt, Human
ugugcagaagaaauggaaggauuc

SEQ ID NO: 36318 - RNA, 24 nt, Human
uaucaaggaagggcaggcgugaug

SEQ ID NO: 36319 - RNA, 24 nt, Human
uucaaauuucuuucuuuuuuaauu

SEQ ID NO: 36320 - RNA, 24 nt, Human
ugcauuguuaucauuaaccagucu

SEQ ID NO: 36321 - RNA, 24 nt, Human
uaaugggucucaaaauucugugac

SEQ ID NO: 36322 - RNA, 24 nt, Human
uauuagggauaauauucauuuagc

SEQ ID NO: 36323 - RNA, 24 nt, Human
uaccuuaggaagcaguacaaaucu

SEQ ID NO: 36324 - RNA, 24 nt, Human
guggaagguaguagauaccaggaa

SEQ ID NO: 36325 - RNA, 24 nt, Human
agagggaccguauucuggggcuua

SEQ ID NO: 36326 - RNA, 24 nt, Human
ugacaggucgauguagcugaggac

SEQ ID NO: 36327 - RNA, 24 nt, Human
uaacuuaaucuccagccccucucc

SEQ ID NO: 36328 - RNA, 24 nt, Human
uugaggcagucuuaacucugucac

SEQ ID NO: 36329 - RNA, 19 nt, Human
uaucacaaucaguguuuga

SEQ ID NO: 36330 - RNA, 24 nt, Human
uaaaaucauuucagauaucaccau

SEQ ID NO: 36331 - RNA, 24 nt, Human
agcaaggaaagcagggcucaccaa

SEQ ID NO: 36332 - RNA, 24 nt, Human
uccaguuugcaaaagaucuucugu

SEQ ID NO: 36333 - RNA, 24 nt, Human
uacccaauaguuacuuuucugguc

SEQ ID NO: 36334 - RNA, 22 nt, Human
uucaggggguacaugugcaggu

SEQ ID NO: 36335 - RNA, 24 nt, Human
uagaaucauacagaauaguuucac

SEQ ID NO: 36336 - RNA, 24 nt, Human
ugacuauaaaccaaaaauaaaauu

SEQ ID NO: 36337 - RNA, 24 nt, Human
uaagaaacauuuacaggccuggug

SEQ ID NO: 36338 - RNA, 24 nt, Human
augaugccccugauuuugcauucu

SEQ ID NO: 36339 - RNA, 24 nt, Human
uuaauucauuuguaucuuuuaaaa

SEQ ID NO: 36340 - RNA, 24 nt, Human
acaggaagguauguccugucagua

SEQ ID NO: 36341 - RNA, 24 nt, Human
aauuguguaauguuuauauucuug

SEQ ID NO: 36342 - RNA, 24 nt, Human
uguuacuucuuugauaguucuuac

SEQ ID NO: 36343 - RNA, 24 nt, Human
uauuauauuggcgaccuucacagg

SEQ ID NO: 36344 - RNA, 24 nt, Human
aguuagaaucuguaaacuaaacca

SEQ ID NO: 36345 - RNA, 24 nt, Human
ugaggaaggacaaagauaaacagg

SEQ ID NO: 36346 - RNA, 24 nt, Human
uuaguuuacaaguuguaggugauu

SEQ ID NO: 36347 - RNA, 24 nt, Human
uaagcagaaaacuaugaagacuua

SEQ ID NO: 36348 - RNA, 24 nt, Human
gggcacugaagaugaugcgaccca

SEQ ID NO: 36349 - RNA, 24 nt, Human
uacagugcuuguaaaagguuugaa

SEQ ID NO: 36350 - RNA, 21 nt, Human
ugggaggggcugaauguggug

SEQ ID NO: 36351 - RNA, 24 nt, Human
aaggaaccauggccaacugugagc

SEQ ID NO: 36352 - RNA, 21 nt, Human
ucuggagaaacugcugccuca

SEQ ID NO: 36353 - RNA, 24 nt, Human
aauuugauagcaucuggucagugg

SEQ ID NO: 36354 - RNA, 24 nt, Human
uggcuucagcgugucccauaccac

SEQ ID NO: 36355 - RNA, 24 nt, Human
gcccuguggguuggaccuccuggg

SEQ ID NO: 36356 - RNA, 24 nt, Human
gagcagucauuaucuguugucuug

SEQ ID NO: 36357 - RNA, 17 nt, Human
uagcacagcuucuccuu

SEQ ID NO: 36358 - RNA, 24 nt, Human
uggacuggccgucagagcucguaa

SEQ ID NO: 36359 - RNA, 20 nt, Human
uucguggaugccacaggacu

SEQ ID NO: 36360 - RNA, 24 nt, Human
uggacagcgaggccaggauggagc

SEQ ID NO: 36361 - RNA, 20 nt, Human
uaaggcacuguuauacagaa

SEQ ID NO: 36362 - RNA, 24 nt, Human
caccugauaguugugaguagucca

SEQ ID NO: 36363 - RNA, 22 nt, Human
ugauacaaguucuggcauuggu

SEQ ID NO: 36364 - RNA, 24 nt, Human
uauuacacacggauguaagcauuu

SEQ ID NO: 36365 - RNA, 24 nt, Human
acgcucacugauuuucagcacaca

SEQ ID NO: 36366 - RNA, 24 nt, Human
acucagggccuuguacacagcagc

SEQ ID NO: 36367 - RNA, 24 nt, Human
uacuugaugggacaggcauugccc

SEQ ID NO: 36368 - RNA, 24 nt, Human
uauggcaagucacuuugacagaca

SEQ ID NO: 36369 - RNA, 24 nt, Human
uacaccacucccaagaagaauaag

SEQ ID NO: 36370 - RNA, 24 nt, Human
cuugccccguggccuuccuguucc

SEQ ID NO: 36371 - RNA, 24 nt, Human
gcugaagauggccggaaagcagau

SEQ ID NO: 36372 - RNA, 24 nt, Human
uccaagugagagaccacagcuucc

SEQ ID NO: 36373 - RNA, 24 nt, Human
uugguucgugagcaguuggugagu

SEQ ID NO: 36374 - RNA, 24 nt, Human
ugccagaaaagccuuacccauuuu

SEQ ID NO: 36375 - RNA, 24 nt, Human
gaauguuccccccauuggaaacug

SEQ ID NO: 36376 - RNA, 24 nt, Human
uuaguuuauucaaagcuuuucuua

SEQ ID NO: 36377 - RNA, 24 nt, Human
ugagggaagaagaucuccagcugg

SEQ ID NO: 36378 - RNA, 24 nt, Human
uauaacauguaugcuuuucagaau

SEQ ID NO: 36379 - RNA, 24 nt, Human
accccauggacccaggugcagagg

SEQ ID NO: 36380 - RNA, 24 nt, Human
uggggacaggugucuggguccccc

SEQ ID NO: 36381 - RNA, 24 nt, Human
uggaagaggagcagcccgaggagu

SEQ ID NO: 36382 - RNA, 24 nt, Human
uucaaguucuuuuauuucugggua

SEQ ID NO: 36383 - RNA, 24 nt, Human
ucuguggagagaucgcucgauuuu

SEQ ID NO: 36384 - RNA, 24 nt, Human
ccugugcuggagaaagaacacgac

SEQ ID NO: 36385 - RNA, 24 nt, Human
uggaguugccugcgcuuaaggacg

SEQ ID NO: 36386 - RNA, 24 nt, Human
agaaugcacuguggaauuugaggg

SEQ ID NO: 36387 - RNA, 24 nt, Human
ugacagaaaaacauucucaggacu

SEQ ID NO: 36388 - RNA, 24 nt, Human
gugccacaccaguagauuguucac

SEQ ID NO: 36389 - RNA, 24 nt, Human
uauugcccauaagccucaggauuu

SEQ ID NO: 36390 - RNA, 24 nt, Human
guggcccacauaggucucugggcg

SEQ ID NO: 36391 - RNA, 24 nt, Human
aaggaaccaaaaguacugguacuu

SEQ ID NO: 36392 - RNA, 24 nt, Human
ggggaaagggaggccaccuggaaa

SEQ ID NO: 36393 - RNA, 24 nt, Human
gagcagcagcugacaaaguuugca

SEQ ID NO: 36394 - RNA, 24 nt, Human
uguccuguccucgccaugaggccg

SEQ ID NO: 36395 - RNA, 24 nt, Human
ugagaaaacaccaaugaagcacuu

SEQ ID NO: 36396 - RNA, 24 nt, Human
gaagguuguuuggcuuguuuaaca

SEQ ID NO: 36397 - RNA, 24 nt, Human
uauuucaccauacuauggagaaua

SEQ ID NO: 36398 - RNA, 24 nt, Human
uuccaugguucuccaagcacgggc

SEQ ID NO: 36399 - RNA, 24 nt, Human
uuagaugaaagcccagugggaauu

SEQ ID NO: 36400 - RNA, 24 nt, Human
aaaaugcuucuaagaaccuguuug

SEQ ID NO: 36401 - RNA, 23 nt, Human
aucgucuuauuuaauuuucuuuc

SEQ ID NO: 36402 - RNA, 24 nt, Human
ugagaaagcaagauguuggcuacc

SEQ ID NO: 36403 - RNA, 24 nt, Human
ugaaaacaggauuaaacguuagua

SEQ ID NO: 36404 - RNA, 24 nt, Human
aguuaguuuuuuuauuauuauuau

SEQ ID NO: 36405 - RNA, 24 nt, Human
uggcaugugcccagcgacguggcc

SEQ ID NO: 36406 - RNA, 24 nt, Human
ccagcagugaguaucccuguugca

SEQ ID NO: 36407 - RNA, 24 nt, Human
acugcaguuuauuggacgugcguu

SEQ ID NO: 36408 - RNA, 24 nt, Human
agguggaguugaaaaacccaaaca

SEQ ID NO: 36409 - RNA, 24 nt, Human
gaacugguccuuucacuuugagau

SEQ ID NO: 36410 - RNA, 24 nt, Human
uaucaagucagcacacaccuuuuc

SEQ ID NO: 36411 - RNA, 21 nt, Human
ugauggaaguaaucugcuuaa

SEQ ID NO: 36412 - RNA, 24 nt, Human
uaagacaguuguguggugugauug

SEQ ID NO: 36413 - RNA, 24 nt, Human
aggaaggaugauaacguguggucc

SEQ ID NO: 36414 - RNA, 24 nt, Human
ugaaaucugauuuucuuauuucua

SEQ ID NO: 36415 - RNA, 24 nt, Human
cuccuggaugcucagcggaucgug

SEQ ID NO: 36416 - RNA, 22 nt, Human
cccccgugccuuggugacgaug

SEQ ID NO: 36417 - RNA, 19 nt, Human
caucauggggcagccaggc

SEQ ID NO: 36418 - RNA, 24 nt, Human
uacuauaugauuuuauggaagaag

SEQ ID NO: 36419 - RNA, 17 nt, Human
ugaguaguaaguucaac

SEQ ID NO: 36420 - RNA, 24 nt, Human
uuuaacaauauugauucucccaau

SEQ ID NO: 36421 - RNA, 24 nt, Human
ucaggccauuagaacccgaggggg

SEQ ID NO: 36422 - RNA, 18 nt, Human
agucauggcaugcccagu

SEQ ID NO: 36423 - RNA, 24 nt, Human
gagcgcccccggcgaagagcgggc

SEQ ID NO: 36424 - RNA, 24 nt, Human
uucgacaaagcccguguaccccug

SEQ ID NO: 36425 - RNA, 23 nt, Human
ugauauggaugaugaagaugaug

SEQ ID NO: 36426 - RNA, 24 nt, Human
gcagaccugacauccaguacccug

SEQ ID NO: 36427 - RNA, 24 nt, Human
ucaggccaguugcagccuucucag

SEQ ID NO: 36428 - RNA, 24 nt, Human
ugugauugauagucagggaccuuc

SEQ ID NO: 36429 - RNA, 24 nt, Human
ugauucuggaaguucugaggaaaa

SEQ ID NO: 36430 - RNA, 24 nt, Human
ccaccgagguaccuguguccuggg

SEQ ID NO: 36431 - RNA, 24 nt, Human
uggcagccgggagaggagcaagcg

SEQ ID NO: 36432 - RNA, 23 nt, Human
cagcgcagccacaggguucccca

SEQ ID NO: 36433 - RNA, 24 nt, Human
ugaauagucaggucuugcaguaca

SEQ ID NO: 36434 - RNA, 21 nt, Human
ugaguaagcgguauuaggcuc

SEQ ID NO: 36435 - RNA, 24 nt, Human
gagcugugcggugcccuccgggac

SEQ ID NO: 36436 - RNA, 24 nt, Human
cucucucuauuuuauuuuuuaaaa

SEQ ID NO: 36437 - RNA, 24 nt, Human
ugugugcaugcaugcgugugugug

SEQ ID NO: 36438 - RNA, 19 nt, Human
ugacacuaauccauguugu

SEQ ID NO: 36439 - RNA, 24 nt, Human
cuggccgacggcacccggcugcag

SEQ ID NO: 36440 - RNA, 24 nt, Human
ucgcaguaagccuggcaggccugu

SEQ ID NO: 36441 - RNA, 19 nt, Human
ugacgaggccacccagagc

SEQ ID NO: 36442 - RNA, 24 nt, Human
agacugugcaagaccccccuuggc

SEQ ID NO: 36443 - RNA, 24 nt, Human
uuagggaaaaugcacugaguuuga

SEQ ID NO: 36444 - RNA, 24 nt, Human
uggcaagccuccacucucugccca

SEQ ID NO: 36445 - RNA, 24 nt, Human
aggcacuggcagaugccgcccgcc

SEQ ID NO: 36446 - RNA, 24 nt, Human
uuacugcagccaacguuggaaaag

SEQ ID NO: 36447 - RNA, 24 nt, Human
ugacuacauacauagauggguagc

SEQ ID NO: 36448 - RNA, 24 nt, Human
uuaauucauauaguuauuguaagc

SEQ ID NO: 36449 - RNA, 24 nt, Human
ucauuguuucagcuggccaaaaaa

SEQ ID NO: 36450 - RNA, 24 nt, Human
aggaaaucugguucacagcaucug

SEQ ID NO: 36451 - RNA, 24 nt, Human
aggcaaggugacgggacuggaagc

SEQ ID NO: 36452 - RNA, 24 nt, Human
aacaguguaggucuuggugaagcc

SEQ ID NO: 36453 - RNA, 23 nt, Human
auuguccggaagaaagaugggag

SEQ ID NO: 36454 - RNA, 24 nt, Human
gugcauuggugauuuugaucauuc

SEQ ID NO: 36455 - RNA, 24 nt, Human
uuuaaaauaaauucuuaaucagag

SEQ ID NO: 36456 - RNA, 24 nt, Human
ugugcagaagaaauggaaggauuc

SEQ ID NO: 36457 - RNA, 24 nt, Human
ggggugccugggaggcuugcccau

SEQ ID NO: 36458 - RNA, 24 nt, Human
aggaagaagauggggcagggcugg

SEQ ID NO: 36459 - RNA, 24 nt, Human
aaacuaguauuucauaaaugcuga

SEQ ID NO: 36460 - RNA, 24 nt, Human
uuacuggauggcagaguugaauag

SEQ ID NO: 36461 - RNA, 24 nt, Human
gaaggugccgucuaggacuuucau

SEQ ID NO: 36462 - RNA, 24 nt, Human
acuuaaguucucuugaagggcaac

SEQ ID NO: 36463 - RNA, 19 nt, Human
caccgugggacgggaacac

SEQ ID NO: 36464 - RNA, 24 nt, Human
caacaugcguggagccaagugcua

SEQ ID NO: 36465 - RNA, 24 nt, Human
uccaaccaagaaaaccucaaagca

SEQ ID NO: 36466 - RNA, 24 nt, Human
uccuccucaucgcccuggaugguc

SEQ ID NO: 36467 - RNA, 24 nt, Human
cauugguccccaccuguucguaga

SEQ ID NO: 36468 - RNA, 24 nt, Human
ugggaacaggaagcucccuagggc

SEQ ID NO: 36469 - RNA, 23 nt, Human
ugucacagaacacugucuauucc

SEQ ID NO: 36470 - RNA, 24 nt, Human
uguacaaaccaguuuuauuaggga

SEQ ID NO: 36471 - RNA, 24 nt, Human
ucuagcacaagauuuuucuguaaa

SEQ ID NO: 36472 - RNA, 24 nt, Human
ucgguuguuaagaacuagagcuua

SEQ ID NO: 36473 - RNA, 24 nt, Human
uaagggcauccauuucacagguga

SEQ ID NO: 36474 - RNA, 24 nt, Human
gcacuaguuagaaugcguacgaga

SEQ ID NO: 36475 - RNA, 24 nt, Human
guccucccuuguggcuuccucagc

SEQ ID NO: 36476 - RNA, 22 nt, Human
cuuugugcugggccugcucuuc

SEQ ID NO: 36477 - RNA, 24 nt, Human
uguucagaaauugaggcuaacauu

SEQ ID NO: 36478 - RNA, 24 nt, Human
ucaggaauaugcggucauuuuauu

SEQ ID NO: 36479 - RNA, 24 nt, Human
acagcauuuggucugacuugugcc

SEQ ID NO: 36480 - RNA, 24 nt, Human
aucacuuuuaagagaaauguacac

SEQ ID NO: 36481 - RNA, 24 nt, Human
uauagugucauguauccucucaac

SEQ ID NO: 36482 - RNA, 24 nt, Human
ucccauaggacgggcccacacugc

SEQ ID NO: 36483 - RNA, 24 nt, Human
gagcaauugcuagaccgaggcauu

SEQ ID NO: 36484 - RNA, 24 nt, Human
ugugaagccuugcugcaggcaagc

SEQ ID NO: 36485 - RNA, 24 nt, Human
cuugcucauagucuucagcaagga

SEQ ID NO: 36486 - RNA, 24 nt, Human
uggaaagcagguagaguuggcuuu

SEQ ID NO: 36487 - RNA, 24 nt, Human
uaagagcaguucagaugaugauca

SEQ ID NO: 36488 - RNA, 22 nt, Human
uggaauuuucugggccgaauac

SEQ ID NO: 36489 - RNA, 24 nt, Human
uuacuuggcacaauuuauuucuac

SEQ ID NO: 36490 - RNA, 24 nt, Human
gggaaacacacaugcagagaaggc

SEQ ID NO: 36491 - RNA, 24 nt, Human
aggcaguuuuauaacuuuauuuga

SEQ ID NO: 36492 - RNA, 24 nt, Human
uuuggugaaucuucauccucauua

SEQ ID NO: 36493 - RNA, 24 nt, Human
aagaaccugccaguucaaccagcg

SEQ ID NO: 36494 - RNA, 24 nt, Human
ucuguaguuuuaagagguuagaag

SEQ ID NO: 36495 - RNA, 24 nt, Human
uggaagaaaaagacauuccucuac

SEQ ID NO: 36496 - RNA, 24 nt, Human
uucugguguuuaauugugauauaa

SEQ ID NO: 36497 - RNA, 24 nt, Human
uggaagaugcucaacaccuccucc

SEQ ID NO: 36498 - RNA, 24 nt, Human
ugaccaggaaauacaacgagcugc

SEQ ID NO: 36499 - RNA, 24 nt, Human
uggaagaugcucaacaccuccucc

SEQ ID NO: 36500 - RNA, 24 nt, Human
ugaccaggaaauacaacgagcugc

SEQ ID NO: 36501 - RNA, 24 nt, Human
ucuuaaguccuacacuguuuuaga

SEQ ID NO: 36502 - RNA, 24 nt, Human
acagugguuacaaaaaaaaaagua

SEQ ID NO: 36503 - RNA, 24 nt, Human
uggaagaugcucaacaccuccucc

SEQ ID NO: 36504 - RNA, 24 nt, Human
ugaccaggaaauacaacgagcugc

SEQ ID NO: 36505 - RNA, 24 nt, Human
ucagugcaaccagagacccuuucg

SEQ ID NO: 36506 - RNA, 24 nt, Human
aggcacucagagaagguaaagcuu

SEQ ID NO: 36507 - RNA, 24 nt, Human
cacccggggcuccacccaagcgcc

SEQ ID NO: 36508 - RNA, 23 nt, Human
uuggaagagcagcccaggugguc

SEQ ID NO: 36509 - RNA, 24 nt, Human
cggcacggucugauccggaaauau

SEQ ID NO: 36510 - RNA, 24 nt, Human
cguucuuuuccucugccgugagug

SEQ ID NO: 36511 - RNA, 24 nt, Human
agaacaccugaaucuuaucucggu

SEQ ID NO: 36512 - RNA, 17 nt, Human
ugucacuggcguccugg

SEQ ID NO: 36513 - RNA, 24 nt, Human
uucagcaaccaggagaccugugug

SEQ ID NO: 36514 - RNA, 24 nt, Human
guggagcuaagagagugaccucca

SEQ ID NO: 36515 - RNA, 24 nt, Human
ccuccgggcaccgccuugggcgcg

SEQ ID NO: 36516 - RNA, 22 nt, Human
cuuggagucacugcuacucagc

SEQ ID NO: 36517 - RNA, 24 nt, Human
uucccuggggauagagugcacccu

SEQ ID NO: 36518 - RNA, 24 nt, Human
uaaguuccucccccuuauaauccc

SEQ ID NO: 36519 - RNA, 24 nt, Human
ugagagccauggagggagccacac

SEQ ID NO: 36520 - RNA, 23 nt, Human
uuuaggaaaaagagauuaagaga

SEQ ID NO: 36521 - RNA, 24 nt, Human
gcgcguucccauuuuccacaggag

SEQ ID NO: 36522 - RNA, 24 nt, Human
uggaggcugagugccguugcggug

SEQ ID NO: 36523 - RNA, 19 nt, Human
cggcaguggagaugaacgu

SEQ ID NO: 36524 - RNA, 24 nt, Human
uuugcuguacacucaauagggcau

SEQ ID NO: 36525 - RNA, 24 nt, Human
uguggcgggccagggccgccugcg

SEQ ID NO: 36526 - RNA, 24 nt, Human
gagcagcugggagggcuccuucuc

SEQ ID NO: 36527 - RNA, 24 nt, Human
aacccaguggaaggaucuacugau

SEQ ID NO: 36528 - RNA, 24 nt, Human
uuccacagccagauuugaccaagc

SEQ ID NO: 36529 - RNA, 24 nt, Human
guuaaauuccuucucuguucaggg

SEQ ID NO: 36530 - RNA, 24 nt, Human
acucuguucuuccgccgcuccgcc

SEQ ID NO: 36531 - RNA, 24 nt, Human
uagaaacgcguccucagcggaaag

SEQ ID NO: 36532 - RNA, 24 nt, Human
ugucucgaggaaucugaagaacuu

SEQ ID NO: 36533 - RNA, 24 nt, Human
ucaaaaagaaacugauucagagac

SEQ ID NO: 36534 - RNA, 24 nt, Human
uuuuagcuguuaauuguacuaugc

SEQ ID NO: 36535 - RNA, 24 nt, Human
aagaaacuuaaagccuggaaugau

SEQ ID NO: 36536 - RNA, 24 nt, Human
ugaauuguacggcacuuggcguaa

SEQ ID NO: 36537 - RNA, 24 nt, Human
uacagaauggauuuuggaagaggg

SEQ ID NO: 36538 - RNA, 24 nt, Human
cgaccgaucuucauucacugcgga

SEQ ID NO: 36539 - RNA, 24 nt, Human
acagcggaggagcuguaccgccug

SEQ ID NO: 36540 - RNA, 24 nt, Human
ggagggacgggucugcagguucca

SEQ ID NO: 36541 - RNA, 24 nt, Human
ccuugaguaaaucccguuaccucu

SEQ ID NO: 36542 - RNA, 21 nt, Human
cuuggcacuggccgucguuuu

SEQ ID NO: 36543 - RNA, 24 nt, Human
aaguauaggcgauagaaauugaaa

SEQ ID NO: 36544 - RNA, 19 nt, Human
agggauggaaagucaccgu

SEQ ID NO: 36545 - RNA, 24 nt, Human
ucugaucuauaaaugcgguggcau

SEQ ID NO: 36546 - RNA, 24 nt, Human
gagcauuagacccaagaccauugu

SEQ ID NO: 36547 - RNA, 24 nt, Human
uuugaagacucuguccgaaaguuu

SEQ ID NO: 36548 - RNA, 24 nt, Human
acccaaauacauuaacaccuccuc

SEQ ID NO: 36549 - RNA, 24 nt, Human
ugagauguugaugcgcccacuugg

SEQ ID NO: 36550 - RNA, 24 nt, Human
uuuaagcucuuucacacuuuuucu

SEQ ID NO: 36551 - RNA, 24 nt, Human
uaucuguucucgguacuauagggc

SEQ ID NO: 36552 - RNA, 24 nt, Human
agagguucugcgguuuaauauccc

SEQ ID NO: 36553 - RNA, 24 nt, Human
ugcauuguuaucauuaaccagucu

SEQ ID NO: 36554 - RNA, 24 nt, Human
uauuagggauaauauucauuuagc

SEQ ID NO: 36555 - RNA, 24 nt, Human
uaaugggucucaaaauucugugac

SEQ ID NO: 36556 - RNA, 24 nt, Human
ugugcagaagaaauggaaggauuc

SEQ ID NO: 36557 - RNA, 24 nt, Human
uucaaauuucuuucuuuuuuaauu

SEQ ID NO: 36558 - RNA, 24 nt, Human
uagcgugggauagauuugucucuu

SEQ ID NO: 36559 - RNA, 24 nt, Human
ugguauacuacugcuuugcggaau

SEQ ID NO: 36560 - RNA, 24 nt, Human
ugagucuuggccaugagaucugug

SEQ ID NO: 36561 - RNA, 24 nt, Human
uagcugguuccagguagaagaggc

SEQ ID NO: 36562 - RNA, 24 nt, Human
uaaguggaguuagaaguggguuau

SEQ ID NO: 36563 - RNA, 24 nt, Human
uguagggauaaggcgugaccacag

SEQ ID NO: 36564 - RNA, 24 nt, Human
ucggcuccagcaccacgaguaccg

SEQ ID NO: 36565 - RNA, 24 nt, Human
uaaagcauuguuuuggagcugguu

SEQ ID NO: 36566 - RNA, 24 nt, Human
uacaaaauaucgaagacacuacca

SEQ ID NO: 36567 - RNA, 24 nt, Human
uaacauggucaaaaaggcaaucag

SEQ ID NO: 36568 - RNA, 24 nt, Human
gagccuuaaugggggcagaaaggg

SEQ ID NO: 36569 - RNA, 23 nt, Human
aacugcguggcuaucacacugac

SEQ ID NO: 36570 - RNA, 24 nt, Human
uaaguuaauuaagggccuguuacu

SEQ ID NO: 36571 - RNA, 24 nt, Human
uuccauagagggcacguagcauau

SEQ ID NO: 36572 - RNA, 24 nt, Human
uuacuuggaauuuccucuguuaua

SEQ ID NO: 36573 - RNA, 22 nt, Human
uccacgaggcaaacgggucauc

SEQ ID NO: 36574 - RNA, 24 nt, Human
uggcaagcagcuccaguccgagca

SEQ ID NO: 36575 - RNA, 24 nt, Human
uauuguagauauuuuuaaaucuuu

SEQ ID NO: 36576 - RNA, 24 nt, Human
uugaaaauacuuuaagucaaaaau

SEQ ID NO: 36577 - RNA, 24 nt, Human
uuuguugaaaaagaggcagacaga

SEQ ID NO: 36578 - RNA, 24 nt, Human
gggcggggcucucgucguacccgc

SEQ ID NO: 36579 - RNA, 24 nt, Human
ucuaaaaugguaaaaugugccacu

SEQ ID NO: 36580 - RNA, 24 nt, Human
aaauagugauccccuuaaaugcuu

SEQ ID NO: 36581 - RNA, 24 nt, Human
uggaggcccaggcugggagguguc

SEQ ID NO: 36582 - RNA, 24 nt, Human
uauuucaucuuauuuaauggugca

SEQ ID NO: 36583 - RNA, 24 nt, Human
uuucaaacaaagcacaguaacagu

SEQ ID NO: 36584 - RNA, 17 nt, Human
ucuaguguccccccagc

SEQ ID NO: 36585 - RNA, 24 nt, Human
caaucauugaauacaaaacaaaua

SEQ ID NO: 36586 - RNA, 24 nt, Human
uugcauacauggaugaggagacug

SEQ ID NO: 36587 - RNA, 24 nt, Human
uggccgggccacggggcucaugcc

SEQ ID NO: 36588 - RNA, 24 nt, Human
ugacaacauuaacgguccucaugc

SEQ ID NO: 36589 - RNA, 24 nt, Human
ucacauauucuuugucuuuauuau

SEQ ID NO: 36590 - RNA, 24 nt, Human
acauguuguggaguugagcugaau

SEQ ID NO: 36591 - RNA, 24 nt, Human
uacaggagacaaucauuuauguuu

SEQ ID NO: 36592 - RNA, 24 nt, Human
uuaggccaacauguauuaagcuga

SEQ ID NO: 36593 - RNA, 24 nt, Human
aggaagaggacucaaaagucuggc

SEQ ID NO: 36594 - RNA, 24 nt, Human
cuuccugguugagcuucugcuaaa

SEQ ID NO: 36595 - RNA, 23 nt, Human
uggcaggccccagcccugcagca

SEQ ID NO: 36596 - RNA, 24 nt, Human
uaagugggucuaggugcugggggc

SEQ ID NO: 36597 - RNA, 24 nt, Human
uguuaagaaugccuucguuauuuc

SEQ ID NO: 36598 - RNA, 24 nt, Human
uuuguggaggccuggggaguuucu

SEQ ID NO: 36599 - RNA, 24 nt, Human
uaagugaagacuuuccaaaaacuc

SEQ ID NO: 36600 - RNA, 24 nt, Human
uuaggaaaauaaggucacauaucu

SEQ ID NO: 36601 - RNA, 24 nt, Human
ugggauuacagaugugagccacca

SEQ ID NO: 36602 - RNA, 24 nt, Human
ucucucuuaauuaacucuuuuauu

SEQ ID NO: 36603 - RNA, 24 nt, Human
uauaugggccugcauacaguggaa

SEQ ID NO: 36604 - RNA, 24 nt, Human
ucacccggaaggaugcaggaaccu

SEQ ID NO: 36605 - RNA, 24 nt, Human
ucgcagaaacaguggaagcagucg

SEQ ID NO: 36606 - RNA, 24 nt, Human
acccaguggagccuggaucggagc

SEQ ID NO: 36607 - RNA, 24 nt, Human
ugaugacccguuaccuggaguccu

SEQ ID NO: 36608 - RNA, 24 nt, Human
uaucugaaaccuagcugcuuacuu

SEQ ID NO: 36609 - RNA, 24 nt, Human
uaggucugucaugaugucuagucu

SEQ ID NO: 36610 - RNA, 24 nt, Human
uggcgagcgcaaguuucaccuguu

SEQ ID NO: 36611 - RNA, 24 nt, Human
ugagucauucgggcaguuaggugg

SEQ ID NO: 36612 - RNA, 24 nt, Human
acuuggugcauguguucuuucuag

SEQ ID NO: 36613 - RNA, 24 nt, Human
ugaaacuggguaauggauacucug

SEQ ID NO: 36614 - RNA, 24 nt, Human
ugugcagcgcgcggccgggcagcu

SEQ ID NO: 36615 - RNA, 24 nt, Human
cacugugcuaagugauuuaccuuu

SEQ ID NO: 36616 - RNA, 24 nt, Human
aaacugcuuauuucuucucuuugc

SEQ ID NO: 36617 - RNA, 17 nt, Human
uauguggcuuuguugua

SEQ ID NO: 36618 - RNA, 24 nt, Human
uggcugcugugucaucuuugaagu

SEQ ID NO: 36619 - RNA, 23 nt, Human
uggguuccuggugguggguuuga

SEQ ID NO: 36620 - RNA, 24 nt, Human
ugaaguaucgggagacggguuuuc

SEQ ID NO: 36621 - RNA, 24 nt, Human
ggaccggagaggcgagacagcggc

SEQ ID NO: 36622 - RNA, 24 nt, Human
acgcugagcucauggagaugcagc

SEQ ID NO: 36623 - RNA, 24 nt, Human
cacaccaccugcugcaugcggcug

SEQ ID NO: 36624 - RNA, 24 nt, Human
ugugagcagguccaccggccccua

SEQ ID NO: 36625 - RNA, 24 nt, Human
cagcaaaugaauggauauuucugc

SEQ ID NO: 36626 - RNA, 24 nt, Human
uccaugaccacaguaaggaccaaa

SEQ ID NO: 36627 - RNA, 24 nt, Human
aaagucauauauacgcaagguaga

SEQ ID NO: 36628 - RNA, 24 nt, Human
cucucccugucaucugggcuggag

SEQ ID NO: 36629 - RNA, 24 nt, Human
uggcugggcagguggauuacaagg

SEQ ID NO: 36630 - RNA, 24 nt, Human
ugaaggcccuagaaagguggucau

SEQ ID NO: 36631 - RNA, 24 nt, Human
auaagccucuaaagugaucagugc

SEQ ID NO: 36632 - RNA, 24 nt, Human
ucuuaaauaucaaccauggcacuu

SEQ ID NO: 36633 - RNA, 24 nt, Human
uaccgggaccgaugcccucuagug

SEQ ID NO: 36634 - RNA, 24 nt, Human
uggccgcaguugcgcuggcuuccg

SEQ ID NO: 36635 - RNA, 24 nt, Human
gaggaucaggguauguuugcgagc

SEQ ID NO: 36636 - RNA, 21 nt, Human
uagcaccuggaauucccuggu

SEQ ID NO: 36637 - RNA, 24 nt, Human
ucuggaguuccaaucccaccuuua

SEQ ID NO: 36638 - RNA, 24 nt, Human
ugaagagccacccuguggcaucga

SEQ ID NO: 36639 - RNA, 24 nt, Human
uagcaagcaggccaaagaugucuc

SEQ ID NO: 36640 - RNA, 24 nt, Human
uccgcaccucuuccaaccacccuc

SEQ ID NO: 36641 - RNA, 24 nt, Human
uuggcagucuccaguugggcugug

SEQ ID NO: 36642 - RNA, 24 nt, Human
ugucaaaaagaccugcagauaccc

SEQ ID NO: 36643 - RNA, 24 nt, Human
agugugcagccauaacacaagaaa

SEQ ID NO: 36644 - RNA, 24 nt, Human
auugugcauaucagggauacccuc

SEQ ID NO: 36645 - RNA, 24 nt, Human
ucccaugaaggaagaagugggguu

SEQ ID NO: 36646 - RNA, 24 nt, Human
ucuuacgguuugguaugggacaug

SEQ ID NO: 36647 - RNA, 23 nt, Human
ugccaaggaccaggaugauggag

SEQ ID NO: 36648 - RNA, 24 nt, Human
aggcaggggguggggaaggcggug

SEQ ID NO: 36649 - RNA, 24 nt, Human
acaagccucucagcuucgcgucgg

SEQ ID NO: 36650 - RNA, 18 nt, Human
cgcgauggagccggggcg

SEQ ID NO: 36651 - RNA, 24 nt, Human
cacaggacacugccugccagucac

SEQ ID NO: 36652 - RNA, 24 nt, Human
auggcgcugcugucuggguucuuu

SEQ ID NO: 36653 - RNA, 24 nt, Human
gcuucaguaagcuagauuuacuaa

SEQ ID NO: 36654 - RNA, 21 nt, Human
uuauuuuaggggccuuaccau

SEQ ID NO: 36655 - RNA, 24 nt, Human
uaccacucuacaagccaguuccac

SEQ ID NO: 36656 - RNA, 24 nt, Human
guccuuagagaugggaaucuugac

SEQ ID NO: 36657 - RNA, 24 nt, Human
ugagugcaacggaaagggcuauca

SEQ ID NO: 36658 - RNA, 17 nt, Human
ucaguguccacagcgca

SEQ ID NO: 36659 - RNA, 24 nt, Human
ucacucgggggaagggaaagguug

SEQ ID NO: 36660 - RNA, 24 nt, Human
ugucacggcagucguugaacacac

SEQ ID NO: 36661 - RNA, 24 nt, Human
uggcagugcugauccucagaaacu

SEQ ID NO: 36662 - RNA, 24 nt, Human
ugcaucaggcgcccuuugaggcca

SEQ ID NO: 36663 - RNA, 24 nt, Human
ugcccaagcuggaguagagugaca

SEQ ID NO: 36664 - RNA, 24 nt, Human
uacuuuuuuuuagaagggggguga

SEQ ID NO: 36665 - RNA, 24 nt, Human
acuuugugauucaggcaaaggcug

SEQ ID NO: 36666 - RNA, 24 nt, Human
aucucauuuuuuuccuuucuccag

SEQ ID NO: 36667 - RNA, 21 nt, Human
gcccugcgcuggcucugccgu

SEQ ID NO: 36668 - RNA, 24 nt, Human
uauaagagucauggaaaaagacag

SEQ ID NO: 36669 - RNA, 21 nt, Human
ugauuucugucccugcaucuc

SEQ ID NO: 36670 - RNA, 24 nt, Human
agagcaagaagaaauguaggaugu

SEQ ID NO: 36671 - RNA, 24 nt, Human
uggcaaggagcugccaaaacugag

SEQ ID NO: 36672 - RNA, 24 nt, Human
aucaaguacuaugugucaggaacc

SEQ ID NO: 36673 - RNA, 24 nt, Human
aggcagcaucugauugugauuugg

SEQ ID NO: 36674 - RNA, 24 nt, Human
guuccuguaaacauccaucgcagc

SEQ ID NO: 36675 - RNA, 24 nt, Human
ggggauccgcgggcugcagguuug

SEQ ID NO: 36676 - RNA, 24 nt, Human
uugguucaagggauggacaaguca

SEQ ID NO: 36677 - RNA, 24 nt, Human
uauugggcaaaacugcaucaaucu

SEQ ID NO: 36678 - RNA, 24 nt, Human
ugaggaggcauuuuugcuaaggcu

SEQ ID NO: 36679 - RNA, 24 nt, Human
uucacuugaaggaauucuauccgg

SEQ ID NO: 36680 - RNA, 24 nt, Human
aguggcuuaaugauccugaaggga

SEQ ID NO: 36681 - RNA, 24 nt, Human
ugacauuaacuacaauuaugggaa

SEQ ID NO: 36682 - RNA, 24 nt, Human
uacuguaucuguuuuccuucaaag

SEQ ID NO: 36683 - RNA, 24 nt, Human
gcgcaaccucuaccgccucuccaa

SEQ ID NO: 36684 - RNA, 24 nt, Human
ccugccacucuaugagcuuaagaa

SEQ ID NO: 36685 - RNA, 22 nt, Human
cccgcccccacggcccagagga

SEQ ID NO: 36686 - RNA, 24 nt, Human
gaccuuuucuuccuggacuauuga

SEQ ID NO: 36687 - RNA, 24 nt, Human
uuuaaaaucugucauuugcuuauu

SEQ ID NO: 36688 - RNA, 24 nt, Human
ugagagagagagaauauaugccac

SEQ ID NO: 36689 - RNA, 24 nt, Human
uaaaugcgcuugaugggcucggcu

SEQ ID NO: 36690 - RNA, 24 nt, Human
uugaugaagucucucaucuuuaga

SEQ ID NO: 36691 - RNA, 24 nt, Human
ucagaccaacagaagauaaccaua

SEQ ID NO: 36692 - RNA, 24 nt, Human
uauguagaaggaaacaccaagaaa

SEQ ID NO: 36693 - RNA, 24 nt, Human
aauuuuuuugcuuguuugucuuuu

SEQ ID NO: 36694 - RNA, 24 nt, Human
aaggaguuaaaagcuucuucuuca

SEQ ID NO: 36695 - RNA, 24 nt, Human
cagccguggcucucuagucuucgu

SEQ ID NO: 36696 - RNA, 24 nt, Human
acgggccgcuuuccacaaugcagu

SEQ ID NO: 36697 - RNA, 24 nt, Human
aggccgagguccgcggccaggugc

SEQ ID NO: 36698 - RNA, 24 nt, Human
uggccggcacgggcagacaacgcg

SEQ ID NO: 36699 - RNA, 24 nt, Human
cagcugcacgaacaucaugugguc

SEQ ID NO: 36700 - RNA, 24 nt, Human
ccgcgcugugaccuggggccucuc

SEQ ID NO: 36701 - RNA, 24 nt, Human
ugagcaguguaugucaggacuugu

SEQ ID NO: 36702 - RNA, 24 nt, Human
ugcuguguguuucauuuuaaauug

SEQ ID NO: 36703 - RNA, 24 nt, Human
uggauuggggagaggguccggggu

SEQ ID NO: 36704 - RNA, 24 nt, Human
uagagcuagugaauuagccuauuu

SEQ ID NO: 36705 - RNA, 24 nt, Human
uucaucucuuugcucgggagguuc

SEQ ID NO: 36706 - RNA, 23 nt, Human
cuggcccuggagcugcacggaca

SEQ ID NO: 36707 - RNA, 24 nt, Human
gagguuccuucacugugcgugcug

SEQ ID NO: 36708 - RNA, 24 nt, Human
uaucccaucacccuuuauuuggag

SEQ ID NO: 36709 - RNA, 24 nt, Human
aagaagccgauuaugugguuuagc

SEQ ID NO: 36710 - RNA, 24 nt, Human
caagcgcaaaguauccuacgccuc

SEQ ID NO: 36711 - RNA, 24 nt, Human
uacacggucguggacgagauguuc

SEQ ID NO: 36712 - RNA, 24 nt, Human
cccuccuggacucgccugcucgcu

SEQ ID NO: 36713 - RNA, 22 nt, Human
ucaggccacugaauggguagga

SEQ ID NO: 36714 - RNA, 24 nt, Human
cuugcugugcucaccugggggggg

SEQ ID NO: 36715 - RNA, 24 nt, Human
accugcucuaguccuguggguccc

SEQ ID NO: 36716 - RNA, 24 nt, Human
agccuacauccuggugguggcggg

SEQ ID NO: 36717 - RNA, 24 nt, Human
gaccuggauccugcacaguugggg

SEQ ID NO: 36718 - RNA, 22 nt, Human
ugccucagagaacuucugcagc

SEQ ID NO: 36719 - RNA, 24 nt, Human
ugggggaaccccccuuuuuccuua

SEQ ID NO: 36720 - RNA, 20 nt, Human
ccccaggggggggggggggg

SEQ ID NO: 36721 - RNA, 20 nt, Human
ucccuguggaaugaaaccgc

SEQ ID NO: 36722 - RNA, 24 nt, Human
uaaugggucucaaaauucugugac

SEQ ID NO: 36723 - RNA, 24 nt, Human
uauuagggauaauauucauuuagc

SEQ ID NO: 36724 - RNA, 24 nt, Human
aggaggcuuuaaaaauagacacca

SEQ ID NO: 36725 - RNA, 24 nt, Human
uucagugucgucaauuuuccauga

SEQ ID NO: 36726 - RNA, 24 nt, Human
uggaagcugcugcugagaucccag

SEQ ID NO: 36727 - RNA, 24 nt, Human
uccaggguucuaccacuugggggg

SEQ ID NO: 36728 - RNA, 21 nt, Human
gguucugggcucccagagagg

SEQ ID NO: 36729 - RNA, 24 nt, Human
ugagaucuugggcaaaucacuuag

SEQ ID NO: 36730 - RNA, 24 nt, Human
uaccucgcccacacuggccagcag

SEQ ID NO: 36731 - RNA, 24 nt, Human
cauucaaucacucucuaugcuugg

SEQ ID NO: 36732 - RNA, 23 nt, Human
ugccccaguacuuuguggguguu

SEQ ID NO: 36733 - RNA, 24 nt, Human
cuggcagugcuccuggcgucgugg

SEQ ID NO: 36734 - RNA, 24 nt, Human
uauuuuuauaacuuguggucguac

SEQ ID NO: 36735 - RNA, 24 nt, Human
uucauauucauggcugaaacuuga

SEQ ID NO: 36736 - RNA, 24 nt, Human
uccaagcugagcuggaugggcuac

SEQ ID NO: 36737 - RNA, 24 nt, Human
cuagauggugacuguaugaccuua

SEQ ID NO: 36738 - RNA, 24 nt, Human
cuggagcagguccaccggccccua

SEQ ID NO: 36739 - RNA, 24 nt, Human
gugcagaaugagggccgaguagau

SEQ ID NO: 36740 - RNA, 24 nt, Human
ccaggccaaaaaggcucaacauuu

SEQ ID NO: 36741 - RNA, 24 nt, Human
aggugucggauggacuuuuggcuc

SEQ ID NO: 36742 - RNA, 24 nt, Human
ugaagaggugagcuccccuucgcc

SEQ ID NO: 36743 - RNA, 24 nt, Human
ugggcaaguuggugagguucugca

SEQ ID NO: 36744 - RNA, 24 nt, Human
gugcugccccuugaggaagcaaag

SEQ ID NO: 36745 - RNA, 24 nt, Human
uaagagaacaguacaauuugcagu

SEQ ID NO: 36746 - RNA, 24 nt, Human
uugaacacauucuuaaaaacacug

SEQ ID NO: 36747 - RNA, 24 nt, Human
uucaagcucuaaaauuuugguucu

SEQ ID NO: 36748 - RNA, 24 nt, Human
gguaaggcugggugcaguggcuca

SEQ ID NO: 36749 - RNA, 21 nt, Human
ugacugcagagcaaguagcug

SEQ ID NO: 36750 - RNA, 24 nt, Human
uggaugauccugagguggagcagg

SEQ ID NO: 36751 - RNA, 19 nt, Human
uuccaaguggugcuggaag

SEQ ID NO: 36752 - RNA, 24 nt, Human
ugucuguagauuuuggaaaguggu

SEQ ID NO: 36753 - RNA, 24 nt, Human
acauuccuuauugcguuggcccag

SEQ ID NO: 36754 - RNA, 24 nt, Human
acccuggugugaaugcgcacaucu

SEQ ID NO: 36755 - RNA, 22 nt, Human
uuacugaauguggcaucagggc

SEQ ID NO: 36756 - RNA, 24 nt, Human
cauggcucaccaagcccugcucca

SEQ ID NO: 36757 - RNA, 24 nt, Human
ucccucuggcugaagacugagaag

SEQ ID NO: 36758 - RNA, 21 nt, Human
uagguggugacagggccuuga

SEQ ID NO: 36759 - RNA, 24 nt, Human
cagggcacagaugaccaaaguccc

SEQ ID NO: 36760 - RNA, 24 nt, Human
ucuuuuguauaaaugacaaagugu

SEQ ID NO: 36761 - RNA, 24 nt, Human
aggcaggggguggggaaggcggug

SEQ ID NO: 36762 - RNA, 23 nt, Human
ugccaaggaccaggaugauggag

SEQ ID NO: 36763 - RNA, 22 nt, Human
aagcugccccaccagcucugcc

SEQ ID NO: 36764 - RNA, 24 nt, Human
ccucccugguggcuaacagggaau

SEQ ID NO: 36765 - RNA, 24 nt, Human
aucacaguuuagaggcacagugga

SEQ ID NO: 36766 - RNA, 24 nt, Human
ucacugagugagcagaaucuggua

SEQ ID NO: 36767 - RNA, 24 nt, Human
agugaagaauucaggcaggugaug

SEQ ID NO: 36768 - RNA, 24 nt, Human
uaccugcugcaggguugguacauu

SEQ ID NO: 36769 - RNA, 24 nt, Human
aggccucacagccgcuuagcacag

SEQ ID NO: 36770 - RNA, 24 nt, Human
ucaguccuggcuagacaaguccac

SEQ ID NO: 36771 - RNA, 24 nt, Human
ugcgaagcccggagaaugugaggc

SEQ ID NO: 36772 - RNA, 24 nt, Human
uuugccuggcagguucaggcucag

SEQ ID NO: 36773 - RNA, 18 nt, Human
cucuaaaucaugguccuc

SEQ ID NO: 36774 - RNA, 24 nt, Human
ugaauauuauucuuuaaugugacu

SEQ ID NO: 36775 - RNA, 24 nt, Human
uuaaaguuucaaaauggagacuca

SEQ ID NO: 36776 - RNA, 24 nt, Human
uguuuagagggaaauauaaauuua

SEQ ID NO: 36777 - RNA, 24 nt, Human
ugagaugggaaagggcuccuucaa

SEQ ID NO: 36778 - RNA, 21 nt, Human
uucaagggauggaaagucacc

SEQ ID NO: 36779 - RNA, 24 nt, Human
uccaggccccacccuagacuuccu

SEQ ID NO: 36780 - RNA, 24 nt, Human
ugccaggugcuuuguggauguucu

SEQ ID NO: 36781 - RNA, 24 nt, Human
ugagaaaggcggagaggcuccaaa

SEQ ID NO: 36782 - RNA, 24 nt, Human
ggccgguggcugagcagucccaga

SEQ ID NO: 36783 - RNA, 24 nt, Human
uuccuugguaugguuaugauuaua

SEQ ID NO: 36784 - RNA, 24 nt, Human
gggcauuuggcauuguuggaaaug

SEQ ID NO: 36785 - RNA, 24 nt, Human
uaucagaggauuuaguucuugcau

SEQ ID NO: 36786 - RNA, 20 nt, Human
ucaguguaguuguaaaugcu

SEQ ID NO: 36787 - RNA, 24 nt, Human
uuaauguuauuaugagguuaaugu

SEQ ID NO: 36788 - RNA, 24 nt, Human
uguuuuguuuuuucauauuuguag

SEQ ID NO: 36789 - RNA, 24 nt, Human
agaguuccagccagaagcuacagc

SEQ ID NO: 36790 - RNA, 24 nt, Human
aaaaccuucaaccucaugccagaa

SEQ ID NO: 36791 - RNA, 18 nt, Human
ucucagggcagauggaag

SEQ ID NO: 36792 - RNA, 24 nt, Human
uuaaagcaguuuuagguguacagc

SEQ ID NO: 36793 - RNA, 24 nt, Human
ucaaaaauagauaguuggugacug

SEQ ID NO: 36794 - RNA, 24 nt, Human
uucauagucgugaaacuggugucu

SEQ ID NO: 36795 - RNA, 24 nt, Human
ggccauggacuuguacagcacccc

SEQ ID NO: 36796 - RNA, 24 nt, Human
acaggaacaugucaucugcagaga

SEQ ID NO: 36797 - RNA, 24 nt, Human
gucgcagggaagcccuggagaaaa

SEQ ID NO: 36798 - RNA, 24 nt, Human
uauugcuuugcccucuuuuucacu

SEQ ID NO: 36799 - RNA, 24 nt, Human
uucauaauacauagaugauauaaa

SEQ ID NO: 36800 - RNA, 24 nt, Human
ugaguaagaagcuauauggacucc

SEQ ID NO: 36801 - RNA, 24 nt, Human
aagaaucauugagauaggaggaaa

SEQ ID NO: 36802 - RNA, 24 nt, Human
uccccaggcucaagcauccuccca

SEQ ID NO: 36803 - RNA, 24 nt, Human
cccgggcucaagugauccaccccc

SEQ ID NO: 36804 - RNA, 24 nt, Human
uaugucugugcucacuccuuuaga

SEQ ID NO: 36805 - RNA, 24 nt, Human
uuaguucauucuucuaauaagccu

SEQ ID NO: 36806 - RNA, 24 nt, Human
aagcguuaucugucaaagcaauuc

SEQ ID NO: 36807 - RNA, 24 nt, Human
ugugcucagcaaugagaauauagc

SEQ ID NO: 36808 - RNA, 17 nt, Human
uuucuuggugggucaag

SEQ ID NO: 36809 - RNA, 24 nt, Human
uguaauaggcuggcugcgcugcua

SEQ ID NO: 36810 - RNA, 24 nt, Human
ucaguuuugauggaacuuggagua

SEQ ID NO: 36811 - RNA, 24 nt, Human
ucgaugccacaucccccucaaagg

SEQ ID NO: 36812 - RNA, 24 nt, Human
ugauggauguggcgaaaugaacau

SEQ ID NO: 36813 - RNA, 24 nt, Human
ucacugagcuaaugaucuaauccu

SEQ ID NO: 36814 - RNA, 24 nt, Human
ccccccgagcugaggaggcuucgc

SEQ ID NO: 36815 - RNA, 24 nt, Human
ugugcaggacaaggagccgcaagg

SEQ ID NO: 36816 - RNA, 24 nt, Human
ccccagagccucaggcagcucaga

SEQ ID NO: 36817 - RNA, 24 nt, Human
acgcucccacgguggcacaugaac

SEQ ID NO: 36818 - RNA, 24 nt, Human
ugccuuauuguuuacaugaugguc

SEQ ID NO: 36819 - RNA, 24 nt, Human
uuaauugcaaaagaauagugauca

SEQ ID NO: 36820 - RNA, 22 nt, Human
uacgcugccugugaccuuugug

SEQ ID NO: 36821 - RNA, 24 nt, Human
uaagagcuacugucagaccuucag

SEQ ID NO: 36822 - RNA, 24 nt, Human
uaagagaaaaugucuucuuuagga

SEQ ID NO: 36823 - RNA, 22 nt, Human
uggggcaacaccagcuggugga

SEQ ID NO: 36824 - RNA, 24 nt, Human
uaaauguccuaucugugagaaaag

SEQ ID NO: 36825 - RNA, 24 nt, Human
ugcaaaaaagccuuucugcggagu

SEQ ID NO: 36826 - RNA, 24 nt, Human
agggaccaggagcuccugcaugcu

SEQ ID NO: 36827 - RNA, 18 nt, Human
uggcaggaauauaccuuc

SEQ ID NO: 36828 - RNA, 24 nt, Human
agagguaaucaggcccaggcugcg

SEQ ID NO: 36829 - RNA, 21 nt, Human
gcggacccacacgggcgagug

SEQ ID NO: 36830 - RNA, 24 nt, Human
ggacaccgccaggcccgagcccag

SEQ ID NO: 36831 - RNA, 24 nt, Human
ugaguuaacaaaauauuuuuaaua

SEQ ID NO: 36832 - RNA, 24 nt, Human
ugaguugguuggauuggcaagcau

SEQ ID NO: 36833 - RNA, 23 nt, Human
uugcucgcaguauccuagaaucu

SEQ ID NO: 36834 - RNA, 24 nt, Human
ugacuugguguuuuaucuugaccc

SEQ ID NO: 36835 - RNA, 24 nt, Human
uaagguaaaugacacaaaguugaa

SEQ ID NO: 36836 - RNA, 24 nt, Human
acuaaacuguagagaaaagacaaa

SEQ ID NO: 36837 - RNA, 24 nt, Human
ugagugcaacggaaagggcuauca

SEQ ID NO: 36838 - RNA, 24 nt, Human
uugcauagcucaaaaaguuugaaa

SEQ ID NO: 36839 - RNA, 24 nt, Human
uauuagggauaauauucauuuagc

SEQ ID NO: 36840 - RNA, 24 nt, Human
uaaugggucucaaaauucugugac

SEQ ID NO: 36841 - RNA, 24 nt, Human
uggccaaggauucuuugcuugucu

SEQ ID NO: 36842 - RNA, 20 nt, Human
uggcucggggcgagcggcgg

SEQ ID NO: 36843 - RNA, 21 nt, Human
cacccuuuuucucaagccaag

SEQ ID NO: 36844 - RNA, 17 nt, Human
uggcugggaguuccacg

SEQ ID NO: 36845 - RNA, 24 nt, Human
cuggcacuucagguguggccggca

SEQ ID NO: 36846 - RNA, 24 nt, Human
acugucuuugugguucuggcuguu

SEQ ID NO: 36847 - RNA, 24 nt, Human
agacagggugcguccaucuuccag

SEQ ID NO: 36848 - RNA, 24 nt, Human
ucagggucuucacgaagaucugca

SEQ ID NO: 36849 - RNA, 21 nt, Human
ugagcggaggagggcccgagu

SEQ ID NO: 36850 - RNA, 18 nt, Human
ugcuauuucggcuucauc

SEQ ID NO: 36851 - RNA, 24 nt, Human
caagagcaccuggcguacgccugc

SEQ ID NO: 36852 - RNA, 24 nt, Human
uagcuuauuggucaggguagauag

SEQ ID NO: 36853 - RNA, 24 nt, Human
uguuauggaauauaguuauaagca

SEQ ID NO: 36854 - RNA, 20 nt, Human
uccugggugcugggacgugc

SEQ ID NO: 36855 - RNA, 24 nt, Human
gacucugggccaccccaguuauac

SEQ ID NO: 36856 - RNA, 21 nt, Human
uguggaaaugguuauauaugg

SEQ ID NO: 36857 - RNA, 24 nt, Human
uugccuggcccugggaggcccaag

SEQ ID NO: 36858 - RNA, 24 nt, Human
uucauaguuuacagaauuuuaaug

SEQ ID NO: 36859 - RNA, 24 nt, Human
aaggagcuggccuugaacucaggg

SEQ ID NO: 36860 - RNA, 24 nt, Human
cggggccaggcuggcagcugucug

SEQ ID NO: 36861 - RNA, 24 nt, Human
uggcugccugcucagggccuggcu

SEQ ID NO: 36862 - RNA, 18 nt, Human
ugcgugcggaagcgcagg

SEQ ID NO: 36863 - RNA, 24 nt, Human
ugaguagauuuacaguugugugga

SEQ ID NO: 36864 - RNA, 24 nt, Human
cuagcauuuucaaguuugcaguaa

SEQ ID NO: 36865 - RNA, 24 nt, Human
guuuggggagagacacaggcaggc

SEQ ID NO: 36866 - RNA, 24 nt, Human
agucuguugggguggugcucaggg

SEQ ID NO: 36867 - RNA, 24 nt, Human
gggccggagcguggccggaccccc

SEQ ID NO: 36868 - RNA, 24 nt, Human
ccuggcaugccuuuuucacggcgg

SEQ ID NO: 36869 - RNA, 24 nt, Human
cucagcauccggcaagaaaacaga

SEQ ID NO: 36870 - RNA, 24 nt, Human
ucuucaauuuuuguauagaguuuu

SEQ ID NO: 36871 - RNA, 24 nt, Human
ucucaccgaagugaucuggaaugu

SEQ ID NO: 36872 - RNA, 24 nt, Human
ugggaaguuuggggccuacaugca

SEQ ID NO: 36873 - RNA, 24 nt, Human
ucgguuguuaagaacuagagcuua

SEQ ID NO: 36874 - RNA, 24 nt, Human
uuuccauguaaaaucucuguugug

SEQ ID NO: 36875 - RNA, 24 nt, Human
uaaaaugcucucaaguccuuugaa

SEQ ID NO: 36876 - RNA, 23 nt, Human
cacugcuauaaaagaugcagggg

SEQ ID NO: 36877 - RNA, 24 nt, Human
uggaauaguauuauguacaaggca

SEQ ID NO: 36878 - RNA, 24 nt, Human
uugaaagguauauuaaaauuaagg

SEQ ID NO: 36879 - RNA, 24 nt, Human
ucuacagucugugaauauaccaau

SEQ ID NO: 36880 - RNA, 24 nt, Human
uggcaauuguaaauagguuuccag

SEQ ID NO: 36881 - RNA, 22 nt, Human
uugaaguuacccaaccaaaugg

SEQ ID NO: 36882 - RNA, 23 nt, Human
caggagccaaucauuagaauuug

SEQ ID NO: 36883 - RNA, 22 nt, Human
ucccucaccaguacaguggagg

SEQ ID NO: 36884 - RNA, 24 nt, Human
ugagaaagagcccuguggcuacgu

SEQ ID NO: 36885 - RNA, 24 nt, Human
ugagaaagagcccuguggcuacgu

SEQ ID NO: 36886 - RNA, 17 nt, Human
uacaguggagguguugg

SEQ ID NO: 36887 - RNA, 21 nt, Human
ugaguuggugagugcugaugu

SEQ ID NO: 36888 - RNA, 24 nt, Human
cagcggaugaauauugggaagcuc

SEQ ID NO: 36889 - RNA, 24 nt, Human
ucuugcucugucgcccaggcugaa

SEQ ID NO: 36890 - RNA, 24 nt, Human
cccaaguagcugggauuacaggcu

SEQ ID NO: 36891 - RNA, 24 nt, Human
aggcauugcaaaaugccuuugaua

SEQ ID NO: 36892 - RNA, 24 nt, Human
cgcgcaaauccucaacugcccugc

SEQ ID NO: 36893 - RNA, 24 nt, Human
uaaugcuagcagguuaaaaucaau

SEQ ID NO: 36894 - RNA, 24 nt, Human
ugccugcacggccgcgucgcucag

SEQ ID NO: 36895 - RNA, 21 nt, Human
gcgcggcgcgagggcgcggag

SEQ ID NO: 36896 - RNA, 24 nt, Human
ugggaagggaaguuaucaagacga

SEQ ID NO: 36897 - RNA, 24 nt, Human
ucaaggcaggaauaaagagcuuuu

SEQ ID NO: 36898 - RNA, 24 nt, Human
uggcagaguuaaauugugcuuuug

SEQ ID NO: 36899 - RNA, 24 nt, Human
auuaaguauccucuaccugcaaau

SEQ ID NO: 36900 - RNA, 24 nt, Human
uccccaggcagccuggggaacgug

SEQ ID NO: 36901 - RNA, 24 nt, Human
uggaacuguguuugggagccucau

SEQ ID NO: 36902 - RNA, 24 nt, Human
uuuuucagacaauuuugcagaaag

SEQ ID NO: 36903 - RNA, 24 nt, Human
uuccauuguguuaaaggcuguaau

SEQ ID NO: 36904 - RNA, 24 nt, Human
uuccauugcacuccagccugggua

SEQ ID NO: 36905 - RNA, 21 nt, Human
ugcgacgauugugcuuugagg

SEQ ID NO: 36906 - RNA, 24 nt, Human
uaacagguguaagaguguugaaaa

SEQ ID NO: 36907 - RNA, 24 nt, Human
uaucaaggaagggcaggcgugaug

SEQ ID NO: 36908 - RNA, 24 nt, Human
uucaaauuucuuucuuuuuuaauu

SEQ ID NO: 36909 - RNA, 24 nt, Human
ccccccuucccccuuuuuuguccc

SEQ ID NO: 36910 - RNA, 24 nt, Human
uagcauugcuuucguguaaauuau

SEQ ID NO: 36911 - RNA, 24 nt, Human
uaccugugcaguugugaauaccca

SEQ ID NO: 36912 - RNA, 24 nt, Human
cuaugcuaggaggcaaauggccag

SEQ ID NO: 36913 - RNA, 24 nt, Human
ucuguaauuaugaaaaagguuguu

SEQ ID NO: 36914 - RNA, 24 nt, Human
uguuuugcaucuguaucuucuaaa

SEQ ID NO: 36915 - RNA, 18 nt, Human
uggguuugguugauugca

SEQ ID NO: 36916 - RNA, 24 nt, Human
uagcauccauaauaaaguuucauu

SEQ ID NO: 36917 - RNA, 24 nt, Human
uagccucacucuccauucucugcc

SEQ ID NO: 36918 - RNA, 24 nt, Human
uuaaagcacuuucuaaagcccuca

SEQ ID NO: 36919 - RNA, 23 nt, Human
uacacaguguuuauugugguuag

SEQ ID NO: 36920 - RNA, 24 nt, Human
ggugauugcauaguguccuuugag

SEQ ID NO: 36921 - RNA, 24 nt, Human
uucaccuuggcuugaguagggggc

SEQ ID NO: 36922 - RNA, 24 nt, Human
uuucuuggguuuuugggcagccuu

SEQ ID NO: 36923 - RNA, 24 nt, Human
uaggagaaggaauuucaggugggu

SEQ ID NO: 36924 - RNA, 24 nt, Human
uuaacauagacuugaauuauuuuu

SEQ ID NO: 36925 - RNA, 24 nt, Human
ugccacgggaggaaugacaagcag

SEQ ID NO: 36926 - RNA, 24 nt, Human
auugcaaauuccauagggcugugg

SEQ ID NO: 36927 - RNA, 24 nt, Human
cauucacugugcuaucggcaauga

SEQ ID NO: 36928 - RNA, 24 nt, Human
aagaaggcauuuucacacaaggcu

SEQ ID NO: 36929 - RNA, 24 nt, Human
uuuucaguuucauccauguauuuc

SEQ ID NO: 36930 - RNA, 24 nt, Human
ugaaauauaauucacauaccacaa

SEQ ID NO: 36931 - RNA, 20 nt, Human
gaucaugguuaucugauuug

SEQ ID NO: 36932 - RNA, 24 nt, Human
ugggaaauuuccagguuuugugaa

SEQ ID NO: 36933 - RNA, 24 nt, Human
ccccguugucuucgcgugugucug

SEQ ID NO: 36934 - RNA, 24 nt, Human
uaaacuaccagugaaaagcgaaua

SEQ ID NO: 36935 - RNA, 24 nt, Human
uuguaagaguggaauuaacugccc

SEQ ID NO: 36936 - RNA, 24 nt, Human
ucccagagcaaccauguuuuagca

SEQ ID NO: 36937 - RNA, 24 nt, Human
cuaaggcgucuuuuguaggcuuaa

SEQ ID NO: 36938 - RNA, 24 nt, Human
uauuauguggugaaauuuuguaaa

SEQ ID NO: 36939 - RNA, 24 nt, Human
uagcuuuauuggggagggggugau

SEQ ID NO: 36940 - RNA, 24 nt, Human
cucguaguguucuggcgggcaguu

SEQ ID NO: 36941 - RNA, 24 nt, Human
uauaaaacuuugauaguuacauug

SEQ ID NO: 36942 - RNA, 24 nt, Human
aacagguaaccacuugagaggaug

SEQ ID NO: 36943 - RNA, 24 nt, Human
uaacagggacgccacagguuuuua

SEQ ID NO: 36944 - RNA, 24 nt, Human
agggagccacgauaauucuccaga

SEQ ID NO: 36945 - RNA, 24 nt, Human
ugaaugacgagcauugagccauca

SEQ ID NO: 36946 - RNA, 24 nt, Human
uaaugggucucaaaauucugugac

SEQ ID NO: 36947 - RNA, 24 nt, Human
uauuagggauaauauucauuuagc

SEQ ID NO: 36948 - RNA, 24 nt, Human
uuuauaaucuauuuguggauuuug

SEQ ID NO: 36949 - RNA, 24 nt, Human
uuuauuagauaccauuuaaaaauu

SEQ ID NO: 36950 - RNA, 24 nt, Human
uuucauugcagucauuauaggauu

SEQ ID NO: 36951 - RNA, 24 nt, Human
cagcagaacauguaguuaugcuug

SEQ ID NO: 36952 - RNA, 24 nt, Human
uaaggaaacuguuguuguuaaaau

SEQ ID NO: 36953 - RNA, 24 nt, Human
uauaauauauucuaaacacaauga

SEQ ID NO: 36954 - RNA, 24 nt, Human
gugcaguuaauguugaaguuacag

SEQ ID NO: 36955 - RNA, 21 nt, Human
uaacauccaccccccaccauc

SEQ ID NO: 36956 - RNA, 24 nt, Human
aaagauggucggcugcuuuuggua

SEQ ID NO: 36957 - RNA, 24 nt, Human
ggacagguguacagacauguucuu

SEQ ID NO: 36958 - RNA, 24 nt, Human
ucgaauggacacauuaccagugaa

SEQ ID NO: 36959 - RNA, 24 nt, Human
uccaaggggauauccacagaguac

SEQ ID NO: 36960 - RNA, 24 nt, Human
ucucuuggcgaucuucuucuugcc

SEQ ID NO: 36961 - RNA, 20 nt, Human
caucacccagccuccgaguc

SEQ ID NO: 36962 - RNA, 24 nt, Human
agcuguugauuauguuuguaguug

SEQ ID NO: 36963 - RNA, 24 nt, Human
aagcggccgggggucaucuaacag

SEQ ID NO: 36964 - RNA, 24 nt, Human
uugaauguuggaaagacacugaca

SEQ ID NO: 36965 - RNA, 24 nt, Human
ugcgguggcagcucugucuggccg

SEQ ID NO: 36966 - RNA, 18 nt, Human
ugaccagaauaugggugg

SEQ ID NO: 36967 - RNA, 20 nt, Human
uccauggucucuuugggcgg

SEQ ID NO: 36968 - RNA, 24 nt, Human
uuuauaauuaaauuauauaauggg

SEQ ID NO: 36969 - RNA, 24 nt, Human
ucuauagacaucacuuaaccuaaa

SEQ ID NO: 36970 - RNA, 24 nt, Human
ugccuugggaagggaggagcagag

SEQ ID NO: 36971 - RNA, 24 nt, Human
uguagauagucuacauuaugauau

SEQ ID NO: 36972 - RNA, 24 nt, Human
agaaugcaaauauauuuuuacugu

SEQ ID NO: 36973 - RNA, 24 nt, Human
uucaacauauguaacguuauucuc

SEQ ID NO: 36974 - RNA, 24 nt, Human
uugaagcauagaauugggcaucca

SEQ ID NO: 36975 - RNA, 24 nt, Human
uggcugggcucuuaucuggaaguu

SEQ ID NO: 36976 - RNA, 24 nt, Human
ucuacaauaaccucaacccccuua

SEQ ID NO: 36977 - RNA, 24 nt, Human
aggcagaguggagagaaacaacuc

SEQ ID NO: 36978 - RNA, 24 nt, Human
ugaaguauacaaacugaaagcuga

SEQ ID NO: 36979 - RNA, 22 nt, Human
ugaaagaaggccuaaagaauua

SEQ ID NO: 36980 - RNA, 24 nt, Human
ccuuuggucgcucgcuccucuccu

SEQ ID NO: 36981 - RNA, 24 nt, Human
ugacauuugcgucugagaaacaau

SEQ ID NO: 36982 - RNA, 24 nt, Human
ucagugguugguggaacaugaaua

SEQ ID NO: 36983 - RNA, 24 nt, Human
aaagauccuggguaguucggauga

SEQ ID NO: 36984 - RNA, 21 nt, Human
ugacucguaaugguggguugc

SEQ ID NO: 36985 - RNA, 24 nt, Human
agucagucgaaguguggccauaau

SEQ ID NO: 36986 - RNA, 24 nt, Human
ccgugcgguguuggugcacugguc

SEQ ID NO: 36987 - RNA, 24 nt, Human
uaccucuagugcaauuuauaagca

SEQ ID NO: 36988 - RNA, 24 nt, Human
ucacaaggauugaaagaugagguu

SEQ ID NO: 36989 - RNA, 24 nt, Human
uaguugcagccacuaacauguuaa

SEQ ID NO: 36990 - RNA, 24 nt, Human
ugugcaacuaucauuuuucucacc

SEQ ID NO: 36991 - RNA, 24 nt, Human
uauucaguguuucccgaguaagcc

SEQ ID NO: 36992 - RNA, 24 nt, Human
uacaggagaggaaugaugauuuac

SEQ ID NO: 36993 - RNA, 19 nt, Human
uugaagcugagccccgccu

SEQ ID NO: 36994 - RNA, 24 nt, Human
ucuggugugaggcacagcgagggc

SEQ ID NO: 36995 - RNA, 24 nt, Human
uauggcaagaaguccaagcuggag

SEQ ID NO: 36996 - RNA, 24 nt, Human
uguguuuguagacuuggaacccac

SEQ ID NO: 36997 - RNA, 24 nt, Human
caccggucuucagggcuucuuggu

SEQ ID NO: 36998 - RNA, 24 nt, Human
ccccggaggucccggaaagggcgg

SEQ ID NO: 36999 - RNA, 24 nt, Human
uaccuggaagagaggcuggaagcu

SEQ ID NO: 37000 - RNA, 24 nt, Human
ucaaagcguuagguuauaggaauu

SEQ ID NO: 37001 - RNA, 24 nt, Human
uaggauaauaguggagagaagguc

SEQ ID NO: 37002 - RNA, 24 nt, Human
uuccuuacuuucuagaauaacaag

SEQ ID NO: 37003 - RNA, 24 nt, Human
uauccugccuuaauucuagaauca

SEQ ID NO: 37004 - RNA, 24 nt, Human
caccuggcugucuuuuccauuaug

SEQ ID NO: 37005 - RNA, 24 nt, Human
gucaacucugccugcauccuaaaa

SEQ ID NO: 37006 - RNA, 24 nt, Human
agucguuuuuuuacagagaaaagg

SEQ ID NO: 37007 - RNA, 24 nt, Human
ugaccagggcugugcuugagguac

SEQ ID NO: 37008 - RNA, 24 nt, Human
uaccugccgaucauagacgacguc

SEQ ID NO: 37009 - RNA, 24 nt, Human
gggcagugggcaccgucaaaguau

SEQ ID NO: 37010 - RNA, 24 nt, Human
caccuggaacaucaaccacgcccg

SEQ ID NO: 37011 - RNA, 22 nt, Human
cacucgguguacguccuggagg

SEQ ID NO: 37012 - RNA, 24 nt, Human
cuccucuagcuuauuggugucucc

SEQ ID NO: 37013 - RNA, 24 nt, Human
caccgggaggugaccccugaccag

SEQ ID NO: 37014 - RNA, 24 nt, Human
ucugaucuauaaaugcgguggcau

SEQ ID NO: 37015 - RNA, 23 nt, Human
agcaacuaucagggcagcucugc

SEQ ID NO: 37016 - RNA, 24 nt, Human
uauugcucacgggggcuccagccg

SEQ ID NO: 37017 - RNA, 24 nt, Human
ucccgugggccucacaugccaggu

SEQ ID NO: 37018 - RNA, 24 nt, Human
uggccugaugauccacagcggaga

SEQ ID NO: 37019 - RNA, 24 nt, Human
ugugugccauugcccaggcagagu

SEQ ID NO: 37020 - RNA, 24 nt, Human
uacaccacucccaagaagaauaag

SEQ ID NO: 37021 - RNA, 24 nt, Human
uauggcaagucacuuugacagaca

SEQ ID NO: 37022 - RNA, 24 nt, Human
ugagaauggcaaaauuagucgccu

SEQ ID NO: 37023 - RNA, 24 nt, Human
uacaccacucccaagaagaauaag

SEQ ID NO: 37024 - RNA, 24 nt, Human
caccuggcaagcacuguggcuggc

SEQ ID NO: 37025 - RNA, 24 nt, Human
uacacugacacgggaaagagggcg

SEQ ID NO: 37026 - RNA, 24 nt, Human
uacguccaacuucagccccagaug

SEQ ID NO: 37027 - RNA, 24 nt, Human
uuagcggugcccucaugccugcuc

SEQ ID NO: 37028 - RNA, 24 nt, Human
ucacugaguacgcggugcagcgca

SEQ ID NO: 37029 - RNA, 24 nt, Human
aagcaucugaguuugagaccaugg

SEQ ID NO: 37030 - RNA, 24 nt, Human
uaccuuugauaaagggcagaugaa

SEQ ID NO: 37031 - RNA, 23 nt, Human
caucaauugcugccaacccaggg

SEQ ID NO: 37032 - RNA, 24 nt, Human
caagaacccgagcacgaacuucca

SEQ ID NO: 37033 - RNA, 24 nt, Human
aauuguuggcuguuuucauaagca

SEQ ID NO: 37034 - RNA, 23 nt, Human
uggcagaaaucagcacgcuggcc

SEQ ID NO: 37035 - RNA, 24 nt, Human
acugcucugagauuugagggaaac

SEQ ID NO: 37036 - RNA, 24 nt, Human
ccuggacgagccccagggacaguc

SEQ ID NO: 37037 - RNA, 21 nt, Human
cugcagcagcucuucuccucc

SEQ ID NO: 37038 - RNA, 24 nt, Human
uccacauucggcuauggggaggaa

SEQ ID NO: 37039 - RNA, 24 nt, Human
ggagguggacuuuggccccuaggg

SEQ ID NO: 37040 - RNA, 24 nt, Human
uggggaggaaagccaguaggaccc

SEQ ID NO: 37041 - RNA, 24 nt, Human
ugcaggaaugagagugauuuuaug

SEQ ID NO: 37042 - RNA, 24 nt, Human
uaaaaaggaccuuuuguuuauacu

SEQ ID NO: 37043 - RNA, 24 nt, Human
ugucagagguugaaugccaucugc

SEQ ID NO: 37044 - RNA, 24 nt, Human
aaaaauuucaauaaccuuugaaau

SEQ ID NO: 37045 - RNA, 24 nt, Human
uuauauuguguuuuuugcguuggu

SEQ ID NO: 37046 - RNA, 24 nt, Human
ucagcaagcaggaguaugacgagu

SEQ ID NO: 37047 - RNA, 24 nt, Human
gacacggugcaaggugacagcagu

SEQ ID NO: 37048 - RNA, 24 nt, Human
acgcagagccggacgugacgggcu

SEQ ID NO: 37049 - RNA, 23 nt, Human
ugacagcugaaggcggggaggcu

SEQ ID NO: 37050 - RNA, 24 nt, Human
aggcuggggucaggcagagguggg

SEQ ID NO: 37051 - RNA, 24 nt, Human
gguccagucagccuugcccagugg

SEQ ID NO: 37052 - RNA, 24 nt, Human
uggccaguuagccguaaaaaaaga

SEQ ID NO: 37053 - RNA, 24 nt, Human
gcgccuuuguuggggguccgggaa

SEQ ID NO: 37054 - RNA, 24 nt, Human
uuucugggagagugcuuaauuccu

SEQ ID NO: 37055 - RNA, 24 nt, Human
ugauugaagccaggaagaaucaug

SEQ ID NO: 37056 - RNA, 24 nt, Human
guggcggcggcggcggcggcagca

SEQ ID NO: 37057 - RNA, 24 nt, Human
agucuuagaaugaguagcaauauc

SEQ ID NO: 37058 - RNA, 24 nt, Human
ccacugcgggggcaagacgaagga

SEQ ID NO: 37059 - RNA, 24 nt, Human
uaaguugcugcaaauucaaaagcu

SEQ ID NO: 37060 - RNA, 24 nt, Human
ugucuugggggaagugcaacugug

SEQ ID NO: 37061 - RNA, 23 nt, Human
uaaggcccacuuaggguccuggu

SEQ ID NO: 37062 - RNA, 24 nt, Human
uaaauugaagaaauuauuuauuac

SEQ ID NO: 37063 - RNA, 24 nt, Human
uugcuguacagauuuuaaaaaacc

SEQ ID NO: 37064 - RNA, 24 nt, Human
agaagaagaagaaauggcaaagag

SEQ ID NO: 37065 - RNA, 24 nt, Human
ucaauuuuuauuuugguuuucuua

SEQ ID NO: 37066 - RNA, 24 nt, Human
gccccgggagaaacacgccagggg

SEQ ID NO: 37067 - RNA, 24 nt, Human
uagggucuaaaaaagcucaaaggg

SEQ ID NO: 37068 - RNA, 24 nt, Human
auuauguuauacaaggcaagcauu

SEQ ID NO: 37069 - RNA, 24 nt, Human
ucacugggcagguuuaagaagaag

SEQ ID NO: 37070 - RNA, 24 nt, Human
ugacuggggcagguuguagagaaa

SEQ ID NO: 37071 - RNA, 24 nt, Human
ugacugcucugccauguugcuuug

SEQ ID NO: 37072 - RNA, 24 nt, Human
uuagaggagccuuuuucaucugac

SEQ ID NO: 37073 - RNA, 24 nt, Human
uguccuguauucuaccgaguccga

SEQ ID NO: 37074 - RNA, 24 nt, Human
uccauggcaggcggguacaagggg

SEQ ID NO: 37075 - RNA, 21 nt, Human
ugggaucgaucagcacugcca

SEQ ID NO: 37076 - RNA, 24 nt, Human
gucccuuucucuccucccuaguaa

SEQ ID NO: 37077 - RNA, 22 nt, Human
uaccggaucaggaagaccaggg

SEQ ID NO: 37078 - RNA, 17 nt, Human
ugugaaguuggggucgu

SEQ ID NO: 37079 - RNA, 24 nt, Human
uguguuguggucuggggagaaugu

SEQ ID NO: 37080 - RNA, 24 nt, Human
uucaaauaggagccgauggaucug

SEQ ID NO: 37081 - RNA, 24 nt, Human
uccaaagaaucggcaaaugagagu

SEQ ID NO: 37082 - RNA, 24 nt, Human
ucaggcucagauagcugcuggccg

SEQ ID NO: 37083 - RNA, 24 nt, Human
uccccugggauccugcagcucuag

SEQ ID NO: 37084 - RNA, 24 nt, Human
ugccuugcccccagacccaccagc

SEQ ID NO: 37085 - RNA, 24 nt, Human
uuuccggcgccgacucugaggccc

SEQ ID NO: 37086 - RNA, 24 nt, Human
ucucacuccacacggugccccgac

SEQ ID NO: 37087 - RNA, 24 nt, Human
gcagugcuggaggcagucucaugc

SEQ ID NO: 37088 - RNA, 24 nt, Human
accacguugcccaguguaaaucca

SEQ ID NO: 37089 - RNA, 24 nt, Human
gcagaauuucgugugugaucacug

SEQ ID NO: 37090 - RNA, 24 nt, Human
ggagauguguauucuuuggccuuc

SEQ ID NO: 37091 - RNA, 24 nt, Human
ucggaaccacauaauuaaagacca

SEQ ID NO: 37092 - RNA, 24 nt, Human
ugagcgguugacccuccuggcucc

SEQ ID NO: 37093 - RNA, 24 nt, Human
ugaauuggcugcagagucugaugu

SEQ ID NO: 37094 - RNA, 24 nt, Human
ucaaagacuaauacuggaauaugu

SEQ ID NO: 37095 - RNA, 24 nt, Human
ugcccagggccagcccauagcuuu

SEQ ID NO: 37096 - RNA, 24 nt, Human
uacaauuuucuauacuguuuaaaa

SEQ ID NO: 37097 - RNA, 24 nt, Human
ucauuuaucauuuauguaaucaaa

SEQ ID NO: 37098 - RNA, 24 nt, Human
agggagcugcugcaggucagccag

SEQ ID NO: 37099 - RNA, 24 nt, Human
aaggaucuuguucucuuugugaca

SEQ ID NO: 37100 - RNA, 24 nt, Human
agauggugaaggcguacagcucag

SEQ ID NO: 37101 - RNA, 24 nt, Human
uccccaugaguucagaauuauuua

SEQ ID NO: 37102 - RNA, 24 nt, Human
aacaguucuuagaccggucuucca

SEQ ID NO: 37103 - RNA, 23 nt, Human
uugguucccuuuaaaaguucugg

SEQ ID NO: 37104 - RNA, 24 nt, Human
uugagggggcaucagaauugggug

SEQ ID NO: 37105 - RNA, 24 nt, Human
uaccauaggacgaaguaaccuugc

SEQ ID NO: 37106 - RNA, 24 nt, Human
aaagguauguaaguuauuaaaugg

SEQ ID NO: 37107 - RNA, 24 nt, Human
uuacugauuuuaaaaauacagaaa

SEQ ID NO: 37108 - RNA, 24 nt, Human
ucgcuagucuccguauggcccgug

SEQ ID NO: 37109 - RNA, 24 nt, Human
uggcguaauaccgaagaggccuga

SEQ ID NO: 37110 - RNA, 23 nt, Human
cagcagacguggcaauaugugug

SEQ ID NO: 37111 - RNA, 23 nt, Human
uuugaccuggggcggaaaaaggc

SEQ ID NO: 37112 - RNA, 24 nt, Human
uaaaaaguuguggcaaagauggcu

SEQ ID NO: 37113 - RNA, 24 nt, Human
uuguccugugcuggggcugacaga

SEQ ID NO: 37114 - RNA, 24 nt, Human
ccacugcacuccagccugggcaag

SEQ ID NO: 37115 - RNA, 24 nt, Human
uuggaaggcagaggugagugaauu

SEQ ID NO: 37116 - RNA, 24 nt, Human
uaggugaugcaagcaucuaagaga

SEQ ID NO: 37117 - RNA, 23 nt, Human
uugaaaaauuugagaaggaggcu

SEQ ID NO: 37118 - RNA, 24 nt, Human
ccuuggguucaagcgauggaaguc

SEQ ID NO: 37119 - RNA, 24 nt, Human
ugagagcucuggccucuucgugag

SEQ ID NO: 37120 - RNA, 21 nt, Human
uggccagaggccaucacaggc

SEQ ID NO: 37121 - RNA, 24 nt, Human
gauugcucgaaccugggaggcgga

SEQ ID NO: 37122 - RNA, 24 nt, Human
cccccgguccagagggccuuccca

SEQ ID NO: 37123 - RNA, 24 nt, Human
ugaggaagaaugugcaucccacag

SEQ ID NO: 37124 - RNA, 24 nt, Human
uauagcaaauuuggaacaacuagg

SEQ ID NO: 37125 - RNA, 24 nt, Human
ugauuuguuucaguuuuauuuucc

SEQ ID NO: 37126 - RNA, 24 nt, Human
uuuguucaaaccaaagugaaaagg

SEQ ID NO: 37127 - RNA, 24 nt, Human
ugagaaacagucaucucaauaaau

SEQ ID NO: 37128 - RNA, 24 nt, Human
aacaguguguaagucauuaacagu

SEQ ID NO: 37129 - RNA, 23 nt, Human
uagcacaugaccaaaugaacaua

SEQ ID NO: 37130 - RNA, 24 nt, Human
ucagucugugcaaugaaauugaug

SEQ ID NO: 37131 - RNA, 24 nt, Human
ugaauugggauguacaagguuauu

SEQ ID NO: 37132 - RNA, 24 nt, Human
uaguagagacgggguuacaccaug

SEQ ID NO: 37133 - RNA, 24 nt, Human
ucacugcaaccuccaccucccggg

SEQ ID NO: 37134 - RNA, 22 nt, Human
uuggaauuucuggagacuaauu

SEQ ID NO: 37135 - RNA, 24 nt, Human
cauugcacuccagccugggugaaa

SEQ ID NO: 37136 - RNA, 24 nt, Human
ugagaccagccucaccaacaugga

SEQ ID NO: 37137 - RNA, 22 nt, Human
uucucauuuguucuccacgccc

SEQ ID NO: 37138 - RNA, 24 nt, Human
ugugcuuauuaaaaauggucaucu

SEQ ID NO: 37139 - RNA, 24 nt, Human
uaagaaauuaauuuauuugaguuc

SEQ ID NO: 37140 - RNA, 24 nt, Human
ugccagcaaacucuucucuuccca

SEQ ID NO: 37141 - RNA, 24 nt, Human
agccuggucaacauggugaaaccc

SEQ ID NO: 37142 - RNA, 24 nt, Human
ugccccagccugagcguacagugu

SEQ ID NO: 37143 - RNA, 20 nt, Human
ugaggcuggucuuuccuggc

SEQ ID NO: 37144 - RNA, 24 nt, Human
uggcaguaccgggcaccgcacuga

SEQ ID NO: 37145 - RNA, 21 nt, Human
ccauacuucgcccuaagcauc

SEQ ID NO: 37146 - RNA, 24 nt, Human
gugguucuuaagacccuccccagc

SEQ ID NO: 37147 - RNA, 24 nt, Human
uccagagagcuucuggguagcuga

SEQ ID NO: 37148 - RNA, 24 nt, Human
aagaugccgcauuuggauuggaug

SEQ ID NO: 37149 - RNA, 24 nt, Human
ugauauguuacucauuguaaagac

SEQ ID NO: 37150 - RNA, 24 nt, Human
agccuugugcuaaaggcguauaac

SEQ ID NO: 37151 - RNA, 24 nt, Human
ucagucauccaaacuagugccauu

SEQ ID NO: 37152 - RNA, 24 nt, Human
ugugugcuuuggugguguugagau

SEQ ID NO: 37153 - RNA, 24 nt, Human
aggaaggagauauagugaagagga

SEQ ID NO: 37154 - RNA, 24 nt, Human
uauggcaagucacuuugacagaca

SEQ ID NO: 37155 - RNA, 24 nt, Human
uacaccacucccaagaagaauaag

SEQ ID NO: 37156 - RNA, 24 nt, Human
uggaaagcagguagaguuggcuuu

SEQ ID NO: 37157 - RNA, 24 nt, Human
agccauugaaacagaugaucugac

SEQ ID NO: 37158 - RNA, 24 nt, Human
aagaagaaaacgaaaagaagaaac

SEQ ID NO: 37159 - RNA, 24 nt, Human
aacugugugagccugcugucccca

SEQ ID NO: 37160 - RNA, 23 nt, Human
cccacacuuccuccaggccucca

SEQ ID NO: 37161 - RNA, 24 nt, Human
gcccuggaacagaguuacagauac

SEQ ID NO: 37162 - RNA, 24 nt, Human
uauucuuccaugcaggaaucugga

SEQ ID NO: 37163 - RNA, 24 nt, Human
gucgucaccuuccagugucauguc

SEQ ID NO: 37164 - RNA, 24 nt, Human
ugacuugucguggccccugucuag

SEQ ID NO: 37165 - RNA, 24 nt, Human
cgauuugguaaccacggaguuggg

SEQ ID NO: 37166 - RNA, 24 nt, Human
ucaggucccuuucaguucuggcuc

SEQ ID NO: 37167 - RNA, 24 nt, Human
ugaaaacuaugaguccuccaauuu

SEQ ID NO: 37168 - RNA, 24 nt, Human
ggacuacaggcauaagccaucaug

SEQ ID NO: 37169 - RNA, 24 nt, Human
uuuuuuguaauucaaguaaaaaaa

SEQ ID NO: 37170 - RNA, 24 nt, Human
ggacuacaggcauaagccaucaug

SEQ ID NO: 37171 - RNA, 24 nt, Human
uuuuuuguaauucaaguaaaaaaa

SEQ ID NO: 37172 - RNA, 24 nt, Human
aacaaguuuacgaucacugucagu

SEQ ID NO: 37173 - RNA, 24 nt, Human
uguuaaaaucugcuagaaaaguaa

SEQ ID NO: 37174 - RNA, 24 nt, Human
ucaggcaugugcccugagcaucga

SEQ ID NO: 37175 - RNA, 24 nt, Human
uauuagggauaauauucauuuagc

SEQ ID NO: 37176 - RNA, 24 nt, Human
uucccagggucuauaaaacauuaa

SEQ ID NO: 37177 - RNA, 24 nt, Human
gaccuggcauuugcucgggacaua

SEQ ID NO: 37178 - RNA, 24 nt, Human
uucauggucccugaucaauuuuaa

SEQ ID NO: 37179 - RNA, 24 nt, Human
uucaaauuacguuggcuugcucaa

SEQ ID NO: 37180 - RNA, 24 nt, Human
uugcagguguaggaggugcgacaa

SEQ ID NO: 37181 - RNA, 20 nt, Human
gcccugggcugggucgaacc

SEQ ID NO: 37182 - RNA, 24 nt, Human
uagcgggucucaugccucggccuc

SEQ ID NO: 37183 - RNA, 24 nt, Human
uuugaagugucuauugggcuagca

SEQ ID NO: 37184 - RNA, 24 nt, Human
uuuaaauucaaguuaguuaaaauu

SEQ ID NO: 37185 - RNA, 24 nt, Human
uggacacugcccccgugggaccuc

SEQ ID NO: 37186 - RNA, 24 nt, Human
ggucacugcugggccuuccacguc

SEQ ID NO: 37187 - RNA, 24 nt, Human
ugagaaacgcacacguaaacugac

SEQ ID NO: 37188 - RNA, 24 nt, Human
uaugaucaaggauauggaaauuac

SEQ ID NO: 37189 - RNA, 24 nt, Human
uaaaguaacccaucuugcaggacg

SEQ ID NO: 37190 - RNA, 24 nt, Human
ucccugaacaccuggguauuggga

SEQ ID NO: 37191 - RNA, 24 nt, Human
uaagucugugaaucuacccugguc

SEQ ID NO: 37192 - RNA, 24 nt, Human
uucuugguccauauccugcccauc

SEQ ID NO: 37193 - RNA, 24 nt, Human
ucaguccaggcaaagcccagagca

SEQ ID NO: 37194 - RNA, 23 nt, Human
cauucugugucaucuagucgugc

SEQ ID NO: 37195 - RNA, 24 nt, Human
uugccgcugacuauaaaacaaacc

SEQ ID NO: 37196 - RNA, 24 nt, Human
ucgguccaauggaaggccuuuugg

SEQ ID NO: 37197 - RNA, 18 nt, Human
uuuuaagcccgggagugg

SEQ ID NO: 37198 - RNA, 24 nt, Human
uacauuaagaaaauuggcuacaac

SEQ ID NO: 37199 - RNA, 24 nt, Human
ccucccugacaacccagcaggcca

SEQ ID NO: 37200 - RNA, 24 nt, Human
uuggguuuaucugcaauuaggguu

SEQ ID NO: 37201 - RNA, 24 nt, Human
cucucugcauggcucuggccaucc

SEQ ID NO: 37202 - RNA, 24 nt, Human
cgugcacgccacaggacccguggc

SEQ ID NO: 37203 - RNA, 24 nt, Human
ucagagcagcgacagugaggccgg

SEQ ID NO: 37204 - RNA, 24 nt, Human
caagacaguaucgaaaaugcauau

SEQ ID NO: 37205 - RNA, 24 nt, Human
cauugcuccugacaucacuaagau

SEQ ID NO: 37206 - RNA, 24 nt, Human
uggggagggcaggaaagaaucggg

SEQ ID NO: 37207 - RNA, 24 nt, Human
ugggcgggcaggcgggcagcauuc

SEQ ID NO: 37208 - RNA, 24 nt, Human
ugaggcaaagaaugguggcgucug

SEQ ID NO: 37209 - RNA, 24 nt, Human
ugaaaugccuaaagaagucacagg

SEQ ID NO: 37210 - RNA, 24 nt, Human
uuuuauguguauuuuauauugcau

SEQ ID NO: 37211 - RNA, 24 nt, Human
ucucagaguacggcucaggcuugg

SEQ ID NO: 37212 - RNA, 24 nt, Human
uggcucuucucuccccagcccucc

SEQ ID NO: 37213 - RNA, 24 nt, Human
ugaauuugucuccugcuaaauauu

SEQ ID NO: 37214 - RNA, 24 nt, Human
uucauuagaaauuuagccauuaga

SEQ ID NO: 37215 - RNA, 24 nt, Human
uaacggaggcaguggaaccaaucg

SEQ ID NO: 37216 - RNA, 24 nt, Human
caagacacaaauguaacuucugag

SEQ ID NO: 37217 - RNA, 24 nt, Human
uaguauuggaaccucccaacauaa

SEQ ID NO: 37218 - RNA, 24 nt, Human
ucuaccauguuggcaugucaacag

SEQ ID NO: 37219 - RNA, 24 nt, Human
ucugugacaggcagcugaaccuac

SEQ ID NO: 37220 - RNA, 24 nt, Human
uacugauugagcuaaagaagaaaa

SEQ ID NO: 37221 - RNA, 24 nt, Human
ucacaaccacggcccuggaggagc

SEQ ID NO: 37222 - RNA, 24 nt, Human
aaaguuuauacaaauuugagggag

SEQ ID NO: 37223 - RNA, 24 nt, Human
caccccuaagggggggccgaacgu

SEQ ID NO: 37224 - RNA, 22 nt, Human
uucacggauggcaagucaccgu

SEQ ID NO: 37225 - RNA, 24 nt, Human
uauugcguugcaccacuuugcgcc

SEQ ID NO: 37226 - RNA, 24 nt, Human
uauguugcccaggcugguccugaa

SEQ ID NO: 37227 - RNA, 24 nt, Human
ucuguaacccaggcuagagugcag

SEQ ID NO: 37228 - RNA, 24 nt, Human
gcggaucaugugucugaugcugcu

SEQ ID NO: 37229 - RNA, 24 nt, Human
guccuucucgauggccaacggcau

SEQ ID NO: 37230 - RNA, 24 nt, Human
uaugacaucaccaaccgcuggucc

SEQ ID NO: 37231 - RNA, 24 nt, Human
uucagccugcaggaccucugcugc

SEQ ID NO: 37232 - RNA, 24 nt, Human
uauuauaagaaaucuagagaugau

SEQ ID NO: 37233 - RNA, 24 nt, Human
aagcagcugggaggagagggggga

SEQ ID NO: 37234 - RNA, 24 nt, Human
cgggagaaaauccaccauaauaaa

SEQ ID NO: 37235 - RNA, 24 nt, Human
ucgcgcagagaucgugccacugca

SEQ ID NO: 37236 - RNA, 24 nt, Human
ugcacagaggggcacggaacucca

SEQ ID NO: 37237 - RNA, 24 nt, Human
uguccugggcagcucgguggcaau

SEQ ID NO: 37238 - RNA, 24 nt, Human
agcacauuugccagcuguagccuu

SEQ ID NO: 37239 - RNA, 24 nt, Human
gagcauaacucgauugcccaucau

SEQ ID NO: 37240 - RNA, 24 nt, Human
uaugugcauccagaccugcagcug

SEQ ID NO: 37241 - RNA, 24 nt, Human
uggcaaacuuucuucauguccugg

SEQ ID NO: 37242 - RNA, 24 nt, Human
ucaauggaacgcaaaaaagaccag

SEQ ID NO: 37243 - RNA, 24 nt, Human
cuuugagauacuccacacugagca

SEQ ID NO: 37244 - RNA, 19 nt, Human
uauaccaccucccgaaggg

SEQ ID NO: 37245 - RNA, 24 nt, Human
gcccguaggcgucuggcagcccgg

SEQ ID NO: 37246 - RNA, 18 nt, Human
ugugaaggcuaugagucc

SEQ ID NO: 37247 - RNA, 24 nt, Human
ugggauggguaugauguaacagug

SEQ ID NO: 37248 - RNA, 24 nt, Human
gugcagcuggcgaccugggcggga

SEQ ID NO: 37249 - RNA, 24 nt, Human
gugcauggaaaguuacuaacagga

SEQ ID NO: 37250 - RNA, 24 nt, Human
uaagucaugacuguuaucacaggg

SEQ ID NO: 37251 - RNA, 24 nt, Human
ugcaaugguuuacagaauucaugg

SEQ ID NO: 37252 - RNA, 21 nt, Human
ugcauguucuuguugccuguc

SEQ ID NO: 37253 - RNA, 24 nt, Human
uaguauuuauaaucauuuacuugu

SEQ ID NO: 37254 - RNA, 24 nt, Human
uguuccugucucaguaaaauuaga

SEQ ID NO: 37255 - RNA, 24 nt, Human
uaagucauauagguaauuauuguc

SEQ ID NO: 37256 - RNA, 24 nt, Human
ucgaauggacacauuaccagugaa

SEQ ID NO: 37257 - RNA, 24 nt, Human
ggacagguguacagacauguucuu

SEQ ID NO: 37258 - RNA, 24 nt, Human
cagccgguguccgaacugaucgcg

SEQ ID NO: 37259 - RNA, 19 nt, Human
cggcgcaggcggcgcugcc

SEQ ID NO: 37260 - RNA, 24 nt, Human
uacacaguugcccgguugggaaug

SEQ ID NO: 37261 - RNA, 24 nt, Human
uaaaauacauauagaauauaagau

SEQ ID NO: 37262 - RNA, 24 nt, Human
uucaucauuuccucaagagaaaca

SEQ ID NO: 37263 - RNA, 24 nt, Human
uuagaaguaaauagcagauucaac

SEQ ID NO: 37264 - RNA, 24 nt, Human
ugcaugcacgaggugcacacguuc

SEQ ID NO: 37265 - RNA, 24 nt, Human
cugcggggugugggcccggccucc

SEQ ID NO: 37266 - RNA, 24 nt, Human
ucaggcuccugcugaggggcccga

SEQ ID NO: 37267 - RNA, 24 nt, Human
uggcgggacgugugggccgugagg

SEQ ID NO: 37268 - RNA, 24 nt, Human
cggcaccaucgacuuccgggaguu

SEQ ID NO: 37269 - RNA, 24 nt, Human
cgaccagauuacauggaggaguuc

SEQ ID NO: 37270 - RNA, 24 nt, Human
ugagauguacgaccuggacggcga

SEQ ID NO: 37271 - RNA, 24 nt, Human
uugaucuugaagaaacugggcgug

SEQ ID NO: 37272 - RNA, 24 nt, Human
aggaaggagauauagugaagagga

SEQ ID NO: 37273 - RNA, 24 nt, Human
guagaguuuucuucaggcuuaaag

SEQ ID NO: 37274 - RNA, 24 nt, Human
aagcugaagggccccugguuugga

SEQ ID NO: 37275 - RNA, 24 nt, Human
aggcaugaucugaguuauucugaa

SEQ ID NO: 37276 - RNA, 24 nt, Human
ccucuugucacagcuugacuccua

SEQ ID NO: 37277 - RNA, 24 nt, Human
uccacuguacuccagccugggcga

SEQ ID NO: 37278 - RNA, 24 nt, Human
cccccgguaacaggcccaggcggu

SEQ ID NO: 37279 - RNA, 24 nt, Human
agccgcugccugcgccccuggaug

SEQ ID NO: 37280 - RNA, 21 nt, Human
ucuaagugggcgggcuguggc

SEQ ID NO: 37281 - RNA, 24 nt, Human
ggugcacaggaccacagucucuga

SEQ ID NO: 37282 - RNA, 24 nt, Human
uguacaaaaugugcauguuucagu

SEQ ID NO: 37283 - RNA, 18 nt, Human
uacaguucaugacaaaaa

SEQ ID NO: 37284 - RNA, 24 nt, Human
acacuuggaagagggucggcuuua

SEQ ID NO: 37285 - RNA, 24 nt, Human
uauucuugggcugaagaggggggg

SEQ ID NO: 37286 - RNA, 23 nt, Human
uaacggguccugcgguggugggu

SEQ ID NO: 37287 - RNA, 24 nt, Human
ucuuacuuuauuuuaaaauuaucu

SEQ ID NO: 37288 - RNA, 24 nt, Human
aggaaggagauauagugaagagga

SEQ ID NO: 37289 - RNA, 23 nt, Human
uuacuccacagaaguuccgagua

SEQ ID NO: 37290 - RNA, 24 nt, Human
uuuauagcagugacagccguucau

SEQ ID NO: 37291 - RNA, 24 nt, Human
uagcagcaagguugaaaagguuaa

SEQ ID NO: 37292 - RNA, 24 nt, Human
cuuacugugacaagcaaaugugga

SEQ ID NO: 37293 - RNA, 24 nt, Human
ugguauaucaucuggguugccuuu

SEQ ID NO: 37294 - RNA, 24 nt, Human
gcccuggcucucugucuccuccca

SEQ ID NO: 37295 - RNA, 24 nt, Human
cucgauuuaaaauacacacaucuu

SEQ ID NO: 37296 - RNA, 24 nt, Human
aauuguccauuugaccuuagccgg

SEQ ID NO: 37297 - RNA, 24 nt, Human
uaggaucaugguuaacguuuccca

SEQ ID NO: 37298 - RNA, 24 nt, Human
ugaggauaugcuuggucggguauu

SEQ ID NO: 37299 - RNA, 24 nt, Human
gaaauggaagggauucauucaaag

SEQ ID NO: 37300 - RNA, 23 nt, Human
agacuguuuacuacuguucgauu

SEQ ID NO: 37301 - RNA, 24 nt, Human
aagagcaaucugggcacuguuacc

SEQ ID NO: 37302 - RNA, 24 nt, Human
ugucaaggacucccaagcugcucu

SEQ ID NO: 37303 - RNA, 24 nt, Human
ugcgagggguugagaacgccuagc

SEQ ID NO: 37304 - RNA, 24 nt, Human
ugugagcaacaggcaugguggcca

SEQ ID NO: 37305 - RNA, 24 nt, Human
acccuggaucugcgcauugcugga

SEQ ID NO: 37306 - RNA, 24 nt, Human
cuccggcugagcugggagaguugg

SEQ ID NO: 37307 - RNA, 18 nt, Human
ccacauguuguucccagg

SEQ ID NO: 37308 - RNA, 24 nt, Human
uaucaagaaagggcuucaccagga

SEQ ID NO: 37309 - RNA, 24 nt, Human
ucucccugcugaaucgaaaggaag

SEQ ID NO: 37310 - RNA, 24 nt, Human
aaucugccuuuggucuguugauuu

SEQ ID NO: 37311 - RNA, 24 nt, Human
guggaacuauguacagaucuuguu

SEQ ID NO: 37312 - RNA, 24 nt, Human
uacuaugcacgucuuaauaagaag

SEQ ID NO: 37313 - RNA, 24 nt, Human
uacacagaauauuccugugcccac

SEQ ID NO: 37314 - RNA, 24 nt, Human
ucuauaauuuuaaccauuuaucca

SEQ ID NO: 37315 - RNA, 24 nt, Human
acugaaagaacaagcagcaacugg

SEQ ID NO: 37316 - RNA, 24 nt, Human
uccagcuuggacgacagagcgaga

SEQ ID NO: 37317 - RNA, 24 nt, Human
agaggugcagugugauggcaggag

SEQ ID NO: 37318 - RNA, 24 nt, Human
cuugcccccugcccugaggaugcg

SEQ ID NO: 37319 - RNA, 24 nt, Human
agacaggcuggcacagccccaggc

SEQ ID NO: 37320 - RNA, 24 nt, Human
aagcagcaccaauggggaugaccc

SEQ ID NO: 37321 - RNA, 24 nt, Human
ucacuguaagcauccaguaggcag

SEQ ID NO: 37322 - RNA, 24 nt, Human
gaugaagccagugauuaggguguu

SEQ ID NO: 37323 - RNA, 17 nt, Human
cagggcuucaucaccgg

SEQ ID NO: 37324 - RNA, 24 nt, Human
cgaguucaucguguacuaugagag

SEQ ID NO: 37325 - RNA, 24 nt, Human
ucccacauccaggaugacaccuua

SEQ ID NO: 37326 - RNA, 24 nt, Human
ugccuggguaacuugcguauuuuc

SEQ ID NO: 37327 - RNA, 24 nt, Human
uaucuuuauccguucguguucaug

SEQ ID NO: 37328 - RNA, 24 nt, Human
auuagcucaucaauuucugcaaaa

SEQ ID NO: 37329 - RNA, 24 nt, Human
uauuuuguaguuuucaauguagaa

SEQ ID NO: 37330 - RNA, 24 nt, Human
gccauguuucuucugugccuacca

SEQ ID NO: 37331 - RNA, 24 nt, Human
uugcagggccauauacggguacau

SEQ ID NO: 37332 - RNA, 24 nt, Human
ugggcucaagugaucuuccugucu

SEQ ID NO: 37333 - RNA, 24 nt, Human
agaaugcuguguuccuucgcugga

SEQ ID NO: 37334 - RNA, 24 nt, Human
cagcaugaguuucugaauaauuuc

SEQ ID NO: 37335 - RNA, 18 nt, Human
uauaauguuauacaguuu

SEQ ID NO: 37336 - RNA, 24 nt, Human
uuuuugguauuuagaaauuuuuuu

SEQ ID NO: 37337 - RNA, 24 nt, Human
uaagauauccaucuuuuucuuuuu

SEQ ID NO: 37338 - RNA, 24 nt, Human
uauaguaaccuuaaaaagaacauu

SEQ ID NO: 37339 - RNA, 24 nt, Human
uucaugcacaggcaaaauguauuc

SEQ ID NO: 37340 - RNA, 24 nt, Human
uguugagauuauuauauacuguau

SEQ ID NO: 37341 - RNA, 24 nt, Human
uguaaacauguaccuuuucuuccc

SEQ ID NO: 37342 - RNA, 24 nt, Human
auaaaaccucuuuguaaacaugua

SEQ ID NO: 37343 - RNA, 24 nt, Human
gauuuuuuuuuaaccuuuauucau

SEQ ID NO: 37344 - RNA, 24 nt, Human
uggacagaagucaugaugaugggg

SEQ ID NO: 37345 - RNA, 24 nt, Human
agcaaauaugaaaauagaaagucc

SEQ ID NO: 37346 - RNA, 24 nt, Human
gccccgucgccccgcccucgccgg

SEQ ID NO: 37347 - RNA, 24 nt, Human
ccggcgcggcaguggccucgcagg

SEQ ID NO: 37348 - RNA, 23 nt, Human
uguguaguguguauagugugugc

SEQ ID NO: 37349 - RNA, 24 nt, Human
uuagugaaauucugaaauacuuga

SEQ ID NO: 37350 - RNA, 24 nt, Human
agauagaccaguucuguugagggu

SEQ ID NO: 37351 - RNA, 24 nt, Human
uucacaaucccuuuacuuuaauuu

SEQ ID NO: 37352 - RNA, 24 nt, Human
uacaggaagugccaaguucaaugc

SEQ ID NO: 37353 - RNA, 24 nt, Human
aaccuuuguacuuguuuuccuccu

SEQ ID NO: 37354 - RNA, 24 nt, Human
uaaaagcuagagauuuauuguuau

SEQ ID NO: 37355 - RNA, 24 nt, Human
aagcagaaagagcaaagacacaug

SEQ ID NO: 37356 - RNA, 24 nt, Human
acgggguuucaccauguuagcaau

SEQ ID NO: 37357 - RNA, 24 nt, Human
uggcauuuguuugaacacagucca

SEQ ID NO: 37358 - RNA, 24 nt, Human
aagaacuacaggucagaaauggaa

SEQ ID NO: 37359 - RNA, 20 nt, Human
uauguagggcaucacuuuau

SEQ ID NO: 37360 - RNA, 24 nt, Human
aauguccuagaguuggagugguac

SEQ ID NO: 37361 - RNA, 24 nt, Human
uccauaguuuacauuagaguucau

SEQ ID NO: 37362 - RNA, 24 nt, Human
gucacauugcaugcaaguuugcug

SEQ ID NO: 37363 - RNA, 24 nt, Human
augguuccuggcaagcccaugugu

SEQ ID NO: 37364 - RNA, 24 nt, Human
cuugcaccguugccagccauuugc

SEQ ID NO: 37365 - RNA, 24 nt, Human
uauaaugaggcacggcuuauugca

SEQ ID NO: 37366 - RNA, 24 nt, Human
cagccgcgaagaugccguuggaac

SEQ ID NO: 37367 - RNA, 24 nt, Human
uaugaagccagcuaccagccccuc

SEQ ID NO: 37368 - RNA, 24 nt, Human
aagaaguucuugaguggcguguaa

SEQ ID NO: 37369 - RNA, 24 nt, Human
uaaugugcaggccaugugccugug

SEQ ID NO: 37370 - RNA, 24 nt, Human
auaguuccugaaaauuaaugcauc

SEQ ID NO: 37371 - RNA, 24 nt, Human
aaugcaacacaauucuuugaaagg

SEQ ID NO: 37372 - RNA, 24 nt, Human
ucucggccuuggcaacggccgucg

SEQ ID NO: 37373 - RNA, 24 nt, Human
agcuauugcuauucaauggagacg

SEQ ID NO: 37374 - RNA, 24 nt, Human
guagagcacagcagcacugugccu

SEQ ID NO: 37375 - RNA, 24 nt, Human
ucucuacucugauuuaacuguucu

SEQ ID NO: 37376 - RNA, 24 nt, Human
cauugugugccaagagcuugaccc

SEQ ID NO: 37377 - RNA, 24 nt, Human
uugcugauggaggaauccaaaaug

SEQ ID NO: 37378 - RNA, 24 nt, Human
ucugaucuauaaaugcgguggcau

SEQ ID NO: 37379 - RNA, 24 nt, Human
caccugaagauuaucggcuauaag

SEQ ID NO: 37380 - RNA, 17 nt, Human
uugguuggggugggggg

SEQ ID NO: 37381 - RNA, 24 nt, Human
uuaaauauuuaaauguacuuauau

SEQ ID NO: 37382 - RNA, 24 nt, Human
uaacugccaaagaguaucauuucg

SEQ ID NO: 37383 - RNA, 24 nt, Human
cagcugcaacaucuuaugaaaccu

SEQ ID NO: 37384 - RNA, 24 nt, Human
ugagucaacugacaauugugacca

SEQ ID NO: 37385 - RNA, 24 nt, Human
ucccccaggugggcgaagcggugg

SEQ ID NO: 37386 - RNA, 24 nt, Human
gugugcuguuagaaggguucuggg

SEQ ID NO: 37387 - RNA, 24 nt, Human
uuccuuggggcauuucugccacug

SEQ ID NO: 37388 - RNA, 24 nt, Human
uagccaucugugccuggauaaaua

SEQ ID NO: 37389 - RNA, 24 nt, Human
uucaaguaaauggccauggaggac

SEQ ID NO: 37390 - RNA, 24 nt, Human
ucugaucuauaaaugcgguggcau

SEQ ID NO: 37391 - RNA, 24 nt, Human
ugugaaaaugccuucuuccucuuu

SEQ ID NO: 37392 - RNA, 24 nt, Human
cuuggcgugcaagugcuggaugaa

SEQ ID NO: 37393 - RNA, 24 nt, Human
uuccagggauggcaagucaccgua

SEQ ID NO: 37394 - RNA, 24 nt, Human
ucugaucuauaaaugcgguggcau

SEQ ID NO: 37395 - RNA, 24 nt, Human
ugagaacuccaggauuguccugca

SEQ ID NO: 37396 - RNA, 24 nt, Human
aaugacacauuuucucuggugguc

SEQ ID NO: 37397 - RNA, 24 nt, Human
uugcauggaggaucuuuguguuuc

SEQ ID NO: 37398 - RNA, 24 nt, Human
agaaaucauuuugccugaaauaag

SEQ ID NO: 37399 - RNA, 23 nt, Human
gguccagcaggcagguacaagcc

SEQ ID NO: 37400 - RNA, 24 nt, Human
gaucaccaagucaggaguucaaga

SEQ ID NO: 37401 - RNA, 21 nt, Human
uugguauuuuuggagaggugu

SEQ ID NO: 37402 - RNA, 24 nt, Human
uggaauuuucagaaaaagauuguc

SEQ ID NO: 37403 - RNA, 24 nt, Human
ugcacaauaaaagguucggaucgu

SEQ ID NO: 37404 - RNA, 24 nt, Human
caagacaugauuuugcuggcuuua

SEQ ID NO: 37405 - RNA, 24 nt, Human
ugagaaaaaaaaaccaccagaagu

SEQ ID NO: 37406 - RNA, 24 nt, Human
ugucaagaaacuucuuaucuucau

SEQ ID NO: 37407 - RNA, 24 nt, Human
aaaggaaacauaaagugcuucuag

SEQ ID NO: 37408 - RNA, 24 nt, Human
gcuguagaacuuuaacacaagucu

SEQ ID NO: 37409 - RNA, 24 nt, Human
uaguagagaugcgacucacggaga

SEQ ID NO: 37410 - RNA, 21 nt, Human
uacaaaguacaagaaauggug

SEQ ID NO: 37411 - RNA, 24 nt, Human
ucaggagugguggugaugcaaaag

SEQ ID NO: 37412 - RNA, 24 nt, Human
aggcaugaaaaggggaaagugagg

SEQ ID NO: 37413 - RNA, 24 nt, Human
ucaggcgcaguacaaguuggggca

SEQ ID NO: 37414 - RNA, 24 nt, Human
uugaaguuuuugcuauaaaacauu

SEQ ID NO: 37415 - RNA, 24 nt, Human
uaugacuaccugcggaagcucuuc

SEQ ID NO: 37416 - RNA, 24 nt, Human
ugggcgcgugcagcccccugaauc

SEQ ID NO: 37417 - RNA, 24 nt, Human
uaucauggcauaagugaaaauauu

SEQ ID NO: 37418 - RNA, 24 nt, Human
uggcugaauucaaaauuaauuuuu

SEQ ID NO: 37419 - RNA, 24 nt, Human
aauacucuccauuggcuuugcuug

SEQ ID NO: 37420 - RNA, 24 nt, Human
auuuacuuguggcuggauuauuug

SEQ ID NO: 37421 - RNA, 24 nt, Human
cgggggaaacccaaagcggggcgc

SEQ ID NO: 37422 - RNA, 24 nt, Human
gcggauccugcgccgagccaaugc

SEQ ID NO: 37423 - RNA, 24 nt, Human
aauaacacaaaauauuuuuuuaag

SEQ ID NO: 37424 - RNA, 22 nt, Human
ccucaaggcgggaguugccggc

SEQ ID NO: 37425 - RNA, 24 nt, Human
uaugaggcccuagagcuccgggac

SEQ ID NO: 37426 - RNA, 24 nt, Human
cauuuggguuggccugaugcagga

SEQ ID NO: 37427 - RNA, 24 nt, Human
auagucuagagccuuuaaaaaacc

SEQ ID NO: 37428 - RNA, 24 nt, Human
gccacaggguuccuacucgccccu

SEQ ID NO: 37429 - RNA, 24 nt, Human
uaucccagcaagcacacuaggcag

SEQ ID NO: 37430 - RNA, 24 nt, Human
caggaucguccuuccaaauggugu

SEQ ID NO: 37431 - RNA, 24 nt, Human
uaguauaucaacuuugguguuuaa

SEQ ID NO: 37432 - RNA, 24 nt, Human
aggcauuggcaugaccaaagcuga

SEQ ID NO: 37433 - RNA, 24 nt, Human
accauggugagcccauuggcaggg

SEQ ID NO: 37434 - RNA, 24 nt, Human
aucaugcugcccugggacccagcu

SEQ ID NO: 37435 - RNA, 22 nt, Human
ugauaguugcaggucuaucugu

SEQ ID NO: 37436 - RNA, 24 nt, Human
ugcgaccauggccgccuuccaguc

SEQ ID NO: 37437 - RNA, 24 nt, Human
caccaauggagggaaaugucagcc

SEQ ID NO: 37438 - RNA, 24 nt, Human
cuuucauucacuguccagcuugcc

SEQ ID NO: 37439 - RNA, 20 nt, Human
cgucaagggggacgagugcc

SEQ ID NO: 37440 - RNA, 24 nt, Human
uagcuucauuauuagauuguuuca

SEQ ID NO: 37441 - RNA, 23 nt, Human
uuucaagucauucuccagacccu

SEQ ID NO: 37442 - RNA, 24 nt, Human
uagacucgaucuaguucaguaaca

SEQ ID NO: 37443 - RNA, 24 nt, Human
aggcagacauccgacuucuugccc

SEQ ID NO: 37444 - RNA, 24 nt, Human
ccuuccaugagcucuccgcagcuc

SEQ ID NO: 37445 - RNA, 24 nt, Human
uuagucccaguuccauuuucauga

SEQ ID NO: 37446 - RNA, 24 nt, Human
uauuggacuuuccaucugucagaa

SEQ ID NO: 37447 - RNA, 24 nt, Human
ucacauugaucucaaagcugaaga

SEQ ID NO: 37448 - RNA, 24 nt, Human
ugacuugaggcuggauaccauccu

SEQ ID NO: 37449 - RNA, 24 nt, Human
caggugcagcugagggaccaggcu

SEQ ID NO: 37450 - RNA, 24 nt, Human
uagcucuaaauuguucuaaagcaa

SEQ ID NO: 37451 - RNA, 24 nt, Human
aggaagugccggcaagucugaucu

SEQ ID NO: 37452 - RNA, 20 nt, Human
caccauaggggaacagggag

SEQ ID NO: 37453 - RNA, 24 nt, Human
ccucacaggcucggcgucggguga

SEQ ID NO: 37454 - RNA, 24 nt, Human
guggauggagagaggccccagccu

SEQ ID NO: 37455 - RNA, 23 nt, Human
aaacacaggcucuucuggugagg

SEQ ID NO: 37456 - RNA, 24 nt, Human
uucacugucccuguuuagccaagg

SEQ ID NO: 37457 - RNA, 24 nt, Human
uguauggacagaguauguugucuc

SEQ ID NO: 37458 - RNA, 24 nt, Human
ucaguuaaaaaagaagaagaagaa

SEQ ID NO: 37459 - RNA, 24 nt, Human
ugugcagaagaaauggaaggauuc

SEQ ID NO: 37460 - RNA, 24 nt, Human
uaucaaggaagggcaggcgugaug

SEQ ID NO: 37461 - RNA, 24 nt, Human
uaacagguguaagaguguugaaaa

SEQ ID NO: 37462 - RNA, 24 nt, Human
cauuacuuugaggcagaucguugu

SEQ ID NO: 37463 - RNA, 24 nt, Human
uaacuuguucauaagaugguggga

SEQ ID NO: 37464 - RNA, 24 nt, Human
uucacagaaguaugaaaaggggau

SEQ ID NO: 37465 - RNA, 24 nt, Human
uauuauguaugguuguaaauucau

SEQ ID NO: 37466 - RNA, 24 nt, Human
uugcaguuaauuugaaaacuuugg

SEQ ID NO: 37467 - RNA, 24 nt, Human
ugauuugaauuuuauaauuguuuu

SEQ ID NO: 37468 - RNA, 20 nt, Human
uuagcucaacacuucacucc

SEQ ID NO: 37469 - RNA, 24 nt, Human
agccauggggcuggaagaagcuuc

SEQ ID NO: 37470 - RNA, 24 nt, Human
uuacaggaagggccuuggcggcca

SEQ ID NO: 37471 - RNA, 24 nt, Human
uuugcuauuucuucuagcaaauuu

SEQ ID NO: 37472 - RNA, 24 nt, Human
uacauguacaaaaacccagcaaga

SEQ ID NO: 37473 - RNA, 24 nt, Human
uguaaaacaucaacucagccaggc

SEQ ID NO: 37474 - RNA, 24 nt, Human
ccuccagcacagccuauauggagc

SEQ ID NO: 37475 - RNA, 24 nt, Human
agaggcugggugaugaccggcuuc

SEQ ID NO: 37476 - RNA, 24 nt, Human
aggaaggagauauagugaagagga

SEQ ID NO: 37477 - RNA, 18 nt, Human
aaggucccaggagaccag

SEQ ID NO: 37478 - RNA, 24 nt, Human
ugugcacugcgugacaaugaccca

SEQ ID NO: 37479 - RNA, 24 nt, Human
gaagcgguuugaauuacgccugua

SEQ ID NO: 37480 - RNA, 18 nt, Human
ugacguggacauccgcaa

SEQ ID NO: 37481 - RNA, 23 nt, Human
ucuguccuacugcucuccagagg

SEQ ID NO: 37482 - RNA, 22 nt, Human
ugauucugugaagaacauauca

SEQ ID NO: 37483 - RNA, 24 nt, Human
uaaguugaacaucaauagcacauu

SEQ ID NO: 37484 - RNA, 24 nt, Human
uaagcaaguuuuaaaauguuaauu

SEQ ID NO: 37485 - RNA, 24 nt, Human
accacacuccagccugggcuacag

SEQ ID NO: 37486 - RNA, 24 nt, Human
uagcuggacguaguggcaugugug

SEQ ID NO: 37487 - RNA, 24 nt, Human
ucaggacuuaacagaaagacuuag

SEQ ID NO: 37488 - RNA, 24 nt, Human
ccugcagccuuucuugccugagag

SEQ ID NO: 37489 - RNA, 24 nt, Human
cagcauaacuucagaguaagggua

SEQ ID NO: 37490 - RNA, 24 nt, Human
gcccuggacuucgagcaggagaug

SEQ ID NO: 37491 - RNA, 24 nt, Human
ugggauugcaggcaugagcuacgg

SEQ ID NO: 37492 - RNA, 24 nt, Human
acggagcaugagaagacguucccc

SEQ ID NO: 37493 - RNA, 24 nt, Human
ugccuuuggcuuuggagaugguuu

SEQ ID NO: 37494 - RNA, 24 nt, Human
uccacggugagcuugcuguagagg

SEQ ID NO: 37495 - RNA, 24 nt, Human
uuuaugcuucaugguugaaauuuu

SEQ ID NO: 37496 - RNA, 24 nt, Human
agacugcuuuguguaauuaaauga

SEQ ID NO: 37497 - RNA, 24 nt, Human
uguaaaauuucugccugucugccu

SEQ ID NO: 37498 - RNA, 24 nt, Human
uggaaucaucucuggguauaugau

SEQ ID NO: 37499 - RNA, 24 nt, Human
ugacuauguugauguucuuguccc

SEQ ID NO: 37500 - RNA, 24 nt, Human
uagccuacuggugauuucauauug

SEQ ID NO: 37501 - RNA, 21 nt, Human
uuugcugggaucuucucucca

SEQ ID NO: 37502 - RNA, 24 nt, Human
uaugucuuuaaacaauaagcaauu

SEQ ID NO: 37503 - RNA, 24 nt, Human
acuugauuuucauuaauccagagc

SEQ ID NO: 37504 - RNA, 24 nt, Human
gaacugguccuuucacuuugagau

SEQ ID NO: 37505 - RNA, 24 nt, Human
uaucaagucagcacacaccuuuuc

SEQ ID NO: 37506 - RNA, 24 nt, Human
ucaaugagucgcuugugaauucuc

SEQ ID NO: 37507 - RNA, 20 nt, Human
ucagaauguguccuccucau

SEQ ID NO: 37508 - RNA, 24 nt, Human
uuuucagaaacaagccacugggcu

SEQ ID NO: 37509 - RNA, 24 nt, Human
ggacagguguacagacauguucuu

SEQ ID NO: 37510 - RNA, 24 nt, Human
ucgaauggacacauuaccagugaa

SEQ ID NO: 37511 - RNA, 23 nt, Human
uaguggccccaaaugucuggcug

SEQ ID NO: 37512 - RNA, 24 nt, Human
ucuggcaacacuugaggggagaua

SEQ ID NO: 37513 - RNA, 24 nt, Human
gagcucgcuugggucccuuugaca

SEQ ID NO: 37514 - RNA, 24 nt, Human
ugacgaggcauuuggcuaccuuaa

SEQ ID NO: 37515 - RNA, 24 nt, Human
uccaaaagccuuguuacuguuucu

SEQ ID NO: 37516 - RNA, 24 nt, Human
ucugauagaccaucuuugggaaac

SEQ ID NO: 37517 - RNA, 21 nt, Human
cuuugugcugggccugcucuu

SEQ ID NO: 37518 - RNA, 23 nt, Human
aggugguuccggaauggccagga

SEQ ID NO: 37519 - RNA, 19 nt, Human
uaggaugcagauuuucccu

SEQ ID NO: 37520 - RNA, 19 nt, Human
caaugcacaaauggaucag

SEQ ID NO: 37521 - RNA, 24 nt, Human
uaggaaagacaaaauaaauacuua

SEQ ID NO: 37522 - RNA, 24 nt, Human
ugcccauuguucaauuauauucgu

SEQ ID NO: 37523 - RNA, 24 nt, Human
gagcauccggaacgucacagagga

SEQ ID NO: 37524 - RNA, 24 nt, Human
gugcaugaccaaaaguccuucuaa

SEQ ID NO: 37525 - RNA, 24 nt, Human
ucacugccucuaccugaaaaacug

SEQ ID NO: 37526 - RNA, 24 nt, Human
ugccaaggauuaaagggcaagcag

SEQ ID NO: 37527 - RNA, 22 nt, Human
uggcuuguccuucccagaaggu

SEQ ID NO: 37528 - RNA, 24 nt, Human
ucgcagagauccugagugucuacc

SEQ ID NO: 37529 - RNA, 24 nt, Human
ugcuaagucagguugccuuuacuu

SEQ ID NO: 37530 - RNA, 24 nt, Human
ugcgugagagggucgugaucgauu

SEQ ID NO: 37531 - RNA, 24 nt, Human
uucccauguggcagcaguaguggc

SEQ ID NO: 37532 - RNA, 24 nt, Human
aacacgguaucggucgucuggaca

SEQ ID NO: 37533 - RNA, 24 nt, Human
agcaagagugacuuuaguauucau

SEQ ID NO: 37534 - RNA, 24 nt, Human
uaagagaaagacacagguagauga

SEQ ID NO: 37535 - RNA, 24 nt, Human
aggaagauuugaacauagcagcug

SEQ ID NO: 37536 - RNA, 24 nt, Human
aacaauacguagccaauuuccuua

SEQ ID NO: 37537 - RNA, 24 nt, Human
ucaguuauaauguucuuuuuaagg

SEQ ID NO: 37538 - RNA, 24 nt, Human
ugacuacauacauagauggguagc

SEQ ID NO: 37539 - RNA, 24 nt, Human
aauggcaccuucaaaaggggcgau

SEQ ID NO: 37540 - RNA, 24 nt, Human
uggaugcagugucucgggacuucg

SEQ ID NO: 37541 - RNA, 21 nt, Human
uucaagggauggaaagucacc

SEQ ID NO: 37542 - RNA, 21 nt, Human
uucaagggauggaaagucacc

SEQ ID NO: 37543 - RNA, 24 nt, Human
uugcagugagccgagaucccgcac

SEQ ID NO: 37544 - RNA, 24 nt, Human
aaugguuuccacugauucgauuuu

SEQ ID NO: 37545 - RNA, 24 nt, Human
uggcauggccuuccgugucccacu

SEQ ID NO: 37546 - RNA, 24 nt, Human
ucgcugagacaccauggggaaggu

SEQ ID NO: 37547 - RNA, 24 nt, Human
ugagaagaacugugaaaagagcau

SEQ ID NO: 37548 - RNA, 24 nt, Human
uaugacacugacaaugaaaauacu

SEQ ID NO: 37549 - RNA, 22 nt, Human
ucagaaagaacuggcgggggca

SEQ ID NO: 37550 - RNA, 24 nt, Human
ugugguggcuggagguggccgaau

SEQ ID NO: 37551 - RNA, 24 nt, Human
uuaguuagguaguuuugguacauu

SEQ ID NO: 37552 - RNA, 24 nt, Human
uuuaacuaagcuauacuaacccca

SEQ ID NO: 37553 - RNA, 24 nt, Human
agcauggugcuaccauucaagaag

SEQ ID NO: 37554 - RNA, 21 nt, Human
uagccaccgcaccucgucuug

SEQ ID NO: 37555 - RNA, 24 nt, Human
uuaggagauuuuuaugacacacgg

SEQ ID NO: 37556 - RNA, 24 nt, Human
uucagggugggggagaauugagga

SEQ ID NO: 37557 - RNA, 24 nt, Human
uauauagaccucccaccgaguggu

SEQ ID NO: 37558 - RNA, 24 nt, Human
cagcagaccaaucauguucccuga

SEQ ID NO: 37559 - RNA, 24 nt, Human
agaaagacugucgcuagcauuuuu

SEQ ID NO: 37560 - RNA, 23 nt, Human
uuugugcauugccacaggagaua

SEQ ID NO: 37561 - RNA, 24 nt, Human
uaguauuuuuuuccucagauggaa

SEQ ID NO: 37562 - RNA, 24 nt, Human
uaaauucugauuuuucacuacuac

SEQ ID NO: 37563 - RNA, 24 nt, Human
uuaaaaguuucugcccauggaaua

SEQ ID NO: 37564 - RNA, 24 nt, Human
uugaagacuuuaacaguagauaaa

SEQ ID NO: 37565 - RNA, 24 nt, Human
augaaauuaauaucuucuacuuga

SEQ ID NO: 37566 - RNA, 24 nt, Human
gagcgcacgaguuaguuguagucc

SEQ ID NO: 37567 - RNA, 24 nt, Human
uguuuucuuuggucccgcaggagg

SEQ ID NO: 37568 - RNA, 24 nt, Human
uucauugucacuaacaucuggugu

SEQ ID NO: 37569 - RNA, 24 nt, Human
uaagguuuauuuucacuguguuuu

SEQ ID NO: 37570 - RNA, 24 nt, Human
ugugauacaagcacuggguucuuu

SEQ ID NO: 37571 - RNA, 21 nt, Human
uuccccagcaucuaauuucuc

SEQ ID NO: 37572 - RNA, 24 nt, Human
guuuguuuggagagggugucuuuc

SEQ ID NO: 37573 - RNA, 24 nt, Human
uuuauggccuaaaauuuguauaag

SEQ ID NO: 37574 - RNA, 24 nt, Human
ugggaagugcaagaccaagauaug

SEQ ID NO: 37575 - RNA, 24 nt, Human
auuuaucaucauaaauacauuuaa

SEQ ID NO: 37576 - RNA, 24 nt, Human
ucccgugggccucacaugccaggu

SEQ ID NO: 37577 - RNA, 17 nt, Human
uaucagggcagcucugc

SEQ ID NO: 37578 - RNA, 24 nt, Human
cguggcccucaugagcuacgccug

SEQ ID NO: 37579 - RNA, 24 nt, Human
uuaaauuuguuuugagaggagauc

SEQ ID NO: 37580 - RNA, 23 nt, Human
uugaaagguauauuaaaauuaag

SEQ ID NO: 37581 - RNA, 21 nt, Human
uuuguaagcuucugagauugc

SEQ ID NO: 37582 - RNA, 24 nt, Human
uguaugcccagggaaggaggcgcu

SEQ ID NO: 37583 - RNA, 24 nt, Human
acaaaacagcccugcugcaaagau

SEQ ID NO: 37584 - RNA, 24 nt, Human
uuagggaaaugguaagauguuaca

SEQ ID NO: 37585 - RNA, 24 nt, Human
uuuuccgcccccuaggguccaagc

SEQ ID NO: 37586 - RNA, 24 nt, Human
uggcagcaggggaacgucuucuca

SEQ ID NO: 37587 - RNA, 24 nt, Human
uuaccagaagacgaaggacugggg

SEQ ID NO: 37588 - RNA, 22 nt, Human
cgccgggacagcagacugccgg

SEQ ID NO: 37589 - RNA, 24 nt, Human
cagccuggacuuaccaccacuaaa

SEQ ID NO: 37590 - RNA, 24 nt, Human
ggcccggagcggagcgcgcccugc

SEQ ID NO: 37591 - RNA, 19 nt, Human
ccacuccaguugcuuggca

SEQ ID NO: 37592 - RNA, 24 nt, Human
uggcccagacaccuccacgcugcu

SEQ ID NO: 37593 - RNA, 24 nt, Human
ucauuuccagcauuuccaucuuua

SEQ ID NO: 37594 - RNA, 24 nt, Human
ucggcacguggcuggucccaggcc

SEQ ID NO: 37595 - RNA, 21 nt, Human
ucuuguggacgcaagcuuccu

SEQ ID NO: 37596 - RNA, 24 nt, Human
uggcagcccuaccucugagauuuu

SEQ ID NO: 37597 - RNA, 19 nt, Human
caccgggcauagccguggu

SEQ ID NO: 37598 - RNA, 24 nt, Human
cccaggacuccuucaccucguuga

SEQ ID NO: 37599 - RNA, 24 nt, Human
uggaagaggggcuccugcagguaa

SEQ ID NO: 37600 - RNA, 24 nt, Human
caagucuuaaagcauguuggauuu

SEQ ID NO: 37601 - RNA, 24 nt, Human
ucuaugacuuauuuuucuguuugg

SEQ ID NO: 37602 - RNA, 24 nt, Human
agacauagucaaaaugaaaacaua

SEQ ID NO: 37603 - RNA, 24 nt, Human
cuccugguccuauuguuuaggaag

SEQ ID NO: 37604 - RNA, 24 nt, Human
ucacucaguuuuuaauaaaggcca

SEQ ID NO: 37605 - RNA, 24 nt, Human
ucccggagcgguggggcggggccu

SEQ ID NO: 37606 - RNA, 24 nt, Human
ucaguucuucccaggugaacagca

SEQ ID NO: 37607 - RNA, 24 nt, Human
aggaagggauggaaggucuccuug

SEQ ID NO: 37608 - RNA, 24 nt, Human
uggaaugcaagcuuuaggacuuca

SEQ ID NO: 37609 - RNA, 24 nt, Human
uggcaagugggugguauagaggcu

SEQ ID NO: 37610 - RNA, 24 nt, Human
ugggaaccgcgcuggaggaaggcg

SEQ ID NO: 37611 - RNA, 24 nt, Human
uugaaugacacccgggaccugcau

SEQ ID NO: 37612 - RNA, 24 nt, Human
uaacagguguaagaguguugaaaa

SEQ ID NO: 37613 - RNA, 24 nt, Human
gaccguaauuguggcugcacugga

SEQ ID NO: 37614 - RNA, 24 nt, Human
ugucauaggcaucgacgaggggca

SEQ ID NO: 37615 - RNA, 24 nt, Human
ugaaaggaaaagcuggugcugggg

SEQ ID NO: 37616 - RNA, 24 nt, Human
uauccuguaauaaggcagggcagg

SEQ ID NO: 37617 - RNA, 24 nt, Human
gaugcaaaauguuugcaguuugac

SEQ ID NO: 37618 - RNA, 24 nt, Human
aaauggaaucuagaagcuaaauuu

SEQ ID NO: 37619 - RNA, 22 nt, Human
uuuacagaaaauucuagaacaa

SEQ ID NO: 37620 - RNA, 24 nt, Human
ugguucuugguaugucccaggaug

SEQ ID NO: 37621 - RNA, 23 nt, Human
ucucacagugcggggucugcggg

SEQ ID NO: 37622 - RNA, 24 nt, Human
cacccgguuagauggggcucugca

SEQ ID NO: 37623 - RNA, 24 nt, Human
uguaaacuagauuauguuguaaac

SEQ ID NO: 37624 - RNA, 24 nt, Human
uugguuggauacuugcuggaaaaa

SEQ ID NO: 37625 - RNA, 19 nt, Human
uaacucccugugucugcau

SEQ ID NO: 37626 - RNA, 24 nt, Human
cugcucccuggccagcccccuugu

SEQ ID NO: 37627 - RNA, 24 nt, Human
uaacagguguaagaguguugaaaa

SEQ ID NO: 37628 - RNA, 24 nt, Human
ugugcagaagaaauggaaggauuc

SEQ ID NO: 37629 - RNA, 24 nt, Human
uaucaaggaagggcaggcgugaug

SEQ ID NO: 37630 - RNA, 24 nt, Human
uuuaagaauuuguuuuauuaaauu

SEQ ID NO: 37631 - RNA, 21 nt, Human
uugcagguggguaguggguca

SEQ ID NO: 37632 - RNA, 24 nt, Human
uguggaucaggguauauagacaga

SEQ ID NO: 37633 - RNA, 23 nt, Human
gaggcccaguccugcccgggccc

SEQ ID NO: 37634 - RNA, 24 nt, Human
aaccuuuuuaaaaaauggagauga

SEQ ID NO: 37635 - RNA, 24 nt, Human
uguacagauuuuaaaaaaccaaaa

SEQ ID NO: 37636 - RNA, 24 nt, Human
uguggaauggggcuaugcuuuuga

SEQ ID NO: 37637 - RNA, 24 nt, Human
uguucaguugcugcucacaauagu

SEQ ID NO: 37638 - RNA, 24 nt, Human
auggagccacaaaguuuccagaug

SEQ ID NO: 37639 - RNA, 24 nt, Human
ggaaaagucaaauucauuguuuau

SEQ ID NO: 37640 - RNA, 24 nt, Human
aucuguuucguuaagcugaaccag

SEQ ID NO: 37641 - RNA, 24 nt, Human
uacccagccggggcccuccuggag

SEQ ID NO: 37642 - RNA, 24 nt, Human
caguguccaccacgagucugccug

SEQ ID NO: 37643 - RNA, 24 nt, Human
cagcagccucaacaguaugguauu

SEQ ID NO: 37644 - RNA, 24 nt, Human
uauggccagcaaccaacuucccag

SEQ ID NO: 37645 - RNA, 24 nt, Human
uagcugcuagcuauuggccuccca

SEQ ID NO: 37646 - RNA, 24 nt, Human
ccaaccuggaccugguuaucgaua

SEQ ID NO: 37647 - RNA, 24 nt, Human
uggaagacagcuacgggcagcagu

SEQ ID NO: 37648 - RNA, 24 nt, Human
ucccuggcuuaugagcaggcugag

SEQ ID NO: 37649 - RNA, 24 nt, Human
uauaacauguaugcuuuucagaau

SEQ ID NO: 37650 - RNA, 24 nt, Human
cucaggauugcccauguggaucac

SEQ ID NO: 37651 - RNA, 24 nt, Human
agaccagucagagaagucagacgu

SEQ ID NO: 37652 - RNA, 23 nt, Human
gaggcccaguccugcccgggccc

SEQ ID NO: 37653 - RNA, 24 nt, Human
ugagacuaguucggacuccccuuc

SEQ ID NO: 37654 - RNA, 24 nt, Human
ucuuguguugugaucaggcuggag

SEQ ID NO: 37655 - RNA, 24 nt, Human
gagugcgucauauguuguuccuag

SEQ ID NO: 37656 - RNA, 24 nt, Human
uucuucucggaaggcuuuuuuaaa

SEQ ID NO: 37657 - RNA, 24 nt, Human
cuuuaaaaaaaaaaaagcggccaa

SEQ ID NO: 37658 - RNA, 24 nt, Human
gcgcagcuucaggggccgcaaggg

SEQ ID NO: 37659 - RNA, 19 nt, Human
ucugaccggcuucaagcuc

SEQ ID NO: 37660 - RNA, 24 nt, Human
ggugaaagagaugaaccacgacua

SEQ ID NO: 37661 - RNA, 24 nt, Human
uuauguugguuaauguuaaucuau

SEQ ID NO: 37662 - RNA, 24 nt, Human
uauuauucucaguugcaucuucau

SEQ ID NO: 37663 - RNA, 24 nt, Human
ugagguuugccagccgggacacca

SEQ ID NO: 37664 - RNA, 24 nt, Human
uuugcacucagcuuauuacaggua

SEQ ID NO: 37665 - RNA, 24 nt, Human
uucaaaaugggcaaauuuuauuuu

SEQ ID NO: 37666 - RNA, 24 nt, Human
uuaauucuuuugccaaguaugccu

SEQ ID NO: 37667 - RNA, 24 nt, Human
caauccgaucgugccccaagacag

SEQ ID NO: 37668 - RNA, 24 nt, Human
cacccguguuuuugcggcgagaag

SEQ ID NO: 37669 - RNA, 24 nt, Human
ccccgguggggcuccacccgucac

SEQ ID NO: 37670 - RNA, 24 nt, Human
ucuaagucagagucuccuaaagag

SEQ ID NO: 37671 - RNA, 24 nt, Human
cggcgggaaugaccacuuccggcc

SEQ ID NO: 37672 - RNA, 23 nt, Human
uagcugcccauuaugcccuucaa

SEQ ID NO: 37673 - RNA, 24 nt, Human
uuccuggccaguguggagucucua

SEQ ID NO: 37674 - RNA, 21 nt, Human
uucaagggauggaaagucacc

SEQ ID NO: 37675 - RNA, 24 nt, Human
uggacgcaagggacaacacgcacu

SEQ ID NO: 37676 - RNA, 24 nt, Human
gagcagcaucguuggcgucuggua

SEQ ID NO: 37677 - RNA, 24 nt, Human
uuccagccagcuuuccaaaucgac

SEQ ID NO: 37678 - RNA, 20 nt, Human
ucucucagcucccgcacccc

SEQ ID NO: 37679 - RNA, 24 nt, Human
acagucuuugaguaacaucuguuc

SEQ ID NO: 37680 - RNA, 24 nt, Human
ucgaauggacacauuaccagugaa

SEQ ID NO: 37681 - RNA, 24 nt, Human
ggacagguguacagacauguucuu

SEQ ID NO: 37682 - RNA, 24 nt, Human
aggauuguauuuaaaaacccccaa

SEQ ID NO: 37683 - RNA, 24 nt, Human
uauuacaauucacuggccgucguu

SEQ ID NO: 37684 - RNA, 24 nt, Human
caccuguaaucccagcuacuuggg

SEQ ID NO: 37685 - RNA, 24 nt, Human
ucuccagggugugcucuggaagau

SEQ ID NO: 37686 - RNA, 21 nt, Human
agggagcuguguaaauggacc

SEQ ID NO: 37687 - RNA, 24 nt, Human
ggagaucacuguuucguaugcucu

SEQ ID NO: 37688 - RNA, 24 nt, Human
ugagaaagcaagauguuggcuacc

SEQ ID NO: 37689 - RNA, 24 nt, Human
uuggaucugagcauuuaaauguuu

SEQ ID NO: 37690 - RNA, 24 nt, Human
ggggagucaggugcggggagcggu

SEQ ID NO: 37691 - RNA, 24 nt, Human
cuugacaaaguggucguugagggc

SEQ ID NO: 37692 - RNA, 24 nt, Human
ugggauggaaaugaaauggccaaa

SEQ ID NO: 37693 - RNA, 23 nt, Human
ucccucuuggcccccggggggac

SEQ ID NO: 37694 - RNA, 20 nt, Human
uacaucgcccugaacgagga

SEQ ID NO: 37695 - RNA, 24 nt, Human
cgggaugaacuggccaacacgcag

SEQ ID NO: 37696 - RNA, 24 nt, Human
agagagcgcggcccucaggagcaa

SEQ ID NO: 37697 - RNA, 24 nt, Human
uacgccucgcaggggcgcuacgag

SEQ ID NO: 37698 - RNA, 24 nt, Human
uccacgggggcuucuuugcguugg

SEQ ID NO: 37699 - RNA, 24 nt, Human
ggcgcagagaccgcgucagggacg

SEQ ID NO: 37700 - RNA, 24 nt, Human
gggaagacgaaggcaugguucagg

SEQ ID NO: 37701 - RNA, 24 nt, Human
uaaaaggaacauuuaaaaaguugc

SEQ ID NO: 37702 - RNA, 24 nt, Human
cugcagcaauuuucagugagacag

SEQ ID NO: 37703 - RNA, 22 nt, Human
ucccgccacugaugaggagaga

SEQ ID NO: 37704 - RNA, 24 nt, Human
uuggccuuauaaguggcucuuugu

SEQ ID NO: 37705 - RNA, 24 nt, Human
aucaagcucagaugacuuauuugg

SEQ ID NO: 37706 - RNA, 17 nt, Human
ucacaguggaauucguc

SEQ ID NO: 37707 - RNA, 24 nt, Human
agaguuguucauccaggagacagc

SEQ ID NO: 37708 - RNA, 24 nt, Human
ggccugggcacccuuagaggggag

SEQ ID NO: 37709 - RNA, 24 nt, Human
uaccaagaaguggaagaagaccaa

SEQ ID NO: 37710 - RNA, 24 nt, Human
acacaaugagauugcaggucagau

SEQ ID NO: 37711 - RNA, 24 nt, Human
cacccgagcuacgccgugccgcac

SEQ ID NO: 37712 - RNA, 24 nt, Human
ugaggauaugcuuggucggguauu

SEQ ID NO: 37713 - RNA, 24 nt, Human
ugaggaaaagcaacuucgcggagg

SEQ ID NO: 37714 - RNA, 24 nt, Human
ugucccggcggcgccaaccgaagc

SEQ ID NO: 37715 - RNA, 19 nt, Human
ugaaaggggagggucccca

SEQ ID NO: 37716 - RNA, 24 nt, Human
uucucuggguucugaaguucuggg

SEQ ID NO: 37717 - RNA, 24 nt, Human
ugcuguagcagcucuuuagcugaa

SEQ ID NO: 37718 - RNA, 24 nt, Human
uacaugaagcucaccaaggcccug

SEQ ID NO: 37719 - RNA, 24 nt, Human
ggcauauuuuauauuagugaagag

SEQ ID NO: 37720 - RNA, 24 nt, Human
uaaaagcagguggaguugguugaa

SEQ ID NO: 37721 - RNA, 24 nt, Human
uuagaaaugagaucuagagaacac

SEQ ID NO: 37722 - RNA, 24 nt, Human
uccaccacuacguggccaucugau

SEQ ID NO: 37723 - RNA, 24 nt, Human
uugguuccaacgcgauggcaaguc

SEQ ID NO: 37724 - RNA, 24 nt, Human
aggcagcagaggcaugagcagcga

SEQ ID NO: 37725 - RNA, 18 nt, Human
caugcagggacgcgcccc

SEQ ID NO: 37726 - RNA, 24 nt, Human
cgaguacaggcacagugccacgac

SEQ ID NO: 37727 - RNA, 24 nt, Human
uaaaaaguuguggcaaagauggcu

SEQ ID NO: 37728 - RNA, 24 nt, Human
caacugaaccacugucuugacuuu

SEQ ID NO: 37729 - RNA, 24 nt, Human
uguguauauauauauauauaugua

SEQ ID NO: 37730 - RNA, 24 nt, Human
ucaacagugugaauguaucauguu

SEQ ID NO: 37731 - RNA, 24 nt, Human
ucgcgcagggggcucgguggggau

SEQ ID NO: 37732 - RNA, 24 nt, Human
ucuaagucagagucuccuaaagag

SEQ ID NO: 37733 - RNA, 24 nt, Human
aucgugcaaguggaugguaagaua

SEQ ID NO: 37734 - RNA, 24 nt, Human
augcagugugugucccgcauguug

SEQ ID NO: 37735 - RNA, 24 nt, Human
ugaggucgaggguuaugauuugaa

SEQ ID NO: 37736 - RNA, 24 nt, Human
uuccagaguucagucugcgccuca

SEQ ID NO: 37737 - RNA, 24 nt, Human
ugggauguccgcugcaaucugcuc

SEQ ID NO: 37738 - RNA, 24 nt, Human
ccugcaaugcacgcugguauucug

SEQ ID NO: 37739 - RNA, 24 nt, Human
aggcaguggcgauggcgcccuuuc

SEQ ID NO: 37740 - RNA, 21 nt, Human
ucagaacauuccacagguaua

SEQ ID NO: 37741 - RNA, 24 nt, Human
cuugcccgcuggcgggcaguagcu

SEQ ID NO: 37742 - RNA, 24 nt, Human
uacuggaagaggucaaggcgcugc

SEQ ID NO: 37743 - RNA, 24 nt, Human
ugcgagaaauuccaggcggcgcuc

SEQ ID NO: 37744 - RNA, 24 nt, Human
aggaauuuggagaccaggauguag

SEQ ID NO: 37745 - RNA, 24 nt, Human
uacucaagacaauugacgagggag

SEQ ID NO: 37746 - RNA, 17 nt, Human
ugugucugaugcuguua

SEQ ID NO: 37747 - RNA, 24 nt, Human
gcucaaucuggccucuaggcuacc

SEQ ID NO: 37748 - RNA, 24 nt, Human
ugauguuuuuauuccucuguaucc

SEQ ID NO: 37749 - RNA, 24 nt, Human
uauagcacuucucaaugccacacc

SEQ ID NO: 37750 - RNA, 24 nt, Human
agaaagacaguucuggucaggccu

SEQ ID NO: 37751 - RNA, 24 nt, Human
ucagaaaugugaauuccaggaugc

SEQ ID NO: 37752 - RNA, 24 nt, Human
aggaaggagauauagugaagagga

SEQ ID NO: 37753 - RNA, 24 nt, Human
uagcuuggugccaauuggucgugg

SEQ ID NO: 37754 - RNA, 24 nt, Human
uugaucuugaagaaacugggcgug

SEQ ID NO: 37755 - RNA, 24 nt, Human
aggaaggagauauagugaagagga

SEQ ID NO: 37756 - RNA, 24 nt, Human
aggaaggagauauagugaagagga

SEQ ID NO: 37757 - RNA, 24 nt, Human
aggaaggagauauagugaagagga

SEQ ID NO: 37758 - RNA, 24 nt, Human
aggaaggagauauagugaagagga

SEQ ID NO: 37759 - RNA, 24 nt, Human
uugaucuugaagaaacugggcgug

SEQ ID NO: 37760 - RNA, 24 nt, Human
aggaaggagauauagugaagagga

SEQ ID NO: 37761 - RNA, 24 nt, Human
guagaguuuucuucaggcuuaaag

SEQ ID NO: 37762 - RNA, 24 nt, Human
uugaucuugaagaaacugggcgug

SEQ ID NO: 37763 - RNA, 24 nt, Human
aggaaggagauauagugaagagga

SEQ ID NO: 37764 - RNA, 24 nt, Human
guagaguuuucuucaggcuuaaag

SEQ ID NO: 37765 - RNA, 18 nt, Human
ugucaaggucauggcugu

SEQ ID NO: 37766 - RNA, 24 nt, Human
uugaucuugaagaaacugggcgug

SEQ ID NO: 37767 - RNA, 24 nt, Human
aggaaggagauauagugaagagga

SEQ ID NO: 37768 - RNA, 24 nt, Human
guagaguuuucuucaggcuuaaag

SEQ ID NO: 37769 - RNA, 20 nt, Human
uugaagaaacugggcguguc

SEQ ID NO: 37770 - RNA, 24 nt, Human
guagaguuuucuucaggcuuaaag

SEQ ID NO: 37771 - RNA, 24 nt, Human
uugaucuugaagaaacugggcgug

SEQ ID NO: 37772 - RNA, 24 nt, Human
guagaguuuucuucaggcuuaaag

SEQ ID NO: 37773 - RNA, 24 nt, Human
uugaucuugaagaaacugggcgug

SEQ ID NO: 37774 - RNA, 24 nt, Human
aggaaggagauauagugaagagga

SEQ ID NO: 37775 - RNA, 24 nt, Human
guagaguuuucuucaggcuuaaag

SEQ ID NO: 37776 - RNA, 24 nt, Human
uugaucuugaagaaacugggcgug

SEQ ID NO: 37777 - RNA, 24 nt, Human
auggaucugaugaaaagaaaaagc

SEQ ID NO: 37778 - RNA, 24 nt, Human
aggaaggagauauagugaagagga

SEQ ID NO: 37779 - RNA, 24 nt, Human
guagaguuuucuucaggcuuaaag

SEQ ID NO: 37780 - RNA, 24 nt, Human
aaggaccugcccacugugcuuccu

SEQ ID NO: 37781 - RNA, 24 nt, Human
uugaucuugaagaaacugggcgug

SEQ ID NO: 37782 - RNA, 24 nt, Human
guagaguuuucuucaggcuuaaag

SEQ ID NO: 37783 - RNA, 24 nt, Human
uugaucuugaagaaacugggcgug

SEQ ID NO: 37784 - RNA, 24 nt, Human
aggaaggagauauagugaagagga

SEQ ID NO: 37785 - RNA, 24 nt, Human
uauggcaagucacuuugacagaca

SEQ ID NO: 37786 - RNA, 24 nt, Human
ugagaauggcaaaauuagucgccu

SEQ ID NO: 37787 - RNA, 24 nt, Human
uacaccacucccaagaagaauaag

SEQ ID NO: 37788 - RNA, 22 nt, Human
uccgugcgcguugcugcggccg

SEQ ID NO: 37789 - RNA, 24 nt, Human
uugaucuugaagaaacugggcgug

SEQ ID NO: 37790 - RNA, 24 nt, Human
ugcaaggaacuuccaugccucuaa

SEQ ID NO: 37791 - RNA, 24 nt, Human
aggaaggagauauagugaagagga

SEQ ID NO: 37792 - RNA, 24 nt, Human
guagaguuuucuucaggcuuaaag

SEQ ID NO: 37793 - RNA, 24 nt, Human
aggaaggagauauagugaagagga

SEQ ID NO: 37794 - RNA, 24 nt, Human
uugaucuugaagaaacugggcgug

SEQ ID NO: 37795 - RNA, 24 nt, Human
aggaaggagauauagugaagagga

SEQ ID NO: 37796 - RNA, 24 nt, Human
guagaguuuucuucaggcuuaaag

SEQ ID NO: 37797 - RNA, 22 nt, Human
uccgugcgcguugcugcggccg

SEQ ID NO: 37798 - RNA, 24 nt, Human
uugaucuugaagaaacugggcgug

SEQ ID NO: 37799 - RNA, 24 nt, Human
aggaaggagauauagugaagagga

SEQ ID NO: 37800 - RNA, 24 nt, Human
guagaguuuucuucaggcuuaaag

SEQ ID NO: 37801 - RNA, 24 nt, Human
ucucaaggccugacagacagaagg

SEQ ID NO: 37802 - RNA, 18 nt, Human
uuccagugauaucggcuc

SEQ ID NO: 37803 - RNA, 23 nt, Human
uggggauaaaauaaagauguaau

SEQ ID NO: 37804 - RNA, 24 nt, Human
aacacauuaauaacaauuuaaaau

SEQ ID NO: 37805 - RNA, 24 nt, Human
uauuauguacacauagaauguuac

SEQ ID NO: 37806 - RNA, 24 nt, Human
ucagaagaagucaacaggcccaag

SEQ ID NO: 37807 - RNA, 24 nt, Human
ugcagaaagaacuugaggugacua

SEQ ID NO: 37808 - RNA, 24 nt, Human
aaaguuacaaccaagaacugggag

SEQ ID NO: 37809 - RNA, 22 nt, Human
uccgugcgcguugcugcggccg

SEQ ID NO: 37810 - RNA, 24 nt, Human
auuugucugagcagugugggcaug

SEQ ID NO: 37811 - RNA, 24 nt, Human
ucucucugcaaaaaaaaaaaaaaa

SEQ ID NO: 37812 - RNA, 24 nt, Human
uauaguacuaccaauguuggugac

SEQ ID NO: 37813 - RNA, 24 nt, Human
uggcacugccggccccuggcccua

SEQ ID NO: 37814 - RNA, 24 nt, Human
uggcccggccugacccggucuggc

SEQ ID NO: 37815 - RNA, 24 nt, Human
cggcccagcgagcggcccugaugc

SEQ ID NO: 37816 - RNA, 24 nt, Human
aggcggcguggacagcggccccgg

SEQ ID NO: 37817 - RNA, 24 nt, Human
cagauuacgcccccuauccuauca

SEQ ID NO: 37818 - RNA, 24 nt, Human
ugaguggagcggccauuuccuguu

SEQ ID NO: 37819 - RNA, 24 nt, Human
uauuagauacuaauuuggccuauu

SEQ ID NO: 37820 - RNA, 24 nt, Human
aaggugcuggaggugccaagugaa

SEQ ID NO: 37821 - RNA, 24 nt, Human
gugcuugacuuguagucccuuuac

SEQ ID NO: 37822 - RNA, 21 nt, Human
uagcauguggaucucgagcuc

SEQ ID NO: 37823 - RNA, 22 nt, Human
ugcccuggccaguggcgugaga

SEQ ID NO: 37824 - RNA, 24 nt, Human
ugaggaccagugcacugaguacau

SEQ ID NO: 37825 - RNA, 24 nt, Human
aggcagcggcuguggcagcccggc

SEQ ID NO: 37826 - RNA, 24 nt, Human
uugaucuugaagaaacugggcgug

SEQ ID NO: 37827 - RNA, 24 nt, Human
aggaaggagauauagugaagagga

SEQ ID NO: 37828 - RNA, 24 nt, Human
guagaguuuucuucaggcuuaaag

SEQ ID NO: 37829 - RNA, 22 nt, Human
uccgugcgcguugcugcggccg

SEQ ID NO: 37830 - RNA, 24 nt, Human
uugaucuugaagaaacugggcgug

SEQ ID NO: 37831 - RNA, 24 nt, Human
aggaaggagauauagugaagagga

SEQ ID NO: 37832 - RNA, 24 nt, Human
uaucacgaacagcaaagcgaccca

SEQ ID NO: 37833 - RNA, 22 nt, Human
uccgugcgcguugcugcggccg

SEQ ID NO: 37834 - RNA, 24 nt, Human
aggaaggagauauagugaagagga

SEQ ID NO: 37835 - RNA, 22 nt, Human
uccgugcgcguugcugcggccg

SEQ ID NO: 37836 - RNA, 24 nt, Human
uugaucuugaagaaacugggcgug

SEQ ID NO: 37837 - RNA, 24 nt, Human
aggaaggagauauagugaagagga

SEQ ID NO: 37838 - RNA, 24 nt, Human
guagaguuuucuucaggcuuaaag

SEQ ID NO: 37839 - RNA, 24 nt, Human
uugaucuugaagaaacugggcgug

SEQ ID NO: 37840 - RNA, 24 nt, Human
uugaucuugaagaaacugggcgug

SEQ ID NO: 37841 - RNA, 24 nt, Human
aggaaggagauauagugaagagga

SEQ ID NO: 37842 - RNA, 24 nt, Human
guagaguuuucuucaggcuuaaag

SEQ ID NO: 37843 - RNA, 24 nt, Human
aagcagaaagggaagagaagcgag

SEQ ID NO: 37844 - RNA, 24 nt, Human
uugaucuugaagaaacugggcgug

SEQ ID NO: 37845 - RNA, 24 nt, Human
aggaaggagauauagugaagagga

SEQ ID NO: 37846 - RNA, 24 nt, Human
guagaguuuucuucaggcuuaaag

SEQ ID NO: 37847 - RNA, 22 nt, Human
uccgugcgcguugcugcggccg

SEQ ID NO: 37848 - RNA, 24 nt, Human
uugaucuugaagaaacugggcgug

SEQ ID NO: 37849 - RNA, 24 nt, Human
aggaaggagauauagugaagagga

SEQ ID NO: 37850 - RNA, 22 nt, Human
uccgugcgcguugcugcggccg

SEQ ID NO: 37851 - RNA, 24 nt, Human
uugaucuugaagaaacugggcgug

SEQ ID NO: 37852 - RNA, 24 nt, Human
aggaaggagauauagugaagagga

SEQ ID NO: 37853 - RNA, 24 nt, Human
uugaucuugaagaaacugggcgug

SEQ ID NO: 37854 - RNA, 24 nt, Human
aggaaggagauauagugaagagga

SEQ ID NO: 37855 - RNA, 24 nt, Human
guagaguuuucuucaggcuuaaag

SEQ ID NO: 37856 - RNA, 24 nt, Human
uuugacaaaccuucaagugcaauu

SEQ ID NO: 37857 - RNA, 24 nt, Human
uauuagagugguauuuuuauccaa

SEQ ID NO: 37858 - RNA, 24 nt, Human
uuuugcuuauucauggcaucuuuc

SEQ ID NO: 37859 - RNA, 24 nt, Human
cauuggaugucuauuaaccaacua

SEQ ID NO: 37860 - RNA, 24 nt, Human
cauuuuguuagcuuucuccuuacu

SEQ ID NO: 37861 - RNA, 24 nt, Human
ugcguggggcucggggaugcuggu

SEQ ID NO: 37862 - RNA, 23 nt, Human
aagcagcaagugacagaggaggg

SEQ ID NO: 37863 - RNA, 24 nt, Human
ugccugggggccuaggugaggcug

SEQ ID NO: 37864 - RNA, 24 nt, Human
ucuaaaggaucagcugauuuauaa

SEQ ID NO: 37865 - RNA, 24 nt, Human
caacauggcagccuuuuccuuaga

SEQ ID NO: 37866 - RNA, 24 nt, Human
uuggacauuugaacagacaguggg

SEQ ID NO: 37867 - RNA, 18 nt, Human
ucccgugguuccagcgcc

SEQ ID NO: 37868 - RNA, 24 nt, Human
cucaggauugcccauguggaucac

SEQ ID NO: 37869 - RNA, 23 nt, Human
gaggcccaguucuguccgggccc

SEQ ID NO: 37870 - RNA, 24 nt, Human
uccuugguuggaagggccaagcac

SEQ ID NO: 37871 - RNA, 24 nt, Human
aagaaacuuaaagccuggaaugau

SEQ ID NO: 37872 - RNA, 24 nt, Human
cgggggccucaccaaacaauuguc

SEQ ID NO: 37873 - RNA, 24 nt, Human
gggcauggaccugauaagccucgg

SEQ ID NO: 37874 - RNA, 24 nt, Human
uugaagacaccugcucaguaugac

SEQ ID NO: 37875 - RNA, 24 nt, Human
cacccguggccacuucggccaagu

SEQ ID NO: 37876 - RNA, 24 nt, Human
cagcaccaccugaagaaacuggag

SEQ ID NO: 37877 - RNA, 24 nt, Human
uguaaauuguugguagguagaagu

SEQ ID NO: 37878 - RNA, 24 nt, Human
aggaaggcuggcaccucuggcucu

SEQ ID NO: 37879 - RNA, 24 nt, Human
agccuaaucuggaagaucuggcau

SEQ ID NO: 37880 - RNA, 24 nt, Human
ucugcaggcccaggacagugggcu

SEQ ID NO: 37881 - RNA, 24 nt, Human
uaccauaugugaaauuuguuuuug

SEQ ID NO: 37882 - RNA, 24 nt, Human
uggaggcaguguuugauuucaacu

SEQ ID NO: 37883 - RNA, 24 nt, Human
uagcaucuugucaguggcacuacu

SEQ ID NO: 37884 - RNA, 24 nt, Human
ucccagugcaacacuaccuuugug

SEQ ID NO: 37885 - RNA, 24 nt, Human
uauggcaagucacuuugacagaca

SEQ ID NO: 37886 - RNA, 24 nt, Human
ugagaauggcaaaauuagucgccu

SEQ ID NO: 37887 - RNA, 24 nt, Human
uacaccacucccaagaagaauaag

SEQ ID NO: 37888 - RNA, 20 nt, Human
ugugaccacccccuucacug

SEQ ID NO: 37889 - RNA, 24 nt, Human
aagcaggagcuuguccaggaaugu

SEQ ID NO: 37890 - RNA, 24 nt, Human
uaugccagcuggagcgacugugcu

SEQ ID NO: 37891 - RNA, 24 nt, Human
ugugccucuauuuuuaccauuuug

SEQ ID NO: 37892 - RNA, 22 nt, Human
aaaguuccagauugcaacaugg

SEQ ID NO: 37893 - RNA, 24 nt, Human
uguggaauauguagauucacuuuu

SEQ ID NO: 37894 - RNA, 24 nt, Human
ugacuguccauagugguuauugau

SEQ ID NO: 37895 - RNA, 24 nt, Human
uccaguaucccaaacuuucuaguc

SEQ ID NO: 37896 - RNA, 20 nt, Human
ugggauuuggaggcaagaga

SEQ ID NO: 37897 - RNA, 24 nt, Human
uacacuuaaaaccacuuaugaaaa

SEQ ID NO: 37898 - RNA, 24 nt, Human
ucuuuugucuuaugcuuagccaua

SEQ ID NO: 37899 - RNA, 24 nt, Human
uaauauguuaaaaacauuuugcuu

SEQ ID NO: 37900 - RNA, 24 nt, Human
uauaacauguaugcuuuucagaau

SEQ ID NO: 37901 - RNA, 24 nt, Human
acccggagauacuaaugggcuucu

SEQ ID NO: 37902 - RNA, 24 nt, Human
uaguaccuuuacggcuguggcuuu

SEQ ID NO: 37903 - RNA, 24 nt, Human
ugacuuaaaaaucugguauuuucu

SEQ ID NO: 37904 - RNA, 24 nt, Human
uucauuuuauauauauauauauau

SEQ ID NO: 37905 - RNA, 24 nt, Human
ucacaaguguaccucugcuaacca

SEQ ID NO: 37906 - RNA, 24 nt, Human
aaaguaaaauaaccaaagucuuaa

SEQ ID NO: 37907 - RNA, 24 nt, Human
acuuuuauaauuaaccacugaagu

SEQ ID NO: 37908 - RNA, 24 nt, Human
ugcccagaagaaaguuaauggcaa

SEQ ID NO: 37909 - RNA, 24 nt, Human
gaucuuguuuuucuugccauccac

SEQ ID NO: 37910 - RNA, 24 nt, Human
accagguaucaagcucauagcggc

SEQ ID NO: 37911 - RNA, 21 nt, Human
caccuggacaauaggaauucg

SEQ ID NO: 37912 - RNA, 19 nt, Human
uaacucccugugucugcau

SEQ ID NO: 37913 - RNA, 24 nt, Human
cugcugcuccccagcccaccagug

SEQ ID NO: 37914 - RNA, 24 nt, Human
cugcucccuggccagcccccuugu

SEQ ID NO: 37915 - RNA, 24 nt, Human
ugcccuguugcucuacauggccuu

SEQ ID NO: 37916 - RNA, 24 nt, Human
uguggucggguguuugcuggugcc

SEQ ID NO: 37917 - RNA, 24 nt, Human
uauggcaagucacuuugacagaca

SEQ ID NO: 37918 - RNA, 24 nt, Human
uacaccacucccaagaagaauaag

SEQ ID NO: 37919 - RNA, 24 nt, Human
uuuggcccugccugcuuaagcccu

SEQ ID NO: 37920 - RNA, 17 nt, Human
ucccugaguccagagcc

SEQ ID NO: 37921 - RNA, 24 nt, Human
ugaggcccagaacccagaccccaa

SEQ ID NO: 37922 - RNA, 24 nt, Human
ccaaagcucagacuugccaggcuc

SEQ ID NO: 37923 - RNA, 24 nt, Human
ugagagcccugcugugggagagcg

SEQ ID NO: 37924 - RNA, 24 nt, Human
uaccauggcgaggggcacauuuca

SEQ ID NO: 37925 - RNA, 24 nt, Human
gacacauucacugccuggucaggc

SEQ ID NO: 37926 - RNA, 24 nt, Human
ucaguauuauuuucaaaaggcuuc

SEQ ID NO: 37927 - RNA, 24 nt, Human
uuccugcauuucugaauuugucau

SEQ ID NO: 37928 - RNA, 24 nt, Human
uucacauuugagggguucuuaucc

SEQ ID NO: 37929 - RNA, 24 nt, Human
ucuguccccaucucugaaauccuu

SEQ ID NO: 37930 - RNA, 24 nt, Human
uuaaaaguugcugcaaggcugcag

SEQ ID NO: 37931 - RNA, 24 nt, Human
ugccuuaacaagaagaugcccaca

SEQ ID NO: 37932 - RNA, 24 nt, Human
uugaucuugaagaaacugggcgug

SEQ ID NO: 37933 - RNA, 24 nt, Human
guagaguuuucuucaggcuuaaag

SEQ ID NO: 37934 - RNA, 24 nt, Human
ugacgugggugugaucgcuagcag

SEQ ID NO: 37935 - RNA, 24 nt, Human
uacccuuggaggccggcgcgcccc

SEQ ID NO: 37936 - RNA, 24 nt, Human
uguccgagugcgcccugaugcugg

SEQ ID NO: 37937 - RNA, 24 nt, Human
uggaaggacgaguuccuccggguc

SEQ ID NO: 37938 - RNA, 24 nt, Human
accaccuuccucugcucguauguc

SEQ ID NO: 37939 - RNA, 24 nt, Human
uaaaucccggggccccggccgggu

SEQ ID NO: 37940 - RNA, 24 nt, Human
agggguucucucuuuccaagcgcc

SEQ ID NO: 37941 - RNA, 24 nt, Human
gggccccccccuucaaaaaacccc

SEQ ID NO: 37942 - RNA, 24 nt, Human
cgaaggggguucucaagguucacc

SEQ ID NO: 37943 - RNA, 24 nt, Human
uugaucuugaagaaacugggcgug

SEQ ID NO: 37944 - RNA, 24 nt, Human
aggaaggagauauagugaagagga

SEQ ID NO: 37945 - RNA, 24 nt, Human
guagaguuuucuucaggcuuaaag

SEQ ID NO: 37946 - RNA, 24 nt, Human
uauggcaagucacuuugacagaca

SEQ ID NO: 37947 - RNA, 24 nt, Human
uacaccacucccaagaagaauaag

SEQ ID NO: 37948 - RNA, 24 nt, Human
cuaccggggccgcggcggggaccg

SEQ ID NO: 37949 - RNA, 24 nt, Human
uaccaugccagcaagcucagcauc

SEQ ID NO: 37950 - RNA, 24 nt, Human
ugagaaccucuuguugcuggugga

SEQ ID NO: 37951 - RNA, 21 nt, Human
aaguaugccugggucuuggau

SEQ ID NO: 37952 - RNA, 24 nt, Human
uacagggacaucucaggcugacug

SEQ ID NO: 37953 - RNA, 24 nt, Human
cguaaagauggcaaugccaguggg

SEQ ID NO: 37954 - RNA, 24 nt, Human
ucugaucuauaaaugcgguggcau

SEQ ID NO: 37955 - RNA, 24 nt, Human
ugucauugccacagccucugagcc

SEQ ID NO: 37956 - RNA, 24 nt, Human
ucagugcaacgaaggcugcagcug

SEQ ID NO: 37957 - RNA, 24 nt, Human
ugugggcagcuacugucuuauuuu

SEQ ID NO: 37958 - RNA, 24 nt, Human
ggagguugcagugagcugagauca

SEQ ID NO: 37959 - RNA, 24 nt, Human
aacaacuuccggcuccucugcaag

SEQ ID NO: 37960 - RNA, 24 nt, Human
cgaccccacuguggaggagacuaa

SEQ ID NO: 37961 - RNA, 24 nt, Human
caccagaaauguucuugcuagcag

SEQ ID NO: 37962 - RNA, 20 nt, Human
uagugcaucuuccauagggg

SEQ ID NO: 37963 - RNA, 24 nt, Human
agagauuggugaggauuuggauaa

SEQ ID NO: 37964 - RNA, 24 nt, Human
uguugugguagcacuggacuuaca

SEQ ID NO: 37965 - RNA, 24 nt, Human
ucaggaacuacggauuuugggaua

SEQ ID NO: 37966 - RNA, 24 nt, Human
gugccgccuucgccaaccacuccg

SEQ ID NO: 37967 - RNA, 24 nt, Human
uaaaugacuauaaacuauuaugug

SEQ ID NO: 37968 - RNA, 24 nt, Human
uggaaggguguaaagauucuuuug

SEQ ID NO: 37969 - RNA, 24 nt, Human
uauguguauuagugaaacauugua

SEQ ID NO: 37970 - RNA, 24 nt, Human
aggaaguugcuguguuucauuucu

SEQ ID NO: 37971 - RNA, 24 nt, Human
gggcguaguugccauugaucuggg

SEQ ID NO: 37972 - RNA, 24 nt, Human
uuggaagguggcuuaucacuguag

SEQ ID NO: 37973 - RNA, 23 nt, Human
uuaaggguuauuguggguugagu

SEQ ID NO: 37974 - RNA, 24 nt, Human
cgggcagauguuuuuuuucuugga

SEQ ID NO: 37975 - RNA, 24 nt, Human
gggaaauguuuguuuuggguuuug

SEQ ID NO: 37976 - RNA, 24 nt, Human
uacaggguugaagaguuugggagg

SEQ ID NO: 37977 - RNA, 24 nt, Human
uuggugggggugcgcugggggugu

SEQ ID NO: 37978 - RNA, 24 nt, Human
ugccugggguuguguguauuguuu

SEQ ID NO: 37979 - RNA, 24 nt, Human
uucugugucgggugggagcguuug

SEQ ID NO: 37980 - RNA, 24 nt, Human
aggaaggagauauagugaagagga

SEQ ID NO: 37981 - RNA, 24 nt, Human
guagaguuuucuucaggcuuaaag

SEQ ID NO: 37982 - RNA, 24 nt, Human
agccauaguucuuuguuaccacag

SEQ ID NO: 37983 - RNA, 24 nt, Human
ugaauaaccaauaauaauuuuuuu

SEQ ID NO: 37984 - RNA, 24 nt, Human
uaacaggccaaaauucuauuuccu

SEQ ID NO: 37985 - RNA, 24 nt, Human
ugagguguuugugguauaauuuuu

SEQ ID NO: 37986 - RNA, 20 nt, Human
uaaaauguagguguuuauug

SEQ ID NO: 37987 - RNA, 24 nt, Human
agugcaguggcgcaaucuuggcug

SEQ ID NO: 37988 - RNA, 24 nt, Human
ucuagagaguagcagaccucucau

SEQ ID NO: 37989 - RNA, 24 nt, Human
agagaagaaaagcguaauagaggg

SEQ ID NO: 37990 - RNA, 24 nt, Human
ugccguggcgagagagauccaucu

SEQ ID NO: 37991 - RNA, 24 nt, Human
uuccggguggugaaaaagcccucc

SEQ ID NO: 37992 - RNA, 24 nt, Human
cuuucauuaauguucuaaggcaga

SEQ ID NO: 37993 - RNA, 24 nt, Human
uauuagggauaauauucauuuagc

SEQ ID NO: 37994 - RNA, 24 nt, Human
uaaugggucucaaaauucugugac

SEQ ID NO: 37995 - RNA, 24 nt, Human
ucccucagccucugguuuuucagc

SEQ ID NO: 37996 - RNA, 24 nt, Human
guugccaccgggacaagaggaccc

SEQ ID NO: 37997 - RNA, 24 nt, Human
cguugcugagcucaacgggaccca

SEQ ID NO: 37998 - RNA, 24 nt, Human
ucucuggauucgauggcucugcgg

SEQ ID NO: 37999 - RNA, 24 nt, Human
uucacucagugauaccccgugugg

SEQ ID NO: 38000 - RNA, 24 nt, Human
ucucucagcccugagguauacaga

SEQ ID NO: 38001 - RNA, 24 nt, Human
uaguguguccccagcaccuucaac

SEQ ID NO: 38002 - RNA, 24 nt, Human
ucagugaacauguuuuuauugaac

SEQ ID NO: 38003 - RNA, 24 nt, Human
uaaugggucucaaaauucugugac

SEQ ID NO: 38004 - RNA, 24 nt, Human
aguucagacaucaauguuccuucc

SEQ ID NO: 38005 - RNA, 24 nt, Human
ugagaaaagacagacuugggguag

SEQ ID NO: 38006 - RNA, 24 nt, Human
gggaauucuuuauuuaguaauguc

SEQ ID NO: 38007 - RNA, 24 nt, Human
ucugcaggugccuccaaaugcugg

SEQ ID NO: 38008 - RNA, 24 nt, Human
uggugcgcgcccgcaagcagaucg

SEQ ID NO: 38009 - RNA, 24 nt, Human
uuggacaacugccccuuccaugac

SEQ ID NO: 38010 - RNA, 24 nt, Human
gcccgauaagcugacacuaagaac

SEQ ID NO: 38011 - RNA, 24 nt, Human
uuccugccccgccggcggggcgag

SEQ ID NO: 38012 - RNA, 24 nt, Human
cgugcaggcgcugaagcgcgcggg

SEQ ID NO: 38013 - RNA, 24 nt, Human
uggaagaagauacaguauuguuua

SEQ ID NO: 38014 - RNA, 24 nt, Human
aaauggaaucuagaagcuaaauuu

SEQ ID NO: 38015 - RNA, 24 nt, Human
uaagguaugcuucaaaaauuuugu

SEQ ID NO: 38016 - RNA, 24 nt, Human
ugaauggauaaguaaaggcagaaa

SEQ ID NO: 38017 - RNA, 24 nt, Human
ugcauuguuaucauuaaccagucu

SEQ ID NO: 38018 - RNA, 24 nt, Human
uauuagggauaauauucauuuagc

SEQ ID NO: 38019 - RNA, 24 nt, Human
uuuaacuuuuuuaaugggucucaa

SEQ ID NO: 38020 - RNA, 21 nt, Human
ugggaggggcugaauguggug

SEQ ID NO: 38021 - RNA, 24 nt, Human
aaggaaccauggccaacugugagc

SEQ ID NO: 38022 - RNA, 24 nt, Human
aagcguuuugagcagaaaggauuc

SEQ ID NO: 38023 - RNA, 24 nt, Human
ugagccugggaaguuguggcugca

SEQ ID NO: 38024 - RNA, 24 nt, Human
uaagugacuugcucaaugccacac

SEQ ID NO: 38025 - RNA, 24 nt, Human
auacaguaggauuuaauauaugca

SEQ ID NO: 38026 - RNA, 17 nt, Human
cucagguucucauccuc

SEQ ID NO: 38027 - RNA, 19 nt, Human
ugagugguagggagucacu

SEQ ID NO: 38028 - RNA, 24 nt, Human
ugcccaguguacaugcacagaugu

SEQ ID NO: 38029 - RNA, 24 nt, Human
cugaggcuucauccuugcucugca

SEQ ID NO: 38030 - RNA, 22 nt, Human
ccggaaauggccaucugcgggg

SEQ ID NO: 38031 - RNA, 24 nt, Human
uggcucaguccucagccucugguc

SEQ ID NO: 38032 - RNA, 24 nt, Human
cucgauuaaaauacacacaucuua

SEQ ID NO: 38033 - RNA, 24 nt, Human
gagcaugguuauggugauucgugc

SEQ ID NO: 38034 - RNA, 24 nt, Human
gggaagcuuugaaauacuugcuga

SEQ ID NO: 38035 - RNA, 24 nt, Human
uaauaucaaacaucucacaggugc

SEQ ID NO: 38036 - RNA, 24 nt, Human
ugcaggagucagaugaggaccauu

SEQ ID NO: 38037 - RNA, 24 nt, Human
uuaggauaauggccuccagcugca

SEQ ID NO: 38038 - RNA, 24 nt, Human
auauauccuacuaguucuguuccu

SEQ ID NO: 38039 - RNA, 24 nt, Human
uacaaaauccuugucaguuuugcu

SEQ ID NO: 38040 - RNA, 24 nt, Human
uaagucugugaaucuacccugguc

SEQ ID NO: 38041 - RNA, 24 nt, Human
ucccugaacaccuggguauuggga

SEQ ID NO: 38042 - RNA, 24 nt, Human
uucuugguccauauccugcccauc

SEQ ID NO: 38043 - RNA, 24 nt, Human
augcaguuucuucauuagguaguc

SEQ ID NO: 38044 - RNA, 22 nt, Human
ggugauggcuguugugugagcc

SEQ ID NO: 38045 - RNA, 24 nt, Human
uguguugugugauaaaccauauaa

SEQ ID NO: 38046 - RNA, 24 nt, Human
uagaauguuagaugacauauuauu

SEQ ID NO: 38047 - RNA, 24 nt, Human
ugggagaggaguugcugaagacug

SEQ ID NO: 38048 - RNA, 24 nt, Human
cagcacccuugggagcucccagug

SEQ ID NO: 38049 - RNA, 24 nt, Human
ugaaaugcacuuucccgugcagca

SEQ ID NO: 38050 - RNA, 24 nt, Human
uggaagccagucauuggcauuuuu

SEQ ID NO: 38051 - RNA, 24 nt, Human
ggggagccucgcugugucuugcug

SEQ ID NO: 38052 - RNA, 24 nt, Human
ugugacuguugcccuuagccagcc

SEQ ID NO: 38053 - RNA, 24 nt, Human
cauuuugccuuccuguuuuugcuc

SEQ ID NO: 38054 - RNA, 24 nt, Human
uguauccgcucaugagacaauaac

SEQ ID NO: 38055 - RNA, 24 nt, Human
agacagcuggaguucagugagcca

SEQ ID NO: 38056 - RNA, 24 nt, Human
accaccuucuaucuuugagugcca

SEQ ID NO: 38057 - RNA, 24 nt, Human
uguacauauguauagguacgagcg

SEQ ID NO: 38058 - RNA, 24 nt, Human
ucggaaccuguugcguuuugaccc

SEQ ID NO: 38059 - RNA, 24 nt, Human
gucgaucaguguccgguaacccuc

SEQ ID NO: 38060 - RNA, 24 nt, Human
gggguccguggcuggguccguggc

SEQ ID NO: 38061 - RNA, 24 nt, Human
cagccgccugccgaacugacccgg

SEQ ID NO: 38062 - RNA, 24 nt, Human
ucuagcgacuggucacccuugcaa

SEQ ID NO: 38063 - RNA, 24 nt, Human
ucuggcgccguucgguuucucuua

SEQ ID NO: 38064 - RNA, 24 nt, Human
aguuuuuuuuuuuucuuuuuauuu

SEQ ID NO: 38065 - RNA, 24 nt, Human
cacccauuguccauagccuucuca

SEQ ID NO: 38066 - RNA, 24 nt, Human
ucugaacagucagcgauuccaggu

SEQ ID NO: 38067 - RNA, 24 nt, Human
ucgcguggccgccaaaagaugagg

SEQ ID NO: 38068 - RNA, 24 nt, Human
uucguucauuuugguucucagggu

SEQ ID NO: 38069 - RNA, 21 nt, Human
aaguaugccugggucuuggau

SEQ ID NO: 38070 - RNA, 24 nt, Human
cgacacaguagcaauuggugccaa

SEQ ID NO: 38071 - RNA, 21 nt, Human
uucaagggauggaaagucacc

SEQ ID NO: 38072 - RNA, 24 nt, Human
uggcaacgggaaacagugaggguu

SEQ ID NO: 38073 - RNA, 24 nt, Human
cuccuucgcugacuacaaccugcu

SEQ ID NO: 38074 - RNA, 24 nt, Human
uacaggguaaaugacggcguggag

SEQ ID NO: 38075 - RNA, 24 nt, Human
uggcuuagauuuuaaaucacauuu

SEQ ID NO: 38076 - RNA, 24 nt, Human
uucaugcaagaacagcaacagggg

SEQ ID NO: 38077 - RNA, 24 nt, Human
ugauaacacuuagcaaacacugau

SEQ ID NO: 38078 - RNA, 24 nt, Human
uugaagguugugcguccacaccua

SEQ ID NO: 38079 - RNA, 23 nt, Human
uccagggcaggaggaucaugaga

SEQ ID NO: 38080 - RNA, 23 nt, Human
gagcaguucuacgucacaagaga

SEQ ID NO: 38081 - RNA, 22 nt, Human
uuagguauuagcaaucugugcu

SEQ ID NO: 38082 - RNA, 24 nt, Human
ggaaaggauucuuuuaauugugga

SEQ ID NO: 38083 - RNA, 24 nt, Human
uuucacucauuagcuccugaggua

SEQ ID NO: 38084 - RNA, 24 nt, Human
uuccaggggacaugucccagauau

SEQ ID NO: 38085 - RNA, 24 nt, Human
acauauuguguacacucccuagga

SEQ ID NO: 38086 - RNA, 24 nt, Human
ugaucugagucuggaacugacaag

SEQ ID NO: 38087 - RNA, 24 nt, Human
ugggguuuccaccuccugccuccg

SEQ ID NO: 38088 - RNA, 23 nt, Human
ugagaagagccauaacucgugac

SEQ ID NO: 38089 - RNA, 24 nt, Human
uguuuuaauuugcuccgccucuug

SEQ ID NO: 38090 - RNA, 24 nt, Human
ggagacccaagaaauccuggugca

SEQ ID NO: 38091 - RNA, 24 nt, Human
gucucuguuuucaauauaauucuu

SEQ ID NO: 38092 - RNA, 22 nt, Human
uacauuggagaaacuggcaggu

SEQ ID NO: 38093 - RNA, 24 nt, Human
cccccaggccucaccuucugaguc

SEQ ID NO: 38094 - RNA, 24 nt, Human
agcacaauuuuucuugcugguacu

SEQ ID NO: 38095 - RNA, 24 nt, Human
cuuugaaugauaccacuaaggccc

SEQ ID NO: 38096 - RNA, 24 nt, Human
uaccugggggccaugcuucuauug

SEQ ID NO: 38097 - RNA, 24 nt, Human
ggaggcgaggggaacuggccgcgu

SEQ ID NO: 38098 - RNA, 24 nt, Human
uccaugcauauugacgagggaucu

SEQ ID NO: 38099 - RNA, 24 nt, Human
uuuaaaggggaaaaaaaguuugua

SEQ ID NO: 38100 - RNA, 24 nt, Human
acgcgcugcccggccagaaaacgg

SEQ ID NO: 38101 - RNA, 24 nt, Human
ucagagcuacacauugagaaccug

SEQ ID NO: 38102 - RNA, 24 nt, Human
uuccugcagacccagcaccagcgg

SEQ ID NO: 38103 - RNA, 24 nt, Human
cuugugcagaacauaaucauguug

SEQ ID NO: 38104 - RNA, 24 nt, Human
ccacugugaauacugguuaaguau

SEQ ID NO: 38105 - RNA, 24 nt, Human
guucacugccgacaucccuccccc

SEQ ID NO: 38106 - RNA, 24 nt, Human
auuuggguggaaaacagggugcua

SEQ ID NO: 38107 - RNA, 24 nt, Human
uacgcacuaaaaaaaaugugugcu

SEQ ID NO: 38108 - RNA, 24 nt, Human
uuuguaaccauuuauauauauuuu

SEQ ID NO: 38109 - RNA, 18 nt, Human
ucacaguggaauucgucc

SEQ ID NO: 38110 - RNA, 24 nt, Human
ugggcagaggaaugcuuugcaagc

SEQ ID NO: 38111 - RNA, 24 nt, Human
uauggaaguucuuaugcgaguauu

SEQ ID NO: 38112 - RNA, 24 nt, Human
ggagccugcuaucaccgccaauuu

SEQ ID NO: 38113 - RNA, 24 nt, Human
ugggcagagccagcugaggggggc

SEQ ID NO: 38114 - RNA, 22 nt, Human
uaagugcuauggucugaauguu

SEQ ID NO: 38115 - RNA, 24 nt, Human
ucaccuggauggcuuucguguccc

SEQ ID NO: 38116 - RNA, 24 nt, Human
acucgcugauguuuggaaagauug

SEQ ID NO: 38117 - RNA, 22 nt, Human
uccgugcgcguugcugcggccg

SEQ ID NO: 38118 - RNA, 24 nt, Human
uugaucuugaagaaacugggcgug

SEQ ID NO: 38119 - RNA, 24 nt, Human
ucagugcgcggaaccaacuugcag

SEQ ID NO: 38120 - RNA, 24 nt, Human
uaaacuaauuaacggaaggagaua

SEQ ID NO: 38121 - RNA, 24 nt, Human
guagaguuuucuucaggcuuaaag

SEQ ID NO: 38122 - RNA, 24 nt, Human
ugaggagcugcagagccuggcugg

SEQ ID NO: 38123 - RNA, 24 nt, Human
uguggugcuguccauggacaacag

SEQ ID NO: 38124 - RNA, 17 nt, Human
ugaggagaaagcugugg

SEQ ID NO: 38125 - RNA, 21 nt, Human
uuggauccccgggaagguccg

SEQ ID NO: 38126 - RNA, 24 nt, Human
uccaacccagaucaaccaaguggu

SEQ ID NO: 38127 - RNA, 24 nt, Human
ugggaccccagcagcagcagcccg

SEQ ID NO: 38128 - RNA, 24 nt, Human
gcgcugaugcccuggcaaggucuu

SEQ ID NO: 38129 - RNA, 23 nt, Human
uggcaugcccguggacacgcugu

SEQ ID NO: 38130 - RNA, 24 nt, Human
ucugaucuauaaaugcgguggcau

SEQ ID NO: 38131 - RNA, 24 nt, Human
uggaaucuguggauagugaauauu

SEQ ID NO: 38132 - RNA, 24 nt, Human
ugacaacagcugacauuuaggagg

SEQ ID NO: 38133 - RNA, 24 nt, Human
uguauugugauuaucugaaauauu

SEQ ID NO: 38134 - RNA, 24 nt, Human
ucgccguugaccuggacagcacuu

SEQ ID NO: 38135 - RNA, 23 nt, Human
uacagcuagguaucucuggagac

SEQ ID NO: 38136 - RNA, 24 nt, Human
ugucaaguaaaacggaagagggau

SEQ ID NO: 38137 - RNA, 24 nt, Human
gagguugaguuuuggacuaggcuu

SEQ ID NO: 38138 - RNA, 24 nt, Human
ucucugggcgccuggcuggcgccg

SEQ ID NO: 38139 - RNA, 24 nt, Human
uccuacguguacgacugguccgcg

SEQ ID NO: 38140 - RNA, 24 nt, Human
cagagccuggaggacaugcuggag

SEQ ID NO: 38141 - RNA, 24 nt, Human
uauaaugaggcacggcuuauugca

SEQ ID NO: 38142 - RNA, 24 nt, Human
ugaagggcaaacaguuuaguucaa

SEQ ID NO: 38143 - RNA, 24 nt, Human
acagccuuugaggaaguauggggg

SEQ ID NO: 38144 - RNA, 24 nt, Human
uaugaaaguuggcacuucuuuuuc

SEQ ID NO: 38145 - RNA, 24 nt, Human
gggcauuggauccucccacaguug

SEQ ID NO: 38146 - RNA, 23 nt, Human
ugagggaaccggaaggaaagugc

SEQ ID NO: 38147 - RNA, 24 nt, Human
uaaugggcguuuucacaugcacau

SEQ ID NO: 38148 - RNA, 24 nt, Human
ucgucucggggugcccugcgggga

SEQ ID NO: 38149 - RNA, 24 nt, Human
gcacaauucacugacccaacugaa

SEQ ID NO: 38150 - RNA, 24 nt, Human
guggaagugagugcugggucaccc

SEQ ID NO: 38151 - RNA, 24 nt, Human
cgcgcugggccgggggcuacgugc

SEQ ID NO: 38152 - RNA, 24 nt, Human
cgagcacguggccuucgaguucgu

SEQ ID NO: 38153 - RNA, 24 nt, Human
ugagcugaguaagggcuccugggg

SEQ ID NO: 38154 - RNA, 24 nt, Human
uuaauggaacgaagaugaagaugc

SEQ ID NO: 38155 - RNA, 24 nt, Human
auugauggucagccaggugccuuc

SEQ ID NO: 38156 - RNA, 24 nt, Human
agccauuggugucugcuccgcuga

SEQ ID NO: 38157 - RNA, 24 nt, Human
gggcauuggccuagcuaucucccu

SEQ ID NO: 38158 - RNA, 24 nt, Human
uguccauucuuucauugagaucua

SEQ ID NO: 38159 - RNA, 24 nt, Human
ggaacagacaggcauugcuggauc

SEQ ID NO: 38160 - RNA, 24 nt, Human
uccccaggcagccuggggaacgug

SEQ ID NO: 38161 - RNA, 23 nt, Human
ugccaugugaaggagccgucucc

SEQ ID NO: 38162 - RNA, 24 nt, Human
uggaacuguguugggagccucauc

SEQ ID NO: 38163 - RNA, 24 nt, Human
uccgcuaucugcagggugcugaaa

SEQ ID NO: 38164 - RNA, 24 nt, Human
ugguuggggcagccuggggcaucu

SEQ ID NO: 38165 - RNA, 18 nt, Human
uggcaugguuccugacgg

SEQ ID NO: 38166 - RNA, 24 nt, Human
ggagagcggugugcggagaaggca

SEQ ID NO: 38167 - RNA, 24 nt, Human
ugagguuucgcuggauaguaggua

SEQ ID NO: 38168 - RNA, 24 nt, Human
aggcugaggcaggaggaucgcuug

SEQ ID NO: 38169 - RNA, 23 nt, Human
agccagacauggugguguaugcc

SEQ ID NO: 38170 - RNA, 22 nt, Human
uggcacggacugaggccaagaa

SEQ ID NO: 38171 - RNA, 24 nt, Human
gggcaggagccggccaagacgaau

SEQ ID NO: 38172 - RNA, 24 nt, Human
aacuguguguugauuucugguucc

SEQ ID NO: 38173 - RNA, 18 nt, Human
uggaagagaaguggaugg

SEQ ID NO: 38174 - RNA, 24 nt, Human
uaaaagcaucuuuuggaacuucaa

SEQ ID NO: 38175 - RNA, 24 nt, Human
uuaaacaguggcuuuggcucuuua

SEQ ID NO: 38176 - RNA, 20 nt, Human
guggcucuggcacuccaccc

SEQ ID NO: 38177 - RNA, 24 nt, Human
ugcccgaggggucagucugauaga

SEQ ID NO: 38178 - RNA, 24 nt, Human
uagcaaaucgagucuuaaauaauc

SEQ ID NO: 38179 - RNA, 24 nt, Human
uggaaaggaggagcgaccgccuga

SEQ ID NO: 38180 - RNA, 24 nt, Human
caagcuccucuccccccucuuuuc

SEQ ID NO: 38181 - RNA, 24 nt, Human
agccacuucccucccaacccuggu

SEQ ID NO: 38182 - RNA, 24 nt, Human
ucggaccacaugaaggugcacagc

SEQ ID NO: 38183 - RNA, 20 nt, Human
uggccggaagcugggcgggu

SEQ ID NO: 38184 - RNA, 24 nt, Human
uauaguuucuccugaacaccugcu

SEQ ID NO: 38185 - RNA, 24 nt, Human
cuuccaccauucccagaacugauc

SEQ ID NO: 38186 - RNA, 24 nt, Human
uuagucuaaagaagauacaggccc

SEQ ID NO: 38187 - RNA, 24 nt, Human
ugcuuggugaccgaauuacuaggu

SEQ ID NO: 38188 - RNA, 24 nt, Human
uauggcaagucacuuugacagaca

SEQ ID NO: 38189 - RNA, 24 nt, Human
ugagaauggcaaaauuagucgccu

SEQ ID NO: 38190 - RNA, 24 nt, Human
uccgcgggguaccaccacaaggag

SEQ ID NO: 38191 - RNA, 24 nt, Human
caagccagagagagcagagaaggc

SEQ ID NO: 38192 - RNA, 24 nt, Human
ccacgaccaguuggcagguuccga

SEQ ID NO: 38193 - RNA, 24 nt, Human
uucucaagggugucagaaccauac

SEQ ID NO: 38194 - RNA, 24 nt, Human
ugaggcuguggccuccaaaggguc

SEQ ID NO: 38195 - RNA, 24 nt, Human
ugguguggaggugcucaugggggu

SEQ ID NO: 38196 - RNA, 24 nt, Human
cagagcacucgcggcguggguggg

SEQ ID NO: 38197 - RNA, 24 nt, Human
gaagcaccugcuccggcauccagc

SEQ ID NO: 38198 - RNA, 24 nt, Human
ggccuuggcuaggacccagagcca

SEQ ID NO: 38199 - RNA, 24 nt, Human
ugugccaaucuuuggauaaagaua

SEQ ID NO: 38200 - RNA, 24 nt, Human
cucuggugaugcuccuccagcucc

SEQ ID NO: 38201 - RNA, 24 nt, Human
agagccugaguccucgccuuguug

SEQ ID NO: 38202 - RNA, 22 nt, Human
uggccugcuccggcugcuuguc

SEQ ID NO: 38203 - RNA, 24 nt, Human
ccagaccgacguggccauuguagu

SEQ ID NO: 38204 - RNA, 24 nt, Human
uacgugaaacacaaacuuugcucu

SEQ ID NO: 38205 - RNA, 24 nt, Human
ugcaggaacugggugugcacacgg

SEQ ID NO: 38206 - RNA, 24 nt, Human
caguaggcuucuauauauccugga

SEQ ID NO: 38207 - RNA, 24 nt, Human
uaggaggauguggcuguugggguu

SEQ ID NO: 38208 - RNA, 24 nt, Human
ugaaaacaaaagaacuucacugag

SEQ ID NO: 38209 - RNA, 24 nt, Human
uaaguaacugaucuaugaaguuag

SEQ ID NO: 38210 - RNA, 24 nt, Human
cacaagccugguuauuugaggaug

SEQ ID NO: 38211 - RNA, 24 nt, Human
acacuguucugaucacuuacaucu

SEQ ID NO: 38212 - RNA, 24 nt, Human
ugagaaccgcucccgagaacuugc

SEQ ID NO: 38213 - RNA, 20 nt, Human
caggagccagcgaggcagag

SEQ ID NO: 38214 - RNA, 23 nt, Human
ugccaagggcagcugcugaccgc

SEQ ID NO: 38215 - RNA, 24 nt, Human
ugagaagccugagaaagugguugu

SEQ ID NO: 38216 - RNA, 18 nt, Human
uacaaauuuacuugguga

SEQ ID NO: 38217 - RNA, 24 nt, Human
aaguuuauauagagaauucuggcu

SEQ ID NO: 38218 - RNA, 24 nt, Human
acuuauuuugcucaaugguuucug

SEQ ID NO: 38219 - RNA, 24 nt, Human
uuauuaaacaagaauauaaauuuu

SEQ ID NO: 38220 - RNA, 24 nt, Human
gaucaauccuucuuuuucucuuuu

SEQ ID NO: 38221 - RNA, 24 nt, Human
ucaguuaaaaaagaaggaaggaag

SEQ ID NO: 38222 - RNA, 24 nt, Human
ucaauuuuuauuuugguuuucuua

SEQ ID NO: 38223 - RNA, 20 nt, Human
cuugucccucucucacacuu

SEQ ID NO: 38224 - RNA, 24 nt, Human
aaggugaacuugucacuugguaug

SEQ ID NO: 38225 - RNA, 24 nt, Human
ugguggucuugagcuuuuggccug

SEQ ID NO: 38226 - RNA, 24 nt, Human
gaacacacuuggcagauggaggaa

SEQ ID NO: 38227 - RNA, 24 nt, Human
agagcgagaggagauugaagugga

SEQ ID NO: 38228 - RNA, 24 nt, Human
cgggcacagaaacacagcagcggg

SEQ ID NO: 38229 - RNA, 24 nt, Human
uucugauuccacuaggaccagacu

SEQ ID NO: 38230 - RNA, 24 nt, Human
ugcauuguuaucauuaaccagucu

SEQ ID NO: 38231 - RNA, 24 nt, Human
ugagcaccuguggcugacccgaca

SEQ ID NO: 38232 - RNA, 24 nt, Human
cuuugugcuugggguagaucuucu

SEQ ID NO: 38233 - RNA, 24 nt, Human
guagaguuuucuucaggcuuaaag

SEQ ID NO: 38234 - RNA, 24 nt, Human
agccucggagccggugggccaugu

SEQ ID NO: 38235 - RNA, 24 nt, Human
caccaaaaacccguuuuuuucccc

SEQ ID NO: 38236 - RNA, 24 nt, Human
gggcguugggaaccgacaccgccg

SEQ ID NO: 38237 - RNA, 24 nt, Human
uaugacauuuuucugcuuuucccu

SEQ ID NO: 38238 - RNA, 22 nt, Human
uuggugcuuaagagaauuacaa

SEQ ID NO: 38239 - RNA, 24 nt, Human
cgggaccaucuggggcaccugcuu

SEQ ID NO: 38240 - RNA, 24 nt, Human
caggagcuuuugugugccugguag

SEQ ID NO: 38241 - RNA, 24 nt, Human
gggcacugaagaugaugcgaccca

SEQ ID NO: 38242 - RNA, 22 nt, Human
aagaguguguaggccagccccg

SEQ ID NO: 38243 - RNA, 24 nt, Human
ucacggaggaccccgccgagcgcg

SEQ ID NO: 38244 - RNA, 24 nt, Human
uugaucuugaagaaacugggcgug

SEQ ID NO: 38245 - RNA, 24 nt, Human
guagaguuuucuucaggcuuaaag

SEQ ID NO: 38246 - RNA, 21 nt, Human
uucuaugguuuccaacagagg

SEQ ID NO: 38247 - RNA, 24 nt, Human
uagcuugacacaaaaguugguagc

SEQ ID NO: 38248 - RNA, 24 nt, Human
uggaugaaaaaaaauacaagagcu

SEQ ID NO: 38249 - RNA, 24 nt, Human
uggcuguaacaaaugcugauuuag

SEQ ID NO: 38250 - RNA, 24 nt, Human
uggcaccauggaugccuucgugaa

SEQ ID NO: 38251 - RNA, 24 nt, Human
ugagcuggugaagagcuggcucaa

SEQ ID NO: 38252 - RNA, 24 nt, Human
uggcucaggguggcuggcgcucac

SEQ ID NO: 38253 - RNA, 24 nt, Human
cuggagccucuguaccugugccca

SEQ ID NO: 38254 - RNA, 24 nt, Human
ucuuguggauuuuguagaugguuu

SEQ ID NO: 38255 - RNA, 24 nt, Human
ugaaaaaauacuuguuaauuuauu

SEQ ID NO: 38256 - RNA, 24 nt, Human
ugcaugaacuucgaagggcagaua

SEQ ID NO: 38257 - RNA, 24 nt, Human
uucaacacgauaauaccuguugcc

SEQ ID NO: 38258 - RNA, 24 nt, Human
ugaacgcgcgccggggggaugggc

SEQ ID NO: 38259 - RNA, 19 nt, Human
uacauuugaggcuuguuuu

SEQ ID NO: 38260 - RNA, 24 nt, Human
uaacuggguugacauugggcugaa

SEQ ID NO: 38261 - RNA, 24 nt, Human
uaauucuuuuaauuugguuaucug

SEQ ID NO: 38262 - RNA, 24 nt, Human
ugucuucgagaauaaccguuuggc

SEQ ID NO: 38263 - RNA, 24 nt, Human
gccaagcggcugagccaaauuggg

SEQ ID NO: 38264 - RNA, 19 nt, Human
acccugguaaauguuuugg

SEQ ID NO: 38265 - RNA, 24 nt, Human
uguuacaccagccuuuccaggguu

SEQ ID NO: 38266 - RNA, 24 nt, Human
ugauuaggacuuuuauugugaauu

SEQ ID NO: 38267 - RNA, 24 nt, Human
ugacaagaggaagcuagguugaaa

SEQ ID NO: 38268 - RNA, 24 nt, Human
ugaccagccggagcagccggagcu

SEQ ID NO: 38269 - RNA, 24 nt, Human
ucaguccccacugcgguccacggc

SEQ ID NO: 38270 - RNA, 24 nt, Human
ugaaaacccaaaacccaacuggcc

SEQ ID NO: 38271 - RNA, 23 nt, Human
uuacaacaaucgagugcuggaca

SEQ ID NO: 38272 - RNA, 24 nt, Human
uccaaauuuggauaaaauaucucu

SEQ ID NO: 38273 - RNA, 24 nt, Human
uuagacuugcaggcugcaggagug

SEQ ID NO: 38274 - RNA, 20 nt, Human
ugacacaaagguggaauaaa

SEQ ID NO: 38275 - RNA, 24 nt, Human
gcgcagcuucaggggccgcaaggg

SEQ ID NO: 38276 - RNA, 24 nt, Human
guccagggcgcggcaugggcgucc

SEQ ID NO: 38277 - RNA, 24 nt, Human
ugaaagccacucggaauuucucca

SEQ ID NO: 38278 - RNA, 24 nt, Human
ugaucucguuggacugcguggcua

SEQ ID NO: 38279 - RNA, 24 nt, Human
aggcaguucaccagccggcucagg

SEQ ID NO: 38280 - RNA, 24 nt, Human
cggcaaaggcgcgguuuucaccac

SEQ ID NO: 38281 - RNA, 24 nt, Human
aaguacgugcuguggguggacgac

SEQ ID NO: 38282 - RNA, 24 nt, Human
cggcgugguuaacuucuuccuggc

SEQ ID NO: 38283 - RNA, 24 nt, Human
acacaaguugucucaaagaugaua

SEQ ID NO: 38284 - RNA, 24 nt, Human
aaaaauccuaagauuucaguucag

SEQ ID NO: 38285 - RNA, 21 nt, Human
aguuguuuuacuccauccugu

SEQ ID NO: 38286 - RNA, 24 nt, Human
uguuauuuucugcaauucuuauuc

SEQ ID NO: 38287 - RNA, 24 nt, Human
auuacauaaaaaugguucuauaaa

SEQ ID NO: 38288 - RNA, 24 nt, Human
uauagaacaaauguuucgucuuaa

SEQ ID NO: 38289 - RNA, 24 nt, Human
uacguuaugcaaaguguuucaaau

SEQ ID NO: 38290 - RNA, 24 nt, Human
uuaaaacacacauaauacaaguuu

SEQ ID NO: 38291 - RNA, 20 nt, Human
uggcugaaggucugcagcug

SEQ ID NO: 38292 - RNA, 24 nt, Human
uggagugugaucuagcucacugua

SEQ ID NO: 38293 - RNA, 24 nt, Human
agggggugggaggugugcauaaga

SEQ ID NO: 38294 - RNA, 21 nt, Human
uguuguaaauuucuuuguugg

SEQ ID NO: 38295 - RNA, 24 nt, Human
agaaggaaggagggagggcagagc

SEQ ID NO: 38296 - RNA, 24 nt, Human
cuuuccuuuucagauguggcuggu

SEQ ID NO: 38297 - RNA, 24 nt, Human
ugaugauacccacggauaugcagu

SEQ ID NO: 38298 - RNA, 19 nt, Human
ucacuggggagucuuaugc

SEQ ID NO: 38299 - RNA, 24 nt, Human
augccaccuaagggagacucagga

SEQ ID NO: 38300 - RNA, 24 nt, Human
uggaacaugggccuuauguuguca

SEQ ID NO: 38301 - RNA, 24 nt, Human
uauggcaagucacuuugacagaca

SEQ ID NO: 38302 - RNA, 24 nt, Human
uacaccacucccaagaagaauaag

SEQ ID NO: 38303 - RNA, 24 nt, Human
uuuaaaaaccuggcuccuuacucu

SEQ ID NO: 38304 - RNA, 24 nt, Human
uccgugcgcguugcugcggccgug

SEQ ID NO: 38305 - RNA, 24 nt, Human
guagaguuuucuucaggcuuaaag

SEQ ID NO: 38306 - RNA, 24 nt, Human
aagcaucuuauuuuauaguauauc

SEQ ID NO: 38307 - RNA, 24 nt, Human
uagcaauaauugguuucuggcaag

SEQ ID NO: 38308 - RNA, 24 nt, Human
uaucaaauaugacccaagcauugg

SEQ ID NO: 38309 - RNA, 24 nt, Human
uagggggugcaggucugaacaagg

SEQ ID NO: 38310 - RNA, 24 nt, Human
cggugccauucaguuuguggacgg

SEQ ID NO: 38311 - RNA, 24 nt, Human
uuggcagucaagcacuuuucugua

SEQ ID NO: 38312 - RNA, 24 nt, Human
cagauccaagagauauauuuggca

SEQ ID NO: 38313 - RNA, 24 nt, Human
aguuuggauucugaaaacuaacug

SEQ ID NO: 38314 - RNA, 24 nt, Human
ccuuacucccucuuuaagauugcg

SEQ ID NO: 38315 - RNA, 24 nt, Human
uuagagcuggcagcagcaucucag

SEQ ID NO: 38316 - RNA, 24 nt, Human
uacccuaacagugccaaagcaaag

SEQ ID NO: 38317 - RNA, 24 nt, Human
uacccugagaacucagagcaguug

SEQ ID NO: 38318 - RNA, 24 nt, Human
ucuuguguuucaccaaaugagagg

SEQ ID NO: 38319 - RNA, 24 nt, Human
uuggcuguggcacugggcugagug

SEQ ID NO: 38320 - RNA, 24 nt, Human
ggaccacgagugcaagcucugugg

SEQ ID NO: 38321 - RNA, 24 nt, Human
uggcaaggccuuccccaaggucua

SEQ ID NO: 38322 - RNA, 24 nt, Human
uggaaagagcuuccgggagucggg

SEQ ID NO: 38323 - RNA, 24 nt, Human
uucauggugaacaccauucaacaa

SEQ ID NO: 38324 - RNA, 24 nt, Human
cauccaacguggucgcgaccucgu

SEQ ID NO: 38325 - RNA, 24 nt, Human
cuuggcacugaacacaccuccaca

SEQ ID NO: 38326 - RNA, 24 nt, Human
agagcagucaggagacaagcauaa

SEQ ID NO: 38327 - RNA, 24 nt, Human
caagagcaagaagcaguucuuugu

SEQ ID NO: 38328 - RNA, 24 nt, Human
ugcccugguggcagcccccagcac

SEQ ID NO: 38329 - RNA, 24 nt, Human
ugugaugaggugaaccugccgcug

SEQ ID NO: 38330 - RNA, 24 nt, Human
uuuguuaguguuggcaaaaagucu

SEQ ID NO: 38331 - RNA, 24 nt, Human
ucgcaaccauggcaguccugggcc

SEQ ID NO: 38332 - RNA, 24 nt, Human
caggguacggcuggacgagcacgc

SEQ ID NO: 38333 - RNA, 20 nt, Human
ugggcuggagggagaggcuu

SEQ ID NO: 38334 - RNA, 21 nt, Human
ucgaagagauacucgcccagc

SEQ ID NO: 38335 - RNA, 20 nt, Human
uaggaggccgugcaggucac

SEQ ID NO: 38336 - RNA, 24 nt, Human
ucagagcuacagccagggauagag

SEQ ID NO: 38337 - RNA, 24 nt, Human
uucgaggggaccugcuauucuucg

SEQ ID NO: 38338 - RNA, 21 nt, Human
ugugauggccacccuucucuu

SEQ ID NO: 38339 - RNA, 24 nt, Human
augaagcuaaaaaaaaggccagug

SEQ ID NO: 38340 - RNA, 23 nt, Human
ucuccaggugcucaucuccaucc

SEQ ID NO: 38341 - RNA, 24 nt, Human
acugguucaccuacaaugagacaa

SEQ ID NO: 38342 - RNA, 24 nt, Human
ucacauagguugugccaugagugg

SEQ ID NO: 38343 - RNA, 24 nt, Human
ugcccagagcuccuugcaagaagu

SEQ ID NO: 38344 - RNA, 24 nt, Human
ugucagaagcucaaagcgacucau

SEQ ID NO: 38345 - RNA, 24 nt, Human
uaaaauguuauacucauauuuguc

SEQ ID NO: 38346 - RNA, 24 nt, Human
uaaauuguuuuccaguugaccgag

SEQ ID NO: 38347 - RNA, 24 nt, Human
uucaaggagagucaccuugcucau

SEQ ID NO: 38348 - RNA, 24 nt, Human
ccgcgcccagcccaaauuauuaca

SEQ ID NO: 38349 - RNA, 19 nt, Human
ugacagaguacauugaggg

SEQ ID NO: 38350 - RNA, 24 nt, Human
agaggaaaagggcccccauggaga

SEQ ID NO: 38351 - RNA, 24 nt, Human
uggcgaaggagcuuucugaaauca

SEQ ID NO: 38352 - RNA, 24 nt, Human
ucgaagcugcacaaagguggcccc

SEQ ID NO: 38353 - RNA, 24 nt, Human
uuccgggucaggcagauugguauu

SEQ ID NO: 38354 - RNA, 23 nt, Human
uuucgcugucuuuuccucacaca

SEQ ID NO: 38355 - RNA, 24 nt, Human
uauuaggcaagaacagguaaugua

SEQ ID NO: 38356 - RNA, 24 nt, Human
aaacugguuaaaaauugagucuuu

SEQ ID NO: 38357 - RNA, 24 nt, Human
uuugauuauuagacagcaauguca

SEQ ID NO: 38358 - RNA, 24 nt, Human
uccacauuccaggagcugugcgag

SEQ ID NO: 38359 - RNA, 24 nt, Human
ugcucgggaucaaggcccaggugg

SEQ ID NO: 38360 - RNA, 24 nt, Human
cgaggucugucccacgcccgcccg

SEQ ID NO: 38361 - RNA, 24 nt, Human
aggaaccgcggggaaaggcgaaug

SEQ ID NO: 38362 - RNA, 24 nt, Human
caaguacauaugauuucagcugca

SEQ ID NO: 38363 - RNA, 24 nt, Human
uaucagagacuguuauccauuugu

SEQ ID NO: 38364 - RNA, 24 nt, Human
uauuucauaaguauggaugugcaa

SEQ ID NO: 38365 - RNA, 23 nt, Human
ccucggagagugggaagcuuugg

SEQ ID NO: 38366 - RNA, 24 nt, Human
ucaaauguaaacucaauuugccuc

SEQ ID NO: 38367 - RNA, 22 nt, Human
ugacuggagcacccccauucac

SEQ ID NO: 38368 - RNA, 18 nt, Human
uacaaggaaggcuguguu

SEQ ID NO: 38369 - RNA, 24 nt, Human
ugccauugccaccaucaaaacaag

SEQ ID NO: 38370 - RNA, 24 nt, Human
ugaguucagguguggaguuuuuca

SEQ ID NO: 38371 - RNA, 24 nt, Human
ucgaccacagaugcucugaacguu

SEQ ID NO: 38372 - RNA, 24 nt, Human
ugugaccaugucggugggaaaagu

SEQ ID NO: 38373 - RNA, 24 nt, Human
uguuauggggauaagcuggugagg

SEQ ID NO: 38374 - RNA, 22 nt, Human
ugggguauccugaacuguaucc

SEQ ID NO: 38375 - RNA, 24 nt, Human
uaaugggucucaaaauucugugac

SEQ ID NO: 38376 - RNA, 24 nt, Human
aagcacuuuuguugagugacaacc

SEQ ID NO: 38377 - RNA, 18 nt, Human
ugauacgacucugagagc

SEQ ID NO: 38378 - RNA, 24 nt, Human
uuugaucaggaaacgugguuacua

SEQ ID NO: 38379 - RNA, 24 nt, Human
ucaguggugcugccccauucggcg

SEQ ID NO: 38380 - RNA, 24 nt, Human
uggaaggcuggacuacuuccuccu

SEQ ID NO: 38381 - RNA, 24 nt, Human
uacaccaugauauacucuugucug

SEQ ID NO: 38382 - RNA, 24 nt, Human
ucucucacccuugcugugcaugua

SEQ ID NO: 38383 - RNA, 24 nt, Human
cucgagggaccaaaucuccaacuu

SEQ ID NO: 38384 - RNA, 22 nt, Human
auggagcccugaauguugaccu

SEQ ID NO: 38385 - RNA, 24 nt, Human
uggcaggccccaacaucgccgcca

SEQ ID NO: 38386 - RNA, 24 nt, Human
gagaaggagaagcucaagucccag

SEQ ID NO: 38387 - RNA, 24 nt, Human
caggagccaccaugucugccccau

SEQ ID NO: 38388 - RNA, 24 nt, Human
aacaguuugcugaugaccaaauac

SEQ ID NO: 38389 - RNA, 24 nt, Human
accaggugccauguuucauuuaug

SEQ ID NO: 38390 - RNA, 24 nt, Human
agaguugggguaaagauuccaggg

SEQ ID NO: 38391 - RNA, 24 nt, Human
ccagaacucaaccuuucacaucuu

SEQ ID NO: 38392 - RNA, 24 nt, Human
ucuauuaguuuuauuuugguguaa

SEQ ID NO: 38393 - RNA, 24 nt, Human
uuuagagaccacugguagccuaag

SEQ ID NO: 38394 - RNA, 24 nt, Human
uguaaguguuggcuuuuaacuugg

SEQ ID NO: 38395 - RNA, 24 nt, Human
cauuucaauacuuuuggcuacuuc

SEQ ID NO: 38396 - RNA, 24 nt, Human
acucuguuccuuuaauuacaaagu

SEQ ID NO: 38397 - RNA, 24 nt, Human
ucccaggcuggaguacaauggcau

SEQ ID NO: 38398 - RNA, 24 nt, Human
uagauuauuuggaaagacuguauu

SEQ ID NO: 38399 - RNA, 24 nt, Human
cagcacacacacucuucccugggc

SEQ ID NO: 38400 - RNA, 24 nt, Human
agucacuaaguccuggccugagag

SEQ ID NO: 38401 - RNA, 24 nt, Human
guccaguagucacaugggcucaau

SEQ ID NO: 38402 - RNA, 24 nt, Human
gccccgguccuggugccucuugcc

SEQ ID NO: 38403 - RNA, 24 nt, Human
ccagcacgucgaagcgcuccaugg

SEQ ID NO: 38404 - RNA, 20 nt, Human
cccaggauguagaugcggcc

SEQ ID NO: 38405 - RNA, 24 nt, Human
uggaugaaguuuuguuguagugug

SEQ ID NO: 38406 - RNA, 24 nt, Human
uucucaguuuugaggccaugaauc

SEQ ID NO: 38407 - RNA, 24 nt, Human
uggcaugcuagguuucuggguucu

SEQ ID NO: 38408 - RNA, 24 nt, Human
cuuggccuuggccuuggccuuggc

SEQ ID NO: 38409 - RNA, 24 nt, Human
cauuguuggccugcaucuucuuua

SEQ ID NO: 38410 - RNA, 24 nt, Human
uacacggucguggacgagauguuc

SEQ ID NO: 38411 - RNA, 24 nt, Human
ugacgggcggcaucuuuguggcgc

SEQ ID NO: 38412 - RNA, 24 nt, Human
uauggcaagucacuuugacagaca

SEQ ID NO: 38413 - RNA, 24 nt, Human
ugagaauggcaaaauuagucgccu

SEQ ID NO: 38414 - RNA, 24 nt, Human
uacaccacucccaagaagaauaag

SEQ ID NO: 38415 - RNA, 24 nt, Human
cagcaucuuggaccucaugccugg

SEQ ID NO: 38416 - RNA, 24 nt, Human
ugaauaaaaugucuuugcuuguaa

SEQ ID NO: 38417 - RNA, 24 nt, Human
agccauugaaacagaugaucugac

SEQ ID NO: 38418 - RNA, 20 nt, Human
ugccauaggccggggugcca

SEQ ID NO: 38419 - RNA, 19 nt, Human
gucccuuuaauugcucugg

SEQ ID NO: 38420 - RNA, 24 nt, Human
uauggcaagucacuuugacagaca

SEQ ID NO: 38421 - RNA, 24 nt, Human
cagguggaugagaauggcaaaauu

SEQ ID NO: 38422 - RNA, 24 nt, Human
uacaccacucccaagaagaauaag

SEQ ID NO: 38423 - RNA, 24 nt, Human
gagacgggguuuccccaugugggc

SEQ ID NO: 38424 - RNA, 24 nt, Human
uggucugaaaacucuuguccucag

SEQ ID NO: 38425 - RNA, 24 nt, Human
uugcaaccucugccuccgggguuc

SEQ ID NO: 38426 - RNA, 24 nt, Human
ucucgcucuguugcccaggcugga

SEQ ID NO: 38427 - RNA, 24 nt, Human
uuaguuuaaaauguugguguuuag

SEQ ID NO: 38428 - RNA, 24 nt, Human
ucaaaacccugguuauagauguac

SEQ ID NO: 38429 - RNA, 24 nt, Human
aagguccaguuuuaaaaaaugaca

SEQ ID NO: 38430 - RNA, 24 nt, Human
gggaauccaaauccaggucgcgau

SEQ ID NO: 38431 - RNA, 24 nt, Human
uuagugaggugaacgacuucagau

SEQ ID NO: 38432 - RNA, 24 nt, Human
uugaucuugaagaaacugggcgug

SEQ ID NO: 38433 - RNA, 24 nt, Human
aggaaggagauauagugaagagga

SEQ ID NO: 38434 - RNA, 24 nt, Human
guagaguuuucuucaggcuuaaag

SEQ ID NO: 38435 - RNA, 24 nt, Human
ugagaauggcaaaauuagucgccu

SEQ ID NO: 38436 - RNA, 24 nt, Human
uacaccacucccaagaagaauaag

SEQ ID NO: 38437 - RNA, 24 nt, Human
ucaaaguagguggagccgauguag

SEQ ID NO: 38438 - RNA, 24 nt, Human
guuuuuguucuggaagccauauuu

SEQ ID NO: 38439 - RNA, 24 nt, Human
uccaguggaacccaaaguccuaag

SEQ ID NO: 38440 - RNA, 24 nt, Human
uagcuuggugccaauuggucgugg

SEQ ID NO: 38441 - RNA, 24 nt, Human
uugaucuugaagaaacugggcgug

SEQ ID NO: 38442 - RNA, 24 nt, Human
aggaaggagauauagugaagagga

SEQ ID NO: 38443 - RNA, 24 nt, Human
guagaguuuucuucaggcuuaaag

SEQ ID NO: 38444 - RNA, 24 nt, Human
gagugcuucagguaucagcuucca

SEQ ID NO: 38445 - RNA, 24 nt, Human
ggacagguguacagacauguucuu

SEQ ID NO: 38446 - RNA, 24 nt, Human
acuaaggucggcuuuguuccugga

SEQ ID NO: 38447 - RNA, 24 nt, Human
uguuauggaggaauagauuugcuu

SEQ ID NO: 38448 - RNA, 24 nt, Human
uuaaaugaagccaugguauguguu

SEQ ID NO: 38449 - RNA, 24 nt, Human
ccgcugcgcgggagcuagggcugu

SEQ ID NO: 38450 - RNA, 24 nt, Human
gcccggcgaggucgccgcugccuc

SEQ ID NO: 38451 - RNA, 24 nt, Human
ugcucuggagauuuaaauuuuccc

SEQ ID NO: 38452 - RNA, 24 nt, Human
ugaggaccagaggcccuauugcuu

SEQ ID NO: 38453 - RNA, 24 nt, Human
gcgcucagugccuuggggaagaag

SEQ ID NO: 38454 - RNA, 24 nt, Human
ccuuccggcuacacauuaccauuc

SEQ ID NO: 38455 - RNA, 24 nt, Human
uccaaauaccagagacugaaauuu

SEQ ID NO: 38456 - RNA, 24 nt, Human
uuugucgugguuauaaaacaauua

SEQ ID NO: 38457 - RNA, 23 nt, Human
ugcaacaggacucgguggagugc

SEQ ID NO: 38458 - RNA, 17 nt, Human
ugcuuugguaggacguc

SEQ ID NO: 38459 - RNA, 24 nt, Human
ggacagguguacagacauguucuu

SEQ ID NO: 38460 - RNA, 24 nt, Human
ucgaauggacacauuaccagugaa

SEQ ID NO: 38461 - RNA, 24 nt, Human
aggcauaggccccucaugaccugc

SEQ ID NO: 38462 - RNA, 17 nt, Human
uaauaugucugugcagc

SEQ ID NO: 38463 - RNA, 24 nt, Human
ugugaagacugggagggaacccua

SEQ ID NO: 38464 - RNA, 24 nt, Human
ugagaaugaccccaagaccuuuga

SEQ ID NO: 38465 - RNA, 24 nt, Human
ugugaacgggaagaaggugcugca

SEQ ID NO: 38466 - RNA, 24 nt, Human
cuuccaaucugaugggcauguuug

SEQ ID NO: 38467 - RNA, 22 nt, Human
guggagggcagcuuugucuaca

SEQ ID NO: 38468 - RNA, 24 nt, Human
cauggcaccccagcaguuagggac

SEQ ID NO: 38469 - RNA, 24 nt, Human
ugagguaucguuuacugcaaagaa

SEQ ID NO: 38470 - RNA, 24 nt, Human
ccauacuguguugaauaagagugg

SEQ ID NO: 38471 - RNA, 24 nt, Human
gccccguuaauuuuuuuauauuuu

SEQ ID NO: 38472 - RNA, 24 nt, Human
uuacugcaagcuccgccuccuggg

SEQ ID NO: 38473 - RNA, 24 nt, Human
ugaaauagugauuugcaauagacu

SEQ ID NO: 38474 - RNA, 24 nt, Human
aacacuuguauuuucuccuuugca

SEQ ID NO: 38475 - RNA, 24 nt, Human
agcccguugagguuggcguagugg

SEQ ID NO: 38476 - RNA, 24 nt, Human
ucccgaggugcaucugcaggagcu

SEQ ID NO: 38477 - RNA, 20 nt, Human
ugcuggggggucgggggcag

SEQ ID NO: 38478 - RNA, 24 nt, Human
cgagggcaaggguggcccugaagg

SEQ ID NO: 38479 - RNA, 21 nt, Human
ucuuguggacgcaagcuuccu

SEQ ID NO: 38480 - RNA, 24 nt, Human
uggcagcccuaccucugagauuuu

SEQ ID NO: 38481 - RNA, 24 nt, Human
ugaggaccagugcacugaguacau

SEQ ID NO: 38482 - RNA, 21 nt, Human
ugggaggggcugaauguggug

SEQ ID NO: 38483 - RNA, 21 nt, Human
gauucuguggagagugcagag

SEQ ID NO: 38484 - RNA, 24 nt, Human
ugagaauggcaaaauuagucgccu

SEQ ID NO: 38485 - RNA, 24 nt, Human
uacaccacucccaagaagaauaag

SEQ ID NO: 38486 - RNA, 24 nt, Human
ccuccaauccuaguaaacaggggc

SEQ ID NO: 38487 - RNA, 24 nt, Human
uaugauagaggaccagcgucuagg

SEQ ID NO: 38488 - RNA, 24 nt, Human
gcgaagaucaacccaugcgcacaa

SEQ ID NO: 38489 - RNA, 24 nt, Human
uccacuggcgaaagaugccuuucu

SEQ ID NO: 38490 - RNA, 24 nt, Human
uagagugguggcucccagaauccc

SEQ ID NO: 38491 - RNA, 24 nt, Human
ugagcaaagaacugaagaagcaag

SEQ ID NO: 38492 - RNA, 24 nt, Human
uuaaauauuaagaaagcuaaaauu

SEQ ID NO: 38493 - RNA, 24 nt, Human
aaggagccacggggugaggcuggu

SEQ ID NO: 38494 - RNA, 24 nt, Human
aagggcccccggaagugugggggc

SEQ ID NO: 38495 - RNA, 22 nt, Human
ugacuuguuaagauagacaacg

SEQ ID NO: 38496 - RNA, 24 nt, Human
uauucagguauccaaagucaggaa

SEQ ID NO: 38497 - RNA, 24 nt, Human
uaccuugugggagggcgccccccc

SEQ ID NO: 38498 - RNA, 24 nt, Human
uaccaaaauaaauauaucuaacac

SEQ ID NO: 38499 - RNA, 24 nt, Human
uaccugucauccuccauagaacgg

SEQ ID NO: 38500 - RNA, 23 nt, Human
cguggacagcuaucucagagccu

SEQ ID NO: 38501 - RNA, 24 nt, Human
cagggccaaagccaccuccagcgc

SEQ ID NO: 38502 - RNA, 22 nt, Human
ugagcugggggagggggagggc

SEQ ID NO: 38503 - RNA, 24 nt, Human
gauaacauuauuauguugccuucu

SEQ ID NO: 38504 - RNA, 24 nt, Human
aaugugcugguaacugcuuugcuu

SEQ ID NO: 38505 - RNA, 24 nt, Human
aagcaucugaguuugagaccaugg

SEQ ID NO: 38506 - RNA, 24 nt, Human
ucgguuccucccauacaugauaua

SEQ ID NO: 38507 - RNA, 24 nt, Human
uccucugucucucgaggaacuagg

SEQ ID NO: 38508 - RNA, 24 nt, Human
cggcgaccgccuccgcggcgcccc

SEQ ID NO: 38509 - RNA, 24 nt, Human
agaagaagaagaaauggcaaagag

SEQ ID NO: 38510 - RNA, 24 nt, Human
agguugccagucucuucauccaug

SEQ ID NO: 38511 - RNA, 24 nt, Human
ucugaucaauccuucuuuuucucu

SEQ ID NO: 38512 - RNA, 24 nt, Human
ucaauuuuuauuuugguuuucuua

SEQ ID NO: 38513 - RNA, 24 nt, Human
agaagccgggagcggcugaucagg

SEQ ID NO: 38514 - RNA, 24 nt, Human
ucccucaaguuucauuugugaagu

SEQ ID NO: 38515 - RNA, 24 nt, Human
uaucugaaaaauaugaaauuagcu

SEQ ID NO: 38516 - RNA, 17 nt, Human
cugcucagugauugcgg

SEQ ID NO: 38517 - RNA, 24 nt, Human
uuaaucauucaaaucacuaucuga

SEQ ID NO: 38518 - RNA, 24 nt, Human
aggcaugacggcuccgagcccugc

SEQ ID NO: 38519 - RNA, 24 nt, Human
uaaguacggugcaguugacccacu

SEQ ID NO: 38520 - RNA, 24 nt, Human
ugacaggagcagccugugggcacc

SEQ ID NO: 38521 - RNA, 18 nt, Human
caccccgcuuucaccccc

SEQ ID NO: 38522 - RNA, 24 nt, Human
uggguggcugugguauaugggaaa

SEQ ID NO: 38523 - RNA, 24 nt, Human
uggaagaagaaugaaguugcugau

SEQ ID NO: 38524 - RNA, 24 nt, Human
auacaagaaugugaaauuguucuc

SEQ ID NO: 38525 - RNA, 24 nt, Human
gucguggucauuguugcuuccuuc

SEQ ID NO: 38526 - RNA, 21 nt, Human
uucaagggauggaaagucacc

SEQ ID NO: 38527 - RNA, 23 nt, Human
ugugaaaggccagaauuugagga

SEQ ID NO: 38528 - RNA, 24 nt, Human
gugguuuaagguguuccagaugac

SEQ ID NO: 38529 - RNA, 24 nt, Human
uugccgguguagggaccaggcacg

SEQ ID NO: 38530 - RNA, 19 nt, Human
uauaguagacuguucaugu

SEQ ID NO: 38531 - RNA, 24 nt, Human
uaccuuaaagacauuauacugaug

SEQ ID NO: 38532 - RNA, 24 nt, Human
gacacuggcaggcacgccgggcag

SEQ ID NO: 38533 - RNA, 24 nt, Human
uaccugguccucacaucuccuuag

SEQ ID NO: 38534 - RNA, 23 nt, Human
aggcagaggagggggcggggggc

SEQ ID NO: 38535 - RNA, 24 nt, Human
uugaucuugaagaaacugggcgug

SEQ ID NO: 38536 - RNA, 24 nt, Human
aggaaggagauauagugaagagga

SEQ ID NO: 38537 - RNA, 24 nt, Human
uguggagucaggaacugaaagcug

SEQ ID NO: 38538 - RNA, 24 nt, Human
ugaagcaagcuccggagacuucuu

SEQ ID NO: 38539 - RNA, 24 nt, Human
ucuuugggacaccugaagaaaauc

SEQ ID NO: 38540 - RNA, 24 nt, Human
uggaaggauacggugaccugguga

SEQ ID NO: 38541 - RNA, 24 nt, Human
uaucagaguaacgagaagacaaac

SEQ ID NO: 38542 - RNA, 24 nt, Human
uaccgcauuguuucucagaagcaa

SEQ ID NO: 38543 - RNA, 24 nt, Human
uauggcaagucacuuugacagaca

SEQ ID NO: 38544 - RNA, 24 nt, Human
ugagaauggcaaaauuagucgccu

SEQ ID NO: 38545 - RNA, 24 nt, Human
ucacaccacucccaagaagaauaa

SEQ ID NO: 38546 - RNA, 24 nt, Human
uccaaaagaacaagaaauuaaugc

SEQ ID NO: 38547 - RNA, 24 nt, Human
uggaucaccugaggucaggaguuc

SEQ ID NO: 38548 - RNA, 24 nt, Human
ucgaaagugaggaucuugcccccu

SEQ ID NO: 38549 - RNA, 24 nt, Human
ugucucaggcaccugaaucagacc

SEQ ID NO: 38550 - RNA, 24 nt, Human
uguugugaggaucaaauggaagga

SEQ ID NO: 38551 - RNA, 22 nt, Human
uccgugcgcguugcugcggccg

SEQ ID NO: 38552 - RNA, 24 nt, Human
uugaucuugaagaaacugggcgug

SEQ ID NO: 38553 - RNA, 24 nt, Human
aggaaggagauauagugaagagga

SEQ ID NO: 38554 - RNA, 24 nt, Human
guagaguuuucuucaggcuuaaag

SEQ ID NO: 38555 - RNA, 24 nt, Human
uucagugggccugguggagacccu

SEQ ID NO: 38556 - RNA, 18 nt, Human
uagaggguggaucugguc

SEQ ID NO: 38557 - RNA, 24 nt, Human
uugauaguuuacuuauacguugaa

SEQ ID NO: 38558 - RNA, 22 nt, Human
uccgugcgcguugcugcggccg

SEQ ID NO: 38559 - RNA, 24 nt, Human
uuccaguuggugaggagcuguugg

SEQ ID NO: 38560 - RNA, 24 nt, Human
aggaaggagauauagugaagagga

SEQ ID NO: 38561 - RNA, 24 nt, Human
uucaagaaauugucacaaaagguu

SEQ ID NO: 38562 - RNA, 22 nt, Human
uccgugcgcguugcugcggccg

SEQ ID NO: 38563 - RNA, 24 nt, Human
uugaucuugaagaaacugggcgug

SEQ ID NO: 38564 - RNA, 24 nt, Human
aggaaggagauauagugaagagga

SEQ ID NO: 38565 - RNA, 22 nt, Human
uccgugcgcguugcugcggccg

SEQ ID NO: 38566 - RNA, 24 nt, Human
uugaucuugaagaaacugggcgug

SEQ ID NO: 38567 - RNA, 24 nt, Human
aggaaggagauauagugaagagga

SEQ ID NO: 38568 - RNA, 24 nt, Human
guagaguuuucuucaggcuuaaag

SEQ ID NO: 38569 - RNA, 22 nt, Human
uccgugcgcguugcugcggccg

SEQ ID NO: 38570 - RNA, 24 nt, Human
uugaucuugaagaaacugggcgug

SEQ ID NO: 38571 - RNA, 24 nt, Human
aggaaggagauauagugaagagga

SEQ ID NO: 38572 - RNA, 24 nt, Human
guagaguuuucuucaggcuuaaag

SEQ ID NO: 38573 - RNA, 24 nt, Human
ugugaacgggaagaaggugcugca

SEQ ID NO: 38574 - RNA, 23 nt, Human
uuggcagccaugaucuuugcaug

SEQ ID NO: 38575 - RNA, 24 nt, Human
uggggucaugccgaacacccauga

SEQ ID NO: 38576 - RNA, 24 nt, Human
gucagcuuguaggccgucagugua

SEQ ID NO: 38577 - RNA, 22 nt, Human
uccgugcgcguugcugcggccg

SEQ ID NO: 38578 - RNA, 24 nt, Human
uugaucuugaagaaacugggcgug

SEQ ID NO: 38579 - RNA, 24 nt, Human
aggaaggagauauagugaagagga

SEQ ID NO: 38580 - RNA, 24 nt, Human
guagaguuuucuucaggcuuaaag

SEQ ID NO: 38581 - RNA, 24 nt, Human
uugaucuugaagaaacugggcgug

SEQ ID NO: 38582 - RNA, 24 nt, Human
guagaguuuucuucaggcuuaaag

SEQ ID NO: 38583 - RNA, 24 nt, Human
gcccugguuggccuggaaggguga

SEQ ID NO: 38584 - RNA, 19 nt, Human
gacacaguggggacaggag

SEQ ID NO: 38585 - RNA, 24 nt, Human
uggaaguggcucugggcaccagcc

SEQ ID NO: 38586 - RNA, 24 nt, Human
ucgcagguggcaugacagaggcuc

SEQ ID NO: 38587 - RNA, 24 nt, Human
uauugcucuuugguuucauaauuu

SEQ ID NO: 38588 - RNA, 24 nt, Human
uugaucuugaagaaacugggcgug

SEQ ID NO: 38589 - RNA, 24 nt, Human
aggaaggagauauagugaagagga

SEQ ID NO: 38590 - RNA, 24 nt, Human
uagcuuggugccaauuggucgugg

SEQ ID NO: 38591 - RNA, 24 nt, Human
gagcugauaccucuguugaucuug

SEQ ID NO: 38592 - RNA, 24 nt, Human
aggaaggagauauagugaagagga

SEQ ID NO: 38593 - RNA, 22 nt, Human
uccgugcgcguugcugcggccg

SEQ ID NO: 38594 - RNA, 24 nt, Human
uugaucuugaagaaacugggcgug

SEQ ID NO: 38595 - RNA, 24 nt, Human
aggaaggagauauagugaagagga

SEQ ID NO: 38596 - RNA, 24 nt, Human
uugaucuugaagaaacugggcgug

SEQ ID NO: 38597 - RNA, 24 nt, Human
aggaaggagauauagugaagagga

SEQ ID NO: 38598 - RNA, 24 nt, Human
guagaguuuucuucaggcuuaaag

SEQ ID NO: 38599 - RNA, 23 nt, Human
uaucaagucucgggagaucuuuc

SEQ ID NO: 38600 - RNA, 24 nt, Human
gcagucuuuggaaaccauuuguuu

SEQ ID NO: 38601 - RNA, 24 nt, Human
aggaaggagauauagugaagagga

SEQ ID NO: 38602 - RNA, 24 nt, Human
uugaucuugaagaaacugggcgug

SEQ ID NO: 38603 - RNA, 24 nt, Human
aggaaggagauauagugaagagga

SEQ ID NO: 38604 - RNA, 24 nt, Human
guagaguuuucuucaggcuuaaag

SEQ ID NO: 38605 - RNA, 24 nt, Human
aggaaggagauauagugaagagga

SEQ ID NO: 38606 - RNA, 24 nt, Human
ugggaacuugaagaagcaaugcgc

SEQ ID NO: 38607 - RNA, 22 nt, Human
uccgugcgcguugcugcggccg

SEQ ID NO: 38608 - RNA, 24 nt, Human
aggaaggagauauagugaagagga

SEQ ID NO: 38609 - RNA, 20 nt, Human
caucggggcugagcagagcu

SEQ ID NO: 38610 - RNA, 24 nt, Human
ugucgugacccugggugccgcggc

SEQ ID NO: 38611 - RNA, 24 nt, Human
cugcagguugucagcgaugccggc

SEQ ID NO: 38612 - RNA, 22 nt, Human
uccgugcgcguugcugcggccg

SEQ ID NO: 38613 - RNA, 24 nt, Human
guagaguuuucuucaggcuuaaag

SEQ ID NO: 38614 - RNA, 24 nt, Human
uugaucuugaagaaacugggcgug

SEQ ID NO: 38615 - RNA, 24 nt, Human
guagaguuuucuucaggcuuaaag

SEQ ID NO: 38616 - RNA, 22 nt, Human
uccgugcgcguugcugcggccg

SEQ ID NO: 38617 - RNA, 24 nt, Human
uugaucuugaagaaacugggcgug

SEQ ID NO: 38618 - RNA, 24 nt, Human
aggaaggagauauagugaagagga

SEQ ID NO: 38619 - RNA, 24 nt, Human
guagaguuuucuucaggcuuaaag

SEQ ID NO: 38620 - RNA, 24 nt, Human
uaaucaccucucggaagaaagccc

SEQ ID NO: 38621 - RNA, 24 nt, Human
uggcacaaucucagcucacuacaa

SEQ ID NO: 38622 - RNA, 24 nt, Human
uuaguagagaugggguuucaccau

SEQ ID NO: 38623 - RNA, 24 nt, Human
guagaguuuucuucaggcuuaaag

SEQ ID NO: 38624 - RNA, 24 nt, Human
ggacagguguacagacauguucuu

SEQ ID NO: 38625 - RNA, 24 nt, Human
ucgaauggacacauuaccagugaa

SEQ ID NO: 38626 - RNA, 24 nt, Human
uuuuuuuuuuuuaaaggggucuca

SEQ ID NO: 38627 - RNA, 22 nt, Human
uccgugcgcguugcugcggccg

SEQ ID NO: 38628 - RNA, 24 nt, Human
uugaucuugaagaaacugggcgug

SEQ ID NO: 38629 - RNA, 24 nt, Human
aggaaggagauauagugaagagga

SEQ ID NO: 38630 - RNA, 24 nt, Human
guagaguuuucuucaggcuuaaag

SEQ ID NO: 38631 - RNA, 24 nt, Human
uguaaaccaacaauaaagcaaaga

SEQ ID NO: 38632 - RNA, 24 nt, Human
uguugcugucaaagggcugccccc

SEQ ID NO: 38633 - RNA, 24 nt, Human
uagcaugcuuuggaaaagcaaaua

SEQ ID NO: 38634 - RNA, 24 nt, Human
guggagcgauguuuccaucucuaa

SEQ ID NO: 38635 - RNA, 24 nt, Human
aucauccuggaaagggacagaggc

SEQ ID NO: 38636 - RNA, 24 nt, Human
uauccccguuuacacacaaauuca

SEQ ID NO: 38637 - RNA, 24 nt, Human
uauuacacacggauguaagcauuu

SEQ ID NO: 38638 - RNA, 18 nt, Human
uacaaggucuggcauugg

SEQ ID NO: 38639 - RNA, 24 nt, Human
cuuggcagcauccugcagcccucu

SEQ ID NO: 38640 - RNA, 24 nt, Human
cagcaucccaacuccagguccaga

SEQ ID NO: 38641 - RNA, 24 nt, Human
aaaugugcgaaaaauaaaugcuug

SEQ ID NO: 38642 - RNA, 24 nt, Human
aggaaggagauauagugaagagga

SEQ ID NO: 38643 - RNA, 22 nt, Human
uccgugcgcguugcugcggccg

SEQ ID NO: 38644 - RNA, 24 nt, Human
uugaucuugaagaaacugggcgug

SEQ ID NO: 38645 - RNA, 24 nt, Human
aggaaggagauauagugaagagga

SEQ ID NO: 38646 - RNA, 24 nt, Human
uugaucuugaagaaacugggcgug

SEQ ID NO: 38647 - RNA, 24 nt, Human
aggaaggagauauagugaagagga

SEQ ID NO: 38648 - RNA, 24 nt, Human
guagaguuuucuucaggcuuaaag

SEQ ID NO: 38649 - RNA, 24 nt, Human
uuuucgggcugcacaaaccacggg

SEQ ID NO: 38650 - RNA, 24 nt, Human
uggaagaucuuagaauugccugcc

SEQ ID NO: 38651 - RNA, 22 nt, Human
uacugggugaauagcacuuucc

SEQ ID NO: 38652 - RNA, 24 nt, Human
ucuguuaugauuuuauuucuucaa

SEQ ID NO: 38653 - RNA, 24 nt, Human
agccaguaucauccugagcacuga

SEQ ID NO: 38654 - RNA, 24 nt, Human
ugaugagcaacuuuaaggcuaagc

SEQ ID NO: 38655 - RNA, 24 nt, Human
uucaggguugguagcagggaguac

SEQ ID NO: 38656 - RNA, 24 nt, Human
uggguugggaagaccaucaguucu

SEQ ID NO: 38657 - RNA, 24 nt, Human
ucuaugugccaggugcugguccaa

SEQ ID NO: 38658 - RNA, 24 nt, Human
aucaccuuucaccaugggcagcga

SEQ ID NO: 38659 - RNA, 24 nt, Human
ugauuuguuuccaugaaccugagu

SEQ ID NO: 38660 - RNA, 24 nt, Human
cacccggggcaguuggcugggcca

SEQ ID NO: 38661 - RNA, 24 nt, Human
ugaggaccagugcacugaguacau

SEQ ID NO: 38662 - RNA, 24 nt, Human
aggcagcggcuguggcagcccggc

SEQ ID NO: 38663 - RNA, 24 nt, Human
uugaagccaguggggcaccaaucc

SEQ ID NO: 38664 - RNA, 24 nt, Human
uaauguacagaacuaaauuuuuua

SEQ ID NO: 38665 - RNA, 24 nt, Human
uaauuuguuaaaaugacuucauuu

SEQ ID NO: 38666 - RNA, 24 nt, Human
aacacuuuuuacauauauguacau

SEQ ID NO: 38667 - RNA, 24 nt, Human
uacacggugaggcacccggagugg

SEQ ID NO: 38668 - RNA, 24 nt, Human
ugaaaggugugaacuugcaauguc

SEQ ID NO: 38669 - RNA, 24 nt, Human
uuaaaauaugggugcacauuuugc

SEQ ID NO: 38670 - RNA, 19 nt, Human
agggauguucaggacucug

SEQ ID NO: 38671 - RNA, 24 nt, Human
uucucuguuuggaggcugcaccca

SEQ ID NO: 38672 - RNA, 24 nt, Human
ccacacaggcucauucucaacugg

SEQ ID NO: 38673 - RNA, 23 nt, Human
ugaguagacgggaggggagggug

SEQ ID NO: 38674 - RNA, 24 nt, Human
ugguacagacuaaaacaaaugugg

SEQ ID NO: 38675 - RNA, 24 nt, Human
uaaagcucuaagacucaugagcca

SEQ ID NO: 38676 - RNA, 24 nt, Human
ugagugcaagagauugaagaguuc

SEQ ID NO: 38677 - RNA, 19 nt, Human
ucugaaguaauugcaaagg

SEQ ID NO: 38678 - RNA, 24 nt, Human
uugaaaguuuguugaugaauauuu

SEQ ID NO: 38679 - RNA, 24 nt, Human
uugaaugguagagaagaaacagca

SEQ ID NO: 38680 - RNA, 24 nt, Human
cagcugcaucugcgccaccugcug

SEQ ID NO: 38681 - RNA, 24 nt, Human
cagcauucuggggcuuguaacacu

SEQ ID NO: 38682 - RNA, 24 nt, Human
ucagugguggcgccugggcucagc

SEQ ID NO: 38683 - RNA, 24 nt, Human
uguagggagaggagauggcaggac

SEQ ID NO: 38684 - RNA, 24 nt, Human
uaagaaacagaccuaguuuaaaag

SEQ ID NO: 38685 - RNA, 24 nt, Human
aaaaaccauuuggaaaaaagggga

SEQ ID NO: 38686 - RNA, 24 nt, Human
ucuacauaaaagcugucaaaguuu

SEQ ID NO: 38687 - RNA, 24 nt, Human
uucuuggccugcucaggagggggc

SEQ ID NO: 38688 - RNA, 24 nt, Human
uauuggccgacuccgcgaucugcu

SEQ ID NO: 38689 - RNA, 18 nt, Human
cuugccccccgcagagcu

SEQ ID NO: 38690 - RNA, 24 nt, Human
agguagcucgggcuauggcacuuc

SEQ ID NO: 38691 - RNA, 24 nt, Human
ugcccgaggggucagucugauaga

SEQ ID NO: 38692 - RNA, 24 nt, Human
cucacauuauacuucuacuggaca

SEQ ID NO: 38693 - RNA, 24 nt, Human
uugcuagucaaguauugagggacu

SEQ ID NO: 38694 - RNA, 24 nt, Human
cucacauuauacuucuacuggaca

SEQ ID NO: 38695 - RNA, 24 nt, Human
uugcuagucaaguauugagggacu

SEQ ID NO: 38696 - RNA, 19 nt, Human
ugcugaacaucuggugguu

SEQ ID NO: 38697 - RNA, 24 nt, Human
ugccacacuuaauagcuucaucca

SEQ ID NO: 38698 - RNA, 24 nt, Human
gccccgaggaggcggcuccucuuc

SEQ ID NO: 38699 - RNA, 24 nt, Human
uuccuugacaggcaaggcuguugg

SEQ ID NO: 38700 - RNA, 24 nt, Human
ccugcagggcucggccguaggaga

SEQ ID NO: 38701 - RNA, 24 nt, Human
uccuuugaaguauacuugaggagg

SEQ ID NO: 38702 - RNA, 24 nt, Human
ugguguggcgcauagugcagagcc

SEQ ID NO: 38703 - RNA, 24 nt, Human
acagcaaaguguggugcgaucucu

SEQ ID NO: 38704 - RNA, 24 nt, Human
uggaagcaaguggguucagugaag

SEQ ID NO: 38705 - RNA, 19 nt, Human
ccgcugagggaggcacagg

SEQ ID NO: 38706 - RNA, 24 nt, Human
ggcgguugccgguggccucagaca

SEQ ID NO: 38707 - RNA, 24 nt, Human
gugcauggccggaugucucuggga

SEQ ID NO: 38708 - RNA, 24 nt, Human
uauggcaagucacuuugacagaca

SEQ ID NO: 38709 - RNA, 24 nt, Human
ugagaauggcaaaauuagucgccu

SEQ ID NO: 38710 - RNA, 24 nt, Human
uacaccacucccaagaagaauaag

SEQ ID NO: 38711 - RNA, 24 nt, Human
uccagugucaaucccaaaccccga

SEQ ID NO: 38712 - RNA, 24 nt, Human
aaauggaaucuagaagcuaaauuu

SEQ ID NO: 38713 - RNA, 24 nt, Human
uaccauggcugaaaaaaagaguca

SEQ ID NO: 38714 - RNA, 24 nt, Human
uaauuugauucuuaugucuuuugu

SEQ ID NO: 38715 - RNA, 24 nt, Human
accagcuaccccagaccuacuaca

SEQ ID NO: 38716 - RNA, 24 nt, Human
uuggaccagccugaucguuucucu

SEQ ID NO: 38717 - RNA, 24 nt, Human
uugaagaucgugacgucuuguaac

SEQ ID NO: 38718 - RNA, 24 nt, Human
uugcggcggcgggucgaacacguu

SEQ ID NO: 38719 - RNA, 24 nt, Human
uucuaggugaaagcaguaaaugga

SEQ ID NO: 38720 - RNA, 24 nt, Human
aggaagcauccccacuacugcccu

SEQ ID NO: 38721 - RNA, 24 nt, Human
ucauuauuuggagaauaacaguga

SEQ ID NO: 38722 - RNA, 24 nt, Human
aagaagacaaacagggccaggcgc

SEQ ID NO: 38723 - RNA, 24 nt, Human
uucaccauuagacucucacauuua

SEQ ID NO: 38724 - RNA, 24 nt, Human
uccaucuucuguucuuccuccauu

SEQ ID NO: 38725 - RNA, 24 nt, Human
ugacuggaaaagaaaaguagcugc

SEQ ID NO: 38726 - RNA, 24 nt, Human
uaagccacucacuuuaaaauuuuu

SEQ ID NO: 38727 - RNA, 17 nt, Human
uugauuguuaggauaga

SEQ ID NO: 38728 - RNA, 24 nt, Human
acgcagauccuucggaccgggggg

SEQ ID NO: 38729 - RNA, 24 nt, Human
uagcauguuuccgaaagugggagg

SEQ ID NO: 38730 - RNA, 24 nt, Human
ccaguccccagcagaaaauuugcc

SEQ ID NO: 38731 - RNA, 22 nt, Human
uauugugucaggccugaaauac

SEQ ID NO: 38732 - RNA, 24 nt, Human
uuggcagcuauggaccucggccug

SEQ ID NO: 38733 - RNA, 24 nt, Human
ggaguggaaccuugucgauuaagg

SEQ ID NO: 38734 - RNA, 24 nt, Human
uggaggaggaugacgaugaugagc

SEQ ID NO: 38735 - RNA, 24 nt, Human
ucacagcccgguaggccgcaaguc

SEQ ID NO: 38736 - RNA, 18 nt, Human
ugacguggacauccgcaa

SEQ ID NO: 38737 - RNA, 24 nt, Human
acuuugagaguuucccggaguccc

SEQ ID NO: 38738 - RNA, 24 nt, Human
uagcacaguugucagacaagauuc

SEQ ID NO: 38739 - RNA, 24 nt, Human
ucccugugcccgcucaccccacuc

SEQ ID NO: 38740 - RNA, 24 nt, Human
uaauggaguauauaguuuagucau

SEQ ID NO: 38741 - RNA, 21 nt, Human
aagaagaaacucaggccaccc

SEQ ID NO: 38742 - RNA, 20 nt, Human
ucccucugggaucugagccu

SEQ ID NO: 38743 - RNA, 24 nt, Human
ucggaucagcuucuugggggccuc

SEQ ID NO: 38744 - RNA, 24 nt, Human
ucacgugggugguuuccauauaga

SEQ ID NO: 38745 - RNA, 17 nt, Human
uaacaaggagauuacuu

SEQ ID NO: 38746 - RNA, 24 nt, Human
uaauaggagaugcaguuuauuuaa

SEQ ID NO: 38747 - RNA, 24 nt, Human
ugaccucaggugauccucccgccu

SEQ ID NO: 38748 - RNA, 24 nt, Human
uaaaaaauuaauauucucaacuaa

SEQ ID NO: 38749 - RNA, 24 nt, Human
agacuggcugugguuaaaugaaua

SEQ ID NO: 38750 - RNA, 24 nt, Human
uuucacucggggaaugcuccggcu

SEQ ID NO: 38751 - RNA, 22 nt, Human
aauuccucacuugucugugugu

SEQ ID NO: 38752 - RNA, 24 nt, Human
cauaccaccacgcccagcaaauuu

SEQ ID NO: 38753 - RNA, 21 nt, Human
uauuuuggcugcagauacagg

SEQ ID NO: 38754 - RNA, 17 nt, Human
ccccccgggaaaagggg

SEQ ID NO: 38755 - RNA, 24 nt, Human
aaaauuccccacaacauacaaccc

SEQ ID NO: 38756 - RNA, 24 nt, Human
aggaaaugucaaaaagggaaaaug

SEQ ID NO: 38757 - RNA, 24 nt, Human
uucuggaguugguuaacacacacu

SEQ ID NO: 38758 - RNA, 24 nt, Human
gagcuugggggcggggauguugaa

SEQ ID NO: 38759 - RNA, 24 nt, Human
ucccugcucaucccgaggagagag

SEQ ID NO: 38760 - RNA, 24 nt, Human
uuucagagccgugaucuuccuaac

SEQ ID NO: 38761 - RNA, 24 nt, Human
uucgagccgaaccgagauuuggaa

SEQ ID NO: 38762 - RNA, 24 nt, Human
uaagugcucuuccccaugguagcu

SEQ ID NO: 38763 - RNA, 24 nt, Human
uaaggcacuguccaaguaacacac

SEQ ID NO: 38764 - RNA, 24 nt, Human
aagaaacuuaaagccuggaaugau

SEQ ID NO: 38765 - RNA, 24 nt, Human
uagcagaaucuugaaaagcccaga

SEQ ID NO: 38766 - RNA, 18 nt, Human
caucguagagugaacaca

SEQ ID NO: 38767 - RNA, 23 nt, Human
uugaaaaauuugagaaggaggcu

SEQ ID NO: 38768 - RNA, 24 nt, Human
uggccugguucaagggauggaaag

SEQ ID NO: 38769 - RNA, 24 nt, Human
uccaccacuacuggccaucugauc

SEQ ID NO: 38770 - RNA, 22 nt, Human
uuccacgggaugggaaagucac

SEQ ID NO: 38771 - RNA, 24 nt, Human
aacgguuugaugauccagguuuga

SEQ ID NO: 38772 - RNA, 23 nt, Human
ugacaaagggacuccuaacccgc

SEQ ID NO: 38773 - RNA, 20 nt, Human
gcaaaggcgcguuugcccgc

SEQ ID NO: 38774 - RNA, 22 nt, Human
uaccaagugaaauuuagaagac

SEQ ID NO: 38775 - RNA, 24 nt, Human
auugauggucagccaggugccuuc

SEQ ID NO: 38776 - RNA, 24 nt, Human
ucccggguucacgcccuucuccug

SEQ ID NO: 38777 - RNA, 24 nt, Human
cacccgucuuggccguccaaagug

SEQ ID NO: 38778 - RNA, 22 nt, Human
uacugggugaauagcacuuucc

SEQ ID NO: 38779 - RNA, 24 nt, Human
ucaguuggaagacacccugaaauc

SEQ ID NO: 38780 - RNA, 24 nt, Human
agagguuggugagggagaucgcgc

SEQ ID NO: 38781 - RNA, 24 nt, Human
uccaccacuacuggccaucugauc

SEQ ID NO: 38782 - RNA, 24 nt, Human
aacgcuuuuauacuguauuuugua

SEQ ID NO: 38783 - RNA, 17 nt, Human
cagcucuuuccuagggg

SEQ ID NO: 38784 - RNA, 24 nt, Human
gcugcaguccauuggcaccgagaa

SEQ ID NO: 38785 - RNA, 24 nt, Human
aggcaccagguccaaugcaguggu

SEQ ID NO: 38786 - RNA, 24 nt, Human
ugauauugccugccgaugcugcca

SEQ ID NO: 38787 - RNA, 24 nt, Human
uagcuacauuuauuccuugucuua

SEQ ID NO: 38788 - RNA, 24 nt, Human
ucgccguguuagccaggacggccu

SEQ ID NO: 38789 - RNA, 24 nt, Human
uugaagguggcgucucaucugucu

SEQ ID NO: 38790 - RNA, 24 nt, Human
ccacggggaccucaccuuugggaa

SEQ ID NO: 38791 - RNA, 19 nt, Human
uaccaguuggcaugauguc

SEQ ID NO: 38792 - RNA, 19 nt, Human
ucccaaagcucagacuugc

SEQ ID NO: 38793 - RNA, 24 nt, Human
ugcuacagaaccaccaaaacccgc

SEQ ID NO: 38794 - RNA, 24 nt, Human
ccccccgcucguggccggccccgg

SEQ ID NO: 38795 - RNA, 19 nt, Human
uggcaugauguauuuuuau

SEQ ID NO: 38796 - RNA, 24 nt, Human
uaaauggugaucuucuaaaucugu

SEQ ID NO: 38797 - RNA, 24 nt, Human
uauuuguccuaccggguuuuuguu

SEQ ID NO: 38798 - RNA, 24 nt, Human
gucccggguccuggcgcuggcauc

SEQ ID NO: 38799 - RNA, 24 nt, Human
acagcccagaggcucgagaagcca

SEQ ID NO: 38800 - RNA, 24 nt, Human
uuuuccuccugguccuccaaaaug

SEQ ID NO: 38801 - RNA, 24 nt, Human
ugagugagggagguagaguuggaa

SEQ ID NO: 38802 - RNA, 24 nt, Human
uauuucauuaagauaaauguuuca

SEQ ID NO: 38803 - RNA, 24 nt, Human
uuggacaauauucugcuaucuaca

SEQ ID NO: 38804 - RNA, 24 nt, Human
ugcauuguuaucauuaaccagucu

SEQ ID NO: 38805 - RNA, 24 nt, Human
uaggacagcuuuauugaucucugg

SEQ ID NO: 38806 - RNA, 24 nt, Human
guuuucuucuucaacguaguggaa

SEQ ID NO: 38807 - RNA, 24 nt, Human
aaagagcuuuguuuuggaggauua

SEQ ID NO: 38808 - RNA, 24 nt, Human
ucucaucaacagaaucuggcucuc

SEQ ID NO: 38809 - RNA, 24 nt, Human
uaucuggaacaguuuacuccguua

SEQ ID NO: 38810 - RNA, 20 nt, Human
agacaggaugaauggugggg

SEQ ID NO: 38811 - RNA, 24 nt, Human
uguuugggggaucaccuggacgcc

SEQ ID NO: 38812 - RNA, 24 nt, Human
uccgcaucguauucccggaaucag

SEQ ID NO: 38813 - RNA, 24 nt, Human
cugcagcuccuuuugacaagaaau

SEQ ID NO: 38814 - RNA, 24 nt, Human
uagaauauaugcaugguaacugaa

SEQ ID NO: 38815 - RNA, 24 nt, Human
cgcacauauuaugcgaaucuauag

SEQ ID NO: 38816 - RNA, 24 nt, Human
gagcaagaaggagcugaaagagcu

SEQ ID NO: 38817 - RNA, 24 nt, Human
aggcggugcaggcccuccgggagc

SEQ ID NO: 38818 - RNA, 24 nt, Human
uggcccagccggcgccugccugag

SEQ ID NO: 38819 - RNA, 21 nt, Human
cgccgugacucuggucagcgc

SEQ ID NO: 38820 - RNA, 24 nt, Human
uccaggagcccguugggaggagac

SEQ ID NO: 38821 - RNA, 24 nt, Human
ucagucagacauuuuaauuugaac

SEQ ID NO: 38822 - RNA, 24 nt, Human
ccaguacggauaauaguuggccuc

SEQ ID NO: 38823 - RNA, 24 nt, Human
aagauuuuuauugcaaggcgcucu

SEQ ID NO: 38824 - RNA, 24 nt, Human
ugcuuuggcaaauuuccuaccguu

SEQ ID NO: 38825 - RNA, 24 nt, Human
acccggggucuggggaacacaccg

SEQ ID NO: 38826 - RNA, 24 nt, Human
uauucaguugguaagcuuccagga

SEQ ID NO: 38827 - RNA, 24 nt, Human
uuaaaaaaaaaaaaaaagucucgu

SEQ ID NO: 38828 - RNA, 24 nt, Human
uagaauguguaaggcucuugccag

SEQ ID NO: 38829 - RNA, 24 nt, Human
uggaagauaagcuuaaaggagaaa

SEQ ID NO: 38830 - RNA, 24 nt, Human
gucgaucuacugggcugauucugg

SEQ ID NO: 38831 - RNA, 24 nt, Human
augacacuaauaaacaaaaauaua

SEQ ID NO: 38832 - RNA, 24 nt, Human
uaauuuuuuguauuuuuaguagag

SEQ ID NO: 38833 - RNA, 24 nt, Human
gagaacuuaaaaaaauaaagacug

SEQ ID NO: 38834 - RNA, 24 nt, Human
caguagcaucaacaucacccugaa

SEQ ID NO: 38835 - RNA, 24 nt, Human
guugcaaaagggcauuuucuguca

SEQ ID NO: 38836 - RNA, 24 nt, Human
ucccuugauaaugcaguaagggac

SEQ ID NO: 38837 - RNA, 24 nt, Human
ucacugcacuccagccugggggaa

SEQ ID NO: 38838 - RNA, 24 nt, Human
aagaaaaugaaauaaagacauuuu

SEQ ID NO: 38839 - RNA, 24 nt, Human
auggggcugacuuuagugggacca

SEQ ID NO: 38840 - RNA, 24 nt, Human
uagagugucaaaacuucuccccag

SEQ ID NO: 38841 - RNA, 24 nt, Human
ucuuuauuuaaaauaccaaguuau

SEQ ID NO: 38842 - RNA, 24 nt, Human
cuucuguauuaccuguguuugccg

SEQ ID NO: 38843 - RNA, 24 nt, Human
ugagguuggacuuguugaaauaau

SEQ ID NO: 38844 - RNA, 24 nt, Human
uggauauggguaugggaaaaauug

SEQ ID NO: 38845 - RNA, 24 nt, Human
uccgaucucgaguggggauccagc

SEQ ID NO: 38846 - RNA, 24 nt, Human
cugcugaacaugcucaauaucucc

SEQ ID NO: 38847 - RNA, 24 nt, Human
ugaaaaccaauugaguguuaccaa

SEQ ID NO: 38848 - RNA, 24 nt, Human
uugauaugaacuuaggacauugac

SEQ ID NO: 38849 - RNA, 24 nt, Human
uuugaagucuccauucguuguaca

SEQ ID NO: 38850 - RNA, 24 nt, Human
aagccuuugguaggaaggaacagc

SEQ ID NO: 38851 - RNA, 24 nt, Human
uuucuggggcuugcgcgcaaaauc

SEQ ID NO: 38852 - RNA, 24 nt, Human
acucuuauuccuacucauuuagca

SEQ ID NO: 38853 - RNA, 24 nt, Human
agagaagcauagaagagacuuuuu

SEQ ID NO: 38854 - RNA, 24 nt, Human
acagaacuuauuaaaguggauaaa

SEQ ID NO: 38855 - RNA, 23 nt, Human
ugggaagcgccuuccccacagga

SEQ ID NO: 38856 - RNA, 24 nt, Human
uauuuugacuugccucuucaucug

SEQ ID NO: 38857 - RNA, 24 nt, Human
uugaacuuacccgcacuuuguucc

SEQ ID NO: 38858 - RNA, 24 nt, Human
uaugaggcccuagagcuccgggac

SEQ ID NO: 38859 - RNA, 23 nt, Human
uaccaggggaggaguggagcugc

SEQ ID NO: 38860 - RNA, 17 nt, Human
uaucaggaguucaugac

SEQ ID NO: 38861 - RNA, 24 nt, Human
ugacaugcucacgugacaugguua

SEQ ID NO: 38862 - RNA, 24 nt, Human
uuuuuauauugcaaacagugguug

SEQ ID NO: 38863 - RNA, 24 nt, Human
aaacaugggccuguuagaaaaaaa

SEQ ID NO: 38864 - RNA, 24 nt, Human
uucauugaagaguuguuuuuuuuu

SEQ ID NO: 38865 - RNA, 24 nt, Human
acaaguucuuccagacuaaagaaa

SEQ ID NO: 38866 - RNA, 24 nt, Human
ucagaaccucuuccucuacacuuu

SEQ ID NO: 38867 - RNA, 24 nt, Human
cagaggcccuggcacauuuuuccu

SEQ ID NO: 38868 - RNA, 24 nt, Human
agaggugggguuucaucauagugg

SEQ ID NO: 38869 - RNA, 24 nt, Human
ucucgcuguguugcccagccugga

SEQ ID NO: 38870 - RNA, 24 nt, Human
uuaguagagaugggguuucaccuu

SEQ ID NO: 38871 - RNA, 24 nt, Human
acugucucuuguuuuuggagguga

SEQ ID NO: 38872 - RNA, 22 nt, Human
ugggaauauuuucugucuucaa

SEQ ID NO: 38873 - RNA, 24 nt, Human
uaauaugggaccauaaagaugagu

SEQ ID NO: 38874 - RNA, 17 nt, Human
uauaagauuucaggaaa

SEQ ID NO: 38875 - RNA, 24 nt, Human
uugcacaggaaagacugcuggcug

SEQ ID NO: 38876 - RNA, 24 nt, Human
uggaaguggcucgcagauacugga

SEQ ID NO: 38877 - RNA, 22 nt, Human
uccgugcgcguugcugcggccg

SEQ ID NO: 38878 - RNA, 24 nt, Human
uugaucuugaagaaacugggcgug

SEQ ID NO: 38879 - RNA, 24 nt, Human
aggaaggagauauagugaagagga

SEQ ID NO: 38880 - RNA, 24 nt, Human
guagaguuuucuucaggcuuaaag

SEQ ID NO: 38881 - RNA, 24 nt, Human
uucgcaauaaccugacgacacucu

SEQ ID NO: 38882 - RNA, 20 nt, Human
gagacuguuggauggcagcu

SEQ ID NO: 38883 - RNA, 20 nt, Human
aauucagucacaaggaguug

SEQ ID NO: 38884 - RNA, 24 nt, Human
ugaguguagacaaguccuccagca

SEQ ID NO: 38885 - RNA, 24 nt, Human
ugaggcagacgccugaacagggac

SEQ ID NO: 38886 - RNA, 24 nt, Human
ugacgugauuggcagacaggguuc

SEQ ID NO: 38887 - RNA, 24 nt, Human
ccgccguggggaggcgugcggcuc

SEQ ID NO: 38888 - RNA, 24 nt, Human
uggcaagaagcugcgcugaaggcc

SEQ ID NO: 38889 - RNA, 24 nt, Human
cacgggacgaccgggcgcccacuu

SEQ ID NO: 38890 - RNA, 24 nt, Human
aguggcauucggggccggggucgc

SEQ ID NO: 38891 - RNA, 24 nt, Human
uauuaugguuucuaaaucaguuau

SEQ ID NO: 38892 - RNA, 24 nt, Human
agagucccuuaauuggguggcuaa

SEQ ID NO: 38893 - RNA, 24 nt, Human
uuaaaaauucuggugcaguggugg

SEQ ID NO: 38894 - RNA, 24 nt, Human
ugugugaaaaugugacaaacacac

SEQ ID NO: 38895 - RNA, 24 nt, Human
ugaaggaaagaggaagugcuagag

SEQ ID NO: 38896 - RNA, 24 nt, Human
uuccuugcagcaggaacccacuua

SEQ ID NO: 38897 - RNA, 24 nt, Human
uucaugauucaauacucuuaagau

SEQ ID NO: 38898 - RNA, 24 nt, Human
guguaugugguuaggaguaauagg

SEQ ID NO: 38899 - RNA, 22 nt, Human
uguccuggcuggcucauuuuuc

SEQ ID NO: 38900 - RNA, 23 nt, Human
gaauacucuagaauucuucauuc

SEQ ID NO: 38901 - RNA, 24 nt, Human
gauugcccacggcaauaaaaugag

SEQ ID NO: 38902 - RNA, 24 nt, Human
uucagugugugauuucaaaagaaa

SEQ ID NO: 38903 - RNA, 24 nt, Human
uacaaagcuuaaaauucugcauau

SEQ ID NO: 38904 - RNA, 24 nt, Human
ccgcaggcugaucccgccguccac

SEQ ID NO: 38905 - RNA, 24 nt, Human
gugauguugggcaacucugcgccg

SEQ ID NO: 38906 - RNA, 24 nt, Human
ucgcaaccuccucggcccugcgug

SEQ ID NO: 38907 - RNA, 24 nt, Human
aagaagccagcugaaucucaaaaa

SEQ ID NO: 38908 - RNA, 24 nt, Human
aggaaggagauauagugaagagga

SEQ ID NO: 38909 - RNA, 21 nt, Human
cauuggacaggacauccagcc

SEQ ID NO: 38910 - RNA, 24 nt, Human
cagcggcagagagccauccucuau

SEQ ID NO: 38911 - RNA, 17 nt, Human
ucucucucugugccucu

SEQ ID NO: 38912 - RNA, 24 nt, Human
ucucucacacauucucccccuugg

SEQ ID NO: 38913 - RNA, 24 nt, Human
guuuuuuuaaaaaaaagaaauuac

SEQ ID NO: 38914 - RNA, 24 nt, Human
uuccacgggauggaaagucaccgu

SEQ ID NO: 38915 - RNA, 23 nt, Human
uacacaguguuuauugugguuag

SEQ ID NO: 38916 - RNA, 24 nt, Human
uuuaaagacaaauuaugggacguu

SEQ ID NO: 38917 - RNA, 24 nt, Human
aagcugccugccuguugccaaagc

SEQ ID NO: 38918 - RNA, 24 nt, Human
aagcuucgucugccaaacagagac

SEQ ID NO: 38919 - RNA, 17 nt, Human
uccugugugcaaguccc

SEQ ID NO: 38920 - RNA, 24 nt, Human
cgagagggccuuaaaguacguccg

SEQ ID NO: 38921 - RNA, 19 nt, Human
uuugcuguguccaagucca

SEQ ID NO: 38922 - RNA, 24 nt, Human
uaugguuugucauugcaugcuuug

SEQ ID NO: 38923 - RNA, 24 nt, Human
auggagcucuacgagcgucuggag

SEQ ID NO: 38924 - RNA, 24 nt, Human
ugccaaagcucgacagcggcccag

SEQ ID NO: 38925 - RNA, 24 nt, Human
ugcuggucuguguucugguugcgc

SEQ ID NO: 38926 - RNA, 24 nt, Human
acagggcguaguaguuagcaacaa

SEQ ID NO: 38927 - RNA, 24 nt, Human
ucuauggguagaaugcaaagggaa

SEQ ID NO: 38928 - RNA, 24 nt, Human
cuuggaaauccaccugacagcucc

SEQ ID NO: 38929 - RNA, 24 nt, Human
ugacccugggcgguaccauggggc

SEQ ID NO: 38930 - RNA, 24 nt, Human
ugagagccaugugcaaagaggaca

SEQ ID NO: 38931 - RNA, 21 nt, Human
caaggcaaaggagauagugag

SEQ ID NO: 38932 - RNA, 24 nt, Human
cauccuggcgaggaguuucaauaa

SEQ ID NO: 38933 - RNA, 24 nt, Human
ugguaaguaauggagcugugaguu

SEQ ID NO: 38934 - RNA, 24 nt, Human
aaagugcugggauuacaggcauga

SEQ ID NO: 38935 - RNA, 24 nt, Human
acucauauugauuaaaacaguuaa

SEQ ID NO: 38936 - RNA, 24 nt, Human
ucacugcauccucugccucccggg

SEQ ID NO: 38937 - RNA, 24 nt, Human
uguggauggccccuccgggaaacu

SEQ ID NO: 38938 - RNA, 24 nt, Human
caugggccacauuggccuccaaga

SEQ ID NO: 38939 - RNA, 24 nt, Human
ucagugguggaccugaccugccgu

SEQ ID NO: 38940 - RNA, 21 nt, Human
cauccgggacuccacgguggc

SEQ ID NO: 38941 - RNA, 20 nt, Human
aagcagcuuuuucgacgugu

SEQ ID NO: 38942 - RNA, 24 nt, Human
uauugcuuaugucauuucuuaagc

SEQ ID NO: 38943 - RNA, 24 nt, Human
ccgagccaugcccgcacagaagag

SEQ ID NO: 38944 - RNA, 24 nt, Human
uaagggcaaguuggggagguccag

SEQ ID NO: 38945 - RNA, 24 nt, Human
uccaccacuacuggccaucugauc

SEQ ID NO: 38946 - RNA, 24 nt, Human
gagcgcagcauccgaccagguugu

SEQ ID NO: 38947 - RNA, 24 nt, Human
uucgcagagcugcuccgcgcgcua

SEQ ID NO: 38948 - RNA, 22 nt, Human
ucgcugccguucggugcgcagu

SEQ ID NO: 38949 - RNA, 24 nt, Human
aaagagacaggaccugaugaugag

SEQ ID NO: 38950 - RNA, 24 nt, Human
agggguacugguucugaacagaau

SEQ ID NO: 38951 - RNA, 24 nt, Human
caaugcaguccuggauggagccga

SEQ ID NO: 38952 - RNA, 24 nt, Human
uuggacggugcaaccgagcuggga

SEQ ID NO: 38953 - RNA, 24 nt, Human
uaugguguuugcgucauucauccg

SEQ ID NO: 38954 - RNA, 24 nt, Human
uggaagugggcagcaagaucuacg

SEQ ID NO: 38955 - RNA, 24 nt, Human
ugucaaggaggaguuuaaggccuu

SEQ ID NO: 38956 - RNA, 24 nt, Human
uccaaugauuggaaacucccuggc

SEQ ID NO: 38957 - RNA, 21 nt, Human
aucagcuuauuuuuuaaccca

SEQ ID NO: 38958 - RNA, 24 nt, Human
ugacacuuuuaaauucaauuuagc

SEQ ID NO: 38959 - RNA, 24 nt, Human
ugugucuccaguccucucuggagg

SEQ ID NO: 38960 - RNA, 24 nt, Human
cauggcacaucgggcuauuugaac

SEQ ID NO: 38961 - RNA, 24 nt, Human
agagguuguggugcuaguuucucu

SEQ ID NO: 38962 - RNA, 24 nt, Human
aacccuggcuaacugcaagcugaa

SEQ ID NO: 38963 - RNA, 24 nt, Human
uguggauggccccuccgggaaacu

SEQ ID NO: 38964 - RNA, 21 nt, Human
cugcccccucugcugaugccc

SEQ ID NO: 38965 - RNA, 24 nt, Human
ugagaacgggaagcuugucaucaa

SEQ ID NO: 38966 - RNA, 24 nt, Human
ugagaacgggaagcuugucaucaa

SEQ ID NO: 38967 - RNA, 24 nt, Human
ugucauaggcaucgacgaggggca

SEQ ID NO: 38968 - RNA, 24 nt, Human
guggugcggcccccaguguccgcu

SEQ ID NO: 38969 - RNA, 24 nt, Human
ccauugcugaaaaggucgaggccu

SEQ ID NO: 38970 - RNA, 21 nt, Human
ucuggagaaacugcugccuca

SEQ ID NO: 38971 - RNA, 24 nt, Human
uuuagggucgcggcuacaagugac

SEQ ID NO: 38972 - RNA, 17 nt, Human
cggcaaguacgugcccc

SEQ ID NO: 38973 - RNA, 24 nt, Human
agcuggugugaacauguccguuuc

SEQ ID NO: 38974 - RNA, 22 nt, Human
uucccguugccuuugcugaggg

SEQ ID NO: 38975 - RNA, 24 nt, Human
ucaguggaaaaccgauggggaacc

SEQ ID NO: 38976 - RNA, 23 nt, Human
ugccaugugaaggagccgucucc

SEQ ID NO: 38977 - RNA, 24 nt, Human
uggaacuguguuugggagccucau

SEQ ID NO: 38978 - RNA, 24 nt, Human
ccucacagcugcugagccguccgc

SEQ ID NO: 38979 - RNA, 24 nt, Human
uugaucuugaagaaacugggcgug

SEQ ID NO: 38980 - RNA, 24 nt, Human
aggaaggagauauagugaagagga

SEQ ID NO: 38981 - RNA, 24 nt, Human
guagaguuuucuucaggcuuaaag

SEQ ID NO: 38982 - RNA, 24 nt, Human
uggaagaggucaucacuccccgga

SEQ ID NO: 38983 - RNA, 24 nt, Human
caggagucaauccgauacgccccu

SEQ ID NO: 38984 - RNA, 24 nt, Human
aaggugccccaagaaacgagaggc

SEQ ID NO: 38985 - RNA, 24 nt, Human
ucagaacacuuaauuuacaaucaa

SEQ ID NO: 38986 - RNA, 24 nt, Human
ugagaugggaaagggcuccuucaa

SEQ ID NO: 38987 - RNA, 24 nt, Human
aggcggcgggcgcggggcgcgcuc

SEQ ID NO: 38988 - RNA, 21 nt, Human
gaggacgucaggaggcccugc

SEQ ID NO: 38989 - RNA, 24 nt, Human
caggacccgucgccaugggccgug

SEQ ID NO: 38990 - RNA, 24 nt, Human
uuggagguuuucugucucaacugg

SEQ ID NO: 38991 - RNA, 24 nt, Human
uuccuacuauaauaacgcugaauc

SEQ ID NO: 38992 - RNA, 24 nt, Human
uaauugaaauaaaauucuaggcug

SEQ ID NO: 38993 - RNA, 24 nt, Human
ugaguuggagaugaacuuuggcca

SEQ ID NO: 38994 - RNA, 24 nt, Human
uacacaggagcagacuggggcgug

SEQ ID NO: 38995 - RNA, 22 nt, Human
uaccccuauuuauauucccugu

SEQ ID NO: 38996 - RNA, 20 nt, Human
ccccaggaacagcacuacac

SEQ ID NO: 38997 - RNA, 24 nt, Human
uuuagacuugacgcaacgggaggu

SEQ ID NO: 38998 - RNA, 24 nt, Human
uaaaggcaucauucaaaaggauuu

SEQ ID NO: 38999 - RNA, 24 nt, Human
augcagcugcugcccgcgggcuug

SEQ ID NO: 39000 - RNA, 22 nt, Human
ucaagccagggcagcccucugu

SEQ ID NO: 39001 - RNA, 24 nt, Human
agcucgugugggccaccucaagcc

SEQ ID NO: 39002 - RNA, 24 nt, Human
uauaaacuccaugagggcagagac

SEQ ID NO: 39003 - RNA, 24 nt, Human
uaccuuggcaugcagcuccagucc

SEQ ID NO: 39004 - RNA, 24 nt, Human
uguauaaaaguaggugauucugua

SEQ ID NO: 39005 - RNA, 24 nt, Human
ugaaaaacagguauucaguauuau

SEQ ID NO: 39006 - RNA, 24 nt, Human
aaucugcauuguucuagcugcucc

SEQ ID NO: 39007 - RNA, 24 nt, Human
uguggcagugagagaauccuggca

SEQ ID NO: 39008 - RNA, 24 nt, Human
uagcagcauugguuuuccaaaaaa

SEQ ID NO: 39009 - RNA, 24 nt, Human
uuagcaagcgccauuuggaugucu

SEQ ID NO: 39010 - RNA, 24 nt, Human
uaacucagcacgcuuccacuucac

SEQ ID NO: 39011 - RNA, 24 nt, Human
cgugcagcugggagagcuagacua

SEQ ID NO: 39012 - RNA, 24 nt, Human
aaacagccaggacuugggucaaca

SEQ ID NO: 39013 - RNA, 24 nt, Human
caucaucgcggucgaaauagaagc

SEQ ID NO: 39014 - RNA, 24 nt, Human
ucuguuuggccgccagucuuuugu

SEQ ID NO: 39015 - RNA, 24 nt, Human
uuggaaagucgaguggcaaagcug

SEQ ID NO: 39016 - RNA, 24 nt, Human
caaucaaaucagcuucagcaaaau

SEQ ID NO: 39017 - RNA, 24 nt, Human
cguucuuggcauucuccaaaacag

SEQ ID NO: 39018 - RNA, 22 nt, Human
ugauggggagaugaacauugca

SEQ ID NO: 39019 - RNA, 24 nt, Human
uucgguguucugcgguggccaugg

SEQ ID NO: 39020 - RNA, 24 nt, Human
ugcugugacuucuccuuuucguga

SEQ ID NO: 39021 - RNA, 24 nt, Human
ucaacggcauccaucuuccuggua

SEQ ID NO: 39022 - RNA, 24 nt, Human
ugggguuggcuggcccugcuucug

SEQ ID NO: 39023 - RNA, 24 nt, Human
uucaucuguuaaauagugacggug

SEQ ID NO: 39024 - RNA, 24 nt, Human
uaagagaaguggggggaggugcca

SEQ ID NO: 39025 - RNA, 24 nt, Human
ucuaccagaaagaacagugcccug

SEQ ID NO: 39026 - RNA, 23 nt, Human
guuacagaggcucaccugguggu

SEQ ID NO: 39027 - RNA, 24 nt, Human
ugcccaggcuggggugcacgacuc

SEQ ID NO: 39028 - RNA, 20 nt, Human
aagaguuuguggggauuuug

SEQ ID NO: 39029 - RNA, 23 nt, Human
ccaggcuucuccgugcaggaaga

SEQ ID NO: 39030 - RNA, 24 nt, Human
gccacaauacaagucaggagaggg

SEQ ID NO: 39031 - RNA, 24 nt, Human
gaacugguccuuucacuuugagau

SEQ ID NO: 39032 - RNA, 24 nt, Human
uaucaagucagcacacaccuuuuc

SEQ ID NO: 39033 - RNA, 24 nt, Human
ucaaugagucgcuugugaauucuc

SEQ ID NO: 39034 - RNA, 24 nt, Human
caugagaauaauguuuuaaaacca

SEQ ID NO: 39035 - RNA, 24 nt, Human
uauaaaguuugggcacuuagagca

SEQ ID NO: 39036 - RNA, 24 nt, Human
uggguccagguccaugcucugaac

SEQ ID NO: 39037 - RNA, 24 nt, Human
uagacaauagcugaucauaauagg

SEQ ID NO: 39038 - RNA, 19 nt, Human
uaugccauuaugaaauuau

SEQ ID NO: 39039 - RNA, 24 nt, Human
caaggacuucuuugcagguaucug

SEQ ID NO: 39040 - RNA, 24 nt, Human
aaaguaaaaauuugagugguucuc

SEQ ID NO: 39041 - RNA, 24 nt, Human
gaguuuggauguguaacugaggca

SEQ ID NO: 39042 - RNA, 24 nt, Human
ugagggcagacugccaaguccugg

SEQ ID NO: 39043 - RNA, 24 nt, Human
ugggguaaugaaguauuucaguuu

SEQ ID NO: 39044 - RNA, 24 nt, Human
ugaaguauuucaguuuugugaaua

SEQ ID NO: 39045 - RNA, 24 nt, Human
uaucauggacauucaggucccgac

SEQ ID NO: 39046 - RNA, 17 nt, Human
uccccgggggcugccgg

SEQ ID NO: 39047 - RNA, 24 nt, Human
agaccagaccagcaacugggaagg

SEQ ID NO: 39048 - RNA, 24 nt, Human
aagacccuccccuuuccccugagg

SEQ ID NO: 39049 - RNA, 24 nt, Human
agguguuucucugcuucaggagug

SEQ ID NO: 39050 - RNA, 24 nt, Human
agcacggaaaucgaccugcccgug

SEQ ID NO: 39051 - RNA, 24 nt, Human
cucuuccuccuucccaaauaucug

SEQ ID NO: 39052 - RNA, 24 nt, Human
uauuuguuuucauuuucuuugccu

SEQ ID NO: 39053 - RNA, 24 nt, Human
aaguugguacgcugucuaauucuu

SEQ ID NO: 39054 - RNA, 24 nt, Human
auagcacuucugcuuuucaaauau

SEQ ID NO: 39055 - RNA, 24 nt, Human
ugccuuaacaagaagaugcccaca

SEQ ID NO: 39056 - RNA, 24 nt, Human
aaucccuucgaggccccagucccu

SEQ ID NO: 39057 - RNA, 24 nt, Human
ucccugaucucugcauugggaagg

SEQ ID NO: 39058 - RNA, 24 nt, Human
uacacuuuuaaaaauuaucccaca

SEQ ID NO: 39059 - RNA, 23 nt, Human
ccucaagcaaucgccugccucag

SEQ ID NO: 39060 - RNA, 24 nt, Human
uucaauuugggaaguuucuauuga

SEQ ID NO: 39061 - RNA, 24 nt, Human
uauagcuuacugcuuaacuaauuu

SEQ ID NO: 39062 - RNA, 24 nt, Human
uauuguuaacauuuuaguguauug

SEQ ID NO: 39063 - RNA, 24 nt, Human
ugagugauaaaggcugaguguuga

SEQ ID NO: 39064 - RNA, 24 nt, Human
uggcaaguaaaugcaguacuguuc

SEQ ID NO: 39065 - RNA, 24 nt, Human
aaaguuguguuccccaaugcuugg

SEQ ID NO: 39066 - RNA, 24 nt, Human
ugguggugggaggggacugaagcc

SEQ ID NO: 39067 - RNA, 24 nt, Human
uuccuaugugucucagcuuggggc

SEQ ID NO: 39068 - RNA, 24 nt, Human
ucuuugauuugcucuuugaggacc

SEQ ID NO: 39069 - RNA, 24 nt, Human
uugguccugagcccugcgaugcug

SEQ ID NO: 39070 - RNA, 24 nt, Human
uauuuuauugcaggaggugggggu

SEQ ID NO: 39071 - RNA, 24 nt, Human
uccgcuccaucauggaggagugcg

SEQ ID NO: 39072 - RNA, 24 nt, Human
ucccguggaagguucaggaagcga

SEQ ID NO: 39073 - RNA, 24 nt, Human
ggacaagaaacagagcugggagga

SEQ ID NO: 39074 - RNA, 24 nt, Human
uccccuuguccacugauggggggu

SEQ ID NO: 39075 - RNA, 24 nt, Human
uaagugcucauggcugcugugcuu

SEQ ID NO: 39076 - RNA, 24 nt, Human
gcgaagggcagggcgaucucaaac

SEQ ID NO: 39077 - RNA, 23 nt, Human
aggcaggucaucgggugcuggcc

SEQ ID NO: 39078 - RNA, 24 nt, Human
ucccugaacagagaagcccguggc

SEQ ID NO: 39079 - RNA, 24 nt, Human
cucugccucucccgcccccuuacc

SEQ ID NO: 39080 - RNA, 24 nt, Human
ucugcaauuugguauaaauguuag

SEQ ID NO: 39081 - RNA, 24 nt, Human
aacuguaucccguugaugcacuaa

SEQ ID NO: 39082 - RNA, 24 nt, Human
aaagcagcaauucuauguucauag

SEQ ID NO: 39083 - RNA, 24 nt, Human
uccauuuuuuuaaauucccccuuu

SEQ ID NO: 39084 - RNA, 24 nt, Human
uggcagaguuacaguucugugguu

SEQ ID NO: 39085 - RNA, 24 nt, Human
uggaucaccugaggucaggaguuc

SEQ ID NO: 39086 - RNA, 24 nt, Human
uaaauaaaauuuaauucugccuuu

SEQ ID NO: 39087 - RNA, 24 nt, Human
uagguaccaacaauuguuaaugac

SEQ ID NO: 39088 - RNA, 24 nt, Human
cacccgcgccaagccugacagcac

SEQ ID NO: 39089 - RNA, 24 nt, Human
ugcccuggggcgccuggcugaggc

SEQ ID NO: 39090 - RNA, 24 nt, Human
guaaaaccuguaugaaaguguagc

SEQ ID NO: 39091 - RNA, 24 nt, Human
ucaaaagaacuuauccaguguagc

SEQ ID NO: 39092 - RNA, 24 nt, Human
ccuggccaacauggugaaauccca

SEQ ID NO: 39093 - RNA, 24 nt, Human
acaaaaccaaauaaaagaagccau

SEQ ID NO: 39094 - RNA, 24 nt, Human
ugaggaaaacgacaagagugagca

SEQ ID NO: 39095 - RNA, 24 nt, Human
aggcauauuuacucuuugugagaa

SEQ ID NO: 39096 - RNA, 24 nt, Human
uaauacucucgaccccauucuucu

SEQ ID NO: 39097 - RNA, 24 nt, Human
uaaggaccugcucuaggaaacauu

SEQ ID NO: 39098 - RNA, 24 nt, Human
caucucaguccuauuuuugaguuu

SEQ ID NO: 39099 - RNA, 24 nt, Human
uauuaucauucagcagucucccuc

SEQ ID NO: 39100 - RNA, 24 nt, Human
ccucgaccuccugggcuccagcgu

SEQ ID NO: 39101 - RNA, 22 nt, Human
uggcaaggucucgcuuagucgc

SEQ ID NO: 39102 - RNA, 24 nt, Human
uauggcaagucacuuugacagaca

SEQ ID NO: 39103 - RNA, 24 nt, Human
ugagaauggcaaaauuagucgccu

SEQ ID NO: 39104 - RNA, 24 nt, Human
uacaccacucccaagaagaauaag

SEQ ID NO: 39105 - RNA, 24 nt, Human
aggaagcgagaaugcagaguuucc

SEQ ID NO: 39106 - RNA, 24 nt, Human
ugugguggcagcagcacaggggca

SEQ ID NO: 39107 - RNA, 24 nt, Human
auccuguucugcggcuuccuuggc

SEQ ID NO: 39108 - RNA, 24 nt, Human
uggcaucuccuauaucuaauucca

SEQ ID NO: 39109 - RNA, 24 nt, Human
uggcugagggaagcagugaugggg

SEQ ID NO: 39110 - RNA, 24 nt, Human
gagccgccgugccucagaggacug

SEQ ID NO: 39111 - RNA, 24 nt, Human
uucauuagcaacuaaugguugagg

SEQ ID NO: 39112 - RNA, 24 nt, Human
ucucacacuggcaggcgguggcuc

SEQ ID NO: 39113 - RNA, 24 nt, Human
ugggucuuugugcugaggcaggac

SEQ ID NO: 39114 - RNA, 24 nt, Human
uugcaugaaacauucuuaacguga

SEQ ID NO: 39115 - RNA, 24 nt, Human
aggcagguuaaguuccuugaugcc

SEQ ID NO: 39116 - RNA, 24 nt, Human
ugaccacagcuguaggauugccag

SEQ ID NO: 39117 - RNA, 24 nt, Human
ccucccagguucuagcgauucucc

SEQ ID NO: 39118 - RNA, 24 nt, Human
ucccugauaucuaccucaccccca

SEQ ID NO: 39119 - RNA, 24 nt, Human
ucaguccccauuaaggccagaauu

SEQ ID NO: 39120 - RNA, 24 nt, Human
uagcccgcagaagcccggucagcg

SEQ ID NO: 39121 - RNA, 24 nt, Human
aggcuuuuacaccacaagugcagu

SEQ ID NO: 39122 - RNA, 24 nt, Human
guggccuuauucugcggcuguggg

SEQ ID NO: 39123 - RNA, 18 nt, Human
uggcuggacccccccgug

SEQ ID NO: 39124 - RNA, 24 nt, Human
cuagcuugcuccgccuaucccugc

SEQ ID NO: 39125 - RNA, 24 nt, Human
caauucuauaucagaaaugaagga

SEQ ID NO: 39126 - RNA, 24 nt, Human
uggccugggcaaucuuggcccugu

SEQ ID NO: 39127 - RNA, 24 nt, Human
gugcauuguccuguuuucacuuuu

SEQ ID NO: 39128 - RNA, 24 nt, Human
cucugcccagguuaagggccacgg

SEQ ID NO: 39129 - RNA, 24 nt, Human
uauggugcggaggcccuggagagg

SEQ ID NO: 39130 - RNA, 24 nt, Human
uaagacuaggggcuugguauauau

SEQ ID NO: 39131 - RNA, 24 nt, Human
cuuugggcagcggcuggaugaaag

SEQ ID NO: 39132 - RNA, 24 nt, Human
uaagacuaggggcuugguauauau

SEQ ID NO: 39133 - RNA, 24 nt, Human
uaagacuaggggcuugguauauau

SEQ ID NO: 39134 - RNA, 24 nt, Human
ucacuguaagcauccaguaggcag

SEQ ID NO: 39135 - RNA, 24 nt, Human
uuaaugccgauauacucuagauga

SEQ ID NO: 39136 - RNA, 24 nt, Human
cauuucaucuggguauuuucaggc

SEQ ID NO: 39137 - RNA, 24 nt, Human
cucaccuugguccggcuccugcac

SEQ ID NO: 39138 - RNA, 20 nt, Human
uaggaucuguaccguccagu

SEQ ID NO: 39139 - RNA, 22 nt, Human
uugguuggagcaguaguuggca

SEQ ID NO: 39140 - RNA, 19 nt, Human
uccauuguugugccuuuga

SEQ ID NO: 39141 - RNA, 24 nt, Human
gucagugucaccgcccaaaaaccu

SEQ ID NO: 39142 - RNA, 24 nt, Human
ugggucugagguuuucucuacuga

SEQ ID NO: 39143 - RNA, 24 nt, Human
ugaggcuucuguacuucucccuuu

SEQ ID NO: 39144 - RNA, 24 nt, Human
caugggccugcuggccauguacac

SEQ ID NO: 39145 - RNA, 24 nt, Human
guagugcgauccaacuaugaagca

SEQ ID NO: 39146 - RNA, 24 nt, Human
ucugcaggauggccgggcauaugg

SEQ ID NO: 39147 - RNA, 24 nt, Human
gagcugcuaauucgcaaucauuug

SEQ ID NO: 39148 - RNA, 24 nt, Human
uugaucuugaagaaacugggcgug

SEQ ID NO: 39149 - RNA, 23 nt, Human
uccgugcgcguugcugcggccgu

SEQ ID NO: 39150 - RNA, 24 nt, Human
aggaaggagauauagugaagagga

SEQ ID NO: 39151 - RNA, 24 nt, Human
guagaguuuucuucaggcuuaaag

SEQ ID NO: 39152 - RNA, 22 nt, Human
ugccaugcacuccagccugagc

SEQ ID NO: 39153 - RNA, 24 nt, Human
uaaaggagauggaagugaauucaa

SEQ ID NO: 39154 - RNA, 24 nt, Human
uucuuggugagaagggccggauga

SEQ ID NO: 39155 - RNA, 24 nt, Human
uguaguucagaugagguuuggcuu

SEQ ID NO: 39156 - RNA, 24 nt, Human
gagaauucugcucuuugauaacaa

SEQ ID NO: 39157 - RNA, 24 nt, Human
uaagggccaaauuuuguaaaauuu

SEQ ID NO: 39158 - RNA, 24 nt, Human
uauaaagcccaaguagagggugua

SEQ ID NO: 39159 - RNA, 24 nt, Human
uccagagcuuuguuugaguucuca

SEQ ID NO: 39160 - RNA, 24 nt, Human
uaaguauagaaucuuaaugguugc

SEQ ID NO: 39161 - RNA, 24 nt, Human
uaaguaguaucauuggagcccuua

SEQ ID NO: 39162 - RNA, 24 nt, Human
uugguugaauacauaguuaagaug

SEQ ID NO: 39163 - RNA, 24 nt, Human
acagagcaagacucugucucaaaa

SEQ ID NO: 39164 - RNA, 24 nt, Human
uggcucugcccagguggggguggg

SEQ ID NO: 39165 - RNA, 23 nt, Human
ccgccgcgcccccgccgccgccc

SEQ ID NO: 39166 - RNA, 24 nt, Human
aacaucuugaccacaucacuuuuu

SEQ ID NO: 39167 - RNA, 24 nt, Human
uuuaagaauuuguuuuauuaaauu

SEQ ID NO: 39168 - RNA, 21 nt, Human
uugcagguggguaguggguca

SEQ ID NO: 39169 - RNA, 24 nt, Human
aagcagcaccaauggggaugaccc

SEQ ID NO: 39170 - RNA, 24 nt, Human
agacaggcuggcacagccccaggc

SEQ ID NO: 39171 - RNA, 24 nt, Human
uacaaugucauuguuugggacccg

SEQ ID NO: 39172 - RNA, 24 nt, Human
caucugcugccuacauuccugcuc

SEQ ID NO: 39173 - RNA, 24 nt, Human
ugaggagauguugcugaagcaucu

SEQ ID NO: 39174 - RNA, 24 nt, Human
ucaguuggaagacacccugaaauc

SEQ ID NO: 39175 - RNA, 24 nt, Human
uuuuuuggguuuacugggugaaua

SEQ ID NO: 39176 - RNA, 24 nt, Human
uaaugcagcuacaggagcaaauua

SEQ ID NO: 39177 - RNA, 24 nt, Human
uggguccaaagacgauuccaaggu

SEQ ID NO: 39178 - RNA, 24 nt, Human
uuuacuuuuauuacaauaaauaau

SEQ ID NO: 39179 - RNA, 24 nt, Human
ugauucaaugggcgcuugagugcc

SEQ ID NO: 39180 - RNA, 21 nt, Human
cgggaugggccggcgccgggc

SEQ ID NO: 39181 - RNA, 24 nt, Human
ugccuuaugggucagugguauggg

SEQ ID NO: 39182 - RNA, 24 nt, Human
uuuaagcaucuuuuacagucagca

SEQ ID NO: 39183 - RNA, 24 nt, Human
ucucgugauguuagcagcuguugc

SEQ ID NO: 39184 - RNA, 24 nt, Human
accauguuggucaggcuggucucg

SEQ ID NO: 39185 - RNA, 24 nt, Human
ucccugggagaaaguccuucccuc

SEQ ID NO: 39186 - RNA, 21 nt, Human
ucacaugagguccuuugcucc

SEQ ID NO: 39187 - RNA, 24 nt, Human
aaugaccccaagaccuuugagggc

SEQ ID NO: 39188 - RNA, 24 nt, Human
ugugaacgggaagaaggugcugca

SEQ ID NO: 39189 - RNA, 24 nt, Human
cuuccaaucugaugggcauguuug

SEQ ID NO: 39190 - RNA, 22 nt, Human
guggagggcagcuuugucuaca

SEQ ID NO: 39191 - RNA, 24 nt, Human
gagcauucaagucccuccgauuca

SEQ ID NO: 39192 - RNA, 24 nt, Human
uuuuacugcugauggugaucaagu

SEQ ID NO: 39193 - RNA, 21 nt, Human
uccgagagccuagucccugcu

SEQ ID NO: 39194 - RNA, 24 nt, Human
ggagaccuugguacaacgcaacgg

SEQ ID NO: 39195 - RNA, 23 nt, Human
uaccaauagauccaaucgaucag

SEQ ID NO: 39196 - RNA, 24 nt, Human
ggagugcucuagaggcccccccuc

SEQ ID NO: 39197 - RNA, 18 nt, Human
ucccugagaaggggagga

SEQ ID NO: 39198 - RNA, 21 nt, Human
ugugaaaauaaaccaacauga

SEQ ID NO: 39199 - RNA, 24 nt, Human
caggaguucaaggcuaugaucaug

SEQ ID NO: 39200 - RNA, 24 nt, Human
uuaaaacauuuugguacugaucaa

SEQ ID NO: 39201 - RNA, 24 nt, Human
uuaaaacauuuugguacugaucaa

SEQ ID NO: 39202 - RNA, 24 nt, Human
ucucacacuggcaggcgguggcuc

SEQ ID NO: 39203 - RNA, 24 nt, Human
ugggucuuugugcugaggcaggac

SEQ ID NO: 39204 - RNA, 24 nt, Human
ccagcucguggagcagguccaccg

SEQ ID NO: 39205 - RNA, 24 nt, Human
uuccccuuaaaguaguugucaugc

SEQ ID NO: 39206 - RNA, 21 nt, Human
ugugaaaauaaaccaacauga

SEQ ID NO: 39207 - RNA, 24 nt, Human
cggaagccggacgggcagggaugg

SEQ ID NO: 39208 - RNA, 24 nt, Human
uaacguguguuuuugccaaaaaaa

SEQ ID NO: 39209 - RNA, 24 nt, Human
uaccaucuucuucagaacugcauc

SEQ ID NO: 39210 - RNA, 24 nt, Human
uaacauacuuuuccagcguaacuc

SEQ ID NO: 39211 - RNA, 24 nt, Human
ucuacagagauccugaagcagauu

SEQ ID NO: 39212 - RNA, 24 nt, Human
uguggaacguguucggucccgagu

SEQ ID NO: 39213 - RNA, 24 nt, Human
uugguucaagcgauggcaagucac

SEQ ID NO: 39214 - RNA, 24 nt, Human
ucugaucuauaaaugcgguggcau

SEQ ID NO: 39215 - RNA, 23 nt, Human
uuugcaaaucugcggaaagugcu

SEQ ID NO: 39216 - RNA, 24 nt, Human
uaggguaugacccccaucauuuac

SEQ ID NO: 39217 - RNA, 24 nt, Human
aggcauguaccacggacccccucc

SEQ ID NO: 39218 - RNA, 17 nt, Human
agggagcccuggggagc

SEQ ID NO: 39219 - RNA, 24 nt, Human
ucccagagccaguguuuauuagca

SEQ ID NO: 39220 - RNA, 24 nt, Human
uuacuggauuuaagaaauuucccu

SEQ ID NO: 39221 - RNA, 24 nt, Human
cuguaugaaugaaugacaucaugu

SEQ ID NO: 39222 - RNA, 24 nt, Human
gaucucucggucccuuccuuaacc

SEQ ID NO: 39223 - RNA, 24 nt, Human
gcgcuuuguggucauucuaccuga

SEQ ID NO: 39224 - RNA, 24 nt, Human
uagcagaagcauagcaagugcucu

SEQ ID NO: 39225 - RNA, 24 nt, Human
ucagaaacgucuaaauacaaugca

SEQ ID NO: 39226 - RNA, 24 nt, Human
uaucaguagauccuuccacugggu

SEQ ID NO: 39227 - RNA, 24 nt, Human
aaucugcauuguucuagcugcucc

SEQ ID NO: 39228 - RNA, 24 nt, Human
uagaaacugaaaauuuacaaacua

SEQ ID NO: 39229 - RNA, 21 nt, Human
uccugggucccgggagggcuc

SEQ ID NO: 39230 - RNA, 24 nt, Human
ugggggcuguggcaagggccccuu

SEQ ID NO: 39231 - RNA, 24 nt, Human
uacauuuacuguacaaagaacggu

SEQ ID NO: 39232 - RNA, 24 nt, Human
uggggccaggacagggaagcugga

SEQ ID NO: 39233 - RNA, 24 nt, Human
uugcagucggggugauaugacaca

SEQ ID NO: 39234 - RNA, 24 nt, Human
uagcugacagcccauacuucaccu

SEQ ID NO: 39235 - RNA, 24 nt, Human
aucacauuaacauaauccgcgagu

SEQ ID NO: 39236 - RNA, 24 nt, Human
acccugguuaauaacaaguuuuac

SEQ ID NO: 39237 - RNA, 24 nt, Human
cuuuccuuuccucgacuuuuuggu

SEQ ID NO: 39238 - RNA, 24 nt, Human
guagugcaacaggguguuuugaua

SEQ ID NO: 39239 - RNA, 24 nt, Human
ucacugagcuaaugaucuaauccu

SEQ ID NO: 39240 - RNA, 22 nt, Human
ucguagccuguuacauuguuac

SEQ ID NO: 39241 - RNA, 24 nt, Human
ugaccggacaaucaugaaggcucu

SEQ ID NO: 39242 - RNA, 23 nt, Human
agcuggguguaguggugugugcc

SEQ ID NO: 39243 - RNA, 24 nt, Human
uaccugggugacagagcaagacuc

SEQ ID NO: 39244 - RNA, 24 nt, Human
gagcacgugucaucuucccugcgg

SEQ ID NO: 39245 - RNA, 23 nt, Human
uccagcagauuacucgggauuuc

SEQ ID NO: 39246 - RNA, 24 nt, Human
uugcgggagauugcugaagaguau

SEQ ID NO: 39247 - RNA, 24 nt, Human
cgagaggcacagaaggagcuggag

SEQ ID NO: 39248 - RNA, 24 nt, Human
ugccccgacguugcccccugccug

SEQ ID NO: 39249 - RNA, 18 nt, Human
gcucuuguuuugucuuga

SEQ ID NO: 39250 - RNA, 23 nt, Human
uucaagggauggaaagucaccgu

SEQ ID NO: 39251 - RNA, 21 nt, Human
aaguaugccugggucuuggau

SEQ ID NO: 39252 - RNA, 21 nt, Human
uggccgggaagugcucgacgu

SEQ ID NO: 39253 - RNA, 24 nt, Human
cguccggggcgaguggcacggggg

SEQ ID NO: 39254 - RNA, 24 nt, Human
gacacguagauucgggcaagucca

SEQ ID NO: 39255 - RNA, 24 nt, Human
uuccccaauguacauucuuggcag

SEQ ID NO: 39256 - RNA, 18 nt, Human
uaaugugauuccuccagu

SEQ ID NO: 39257 - RNA, 24 nt, Human
uaugugagagauaggaaucuaguu

SEQ ID NO: 39258 - RNA, 24 nt, Human
uacuaguuagaagcuuauuaucuu

SEQ ID NO: 39259 - RNA, 24 nt, Human
uuuuaaauguugucuuaccaauua

SEQ ID NO: 39260 - RNA, 24 nt, Human
uacgguauauuucaagagauucua

SEQ ID NO: 39261 - RNA, 24 nt, Human
uuggaguaguuucaaauacaagau

SEQ ID NO: 39262 - RNA, 24 nt, Human
auggauuguugcuugauaguguau

SEQ ID NO: 39263 - RNA, 24 nt, Human
cagcagaaagaugccaggcaaugg

SEQ ID NO: 39264 - RNA, 22 nt, Human
ucuguuggaggagcgccaaaag

SEQ ID NO: 39265 - RNA, 24 nt, Human
aaagaucuucucuccaaaccaguu

SEQ ID NO: 39266 - RNA, 24 nt, Human
uagccaugcccauucccgccccca

SEQ ID NO: 39267 - RNA, 24 nt, Human
uagcuccucuuguccacucugcuu

SEQ ID NO: 39268 - RNA, 24 nt, Human
aggugccauugugggaaugauagu

SEQ ID NO: 39269 - RNA, 24 nt, Human
gaguagccuggcuguaggugacac

SEQ ID NO: 39270 - RNA, 24 nt, Human
cauguaaccucggggucugaggcc

SEQ ID NO: 39271 - RNA, 24 nt, Human
ugagugaaaugaguuauggaucua

SEQ ID NO: 39272 - RNA, 22 nt, Human
cacugcuggaggccuucggacc

SEQ ID NO: 39273 - RNA, 24 nt, Human
uauauagauguauauauauacaca

SEQ ID NO: 39274 - RNA, 24 nt, Human
uacacagauaauuagagauauaug

SEQ ID NO: 39275 - RNA, 24 nt, Human
ucuaauuuagccaaguaauugcug

SEQ ID NO: 39276 - RNA, 24 nt, Human
aaucccacauuuuuggauuauguc

SEQ ID NO: 39277 - RNA, 24 nt, Human
ugauguggacuucucuuuucuugg

SEQ ID NO: 39278 - RNA, 24 nt, Human
ugaauugguauuaauuuaguaacg

SEQ ID NO: 39279 - RNA, 23 nt, Human
uacccaacagaguugugcuauga

SEQ ID NO: 39280 - RNA, 24 nt, Human
uauuucagccugaaaaugaaaucc

SEQ ID NO: 39281 - RNA, 24 nt, Human
aucacaauauggucugguccaauc

SEQ ID NO: 39282 - RNA, 24 nt, Human
uucaagauuggaucagagcucauc

SEQ ID NO: 39283 - RNA, 24 nt, Human
uugaucuugaagaaacugggcgug

SEQ ID NO: 39284 - RNA, 24 nt, Human
guagaguuuucuucaggcuuaaag

SEQ ID NO: 39285 - RNA, 24 nt, Human
uccacuggcgaaagaugccuuucu

SEQ ID NO: 39286 - RNA, 24 nt, Human
uaguucagauugaucuuaggucaa

SEQ ID NO: 39287 - RNA, 24 nt, Human
uagagugguggcucccagaauccc

SEQ ID NO: 39288 - RNA, 23 nt, Human
ucgaccccaaaagccaagucugu

SEQ ID NO: 39289 - RNA, 24 nt, Human
ugggggcaggguggggucucaagc

SEQ ID NO: 39290 - RNA, 24 nt, Human
aagccagcacuauccuuggggaca

SEQ ID NO: 39291 - RNA, 20 nt, Human
uaaggcgaggcggaauuaaa

SEQ ID NO: 39292 - RNA, 24 nt, Human
aguuuggauuaaauuuacacugug

SEQ ID NO: 39293 - RNA, 21 nt, Human
ucugacaguucugcgacaagc

SEQ ID NO: 39294 - RNA, 24 nt, Human
gcugaacccccugcucaccgccag

SEQ ID NO: 39295 - RNA, 20 nt, Human
ugaugaggggguggagcugg

SEQ ID NO: 39296 - RNA, 21 nt, Human
ugacaccauggggagcugcug

SEQ ID NO: 39297 - RNA, 20 nt, Human
cuugcucuuaacuuuucugu

SEQ ID NO: 39298 - RNA, 24 nt, Human
uagaaggaccggcgauuaauggag

SEQ ID NO: 39299 - RNA, 24 nt, Human
uaagugagaacaugcgguauuugg

SEQ ID NO: 39300 - RNA, 24 nt, Human
uauuuugcuaaggauaauggcuuc

SEQ ID NO: 39301 - RNA, 24 nt, Human
uauugugaaacaucagaggguaca

SEQ ID NO: 39302 - RNA, 24 nt, Human
uagaaugugacgcuuuuaauauag

SEQ ID NO: 39303 - RNA, 24 nt, Human
ugagagucugacaugcauaucaua

SEQ ID NO: 39304 - RNA, 24 nt, Human
aagggacccagcugggucugggcc

SEQ ID NO: 39305 - RNA, 24 nt, Human
uacaccaucccaagaagaauaagc

SEQ ID NO: 39306 - RNA, 24 nt, Human
gucaaggucauuggacagcugaac

SEQ ID NO: 39307 - RNA, 24 nt, Human
aacugggcauauagggagauccug

SEQ ID NO: 39308 - RNA, 24 nt, Human
gucaugcuguaaucccaucacuuu

SEQ ID NO: 39309 - RNA, 24 nt, Human
ugaaauggguuaugucuuaauuuu

SEQ ID NO: 39310 - RNA, 24 nt, Human
aggugguuuuuauucacagaaagu

SEQ ID NO: 39311 - RNA, 24 nt, Human
uugcucaacagguuuauauaaagc

SEQ ID NO: 39312 - RNA, 24 nt, Human
ccaggaaauacaagggguccaagg

SEQ ID NO: 39313 - RNA, 24 nt, Human
uugagguagagguuggggguuuau

SEQ ID NO: 39314 - RNA, 24 nt, Human
cugugccugugggucucuagaacc

SEQ ID NO: 39315 - RNA, 24 nt, Human
agugucuauuuauucuuggguggc

SEQ ID NO: 39316 - RNA, 24 nt, Human
uaucugggagcacuucgauaagga

SEQ ID NO: 39317 - RNA, 24 nt, Human
cgauauagugcccccagccaguac

SEQ ID NO: 39318 - RNA, 23 nt, Human
uucaagggauggcaagucaccgu

SEQ ID NO: 39319 - RNA, 24 nt, Human
ccagaacggcacgcuguaugugac

SEQ ID NO: 39320 - RNA, 24 nt, Human
uguccuguggccaggcggaaagca

SEQ ID NO: 39321 - RNA, 24 nt, Human
aucuuuguacugucaacuuuuugg

SEQ ID NO: 39322 - RNA, 24 nt, Human
ugccaugguggugguucucucgag

SEQ ID NO: 39323 - RNA, 24 nt, Human
cauuggguccagcaaggaccucua

SEQ ID NO: 39324 - RNA, 19 nt, Human
cugcagcggugggcagacg

SEQ ID NO: 39325 - RNA, 24 nt, Human
uucuuauuuauuuauuuauuuuug

SEQ ID NO: 39326 - RNA, 21 nt, Human
ugagcgcgacgaaaacauagu

SEQ ID NO: 39327 - RNA, 24 nt, Human
ggggaauagggcagugggcagaaa

SEQ ID NO: 39328 - RNA, 24 nt, Human
uuuguuuaauaacuuaugaaaagg

SEQ ID NO: 39329 - RNA, 24 nt, Human
uggaaaaacacuuguacaaugaaa

SEQ ID NO: 39330 - RNA, 24 nt, Human
ucacaggcuagccuuucugcacug

SEQ ID NO: 39331 - RNA, 24 nt, Human
uuccuccguuaauaaggauccuug

SEQ ID NO: 39332 - RNA, 21 nt, Human
ugauuuguggacguuuuccuu

SEQ ID NO: 39333 - RNA, 24 nt, Human
aggcagacagcgaguggcgacgau

SEQ ID NO: 39334 - RNA, 24 nt, Human
uuccgugguagaucaaacgcgagg

SEQ ID NO: 39335 - RNA, 24 nt, Human
aagcauuucggggcguuggaggcc

SEQ ID NO: 39336 - RNA, 24 nt, Human
agguuccagcacaaaggagucugu

SEQ ID NO: 39337 - RNA, 19 nt, Human
ccgcugagggaggcacagg

SEQ ID NO: 39338 - RNA, 24 nt, Human
ugagguaggcuguuuccuucuuuc

SEQ ID NO: 39339 - RNA, 24 nt, Human
uuuaaagggguuaaaaccuuuugg

SEQ ID NO: 39340 - RNA, 22 nt, Human
ucagggagacaagggauggcag

SEQ ID NO: 39341 - RNA, 24 nt, Human
ugccugggcugaggucuugggggc

SEQ ID NO: 39342 - RNA, 24 nt, Human
aggucauucauuucacaaacauuu

SEQ ID NO: 39343 - RNA, 24 nt, Human
gugcuuagagcuuuucgguggaag

SEQ ID NO: 39344 - RNA, 24 nt, Human
uauuagggauaauauucauuuagc

SEQ ID NO: 39345 - RNA, 24 nt, Human
ugguauguuguaucuuuguucucg

SEQ ID NO: 39346 - RNA, 24 nt, Human
uagugcuauaaauuucccucuaca

SEQ ID NO: 39347 - RNA, 23 nt, Human
ucucaggggcccuggcccugacc

SEQ ID NO: 39348 - RNA, 24 nt, Human
ccgaagcucugucucccacuccgu

SEQ ID NO: 39349 - RNA, 24 nt, Human
uguagauaggcaaaaccaagaacu

SEQ ID NO: 39350 - RNA, 24 nt, Human
uaaccacuuaaauagaacaguguc

SEQ ID NO: 39351 - RNA, 24 nt, Human
uagggcauuuuaaugugcaaaaaa

SEQ ID NO: 39352 - RNA, 24 nt, Human
uauuagggauaauauucauuuagc

SEQ ID NO: 39353 - RNA, 24 nt, Human
uaaugggucucaaaauucugugac

SEQ ID NO: 39354 - RNA, 24 nt, Human
uggaagacagcuacgggcagcagu

SEQ ID NO: 39355 - RNA, 18 nt, Human
guccagguguagaaugcc

SEQ ID NO: 39356 - RNA, 24 nt, Human
ucacugcaaccucugccuccuggg

SEQ ID NO: 39357 - RNA, 24 nt, Human
uucaucacucaggauggcuuguga

SEQ ID NO: 39358 - RNA, 24 nt, Human
caaaugacuuaguaaucuaauaug

SEQ ID NO: 39359 - RNA, 24 nt, Human
uuccaguaagaaguucaagaguac

SEQ ID NO: 39360 - RNA, 22 nt, Human
uucaaguaagagcaauaguaaa

SEQ ID NO: 39361 - RNA, 24 nt, Human
uugaagaauucacuggucguuuug

SEQ ID NO: 39362 - RNA, 24 nt, Human
uggcuaaugagcaggcguuucuuc

SEQ ID NO: 39363 - RNA, 24 nt, Human
uccucaguucuuuccauccuccuu

SEQ ID NO: 39364 - RNA, 22 nt, Human
cagcacagagggagggcaugga

SEQ ID NO: 39365 - RNA, 24 nt, Human
uuguccugugcuggggcugacagg

SEQ ID NO: 39366 - RNA, 24 nt, Human
uccgcagccaauuaagccgacuga

SEQ ID NO: 39367 - RNA, 24 nt, Human
uaaaaaguuguggcaaagauggcu

SEQ ID NO: 39368 - RNA, 24 nt, Human
ucagaagcuauaguccagaaauca

SEQ ID NO: 39369 - RNA, 24 nt, Human
cauaucaucgcggaauucauucgg

SEQ ID NO: 39370 - RNA, 24 nt, Human
uuagaaaaaguguuuuuccucauc

SEQ ID NO: 39371 - RNA, 24 nt, Human
ccuggcaaauauugugaaaccccg

SEQ ID NO: 39372 - RNA, 20 nt, Human
ugaggcaggagaaucaccug

SEQ ID NO: 39373 - RNA, 24 nt, Human
ggagcacacuuguaaucccaguac

SEQ ID NO: 39374 - RNA, 24 nt, Human
uggaauagcgucuuccauguggga

SEQ ID NO: 39375 - RNA, 24 nt, Human
cacaguguuauuuguuguaccuga

SEQ ID NO: 39376 - RNA, 24 nt, Human
uaaagaaagaaaauuacagccugc

SEQ ID NO: 39377 - RNA, 24 nt, Human
ugagaucauuauuuucaaaacauu

SEQ ID NO: 39378 - RNA, 24 nt, Human
agguaauuaggugaugaggguaga

SEQ ID NO: 39379 - RNA, 24 nt, Human
uauguuaauauuuugaacuaacau

SEQ ID NO: 39380 - RNA, 24 nt, Human
cacuggucuugguugcccccacau

SEQ ID NO: 39381 - RNA, 24 nt, Human
ucaauguucccuuuugugaagaug

SEQ ID NO: 39382 - RNA, 24 nt, Human
uugugcuaaagggaaaggaggauc

SEQ ID NO: 39383 - RNA, 24 nt, Human
ucagaguacauauuuggggugcgg

SEQ ID NO: 39384 - RNA, 24 nt, Human
ucccaguaucgaggggcaaacuua

SEQ ID NO: 39385 - RNA, 24 nt, Human
caccgcauaacaccccugugggca

SEQ ID NO: 39386 - RNA, 24 nt, Human
uauaaauuccggacauggcggcag

SEQ ID NO: 39387 - RNA, 24 nt, Human
cgacagcuaccgcucaccucuugc

SEQ ID NO: 39388 - RNA, 24 nt, Human
uaugaggcccuagagcuccgggac

SEQ ID NO: 39389 - RNA, 24 nt, Human
ccagcggugguuccggccuucuga

SEQ ID NO: 39390 - RNA, 24 nt, Human
gccugcugacacuucccugcaacc

SEQ ID NO: 39391 - RNA, 24 nt, Human
aagccauuuggauuggguuuagaa

SEQ ID NO: 39392 - RNA, 23 nt, Human
uguggaauuaguagauucgauga

SEQ ID NO: 39393 - RNA, 24 nt, Human
uauuaaguguccauauuucucaag

SEQ ID NO: 39394 - RNA, 24 nt, Human
gggaauucuuuauuuaguaauguc

SEQ ID NO: 39395 - RNA, 24 nt, Human
ucugcaggugccuccaaaugcugg

SEQ ID NO: 39396 - RNA, 24 nt, Human
aggaauucgagaccagccuuggcc

SEQ ID NO: 39397 - RNA, 24 nt, Human
uagcccccugcagccuugaccucc

SEQ ID NO: 39398 - RNA, 24 nt, Human
uauggcaagucacuuugacagaca

SEQ ID NO: 39399 - RNA, 24 nt, Human
uacaccacucccaagaagaauaag

SEQ ID NO: 39400 - RNA, 24 nt, Human
uacgcgcgagggagagaagcgccc

SEQ ID NO: 39401 - RNA, 24 nt, Human
ugagaauggcaaaauuagucgccu

SEQ ID NO: 39402 - RNA, 24 nt, Human
uacaccacucccaagaagaauaag

SEQ ID NO: 39403 - RNA, 24 nt, Human
ggacagguguacagacauguucuu

SEQ ID NO: 39404 - RNA, 24 nt, Human
uuuagaauaugaaaauaagagccc

SEQ ID NO: 39405 - RNA, 24 nt, Human
aggccauuaacuguuugaugcgag

SEQ ID NO: 39406 - RNA, 24 nt, Human
uaaguggaaugucucccggcccuc

SEQ ID NO: 39407 - RNA, 24 nt, Human
uuuggcacauaucuaacucuagua

SEQ ID NO: 39408 - RNA, 24 nt, Human
ucucuugugggcaggggugggggu

SEQ ID NO: 39409 - RNA, 24 nt, Human
guggcccuucuuguugccggcacu

SEQ ID NO: 39410 - RNA, 24 nt, Human
uaaauagcaucccucuccccacga

SEQ ID NO: 39411 - RNA, 24 nt, Human
agguggucggugagggucuggagc

SEQ ID NO: 39412 - RNA, 24 nt, Human
ugccguggcggcggcugcccuccu

SEQ ID NO: 39413 - RNA, 24 nt, Human
uugcaugaaacauucuuaacguga

SEQ ID NO: 39414 - RNA, 24 nt, Human
aggcagguuaaguuccuugaugcc

SEQ ID NO: 39415 - RNA, 24 nt, Human
aaguuuuucaauccuucauggaaa

SEQ ID NO: 39416 - RNA, 24 nt, Human
uucauggaguacuuggagaaaaac

SEQ ID NO: 39417 - RNA, 24 nt, Human
uucuucuauguacgucagcuuuag

SEQ ID NO: 39418 - RNA, 24 nt, Human
ucacaaccacggcccuggaggagc

SEQ ID NO: 39419 - RNA, 24 nt, Human
agguaguaaacuccccaggugggc

SEQ ID NO: 39420 - RNA, 24 nt, Human
uauguugcccaggcuggucgcaaa

SEQ ID NO: 39421 - RNA, 24 nt, Human
uucaaauguauaugaagaagaaac

SEQ ID NO: 39422 - RNA, 24 nt, Human
agacaggcuggcacagccccaggc

SEQ ID NO: 39423 - RNA, 24 nt, Human
aagcagcaccaauggggaugaccc

SEQ ID NO: 39424 - RNA, 23 nt, Human
aaggagccccgcggccuaagcgc

SEQ ID NO: 39425 - RNA, 23 nt, Human
uugaaagguauauuaaaauuaag

SEQ ID NO: 39426 - RNA, 21 nt, Human
uuuguaagcuucugagauugc

SEQ ID NO: 39427 - RNA, 24 nt, Human
cuggaaggcauacccuacaauuua

SEQ ID NO: 39428 - RNA, 24 nt, Human
aauugccaggaaagagguagaaau

SEQ ID NO: 39429 - RNA, 24 nt, Human
ucucuacaaaaugcuaacauuuaa

SEQ ID NO: 39430 - RNA, 24 nt, Human
ucccagcaggacccucuucuuguu

SEQ ID NO: 39431 - RNA, 24 nt, Human
ggacagguguacagacauguucuu

SEQ ID NO: 39432 - RNA, 24 nt, Human
ucgaauggacacauuaccagugaa

SEQ ID NO: 39433 - RNA, 24 nt, Human
uaaguacauaggucuuuauuuaaa

SEQ ID NO: 39434 - RNA, 18 nt, Human
guccagguguagaaugcc

SEQ ID NO: 39435 - RNA, 24 nt, Human
uccacuggcgaaagaugccuuucu

SEQ ID NO: 39436 - RNA, 24 nt, Human
uaguucagauugaucuuaggucaa

SEQ ID NO: 39437 - RNA, 24 nt, Human
uagagugguggcucccagaauccc

SEQ ID NO: 39438 - RNA, 24 nt, Human
ugauauguuucuuuacagaaugca

SEQ ID NO: 39439 - RNA, 24 nt, Human
caccuggaacauugggaauuguuu

SEQ ID NO: 39440 - RNA, 20 nt, Human
uguaacuuauuaaauauguu

SEQ ID NO: 39441 - RNA, 24 nt, Human
uuuuacuuuuuugguuuuuguuuu

SEQ ID NO: 39442 - RNA, 24 nt, Human
aagcugcagaccuucgccaagagg

SEQ ID NO: 39443 - RNA, 24 nt, Human
ugugacaguucuuaaagauagugu

SEQ ID NO: 39444 - RNA, 24 nt, Human
uggcugcaggugcuggggagagag

SEQ ID NO: 39445 - RNA, 24 nt, Human
aaggaggcuuggcggugguugggc

SEQ ID NO: 39446 - RNA, 24 nt, Human
auuuaauugggugcuuuguaaaua

SEQ ID NO: 39447 - RNA, 24 nt, Human
ucuacaacugaggaaacaauauag

SEQ ID NO: 39448 - RNA, 24 nt, Human
ucacugccuccugggccaaaguga

SEQ ID NO: 39449 - RNA, 24 nt, Human
uaaaugcguggauuuauaccugag

SEQ ID NO: 39450 - RNA, 24 nt, Human
augcauggugcugggcaccaaagu

SEQ ID NO: 39451 - RNA, 24 nt, Human
cucgauuaaaauacacacaucuua

SEQ ID NO: 39452 - RNA, 24 nt, Human
uaggaguugugaaugugguaaaac

SEQ ID NO: 39453 - RNA, 24 nt, Human
ucaguuggcuaugggaagcaguuc

SEQ ID NO: 39454 - RNA, 24 nt, Human
uuaauccaugaacaucauuauauc

SEQ ID NO: 39455 - RNA, 18 nt, Human
ugagugaaagaagcagcc

SEQ ID NO: 39456 - RNA, 24 nt, Human
ugagcaggacccccuuccagguga

SEQ ID NO: 39457 - RNA, 24 nt, Human
uuccccuuggaaacuuugguuggc

SEQ ID NO: 39458 - RNA, 24 nt, Human
auuucauucacuggggaggaacaa

SEQ ID NO: 39459 - RNA, 23 nt, Human
uaaggcgaggcggaauuaaaccc

SEQ ID NO: 39460 - RNA, 24 nt, Human
ugguuggggcuguggacugagguc

SEQ ID NO: 39461 - RNA, 24 nt, Human
uuuggaguggauucuuagcugcuu

SEQ ID NO: 39462 - RNA, 24 nt, Human
ugaaguaagagguacggagauccu

SEQ ID NO: 39463 - RNA, 20 nt, Human
ucaccaguuuucauuguucu

SEQ ID NO: 39464 - RNA, 24 nt, Human
ucacugaaguacucgcauguuguu

SEQ ID NO: 39465 - RNA, 24 nt, Human
uaggugcccucaauagccuccuug

SEQ ID NO: 39466 - RNA, 24 nt, Human
ucgaauggacacauuaccagugaa

SEQ ID NO: 39467 - RNA, 21 nt, Human
gucaauauccauaaaugaagg

SEQ ID NO: 39468 - RNA, 24 nt, Human
ucucgaacuccugagcucaagcag

SEQ ID NO: 39469 - RNA, 24 nt, Human
ugggaccauuggugcaugccacua

SEQ ID NO: 39470 - RNA, 24 nt, Human
aagacugaauaauauuccauugua

SEQ ID NO: 39471 - RNA, 22 nt, Human
uucacgggauggaagucaccgu

SEQ ID NO: 39472 - RNA, 24 nt, Human
agaaagaaaauaaauucuuaaugu

SEQ ID NO: 39473 - RNA, 24 nt, Human
ugaggaaguaauagucucuuuucc

SEQ ID NO: 39474 - RNA, 24 nt, Human
uuugcagugagccgagagcgugcc

SEQ ID NO: 39475 - RNA, 24 nt, Human
ucccagaagguguccagccgagac

SEQ ID NO: 39476 - RNA, 24 nt, Human
caacuggauugaugacuccgggaa

SEQ ID NO: 39477 - RNA, 24 nt, Human
ucugcagucaaagccgaugcuggg

SEQ ID NO: 39478 - RNA, 24 nt, Human
caucaaugcugccaagggcuccuc

SEQ ID NO: 39479 - RNA, 24 nt, Human
gcaacauuacgaccauugcugagu

SEQ ID NO: 39480 - RNA, 24 nt, Human
ucagacaagcaacccacuggcuug

SEQ ID NO: 39481 - RNA, 23 nt, Human
ucugcaaauuuugugcucacagc

SEQ ID NO: 39482 - RNA, 24 nt, Human
cuugcccaccuggguuuggcugca

SEQ ID NO: 39483 - RNA, 24 nt, Human
ugucauagacauaauugaucaauu

SEQ ID NO: 39484 - RNA, 23 nt, Human
gcgcguggacaucgucacagcag

SEQ ID NO: 39485 - RNA, 24 nt, Human
uucagcugcaucugcgccaccugc

SEQ ID NO: 39486 - RNA, 24 nt, Human
cagcauucuggggcuuguaacacu

SEQ ID NO: 39487 - RNA, 24 nt, Human
ugcauuuuucauucaauaaauguu

SEQ ID NO: 39488 - RNA, 19 nt, Human
uucaaugguacugcaguua

SEQ ID NO: 39489 - RNA, 24 nt, Human
cggcagccuugagaucaaaugccc

SEQ ID NO: 39490 - RNA, 24 nt, Human
ucagcaccugcucugcggaaggca

SEQ ID NO: 39491 - RNA, 24 nt, Human
uuacaucccguucacagcucgagu

SEQ ID NO: 39492 - RNA, 24 nt, Human
guucuugggccuggcacugucucc

SEQ ID NO: 39493 - RNA, 24 nt, Human
gaaagugucuuaaucaaaauuucu

SEQ ID NO: 39494 - RNA, 24 nt, Human
uauuuuguuaauuuuuuauugagu

SEQ ID NO: 39495 - RNA, 24 nt, Human
ccugccguugcccugagcugcagc

SEQ ID NO: 39496 - RNA, 24 nt, Human
ugcauuguuaucauuaaccagucu

SEQ ID NO: 39497 - RNA, 24 nt, Human
uaaugggucucaaaauuuugugac

SEQ ID NO: 39498 - RNA, 24 nt, Human
uauuagggauaauauucauuuagc

SEQ ID NO: 39499 - RNA, 24 nt, Human
uauuagggauaauauucauuuagc

SEQ ID NO: 39500 - RNA, 24 nt, Human
uucacugauguuagaaucaucaca

SEQ ID NO: 39501 - RNA, 24 nt, Human
ugguauugaguaauacuuaccuga

SEQ ID NO: 39502 - RNA, 24 nt, Human
uggcucagauuggcuccuauguuc

SEQ ID NO: 39503 - RNA, 24 nt, Human
ucuuggaugaacuaggaagaggga

SEQ ID NO: 39504 - RNA, 24 nt, Human
ugggucaaccuuggguuucuucac

SEQ ID NO: 39505 - RNA, 24 nt, Human
ugagaauggcaaaauuagucgccu

SEQ ID NO: 39506 - RNA, 24 nt, Human
ugcccugaaaacaucuacaaaugc

SEQ ID NO: 39507 - RNA, 24 nt, Human
ugugaugaucagauugucaguuca

SEQ ID NO: 39508 - RNA, 22 nt, Human
uaaagguuucacagucagugca

SEQ ID NO: 39509 - RNA, 24 nt, Human
cauggcucaccaagcccugcucca

SEQ ID NO: 39510 - RNA, 24 nt, Human
ugauuggcugcagggaugaaaguu

SEQ ID NO: 39511 - RNA, 24 nt, Human
uguucuggagcuguuggacaaaua

SEQ ID NO: 39512 - RNA, 22 nt, Human
ugagaagaagcagcagaugggc

SEQ ID NO: 39513 - RNA, 24 nt, Human
aggcagucacagaacaggggcaug

SEQ ID NO: 39514 - RNA, 24 nt, Human
aaccagaaaguaagguguucuacu

SEQ ID NO: 39515 - RNA, 24 nt, Human
uaauguugucugacuuacuguuuc

SEQ ID NO: 39516 - RNA, 24 nt, Human
ugagaauggcaaaauuagucgccu

SEQ ID NO: 39517 - RNA, 24 nt, Human
uacaccacucccaagaagaauaag

SEQ ID NO: 39518 - RNA, 24 nt, Human
uguuguggccuuuuuugauccaua

SEQ ID NO: 39519 - RNA, 24 nt, Human
gcuccagaaaaaccuguaaagaaa

SEQ ID NO: 39520 - RNA, 24 nt, Human
gagccgagcgaagcgaugccuaaa

SEQ ID NO: 39521 - RNA, 24 nt, Human
uuguauguuuggauugcagaagaa

SEQ ID NO: 39522 - RNA, 24 nt, Human
uguaaaggaugaucaaacacugga

SEQ ID NO: 39523 - RNA, 19 nt, Human
cacauuguuuuuugcuacc

SEQ ID NO: 39524 - RNA, 24 nt, Human
uugaauuuggaaagagaacuaucc

SEQ ID NO: 39525 - RNA, 24 nt, Human
uccccagaugacucugguuuuguu

SEQ ID NO: 39526 - RNA, 24 nt, Human
ucuaagcuuggguuccguguugcc

SEQ ID NO: 39527 - RNA, 24 nt, Human
cagcaaacagaaugauucuuugac

SEQ ID NO: 39528 - RNA, 24 nt, Human
ggcucuguugcgggcgcacgacgc

SEQ ID NO: 39529 - RNA, 24 nt, Human
cggugcgggucgcgggccuccgcu

SEQ ID NO: 39530 - RNA, 18 nt, Human
uccccguucugcaagggc

SEQ ID NO: 39531 - RNA, 24 nt, Human
uuucccaguaauaaaauuagguuu

SEQ ID NO: 39532 - RNA, 20 nt, Human
ugaacagcugaucgagucga

SEQ ID NO: 39533 - RNA, 24 nt, Human
uauggcaagucacuuugacagaca

SEQ ID NO: 39534 - RNA, 24 nt, Human
ugagaauggcaaaauuagucgccu

SEQ ID NO: 39535 - RNA, 24 nt, Human
uacaccacucccaagaagaauaag

SEQ ID NO: 39536 - RNA, 24 nt, Human
ugcccggcaaauucuuguuucuuc

SEQ ID NO: 39537 - RNA, 24 nt, Human
uuuaagcuaguguuaauaaauuaa

SEQ ID NO: 39538 - RNA, 24 nt, Human
gaggauccaagcuuacguacgcgu

SEQ ID NO: 39539 - RNA, 24 nt, Human
uacuuugguaccuggcccgccuuu

SEQ ID NO: 39540 - RNA, 24 nt, Human
ucagcgggcuauauacucgucggu

SEQ ID NO: 39541 - RNA, 24 nt, Human
uccgugcgcguugcugcggccgug

SEQ ID NO: 39542 - RNA, 24 nt, Human
uugaucuugaagaaacugggcgug

SEQ ID NO: 39543 - RNA, 24 nt, Human
aggaaggagauauagugaagagga

SEQ ID NO: 39544 - RNA, 24 nt, Human
uguucuggagcuguuggacaaaua

SEQ ID NO: 39545 - RNA, 24 nt, Human
aggagauuauuuagguaucuuucu

SEQ ID NO: 39546 - RNA, 24 nt, Human
uaccaggaagcauuugaaauuagu

SEQ ID NO: 39547 - RNA, 24 nt, Human
aggcagucacagaacaggggcaug

SEQ ID NO: 39548 - RNA, 24 nt, Human
aggaggaagaaauguuuucuuagg

SEQ ID NO: 39549 - RNA, 24 nt, Human
caagcuccucuccccccucuuuuc

SEQ ID NO: 39550 - RNA, 24 nt, Human
agccacuucccucccaacccuggu

SEQ ID NO: 39551 - RNA, 24 nt, Human
ucggaccacaugaaggugcacagc

SEQ ID NO: 39552 - RNA, 24 nt, Human
uucauguauuacuucgauaacccg

SEQ ID NO: 39553 - RNA, 24 nt, Human
uguggucuacugggaagugaagua

SEQ ID NO: 39554 - RNA, 24 nt, Human
aggaacuuugaugcacuggugaug

SEQ ID NO: 39555 - RNA, 24 nt, Human
uucgugaguaacuagagagcagac

SEQ ID NO: 39556 - RNA, 24 nt, Human
agaauagagcuuuaucuucguauu

SEQ ID NO: 39557 - RNA, 24 nt, Human
uugcaaaguuacguuuuguaggag

SEQ ID NO: 39558 - RNA, 24 nt, Human
uaugacagaaucaugaagacuugc

SEQ ID NO: 39559 - RNA, 24 nt, Human
auguauuuggugcugaagauaaac

SEQ ID NO: 39560 - RNA, 24 nt, Human
uccagauuuguauuugcacuguca

SEQ ID NO: 39561 - RNA, 24 nt, Human
uccagguguaucuuagcuaaaacu

SEQ ID NO: 39562 - RNA, 24 nt, Human
uggcugacaccuuacugguaaccu

SEQ ID NO: 39563 - RNA, 24 nt, Human
uacccgggcugaaaaccucaauuu

SEQ ID NO: 39564 - RNA, 24 nt, Human
uagaaaguuggcauugagaaucug

SEQ ID NO: 39565 - RNA, 24 nt, Human
uacagagaaaagcagcgugaggga

SEQ ID NO: 39566 - RNA, 24 nt, Human
caccccugcggagagcaccguggc

SEQ ID NO: 39567 - RNA, 24 nt, Human
aguggauuuugccggcugguugug

SEQ ID NO: 39568 - RNA, 24 nt, Human
uguguucacccccgacuuccagga

SEQ ID NO: 39569 - RNA, 24 nt, Human
ugaccugcccaccgucccugucca

SEQ ID NO: 39570 - RNA, 24 nt, Human
uggcagaguuaaauugugcuuuug

SEQ ID NO: 39571 - RNA, 24 nt, Human
uccgggguugggaccgccgcguuc

SEQ ID NO: 39572 - RNA, 24 nt, Human
ucggucccccaggccugccgguca

SEQ ID NO: 39573 - RNA, 24 nt, Human
ucaaacagccgaaaccugucuugc

SEQ ID NO: 39574 - RNA, 24 nt, Human
gucgcagacuucacaguguaacuu

SEQ ID NO: 39575 - RNA, 24 nt, Human
cgccauggaccucucccucgaugc

SEQ ID NO: 39576 - RNA, 24 nt, Human
acugcaccugaagcccagccaaug

SEQ ID NO: 39577 - RNA, 24 nt, Human
accauggugagcccauuggcaggg

SEQ ID NO: 39578 - RNA, 22 nt, Human
cgccgggacagcagacugccgg

SEQ ID NO: 39579 - RNA, 24 nt, Human
cagccuggacuuaccaccacuaaa

SEQ ID NO: 39580 - RNA, 24 nt, Human
ggcccggagcggagcgcgcccugc

SEQ ID NO: 39581 - RNA, 24 nt, Human
aggaagucacuaccauuuauauuc

SEQ ID NO: 39582 - RNA, 24 nt, Human
gacucuuucugcaagauaccugua

SEQ ID NO: 39583 - RNA, 24 nt, Human
uacacaucaauuugaguuguucag

SEQ ID NO: 39584 - RNA, 24 nt, Human
uacaguguuaacugccauauaugu

SEQ ID NO: 39585 - RNA, 24 nt, Human
uaggagaaggaauuucaggugggu

SEQ ID NO: 39586 - RNA, 24 nt, Human
uaaaugguaaacgugauaucauga

SEQ ID NO: 39587 - RNA, 24 nt, Human
uguuagucaagaguccucaguagg

SEQ ID NO: 39588 - RNA, 24 nt, Human
ucauggacuaaacuaggucagagu

SEQ ID NO: 39589 - RNA, 22 nt, Human
gucaauauccauaaaugaaggg

SEQ ID NO: 39590 - RNA, 24 nt, Human
uggaagggcagaaucaggcuaucu

SEQ ID NO: 39591 - RNA, 24 nt, Human
ggacugggccgucgcacacgccag

SEQ ID NO: 39592 - RNA, 24 nt, Human
ugaaaaguuggaagauuuugcauc

SEQ ID NO: 39593 - RNA, 24 nt, Human
aaauggaaucuagaagcuaaauuu

SEQ ID NO: 39594 - RNA, 24 nt, Human
agagugcugaacggcaagggugca

SEQ ID NO: 39595 - RNA, 24 nt, Human
gugguugguguaaaugagugaggc

SEQ ID NO: 39596 - RNA, 17 nt, Human
ugaguagguggccugca

SEQ ID NO: 39597 - RNA, 24 nt, Human
gccaacauggugaaacccugucuc

SEQ ID NO: 39598 - RNA, 24 nt, Human
aacucauuuuccucguaauuuggg

SEQ ID NO: 39599 - RNA, 24 nt, Human
ugguaguggccagggccugcguuc

SEQ ID NO: 39600 - RNA, 24 nt, Human
ucuugcucuucuugcccaggcugg

SEQ ID NO: 39601 - RNA, 24 nt, Human
uaauauaauaacagccaauguuug

SEQ ID NO: 39602 - RNA, 22 nt, Human
uuaauuggguauaauucuggaa

SEQ ID NO: 39603 - RNA, 24 nt, Human
ugacuugggccaauuacacgacug

SEQ ID NO: 39604 - RNA, 24 nt, Human
uagccuguggcaccccggagauga

SEQ ID NO: 39605 - RNA, 24 nt, Human
ugacacgaggggaggggucugugu

SEQ ID NO: 39606 - RNA, 24 nt, Human
cuccccagcaugcuggcauccagc

SEQ ID NO: 39607 - RNA, 24 nt, Human
ugacgaguacgucugaugcugcca

SEQ ID NO: 39608 - RNA, 21 nt, Human
accaauguuuaaaaugacauu

SEQ ID NO: 39609 - RNA, 24 nt, Human
uguaaccucauaaaguguccgaug

SEQ ID NO: 39610 - RNA, 24 nt, Human
ucagaaauuauuggucugcguuca

SEQ ID NO: 39611 - RNA, 24 nt, Human
cuaaauuggucuuccaggugcuug

SEQ ID NO: 39612 - RNA, 24 nt, Human
uaaugguuuuuacagauuauugaa

SEQ ID NO: 39613 - RNA, 24 nt, Human
uaagaagacgcuuauuuguauugg

SEQ ID NO: 39614 - RNA, 24 nt, Human
cauuccauuuuuuuuuacuuuaua

SEQ ID NO: 39615 - RNA, 24 nt, Human
ugagguuucgcuggauaguaggua

SEQ ID NO: 39616 - RNA, 24 nt, Human
uugaucuugaagaaacugggcgug

SEQ ID NO: 39617 - RNA, 24 nt, Human
uccgcgcgcagccggagcacaugg

SEQ ID NO: 39618 - RNA, 24 nt, Human
aggaaggagauauagugaagagga

SEQ ID NO: 39619 - RNA, 24 nt, Human
guagaguuuucuucaggcuuaaag

SEQ ID NO: 39620 - RNA, 24 nt, Human
aggaaggagauauagugaagagga

SEQ ID NO: 39621 - RNA, 24 nt, Human
gcgcguugcugcggccgugguccg

SEQ ID NO: 39622 - RNA, 24 nt, Human
uugaucuugaagaaacugggcgug

SEQ ID NO: 39623 - RNA, 24 nt, Human
guagaguuuucuucaggcuuaaag

SEQ ID NO: 39624 - RNA, 18 nt, Human
cagcagccggaguguggc

SEQ ID NO: 39625 - RNA, 24 nt, Human
agucgggaacaugaagggagacug

SEQ ID NO: 39626 - RNA, 24 nt, Human
uguuugggaaacauagauugucuu

SEQ ID NO: 39627 - RNA, 24 nt, Human
auagcaguccaauugaucauaagc

SEQ ID NO: 39628 - RNA, 24 nt, Human
uaaguagcaucugggaagaggaga

SEQ ID NO: 39629 - RNA, 24 nt, Human
uuaccaugaagguuguuuugcuua

SEQ ID NO: 39630 - RNA, 24 nt, Human
ggaggaacuugaaaggaggguaaa

SEQ ID NO: 39631 - RNA, 24 nt, Human
cauguuuuagacaaauacucacgu

SEQ ID NO: 39632 - RNA, 24 nt, Human
ucuuuuuuuauaccauuuuauccu

SEQ ID NO: 39633 - RNA, 24 nt, Human
aauuuccuguuguguggguggcau

SEQ ID NO: 39634 - RNA, 24 nt, Human
guggugcggcaggcgucccugcau

SEQ ID NO: 39635 - RNA, 24 nt, Human
agauaagagaacgauugcagcgag

SEQ ID NO: 39636 - RNA, 24 nt, Human
ucacugggaagaugaccacagaaa

SEQ ID NO: 39637 - RNA, 24 nt, Human
agaggaacaaaggugugcucugag

SEQ ID NO: 39638 - RNA, 24 nt, Human
uaaaugcucccugccugguguggg

SEQ ID NO: 39639 - RNA, 24 nt, Human
uuaguagacgugggguuucaccau

SEQ ID NO: 39640 - RNA, 24 nt, Human
ccaacgugcugggauuacaggcau

SEQ ID NO: 39641 - RNA, 24 nt, Human
ucuugcucugucacccaggcugga

SEQ ID NO: 39642 - RNA, 24 nt, Human
gcuugagugaugcucagauuaggg

SEQ ID NO: 39643 - RNA, 24 nt, Human
aguaaaauuaaacucugugcuucc

SEQ ID NO: 39644 - RNA, 24 nt, Human
uaaaugauaugaaucauuuaacua

SEQ ID NO: 39645 - RNA, 24 nt, Human
uuaggaaauaauuauuaaaacaug

SEQ ID NO: 39646 - RNA, 24 nt, Human
uugguugaauacauaguuaagaug

SEQ ID NO: 39647 - RNA, 24 nt, Human
uaagccauuuuaaggaguuucaug

SEQ ID NO: 39648 - RNA, 24 nt, Human
cagcuuagaaaaugcagguuaccc

SEQ ID NO: 39649 - RNA, 24 nt, Human
ugaaauacuaccuaguuacuucuu

SEQ ID NO: 39650 - RNA, 24 nt, Human
uuggaugccacuccccuguguuga

SEQ ID NO: 39651 - RNA, 24 nt, Human
cuaguucuuaggaacagacucgau

SEQ ID NO: 39652 - RNA, 24 nt, Human
aguaguuuuaagguccagcuucuu

SEQ ID NO: 39653 - RNA, 20 nt, Human
ugaguugaauacucagcucc

SEQ ID NO: 39654 - RNA, 24 nt, Human
accccaugaauaaauagcagguuc

SEQ ID NO: 39655 - RNA, 24 nt, Human
ugaaaugaccaaaguacacaaaug

SEQ ID NO: 39656 - RNA, 24 nt, Human
ugggaccacgggcaugagccacca

SEQ ID NO: 39657 - RNA, 24 nt, Human
aucaaugucaauauccuaguuuug

SEQ ID NO: 39658 - RNA, 24 nt, Human
cuuggcuuccacucagcaucagcg

SEQ ID NO: 39659 - RNA, 24 nt, Human
caccagaaaaccuucauauaaaaa

SEQ ID NO: 39660 - RNA, 24 nt, Human
ggaaagcagcgcguggauguggag

SEQ ID NO: 39661 - RNA, 24 nt, Human
ucacaaccacggcccuggaggagc

SEQ ID NO: 39662 - RNA, 24 nt, Human
uaauauuuacugaccauuuacuau

SEQ ID NO: 39663 - RNA, 24 nt, Human
uuaauuuuugucuaccgaauauga

SEQ ID NO: 39664 - RNA, 24 nt, Human
uauccuucaacaaguguacguggc

SEQ ID NO: 39665 - RNA, 18 nt, Human
uacagugugcuuuagaau

SEQ ID NO: 39666 - RNA, 24 nt, Human
ugugaaaauuuaaguagauucuua

SEQ ID NO: 39667 - RNA, 24 nt, Human
ucuggcacaggaaauggucuccaa

SEQ ID NO: 39668 - RNA, 24 nt, Human
cgcccuaggcuucacggcagauca

SEQ ID NO: 39669 - RNA, 24 nt, Human
uuucaaggucgcugggcccgaggu

SEQ ID NO: 39670 - RNA, 24 nt, Human
cagcccccucaugcugguccuuga

SEQ ID NO: 39671 - RNA, 24 nt, Human
ugagauuauuaugagcagaauggu

SEQ ID NO: 39672 - RNA, 24 nt, Human
uacaccacucccaagaagaauaag

SEQ ID NO: 39673 - RNA, 24 nt, Human
uugcugccacuuccaggugcuggc

SEQ ID NO: 39674 - RNA, 24 nt, Human
aaaaugagcagcgucccucuccac

SEQ ID NO: 39675 - RNA, 24 nt, Human
aaguauaggcgauagaaauugaga

SEQ ID NO: 39676 - RNA, 24 nt, Human
uuugcauuuuuggcugauuuaaaa

SEQ ID NO: 39677 - RNA, 24 nt, Human
gaggaugccgccauccagaauuuu

SEQ ID NO: 39678 - RNA, 24 nt, Human
uuucuaaauaucuuuuuaaaauaa

SEQ ID NO: 39679 - RNA, 24 nt, Human
uagcuuuuuaaaaggcuguuuaca

SEQ ID NO: 39680 - RNA, 24 nt, Human
cuccuaaucccagauguaccgcga

SEQ ID NO: 39681 - RNA, 24 nt, Human
cagcugcugccagguuuaagaaca

SEQ ID NO: 39682 - RNA, 24 nt, Human
aaucaaguccuggucaccuggaca

SEQ ID NO: 39683 - RNA, 24 nt, Human
uuggaaguagaauguucgcugaug

SEQ ID NO: 39684 - RNA, 24 nt, Human
uugcaaguggcguauaacgauaag

SEQ ID NO: 39685 - RNA, 24 nt, Human
uuaguaccaagaaaacagggauga

SEQ ID NO: 39686 - RNA, 24 nt, Human
ucagagggucuccugcagcccucu

SEQ ID NO: 39687 - RNA, 24 nt, Human
aaguauaggcgauagaaauugaga

SEQ ID NO: 39688 - RNA, 24 nt, Human
uggcaaaaugugggcugcucuguu

SEQ ID NO: 39689 - RNA, 24 nt, Human
gaacauauaccauauagugaaagg

SEQ ID NO: 39690 - RNA, 24 nt, Human
ucucaaaacucaaauacucuuuau

SEQ ID NO: 39691 - RNA, 22 nt, Human
acgcacagcuaggaaugaccgc

SEQ ID NO: 39692 - RNA, 19 nt, Human
uaccuugugagcaguuggu

SEQ ID NO: 39693 - RNA, 24 nt, Human
uaaauuuucuuuuuaaaaagaggc

SEQ ID NO: 39694 - RNA, 24 nt, Human
ugcgaugggucgugacacugggcc

SEQ ID NO: 39695 - RNA, 24 nt, Human
ucggggauucugcugggcaauggc

SEQ ID NO: 39696 - RNA, 24 nt, Human
aggcauuugaagaugaaaugaaaa

SEQ ID NO: 39697 - RNA, 24 nt, Human
uguguauuuacuuuagaaaaaaug

SEQ ID NO: 39698 - RNA, 24 nt, Human
uggaugauuaagagauugccauuu

SEQ ID NO: 39699 - RNA, 24 nt, Human
uggcgagauaucaaguucaaaacc

SEQ ID NO: 39700 - RNA, 22 nt, Human
ucauaaguagucauccaguaga

SEQ ID NO: 39701 - RNA, 24 nt, Human
uggcuuuagucuugaugaauguga

SEQ ID NO: 39702 - RNA, 24 nt, Human
ccgcacccaucuuugaagauagcc

SEQ ID NO: 39703 - RNA, 24 nt, Human
accuggagggcaugaugagcgagg

SEQ ID NO: 39704 - RNA, 24 nt, Human
agaguuguucauccaggagacagc

SEQ ID NO: 39705 - RNA, 24 nt, Human
ggccugggcacccuuagaggggag

SEQ ID NO: 39706 - RNA, 22 nt, Human
gcgaauggcaaauuguaagcgg

SEQ ID NO: 39707 - RNA, 24 nt, Human
uauuucaaggagacagaucaaauu

SEQ ID NO: 39708 - RNA, 24 nt, Human
uccaugcugaacgacugugacuau

SEQ ID NO: 39709 - RNA, 24 nt, Human
cacccgcaguaaccacugaacguc

SEQ ID NO: 39710 - RNA, 24 nt, Human
uagcauucaaaauguugcauagag

SEQ ID NO: 39711 - RNA, 24 nt, Human
gcagaccccugcaugcaguugugu

SEQ ID NO: 39712 - RNA, 19 nt, Human
aacacggugaaaccccauc

SEQ ID NO: 39713 - RNA, 24 nt, Human
ccacugcacuccacccugggcaac

SEQ ID NO: 39714 - RNA, 24 nt, Human
uucaaaauuuuaauguguuccaug

SEQ ID NO: 39715 - RNA, 24 nt, Human
uuccagguugaccacuuugugccc

SEQ ID NO: 39716 - RNA, 24 nt, Human
cagaagcuauaaaacuggggggca

SEQ ID NO: 39717 - RNA, 24 nt, Human
aagcagcgguaccagaugcagaaa

SEQ ID NO: 39718 - RNA, 24 nt, Human
uccacuggcgaaagaugccuuucu

SEQ ID NO: 39719 - RNA, 24 nt, Human
uaguucagauugaucuuaggucaa

SEQ ID NO: 39720 - RNA, 24 nt, Human
uagagugguggcucccagaauccc

SEQ ID NO: 39721 - RNA, 24 nt, Human
ggucauuaccuuauugaguuuaga

SEQ ID NO: 39722 - RNA, 24 nt, Human
uuuagacuugacgcaacgggaggu

SEQ ID NO: 39723 - RNA, 24 nt, Human
agagcagguguucugggccccuuc

SEQ ID NO: 39724 - RNA, 24 nt, Human
gggcucaggugagagcagguguuc

SEQ ID NO: 39725 - RNA, 24 nt, Human
ugcaugacgguguccuguccucgg

SEQ ID NO: 39726 - RNA, 24 nt, Human
uaguucagauugaucuuaggucaa

SEQ ID NO: 39727 - RNA, 19 nt, Human
ugucacagaacuacagucu

SEQ ID NO: 39728 - RNA, 24 nt, Human
acuugauggggaugguuagacaac

SEQ ID NO: 39729 - RNA, 24 nt, Human
gaccagccggaaagcauuggggau

SEQ ID NO: 39730 - RNA, 24 nt, Human
ucccgaaagucccaggcuguugga

SEQ ID NO: 39731 - RNA, 24 nt, Human
ucacuuccagguccucaguacaca

SEQ ID NO: 39732 - RNA, 24 nt, Human
uuaaaauaugggugcacauuuugc

SEQ ID NO: 39733 - RNA, 24 nt, Human
ccacacaggcucauucucaacugg

SEQ ID NO: 39734 - RNA, 23 nt, Human
agggauguucaggacucugcagc

SEQ ID NO: 39735 - RNA, 24 nt, Human
uucucuguuuggaggcugcaccca

SEQ ID NO: 39736 - RNA, 24 nt, Human
auuucauucacuggggaggaacaa

SEQ ID NO: 39737 - RNA, 23 nt, Human
uaaggcgaggcggaauuaaaccc

SEQ ID NO: 39738 - RNA, 24 nt, Human
gagcauuuguauguuauggugaau

SEQ ID NO: 39739 - RNA, 24 nt, Human
ucucacuggaauaccccaccauua

SEQ ID NO: 39740 - RNA, 24 nt, Human
cagcgugguugugcaugggagugg

SEQ ID NO: 39741 - RNA, 24 nt, Human
uggaauugguaugugguugggcaa

SEQ ID NO: 39742 - RNA, 24 nt, Human
uaacagguguaagaguguugaaaa

SEQ ID NO: 39743 - RNA, 24 nt, Human
ugugcagaagaaauggaaggauuc

SEQ ID NO: 39744 - RNA, 24 nt, Human
uccauagucuccuaccccuccugg

SEQ ID NO: 39745 - RNA, 24 nt, Human
ucacguaagcaugagguuguuggg

SEQ ID NO: 39746 - RNA, 24 nt, Human
uuccagcgacuggacaagcugagg

SEQ ID NO: 39747 - RNA, 24 nt, Human
aacaaauuucacauaugguaaacc

SEQ ID NO: 39748 - RNA, 24 nt, Human
aggaagcgagaaugcagaguuucc

SEQ ID NO: 39749 - RNA, 20 nt, Human
ugugguggcagcagccaagg

SEQ ID NO: 39750 - RNA, 21 nt, Human
ucgcuggcucccacuuugucu

SEQ ID NO: 39751 - RNA, 24 nt, Human
ugacagacagaagggcuuggagau

SEQ ID NO: 39752 - RNA, 24 nt, Human
ugacgugcuggaacucagagaggu

SEQ ID NO: 39753 - RNA, 24 nt, Human
uggcugaauuuuccuucuuuaccu

SEQ ID NO: 39754 - RNA, 24 nt, Human
uugcagcacgucagcaucaauauc

SEQ ID NO: 39755 - RNA, 24 nt, Human
ugugaugacagcuuggcggguacg

SEQ ID NO: 39756 - RNA, 24 nt, Human
aacccggaagcauagacugugcua

SEQ ID NO: 39757 - RNA, 24 nt, Human
ggacuagaaaguacaugaccaagc

SEQ ID NO: 39758 - RNA, 24 nt, Human
ucccgguaacuauuccgguuauga

SEQ ID NO: 39759 - RNA, 24 nt, Human
uaccuggaggagaagggcaccuac

SEQ ID NO: 39760 - RNA, 24 nt, Human
ggggaagugccuggacugcaucaa

SEQ ID NO: 39761 - RNA, 24 nt, Human
ugagggcuuccucaaagucugagc

SEQ ID NO: 39762 - RNA, 24 nt, Human
ucccugaaagagauggucuccaag

SEQ ID NO: 39763 - RNA, 24 nt, Human
uagcaaaaguaauauaaaaguacc

SEQ ID NO: 39764 - RNA, 24 nt, Human
cauggagagcgaugcuagugaugc

SEQ ID NO: 39765 - RNA, 24 nt, Human
cacccugugccaggucgcugcgcu

SEQ ID NO: 39766 - RNA, 24 nt, Human
aucgagcaggucucuggacucaca

SEQ ID NO: 39767 - RNA, 24 nt, Human
ucccugcagcccgggccgggccug

SEQ ID NO: 39768 - RNA, 24 nt, Human
acgcaguuacggcgugccaauacc

SEQ ID NO: 39769 - RNA, 24 nt, Human
ugagauagccaggcugaagaagca

SEQ ID NO: 39770 - RNA, 24 nt, Human
uauggcaagucacuuugacagaca

SEQ ID NO: 39771 - RNA, 24 nt, Human
uacaccacucccaagaagaauaag

SEQ ID NO: 39772 - RNA, 24 nt, Human
ucuugcucuguugcccaggcugga

SEQ ID NO: 39773 - RNA, 24 nt, Human
agcaauuuuccugcuggguauuua

SEQ ID NO: 39774 - RNA, 24 nt, Human
caggcaguuaacaaaugcuggcaa

SEQ ID NO: 39775 - RNA, 24 nt, Human
ugacuaguuuaaggagacuggcga

SEQ ID NO: 39776 - RNA, 24 nt, Human
uagaagcagccaccagcagaugac

SEQ ID NO: 39777 - RNA, 24 nt, Human
cacuacaccauuggcaaggagauc

SEQ ID NO: 39778 - RNA, 24 nt, Human
uguguuuguagacuuggaacccac

SEQ ID NO: 39779 - RNA, 24 nt, Human
ucacgaacacagagacgucaucgu

SEQ ID NO: 39780 - RNA, 24 nt, Human
ugaauccucaguggucacugcucu

SEQ ID NO: 39781 - RNA, 24 nt, Human
gauuaugugcgcuggaacguggaa

SEQ ID NO: 39782 - RNA, 24 nt, Human
cacugcauuccagccugggcagca

SEQ ID NO: 39783 - RNA, 24 nt, Human
ugcccaggacagccagcccugagc

SEQ ID NO: 39784 - RNA, 24 nt, Human
ugucacguggggcuuauaggacgg

SEQ ID NO: 39785 - RNA, 24 nt, Human
agaacagacugggacucaucuucc

SEQ ID NO: 39786 - RNA, 24 nt, Human
ugacaagaggagccccaccuuauc

SEQ ID NO: 39787 - RNA, 24 nt, Human
caugugaacgcuacuuaugugaac

SEQ ID NO: 39788 - RNA, 22 nt, Human
auaaugaauaaugaccuuauuu

SEQ ID NO: 39789 - RNA, 24 nt, Human
accgugagaaguaaauuucuguuu

SEQ ID NO: 39790 - RNA, 24 nt, Human
uaauguacagaacuaaauuuuuua

SEQ ID NO: 39791 - RNA, 24 nt, Human
uaauuuguuaaaaugacuucauuu

SEQ ID NO: 39792 - RNA, 24 nt, Human
acagugcgggcugcggugggucag

SEQ ID NO: 39793 - RNA, 24 nt, Human
ugccguagcuauggaauagaagca

SEQ ID NO: 39794 - RNA, 24 nt, Human
uuuggcaaggauggaguguccaga

SEQ ID NO: 39795 - RNA, 24 nt, Human
uggcagggcagugaaagaagggga

SEQ ID NO: 39796 - RNA, 24 nt, Human
uuuaagauuuucugaccuggauuu

SEQ ID NO: 39797 - RNA, 24 nt, Human
uucacagaccaaaccagacaucca

SEQ ID NO: 39798 - RNA, 18 nt, Human
uggcugugacauugagca

SEQ ID NO: 39799 - RNA, 24 nt, Human
augggucagcgaucuccugacuca

SEQ ID NO: 39800 - RNA, 24 nt, Human
ucaguggcccucccuggugcacug

SEQ ID NO: 39801 - RNA, 20 nt, Human
ucucccagccaccuccuccc

SEQ ID NO: 39802 - RNA, 24 nt, Human
aaccaggaagagaagaguggccca

SEQ ID NO: 39803 - RNA, 17 nt, Human
ugagagggggggcggcc

SEQ ID NO: 39804 - RNA, 24 nt, Human
cuacuggagcuggauccgccagcc

SEQ ID NO: 39805 - RNA, 24 nt, Human
ucccucuuuuggaacucugguuua

SEQ ID NO: 39806 - RNA, 24 nt, Human
ugagggaaggacugcugggauugg

SEQ ID NO: 39807 - RNA, 24 nt, Human
uaccaggacaucagugaguuggua

SEQ ID NO: 39808 - RNA, 24 nt, Human
accugggguggcacacacacgcaa

SEQ ID NO: 39809 - RNA, 24 nt, Human
uggaaugggaacgucuguugagag

SEQ ID NO: 39810 - RNA, 24 nt, Human
cuggagccaagugcuaacaugucu

SEQ ID NO: 39811 - RNA, 24 nt, Human
ggccgaggagaaggguuccaaacc

SEQ ID NO: 39812 - RNA, 24 nt, Human
uccaccacuacuggccaucugauc

SEQ ID NO: 39813 - RNA, 24 nt, Human
ccuggcuccagggauggcaaaguc

SEQ ID NO: 39814 - RNA, 24 nt, Human
caccuggaacaucaaccacgcccg

SEQ ID NO: 39815 - RNA, 22 nt, Human
cacucgguguacguccuggagg

SEQ ID NO: 39816 - RNA, 24 nt, Human
ugcugagcccgcuucggccgggac

SEQ ID NO: 39817 - RNA, 24 nt, Human
ucugaucuauaaaugcgguggcau

SEQ ID NO: 39818 - RNA, 24 nt, Human
uuagucacggggaugguggaagag

SEQ ID NO: 39819 - RNA, 24 nt, Human
acucgccccaaaggaaaacaacuu

SEQ ID NO: 39820 - RNA, 24 nt, Human
uagagcuagugaauuagccuauuu

SEQ ID NO: 39821 - RNA, 24 nt, Human
uagcagugcaaagaguuccuuuau

SEQ ID NO: 39822 - RNA, 24 nt, Human
uaacuaagauuuugccuuuauugg

SEQ ID NO: 39823 - RNA, 24 nt, Human
ucaggcucauauagcugcuggccg

SEQ ID NO: 39824 - RNA, 24 nt, Human
ugggauccugcagcucuagucucc

SEQ ID NO: 39825 - RNA, 24 nt, Human
uggaggguguuguggucuccaauc

SEQ ID NO: 39826 - RNA, 24 nt, Human
ugcuguacuuacucccugagguag

SEQ ID NO: 39827 - RNA, 24 nt, Human
ugauagggugggcuaaaaaccaug

SEQ ID NO: 39828 - RNA, 24 nt, Human
ugcugcaguacaggggagcauagg

SEQ ID NO: 39829 - RNA, 24 nt, Human
uaugaggcccuagagcuccgggac

SEQ ID NO: 39830 - RNA, 24 nt, Human
uaaaugucuacaugugccagaaug

SEQ ID NO: 39831 - RNA, 20 nt, Human
uacacaggcacauggcuuua

SEQ ID NO: 39832 - RNA, 24 nt, Human
uccacaauuaaaauagcacaucug

SEQ ID NO: 39833 - RNA, 24 nt, Human
uggugcaaaagugauugugguuug

SEQ ID NO: 39834 - RNA, 24 nt, Human
uuagaugguagcuaugcucaguga

SEQ ID NO: 39835 - RNA, 24 nt, Human
ugagguugacccuuuucguguuaa

SEQ ID NO: 39836 - RNA, 18 nt, Human
uucauuuuauuucuguuc

SEQ ID NO: 39837 - RNA, 24 nt, Human
aaccaggacccaaggugcccuucc

SEQ ID NO: 39838 - RNA, 24 nt, Human
gggccaugcucccuggcccugacu

SEQ ID NO: 39839 - RNA, 24 nt, Human
ucuaucggauuagcacucggugcc

SEQ ID NO: 39840 - RNA, 24 nt, Human
ccaacgcacucuaaauccccagau

SEQ ID NO: 39841 - RNA, 24 nt, Human
augaauuacugagcuccaaaauug

SEQ ID NO: 39842 - RNA, 24 nt, Human
ucaaggacauuuuccuaaggacag

SEQ ID NO: 39843 - RNA, 24 nt, Human
aggcaggacacagcggcuuuccga

SEQ ID NO: 39844 - RNA, 24 nt, Human
aagguucuuuuauuguggaacuuu

SEQ ID NO: 39845 - RNA, 18 nt, Human
aggcagggucugcaugug

SEQ ID NO: 39846 - RNA, 24 nt, Human
agucuuugaaaggcaccaacccuu

SEQ ID NO: 39847 - RNA, 24 nt, Human
uaguaguugggauuacaggcaugc

SEQ ID NO: 39848 - RNA, 24 nt, Human
ugaccucaagugauccgcucgcuc

SEQ ID NO: 39849 - RNA, 21 nt, Human
uaaggagggggcauggguccc

SEQ ID NO: 39850 - RNA, 24 nt, Human
aagcgugcuucuguguccagcuuu

SEQ ID NO: 39851 - RNA, 24 nt, Human
ggaaggacgggcguggucugcagg

SEQ ID NO: 39852 - RNA, 24 nt, Human
cauuuggaaaaucuacuguacagg

SEQ ID NO: 39853 - RNA, 24 nt, Human
guggggcagcaggagcuaacggag

SEQ ID NO: 39854 - RNA, 24 nt, Human
uaagccccgcaugcauuagguauu

SEQ ID NO: 39855 - RNA, 20 nt, Human
ucccugcaaaggacaggaac

SEQ ID NO: 39856 - RNA, 24 nt, Human
ugccaaaguuagccacaucuuacu

SEQ ID NO: 39857 - RNA, 24 nt, Human
uucugauuuuaaaaggauucucug

SEQ ID NO: 39858 - RNA, 24 nt, Human
acuaugacgaaucacuuuacagca

SEQ ID NO: 39859 - RNA, 24 nt, Human
cagcaaaugaauggauauuucugc

SEQ ID NO: 39860 - RNA, 24 nt, Human
ugacaaauaagucucacacagugc

SEQ ID NO: 39861 - RNA, 24 nt, Human
uauugugacucacauguccuccug

SEQ ID NO: 39862 - RNA, 24 nt, Human
uguuuuguucuuuugguaguuuua

SEQ ID NO: 39863 - RNA, 24 nt, Human
uuacuuggaauuuccucuguuaua

SEQ ID NO: 39864 - RNA, 24 nt, Human
uaaguuguauaaaaguaggugauu

SEQ ID NO: 39865 - RNA, 24 nt, Human
uugaaaguuguacugguucccugu

SEQ ID NO: 39866 - RNA, 24 nt, Human
uggcaggccugguaggcggaggcg

SEQ ID NO: 39867 - RNA, 24 nt, Human
uuacuacauuaagguacgagcagg

SEQ ID NO: 39868 - RNA, 24 nt, Human
ugaaaguauucaaaagucuucccg

SEQ ID NO: 39869 - RNA, 24 nt, Human
uaaaagaccauccauccagucugc

SEQ ID NO: 39870 - RNA, 24 nt, Human
uuaaaugugcauuaccugguuaca

SEQ ID NO: 39871 - RNA, 24 nt, Human
acaaagccaaaggccccuuguuag

SEQ ID NO: 39872 - RNA, 19 nt, Human
aacaaguuauuauacuccu

SEQ ID NO: 39873 - RNA, 24 nt, Human
acuggauuaugauaaggguuuaag

SEQ ID NO: 39874 - RNA, 24 nt, Human
gugcuuugauuaaugguuaaaacu

SEQ ID NO: 39875 - RNA, 24 nt, Human
cauucugugccuguggugaccgug

SEQ ID NO: 39876 - RNA, 24 nt, Human
cccccgggaccucgcaugcacgaa

SEQ ID NO: 39877 - RNA, 24 nt, Human
cggcgggaaggaggcgcgcggacc

SEQ ID NO: 39878 - RNA, 18 nt, Human
uagaacgcaggcggcggc

SEQ ID NO: 39879 - RNA, 24 nt, Human
acucguuuugucuucucuuccccu

SEQ ID NO: 39880 - RNA, 24 nt, Human
cuuuaucauuucauuaauucacaa

SEQ ID NO: 39881 - RNA, 24 nt, Human
acuauuauuacuauauauuaaauu

SEQ ID NO: 39882 - RNA, 24 nt, Human
uuacauaggucggcuugagcacug

SEQ ID NO: 39883 - RNA, 24 nt, Human
ucucagaagacuccguuucugggg

SEQ ID NO: 39884 - RNA, 24 nt, Human
uggaaggucuaaaguuugugaggg

SEQ ID NO: 39885 - RNA, 24 nt, Human
gagcgguccuuggggagacgcggg

SEQ ID NO: 39886 - RNA, 24 nt, Human
ucaggcccugcucaagauuccagu

SEQ ID NO: 39887 - RNA, 24 nt, Human
cacagugucugauuuguaugccca

SEQ ID NO: 39888 - RNA, 24 nt, Human
uuuagacuugacgcaacgggaggu

SEQ ID NO: 39889 - RNA, 24 nt, Human
cagcugccaccuccagacuuugga

SEQ ID NO: 39890 - RNA, 24 nt, Human
ucacagagguagcaucaagccccu

SEQ ID NO: 39891 - RNA, 24 nt, Human
uaaaacauaaacuguguuagauag

SEQ ID NO: 39892 - RNA, 24 nt, Human
uggcagggaacaaaugccaaguga

SEQ ID NO: 39893 - RNA, 24 nt, Human
uccacugggcaaaaaacaaaacaa

SEQ ID NO: 39894 - RNA, 19 nt, Human
uagaagacagguggucugc

SEQ ID NO: 39895 - RNA, 24 nt, Human
ugagggagagagagcagcuccaca

SEQ ID NO: 39896 - RNA, 24 nt, Human
uaaaacaaguuuuuguugguuacu

SEQ ID NO: 39897 - RNA, 24 nt, Human
ggccuuagccgccagcccgcgcug

SEQ ID NO: 39898 - RNA, 24 nt, Human
ucauauguuuaaccuugauuugga

SEQ ID NO: 39899 - RNA, 24 nt, Human
uucacuuuuauuauaggaucccca

SEQ ID NO: 39900 - RNA, 24 nt, Human
acgcagccucuagucucuguuucu

SEQ ID NO: 39901 - RNA, 24 nt, Human
caguaugguagugggcuacccccu

SEQ ID NO: 39902 - RNA, 24 nt, Human
guggagggcccuauggacacccca

SEQ ID NO: 39903 - RNA, 24 nt, Human
acgcaguuucaucucagggaggcc

SEQ ID NO: 39904 - RNA, 24 nt, Human
ucccugcagaagcguggcauugug

SEQ ID NO: 39905 - RNA, 24 nt, Human
ucauuguagaaaggaagccuugcu

SEQ ID NO: 39906 - RNA, 23 nt, Human
uaccggcccaaguacugcgguuc

SEQ ID NO: 39907 - RNA, 24 nt, Human
ugggaguaucggauguagcugagu

SEQ ID NO: 39908 - RNA, 24 nt, Human
ucggcucgugccgauucggcacga

SEQ ID NO: 39909 - RNA, 24 nt, Human
ugaggcaauacauuuuguguuacu

SEQ ID NO: 39910 - RNA, 24 nt, Human
ugcccguugccuagguugggcuca

SEQ ID NO: 39911 - RNA, 24 nt, Human
uagccuuggaaaaauccaucuccg

SEQ ID NO: 39912 - RNA, 24 nt, Human
guagagcuccccaucaaugaucgc

SEQ ID NO: 39913 - RNA, 24 nt, Human
agaucuguugccaucauggccccu

SEQ ID NO: 39914 - RNA, 23 nt, Human
uauguugucaaaggcuuaagggc

SEQ ID NO: 39915 - RNA, 17 nt, Human
ugagauggaucaacagu

SEQ ID NO: 39916 - RNA, 24 nt, Human
gggaauuggcacaccagcugguac

SEQ ID NO: 39917 - RNA, 24 nt, Human
ucaaucagguugcagauucuaaaa

SEQ ID NO: 39918 - RNA, 24 nt, Human
uggaaaaacuuggcuugucugcca

SEQ ID NO: 39919 - RNA, 22 nt, Human
uggggagagcuuuuccacugcc

SEQ ID NO: 39920 - RNA, 24 nt, Human
uuaguugugugucugccugaaacc

SEQ ID NO: 39921 - RNA, 24 nt, Human
uguagaaucuuuauuaucucaaca

SEQ ID NO: 39922 - RNA, 24 nt, Human
uccgugcuggcccuaugagacgga

SEQ ID NO: 39923 - RNA, 24 nt, Human
ccgaacuugaucaauguauacaau

SEQ ID NO: 39924 - RNA, 24 nt, Human
uaaaauaauaugaaaugcagacuu

SEQ ID NO: 39925 - RNA, 24 nt, Human
gugaacuugaagugcuucccauuc

SEQ ID NO: 39926 - RNA, 24 nt, Human
uuccuggcucugcaguugguacuu

SEQ ID NO: 39927 - RNA, 24 nt, Human
gagcagcagcaguggagggggcag

SEQ ID NO: 39928 - RNA, 24 nt, Human
ucccuauuuccuuugcuguguucc

SEQ ID NO: 39929 - RNA, 17 nt, Human
cagggcaggcgccggcc

SEQ ID NO: 39930 - RNA, 24 nt, Human
ugaauggacggguucaggccugau

SEQ ID NO: 39931 - RNA, 24 nt, Human
agauguugacccagaguccucugu

SEQ ID NO: 39932 - RNA, 24 nt, Human
agguggcucagggaguggcagaag

SEQ ID NO: 39933 - RNA, 24 nt, Human
uccaaauuuggauaaaauaucucu

SEQ ID NO: 39934 - RNA, 24 nt, Human
cuucccaaagcuagggccguuccc

SEQ ID NO: 39935 - RNA, 24 nt, Human
uaugugaaaagagaaggugggcug

SEQ ID NO: 39936 - RNA, 24 nt, Human
uuaaaguaagugugggucaagguc

SEQ ID NO: 39937 - RNA, 24 nt, Human
gggcaguaaagaaucuguaacugc

SEQ ID NO: 39938 - RNA, 24 nt, Human
agccugggcuucaugcccccucug

SEQ ID NO: 39939 - RNA, 24 nt, Human
ucgaauggacacauuaccagugaa

SEQ ID NO: 39940 - RNA, 24 nt, Human
uaaggaagcgguacgaacuccacg

SEQ ID NO: 39941 - RNA, 21 nt, Human
ugacacgaggggagggggucu

SEQ ID NO: 39942 - RNA, 24 nt, Human
ugaggggagaaaaacaaucacuug

SEQ ID NO: 39943 - RNA, 24 nt, Human
uggaagucauuaccucugcaguca

SEQ ID NO: 39944 - RNA, 24 nt, Human
uaauaggccuuucaaauguauguu

SEQ ID NO: 39945 - RNA, 24 nt, Human
ccgcgucgacgaaacauuuaggac

SEQ ID NO: 39946 - RNA, 18 nt, Human
cgauacgagccacaaacu

SEQ ID NO: 39947 - RNA, 24 nt, Human
ugaccucaggugauccucccgccu

SEQ ID NO: 39948 - RNA, 24 nt, Human
uaagaaaccucuuuaagcaauaga

SEQ ID NO: 39949 - RNA, 20 nt, Human
cauucauuacugggggaggu

SEQ ID NO: 39950 - RNA, 23 nt, Human
uggacugcgcauucauggguucc

SEQ ID NO: 39951 - RNA, 24 nt, Human
auagaauguggccaggccuuacaa

SEQ ID NO: 39952 - RNA, 24 nt, Human
aaggugccucguuuuuguccuaga

SEQ ID NO: 39953 - RNA, 24 nt, Human
uuacuaguuuauuauggcuugggu

SEQ ID NO: 39954 - RNA, 24 nt, Human
ucuauaguguuugaucauagaagu

SEQ ID NO: 39955 - RNA, 22 nt, Human
aacauuauaaauguaugcuacu

SEQ ID NO: 39956 - RNA, 24 nt, Human
agugguugaauuuacccacccaag

SEQ ID NO: 39957 - RNA, 24 nt, Human
uccuuuaucagucgucuuagcaga

SEQ ID NO: 39958 - RNA, 24 nt, Human
cagguuccauucaaugcaagucac

SEQ ID NO: 39959 - RNA, 24 nt, Human
cagugcacauaccuucaguuuggg

SEQ ID NO: 39960 - RNA, 24 nt, Human
uuugccaauuuggcgguggcugcc

SEQ ID NO: 39961 - RNA, 24 nt, Human
uggcggcggcgcagggccucgugg

SEQ ID NO: 39962 - RNA, 24 nt, Human
uaaaagaccauccauccagucugc

SEQ ID NO: 39963 - RNA, 24 nt, Human
ugguaaggggaagaggcagauaug

SEQ ID NO: 39964 - RNA, 24 nt, Human
ccuccagccugagaagcaugccgu

SEQ ID NO: 39965 - RNA, 24 nt, Human
caucgguaagcgggugccggauca

SEQ ID NO: 39966 - RNA, 24 nt, Human
agucauuccuuacgagaagaaagc

SEQ ID NO: 39967 - RNA, 17 nt, Human
acccugaggaagaagag

SEQ ID NO: 39968 - RNA, 24 nt, Human
ugaggugggcagugugccaggucc

SEQ ID NO: 39969 - RNA, 24 nt, Human
uaagcagaggucaccgggcaacua

SEQ ID NO: 39970 - RNA, 24 nt, Human
uaccaggagaggaaucgagccaug

SEQ ID NO: 39971 - RNA, 24 nt, Human
gggcagcaagcggccccucgcucc

SEQ ID NO: 39972 - RNA, 24 nt, Human
agccauugggauccagacaucaga

SEQ ID NO: 39973 - RNA, 24 nt, Human
acacuggucuccgcuguauccugg

SEQ ID NO: 39974 - RNA, 17 nt, Human
uaacuuggaaggcagag

SEQ ID NO: 39975 - RNA, 24 nt, Human
uucuccaaguacgagaaguaacag

SEQ ID NO: 39976 - RNA, 24 nt, Human
ugaggugggcgcaccgggcauagu

SEQ ID NO: 39977 - RNA, 24 nt, Human
ugauguugagaaccguguaccaug

SEQ ID NO: 39978 - RNA, 24 nt, Human
ccaguacaacauuauguucccgaa

SEQ ID NO: 39979 - RNA, 24 nt, Human
guccaguucacagacauuguggaa

SEQ ID NO: 39980 - RNA, 24 nt, Human
ugagggaaggacugcuggguuggc

SEQ ID NO: 39981 - RNA, 24 nt, Human
ucaccgaaggugaaaauggcauua

SEQ ID NO: 39982 - RNA, 24 nt, Human
ucggaaaggaggcgccggcugugg

SEQ ID NO: 39983 - RNA, 24 nt, Human
uucauuaagauaaagauggcuuuu

SEQ ID NO: 39984 - RNA, 24 nt, Human
ucuccagaaaugcuuuggguucau

SEQ ID NO: 39985 - RNA, 24 nt, Human
uugaucuugaagaaacugggcgug

SEQ ID NO: 39986 - RNA, 24 nt, Human
caugaaguaccacccuuugggggu

SEQ ID NO: 39987 - RNA, 24 nt, Human
aggaaggagauauagugaagagga

SEQ ID NO: 39988 - RNA, 24 nt, Human
guagaguuuucuucaggcuuaaag

SEQ ID NO: 39989 - RNA, 24 nt, Human
ccaccuggccauuaaggggaaagg

SEQ ID NO: 39990 - RNA, 24 nt, Human
ucccaguugaggggcacagggcug

SEQ ID NO: 39991 - RNA, 24 nt, Human
uguggauggccccuccgggaaacu

SEQ ID NO: 39992 - RNA, 21 nt, Human
cugcccccucugcugaugccc

SEQ ID NO: 39993 - RNA, 24 nt, Human
ccugggaggcgggggccccccucc

SEQ ID NO: 39994 - RNA, 23 nt, Human
acugaaucuccccuccucacagu

SEQ ID NO: 39995 - RNA, 24 nt, Human
aggaaggagauauagugaagagga

SEQ ID NO: 39996 - RNA, 24 nt, Human
uccgugcgcguugcugcggccgug

SEQ ID NO: 39997 - RNA, 24 nt, Human
guagaguuuucuucaggcuuaaag

SEQ ID NO: 39998 - RNA, 24 nt, Human
uucacaguggcuaaguucugcacc

SEQ ID NO: 39999 - RNA, 22 nt, Human
uggguuggcccuuaaagggggg

SEQ ID NO: 40000 - RNA, 24 nt, Human
cuuucaucuccaaccagccgggcg

SEQ ID NO: 40001 - RNA, 22 nt, Human
ucagccaagagcaaugggcggc

SEQ ID NO: 40002 - RNA, 24 nt, Human
gugcaucgcggccaacgcgggcgg

SEQ ID NO: 40003 - RNA, 24 nt, Human
ccgcagcuucagcaccucggccca

SEQ ID NO: 40004 - RNA, 24 nt, Human
aggcaucgggcagccacuuucacu

SEQ ID NO: 40005 - RNA, 24 nt, Human
gggaauuguuguaaauaaaaaccc

SEQ ID NO: 40006 - RNA, 24 nt, Human
ucccccaguacucccagcuggugc

SEQ ID NO: 40007 - RNA, 24 nt, Human
uuggacccuugacggagauccugg

SEQ ID NO: 40008 - RNA, 24 nt, Human
cuccccauccuacacaccuccuca

SEQ ID NO: 40009 - RNA, 24 nt, Human
ucugugcugcgguguguccagggg

SEQ ID NO: 40010 - RNA, 24 nt, Human
uuuaagaaauuccuacgugggaca

SEQ ID NO: 40011 - RNA, 24 nt, Human
aggguucguucccaggaagaaagu

SEQ ID NO: 40012 - RNA, 24 nt, Human
ucgagaccuggaagcuauggccag

SEQ ID NO: 40013 - RNA, 24 nt, Human
cgcccagagaucacgcacgcggua

SEQ ID NO: 40014 - RNA, 24 nt, Human
cuucugguucuccgcuccgccucg

SEQ ID NO: 40015 - RNA, 21 nt, Human
uugacaggggaggccuuggca

SEQ ID NO: 40016 - RNA, 24 nt, Human
ucacugccaccucuccgccccgga

SEQ ID NO: 40017 - RNA, 24 nt, Human
ucccuggaucuccucccuccuccc

SEQ ID NO: 40018 - RNA, 24 nt, Human
ucccagguucacccacccaggcuu

SEQ ID NO: 40019 - RNA, 23 nt, Human
accaagauggcggccguggggcg

SEQ ID NO: 40020 - RNA, 24 nt, Human
uugaccaacugaaaauuccuccug

SEQ ID NO: 40021 - RNA, 24 nt, Human
uguaguauucguggaccauguacu

SEQ ID NO: 40022 - RNA, 24 nt, Human
uagaauggcagcaugcaggacuug

SEQ ID NO: 40023 - RNA, 24 nt, Human
uggccaggcugcagcugaaugggc

SEQ ID NO: 40024 - RNA, 24 nt, Human
uucauuggaggguugagcuuugaa

SEQ ID NO: 40025 - RNA, 24 nt, Human
uuucauguuuguguuuugacugga

SEQ ID NO: 40026 - RNA, 24 nt, Human
ucugaucuauaaaugcgguggcau

SEQ ID NO: 40027 - RNA, 24 nt, Human
ucugaucuauaaaugcgguggcau

SEQ ID NO: 40028 - RNA, 19 nt, Human
ugauuugcucccagagaac

SEQ ID NO: 40029 - RNA, 24 nt, Human
uggccaggccaccugcaccaggga

SEQ ID NO: 40030 - RNA, 24 nt, Human
gcagucccgaggggucacaggcua

SEQ ID NO: 40031 - RNA, 24 nt, Human
uggcuugggucgagcucugucaca

SEQ ID NO: 40032 - RNA, 24 nt, Human
cuuugcugcugaugcuauggcccg

SEQ ID NO: 40033 - RNA, 24 nt, Human
ugcuagugaugaucugguaauaua

SEQ ID NO: 40034 - RNA, 24 nt, Human
aggaaacggguuuuugggugcuuc

SEQ ID NO: 40035 - RNA, 24 nt, Human
uuuccagaucuacgcugugccuug

SEQ ID NO: 40036 - RNA, 24 nt, Human
uaagagguuuuuaguuuuuguuuu

SEQ ID NO: 40037 - RNA, 24 nt, Human
cuggcagacggcucgcuuuucgua

SEQ ID NO: 40038 - RNA, 24 nt, Human
ucuauggucuauuccuauucuaga

SEQ ID NO: 40039 - RNA, 24 nt, Human
uugacccaggcucuuauagauagg

SEQ ID NO: 40040 - RNA, 24 nt, Human
ugaacagacuauaacuaggaaagg

SEQ ID NO: 40041 - RNA, 24 nt, Human
aaauuucuuuuuuuuuauuuaauu

SEQ ID NO: 40042 - RNA, 20 nt, Human
cacccuuugcugcugaccuc

SEQ ID NO: 40043 - RNA, 24 nt, Human
aaggaguacucgguguuccugacc

SEQ ID NO: 40044 - RNA, 18 nt, Human
uaucaaggaagggcaggc

SEQ ID NO: 40045 - RNA, 24 nt, Human
ucaguuaaaaaagaagaagaagaa

SEQ ID NO: 40046 - RNA, 24 nt, Human
ucugaucaauccuucuuuuucucu

SEQ ID NO: 40047 - RNA, 24 nt, Human
ucaauuuuuauuuugguuuucuua

SEQ ID NO: 40048 - RNA, 24 nt, Human
uggcugggcagggcaaggcugggc

SEQ ID NO: 40049 - RNA, 24 nt, Human
uagaagaugaaauugugggaagac

SEQ ID NO: 40050 - RNA, 24 nt, Human
ugacugguaaaaacuggauauuaa

SEQ ID NO: 40051 - RNA, 24 nt, Human
uuaguacgggucuagaagccaguu

SEQ ID NO: 40052 - RNA, 24 nt, Human
gugcauccuggacugaagagugag

SEQ ID NO: 40053 - RNA, 24 nt, Human
aggaagcaaaaaaggcuaagcaag

SEQ ID NO: 40054 - RNA, 19 nt, Human
uuaaugcgaaaugcgaguc

SEQ ID NO: 40055 - RNA, 17 nt, Human
uacauggauucugaaag

SEQ ID NO: 40056 - RNA, 24 nt, Human
aacaacauugguaaaucguuuucc

SEQ ID NO: 40057 - RNA, 24 nt, Human
ucccuugcaauuguucgccccucu

SEQ ID NO: 40058 - RNA, 24 nt, Human
uaaguggaauucuucauugagucg

SEQ ID NO: 40059 - RNA, 24 nt, Human
uggcuuggggcugcacuuuggcuc

SEQ ID NO: 40060 - RNA, 24 nt, Human
aggcagggccucucugcagcugcc

SEQ ID NO: 40061 - RNA, 23 nt, Human
uacccaggugcuguggcacuaac

SEQ ID NO: 40062 - RNA, 24 nt, Human
ucagaacaaucucucuuccuuggu

SEQ ID NO: 40063 - RNA, 19 nt, Human
ugcuucagugggccccugc

SEQ ID NO: 40064 - RNA, 22 nt, Human
uauccaguguaaauuguugagc

SEQ ID NO: 40065 - RNA, 24 nt, Human
uauucaguuggauuuggauauauu

SEQ ID NO: 40066 - RNA, 24 nt, Human
uauaccauuuuuccagaugcguau

SEQ ID NO: 40067 - RNA, 24 nt, Human
uuugaucuuuccccuuuaauuuga

SEQ ID NO: 40068 - RNA, 24 nt, Human
cauccagcuugggaacccgggaca

SEQ ID NO: 40069 - RNA, 24 nt, Human
uauggucccucagaaucacaguca

SEQ ID NO: 40070 - RNA, 24 nt, Human
ucaggcucagauagcugcuggccg

SEQ ID NO: 40071 - RNA, 24 nt, Human
ugggauccugcagcucuagucucc

SEQ ID NO: 40072 - RNA, 20 nt, Human
uaaaagguacauacuauucu

SEQ ID NO: 40073 - RNA, 24 nt, Human
aaagguacauacuauucugcacuu

SEQ ID NO: 40074 - RNA, 24 nt, Human
cugugccacgcguggcugcggaag

SEQ ID NO: 40075 - RNA, 24 nt, Human
augcaggcccugugggagcccacg

SEQ ID NO: 40076 - RNA, 24 nt, Human
cacgugccucuuuacucagcgcuc

SEQ ID NO: 40077 - RNA, 24 nt, Human
uacgugguccaugcgguguucucu

SEQ ID NO: 40078 - RNA, 24 nt, Human
gagcagcagccaaguccgcgggaa

SEQ ID NO: 40079 - RNA, 23 nt, Human
uucaaccuauacaaaaaggaaaa

SEQ ID NO: 40080 - RNA, 24 nt, Human
ugccggugcgagcggggcccggcu

SEQ ID NO: 40081 - RNA, 24 nt, Human
ucacaaggucaggaguucaagacc

SEQ ID NO: 40082 - RNA, 24 nt, Human
aucacgccacugcacuccagccug

SEQ ID NO: 40083 - RNA, 24 nt, Human
ucacugaauuuggcaguuauuauu

SEQ ID NO: 40084 - RNA, 22 nt, Human
ugugccugcagaggagcugcuc

SEQ ID NO: 40085 - RNA, 24 nt, Human
uaugcaaggucaagagcggagggg

SEQ ID NO: 40086 - RNA, 20 nt, Human
cauccuggugggaccuccgc

SEQ ID NO: 40087 - RNA, 24 nt, Human
gugcuccccgguccccaccccuac

SEQ ID NO: 40088 - RNA, 24 nt, Human
uaaauguaaggaguauauauuuug

SEQ ID NO: 40089 - RNA, 24 nt, Human
uaucacaucuuuuuacuuuuaaag

SEQ ID NO: 40090 - RNA, 24 nt, Human
uauuaugucaaaagcugaagcucu

SEQ ID NO: 40091 - RNA, 24 nt, Human
uaaaacauacccacaugagauucu

SEQ ID NO: 40092 - RNA, 24 nt, Human
ugagaagacauuccccuccugcca

SEQ ID NO: 40093 - RNA, 24 nt, Human
ugccagaacuuguaucaacuugag

SEQ ID NO: 40094 - RNA, 19 nt, Human
uaacauagcauuaaggugg

SEQ ID NO: 40095 - RNA, 24 nt, Human
ggauaucgucuuucaucacguucu

SEQ ID NO: 40096 - RNA, 24 nt, Human
uuaauauaguuucacuuuuuauuu

SEQ ID NO: 40097 - RNA, 24 nt, Human
uucauuuuaaagguuaaauuauga

SEQ ID NO: 40098 - RNA, 24 nt, Human
ugucuagucuugaaguccucauuu

SEQ ID NO: 40099 - RNA, 24 nt, Human
aauugcuugaacccgggaggugga

SEQ ID NO: 40100 - RNA, 24 nt, Human
ggagcaaaucccaccuuuacccca

SEQ ID NO: 40101 - RNA, 24 nt, Human
uucugccacgcuuuaugcccuugc

SEQ ID NO: 40102 - RNA, 24 nt, Human
agugguggggaggaggacgagaag

SEQ ID NO: 40103 - RNA, 24 nt, Human
ccgcagcuucagcaccucggccca

SEQ ID NO: 40104 - RNA, 24 nt, Human
uggcaauucggacgaggaggcguu

SEQ ID NO: 40105 - RNA, 24 nt, Human
uguugcugggcuugugaucuacgu

SEQ ID NO: 40106 - RNA, 23 nt, Human
uucggggaaguaguccuugacca

SEQ ID NO: 40107 - RNA, 18 nt, Human
cacagcguuuacaaaguu

SEQ ID NO: 40108 - RNA, 24 nt, Human
uaccuguacagaauggauuacaua

SEQ ID NO: 40109 - RNA, 24 nt, Human
ggccauggaaauuaguacagaacc

SEQ ID NO: 40110 - RNA, 24 nt, Human
uggccuggucuccucuccuccuca

SEQ ID NO: 40111 - RNA, 24 nt, Human
uacugggaccaacuacaacaucgg

SEQ ID NO: 40112 - RNA, 22 nt, Human
ugugcagaagaaauggaaggau

SEQ ID NO: 40113 - RNA, 24 nt, Human
accauccuggcagcccuggcccug

SEQ ID NO: 40114 - RNA, 24 nt, Human
uggggcccacaagggggggggucc

SEQ ID NO: 40115 - RNA, 24 nt, Human
ccuccaggcccccuccacucggcc

SEQ ID NO: 40116 - RNA, 24 nt, Human
cccccggggcuucaagggcgccuc

SEQ ID NO: 40117 - RNA, 24 nt, Human
aaaccccagccucagccaguccca

SEQ ID NO: 40118 - RNA, 24 nt, Human
guuucuguaaagagaaaaauuauc

SEQ ID NO: 40119 - RNA, 24 nt, Human
uugaauguaagugcaguagaaauu

SEQ ID NO: 40120 - RNA, 24 nt, Human
uugguggcuguggucggguguugc

SEQ ID NO: 40121 - RNA, 24 nt, Human
uccagguaggaggccaggcggucg

SEQ ID NO: 40122 - RNA, 24 nt, Human
cgaggacacaaagcgggcggagga

SEQ ID NO: 40123 - RNA, 24 nt, Human
uagugcaggaaaguggugauaagc

SEQ ID NO: 40124 - RNA, 24 nt, Human
uccgcgggacuucacaccaugugc

SEQ ID NO: 40125 - RNA, 24 nt, Human
uguaugcuuucacuguaaugaauc

SEQ ID NO: 40126 - RNA, 24 nt, Human
uggaagaugcucaacaccuccucc

SEQ ID NO: 40127 - RNA, 24 nt, Human
ugugcagaagaaauggaaggauuc

SEQ ID NO: 40128 - RNA, 24 nt, Human
uaucaaggaagggcaggcgugaug

SEQ ID NO: 40129 - RNA, 24 nt, Human
uucaaauuucuuucuuuuuuaauu

SEQ ID NO: 40130 - RNA, 24 nt, Human
ucaauuuuuauuuugguuuucuua

SEQ ID NO: 40131 - RNA, 24 nt, Human
ccacugcacuccagccugggagac

SEQ ID NO: 40132 - RNA, 21 nt, Human
aacacggugaaacuccgucuc

SEQ ID NO: 40133 - RNA, 23 nt, Human
uuuaucagacauauugcaccgac

SEQ ID NO: 40134 - RNA, 24 nt, Human
uaacagguguaagaguguugaaaa

SEQ ID NO: 40135 - RNA, 24 nt, Human
uaucaaggaagggcaggcgugaug

SEQ ID NO: 40136 - RNA, 24 nt, Human
ucaguuaaaaaagaagaagaagaa

SEQ ID NO: 40137 - RNA, 24 nt, Human
ucugaucaauccuucuuuuucucu

SEQ ID NO: 40138 - RNA, 24 nt, Human
ugcauuguuaucauuaaccagucu

SEQ ID NO: 40139 - RNA, 24 nt, Human
uauuagggauaauauucauuuagc

SEQ ID NO: 40140 - RNA, 24 nt, Human
uaaugggucucaaaauucugugac

SEQ ID NO: 40141 - RNA, 24 nt, Human
gaagugaaaauuguucaguccaag

SEQ ID NO: 40142 - RNA, 24 nt, Human
uagaauagagggugaugacgguaa

SEQ ID NO: 40143 - RNA, 24 nt, Human
uaacuggaguagaguuccugguug

SEQ ID NO: 40144 - RNA, 24 nt, Human
uaaugggucucaaaauucugugac

SEQ ID NO: 40145 - RNA, 24 nt, Human
ugagcaggcugagagugacaucau

SEQ ID NO: 40146 - RNA, 24 nt, Human
aggaacaaccugacucaggcucua

SEQ ID NO: 40147 - RNA, 21 nt, Human
uuucgcauagugccaagcacc

SEQ ID NO: 40148 - RNA, 24 nt, Human
aacucugcaagacuugguagaaaa

SEQ ID NO: 40149 - RNA, 24 nt, Human
gacuuguuguuucuucaaaacuuu

SEQ ID NO: 40150 - RNA, 23 nt, Human
uagaauucggcugugaauccauc

SEQ ID NO: 40151 - RNA, 24 nt, Human
augguauuucugguucuagauccu

SEQ ID NO: 40152 - RNA, 24 nt, Human
uaguacagaaggaaugguaccagu

SEQ ID NO: 40153 - RNA, 24 nt, Human
uacugugaauagugccgcaauaaa

SEQ ID NO: 40154 - RNA, 21 nt, Human
uuucugguucuagauccuugg

SEQ ID NO: 40155 - RNA, 24 nt, Human
ucuuugcuauugugaauagugccg

SEQ ID NO: 40156 - RNA, 21 nt, Human
uuucugguucuagauccuugg

SEQ ID NO: 40157 - RNA, 19 nt, Human
augcaugucaaugggaguu

SEQ ID NO: 40158 - RNA, 24 nt, Human
uguagagucaugccaguucuuagg

SEQ ID NO: 40159 - RNA, 24 nt, Human
uggaaugccgacauguggccuuuc

SEQ ID NO: 40160 - RNA, 24 nt, Human
ucgcagaaugggcugacucggagc

SEQ ID NO: 40161 - RNA, 24 nt, Human
aguggaaucauacaguauuugucu

SEQ ID NO: 40162 - RNA, 24 nt, Human
uuaauggucagcuuuucauguuua

SEQ ID NO: 40163 - RNA, 24 nt, Human
uccacgguggcugcaggcacaugc

SEQ ID NO: 40164 - RNA, 24 nt, Human
uucaugaggggccguagcuugagc

SEQ ID NO: 40165 - RNA, 24 nt, Human
ucccccugcucuaggccaaggugg

SEQ ID NO: 40166 - RNA, 24 nt, Human
agagggaagcccagggguccuguu

SEQ ID NO: 40167 - RNA, 24 nt, Human
gacugcuugcaauccuugacuagu

SEQ ID NO: 40168 - RNA, 24 nt, Human
gagcuuguuuuccugcaacuagac

SEQ ID NO: 40169 - RNA, 24 nt, Human
uaaggagcgugcaaccuacauccc

SEQ ID NO: 40170 - RNA, 24 nt, Human
agaaagacuuaagggagcagaggg

SEQ ID NO: 40171 - RNA, 24 nt, Human
uauaucucauaagagcaaagauac

SEQ ID NO: 40172 - RNA, 24 nt, Human
caggguccaauucaagauuacucu

SEQ ID NO: 40173 - RNA, 24 nt, Human
cuugcuuuaauaccugcuucuggc

SEQ ID NO: 40174 - RNA, 24 nt, Human
ucagaacgguuauacucaaaaaca

SEQ ID NO: 40175 - RNA, 24 nt, Human
gggcacugaagaugaugcgaccca

SEQ ID NO: 40176 - RNA, 24 nt, Human
uacagugcuuguaaaagguuugaa

SEQ ID NO: 40177 - RNA, 22 nt, Human
ucccuaaagaaaaagaugaaaa

SEQ ID NO: 40178 - RNA, 24 nt, Human
uaacuugauuuuuuacuauuauaa

SEQ ID NO: 40179 - RNA, 24 nt, Human
uguuguugaauucaagauggaaga

SEQ ID NO: 40180 - RNA, 18 nt, Human
ucccaugaaaugaaauua

SEQ ID NO: 40181 - RNA, 24 nt, Human
uagaucauuuauugaagacauacu

SEQ ID NO: 40182 - RNA, 24 nt, Human
uagguaaauaacucaauggacaac

SEQ ID NO: 40183 - RNA, 24 nt, Human
ucgaauggacacauuaccagugaa

SEQ ID NO: 40184 - RNA, 24 nt, Human
ggacagguguacagacauguuucu

SEQ ID NO: 40185 - RNA, 24 nt, Human
agagugaagaagagguuuucuuug

SEQ ID NO: 40186 - RNA, 24 nt, Human
uucaaauuucuuucuuuuuuaauu

SEQ ID NO: 40187 - RNA, 19 nt, Human
ucaguguccacagcgcaug

SEQ ID NO: 40188 - RNA, 24 nt, Human
ugaguacuuggccccggucacgcg

SEQ ID NO: 40189 - RNA, 24 nt, Human
acuuuuguggccuuuuuuccuuuu

SEQ ID NO: 40190 - RNA, 24 nt, Human
uuagugcccacucgcuagaugguu

SEQ ID NO: 40191 - RNA, 24 nt, Human
ugcgcgcgcacaugagcgcgugcu

SEQ ID NO: 40192 - RNA, 24 nt, Human
acgaaccgguguacacuugucagg

SEQ ID NO: 40193 - RNA, 24 nt, Human
uuggaacuaugaaaagcucuucuc

SEQ ID NO: 40194 - RNA, 24 nt, Human
uaguuugauuguagaaaucacauc

SEQ ID NO: 40195 - RNA, 24 nt, Human
uuuuacagccacuccagauuugua

SEQ ID NO: 40196 - RNA, 24 nt, Human
uccacuggcgaaagaugccuuucu

SEQ ID NO: 40197 - RNA, 24 nt, Human
uaguucagauugaucuuaggucaa

SEQ ID NO: 40198 - RNA, 24 nt, Human
acgcgcaaauucugaccaguccuc

SEQ ID NO: 40199 - RNA, 24 nt, Human
uagagccacuguugguauuuugau

SEQ ID NO: 40200 - RNA, 24 nt, Human
ugagauuuuagacagugauguuuu

SEQ ID NO: 40201 - RNA, 24 nt, Human
cagugcccacguuguuguauuccc

SEQ ID NO: 40202 - RNA, 24 nt, Human
cuuggcacaggucacuugcacaua

SEQ ID NO: 40203 - RNA, 24 nt, Human
uguggcuuucauuaauauaguucu

SEQ ID NO: 40204 - RNA, 24 nt, Human
ucucugaggagaccucacccacuc

SEQ ID NO: 40205 - RNA, 24 nt, Human
uaaaauaaagggaagacgcugcug

SEQ ID NO: 40206 - RNA, 24 nt, Human
uggaagaugcucaacaccuccucc

SEQ ID NO: 40207 - RNA, 24 nt, Human
ugggggccccccgcacccacaggg

SEQ ID NO: 40208 - RNA, 24 nt, Human
uaugaucaagguucacacaguuaa

SEQ ID NO: 40209 - RNA, 24 nt, Human
gggccauggguagggguuuggggg

SEQ ID NO: 40210 - RNA, 24 nt, Human
uaaggcacguucuuuccuuacugg

SEQ ID NO: 40211 - RNA, 24 nt, Human
ucuguccucuucucugcauaccgu

SEQ ID NO: 40212 - RNA, 24 nt, Human
agagauugaagacgggugggcaca

SEQ ID NO: 40213 - RNA, 24 nt, Human
uagcugaguucaugguugcuugaa

SEQ ID NO: 40214 - RNA, 24 nt, Human
uucaugcaaugguuguucuagaaa

SEQ ID NO: 40215 - RNA, 24 nt, Human
aaguguauuauugcauuuuuuaag

SEQ ID NO: 40216 - RNA, 24 nt, Human
cguaaagaaaauuauuugucuuuu

SEQ ID NO: 40217 - RNA, 24 nt, Human
ugccacgggaccauggaacagugc

SEQ ID NO: 40218 - RNA, 24 nt, Human
uaccaccagaguaguaauuuucca

SEQ ID NO: 40219 - RNA, 24 nt, Human
guggaucguguuuauggugaaucc

SEQ ID NO: 40220 - RNA, 21 nt, Human
uaagguaagguaaauuucaug

SEQ ID NO: 40221 - RNA, 24 nt, Human
uuuaauagagugaaaacagagcuc

SEQ ID NO: 40222 - RNA, 24 nt, Human
aaaguacuugccgcucuaccccug

SEQ ID NO: 40223 - RNA, 24 nt, Human
cuccauggccaaagcgagagcauu

SEQ ID NO: 40224 - RNA, 24 nt, Human
gucaagaagugaagacagaugguc

SEQ ID NO: 40225 - RNA, 24 nt, Human
agggagggaagcacagugggcagg

SEQ ID NO: 40226 - RNA, 24 nt, Human
guacauugagcgccaugcuuagcu

SEQ ID NO: 40227 - RNA, 24 nt, Human
uauccucgauagaaguaaggguca

SEQ ID NO: 40228 - RNA, 24 nt, Human
uaacaaaauauuucaccuuuucug

SEQ ID NO: 40229 - RNA, 24 nt, Human
ucuuuugugagcagugagugccua

SEQ ID NO: 40230 - RNA, 24 nt, Human
ugggauccuggguccugaggccuu

SEQ ID NO: 40231 - RNA, 24 nt, Human
ucuauaaucuauccugccaucagg

SEQ ID NO: 40232 - RNA, 24 nt, Human
uggaacuuuauuuuguuuaucagu

SEQ ID NO: 40233 - RNA, 24 nt, Human
uauuuggaauuuauauacaaccug

SEQ ID NO: 40234 - RNA, 24 nt, Human
caaccccacaacucuaagguucug

SEQ ID NO: 40235 - RNA, 24 nt, Human
ccugcugguuuccuccuuccacgc

SEQ ID NO: 40236 - RNA, 24 nt, Human
gugguuccuagacucacuuugugc

SEQ ID NO: 40237 - RNA, 24 nt, Human
caccugauucuauaggccaugugc

SEQ ID NO: 40238 - RNA, 24 nt, Human
ucaagguuuaauuuugcuuuaauc

SEQ ID NO: 40239 - RNA, 24 nt, Human
acgcaguagccauaaugccacacc

SEQ ID NO: 40240 - RNA, 24 nt, Human
uugguaguuggcuauggauuuucu

SEQ ID NO: 40241 - RNA, 24 nt, Human
gaucacucugcucugauuauggaa

SEQ ID NO: 40242 - RNA, 24 nt, Human
ucaguuaaaaaagaagaagaagaa

SEQ ID NO: 40243 - RNA, 24 nt, Human
ugaaucggccaacgcgcggggaga

SEQ ID NO: 40244 - RNA, 24 nt, Human
cggcugcggcgagcgguaucagcu

SEQ ID NO: 40245 - RNA, 24 nt, Human
ucaauaguuuaaguaacauuacaa

SEQ ID NO: 40246 - RNA, 20 nt, Human
ucaguaggaguuauaauacc

SEQ ID NO: 40247 - RNA, 23 nt, Human
ucuccaaguaacacaucaaguac

SEQ ID NO: 40248 - RNA, 24 nt, Human
uauaacccaaacuuuuuuuuuuuu

SEQ ID NO: 40249 - RNA, 24 nt, Human
uacuuagucacggggaugguggaa

SEQ ID NO: 40250 - RNA, 24 nt, Human
ugagcaguguaugucaggacuugu

SEQ ID NO: 40251 - RNA, 24 nt, Human
uagagcuagugaauuagccuauuu

SEQ ID NO: 40252 - RNA, 24 nt, Human
caaucauugaauacaaaacaaaua

SEQ ID NO: 40253 - RNA, 24 nt, Human
uacauggaugaggagacuggcaac

SEQ ID NO: 40254 - RNA, 24 nt, Human
cacccuacaaacaggcccccuaca

SEQ ID NO: 40255 - RNA, 24 nt, Human
uggaaaauaauggcaauuuauuaa

SEQ ID NO: 40256 - RNA, 24 nt, Human
ucucuugucuuuuuacuuagcaaa

SEQ ID NO: 40257 - RNA, 24 nt, Human
uuuaauauauuuguuggccagaga

SEQ ID NO: 40258 - RNA, 24 nt, Human
ucaaagaaguaagauggugaaaau

SEQ ID NO: 40259 - RNA, 24 nt, Human
uagguuagaauguaaauuaaagug

SEQ ID NO: 40260 - RNA, 24 nt, Human
ugacuuguaguaagcagguuucug

SEQ ID NO: 40261 - RNA, 24 nt, Human
ugcccagcugggcuggaaaaccgg

SEQ ID NO: 40262 - RNA, 24 nt, Human
ucuuuccagaaaauccaaguccgg

SEQ ID NO: 40263 - RNA, 24 nt, Human
ucucccaggcucuucuggagcugg

SEQ ID NO: 40264 - RNA, 24 nt, Human
ugcgggaaaugggggggucugaaa

SEQ ID NO: 40265 - RNA, 24 nt, Human
uaaccaaaaacauaaagcgauaau

SEQ ID NO: 40266 - RNA, 23 nt, Human
guccagagccucgucguccacug

SEQ ID NO: 40267 - RNA, 24 nt, Human
uaacacaagcauguggcucaucac

SEQ ID NO: 40268 - RNA, 24 nt, Human
aagcagccucuugucacagguuga

SEQ ID NO: 40269 - RNA, 23 nt, Human
uauucuggauguaauaucucugu

SEQ ID NO: 40270 - RNA, 24 nt, Human
acauguggcaaugggaugauucuc

SEQ ID NO: 40271 - RNA, 24 nt, Human
aagggcucacgagucgaaauauca

SEQ ID NO: 40272 - RNA, 24 nt, Human
uauugcguaauuccuuucaaauac

SEQ ID NO: 40273 - RNA, 24 nt, Human
aagcauauuuuucagcaaguacag

SEQ ID NO: 40274 - RNA, 24 nt, Human
ugguggaggaggguaaauauguca

SEQ ID NO: 40275 - RNA, 24 nt, Human
gaacaagagaaauaacugcagaaa

SEQ ID NO: 40276 - RNA, 24 nt, Human
uaaguucuguucaaggcaagaagu

SEQ ID NO: 40277 - RNA, 24 nt, Human
uauaaaacacuuauacagauaaau

SEQ ID NO: 40278 - RNA, 24 nt, Human
uugccagucugcucauccauguau

SEQ ID NO: 40279 - RNA, 24 nt, Human
uucaaauuucuuucuuuuuuaauu

SEQ ID NO: 40280 - RNA, 24 nt, Human
ucaauuuuuauuuugguuuucuua

SEQ ID NO: 40281 - RNA, 24 nt, Human
gcucauuugcaggggggagccaaa

SEQ ID NO: 40282 - RNA, 24 nt, Human
uauuagggauaauauucauuuagc

SEQ ID NO: 40283 - RNA, 24 nt, Human
uaaugggucucaaaauucugugac

SEQ ID NO: 40284 - RNA, 24 nt, Human
aucgagcauuucuggagggagcug

SEQ ID NO: 40285 - RNA, 24 nt, Human
uucagcuccaucaccauccuggag

SEQ ID NO: 40286 - RNA, 24 nt, Human
ugggaagggaugaucucugucucu

SEQ ID NO: 40287 - RNA, 24 nt, Human
uugaacagccgccuggaggagcag

SEQ ID NO: 40288 - RNA, 24 nt, Human
ugaaaguggcuguucuccugccuu

SEQ ID NO: 40289 - RNA, 17 nt, Human
ugaacagucugcaguca

SEQ ID NO: 40290 - RNA, 24 nt, Human
aagcugcaaaccauuuagggaguc

SEQ ID NO: 40291 - RNA, 24 nt, Human
uguaaauugcuuaaaucgcuuaaa

SEQ ID NO: 40292 - RNA, 24 nt, Human
uguuagucaagaguccucaguagg

SEQ ID NO: 40293 - RNA, 24 nt, Human
uaaaugguaaacgugauaucauga

SEQ ID NO: 40294 - RNA, 24 nt, Human
ucauggacuaaacuaggucaaagu

SEQ ID NO: 40295 - RNA, 22 nt, Human
gucaauauccauaaaugaaggg

SEQ ID NO: 40296 - RNA, 24 nt, Human
uacaugauuggcuugcccaauaca

SEQ ID NO: 40297 - RNA, 24 nt, Human
cuucaagugagccuccugccucug

SEQ ID NO: 40298 - RNA, 24 nt, Human
ucccaaaggccggcaagauggugu

SEQ ID NO: 40299 - RNA, 24 nt, Human
agccggugcugguggcccggcgcg

SEQ ID NO: 40300 - RNA, 24 nt, Human
ugagaucaagauggccuucgugcu

SEQ ID NO: 40301 - RNA, 24 nt, Human
uguacuggauuguuuuugcacucu

SEQ ID NO: 40302 - RNA, 24 nt, Human
uucacauuuaauacaaacuuucuu

SEQ ID NO: 40303 - RNA, 24 nt, Human
uaguaguaaggagaaucuuaaauc

SEQ ID NO: 40304 - RNA, 24 nt, Human
ugggaacugaugaggagaguaaca

SEQ ID NO: 40305 - RNA, 24 nt, Human
ggagaacaguccccugguacacug

SEQ ID NO: 40306 - RNA, 24 nt, Human
uaggagaagaaauaugggguaaaa

SEQ ID NO: 40307 - RNA, 24 nt, Human
uaggguguuaaucuuuaugugaaa

SEQ ID NO: 40308 - RNA, 24 nt, Human
aucagguuccguuuggggcccguc

SEQ ID NO: 40309 - RNA, 24 nt, Human
uggaagccacacacagcccgguug

SEQ ID NO: 40310 - RNA, 24 nt, Human
uggcaggcuggcgcuggcaggcag

SEQ ID NO: 40311 - RNA, 24 nt, Human
uauuugaaggcagaaaacacccua

SEQ ID NO: 40312 - RNA, 24 nt, Human
cguuggccgagggggccguacgga

SEQ ID NO: 40313 - RNA, 24 nt, Human
aaaggugcucauuuagagauucua

SEQ ID NO: 40314 - RNA, 24 nt, Human
acuggcaugaggacuauuggucuu

SEQ ID NO: 40315 - RNA, 18 nt, Human
uguggaggaucaaggcug

SEQ ID NO: 40316 - RNA, 24 nt, Human
acuggauucggaaugugcugauuu

SEQ ID NO: 40317 - RNA, 24 nt, Human
uccacagaaaacauccuggggucc

SEQ ID NO: 40318 - RNA, 24 nt, Human
ggccauggucucacacuagugcug

SEQ ID NO: 40319 - RNA, 24 nt, Human
ucgccaaucuggucggcauggcgg

SEQ ID NO: 40320 - RNA, 24 nt, Human
ccagcagugaguaucccuguugca

SEQ ID NO: 40321 - RNA, 24 nt, Human
aggcaguaccauacuuggaguuca

SEQ ID NO: 40322 - RNA, 24 nt, Human
acugcaguuuauuggacgugcguu

SEQ ID NO: 40323 - RNA, 24 nt, Human
ucugcacgacgcacuggcccagga

SEQ ID NO: 40324 - RNA, 24 nt, Human
ugaaggacgagcgugugcccaaga

SEQ ID NO: 40325 - RNA, 24 nt, Human
ucaguuaaaaaagaagaagaagaa

SEQ ID NO: 40326 - RNA, 24 nt, Human
uggcuuauuuguuuuguauucaau

SEQ ID NO: 40327 - RNA, 21 nt, Human
agacuagacucuauuauuauu

SEQ ID NO: 40328 - RNA, 24 nt, Human
ucucacucuguugcccagacugga

SEQ ID NO: 40329 - RNA, 24 nt, Human
ugagaacuaugcccaagguggucg

SEQ ID NO: 40330 - RNA, 24 nt, Human
uccagguuacagguagauuuaaaa

SEQ ID NO: 40331 - RNA, 24 nt, Human
uuccaggccuguguuguguggagg

SEQ ID NO: 40332 - RNA, 24 nt, Human
ugagggaucuuuacugaacgcagc

SEQ ID NO: 40333 - RNA, 24 nt, Human
ugaggacugggacagguacgugca

SEQ ID NO: 40334 - RNA, 24 nt, Human
uaugaggaguuaugccuaacaacu

SEQ ID NO: 40335 - RNA, 20 nt, Human
ucccgggguaaucacucccc

SEQ ID NO: 40336 - RNA, 24 nt, Human
uaaauuuucaguuucuacacacuu

SEQ ID NO: 40337 - RNA, 24 nt, Human
uuaguucugucaugccaggaauuu

SEQ ID NO: 40338 - RNA, 24 nt, Human
uugaugcugagauccauauuuagu

SEQ ID NO: 40339 - RNA, 21 nt, Human
cacuguauagcaggagaaaac

SEQ ID NO: 40340 - RNA, 24 nt, Human
ugggcacuccaguaaaaaugacau

SEQ ID NO: 40341 - RNA, 22 nt, Human
ucuaguguugucuugaucaaga

SEQ ID NO: 40342 - RNA, 24 nt, Human
cacacccaaacaaacccaagucaa

SEQ ID NO: 40343 - RNA, 24 nt, Human
uaauaggauggcaucuaauauuuu

SEQ ID NO: 40344 - RNA, 24 nt, Human
cgugcagacucgacagcaccugaa

SEQ ID NO: 40345 - RNA, 24 nt, Human
cuuuuccaugacugacauuuuuca

SEQ ID NO: 40346 - RNA, 24 nt, Human
cgcccgugccggagccgcccaagg

SEQ ID NO: 40347 - RNA, 24 nt, Human
uuaguccuauggagaacguccaug

SEQ ID NO: 40348 - RNA, 24 nt, Human
acccggaaguuagacuugcgacua

SEQ ID NO: 40349 - RNA, 24 nt, Human
cugcgggaggugcagacccugcgc

SEQ ID NO: 40350 - RNA, 24 nt, Human
ucuguagucaucacaggcuucccu

SEQ ID NO: 40351 - RNA, 24 nt, Human
uuaaugaagggauuaaguucauaa

SEQ ID NO: 40352 - RNA, 24 nt, Human
ugacuggucgauccucuuuauggc

SEQ ID NO: 40353 - RNA, 23 nt, Human
uaucaaagaaguuuguauggcuu

SEQ ID NO: 40354 - RNA, 24 nt, Human
uggaagguaaauauauguuaagaa

SEQ ID NO: 40355 - RNA, 24 nt, Human
uacuuuugcuuuuuauagugauua

SEQ ID NO: 40356 - RNA, 24 nt, Human
uacauagucauauacguaacaucu

SEQ ID NO: 40357 - RNA, 24 nt, Human
uauguaauauauaacuauaugacc

SEQ ID NO: 40358 - RNA, 24 nt, Human
uucaguuugaguuuagugaaaaaa

SEQ ID NO: 40359 - RNA, 24 nt, Human
caggagccacccagcugguccagc

SEQ ID NO: 40360 - RNA, 24 nt, Human
cugguccuugcaugugggcagcag

SEQ ID NO: 40361 - RNA, 24 nt, Human
gccacaauauuccuuuaagccaaa

SEQ ID NO: 40362 - RNA, 24 nt, Human
uugacuguacuucuauauccauga

SEQ ID NO: 40363 - RNA, 24 nt, Human
uggaaugugcaaaagaaaucaauu

SEQ ID NO: 40364 - RNA, 24 nt, Human
cugaagauacucaggguaaaaaga

SEQ ID NO: 40365 - RNA, 24 nt, Human
uccaguguagguggagaaacuucu

SEQ ID NO: 40366 - RNA, 24 nt, Human
uggcucucuuauauauuucuuuau

SEQ ID NO: 40367 - RNA, 24 nt, Human
ugagagcccugcagugugccugcg

SEQ ID NO: 40368 - RNA, 24 nt, Human
ugccggaggaguggucgcaugugg

SEQ ID NO: 40369 - RNA, 23 nt, Human
ugcguggaagaauacaccggggc

SEQ ID NO: 40370 - RNA, 24 nt, Human
guggagcaggcugaggcucugaag

SEQ ID NO: 40371 - RNA, 24 nt, Human
uggcauagugaaggcccugaaugu

SEQ ID NO: 40372 - RNA, 24 nt, Human
guggugcuccucauggaaccuugc

SEQ ID NO: 40373 - RNA, 24 nt, Human
ucuaccagaaagaacagugcccug

SEQ ID NO: 40374 - RNA, 23 nt, Human
guuacagaggcucaccugguggu

SEQ ID NO: 40375 - RNA, 24 nt, Human
cuuuaaguccucaucuucuuccuc

SEQ ID NO: 40376 - RNA, 24 nt, Human
uugaaacauucauuguuugcauuu

SEQ ID NO: 40377 - RNA, 24 nt, Human
uaguauagagauguggauguaguc

SEQ ID NO: 40378 - RNA, 24 nt, Human
ugagagccaugugcaagaggacag

SEQ ID NO: 40379 - RNA, 24 nt, Human
accuggguggauggagccgugcgu

SEQ ID NO: 40380 - RNA, 24 nt, Human
cuggcccgcaagggcccguggcug

SEQ ID NO: 40381 - RNA, 24 nt, Human
uugaucuugaagaaacugggcgug

SEQ ID NO: 40382 - RNA, 24 nt, Human
gcgcguugcugcggccgugguccg

SEQ ID NO: 40383 - RNA, 24 nt, Human
guagaguuuucuucaggcuuaaag

SEQ ID NO: 40384 - RNA, 24 nt, Human
ggacagguguggccagcuccagca

SEQ ID NO: 40385 - RNA, 24 nt, Human
ugggguucuugaaaacauuggaga

SEQ ID NO: 40386 - RNA, 21 nt, Human
cguuguacuuggucuugcccc

SEQ ID NO: 40387 - RNA, 24 nt, Human
aagcaggugcggcugccccaggac

SEQ ID NO: 40388 - RNA, 24 nt, Human
aagaugccgcauuuggauuggaug

SEQ ID NO: 40389 - RNA, 24 nt, Human
uauagagauuacuggcuuuaacag

SEQ ID NO: 40390 - RNA, 24 nt, Human
ugccaagggcagcugcugaccgcc

SEQ ID NO: 40391 - RNA, 24 nt, Human
ugccagaacuguaucaacuugagg

SEQ ID NO: 40392 - RNA, 19 nt, Human
uaacauagcauuaaggugg

SEQ ID NO: 40393 - RNA, 24 nt, Human
ggauaucgucuuucaucacguucu

SEQ ID NO: 40394 - RNA, 24 nt, Human
uauuuuauuuaaauaaggggaagc

SEQ ID NO: 40395 - RNA, 21 nt, Human
ugaaaggauuagagaaggauu

SEQ ID NO: 40396 - RNA, 24 nt, Human
ugaaagcccuggacaugaauucau

SEQ ID NO: 40397 - RNA, 24 nt, Human
acgggguuucaccauguugguuag

SEQ ID NO: 40398 - RNA, 24 nt, Human
uagagugcagauggcaugaucuca

SEQ ID NO: 40399 - RNA, 23 nt, Human
uucacauucauauacucccgcau

SEQ ID NO: 40400 - RNA, 18 nt, Human
ugaccaggccaggcugcu

SEQ ID NO: 40401 - RNA, 24 nt, Human
aggcauagaaggcgaagugguaga

SEQ ID NO: 40402 - RNA, 18 nt, Human
ucccuggugcagcuguac

SEQ ID NO: 40403 - RNA, 23 nt, Human
uuccugaccccugagaaagcagg

SEQ ID NO: 40404 - RNA, 24 nt, Human
uggcugucauuucacaagagcauc

SEQ ID NO: 40405 - RNA, 24 nt, Human
uccaucagacucuucacaacuauu

SEQ ID NO: 40406 - RNA, 24 nt, Human
augcuuacuuuuuguaauuguaac

SEQ ID NO: 40407 - RNA, 24 nt, Human
ugugugggagaucacugcggcgga

SEQ ID NO: 40408 - RNA, 24 nt, Human
gaggaccccgggccgcaggccccu

SEQ ID NO: 40409 - RNA, 24 nt, Human
agagugcgcugaccauccagcuga

SEQ ID NO: 40410 - RNA, 24 nt, Human
ggaguacagcgccaugcgggacca

SEQ ID NO: 40411 - RNA, 24 nt, Human
caccaguacagggagcagaucaaa

SEQ ID NO: 40412 - RNA, 24 nt, Human
uacaccaaccaagugggguggaua

SEQ ID NO: 40413 - RNA, 24 nt, Human
uggugcgagcaugugcguucagag

SEQ ID NO: 40414 - RNA, 24 nt, Human
ucacugcaaccuccgccuccuggg

SEQ ID NO: 40415 - RNA, 24 nt, Human
cuuggccuuggccuuggccuuggc

SEQ ID NO: 40416 - RNA, 24 nt, Human
cauuguuggccugcaucuucuuua

SEQ ID NO: 40417 - RNA, 24 nt, Human
gagcuugcggcugacacccuuugg

SEQ ID NO: 40418 - RNA, 24 nt, Human
cgagguuccuugggucauggugcc

SEQ ID NO: 40419 - RNA, 24 nt, Human
uacauggaugggcggggagguaac

SEQ ID NO: 40420 - RNA, 24 nt, Human
ugugugcgccgcucagugagaaca

SEQ ID NO: 40421 - RNA, 24 nt, Human
uuggucgauagcaaauauguagug

SEQ ID NO: 40422 - RNA, 17 nt, Human
ugggaaggugauacugu

SEQ ID NO: 40423 - RNA, 24 nt, Human
uuggaacuaccaagcauguggcuc

SEQ ID NO: 40424 - RNA, 24 nt, Human
uucauguguuagaacgggggcugg

SEQ ID NO: 40425 - RNA, 24 nt, Human
uuguaagaguggaauuaacugccc

SEQ ID NO: 40426 - RNA, 24 nt, Human
ccaguacagaucguuucucaucuc

SEQ ID NO: 40427 - RNA, 24 nt, Human
caugucaccuuucacccagcaaua

SEQ ID NO: 40428 - RNA, 24 nt, Human
uacccuuggaagaauuaugaauuu

SEQ ID NO: 40429 - RNA, 24 nt, Human
uucgacuuccuacagauuugacag

SEQ ID NO: 40430 - RNA, 24 nt, Human
ucagauggaacuggaagauguaug

SEQ ID NO: 40431 - RNA, 24 nt, Human
ugaagaaauuuauaguacccuacu

SEQ ID NO: 40432 - RNA, 24 nt, Human
accggaagggcagaauuuauuuuu

SEQ ID NO: 40433 - RNA, 24 nt, Human
ucagccuucauuuguucguggaug

SEQ ID NO: 40434 - RNA, 24 nt, Human
uagccagcaggauggaguccacgg

SEQ ID NO: 40435 - RNA, 19 nt, Human
uaagcuagccaccuucccc

SEQ ID NO: 40436 - RNA, 24 nt, Human
cagcagcacgugguucucguaagg

SEQ ID NO: 40437 - RNA, 24 nt, Human
ucuaauggcuuaccgagacagcuc

SEQ ID NO: 40438 - RNA, 24 nt, Human
aggaggccuuccgcacccgggaag

SEQ ID NO: 40439 - RNA, 24 nt, Human
ugaguucauaaguagugguuauag

SEQ ID NO: 40440 - RNA, 24 nt, Human
ucugcacaagcuggaaguguccuu

SEQ ID NO: 40441 - RNA, 24 nt, Human
ucuggauucgguucuuggcuggga

SEQ ID NO: 40442 - RNA, 24 nt, Human
ugguguggcgcauagugcagagcc

SEQ ID NO: 40443 - RNA, 24 nt, Human
acagcaaaguguggugcgaucucu

SEQ ID NO: 40444 - RNA, 24 nt, Human
aaugugacaugaauuauggaguag

SEQ ID NO: 40445 - RNA, 24 nt, Human
uuucucaguacaaagaauccguga

SEQ ID NO: 40446 - RNA, 24 nt, Human
uacauggaagaguauauaugggaa

SEQ ID NO: 40447 - RNA, 24 nt, Human
cacccugaagugcagaggguugcu

SEQ ID NO: 40448 - RNA, 24 nt, Human
uggcaagucacuuggugcccgggg

SEQ ID NO: 40449 - RNA, 24 nt, Human
ugaggaggaggaagaugaugauga

SEQ ID NO: 40450 - RNA, 23 nt, Human
ggugcagaccugcuuggaggccc

SEQ ID NO: 40451 - RNA, 24 nt, Human
cauugccuuauuucugcuagauca

SEQ ID NO: 40452 - RNA, 21 nt, Human
acccugagugugacgggaagg

SEQ ID NO: 40453 - RNA, 24 nt, Human
aagcagaaagggaagagaagcgag

SEQ ID NO: 40454 - RNA, 24 nt, Human
uucccaugccccaggcuccugcag

SEQ ID NO: 40455 - RNA, 24 nt, Human
auaguucuguuaauaacccacugu

SEQ ID NO: 40456 - RNA, 24 nt, Human
acugucucugccucuucccggaga

SEQ ID NO: 40457 - RNA, 24 nt, Human
uggaaggugacuuuaucaccuuaa

SEQ ID NO: 40458 - RNA, 24 nt, Human
uaaaaagcaugucgugauguacac

SEQ ID NO: 40459 - RNA, 24 nt, Human
cuacugcaaccucugccucccggg

SEQ ID NO: 40460 - RNA, 24 nt, Human
ucccuuaccuacauuguuccaaca

SEQ ID NO: 40461 - RNA, 24 nt, Human
aagcccuacgcauuauauagagga

SEQ ID NO: 40462 - RNA, 24 nt, Human
cuuugguaguuccuggaaaucauc

SEQ ID NO: 40463 - RNA, 19 nt, Human
gagcuuccagcagcugcuc

SEQ ID NO: 40464 - RNA, 20 nt, Human
uaaaaccagccugcaguaga

SEQ ID NO: 40465 - RNA, 24 nt, Human
ggguauggcucugcuccuuccugu

SEQ ID NO: 40466 - RNA, 24 nt, Human
ugucauaggcaucgacgaggggca

SEQ ID NO: 40467 - RNA, 24 nt, Human
uacacacugaacuggcaauaacau

SEQ ID NO: 40468 - RNA, 24 nt, Human
uaugugugugugugugugugugua

SEQ ID NO: 40469 - RNA, 24 nt, Human
cuagguccuuucuugaaagacucu

SEQ ID NO: 40470 - RNA, 24 nt, Human
aagguuuccuugagcuauuguuuu

SEQ ID NO: 40471 - RNA, 24 nt, Human
acuugcugccauugacuucuggcc

SEQ ID NO: 40472 - RNA, 24 nt, Human
aguugcuccagaaaaaccuguaaa

SEQ ID NO: 40473 - RNA, 24 nt, Human
uaaugggucucaaaauucugugac

SEQ ID NO: 40474 - RNA, 24 nt, Human
acuacuuccuauaaauuucuccug

SEQ ID NO: 40475 - RNA, 24 nt, Human
uaucauggaauuagaugacacuuu

SEQ ID NO: 40476 - RNA, 24 nt, Human
uucuaggucagucuaacaguuugc

SEQ ID NO: 40477 - RNA, 24 nt, Human
uaucagaguauauacacaugaggu

SEQ ID NO: 40478 - RNA, 24 nt, Human
gagcaugcaucuucucggugagcc

SEQ ID NO: 40479 - RNA, 24 nt, Human
uuccaaaauccacagauccaaaga

SEQ ID NO: 40480 - RNA, 24 nt, Human
ugaccuguguuggugggagaugac

SEQ ID NO: 40481 - RNA, 24 nt, Human
acagguacauagguaaccaaagua

SEQ ID NO: 40482 - RNA, 24 nt, Human
augcgcuugugaauguugauggug

SEQ ID NO: 40483 - RNA, 24 nt, Human
gaacccaggucacugcuggggcga

SEQ ID NO: 40484 - RNA, 24 nt, Human
ugggaaggaacacaggccuccagc

SEQ ID NO: 40485 - RNA, 24 nt, Human
acuacaggugcaugccacccauuu

SEQ ID NO: 40486 - RNA, 24 nt, Human
ucuuccucugucgcccaggcugga

SEQ ID NO: 40487 - RNA, 18 nt, Human
gauuacggaugugagcca

SEQ ID NO: 40488 - RNA, 24 nt, Human
ucuggcauauauuagcugugugac

SEQ ID NO: 40489 - RNA, 24 nt, Human
cauggaacuuggccucaguacguc

SEQ ID NO: 40490 - RNA, 24 nt, Human
ugagaggaaguuagaggggcuaga

SEQ ID NO: 40491 - RNA, 24 nt, Human
uacauggacaccggcgaggagauc

SEQ ID NO: 40492 - RNA, 19 nt, Human
ucagcagaugccaccacuu

SEQ ID NO: 40493 - RNA, 24 nt, Human
uuccuugcagugucaugggaagug

SEQ ID NO: 40494 - RNA, 24 nt, Human
uguuuuguuuuuugguaucacuua

SEQ ID NO: 40495 - RNA, 24 nt, Human
gucgccugagacccuccugagggg

SEQ ID NO: 40496 - RNA, 24 nt, Human
uuccauggggauccgcaguccaga

SEQ ID NO: 40497 - RNA, 24 nt, Human
aguggaguucgcugcgcgcuguug

SEQ ID NO: 40498 - RNA, 24 nt, Human
uucccuuuaaggggggggaaaugc

SEQ ID NO: 40499 - RNA, 24 nt, Human
acccgguggccgcccggaccugcu

SEQ ID NO: 40500 - RNA, 24 nt, Human
guuguccccucgccaaagggacgg

SEQ ID NO: 40501 - RNA, 24 nt, Human
uggcgccgccuguaccugaaaugc

SEQ ID NO: 40502 - RNA, 24 nt, Human
aagcauaguguaguggagaugauc

SEQ ID NO: 40503 - RNA, 24 nt, Human
ugagaacauauaacugggcguccc

SEQ ID NO: 40504 - RNA, 24 nt, Human
uaagcguaaauucccccguccaca

SEQ ID NO: 40505 - RNA, 24 nt, Human
uagaagaugaccucguuccggagc

SEQ ID NO: 40506 - RNA, 24 nt, Human
uugcccuuuuccuugacuauuaca

SEQ ID NO: 40507 - RNA, 18 nt, Human
gacacuuuugccaaugaa

SEQ ID NO: 40508 - RNA, 22 nt, Human
ugagcacauaguauguggcagg

SEQ ID NO: 40509 - RNA, 24 nt, Human
uacaguuuacagacaagagguuuc

SEQ ID NO: 40510 - RNA, 24 nt, Human
cggcugggcucggucgggcgcugu

SEQ ID NO: 40511 - RNA, 24 nt, Human
caccgggguuggggcgcggaggag

SEQ ID NO: 40512 - RNA, 24 nt, Human
uacgcuuccccaauggggucccca

SEQ ID NO: 40513 - RNA, 24 nt, Human
ggccagagcaccgaggagcugcgg

SEQ ID NO: 40514 - RNA, 24 nt, Human
ugacugcauuugguauugcauucc

SEQ ID NO: 40515 - RNA, 20 nt, Human
gucguuguaaagccagacuc

SEQ ID NO: 40516 - RNA, 23 nt, Human
uccgcgcgccgggagccggccgc

SEQ ID NO: 40517 - RNA, 24 nt, Human
agcuguuuugagaagccuucgggu

SEQ ID NO: 40518 - RNA, 24 nt, Human
ccagcacccuugacgucugggucc

SEQ ID NO: 40519 - RNA, 24 nt, Human
ugaguuagaauccaaaccagagcu

SEQ ID NO: 40520 - RNA, 24 nt, Human
acgcaaggcuucacagcuuuccaa

SEQ ID NO: 40521 - RNA, 24 nt, Human
ugccaacguuaggagugaaaauag

SEQ ID NO: 40522 - RNA, 24 nt, Human
aagcgcugggauuguucugaucuc

SEQ ID NO: 40523 - RNA, 24 nt, Human
uagcauacuuaugcacagagugaa

SEQ ID NO: 40524 - RNA, 24 nt, Human
uacaagaucacugacucugaggac

SEQ ID NO: 40525 - RNA, 24 nt, Human
gugggcccggccaggcuggcagau

SEQ ID NO: 40526 - RNA, 24 nt, Human
ucgcugcccucagcgcagagcuca

SEQ ID NO: 40527 - RNA, 24 nt, Human
agcuguguggggcccuggggcugg

SEQ ID NO: 40528 - RNA, 24 nt, Human
caccagcaccaagugccugguggu

SEQ ID NO: 40529 - RNA, 24 nt, Human
cgccggggccuccaggagcggugg

SEQ ID NO: 40530 - RNA, 24 nt, Human
acuccgugagcgccuccgccgguc

SEQ ID NO: 40531 - RNA, 24 nt, Human
ucacggucccggucccggucccug

SEQ ID NO: 40532 - RNA, 24 nt, Human
uuccugggugcuuugauguuaagu

SEQ ID NO: 40533 - RNA, 22 nt, Human
gccuaggggcagcuuugacucg

SEQ ID NO: 40534 - RNA, 24 nt, Human
cuggcagucauagaguucuauccg

SEQ ID NO: 40535 - RNA, 24 nt, Human
ccacaagcucugcggaccuuggcc

SEQ ID NO: 40536 - RNA, 24 nt, Human
caucaguuuagcccagagauagac

SEQ ID NO: 40537 - RNA, 22 nt, Human
aagaaaaccaaaaaaaaaggac

SEQ ID NO: 40538 - RNA, 24 nt, Human
aggaaccguggggacaaccgggau

SEQ ID NO: 40539 - RNA, 24 nt, Human
gagcaguuucugaccauccugccu

SEQ ID NO: 40540 - RNA, 24 nt, Human
acccugugggagccccaaauggcg

SEQ ID NO: 40541 - RNA, 24 nt, Human
uaugauauuaacgccugggcagcg

SEQ ID NO: 40542 - RNA, 24 nt, Human
ucacuggaaacucaccuccugggu

SEQ ID NO: 40543 - RNA, 24 nt, Human
ugucaaggaaugaagucucuagcc

SEQ ID NO: 40544 - RNA, 24 nt, Human
ugcauuguuaucauuaaccagucu

SEQ ID NO: 40545 - RNA, 24 nt, Human
ugcauuguuaucauuaaccagucu

SEQ ID NO: 40546 - RNA, 24 nt, Human
uauuagggauaauauucauuuagc

SEQ ID NO: 40547 - RNA, 24 nt, Human
uaaugggucucaaaauucugugac

SEQ ID NO: 40548 - RNA, 24 nt, Human
uguuauugcauguuuauuucuucu

SEQ ID NO: 40549 - RNA, 22 nt, Human
ugccugguaggagcggaggaca

SEQ ID NO: 40550 - RNA, 24 nt, Human
gaacugguccuuucacuuugagau

SEQ ID NO: 40551 - RNA, 18 nt, Human
ugccaggaucuggucucu

SEQ ID NO: 40552 - RNA, 24 nt, Human
ucuuaagugucaucuggcaucuuc

SEQ ID NO: 40553 - RNA, 24 nt, Human
acccaagaaauuucggauuucaac

SEQ ID NO: 40554 - RNA, 24 nt, Human
ugauauccuuguuuuuaacuguug

SEQ ID NO: 40555 - RNA, 19 nt, Human
cacccuugggcggcacggg

SEQ ID NO: 40556 - RNA, 24 nt, Human
ccccggagucacccgugggcggca

SEQ ID NO: 40557 - RNA, 24 nt, Human
acccauucagccccuuccgcuguc

SEQ ID NO: 40558 - RNA, 23 nt, Human
uuugcaccgucuauguggguaag

SEQ ID NO: 40559 - RNA, 22 nt, Human
ucgcugucggaccgcgacagcu

SEQ ID NO: 40560 - RNA, 24 nt, Human
cggcagccucagcggcucugaguc

SEQ ID NO: 40561 - RNA, 24 nt, Human
caagugguuugggauucagggcuu

SEQ ID NO: 40562 - RNA, 19 nt, Human
uguuauggccgcugaccgc

SEQ ID NO: 40563 - RNA, 24 nt, Human
ucucagauuacuucauugcucacc

SEQ ID NO: 40564 - RNA, 24 nt, Human
gucacuuaaacaagccaucuaucc

SEQ ID NO: 40565 - RNA, 24 nt, Human
caccguguuagccaggauggucuc

SEQ ID NO: 40566 - RNA, 24 nt, Human
aagcagcugaagauuucaacacau

SEQ ID NO: 40567 - RNA, 24 nt, Human
ugguaaggaauaaaaaauguacag

SEQ ID NO: 40568 - RNA, 24 nt, Human
ugagcauaauaaaguguagaaaug

SEQ ID NO: 40569 - RNA, 24 nt, Human
acgcauauuugaccuucucucgaa

SEQ ID NO: 40570 - RNA, 24 nt, Human
ugauguuccgggugugcauccccu

SEQ ID NO: 40571 - RNA, 24 nt, Human
ucgcuucgggugcucgacuccugu

SEQ ID NO: 40572 - RNA, 24 nt, Human
cccugguucgugccgaagggaccc

SEQ ID NO: 40573 - RNA, 21 nt, Human
ugguaugggugcggucuuccc

SEQ ID NO: 40574 - RNA, 24 nt, Human
uacuugguguaaagaacuuaauuu

SEQ ID NO: 40575 - RNA, 24 nt, Human
ugagauccauauuuaguuuuauaa

SEQ ID NO: 40576 - RNA, 24 nt, Human
uaaauuuucaguuucuacacacuu

SEQ ID NO: 40577 - RNA, 24 nt, Human
agcuagaacaaugcagauucaucc

SEQ ID NO: 40578 - RNA, 24 nt, Human
uaauauguuaaaaacauuuugcuu

SEQ ID NO: 40579 - RNA, 24 nt, Human
uuuaagauggauauuugguggcuc

SEQ ID NO: 40580 - RNA, 24 nt, Human
cuagaccauauuuucaagucaucu

SEQ ID NO: 40581 - RNA, 18 nt, Human
uuccucgcgcaaaaaggc

SEQ ID NO: 40582 - RNA, 24 nt, Human
cuggugcggacgccggcagauguu

SEQ ID NO: 40583 - RNA, 24 nt, Human
ugacaaggugagagggagaggagg

SEQ ID NO: 40584 - RNA, 24 nt, Human
uucaacaagugaagguuuauuacu

SEQ ID NO: 40585 - RNA, 24 nt, Human
gucccuuugugguacgugcuuucc

SEQ ID NO: 40586 - RNA, 24 nt, Human
uaagagaaaauacuuccucuguuc

SEQ ID NO: 40587 - RNA, 24 nt, Human
ucccggugcucugcgagaucuccc

SEQ ID NO: 40588 - RNA, 24 nt, Human
cauugcccagaguugcacuugcug

SEQ ID NO: 40589 - RNA, 24 nt, Human
aguuuuuuaaaccucugaauuugu

SEQ ID NO: 40590 - RNA, 24 nt, Human
uaagcuccucugagcagggucgac

SEQ ID NO: 40591 - RNA, 24 nt, Human
ugucaguauuugcauggcuuguac

SEQ ID NO: 40592 - RNA, 24 nt, Human
cagaacaugaucaaggguguuaca

SEQ ID NO: 40593 - RNA, 24 nt, Human
ccccugagggagaggaaaggugaa

SEQ ID NO: 40594 - RNA, 23 nt, Human
uuacaacaaucgagugcuggaca

SEQ ID NO: 40595 - RNA, 24 nt, Human
uguguuguuuuguuuuuauuuuua

SEQ ID NO: 40596 - RNA, 24 nt, Human
caccgguaguuucccgucuuugca

SEQ ID NO: 40597 - RNA, 24 nt, Human
gcgcaucuauaaauuuucacacaa

SEQ ID NO: 40598 - RNA, 24 nt, Human
uauuacagauuguucaaaaauguc

SEQ ID NO: 40599 - RNA, 24 nt, Human
uuccuucucggcaccaccuggauc

SEQ ID NO: 40600 - RNA, 24 nt, Human
ggauauagggucgaagccgcacuc

SEQ ID NO: 40601 - RNA, 24 nt, Human
uuuguagucacucauaggccagac

SEQ ID NO: 40602 - RNA, 24 nt, Human
uaauauguuaaaaacauuuugcuu

SEQ ID NO: 40603 - RNA, 24 nt, Human
ugauauuuaaaacauuuauguggu

SEQ ID NO: 40604 - RNA, 24 nt, Human
ugaccugaaauuuuuaguauuuac

SEQ ID NO: 40605 - RNA, 24 nt, Human
cacuguguucaauuuugaguuucc

SEQ ID NO: 40606 - RNA, 24 nt, Human
ucacucgugcucggccccagggac

SEQ ID NO: 40607 - RNA, 23 nt, Human
ugucgcggucugugaguuugucu

SEQ ID NO: 40608 - RNA, 17 nt, Human
uuauaggugugcaccac

SEQ ID NO: 40609 - RNA, 24 nt, Human
uuugcauuuaaauuuuuaucuuau

SEQ ID NO: 40610 - RNA, 24 nt, Human
uuuuuguuuuugugugugugugcu

SEQ ID NO: 40611 - RNA, 24 nt, Human
uuaaaaauauuuauccuguuagaa

SEQ ID NO: 40612 - RNA, 24 nt, Human
uggcaagauugcagcaagaucaug

SEQ ID NO: 40613 - RNA, 24 nt, Human
uuaaaaagcaaaauaaacuugguu

SEQ ID NO: 40614 - RNA, 24 nt, Human
ugaggcuguggccuccaaaggguc

SEQ ID NO: 40615 - RNA, 24 nt, Human
cagagcacucgcggcguggguggg

SEQ ID NO: 40616 - RNA, 24 nt, Human
ucagagagcaacgcgagaaggauu

SEQ ID NO: 40617 - RNA, 17 nt, Human
uaggaggccucaccugc

SEQ ID NO: 40618 - RNA, 19 nt, Human
gacacuguuucggacucgu

SEQ ID NO: 40619 - RNA, 24 nt, Human
ccaccucggccggcgagcgcgccc

SEQ ID NO: 40620 - RNA, 24 nt, Human
uaccauuucuucaaauucuacugc

SEQ ID NO: 40621 - RNA, 24 nt, Human
gaccgggauccugaggcugguaac

SEQ ID NO: 40622 - RNA, 18 nt, Human
aagcagguaucgguuuua

SEQ ID NO: 40623 - RNA, 24 nt, Human
cuuuauguacaagccuuagggaag

SEQ ID NO: 40624 - RNA, 21 nt, Human
uaggacccaggacauugccac

SEQ ID NO: 40625 - RNA, 24 nt, Human
ugucuuggucuugugcuucuccuu

SEQ ID NO: 40626 - RNA, 24 nt, Human
ugccauaugguuuuucagaaacau

SEQ ID NO: 40627 - RNA, 24 nt, Human
uacagcuuugcacacugacaggag

SEQ ID NO: 40628 - RNA, 24 nt, Human
uaucaaggaagggcaaggcgugau

SEQ ID NO: 40629 - RNA, 24 nt, Human
uugucaugaauauggacaaaaccu

SEQ ID NO: 40630 - RNA, 24 nt, Human
uuugaauuuauauuuacuagcuac

SEQ ID NO: 40631 - RNA, 24 nt, Human
uaggaggguguugauuagaggaag

SEQ ID NO: 40632 - RNA, 24 nt, Human
aagcaggaucuagguauuuaggua

SEQ ID NO: 40633 - RNA, 24 nt, Human
uagcaucaugaauuugcuuuucuc

SEQ ID NO: 40634 - RNA, 24 nt, Human
uguggaggugcucauggggugcgg

SEQ ID NO: 40635 - RNA, 22 nt, Human
uuagaacauaacuugcugaagu

SEQ ID NO: 40636 - RNA, 24 nt, Human
uuagauucuuuuauuuuuuuaauu

SEQ ID NO: 40637 - RNA, 24 nt, Human
uacugauuuuuugagaccaaggau

SEQ ID NO: 40638 - RNA, 24 nt, Human
ucuaaaacaauacuuuuuuaaaaa

SEQ ID NO: 40639 - RNA, 24 nt, Human
ugcgacugccugcagggcuuccag

SEQ ID NO: 40640 - RNA, 24 nt, Human
agcaaggugcgugaggaguaugcc

SEQ ID NO: 40641 - RNA, 24 nt, Human
ucaugauugagcgcgugguggggg

SEQ ID NO: 40642 - RNA, 24 nt, Human
ugauuagauuuacacagagcuuuu

SEQ ID NO: 40643 - RNA, 24 nt, Human
cacgcagaaaaaguauguagcgac

SEQ ID NO: 40644 - RNA, 24 nt, Human
ugacuagggcgcaguugcucauac

SEQ ID NO: 40645 - RNA, 24 nt, Human
uagaagccuuugaccaagcagguc

SEQ ID NO: 40646 - RNA, 24 nt, Human
aaggacuccuacgugggcgacgag

SEQ ID NO: 40647 - RNA, 24 nt, Human
acucuguucuuccgccgcuccgcc

SEQ ID NO: 40648 - RNA, 24 nt, Human
ugggguggugggaagcuugggagc

SEQ ID NO: 40649 - RNA, 24 nt, Human
uuuuguuugauuugcggcguuccu

SEQ ID NO: 40650 - RNA, 24 nt, Human
ugagcuuagggucuuccucugacu

SEQ ID NO: 40651 - RNA, 24 nt, Human
ugucacaccuuugcuuauggccug

SEQ ID NO: 40652 - RNA, 24 nt, Human
cuuggccucuucuuuccggcagga

SEQ ID NO: 40653 - RNA, 24 nt, Human
ugaaaucauaaagccuuuugacaa

SEQ ID NO: 40654 - RNA, 24 nt, Human
ugaaacagaaaccugugcuaaaau

SEQ ID NO: 40655 - RNA, 24 nt, Human
ugugaaagaaagggcccagggugu

SEQ ID NO: 40656 - RNA, 24 nt, Human
aauuaugugccuuuacugcagcuu

SEQ ID NO: 40657 - RNA, 24 nt, Human
uucauuauuuuauaugucauaugu

SEQ ID NO: 40658 - RNA, 24 nt, Human
ucucacugucacccaggcuggagu

SEQ ID NO: 40659 - RNA, 23 nt, Human
ugaccaagguauuaagcucagca

SEQ ID NO: 40660 - RNA, 23 nt, Human
cagcaucugcacauauuuccugc

SEQ ID NO: 40661 - RNA, 24 nt, Human
uucagugggauuucucacuccauc

SEQ ID NO: 40662 - RNA, 24 nt, Human
agauauuuuuuuaguucgagagac

SEQ ID NO: 40663 - RNA, 24 nt, Human
auaucauuuaaacgaaugagcaau

SEQ ID NO: 40664 - RNA, 24 nt, Human
uagagucuauaguuuacacuuuua

SEQ ID NO: 40665 - RNA, 24 nt, Human
uucaauaauuaacucuagcacgua

SEQ ID NO: 40666 - RNA, 24 nt, Human
caagugacagcagaacugaaaaug

SEQ ID NO: 40667 - RNA, 24 nt, Human
uacaagauuuuuaaaauuuuucuu

SEQ ID NO: 40668 - RNA, 24 nt, Human
ucaccagaaagcaaccaacuuagc

SEQ ID NO: 40669 - RNA, 24 nt, Human
cugcugcgcaccccagcuaagguu

SEQ ID NO: 40670 - RNA, 24 nt, Human
ucugccagguuuucuugggcaaug

SEQ ID NO: 40671 - RNA, 24 nt, Human
uggccagcgucuuugaccaguuua

SEQ ID NO: 40672 - RNA, 24 nt, Human
uggcauagaugacagcaucucuca

SEQ ID NO: 40673 - RNA, 24 nt, Human
uaggauaaacacauggcacaguaa

SEQ ID NO: 40674 - RNA, 24 nt, Human
cuggagcagguccaccggccccua

SEQ ID NO: 40675 - RNA, 24 nt, Human
gugcagaaugagggccgaguagau

SEQ ID NO: 40676 - RNA, 24 nt, Human
aagccccauuucuuugagaagugg

SEQ ID NO: 40677 - RNA, 24 nt, Human
acaccauccggaagaugaagaacg

SEQ ID NO: 40678 - RNA, 23 nt, Human
aagagcacugaucguacuggcuc

SEQ ID NO: 40679 - RNA, 20 nt, Human
uguccagaauuuccagaagu

SEQ ID NO: 40680 - RNA, 24 nt, Human
ugagugcccccaggaggggcuggg

SEQ ID NO: 40681 - RNA, 24 nt, Human
uguggcccuucucuuuaaguccga

SEQ ID NO: 40682 - RNA, 21 nt, Human
uacuguguaacaaaucacugc

SEQ ID NO: 40683 - RNA, 24 nt, Human
ccccauugcacuccagccugggca

SEQ ID NO: 40684 - RNA, 24 nt, Human
aaagacauagaaaaaggcuuugcc

SEQ ID NO: 40685 - RNA, 24 nt, Human
ugaggugugagugaaaugagcuuu

SEQ ID NO: 40686 - RNA, 24 nt, Human
uccguaccugcagugggugcgcca

SEQ ID NO: 40687 - RNA, 24 nt, Human
ugucuagucuugaagucccucauu

SEQ ID NO: 40688 - RNA, 24 nt, Human
uggggaaaaacauuaaaauuaaaa

SEQ ID NO: 40689 - RNA, 24 nt, Human
uucuuuguauaauaaugggaaguu

SEQ ID NO: 40690 - RNA, 24 nt, Human
ucccuaauguucuuccucuaguca

SEQ ID NO: 40691 - RNA, 24 nt, Human
uccauuguguuuugccgaucuucu

SEQ ID NO: 40692 - RNA, 24 nt, Human
uguuugcuguuuuccaucaugugu

SEQ ID NO: 40693 - RNA, 24 nt, Human
aacaagacuggaaauaguuuagaa

SEQ ID NO: 40694 - RNA, 23 nt, Human
ugucggaaugggguuaaccuuuc

SEQ ID NO: 40695 - RNA, 24 nt, Human
cgggaucucggcggucagauaaua

SEQ ID NO: 40696 - RNA, 24 nt, Human
uuguucaguuccucgucguugcgu

SEQ ID NO: 40697 - RNA, 18 nt, Human
uguugcauguuuguaguc

SEQ ID NO: 40698 - RNA, 23 nt, Human
ccagaaaaggugucacacuuuug

SEQ ID NO: 40699 - RNA, 24 nt, Human
agguaugugcaggggacuccugga

SEQ ID NO: 40700 - RNA, 24 nt, Human
uguggagacucagucugugaagcu

SEQ ID NO: 40701 - RNA, 24 nt, Human
uuaguauuauuuauuugacaacuc

SEQ ID NO: 40702 - RNA, 24 nt, Human
uguucuggagcuguuggacaaaua

SEQ ID NO: 40703 - RNA, 24 nt, Human
uggcacuaaauuucucagucuuuu

SEQ ID NO: 40704 - RNA, 24 nt, Human
ucccggagacgccgacucgcgauc

SEQ ID NO: 40705 - RNA, 24 nt, Human
uaccagcacacccuaaagagagga

SEQ ID NO: 40706 - RNA, 24 nt, Human
uagaaaguuggagucaaacacugg

SEQ ID NO: 40707 - RNA, 24 nt, Human
uaguauaguaaauacauaaaccag

SEQ ID NO: 40708 - RNA, 24 nt, Human
uauugcaauacauauggcaucacu

SEQ ID NO: 40709 - RNA, 24 nt, Human
ccucucugaccgguuggccaggga

SEQ ID NO: 40710 - RNA, 24 nt, Human
uaaacgggucuucaaggugguaga

SEQ ID NO: 40711 - RNA, 24 nt, Human
cuuugaugaggccuuuguucggga

SEQ ID NO: 40712 - RNA, 23 nt, Human
uggcucgaugguuacucggugac

SEQ ID NO: 40713 - RNA, 24 nt, Human
uaaugccaacugaagaaaauauug

SEQ ID NO: 40714 - RNA, 17 nt, Human
uuucaggggcuuuauag

SEQ ID NO: 40715 - RNA, 24 nt, Human
ugccuuggugcacucuagagacgg

SEQ ID NO: 40716 - RNA, 24 nt, Human
ugaaauagaaauaugaauagcauu

SEQ ID NO: 40717 - RNA, 24 nt, Human
gggcaggcgcccgucgacccuucg

SEQ ID NO: 40718 - RNA, 24 nt, Human
caagacagugaugaugaaaaaaug

SEQ ID NO: 40719 - RNA, 24 nt, Human
cagcccacguacaucucuccuccu

SEQ ID NO: 40720 - RNA, 24 nt, Human
ugaguaccauucugcaaaggauuc

SEQ ID NO: 40721 - RNA, 24 nt, Human
ugacaggagaaggcuuguuuggca

SEQ ID NO: 40722 - RNA, 23 nt, Human
ucccugggcgacguggguuucug

SEQ ID NO: 40723 - RNA, 24 nt, Human
aaaguuaaagcgaugccauuaguu

SEQ ID NO: 40724 - RNA, 17 nt, Human
uauguuaucaggcuaca

SEQ ID NO: 40725 - RNA, 24 nt, Human
auccauccguuuugcauuggaaau

SEQ ID NO: 40726 - RNA, 24 nt, Human
auaaacuugucucacuuuacucug

SEQ ID NO: 40727 - RNA, 21 nt, Human
cacaggaccucaaggugggcc

SEQ ID NO: 40728 - RNA, 24 nt, Human
cuuggcuacuaacaucauccagcc

SEQ ID NO: 40729 - RNA, 24 nt, Human
gauggcaagaacugcuggagacac

SEQ ID NO: 40730 - RNA, 24 nt, Human
ucgcucuccucuggggacugcaga

SEQ ID NO: 40731 - RNA, 24 nt, Human
ccgggcccugguucgugccgaagg

SEQ ID NO: 40732 - RNA, 17 nt, Human
uagaaaauaaacauguu

SEQ ID NO: 40733 - RNA, 19 nt, Human
uggaagaacacaaggaaaa

SEQ ID NO: 40734 - RNA, 24 nt, Human
uugaucuugaagaaacugggcgug

SEQ ID NO: 40735 - RNA, 23 nt, Human
uccgugcgcguugcugcggccgu

SEQ ID NO: 40736 - RNA, 24 nt, Human
aggaaggagauauagugaagagga

SEQ ID NO: 40737 - RNA, 24 nt, Human
guagaguuuucuucaggcuuaaag

SEQ ID NO: 40738 - RNA, 24 nt, Human
cagcggacuuuaggggauuacagg

SEQ ID NO: 40739 - RNA, 24 nt, Human
ugugagaaguagauaggguuacug

SEQ ID NO: 40740 - RNA, 24 nt, Human
ccagcucguggagcagguccaccg

SEQ ID NO: 40741 - RNA, 24 nt, Human
gugcagaaugagggccgaguagau

SEQ ID NO: 40742 - RNA, 24 nt, Human
ccaggccaaaaaggcucaacauuu

SEQ ID NO: 40743 - RNA, 24 nt, Human
ucacugccacccagaagacuguug

SEQ ID NO: 40744 - RNA, 24 nt, Human
ucgcucagacaccauggggaaggu

SEQ ID NO: 40745 - RNA, 24 nt, Human
gcucauuugcaggggggagccaaa

SEQ ID NO: 40746 - RNA, 24 nt, Human
ucccaacacaaggugggcagggag

SEQ ID NO: 40747 - RNA, 24 nt, Human
uucugguuagcucagccccagccc

SEQ ID NO: 40748 - RNA, 24 nt, Human
aagcguuuugagcagaaaggauuc

SEQ ID NO: 40749 - RNA, 24 nt, Human
acccugaggaacugguagauuaca

SEQ ID NO: 40750 - RNA, 24 nt, Human
ugagaaugaccccaagaccuuuga

SEQ ID NO: 40751 - RNA, 24 nt, Human
ugugaacgggaagaaggugcugca

SEQ ID NO: 40752 - RNA, 24 nt, Human
cuuccaaucugaugggcauguuug

SEQ ID NO: 40753 - RNA, 22 nt, Human
guggagggcagcuuugucuaca

SEQ ID NO: 40754 - RNA, 24 nt, Human
uggcaaguuuggggccuacaugca

SEQ ID NO: 40755 - RNA, 24 nt, Human
ugaugggccugugaccauagagcu

SEQ ID NO: 40756 - RNA, 24 nt, Human
uagaagaaugaacuaaggugucua

SEQ ID NO: 40757 - RNA, 24 nt, Human
cagcagacgcuucaugauaggaag

SEQ ID NO: 40758 - RNA, 22 nt, Human
caacacagcacccuccuccugu

SEQ ID NO: 40759 - RNA, 23 nt, Human
ucccgugugcccgagagcgccgg

SEQ ID NO: 40760 - RNA, 24 nt, Human
uuccauugacauucuuagcacagc

SEQ ID NO: 40761 - RNA, 24 nt, Human
uauaaugaggcacggcuuauugca

SEQ ID NO: 40762 - RNA, 24 nt, Human
gucccaaaggcagaaggcaguauu

SEQ ID NO: 40763 - RNA, 24 nt, Human
uucuuggucuuggaggcgaagccg

SEQ ID NO: 40764 - RNA, 24 nt, Human
gucacuugugguauugauguggac

SEQ ID NO: 40765 - RNA, 24 nt, Human
uugcuggggacgacgcuccccgag

SEQ ID NO: 40766 - RNA, 24 nt, Human
uggguugggaucagggguaggaau

SEQ ID NO: 40767 - RNA, 24 nt, Human
ugacggggcuugagguccucaggg

SEQ ID NO: 40768 - RNA, 24 nt, Human
ugauugacaacacccauuuuuccu

SEQ ID NO: 40769 - RNA, 24 nt, Human
uaaugucgggacaucaucuucacc

SEQ ID NO: 40770 - RNA, 24 nt, Human
uaagaagaugugggucuccaaaaa

SEQ ID NO: 40771 - RNA, 24 nt, Human
aggaacccaaggcgugaacgaugg

SEQ ID NO: 40772 - RNA, 24 nt, Human
ugcaauguauuuuccugcuuuuca

SEQ ID NO: 40773 - RNA, 24 nt, Human
uuggauccuagaguuguuuccagu

SEQ ID NO: 40774 - RNA, 18 nt, Human
gugcauguggauugauac

SEQ ID NO: 40775 - RNA, 24 nt, Human
uuagcauuggaauucugaaggcuu

SEQ ID NO: 40776 - RNA, 24 nt, Human
ucugcauucucgcuuccuggaggg

SEQ ID NO: 40777 - RNA, 24 nt, Human
uggccuugucuguggagacggauu

SEQ ID NO: 40778 - RNA, 24 nt, Human
gagagcacgauuuauuguggugac

SEQ ID NO: 40779 - RNA, 24 nt, Human
aguuauguuugaaugcgauaaggg

SEQ ID NO: 40780 - RNA, 24 nt, Human
uuugcacgucccuauggcagggag

SEQ ID NO: 40781 - RNA, 24 nt, Human
ggaggagacagaggcgauggugcg

SEQ ID NO: 40782 - RNA, 24 nt, Human
ccgcaaccuccaccuccagguuuc

SEQ ID NO: 40783 - RNA, 24 nt, Human
uccacaacuguaguaucauacaga

SEQ ID NO: 40784 - RNA, 24 nt, Human
ucuauaguuuacauuagaguucac

SEQ ID NO: 40785 - RNA, 24 nt, Human
ucuuagugugauagacuaccacgc

SEQ ID NO: 40786 - RNA, 21 nt, Human
ugugauagugucgacggugag

SEQ ID NO: 40787 - RNA, 24 nt, Human
uccugcagcguccacacagaggca

SEQ ID NO: 40788 - RNA, 24 nt, Human
uaugguguuugcgucauucauccg

SEQ ID NO: 40789 - RNA, 24 nt, Human
ucuuccuugcucagaagaugauga

SEQ ID NO: 40790 - RNA, 24 nt, Human
ugccguggaggccucuucaagugc

SEQ ID NO: 40791 - RNA, 24 nt, Human
uagcaguaggaacgggggccgccg

SEQ ID NO: 40792 - RNA, 24 nt, Human
cgugcaguaccaguucgagaugga

SEQ ID NO: 40793 - RNA, 24 nt, Human
agaauggagggccagucccggaau

SEQ ID NO: 40794 - RNA, 24 nt, Human
uggcaccauggaugccuucgugaa

SEQ ID NO: 40795 - RNA, 24 nt, Human
uggaagacagcuacgggcagcagu

SEQ ID NO: 40796 - RNA, 24 nt, Human
uagcacgccccgccagaacuacca

SEQ ID NO: 40797 - RNA, 24 nt, Human
gcugcagcauauuguacuggccug

SEQ ID NO: 40798 - RNA, 20 nt, Human
uaaaauuucaggcucgacac

SEQ ID NO: 40799 - RNA, 24 nt, Human
uagccuguggccaccccggagaug

SEQ ID NO: 40800 - RNA, 24 nt, Human
agcagcucuuuuugcccuucuucu

SEQ ID NO: 40801 - RNA, 24 nt, Human
uugaagccaauuguuuuccaaaua

SEQ ID NO: 40802 - RNA, 24 nt, Human
uccaaagacaagguuucccuggaa

SEQ ID NO: 40803 - RNA, 24 nt, Human
acagaaaguuugagccuauaagcc

SEQ ID NO: 40804 - RNA, 23 nt, Human
uaaccagacaaagucaaauucac

SEQ ID NO: 40805 - RNA, 22 nt, Human
uagcaugccucuuaauuuuucu

SEQ ID NO: 40806 - RNA, 24 nt, Human
uauaaaacuuugauaguuacauug

SEQ ID NO: 40807 - RNA, 24 nt, Human
caccugaaagaaacuucauacuug

SEQ ID NO: 40808 - RNA, 24 nt, Human
aacagguaaccacuugagaggaug

SEQ ID NO: 40809 - RNA, 24 nt, Human
uaaggccccuaacucuugcuggcu

SEQ ID NO: 40810 - RNA, 24 nt, Human
ugaaaagauaauuuauccuauguu

SEQ ID NO: 40811 - RNA, 24 nt, Human
cuuaccuacaaauuugaaacaugu

SEQ ID NO: 40812 - RNA, 24 nt, Human
uucuacuucaccagcagcagcguu

SEQ ID NO: 40813 - RNA, 24 nt, Human
cuugcggaccuuccucgagcgcca

SEQ ID NO: 40814 - RNA, 24 nt, Human
ugauuugauccuggaaguaacugc

SEQ ID NO: 40815 - RNA, 24 nt, Human
uggcaggaaugggaggcauccaga

SEQ ID NO: 40816 - RNA, 24 nt, Human
ugcuugacgggcacccacggccag

SEQ ID NO: 40817 - RNA, 24 nt, Human
uauuuuuuaaauuuuuaaaauuug

SEQ ID NO: 40818 - RNA, 24 nt, Human
uaccucaagggcuuuugacuugag

SEQ ID NO: 40819 - RNA, 24 nt, Human
auggauuuucugagaaaccugacu

SEQ ID NO: 40820 - RNA, 24 nt, Human
uuccaauaaguaucuuaggaacuu

SEQ ID NO: 40821 - RNA, 23 nt, Human
ugccaggguggcgaucucccccc

SEQ ID NO: 40822 - RNA, 22 nt, Human
uuccuggaauauuucuugguuu

SEQ ID NO: 40823 - RNA, 24 nt, Human
ugcauuguuaucauuaaccagucu

SEQ ID NO: 40824 - RNA, 24 nt, Human
uauuagggauaauauucauuuagc

SEQ ID NO: 40825 - RNA, 24 nt, Human
uagcuuuaacugugacgggugucg

SEQ ID NO: 40826 - RNA, 24 nt, Human
uggggcccaacgaggcgcuggugg

SEQ ID NO: 40827 - RNA, 24 nt, Human
gggaagcugaguugaaaaagggaa

SEQ ID NO: 40828 - RNA, 24 nt, Human
uucaucuaugguuaccccaagaag

SEQ ID NO: 40829 - RNA, 24 nt, Human
agaaaagcaauuauucaggauggc

SEQ ID NO: 40830 - RNA, 24 nt, Human
ugcauuguuaucauuaaccagucu

SEQ ID NO: 40831 - RNA, 24 nt, Human
uauuagggauaauauucauuuagc

SEQ ID NO: 40832 - RNA, 24 nt, Human
uaaugggucucaaaauucugugac

SEQ ID NO: 40833 - RNA, 24 nt, Human
uuuccuguccccugcugcuccuuc

SEQ ID NO: 40834 - RNA, 24 nt, Human
ugaagcaagcuccggagacuucuu

SEQ ID NO: 40835 - RNA, 24 nt, Human
uucuucacgggcagcaagcuggug

SEQ ID NO: 40836 - RNA, 24 nt, Human
ccggaccccaccucuucccugccg

SEQ ID NO: 40837 - RNA, 24 nt, Human
cagcgcgcaccccggcggggcuuu

SEQ ID NO: 40838 - RNA, 24 nt, Human
ugagcuaaaagcuuccaugaaggg

SEQ ID NO: 40839 - RNA, 24 nt, Human
uacguugcuuaacccuuuuggcgu

SEQ ID NO: 40840 - RNA, 24 nt, Human
ucggaucucaugacgcugagugac

SEQ ID NO: 40841 - RNA, 24 nt, Human
aggaagcgagcacucagcagguua

SEQ ID NO: 40842 - RNA, 24 nt, Human
aacgguuugaugauccagguuuga

SEQ ID NO: 40843 - RNA, 24 nt, Human
ugugggcauuuauaaucuggucca

SEQ ID NO: 40844 - RNA, 19 nt, Human
uuccacacggaguuggagc

SEQ ID NO: 40845 - RNA, 24 nt, Human
ggggaagagcugggucgacucaag

SEQ ID NO: 40846 - RNA, 24 nt, Human
ugacuggcagaguacggcugcugu

SEQ ID NO: 40847 - RNA, 24 nt, Human
uacaauuuggugaauggagugacc

SEQ ID NO: 40848 - RNA, 23 nt, Human
cuggccaccaaagagggccuucc

SEQ ID NO: 40849 - RNA, 24 nt, Human
accccuuugccugaacgccuuacu

SEQ ID NO: 40850 - RNA, 24 nt, Human
uccagaaccugacgacccggcgac

SEQ ID NO: 40851 - RNA, 24 nt, Human
ucagcaguccuagcccccaacagc

SEQ ID NO: 40852 - RNA, 24 nt, Human
ugccaugacgaccgccaucuugga

SEQ ID NO: 40853 - RNA, 24 nt, Human
ccuuauuguuuggggcaaagggcc

SEQ ID NO: 40854 - RNA, 24 nt, Human
caggacccgucgucaugggccgug

SEQ ID NO: 40855 - RNA, 24 nt, Human
uccaugcugguccuggagucccug

SEQ ID NO: 40856 - RNA, 24 nt, Human
uggcuaaaguguucagccugaugg

SEQ ID NO: 40857 - RNA, 24 nt, Human
uccuugugggaugcguccggcaua

SEQ ID NO: 40858 - RNA, 24 nt, Human
uguaaaauauuuccuggauaacuu

SEQ ID NO: 40859 - RNA, 24 nt, Human
cugccgucgcgguccgugcugucc

SEQ ID NO: 40860 - RNA, 24 nt, Human
ccagcacuuugaaugaaaauuugu

SEQ ID NO: 40861 - RNA, 24 nt, Human
ggggggccgaaaccaacagggguu

SEQ ID NO: 40862 - RNA, 24 nt, Human
ugggcuuugccaucuacugguuca

SEQ ID NO: 40863 - RNA, 18 nt, Human
ggggaugggguuggggaa

SEQ ID NO: 40864 - RNA, 24 nt, Human
uuccuugcagcaggaacccacuua

SEQ ID NO: 40865 - RNA, 24 nt, Human
cuccugaguucacugcuacucaac

SEQ ID NO: 40866 - RNA, 24 nt, Human
caccaugccugacccauuuggcag

SEQ ID NO: 40867 - RNA, 24 nt, Human
ugggaagaugggccuuaaauucuu

SEQ ID NO: 40868 - RNA, 21 nt, Human
uucaagggauggaaagucacc

SEQ ID NO: 40869 - RNA, 24 nt, Human
ucccggaggguugcuccuuuugcc

SEQ ID NO: 40870 - RNA, 23 nt, Human
uccagcagauuacucgggauuuc

SEQ ID NO: 40871 - RNA, 24 nt, Human
ucacuguagaccccaaauaccauc

SEQ ID NO: 40872 - RNA, 24 nt, Human
acucucugccuccgccaaaauuua

SEQ ID NO: 40873 - RNA, 24 nt, Human
gcuugcuugagggcucuggaacug

SEQ ID NO: 40874 - RNA, 24 nt, Human
uacauuaagaaaauuggcuacaac

SEQ ID NO: 40875 - RNA, 24 nt, Human
ucugaucuauaaaugcgguggcau

SEQ ID NO: 40876 - RNA, 24 nt, Human
ucagcaagauccgugaggaguucc

SEQ ID NO: 40877 - RNA, 24 nt, Human
ucggugcaccagcugguggagaau

SEQ ID NO: 40878 - RNA, 24 nt, Human
uaaccgggggcccugaaccguggc

SEQ ID NO: 40879 - RNA, 24 nt, Human
uagaagaacucggugccccugcga

SEQ ID NO: 40880 - RNA, 24 nt, Human
gcgcagcuucaggggccgcaaggg

SEQ ID NO: 40881 - RNA, 19 nt, Human
ucugaccggcuucaagcuc

SEQ ID NO: 40882 - RNA, 24 nt, Human
aaccagaaaguaaggcguucuacu

SEQ ID NO: 40883 - RNA, 24 nt, Human
uuuuccccgcccccccuggaaucu

SEQ ID NO: 40884 - RNA, 24 nt, Human
aagcguucaaagugaaggccgugc

SEQ ID NO: 40885 - RNA, 24 nt, Human
ucccgguccggggguggcgguggu

SEQ ID NO: 40886 - RNA, 24 nt, Human
acucgcugcgaacacccucguggu

SEQ ID NO: 40887 - RNA, 24 nt, Human
cccccccccacccauggagcccac

SEQ ID NO: 40888 - RNA, 24 nt, Human
uuggcaucuucuaccaggccugaa

SEQ ID NO: 40889 - RNA, 22 nt, Human
uuccugagccuugaggaguuga

SEQ ID NO: 40890 - RNA, 24 nt, Human
cguacguaagcuuggauccucuag

SEQ ID NO: 40891 - RNA, 24 nt, Human
acagugcugcaggcugagcugaca

SEQ ID NO: 40892 - RNA, 24 nt, Human
uggccaguguuggcuagggacacu

SEQ ID NO: 40893 - RNA, 24 nt, Human
ucccugugcacaggugggcugacc

SEQ ID NO: 40894 - RNA, 24 nt, Human
uccuugguuaaagaaauccacuug

SEQ ID NO: 40895 - RNA, 24 nt, Human
ugaccaacguggugaaacccuguc

SEQ ID NO: 40896 - RNA, 24 nt, Human
ucuuuucuuuauucuacuaguuga

SEQ ID NO: 40897 - RNA, 24 nt, Human
uuggcagaaggcacuuaaacugug

SEQ ID NO: 40898 - RNA, 22 nt, Human
gcccaugggaaggacagagugu

SEQ ID NO: 40899 - RNA, 24 nt, Human
cagcucccucccucagcccugccc

SEQ ID NO: 40900 - RNA, 24 nt, Human
aggaggaggcggguuuggacagaa

SEQ ID NO: 40901 - RNA, 24 nt, Human
cgaggccuccgcgcucuacggccg

SEQ ID NO: 40902 - RNA, 24 nt, Human
gccacgggauggcccccaaauucc

SEQ ID NO: 40903 - RNA, 21 nt, Human
cauggaaacugcagagacugc

SEQ ID NO: 40904 - RNA, 24 nt, Human
uggcaagccuagcccccaucccug

SEQ ID NO: 40905 - RNA, 24 nt, Human
uaucaaggaagggcaggcgugaug

SEQ ID NO: 40906 - RNA, 24 nt, Human
ucaauuuuuauuuugguuuucuua

SEQ ID NO: 40907 - RNA, 24 nt, Human
ucagugguaggcugauucugauuu

SEQ ID NO: 40908 - RNA, 24 nt, Human
uuuugcucucagaaccccuucccc

SEQ ID NO: 40909 - RNA, 24 nt, Human
acuggcugccugcggguggcuccu

SEQ ID NO: 40910 - RNA, 20 nt, Human
cuuggcccaguaccuaugca

SEQ ID NO: 40911 - RNA, 24 nt, Human
cuugcccccugcccugaggaugcg

SEQ ID NO: 40912 - RNA, 24 nt, Human
cacaaccacggccgucuuguuuuc

SEQ ID NO: 40913 - RNA, 24 nt, Human
uacaaaguuucaucauugccccca

SEQ ID NO: 40914 - RNA, 24 nt, Human
uugcuuugucccuuuucucagagc

SEQ ID NO: 40915 - RNA, 24 nt, Human
guccauuguguggcuugagaccua

SEQ ID NO: 40916 - RNA, 24 nt, Human
acugcuguucuagacugugggggu

SEQ ID NO: 40917 - RNA, 24 nt, Human
ugcccagauaaaguccaagugauu

SEQ ID NO: 40918 - RNA, 24 nt, Human
ugagagaauaaaguauuuuggaaa

SEQ ID NO: 40919 - RNA, 24 nt, Human
ugagaauggcaaaauuagucgccu

SEQ ID NO: 40920 - RNA, 24 nt, Human
gagaauauuugauuuuuguuguca

SEQ ID NO: 40921 - RNA, 24 nt, Human
acacuggaaaguaggaauuugguu

SEQ ID NO: 40922 - RNA, 24 nt, Human
uggaauggaaauguaagcuauaaa

SEQ ID NO: 40923 - RNA, 24 nt, Human
aaagagcuauuuuaaaauauaaag

SEQ ID NO: 40924 - RNA, 24 nt, Human
ucaggcgcaguacaaguuggggca

SEQ ID NO: 40925 - RNA, 24 nt, Human
uuuaugaaaaaaauuuaaaguaca

SEQ ID NO: 40926 - RNA, 20 nt, Human
ucccgggguaaucacucccc

SEQ ID NO: 40927 - RNA, 24 nt, Human
gcagcaacccaggcaucugugccc

SEQ ID NO: 40928 - RNA, 24 nt, Human
uaggacccucaggcuggccgacga

SEQ ID NO: 40929 - RNA, 22 nt, Human
uaggagaugcuguagugaccau

SEQ ID NO: 40930 - RNA, 24 nt, Human
ucuguaguggauguacuacagcuc

SEQ ID NO: 40931 - RNA, 24 nt, Human
uugaaaauggaggcuaugcagacc

SEQ ID NO: 40932 - RNA, 17 nt, Human
ugacaaggaccaugaug

SEQ ID NO: 40933 - RNA, 20 nt, Human
uagcuggcauugauaaggca

SEQ ID NO: 40934 - RNA, 24 nt, Human
cuuuccuucuucuuggcuuucucu

SEQ ID NO: 40935 - RNA, 19 nt, Human
gauucuggacagguugcuc

SEQ ID NO: 40936 - RNA, 24 nt, Human
uguugugcagcauguugcacuucu

SEQ ID NO: 40937 - RNA, 24 nt, Human
ugaaaucaggaccgcagcucgggc

SEQ ID NO: 40938 - RNA, 24 nt, Human
ucugcaauuugguauaaauguuag

SEQ ID NO: 40939 - RNA, 24 nt, Human
aaagcagcaauucuauguucauag

SEQ ID NO: 40940 - RNA, 24 nt, Human
ugggaagucuggggaagggauaca

SEQ ID NO: 40941 - RNA, 24 nt, Human
acccuugugacccuguaugaaggu

SEQ ID NO: 40942 - RNA, 24 nt, Human
aagcacgacuaagagccuucugag

SEQ ID NO: 40943 - RNA, 24 nt, Human
uuaaccaggcccuuuuggauuuuc

SEQ ID NO: 40944 - RNA, 24 nt, Human
auaguaggaaugcauguuaagauu

SEQ ID NO: 40945 - RNA, 24 nt, Human
uccaugaugauacggggucucuau

SEQ ID NO: 40946 - RNA, 24 nt, Human
agagggagaagacaggcgcaguca

SEQ ID NO: 40947 - RNA, 24 nt, Human
uaagcaagcugaagggaaaagggg

SEQ ID NO: 40948 - RNA, 24 nt, Human
acgaaggugcaugcgcugaaugau

SEQ ID NO: 40949 - RNA, 24 nt, Human
agggguccggugcugucgcgggaa

SEQ ID NO: 40950 - RNA, 24 nt, Human
uuaguauuauuuauuugacaacuc

SEQ ID NO: 40951 - RNA, 24 nt, Human
acacacuuuccucuucuugacugu

SEQ ID NO: 40952 - RNA, 24 nt, Human
ucacugccuccugggccaaaguga

SEQ ID NO: 40953 - RNA, 22 nt, Human
ccgcagccgcuggcccaggugc

SEQ ID NO: 40954 - RNA, 24 nt, Human
cgccguggagcaggggguggcgcu

SEQ ID NO: 40955 - RNA, 24 nt, Human
uacaugagugggugugucuaggug

SEQ ID NO: 40956 - RNA, 24 nt, Human
gugcauuggugauuuugaucaucc

SEQ ID NO: 40957 - RNA, 24 nt, Human
uuuaaaaauuucuugaauuugugg

SEQ ID NO: 40958 - RNA, 24 nt, Human
auccuguaaucacugaaggguaca

SEQ ID NO: 40959 - RNA, 24 nt, Human
ucccagguucaagcaauucuccug

SEQ ID NO: 40960 - RNA, 24 nt, Human
uagaaucuugcuauucaaagugua

SEQ ID NO: 40961 - RNA, 24 nt, Human
aguuugugagaaaugcagaaaccu

SEQ ID NO: 40962 - RNA, 24 nt, Human
caaaauauuuggccuaaauuuuca

SEQ ID NO: 40963 - RNA, 24 nt, Human
uccguagucuauucuuucccucau

SEQ ID NO: 40964 - RNA, 24 nt, Human
gaaucccaggccacggugcuucua

SEQ ID NO: 40965 - RNA, 24 nt, Human
gggaaggaaaggggccugagcugg

SEQ ID NO: 40966 - RNA, 24 nt, Human
uggccuggggcugcucccugcccg

SEQ ID NO: 40967 - RNA, 24 nt, Human
ccggagcacauuccugagcgcuga

SEQ ID NO: 40968 - RNA, 24 nt, Human
aagcagaaagagcaaagacacaug

SEQ ID NO: 40969 - RNA, 24 nt, Human
uccgagaucugcuuauguucccaa

SEQ ID NO: 40970 - RNA, 24 nt, Human
cacuuugugagcucaucaucaguc

SEQ ID NO: 40971 - RNA, 24 nt, Human
uggcagccucaucaagaugacuga

SEQ ID NO: 40972 - RNA, 24 nt, Human
uguauagacccaguuggcaaucau

SEQ ID NO: 40973 - RNA, 24 nt, Human
aggaaggcacuaaggaaagaccac

SEQ ID NO: 40974 - RNA, 24 nt, Human
uauguguauauauauguauguaac

SEQ ID NO: 40975 - RNA, 24 nt, Human
gcacuggggugggcagcuggccag

SEQ ID NO: 40976 - RNA, 24 nt, Human
cagccuuuuccucuuuccaggccc

SEQ ID NO: 40977 - RNA, 24 nt, Human
uucagagucuuauugggguggggc

SEQ ID NO: 40978 - RNA, 24 nt, Human
ugcagaaaacacaucuuaaaauca

SEQ ID NO: 40979 - RNA, 24 nt, Human
uauggcaacaggccauucugggcc

SEQ ID NO: 40980 - RNA, 17 nt, Human
cauuccccaaggcgggg

SEQ ID NO: 40981 - RNA, 24 nt, Human
uauuuuggaggauuggguucucag

SEQ ID NO: 40982 - RNA, 24 nt, Human
ugaggugggaggauggcuugaaca

SEQ ID NO: 40983 - RNA, 24 nt, Human
aggcaggagugcaguggcaaaucu

SEQ ID NO: 40984 - RNA, 24 nt, Human
uuaguagagacgggguuucaccau

SEQ ID NO: 40985 - RNA, 24 nt, Human
ccucaaucucuccaaaaacggaga

SEQ ID NO: 40986 - RNA, 24 nt, Human
agucaagaucagaauagcuccucu

SEQ ID NO: 40987 - RNA, 24 nt, Human
uaaauggauuaaucccauuauugc

SEQ ID NO: 40988 - RNA, 24 nt, Human
uccaaaguucauguguuggaaacu

SEQ ID NO: 40989 - RNA, 24 nt, Human
gauaugaucagauuuaccauuuuu

SEQ ID NO: 40990 - RNA, 24 nt, Human
uauaugcaaagcccgugugacugg

SEQ ID NO: 40991 - RNA, 24 nt, Human
uggaauguucuguaacugccuguu

SEQ ID NO: 40992 - RNA, 24 nt, Human
uguugagaagaauauguauucugc

SEQ ID NO: 40993 - RNA, 24 nt, Human
gggcuuguggccuuagacgccagu

SEQ ID NO: 40994 - RNA, 24 nt, Human
uuuucaguuucauccauguauuuc

SEQ ID NO: 40995 - RNA, 24 nt, Human
ucuaaagauuugucuauuuugaac

SEQ ID NO: 40996 - RNA, 24 nt, Human
ugaaauauaauucacauaccacaa

SEQ ID NO: 40997 - RNA, 24 nt, Human
agacaggcuggcacagccccaggc

SEQ ID NO: 40998 - RNA, 24 nt, Human
aagcagcaccaauggggaugaccc

SEQ ID NO: 40999 - RNA, 24 nt, Human
ugguaguucaugcaggccacggcc

SEQ ID NO: 41000 - RNA, 21 nt, Human
uaaccagcaauacuauggggc

SEQ ID NO: 41001 - RNA, 24 nt, Human
ugccaagggacgcugcugaccgcc

SEQ ID NO: 41002 - RNA, 24 nt, Human
uaagaaaacugauucaguuguguu

SEQ ID NO: 41003 - RNA, 24 nt, Human
cuagcaccuuugauuuuucucagu

SEQ ID NO: 41004 - RNA, 24 nt, Human
agacaggcuggcacagccccaugc

SEQ ID NO: 41005 - RNA, 24 nt, Human
aagcagcaccaauggggaugaccc

SEQ ID NO: 41006 - RNA, 24 nt, Human
cuggagcacaagguucagcaaggg

SEQ ID NO: 41007 - RNA, 24 nt, Human
cgaguccagcucuccucaugcucc

SEQ ID NO: 41008 - RNA, 24 nt, Human
uagugucaacccaaccaaaaacua

SEQ ID NO: 41009 - RNA, 24 nt, Human
uucgcagagcugcuccgcgcgcua

SEQ ID NO: 41010 - RNA, 22 nt, Human
ucgcugccguucggugcgcagu

SEQ ID NO: 41011 - RNA, 24 nt, Human
ggaacgagggcgacgugugggccu

SEQ ID NO: 41012 - RNA, 24 nt, Human
ucucuuguucccgucccacggucc

SEQ ID NO: 41013 - RNA, 24 nt, Human
ucaguaaugcguucaggaguccac

SEQ ID NO: 41014 - RNA, 24 nt, Human
acgcuuugucaugcuucuucagua

SEQ ID NO: 41015 - RNA, 24 nt, Human
gcaguggagcuggcgguuuccucu

SEQ ID NO: 41016 - RNA, 24 nt, Human
ugauuaccuucaugacgggaaccu

SEQ ID NO: 41017 - RNA, 24 nt, Human
uacaauaugguugguaguaacaga

SEQ ID NO: 41018 - RNA, 24 nt, Human
ugaggaaucuugagccaaguccua

SEQ ID NO: 41019 - RNA, 24 nt, Human
ucuuuuguuuauuuauauucuuua

SEQ ID NO: 41020 - RNA, 24 nt, Human
uagcuccauuuaacaccagccaug

SEQ ID NO: 41021 - RNA, 24 nt, Human
cuacagguugcaacauaaaacgga

SEQ ID NO: 41022 - RNA, 24 nt, Human
gagcuggggccaagugacuucucc

SEQ ID NO: 41023 - RNA, 24 nt, Human
cagcacaggaaccugggcaggcag

SEQ ID NO: 41024 - RNA, 24 nt, Human
uagaaaaugcucagcacguggccu

SEQ ID NO: 41025 - RNA, 24 nt, Human
uaucauuggagauugugccaccca

SEQ ID NO: 41026 - RNA, 24 nt, Human
gugaacuugcuuuaccccgaaacc

SEQ ID NO: 41027 - RNA, 24 nt, Human
uauaauauuuucauuagcacaagg

SEQ ID NO: 41028 - RNA, 24 nt, Human
acuuaauuuuuacagaaaauucuu

SEQ ID NO: 41029 - RNA, 19 nt, Human
ugggaugggugcacaacuc

SEQ ID NO: 41030 - RNA, 24 nt, Human
ugaguacuuaaauaaaucuaugaa

SEQ ID NO: 41031 - RNA, 24 nt, Human
aggcuguagaaccugccagacugu

SEQ ID NO: 41032 - RNA, 24 nt, Human
aauuuuauuucaaugucugauuua

SEQ ID NO: 41033 - RNA, 24 nt, Human
uccaaaaucuccuuuaucacucga

SEQ ID NO: 41034 - RNA, 24 nt, Human
ucuuugauugagccguauaaacca

SEQ ID NO: 41035 - RNA, 24 nt, Human
ucaaauauuuggaaauuuuuaaau

SEQ ID NO: 41036 - RNA, 24 nt, Human
agacaaggagggggcuugggagug

SEQ ID NO: 41037 - RNA, 24 nt, Human
uuacaagugagaacaugugguguu

SEQ ID NO: 41038 - RNA, 24 nt, Human
uagcuaguuauccugaugcucucc

SEQ ID NO: 41039 - RNA, 24 nt, Human
uaucaaccuaucaccuagguauua

SEQ ID NO: 41040 - RNA, 24 nt, Human
uguuauauagcuuuucccaaugcu

SEQ ID NO: 41041 - RNA, 24 nt, Human
uggcaagcaguuccaguccgagca

SEQ ID NO: 41042 - RNA, 24 nt, Human
ugccugaacagcuuuaccgccggg

SEQ ID NO: 41043 - RNA, 24 nt, Human
uugcuuugaaugcucaaacuaugg

SEQ ID NO: 41044 - RNA, 24 nt, Human
uggaaagcucccucaccagagugc

SEQ ID NO: 41045 - RNA, 24 nt, Human
ugacaccagacccuucauucaagc

SEQ ID NO: 41046 - RNA, 24 nt, Human
uguggcgguuacacggccgggcgc

SEQ ID NO: 41047 - RNA, 24 nt, Human
ugagguaucguuuacugcaaagaa

SEQ ID NO: 41048 - RNA, 24 nt, Human
ugaaaacaaaagaacuucacugag

SEQ ID NO: 41049 - RNA, 24 nt, Human
uaaguaacugaucuaugaaguuag

SEQ ID NO: 41050 - RNA, 24 nt, Human
agggguccggugcugucgcgggaa

SEQ ID NO: 41051 - RNA, 24 nt, Human
uuaguauuauuuauuugacaacuc

SEQ ID NO: 41052 - RNA, 24 nt, Human
ucauggacuaaacuaggucagagu

SEQ ID NO: 41053 - RNA, 24 nt, Human
uaaccaaaaacauaaagcgauaau

SEQ ID NO: 41054 - RNA, 24 nt, Human
uauaguguccaauguagcauuauu

SEQ ID NO: 41055 - RNA, 24 nt, Human
gacacuugcaguaacauuugggaa

SEQ ID NO: 41056 - RNA, 24 nt, Human
uucaaguaucagugccuccaucaa

SEQ ID NO: 41057 - RNA, 24 nt, Human
cacaguuucagaacugaguaagga

SEQ ID NO: 41058 - RNA, 24 nt, Human
uauggcaagucacuuugacagaca

SEQ ID NO: 41059 - RNA, 24 nt, Human
ugagaauggcaaaauuagucgccu

SEQ ID NO: 41060 - RNA, 24 nt, Human
uacaccacucccaagaagaauaag

SEQ ID NO: 41061 - RNA, 24 nt, Human
uuugauugaaagucuucaauuugu

SEQ ID NO: 41062 - RNA, 24 nt, Human
ucuuucuuuuuaauguguccagcu

SEQ ID NO: 41063 - RNA, 24 nt, Human
guggaaugacucuuugaccacgcg

SEQ ID NO: 41064 - RNA, 24 nt, Human
ucacugcacucuagccuaggugac

SEQ ID NO: 41065 - RNA, 17 nt, Human
uugcucucccuugggcc

SEQ ID NO: 41066 - RNA, 24 nt, Human
gagcgcgcacggcucgcuggagcc

SEQ ID NO: 41067 - RNA, 24 nt, Human
uguaucugcuguguagcaucugau

SEQ ID NO: 41068 - RNA, 24 nt, Human
uauguuggguaucacuucagaguc

SEQ ID NO: 41069 - RNA, 24 nt, Human
ugaccacggguuccacacucuggu

SEQ ID NO: 41070 - RNA, 24 nt, Human
cauuacuuuuaaccaaaacauuca

SEQ ID NO: 41071 - RNA, 24 nt, Human
ucaugguaaagaccacauauuuuu

SEQ ID NO: 41072 - RNA, 24 nt, Human
acgguccuggucaugugccacacg

SEQ ID NO: 41073 - RNA, 24 nt, Human
aggaaguucagccggaauccagga

SEQ ID NO: 41074 - RNA, 20 nt, Human
ugugcuggaacgaguguuga

SEQ ID NO: 41075 - RNA, 24 nt, Human
gugcagccgcagacguccaaagcu

SEQ ID NO: 41076 - RNA, 24 nt, Human
uaucaaccuaucaccuagguauua

SEQ ID NO: 41077 - RNA, 24 nt, Human
uaagaacgggcuuggacuuggucu

SEQ ID NO: 41078 - RNA, 24 nt, Human
ugagaauguauuggcaauucaucu

SEQ ID NO: 41079 - RNA, 24 nt, Human
uaccuauaaugacucacauguaug

SEQ ID NO: 41080 - RNA, 24 nt, Human
ucagcuaguauuugcagccacguu

SEQ ID NO: 41081 - RNA, 24 nt, Human
ugcagaaaaacccagaguuagauu

SEQ ID NO: 41082 - RNA, 24 nt, Human
ugcuguuuguuauccugagguaug

SEQ ID NO: 41083 - RNA, 23 nt, Human
uucaagugauuccugugccucag

SEQ ID NO: 41084 - RNA, 24 nt, Human
ccccggagucacccgugggcggca

SEQ ID NO: 41085 - RNA, 21 nt, Human
uaccaaggcucaugggacgcu

SEQ ID NO: 41086 - RNA, 24 nt, Human
aagcaacuagaacaugauucagaa

SEQ ID NO: 41087 - RNA, 20 nt, Human
cauuucacugccaugaaaca

SEQ ID NO: 41088 - RNA, 24 nt, Human
ugaguaaaacgcugccuuagguga

SEQ ID NO: 41089 - RNA, 24 nt, Human
acacaaaccauccugugcaucuau

SEQ ID NO: 41090 - RNA, 24 nt, Human
aaaccagguauccaaaggcgaaag

SEQ ID NO: 41091 - RNA, 24 nt, Human
agcuguguguaaugaaaaggguug

SEQ ID NO: 41092 - RNA, 22 nt, Human
cgccgggacagcagacugccgg

SEQ ID NO: 41093 - RNA, 24 nt, Human
cagccuggacuuaccaccacuaaa

SEQ ID NO: 41094 - RNA, 24 nt, Human
ggcccggagcggagcgcgcccugc

SEQ ID NO: 41095 - RNA, 24 nt, Human
ggacugggccgucgacacgccagc

SEQ ID NO: 41096 - RNA, 24 nt, Human
uggggcacccaggaagccugaggg

SEQ ID NO: 41097 - RNA, 24 nt, Human
uauuucacuggaaaauucuguaaa

SEQ ID NO: 41098 - RNA, 24 nt, Human
ugaaaagcagguauccaaaagaac

SEQ ID NO: 41099 - RNA, 24 nt, Human
uucgcagacacucuccauggcggg

SEQ ID NO: 41100 - RNA, 24 nt, Human
aacccuuuauacaucuggggcauc

SEQ ID NO: 41101 - RNA, 24 nt, Human
cugaagccugguuccuggggucgc

SEQ ID NO: 41102 - RNA, 24 nt, Human
ugagcuguucugucucgaaaaguu

SEQ ID NO: 41103 - RNA, 24 nt, Human
ucggaagcggagcaaggucgaggc

SEQ ID NO: 41104 - RNA, 24 nt, Human
gcgcagcuucaggggccgcaaggg

SEQ ID NO: 41105 - RNA, 19 nt, Human
ucugaccggcuucaagcuc

SEQ ID NO: 41106 - RNA, 24 nt, Human
uccagaacaggcaaauuuguagag

SEQ ID NO: 41107 - RNA, 24 nt, Human
gcagagcugguccggcugcgcgag

SEQ ID NO: 41108 - RNA, 24 nt, Human
uggcagagagcaccuuagcaggcc

SEQ ID NO: 41109 - RNA, 24 nt, Human
gucguugugccggccuuaguucca

SEQ ID NO: 41110 - RNA, 22 nt, Human
agccccaauuacgcgaucuugc

SEQ ID NO: 41111 - RNA, 24 nt, Human
cauuccaugcagccuugcggaacu

SEQ ID NO: 41112 - RNA, 24 nt, Human
uguggacgagcaggaggaggcggc

SEQ ID NO: 41113 - RNA, 23 nt, Human
uaggauccacuauuauucacagu

SEQ ID NO: 41114 - RNA, 24 nt, Human
uagguuguguucugaaucucaggu

SEQ ID NO: 41115 - RNA, 21 nt, Human
uaauaagugcuuuccuuaguu

SEQ ID NO: 41116 - RNA, 24 nt, Human
uugcagcuuuauaguuuuuaaaau

SEQ ID NO: 41117 - RNA, 24 nt, Human
auagaaccccuucugacugagcaa

SEQ ID NO: 41118 - RNA, 24 nt, Human
uagugugucuucuugaguaggcca

SEQ ID NO: 41119 - RNA, 24 nt, Human
uauauuguuaagaguaguacauau

SEQ ID NO: 41120 - RNA, 24 nt, Human
uacaggaugauuuucauauuuuga

SEQ ID NO: 41121 - RNA, 24 nt, Human
acccagugccggaguuggucuucu

SEQ ID NO: 41122 - RNA, 24 nt, Human
uuuaacuuuuuuaaugggucucaa

SEQ ID NO: 41123 - RNA, 24 nt, Human
ggggagggcagcccagagacacgu

SEQ ID NO: 41124 - RNA, 24 nt, Human
ugggagaugcgugugagcgagaca

SEQ ID NO: 41125 - RNA, 24 nt, Human
uacccggcugcgcaggucugauau

SEQ ID NO: 41126 - RNA, 24 nt, Human
aaccucuucuguggagucugcgug

SEQ ID NO: 41127 - RNA, 24 nt, Human
acgcugcggggcgggcggacagac

SEQ ID NO: 41128 - RNA, 24 nt, Human
uauggcaagucacuuugacagaca

SEQ ID NO: 41129 - RNA, 24 nt, Human
ugagaauggcaaaauuagucgccu

SEQ ID NO: 41130 - RNA, 24 nt, Human
uacaccacucccaagaagaauaag

SEQ ID NO: 41131 - RNA, 24 nt, Human
uacagugcugcaaauuacaccaau

SEQ ID NO: 41132 - RNA, 24 nt, Human
uauggcaagucacuuugacagaca

SEQ ID NO: 41133 - RNA, 24 nt, Human
uacaccacucccaagaagaauaag

SEQ ID NO: 41134 - RNA, 24 nt, Human
agugguucacgccuguaaucccag

SEQ ID NO: 41135 - RNA, 24 nt, Human
ggcccggagcggagcgcgcccugc

SEQ ID NO: 41136 - RNA, 24 nt, Human
ccccuggggaacaggccgucgcgg

SEQ ID NO: 41137 - RNA, 24 nt, Human
ucgaagagcuggagaccaaggccg

SEQ ID NO: 41138 - RNA, 18 nt, Human
ugguguggcagagcuggg

SEQ ID NO: 41139 - RNA, 24 nt, Human
agcugguaccaggcgggcagugcc

SEQ ID NO: 41140 - RNA, 24 nt, Human
aacucuuugggaaugcagccuagu

SEQ ID NO: 41141 - RNA, 24 nt, Human
uuuaaaaguuucuguaccaauauc

SEQ ID NO: 41142 - RNA, 24 nt, Human
uggugucgaugggccggaaguagg

SEQ ID NO: 41143 - RNA, 22 nt, Human
ucguacauguggaacagaaauc

SEQ ID NO: 41144 - RNA, 24 nt, Human
uuucccgacagcagcuccucgacc

SEQ ID NO: 41145 - RNA, 24 nt, Human
uauggcaagucacuuugacagaca

SEQ ID NO: 41146 - RNA, 24 nt, Human
ugagaauggcaaaauuagucgccu

SEQ ID NO: 41147 - RNA, 24 nt, Human
uacaccacucccaagaagaauaag

SEQ ID NO: 41148 - RNA, 22 nt, Human
cgccgggacagcagacugccgg

SEQ ID NO: 41149 - RNA, 24 nt, Human
cagccuggacuuaccaccacuaaa

SEQ ID NO: 41150 - RNA, 24 nt, Human
cucgauuaaaauacacacaucuua

SEQ ID NO: 41151 - RNA, 24 nt, Human
uccuugggaugggcgucugcucug

SEQ ID NO: 41152 - RNA, 24 nt, Human
uguuuuggucucuugggcaacauu

SEQ ID NO: 41153 - RNA, 24 nt, Human
cagcggccgcgguguuuguuuugu

SEQ ID NO: 41154 - RNA, 24 nt, Human
gagcuuuugcauccucuggaugua

SEQ ID NO: 41155 - RNA, 24 nt, Human
uuccuggguaaccuccccaggugu

SEQ ID NO: 41156 - RNA, 24 nt, Human
aaccuuuguacuuguuuuccuccu

SEQ ID NO: 41157 - RNA, 24 nt, Human
uacacuguuaaauauuccaagaaa

SEQ ID NO: 41158 - RNA, 24 nt, Human
ucaacgaaguuauuccaucauccc

SEQ ID NO: 41159 - RNA, 18 nt, Human
ggacuuggaaggcuggug

SEQ ID NO: 41160 - RNA, 24 nt, Human
ucaaagauuccacugauugacauu

SEQ ID NO: 41161 - RNA, 24 nt, Human
uaugccaguguaaugaaacugccc

SEQ ID NO: 41162 - RNA, 24 nt, Human
aaggaccauccauucuuugccggc

SEQ ID NO: 41163 - RNA, 24 nt, Human
aaggaaccauggccaacugugagc

SEQ ID NO: 41164 - RNA, 24 nt, Human
aagcguuuugagcagaaaggauuc

SEQ ID NO: 41165 - RNA, 24 nt, Human
gcgcggccuggugggcgagaucau

SEQ ID NO: 41166 - RNA, 24 nt, Human
aggaaggagauauagugaagagga

SEQ ID NO: 41167 - RNA, 24 nt, Human
guagaguauucuucaggcuuaaag

SEQ ID NO: 41168 - RNA, 24 nt, Human
uuaguucauucuucuaauaagccu

SEQ ID NO: 41169 - RNA, 24 nt, Human
uggccaggccucagcgcgaccucg

SEQ ID NO: 41170 - RNA, 24 nt, Human
ucacucaguuuuuaauaaaggcca

SEQ ID NO: 41171 - RNA, 24 nt, Human
ugacaauaggucuuaaugcaaguu

SEQ ID NO: 41172 - RNA, 24 nt, Human
ugcauuguuaucauuaaccagucu

SEQ ID NO: 41173 - RNA, 24 nt, Human
uauuagggauaauauucauuuggc

SEQ ID NO: 41174 - RNA, 24 nt, Human
ucacugaggcgucuuggcuacugg

SEQ ID NO: 41175 - RNA, 24 nt, Human
acuggcugccugcggguggcuccu

SEQ ID NO: 41176 - RNA, 24 nt, Human
aucgagcuguccgacaacccuggc

SEQ ID NO: 41177 - RNA, 24 nt, Human
cuuggcccaguaccuaugcaacga

SEQ ID NO: 41178 - RNA, 17 nt, Human
uacagugguuucucuuu

SEQ ID NO: 41179 - RNA, 24 nt, Human
uuggcaaacguuucccgaagagga

SEQ ID NO: 41180 - RNA, 24 nt, Human
ugaauuugcaggaugggagggcuc

SEQ ID NO: 41181 - RNA, 24 nt, Human
cuucuuggucucggcgugccccau

SEQ ID NO: 41182 - RNA, 24 nt, Human
agguauauuuguauauguaaccaa

SEQ ID NO: 41183 - RNA, 24 nt, Human
aggcagggaguggggacugcagga

SEQ ID NO: 41184 - RNA, 24 nt, Human
ucuaugaacauaucaguuggggga

SEQ ID NO: 41185 - RNA, 24 nt, Human
ugccuggggauccugaagauaaaa

SEQ ID NO: 41186 - RNA, 24 nt, Human
cauugcuggauggccgggacugca

SEQ ID NO: 41187 - RNA, 24 nt, Human
uggaagcugagcccauauuaagag

SEQ ID NO: 41188 - RNA, 24 nt, Human
ccccugaaaaagcagcuuaaaaua

SEQ ID NO: 41189 - RNA, 19 nt, Human
agggauguucaggacucug

SEQ ID NO: 41190 - RNA, 24 nt, Human
uucucuguuuggaggcugcaccca

SEQ ID NO: 41191 - RNA, 24 nt, Human
ucuggcacaggaaauggucuccaa

SEQ ID NO: 41192 - RNA, 24 nt, Human
gaaugggguugggggccccaccuc

SEQ ID NO: 41193 - RNA, 24 nt, Human
uaggucccgagguggagucggggg

SEQ ID NO: 41194 - RNA, 24 nt, Human
uguauauauuuaacacacacaucu

SEQ ID NO: 41195 - RNA, 24 nt, Human
uugaagcuugaaaauuuuauuuaa

SEQ ID NO: 41196 - RNA, 24 nt, Human
uauaaaaguauuacacaauucugu

SEQ ID NO: 41197 - RNA, 24 nt, Human
accacauguaugaggacacauaua

SEQ ID NO: 41198 - RNA, 24 nt, Human
aagcagcaccaauggggaugaccc

SEQ ID NO: 41199 - RNA, 24 nt, Human
guccaguagucacaugggcucaau

SEQ ID NO: 41200 - RNA, 24 nt, Human
aaggguauuuauuucuuauucaug

SEQ ID NO: 41201 - RNA, 20 nt, Human
uccacauguggaaguggggu

SEQ ID NO: 41202 - RNA, 24 nt, Human
aaaccaucucaaguccaaacaugu

SEQ ID NO: 41203 - RNA, 21 nt, Human
agagcucaggucucugagggc

SEQ ID NO: 41204 - RNA, 19 nt, Human
agcugccuggggccagccc

SEQ ID NO: 41205 - RNA, 22 nt, Human
agggccguucuacccccuggga

SEQ ID NO: 41206 - RNA, 21 nt, Human
cacagggccguucuacccccu

SEQ ID NO: 41207 - RNA, 19 nt, Human
cagcaggagugucuuaagc

SEQ ID NO: 41208 - RNA, 23 nt, Human
cagguuccccauccuagcucccc

SEQ ID NO: 41209 - RNA, 18 nt, Human
ccacagcggcgccggcca

SEQ ID NO: 41210 - RNA, 22 nt, Human
ccagccccucaguucuggcugu

SEQ ID NO: 41211 - RNA, 23 nt, Human
ccagccccucaguucuggcugug

SEQ ID NO: 41212 - RNA, 23 nt, Human
ccagggccacuucugcaggagcu

SEQ ID NO: 41213 - RNA, 21 nt, Human
cccacagcggcgccggccacg

SEQ ID NO: 41214 - RNA, 22 nt, Human
ccccauccuagcuccccggauc

SEQ ID NO: 41215 - RNA, 22 nt, Human
ccccugggagcugccuggggcc

SEQ ID NO: 41216 - RNA, 18 nt, Human
cccucaguucuggcugug

SEQ ID NO: 41217 - RNA, 20 nt, Human
cgcccagggcugagugacgg

SEQ ID NO: 41218 - RNA, 19 nt, Human
cggcgccggccacgcgcug

SEQ ID NO: 41219 - RNA, 26 nt, Human
cugagugacggugguggcaagugcuu

SEQ ID NO: 41220 - RNA, 19 nt, Human
gccagccccucaguucugg

SEQ ID NO: 41221 - RNA, 22 nt, Human
gcucggguucgagguuccacgu

SEQ ID NO: 41222 - RNA, 19 nt, Human
gcuggugugcccggguacc

SEQ ID NO: 41223 - RNA, 24 nt, Human
ggcugagugacggugguggcaagu

SEQ ID NO: 41224 - RNA, 25 nt, Human
ggggcagcaggagugucuuaagcac

SEQ ID NO: 41225 - RNA, 21 nt, Human
uccacguggccagaagagcuc

SEQ ID NO: 41226 - RNA, 24 nt, Human
uccagggccacuucugcaggagcu

SEQ ID NO: 41227 - RNA, 20 nt, Human
uccccacagcggcgccggcc

SEQ ID NO: 41228 - RNA, 21 nt, Human
uccuagcuccccggaucucca

SEQ ID NO: 41229 - RNA, 24 nt, Human
ucuccauagggaguguccccucgg

SEQ ID NO: 41230 - RNA, 23 nt, Human
ucugcaggagcucggguucgagg

SEQ ID NO: 41231 - RNA, 23 nt, Human
ucuggcuguggcagguuccccau

SEQ ID NO: 41232 - RNA, 23 nt, Human
ugccuggggccagccccucaguu

SEQ ID NO: 41233 - RNA, 26 nt, Human
ugccuggggccagccccucaguucug

SEQ ID NO: 41234 - RNA, 19 nt, Human
uggcuguggcagguucccc

SEQ ID NO: 41235 - RNA, 20 nt, Human
uggggccagccccucaguuc

SEQ ID NO: 41236 - RNA, 21 nt, Human
uggggccagccccucaguucu

SEQ ID NO: 41237 - RNA, 24 nt, Human
uguccagaccgcucucuuaucccu

SEQ ID NO: 41238 - RNA, 18 nt, Human
ugugcccggguacccauc

SEQ ID NO: 41239 - RNA, 21 nt, Human
aaaaaagaaaaaagaaaagaa

SEQ ID NO: 41240 - RNA, 20 nt, Human
aaacuaagcuggggcugggc

SEQ ID NO: 41241 - RNA, 23 nt, Human
aaacucggcagugguugggaagg

SEQ ID NO: 41242 - RNA, 21 nt, Human
aaagaggcccugagaaguguu

SEQ ID NO: 41243 - RNA, 19 nt, Human
aacaaggugaaaccccauc

SEQ ID NO: 41244 - RNA, 20 nt, Human
aacaaggugaaaccccaucu

SEQ ID NO: 41245 - RNA, 21 nt, Human
aacaaggugaaaccccaucuc

SEQ ID NO: 41246 - RNA, 19 nt, Human
aacacagugagacccuguc

SEQ ID NO: 41247 - RNA, 20 nt, Human
aacacagugagacccugucu

SEQ ID NO: 41248 - RNA, 18 nt, Human
aacacuuugggaggcuga

SEQ ID NO: 41249 - RNA, 24 nt, Human
aacacuuugggaggcugaggcggg

SEQ ID NO: 41250 - RNA, 19 nt, Human
aacauagugagacucaucu

SEQ ID NO: 41251 - RNA, 21 nt, Human
aagaacacagaggaauccagc

SEQ ID NO: 41252 - RNA, 21 nt, Human
aagacauuuuaaacagagcuc

SEQ ID NO: 41253 - RNA, 23 nt, Human
aagagcaaaauucugucucaaaa

SEQ ID NO: 41254 - RNA, 26 nt, Human
aagagcaaaauucugucucaaaaaca

SEQ ID NO: 41255 - RNA, 23 nt, Human
aagaguucaagaccagccugggc

SEQ ID NO: 41256 - RNA, 23 nt, Human
aagaucacgccauugcacuccag

SEQ ID NO: 41257 - RNA, 19 nt, Human
aauaaauaauagaaagaaa

SEQ ID NO: 41258 - RNA, 24 nt, Human
aaucacuugaacccaggagguaga

SEQ ID NO: 41259 - RNA, 19 nt, Human
acaaaaaauaauaauuagc

SEQ ID NO: 41260 - RNA, 18 nt, Human
acacugcacuccagccug

SEQ ID NO: 41261 - RNA, 20 nt, Human
acacugcacuccagccuggg

SEQ ID NO: 41262 - RNA, 21 nt, Human
acacugcacuccagccugggu

SEQ ID NO: 41263 - RNA, 24 nt, Human
acacugcacuccagccugggugac

SEQ ID NO: 41264 - RNA, 20 nt, Human
acagugagacccugucuaca

SEQ ID NO: 41265 - RNA, 20 nt, Human
acagugugagacccugucuc

SEQ ID NO: 41266 - RNA, 24 nt, Human
acagugugagacccugucucaaaa

SEQ ID NO: 41267 - RNA, 21 nt, Human
accccaucucuacuaaaaaca

SEQ ID NO: 41268 - RNA, 23 nt, Human
accuauuagaauggcuaaaauaa

SEQ ID NO: 41269 - RNA, 18 nt, Human
acuaagcuggggcugggc

SEQ ID NO: 41270 - RNA, 24 nt, Human
acugcaacacugcacuccagccug

SEQ ID NO: 41271 - RNA, 18 nt, Human
acugcacuccagccuggg

SEQ ID NO: 41272 - RNA, 21 nt, Human
acugcacuccagccuggguga

SEQ ID NO: 41273 - RNA, 24 nt, Human
acugcacuccagccugggugacag

SEQ ID NO: 41274 - RNA, 21 nt, Human
agaaaaaagaaaagaaaacug

SEQ ID NO: 41275 - RNA, 18 nt, Human
agaaagagagagaggaca

SEQ ID NO: 41276 - RNA, 22 nt, Human
agaaucacuugaacccaggagg

SEQ ID NO: 41277 - RNA, 24 nt, Human
agacugugcagacauuaguuaaaa

SEQ ID NO: 41278 - RNA, 20 nt, Human
agagguugcugugagccaag

SEQ ID NO: 41279 - RNA, 24 nt, Human
agcacuuugggaggcugaggcggg

SEQ ID NO: 41280 - RNA, 26 nt, Human
agccaguccagaauccccggcacuuc

SEQ ID NO: 41281 - RNA, 18 nt, Human
agccggacugcaacacug

SEQ ID NO: 41282 - RNA, 22 nt, Human
agccugggcaacauagugagac

SEQ ID NO: 41283 - RNA, 23 nt, Human
agccugggcaacauagugagacu

SEQ ID NO: 41284 - RNA, 24 nt, Human
agccugggcaacauagugagacuc

SEQ ID NO: 41285 - RNA, 24 nt, Human
agcuacucaggaggcugagguggg

SEQ ID NO: 41286 - RNA, 23 nt, Human
agcuggggcugggcgugguggcu

SEQ ID NO: 41287 - RNA, 20 nt, Human
agcugggugugguggugggu

SEQ ID NO: 41288 - RNA, 23 nt, Human
agcugggugugguggugggugcc

SEQ ID NO: 41289 - RNA, 22 nt, Human
agcuugggcaacacagugagac

SEQ ID NO: 41290 - RNA, 24 nt, Human
agcuugggcaacacagugagaccc

SEQ ID NO: 41291 - RNA, 19 nt, Human
aggacucagagcugaggga

SEQ ID NO: 41292 - RNA, 19 nt, Human
aggagccaccccagaaccc

SEQ ID NO: 41293 - RNA, 22 nt, Human
aggagccaccccagaacccauc

SEQ ID NO: 41294 - RNA, 21 nt, Human
aggaguuggagaccagccugg

SEQ ID NO: 41295 - RNA, 24 nt, Human
aggaucacuugagcccaagaguuc

SEQ ID NO: 41296 - RNA, 22 nt, Human
aggaucgcuugagccugggagg

SEQ ID NO: 41297 - RNA, 18 nt, Human
aggcacgagaaucacuug

SEQ ID NO: 41298 - RNA, 22 nt, Human
aggcaggaggaucgcuugagcc

SEQ ID NO: 41299 - RNA, 24 nt, Human
aggcaggaggaucgcuugagccug

SEQ ID NO: 41300 - RNA, 24 nt, Human
aggcaugguggcucaugccuguag

SEQ ID NO: 41301 - RNA, 18 nt, Human
aggcgggaggaucacuug

SEQ ID NO: 41302 - RNA, 23 nt, Human
aggcgggaggaucacuugagccc

SEQ ID NO: 41303 - RNA, 20 nt, Human
aggcggguggaucaccugag

SEQ ID NO: 41304 - RNA, 24 nt, Human
aggcugaggcacgagaaucacuug

SEQ ID NO: 41305 - RNA, 20 nt, Human
aggcugaggcaggaggaucg

SEQ ID NO: 41306 - RNA, 24 nt, Human
aggcugaggcaggaggaucgcuug

SEQ ID NO: 41307 - RNA, 24 nt, Human
aggcugaggcgggaggaucacuug

SEQ ID NO: 41308 - RNA, 21 nt, Human
aggcugaggcggguggaucac

SEQ ID NO: 41309 - RNA, 24 nt, Human
aggcugaggcggguggaucaccug

SEQ ID NO: 41310 - RNA, 19 nt, Human
aggcugaggugggaggauc

SEQ ID NO: 41311 - RNA, 18 nt, Human
agggccuugaggcccugc

SEQ ID NO: 41312 - RNA, 24 nt, Human
agguagagguugcugugagccaag

SEQ ID NO: 41313 - RNA, 22 nt, Human
aggugcccagggaguaagaggc

SEQ ID NO: 41314 - RNA, 24 nt, Human
aggugcuguggcucacaccuguaa

SEQ ID NO: 41315 - RNA, 20 nt, Human
aggugggaggaucacuuaag

SEQ ID NO: 41316 - RNA, 22 nt, Human
agguuuuaaaaauugauaaacc

SEQ ID NO: 41317 - RNA, 21 nt, Human
aguaagaggcagcauccugga

SEQ ID NO: 41318 - RNA, 24 nt, Human
aucacgccauugcacuccagccug

SEQ ID NO: 41319 - RNA, 20 nt, Human
auuagcuggguguggugguc

SEQ ID NO: 41320 - RNA, 24 nt, Human
auugcacuccagccugggcaacaa

SEQ ID NO: 41321 - RNA, 24 nt, Human
caaaaugcagcuucccugaaccuc

SEQ ID NO: 41322 - RNA, 22 nt, Human
caacacuuugggaggcugaggc

SEQ ID NO: 41323 - RNA, 24 nt, Human
caacacuuugggaggcugaggcgg

SEQ ID NO: 41324 - RNA, 23 nt, Human
caacagcacccugggcccgcggc

SEQ ID NO: 41325 - RNA, 21 nt, Human
cacaaaaugcagcuucccuga

SEQ ID NO: 41326 - RNA, 24 nt, Human
cacaccuguaaucccaacacuuug

SEQ ID NO: 41327 - RNA, 24 nt, Human
cacagaggaauccagccauuucca

SEQ ID NO: 41328 - RNA, 19 nt, Human
caccaacagcacccugggc

SEQ ID NO: 41329 - RNA, 24 nt, Human
caccccuguaaucccagcacuuug

SEQ ID NO: 41330 - RNA, 21 nt, Human
cacccuggacugggaggacaa

SEQ ID NO: 41331 - RNA, 24 nt, Human
caccugagcucaggaguuggagac

SEQ ID NO: 41332 - RNA, 19 nt, Human
caccuguaaucccaacacu

SEQ ID NO: 41333 - RNA, 24 nt, Human
caccuguaaucccaacacuuuggg

SEQ ID NO: 41334 - RNA, 24 nt, Human
cacuccagccugggcaacaagagc

SEQ ID NO: 41335 - RNA, 20 nt, Human
cacuccagccugggugacag

SEQ ID NO: 41336 - RNA, 20 nt, Human
cacuccagccugggugacag

SEQ ID NO: 41337 - RNA, 22 nt, Human
cacuccagccugggugacagug

SEQ ID NO: 41338 - RNA, 19 nt, Human
cacugcacuccagccuggg

SEQ ID NO: 41339 - RNA, 19 nt, Human
cacugcacuccagccuggg

SEQ ID NO: 41340 - RNA, 19 nt, Human
cacugcacuccagccuggg

SEQ ID NO: 41341 - RNA, 20 nt, Human
cacugcacuccagccugggu

SEQ ID NO: 41342 - RNA, 22 nt, Human
cacugcacuccagccuggguga

SEQ ID NO: 41343 - RNA, 23 nt, Human
cacugcacuccagccugggugac

SEQ ID NO: 41344 - RNA, 24 nt, Human
cacugcacuccagccugggugaca

SEQ ID NO: 41345 - RNA, 25 nt, Human
cacugcacuccagccugggugacag

SEQ ID NO: 41346 - RNA, 18 nt, Human
cagaauccccggcacuuc

SEQ ID NO: 41347 - RNA, 26 nt, Human
cagcacccugggcccgcggggagguc

SEQ ID NO: 41348 - RNA, 24 nt, Human
cagcacuuugggaggcugaggcgg

SEQ ID NO: 41349 - RNA, 19 nt, Human
cagccccccagagaccccg

SEQ ID NO: 41350 - RNA, 20 nt, Human
cagccugggcaacauaguga

SEQ ID NO: 41351 - RNA, 24 nt, Human
cagcuacucaggaggcugaggugg

SEQ ID NO: 41352 - RNA, 24 nt, Human
cagcuacuugggaggcugaggcag

SEQ ID NO: 41353 - RNA, 24 nt, Human
caggaggcugaggcacgagaauca

SEQ ID NO: 41354 - RNA, 23 nt, Human
cagggccuugaggcccugcucca

SEQ ID NO: 41355 - RNA, 19 nt, Human
cauugcacuccagccuggg

SEQ ID NO: 41356 - RNA, 21 nt, Human
cauugcacuccagccugggca

SEQ ID NO: 41357 - RNA, 22 nt, Human
cauugcacuccagccugggcaa

SEQ ID NO: 41358 - RNA, 24 nt, Human
cauugcacuccagccugggcaaca

SEQ ID NO: 41359 - RNA, 19 nt, Human
ccaacaaggugaaacccca

SEQ ID NO: 41360 - RNA, 18 nt, Human
ccacuccucuaccucagg

SEQ ID NO: 41361 - RNA, 20 nt, Human
ccauugcacuccagccuggg

SEQ ID NO: 41362 - RNA, 21 nt, Human
ccauugcacuccagccugggc

SEQ ID NO: 41363 - RNA, 23 nt, Human
ccauugcacuccagccugggcaa

SEQ ID NO: 41364 - RNA, 24 nt, Human
ccauugcacuccagccugggcaac

SEQ ID NO: 41365 - RNA, 22 nt, Human
cccagcccacucagcccuggga

SEQ ID NO: 41366 - RNA, 23 nt, Human
cccagcccacucagcccugggag

SEQ ID NO: 41367 - RNA, 21 nt, Human
cccccagagaccccggccuug

SEQ ID NO: 41368 - RNA, 22 nt, Human
ccccggcacuucugaggacacc

SEQ ID NO: 41369 - RNA, 19 nt, Human
ccccuguaaucccagcacu

SEQ ID NO: 41370 - RNA, 23 nt, Human
ccccuguaaucccagcacuuugg

SEQ ID NO: 41371 - RNA, 23 nt, Human
ccucaggagccaccccagaaccc

SEQ ID NO: 41372 - RNA, 21 nt, Human
ccuggacugggaggacaagac

SEQ ID NO: 41373 - RNA, 19 nt, Human
ccuggccacccaacaaggu

SEQ ID NO: 41374 - RNA, 28 nt, Human
ccuggccacccaacaaggugaaacccca

SEQ ID NO: 41375 - RNA, 22 nt, Human
ccuguaaucccagcacuuuggg

SEQ ID NO: 41376 - RNA, 19 nt, Human
ccuguagucccagcuacuc

SEQ ID NO: 41377 - RNA, 21 nt, Human
ccuguagucccagcuacucag

SEQ ID NO: 41378 - RNA, 22 nt, Human
ccugucucaaaaaagaaaaaag

SEQ ID NO: 41379 - RNA, 24 nt, Human
cgccauugcacuccagccugggca

SEQ ID NO: 41380 - RNA, 24 nt, Human
cggguggaucaccugagcucagga

SEQ ID NO: 41381 - RNA, 24 nt, Human
cucaaaaacaaauaaacaagaaaa

SEQ ID NO: 41382 - RNA, 21 nt, Human
cucaagcaaccugcccauacc

SEQ ID NO: 41383 - RNA, 24 nt, Human
cucaagcaaccugcccauaccugc

SEQ ID NO: 41384 - RNA, 22 nt, Human
cucacaccuguaaucccaacac

SEQ ID NO: 41385 - RNA, 24 nt, Human
cucacaccuguaaucccaacacuu

SEQ ID NO: 41386 - RNA, 24 nt, Human
cucaccccuguaaucccagcacuu

SEQ ID NO: 41387 - RNA, 18 nt, Human
cucaggaggcugaggugg

SEQ ID NO: 41388 - RNA, 24 nt, Human
cucaugccuguagucccagcuacu

SEQ ID NO: 41389 - RNA, 24 nt, Human
cuccagccccccagagaccccggc

SEQ ID NO: 41390 - RNA, 21 nt, Human
cugcccauaccugcugggacc

SEQ ID NO: 41391 - RNA, 21 nt, Human
cuggaagagcacagaugaaag

SEQ ID NO: 41392 - RNA, 23 nt, Human
cuuaagagccaguucuccacucc

SEQ ID NO: 41393 - RNA, 21 nt, Human
cuugugcugcaacaggagggg

SEQ ID NO: 41394 - RNA, 19 nt, Human
gaagugacaucaucacaga

SEQ ID NO: 41395 - RNA, 21 nt, Human
gagccaguccagaauccccgg

SEQ ID NO: 41396 - RNA, 21 nt, Human
gaggcccugagaaguguuggu

SEQ ID NO: 41397 - RNA, 25 nt, Human
gauaaugggaaagaacacagaggaa

SEQ ID NO: 41398 - RNA, 23 nt, Human
gaucaccugagcucaggaguugg

SEQ ID NO: 41399 - RNA, 24 nt, Human
gaucaccugagcucaggaguugga

SEQ ID NO: 41400 - RNA, 24 nt, Human
gaucacuuaaggccaggaguucaa

SEQ ID NO: 41401 - RNA, 24 nt, Human
gaucacuugagcccaagaguucaa

SEQ ID NO: 41402 - RNA, 26 nt, Human
gaucacuugagcccaagaguucaaga

SEQ ID NO: 41403 - RNA, 23 nt, Human
gaucgcuugagccugggagguca

SEQ ID NO: 41404 - RNA, 18 nt, Human
gcaacacugcacuccagc

SEQ ID NO: 41405 - RNA, 22 nt, Human
gcacgagaaucacuugaaccca

SEQ ID NO: 41406 - RNA, 22 nt, Human
gccaggcaugguggcucaugcc

SEQ ID NO: 41407 - RNA, 22 nt, Human
gccauugcacuccagccugggc

SEQ ID NO: 41408 - RNA, 24 nt, Human
gccauugcacuccagccugggcaa

SEQ ID NO: 41409 - RNA, 24 nt, Human
gccugggaggucaaaacugcagug

SEQ ID NO: 41410 - RNA, 22 nt, Human
gcuucuccagccccccagagac

SEQ ID NO: 41411 - RNA, 19 nt, Human
ggaggcuucuccagccccc

SEQ ID NO: 41412 - RNA, 23 nt, Human
ggaucacuuaaggccaggaguuc

SEQ ID NO: 41413 - RNA, 23 nt, Human
ggaucacuugagcccaagaguuc

SEQ ID NO: 41414 - RNA, 24 nt, Human
ggcaacuaagcacuuggggaaaaa

SEQ ID NO: 41415 - RNA, 23 nt, Human
ggcgugguggcucaccccuguaa

SEQ ID NO: 41416 - RNA, 21 nt, Human
ggcucaccccuguaaucccag

SEQ ID NO: 41417 - RNA, 21 nt, Human
ggcucaugccuguagucccag

SEQ ID NO: 41418 - RNA, 21 nt, Human
gggaacagcccagcacuacca

SEQ ID NO: 41419 - RNA, 22 nt, Human
gggaggucaaaacugcagugag

SEQ ID NO: 41420 - RNA, 21 nt, Human
ggggcugggcgugguggcuca

SEQ ID NO: 41421 - RNA, 21 nt, Human
gguggaucaccugagcucagg

SEQ ID NO: 41422 - RNA, 24 nt, Human
gguggcucaccccuguaaucccag

SEQ ID NO: 41423 - RNA, 24 nt, Human
gguggcucaugccuguagucccag

SEQ ID NO: 41424 - RNA, 28 nt, Human
gugaguuggccaggcaugguggcucaug

SEQ ID NO: 41425 - RNA, 22 nt, Human
guggcucacaccuguaauccca

SEQ ID NO: 41426 - RNA, 19 nt, Human
uaaaaaacuaagcuggggc

SEQ ID NO: 41427 - RNA, 26 nt, Human
uaaaaauuagcugggugugguggugg

SEQ ID NO: 41428 - RNA, 21 nt, Human
uagcaaauucguugaaaaaca

SEQ ID NO: 41429 - RNA, 18 nt, Human
uagcaagaaagagagaga

SEQ ID NO: 41430 - RNA, 18 nt, Human
ucacagacugugcagaca

SEQ ID NO: 41431 - RNA, 23 nt, Human
ucacgccauugcacuccagccug

SEQ ID NO: 41432 - RNA, 23 nt, Human
ucacuuaaggccaggaguucaag

SEQ ID NO: 41433 - RNA, 23 nt, Human
ucacuugagcccaagaguucaag

SEQ ID NO: 41434 - RNA, 21 nt, Human
ucagagcugagggauaauggg

SEQ ID NO: 41435 - RNA, 20 nt, Human
ucaggaguuggagaccagcc

SEQ ID NO: 41436 - RNA, 20 nt, Human
uccagaauccccggcacuuc

SEQ ID NO: 41437 - RNA, 23 nt, Human
uccagccugggugacagugugag

SEQ ID NO: 41438 - RNA, 24 nt, Human
uccagccugggugacagugugaga

SEQ ID NO: 41439 - RNA, 18 nt, Human
ucgcuugagccugggagg

SEQ ID NO: 41440 - RNA, 18 nt, Human
ucucaaaaaagaaaaaag

SEQ ID NO: 41441 - RNA, 21 nt, Human
ucuccagccccccagagaccc

SEQ ID NO: 41442 - RNA, 21 nt, Human
ucuccagccccccagagaccc

SEQ ID NO: 41443 - RNA, 21 nt, Human
ucucuacuaaaaacauaaaaa

SEQ ID NO: 41444 - RNA, 20 nt, Human
ucuuaagagccaguucucca

SEQ ID NO: 41445 - RNA, 19 nt, Human
ugaaaccccaucucuacua

SEQ ID NO: 41446 - RNA, 20 nt, Human
ugacagugugagacccuguc

SEQ ID NO: 41447 - RNA, 22 nt, Human
ugacagugugagacccugucuc

SEQ ID NO: 41448 - RNA, 22 nt, Human
ugagacucaucucuacaaaaaa

SEQ ID NO: 41449 - RNA, 23 nt, Human
ugagcccaagaguucaagaccag

SEQ ID NO: 41450 - RNA, 21 nt, Human
ugagccggacugcaacacugg

SEQ ID NO: 41451 - RNA, 18 nt, Human
ugagccugggaggucaaa

SEQ ID NO: 41452 - RNA, 24 nt, Human
ugagccugggaggucaaaacugca

SEQ ID NO: 41453 - RNA, 25 nt, Human
ugaggacaccaacagcacccugggc

SEQ ID NO: 41454 - RNA, 23 nt, Human
ugaggacacgagaucccagccca

SEQ ID NO: 41455 - RNA, 20 nt, Human
ugaggcacgagaaucacuug

SEQ ID NO: 41456 - RNA, 24 nt, Human
ugaggcacgagaaucacuugaacc

SEQ ID NO: 41457 - RNA, 20 nt, Human
ugaggcaggaggaucgcuug

SEQ ID NO: 41458 - RNA, 24 nt, Human
ugaggcaggaggaucgcuugagcc

SEQ ID NO: 41459 - RNA, 24 nt, Human
ugaggcaggaggaucgcuugagcc

SEQ ID NO: 41460 - RNA, 19 nt, Human
ugaggcgggaggaucacuu

SEQ ID NO: 41461 - RNA, 24 nt, Human
ugaggcgggaggaucacuugagcc

SEQ ID NO: 41462 - RNA, 19 nt, Human
ugaggcggguggaucaccu

SEQ ID NO: 41463 - RNA, 20 nt, Human
ugaggcggguggaucaccug

SEQ ID NO: 41464 - RNA, 22 nt, Human
ugaggcggguggaucaccugag

SEQ ID NO: 41465 - RNA, 22 nt, Human
ugaggcggguggaucaccugag

SEQ ID NO: 41466 - RNA, 26 nt, Human
ugaggcggguggaucaccugagcuca

SEQ ID NO: 41467 - RNA, 18 nt, Human
ugaggugggaggaucacu

SEQ ID NO: 41468 - RNA, 20 nt, Human
ugaggugggaggaucacuua

SEQ ID NO: 41469 - RNA, 24 nt, Human
ugaggugggaggaucacuuaaggc

SEQ ID NO: 41470 - RNA, 26 nt, Human
ugaggugggaggaucacuuaaggcca

SEQ ID NO: 41471 - RNA, 19 nt, Human
ugcacuccagccugggcaa

SEQ ID NO: 41472 - RNA, 22 nt, Human
ugcacuccagccugggcaacaa

SEQ ID NO: 41473 - RNA, 19 nt, Human
ugccagggccuugaggccc

SEQ ID NO: 41474 - RNA, 24 nt, Human
ugcccaggcucccagcuacuuggg

SEQ ID NO: 41475 - RNA, 24 nt, Human
ugccuguagucccagcuacucagg

SEQ ID NO: 41476 - RNA, 24 nt, Human
ugccugucagcccagcuacucagg

SEQ ID NO: 41477 - RNA, 22 nt, Human
uggacugggaggacaagaccac

SEQ ID NO: 41478 - RNA, 23 nt, Human
uggaucaccugagcucaggaguu

SEQ ID NO: 41479 - RNA, 27 nt, Human
uggaucaccugagcucaggaguuggag

SEQ ID NO: 41480 - RNA, 24 nt, Human
uggccaggcaugguggcucaugcc

SEQ ID NO: 41481 - RNA, 24 nt, Human
uggccaggugcuguggcucacacc

SEQ ID NO: 41482 - RNA, 21 nt, Human
uggcucacaccuguaauccca

SEQ ID NO: 41483 - RNA, 21 nt, Human
uggcucaccccuguaauccca

SEQ ID NO: 41484 - RNA, 24 nt, Human
uggcucaccccuguaaucccagca

SEQ ID NO: 41485 - RNA, 26 nt, Human
ugggaaagaacacagaggaauccagc

SEQ ID NO: 41486 - RNA, 21 nt, Human
ugggaggaucacuuaaggcca

SEQ ID NO: 41487 - RNA, 20 nt, Human
ugggaggcugaggcaggagg

SEQ ID NO: 41488 - RNA, 23 nt, Human
ugggaggcugaggcaggaggauc

SEQ ID NO: 41489 - RNA, 19 nt, Human
ugggaggcugaggcgggag

SEQ ID NO: 41490 - RNA, 24 nt, Human
ugggaggcugaggcgggaggauca

SEQ ID NO: 41491 - RNA, 20 nt, Human
ugggaggcugaggcgggugg

SEQ ID NO: 41492 - RNA, 23 nt, Human
ugggaggcugaggcggguggauc

SEQ ID NO: 41493 - RNA, 24 nt, Human
ugggaggcugaggcggguggauca

SEQ ID NO: 41494 - RNA, 23 nt, Human
ugggaggcugggaacagcccagc

SEQ ID NO: 41495 - RNA, 20 nt, Human
ugggcaacacagugagaccc

SEQ ID NO: 41496 - RNA, 24 nt, Human
ugggcaacacagugagacccuguc

SEQ ID NO: 41497 - RNA, 24 nt, Human
ugguggcucaccccuguaauccca

SEQ ID NO: 41498 - RNA, 24 nt, Human
ugguggcucaugccuguaguccca

SEQ ID NO: 41499 - RNA, 22 nt, Human
uggugggugccugucagcccag

SEQ ID NO: 41500 - RNA, 21 nt, Human
ugucuggggugagcgucugca

SEQ ID NO: 41501 - RNA, 19 nt, Human
ugugcugcaacaggagggg

SEQ ID NO: 41502 - RNA, 19 nt, Human
uguggcucacaccuguaau

SEQ ID NO: 41503 - RNA, 19 nt, Human
ugugugccagggccuugag

SEQ ID NO: 41504 - RNA, 18 nt, Human
uuagcugggugugguggu

SEQ ID NO: 41505 - RNA, 24 nt, Human
uuagcugggugugguggugggugc

SEQ ID NO: 41506 - RNA, 22 nt, Human
uucaucaacuauugguugauaa

SEQ ID NO: 41507 - RNA, 22 nt, Human
uugagcccaagaguucaagacc

SEQ ID NO: 41508 - RNA, 24 nt, Human
uugggaggcugaggcaggaggauc

SEQ ID NO: 41509 - RNA, 25 nt, Human
uugggaggcugaggcgggaggauca

SEQ ID NO: 41510 - RNA, 25 nt, Human
uugggaggcugaggcggguggauca

SEQ ID NO: 41511 - RNA, 26 nt, Human
uuuccacagcguccagcucugcugug

SEQ ID NO: 41512 - RNA, 21 nt, Human
aaagcacuuuucagccuugug

SEQ ID NO: 41513 - RNA, 22 nt, Human
cagcaaagcacuuuucagccuu

SEQ ID NO: 41514 - RNA, 20 nt, Human
gcagaaagaaggagcuggag

SEQ ID NO: 41515 - RNA, 21 nt, Human
ugcagaaagaaggagcuggag

SEQ ID NO: 41516 - RNA, 24 nt, Human
uggagcucagagaacaggacucca

SEQ ID NO: 41517 - RNA, 26 nt, Human
uguuuauucaucaagucuuuaaagau

SEQ ID NO: 41518 - RNA, 19 nt, Human
aacucgguucccgggcuag

SEQ ID NO: 41519 - RNA, 22 nt, Human
acggcacagaccgcacucccgc

SEQ ID NO: 41520 - RNA, 25 nt, Human
caaacuccuggccggaacggcacaa

SEQ ID NO: 41521 - RNA, 18 nt, Human
ucugcagucggcaaacuc

SEQ ID NO: 41522 - RNA, 18 nt, Human
uggaaaacaaaaggaaaa

SEQ ID NO: 41523 - RNA, 22 nt, Human
uggaaaacaaaaggaaaacuua

SEQ ID NO: 41524 - RNA, 21 nt, Human
aagaaggaaaaucuccgaaaa

SEQ ID NO: 41525 - RNA, 23 nt, Human
aagcagauagacaauguagaaaa

SEQ ID NO: 41526 - RNA, 18 nt, Human
aguaagaaaaaaaaaaca

SEQ ID NO: 41527 - RNA, 20 nt, Human
aguagccaacucacaaaaau

SEQ ID NO: 41528 - RNA, 21 nt, Human
auacaagaauguaauauuuuu

SEQ ID NO: 41529 - RNA, 25 nt, Human
cacaguaagaaaaaaaaaacagaaa

SEQ ID NO: 41530 - RNA, 25 nt, Human
ccacaguaagaaaaaaaaaacagaa

SEQ ID NO: 41531 - RNA, 19 nt, Human
ccuacaugauaugccugaa

SEQ ID NO: 41532 - RNA, 21 nt, Human
cgucccgcuucuuggucucua

SEQ ID NO: 41533 - RNA, 22 nt, Human
cucacaaaaauaaaguauacaa

SEQ ID NO: 41534 - RNA, 21 nt, Human
cucacauuuauucucuugcau

SEQ ID NO: 41535 - RNA, 23 nt, Human
guaagaaggaaaaucuccgaaaa

SEQ ID NO: 41536 - RNA, 22 nt, Human
guagccaacucacaaaaauaaa

SEQ ID NO: 41537 - RNA, 19 nt, Human
uaacaguguaagaaggaaa

SEQ ID NO: 41538 - RNA, 22 nt, Human
uaaucgaaauuuucugagguuu

SEQ ID NO: 41539 - RNA, 24 nt, Human
ucuagaaacacagaaaguaaaccu

SEQ ID NO: 41540 - RNA, 21 nt, Human
uugcaucguaaauaguagcca

SEQ ID NO: 41541 - RNA, 25 nt, Human
uuggucucuagaaacacagggucac

SEQ ID NO: 41542 - RNA, 25 nt, Human
aaguguccuccuaagccaaggaggg

SEQ ID NO: 41543 - RNA, 20 nt, Human
agccaccuuaucuccucuuu

SEQ ID NO: 41544 - RNA, 21 nt, Human
agcugagcuaagaggagccca

SEQ ID NO: 41545 - RNA, 18 nt, Human
aucauguuggcagccagg

SEQ ID NO: 41546 - RNA, 21 nt, Human
ccgcuagcccugggggccugu

SEQ ID NO: 41547 - RNA, 18 nt, Human
ccuccuaagccaaggagg

SEQ ID NO: 41548 - RNA, 20 nt, Human
ccuccuuggggcgccccagc

SEQ ID NO: 41549 - RNA, 22 nt, Human
cgccccagcuuuggaagugucc

SEQ ID NO: 41550 - RNA, 21 nt, Human
cuguaguagcagauguucccc

SEQ ID NO: 41551 - RNA, 19 nt, Human
gagcccagggcagagacgg

SEQ ID NO: 41552 - RNA, 18 nt, Human
gaggagcccagggcagag

SEQ ID NO: 41553 - RNA, 23 nt, Human
gauguuccccgggcagccugugg

SEQ ID NO: 41554 - RNA, 21 nt, Human
gcucagcugagcuaagaggag

SEQ ID NO: 41555 - RNA, 24 nt, Human
ggagcccagggcagagacggggau

SEQ ID NO: 41556 - RNA, 18 nt, Human
uaagaggagcccagggca

SEQ ID NO: 41557 - RNA, 22 nt, Human
uacccaguguucccuccacaaa

SEQ ID NO: 41558 - RNA, 23 nt, Human
uauuuagcccugcucucuccacu

SEQ ID NO: 41559 - RNA, 20 nt, Human
ucaggccgugagaagccacc

SEQ ID NO: 41560 - RNA, 18 nt, Human
uccccgggcagccugugg

SEQ ID NO: 41561 - RNA, 18 nt, Human
uccccgggcagccugugg

SEQ ID NO: 41562 - RNA, 19 nt, Human
uccccgggcagccuguggu

SEQ ID NO: 41563 - RNA, 20 nt, Human
uccccgggcagccuguggug

SEQ ID NO: 41564 - RNA, 22 nt, Human
ugccuccuuggggcgccccagc

SEQ ID NO: 41565 - RNA, 24 nt, Human
ugggggccuguccgcaggcacggg

SEQ ID NO: 41566 - RNA, 22 nt, Human
aaaaacgauuccuacuugcuga

SEQ ID NO: 41567 - RNA, 24 nt, Human
aagucaccccaaagaacucuccua

SEQ ID NO: 41568 - RNA, 18 nt, Human
caagggcccgcugcaccu

SEQ ID NO: 41569 - RNA, 22 nt, Human
caccccaaagaacucuccuagg

SEQ ID NO: 41570 - RNA, 19 nt, Human
cacgugguccuuuuauucu

SEQ ID NO: 41571 - RNA, 18 nt, Human
cacugacguggagggcuc

SEQ ID NO: 41572 - RNA, 20 nt, Human
cagagucccccgccaagggc

SEQ ID NO: 41573 - RNA, 20 nt, Human
cagcuccucccucagagucc

SEQ ID NO: 41574 - RNA, 24 nt, Human
ccagcuccucccucagaguccccc

SEQ ID NO: 41575 - RNA, 22 nt, Human
cccagcuccucccucagagucc

SEQ ID NO: 41576 - RNA, 26 nt, Human
ccccaaagaacucuccuagggucgcc

SEQ ID NO: 41577 - RNA, 18 nt, Human
ccccgccaagggcccgcu

SEQ ID NO: 41578 - RNA, 19 nt, Human
ccucagagucccccgccaa

SEQ ID NO: 41579 - RNA, 22 nt, Human
ccucccucagagucccccgcca

SEQ ID NO: 41580 - RNA, 18 nt, Human
gacggauggauccagugg

SEQ ID NO: 41581 - RNA, 21 nt, Human
gacugcucccaaguguguucc

SEQ ID NO: 41582 - RNA, 23 nt, Human
ggcacugacguggagggcucagg

SEQ ID NO: 41583 - RNA, 22 nt, Human
gugggagccuccuccuucccca

SEQ ID NO: 41584 - RNA, 21 nt, Human
ucccucagagucccccgccaa

SEQ ID NO: 41585 - RNA, 18 nt, Human
ugcugacgcggaaagcuc

SEQ ID NO: 41586 - RNA, 19 nt, Human
ugcuggguuaggaggggcu

SEQ ID NO: 41587 - RNA, 24 nt, Human
uuuaaggggcacugagacauagga

SEQ ID NO: 41588 - RNA, 27 nt, Human
aaaaaaacaaaagaaaaaaaguggcac

SEQ ID NO: 41589 - RNA, 19 nt, Human
aaaacaaaauauaauuccc

SEQ ID NO: 41590 - RNA, 21 nt, Human
aaaagaaaaaaaguggcacaa

SEQ ID NO: 41591 - RNA, 28 nt, Human
aaacaacaacaacaaaaaaaaaacaaaa

SEQ ID NO: 41592 - RNA, 19 nt, Human
aaacagcacauuagcaaac

SEQ ID NO: 41593 - RNA, 20 nt, Human
aaacagcacauuagcaaacc

SEQ ID NO: 41594 - RNA, 21 nt, Human
aacagcacauuagcaaaccca

SEQ ID NO: 41595 - RNA, 24 nt, Human
acaacaacaaaaaaaaaacaaaag

SEQ ID NO: 41596 - RNA, 25 nt, Human
acaacaacaaaaaaaaaacaaaaga

SEQ ID NO: 41597 - RNA, 26 nt, Human
acaacaacaacaaaaaaaaaacaaaa

SEQ ID NO: 41598 - RNA, 24 nt, Human
acagagcgagacuccaucucaaaa

SEQ ID NO: 41599 - RNA, 21 nt, Human
acugcacuccagccuggguga

SEQ ID NO: 41600 - RNA, 24 nt, Human
acugcacuccagccugggugacag

SEQ ID NO: 41601 - RNA, 26 nt, Human
acugcacuccagccugggugacagag

SEQ ID NO: 41602 - RNA, 18 nt, Human
agagcagagcaacaaaag

SEQ ID NO: 41603 - RNA, 24 nt, Human
agccugggugacagagcgagacuc

SEQ ID NO: 41604 - RNA, 21 nt, Human
caaaagaaaaaaaguggcaca

SEQ ID NO: 41605 - RNA, 24 nt, Human
caaaaggcagcaaggcuggcagau

SEQ ID NO: 41606 - RNA, 24 nt, Human
caacaaaaaaaaaacaaaagaaaa

SEQ ID NO: 41607 - RNA, 22 nt, Human
caccuggugacuguaaagacaa

SEQ ID NO: 41608 - RNA, 22 nt, Human
cacuccagccugggugacagag

SEQ ID NO: 41609 - RNA, 24 nt, Human
cacuccagccugggugacagagcg

SEQ ID NO: 41610 - RNA, 19 nt, Human
cacugcacuccagccuggg

SEQ ID NO: 41611 - RNA, 19 nt, Human
cacugcacuccagccuggg

SEQ ID NO: 41612 - RNA, 20 nt, Human
cacugcacuccagccugggu

SEQ ID NO: 41613 - RNA, 20 nt, Human
cacugcacuccagccugggu

SEQ ID NO: 41614 - RNA, 21 nt, Human
cacugcacuccagccugggug

SEQ ID NO: 41615 - RNA, 22 nt, Human
cacugcacuccagccuggguga

SEQ ID NO: 41616 - RNA, 23 nt, Human
cacugcacuccagccugggugac

SEQ ID NO: 41617 - RNA, 24 nt, Human
cacugcacuccagccugggugaca

SEQ ID NO: 41618 - RNA, 25 nt, Human
cacugcacuccagccugggugacag

SEQ ID NO: 41619 - RNA, 22 nt, Human
caucucaaaaaacaacaacaac

SEQ ID NO: 41620 - RNA, 22 nt, Human
ccugggugacagagcgagacuc

SEQ ID NO: 41621 - RNA, 24 nt, Human
cucaaaaaacaacaacaacaaaaa

SEQ ID NO: 41622 - RNA, 20 nt, Human
cugggaagaaaaaaacaaaa

SEQ ID NO: 41623 - RNA, 24 nt, Human
gcacuccagccugggugacagagc

SEQ ID NO: 41624 - RNA, 23 nt, Human
gcagagcaacaaaaggcagcaag

SEQ ID NO: 41625 - RNA, 21 nt, Human
uauugccugggaagaaaaaaa

SEQ ID NO: 41626 - RNA, 20 nt, Human
ucacacacauguucagaggu

SEQ ID NO: 41627 - RNA, 23 nt, Human
uccagccugggugacagagcgag

SEQ ID NO: 41628 - RNA, 24 nt, Human
uccagccugggugacagagcgaga

SEQ ID NO: 41629 - RNA, 28 nt, Human
ucucaaaaaacaacaacaacaaaaaaaa

SEQ ID NO: 41630 - RNA, 18 nt, Human
ugccugggaagaaaaaaa

SEQ ID NO: 41631 - RNA, 23 nt, Human
uggcuugcaucuccuguuccaaa

SEQ ID NO: 41632 - RNA, 22 nt, Human
ugggaagaaaaaaacaaaauau

SEQ ID NO: 41633 - RNA, 25 nt, Human
uuuaaaacagcacauuagcaaaccc

SEQ ID NO: 41634 - RNA, 18 nt, Human
aauagugaaccaaaacua

SEQ ID NO: 41635 - RNA, 25 nt, Human
aaucacacacuggcaaguuuaugag

SEQ ID NO: 41636 - RNA, 20 nt, Human
acccuuucuuuuugacuccu

SEQ ID NO: 41637 - RNA, 24 nt, Human
aggaagaauccuccuggaauccug

SEQ ID NO: 41638 - RNA, 18 nt, Human
augaacacacuucuuaga

SEQ ID NO: 41639 - RNA, 21 nt, Human
augcauuucuguugaauauau

SEQ ID NO: 41640 - RNA, 21 nt, Human
caagggaccagcgggucaggc

SEQ ID NO: 41641 - RNA, 27 nt, Human
ccucccgccagcaagggaccagcgggu

SEQ ID NO: 41642 - RNA, 20 nt, Human
cuccauguugauguuuuugu

SEQ ID NO: 41643 - RNA, 24 nt, Human
cuccuauuaaaaacacucagcaaa

SEQ ID NO: 41644 - RNA, 26 nt, Human
cucuauggcuguugcaugaacacacu

SEQ ID NO: 41645 - RNA, 21 nt, Human
gaaccaaaacuacuuggaaaa

SEQ ID NO: 41646 - RNA, 23 nt, Human
gacccuuucuuuuugacuccuau

SEQ ID NO: 41647 - RNA, 28 nt, Human
gauugccuuucaauagcaccaucucuau

SEQ ID NO: 41648 - RNA, 23 nt, Human
gcgggucaggccuggcuacugcg

SEQ ID NO: 41649 - RNA, 24 nt, Human
ggaauuauuuaugaugauucguac

SEQ ID NO: 41650 - RNA, 21 nt, Human
gggucaggccuggcuacugcg

SEQ ID NO: 41651 - RNA, 22 nt, Human
gucauggaauaugcacauuuuc

SEQ ID NO: 41652 - RNA, 22 nt, Human
gugaacaccacuacuauaaaua

SEQ ID NO: 41653 - RNA, 21 nt, Human
uaacaaaauauugaaaugaga

SEQ ID NO: 41654 - RNA, 18 nt, Human
uagaagacacugaagaga

SEQ ID NO: 41655 - RNA, 18 nt, Human
uagaagacacugaagaga

SEQ ID NO: 41656 - RNA, 22 nt, Human
uaguuaacaaaauauugaaaug

SEQ ID NO: 41657 - RNA, 19 nt, Human
ucaggccuggcuacugcgu

SEQ ID NO: 41658 - RNA, 21 nt, Human
ucguacagcuucuuuuacaaa

SEQ ID NO: 41659 - RNA, 22 nt, Human
ucuguuauuauuuccuacuuca

SEQ ID NO: 41660 - RNA, 22 nt, Human
ugaauauauaucuaggagauaa

SEQ ID NO: 41661 - RNA, 23 nt, Human
ugauucguacagcuucuuuuaca

SEQ ID NO: 41662 - RNA, 19 nt, Human
uggaauccugaugcuuguc

SEQ ID NO: 41663 - RNA, 23 nt, Human
ugggacuauugugaacaccacua

SEQ ID NO: 41664 - RNA, 21 nt, Human
uguucauuuacuguuuucuuu

SEQ ID NO: 41665 - RNA, 20 nt, Human
uugaauauauaucuaggaga

SEQ ID NO: 41666 - RNA, 21 nt, Human
accccuugagggacagggacu

SEQ ID NO: 41667 - RNA, 27 nt, Human
ccacccuccaggccccgucuccgaucu

SEQ ID NO: 41668 - RNA, 20 nt, Human
ccuccaggccccgucucccc

SEQ ID NO: 41669 - RNA, 22 nt, Human
ccuuugcgugcugccacccucc

SEQ ID NO: 41670 - RNA, 21 nt, Human
cgacuugcgggaugcgcgccc

SEQ ID NO: 41671 - RNA, 20 nt, Human
cuucccccagcgacucgccg

SEQ ID NO: 41672 - RNA, 21 nt, Human
cuuugcgugcugccacccucc

SEQ ID NO: 41673 - RNA, 18 nt, Human
gacuucccccagcgacuc

SEQ ID NO: 41674 - RNA, 21 nt, Human
gaguuccggcagcgcugggug

SEQ ID NO: 41675 - RNA, 21 nt, Human
gauccgccggguuccgacuug

SEQ ID NO: 41676 - RNA, 20 nt, Human
gaucugcgggauccgauccg

SEQ ID NO: 41677 - RNA, 18 nt, Human
gccccgaguuccggcagc

SEQ ID NO: 41678 - RNA, 24 nt, Human
ugaaaacaugaauuaggcaaacua

SEQ ID NO: 41679 - RNA, 19 nt, Human
ugaauuaggcaaacuaauc

SEQ ID NO: 41680 - RNA, 25 nt, Human
aaaaaaaaaaaaaaaggcugcccag

SEQ ID NO: 41681 - RNA, 24 nt, Human
aaaaaagugugaguucaaacccau

SEQ ID NO: 41682 - RNA, 21 nt, Human
aaaacagaaccggggaaaaaa

SEQ ID NO: 41683 - RNA, 23 nt, Human
aaaauacaacuccaucuuuucau

SEQ ID NO: 41684 - RNA, 20 nt, Human
aaaauagaucccauuacaga

SEQ ID NO: 41685 - RNA, 23 nt, Human
aaauguaaaaaauuacuauuuua

SEQ ID NO: 41686 - RNA, 19 nt, Human
aacagcuuaucagagggaa

SEQ ID NO: 41687 - RNA, 24 nt, Human
aaccacaagaagaaaacacagaca

SEQ ID NO: 41688 - RNA, 23 nt, Human
aagaagaaaacacagacaaaugg

SEQ ID NO: 41689 - RNA, 22 nt, Human
aagagucucauaaggaugaccc

SEQ ID NO: 41690 - RNA, 24 nt, Human
aagcagaaauuuuugaacacguag

SEQ ID NO: 41691 - RNA, 21 nt, Human
aagcaggauguuagccacgca

SEQ ID NO: 41692 - RNA, 21 nt, Human
aagcgcccugagaaccggcuc

SEQ ID NO: 41693 - RNA, 18 nt, Human
aaggaugacccuguagac

SEQ ID NO: 41694 - RNA, 24 nt, Human
aaggggagaaaacagaaccgggga

SEQ ID NO: 41695 - RNA, 20 nt, Human
aaucauuuuuuucuuuuuca

SEQ ID NO: 41696 - RNA, 20 nt, Human
aaugcuccauauggaaguau

SEQ ID NO: 41697 - RNA, 21 nt, Human
acaaucucuuuaaucccaugc

SEQ ID NO: 41698 - RNA, 19 nt, Human
acacagacaaauggcuuua

SEQ ID NO: 41699 - RNA, 23 nt, Human
acuauacagugaaugaaugaugu

SEQ ID NO: 41700 - RNA, 21 nt, Human
acuccaucuuuucauuuucua

SEQ ID NO: 41701 - RNA, 23 nt, Human
agaaauaugcauuuuaauacuuc

SEQ ID NO: 41702 - RNA, 24 nt, Human
agaaauuauucuauaaauucugua

SEQ ID NO: 41703 - RNA, 24 nt, Human
agaagucacugauagaacuuaaaa

SEQ ID NO: 41704 - RNA, 23 nt, Human
agaguugguaaaaauuucuacca

SEQ ID NO: 41705 - RNA, 19 nt, Human
agucaggacaaaugggcac

SEQ ID NO: 41706 - RNA, 19 nt, Human
aguggccauacuccucuau

SEQ ID NO: 41707 - RNA, 22 nt, Human
auaguucucucauauuuuucuu

SEQ ID NO: 41708 - RNA, 22 nt, Human
auuuugagaauuucugaaacuc

SEQ ID NO: 41709 - RNA, 23 nt, Human
caaaauacaacuccaucuuuuca

SEQ ID NO: 41710 - RNA, 18 nt, Human
caaaauaguucacagugc

SEQ ID NO: 41711 - RNA, 18 nt, Human
caaacuuacauaagaaaa

SEQ ID NO: 41712 - RNA, 26 nt, Human
caagaagaaaacacagacaaauggcu

SEQ ID NO: 41713 - RNA, 21 nt, Human
cacauagguacauuccacagg

SEQ ID NO: 41714 - RNA, 19 nt, Human
caccccguaugaacaggau

SEQ ID NO: 41715 - RNA, 28 nt, Human
cagaaccggggaaaaaacaaggagcaaa

SEQ ID NO: 41716 - RNA, 22 nt, Human
cagacagucaggacaaaugggc

SEQ ID NO: 41717 - RNA, 24 nt, Human
cagacagucaggacaaaugggcac

SEQ ID NO: 41718 - RNA, 19 nt, Human
cagcguguggcucgggagc

SEQ ID NO: 41719 - RNA, 21 nt, Human
cauagguacauuccacaggga

SEQ ID NO: 41720 - RNA, 18 nt, Human
ccccuugacaagccuucc

SEQ ID NO: 41721 - RNA, 20 nt, Human
ccccuugacaagccuuccgg

SEQ ID NO: 41722 - RNA, 24 nt, Human
cccugcccugccgcagcccgggag

SEQ ID NO: 41723 - RNA, 22 nt, Human
cccugccgcagcccgggagaga

SEQ ID NO: 41724 - RNA, 19 nt, Human
ccggccccacucacucucg

SEQ ID NO: 41725 - RNA, 22 nt, Human
ccugcccugccgcagcccggga

SEQ ID NO: 41726 - RNA, 28 nt, Human
ccuggcuucagcagcuugcagccccagc

SEQ ID NO: 41727 - RNA, 21 nt, Human
cguguggcucgggagcccugg

SEQ ID NO: 41728 - RNA, 22 nt, Human
cuccccgcccugcccugccgca

SEQ ID NO: 41729 - RNA, 18 nt, Human
cugaaacucacauaggua

SEQ ID NO: 41730 - RNA, 20 nt, Human
cugccaccagaacagcuuau

SEQ ID NO: 41731 - RNA, 18 nt, Human
cuggcuucagcagcuugc

SEQ ID NO: 41732 - RNA, 21 nt, Human
gagaauuucugaaacucacau

SEQ ID NO: 41733 - RNA, 22 nt, Human
gcggagcuccccgcccugcccu

SEQ ID NO: 41734 - RNA, 20 nt, Human
ggaaaaaacaaggagcaaag

SEQ ID NO: 41735 - RNA, 23 nt, Human
ggacaaaugggcacaggcuuccc

SEQ ID NO: 41736 - RNA, 22 nt, Human
gugaaacuuuugucuaguuuuu

SEQ ID NO: 41737 - RNA, 18 nt, Human
gugacccuuauacuuucu

SEQ ID NO: 41738 - RNA, 23 nt, Human
gugcaacauuuaauagucacaaa

SEQ ID NO: 41739 - RNA, 24 nt, Human
uaaaacaaucauuuuuuucuuuuu

SEQ ID NO: 41740 - RNA, 23 nt, Human
uaaaccagugagcugaauaacau

SEQ ID NO: 41741 - RNA, 21 nt, Human
uaauacacuugugucagauaa

SEQ ID NO: 41742 - RNA, 18 nt, Human
uacacaggaacaaaaaaa

SEQ ID NO: 41743 - RNA, 22 nt, Human
uacuaaaugccauaaacacaag

SEQ ID NO: 41744 - RNA, 19 nt, Human
uagcagacagucaggacaa

SEQ ID NO: 41745 - RNA, 23 nt, Human
uaggacaauauaacaauggaacc

SEQ ID NO: 41746 - RNA, 18 nt, Human
uagucaaugauuacuaua

SEQ ID NO: 41747 - RNA, 19 nt, Human
uauauuuguaaaccaguga

SEQ ID NO: 41748 - RNA, 21 nt, Human
ucaaagcaggauguuagccac

SEQ ID NO: 41749 - RNA, 22 nt, Human
ucacauagguacauuccacagg

SEQ ID NO: 41750 - RNA, 18 nt, Human
ucagaggaaccgaaguaa

SEQ ID NO: 41751 - RNA, 24 nt, Human
ucagcagcuugcagccccagcagu

SEQ ID NO: 41752 - RNA, 23 nt, Human
ucauuuuuuucuuuuucagcagu

SEQ ID NO: 41753 - RNA, 21 nt, Human
uccacagggaauauacagaaa

SEQ ID NO: 41754 - RNA, 18 nt, Human
ucccggccccacucacuc

SEQ ID NO: 41755 - RNA, 18 nt, Human
ucccucagccagcacccc

SEQ ID NO: 41756 - RNA, 23 nt, Human
uccucuauaccacaggguucuac

SEQ ID NO: 41757 - RNA, 20 nt, Human
ucuaaaacaaucauuuuuuu

SEQ ID NO: 41758 - RNA, 25 nt, Human
ucuauaccacaggguucuacaaaga

SEQ ID NO: 41759 - RNA, 24 nt, Human
ugaaaaaugcuccauauggaagua

SEQ ID NO: 41760 - RNA, 18 nt, Human
ugaaagaaacucaaauau

SEQ ID NO: 41761 - RNA, 22 nt, Human
ugaaagaucacuugaacuuccc

SEQ ID NO: 41762 - RNA, 22 nt, Human
ugaagagaugaaaaauuugaga

SEQ ID NO: 41763 - RNA, 20 nt, Human
ugaagguacuaaaugccaua

SEQ ID NO: 41764 - RNA, 19 nt, Human
ugagcugaauaacauggca

SEQ ID NO: 41765 - RNA, 24 nt, Human
ugcaauuaaaaaaaaaaaaaaaaa

SEQ ID NO: 41766 - RNA, 19 nt, Human
ugcgcggagcuccccgccc

SEQ ID NO: 41767 - RNA, 22 nt, Human
ugcgcggagcuccccgcccugc

SEQ ID NO: 41768 - RNA, 18 nt, Human
ugcgggucccggccccac

SEQ ID NO: 41769 - RNA, 19 nt, Human
uggcacacucauugccagc

SEQ ID NO: 41770 - RNA, 18 nt, Human
uggcacuaauaacucugg

SEQ ID NO: 41771 - RNA, 20 nt, Human
uggcucgaagcauaggacaa

SEQ ID NO: 41772 - RNA, 20 nt, Human
uggucauuaacuguuuucca

SEQ ID NO: 41773 - RNA, 19 nt, Human
ugucaaaauacaacuccau

SEQ ID NO: 41774 - RNA, 19 nt, Human
ugugcugggcauuuauguu

SEQ ID NO: 41775 - RNA, 22 nt, Human
uguugaagaauucauuguuuag

SEQ ID NO: 41776 - RNA, 24 nt, Human
uuagaaaacucugaaaaaugcucc

SEQ ID NO: 41777 - RNA, 24 nt, Human
uuccagugcaaaaauagaucccau

SEQ ID NO: 41778 - RNA, 21 nt, Human
uugaaaucagaggaaccgaag

SEQ ID NO: 41779 - RNA, 18 nt, Human
uugaagaauucauuguuu

SEQ ID NO: 41780 - RNA, 23 nt, Human
uuguguuugcgucucuuucuccu

SEQ ID NO: 41781 - RNA, 23 nt, Human
uuguguuuucuucaaaauaguuc

SEQ ID NO: 41782 - RNA, 24 nt, Human
uuuuuuaacaaugaauugugcugg

SEQ ID NO: 41783 - RNA, 23 nt, Human
uuuuuucuuuuuuccuuuuaaug

SEQ ID NO: 41784 - RNA, 21 nt, Human
aggcaggggcgaggggccggg

SEQ ID NO: 41785 - RNA, 18 nt, Human
agggaggugggcgggcag

SEQ ID NO: 41786 - RNA, 18 nt, Human
aggugggcgggcaggggg

SEQ ID NO: 41787 - RNA, 29 nt, Human
auggcagcuggggguuggggggggucugg

SEQ ID NO: 41788 - RNA, 22 nt, Human
caaaauaaauacgggacugacc

SEQ ID NO: 41789 - RNA, 24 nt, Human
caagacgcacacccaggcacaggc

SEQ ID NO: 41790 - RNA, 24 nt, Human
cagaccccgaggcuuuaaggcaaa

SEQ ID NO: 41791 - RNA, 18 nt, Human
cagcagggucagcuucuc

SEQ ID NO: 41792 - RNA, 18 nt, Human
cagcccgggccgggucag

SEQ ID NO: 41793 - RNA, 18 nt, Human
cagcuccgcccacagccc

SEQ ID NO: 41794 - RNA, 20 nt, Human
caggagaaaggccagcagug

SEQ ID NO: 41795 - RNA, 20 nt, Human
cagugccaggcaggggcgag

SEQ ID NO: 41796 - RNA, 18 nt, Human
ccacuccaggcccuggca

SEQ ID NO: 41797 - RNA, 20 nt, Human
cccacagcccgcucucggca

SEQ ID NO: 41798 - RNA, 23 nt, Human
cccacagcccgcucucggcaucu

SEQ ID NO: 41799 - RNA, 21 nt, Human
ccccuugguccugaaccucca

SEQ ID NO: 41800 - RNA, 21 nt, Human
cccgcaccguugacgcccagg

SEQ ID NO: 41801 - RNA, 18 nt, Human
cccgccgcgccgcugggc

SEQ ID NO: 41802 - RNA, 19 nt, Human
cccgccgcgccgcugggca

SEQ ID NO: 41803 - RNA, 24 nt, Human
ccgccgcgccgcugggcaucgccc

SEQ ID NO: 41804 - RNA, 24 nt, Human
ccgcgcgggggcggggcgcucggg

SEQ ID NO: 41805 - RNA, 19 nt, Human
ccucagcgccgcggcccgc

SEQ ID NO: 41806 - RNA, 21 nt, Human
ccucccuggcccagcucuggg

SEQ ID NO: 41807 - RNA, 20 nt, Human
ccuugccuggccagcagggu

SEQ ID NO: 41808 - RNA, 25 nt, Human
cgaggccgggcaggagaaaggccag

SEQ ID NO: 41809 - RNA, 19 nt, Human
cgccaagacgcacacccag

SEQ ID NO: 41810 - RNA, 18 nt, Human
cgccgggccccgcagccc

SEQ ID NO: 41811 - RNA, 19 nt, Human
cggcaaccgcagugaccac

SEQ ID NO: 41812 - RNA, 18 nt, Human
cggcgucgccuugggcgg

SEQ ID NO: 41813 - RNA, 23 nt, Human
cgggcagggggccaagcugggug

SEQ ID NO: 41814 - RNA, 23 nt, Human
cucaaagcaaaauaaauacggga

SEQ ID NO: 41815 - RNA, 19 nt, Human
cucccuggcccagcucugg

SEQ ID NO: 41816 - RNA, 22 nt, Human
cugacccagcuccgcccacagc

SEQ ID NO: 41817 - RNA, 18 nt, Human
cuggccagcagggucagc

SEQ ID NO: 41818 - RNA, 21 nt, Human
gagagcagggccagaggagcc

SEQ ID NO: 41819 - RNA, 21 nt, Human
gagcagugccaggcaggggcg

SEQ ID NO: 41820 - RNA, 20 nt, Human
gagcccgaagcacucgccaa

SEQ ID NO: 41821 - RNA, 19 nt, Human
gaggccgggcaggagaaag

SEQ ID NO: 41822 - RNA, 20 nt, Human
gcagcuggggguuggggggg

SEQ ID NO: 41823 - RNA, 18 nt, Human
gccccgccgggccccgca

SEQ ID NO: 41824 - RNA, 24 nt, Human
gcccgcaccguugacgcccaggag

SEQ ID NO: 41825 - RNA, 20 nt, Human
gcuggggguugggggggguc

SEQ ID NO: 41826 - RNA, 22 nt, Human
ggagagcagggccagaggagcc

SEQ ID NO: 41827 - RNA, 18 nt, Human
ggccagcagggucagcuu

SEQ ID NO: 41828 - RNA, 19 nt, Human
ggcccggcucccagggagg

SEQ ID NO: 41829 - RNA, 22 nt, Human
ggccgggcagaccccgaggcuu

SEQ ID NO: 41830 - RNA, 19 nt, Human
gggcaggagaaaggccagc

SEQ ID NO: 41831 - RNA, 21 nt, Human
gggccgggcagaccccgaggc

SEQ ID NO: 41832 - RNA, 24 nt, Human
gggcggggcgcucgggcguccggg

SEQ ID NO: 41833 - RNA, 19 nt, Human
gggggcggggcgcucgggc

SEQ ID NO: 41834 - RNA, 18 nt, Human
guacaggggcuggaggac

SEQ ID NO: 41835 - RNA, 19 nt, Human
gucgccuugggcggugagc

SEQ ID NO: 41836 - RNA, 20 nt, Human
gugggagagcgauggcagcu

SEQ ID NO: 41837 - RNA, 19 nt, Human
ucaaagcaaaauaaauacg

SEQ ID NO: 41838 - RNA, 23 nt, Human
ucccgcaggacagccaccucccu

SEQ ID NO: 41839 - RNA, 23 nt, Human
ucccgcgggacagccaccucccu

SEQ ID NO: 41840 - RNA, 23 nt, Human
uccugaaccuccacuccaggccc

SEQ ID NO: 41841 - RNA, 24 nt, Human
uccugaaccuccacuccaggcccu

SEQ ID NO: 41842 - RNA, 19 nt, Human
ugacccagcuccgcccaca

SEQ ID NO: 41843 - RNA, 23 nt, Human
ugcccgcaccguugacgcccagg

SEQ ID NO: 41844 - RNA, 21 nt, Human
uggcagcuggggguugggggg

SEQ ID NO: 41845 - RNA, 26 nt, Human
uggcccagcucuggguggucaguggg

SEQ ID NO: 41846 - RNA, 20 nt, Human
ugggagagcgauggcagcug

SEQ ID NO: 41847 - RNA, 27 nt, Human
ugggagagcgauggcagcuggggguug

SEQ ID NO: 41848 - RNA, 18 nt, Human
uggggguugggggggguc

SEQ ID NO: 41849 - RNA, 23 nt, Human
ugguccagccggcgucgccuugg

SEQ ID NO: 41850 - RNA, 21 nt, Human
uuuaaaacaaacaucugugcg

SEQ ID NO: 41851 - RNA, 22 nt, Human
uuuaaaacaaacaucugugcgc

SEQ ID NO: 41852 - RNA, 21 nt, Human
aaaagccuccuugacucacag

SEQ ID NO: 41853 - RNA, 23 nt, Human
aaacagagacugcuucgagccug

SEQ ID NO: 41854 - RNA, 18 nt, Human
aacugcaggcagagagga

SEQ ID NO: 41855 - RNA, 18 nt, Human
acagagggcuccggggug

SEQ ID NO: 41856 - RNA, 20 nt, Human
acccugagguuugggaacac

SEQ ID NO: 41857 - RNA, 21 nt, Human
accucgcaggacaucaggagg

SEQ ID NO: 41858 - RNA, 23 nt, Human
acgcuaagaccccagcaccuaau

SEQ ID NO: 41859 - RNA, 20 nt, Human
agagaggaguccuucccgcu

SEQ ID NO: 41860 - RNA, 19 nt, Human
aggaggaggcggcuccgca

SEQ ID NO: 41861 - RNA, 21 nt, Human
aggauguaagaugggcccugc

SEQ ID NO: 41862 - RNA, 19 nt, Human
aggcagggaaggcgaugga

SEQ ID NO: 41863 - RNA, 21 nt, Human
augggcccugcuugcccgucc

SEQ ID NO: 41864 - RNA, 20 nt, Human
cacccagagaccccggagcu

SEQ ID NO: 41865 - RNA, 25 nt, Human
cacccagagaccccggagcuugccc

SEQ ID NO: 41866 - RNA, 24 nt, Human
caccuucccuccugugccggcugc

SEQ ID NO: 41867 - RNA, 28 nt, Human
cacuggguccucucuccagggagugccu

SEQ ID NO: 41868 - RNA, 21 nt, Human
cagaagaggcuccacacagca

SEQ ID NO: 41869 - RNA, 21 nt, Human
cagagccuccaggaugccccc

SEQ ID NO: 41870 - RNA, 21 nt, Human
cagcaggucucccuucaggac

SEQ ID NO: 41871 - RNA, 19 nt, Human
cagcccuuagggugguccc

SEQ ID NO: 41872 - RNA, 20 nt, Human
cagcucagcugcagcccuuc

SEQ ID NO: 41873 - RNA, 18 nt, Human
caggaggugcccagggcu

SEQ ID NO: 41874 - RNA, 25 nt, Human
caggaugcccccgggcugcgcugga

SEQ ID NO: 41875 - RNA, 21 nt, Human
ccacccagagaccccggagcu

SEQ ID NO: 41876 - RNA, 24 nt, Human
ccacccagagaccccggagcuugc

SEQ ID NO: 41877 - RNA, 20 nt, Human
cccccgggcugcgcuggacg

SEQ ID NO: 41878 - RNA, 25 nt, Human
ccccggagcuugcccgcagacugcc

SEQ ID NO: 41879 - RNA, 24 nt, Human
cccggccugccccagcucugggaa

SEQ ID NO: 41880 - RNA, 22 nt, Human
cccuuaggguggucccugcgug

SEQ ID NO: 41881 - RNA, 18 nt, Human
ccgggguggggccugaga

SEQ ID NO: 41882 - RNA, 21 nt, Human
ccuggagaaauucaaccccca

SEQ ID NO: 41883 - RNA, 18 nt, Human
cguguguaaacuuggaca

SEQ ID NO: 41884 - RNA, 20 nt, Human
cguguguaaacuuggacaag

SEQ ID NO: 41885 - RNA, 24 nt, Human
cuccagcaccgagccugggguacc

SEQ ID NO: 41886 - RNA, 20 nt, Human
cucuccagcaccgagccugg

SEQ ID NO: 41887 - RNA, 27 nt, Human
cugcagcccuuccugggucagcucucc

SEQ ID NO: 41888 - RNA, 22 nt, Human
cuucccgcuuccuccccagggg

SEQ ID NO: 41889 - RNA, 23 nt, Human
gagaggcagggaaggcgauggag

SEQ ID NO: 41890 - RNA, 19 nt, Human
gagccugggcgccggggcg

SEQ ID NO: 41891 - RNA, 19 nt, Human
gagcuugcccgcagacugc

SEQ ID NO: 41892 - RNA, 18 nt, Human
gagggcuccggggugggg

SEQ ID NO: 41893 - RNA, 21 nt, Human
gcacagagggcuccggggugg

SEQ ID NO: 41894 - RNA, 24 nt, Human
gcagcccuuccugggucagcucuc

SEQ ID NO: 41895 - RNA, 21 nt, Human
gcagugcuggaaacagagacu

SEQ ID NO: 41896 - RNA, 23 nt, Human
gcagugcuggaaacagagacugc

SEQ ID NO: 41897 - RNA, 20 nt, Human
gcaugguccauuccuggcgg

SEQ ID NO: 41898 - RNA, 21 nt, Human
gcguguccuggggcgggcgac

SEQ ID NO: 41899 - RNA, 19 nt, Human
gcuacaguucaaccuggcu

SEQ ID NO: 41900 - RNA, 22 nt, Human
gcuggaaacagagacugcuucg

SEQ ID NO: 41901 - RNA, 19 nt, Human
gcugggucccagaagaggc

SEQ ID NO: 41902 - RNA, 21 nt, Human
gcuugcccguccugucccugc

SEQ ID NO: 41903 - RNA, 19 nt, Human
ggacaagucacuggguccu

SEQ ID NO: 41904 - RNA, 20 nt, Human
ggagaugcgcaugcugaucc

SEQ ID NO: 41905 - RNA, 18 nt, Human
ggaggugcccagggcuca

SEQ ID NO: 41906 - RNA, 19 nt, Human
ggcagggcaacccugaggu

SEQ ID NO: 41907 - RNA, 18 nt, Human
ggcuggcuucccgcuucc

SEQ ID NO: 41908 - RNA, 22 nt, Human
gggccugagagccucuggagug

SEQ ID NO: 41909 - RNA, 24 nt, Human
gggguggggccugagagccucugg

SEQ ID NO: 41910 - RNA, 23 nt, Human
ggguggggccugagagccucugg

SEQ ID NO: 41911 - RNA, 20 nt, Human
gucacuggguccucucucca

SEQ ID NO: 41912 - RNA, 23 nt, Human
gucagcucuccacccagagaccc

SEQ ID NO: 41913 - RNA, 24 nt, Human
gucagcucuccacccagagacccc

SEQ ID NO: 41914 - RNA, 24 nt, Human
uaagaugggcccugcuugcccguc

SEQ ID NO: 41915 - RNA, 18 nt, Human
uaggagaugcugugggac

SEQ ID NO: 41916 - RNA, 19 nt, Human
uaggagaugcugugggacg

SEQ ID NO: 41917 - RNA, 24 nt, Human
uaugcagacauggagaugcgcaug

SEQ ID NO: 41918 - RNA, 21 nt, Human
ucagcauuuauuuucuggaug

SEQ ID NO: 41919 - RNA, 21 nt, Human
ucagcugcagcccuuccuggg

SEQ ID NO: 41920 - RNA, 21 nt, Human
ucaggaggugcccagggcuca

SEQ ID NO: 41921 - RNA, 23 nt, Human
uccgcacagagggcuccggggug

SEQ ID NO: 41922 - RNA, 24 nt, Human
uccuggcggccugggggccucgcu

SEQ ID NO: 41923 - RNA, 23 nt, Human
uccuugagacagccacccagccc

SEQ ID NO: 41924 - RNA, 22 nt, Human
ucgcggugacuaccaugcccua

SEQ ID NO: 41925 - RNA, 24 nt, Human
ucuccagcaccgagccugggcgcc

SEQ ID NO: 41926 - RNA, 22 nt, Human
ugagguuugggaacaccgugac

SEQ ID NO: 41927 - RNA, 25 nt, Human
ugcccagggcucacaggcaugacuc

SEQ ID NO: 41928 - RNA, 18 nt, Human
ugcccggccugccccagc

SEQ ID NO: 41929 - RNA, 21 nt, Human
uggaaacagagacugcuucga

SEQ ID NO: 41930 - RNA, 26 nt, Human
uggacgcuaagaccccagcaccuaau

SEQ ID NO: 41931 - RNA, 19 nt, Human
uggagaggcagggaaggcg

SEQ ID NO: 41932 - RNA, 19 nt, Human
uggcuucccgcuuccuccc

SEQ ID NO: 41933 - RNA, 21 nt, Human
uguaaacuuggacaagucacu

SEQ ID NO: 41934 - RNA, 24 nt, Human
uguaaacuuggacaagucacuggg

SEQ ID NO: 41935 - RNA, 19 nt, Human
ugugcagacguggcugcuc

SEQ ID NO: 41936 - RNA, 18 nt, Human
uguguaaacuuggacaag

SEQ ID NO: 41937 - RNA, 19 nt, Human
uuuuuuuuuuuuuuugugu

SEQ ID NO: 41938 - RNA, 18 nt, Human
uuuuuuuuuuuuuuuuug

SEQ ID NO: 41939 - RNA, 19 nt, Human
uuuuuuuuuuuuuuuuugu

SEQ ID NO: 41940 - RNA, 22 nt, Human
aagucaguuucgguuuccuucc

SEQ ID NO: 41941 - RNA, 23 nt, Human
acaacgcagacacacagacaaac

SEQ ID NO: 41942 - RNA, 27 nt, Human
acaacgcagacacacagacaaacaugc

SEQ ID NO: 41943 - RNA, 21 nt, Human
agaaaagcagaucugcuugaa

SEQ ID NO: 41944 - RNA, 25 nt, Human
agacaaacaugcagaaaagcagauc

SEQ ID NO: 41945 - RNA, 23 nt, Human
agaccagauuggucagagcugag

SEQ ID NO: 41946 - RNA, 19 nt, Human
agcaaaggacauaaacgcc

SEQ ID NO: 41947 - RNA, 20 nt, Human
aguccauuuggaugaccaua

SEQ ID NO: 41948 - RNA, 19 nt, Human
augaaaaucacacacaacg

SEQ ID NO: 41949 - RNA, 20 nt, Human
auggaggccaaagcugcuag

SEQ ID NO: 41950 - RNA, 20 nt, Human
cacaacgcagacacacagac

SEQ ID NO: 41951 - RNA, 24 nt, Human
cacagacaaacaugcagaaaagca

SEQ ID NO: 41952 - RNA, 21 nt, Human
ccuccagcugcccagaguucc

SEQ ID NO: 41953 - RNA, 24 nt, Human
cgcagacacacagacaaacaugca

SEQ ID NO: 41954 - RNA, 24 nt, Human
cuagugggauggcccgggguuucu

SEQ ID NO: 41955 - RNA, 19 nt, Human
cuccugcgccuccagcugc

SEQ ID NO: 41956 - RNA, 18 nt, Human
cugcaugcuccucgugug

SEQ ID NO: 41957 - RNA, 25 nt, Human
cugcccagaguuccuuucuggcugc

SEQ ID NO: 41958 - RNA, 20 nt, Human
gaauucgcugcaugcuccuc

SEQ ID NO: 41959 - RNA, 23 nt, Human
gaggccccucagacagcaaagga

SEQ ID NO: 41960 - RNA, 23 nt, Human
gauuuuguauuuguuugguuuca

SEQ ID NO: 41961 - RNA, 26 nt, Human
gccuccagcugcccagaguuccuuuc

SEQ ID NO: 41962 - RNA, 24 nt, Human
uccaugaaaaucacacacaacgca

SEQ ID NO: 41963 - RNA, 24 nt, Human
uccuucugaaagaccucuuucuga

SEQ ID NO: 41964 - RNA, 18 nt, Human
ucgcugcaugcuccucgu

SEQ ID NO: 41965 - RNA, 24 nt, Human
ucuaguucuggggucuggagaagg

SEQ ID NO: 41966 - RNA, 24 nt, Human
ucugaaagaccucuuucugaauuc

SEQ ID NO: 41967 - RNA, 18 nt, Human
ucugcuugaaaugagagc

SEQ ID NO: 41968 - RNA, 23 nt, Human
ugaaaaucacacacaacgcagac

SEQ ID NO: 41969 - RNA, 18 nt, Human
ugagugcauuugcauuuu

SEQ ID NO: 41970 - RNA, 25 nt, Human
ugcagaaaagcagaucugcuugaaa

SEQ ID NO: 41971 - RNA, 22 nt, Human
ugcaugcuccucguguguuugu

SEQ ID NO: 41972 - RNA, 19 nt, Human
ugcgccuccagcugcccag

SEQ ID NO: 41973 - RNA, 19 nt, Human
ugcuagugggauggcccgg

SEQ ID NO: 41974 - RNA, 18 nt, Human
ugggcacaggcuccugcg

SEQ ID NO: 41975 - RNA, 23 nt, Human
uuuguauuuguuugguuucacca

SEQ ID NO: 41976 - RNA, 22 nt, Human
uuuguuuucugcugcagugggg

SEQ ID NO: 41977 - RNA, 22 nt, Human
accacggcuucucuccagccuu

SEQ ID NO: 41978 - RNA, 23 nt, Human
aggcacucuaccuugcccuugcc

SEQ ID NO: 41979 - RNA, 21 nt, Human
caccaccacggcuucucucca

SEQ ID NO: 41980 - RNA, 18 nt, Human
ccccgcggccccgcaggg

SEQ ID NO: 41981 - RNA, 24 nt, Human
ccgcggccccgcaggggagggagg

SEQ ID NO: 41982 - RNA, 18 nt, Human
ccuccccgcggccccgca

SEQ ID NO: 41983 - RNA, 18 nt, Human
ggcaccagccccucugcc

SEQ ID NO: 41984 - RNA, 19 nt, Human
ucccagggccuccccgcgg

SEQ ID NO: 41985 - RNA, 24 nt, Human
ucugccagccugaguccagggcuc

SEQ ID NO: 41986 - RNA, 19 nt, Human
aaugcaguuuaaacuauga

SEQ ID NO: 41987 - RNA, 24 nt, Human
acaaauauuaaaaaguauuuaaca

SEQ ID NO: 41988 - RNA, 24 nt, Human
accuaaaggaaacgaacagcggcc

SEQ ID NO: 41989 - RNA, 24 nt, Human
acucuguuccuuuaauuacgaagu

SEQ ID NO: 41990 - RNA, 23 nt, Human
acuuuaugcaaacauuucaauac

SEQ ID NO: 41991 - RNA, 22 nt, Human
aggaggaauguucuggcuuccg

SEQ ID NO: 41992 - RNA, 21 nt, Human
cagccaaucagccucaccaca

SEQ ID NO: 41993 - RNA, 18 nt, Human
cagcccacgccccggcgc

SEQ ID NO: 41994 - RNA, 18 nt, Human
cagccucaccacagauga

SEQ ID NO: 41995 - RNA, 18 nt, Human
caggcuuccuguggcaaa

SEQ ID NO: 41996 - RNA, 24 nt, Human
cauuucaauacuuuuugcuacuuc

SEQ ID NO: 41997 - RNA, 23 nt, Human
ccagccaaucagccucaccacag

SEQ ID NO: 41998 - RNA, 22 nt, Human
ccucgagaaacugcgaaacagg

SEQ ID NO: 41999 - RNA, 23 nt, Human
cgaacagcggccucugcuucuuu

SEQ ID NO: 42000 - RNA, 18 nt, Human
cuggagaauaucugaaua

SEQ ID NO: 42001 - RNA, 25 nt, Human
cuucauaauucuguaaguguuugcu

SEQ ID NO: 42002 - RNA, 26 nt, Human
gaccucgcgcuccuuggaacggccac

SEQ ID NO: 42003 - RNA, 22 nt, Human
gagaaacugcgaaacagguuga

SEQ ID NO: 42004 - RNA, 22 nt, Human
ggagaaugagaaaugaucucua

SEQ ID NO: 42005 - RNA, 18 nt, Human
ggcgcuguuccugcccag

SEQ ID NO: 42006 - RNA, 20 nt, Human
ucacucuguuccuuuaauua

SEQ ID NO: 42007 - RNA, 24 nt, Human
ucaguuacaguccaaaugggaaaa

SEQ ID NO: 42008 - RNA, 18 nt, Human
uccuaggagaaugagaaa

SEQ ID NO: 42009 - RNA, 25 nt, Human
uccuuggaacggccaccaagacgug

SEQ ID NO: 42010 - RNA, 21 nt, Human
ucugaacuugacugaggaaau

SEQ ID NO: 42011 - RNA, 20 nt, Human
ugaagacucugaacuugacu

SEQ ID NO: 42012 - RNA, 21 nt, Human
ugagcucaggcuuccuguggc

SEQ ID NO: 42013 - RNA, 21 nt, Human
ugaugucucucacucuguucc

SEQ ID NO: 42014 - RNA, 24 nt, Human
ugaugucucucacucuguuccuuu

SEQ ID NO: 42015 - RNA, 24 nt, Human
ugcuuuuaacuuugaauaaauguc

SEQ ID NO: 42016 - RNA, 20 nt, Human
uggaagaagauacuccgacu

SEQ ID NO: 42017 - RNA, 24 nt, Human
uggagaauaucugaauagaguagg

SEQ ID NO: 42018 - RNA, 22 nt, Human
uguaaguguuugcuuuuaacuu

SEQ ID NO: 42019 - RNA, 24 nt, Human
uuuaggaaucuggagaauaucuga

SEQ ID NO: 42020 - RNA, 24 nt, Human
aaaagaaaauacaaaaccugaaaa

SEQ ID NO: 42021 - RNA, 21 nt, Human
aaaauguugaaaacugcacau

SEQ ID NO: 42022 - RNA, 19 nt, Human
aaauaaagcuucugcccuu

SEQ ID NO: 42023 - RNA, 20 nt, Human
aaauacaugccuucaaacaa

SEQ ID NO: 42024 - RNA, 26 nt, Human
aaauacaugccuucaaacaacuuaaa

SEQ ID NO: 42025 - RNA, 22 nt, Human
aaauguugaaaacugcacauau

SEQ ID NO: 42026 - RNA, 20 nt, Human
aaauuaacagcacugauaca

SEQ ID NO: 42027 - RNA, 19 nt, Human
acaaaaccugaaaauaacu

SEQ ID NO: 42028 - RNA, 18 nt, Human
acaaggauuauuuuccuc

SEQ ID NO: 42029 - RNA, 20 nt, Human
acaugccuucaaacaacuuu

SEQ ID NO: 42030 - RNA, 27 nt, Human
agaaaagaaaauacaaaaccugaaaaa

SEQ ID NO: 42031 - RNA, 18 nt, Human
agacuauaaauaaaacua

SEQ ID NO: 42032 - RNA, 23 nt, Human
agacuauaaauaaaacuauaacc

SEQ ID NO: 42033 - RNA, 24 nt, Human
auuuuagccuuauuaaugaaauuc

SEQ ID NO: 42034 - RNA, 27 nt, Human
caaaaaauaaagcuucugcccuuuuaa

SEQ ID NO: 42035 - RNA, 27 nt, Human
caaaaccugaaaauaacuucagugcua

SEQ ID NO: 42036 - RNA, 22 nt, Human
caaaauguugaaaacugcacag

SEQ ID NO: 42037 - RNA, 23 nt, Human
caacuuaaaugcaaaaaucauuc

SEQ ID NO: 42038 - RNA, 22 nt, Human
caagaaaagaaaauacaaaacc

SEQ ID NO: 42039 - RNA, 23 nt, Human
cacaaggauuauuuuccucagau

SEQ ID NO: 42040 - RNA, 20 nt, Human
caccuuugaagacacaggag

SEQ ID NO: 42041 - RNA, 21 nt, Human
cagggaacuaauaaauucuua

SEQ ID NO: 42042 - RNA, 24 nt, Human
ccacaagaaaagaaaauacaaaac

SEQ ID NO: 42043 - RNA, 25 nt, Human
cccguacgccucagcccgccggcca

SEQ ID NO: 42044 - RNA, 24 nt, Human
ccucagcucucaacaccuuugaag

SEQ ID NO: 42045 - RNA, 18 nt, Human
gaaaagaaaauacaaaac

SEQ ID NO: 42046 - RNA, 21 nt, Human
gaaaaucacacuuuauaaaga

SEQ ID NO: 42047 - RNA, 19 nt, Human
gcaaggacuuccaaacuua

SEQ ID NO: 42048 - RNA, 23 nt, Human
ggaacacauauuccucagcucuc

SEQ ID NO: 42049 - RNA, 25 nt, Human
ggaacacauauuccucagcucucaa

SEQ ID NO: 42050 - RNA, 20 nt, Human
ggagaaaaagcacuuuuucu

SEQ ID NO: 42051 - RNA, 24 nt, Human
ggagaugggcaauauaaauguucc

SEQ ID NO: 42052 - RNA, 23 nt, Human
uaaaaaugauugucacagaugua

SEQ ID NO: 42053 - RNA, 23 nt, Human
uaaaaguagguagaauacuacca

SEQ ID NO: 42054 - RNA, 24 nt, Human
uaaaugcaaaaaucauucauucuu

SEQ ID NO: 42055 - RNA, 18 nt, Human
uaacagcacugauacaaa

SEQ ID NO: 42056 - RNA, 21 nt, Human
uacaugccuucaaacaacuuu

SEQ ID NO: 42057 - RNA, 18 nt, Human
uagccuuauuaaugaaau

SEQ ID NO: 42058 - RNA, 21 nt, Human
uagguagaauacuaccagaag

SEQ ID NO: 42059 - RNA, 23 nt, Human
uaguucaugggaaaacuuccauu

SEQ ID NO: 42060 - RNA, 20 nt, Human
uaucagaaaauaaaacauaa

SEQ ID NO: 42061 - RNA, 22 nt, Human
ucauguaucagaaaauaaaaca

SEQ ID NO: 42062 - RNA, 22 nt, Human
uccacaagaaaagaaaauacaa

SEQ ID NO: 42063 - RNA, 20 nt, Human
uccucagcucucaacaccuu

SEQ ID NO: 42064 - RNA, 24 nt, Human
ucucauauuguuuaccaguaauug

SEQ ID NO: 42065 - RNA, 22 nt, Human
ugaaauagugguuucuucuucc

SEQ ID NO: 42066 - RNA, 21 nt, Human
ugaggcaacagcaaauuaaca

SEQ ID NO: 42067 - RNA, 23 nt, Human
ugcacauauucaaacauaguucc

SEQ ID NO: 42068 - RNA, 19 nt, Human
uguaucagaaaauaaaaca

SEQ ID NO: 42069 - RNA, 19 nt, Human
uguguuguuugcuuucuga

SEQ ID NO: 42070 - RNA, 25 nt, Human
uuaaaaaacauguuuuccuguucaa

SEQ ID NO: 42071 - RNA, 21 nt, Human
uuaaagucucauauuguuuac

SEQ ID NO: 42072 - RNA, 20 nt, Human
uuccucagcucucaacaccu

SEQ ID NO: 42073 - RNA, 21 nt, Human
uuccucagcucucaacaccuu

SEQ ID NO: 42074 - RNA, 19 nt, Human
uucgcaaaaguacucauac

SEQ ID NO: 42075 - RNA, 22 nt, Human
aaagcucaugcuaauacuuucc

SEQ ID NO: 42076 - RNA, 21 nt, Human
aagaaaaaacaaucccagcaa

SEQ ID NO: 42077 - RNA, 19 nt, Human
aagacaguucucugcccuu

SEQ ID NO: 42078 - RNA, 23 nt, Human
aagcacugagugguggcugagcu

SEQ ID NO: 42079 - RNA, 23 nt, Human
aaucccagcaaucccuccugcug

SEQ ID NO: 42080 - RNA, 27 nt, Human
acccugugaauaugaauuugaggaagc

SEQ ID NO: 42081 - RNA, 27 nt, Human
agcauccacccuuucccuauccuuagc

SEQ ID NO: 42082 - RNA, 19 nt, Human
agcugccacuugacauugg

SEQ ID NO: 42083 - RNA, 21 nt, Human
aggccauuagaaauuagcuuc

SEQ ID NO: 42084 - RNA, 22 nt, Human
cacugagugguggcugagcugc

SEQ ID NO: 42085 - RNA, 20 nt, Human
cagagaagcacugaguggug

SEQ ID NO: 42086 - RNA, 26 nt, Human
cauuggguuuucccucauauggaccc

SEQ ID NO: 42087 - RNA, 18 nt, Human
ccaccccuacacucacuc

SEQ ID NO: 42088 - RNA, 21 nt, Human
cccucagccugagagcaucca

SEQ ID NO: 42089 - RNA, 18 nt, Human
cgacccugugaauaugaa

SEQ ID NO: 42090 - RNA, 19 nt, Human
cugagcugccacuugacau

SEQ ID NO: 42091 - RNA, 21 nt, Human
cuguaaaaguaaaauauuaac

SEQ ID NO: 42092 - RNA, 21 nt, Human
cugugaauaugaauuugagga

SEQ ID NO: 42093 - RNA, 20 nt, Human
ggagaguuaaaagguuucaa

SEQ ID NO: 42094 - RNA, 20 nt, Human
uaaaagguuucacaaccuuu

SEQ ID NO: 42095 - RNA, 20 nt, Human
uaauugcaacccacagccaa

SEQ ID NO: 42096 - RNA, 27 nt, Human
uauccuuagccuuagagaugaaggaag

SEQ ID NO: 42097 - RNA, 27 nt, Human
ucaggacuggcuccugcacagagaaaa

SEQ ID NO: 42098 - RNA, 24 nt, Human
ucccugaugucucacuaauuccca

SEQ ID NO: 42099 - RNA, 23 nt, Human
ugaaagacaguucucugcccuug

SEQ ID NO: 42100 - RNA, 18 nt, Human
ugacauuggguuuucccu

SEQ ID NO: 42101 - RNA, 23 nt, Human
ugacuguaaaaguaaaauauuaa

SEQ ID NO: 42102 - RNA, 19 nt, Human
ugagagcauccacccuuuc

SEQ ID NO: 42103 - RNA, 19 nt, Human
ugcugggauuguuuuuuuc

SEQ ID NO: 42104 - RNA, 22 nt, Human
ugggauuguuuuuuucuuuaaa

SEQ ID NO: 42105 - RNA, 23 nt, Human
uguauacacaucuaaagcagaau

SEQ ID NO: 42106 - RNA, 18 nt, Human
uuugaggaagccagagga

SEQ ID NO: 42107 - RNA, 19 nt, Human
uuugaggaagccagaggaa

SEQ ID NO: 42108 - RNA, 23 nt, Human
aaaaacacuggaaucauccugca

SEQ ID NO: 42109 - RNA, 22 nt, Human
aaaacacuggaaucauccugca

SEQ ID NO: 42110 - RNA, 20 nt, Human
aaaauucccucuugcauucc

SEQ ID NO: 42111 - RNA, 21 nt, Human
aaaauucccucuugcauuccu

SEQ ID NO: 42112 - RNA, 22 nt, Human
aagccacuaucaucuccaccug

SEQ ID NO: 42113 - RNA, 21 nt, Human
aagguggaacuugacuugaaa

SEQ ID NO: 42114 - RNA, 23 nt, Human
aaguuugaucuuuccacacuacc

SEQ ID NO: 42115 - RNA, 20 nt, Human
acacuggaaucauccugcaa

SEQ ID NO: 42116 - RNA, 20 nt, Human
acaguuucuucagucucugc

SEQ ID NO: 42117 - RNA, 22 nt, Human
acccaaauuccuucccuucacu

SEQ ID NO: 42118 - RNA, 23 nt, Human
acuuaccagcaucuguaccaaca

SEQ ID NO: 42119 - RNA, 19 nt, Human
agcacuuucccauguacca

SEQ ID NO: 42120 - RNA, 21 nt, Human
aggaacgcuguuggugcccuc

SEQ ID NO: 42121 - RNA, 22 nt, Human
agucuaccaugaccaugaggau

SEQ ID NO: 42122 - RNA, 19 nt, Human
aucuuuuucauauagauuc

SEQ ID NO: 42123 - RNA, 18 nt, Human
auucuguucuuuuacauc

SEQ ID NO: 42124 - RNA, 23 nt, Human
auuucuuccaucuugaaaaacaa

SEQ ID NO: 42125 - RNA, 22 nt, Human
caacaaaaacacuggaaucauc

SEQ ID NO: 42126 - RNA, 18 nt, Human
cacauuaugcuccuuggg

SEQ ID NO: 42127 - RNA, 23 nt, Human
cacucugucuuucugaauauauc

SEQ ID NO: 42128 - RNA, 18 nt, Human
cagaaucugaccuuugcc

SEQ ID NO: 42129 - RNA, 23 nt, Human
cagcaucuguaccaacacucugc

SEQ ID NO: 42130 - RNA, 24 nt, Human
cagguggcacugaacccaauuauc

SEQ ID NO: 42131 - RNA, 21 nt, Human
cagucacacagcuuuaaauac

SEQ ID NO: 42132 - RNA, 24 nt, Human
caucuugaaaaacaaacaaaaaac

SEQ ID NO: 42133 - RNA, 19 nt, Human
ccaugccugcuggaucccu

SEQ ID NO: 42134 - RNA, 21 nt, Human
ccaugccugcuggaucccucc

SEQ ID NO: 42135 - RNA, 20 nt, Human
ccauucuucccuuucugucc

SEQ ID NO: 42136 - RNA, 25 nt, Human
cccaaauuccuucccuucacugguc

SEQ ID NO: 42137 - RNA, 23 nt, Human
ccccaugccugcuggaucccucc

SEQ ID NO: 42138 - RNA, 20 nt, Human
cccugcaccuccagcucuac

SEQ ID NO: 42139 - RNA, 18 nt, Human
ccgugcuuauuucacuga

SEQ ID NO: 42140 - RNA, 22 nt, Human
ccuccagcucuaccaccaucau

SEQ ID NO: 42141 - RNA, 22 nt, Human
ccucgaaccucgcgcgugucug

SEQ ID NO: 42142 - RNA, 23 nt, Human
ccucugcauccugcucugccugc

SEQ ID NO: 42143 - RNA, 28 nt, Human
ccucugcauccugcucugccugccaccu

SEQ ID NO: 42144 - RNA, 19 nt, Human
ccucuugcauuccugacuc

SEQ ID NO: 42145 - RNA, 27 nt, Human
cucagccucgaaccucgcgccgguucc

SEQ ID NO: 42146 - RNA, 23 nt, Human
cucauuagcacauaaggagauga

SEQ ID NO: 42147 - RNA, 19 nt, Human
cuccagcucuaccaccauc

SEQ ID NO: 42148 - RNA, 22 nt, Human
cucuccauaucagucuaccaug

SEQ ID NO: 42149 - RNA, 23 nt, Human
cucuugaccacacuuccccugcc

SEQ ID NO: 42150 - RNA, 18 nt, Human
gaccacacuuccccugcc

SEQ ID NO: 42151 - RNA, 20 nt, Human
gaggaggaacgcuguuggug

SEQ ID NO: 42152 - RNA, 23 nt, Human
gccucgaaccucgcgcgugucug

SEQ ID NO: 42153 - RNA, 21 nt, Human
ggugcccucuuagcacuuucc

SEQ ID NO: 42154 - RNA, 22 nt, Human
uaaaauauacuguagcaaaagu

SEQ ID NO: 42155 - RNA, 25 nt, Human
uaaaugaacuauucaugccucucuu

SEQ ID NO: 42156 - RNA, 18 nt, Human
uacaucuucacauucugc

SEQ ID NO: 42157 - RNA, 19 nt, Human
uacaucuucacauucugcu

SEQ ID NO: 42158 - RNA, 20 nt, Human
uaccaucuguaucgaauaau

SEQ ID NO: 42159 - RNA, 22 nt, Human
uacucugagacggaagcaguug

SEQ ID NO: 42160 - RNA, 26 nt, Human
uagaauggaacuccauaaccuccuac

SEQ ID NO: 42161 - RNA, 23 nt, Human
uaggaaggaccagaagaaggaua

SEQ ID NO: 42162 - RNA, 20 nt, Human
ucaacaaaaacacuggaauc

SEQ ID NO: 42163 - RNA, 23 nt, Human
ucaacuacuuaccuaacacugga

SEQ ID NO: 42164 - RNA, 23 nt, Human
ucaagcuuaacaugccuaaccug

SEQ ID NO: 42165 - RNA, 22 nt, Human
ucacacagcuuuaaauaccauc

SEQ ID NO: 42166 - RNA, 19 nt, Human
ucacuggucuaacaggcgg

SEQ ID NO: 42167 - RNA, 19 nt, Human
ucagucagucacacagcuu

SEQ ID NO: 42168 - RNA, 23 nt, Human
uccacuuaccagcaucuguacca

SEQ ID NO: 42169 - RNA, 22 nt, Human
uccagguggcacugaacccaau

SEQ ID NO: 42170 - RNA, 19 nt, Human
uccccaggcugggcccucc

SEQ ID NO: 42171 - RNA, 20 nt, Human
ucccucuuuuccuuuggagc

SEQ ID NO: 42172 - RNA, 23 nt, Human
ucccuuucuguccuauaucauca

SEQ ID NO: 42173 - RNA, 19 nt, Human
uccuuugaugccuucucuc

SEQ ID NO: 42174 - RNA, 19 nt, Human
uccuuuggagcuaaacugg

SEQ ID NO: 42175 - RNA, 18 nt, Human
ucuaacaggcggucagau

SEQ ID NO: 42176 - RNA, 24 nt, Human
ucucaagcuuaacaugccuaaccu

SEQ ID NO: 42177 - RNA, 21 nt, Human
ucuccauaucagucuaccaug

SEQ ID NO: 42178 - RNA, 24 nt, Human
ucucuucuuaaaucaacccaaauu

SEQ ID NO: 42179 - RNA, 19 nt, Human
ugaaagaaggcuuguggug

SEQ ID NO: 42180 - RNA, 21 nt, Human
ugaaagaaggcuuguggugac

SEQ ID NO: 42181 - RNA, 19 nt, Human
ugaaguguuuagaauggaa

SEQ ID NO: 42182 - RNA, 18 nt, Human
ugaccacacuuccccugc

SEQ ID NO: 42183 - RNA, 20 nt, Human
ugaccuuugcccugcaccuc

SEQ ID NO: 42184 - RNA, 23 nt, Human
ugcauguucauccuguagauccc

SEQ ID NO: 42185 - RNA, 20 nt, Human
ugcuguuucuguaaaugaac

SEQ ID NO: 42186 - RNA, 19 nt, Human
ugcuuugcuaaguccaaag

SEQ ID NO: 42187 - RNA, 23 nt, Human
uggaacuccauaaccuccuacca

SEQ ID NO: 42188 - RNA, 22 nt, Human
uggggaggaggaacgcuguugg

SEQ ID NO: 42189 - RNA, 20 nt, Human
uggugcccucuuagcacuuu

SEQ ID NO: 42190 - RNA, 22 nt, Human
uggugcccucuuagcacuuucc

SEQ ID NO: 42191 - RNA, 19 nt, Human
uguguaguuugaaagaagg

SEQ ID NO: 42192 - RNA, 19 nt, Human
uguucucucugaaacccac

SEQ ID NO: 42193 - RNA, 19 nt, Human
uuaccuaacacuggagugg

SEQ ID NO: 42194 - RNA, 24 nt, Human
uucaagauacucugagacggaagc

SEQ ID NO: 42195 - RNA, 23 nt, Human
uucacauucugcuaaauuaccgg

SEQ ID NO: 42196 - RNA, 18 nt, Human
uuccuuggacuucucagu

SEQ ID NO: 42197 - RNA, 22 nt, Human
uuccuuggacuucucagucuau

SEQ ID NO: 42198 - RNA, 24 nt, Human
uugcauguucauccuguagauccc

SEQ ID NO: 42199 - RNA, 21 nt, Human
uugcuguuucuguaaaugaac

SEQ ID NO: 42200 - RNA, 22 nt, Human
uugcuuccgcauccccaguucu

SEQ ID NO: 42201 - RNA, 22 nt, Human
uugugcugugccucugcauccu

SEQ ID NO: 42202 - RNA, 19 nt, Human
uuguuugcauguucauccu

SEQ ID NO: 42203 - RNA, 20 nt, Human
uuuguuugcauguucauccu

SEQ ID NO: 42204 - RNA, 18 nt, Human
aaugcguggacgccggcc

SEQ ID NO: 42205 - RNA, 19 nt, Human
acaucuuauucccuucugg

SEQ ID NO: 42206 - RNA, 19 nt, Human
accccaagaccaggaugaa

SEQ ID NO: 42207 - RNA, 19 nt, Human
agcgcacgcgccgccgcca

SEQ ID NO: 42208 - RNA, 20 nt, Human
agggaaguggccaaacuuuu

SEQ ID NO: 42209 - RNA, 25 nt, Human
cagcacggccccgcuggcucugggc

SEQ ID NO: 42210 - RNA, 21 nt, Human
caggccucaccgcccacuccc

SEQ ID NO: 42211 - RNA, 19 nt, Human
cagggaaaggagacacauc

SEQ ID NO: 42212 - RNA, 21 nt, Human
ccacgcacucacgcagggcac

SEQ ID NO: 42213 - RNA, 25 nt, Human
ccccaaaagauguuuuucggaaagg

SEQ ID NO: 42214 - RNA, 21 nt, Human
ccccaagaccaggaugaaaua

SEQ ID NO: 42215 - RNA, 27 nt, Human
ccccaagaccaggaugaaauaagccag

SEQ ID NO: 42216 - RNA, 23 nt, Human
cccgcuggcucugggcccgggac

SEQ ID NO: 42217 - RNA, 22 nt, Human
ccgcuggcucugggcccgggac

SEQ ID NO: 42218 - RNA, 21 nt, Human
cgcacucacgcagggcacgua

SEQ ID NO: 42219 - RNA, 20 nt, Human
cggaaaggucccuuucccuu

SEQ ID NO: 42220 - RNA, 21 nt, Human
cggccgaggcugcgggcacug

SEQ ID NO: 42221 - RNA, 21 nt, Human
cgggggucccgggaagggacg

SEQ ID NO: 42222 - RNA, 20 nt, Human
cucugggcccgggacccuuc

SEQ ID NO: 42223 - RNA, 21 nt, Human
gggcgcggacauccgggugcc

SEQ ID NO: 42224 - RNA, 24 nt, Human
uagcaccauaccccaagaccagga

SEQ ID NO: 42225 - RNA, 19 nt, Human
ucuuugagagggaaguggc

SEQ ID NO: 42226 - RNA, 21 nt, Human
uggcucugggcccgggacccu

SEQ ID NO: 42227 - RNA, 20 nt, Human
uggguuagucuuugagaggg

SEQ ID NO: 42228 - RNA, 23 nt, Human
uuagucuuugagagggaaguggc

SEQ ID NO: 42229 - RNA, 22 nt, Human
uuuuuuuuuuuuuuuuucacag

SEQ ID NO: 42230 - RNA, 23 nt, Human
uuuuuuuuuuuuuuuuucacagu

SEQ ID NO: 42231 - RNA, 19 nt, Human
aacaaaaaaagaaaauguc

SEQ ID NO: 42232 - RNA, 26 nt, Human
acaauucugcuucagugcaaauaugu

SEQ ID NO: 42233 - RNA, 27 nt, Human
guaguccaaaacaacaaaaaaagaaaa

SEQ ID NO: 42234 - RNA, 19 nt, Human
uccaaaacaacaaaaaaag

SEQ ID NO: 42235 - RNA, 22 nt, Human
ugagcgaggaaagaggaaccga

SEQ ID NO: 42236 - RNA, 19 nt, Human
agggagggauuggccuccc

SEQ ID NO: 42237 - RNA, 21 nt, Human
augcuuggcagcgaccacacc

SEQ ID NO: 42238 - RNA, 22 nt, Human
cacccucaucccacugagggcu

SEQ ID NO: 42239 - RNA, 18 nt, Human
caggagccgccggcaaua

SEQ ID NO: 42240 - RNA, 19 nt, Human
caggagccgccggcaauag

SEQ ID NO: 42241 - RNA, 25 nt, Human
caguaggcucccccaggcugagccc

SEQ ID NO: 42242 - RNA, 25 nt, Human
cccagcccuaacacugaugcuuggc

SEQ ID NO: 42243 - RNA, 24 nt, Human
cccaggcugagccccagcccuaac

SEQ ID NO: 42244 - RNA, 21 nt, Human
ccccaggcugagccccagccc

SEQ ID NO: 42245 - RNA, 18 nt, Human
cccccaggcugagcccca

SEQ ID NO: 42246 - RNA, 23 nt, Human
cccccaggcugagccccagcccu

SEQ ID NO: 42247 - RNA, 23 nt, Human
ccucaucccacugagggcucuau

SEQ ID NO: 42248 - RNA, 23 nt, Human
ccugccagcugcucggccccggc

SEQ ID NO: 42249 - RNA, 21 nt, Human
cgaccacaccucagggggccc

SEQ ID NO: 42250 - RNA, 19 nt, Human
cgccggcaauagcaguuuc

SEQ ID NO: 42251 - RNA, 20 nt, Human
cugagccccagcccuaacac

SEQ ID NO: 42252 - RNA, 18 nt, Human
gacgcgguaaaacaggag

SEQ ID NO: 42253 - RNA, 20 nt, Human
ggaggggagggagggauugg

SEQ ID NO: 42254 - RNA, 21 nt, Human
ggaggggagggagggauuggc

SEQ ID NO: 42255 - RNA, 21 nt, Human
gggagggaggcagccggcagg

SEQ ID NO: 42256 - RNA, 21 nt, Human
gggauuggccuccccugccag

SEQ ID NO: 42257 - RNA, 23 nt, Human
ucaguccccaguaggcuccccca

SEQ ID NO: 42258 - RNA, 18 nt, Human
ucccccaggcugagcccc

SEQ ID NO: 42259 - RNA, 26 nt, Human
ucccccaggcugagccccagcccuaa

SEQ ID NO: 42260 - RNA, 24 nt, Human
uccccugccagcugcucggccccc

SEQ ID NO: 42261 - RNA, 18 nt, Human
ugggagggaggcagccgg

SEQ ID NO: 42262 - RNA, 18 nt, Human
uggggaggggagggaggg

SEQ ID NO: 42263 - RNA, 23 nt, Human
uggggaggggagggagggauugg

SEQ ID NO: 42264 - RNA, 22 nt, Human
aaaaacccugguaagaccuagg

SEQ ID NO: 42265 - RNA, 20 nt, Human
aaaaaggcagcucuaccuuu

SEQ ID NO: 42266 - RNA, 19 nt, Human
aaaccaaacaguaaaaacc

SEQ ID NO: 42267 - RNA, 26 nt, Human
aaagugcccgccauuacucccaauua

SEQ ID NO: 42268 - RNA, 18 nt, Human
aacaguaaaaacccuggu

SEQ ID NO: 42269 - RNA, 21 nt, Human
aaguuucuagaacaucuuggu

SEQ ID NO: 42270 - RNA, 21 nt, Human
accaggggcaagaugcaggaa

SEQ ID NO: 42271 - RNA, 24 nt, Human
accucuggcaaagccagauccugg

SEQ ID NO: 42272 - RNA, 23 nt, Human
accuuugcuuaggaggcuaggga

SEQ ID NO: 42273 - RNA, 18 nt, Human
acucccaauuagaaaaag

SEQ ID NO: 42274 - RNA, 23 nt, Human
agacagaugcccuccacgcuccc

SEQ ID NO: 42275 - RNA, 22 nt, Human
agacaggcugaccugcccgggc

SEQ ID NO: 42276 - RNA, 24 nt, Human
agaugcccuccacgcucccuaccc

SEQ ID NO: 42277 - RNA, 24 nt, Human
agccagggguggguggacgagggg

SEQ ID NO: 42278 - RNA, 21 nt, Human
aggccaggccuguuaccuggc

SEQ ID NO: 42279 - RNA, 18 nt, Human
aggcguuggcucagggca

SEQ ID NO: 42280 - RNA, 20 nt, Human
aggcguuggcucagggcagc

SEQ ID NO: 42281 - RNA, 21 nt, Human
agguuuaaaaaggcagcucua

SEQ ID NO: 42282 - RNA, 27 nt, Human
aucccauccaccaaagacagaagagaa

SEQ ID NO: 42283 - RNA, 23 nt, Human
aucccguuccccgugucccuccg

SEQ ID NO: 42284 - RNA, 19 nt, Human
augaacauccacguggccu

SEQ ID NO: 42285 - RNA, 20 nt, Human
cacccgcgcugcgccgcugc

SEQ ID NO: 42286 - RNA, 24 nt, Human
cagacagaugcccuccacgcuccc

SEQ ID NO: 42287 - RNA, 21 nt, Human
caggcuacuaaggaagggcca

SEQ ID NO: 42288 - RNA, 18 nt, Human
cagugcugcaggccuggg

SEQ ID NO: 42289 - RNA, 26 nt, Human
ccaauuagaaaaagguuuuugaaauc

SEQ ID NO: 42290 - RNA, 18 nt, Human
ccacccgcgcugcgccgc

SEQ ID NO: 42291 - RNA, 23 nt, Human
ccagggguggguggacgaggggc

SEQ ID NO: 42292 - RNA, 22 nt, Human
ccccaccgggagaagcaggggc

SEQ ID NO: 42293 - RNA, 22 nt, Human
cccgcgcugcgccgcugcaagg

SEQ ID NO: 42294 - RNA, 24 nt, Human
cccgcgcugcgccgcugcaagguc

SEQ ID NO: 42295 - RNA, 25 nt, Human
cccgcgcugcgccgcugcaaggucg

SEQ ID NO: 42296 - RNA, 27 nt, Human
cccuacccgcccuggccagacucacag

SEQ ID NO: 42297 - RNA, 22 nt, Human
cccuccacgcucccuacccgcc

SEQ ID NO: 42298 - RNA, 21 nt, Human
cccuggccagacucacagagc

SEQ ID NO: 42299 - RNA, 22 nt, Human
ccgcucuucccgcugcuccucc

SEQ ID NO: 42300 - RNA, 21 nt, Human
ccgggcugggcaccccugagg

SEQ ID NO: 42301 - RNA, 19 nt, Human
ccugcugguuggagguggg

SEQ ID NO: 42302 - RNA, 20 nt, Human
cgcgcugcucauugaagacu

SEQ ID NO: 42303 - RNA, 19 nt, Human
cgugggcacaucugccagg

SEQ ID NO: 42304 - RNA, 18 nt, Human
cuccagacagcagagcac

SEQ ID NO: 42305 - RNA, 23 nt, Human
cuccgcucuucccgcugcuccuc

SEQ ID NO: 42306 - RNA, 23 nt, Human
cuggacaucccccaggcuacuaa

SEQ ID NO: 42307 - RNA, 21 nt, Human
cuggccagccccucacucccc

SEQ ID NO: 42308 - RNA, 20 nt, Human
cugguuggaggugggcgggu

SEQ ID NO: 42309 - RNA, 18 nt, Human
gaacauccacguggccuc

SEQ ID NO: 42310 - RNA, 19 nt, Human
gaccuagguuuaaaaaggc

SEQ ID NO: 42311 - RNA, 21 nt, Human
gagcacaggggcggguguggg

SEQ ID NO: 42312 - RNA, 19 nt, Human
gcaccggguccucugcccc

SEQ ID NO: 42313 - RNA, 22 nt, Human
gccggaccggguccuccccccg

SEQ ID NO: 42314 - RNA, 24 nt, Human
gcgcgcagcaggcucgggucuggg

SEQ ID NO: 42315 - RNA, 23 nt, Human
ggaccaggggcaagaugcaggaa

SEQ ID NO: 42316 - RNA, 18 nt, Human
ggagggcagcugggggcc

SEQ ID NO: 42317 - RNA, 18 nt, Human
ggcaccggguccucugcc

SEQ ID NO: 42318 - RNA, 19 nt, Human
ggcagacagaugcccucca

SEQ ID NO: 42319 - RNA, 21 nt, Human
ggcgggugcugaaggccaggu

SEQ ID NO: 42320 - RNA, 21 nt, Human
gggaagccccuucucuggagg

SEQ ID NO: 42321 - RNA, 22 nt, Human
gggagggaggcugccagccagg

SEQ ID NO: 42322 - RNA, 18 nt, Human
gggcacaucugccaggca

SEQ ID NO: 42323 - RNA, 18 nt, Human
gggcggguguggggaggg

SEQ ID NO: 42324 - RNA, 26 nt, Human
ggguaaggagugcccugggaaugggg

SEQ ID NO: 42325 - RNA, 24 nt, Human
ggguguggggagggaggcugccag

SEQ ID NO: 42326 - RNA, 24 nt, Human
ggugcugaaggccagguuguagcu

SEQ ID NO: 42327 - RNA, 21 nt, Human
uagcucacgggggcaaggcca

SEQ ID NO: 42328 - RNA, 21 nt, Human
uaguacacuuuauugaccggg

SEQ ID NO: 42329 - RNA, 19 nt, Human
uagucucuggacauccccc

SEQ ID NO: 42330 - RNA, 22 nt, Human
ucaaaccaaacaguaaaaaccc

SEQ ID NO: 42331 - RNA, 20 nt, Human
ucccgcugcuccuccccgcc

SEQ ID NO: 42332 - RNA, 25 nt, Human
ucccuacccgcccuggccagacuca

SEQ ID NO: 42333 - RNA, 19 nt, Human
uccuccccgccucccaccc

SEQ ID NO: 42334 - RNA, 18 nt, Human
ucgcuccgcucuucccgc

SEQ ID NO: 42335 - RNA, 19 nt, Human
ucuucccgcugcuccuccc

SEQ ID NO: 42336 - RNA, 22 nt, Human
ugcaggaagcggugauccaugg

SEQ ID NO: 42337 - RNA, 19 nt, Human
ugcccugggaauggggcag

SEQ ID NO: 42338 - RNA, 19 nt, Human
uggcaagagggagagacgg

SEQ ID NO: 42339 - RNA, 20 nt, Human
uggcucagggcagcaggggu

SEQ ID NO: 42340 - RNA, 19 nt, Human
ugggagggggcgcgcagca

SEQ ID NO: 42341 - RNA, 23 nt, Human
ugggagggggcgcgcagcaggcu

SEQ ID NO: 42342 - RNA, 19 nt, Human
ugggcgggugcugaaggcc

SEQ ID NO: 42343 - RNA, 23 nt, Human
uggggagggaggcugccagccag

SEQ ID NO: 42344 - RNA, 19 nt, Human
ugguuggaggugggcgggu

SEQ ID NO: 42345 - RNA, 22 nt, Human
ugguuggaggugggcgggugcu

SEQ ID NO: 42346 - RNA, 22 nt, Human
uuagaaaaagguuuuugaaauc

SEQ ID NO: 42347 - RNA, 20 nt, Human
uucccgcugcuccuccccgc

SEQ ID NO: 42348 - RNA, 21 nt, Human
uucgugugguucacagugaga

SEQ ID NO: 42349 - RNA, 22 nt, Human
uuugccaccaucccauccacca

SEQ ID NO: 42350 - RNA, 18 nt, Human
aaaagaaaaaagggaaag

SEQ ID NO: 42351 - RNA, 22 nt, Human
aaagaaaaaagggaaagccugg

SEQ ID NO: 42352 - RNA, 30 nt, Human
aaagaacaaaaucaaucaacacuguaagcc

SEQ ID NO: 42353 - RNA, 20 nt, Human
aaagacuugcaguccacaga

SEQ ID NO: 42354 - RNA, 21 nt, Human
aacaaaagaaaaaagggaaag

SEQ ID NO: 42355 - RNA, 22 nt, Human
aaccaauuccuccagaagucug

SEQ ID NO: 42356 - RNA, 18 nt, Human
aaccacaaaacugcagcc

SEQ ID NO: 42357 - RNA, 21 nt, Human
aagaaaaaagggaaagccugg

SEQ ID NO: 42358 - RNA, 19 nt, Human
aaggucaaauucccaugag

SEQ ID NO: 42359 - RNA, 21 nt, Human
agaaaagaggugguaagaaaa

SEQ ID NO: 42360 - RNA, 23 nt, Human
agaggcugccucuggcccaaaac

SEQ ID NO: 42361 - RNA, 21 nt, Human
agccccagguggaacgucggc

SEQ ID NO: 42362 - RNA, 19 nt, Human
agccggggccggggccgca

SEQ ID NO: 42363 - RNA, 25 nt, Human
aggaggacaggcgugggagugcaga

SEQ ID NO: 42364 - RNA, 20 nt, Human
aggcugccucuggcccaaaa

SEQ ID NO: 42365 - RNA, 21 nt, Human
aggcugccucuggcccaaaac

SEQ ID NO: 42366 - RNA, 19 nt, Human
agguaccaugagagggaaa

SEQ ID NO: 42367 - RNA, 21 nt, Human
aguuccagguccagguuagcc

SEQ ID NO: 42368 - RNA, 23 nt, Human
auuuucuccaggccccucaacca

SEQ ID NO: 42369 - RNA, 25 nt, Human
caaaacuccuccgugggaagcacca

SEQ ID NO: 42370 - RNA, 23 nt, Human
caaaaucaaucaacacuguaagc

SEQ ID NO: 42371 - RNA, 21 nt, Human
caaagacuugcaguccacaga

SEQ ID NO: 42372 - RNA, 18 nt, Human
caacacuguaagcaacca

SEQ ID NO: 42373 - RNA, 23 nt, Human
caaccaacacugcuuugggccag

SEQ ID NO: 42374 - RNA, 20 nt, Human
caaccaauuccuccagaagu

SEQ ID NO: 42375 - RNA, 23 nt, Human
caaccacaaaacugcagccccaa

SEQ ID NO: 42376 - RNA, 23 nt, Human
cacugccaaggggagaaaaugau

SEQ ID NO: 42377 - RNA, 20 nt, Human
cagguaccaugagagggaaa

SEQ ID NO: 42378 - RNA, 21 nt, Human
caguuccaggcaggggaccgg

SEQ ID NO: 42379 - RNA, 22 nt, Human
caguuccagguccagguuagcc

SEQ ID NO: 42380 - RNA, 21 nt, Human
ccccagguggaacgucggccc

SEQ ID NO: 42381 - RNA, 21 nt, Human
ccccucaaccacaaaacugca

SEQ ID NO: 42382 - RNA, 18 nt, Human
ccccuggcccuacaguuc

SEQ ID NO: 42383 - RNA, 21 nt, Human
ccccuggcccuacaguuccag

SEQ ID NO: 42384 - RNA, 25 nt, Human
cccugggcgcuggcauauaggcccu

SEQ ID NO: 42385 - RNA, 19 nt, Human
ccuacaguuccagguccag

SEQ ID NO: 42386 - RNA, 24 nt, Human
ccuacaguuccagguccagguuag

SEQ ID NO: 42387 - RNA, 21 nt, Human
ccucuggcccaaaacgagaac

SEQ ID NO: 42388 - RNA, 22 nt, Human
cggcggcggcgcagggagccgg

SEQ ID NO: 42389 - RNA, 21 nt, Human
cuaggaucuucuauacaacca

SEQ ID NO: 42390 - RNA, 23 nt, Human
cucaaagacuugcaguccacaga

SEQ ID NO: 42391 - RNA, 19 nt, Human
cuccugggucuucacagcc

SEQ ID NO: 42392 - RNA, 18 nt, Human
cuggcgcugagaugcugg

SEQ ID NO: 42393 - RNA, 19 nt, Human
cuggcgcugagaugcuggu

SEQ ID NO: 42394 - RNA, 18 nt, Human
gaacugguagagcuggcg

SEQ ID NO: 42395 - RNA, 18 nt, Human
gagagggaaagaaaagag

SEQ ID NO: 42396 - RNA, 19 nt, Human
gagauccgaggcaguaggc

SEQ ID NO: 42397 - RNA, 19 nt, Human
gaggcuugguuuaccaggg

SEQ ID NO: 42398 - RNA, 19 nt, Human
gagucggggugggugggga

SEQ ID NO: 42399 - RNA, 22 nt, Human
gauguuagaggugaugggagcc

SEQ ID NO: 42400 - RNA, 19 nt, Human
gccaaggggagaaaaugau

SEQ ID NO: 42401 - RNA, 18 nt, Human
gcggcggcgcagggagcc

SEQ ID NO: 42402 - RNA, 19 nt, Human
gcggcggcggcggcggcgc

SEQ ID NO: 42403 - RNA, 20 nt, Human
gcggcggcggcggcggcggc

SEQ ID NO: 42404 - RNA, 20 nt, Human
gcggcggcggcggcggcggc

SEQ ID NO: 42405 - RNA, 20 nt, Human
gcggcggcggcggcggcggc

SEQ ID NO: 42406 - RNA, 20 nt, Human
gcggcggcggcggcggcggc

SEQ ID NO: 42407 - RNA, 20 nt, Human
gcggcggcggcggcggcggc

SEQ ID NO: 42408 - RNA, 20 nt, Human
gcggcggcggcggcggcggc

SEQ ID NO: 42409 - RNA, 20 nt, Human
gcggcggcggcggcggcggc

SEQ ID NO: 42410 - RNA, 20 nt, Human
gcggcggcggcggcggcggc

SEQ ID NO: 42411 - RNA, 23 nt, Human
gcggcggcggcggcggcggcggc

SEQ ID NO: 42412 - RNA, 23 nt, Human
gcggcggcggcggcggcggcggc

SEQ ID NO: 42413 - RNA, 23 nt, Human
gcggcggcggcggcggcggcggc

SEQ ID NO: 42414 - RNA, 23 nt, Human
gcggcggcggcggcggcggcggc

SEQ ID NO: 42415 - RNA, 23 nt, Human
gcggcggcggcggcggcggcggc

SEQ ID NO: 42416 - RNA, 23 nt, Human
gcggcggcggcggcggcggcggc

SEQ ID NO: 42417 - RNA, 24 nt, Human
gcggcggcggcggcggcggcggcg

SEQ ID NO: 42418 - RNA, 24 nt, Human
gcggcggcggcggcggcggcggcg

SEQ ID NO: 42419 - RNA, 24 nt, Human
gcggcggcggcggcggcggcggcg

SEQ ID NO: 42420 - RNA, 24 nt, Human
gcggcggcggcggcggcggcggcg

SEQ ID NO: 42421 - RNA, 21 nt, Human
gcuggcggcggcggcggcggc

SEQ ID NO: 42422 - RNA, 19 nt, Human
ggaggcuugguuuaccagg

SEQ ID NO: 42423 - RNA, 24 nt, Human
ggagucgggguggguggggaggga

SEQ ID NO: 42424 - RNA, 23 nt, Human
ggauguuagaggugaugggagcc

SEQ ID NO: 42425 - RNA, 26 nt, Human
ggccccucaaccacaaaacugcagcc

SEQ ID NO: 42426 - RNA, 20 nt, Human
ggcggcggcggcggcggcgg

SEQ ID NO: 42427 - RNA, 23 nt, Human
ggcggcggcggcggcggcggcgg

SEQ ID NO: 42428 - RNA, 23 nt, Human
ggcggcggcggcggcggcggcgg

SEQ ID NO: 42429 - RNA, 23 nt, Human
ggcggcggcggcggcggcggcgg

SEQ ID NO: 42430 - RNA, 23 nt, Human
ggcggcggcggcggcggcggcgg

SEQ ID NO: 42431 - RNA, 23 nt, Human
ggcggcggcggcggcggcggcgg

SEQ ID NO: 42432 - RNA, 23 nt, Human
ggcggcggcggcggcggcggcgg

SEQ ID NO: 42433 - RNA, 23 nt, Human
ggcggcggcggcggcggcggcgg

SEQ ID NO: 42434 - RNA, 23 nt, Human
ggcggcggcgggcaccgggcggc

SEQ ID NO: 42435 - RNA, 23 nt, Human
ggcggcggcgggcaccgggcggc

SEQ ID NO: 42436 - RNA, 23 nt, Human
ggcggcgggugaucgggcccggc

SEQ ID NO: 42437 - RNA, 21 nt, Human
gggaggcuugguuuaccaggg

SEQ ID NO: 42438 - RNA, 19 nt, Human
gggcagggugugcguguuu

SEQ ID NO: 42439 - RNA, 22 nt, Human
gggcggcggcgggcaccgggcg

SEQ ID NO: 42440 - RNA, 22 nt, Human
gggcggcggcgggcaccgggcg

SEQ ID NO: 42441 - RNA, 26 nt, Human
gggcggcggcgggcaccgggcggcga

SEQ ID NO: 42442 - RNA, 26 nt, Human
gggcggcggcgggcaccgggcggcga

SEQ ID NO: 42443 - RNA, 26 nt, Human
gggcggcggcgggcaccgggcggcgg

SEQ ID NO: 42444 - RNA, 26 nt, Human
gggcggcggcgggcaccgggcggcgg

SEQ ID NO: 42445 - RNA, 24 nt, Human
gggcggcgggugaucgggcccggc

SEQ ID NO: 42446 - RNA, 22 nt, Human
gucaaggucaaauucccaugag

SEQ ID NO: 42447 - RNA, 25 nt, Human
gucacuaggaucuucuauacaacca

SEQ ID NO: 42448 - RNA, 18 nt, Human
guggcgcgggcggcggcg

SEQ ID NO: 42449 - RNA, 22 nt, Human
guugcuggcgcgggcggcggcg

SEQ ID NO: 42450 - RNA, 29 nt, Human
uagcgcuggcggcggcggcggcggcggcg

SEQ ID NO: 42451 - RNA, 22 nt, Human
uauacaaccaauuccuccagaa

SEQ ID NO: 42452 - RNA, 22 nt, Human
ucaaccacaaaacugcagcccc

SEQ ID NO: 42453 - RNA, 20 nt, Human
ucccaugaggccaucuccuu

SEQ ID NO: 42454 - RNA, 23 nt, Human
ucccugggcgcuggcauauaggc

SEQ ID NO: 42455 - RNA, 19 nt, Human
uccuccagaagucuggcug

SEQ ID NO: 42456 - RNA, 23 nt, Human
uccuccagaagucuggcugccaa

SEQ ID NO: 42457 - RNA, 18 nt, Human
uccuuaauauuuacccca

SEQ ID NO: 42458 - RNA, 23 nt, Human
ucgggcccgguugcuggcgcggg

SEQ ID NO: 42459 - RNA, 18 nt, Human
ucgggguggguggggagg

SEQ ID NO: 42460 - RNA, 21 nt, Human
ugaacaaaagaaaaaagggaa

SEQ ID NO: 42461 - RNA, 18 nt, Human
ugaggccaucuccuuaau

SEQ ID NO: 42462 - RNA, 20 nt, Human
ugcagccccaaggaaaugaa

SEQ ID NO: 42463 - RNA, 19 nt, Human
ugcuggcgcuagcgcuggc

SEQ ID NO: 42464 - RNA, 23 nt, Human
uggcauauaggcccugcaguucu

SEQ ID NO: 42465 - RNA, 19 nt, Human
uggcccaaaacgagaacug

SEQ ID NO: 42466 - RNA, 20 nt, Human
uggcccaaaacgagaacugg

SEQ ID NO: 42467 - RNA, 18 nt, Human
uggcggcggcggcggcgg

SEQ ID NO: 42468 - RNA, 22 nt, Human
uggcggcggcggcggcggcggc

SEQ ID NO: 42469 - RNA, 21 nt, Human
uggggagggaagccccaggug

SEQ ID NO: 42470 - RNA, 23 nt, Human
uggguggggagggaagccccagg

SEQ ID NO: 42471 - RNA, 24 nt, Human
ugggugguucgcaucucugucucu

SEQ ID NO: 42472 - RNA, 19 nt, Human
uucccagcuuuugagugcc

SEQ ID NO: 42473 - RNA, 21 nt, Human
uucccaugaggccaucuccuu

SEQ ID NO: 42474 - RNA, 19 nt, Human
uuucagugugggaggcuug

SEQ ID NO: 42475 - RNA, 21 nt, Human
aaaagacagcaggaguuagaa

SEQ ID NO: 42476 - RNA, 25 nt, Human
aaacaucuucucaggccucaggccc

SEQ ID NO: 42477 - RNA, 21 nt, Human
aacccacccccaacaccgcac

SEQ ID NO: 42478 - RNA, 22 nt, Human
acccccccuacauuuaccccug

SEQ ID NO: 42479 - RNA, 23 nt, Human
agugaaaccuucucuaaccaccc

SEQ ID NO: 42480 - RNA, 23 nt, Human
caacccacccccaacaccgcacc

SEQ ID NO: 42481 - RNA, 25 nt, Human
cacagaucagaaaacuauaagcuuu

SEQ ID NO: 42482 - RNA, 26 nt, Human
cacccccaacaccgcacccuugaucc

SEQ ID NO: 42483 - RNA, 21 nt, Human
cacccccccuacauuuacccc

SEQ ID NO: 42484 - RNA, 19 nt, Human
cacccuccccaacccaccc

SEQ ID NO: 42485 - RNA, 21 nt, Human
cacccuccccaacccaccccc

SEQ ID NO: 42486 - RNA, 22 nt, Human
cacccuugauccugggcaaucu

SEQ ID NO: 42487 - RNA, 19 nt, Human
caccgcacccuugauccug

SEQ ID NO: 42488 - RNA, 20 nt, Human
cagcaauccccacccccccu

SEQ ID NO: 42489 - RNA, 23 nt, Human
caguacagcauuugcaacacuuc

SEQ ID NO: 42490 - RNA, 23 nt, Human
cauccagcaauccccaccccccc

SEQ ID NO: 42491 - RNA, 24 nt, Human
cauccagcaauccccacccccccu

SEQ ID NO: 42492 - RNA, 21 nt, Human
ccaauucuucguuucccagaa

SEQ ID NO: 42493 - RNA, 22 nt, Human
ccagaaucagagaauaugaaaa

SEQ ID NO: 42494 - RNA, 21 nt, Human
ccagcaauccccacccccccu

SEQ ID NO: 42495 - RNA, 21 nt, Human
ccaugaagucuccacaucucc

SEQ ID NO: 42496 - RNA, 22 nt, Human
cccaacccacccccaacaccgc

SEQ ID NO: 42497 - RNA, 21 nt, Human
cccacccccaacaccgcaccc

SEQ ID NO: 42498 - RNA, 23 nt, Human
cccacccccccuacauuuacccc

SEQ ID NO: 42499 - RNA, 18 nt, Human
ccccaacaccgcacccuu

SEQ ID NO: 42500 - RNA, 21 nt, Human
ccccaacaccgcacccuugau

SEQ ID NO: 42501 - RNA, 25 nt, Human
ccccaacaccgcacccuugauccug

SEQ ID NO: 42502 - RNA, 27 nt, Human
ccccacccccccuacauuuaccccuuc

SEQ ID NO: 42503 - RNA, 24 nt, Human
cccccaacaccgcacccuugaucc

SEQ ID NO: 42504 - RNA, 23 nt, Human
cccccccuacauuuaccccugcu

SEQ ID NO: 42505 - RNA, 26 nt, Human
cccccccuacauuuaccccugcuucc

SEQ ID NO: 42506 - RNA, 21 nt, Human
cccuccccaacccacccccaa

SEQ ID NO: 42507 - RNA, 25 nt, Human
cccuccccaacccacccccaacacc

SEQ ID NO: 42508 - RNA, 24 nt, Human
cccugcucauaaaaucagucuucu

SEQ ID NO: 42509 - RNA, 22 nt, Human
ccuacauuuaccccugcuucca

SEQ ID NO: 42510 - RNA, 22 nt, Human
ccuucucuaaccacccucccca

SEQ ID NO: 42511 - RNA, 20 nt, Human
cgcagacugugggccucgaa

SEQ ID NO: 42512 - RNA, 19 nt, Human
cuccccaacccacccccaa

SEQ ID NO: 42513 - RNA, 24 nt, Human
cugggguucuaaggucuugagagc

SEQ ID NO: 42514 - RNA, 21 nt, Human
cugugggccucgaagcugcac

SEQ ID NO: 42515 - RNA, 23 nt, Human
cuuagugaaaccuucucuaacca

SEQ ID NO: 42516 - RNA, 19 nt, Human
cuugagcagccagaagagg

SEQ ID NO: 42517 - RNA, 23 nt, Human
cuugauccugggcaaucuccuuu

SEQ ID NO: 42518 - RNA, 19 nt, Human
gccucgaagcugcaccugu

SEQ ID NO: 42519 - RNA, 20 nt, Human
ggguuuccauccagcaaucc

SEQ ID NO: 42520 - RNA, 23 nt, Human
uaaaaggagaaccacaugaucac

SEQ ID NO: 42521 - RNA, 18 nt, Human
uaaccacccuccccaacc

SEQ ID NO: 42522 - RNA, 22 nt, Human
uaaccacccuccccaacccacc

SEQ ID NO: 42523 - RNA, 23 nt, Human
uagugaaaccuucucuaaccacc

SEQ ID NO: 42524 - RNA, 25 nt, Human
uauuauaaaauuauucagcauguaa

SEQ ID NO: 42525 - RNA, 24 nt, Human
uccagcaauccccacccccccuac

SEQ ID NO: 42526 - RNA, 21 nt, Human
uccauccagcaauccccaccc

SEQ ID NO: 42527 - RNA, 24 nt, Human
uccccaacccacccccaacaccgc

SEQ ID NO: 42528 - RNA, 25 nt, Human
uccccacccccccuacauuuacccc

SEQ ID NO: 42529 - RNA, 19 nt, Human
ucucuaaccacccucccca

SEQ ID NO: 42530 - RNA, 25 nt, Human
ugaaaagacagcaggaguuagaaga

SEQ ID NO: 42531 - RNA, 19 nt, Human
ugagagccaucaaguagcc

SEQ ID NO: 42532 - RNA, 19 nt, Human
ugauccugggcaaucuccu

SEQ ID NO: 42533 - RNA, 23 nt, Human
ugccugcucuuuccucuccuuag

SEQ ID NO: 42534 - RNA, 20 nt, Human
ugggguucuaaggucuugag

SEQ ID NO: 42535 - RNA, 19 nt, Human
ugguucugggguucuaagg

SEQ ID NO: 42536 - RNA, 18 nt, Human
uguaucaaaccccugcuc

SEQ ID NO: 42537 - RNA, 20 nt, Human
ugugaaccucugagcucagc

SEQ ID NO: 42538 - RNA, 21 nt, Human
uuagaagaagcuuagaucucg

SEQ ID NO: 42539 - RNA, 21 nt, Human
uuccaggagaaguucucaucu

SEQ ID NO: 42540 - RNA, 19 nt, Human
uuccaggguuuccauccag

SEQ ID NO: 42541 - RNA, 24 nt, Human
uuccaggguuuccauccagcaauc

SEQ ID NO: 42542 - RNA, 19 nt, Human
uuccugccaauucuucguu

SEQ ID NO: 42543 - RNA, 20 nt, Human
uucucuaaccacccucccca

SEQ ID NO: 42544 - RNA, 21 nt, Human
aaagugucauuuauagagaaa

SEQ ID NO: 42545 - RNA, 19 nt, Human
aaccuugcaaacuccaucc

SEQ ID NO: 42546 - RNA, 25 nt, Human
aagacuccuccuauucaucucacag

SEQ ID NO: 42547 - RNA, 21 nt, Human
acaugaggaacccuuggggau

SEQ ID NO: 42548 - RNA, 22 nt, Human
agaaccaaccccaagcccacca

SEQ ID NO: 42549 - RNA, 18 nt, Human
agcauuuuguuuucuugg

SEQ ID NO: 42550 - RNA, 18 nt, Human
agccucuacuuuacccag

SEQ ID NO: 42551 - RNA, 23 nt, Human
agugagugggguuaaacgagaag

SEQ ID NO: 42552 - RNA, 20 nt, Human
aguggggacaacuucagccc

SEQ ID NO: 42553 - RNA, 22 nt, Human
auaguauggaaauuggaauauc

SEQ ID NO: 42554 - RNA, 23 nt, Human
auucugcucuuuuuccuucugau

SEQ ID NO: 42555 - RNA, 18 nt, Human
auuguggcugauuucuaa

SEQ ID NO: 42556 - RNA, 22 nt, Human
caagcccaccaaguggggugac

SEQ ID NO: 42557 - RNA, 21 nt, Human
caccacccagaaccaacccca

SEQ ID NO: 42558 - RNA, 26 nt, Human
caccacccagaaccaaccccaagccc

SEQ ID NO: 42559 - RNA, 21 nt, Human
cacccagaaccaaccccaagc

SEQ ID NO: 42560 - RNA, 24 nt, Human
cauuuuguuuucuugguuauucua

SEQ ID NO: 42561 - RNA, 19 nt, Human
ccagucaagauggaaguga

SEQ ID NO: 42562 - RNA, 21 nt, Human
ccccugagaacuguuuucacc

SEQ ID NO: 42563 - RNA, 22 nt, Human
ccugggcuuuuggccuggggac

SEQ ID NO: 42564 - RNA, 21 nt, Human
cuuucacucuauggcagagaa

SEQ ID NO: 42565 - RNA, 18 nt, Human
gaaaccuugcaaacucca

SEQ ID NO: 42566 - RNA, 19 nt, Human
gagaggacagccccuccuc

SEQ ID NO: 42567 - RNA, 18 nt, Human
gcacuggggugguuuugg

SEQ ID NO: 42568 - RNA, 20 nt, Human
gcccaccaaguggggugaca

SEQ ID NO: 42569 - RNA, 21 nt, Human
ggauuugggaggugaagggca

SEQ ID NO: 42570 - RNA, 19 nt, Human
gggcugaagaccagggcug

SEQ ID NO: 42571 - RNA, 21 nt, Human
ggggauuugggaggugaaggg

SEQ ID NO: 42572 - RNA, 21 nt, Human
guggggacaacuucagcccca

SEQ ID NO: 42573 - RNA, 20 nt, Human
uagaaucagccgccaggacc

SEQ ID NO: 42574 - RNA, 23 nt, Human
uauagagaaacuccagcauuuug

SEQ ID NO: 42575 - RNA, 20 nt, Human
ucagugaaauaauugcaagg

SEQ ID NO: 42576 - RNA, 24 nt, Human
uccacauuuguaggggaguguggc

SEQ ID NO: 42577 - RNA, 25 nt, Human
uccugaagacuccuccuauucaucu

SEQ ID NO: 42578 - RNA, 20 nt, Human
ucucauguuggguuggccaa

SEQ ID NO: 42579 - RNA, 21 nt, Human
ugccugcggagaggacagccc

SEQ ID NO: 42580 - RNA, 21 nt, Human
ugcggagaggacagccccucc

SEQ ID NO: 42581 - RNA, 18 nt, Human
uggaaauuggaauaucuu

SEQ ID NO: 42582 - RNA, 23 nt, Human
uggaagugagugggguuaaacga

SEQ ID NO: 42583 - RNA, 19 nt, Human
uggaauaucuucagugaaa

SEQ ID NO: 42584 - RNA, 23 nt, Human
uggagcccugggcuuuuggccug

SEQ ID NO: 42585 - RNA, 19 nt, Human
uggcagagaaauggcaaag

SEQ ID NO: 42586 - RNA, 21 nt, Human
uggcagagaaauggcaaaggu

SEQ ID NO: 42587 - RNA, 21 nt, Human
uggcaguggggacaacuucag

SEQ ID NO: 42588 - RNA, 18 nt, Human
uggccaaacacuguauuc

SEQ ID NO: 42589 - RNA, 22 nt, Human
uggccaagagcagaaaacccua

SEQ ID NO: 42590 - RNA, 21 nt, Human
uggccagaagaccugcuacgu

SEQ ID NO: 42591 - RNA, 25 nt, Human
ugggaggggcugaagaccagggcug

SEQ ID NO: 42592 - RNA, 21 nt, Human
ugggaggugaagggcaguuuc

SEQ ID NO: 42593 - RNA, 24 nt, Human
ugggcuuuuggccuggggacacuu

SEQ ID NO: 42594 - RNA, 22 nt, Human
uggggauuugggaggugaaggg

SEQ ID NO: 42595 - RNA, 19 nt, Human
ugguugggagccgguccaa

SEQ ID NO: 42596 - RNA, 18 nt, Human
ugugguuuugguugggag

SEQ ID NO: 42597 - RNA, 24 nt, Human
uucaccacccagaaccaaccccaa

SEQ ID NO: 42598 - RNA, 22 nt, Human
uuggaggaaauaguauggaaau

SEQ ID NO: 42599 - RNA, 23 nt, Human
uuguggcugauuucuaacugaaa

SEQ ID NO: 42600 - RNA, 25 nt, Human
uuguuuauuguggcugauuucuaac

SEQ ID NO: 42601 - RNA, 22 nt, Human
uuuauacacacuuuuguaugua

SEQ ID NO: 42602 - RNA, 19 nt, Human
aaaaucuuaaggugccccc

SEQ ID NO: 42603 - RNA, 31 nt, Human
aaacaaggacacagacacaaaggccuucucu

SEQ ID NO: 42604 - RNA, 22 nt, Human
aaacagaaacgaaacuuuagga

SEQ ID NO: 42605 - RNA, 22 nt, Human
aaacagaaacgaaacuuuagga

SEQ ID NO: 42606 - RNA, 22 nt, Human
aaacagaaacgaaacuuuagga

SEQ ID NO: 42607 - RNA, 21 nt, Human
aaacagcucgagccagacuga

SEQ ID NO: 42608 - RNA, 19 nt, Human
aacugcuucuggaccacau

SEQ ID NO: 42609 - RNA, 20 nt, Human
aagcagcauagacgcccagc

SEQ ID NO: 42610 - RNA, 23 nt, Human
aagcauucagcacaguuacccug

SEQ ID NO: 42611 - RNA, 23 nt, Human
aagcauucagcacaguuacccug

SEQ ID NO: 42612 - RNA, 19 nt, Human
aaggacacagacacaaagg

SEQ ID NO: 42613 - RNA, 24 nt, Human
aaggcacaggccuccagagucugc

SEQ ID NO: 42614 - RNA, 19 nt, Human
aaggcccaccagccccggg

SEQ ID NO: 42615 - RNA, 19 nt, Human
aaggcccaccagccccggg

SEQ ID NO: 42616 - RNA, 22 nt, Human
aaggcccaccagccccggguuc

SEQ ID NO: 42617 - RNA, 22 nt, Human
aaggcccaccagccccggguuc

SEQ ID NO: 42618 - RNA, 19 nt, Human
aauguccuccucugaguag

SEQ ID NO: 42619 - RNA, 19 nt, Human
aauguccuccucugaguag

SEQ ID NO: 42620 - RNA, 23 nt, Human
acacugagcuccacagugccaau

SEQ ID NO: 42621 - RNA, 23 nt, Human
acccagcagcugucuucuguucc

SEQ ID NO: 42622 - RNA, 23 nt, Human
acccagcagcugucuucuguucc

SEQ ID NO: 42623 - RNA, 23 nt, Human
acccagcagcugucuucuguucc

SEQ ID NO: 42624 - RNA, 22 nt, Human
accccagaguacaggacugagu

SEQ ID NO: 42625 - RNA, 22 nt, Human
accccagaguacaggacugagu

SEQ ID NO: 42626 - RNA, 22 nt, Human
acccgcugccgcuggcccccag

SEQ ID NO: 42627 - RNA, 24 nt, Human
acccucuccacagccacgauguua

SEQ ID NO: 42628 - RNA, 20 nt, Human
accgcggacagugggucauc

SEQ ID NO: 42629 - RNA, 20 nt, Human
agagcaccacgcaguucccc

SEQ ID NO: 42630 - RNA, 20 nt, Human
agagcaccacgcaguucccc

SEQ ID NO: 42631 - RNA, 23 nt, Human
agagcggcgugcuggccaugaug

SEQ ID NO: 42632 - RNA, 22 nt, Human
agcacaguuacccuguaaggca

SEQ ID NO: 42633 - RNA, 19 nt, Human
agcagcugucuucuguucc

SEQ ID NO: 42634 - RNA, 19 nt, Human
agcagcugucuucuguucc

SEQ ID NO: 42635 - RNA, 19 nt, Human
agcagcugucuucuguucc

SEQ ID NO: 42636 - RNA, 18 nt, Human
agccagacugacccgcug

SEQ ID NO: 42637 - RNA, 19 nt, Human
agcccaccaaauguccucc

SEQ ID NO: 42638 - RNA, 21 nt, Human
agcgcuugggguucagggcuu

SEQ ID NO: 42639 - RNA, 27 nt, Human
agcugccucuggcccacgcugagauuc

SEQ ID NO: 42640 - RNA, 27 nt, Human
agcugccucuggcccacgcugagauuc

SEQ ID NO: 42641 - RNA, 24 nt, Human
aggaggaaaaagcuuuuuauuaaa

SEQ ID NO: 42642 - RNA, 18 nt, Human
aggaggaaauggggcagg

SEQ ID NO: 42643 - RNA, 18 nt, Human
aggaggaaauggggcagg

SEQ ID NO: 42644 - RNA, 23 nt, Human
aggcacaggccuccagagucugc

SEQ ID NO: 42645 - RNA, 21 nt, Human
aggcagcaccccagaguacag

SEQ ID NO: 42646 - RNA, 21 nt, Human
aggcagcaccccagaguacag

SEQ ID NO: 42647 - RNA, 21 nt, Human
aggcagcaccccagaguacag

SEQ ID NO: 42648 - RNA, 24 nt, Human
aggcagcaucuccaggucagcuag

SEQ ID NO: 42649 - RNA, 19 nt, Human
agggacaaggacccugaac

SEQ ID NO: 42650 - RNA, 24 nt, Human
agggguggccugacccagcagcug

SEQ ID NO: 42651 - RNA, 24 nt, Human
agggguggccugacccagcagcug

SEQ ID NO: 42652 - RNA, 24 nt, Human
agggguggccugacccagcagcug

SEQ ID NO: 42653 - RNA, 24 nt, Human
aggugguugugguguggagguagg

SEQ ID NO: 42654 - RNA, 22 nt, Human
agucugcugguagcgcuugggg

SEQ ID NO: 42655 - RNA, 20 nt, Human
agugccuccuuauccucugc

SEQ ID NO: 42656 - RNA, 22 nt, Human
augacaggggccagaaccucau

SEQ ID NO: 42657 - RNA, 20 nt, Human
caaaaucuuaaggugccccc

SEQ ID NO: 42658 - RNA, 20 nt, Human
caaaaucuuaaggugccccc

SEQ ID NO: 42659 - RNA, 22 nt, Human
caaacuagcugugaccuuaggc

SEQ ID NO: 42660 - RNA, 22 nt, Human
caaacuagcugugaccuuaggc

SEQ ID NO: 42661 - RNA, 22 nt, Human
caaacuagcugugaccuuaggc

SEQ ID NO: 42662 - RNA, 22 nt, Human
caaagcccaccaaauguccucc

SEQ ID NO: 42663 - RNA, 22 nt, Human
caaagcccaccaaauguccucc

SEQ ID NO: 42664 - RNA, 23 nt, Human
caaagcccaccaaauguccuccu

SEQ ID NO: 42665 - RNA, 21 nt, Human
caaggacacagacacaaaggc

SEQ ID NO: 42666 - RNA, 23 nt, Human
cacagaaaggcccaccagccccg

SEQ ID NO: 42667 - RNA, 23 nt, Human
cacagaaaggcccaccagccccg

SEQ ID NO: 42668 - RNA, 22 nt, Human
caccacgcaguuccccacgaac

SEQ ID NO: 42669 - RNA, 22 nt, Human
caccacgcaguuccccacgaac

SEQ ID NO: 42670 - RNA, 24 nt, Human
caccagggaggacuucccacagcc

SEQ ID NO: 42671 - RNA, 18 nt, Human
caccaggucuaggcccgg

SEQ ID NO: 42672 - RNA, 18 nt, Human
caccaggucuaggcccgg

SEQ ID NO: 42673 - RNA, 22 nt, Human
caccagugccccuuucgggacc

SEQ ID NO: 42674 - RNA, 18 nt, Human
cacccuuugccgccucca

SEQ ID NO: 42675 - RNA, 18 nt, Human
cacccuuugccgccucca

SEQ ID NO: 42676 - RNA, 18 nt, Human
caccuucucugauggacc

SEQ ID NO: 42677 - RNA, 23 nt, Human
cacguacacccagagggugauca

SEQ ID NO: 42678 - RNA, 18 nt, Human
cacguuuuccugaagagu

SEQ ID NO: 42679 - RNA, 18 nt, Human
cagaauaauuccggaacu

SEQ ID NO: 42680 - RNA, 21 nt, Human
cagaauaauuccggaacucca

SEQ ID NO: 42681 - RNA, 22 nt, Human
cagaauuccuaaagcagcauag

SEQ ID NO: 42682 - RNA, 18 nt, Human
cagagggugaucaggguc

SEQ ID NO: 42683 - RNA, 20 nt, Human
cagcaccccagaguacagga

SEQ ID NO: 42684 - RNA, 20 nt, Human
cagcaccccagaguacagga

SEQ ID NO: 42685 - RNA, 23 nt, Human
cagcccacaggccccaccacggc

SEQ ID NO: 42686 - RNA, 24 nt, Human
cagccccggguucaggcugcuccu

SEQ ID NO: 42687 - RNA, 24 nt, Human
cagccccggguucaggcugcuccu

SEQ ID NO: 42688 - RNA, 24 nt, Human
cagccgcuucaguugccgugaugu

SEQ ID NO: 42689 - RNA, 19 nt, Human
cagcgugguacagagcccc

SEQ ID NO: 42690 - RNA, 25 nt, Human
caggaaaggccaggaggaaaucuca

SEQ ID NO: 42691 - RNA, 25 nt, Human
caggaaaggccaggaggaaaucuca

SEQ ID NO: 42692 - RNA, 21 nt, Human
caggaggaaaaagcuuuuuau

SEQ ID NO: 42693 - RNA, 21 nt, Human
caggaggaaaaagcuuuuuau

SEQ ID NO: 42694 - RNA, 21 nt, Human
caggaggaaaaagcuuuuuau

SEQ ID NO: 42695 - RNA, 18 nt, Human
cagggcagacaccaggga

SEQ ID NO: 42696 - RNA, 18 nt, Human
cagggcuggguacgggcc

SEQ ID NO: 42697 - RNA, 20 nt, Human
caggucagcuagcaaggcac

SEQ ID NO: 42698 - RNA, 18 nt, Human
caggugaaggugguugug

SEQ ID NO: 42699 - RNA, 27 nt, Human
caggugccuccgggguaacuuagagga

SEQ ID NO: 42700 - RNA, 19 nt, Human
caguucuggauccaugccu

SEQ ID NO: 42701 - RNA, 18 nt, Human
cauaggccacggagcccu

SEQ ID NO: 42702 - RNA, 21 nt, Human
caucaacgacauagauguccu

SEQ ID NO: 42703 - RNA, 24 nt, Human
caucacuguaaacagcucgagcca

SEQ ID NO: 42704 - RNA, 23 nt, Human
ccaaagcccaccaaauguccucc

SEQ ID NO: 42705 - RNA, 20 nt, Human
ccacaagaguggagauggcg

SEQ ID NO: 42706 - RNA, 18 nt, Human
ccaccaaauguccuccuc

SEQ ID NO: 42707 - RNA, 18 nt, Human
ccaccaaauguccuccuc

SEQ ID NO: 42708 - RNA, 24 nt, Human
ccacuccgaugcucagccaccuau

SEQ ID NO: 42709 - RNA, 24 nt, Human
ccacuccgaugcucagccgccuau

SEQ ID NO: 42710 - RNA, 20 nt, Human
ccagaacacacugagcucca

SEQ ID NO: 42711 - RNA, 22 nt, Human
ccagccccggguucaggcugcu

SEQ ID NO: 42712 - RNA, 22 nt, Human
ccagccccggguucaggcugcu

SEQ ID NO: 42713 - RNA, 19 nt, Human
ccauggccauggcugccag

SEQ ID NO: 42714 - RNA, 22 nt, Human
cccacgaacuccacuccgaugc

SEQ ID NO: 42715 - RNA, 22 nt, Human
cccacgaacuccacuccgaugc

SEQ ID NO: 42716 - RNA, 22 nt, Human
cccacgauccccaccuucucgc

SEQ ID NO: 42717 - RNA, 22 nt, Human
cccacgauccccaccuucucgc

SEQ ID NO: 42718 - RNA, 19 nt, Human
cccagcggcgggcagagcg

SEQ ID NO: 42719 - RNA, 26 nt, Human
cccccaguguuugcuaucaaguccau

SEQ ID NO: 42720 - RNA, 26 nt, Human
cccccaguguuugcuaucaaguccau

SEQ ID NO: 42721 - RNA, 21 nt, Human
ccccgcccucugagcacugga

SEQ ID NO: 42722 - RNA, 21 nt, Human
ccccgcccucugagcacugga

SEQ ID NO: 42723 - RNA, 19 nt, Human
ccccggguucaggcugcuc

SEQ ID NO: 42724 - RNA, 19 nt, Human
ccccggguucaggcugcuc

SEQ ID NO: 42725 - RNA, 23 nt, Human
cccgcugccgcuggcccccagac

SEQ ID NO: 42726 - RNA, 24 nt, Human
cccgcugccgcuggcccccagaca

SEQ ID NO: 42727 - RNA, 19 nt, Human
cccugaacaccagagagcc

SEQ ID NO: 42728 - RNA, 19 nt, Human
ccgcggacagugggucauc

SEQ ID NO: 42729 - RNA, 18 nt, Human
ccucugucaccugcaccu

SEQ ID NO: 42730 - RNA, 23 nt, Human
ccugacccagcagcugucuucug

SEQ ID NO: 42731 - RNA, 23 nt, Human
ccugacccagcagcugucuucug

SEQ ID NO: 42732 - RNA, 23 nt, Human
ccugacccagcagcugucuucug

SEQ ID NO: 42733 - RNA, 24 nt, Human
ccugggcccaggugaaggugccac

SEQ ID NO: 42734 - RNA, 22 nt, Human
cgagcugccucuggcccacgcu

SEQ ID NO: 42735 - RNA, 18 nt, Human
cgccuccaggaugcggaa

SEQ ID NO: 42736 - RNA, 23 nt, Human
cggcccacgauccccaccuucuc

SEQ ID NO: 42737 - RNA, 19 nt, Human
cggucggacccagcggcgg

SEQ ID NO: 42738 - RNA, 19 nt, Human
cgugcgcagcagcuggggc

SEQ ID NO: 42739 - RNA, 19 nt, Human
cucacaaacgugugcaggu

SEQ ID NO: 42740 - RNA, 19 nt, Human
cucacaaacgugugcaggu

SEQ ID NO: 42741 - RNA, 19 nt, Human
cucaggaauugcuggaucc

SEQ ID NO: 42742 - RNA, 23 nt, Human
cucaucaacgacauagauguccu

SEQ ID NO: 42743 - RNA, 25 nt, Human
cuccaaagcccaccaaauguccucc

SEQ ID NO: 42744 - RNA, 25 nt, Human
cuccaaagcccaccaaauguccucc

SEQ ID NO: 42745 - RNA, 24 nt, Human
cuccacagccacgauguuagauuc

SEQ ID NO: 42746 - RNA, 18 nt, Human
cuccacagugccaauggc

SEQ ID NO: 42747 - RNA, 19 nt, Human
cuccacuccgaugcucagc

SEQ ID NO: 42748 - RNA, 22 nt, Human
cuccacuccgaugcucagccac

SEQ ID NO: 42749 - RNA, 23 nt, Human
cugaguagcugccgaaggggucc

SEQ ID NO: 42750 - RNA, 23 nt, Human
cugaguagcugccgaaggggucc

SEQ ID NO: 42751 - RNA, 24 nt, Human
cugccuuccaccacccagggcgcc

SEQ ID NO: 42752 - RNA, 24 nt, Human
cugccuuccaccacccagggcgcc

SEQ ID NO: 42753 - RNA, 23 nt, Human
cuucgggagggcggcugccuucc

SEQ ID NO: 42754 - RNA, 23 nt, Human
cuucgggagggcggcugccuucc

SEQ ID NO: 42755 - RNA, 21 nt, Human
cuugcagaauuccuaaagcag

SEQ ID NO: 42756 - RNA, 21 nt, Human
cuuugacccacauacaggaga

SEQ ID NO: 42757 - RNA, 26 nt, Human
gaacaggaugggguccugcgggauga

SEQ ID NO: 42758 - RNA, 26 nt, Human
gaacaggaugggguccugcgggauga

SEQ ID NO: 42759 - RNA, 20 nt, Human
gaagacuugccagccccagu

SEQ ID NO: 42760 - RNA, 20 nt, Human
gaagacuugccagccccagu

SEQ ID NO: 42761 - RNA, 24 nt, Human
gagcaccacgcaguuccccacgaa

SEQ ID NO: 42762 - RNA, 24 nt, Human
gagcaccacgcaguuccccacgaa

SEQ ID NO: 42763 - RNA, 21 nt, Human
gaugcccuccaccugcuucag

SEQ ID NO: 42764 - RNA, 24 nt, Human
gaugcucagccaccuaugggggau

SEQ ID NO: 42765 - RNA, 21 nt, Human
gcaaggcacaggccuccagag

SEQ ID NO: 42766 - RNA, 23 nt, Human
gcaguuccccacgaacuccacuc

SEQ ID NO: 42767 - RNA, 23 nt, Human
gcaguuccccacgaacuccacuc

SEQ ID NO: 42768 - RNA, 20 nt, Human
gcaucauuuguccaggcacu

SEQ ID NO: 42769 - RNA, 19 nt, Human
gcaugaggaugacaggggc

SEQ ID NO: 42770 - RNA, 19 nt, Human
gccagaaccucaucaacga

SEQ ID NO: 42771 - RNA, 21 nt, Human
gcccacgcugagauucucccc

SEQ ID NO: 42772 - RNA, 21 nt, Human
gcccacgcugagauucucccc

SEQ ID NO: 42773 - RNA, 21 nt, Human
gccccaccacggccaccagug

SEQ ID NO: 42774 - RNA, 19 nt, Human
gccccggguucaggcugcu

SEQ ID NO: 42775 - RNA, 19 nt, Human
gccccggguucaggcugcu

SEQ ID NO: 42776 - RNA, 19 nt, Human
gccgugcgcagcagcuggg

SEQ ID NO: 42777 - RNA, 19 nt, Human
gccucugucucugucuugg

SEQ ID NO: 42778 - RNA, 19 nt, Human
gccucugucucugucuugg

SEQ ID NO: 42779 - RNA, 24 nt, Human
gcggcugcaaggaaggcgagcgcg

SEQ ID NO: 42780 - RNA, 19 nt, Human
ggaaggcgagcgcggucgg

SEQ ID NO: 42781 - RNA, 20 nt, Human
ggagcccuucaugugcacuu

SEQ ID NO: 42782 - RNA, 18 nt, Human
ggaggaaauggggcaggg

SEQ ID NO: 42783 - RNA, 24 nt, Human
ggaggacuucccacagcccacagg

SEQ ID NO: 42784 - RNA, 18 nt, Human
ggcaggggcagggcaggg

SEQ ID NO: 42785 - RNA, 20 nt, Human
ggccauggcugccagcauca

SEQ ID NO: 42786 - RNA, 22 nt, Human
ggcccacgauccccaccuucuc

SEQ ID NO: 42787 - RNA, 23 nt, Human
gggacagcuccaaagcccaccaa

SEQ ID NO: 42788 - RNA, 23 nt, Human
gggacagcuccaaagcccaccaa

SEQ ID NO: 42789 - RNA, 18 nt, Human
gggaucagaugaggagga

SEQ ID NO: 42790 - RNA, 24 nt, Human
gggccgaggcgcggcugcaaggaa

SEQ ID NO: 42791 - RNA, 18 nt, Human
ggggcaggggcagggcag

SEQ ID NO: 42792 - RNA, 21 nt, Human
gggguccugcgggaugauggu

SEQ ID NO: 42793 - RNA, 21 nt, Human
gggguccugcgggaugauggu

SEQ ID NO: 42794 - RNA, 19 nt, Human
ggguccugcgggaugaugg

SEQ ID NO: 42795 - RNA, 19 nt, Human
ggguccugcgggaugaugg

SEQ ID NO: 42796 - RNA, 22 nt, Human
gggugaucagggucaccaggaa

SEQ ID NO: 42797 - RNA, 20 nt, Human
ggguggccugacccagcagc

SEQ ID NO: 42798 - RNA, 20 nt, Human
ggguggccugacccagcagc

SEQ ID NO: 42799 - RNA, 20 nt, Human
ggguggccugacccagcagc

SEQ ID NO: 42800 - RNA, 19 nt, Human
ggugcccccaguguuugcu

SEQ ID NO: 42801 - RNA, 19 nt, Human
ggugcccccaguguuugcu

SEQ ID NO: 42802 - RNA, 19 nt, Human
ggugcccccaguguuugcu

SEQ ID NO: 42803 - RNA, 23 nt, Human
guccaggccugccggcugggagc

SEQ ID NO: 42804 - RNA, 23 nt, Human
guccaggccugccggcugggagc

SEQ ID NO: 42805 - RNA, 20 nt, Human
uaauggauucaggcagcacc

SEQ ID NO: 42806 - RNA, 20 nt, Human
uaauggauucaggcagcacc

SEQ ID NO: 42807 - RNA, 20 nt, Human
uaauggauucaggcagcacc

SEQ ID NO: 42808 - RNA, 21 nt, Human
uacaggccgacccugucccuc

SEQ ID NO: 42809 - RNA, 25 nt, Human
uagcacaaugaugaagucugucugg

SEQ ID NO: 42810 - RNA, 21 nt, Human
uagcagcuucucugguuggca

SEQ ID NO: 42811 - RNA, 24 nt, Human
uaggcgugucauucaccacuuggg

SEQ ID NO: 42812 - RNA, 24 nt, Human
uaggcgugucauucaccacuuggg

SEQ ID NO: 42813 - RNA, 24 nt, Human
uaggcgugucauucaccacuuggg

SEQ ID NO: 42814 - RNA, 18 nt, Human
ucaaacugggugcggaug

SEQ ID NO: 42815 - RNA, 18 nt, Human
ucaaacugggugcggaug

SEQ ID NO: 42816 - RNA, 21 nt, Human
ucacccuuugccgccuccagg

SEQ ID NO: 42817 - RNA, 23 nt, Human
ucagcaccuugaugccguccagg

SEQ ID NO: 42818 - RNA, 19 nt, Human
ucagcuagcaaggcacagg

SEQ ID NO: 42819 - RNA, 23 nt, Human
ucaggcagcaccccagaguacag

SEQ ID NO: 42820 - RNA, 23 nt, Human
ucaggcagcaccccagaguacag

SEQ ID NO: 42821 - RNA, 19 nt, Human
ucaucaguacucccauuuu

SEQ ID NO: 42822 - RNA, 19 nt, Human
ucaucaguacucccauuuu

SEQ ID NO: 42823 - RNA, 19 nt, Human
ucaucaguacucccauuuu

SEQ ID NO: 42824 - RNA, 25 nt, Human
ucauucaccacuuggggaucauuuc

SEQ ID NO: 42825 - RNA, 25 nt, Human
ucauucaccacuuggggaucauuuc

SEQ ID NO: 42826 - RNA, 25 nt, Human
ucauucaccacuuggggaucauuuc

SEQ ID NO: 42827 - RNA, 19 nt, Human
uccacacucugggggucaa

SEQ ID NO: 42828 - RNA, 19 nt, Human
uccaccacccagggcgccu

SEQ ID NO: 42829 - RNA, 19 nt, Human
uccaccacccagggcgccu

SEQ ID NO: 42830 - RNA, 24 nt, Human
uccaccacccagggcgccucuguc

SEQ ID NO: 42831 - RNA, 24 nt, Human
uccaccacccagggcgccucuguc

SEQ ID NO: 42832 - RNA, 23 nt, Human
uccaccuccccacgugggggcca

SEQ ID NO: 42833 - RNA, 23 nt, Human
uccaccuccccacgugggggcca

SEQ ID NO: 42834 - RNA, 24 nt, Human
uccacguacacguacacccagagg

SEQ ID NO: 42835 - RNA, 21 nt, Human
uccagcaagaaaauaucggca

SEQ ID NO: 42836 - RNA, 23 nt, Human
uccaucagcuagcacaaugauga

SEQ ID NO: 42837 - RNA, 19 nt, Human
ucccacagcccacaggccc

SEQ ID NO: 42838 - RNA, 22 nt, Human
ucccguagaagaugccucuagc

SEQ ID NO: 42839 - RNA, 19 nt, Human
uccuuggagaagcaguuca

SEQ ID NO: 42840 - RNA, 21 nt, Human
ucuccaggucgauggcagcug

SEQ ID NO: 42841 - RNA, 21 nt, Human
ucuccaggucgauggcagcug

SEQ ID NO: 42842 - RNA, 22 nt, Human
ucugauccccaccaggcagcau

SEQ ID NO: 42843 - RNA, 18 nt, Human
ugaaaaccaggaaaggcc

SEQ ID NO: 42844 - RNA, 19 nt, Human
ugaccacaagaguggagau

SEQ ID NO: 42845 - RNA, 23 nt, Human
ugacggcaaauagugcagcaaag

SEQ ID NO: 42846 - RNA, 23 nt, Human
ugacggcaaauagugcagcaaag

SEQ ID NO: 42847 - RNA, 18 nt, Human
ugaggacagggcacucag

SEQ ID NO: 42848 - RNA, 20 nt, Human
ugaucucaaaaucccggcug

SEQ ID NO: 42849 - RNA, 20 nt, Human
ugcaacacacgggcagccug

SEQ ID NO: 42850 - RNA, 18 nt, Human
ugccauggcaucauuugu

SEQ ID NO: 42851 - RNA, 19 nt, Human
ugccccuuucgggaccugg

SEQ ID NO: 42852 - RNA, 19 nt, Human
ugcccuccaccugcuucag

SEQ ID NO: 42853 - RNA, 24 nt, Human
ugccucuggcccacgcugagauuc

SEQ ID NO: 42854 - RNA, 23 nt, Human
ugccuggugcaacacacgggcag

SEQ ID NO: 42855 - RNA, 24 nt, Human
ugcugggaauuccuggaggagcag

SEQ ID NO: 42856 - RNA, 28 nt, Human
uggaccacauaggugacugguuaaagag

SEQ ID NO: 42857 - RNA, 20 nt, Human
uggaguacuccuugacccuc

SEQ ID NO: 42858 - RNA, 20 nt, Human
uggaguacuccuugacccuc

SEQ ID NO: 42859 - RNA, 20 nt, Human
uggaugccacccgcugccau

SEQ ID NO: 42860 - RNA, 20 nt, Human
uggcaccagucacugucucc

SEQ ID NO: 42861 - RNA, 21 nt, Human
uggcauagccuggggagaugg

SEQ ID NO: 42862 - RNA, 20 nt, Human
uggcccgaugacguggucaa

SEQ ID NO: 42863 - RNA, 23 nt, Human
uggcccgaugacguggucaaaga

SEQ ID NO: 42864 - RNA, 21 nt, Human
uggccucgucuaaaaccagga

SEQ ID NO: 42865 - RNA, 21 nt, Human
uggccucgucuaaaaccagga

SEQ ID NO: 42866 - RNA, 19 nt, Human
uggcugcuuucuccuccug

SEQ ID NO: 42867 - RNA, 21 nt, Human
ugggguccugcgggaugaugg

SEQ ID NO: 42868 - RNA, 21 nt, Human
ugggguccugcgggaugaugg

SEQ ID NO: 42869 - RNA, 21 nt, Human
ugggucagugccccaucugcc

SEQ ID NO: 42870 - RNA, 21 nt, Human
uggugcaacacacgggcagcc

SEQ ID NO: 42871 - RNA, 21 nt, Human
ugguguggagguaggccgccg

SEQ ID NO: 42872 - RNA, 18 nt, Human
ugguguggugucaaagaa

SEQ ID NO: 42873 - RNA, 21 nt, Human
uguccaggaccaggacccugg

SEQ ID NO: 42874 - RNA, 21 nt, Human
uguccaggaccaggacccugg

SEQ ID NO: 42875 - RNA, 22 nt, Human
uucacccuuugccgccuccagg

SEQ ID NO: 42876 - RNA, 22 nt, Human
uucagagacacacuggccugag

SEQ ID NO: 42877 - RNA, 21 nt, Human
uuccagccgcuucaguugccg

SEQ ID NO: 42878 - RNA, 20 nt, Human
uucccacagcccacaggccc

SEQ ID NO: 42879 - RNA, 21 nt, Human
uuccugaagagugcaguucug

SEQ ID NO: 42880 - RNA, 23 nt, Human
uucuggauccaugccugcugggg

SEQ ID NO: 42881 - RNA, 20 nt, Human
uugacccucuccacagccac

SEQ ID NO: 42882 - RNA, 21 nt, Human
uugacccucuccacagccacu

SEQ ID NO: 42883 - RNA, 18 nt, Human
uuucuccuccugggucag

SEQ ID NO: 42884 - RNA, 26 nt, Human
uuuuuuuuuuuuuuuuuuacuguuga

SEQ ID NO: 42885 - RNA, 26 nt, Human
uuuuuuuuuuuuuuuuuuacuguuga

SEQ ID NO: 42886 - RNA, 19 nt, Human
aagcagggaugcuggggcu

SEQ ID NO: 42887 - RNA, 18 nt, Human
aggcggcgguggccgcgg

SEQ ID NO: 42888 - RNA, 19 nt, Human
ccgggcggggcgggcgcgg

SEQ ID NO: 42889 - RNA, 18 nt, Human
cggggucgcgcugaucag

SEQ ID NO: 42890 - RNA, 23 nt, Human
gcggggcgggcgcgggccggggu

SEQ ID NO: 42891 - RNA, 24 nt, Human
ggaccucaagcagggaugcugggg

SEQ ID NO: 42892 - RNA, 18 nt, Human
ggaugcuggggcuccggc

SEQ ID NO: 42893 - RNA, 19 nt, Human
ggcggcgguggccgcgggc

SEQ ID NO: 42894 - RNA, 22 nt, Human
ggcgggcgcgggccggggucgc

SEQ ID NO: 42895 - RNA, 21 nt, Human
ggggcgggcgcgggccggggu

SEQ ID NO: 42896 - RNA, 21 nt, Human
ggucgcgcugaucaggcggcg

SEQ ID NO: 42897 - RNA, 21 nt, Human
uccaaaaacuaguggaaaaug

SEQ ID NO: 42898 - RNA, 18 nt, Human
ugaucaggcggcgguggc

SEQ ID NO: 42899 - RNA, 18 nt, Human
ugccaaaguaaaaaaaag

SEQ ID NO: 42900 - RNA, 21 nt, Human
uguugccaaaguaaaaaaaag

SEQ ID NO: 42901 - RNA, 23 nt, Human
aaaaaugauagaaaggaauaugc

SEQ ID NO: 42902 - RNA, 20 nt, Human
aaacaguaagugacaccagg

SEQ ID NO: 42903 - RNA, 21 nt, Human
aaacaguaagugacaccagga

SEQ ID NO: 42904 - RNA, 20 nt, Human
aaaccacacagcaaccagca

SEQ ID NO: 42905 - RNA, 19 nt, Human
aacaacagcaaaaagaaga

SEQ ID NO: 42906 - RNA, 20 nt, Human
aacaugcuaaggcgacagaa

SEQ ID NO: 42907 - RNA, 18 nt, Human
aagaagaaggcaggaaag

SEQ ID NO: 42908 - RNA, 20 nt, Human
aagaagaaggcaggaaagaa

SEQ ID NO: 42909 - RNA, 22 nt, Human
aagaagaaggcaggaaagaaac

SEQ ID NO: 42910 - RNA, 21 nt, Human
aagcagcaguuggcuccaggg

SEQ ID NO: 42911 - RNA, 24 nt, Human
aaugaaaugcuacucuuccuacag

SEQ ID NO: 42912 - RNA, 21 nt, Human
acacaccaaaccacacagcaa

SEQ ID NO: 42913 - RNA, 22 nt, Human
acacgucuuccuuuggacaccc

SEQ ID NO: 42914 - RNA, 19 nt, Human
acagacccacgaaauccug

SEQ ID NO: 42915 - RNA, 23 nt, Human
acagacccacgaaauccugagcc

SEQ ID NO: 42916 - RNA, 18 nt, Human
accacacagcaaccagca

SEQ ID NO: 42917 - RNA, 21 nt, Human
accagccccacagcacaaagg

SEQ ID NO: 42918 - RNA, 19 nt, Human
agaaaaccuggcaccguga

SEQ ID NO: 42919 - RNA, 20 nt, Human
agaaacaacagcaaaaagaa

SEQ ID NO: 42920 - RNA, 19 nt, Human
agaaaggaaaacagaccca

SEQ ID NO: 42921 - RNA, 20 nt, Human
agaaaggaaaacagacccac

SEQ ID NO: 42922 - RNA, 23 nt, Human
agaaugaaaugcuacucuuccua

SEQ ID NO: 42923 - RNA, 24 nt, Human
agacugauucuuguuuagaaacaa

SEQ ID NO: 42924 - RNA, 21 nt, Human
agagagagagacugugcgacg

SEQ ID NO: 42925 - RNA, 25 nt, Human
agcaaaaagaagaaggcaggaaaga

SEQ ID NO: 42926 - RNA, 19 nt, Human
agcaaaaccagaucucuag

SEQ ID NO: 42927 - RNA, 22 nt, Human
agccaauccggaacugcugugc

SEQ ID NO: 42928 - RNA, 18 nt, Human
aggaaccugaggcagugg

SEQ ID NO: 42929 - RNA, 19 nt, Human
aggcaggaaagaaacuccc

SEQ ID NO: 42930 - RNA, 22 nt, Human
aggcaggaaagaaacuccccgg

SEQ ID NO: 42931 - RNA, 20 nt, Human
aggcggcagagggggcuguc

SEQ ID NO: 42932 - RNA, 25 nt, Human
aggcggcagagggggcugucggagg

SEQ ID NO: 42933 - RNA, 22 nt, Human
caaaaacuucuacgccagugug

SEQ ID NO: 42934 - RNA, 20 nt, Human
caacaggucuuggagcugga

SEQ ID NO: 42935 - RNA, 21 nt, Human
cacaccaaaccacacagcaac

SEQ ID NO: 42936 - RNA, 23 nt, Human
caccaaaccacacagcaaccagg

SEQ ID NO: 42937 - RNA, 21 nt, Human
caccccuggagcggcuguggg

SEQ ID NO: 42938 - RNA, 18 nt, Human
caccucaaaaagcagcag

SEQ ID NO: 42939 - RNA, 23 nt, Human
caccucaaaaagcagcaguuggc

SEQ ID NO: 42940 - RNA, 24 nt, Human
cagcaaaaagaagaaggcaggaaa

SEQ ID NO: 42941 - RNA, 22 nt, Human
cagcacaaaggggguuugcggg

SEQ ID NO: 42942 - RNA, 23 nt, Human
caggacagaaggcaggagcccug

SEQ ID NO: 42943 - RNA, 21 nt, Human
cagucuaauagcaaaaccaga

SEQ ID NO: 42944 - RNA, 23 nt, Human
cagucuaauagcaaaaccagauc

SEQ ID NO: 42945 - RNA, 18 nt, Human
ccaggacaaccgcgccag

SEQ ID NO: 42946 - RNA, 18 nt, Human
ccagggcucacagacugu

SEQ ID NO: 42947 - RNA, 21 nt, Human
cccacgaaauccugagcccug

SEQ ID NO: 42948 - RNA, 22 nt, Human
cccugccacugaacuguggagg

SEQ ID NO: 42949 - RNA, 21 nt, Human
ccugaaccuuuuagagugcaa

SEQ ID NO: 42950 - RNA, 28 nt, Human
ccugccacugaacuguggaagguuuucc

SEQ ID NO: 42951 - RNA, 23 nt, Human
cgcucaaccacgcucccgagcau

SEQ ID NO: 42952 - RNA, 23 nt, Human
cggcagagggggcugucggaggg

SEQ ID NO: 42953 - RNA, 27 nt, Human
cgggaacacaccaaaccacacagcaac

SEQ ID NO: 42954 - RNA, 18 nt, Human
cugcgccccugcuccagg

SEQ ID NO: 42955 - RNA, 18 nt, Human
cugcugugcgaaagauaa

SEQ ID NO: 42956 - RNA, 18 nt, Human
cuguggggaggcggcaga

SEQ ID NO: 42957 - RNA, 19 nt, Human
cuucgccccgcugcucucc

SEQ ID NO: 42958 - RNA, 20 nt, Human
cuucgccccgcugcucuccc

SEQ ID NO: 42959 - RNA, 18 nt, Human
gaaauccugagcccugcc

SEQ ID NO: 42960 - RNA, 23 nt, Human
gaacacaccaaaccacacagcaa

SEQ ID NO: 42961 - RNA, 23 nt, Human
gaaccaacaggucuuggagcugg

SEQ ID NO: 42962 - RNA, 18 nt, Human
gaaccuuuuagagugcaa

SEQ ID NO: 42963 - RNA, 22 nt, Human
gaaugaaaugcuacucuuccua

SEQ ID NO: 42964 - RNA, 19 nt, Human
gagggcccacuauugccac

SEQ ID NO: 42965 - RNA, 20 nt, Human
gcgaaagauaaaaucgagaa

SEQ ID NO: 42966 - RNA, 23 nt, Human
ggaaagaaacuccccggcucgga

SEQ ID NO: 42967 - RNA, 21 nt, Human
gggagugaaaaggggccuggg

SEQ ID NO: 42968 - RNA, 22 nt, Human
gggagugaaaaggggccugggc

SEQ ID NO: 42969 - RNA, 25 nt, Human
gugaaacacacaagccaauccggaa

SEQ ID NO: 42970 - RNA, 23 nt, Human
uaaaauaaacagcuuacauuuuc

SEQ ID NO: 42971 - RNA, 21 nt, Human
uagaaacaacagcaaaaagaa

SEQ ID NO: 42972 - RNA, 19 nt, Human
uaggaaccugaggcagugg

SEQ ID NO: 42973 - RNA, 25 nt, Human
uauaaagcuucauuauaggccucug

SEQ ID NO: 42974 - RNA, 19 nt, Human
uauauagauauagcuacac

SEQ ID NO: 42975 - RNA, 21 nt, Human
uauugccacacgucuuccuuu

SEQ ID NO: 42976 - RNA, 21 nt, Human
ucaaccacgcucccgagcaug

SEQ ID NO: 42977 - RNA, 19 nt, Human
ucagcaaacaugcuaaggc

SEQ ID NO: 42978 - RNA, 19 nt, Human
ucuccagccaccccuggag

SEQ ID NO: 42979 - RNA, 18 nt, Human
ucucuguggauagacuga

SEQ ID NO: 42980 - RNA, 18 nt, Human
ucucuguggauagacuga

SEQ ID NO: 42981 - RNA, 19 nt, Human
ucuuggagcuggagagcuc

SEQ ID NO: 42982 - RNA, 20 nt, Human
ugaaacacacaagccaaucc

SEQ ID NO: 42983 - RNA, 20 nt, Human
ugacagaaacaguaagugaa

SEQ ID NO: 42984 - RNA, 22 nt, Human
ugacagaaacaguaagugacac

SEQ ID NO: 42985 - RNA, 22 nt, Human
ugagaacucacggcgcucugca

SEQ ID NO: 42986 - RNA, 20 nt, Human
ugaggcagugggacucucug

SEQ ID NO: 42987 - RNA, 19 nt, Human
ugcaauuaagaacaaaaac

SEQ ID NO: 42988 - RNA, 25 nt, Human
uggaauaaauacaauaaucaaaaua

SEQ ID NO: 42989 - RNA, 21 nt, Human
uggacacccagaaaaccuggc

SEQ ID NO: 42990 - RNA, 23 nt, Human
uggagggagugaaaaggggccug

SEQ ID NO: 42991 - RNA, 24 nt, Human
uggagggagugaaaaggggccugg

SEQ ID NO: 42992 - RNA, 19 nt, Human
uggggaggcggcagagggg

SEQ ID NO: 42993 - RNA, 23 nt, Human
uguacagaauuauauauagauau

SEQ ID NO: 42994 - RNA, 22 nt, Human
uuagaaacaacagcaaaaagaa

SEQ ID NO: 42995 - RNA, 21 nt, Human
uuauaauaacgguucccugaa

SEQ ID NO: 42996 - RNA, 18 nt, Human
uugccacacgucuuccuu

SEQ ID NO: 42997 - RNA, 21 nt, Human
uuggacacccagaaaaccugg

SEQ ID NO: 42998 - RNA, 23 nt, Human
uuggagcuggagagcucugugca

SEQ ID NO: 42999 - RNA, 19 nt, Human
agggguaugggcagggucc

SEQ ID NO: 43000 - RNA, 20 nt, Human
caagugauuuacaguuagaa

SEQ ID NO: 43001 - RNA, 25 nt, Human
caagugauuuacaguuagaaaaccc

SEQ ID NO: 43002 - RNA, 19 nt, Human
caggcccccgccccccggg

SEQ ID NO: 43003 - RNA, 21 nt, Human
caguuagaaaacccaggcagg

SEQ ID NO: 43004 - RNA, 23 nt, Human
ccggcccggccgucaggcccccg

SEQ ID NO: 43005 - RNA, 19 nt, Human
ccucugucccuugcagcuc

SEQ ID NO: 43006 - RNA, 22 nt, Human
cgggcucagcuggcuccgcugg

SEQ ID NO: 43007 - RNA, 18 nt, Human
gccgcgccucugucccuu

SEQ ID NO: 43008 - RNA, 18 nt, Human
gcgcgggcgcgggcuggg

SEQ ID NO: 43009 - RNA, 18 nt, Human
gggcaggguccgaaugug

SEQ ID NO: 43010 - RNA, 20 nt, Human
uacaagugauuuacaguuag

SEQ ID NO: 43011 - RNA, 21 nt, Human
uacaguuagaaaacccaggca

SEQ ID NO: 43012 - RNA, 21 nt, Human
ucccuugcagcuccgccgccc

SEQ ID NO: 43013 - RNA, 22 nt, Human
uccgccgcccggcccggccguc

SEQ ID NO: 43014 - RNA, 20 nt, Human
uccgcgcgccugccgcgccu

SEQ ID NO: 43015 - RNA, 21 nt, Human
uccgcgcgccugccgcgccuc

SEQ ID NO: 43016 - RNA, 22 nt, Human
ugggauggcacuugggcucugg

SEQ ID NO: 43017 - RNA, 20 nt, Human
ugggcucgggcucagcuggc

SEQ ID NO: 43018 - RNA, 24 nt, Human
ugucccuugcagcuccgccgcccc

SEQ ID NO: 43019 - RNA, 21 nt, Human
aagcagaggcccgugugcccc

SEQ ID NO: 43020 - RNA, 24 nt, Human
accacccucaggggauggaccaug

SEQ ID NO: 43021 - RNA, 24 nt, Human
accccagcuuccuccgcggagcaa

SEQ ID NO: 43022 - RNA, 18 nt, Human
accugggcuggcugccgc

SEQ ID NO: 43023 - RNA, 19 nt, Human
acugagcugggaacauggu

SEQ ID NO: 43024 - RNA, 21 nt, Human
acuggggcuggugccuggggc

SEQ ID NO: 43025 - RNA, 24 nt, Human
agagguggugaggggccgaggggg

SEQ ID NO: 43026 - RNA, 20 nt, Human
agguggugaggggccgaggg

SEQ ID NO: 43027 - RNA, 19 nt, Human
caagcagaggcccgugugc

SEQ ID NO: 43028 - RNA, 25 nt, Human
caagcagaggcccguguuguaauga

SEQ ID NO: 43029 - RNA, 22 nt, Human
caaguggaggaacuuggcucuc

SEQ ID NO: 43030 - RNA, 23 nt, Human
cacggaacgggagccuuggcuga

SEQ ID NO: 43031 - RNA, 18 nt, Human
cacugcccuggacagggc

SEQ ID NO: 43032 - RNA, 19 nt, Human
cacuguggaacagcgcccc

SEQ ID NO: 43033 - RNA, 19 nt, Human
cagcgcccccagggagugg

SEQ ID NO: 43034 - RNA, 23 nt, Human
cagcucccccuggugaccccucu

SEQ ID NO: 43035 - RNA, 20 nt, Human
caggggcggggugcgugcau

SEQ ID NO: 43036 - RNA, 22 nt, Human
caucuacuuucccgagggcggg

SEQ ID NO: 43037 - RNA, 19 nt, Human
ccaccuucuccuccuccuc

SEQ ID NO: 43038 - RNA, 18 nt, Human
ccccgggguggugcuggg

SEQ ID NO: 43039 - RNA, 23 nt, Human
ccccugagacugucgcuuuaggg

SEQ ID NO: 43040 - RNA, 18 nt, Human
ccccugaggucagggccu

SEQ ID NO: 43041 - RNA, 21 nt, Human
cccuccacaucuacuuucccg

SEQ ID NO: 43042 - RNA, 21 nt, Human
ccucaggggauggaccauggg

SEQ ID NO: 43043 - RNA, 20 nt, Human
ccugcagugccaggggcugu

SEQ ID NO: 43044 - RNA, 22 nt, Human
cgcacuccuggcuggcaagcag

SEQ ID NO: 43045 - RNA, 23 nt, Human
cgcggccucuucgggcagcccaa

SEQ ID NO: 43046 - RNA, 18 nt, Human
cgggaaaggcacacggug

SEQ ID NO: 43047 - RNA, 18 nt, Human
cuccagggucgcggccuc

SEQ ID NO: 43048 - RNA, 23 nt, Human
cucugugugacugugggucccac

SEQ ID NO: 43049 - RNA, 19 nt, Human
cucuuuggcacugagcugg

SEQ ID NO: 43050 - RNA, 19 nt, Human
cugaggucagggccuugag

SEQ ID NO: 43051 - RNA, 24 nt, Human
cugcagugccaggggcuguggccu

SEQ ID NO: 43052 - RNA, 21 nt, Human
cugcuggcacgguagucacau

SEQ ID NO: 43053 - RNA, 20 nt, Human
cugggccuguugucuaggca

SEQ ID NO: 43054 - RNA, 20 nt, Human
cuucgggcagcccaagugga

SEQ ID NO: 43055 - RNA, 19 nt, Human
cuucuccuccuccuccucc

SEQ ID NO: 43056 - RNA, 18 nt, Human
cuuggcucuccuguccug

SEQ ID NO: 43057 - RNA, 26 nt, Human
cuugugggggagaggaugcaggugag

SEQ ID NO: 43058 - RNA, 21 nt, Human
gaacuuggcucuccuguccug

SEQ ID NO: 43059 - RNA, 28 nt, Human
gaggccaccugcagugccaggggccagg

SEQ ID NO: 43060 - RNA, 19 nt, Human
gaggggccgagggggcggg

SEQ ID NO: 43061 - RNA, 22 nt, Human
gcacugggccccuuguacccca

SEQ ID NO: 43062 - RNA, 19 nt, Human
gcagaggcccgugugcccc

SEQ ID NO: 43063 - RNA, 18 nt, Human
gcagggcgccacccucca

SEQ ID NO: 43064 - RNA, 19 nt, Human
gcagggcgccacccuccac

SEQ ID NO: 43065 - RNA, 21 nt, Human
gcagugccaggggcuguggcc

SEQ ID NO: 43066 - RNA, 19 nt, Human
gcaguguaggcuggcgggg

SEQ ID NO: 43067 - RNA, 21 nt, Human
gcaguugaggcagguggcugg

SEQ ID NO: 43068 - RNA, 21 nt, Human
gcggggcaggggccggggacg

SEQ ID NO: 43069 - RNA, 21 nt, Human
gcggggugacggccgcagggg

SEQ ID NO: 43070 - RNA, 18 nt, Human
gcuggcaagcagaggccc

SEQ ID NO: 43071 - RNA, 23 nt, Human
gcuggcaagcagaggcccguguu

SEQ ID NO: 43072 - RNA, 18 nt, Human
ggacucgagucucuggag

SEQ ID NO: 43073 - RNA, 24 nt, Human
ggccaggcaugcaggggcggggug

SEQ ID NO: 43074 - RNA, 19 nt, Human
ggcuguggccugacgggcu

SEQ ID NO: 43075 - RNA, 18 nt, Human
gggccgagggggcggggc

SEQ ID NO: 43076 - RNA, 21 nt, Human
ggggcggggugcgugcauggg

SEQ ID NO: 43077 - RNA, 19 nt, Human
ggggcuggguuuggcaccg

SEQ ID NO: 43078 - RNA, 20 nt, Human
gggguggugcccggcccgag

SEQ ID NO: 43079 - RNA, 18 nt, Human
gguggugaggggccgagg

SEQ ID NO: 43080 - RNA, 24 nt, Human
guaccccagcuuccuccgcggagc

SEQ ID NO: 43081 - RNA, 23 nt, Human
uaccccagcuuccuccgcggagc

SEQ ID NO: 43082 - RNA, 18 nt, Human
uacuggggggacuggggg

SEQ ID NO: 43083 - RNA, 18 nt, Human
ucccacggaacgggagcc

SEQ ID NO: 43084 - RNA, 21 nt, Human
uccgcagacagcucccccugg

SEQ ID NO: 43085 - RNA, 28 nt, Human
ucggcugcgcugcuguguggcguugucg

SEQ ID NO: 43086 - RNA, 20 nt, Human
ucuaggaggaggggccaggc

SEQ ID NO: 43087 - RNA, 22 nt, Human
ucucccgugggaucuuuggggc

SEQ ID NO: 43088 - RNA, 19 nt, Human
ucuccuccuccuccucccc

SEQ ID NO: 43089 - RNA, 21 nt, Human
ucucucucgggcaggcgcugg

SEQ ID NO: 43090 - RNA, 23 nt, Human
ucucuggagggaggccaccugca

SEQ ID NO: 43091 - RNA, 18 nt, Human
ucucuuccucuccaccuu

SEQ ID NO: 43092 - RNA, 25 nt, Human
ugagagacugacgaggagggaauca

SEQ ID NO: 43093 - RNA, 18 nt, Human
ugaggcagguggcuggaa

SEQ ID NO: 43094 - RNA, 21 nt, Human
ugaggcagguggcuggaagga

SEQ ID NO: 43095 - RNA, 26 nt, Human
ugagggcccgggaaaggcacacgguu

SEQ ID NO: 43096 - RNA, 18 nt, Human
ugaggggccgagggggcg

SEQ ID NO: 43097 - RNA, 24 nt, Human
ugcaggggcggggugcgugcaugg

SEQ ID NO: 43098 - RNA, 24 nt, Human
ugccccgguggcggcuggcagugu

SEQ ID NO: 43099 - RNA, 23 nt, Human
ugcccggcccgagggcugagggc

SEQ ID NO: 43100 - RNA, 21 nt, Human
ugccuggggcagcaguugagg

SEQ ID NO: 43101 - RNA, 22 nt, Human
ugccuggggcagcaguugaggc

SEQ ID NO: 43102 - RNA, 24 nt, Human
ugccuggggcagcaguugaggcag

SEQ ID NO: 43103 - RNA, 26 nt, Human
ugcgucccucuccccucucccguggg

SEQ ID NO: 43104 - RNA, 19 nt, Human
uggaggaacuuggcucucc

SEQ ID NO: 43105 - RNA, 21 nt, Human
uggaggaacuuggcucuccug

SEQ ID NO: 43106 - RNA, 21 nt, Human
uggccccugaggucagggccu

SEQ ID NO: 43107 - RNA, 21 nt, Human
uggccugacgggcuccugggg

SEQ ID NO: 43108 - RNA, 22 nt, Human
uggcugccgcguagggacuggg

SEQ ID NO: 43109 - RNA, 21 nt, Human
ugggagggacagggcgagggu

SEQ ID NO: 43110 - RNA, 19 nt, Human
ugggccccuuguaccccag

SEQ ID NO: 43111 - RNA, 21 nt, Human
ugggcucagggcccuccaggg

SEQ ID NO: 43112 - RNA, 21 nt, Human
ugggggagaggaugcagguga

SEQ ID NO: 43113 - RNA, 19 nt, Human
uggugaggggccgaggggg

SEQ ID NO: 43114 - RNA, 21 nt, Human
uggugaggggccgagggggcg

SEQ ID NO: 43115 - RNA, 22 nt, Human
uguggccagcacugggccccuu

SEQ ID NO: 43116 - RNA, 20 nt, Human
uguugcucugacccugggcc

SEQ ID NO: 43117 - RNA, 23 nt, Human
uuaggcccccgggguggugcugg

SEQ ID NO: 43118 - RNA, 19 nt, Human
uugaggcagguggcuggaa

SEQ ID NO: 43119 - RNA, 23 nt, Human
aaaauaguauuuguuucaaaaca

SEQ ID NO: 43120 - RNA, 18 nt, Human
aaaguacuauuccaaugu

SEQ ID NO: 43121 - RNA, 20 nt, Human
aagcagaaagggagauuucc

SEQ ID NO: 43122 - RNA, 22 nt, Human
aagcagaaagggagauuuccaa

SEQ ID NO: 43123 - RNA, 23 nt, Human
aagcagaaagggagauuuccaag

SEQ ID NO: 43124 - RNA, 24 nt, Human
aaugaaaggauuuauuaaaaauau

SEQ ID NO: 43125 - RNA, 24 nt, Human
acagcgucccauagucugcagcgu

SEQ ID NO: 43126 - RNA, 20 nt, Human
accuugaaaaugaggagaga

SEQ ID NO: 43127 - RNA, 22 nt, Human
accuugaaaaugaggagagagc

SEQ ID NO: 43128 - RNA, 21 nt, Human
agaagagcaagcagaaaggga

SEQ ID NO: 43129 - RNA, 23 nt, Human
agaagcucaagcugcaccaagcu

SEQ ID NO: 43130 - RNA, 20 nt, Human
agaggucgaaucaggccauc

SEQ ID NO: 43131 - RNA, 23 nt, Human
aguaggaaaaauaguauuuguuu

SEQ ID NO: 43132 - RNA, 23 nt, Human
aucaauuugaauucuagguauua

SEQ ID NO: 43133 - RNA, 18 nt, Human
auuacuaugauucucaga

SEQ ID NO: 43134 - RNA, 22 nt, Human
caaaagagcacuaaaccagaga

SEQ ID NO: 43135 - RNA, 20 nt, Human
caagcuccucccucccaggc

SEQ ID NO: 43136 - RNA, 23 nt, Human
caagcuccucccucccaggcccc

SEQ ID NO: 43137 - RNA, 25 nt, Human
caccaagcuccucccucccaggccc

SEQ ID NO: 43138 - RNA, 25 nt, Human
caccuagaaaauccuguuuuacaag

SEQ ID NO: 43139 - RNA, 24 nt, Human
cacuaaaccagagagucaggagaa

SEQ ID NO: 43140 - RNA, 18 nt, Human
cacuuagaaacccacaga

SEQ ID NO: 43141 - RNA, 21 nt, Human
cagaaagggagauuuccaagc

SEQ ID NO: 43142 - RNA, 21 nt, Human
cagacacaccacauauacaua

SEQ ID NO: 43143 - RNA, 22 nt, Human
cagcaaauguuuuagaaagucc

SEQ ID NO: 43144 - RNA, 20 nt, Human
caggccccucauuggcugug

SEQ ID NO: 43145 - RNA, 18 nt, Human
cccaggccccucauuggc

SEQ ID NO: 43146 - RNA, 21 nt, Human
ccccucauuggcugugagggc

SEQ ID NO: 43147 - RNA, 20 nt, Human
ccuagaaaauccuguuuuac

SEQ ID NO: 43148 - RNA, 21 nt, Human
ccuuugaaccuugaaaaugag

SEQ ID NO: 43149 - RNA, 21 nt, Human
cgcaaacagaagagcaagcag

SEQ ID NO: 43150 - RNA, 18 nt, Human
cucuuccacuguuguguu

SEQ ID NO: 43151 - RNA, 24 nt, Human
cugcagcguuucucuuccacuguu

SEQ ID NO: 43152 - RNA, 21 nt, Human
cuuagaaacccacagaaguuu

SEQ ID NO: 43153 - RNA, 18 nt, Human
cuugaaaaugaggagaga

SEQ ID NO: 43154 - RNA, 18 nt, Human
gagcaaagcgaauuacau

SEQ ID NO: 43155 - RNA, 20 nt, Human
gagugucaauuuucucaaaa

SEQ ID NO: 43156 - RNA, 25 nt, Human
guauaacagaaugucuuugagccuu

SEQ ID NO: 43157 - RNA, 21 nt, Human
gugacagaugcagcagagcuc

SEQ ID NO: 43158 - RNA, 22 nt, Human
guuacccaaaccggcuuccaaa

SEQ ID NO: 43159 - RNA, 23 nt, Human
uaacaaaagagcacuaaaccaga

SEQ ID NO: 43160 - RNA, 21 nt, Human
uaauaacaaaagagcacuaaa

SEQ ID NO: 43161 - RNA, 20 nt, Human
uaauuuguuauaugcccuca

SEQ ID NO: 43162 - RNA, 25 nt, Human
uacagcgucccauagucugcagcgu

SEQ ID NO: 43163 - RNA, 22 nt, Human
uauaacagaaugucuuugagcc

SEQ ID NO: 43164 - RNA, 18 nt, Human
ucacagaaauccccagca

SEQ ID NO: 43165 - RNA, 25 nt, Human
ucaugcaguauaacagaaugucuuu

SEQ ID NO: 43166 - RNA, 21 nt, Human
uccaaaagaauucguuuuaaa

SEQ ID NO: 43167 - RNA, 23 nt, Human
uccccagcaaauguuuuagaaag

SEQ ID NO: 43168 - RNA, 19 nt, Human
ucccuuugaaccuugaaaa

SEQ ID NO: 43169 - RNA, 20 nt, Human
ucugcagcguuucucuucca

SEQ ID NO: 43170 - RNA, 22 nt, Human
ucuugcugccuuuuuuucucug

SEQ ID NO: 43171 - RNA, 19 nt, Human
ugacugaccuuacauaaug

SEQ ID NO: 43172 - RNA, 24 nt, Human
ugauacauuuuagccaugcuuuuu

SEQ ID NO: 43173 - RNA, 23 nt, Human
ugcaccaagcuccucccucccag

SEQ ID NO: 43174 - RNA, 20 nt, Human
ugcuaaaaucuuauaaaaca

SEQ ID NO: 43175 - RNA, 25 nt, Human
ugcuuuuuucuuucaacaaaugcca

SEQ ID NO: 43176 - RNA, 21 nt, Human
uggaauccucgcagcuucccc

SEQ ID NO: 43177 - RNA, 18 nt, Human
uggagaggucgaaucagg

SEQ ID NO: 43178 - RNA, 19 nt, Human
uguuguguuuuuaauuuug

SEQ ID NO: 43179 - RNA, 21 nt, Human
uuaaaagaucaugcuucacag

SEQ ID NO: 43180 - RNA, 18 nt, Human
uuacauaaugcauuuguu

SEQ ID NO: 43181 - RNA, 20 nt, Human
uucauuuccagaauauugcc

SEQ ID NO: 43182 - RNA, 26 nt, Human
aaacaaaaccaguuaugcaaaaacaa

SEQ ID NO: 43183 - RNA, 20 nt, Human
aaacaagaguacaaaaugcc

SEQ ID NO: 43184 - RNA, 23 nt, Human
aaacaagaguacaaaaugccccu

SEQ ID NO: 43185 - RNA, 21 nt, Human
aaauaaccaccacacuucuaa

SEQ ID NO: 43186 - RNA, 19 nt, Human
aaaugcacuccaagacaca

SEQ ID NO: 43187 - RNA, 22 nt, Human
aacauacuuuuuaaacauaaaa

SEQ ID NO: 43188 - RNA, 19 nt, Human
aacccaaauauaaaaaagu

SEQ ID NO: 43189 - RNA, 20 nt, Human
aacuaccacagggcacagga

SEQ ID NO: 43190 - RNA, 21 nt, Human
aacuuguucuccauuauucug

SEQ ID NO: 43191 - RNA, 19 nt, Human
aagacacacacaaggaaug

SEQ ID NO: 43192 - RNA, 21 nt, Human
aagauucacagagauaaaaca

SEQ ID NO: 43193 - RNA, 22 nt, Human
aauucucuuaaaaaucuagaac

SEQ ID NO: 43194 - RNA, 20 nt, Human
aauucugcaaaaaaacaaaa

SEQ ID NO: 43195 - RNA, 23 nt, Human
acauaaaaucacagucaaagaca

SEQ ID NO: 43196 - RNA, 20 nt, Human
acuaccacagggcacaggaa

SEQ ID NO: 43197 - RNA, 21 nt, Human
acuuugccuuucuaaguauau

SEQ ID NO: 43198 - RNA, 24 nt, Human
agagauaaaacagugccucggaaa

SEQ ID NO: 43199 - RNA, 21 nt, Human
agguauaguucuccagauuuc

SEQ ID NO: 43200 - RNA, 20 nt, Human
agguuuuuaaccacaagaau

SEQ ID NO: 43201 - RNA, 19 nt, Human
caaaaaaacaaaaccaguu

SEQ ID NO: 43202 - RNA, 20 nt, Human
caaauaaccaccacacuucu

SEQ ID NO: 43203 - RNA, 24 nt, Human
caaauaaccaccacacuucuaaug

SEQ ID NO: 43204 - RNA, 23 nt, Human
caagaguacaaaaugccccuuuc

SEQ ID NO: 43205 - RNA, 19 nt, Human
cagcuaaagaaaucugcca

SEQ ID NO: 43206 - RNA, 22 nt, Human
cauaaaaucacagucaaagaca

SEQ ID NO: 43207 - RNA, 23 nt, Human
cauauacuuuaaacaacucaaua

SEQ ID NO: 43208 - RNA, 23 nt, Human
cuaacacacacaaauuugucuaa

SEQ ID NO: 43209 - RNA, 20 nt, Human
gaguuuuuuuuuuuuuuuuu

SEQ ID NO: 43210 - RNA, 22 nt, Human
gaguuuuuuuuuuuuuuuuuuu

SEQ ID NO: 43211 - RNA, 23 nt, Human
gcaaaaacaagaguacaaaaugc

SEQ ID NO: 43212 - RNA, 19 nt, Human
gcacuccaagacacacaca

SEQ ID NO: 43213 - RNA, 19 nt, Human
uaaacaacucaauacugca

SEQ ID NO: 43214 - RNA, 23 nt, Human
uagaacaggacaaaugaugaccc

SEQ ID NO: 43215 - RNA, 19 nt, Human
uagcaauauccuauauaau

SEQ ID NO: 43216 - RNA, 20 nt, Human
uagcaauauccuauauaaua

SEQ ID NO: 43217 - RNA, 24 nt, Human
uagcugacuucgaaugguuuacau

SEQ ID NO: 43218 - RNA, 21 nt, Human
uaggugugauacaugguaacc

SEQ ID NO: 43219 - RNA, 21 nt, Human
uaguuaaggaaaaccaaaaug

SEQ ID NO: 43220 - RNA, 18 nt, Human
uauaaaaaaguuauucaa

SEQ ID NO: 43221 - RNA, 20 nt, Human
uccaagacacacacaaggaa

SEQ ID NO: 43222 - RNA, 22 nt, Human
uccaagacacacacaaggaaug

SEQ ID NO: 43223 - RNA, 18 nt, Human
uccuuguaagcaagacug

SEQ ID NO: 43224 - RNA, 18 nt, Human
ucuaaguauauucuguaa

SEQ ID NO: 43225 - RNA, 18 nt, Human
ucugcaaaaaaacaaaac

SEQ ID NO: 43226 - RNA, 22 nt, Human
ucuguaauuauuucacugaagc

SEQ ID NO: 43227 - RNA, 21 nt, Human
ugaguauuacuguggcagcua

SEQ ID NO: 43228 - RNA, 19 nt, Human
ugcaaaaaaacaaaaccag

SEQ ID NO: 43229 - RNA, 22 nt, Human
ugcauuauuucauguagugccu

SEQ ID NO: 43230 - RNA, 20 nt, Human
ugggaagauuaggugugaua

SEQ ID NO: 43231 - RNA, 21 nt, Human
ugggaagauuaggugugauac

SEQ ID NO: 43232 - RNA, 23 nt, Human
ugggcuucuaacacacacaaauu

SEQ ID NO: 43233 - RNA, 23 nt, Human
ugggcuucuaacacacacaaauu

SEQ ID NO: 43234 - RNA, 23 nt, Human
ugucuaauucucuuaaaaaucua

SEQ ID NO: 43235 - RNA, 23 nt, Human
uguggcagcuaaagaaaucugcc

SEQ ID NO: 43236 - RNA, 22 nt, Human
uuaaaaaaaacuaagcucaacu

SEQ ID NO: 43237 - RNA, 21 nt, Human
uucaagauucacagagauaaa

SEQ ID NO: 43238 - RNA, 20 nt, Human
uucgguagccagugauuguu

SEQ ID NO: 43239 - RNA, 21 nt, Human
uuuguugcuuuguuuuuuuuu

SEQ ID NO: 43240 - RNA, 21 nt, Human
uuuguugcuuuguuuuuuuuu

SEQ ID NO: 43241 - RNA, 22 nt, Human
uuuuuaaacauaaaaucacagu

SEQ ID NO: 43242 - RNA, 24 nt, Human
uuuuuuuuuuuuuuuuuuaaucug

SEQ ID NO: 43243 - RNA, 20 nt, Human
aaaaccuucaguaucugcag

SEQ ID NO: 43244 - RNA, 22 nt, Human
aaaauauuaaguaacucaagua

SEQ ID NO: 43245 - RNA, 22 nt, Human
aaaauauuaaguaacucaagua

SEQ ID NO: 43246 - RNA, 20 nt, Human
aaaggccccuggaaguuagu

SEQ ID NO: 43247 - RNA, 20 nt, Human
aaauacaaaucuggagauuc

SEQ ID NO: 43248 - RNA, 20 nt, Human
aaauacaaaucuggagauuc

SEQ ID NO: 43249 - RNA, 20 nt, Human
aaauacaaaucuggagauuc

SEQ ID NO: 43250 - RNA, 18 nt, Human
aacuacacaacacuggca

SEQ ID NO: 43251 - RNA, 18 nt, Human
aacuacacaacacuggca

SEQ ID NO: 43252 - RNA, 18 nt, Human
aacuacacaacacuggca

SEQ ID NO: 43253 - RNA, 21 nt, Human
aagaaccucaagauccucuca

SEQ ID NO: 43254 - RNA, 21 nt, Human
aagagaccaccaccacaugga

SEQ ID NO: 43255 - RNA, 22 nt, Human
aaguacuagaaguacagaagcc

SEQ ID NO: 43256 - RNA, 22 nt, Human
aaguacuagaaguacagaagcc

SEQ ID NO: 43257 - RNA, 22 nt, Human
aaguacuagaaguacagaagcc

SEQ ID NO: 43258 - RNA, 21 nt, Human
aaugaaacuacaagagaccac

SEQ ID NO: 43259 - RNA, 18 nt, Human
acacagcccacccucccu

SEQ ID NO: 43260 - RNA, 18 nt, Human
acagaucucacacuucca

SEQ ID NO: 43261 - RNA, 18 nt, Human
acagaucucacacuucca

SEQ ID NO: 43262 - RNA, 18 nt, Human
acagaucucacacuucca

SEQ ID NO: 43263 - RNA, 25 nt, Human
acagcccacccucccuccagaaccc

SEQ ID NO: 43264 - RNA, 22 nt, Human
acagccuccugagggcaggggc

SEQ ID NO: 43265 - RNA, 19 nt, Human
acccucccuccagaaccca

SEQ ID NO: 43266 - RNA, 21 nt, Human
accugggcucagcccaccacu

SEQ ID NO: 43267 - RNA, 21 nt, Human
accugggcucagcccaccacu

SEQ ID NO: 43268 - RNA, 21 nt, Human
accugggcucagcccaccacu

SEQ ID NO: 43269 - RNA, 26 nt, Human
accuuggguguuugacauacgcgugu

SEQ ID NO: 43270 - RNA, 21 nt, Human
acuacaagagaccaccaccac

SEQ ID NO: 43271 - RNA, 20 nt, Human
acuagaaguacagaagccug

SEQ ID NO: 43272 - RNA, 20 nt, Human
acuagaaguacagaagccug

SEQ ID NO: 43273 - RNA, 22 nt, Human
agaaucgcuccacguccuggcu

SEQ ID NO: 43274 - RNA, 26 nt, Human
agacagaaagcuguaauucuuuuuaa

SEQ ID NO: 43275 - RNA, 27 nt, Human
agacagaaagcuguaauucuuuuuaau

SEQ ID NO: 43276 - RNA, 27 nt, Human
agacagaaagcuguaauucuuuuuaau

SEQ ID NO: 43277 - RNA, 20 nt, Human
agcaugacagccaggaaugu

SEQ ID NO: 43278 - RNA, 22 nt, Human
agcucccaucuuccuccuccac

SEQ ID NO: 43279 - RNA, 22 nt, Human
aggagaggugggaacgccuggc

SEQ ID NO: 43280 - RNA, 20 nt, Human
aggcacaaaagggucaggaa

SEQ ID NO: 43281 - RNA, 22 nt, Human
aggggcacuggucugagugagg

SEQ ID NO: 43282 - RNA, 22 nt, Human
aggggcacuggucugagugagg

SEQ ID NO: 43283 - RNA, 22 nt, Human
aggggcacuggucugagugagg

SEQ ID NO: 43284 - RNA, 18 nt, Human
aguagugggcccaaucca

SEQ ID NO: 43285 - RNA, 24 nt, Human
aucuuccuccuccacagaguuuca

SEQ ID NO: 43286 - RNA, 24 nt, Human
caaaagggucaggaacaucaaggc

SEQ ID NO: 43287 - RNA, 23 nt, Human
caaggcucugccgaugucccaca

SEQ ID NO: 43288 - RNA, 19 nt, Human
caaguggaaagggagaugu

SEQ ID NO: 43289 - RNA, 19 nt, Human
caaguggaaagggagaugu

SEQ ID NO: 43290 - RNA, 19 nt, Human
caaguggaaagggagaugu

SEQ ID NO: 43291 - RNA, 18 nt, Human
cacagcccacccucccuc

SEQ ID NO: 43292 - RNA, 20 nt, Human
cacagcccacccucccucca

SEQ ID NO: 43293 - RNA, 22 nt, Human
cacagcccacccucccuccaga

SEQ ID NO: 43294 - RNA, 21 nt, Human
cacaguaacuccaccucaugc

SEQ ID NO: 43295 - RNA, 21 nt, Human
cacaguaacuccaccucaugc

SEQ ID NO: 43296 - RNA, 21 nt, Human
cacaguaacuccaccucaugc

SEQ ID NO: 43297 - RNA, 20 nt, Human
cacccucccuccagaaccca

SEQ ID NO: 43298 - RNA, 22 nt, Human
cacccucccuccagaacccacu

SEQ ID NO: 43299 - RNA, 21 nt, Human
caccugagaaaagaaaaaaac

SEQ ID NO: 43300 - RNA, 24 nt, Human
caccugagaaaagaaaaaaaccac

SEQ ID NO: 43301 - RNA, 18 nt, Human
caccuuuugcccugacuc

SEQ ID NO: 43302 - RNA, 24 nt, Human
cagaacccacuggaaccucccaag

SEQ ID NO: 43303 - RNA, 18 nt, Human
cagaguuucagaaccaag

SEQ ID NO: 43304 - RNA, 20 nt, Human
cagaguuucagaaccaagga

SEQ ID NO: 43305 - RNA, 20 nt, Human
cagaguuucagaaccaagga

SEQ ID NO: 43306 - RNA, 19 nt, Human
cagccuccugagggcaggg

SEQ ID NO: 43307 - RNA, 21 nt, Human
caucaaggcauuuugugauga

SEQ ID NO: 43308 - RNA, 18 nt, Human
ccaaccuuauuuuggcua

SEQ ID NO: 43309 - RNA, 18 nt, Human
ccaaguuggacaggccug

SEQ ID NO: 43310 - RNA, 22 nt, Human
ccacagaguuucagaaccaagg

SEQ ID NO: 43311 - RNA, 24 nt, Human
ccaccucaccuuuugcccugacuc

SEQ ID NO: 43312 - RNA, 26 nt, Human
ccacuggaaccucccaaggggcccuc

SEQ ID NO: 43313 - RNA, 19 nt, Human
cccaucuuccuccuccaca

SEQ ID NO: 43314 - RNA, 21 nt, Human
cccaucuuccuccuccacaga

SEQ ID NO: 43315 - RNA, 21 nt, Human
cccaucuuccuccuccacaga

SEQ ID NO: 43316 - RNA, 19 nt, Human
ccccguuuugaggggccuc

SEQ ID NO: 43317 - RNA, 22 nt, Human
cccgagggacucuggagcccag

SEQ ID NO: 43318 - RNA, 24 nt, Human
cccgcgaccgccaugaccugagac

SEQ ID NO: 43319 - RNA, 22 nt, Human
cccuccagaacccacuggaacc

SEQ ID NO: 43320 - RNA, 24 nt, Human
ccgagggacucuggagcccagcug

SEQ ID NO: 43321 - RNA, 25 nt, Human
ccuccagaacccacuggaaccuccc

SEQ ID NO: 43322 - RNA, 20 nt, Human
ccucccuccagaacccacug

SEQ ID NO: 43323 - RNA, 24 nt, Human
ccugagaccgagggacucuggagc

SEQ ID NO: 43324 - RNA, 21 nt, Human
ccugagggcaggggccccaga

SEQ ID NO: 43325 - RNA, 25 nt, Human
ccugcacaggacccauguggcuccu

SEQ ID NO: 43326 - RNA, 19 nt, Human
ccuucaguaucugcaggaa

SEQ ID NO: 43327 - RNA, 18 nt, Human
cgagggacucuggagccc

SEQ ID NO: 43328 - RNA, 21 nt, Human
cggcagaaccugagucggggu

SEQ ID NO: 43329 - RNA, 24 nt, Human
cuccacagaguuucagaaccaagg

SEQ ID NO: 43330 - RNA, 23 nt, Human
cuccagaacccacuggaaccucc

SEQ ID NO: 43331 - RNA, 21 nt, Human
cucccaucuuccuccuccaca

SEQ ID NO: 43332 - RNA, 22 nt, Human
cucccaucuuccuccuccacag

SEQ ID NO: 43333 - RNA, 22 nt, Human
cucgcucuccacuuccucuguc

SEQ ID NO: 43334 - RNA, 22 nt, Human
cucucugcuacugcuacucccc

SEQ ID NO: 43335 - RNA, 22 nt, Human
cucuuuagcaaacaugaucuga

SEQ ID NO: 43336 - RNA, 22 nt, Human
cucuuuagcaaacaugaucuga

SEQ ID NO: 43337 - RNA, 22 nt, Human
cucuuuagcaaacaugaucuga

SEQ ID NO: 43338 - RNA, 22 nt, Human
cuguccuugccaccaaguugga

SEQ ID NO: 43339 - RNA, 23 nt, Human
cuuuguuucccaggaccccauag

SEQ ID NO: 43340 - RNA, 23 nt, Human
gaaaaaaaccacaccaaccuagg

SEQ ID NO: 43341 - RNA, 19 nt, Human
gaacccacuggaaccuccc

SEQ ID NO: 43342 - RNA, 18 nt, Human
gaauagaagguucuuaga

SEQ ID NO: 43343 - RNA, 18 nt, Human
gagaagacagaaagcugu

SEQ ID NO: 43344 - RNA, 18 nt, Human
gagaagacagaaagcugu

SEQ ID NO: 43345 - RNA, 18 nt, Human
gagaggcucuggccggca

SEQ ID NO: 43346 - RNA, 21 nt, Human
gagauucaaugucccccacag

SEQ ID NO: 43347 - RNA, 21 nt, Human
gagauucaaugucccccacag

SEQ ID NO: 43348 - RNA, 21 nt, Human
gagauucagugucccccacag

SEQ ID NO: 43349 - RNA, 18 nt, Human
gagcaaaagacggagcug

SEQ ID NO: 43350 - RNA, 18 nt, Human
gagcucgaucuucgcugu

SEQ ID NO: 43351 - RNA, 18 nt, Human
gagcucgaucuucgcugu

SEQ ID NO: 43352 - RNA, 18 nt, Human
gagcucgaucuucgcugu

SEQ ID NO: 43353 - RNA, 19 nt, Human
gaggaggccacucgguucu

SEQ ID NO: 43354 - RNA, 21 nt, Human
gaggcagcagaguccugggag

SEQ ID NO: 43355 - RNA, 21 nt, Human
gaggcagcagaguccugggag

SEQ ID NO: 43356 - RNA, 21 nt, Human
gaggcagcagaguccugggag

SEQ ID NO: 43357 - RNA, 20 nt, Human
gccccauuuaccugccucag

SEQ ID NO: 43358 - RNA, 18 nt, Human
gccuuuggguucuuucuc

SEQ ID NO: 43359 - RNA, 18 nt, Human
gcgugaguccuugcccca

SEQ ID NO: 43360 - RNA, 24 nt, Human
gcuaugaguagugggcccaaucca

SEQ ID NO: 43361 - RNA, 21 nt, Human
gcucccaucuuccuccuccac

SEQ ID NO: 43362 - RNA, 19 nt, Human
gcuuugugcuuucuggguu

SEQ ID NO: 43363 - RNA, 19 nt, Human
gcuuugugcuuucuggguu

SEQ ID NO: 43364 - RNA, 19 nt, Human
gcuuugugcuuucuggguu

SEQ ID NO: 43365 - RNA, 21 nt, Human
ggcacaaaagggucaggaaca

SEQ ID NO: 43366 - RNA, 20 nt, Human
ggccaggcugagccuuuggg

SEQ ID NO: 43367 - RNA, 23 nt, Human
ggcccuggccaggcugagccuuu

SEQ ID NO: 43368 - RNA, 20 nt, Human
gggccucuggcccuggccag

SEQ ID NO: 43369 - RNA, 18 nt, Human
gggcgcgggccccgcgac

SEQ ID NO: 43370 - RNA, 26 nt, Human
guucuccuuccaaaagccagagcuuc

SEQ ID NO: 43371 - RNA, 26 nt, Human
uaaaaaaaaucauuccaugauagaga

SEQ ID NO: 43372 - RNA, 26 nt, Human
uaaaaaaaaucauuccaugauagaga

SEQ ID NO: 43373 - RNA, 24 nt, Human
uaaaaauauuaaguaacucaagua

SEQ ID NO: 43374 - RNA, 24 nt, Human
uaaaaauauuaaguaacucaagua

SEQ ID NO: 43375 - RNA, 24 nt, Human
uaagguagggcagaccaaaggccc

SEQ ID NO: 43376 - RNA, 24 nt, Human
uaagguagggcagaccaaaggccc

SEQ ID NO: 43377 - RNA, 24 nt, Human
uaagguagggcagaccaaaggccc

SEQ ID NO: 43378 - RNA, 19 nt, Human
uacuagaaguacagaagcc

SEQ ID NO: 43379 - RNA, 19 nt, Human
uacuagaaguacagaagcc

SEQ ID NO: 43380 - RNA, 19 nt, Human
uacuagaaguacagaagcc

SEQ ID NO: 43381 - RNA, 21 nt, Human
uacuagaaguacagaagccug

SEQ ID NO: 43382 - RNA, 21 nt, Human
uacuagaaguacagaagccug

SEQ ID NO: 43383 - RNA, 22 nt, Human
uagaagguucuuagagccagca

SEQ ID NO: 43384 - RNA, 30 nt, Human
uagaccugggcucagcccaccacugcuagg

SEQ ID NO: 43385 - RNA, 30 nt, Human; identical to SEQ ID NO: 43384

SEQ ID NO: 43386 - RNA, 30 nt, Human; identical to SEQ ID NO: 43384

SEQ ID NO: 43387 - RNA, 24 nt, Human
uagugguucagguucuaacuacac

SEQ ID NO: 43388 - RNA, 24 nt, Human
uagugguucagguucuaacuacac

SEQ ID NO: 43389 - RNA, 18 nt, Human
uaucaccugagaaaagaa

SEQ ID NO: 43390 - RNA, 22 nt, Human
uauugcugcacaauuuaacuga

SEQ ID NO: 43391 - RNA, 22 nt, Human
uauugcugcacaauuuaacuga

SEQ ID NO: 43392 - RNA, 22 nt, Human
uauugcugcacaauuuaacuga

SEQ ID NO: 43393 - RNA, 23 nt, Human
ucaccaccucaccuuuugcccug

SEQ ID NO: 43394 - RNA, 24 nt, Human
ucagaacaaugagcaugacagcca

SEQ ID NO: 43395 - RNA, 20 nt, Human
ucauuccaugauagagaagg

SEQ ID NO: 43396 - RNA, 20 nt, Human
ucauuccaugauagagaagg

SEQ ID NO: 43397 - RNA, 20 nt, Human
ucauuccaugauagagaagg

SEQ ID NO: 43398 - RNA, 20 nt, Human
uccaguccaccugcuggucc

SEQ ID NO: 43399 - RNA, 21 nt, Human
uccaugauagagaagacagaa

SEQ ID NO: 43400 - RNA, 21 nt, Human
ucccaucuuccuccuccacag

SEQ ID NO: 43401 - RNA, 22 nt, Human
ucucaucagcucccaucuuccu

SEQ ID NO: 43402 - RNA, 22 nt, Human
ucucaucagcucccaucuuccu

SEQ ID NO: 43403 - RNA, 21 nt, Human
ugaaacuacaagagaccacca

SEQ ID NO: 43404 - RNA, 22 nt, Human
ugaacgucauccccagcugcug

SEQ ID NO: 43405 - RNA, 24 nt, Human
ugacuggggaucaagccaaccugg

SEQ ID NO: 43406 - RNA, 25 nt, Human
ugagaaaagaaaaaaaccacaccaa

SEQ ID NO: 43407 - RNA, 18 nt, Human
ugaggcagcagaguccug

SEQ ID NO: 43408 - RNA, 18 nt, Human
ugaggcagcagaguccug

SEQ ID NO: 43409 - RNA, 18 nt, Human
ugaggcagcagaguccug

SEQ ID NO: 43410 - RNA, 20 nt, Human
ugagggccgccgacccgcca

SEQ ID NO: 43411 - RNA, 20 nt, Human
ugagggccgccgacccgcca

SEQ ID NO: 43412 - RNA, 20 nt, Human
ugagggccgccgacccgcca

SEQ ID NO: 43413 - RNA, 21 nt, Human
ugauucucaucagcucccauc

SEQ ID NO: 43414 - RNA, 19 nt, Human
ugccccauuuaccugccuc

SEQ ID NO: 43415 - RNA, 21 nt, Human
ugccccauuuaccugccucag

SEQ ID NO: 43416 - RNA, 22 nt, Human
ugccccauuuaccugccucagg

SEQ ID NO: 43417 - RNA, 19 nt, Human
ugcccugacucuaggaccu

SEQ ID NO: 43418 - RNA, 18 nt, Human
ugcuuugugcuuucuggg

SEQ ID NO: 43419 - RNA, 18 nt, Human
ugcuuugugcuuucuggg

SEQ ID NO: 43420 - RNA, 21 nt, Human
uggcaaguggaaagggagaug

SEQ ID NO: 43421 - RNA, 21 nt, Human
uggcaaguggaaagggagaug

SEQ ID NO: 43422 - RNA, 21 nt, Human
uggcaaguggaaagggagaug

SEQ ID NO: 43423 - RNA, 21 nt, Human
uggccaggcugagccuuuggg

SEQ ID NO: 43424 - RNA, 21 nt, Human
uggccaggcugagccuuuggg

SEQ ID NO: 43425 - RNA, 26 nt, Human
uggccaggcugagccuuuggguucuu

SEQ ID NO: 43426 - RNA, 22 nt, Human
uggccugggucagaugggagag

SEQ ID NO: 43427 - RNA, 20 nt, Human
ugggcucagcccaccacugc

SEQ ID NO: 43428 - RNA, 20 nt, Human
ugggcucagcccaccacugc

SEQ ID NO: 43429 - RNA, 20 nt, Human
ugggcucagcccaccacugc

SEQ ID NO: 43430 - RNA, 22 nt, Human
uggggagaagugaaaaacccug

SEQ ID NO: 43431 - RNA, 22 nt, Human
uggggagaagugaaaaacccug

SEQ ID NO: 43432 - RNA, 23 nt, Human
uggggagaagugaaaaacccugg

SEQ ID NO: 43433 - RNA, 23 nt, Human
uggggagaagugaaaaacccugg

SEQ ID NO: 43434 - RNA, 21 nt, Human
ugguucagguucuaacuacac

SEQ ID NO: 43435 - RNA, 24 nt, Human
ugucaaauacaaaucuggagauuc

SEQ ID NO: 43436 - RNA, 24 nt, Human
ugucaaauacaaaucuggagauuc

SEQ ID NO: 43437 - RNA, 25 nt, Human
ugucaaauacaaaucuggagauuca

SEQ ID NO: 43438 - RNA, 25 nt, Human
ugucaaauacaaaucuggagauuca

SEQ ID NO: 43439 - RNA, 25 nt, Human
uguccuugccaccaaguuggacagg

SEQ ID NO: 43440 - RNA, 22 nt, Human
uuauuuuggcuaaggggaaagg

SEQ ID NO: 43441 - RNA, 22 nt, Human
uuauuuuggcuaaggggaaagg

SEQ ID NO: 43442 - RNA, 22 nt, Human
uuauuuuggcuaaggggaaagg

SEQ ID NO: 43443 - RNA, 18 nt, Human
uucccuucccaccaagcu

SEQ ID NO: 43444 - RNA, 18 nt, Human
uucccuucccaccaagcu

SEQ ID NO: 43445 - RNA, 18 nt, Human
uucccuucccaccaagcu

SEQ ID NO: 43446 - RNA, 24 nt, Human
uugauucucaucagcucccauccc

SEQ ID NO: 43447 - RNA, 21 nt, Human
uuggcuaaggggaaagggauu

SEQ ID NO: 43448 - RNA, 21 nt, Human
uuggcuaaggggaaagggauu

SEQ ID NO: 43449 - RNA, 21 nt, Human
uuggcuaaggggaaagggauu

SEQ ID NO: 43450 - RNA, 18 nt, Human
uuuggcuaaggggaaagg

SEQ ID NO: 43451 - RNA, 18 nt, Human
uuuuuuuuuuuuuuuuug

SEQ ID NO: 43452 - RNA, 18 nt, Human
uuuuuuuuuuuuuuuuug

SEQ ID NO: 43453 - RNA, 18 nt, Human
uuuuuuuuuuuuuuuuug

SEQ ID NO: 43454 - RNA, 21 nt, Human
uuuuuuuuuuuuuuuuuuugg

SEQ ID NO: 43455 - RNA, 25 nt, Human
uuuuuuuuuuuuuuuuuuuguuuuu

SEQ ID NO: 43456 - RNA, 25 nt, Human
uuuuuuuuuuuuuuuuuuuguuuuu

SEQ ID NO: 43457 - RNA, 19 nt, Human
aaaacaaaaaaaguucaga

SEQ ID NO: 43458 - RNA, 21 nt, Human
aaaauaccuauuuuuccaaca

SEQ ID NO: 43459 - RNA, 20 nt, Human
aaaaucuucccauacaucau

SEQ ID NO: 43460 - RNA, 24 nt, Human
aaacauguuuaaaagcaccaaaaa

SEQ ID NO: 43461 - RNA, 20 nt, Human
aaaugcuuuuuccuaaaucu

SEQ ID NO: 43462 - RNA, 22 nt, Human
aaugcaaaaacaaaaaaaguuc

SEQ ID NO: 43463 - RNA, 25 nt, Human
aaugcaaaaacaaaaaaaguucaga

SEQ ID NO: 43464 - RNA, 25 nt, Human
acaaacaauaaacauaauccugaug

SEQ ID NO: 43465 - RNA, 24 nt, Human
acagaaaaaagcaugaaagaauau

SEQ ID NO: 43466 - RNA, 21 nt, Human
acucaagaaauuuagaugggu

SEQ ID NO: 43467 - RNA, 20 nt, Human
agaaaaaagcaugaaagaau

SEQ ID NO: 43468 - RNA, 22 nt, Human
agaaaaaucuguggaacuuaaa

SEQ ID NO: 43469 - RNA, 24 nt, Human
agcaccaaaaaagauuaaaaacaa

SEQ ID NO: 43470 - RNA, 24 nt, Human
aggaacagaaaaguggccgguacc

SEQ ID NO: 43471 - RNA, 19 nt, Human
aggcauuacuuauuuuagu

SEQ ID NO: 43472 - RNA, 18 nt, Human
agggguuuuuugcgggga

SEQ ID NO: 43473 - RNA, 20 nt, Human
auuuuuuuauuccauucugu

SEQ ID NO: 43474 - RNA, 25 nt, Human
caaaaaaaguucagaguaaaguuag

SEQ ID NO: 43475 - RNA, 23 nt, Human
caaaaacaaaaaaaguucagagu

SEQ ID NO: 43476 - RNA, 22 nt, Human
cagcucuucuggagaaaacgau

SEQ ID NO: 43477 - RNA, 19 nt, Human
caggaacagaaaaguggca

SEQ ID NO: 43478 - RNA, 21 nt, Human
caggaucaguaaauaacaaua

SEQ ID NO: 43479 - RNA, 23 nt, Human
caggaucaguaaauaacaauagc

SEQ ID NO: 43480 - RNA, 19 nt, Human
cagguaaguacagaaaccc

SEQ ID NO: 43481 - RNA, 22 nt, Human
cauaauaggguccaguuaaacc

SEQ ID NO: 43482 - RNA, 21 nt, Human
ccaggcuccagguaauccugu

SEQ ID NO: 43483 - RNA, 22 nt, Human
ccauacaucaugaaaacuugga

SEQ ID NO: 43484 - RNA, 20 nt, Human
cuucccauacaucaugaaaa

SEQ ID NO: 43485 - RNA, 21 nt, Human
cuucuggagaaaacgaucccc

SEQ ID NO: 43486 - RNA, 21 nt, Human
cuuggcugcccaacagaaaaa

SEQ ID NO: 43487 - RNA, 24 nt, Human
gaaaacaaacaauaaacauaaucc

SEQ ID NO: 43488 - RNA, 23 nt, Human
gcuaaacauguuuaaaagcacca

SEQ ID NO: 43489 - RNA, 22 nt, Human
gugcucuauauccaaacucaca

SEQ ID NO: 43490 - RNA, 25 nt, Human
uaaaaggcauaauaggguccaguua

SEQ ID NO: 43491 - RNA, 24 nt, Human
uaggguccaguuaaaccauacuuu

SEQ ID NO: 43492 - RNA, 19 nt, Human
uauuaugcacaaaagagcc

SEQ ID NO: 43493 - RNA, 24 nt, Human
ucacaaauuuaaccuauccuuaaa

SEQ ID NO: 43494 - RNA, 28 nt, Human
uccaggcuccagguaauccuguucaaaa

SEQ ID NO: 43495 - RNA, 19 nt, Human
ucuggagaaaacgaucccc

SEQ ID NO: 43496 - RNA, 21 nt, Human
ucuggagaaaacgauccccuu

SEQ ID NO: 43497 - RNA, 19 nt, Human
ucuguaguucuaagggaag

SEQ ID NO: 43498 - RNA, 19 nt, Human
ugaaaugucuucauuuuag

SEQ ID NO: 43499 - RNA, 19 nt, Human
ugacaaaaaauucuaguaa

SEQ ID NO: 43500 - RNA, 25 nt, Human
ugacaaaaaauucuaguaaauacuc

SEQ ID NO: 43501 - RNA, 22 nt, Human
ugacugaauacagaaccucaug

SEQ ID NO: 43502 - RNA, 23 nt, Human
ugcaaaaacaaaaaaaguucaga

SEQ ID NO: 43503 - RNA, 22 nt, Human
ugcaaagacugaaaacaaacaa

SEQ ID NO: 43504 - RNA, 20 nt, Human
ugcccaacagaaaaaucugu

SEQ ID NO: 43505 - RNA, 22 nt, Human
ugcccaacagaaaaaucugugg

SEQ ID NO: 43506 - RNA, 23 nt, Human
ugcccaacagaaaaaucugugga

SEQ ID NO: 43507 - RNA, 18 nt, Human
ugccuuuagggaaguggu

SEQ ID NO: 43508 - RNA, 18 nt, Human
ugcuugccccagucauuu

SEQ ID NO: 43509 - RNA, 22 nt, Human
uggagaaaacgauccccuugcg

SEQ ID NO: 43510 - RNA, 24 nt, Human
uggcuccaggcuccagguaauccu

SEQ ID NO: 43511 - RNA, 22 nt, Human
uggggcauaaaauccugauuca

SEQ ID NO: 43512 - RNA, 21 nt, Human
ugguaauauagugcaaagacu

SEQ ID NO: 43513 - RNA, 24 nt, Human
uguauacaaaacaaacccuuuaca

SEQ ID NO: 43514 - RNA, 24 nt, Human
uguuuauuuaucaaaugucaauca

SEQ ID NO: 43515 - RNA, 25 nt, Human
uuaaaaaaaauacauagaugcuuag

SEQ ID NO: 43516 - RNA, 19 nt, Human
uuaaaguggcuccaggcuc

SEQ ID NO: 43517 - RNA, 22 nt, Human
uuaauaaauggcuuaucaauau

SEQ ID NO: 43518 - RNA, 19 nt, Human
uuagaaaugcuuuuuccua

SEQ ID NO: 43519 - RNA, 20 nt, Human
uucaggaacagaaaaguggc

SEQ ID NO: 43520 - RNA, 20 nt, Human
uucuaauuuccuccucaauu

SEQ ID NO: 43521 - RNA, 21 nt, Human
uuucaacuacaauuuagaacc

SEQ ID NO: 43522 - RNA, 21 nt, Human
uuuguauacaaaacaaacccu

SEQ ID NO: 43523 - RNA, 27 nt, Human
uuuuacaacauguauuuauggguuacu

SEQ ID NO: 43524 - RNA, 24 nt, Human
uuuucagccacacagcguguucuc

SEQ ID NO: 43525 - RNA, 22 nt, Human
aacagcaccacccaaagacugg

SEQ ID NO: 43526 - RNA, 21 nt, Human
aacagcuguuuguaccaguga

SEQ ID NO: 43527 - RNA, 20 nt, Human
aagagaagcagaacaaacaa

SEQ ID NO: 43528 - RNA, 22 nt, Human
accuccagcucugagcuucaac

SEQ ID NO: 43529 - RNA, 20 nt, Human
agaaaagaacagcaccaccc

SEQ ID NO: 43530 - RNA, 25 nt, Human
agaaaagaacagcaccacccaaaga

SEQ ID NO: 43531 - RNA, 21 nt, Human
agagaaauggaugcaaucaga

SEQ ID NO: 43532 - RNA, 23 nt, Human
agcauuaaauccaccagaaaaga

SEQ ID NO: 43533 - RNA, 22 nt, Human
aggccagaggcagucuucagag

SEQ ID NO: 43534 - RNA, 24 nt, Human
aggccagaggcagucuucagagga

SEQ ID NO: 43535 - RNA, 18 nt, Human
aguucagcagcauuccuu

SEQ ID NO: 43536 - RNA, 19 nt, Human
auggggcuggcucuccaag

SEQ ID NO: 43537 - RNA, 22 nt, Human
auggggcuggcucuccaagucg

SEQ ID NO: 43538 - RNA, 24 nt, Human
caccagaaaagaacagcaccaccc

SEQ ID NO: 43539 - RNA, 26 nt, Human
caccuccagcucugagcuucaacagc

SEQ ID NO: 43540 - RNA, 24 nt, Human
cagaggacuucuaggccacacaaa

SEQ ID NO: 43541 - RNA, 20 nt, Human
cagcaccacccaaagacugg

SEQ ID NO: 43542 - RNA, 30 nt, Human
cagcagcauuccuuuccugccccaaguccu

SEQ ID NO: 43543 - RNA, 23 nt, Human
cagugagucagcauuaaauccac

SEQ ID NO: 43544 - RNA, 21 nt, Human
caguuacagcuacuguggcgg

SEQ ID NO: 43545 - RNA, 19 nt, Human
ccucagaagcucaccucca

SEQ ID NO: 43546 - RNA, 22 nt, Human
cuccaccuucaugugccugaau

SEQ ID NO: 43547 - RNA, 18 nt, Human
cucgggagacuucuggga

SEQ ID NO: 43548 - RNA, 24 nt, Human
cuuuccuuuauuucuuccccuuuu

SEQ ID NO: 43549 - RNA, 21 nt, Human
gagucagcauuaaauccaccg

SEQ ID NO: 43550 - RNA, 21 nt, Human
gcaaaggccucagaagcucac

SEQ ID NO: 43551 - RNA, 24 nt, Human
gcagaacaaacaagucuuucagag

SEQ ID NO: 43552 - RNA, 20 nt, Human
gcaggccagaggcagucuuc

SEQ ID NO: 43553 - RNA, 18 nt, Human
uccuuuccugccccaagu

SEQ ID NO: 43554 - RNA, 19 nt, Human
ucucucgggagacuucugg

SEQ ID NO: 43555 - RNA, 19 nt, Human
ugagcuucaacagcuguuu

SEQ ID NO: 43556 - RNA, 21 nt, Human
uggaaccucacaauaaggugg

SEQ ID NO: 43557 - RNA, 23 nt, Human
uggaaccucacaauaaggugguc

SEQ ID NO: 43558 - RNA, 21 nt, Human
uucaaguucagcagcauuccu

SEQ ID NO: 43559 - RNA, 26 nt, Human
uucagaggaggggagaccacagagga

SEQ ID NO: 43560 - RNA, 21 nt, Human
uucugagugaugagaguccug

SEQ ID NO: 43561 - RNA, 24 nt, Human
uuuuuuucggcagcaacuccuuuc

SEQ ID NO: 43562 - RNA, 21 nt, Human
aaaaaaaaaaaaaaccaccaa

SEQ ID NO: 43563 - RNA, 22 nt, Human
acccacaaacccaacgcgguuc

SEQ ID NO: 43564 - RNA, 20 nt, Human
acgcgguucuagggguugga

SEQ ID NO: 43565 - RNA, 18 nt, Human
acuucucauuggaaaaga

SEQ ID NO: 43566 - RNA, 22 nt, Human
auucuagacgugcccucggcca

SEQ ID NO: 43567 - RNA, 18 nt, Human
caaguacuaaaaagguau

SEQ ID NO: 43568 - RNA, 25 nt, Human
caccuuagaaagaugaaaaugugaa

SEQ ID NO: 43569 - RNA, 20 nt, Human
cacguggaaaaagaaagacu

SEQ ID NO: 43570 - RNA, 24 nt, Human
caggacccacggugccuggugcua

SEQ ID NO: 43571 - RNA, 20 nt, Human
cauccaggacccacggugcc

SEQ ID NO: 43572 - RNA, 24 nt, Human
ccagacaucugacugugcagccau

SEQ ID NO: 43573 - RNA, 23 nt, Human
ccucucuaaacaaaguaugugau

SEQ ID NO: 43574 - RNA, 22 nt, Human
cguggaaaaagaaagacuuuga

SEQ ID NO: 43575 - RNA, 18 nt, Human
cuccaugcucggacucuc

SEQ ID NO: 43576 - RNA, 23 nt, Human
cuuagaaagaugaaaaugugaaa

SEQ ID NO: 43577 - RNA, 21 nt, Human
gaaaagagacacaccuuagaa

SEQ ID NO: 43578 - RNA, 20 nt, Human
gagacacccacaaacccaac

SEQ ID NO: 43579 - RNA, 25 nt, Human
gagacacccacaaacccaacgcggg

SEQ ID NO: 43580 - RNA, 20 nt, Human
gcuugcaaaaaugacuucuc

SEQ ID NO: 43581 - RNA, 22 nt, Human
ggaaaagagacacaccuuagaa

SEQ ID NO: 43582 - RNA, 23 nt, Human
ggaaucgcuccaugcucggacuc

SEQ ID NO: 43583 - RNA, 19 nt, Human
ggugacucggguuaaaccc

SEQ ID NO: 43584 - RNA, 21 nt, Human
guccacgucuucccuccaccu

SEQ ID NO: 43585 - RNA, 21 nt, Human
gugaaaaacaacagucauaaa

SEQ ID NO: 43586 - RNA, 24 nt, Human
uaaaaaaaaaaaaaaaaccaccaa

SEQ ID NO: 43587 - RNA, 23 nt, Human
uaagaagcacguggaaaaagaaa

SEQ ID NO: 43588 - RNA, 21 nt, Human
ucaccagcuguguugcagcuu

SEQ ID NO: 43589 - RNA, 18 nt, Human
ucagcaaguacuaaaaag

SEQ ID NO: 43590 - RNA, 18 nt, Human
uccaggacccacggugcc

SEQ ID NO: 43591 - RNA, 25 nt, Human
ucuguauguuaaaaaaaaaaaaaaa

SEQ ID NO: 43592 - RNA, 26 nt, Human
ucuguauguuaaaaaaaaaaaaaaaa

SEQ ID NO: 43593 - RNA, 21 nt, Human
ucuucccuccaccuggaaccu

SEQ ID NO: 43594 - RNA, 23 nt, Human
ugagcacgagacacccacaaacc

SEQ ID NO: 43595 - RNA, 24 nt, Human
ugagcacgagacacccacaaaccc

SEQ ID NO: 43596 - RNA, 25 nt, Human
ugcccucggccacagugucuaaucu

SEQ ID NO: 43597 - RNA, 18 nt, Human
ugcgauugaucgacuuug

SEQ ID NO: 43598 - RNA, 21 nt, Human
ugggugacucggguuaaaccc

SEQ ID NO: 43599 - RNA, 18 nt, Human
uuagaaagaugaaaaugu

SEQ ID NO: 43600 - RNA, 19 nt, Human
uuuaggaagaaacaaacaa

SEQ ID NO: 43601 - RNA, 20 nt, Human
uuuccuggcauucagguguu

SEQ ID NO: 43602 - RNA, 24 nt, Human
uuuuuuuuuuuuuuuuuuuuuagg

SEQ ID NO: 43603 - RNA, 19 nt, Human
aaaaaacuugauugaauac

SEQ ID NO: 43604 - RNA, 21 nt, Human
aaaaauguaucucuuuaaaac

SEQ ID NO: 43605 - RNA, 20 nt, Human
aaacaaacucuaaagcagca

SEQ ID NO: 43606 - RNA, 19 nt, Human
aagaccaccaagcaugugc

SEQ ID NO: 43607 - RNA, 24 nt, Human
acaaaugccagagacaguaauaac

SEQ ID NO: 43608 - RNA, 21 nt, Human
agaaaacaacaaaaaaacuug

SEQ ID NO: 43609 - RNA, 22 nt, Human
agaaaacaacaaaaaaacuuga

SEQ ID NO: 43610 - RNA, 23 nt, Human
agaaaacaacaaaaaaacuugau

SEQ ID NO: 43611 - RNA, 23 nt, Human
gaugaggaaacaaaugccagaga

SEQ ID NO: 43612 - RNA, 24 nt, Human
gcaagggaacagaaaacaacaaaa

SEQ ID NO: 43613 - RNA, 21 nt, Human
ggaacagaaaacaacaaaaaa

SEQ ID NO: 43614 - RNA, 18 nt, Human
uaacaagaccaccaagca

SEQ ID NO: 43615 - RNA, 21 nt, Human
uaacuugucaggaguuuccag

SEQ ID NO: 43616 - RNA, 19 nt, Human
uaagacagaaucuuuuuuc

SEQ ID NO: 43617 - RNA, 26 nt, Human
uaauaaauuagaccagauuucuuccc

SEQ ID NO: 43618 - RNA, 18 nt, Human
uacccuauaagacagaau

SEQ ID NO: 43619 - RNA, 22 nt, Human
uccccaugguuacugucugagg

SEQ ID NO: 43620 - RNA, 25 nt, Human
ucuaaaaauguaucucuuuaaaaca

SEQ ID NO: 43621 - RNA, 24 nt, Human
ucucaggaugcgugcgcucggagg

SEQ ID NO: 43622 - RNA, 21 nt, Human
ugaggaaacaaaugccagaga

SEQ ID NO: 43623 - RNA, 18 nt, Human
uggcaagggaacagaaaa

SEQ ID NO: 43624 - RNA, 18 nt, Human
ugucaggaguuuccagaa

SEQ ID NO: 43625 - RNA, 19 nt, Human
ugucaggaguuuccagaau

SEQ ID NO: 43626 - RNA, 22 nt, Human
ugugauggcaagggaacagaaa

SEQ ID NO: 43627 - RNA, 18 nt, Human
ugugcuuaucaaaaagau

SEQ ID NO: 43628 - RNA, 20 nt, Human
ugugcuuaucaaaaagauuu

SEQ ID NO: 43629 - RNA, 23 nt, Human
aaccuugcuucaucuaaacccac

SEQ ID NO: 43630 - RNA, 19 nt, Human
aagaaagaaauacauggca

SEQ ID NO: 43631 - RNA, 21 nt, Human
accccggagucccuugggaca

SEQ ID NO: 43632 - RNA, 18 nt, Human
acuauaaaccacuuccau

SEQ ID NO: 43633 - RNA, 24 nt, Human
agcccauuccuacgguuuuuuauu

SEQ ID NO: 43634 - RNA, 23 nt, Human
aggaacagaagcauucuuaccca

SEQ ID NO: 43635 - RNA, 18 nt, Human
aggcagcaaagcugggca

SEQ ID NO: 43636 - RNA, 19 nt, Human
cacgagucucccauagguu

SEQ ID NO: 43637 - RNA, 24 nt, Human
cacucucauuucagacguucagag

SEQ ID NO: 43638 - RNA, 19 nt, Human
ccuagaacaaggaaaaaaa

SEQ ID NO: 43639 - RNA, 28 nt, Human
ccuagaacaaggaaaaaaaauagucaca

SEQ ID NO: 43640 - RNA, 23 nt, Human
ccugaccccggagucccuuggga

SEQ ID NO: 43641 - RNA, 21 nt, Human
ccugcaaguuguaagagcaag

SEQ ID NO: 43642 - RNA, 19 nt, Human
cuccccagaguggcuucag

SEQ ID NO: 43643 - RNA, 18 nt, Human
cucuguagcaguggugcu

SEQ ID NO: 43644 - RNA, 19 nt, Human
cugcuuggauccaagaggc

SEQ ID NO: 43645 - RNA, 21 nt, Human
cuucaucuaaacccacaacuc

SEQ ID NO: 43646 - RNA, 18 nt, Human
ggagcccguggcagacug

SEQ ID NO: 43647 - RNA, 24 nt, Human
gggcaaauuuucugguggccggac

SEQ ID NO: 43648 - RNA, 21 nt, Human
gguuuuuuauuuuaauccuca

SEQ ID NO: 43649 - RNA, 19 nt, Human
uaaaagacuugagaugucc

SEQ ID NO: 43650 - RNA, 24 nt, Human
uaaacccacaacucucuuucucug

SEQ ID NO: 43651 - RNA, 22 nt, Human
uauggucaggaauccuugaaac

SEQ ID NO: 43652 - RNA, 20 nt, Human
ucacuuccauuuucccagcc

SEQ ID NO: 43653 - RNA, 23 nt, Human
ucagagcagucaugcacagucgg

SEQ ID NO: 43654 - RNA, 19 nt, Human
ucaguuggggagcccgugg

SEQ ID NO: 43655 - RNA, 19 nt, Human
ucaucuaaacccacaacuc

SEQ ID NO: 43656 - RNA, 19 nt, Human
uccaaauaaccacaugucc

SEQ ID NO: 43657 - RNA, 23 nt, Human
uccaaauaaccacaugucccugc

SEQ ID NO: 43658 - RNA, 22 nt, Human
uccccagaguggcuucaguugg

SEQ ID NO: 43659 - RNA, 21 nt, Human
ucugcauuuaacucugggucu

SEQ ID NO: 43660 - RNA, 20 nt, Human
ucuuucucugucacuuaugg

SEQ ID NO: 43661 - RNA, 18 nt, Human
ugaccuauuuuuuucugu

SEQ ID NO: 43662 - RNA, 20 nt, Human
ugagauguccugucaagaaa

SEQ ID NO: 43663 - RNA, 22 nt, Human
uggccggacccuccccagagug

SEQ ID NO: 43664 - RNA, 26 nt, Human
ugucaagaaagaaauacauggcacuc

SEQ ID NO: 43665 - RNA, 21 nt, Human
ugugaucagguaacuccgacc

SEQ ID NO: 43666 - RNA, 20 nt, Human
uuaaaagacuugagaugucc

SEQ ID NO: 43667 - RNA, 21 nt, Human
uuccauugcauucaaggccug

SEQ ID NO: 43668 - RNA, 21 nt, Human
aaaacacccuugggacuuuuu

SEQ ID NO: 43669 - RNA, 23 nt, Human
aaauagcagaggcugagaaggcu

SEQ ID NO: 43670 - RNA, 22 nt, Human
agaaaacaguaacaaaacaccc

SEQ ID NO: 43671 - RNA, 24 nt, Human
agagagguggaagagaagaucaaa

SEQ ID NO: 43672 - RNA, 21 nt, Human
aggaacagaccaugucaaaca

SEQ ID NO: 43673 - RNA, 23 nt, Human
aggcaagagagauaguugugauu

SEQ ID NO: 43674 - RNA, 18 nt, Human
caacauguaacuaggaac

SEQ ID NO: 43675 - RNA, 21 nt, Human
caauacacaauaacaugauca

SEQ ID NO: 43676 - RNA, 26 nt, Human
caaugaguucuucccugucucuguuu

SEQ ID NO: 43677 - RNA, 24 nt, Human
cagaggcugagaaggcuguugugg

SEQ ID NO: 43678 - RNA, 18 nt, Human
cauuaauaaaaucugagg

SEQ ID NO: 43679 - RNA, 18 nt, Human
cucacuucuaccuuccuc

SEQ ID NO: 43680 - RNA, 23 nt, Human
cugagcaaaguggcugaguuuac

SEQ ID NO: 43681 - RNA, 22 nt, Human
gaaauagcagaggcugagaagg

SEQ ID NO: 43682 - RNA, 24 nt, Human
gagagguggaagagaagaucaaag

SEQ ID NO: 43683 - RNA, 23 nt, Human
gaguaaaaaggaugggaucucca

SEQ ID NO: 43684 - RNA, 18 nt, Human
ggagaaaacaguaacaaa

SEQ ID NO: 43685 - RNA, 20 nt, Human
ggaguuuggagaccgaaaug

SEQ ID NO: 43686 - RNA, 27 nt, Human
uaacuaggaacagaccaugucaaacac

SEQ ID NO: 43687 - RNA, 20 nt, Human
uccacggcaauacacaauaa

SEQ ID NO: 43688 - RNA, 26 nt, Human
ucugcaaacauggaaacucacuucua

SEQ ID NO: 43689 - RNA, 24 nt, Human
ugacauguagagaaacuaaauucc

SEQ ID NO: 43690 - RNA, 19 nt, Human
ugagaaggcuguuguggaa

SEQ ID NO: 43691 - RNA, 19 nt, Human
ugcauuaaaaagccaacag

SEQ ID NO: 43692 - RNA, 22 nt, Human
ugccugagggaguuaagaagau

SEQ ID NO: 43693 - RNA, 18 nt, Human
uggaagagaagaucaaag

SEQ ID NO: 43694 - RNA, 25 nt, Human
uuaaaaagccaacagggaguuugga

SEQ ID NO: 43695 - RNA, 18 nt, Human
uucacagaaccacaauuu

SEQ ID NO: 43696 - RNA, 24 nt, Human
uucacagaaccacaauuuuaccau

SEQ ID NO: 43697 - RNA, 19 nt, Human
uuccuuggguuuaccuaua

SEQ ID NO: 43698 - RNA, 19 nt, Human
aaaaagacaguccacaucg

SEQ ID NO: 43699 - RNA, 24 nt, Human
aaacaaaaugcacuggaccccgag

SEQ ID NO: 43700 - RNA, 25 nt, Human
aaacaaaaugcacuggaccccgaga

SEQ ID NO: 43701 - RNA, 24 nt, Human
aagaacucagaaaagugaaggcug

SEQ ID NO: 43702 - RNA, 23 nt, Human
aagccaccgccgcuuuccaaagc

SEQ ID NO: 43703 - RNA, 23 nt, Human
aagguccaggagaccccgggucc

SEQ ID NO: 43704 - RNA, 25 nt, Human
acagcccgccgguaucugggcuccg

SEQ ID NO: 43705 - RNA, 20 nt, Human
acagggcccucagcucugcc

SEQ ID NO: 43706 - RNA, 21 nt, Human
accaggacugcgcaggcccuu

SEQ ID NO: 43707 - RNA, 23 nt, Human
accccgagaagcagagggggagc

SEQ ID NO: 43708 - RNA, 21 nt, Human
acggagcggggaggaggaagg

SEQ ID NO: 43709 - RNA, 24 nt, Human
acgugaggcuuucaggggcuccgu

SEQ ID NO: 43710 - RNA, 25 nt, Human
agaaaaaaaugaaaaagacagucca

SEQ ID NO: 43711 - RNA, 21 nt, Human
agaccccgggucccugcccag

SEQ ID NO: 43712 - RNA, 20 nt, Human
agagacggagcggggaggag

SEQ ID NO: 43713 - RNA, 21 nt, Human
agagagaaaaaaaugaaaaag

SEQ ID NO: 43714 - RNA, 22 nt, Human
agagagaaaaaaaugaaaaaga

SEQ ID NO: 43715 - RNA, 25 nt, Human
agcaagagcugggcucuggggaugu

SEQ ID NO: 43716 - RNA, 18 nt, Human
agccaccacaggcccccg

SEQ ID NO: 43717 - RNA, 18 nt, Human
agcggggaggaggaaggu

SEQ ID NO: 43718 - RNA, 21 nt, Human
aggaaggugcgggagggcagg

SEQ ID NO: 43719 - RNA, 21 nt, Human
aggcagagggccugacacaca

SEQ ID NO: 43720 - RNA, 19 nt, Human
aggcccuuuccucccaccu

SEQ ID NO: 43721 - RNA, 22 nt, Human
agggagugcaggcagagggccu

SEQ ID NO: 43722 - RNA, 22 nt, Human
agggcacccagaugugugaaag

SEQ ID NO: 43723 - RNA, 21 nt, Human
aggggcuccagagagaaaaaa

SEQ ID NO: 43724 - RNA, 22 nt, Human
agugcaccccaccccgggcagc

SEQ ID NO: 43725 - RNA, 21 nt, Human
aucacguuaacaaaaggaagg

SEQ ID NO: 43726 - RNA, 20 nt, Human
aucagccguucccaccuggc

SEQ ID NO: 43727 - RNA, 18 nt, Human
auggaaaggacaugcccc

SEQ ID NO: 43728 - RNA, 19 nt, Human
auggcccgugcaugcccuu

SEQ ID NO: 43729 - RNA, 22 nt, Human
caaagccaacccgggccaacgg

SEQ ID NO: 43730 - RNA, 20 nt, Human
caaagccaccgccgcuuucc

SEQ ID NO: 43731 - RNA, 18 nt, Human
caccccgggcagcagcag

SEQ ID NO: 43732 - RNA, 18 nt, Human
caccugcccacugcucuc

SEQ ID NO: 43733 - RNA, 22 nt, Human
cacugccucccuuguccccugc

SEQ ID NO: 43734 - RNA, 21 nt, Human
cagagacggagcggggaggag

SEQ ID NO: 43735 - RNA, 18 nt, Human
cagauuuggauucaaaaa

SEQ ID NO: 43736 - RNA, 22 nt, Human
cagcacacgacgggcaaggcca

SEQ ID NO: 43737 - RNA, 25 nt, Human
cagcagcagagggcagagugaccag

SEQ ID NO: 43738 - RNA, 21 nt, Human
cagcccgccgguaucugggcu

SEQ ID NO: 43739 - RNA, 19 nt, Human
cagccgggggaggaggggc

SEQ ID NO: 43740 - RNA, 22 nt, Human
cagccgugugcauggcccgugc

SEQ ID NO: 43741 - RNA, 23 nt, Human
caggaccaggacugcgcaggcug

SEQ ID NO: 43742 - RNA, 19 nt, Human
caggcccgcccccgccccg

SEQ ID NO: 43743 - RNA, 22 nt, Human
cagggcacccagaugugugaaa

SEQ ID NO: 43744 - RNA, 23 nt, Human
cagggcacccagaugugugaaag

SEQ ID NO: 43745 - RNA, 24 nt, Human
cagggcacccagaugugugaaagg

SEQ ID NO: 43746 - RNA, 19 nt, Human
cagggcccucagcucugcc

SEQ ID NO: 43747 - RNA, 18 nt, Human
cagugcacgucacaagag

SEQ ID NO: 43748 - RNA, 21 nt, Human
caucacguuaacaaaaggaag

SEQ ID NO: 43749 - RNA, 20 nt, Human
ccaacccgggccaacggcga

SEQ ID NO: 43750 - RNA, 27 nt, Human
ccaggagaccccgggucccugcccaga

SEQ ID NO: 43751 - RNA, 24 nt, Human
ccaggggccccuggcguucccgag

SEQ ID NO: 43752 - RNA, 21 nt, Human
ccaguaccucauggagacagg

SEQ ID NO: 43753 - RNA, 22 nt, Human
ccccacuagccacugccucccu

SEQ ID NO: 43754 - RNA, 24 nt, Human
ccccacuagccacugccucccuug

SEQ ID NO: 43755 - RNA, 19 nt, Human
ccccgccgccgccugcgcc

SEQ ID NO: 43756 - RNA, 24 nt, Human
ccccgccgccgccugcgccuuaac

SEQ ID NO: 43757 - RNA, 19 nt, Human
ccccgggucccugcccaga

SEQ ID NO: 43758 - RNA, 24 nt, Human
cccgaaauggcgguucuugaaaca

SEQ ID NO: 43759 - RNA, 22 nt, Human
cccgccaggcccgcccccgccc

SEQ ID NO: 43760 - RNA, 24 nt, Human
cccgcccccgccccgccgccgccu

SEQ ID NO: 43761 - RNA, 21 nt, Human
cccgugcaugcccuucccgaa

SEQ ID NO: 43762 - RNA, 25 nt, Human
ccgcacccaggggccccuggcguuc

SEQ ID NO: 43763 - RNA, 22 nt, Human
ccgcccccgccccgccgccgcc

SEQ ID NO: 43764 - RNA, 18 nt, Human
ccgccccgcaggccgccc

SEQ ID NO: 43765 - RNA, 19 nt, Human
ccgccccgccgccgccugc

SEQ ID NO: 43766 - RNA, 19 nt, Human
ccgccgcccgccgcccgcg

SEQ ID NO: 43767 - RNA, 25 nt, Human
ccgccgcccgccgcccgcgcccgcc

SEQ ID NO: 43768 - RNA, 21 nt, Human
ccgccgccugcgccuuaaccc

SEQ ID NO: 43769 - RNA, 21 nt, Human
ccggcgugaagccucaggggc

SEQ ID NO: 43770 - RNA, 19 nt, Human
ccgggcccggcucaggccc

SEQ ID NO: 43771 - RNA, 20 nt, Human
ccgugcaugcccuucccgaa

SEQ ID NO: 43772 - RNA, 22 nt, Human
ccgugugcauggcccgugcaug

SEQ ID NO: 43773 - RNA, 21 nt, Human
ccucaccgccgcccgccgccc

SEQ ID NO: 43774 - RNA, 22 nt, Human
ccucaggggcggccaccugccc

SEQ ID NO: 43775 - RNA, 18 nt, Human
ccucccugaugaccccca

SEQ ID NO: 43776 - RNA, 20 nt, Human
ccugacaccugaccccugac

SEQ ID NO: 43777 - RNA, 21 nt, Human
ccugacaccugaccccugacc

SEQ ID NO: 43778 - RNA, 24 nt, Human
ccugcgccuuaacccccuccuggc

SEQ ID NO: 43779 - RNA, 19 nt, Human
cgagcccggcccaaagcca

SEQ ID NO: 43780 - RNA, 25 nt, Human
cgaggccgagcccggcccaaagcca

SEQ ID NO: 43781 - RNA, 21 nt, Human
cgaggcgguaugaaggggcgg

SEQ ID NO: 43782 - RNA, 20 nt, Human
cgaggugcccaguggcagcu

SEQ ID NO: 43783 - RNA, 21 nt, Human
cgccaggcccgcccccgcccc

SEQ ID NO: 43784 - RNA, 23 nt, Human
cgcccaguucaagagugcagcca

SEQ ID NO: 43785 - RNA, 18 nt, Human
cgcccgcgcccgcccagg

SEQ ID NO: 43786 - RNA, 18 nt, Human
cgcccgcgcccgcccagg

SEQ ID NO: 43787 - RNA, 20 nt, Human
cggcccccgggcgccgcccc

SEQ ID NO: 43788 - RNA, 20 nt, Human
cggcucggcccggcccccgg

SEQ ID NO: 43789 - RNA, 22 nt, Human
cgggcagcagcagagggcagag

SEQ ID NO: 43790 - RNA, 21 nt, Human
cgggccggagccccucucccg

SEQ ID NO: 43791 - RNA, 20 nt, Human
cggggaggaggaaggugcgg

SEQ ID NO: 43792 - RNA, 21 nt, Human
cgugugcauggcccgugcaug

SEQ ID NO: 43793 - RNA, 24 nt, Human
cucacuagucccuucucagccacu

SEQ ID NO: 43794 - RNA, 18 nt, Human
cucauggagacaggcagu

SEQ ID NO: 43795 - RNA, 19 nt, Human
cucccugaugacccccaca

SEQ ID NO: 43796 - RNA, 23 nt, Human
cuccggcgugaagccucaggggc

SEQ ID NO: 43797 - RNA, 21 nt, Human
cuccugggccaaggugcugac

SEQ ID NO: 43798 - RNA, 18 nt, Human
cucggcccggcccccggg

SEQ ID NO: 43799 - RNA, 20 nt, Human
cugccugggcccagucuggg

SEQ ID NO: 43800 - RNA, 20 nt, Human
cuuaacccccuccuggccgc

SEQ ID NO: 43801 - RNA, 24 nt, Human
gaaaaauaaaguacaaguuuaggu

SEQ ID NO: 43802 - RNA, 20 nt, Human
gaaaagagcgucuauaaaag

SEQ ID NO: 43803 - RNA, 21 nt, Human
gaaacaaaaugcacuggaccc

SEQ ID NO: 43804 - RNA, 22 nt, Human
gaaacaaaaugcacuggacccc

SEQ ID NO: 43805 - RNA, 20 nt, Human
gaaaugcuucaagaacucag

SEQ ID NO: 43806 - RNA, 18 nt, Human
gaaggugcgggagggcag

SEQ ID NO: 43807 - RNA, 18 nt, Human
gacagugaccugccaccc

SEQ ID NO: 43808 - RNA, 24 nt, Human
gaccaggacugcgcaggcccuuuc

SEQ ID NO: 43809 - RNA, 21 nt, Human
gagacaggcagucgggggacc

SEQ ID NO: 43810 - RNA, 26 nt, Human
gagcaagagcugggcucuggggaugu

SEQ ID NO: 43811 - RNA, 22 nt, Human
gagcccggcccaaagccaccgc

SEQ ID NO: 43812 - RNA, 18 nt, Human
gagcggggaggaggaagg

SEQ ID NO: 43813 - RNA, 19 nt, Human
gaggagugggggaggggaa

SEQ ID NO: 43814 - RNA, 22 nt, Human
gaggccgagcccggcccaaagc

SEQ ID NO: 43815 - RNA, 25 nt, Human
gaggggcuccagagagaaaaaaaug

SEQ ID NO: 43816 - RNA, 19 nt, Human
gaggugcccaguggcagcu

SEQ ID NO: 43817 - RNA, 21 nt, Human
gagugcagccaggaccaggac

SEQ ID NO: 43818 - RNA, 23 nt, Human
gagugggggaggggaagggcccu

SEQ ID NO: 43819 - RNA, 19 nt, Human
gauggaaaggacaugcccc

SEQ ID NO: 43820 - RNA, 19 nt, Human
gcagcagagggcagaguga

SEQ ID NO: 43821 - RNA, 22 nt, Human
gcccaguucaagagugcagcca

SEQ ID NO: 43822 - RNA, 18 nt, Human
gcccgcaugugcugcagg

SEQ ID NO: 43823 - RNA, 24 nt, Human
gccgcgcccguccgcacccagggg

SEQ ID NO: 43824 - RNA, 20 nt, Human
gccgugugcauggcccgugc

SEQ ID NO: 43825 - RNA, 20 nt, Human
gccuggcgcagagcuccugg

SEQ ID NO: 43826 - RNA, 19 nt, Human
gcgcccgccaggcccgccc

SEQ ID NO: 43827 - RNA, 19 nt, Human
gcuccguuugugguuuucc

SEQ ID NO: 43828 - RNA, 22 nt, Human
ggaggaggaaggugcgggaggg

SEQ ID NO: 43829 - RNA, 19 nt, Human
ggcggccaccugcccacug

SEQ ID NO: 43830 - RNA, 22 nt, Human
gggaggggaagggcccuucagg

SEQ ID NO: 43831 - RNA, 20 nt, Human
gggauguggacagauggaaa

SEQ ID NO: 43832 - RNA, 18 nt, Human
gggcaaggccagggagug

SEQ ID NO: 43833 - RNA, 18 nt, Human
gggcagcagcagagggca

SEQ ID NO: 43834 - RNA, 23 nt, Human
ggggaggggaagggcccuucagg

SEQ ID NO: 43835 - RNA, 18 nt, Human
ggggauguggacagaugg

SEQ ID NO: 43836 - RNA, 21 nt, Human
ggggcuauuuggcaccagcug

SEQ ID NO: 43837 - RNA, 19 nt, Human
gggggaccugggugggggc

SEQ ID NO: 43838 - RNA, 20 nt, Human
uaaaaaauacuacagaggac

SEQ ID NO: 43839 - RNA, 18 nt, Human
uaacaaaaggaagggacc

SEQ ID NO: 43840 - RNA, 19 nt, Human
uacacagaggcagggcuuu

SEQ ID NO: 43841 - RNA, 20 nt, Human
uacacagaggcagggcuuug

SEQ ID NO: 43842 - RNA, 18 nt, Human
uagccacugccucccuug

SEQ ID NO: 43843 - RNA, 20 nt, Human
uaguagagcuggacuccaca

SEQ ID NO: 43844 - RNA, 25 nt, Human
uauacagaaacaaaaugcacuggac

SEQ ID NO: 43845 - RNA, 26 nt, Human
uauacagaaacaaaaugcacuggacc

SEQ ID NO: 43846 - RNA, 21 nt, Human
ucaaaaaaaaccacagagaau

SEQ ID NO: 43847 - RNA, 28 nt, Human
ucagcacacgacgggcaaggccagggag

SEQ ID NO: 43848 - RNA, 23 nt, Human
uccacagggcccucagcucugcc

SEQ ID NO: 43849 - RNA, 27 nt, Human
uccacaucagccguucccaccuggccu

SEQ ID NO: 43850 - RNA, 22 nt, Human
uccagagagaaaaaaaugaaaa

SEQ ID NO: 43851 - RNA, 19 nt, Human
ucccaccugcccaggaccc

SEQ ID NO: 43852 - RNA, 21 nt, Human
ucccgaggccgagcccggccc

SEQ ID NO: 43853 - RNA, 23 nt, Human
ucccugaugacccccacagaaca

SEQ ID NO: 43854 - RNA, 25 nt, Human
ucccugcccagagucacagcccgcc

SEQ ID NO: 43855 - RNA, 23 nt, Human
uccgcacccaggggccccuggcg

SEQ ID NO: 43856 - RNA, 20 nt, Human
ucggcagugacagugaccug

SEQ ID NO: 43857 - RNA, 21 nt, Human
ucgggggaccugggugggggc

SEQ ID NO: 43858 - RNA, 18 nt, Human
ugaaaaagacaguccaca

SEQ ID NO: 43859 - RNA, 18 nt, Human
ugaaaaagacaguccaca

SEQ ID NO: 43860 - RNA, 22 nt, Human
ugacucacuagucccuucucag

SEQ ID NO: 43861 - RNA, 20 nt, Human
ugcacuggaccccgagaagc

SEQ ID NO: 43862 - RNA, 21 nt, Human
ugcagccaggaccaggacugc

SEQ ID NO: 43863 - RNA, 19 nt, Human
ugcauggcccgugcaugcc

SEQ ID NO: 43864 - RNA, 19 nt, Human
ugccucgauccuuuucagc

SEQ ID NO: 43865 - RNA, 21 nt, Human
ugcgccaagcgaacgaucggg

SEQ ID NO: 43866 - RNA, 18 nt, Human
ugcucugucuucaaggcc

SEQ ID NO: 43867 - RNA, 20 nt, Human
uggagaaguggaagaaggag

SEQ ID NO: 43868 - RNA, 19 nt, Human
uggcaccagcuguucaccc

SEQ ID NO: 43869 - RNA, 22 nt, Human
uggcagcucuauucucucucag

SEQ ID NO: 43870 - RNA, 22 nt, Human
uggccgcgcccguccgcaccca

SEQ ID NO: 43871 - RNA, 19 nt, Human
uggcgagugcaccccaccc

SEQ ID NO: 43872 - RNA, 22 nt, Human
uggcuuuagcacccuguuuucc

SEQ ID NO: 43873 - RNA, 20 nt, Human
ugggcuccggccuggggcag

SEQ ID NO: 43874 - RNA, 18 nt, Human
ugggcucuggggaugugg

SEQ ID NO: 43875 - RNA, 24 nt, Human
ugggggaggggaagggcccuucag

SEQ ID NO: 43876 - RNA, 22 nt, Human
uuccaaaggaaagggccuugua

SEQ ID NO: 43877 - RNA, 22 nt, Human
uuggagaaguggaagaaggagg

SEQ ID NO: 43878 - RNA, 19 nt, Human
aaaacaagaacacaggaaa

SEQ ID NO: 43879 - RNA, 22 nt, Human
aagaacacaggaaaacaagucc

SEQ ID NO: 43880 - RNA, 20 nt, Human
acucccgcgcccccgccgac

SEQ ID NO: 43881 - RNA, 23 nt, Human
caagaacacaggaaaacaagucc

SEQ ID NO: 43882 - RNA, 18 nt, Human
caaguccuuuucccucuc

SEQ ID NO: 43883 - RNA, 22 nt, Human
cagccgccgcgcugccuccagg

SEQ ID NO: 43884 - RNA, 22 nt, Human
ccaggcccuggcccugagcggc

SEQ ID NO: 43885 - RNA, 20 nt, Human
cccagcccaggcccuggccc

SEQ ID NO: 43886 - RNA, 25 nt, Human
cccagcccaggcccuggcccugagc

SEQ ID NO: 43887 - RNA, 19 nt, Human
ccgcgcccccgccgacccc

SEQ ID NO: 43888 - RNA, 20 nt, Human
ccgcgcccccgccgaccccu

SEQ ID NO: 43889 - RNA, 21 nt, Human
ccgcgcccccgccgaccccug

SEQ ID NO: 43890 - RNA, 24 nt, Human
ccucacggcagccgccgcgcugcc

SEQ ID NO: 43891 - RNA, 25 nt, Human
ccucacggcagccgccgcgcugccu

SEQ ID NO: 43892 - RNA, 22 nt, Human
ccuccaggcgacucacagauuc

SEQ ID NO: 43893 - RNA, 18 nt, Human
ccucccagcccaggcccu

SEQ ID NO: 43894 - RNA, 21 nt, Human
ccugagcggcugggccaccgg

SEQ ID NO: 43895 - RNA, 19 nt, Human
cggcagccgccgcgcugcc

SEQ ID NO: 43896 - RNA, 21 nt, Human
cucagaaaugugugcauuuuc

SEQ ID NO: 43897 - RNA, 22 nt, Human
cucccagcccaggcccuggccc

SEQ ID NO: 43898 - RNA, 19 nt, Human
cuccgcacccggccuccuc

SEQ ID NO: 43899 - RNA, 18 nt, Human
cuccuggcgcugcuccgg

SEQ ID NO: 43900 - RNA, 20 nt, Human
cucgcguacucccgcgcccc

SEQ ID NO: 43901 - RNA, 26 nt, Human
cucggcuccggccucgggcuccuggc

SEQ ID NO: 43902 - RNA, 23 nt, Human
cuggcgcugcuccggucucuccc

SEQ ID NO: 43903 - RNA, 19 nt, Human
gaaaacaagaacacaggaa

SEQ ID NO: 43904 - RNA, 21 nt, Human
gcccaggcccuggcccugagc

SEQ ID NO: 43905 - RNA, 19 nt, Human
gcccugagcggcugggccc

SEQ ID NO: 43906 - RNA, 21 nt, Human
gccgcgcugccuccaggcgac

SEQ ID NO: 43907 - RNA, 18 nt, Human
gccucgggcuccuggcgc

SEQ ID NO: 43908 - RNA, 19 nt, Human
gccucgggcuccuggcgcu

SEQ ID NO: 43909 - RNA, 24 nt, Human
gcgcccccgccgaccccuggucac

SEQ ID NO: 43910 - RNA, 19 nt, Human
guccuuuucccucuccccu

SEQ ID NO: 43911 - RNA, 18 nt, Human
ucacggcagccgccgcgc

SEQ ID NO: 43912 - RNA, 24 nt, Human
ucacggcagccgccgcgcugccuc

SEQ ID NO: 43913 - RNA, 18 nt, Human
uccucggcuccggccucg

SEQ ID NO: 43914 - RNA, 21 nt, Human
ugcuccggucucucccuccca

SEQ ID NO: 43915 - RNA, 22 nt, Human
agggauccagcgcuggacguag

SEQ ID NO: 43916 - RNA, 23 nt, Human
agggguucuccugggggcuggua

SEQ ID NO: 43917 - RNA, 18 nt, Human
aggucccauuguagcuaa

SEQ ID NO: 43918 - RNA, 26 nt, Human
caccagguccucauuuucaauguucu

SEQ ID NO: 43919 - RNA, 20 nt, Human
cagcgcuggacguaguuggg

SEQ ID NO: 43920 - RNA, 20 nt, Human
caggugauggccugcucccc

SEQ ID NO: 43921 - RNA, 18 nt, Human
ccagggguuggugauguu

SEQ ID NO: 43922 - RNA, 21 nt, Human
cccaccgucacccaggccacc

SEQ ID NO: 43923 - RNA, 23 nt, Human
cccaccgucacccaggccaccag

SEQ ID NO: 43924 - RNA, 22 nt, Human
cccaggugauggccugcuccuc

SEQ ID NO: 43925 - RNA, 19 nt, Human
ccguugucccgaggccaca

SEQ ID NO: 43926 - RNA, 19 nt, Human
ccuccugccagccuggggg

SEQ ID NO: 43927 - RNA, 18 nt, Human
ccugggaggaacuggggg

SEQ ID NO: 43928 - RNA, 23 nt, Human
ccugggggcugguaaagagcagg

SEQ ID NO: 43929 - RNA, 23 nt, Human
cgaucacagugucucuggaugcc

SEQ ID NO: 43930 - RNA, 24 nt, Human
cuccacggcucugugugcucugcu

SEQ ID NO: 43931 - RNA, 22 nt, Human
cucugcucccaguucgcucugc

SEQ ID NO: 43932 - RNA, 19 nt, Human
cucugcuuccagccuuugc

SEQ ID NO: 43933 - RNA, 18 nt, Human
cugcacagcuccgacucc

SEQ ID NO: 43934 - RNA, 18 nt, Human
cugcuccuccugccagcc

SEQ ID NO: 43935 - RNA, 23 nt, Human
cuggugguagaugcugcugcugc

SEQ ID NO: 43936 - RNA, 22 nt, Human
cuuguggccccagggguucucc

SEQ ID NO: 43937 - RNA, 21 nt, Human
gaagcccacggaguucccagg

SEQ ID NO: 43938 - RNA, 19 nt, Human
gagugggggaugugcagga

SEQ ID NO: 43939 - RNA, 25 nt, Human
gcagcaccuggucggccauggagug

SEQ ID NO: 43940 - RNA, 18 nt, Human
gcgcuuguggccccaggg

SEQ ID NO: 43941 - RNA, 21 nt, Human
gcggugucuugggcuccaggg

SEQ ID NO: 43942 - RNA, 20 nt, Human
gcucccaguucgcucugcuu

SEQ ID NO: 43943 - RNA, 19 nt, Human
gggcgggugccaggggucg

SEQ ID NO: 43944 - RNA, 25 nt, Human
guagaugcugcugcugcacagcucc

SEQ ID NO: 43945 - RNA, 23 nt, Human
uaaaagggggaggcaucgagcag

SEQ ID NO: 43946 - RNA, 19 nt, Human
uacgugcgcuuguggcccc

SEQ ID NO: 43947 - RNA, 18 nt, Human
ucguucuggugguagaug

SEQ ID NO: 43948 - RNA, 23 nt, Human
ucucuggaugccagggagggguc

SEQ ID NO: 43949 - RNA, 18 nt, Human
ucugaggguuuauugucu

SEQ ID NO: 43950 - RNA, 21 nt, Human
ugccacauccaggucuacgcg

SEQ ID NO: 43951 - RNA, 19 nt, Human
ugccaggggguaccuugcc

SEQ ID NO: 43952 - RNA, 22 nt, Human
ugcugcacagcuccgacucccg

SEQ ID NO: 43953 - RNA, 23 nt, Human
uggccggagcaggaagcccacgg

SEQ ID NO: 43954 - RNA, 20 nt, Human
uggcuggaccacgcgguguc

SEQ ID NO: 43955 - RNA, 22 nt, Human
uggcuggaccacgcggugucuu

SEQ ID NO: 43956 - RNA, 25 nt, Human
uggcuggaccacgcggugucuuggg

SEQ ID NO: 43957 - RNA, 19 nt, Human
uggcuguguugggaauguc

SEQ ID NO: 43958 - RNA, 21 nt, Human
ugggggaggaacugggggcug

SEQ ID NO: 43959 - RNA, 21 nt, Human
ugggggaggaacugggggcug

SEQ ID NO: 43960 - RNA, 22 nt, Human
ugggggaggaacugggggcugg

SEQ ID NO: 43961 - RNA, 18 nt, Human
ugucccgaggccacacga

SEQ ID NO: 43962 - RNA, 18 nt, Human
uucccagguguggcugug

SEQ ID NO: 43963 - RNA, 19 nt, Human
uuggugccugccacaucca

SEQ ID NO: 43964 - RNA, 19 nt, Human
aaacaauucccgaacagca

SEQ ID NO: 43965 - RNA, 25 nt, Human
aaacagaacauagacaaaagggacc

SEQ ID NO: 43966 - RNA, 26 nt, Human
aaacagaacauagacaaaagggaccc

SEQ ID NO: 43967 - RNA, 22 nt, Human
aaacggcagcaucaaacagacc

SEQ ID NO: 43968 - RNA, 18 nt, Human
aaaggagggagggcgggc

SEQ ID NO: 43969 - RNA, 21 nt, Human
aacaggcucaaaaagggccuc

SEQ ID NO: 43970 - RNA, 25 nt, Human
aaccccagaaguggagauucccaaa

SEQ ID NO: 43971 - RNA, 22 nt, Human
aacgacgcucugccacacagaa

SEQ ID NO: 43972 - RNA, 18 nt, Human
aagaacaggcagaccugg

SEQ ID NO: 43973 - RNA, 19 nt, Human
aagaacaggcagaccuggc

SEQ ID NO: 43974 - RNA, 20 nt, Human
aagagcugagcugccucccc

SEQ ID NO: 43975 - RNA, 19 nt, Human
aaggagggagggcgggcgg

SEQ ID NO: 43976 - RNA, 21 nt, Human
aaggcgauggagcgaagacca

SEQ ID NO: 43977 - RNA, 19 nt, Human
aaguguacauaaaacaauu

SEQ ID NO: 43978 - RNA, 18 nt, Human
acagaacauagacaaaaa

SEQ ID NO: 43979 - RNA, 18 nt, Human
acagaccacugcugccgc

SEQ ID NO: 43980 - RNA, 23 nt, Human
acagaccacugcugccgcgacaa

SEQ ID NO: 43981 - RNA, 19 nt, Human
acagcacggagcaucagac

SEQ ID NO: 43982 - RNA, 19 nt, Human
acagcagggaagggaacug

SEQ ID NO: 43983 - RNA, 20 nt, Human
acagcagggaagggaacuga

SEQ ID NO: 43984 - RNA, 22 nt, Human
acaggaguaaacaggcucaaaa

SEQ ID NO: 43985 - RNA, 20 nt, Human
acccagggccucuucagagc

SEQ ID NO: 43986 - RNA, 24 nt, Human
accccagaaguggagauucccaaa

SEQ ID NO: 43987 - RNA, 21 nt, Human
accuuaggaagggccaggcac

SEQ ID NO: 43988 - RNA, 20 nt, Human
acggugggaacacaccucac

SEQ ID NO: 43989 - RNA, 23 nt, Human
acucacucugccccuuccugucc

SEQ ID NO: 43990 - RNA, 19 nt, Human
agagguauggagggcagga

SEQ ID NO: 43991 - RNA, 20 nt, Human
agagguauggagggcaggag

SEQ ID NO: 43992 - RNA, 21 nt, Human
agccaucagccauugcccagc

SEQ ID NO: 43993 - RNA, 21 nt, Human
aggaagaggcggguggaggaa

SEQ ID NO: 43994 - RNA, 25 nt, Human
aggaggccccagcagaacccagccc

SEQ ID NO: 43995 - RNA, 22 nt, Human
aggagggagggcgggcgggagc

SEQ ID NO: 43996 - RNA, 21 nt, Human
aggaguaaacaggcucaaaaa

SEQ ID NO: 43997 - RNA, 33 nt, Human
aggcaggaggccgaacagguaaaccccagaagg

SEQ ID NO: 43998 - RNA, 22 nt, Human
aggcgauggagcgaagaccaag

SEQ ID NO: 43999 - RNA, 19 nt, Human
aggcggaaagaaagugcug

SEQ ID NO: 44000 - RNA, 21 nt, Human
aggcuggggcugggcagccgg

SEQ ID NO: 44001 - RNA, 18 nt, Human
agggagggcgggcgggag

SEQ ID NO: 44002 - RNA, 23 nt, Human
agguauggagggcaggagguggg

SEQ ID NO: 44003 - RNA, 21 nt, Human
auagaacagcagggaagggaa

SEQ ID NO: 44004 - RNA, 20 nt, Human
aucagucacccuccaggaag

SEQ ID NO: 44005 - RNA, 19 nt, Human
caaagcaggugugcuccca

SEQ ID NO: 44006 - RNA, 24 nt, Human
caaagcaggugugcucccaaaggc

SEQ ID NO: 44007 - RNA, 23 nt, Human
caacccagggccucuucagagcu

SEQ ID NO: 44008 - RNA, 18 nt, Human
caagguggcacaaaagac

SEQ ID NO: 44009 - RNA, 19 nt, Human
cacaugcaugcaggcaggc

SEQ ID NO: 44010 - RNA, 19 nt, Human
caccaacaaggaggcccca

SEQ ID NO: 44011 - RNA, 23 nt, Human
caccgccuuucccagggagcaag

SEQ ID NO: 44012 - RNA, 21 nt, Human
caccucacuccuuccuaguac

SEQ ID NO: 44013 - RNA, 24 nt, Human
cacucaaaggaaauagaacagcag

SEQ ID NO: 44014 - RNA, 18 nt, Human
cagcaagaacaggcagac

SEQ ID NO: 44015 - RNA, 19 nt, Human
cagcaucaaacagaccacu

SEQ ID NO: 44016 - RNA, 20 nt, Human
cagcgcaaaauaaaaggccu

SEQ ID NO: 44017 - RNA, 21 nt, Human
cagcgcaaaauaaaaggccuu

SEQ ID NO: 44018 - RNA, 23 nt, Human
caggaguaaacaggcucaaaaag

SEQ ID NO: 44019 - RNA, 20 nt, Human
caggcagaccuggcguuucu

SEQ ID NO: 44020 - RNA, 18 nt, Human
ccacaggaguaaacaggc

SEQ ID NO: 44021 - RNA, 22 nt, Human
ccaccacccgcccgcagccacc

SEQ ID NO: 44022 - RNA, 19 nt, Human
ccaggagaccgccaucugg

SEQ ID NO: 44023 - RNA, 20 nt, Human
cccaaaaggcuguauccaga

SEQ ID NO: 44024 - RNA, 19 nt, Human
cccaaaggcggagucugag

SEQ ID NO: 44025 - RNA, 18 nt, Human
cccacaacuugcuccuaa

SEQ ID NO: 44026 - RNA, 19 nt, Human
cccagcaagaacaggcaga

SEQ ID NO: 44027 - RNA, 23 nt, Human
ccccacucuccccacaacuucug

SEQ ID NO: 44028 - RNA, 19 nt, Human
ccccagcagaacccagccc

SEQ ID NO: 44029 - RNA, 23 nt, Human
ccccucuugaaaagcccccacaa

SEQ ID NO: 44030 - RNA, 24 nt, Human
ccccuggagcugcaucugcucucc

SEQ ID NO: 44031 - RNA, 21 nt, Human
cccgcgacccgggacacccag

SEQ ID NO: 44032 - RNA, 22 nt, Human
ccgaaacccgacccucaucgcg

SEQ ID NO: 44033 - RNA, 23 nt, Human
ccgaaacccgacccucaucgcgc

SEQ ID NO: 44034 - RNA, 19 nt, Human
ccgcagccacccugccucg

SEQ ID NO: 44035 - RNA, 20 nt, Human
ccgcccgcagccacccugcc

SEQ ID NO: 44036 - RNA, 21 nt, Human
ccggcagcggcaaacggcagc

SEQ ID NO: 44037 - RNA, 20 nt, Human
ccguggcagugcuuggcugu

SEQ ID NO: 44038 - RNA, 24 nt, Human
ccuacagcaccaacaaggaggccc

SEQ ID NO: 44039 - RNA, 21 nt, Human
ccuaggcugauggcccgaggc

SEQ ID NO: 44040 - RNA, 24 nt, Human
ccucagcagccugaccgccuccuc

SEQ ID NO: 44041 - RNA, 19 nt, Human
ccugaccgccuccuccccc

SEQ ID NO: 44042 - RNA, 19 nt, Human
ccuuccucuugggcauguc

SEQ ID NO: 44043 - RNA, 19 nt, Human
cgauggagcgaagaccaag

SEQ ID NO: 44044 - RNA, 23 nt, Human
cggaugccaggcagggaccuuag

SEQ ID NO: 44045 - RNA, 21 nt, Human
cggcaccacaauggcuggcca

SEQ ID NO: 44046 - RNA, 21 nt, Human
cggcugucugauuccccacuc

SEQ ID NO: 44047 - RNA, 24 nt, Human
cgggggaggccgaaguugcgagcg

SEQ ID NO: 44048 - RNA, 20 nt, Human
cgguggugaggcuggggcuc

SEQ ID NO: 44049 - RNA, 23 nt, Human
cgugaaggucgcagucugggccg

SEQ ID NO: 44050 - RNA, 19 nt, Human
cgugacucacucugccccu

SEQ ID NO: 44051 - RNA, 22 nt, Human
cuagagguauggagggcaggag

SEQ ID NO: 44052 - RNA, 22 nt, Human
cucagcagccugaccgccuccu

SEQ ID NO: 44053 - RNA, 20 nt, Human
cucugccacacagaagagcc

SEQ ID NO: 44054 - RNA, 20 nt, Human
cucugugcuaagcuggggac

SEQ ID NO: 44055 - RNA, 22 nt, Human
cugaaaagcaguagaaggaaca

SEQ ID NO: 44056 - RNA, 19 nt, Human
cugcccaaggccacaggag

SEQ ID NO: 44057 - RNA, 24 nt, Human
cuggacaccugcuucggccacauc

SEQ ID NO: 44058 - RNA, 23 nt, Human
gaacaggcagaccuggcguuucu

SEQ ID NO: 44059 - RNA, 26 nt, Human
gaccuggcguuucuuagccugacucc

SEQ ID NO: 44060 - RNA, 18 nt, Human
gaguaaacaggcucaaaa

SEQ ID NO: 44061 - RNA, 23 nt, Human
gcaaacccuucuuuaagacucag

SEQ ID NO: 44062 - RNA, 24 nt, Human
gcagaccuggcguuucuuagccug

SEQ ID NO: 44063 - RNA, 18 nt, Human
gcagggaagggaacugaa

SEQ ID NO: 44064 - RNA, 21 nt, Human
gcaguagaaggaacagucaga

SEQ ID NO: 44065 - RNA, 22 nt, Human
gcagugacuggagguuucgggc

SEQ ID NO: 44066 - RNA, 23 nt, Human
gccaggagaccgccaucugggag

SEQ ID NO: 44067 - RNA, 20 nt, Human
gccaucagccauugcccagc

SEQ ID NO: 44068 - RNA, 20 nt, Human
gccauugcccagcaagaaca

SEQ ID NO: 44069 - RNA, 19 nt, Human
gccuggacaccugcuucgg

SEQ ID NO: 44070 - RNA, 21 nt, Human
gccuggacaccugcuucggcc

SEQ ID NO: 44071 - RNA, 21 nt, Human
gcggaaagaaagugcuggagg

SEQ ID NO: 44072 - RNA, 21 nt, Human
gcucggucagauccgaaaccc

SEQ ID NO: 44073 - RNA, 18 nt, Human
gcugcagccuaccugccu

SEQ ID NO: 44074 - RNA, 23 nt, Human
ggaaauagaacagcagggaaggg

SEQ ID NO: 44075 - RNA, 25 nt, Human
ggacaccugcuucggccacaucagu

SEQ ID NO: 44076 - RNA, 22 nt, Human
ggaggaagacugaggggaggcu

SEQ ID NO: 44077 - RNA, 20 nt, Human
ggcaccacaauggcuggcca

SEQ ID NO: 44078 - RNA, 25 nt, Human
ggcaggaggugggaugcgggggacc

SEQ ID NO: 44079 - RNA, 21 nt, Human
ggcaggaggugggaugcggug

SEQ ID NO: 44080 - RNA, 22 nt, Human
ggccggcagcggcaaacggcag

SEQ ID NO: 44081 - RNA, 22 nt, Human
ggcggagucugaggaggggccg

SEQ ID NO: 44082 - RNA, 23 nt, Human
gggcaaugcgucugcaagucggg

SEQ ID NO: 44083 - RNA, 23 nt, Human
gggcaggaggugggaugcggugg

SEQ ID NO: 44084 - RNA, 23 nt, Human
gggccggcagcggcaaacggcag

SEQ ID NO: 44085 - RNA, 20 nt, Human
ggugcacaugcaugcaggca

SEQ ID NO: 44086 - RNA, 18 nt, Human
gguggugaggcuggggcu

SEQ ID NO: 44087 - RNA, 19 nt, Human
gucagauauucaugaaggg

SEQ ID NO: 44088 - RNA, 19 nt, Human
gugagucuuuacacucaaa

SEQ ID NO: 44089 - RNA, 19 nt, Human
gugcacaugcaugcaggca

SEQ ID NO: 44090 - RNA, 18 nt, Human
gugggccugugccuuugc

SEQ ID NO: 44091 - RNA, 22 nt, Human
guuccaggcugcacagucccug

SEQ ID NO: 44092 - RNA, 25 nt, Human
uaaaacaauucccgaacagcacgga

SEQ ID NO: 44093 - RNA, 22 nt, Human
uaaaaucuaaggcaagaguacc

SEQ ID NO: 44094 - RNA, 21 nt, Human
uaaacaggcucaaaaagggcu

SEQ ID NO: 44095 - RNA, 27 nt, Human
uaaaccccagaaguggagauucccaaa

SEQ ID NO: 44096 - RNA, 24 nt, Human
uaaggcaagaguaccacgaggucc

SEQ ID NO: 44097 - RNA, 26 nt, Human
uacccaaaaggcuguauccagaagcu

SEQ ID NO: 44098 - RNA, 19 nt, Human
uauuaacauuuuccucuca

SEQ ID NO: 44099 - RNA, 22 nt, Human
ucaggcggaaagaaagugcugg

SEQ ID NO: 44100 - RNA, 22 nt, Human
ucagucacccuccaggaagccu

SEQ ID NO: 44101 - RNA, 21 nt, Human
uccaccacccgcccgcagcca

SEQ ID NO: 44102 - RNA, 23 nt, Human
uccaccacccgcccgcagccacc

SEQ ID NO: 44103 - RNA, 21 nt, Human
uccagaagcuggggcggcacc

SEQ ID NO: 44104 - RNA, 21 nt, Human
ucccaaaggcggagucugagg

SEQ ID NO: 44105 - RNA, 19 nt, Human
ucccagguccuggaggacc

SEQ ID NO: 44106 - RNA, 18 nt, Human
ucccaguguuuacccaaa

SEQ ID NO: 44107 - RNA, 24 nt, Human
uccccacaacuucuggaguuccca

SEQ ID NO: 44108 - RNA, 19 nt, Human
uccccagcccugagggccc

SEQ ID NO: 44109 - RNA, 22 nt, Human
uccucagcagccugaccgccuc

SEQ ID NO: 44110 - RNA, 18 nt, Human
ucgcagucugggccguga

SEQ ID NO: 44111 - RNA, 21 nt, Human
ucggucagauccgaaacccga

SEQ ID NO: 44112 - RNA, 22 nt, Human
ucugaguuggaccccaggcugg

SEQ ID NO: 44113 - RNA, 24 nt, Human
ucugauuccccacucuccccacaa

SEQ ID NO: 44114 - RNA, 20 nt, Human
ucugcccaaggccacaggag

SEQ ID NO: 44115 - RNA, 21 nt, Human
ucuggcaccugacccucccca

SEQ ID NO: 44116 - RNA, 22 nt, Human
ucuggcaccugacccuccccac

SEQ ID NO: 44117 - RNA, 20 nt, Human
ugaaaagcaguagaaggaac

SEQ ID NO: 44118 - RNA, 21 nt, Human
ugacucacucugccccuuccu

SEQ ID NO: 44119 - RNA, 21 nt, Human
ugagggcccggaaacgacgcu

SEQ ID NO: 44120 - RNA, 20 nt, Human
ugcacaggcagcaaggcaag

SEQ ID NO: 44121 - RNA, 19 nt, Human
ugccucagcgagcuugggg

SEQ ID NO: 44122 - RNA, 20 nt, Human
ugccucagcgagcuuggggc

SEQ ID NO: 44123 - RNA, 22 nt, Human
ugccucagcgagcuuggggcug

SEQ ID NO: 44124 - RNA, 27 nt, Human
ugccucagcgagcuuggggcugugggg

SEQ ID NO: 44125 - RNA, 23 nt, Human
ugcuaagcuggggacgaguguga

SEQ ID NO: 44126 - RNA, 22 nt, Human
ugcugccgcgacaacccagggc

SEQ ID NO: 44127 - RNA, 24 nt, Human
ugcugggcacagccacccugcugg

SEQ ID NO: 44128 - RNA, 22 nt, Human
uggaagcaagcaggagccuucu

SEQ ID NO: 44129 - RNA, 21 nt, Human
uggaggaagacugaggggagg

SEQ ID NO: 44130 - RNA, 18 nt, Human
uggcagcaguuacacagc

SEQ ID NO: 44131 - RNA, 24 nt, Human
uggcagcaguuacacagcgcaaaa

SEQ ID NO: 44132 - RNA, 19 nt, Human
uggcugcagccuaccugcc

SEQ ID NO: 44133 - RNA, 25 nt, Human
ugggcuggacucaggcggaaagaaa

SEQ ID NO: 44134 - RNA, 20 nt, Human
uggggcugggcagccggcuu

SEQ ID NO: 44135 - RNA, 20 nt, Human
uggggcuguggggcucccug

SEQ ID NO: 44136 - RNA, 18 nt, Human
uggguuugggaguuuucu

SEQ ID NO: 44137 - RNA, 21 nt, Human
uggugaggcuggggcugggca

SEQ ID NO: 44138 - RNA, 20 nt, Human
uuaacauuuuccucucacgu

SEQ ID NO: 44139 - RNA, 20 nt, Human
uucuggaguucccaguguuu

SEQ ID NO: 44140 - RNA, 19 nt, Human
uugcagccuucccauagcc

SEQ ID NO: 44141 - RNA, 20 nt, Human
uugcagccuucccauagccu

SEQ ID NO: 44142 - RNA, 21 nt, Human
uuggggcuguggggcucccug

SEQ ID NO: 44143 - RNA, 18 nt, Human
uuuccucagcagccugac

SEQ ID NO: 44144 - RNA, 19 nt, Human
uuucucagccuuugcagcc

SEQ ID NO: 44145 - RNA, 21 nt, Human
uuugcuucccagguccuggag

SEQ ID NO: 44146 - RNA, 25 nt, Human
uuugggaguuuucuauugcagucuu

SEQ ID NO: 44147 - RNA, 18 nt, Human
uuuuuuuuuuuuuuuuug

SEQ ID NO: 44148 - RNA, 27 nt, Human
uuuuuuuuuuuuuuuuuuuuuuugggg

SEQ ID NO: 44149 - RNA, 20 nt, Human
aaugaguugaagugccuuga

SEQ ID NO: 44150 - RNA, 18 nt, Human
caacccugcagaccagcc

SEQ ID NO: 44151 - RNA, 21 nt, Human
caccccacccacuccuauacc

SEQ ID NO: 44152 - RNA, 19 nt, Human
cagccaccaguccgggaac

SEQ ID NO: 44153 - RNA, 21 nt, Human
caggucaacccugcagaccag

SEQ ID NO: 44154 - RNA, 21 nt, Human
caucaguguucacauuuucca

SEQ ID NO: 44155 - RNA, 24 nt, Human
caugcacuuuuacuaugcccauug

SEQ ID NO: 44156 - RNA, 19 nt, Human
ccacugccaccaccaccag

SEQ ID NO: 44157 - RNA, 24 nt, Human
ccauggccuuguggccugggugac

SEQ ID NO: 44158 - RNA, 20 nt, Human
ccguccgcacacgcgcagaa

SEQ ID NO: 44159 - RNA, 19 nt, Human
cguccgcacacgcgcagaa

SEQ ID NO: 44160 - RNA, 22 nt, Human
cucaacaccccacccacuccua

SEQ ID NO: 44161 - RNA, 19 nt, Human
cugcguagcgccuccagcc

SEQ ID NO: 44162 - RNA, 21 nt, Human
gagggucugauggguggcuca

SEQ ID NO: 44163 - RNA, 22 nt, Human
gcuagagcagcaggacugucug

SEQ ID NO: 44164 - RNA, 21 nt, Human
guagcgccuccagccugggac

SEQ ID NO: 44165 - RNA, 22 nt, Human
gugcugaguuuucccauguggu

SEQ ID NO: 44166 - RNA, 20 nt, Human
ucaacccugcagaccagcca

SEQ ID NO: 44167 - RNA, 20 nt, Human
uccgcacacgcgcagaacca

SEQ ID NO: 44168 - RNA, 21 nt, Human
uccgcacacgcgcagaaccac

SEQ ID NO: 44169 - RNA, 19 nt, Human
ucuguccacugccaccacc

SEQ ID NO: 44170 - RNA, 21 nt, Human
ugaccgcggaguuaacagaca

SEQ ID NO: 44171 - RNA, 28 nt, Human
ugaccgcggaguuaacagacagccgucc

SEQ ID NO: 44172 - RNA, 19 nt, Human
ugaguugaagugccuugau

SEQ ID NO: 44173 - RNA, 24 nt, Human
ugcccauugcacuucucauccaug

SEQ ID NO: 44174 - RNA, 23 nt, Human
ugcugaguuuucccaugugguuu

SEQ ID NO: 44175 - RNA, 21 nt, Human
aaaaacacaaaaaaauauuca

SEQ ID NO: 44176 - RNA, 22 nt, Human
aaaaggaaacaaaaacacaaaa

SEQ ID NO: 44177 - RNA, 26 nt, Human
aaaaucaacuauaguagaaccagagg

SEQ ID NO: 44178 - RNA, 24 nt, Human
aaacaaaaacacaaaaaaauauuc

SEQ ID NO: 44179 - RNA, 21 nt, Human
aaaucaacuauaguagaaccg

SEQ ID NO: 44180 - RNA, 20 nt, Human
aaggaaacaaaaacacaagg

SEQ ID NO: 44181 - RNA, 23 nt, Human
acagacaggagggcauuccucca

SEQ ID NO: 44182 - RNA, 26 nt, Human
acugcagucgcacugaacaccaggcc

SEQ ID NO: 44183 - RNA, 18 nt, Human
agcuguggcacagagaac

SEQ ID NO: 44184 - RNA, 22 nt, Human
aggcaguccagaaguagaaaua

SEQ ID NO: 44185 - RNA, 19 nt, Human
aggcgucuuaacaugaaac

SEQ ID NO: 44186 - RNA, 23 nt, Human
caacgaauauucaacauucaaaa

SEQ ID NO: 44187 - RNA, 19 nt, Human
cacaccuuugcucuagaau

SEQ ID NO: 44188 - RNA, 22 nt, Human
cacaggcgucuuaacaugaaac

SEQ ID NO: 44189 - RNA, 23 nt, Human
caccuuugcucuagaaucaggaa

SEQ ID NO: 44190 - RNA, 19 nt, Human
cagaaacacugaauagcac

SEQ ID NO: 44191 - RNA, 18 nt, Human
cagaaguagaaauacacc

SEQ ID NO: 44192 - RNA, 21 nt, Human
caggaagagcaucagugaaag

SEQ ID NO: 44193 - RNA, 19 nt, Human
cagguccugcccuagagga

SEQ ID NO: 44194 - RNA, 24 nt, Human
caucagugaaaguccccaggcccc

SEQ ID NO: 44195 - RNA, 23 nt, Human
ccaaauauccauuuuaucaugau

SEQ ID NO: 44196 - RNA, 24 nt, Human
ccccaggccccuagaggagggauc

SEQ ID NO: 44197 - RNA, 19 nt, Human
ccccuucccacaccuuugc

SEQ ID NO: 44198 - RNA, 19 nt, Human
ccuccauuuccccuuccca

SEQ ID NO: 44199 - RNA, 21 nt, Human
ccuccauuuccccuucccaca

SEQ ID NO: 44200 - RNA, 22 nt, Human
ccuucccacaccuuugcucuag

SEQ ID NO: 44201 - RNA, 24 nt, Human
cgacacagacaggagggcauuccc

SEQ ID NO: 44202 - RNA, 23 nt, Human
cgccuucgaccuccguugcgcuc

SEQ ID NO: 44203 - RNA, 24 nt, Human
cuccguugcgcucgcacuggcggg

SEQ ID NO: 44204 - RNA, 19 nt, Human
gaggagcucagcccuuggg

SEQ ID NO: 44205 - RNA, 18 nt, Human
gcucgcacuggcgggacc

SEQ ID NO: 44206 - RNA, 24 nt, Human
ggaaacaaaaacacaaaaaaauau

SEQ ID NO: 44207 - RNA, 22 nt, Human
ggcacagagaacgacacagaca

SEQ ID NO: 44208 - RNA, 20 nt, Human
gugccaacacacagggugca

SEQ ID NO: 44209 - RNA, 23 nt, Human
uaaaguggauccaagaaaggacu

SEQ ID NO: 44210 - RNA, 23 nt, Human
uaacaugaaacccaacgaauauu

SEQ ID NO: 44211 - RNA, 22 nt, Human
uagcacuccuggaccacaggcg

SEQ ID NO: 44212 - RNA, 23 nt, Human
uaguaaaaugcagacuaaucaag

SEQ ID NO: 44213 - RNA, 19 nt, Human
uauaguagaaccagaggug

SEQ ID NO: 44214 - RNA, 19 nt, Human
uaucaggaacagaaacacu

SEQ ID NO: 44215 - RNA, 23 nt, Human
ucaagauaaaguggauccaagaa

SEQ ID NO: 44216 - RNA, 20 nt, Human
ucagaaaaggaaacaaaaac

SEQ ID NO: 44217 - RNA, 21 nt, Human
ucagaaaaggaaacaaaaaca

SEQ ID NO: 44218 - RNA, 18 nt, Human
uccaaaauccaguuaagu

SEQ ID NO: 44219 - RNA, 21 nt, Human
uccacuggggauucugcccca

SEQ ID NO: 44220 - RNA, 22 nt, Human
uccccaggccccuagaggaggg

SEQ ID NO: 44221 - RNA, 23 nt, Human
ucuguagcuguggcacagagaac

SEQ ID NO: 44222 - RNA, 27 nt, Human
ugaaacccaacgaauauucaacauuca

SEQ ID NO: 44223 - RNA, 21 nt, Human
ugacggugaaucuucacuggu

SEQ ID NO: 44224 - RNA, 21 nt, Human
ugacugcagucgcacugaaca

SEQ ID NO: 44225 - RNA, 19 nt, Human
ugccccaguccaagacccg

SEQ ID NO: 44226 - RNA, 22 nt, Human
ugcgcucgcacuggcgggaccu

SEQ ID NO: 44227 - RNA, 20 nt, Human
uggaauagagcggcccacau

SEQ ID NO: 44228 - RNA, 25 nt, Human
uuaacaugaaacccaacgaauauuc

SEQ ID NO: 44229 - RNA, 22 nt, Human
uucaaaguguuuaucaggaaca

SEQ ID NO: 44230 - RNA, 22 nt, Human
uuucaugguuugacggugaauc

SEQ ID NO: 44231 - RNA, 22 nt, Human
uuuuuuuaaaagccaaauugga

SEQ ID NO: 44232 - RNA, 21 nt, Human
aaagaguuccauugcuuaaaa

SEQ ID NO: 44233 - RNA, 18 nt, Human
aagaaagaguuccauugc

SEQ ID NO: 44234 - RNA, 18 nt, Human
agaaccaaggcauucccu

SEQ ID NO: 44235 - RNA, 19 nt, Human
agagagcagguaaaaacau

SEQ ID NO: 44236 - RNA, 19 nt, Human
agaguuccauugcuuaaaa

SEQ ID NO: 44237 - RNA, 22 nt, Human
agaugucagcaauugacagaac

SEQ ID NO: 44238 - RNA, 23 nt, Human
agaugucagcaauugacagaacc

SEQ ID NO: 44239 - RNA, 23 nt, Human
agguaugauggcuuccagcuuca

SEQ ID NO: 44240 - RNA, 25 nt, Human
auuuggagcaaaugguagccgaaau

SEQ ID NO: 44241 - RNA, 21 nt, Human
caaauacuuagcugaguccua

SEQ ID NO: 44242 - RNA, 22 nt, Human
caccuaggcaagauucagaaaa

SEQ ID NO: 44243 - RNA, 21 nt, Human
cagcagcguuucacagagaug

SEQ ID NO: 44244 - RNA, 20 nt, Human
caucauuguauuaacagccu

SEQ ID NO: 44245 - RNA, 23 nt, Human
cauugcuuaaaaacgggguugga

SEQ ID NO: 44246 - RNA, 20 nt, Human
ccauugcuuaaaaacggggu

SEQ ID NO: 44247 - RNA, 22 nt, Human
cuacauaaaaaacuguaaguua

SEQ ID NO: 44248 - RNA, 21 nt, Human
ggaauuuggagcaaaugguag

SEQ ID NO: 44249 - RNA, 20 nt, Human
uaaaacgagauuagcuguaa

SEQ ID NO: 44250 - RNA, 18 nt, Human
uaaaugaaacaccuaggc

SEQ ID NO: 44251 - RNA, 19 nt, Human
uacauuaacuguugcaaaa

SEQ ID NO: 44252 - RNA, 23 nt, Human
uaggcaaauacuuagcugagucc

SEQ ID NO: 44253 - RNA, 20 nt, Human
uauucuguguucucagaugu

SEQ ID NO: 44254 - RNA, 19 nt, Human
ucaaagauuuguccuucca

SEQ ID NO: 44255 - RNA, 21 nt, Human
ucaaagauuuguccuuccacu

SEQ ID NO: 44256 - RNA, 19 nt, Human
ucacucagcagcguuucac

SEQ ID NO: 44257 - RNA, 21 nt, Human
ucagcaauugacagaaccaag

SEQ ID NO: 44258 - RNA, 24 nt, Human
ucagcagcguuucacagagauguu

SEQ ID NO: 44259 - RNA, 22 nt, Human
ucucuauagagagagcagguaa

SEQ ID NO: 44260 - RNA, 23 nt, Human
ucuuaccuuauuuuacuacuuau

SEQ ID NO: 44261 - RNA, 22 nt, Human
ugaaagcaguucucacucagca

SEQ ID NO: 44262 - RNA, 22 nt, Human
uggaguacagugguaaaaacca

SEQ ID NO: 44263 - RNA, 25 nt, Human
ugguagccgaaaugaguuuacaugc

SEQ ID NO: 44264 - RNA, 20 nt, Human
uguucugcauaagcuuuugu

SEQ ID NO: 44265 - RNA, 22 nt, Human
uucaaagauuuguccuuccacu

SEQ ID NO: 44266 - RNA, 24 nt, Human
uuuguuugucaucauuguauuaac

SEQ ID NO: 44267 - RNA, 21 nt, Human
aaaguuucacaaaugcuuucc

SEQ ID NO: 44268 - RNA, 21 nt, Human
aagagaucaaaauaaccuaug

SEQ ID NO: 44269 - RNA, 18 nt, Human
aagcaaaaguauaaacua

SEQ ID NO: 44270 - RNA, 26 nt, Human
aauuaaauaagauuuucaagaaaguu

SEQ ID NO: 44271 - RNA, 24 nt, Human
agaccaacagucauauaaaaauaa

SEQ ID NO: 44272 - RNA, 19 nt, Human
agcccgugggcgggauggg

SEQ ID NO: 44273 - RNA, 23 nt, Human
agcccuuucuuuuuucuggagcu

SEQ ID NO: 44274 - RNA, 20 nt, Human
auaaaaaccaaaccugcuua

SEQ ID NO: 44275 - RNA, 22 nt, Human
auaaaaaccaaaccugcuuaag

SEQ ID NO: 44276 - RNA, 18 nt, Human
augcaaacauaugaaaug

SEQ ID NO: 44277 - RNA, 26 nt, Human
auggggcggggcgggaagaggcgguu

SEQ ID NO: 44278 - RNA, 24 nt, Human
caaaaugcaaacauaugaaaugag

SEQ ID NO: 44279 - RNA, 23 nt, Human
cacuggaaaaaacguuaaagccc

SEQ ID NO: 44280 - RNA, 19 nt, Human
cuggagcugaaacaguggc

SEQ ID NO: 44281 - RNA, 21 nt, Human
ggaagaggcgguugggcugcg

SEQ ID NO: 44282 - RNA, 28 nt, Human
uaagcaaaaguauaaacuaaucaacggg

SEQ ID NO: 44283 - RNA, 23 nt, Human
uaauaccauuaagucuacaaagu

SEQ ID NO: 44284 - RNA, 19 nt, Human
uacacgggucacggccuug

SEQ ID NO: 44285 - RNA, 20 nt, Human
uccccgaacgcgggacuccu

SEQ ID NO: 44286 - RNA, 20 nt, Human
ucuggagcugaaacaguggc

SEQ ID NO: 44287 - RNA, 21 nt, Human
ugcggaaggacggggcgcugc

SEQ ID NO: 44288 - RNA, 19 nt, Human
ugggcgggauggggcgggg

SEQ ID NO: 44289 - RNA, 23 nt, Human
uucaaguaaagugguacuaaaga

SEQ ID NO: 44290 - RNA, 18 nt, Human
uuucacuggaaaaaacgu

SEQ ID NO: 44291 - RNA, 22 nt, Human
uuuucacuggaaaaaacguuaa

SEQ ID NO: 44292 - RNA, 22 nt, Human
acagucagucacacagcaugaa

SEQ ID NO: 44293 - RNA, 22 nt, Human
acaguggugaggaggcggaaag

SEQ ID NO: 44294 - RNA, 26 nt, Human
accaccugcccaacaccaggacccca

SEQ ID NO: 44295 - RNA, 20 nt, Human
accccgcccccaggagccag

SEQ ID NO: 44296 - RNA, 23 nt, Human
accucaaggaaaagacagacccc

SEQ ID NO: 44297 - RNA, 23 nt, Human
agacagaccccaccaagggccug

SEQ ID NO: 44298 - RNA, 19 nt, Human
agccccaccaccugcccaa

SEQ ID NO: 44299 - RNA, 22 nt, Human
aggaaaagacagaccccaccaa

SEQ ID NO: 44300 - RNA, 24 nt, Human
aggaaaagacagaccccaccaagg

SEQ ID NO: 44301 - RNA, 19 nt, Human
auggcccagccccaccacc

SEQ ID NO: 44302 - RNA, 23 nt, Human
cacaaccccgcccccaggagccu

SEQ ID NO: 44303 - RNA, 19 nt, Human
cacacagcaugaaucacca

SEQ ID NO: 44304 - RNA, 21 nt, Human
cacacagcaugaaucaccacc

SEQ ID NO: 44305 - RNA, 22 nt, Human
cacacagcaugaaucaccaccc

SEQ ID NO: 44306 - RNA, 20 nt, Human
cacagucccaggcccgaauc

SEQ ID NO: 44307 - RNA, 25 nt, Human
caccaccugcccaacaccaggaccc

SEQ ID NO: 44308 - RNA, 22 nt, Human
caccccugccuucaucagacuu

SEQ ID NO: 44309 - RNA, 18 nt, Human
cagcacugagcccaucug

SEQ ID NO: 44310 - RNA, 23 nt, Human
caucugggguccccagggagccc

SEQ ID NO: 44311 - RNA, 26 nt, Human
ccaggccucgucauccugaccccagc

SEQ ID NO: 44312 - RNA, 22 nt, Human
cccagccccaccaccugcccaa

SEQ ID NO: 44313 - RNA, 21 nt, Human
ccccacaaccccgcccccagg

SEQ ID NO: 44314 - RNA, 18 nt, Human
cccccacaaccccgcccc

SEQ ID NO: 44315 - RNA, 21 nt, Human
ccccccacaaccccgccccca

SEQ ID NO: 44316 - RNA, 21 nt, Human
ccccccacaaccccgcccccg

SEQ ID NO: 44317 - RNA, 20 nt, Human
ccccgcccccaggagccagg

SEQ ID NO: 44318 - RNA, 23 nt, Human
ccccuggcucccgcgccuucccg

SEQ ID NO: 44319 - RNA, 20 nt, Human
cccgcccccaggagccaggg

SEQ ID NO: 44320 - RNA, 24 nt, Human
cccugccuucaucagacuuuacaa

SEQ ID NO: 44321 - RNA, 18 nt, Human
ccgccgggccgcccaguc

SEQ ID NO: 44322 - RNA, 22 nt, Human
ccucugggccagcuccauggcc

SEQ ID NO: 44323 - RNA, 28 nt, Human
ccucugggccagcuccauggcccagccc

SEQ ID NO: 44324 - RNA, 24 nt, Human
ccugaccccagcccugcuccugac

SEQ ID NO: 44325 - RNA, 20 nt, Human
ccugaccucugaccucaagg

SEQ ID NO: 44326 - RNA, 20 nt, Human
ccugcccaacaccaggaccc

SEQ ID NO: 44327 - RNA, 24 nt, Human
cucaaggaaaagacagaccccacc

SEQ ID NO: 44328 - RNA, 20 nt, Human
cuccauggcccagccccacc

SEQ ID NO: 44329 - RNA, 24 nt, Human
cuccauggcccagccccaccaccu

SEQ ID NO: 44330 - RNA, 21 nt, Human
cuccugaccucugaccucaag

SEQ ID NO: 44331 - RNA, 22 nt, Human
cuccugaccucugaccucaagg

SEQ ID NO: 44332 - RNA, 20 nt, Human
cugaccucaaggaaaagaca

SEQ ID NO: 44333 - RNA, 24 nt, Human
cuggcucccgcgccuucccgcagu

SEQ ID NO: 44334 - RNA, 23 nt, Human
cugucgcacugggccuucaugcc

SEQ ID NO: 44335 - RNA, 18 nt, Human
gaaaagacagaccccacc

SEQ ID NO: 44336 - RNA, 19 nt, Human
gaaaagacagaccccacca

SEQ ID NO: 44337 - RNA, 22 nt, Human
gagcccccgccgggccgcccag

SEQ ID NO: 44338 - RNA, 22 nt, Human
gaggaacuugaggcacaguggu

SEQ ID NO: 44339 - RNA, 18 nt, Human
gcaccagggcccgcggga

SEQ ID NO: 44340 - RNA, 19 nt, Human
gcacugggccuucaugcca

SEQ ID NO: 44341 - RNA, 18 nt, Human
ggaaaagacagaccccac

SEQ ID NO: 44342 - RNA, 20 nt, Human
ggaggacaacugaggugucc

SEQ ID NO: 44343 - RNA, 21 nt, Human
ggaggccccuggcucccgcgc

SEQ ID NO: 44344 - RNA, 21 nt, Human
uagaugaggaacuugaggcac

SEQ ID NO: 44345 - RNA, 19 nt, Human
ucagcccccccacaacccc

SEQ ID NO: 44346 - RNA, 19 nt, Human
uccccagggagcccccgcc

SEQ ID NO: 44347 - RNA, 21 nt, Human
ucccugagugucgcucagccc

SEQ ID NO: 44348 - RNA, 20 nt, Human
ugaccccagcccugcuccug

SEQ ID NO: 44349 - RNA, 24 nt, Human
ugaccccagcccugcuccugaccu

SEQ ID NO: 44350 - RNA, 26 nt, Human
ugaggaacuugaggcacaguggugag

SEQ ID NO: 44351 - RNA, 24 nt, Human
ugaggaggcggaaaggcccagagg

SEQ ID NO: 44352 - RNA, 18 nt, Human
uggcucccgcgccuuccc

SEQ ID NO: 44353 - RNA, 19 nt, Human
ugggguggaggccccuggc

SEQ ID NO: 44354 - RNA, 26 nt, Human
aaaaacacaaaaaugaaccaggcaug

SEQ ID NO: 44355 - RNA, 21 nt, Human
aaaugaccuacugaaaccacc

SEQ ID NO: 44356 - RNA, 22 nt, Human
aaccaaaaaggccaacaccagg

SEQ ID NO: 44357 - RNA, 18 nt, Human
aaccaggcaugguggugc

SEQ ID NO: 44358 - RNA, 25 nt, Human
aacuguacagcccccuucucucccu

SEQ ID NO: 44359 - RNA, 24 nt, Human
aaggcugcagugagcugagaucgg

SEQ ID NO: 44360 - RNA, 24 nt, Human
aaucaccggaacccaggaggucaa

SEQ ID NO: 44361 - RNA, 24 nt, Human
acccaggaggucaaggcugcagug

SEQ ID NO: 44362 - RNA, 24 nt, Human
accccaucucuacuaaaaacacaa

SEQ ID NO: 44363 - RNA, 23 nt, Human
accuguaguuccagcuacuuggg

SEQ ID NO: 44364 - RNA, 24 nt, Human
acugcacucuagccugggugacag

SEQ ID NO: 44365 - RNA, 26 nt, Human
acugcacucuagccugggugacagag

SEQ ID NO: 44366 - RNA, 21 nt, Human
acuucuguauacucugaaacu

SEQ ID NO: 44367 - RNA, 24 nt, Human
agauauccaacacuguauugaaua

SEQ ID NO: 44368 - RNA, 24 nt, Human
agcacuuugggaggccaagguggg

SEQ ID NO: 44369 - RNA, 22 nt, Human
agccaggcaugguggcucaucc

SEQ ID NO: 44370 - RNA, 22 nt, Human
agccugggcaauaugguaaaac

SEQ ID NO: 44371 - RNA, 24 nt, Human
agccugggcaauaugguaaaaccc

SEQ ID NO: 44372 - RNA, 22 nt, Human
agccugggugacagaguaagac

SEQ ID NO: 44373 - RNA, 24 nt, Human
aggcaugguggcucaucccuguaa

SEQ ID NO: 44374 - RNA, 21 nt, Human
aggcaugguggugcacaccug

SEQ ID NO: 44375 - RNA, 24 nt, Human
aggcaugguggugcacaccuguag

SEQ ID NO: 44376 - RNA, 19 nt, Human
aggccaaggugggcgauau

SEQ ID NO: 44377 - RNA, 24 nt, Human
aggucaaggcugcagugagcugag

SEQ ID NO: 44378 - RNA, 20 nt, Human
auauguaugcguauacagcu

SEQ ID NO: 44379 - RNA, 22 nt, Human
aucccagcacuuugggaggcca

SEQ ID NO: 44380 - RNA, 24 nt, Human
aucgcgccacugcacucuagccug

SEQ ID NO: 44381 - RNA, 22 nt, Human
caaaacccaauuucugaacuau

SEQ ID NO: 44382 - RNA, 25 nt, Human
caaggugggcgauauccagaagcca

SEQ ID NO: 44383 - RNA, 24 nt, Human
cacaccuguaguuccagcuacuug

SEQ ID NO: 44384 - RNA, 22 nt, Human
caccaggacccugacuaagggc

SEQ ID NO: 44385 - RNA, 23 nt, Human
caccuguaguuccagcuacuugg

SEQ ID NO: 44386 - RNA, 24 nt, Human
caccuguaguuccagcuacuuggg

SEQ ID NO: 44387 - RNA, 22 nt, Human
cacucuagccugggugacagag

SEQ ID NO: 44388 - RNA, 22 nt, Human
cacucuagccugggugacagag

SEQ ID NO: 44389 - RNA, 19 nt, Human
cacugcacucuagccuggg

SEQ ID NO: 44390 - RNA, 21 nt, Human
cacugcacucuagccugggug

SEQ ID NO: 44391 - RNA, 22 nt, Human
cacugcacucuagccuggguga

SEQ ID NO: 44392 - RNA, 23 nt, Human
cacugcacucuagccugggugac

SEQ ID NO: 44393 - RNA, 24 nt, Human
cacugcacucuagccugggugaca

SEQ ID NO: 44394 - RNA, 25 nt, Human
cacugcacucuagccugggugacag

SEQ ID NO: 44395 - RNA, 18 nt, Human
cagaagccagaagaccag

SEQ ID NO: 44396 - RNA, 21 nt, Human
cagcacuuugggaggccaagg

SEQ ID NO: 44397 - RNA, 24 nt, Human
cagcacuuugggaggccaaggugg

SEQ ID NO: 44398 - RNA, 22 nt, Human
cagccugaaaagagaaaaccaa

SEQ ID NO: 44399 - RNA, 23 nt, Human
cagccugaaaagagaaaaccaaa

SEQ ID NO: 44400 - RNA, 19 nt, Human
caggacccugacuaagggc

SEQ ID NO: 44401 - RNA, 23 nt, Human
caggacccugacuaagggcuuca

SEQ ID NO: 44402 - RNA, 25 nt, Human
caggauaaagugcaauaauaaccau

SEQ ID NO: 44403 - RNA, 23 nt, Human
cauaugaccuacaaaauuauacc

SEQ ID NO: 44404 - RNA, 24 nt, Human
caucccuguaaucccagcacuuug

SEQ ID NO: 44405 - RNA, 22 nt, Human
ccaacaccaggacccugacuaa

SEQ ID NO: 44406 - RNA, 20 nt, Human
ccacugcacucuagccuggg

SEQ ID NO: 44407 - RNA, 20 nt, Human
ccacugcacucuagccuggg

SEQ ID NO: 44408 - RNA, 21 nt, Human
ccacugcacucuagccugggu

SEQ ID NO: 44409 - RNA, 21 nt, Human
ccacugcacucuagccugggu

SEQ ID NO: 44410 - RNA, 24 nt, Human
ccacugcacucuagccugggugac

SEQ ID NO: 44411 - RNA, 21 nt, Human
ccagggaggggucccacuccu

SEQ ID NO: 44412 - RNA, 21 nt, Human
cccccuucucucccucauucc

SEQ ID NO: 44413 - RNA, 21 nt, Human
cccugacuaagggcuucauua

SEQ ID NO: 44414 - RNA, 24 nt, Human
ccugggcaauaugguaaaacccca

SEQ ID NO: 44415 - RNA, 20 nt, Human
ccugggugacagaguaagac

SEQ ID NO: 44416 - RNA, 21 nt, Human
ccuguaguuccagcuacuugg

SEQ ID NO: 44417 - RNA, 24 nt, Human
ccuguauaaccuauauugcaaaac

SEQ ID NO: 44418 - RNA, 24 nt, Human
cguauacagcuuuaaaaacaguuu

SEQ ID NO: 44419 - RNA, 24 nt, Human
cucaucccuguaaucccagcacuu

SEQ ID NO: 44420 - RNA, 19 nt, Human
cugcagugagcugagaucg

SEQ ID NO: 44421 - RNA, 20 nt, Human
cugcagugagcugagaucgc

SEQ ID NO: 44422 - RNA, 22 nt, Human
cugcagugagcugagaucgcgc

SEQ ID NO: 44423 - RNA, 20 nt, Human
gacacaaccguuuaaaauuu

SEQ ID NO: 44424 - RNA, 20 nt, Human
gagaaucaccggaacccagg

SEQ ID NO: 44425 - RNA, 20 nt, Human
gagaucgcgccacugcacuc

SEQ ID NO: 44426 - RNA, 24 nt, Human
gcacucuagccugggugacagagu

SEQ ID NO: 44427 - RNA, 20 nt, Human
gcacuuugggaggccaaggu

SEQ ID NO: 44428 - RNA, 21 nt, Human
gccaacaccaggacccugacu

SEQ ID NO: 44429 - RNA, 24 nt, Human
gccacugcacucuagccuggguga

SEQ ID NO: 44430 - RNA, 20 nt, Human
gcugagaucgcgccacugca

SEQ ID NO: 44431 - RNA, 30 nt, Human
ggaggucaaggcugcagugagcugagaucg

SEQ ID NO: 44432 - RNA, 21 nt, Human
ggcucaucccuguaaucccag

SEQ ID NO: 44433 - RNA, 18 nt, Human
gggaggaugaggcaugag

SEQ ID NO: 44434 - RNA, 24 nt, Human
gguggcucaucccuguaaucccag

SEQ ID NO: 44435 - RNA, 24 nt, Human
gguggugcacaccuguaguuccag

SEQ ID NO: 44436 - RNA, 24 nt, Human
uaaaaacacaaaaaugaaccaggc

SEQ ID NO: 44437 - RNA, 24 nt, Human
uaaaauacagaaauugucaacuga

SEQ ID NO: 44438 - RNA, 23 nt, Human
uaaaccuuauacuugaaaacuaa

SEQ ID NO: 44439 - RNA, 20 nt, Human
uacagcuuuaaaaacaguuu

SEQ ID NO: 44440 - RNA, 24 nt, Human
uacuuaaaccuuauacuugaaaac

SEQ ID NO: 44441 - RNA, 20 nt, Human
uauauauauguaugcguaua

SEQ ID NO: 44442 - RNA, 21 nt, Human
uauccagaagccagaagacca

SEQ ID NO: 44443 - RNA, 25 nt, Human
uaugguaaaaccccaucucuacuaa

SEQ ID NO: 44444 - RNA, 22 nt, Human
ucacugaaccaaaacccaauuu

SEQ ID NO: 44445 - RNA, 22 nt, Human
ucccaacaagacacaaccguuu

SEQ ID NO: 44446 - RNA, 22 nt, Human
ucccacgcaaggcacuuacucc

SEQ ID NO: 44447 - RNA, 22 nt, Human
ucccuguaaucccagcacuuug

SEQ ID NO: 44448 - RNA, 23 nt, Human
ucccuguaaucccagcacuuugg

SEQ ID NO: 44449 - RNA, 24 nt, Human
ucccuguaaucccagcacuuuggg

SEQ ID NO: 44450 - RNA, 24 nt, Human
ucuagccugggugacagaguaaga

SEQ ID NO: 44451 - RNA, 25 nt, Human
ugaaaagagaaaaccaaaaaggcca

SEQ ID NO: 44452 - RNA, 22 nt, Human
ugagcugagaucgcgccacugc

SEQ ID NO: 44453 - RNA, 19 nt, Human
ugaggcaugagaaucaccg

SEQ ID NO: 44454 - RNA, 24 nt, Human
ugaggcaugagaaucaccggaacc

SEQ ID NO: 44455 - RNA, 18 nt, Human
ugcaaaacaauagauuca

SEQ ID NO: 44456 - RNA, 18 nt, Human
uggcucaucccuguaauc

SEQ ID NO: 44457 - RNA, 21 nt, Human
uggcucaucccuguaauccca

SEQ ID NO: 44458 - RNA, 22 nt, Human
uggcucaucccuguaaucccag

SEQ ID NO: 44459 - RNA, 24 nt, Human
uggcucaucccuguaaucccagca

SEQ ID NO: 44460 - RNA, 19 nt, Human
ugggaggccaaggugggcg

SEQ ID NO: 44461 - RNA, 22 nt, Human
ugggcaauaugguaaaacccca

SEQ ID NO: 44462 - RNA, 19 nt, Human
uggugcacaccuguaguuc

SEQ ID NO: 44463 - RNA, 22 nt, Human
uggugcacaccuguaguuccag

SEQ ID NO: 44464 - RNA, 24 nt, Human
ugguggcucaucccuguaauccca

SEQ ID NO: 44465 - RNA, 23 nt, Human
ugguggugcacaccuguaguucc

SEQ ID NO: 44466 - RNA, 24 nt, Human
ugguggugcacaccuguaguucca

SEQ ID NO: 44467 - RNA, 24 nt, Human
uguaacaaauauuucccugaugcc

SEQ ID NO: 44468 - RNA, 22 nt, Human
uuacagcagugacaccagggag

SEQ ID NO: 44469 - RNA, 22 nt, Human
uuggaaaaaaauacaggugcuu

SEQ ID NO: 44470 - RNA, 23 nt, Human
uuuaaaaugaccuacugaaacca

SEQ ID NO: 44471 - RNA, 20 nt, Human
uuucccugaugccacaagau

SEQ ID NO: 44472 - RNA, 18 nt, Human
acgcccgcguccugcacg

SEQ ID NO: 44473 - RNA, 19 nt, Human
aggcacagugcugggaaca

SEQ ID NO: 44474 - RNA, 23 nt, Human
cgggacaaaccagggccuuaagg

SEQ ID NO: 44475 - RNA, 19 nt, Human
uaaggaaaggggcuucggc

SEQ ID NO: 44476 - RNA, 23 nt, Human
uaagugcucuugagagcaggcac

SEQ ID NO: 44477 - RNA, 21 nt, Human
ugacccagcucuggcguccug

SEQ ID NO: 44478 - RNA, 18 nt, Human
ugagagcaggcacagugc

SEQ ID NO: 44479 - RNA, 18 nt, Human
ugagagcaggcacagugc

SEQ ID NO: 44480 - RNA, 20 nt, Human
aaaaaaugaaacagcuuauc

SEQ ID NO: 44481 - RNA, 25 nt, Human
agaaaauaauaaaaaaugaaacagc

SEQ ID NO: 44482 - RNA, 21 nt, Human
agcggccuccuccccaacccc

SEQ ID NO: 44483 - RNA, 24 nt, Human
cauagaaaauaauaaaaaaugaaa

SEQ ID NO: 44484 - RNA, 19 nt, Human
ccccaaccccgcacccuag

SEQ ID NO: 44485 - RNA, 18 nt, Human
ccuccccaaccccgcacc

SEQ ID NO: 44486 - RNA, 18 nt, Human
ccuccuccccaaccccgc

SEQ ID NO: 44487 - RNA, 21 nt, Human
cguagacuagcggccuccucc

SEQ ID NO: 44488 - RNA, 18 nt, Human
cuagcggccuccucccca

SEQ ID NO: 44489 - RNA, 23 nt, Human
cuagcggccuccuccccaacccc

SEQ ID NO: 44490 - RNA, 21 nt, Human
cuccccaaccccgcacccuag

SEQ ID NO: 44491 - RNA, 21 nt, Human
gccuccuccccaaccccgcac

SEQ ID NO: 44492 - RNA, 20 nt, Human
gcggccuccuccccaacccc

SEQ ID NO: 44493 - RNA, 18 nt, Human
ggccuccuccccaacccc

SEQ ID NO: 44494 - RNA, 26 nt, Human
uaagcugacccacaguagucacacuu

SEQ ID NO: 44495 - RNA, 23 nt, Human
uagacuagcggccuccuccccaa

SEQ ID NO: 44496 - RNA, 19 nt, Human
ucacauaggguugucuccu

SEQ ID NO: 44497 - RNA, 20 nt, Human
uccuccccaaccccgcaccc

SEQ ID NO: 44498 - RNA, 20 nt, Human
ucuccuuaaauagcagaggu

SEQ ID NO: 44499 - RNA, 18 nt, Human
ugggauuucaucauuuug

SEQ ID NO: 44500 - RNA, 19 nt, Human
uucuggucacauaggguug

SEQ ID NO: 44501 - RNA, 21 nt, Human
cugccgccgucugcccugcgc

SEQ ID NO: 44502 - RNA, 20 nt, Human
cuucuccugccgccgucugc

SEQ ID NO: 44503 - RNA, 22 nt, Human
uaaaguaaaguacaagcuguaa

SEQ ID NO: 44504 - RNA, 24 nt, Human
uaaaugcaauugucuuguaccuug

SEQ ID NO: 44505 - RNA, 18 nt, Human
uacacauuaaaguaaagu

SEQ ID NO: 44506 - RNA, 23 nt, Human
ucuccugccgccgucugcccugc

SEQ ID NO: 44507 - RNA, 24 nt, Human
uuacacauuaaaguaaaguacaag

SEQ ID NO: 44508 - RNA, 22 nt, Human
uuaguuuaaaaagaaauugagg

SEQ ID NO: 44509 - RNA, 23 nt, Human
uugguccucugauuucacauauu

SEQ ID NO: 44510 - RNA, 19 nt, Human
aaauaacaaggccagaaaa

SEQ ID NO: 44511 - RNA, 21 nt, Human
aagcaggaaauacauuuaaaa

SEQ ID NO: 44512 - RNA, 29 nt, Human
aagcaggaaauacauuuaaaagggacccc

SEQ ID NO: 44513 - RNA, 24 nt, Human
aaggcaaaaaaaaaauaugaucaa

SEQ ID NO: 44514 - RNA, 18 nt, Human
aauaacuaaaaugacauu

SEQ ID NO: 44515 - RNA, 22 nt, Human
acaaggcaaaaaaaaaauauga

SEQ ID NO: 44516 - RNA, 19 nt, Human
acugcauugcagcuuaaaa

SEQ ID NO: 44517 - RNA, 25 nt, Human
agccaguccucuggcuagaggccca

SEQ ID NO: 44518 - RNA, 19 nt, Human
aggcaaaaaaaaaauauga

SEQ ID NO: 44519 - RNA, 22 nt, Human
aguccucuggcuagaggcccag

SEQ ID NO: 44520 - RNA, 20 nt, Human
auaagauuuuaacugccaac

SEQ ID NO: 44521 - RNA, 22 nt, Human
caggauggaaaccagcuccuac

SEQ ID NO: 44522 - RNA, 18 nt, Human
ccccgggcagcagcgccg

SEQ ID NO: 44523 - RNA, 18 nt, Human
cgugacuacugcauugca

SEQ ID NO: 44524 - RNA, 19 nt, Human
cugaagccgggagccaguc

SEQ ID NO: 44525 - RNA, 22 nt, Human
gacccaacaccuccagcucucg

SEQ ID NO: 44526 - RNA, 19 nt, Human
gauggaaaccagcuccuac

SEQ ID NO: 44527 - RNA, 20 nt, Human
ggcuggaggugugugccgug

SEQ ID NO: 44528 - RNA, 24 nt, Human
gggcagcagcgccgggcucgaggc

SEQ ID NO: 44529 - RNA, 23 nt, Human
gggccgaggcugagcguuuugga

SEQ ID NO: 44530 - RNA, 18 nt, Human
ggggggccgaggcugagc

SEQ ID NO: 44531 - RNA, 25 nt, Human
uaaaacaugcuuuggucaguaaauu

SEQ ID NO: 44532 - RNA, 27 nt, Human
uaaaauaauauuuuauacuccugugca

SEQ ID NO: 44533 - RNA, 22 nt, Human
uaacaauaccugacuacauggu

SEQ ID NO: 44534 - RNA, 24 nt, Human
uaacaauaccugacuacaugguua

SEQ ID NO: 44535 - RNA, 18 nt, Human
uaacacagauucauuugu

SEQ ID NO: 44536 - RNA, 23 nt, Human
uaaguaaacuuuaaauacauuga

SEQ ID NO: 44537 - RNA, 22 nt, Human
uacugcauugcagcuuaaaaca

SEQ ID NO: 44538 - RNA, 18 nt, Human
uagaauguccaguagcau

SEQ ID NO: 44539 - RNA, 20 nt, Human
uagucuauauucuuuucuca

SEQ ID NO: 44540 - RNA, 23 nt, Human
uaucauugcucuccgaauuaaaa

SEQ ID NO: 44541 - RNA, 22 nt, Human
ucaguagucuauauucuuuucu

SEQ ID NO: 44542 - RNA, 18 nt, Human
ucccagguccaaggcugu

SEQ ID NO: 44543 - RNA, 19 nt, Human
ucccagguccaaggcuguc

SEQ ID NO: 44544 - RNA, 21 nt, Human
ucccgacccaacaccuccagc

SEQ ID NO: 44545 - RNA, 23 nt, Human
uccgaauuaaaacuaaacuacaa

SEQ ID NO: 44546 - RNA, 19 nt, Human
ucuggcuagaggcccagag

SEQ ID NO: 44547 - RNA, 19 nt, Human
ugacaaggcaaaaaaaaaa

SEQ ID NO: 44548 - RNA, 24 nt, Human
ugacaaggcaaaaaaaaaauauga

SEQ ID NO: 44549 - RNA, 18 nt, Human
ugcacugauuaucauugc

SEQ ID NO: 44550 - RNA, 22 nt, Human
ugccaggauggaaaccagcucc

SEQ ID NO: 44551 - RNA, 18 nt, Human
ugcuagaauguccaguag

SEQ ID NO: 44552 - RNA, 23 nt, Human
uggcagggcucagagcgauaagg

SEQ ID NO: 44553 - RNA, 21 nt, Human
ugucagacuaguugugguuag

SEQ ID NO: 44554 - RNA, 20 nt, Human
uguggggggccgaggcugag

SEQ ID NO: 44555 - RNA, 23 nt, Human
uguggggggccgaggcugagcgu

SEQ ID NO: 44556 - RNA, 20 nt, Human
uguggucauaagaaaaauaa

SEQ ID NO: 44557 - RNA, 27 nt, Human
uuuagaauuuccugaccuuaaguaaac

SEQ ID NO: 44558 - RNA, 24 nt, Human
aaaaaccaaagcaaaccucagaac

SEQ ID NO: 44559 - RNA, 24 nt, Human
aaaacaaaacaaaucuccaucgga

SEQ ID NO: 44560 - RNA, 19 nt, Human
aaaagcauaaaaugaagca

SEQ ID NO: 44561 - RNA, 21 nt, Human
aaaaggggguuuuugggcagg

SEQ ID NO: 44562 - RNA, 22 nt, Human
aaacaaaacaaaucuccaucgg

SEQ ID NO: 44563 - RNA, 22 nt, Human
aaacauaaaagccccccuaccc

SEQ ID NO: 44564 - RNA, 21 nt, Human
aaaccaaagcaaaccucagaa

SEQ ID NO: 44565 - RNA, 28 nt, Human
aaaugccaaagaaaauggaaaaaccaaa

SEQ ID NO: 44566 - RNA, 20 nt, Human
aacacaggcgucccccaccc

SEQ ID NO: 44567 - RNA, 22 nt, Human
aagaaaauggaaaaaccaaagc

SEQ ID NO: 44568 - RNA, 23 nt, Human
aagcaaaccucagaacaucaaaa

SEQ ID NO: 44569 - RNA, 27 nt, Human
aagcaaaccucagaacaucaaaacuaa

SEQ ID NO: 44570 - RNA, 27 nt, Human
aagcauaaaaugaagcaaaagggaccc

SEQ ID NO: 44571 - RNA, 22 nt, Human
aaggcaagcaucgcgccagaug

SEQ ID NO: 44572 - RNA, 24 nt, Human
acaaaacaaaucuccaucggacaa

SEQ ID NO: 44573 - RNA, 21 nt, Human
acacaagaacugaauguagca

SEQ ID NO: 44574 - RNA, 19 nt, Human
acagggagagaagaacgac

SEQ ID NO: 44575 - RNA, 22 nt, Human
acagggagagaagaacgacaug

SEQ ID NO: 44576 - RNA, 23 nt, Human
agagaacgcaaggcaagcaucgc

SEQ ID NO: 44577 - RNA, 22 nt, Human
agcuugcuguuccuuguccugg

SEQ ID NO: 44578 - RNA, 20 nt, Human
aggcgucccccacccgcugg

SEQ ID NO: 44579 - RNA, 24 nt, Human
agguuggcgcgggucaccuuuggc

SEQ ID NO: 44580 - RNA, 19 nt, Human
aguguggacacuggaaacc

SEQ ID NO: 44581 - RNA, 20 nt, Human
auaaaaagaaucagacugua

SEQ ID NO: 44582 - RNA, 18 nt, Human
aucggacaaacauaaaag

SEQ ID NO: 44583 - RNA, 18 nt, Human
caaacauaaaagcccccc

SEQ ID NO: 44584 - RNA, 20 nt, Human
caccuuuggcgccgaagccc

SEQ ID NO: 44585 - RNA, 21 nt, Human
caccuuuggcgccgaagcccc

SEQ ID NO: 44586 - RNA, 24 nt, Human
cacggcggggcccaaggaugcguc

SEQ ID NO: 44587 - RNA, 19 nt, Human
cagagugugacucaucucu

SEQ ID NO: 44588 - RNA, 18 nt, Human
cagccgcacgcugacagg

SEQ ID NO: 44589 - RNA, 18 nt, Human
cagcuuggggaaaagggg

SEQ ID NO: 44590 - RNA, 23 nt, Human
cauaaaagccccccuaccccaga

SEQ ID NO: 44591 - RNA, 18 nt, Human
ccauucaaacucuagcuc

SEQ ID NO: 44592 - RNA, 18 nt, Human
cccaugggcagcuugggg

SEQ ID NO: 44593 - RNA, 18 nt, Human
ccccaugggcagcuuggg

SEQ ID NO: 44594 - RNA, 21 nt, Human
ccccccuaccccagauaaaaa

SEQ ID NO: 44595 - RNA, 19 nt, Human
ccccuaccccagauaaaaa

SEQ ID NO: 44596 - RNA, 18 nt, Human
cgccgaagccccaugggc

SEQ ID NO: 44597 - RNA, 20 nt, Human
cgccgaagccccaugggcag

SEQ ID NO: 44598 - RNA, 21 nt, Human
cggagcgaggucuaggcagcu

SEQ ID NO: 44599 - RNA, 19 nt, Human
cuggucccacugcacggca

SEQ ID NO: 44600 - RNA, 30 nt, Human
gacaugggcaccaugggugaacacaggcgu

SEQ ID NO: 44601 - RNA, 20 nt, Human
gaccuggaaucuggucccac

SEQ ID NO: 44602 - RNA, 22 nt, Human
gcaaaccucagaacaucaaaac

SEQ ID NO: 44603 - RNA, 19 nt, Human
gcagcuuggggaaaagggg

SEQ ID NO: 44604 - RNA, 20 nt, Human
gcagcuuggggaaaaggggg

SEQ ID NO: 44605 - RNA, 23 nt, Human
gccagaugcugugaguuuauccu

SEQ ID NO: 44606 - RNA, 20 nt, Human
gcugugaguuuauccugaga

SEQ ID NO: 44607 - RNA, 25 nt, Human
ggagggagugcugggugacucgagg

SEQ ID NO: 44608 - RNA, 22 nt, Human
ggagugcugggugacucgaggg

SEQ ID NO: 44609 - RNA, 20 nt, Human
ggagugucauguacaagaca

SEQ ID NO: 44610 - RNA, 19 nt, Human
gggaaaaggggguuuuugg

SEQ ID NO: 44611 - RNA, 20 nt, Human
ggguuuuugggcagguuaag

SEQ ID NO: 44612 - RNA, 21 nt, Human
guuccuuguccugggucuugg

SEQ ID NO: 44613 - RNA, 22 nt, Human
uaaaaaagcauaaaaugaagca

SEQ ID NO: 44614 - RNA, 21 nt, Human
uaaauaaaugccaaagaaaau

SEQ ID NO: 44615 - RNA, 18 nt, Human
uaagagggacgcacggcg

SEQ ID NO: 44616 - RNA, 22 nt, Human
uacaagacagacguggaggugg

SEQ ID NO: 44617 - RNA, 18 nt, Human
ucccaguccucgggcucu

SEQ ID NO: 44618 - RNA, 24 nt, Human
uccucgggcucugcuuaaaccuug

SEQ ID NO: 44619 - RNA, 20 nt, Human
ucgggcucugcuuaaaccuu

SEQ ID NO: 44620 - RNA, 21 nt, Human
ugaacacaggcgucccccacc

SEQ ID NO: 44621 - RNA, 18 nt, Human
ugaagcaaaacaaaacaa

SEQ ID NO: 44622 - RNA, 20 nt, Human
ugcaggugcuuuauacaucu

SEQ ID NO: 44623 - RNA, 24 nt, Human
ugcuuuauacaucuggcagugaga

SEQ ID NO: 44624 - RNA, 19 nt, Human
ugggccucaaggucuguuu

SEQ ID NO: 44625 - RNA, 20 nt, Human
uguacaagacagacguggag

SEQ ID NO: 44626 - RNA, 24 nt, Human
ugugacucaucucuccuaagaggg

SEQ ID NO: 44627 - RNA, 18 nt, Human
uguuggacguggccggag

SEQ ID NO: 44628 - RNA, 22 nt, Human
uguuuggagggagugcugggug

SEQ ID NO: 44629 - RNA, 18 nt, Human
uuggcgccgaagccccau

SEQ ID NO: 44630 - RNA, 23 nt, Human
uuuuuuuuuuuuuuuuccacaag

SEQ ID NO: 44631 - RNA, 24 nt, Human
aaagauccuacagccuuacucucc

SEQ ID NO: 44632 - RNA, 25 nt, Human
aacucuuuauacaggcgaaggcauu

SEQ ID NO: 44633 - RNA, 21 nt, Human
aagacuccuuccuuaccacag

SEQ ID NO: 44634 - RNA, 21 nt, Human
aagccggcagccggcggcggg

SEQ ID NO: 44635 - RNA, 20 nt, Human
aauguaaaaagaaugggaua

SEQ ID NO: 44636 - RNA, 20 nt, Human
aauuuauggacguggcccuc

SEQ ID NO: 44637 - RNA, 22 nt, Human
acacagcuagggaaggaaggcc

SEQ ID NO: 44638 - RNA, 22 nt, Human
acaguacagacaccaggggaga

SEQ ID NO: 44639 - RNA, 22 nt, Human
acagugcaaagguuacaaugcg

SEQ ID NO: 44640 - RNA, 21 nt, Human
acccaguuuauuagaccagag

SEQ ID NO: 44641 - RNA, 20 nt, Human
accuccauccccuggguggg

SEQ ID NO: 44642 - RNA, 21 nt, Human
agaaagaggcagagcuuguga

SEQ ID NO: 44643 - RNA, 21 nt, Human
agaccaagacacagcuaggga

SEQ ID NO: 44644 - RNA, 24 nt, Human
agagcccugcagggagcgccccgc

SEQ ID NO: 44645 - RNA, 21 nt, Human
agaggcagagagaggacucua

SEQ ID NO: 44646 - RNA, 22 nt, Human
agaggcagagagaggacucuau

SEQ ID NO: 44647 - RNA, 22 nt, Human
agaggcaugcgucacccagagc

SEQ ID NO: 44648 - RNA, 24 nt, Human
agaggcaugcgucacccagagccc

SEQ ID NO: 44649 - RNA, 26 nt, Human
agagggcaaugggauaggaggagcag

SEQ ID NO: 44650 - RNA, 22 nt, Human
agagggguuggggcucaggccu

SEQ ID NO: 44651 - RNA, 19 nt, Human
agaguuccauaagaaaauu

SEQ ID NO: 44652 - RNA, 22 nt, Human
agauuccaaagauccuacagcc

SEQ ID NO: 44653 - RNA, 20 nt, Human
agcuaggggaggcagcaugg

SEQ ID NO: 44654 - RNA, 23 nt, Human
agcugggggcccccucgcucucc

SEQ ID NO: 44655 - RNA, 20 nt, Human
aggcauucagagaccaggga

SEQ ID NO: 44656 - RNA, 18 nt, Human
aggccagaaagaggcaga

SEQ ID NO: 44657 - RNA, 20 nt, Human
aggggaugggguggagacag

SEQ ID NO: 44658 - RNA, 18 nt, Human
aggggcagccugaggucc

SEQ ID NO: 44659 - RNA, 20 nt, Human
aggggcucauggcccggggc

SEQ ID NO: 44660 - RNA, 18 nt, Human
agggggcugggcacccag

SEQ ID NO: 44661 - RNA, 21 nt, Human
agggugagacaacagcagagc

SEQ ID NO: 44662 - RNA, 21 nt, Human
aggugaggaaagggggcuggg

SEQ ID NO: 44663 - RNA, 18 nt, Human
aguacagacaccagggga

SEQ ID NO: 44664 - RNA, 22 nt, Human
auagcaauauagagucuguauc

SEQ ID NO: 44665 - RNA, 21 nt, Human
aucaggugaggaaagggggcu

SEQ ID NO: 44666 - RNA, 19 nt, Human
auggaggagagaggggcag

SEQ ID NO: 44667 - RNA, 18 nt, Human
augggauaggaggagcag

SEQ ID NO: 44668 - RNA, 19 nt, Human
caccaggggagagagucca

SEQ ID NO: 44669 - RNA, 18 nt, Human
cacccagagcccugccug

SEQ ID NO: 44670 - RNA, 24 nt, Human
cacccagagcccugccugcuguuc

SEQ ID NO: 44671 - RNA, 28 nt, Human
cagaccccagagaucccuuccaccccuu

SEQ ID NO: 44672 - RNA, 21 nt, Human
cagagaucccuuccaccccuc

SEQ ID NO: 44673 - RNA, 20 nt, Human
cagagcccugccugcuguuc

SEQ ID NO: 44674 - RNA, 23 nt, Human
cagcaucccacugccccaacuuc

SEQ ID NO: 44675 - RNA, 23 nt, Human
cagccggcggcggguccuggggc

SEQ ID NO: 44676 - RNA, 23 nt, Human
cagcuguggggugggggugaacu

SEQ ID NO: 44677 - RNA, 23 nt, Human
cagcuuccuuugucgccacugag

SEQ ID NO: 44678 - RNA, 21 nt, Human
caggagucgccaauccccagc

SEQ ID NO: 44679 - RNA, 22 nt, Human
caggagucgccaauccccagcu

SEQ ID NO: 44680 - RNA, 21 nt, Human
caggguagaccuccauccccu

SEQ ID NO: 44681 - RNA, 23 nt, Human
ccaaacccaccucaccagaaaau

SEQ ID NO: 44682 - RNA, 22 nt, Human
ccaagagauuccaaagauccua

SEQ ID NO: 44683 - RNA, 18 nt, Human
ccagaccccagagauccc

SEQ ID NO: 44684 - RNA, 23 nt, Human
ccaggccaaugcagcugcucaca

SEQ ID NO: 44685 - RNA, 19 nt, Human
ccagggccgcaucuugucc

SEQ ID NO: 44686 - RNA, 21 nt, Human
cccaaacccaccucaccagaa

SEQ ID NO: 44687 - RNA, 22 nt, Human
cccaaacccaccucaccagaaa

SEQ ID NO: 44688 - RNA, 22 nt, Human
cccagagaucccuuccaccccc

SEQ ID NO: 44689 - RNA, 25 nt, Human
cccagagaucccuuccaccccucac

SEQ ID NO: 44690 - RNA, 18 nt, Human
cccagggcagaugugagg

SEQ ID NO: 44691 - RNA, 19 nt, Human
ccccacacuagcccucccc

SEQ ID NO: 44692 - RNA, 22 nt, Human
ccccacacuagcccucccccuu

SEQ ID NO: 44693 - RNA, 20 nt, Human
ccccagagaucccuuccacc

SEQ ID NO: 44694 - RNA, 18 nt, Human
cccgcgcgcgcuggcucg

SEQ ID NO: 44695 - RNA, 18 nt, Human
cccggccccgcucggcuc

SEQ ID NO: 44696 - RNA, 23 nt, Human
ccggccccgcucggcuccgaucu

SEQ ID NO: 44697 - RNA, 26 nt, Human
ccucaccagaaaauaaaagugguggg

SEQ ID NO: 44698 - RNA, 20 nt, Human
ccucccaaacccaccucacc

SEQ ID NO: 44699 - RNA, 21 nt, Human
cgcggaggggcucauggcccg

SEQ ID NO: 44700 - RNA, 23 nt, Human
cuaguccuccccaucuaggccuu

SEQ ID NO: 44701 - RNA, 20 nt, Human
cuccaggccaaugcagcugc

SEQ ID NO: 44702 - RNA, 22 nt, Human
cuccauccccugggugggggcu

SEQ ID NO: 44703 - RNA, 21 nt, Human
cucccucccccacacuagccc

SEQ ID NO: 44704 - RNA, 21 nt, Human
cugaggaccucagcuucugcc

SEQ ID NO: 44705 - RNA, 24 nt, Human
cugggagcuaggggaggcagcaug

SEQ ID NO: 44706 - RNA, 18 nt, Human
cugguggagggagggggg

SEQ ID NO: 44707 - RNA, 18 nt, Human
cuguggggugggggugaa

SEQ ID NO: 44708 - RNA, 21 nt, Human
cuucaggagucgccaaucccc

SEQ ID NO: 44709 - RNA, 20 nt, Human
cuucugccugucagcauccc

SEQ ID NO: 44710 - RNA, 18 nt, Human
cuuggcuuaguguccagg

SEQ ID NO: 44711 - RNA, 20 nt, Human
cuuguccccauuaccacuuc

SEQ ID NO: 44712 - RNA, 21 nt, Human
cuuuccucccaaacccaccuc

SEQ ID NO: 44713 - RNA, 21 nt, Human
gaagagggguuggggcucagg

SEQ ID NO: 44714 - RNA, 21 nt, Human
gaaggcauucagagaccaggg

SEQ ID NO: 44715 - RNA, 24 nt, Human
gaaugggauagaggcagagagagg

SEQ ID NO: 44716 - RNA, 24 nt, Human
gagaucccuuccaccccucacugg

SEQ ID NO: 44717 - RNA, 18 nt, Human
gagcccgcggccgccgcg

SEQ ID NO: 44718 - RNA, 23 nt, Human
gauccuacagccuuacucuccag

SEQ ID NO: 44719 - RNA, 18 nt, Human
gccaauccccagcucccu

SEQ ID NO: 44720 - RNA, 22 nt, Human
gccuggaaggagugucuggugg

SEQ ID NO: 44721 - RNA, 20 nt, Human
ggaaggaaggccugaagagg

SEQ ID NO: 44722 - RNA, 24 nt, Human
ggaaggaaggccugaagagggguu

SEQ ID NO: 44723 - RNA, 21 nt, Human
ggacgcuaaccagccaggucu

SEQ ID NO: 44724 - RNA, 23 nt, Human
ggcccccucgcucuccuaguccu

SEQ ID NO: 44725 - RNA, 23 nt, Human
ggccuggaaggagugucuggugg

SEQ ID NO: 44726 - RNA, 21 nt, Human
gggaaggaaggccugaagagg

SEQ ID NO: 44727 - RNA, 18 nt, Human
gggagaaugguucucaga

SEQ ID NO: 44728 - RNA, 20 nt, Human
ggggaugggguggagacaga

SEQ ID NO: 44729 - RNA, 23 nt, Human
ggggcucaggccuggaaggagug

SEQ ID NO: 44730 - RNA, 23 nt, Human
gggguggagacagacagggcugg

SEQ ID NO: 44731 - RNA, 18 nt, Human
gguggaacuugggguggg

SEQ ID NO: 44732 - RNA, 19 nt, Human
gucugguggagggaggggg

SEQ ID NO: 44733 - RNA, 18 nt, Human
uaaaaguggugggcuugg

SEQ ID NO: 44734 - RNA, 18 nt, Human
uacagcaccagggccgca

SEQ ID NO: 44735 - RNA, 25 nt, Human
uagaagguggaacuuggggugggag

SEQ ID NO: 44736 - RNA, 23 nt, Human
uagaggcagagagaggacucuau

SEQ ID NO: 44737 - RNA, 18 nt, Human
uagauagacagaauucag

SEQ ID NO: 44738 - RNA, 19 nt, Human
ucaacuccuccucuaggcc

SEQ ID NO: 44739 - RNA, 24 nt, Human
ucagagaccagggagggaguagaa

SEQ ID NO: 44740 - RNA, 26 nt, Human
uccacauggugugagagaguggggcu

SEQ ID NO: 44741 - RNA, 23 nt, Human
ucccaaacccaccucaccagaaa

SEQ ID NO: 44742 - RNA, 22 nt, Human
uccgggagagggaccagugagg

SEQ ID NO: 44743 - RNA, 22 nt, Human
uccuggggcgcuggaccggugg

SEQ ID NO: 44744 - RNA, 21 nt, Human
ucucuacagcaaccccuuccc

SEQ ID NO: 44745 - RNA, 18 nt, Human
ugaaguuggggaagagga

SEQ ID NO: 44746 - RNA, 19 nt, Human
ugagacaacagcagagcuu

SEQ ID NO: 44747 - RNA, 22 nt, Human
ugagagaagcaaaugaaguugg

SEQ ID NO: 44748 - RNA, 20 nt, Human
ugaggaagggcugccucuug

SEQ ID NO: 44749 - RNA, 24 nt, Human
ugaggaggcagcugggggcccccu

SEQ ID NO: 44750 - RNA, 20 nt, Human
ugcccggguugggggagagg

SEQ ID NO: 44751 - RNA, 21 nt, Human
ugcccggguugggggagaggg

SEQ ID NO: 44752 - RNA, 19 nt, Human
uggaacuuggggugggaga

SEQ ID NO: 44753 - RNA, 18 nt, Human
uggaggagagaggggcag

SEQ ID NO: 44754 - RNA, 18 nt, Human
ugggaagggccuuuggug

SEQ ID NO: 44755 - RNA, 21 nt, Human
ugggagaaugguucucagaga

SEQ ID NO: 44756 - RNA, 18 nt, Human
ugggauagaggcagagag

SEQ ID NO: 44757 - RNA, 20 nt, Human
ugggauagaggcagagagag

SEQ ID NO: 44758 - RNA, 21 nt, Human
uggggaagccucccuccccca

SEQ ID NO: 44759 - RNA, 18 nt, Human
uggggagguaugaucucu

SEQ ID NO: 44760 - RNA, 22 nt, Human
uggggccaaauuccagacccca

SEQ ID NO: 44761 - RNA, 26 nt, Human
ugggggcccccucgcucugggacacc

SEQ ID NO: 44762 - RNA, 22 nt, Human
uggggugggagaaugguucuca

SEQ ID NO: 44763 - RNA, 21 nt, Human
uggggugggagaaugguucuu

SEQ ID NO: 44764 - RNA, 22 nt, Human
uggguaucaggugaggaaaggg

SEQ ID NO: 44765 - RNA, 21 nt, Human
ugggugggggcuaucucuaca

SEQ ID NO: 44766 - RNA, 24 nt, Human
uggguuuggggacagucacugggc

SEQ ID NO: 44767 - RNA, 21 nt, Human
ugguggagggagggggggcag

SEQ ID NO: 44768 - RNA, 24 nt, Human
ugguggagggagggggggcaggcc

SEQ ID NO: 44769 - RNA, 23 nt, Human
ugucagcaucccacugccccaac

SEQ ID NO: 44770 - RNA, 19 nt, Human
ugucagcugggcagagggc

SEQ ID NO: 44771 - RNA, 22 nt, Human
uuaaugggauggugaggaaggg

SEQ ID NO: 44772 - RNA, 20 nt, Human
uuccagaccccagagauccc

SEQ ID NO: 44773 - RNA, 18 nt, Human
uucccuggggaugccacu

SEQ ID NO: 44774 - RNA, 25 nt, Human
uuggggaagaggaugugggagaguu

SEQ ID NO: 44775 - RNA, 19 nt, Human
uuuuuugguugaaacccag

SEQ ID NO: 44776 - RNA, 21 nt, Human
cagcugcccaccaguguuccc

SEQ ID NO: 44777 - RNA, 21 nt, Human
caucccagucucuggugggag

SEQ ID NO: 44778 - RNA, 20 nt, Human
ccaccaguguucccauccca

SEQ ID NO: 44779 - RNA, 23 nt, Human
cccaucccagucucuggugggag

SEQ ID NO: 44780 - RNA, 23 nt, Human
cuggugggaggcccuugggcagg

SEQ ID NO: 44781 - RNA, 20 nt, Human
gggaggcccuugggcagggc

SEQ ID NO: 44782 - RNA, 18 nt, Human
uguucccaucccagucuc

SEQ ID NO: 44783 - RNA, 23 nt, Human
aaacagaacagaagucaaaucca

SEQ ID NO: 44784 - RNA, 24 nt, Human
aaacagaacagaagucaaauccag

SEQ ID NO: 44785 - RNA, 22 nt, Human
aaauaaauacugaaagcaaugu

SEQ ID NO: 44786 - RNA, 19 nt, Human
aaauacugaaagcaauguc

SEQ ID NO: 44787 - RNA, 22 nt, Human
aagaaacagaacagaagucaaa

SEQ ID NO: 44788 - RNA, 21 nt, Human
aagaugcucucuccuuggcca

SEQ ID NO: 44789 - RNA, 19 nt, Human
aauccuuauuaagaaacag

SEQ ID NO: 44790 - RNA, 23 nt, Human
aauccuuauuaagaaacagaaca

SEQ ID NO: 44791 - RNA, 22 nt, Human
acaauuuuuuuucugaacagag

SEQ ID NO: 44792 - RNA, 18 nt, Human
accuuggaagugaaaaag

SEQ ID NO: 44793 - RNA, 18 nt, Human
agaaauaaauacugaaag

SEQ ID NO: 44794 - RNA, 23 nt, Human
agacagaaauaaauacugaaagc

SEQ ID NO: 44795 - RNA, 21 nt, Human
aggcaugcucugggaguucac

SEQ ID NO: 44796 - RNA, 20 nt, Human
auccauccauauuccauaca

SEQ ID NO: 44797 - RNA, 21 nt, Human
augcaugccauucucaauccu

SEQ ID NO: 44798 - RNA, 19 nt, Human
caccucaagaggaaaaaca

SEQ ID NO: 44799 - RNA, 21 nt, Human
cacugugagcaaauacaaaag

SEQ ID NO: 44800 - RNA, 18 nt, Human
cagaaauaaauacugaaa

SEQ ID NO: 44801 - RNA, 19 nt, Human
caguagaaaugaguuucua

SEQ ID NO: 44802 - RNA, 23 nt, Human
cauacaagauccaacacuugcuc

SEQ ID NO: 44803 - RNA, 18 nt, Human
ccacugaaugacuuuccc

SEQ ID NO: 44804 - RNA, 18 nt, Human
ccugugagccaagaucac

SEQ ID NO: 44805 - RNA, 19 nt, Human
cucaagaggaaaaacauag

SEQ ID NO: 44806 - RNA, 20 nt, Human
cucagcacugcucaaacacu

SEQ ID NO: 44807 - RNA, 19 nt, Human
cuuucccuagacuaaaacc

SEQ ID NO: 44808 - RNA, 20 nt, Human
cuuugugcucagcacugcuc

SEQ ID NO: 44809 - RNA, 20 nt, Human
gaggccccuggcucuaguuu

SEQ ID NO: 44810 - RNA, 23 nt, Human
gugagaccaaauacacacuuucc

SEQ ID NO: 44811 - RNA, 21 nt, Human
guuagagaacaguagaaauga

SEQ ID NO: 44812 - RNA, 20 nt, Human
guugucuuuggacaauuuuu

SEQ ID NO: 44813 - RNA, 22 nt, Human
uaagaaacagaacagaagucaa

SEQ ID NO: 44814 - RNA, 21 nt, Human
uaauauacucuaauacaaaau

SEQ ID NO: 44815 - RNA, 25 nt, Human
uacaacaaaaucaccucaagaggaa

SEQ ID NO: 44816 - RNA, 28 nt, Human
uacaacaaaaucaccucaagaggaaaaa

SEQ ID NO: 44817 - RNA, 21 nt, Human
uacauacaacaaaaucaccuc

SEQ ID NO: 44818 - RNA, 21 nt, Human
ucacuguaggcaaaucaccau

SEQ ID NO: 44819 - RNA, 24 nt, Human
uccauccauauuccauacaagauc

SEQ ID NO: 44820 - RNA, 18 nt, Human
uccccugugagccaagau

SEQ ID NO: 44821 - RNA, 18 nt, Human
ucccuggauucuucucuc

SEQ ID NO: 44822 - RNA, 20 nt, Human
ucucuuuagaccugucaccu

SEQ ID NO: 44823 - RNA, 18 nt, Human
ugaaaaagcaauguccuc

SEQ ID NO: 44824 - RNA, 18 nt, Human
ugacaauggauuaaauga

SEQ ID NO: 44825 - RNA, 21 nt, Human
ugagugucugcuuugugcuca

SEQ ID NO: 44826 - RNA, 23 nt, Human
uggauucuucucucuuuagaccu

SEQ ID NO: 44827 - RNA, 22 nt, Human
uggcucuaguuuuguguuguca

SEQ ID NO: 44828 - RNA, 19 nt, Human
uuaacauuuacauacaaca

SEQ ID NO: 44829 - RNA, 23 nt, Human
uucccuaauauacucuaauacaa

SEQ ID NO: 44830 - RNA, 26 nt, Human
uuuagaccugucaccuugaagaaagc

SEQ ID NO: 44831 - RNA, 19 nt, Human
uuucaacuucagaaauuca

SEQ ID NO: 44832 - RNA, 24 nt, Human
aagaagagacagaaaugggggacc

SEQ ID NO: 44833 - RNA, 23 nt, Human
accggaagacgggaacagagggg

SEQ ID NO: 44834 - RNA, 18 nt, Human
agaggaccgggagccccg

SEQ ID NO: 44835 - RNA, 18 nt, Human
agaggaccgggagccccg

SEQ ID NO: 44836 - RNA, 19 nt, Human
aggaggaagggagcacuag

SEQ ID NO: 44837 - RNA, 25 nt, Human
aggaggaagggagcacuaggucuga

SEQ ID NO: 44838 - RNA, 20 nt, Human
aggcggcgucugaggcgggg

SEQ ID NO: 44839 - RNA, 20 nt, Human
aggggacaggagggggaggu

SEQ ID NO: 44840 - RNA, 26 nt, Human
aggggacaggagggggagguuggggg

SEQ ID NO: 44841 - RNA, 19 nt, Human
aguggucgaacugguucuu

SEQ ID NO: 44842 - RNA, 19 nt, Human
cagccugaagacaugccag

SEQ ID NO: 44843 - RNA, 19 nt, Human
cagccugaagacaugccag

SEQ ID NO: 44844 - RNA, 20 nt, Human
cccagcccugaaauaaauag

SEQ ID NO: 44845 - RNA, 20 nt, Human
cccagcccugaaauaaauag

SEQ ID NO: 44846 - RNA, 18 nt, Human
ccccgggggacgucgggg

SEQ ID NO: 44847 - RNA, 20 nt, Human
ccccgggggacgucgggggg

SEQ ID NO: 44848 - RNA, 21 nt, Human
ccccgggggacgucggggugg

SEQ ID NO: 44849 - RNA, 19 nt, Human
ccgggccgggccgggccgc

SEQ ID NO: 44850 - RNA, 20 nt, Human
ccgggccgggccgggccgcg

SEQ ID NO: 44851 - RNA, 23 nt, Human
ccuguggccguaggggaagaggc

SEQ ID NO: 44852 - RNA, 19 nt, Human
cggccagggcgcccagcga

SEQ ID NO: 44853 - RNA, 18 nt, Human
cggcccccuccuccugcc

SEQ ID NO: 44854 - RNA, 18 nt, Human
cgggaggggaggacggca

SEQ ID NO: 44855 - RNA, 20 nt, Human
cuccagcgguggaacucggc

SEQ ID NO: 44856 - RNA, 22 nt, Human
cuccugcccuguccagugugag

SEQ ID NO: 44857 - RNA, 21 nt, Human
gaacucggccuuccacuggcg

SEQ ID NO: 44858 - RNA, 23 nt, Human
gacgggaacagaggggacaggag

SEQ ID NO: 44859 - RNA, 19 nt, Human
gaggcacggcccccuccuc

SEQ ID NO: 44860 - RNA, 23 nt, Human
gcagccagagggcgaaggcacgc

SEQ ID NO: 44861 - RNA, 18 nt, Human
gccccgggggacgucggg

SEQ ID NO: 44862 - RNA, 18 nt, Human
gccccgggggacgucggg

SEQ ID NO: 44863 - RNA, 19 nt, Human
gccccgggggacgucgggg

SEQ ID NO: 44864 - RNA, 20 nt, Human
gccgggcggagcggaggaca

SEQ ID NO: 44865 - RNA, 20 nt, Human
gccgggcggagcggaggaca

SEQ ID NO: 44866 - RNA, 21 nt, Human
gcggagcggaggacauggggg

SEQ ID NO: 44867 - RNA, 21 nt, Human
gcggagcggaggacauggggg

SEQ ID NO: 44868 - RNA, 18 nt, Human
ggaacagaggggacagga

SEQ ID NO: 44869 - RNA, 19 nt, Human
ggaccgggagccccggggg

SEQ ID NO: 44870 - RNA, 19 nt, Human
ggaccgggagccccggggg

SEQ ID NO: 44871 - RNA, 24 nt, Human
ggagagaggaggagaaaagaauga

SEQ ID NO: 44872 - RNA, 19 nt, Human
ggagggggagguuggggga

SEQ ID NO: 44873 - RNA, 19 nt, Human
ggccgggccgggccgcgcc

SEQ ID NO: 44874 - RNA, 21 nt, Human
ggccgggcggagcggaggaca

SEQ ID NO: 44875 - RNA, 21 nt, Human
ggccgggcggagcggaggaca

SEQ ID NO: 44876 - RNA, 21 nt, Human
gggaaaaagaagagacagaaa

SEQ ID NO: 44877 - RNA, 20 nt, Human
gggaggaugagggcagaggc

SEQ ID NO: 44878 - RNA, 24 nt, Human
gggcaggcggcgucugaggcggcc

SEQ ID NO: 44879 - RNA, 21 nt, Human
gggccgggccgggccgcgccg

SEQ ID NO: 44880 - RNA, 24 nt, Human
gggccgggccgggccgcgccggga

SEQ ID NO: 44881 - RNA, 19 nt, Human
gggccgggcggagcggagg

SEQ ID NO: 44882 - RNA, 19 nt, Human
gggccgggcggagcggagg

SEQ ID NO: 44883 - RNA, 22 nt, Human
ggggacaggagggggagguugg

SEQ ID NO: 44884 - RNA, 20 nt, Human
ggggguuucagugcagggag

SEQ ID NO: 44885 - RNA, 19 nt, Human
ggguggggaugggcagagu

SEQ ID NO: 44886 - RNA, 19 nt, Human
ggguggggaugggcagagu

SEQ ID NO: 44887 - RNA, 18 nt, Human
gggugggguggggauggg

SEQ ID NO: 44888 - RNA, 18 nt, Human
gggugggguggggauggg

SEQ ID NO: 44889 - RNA, 24 nt, Human
gguugggggaaaaagaagagacag

SEQ ID NO: 44890 - RNA, 21 nt, Human
guccggggccucccacuuccc

SEQ ID NO: 44891 - RNA, 22 nt, Human
ucccacuuccccccaaugucag

SEQ ID NO: 44892 - RNA, 18 nt, Human
ucccugagaaggguggga

SEQ ID NO: 44893 - RNA, 26 nt, Human
ucugcggccagggcgcccagcgaggc

SEQ ID NO: 44894 - RNA, 18 nt, Human
ugagaagggugggaggca

SEQ ID NO: 44895 - RNA, 19 nt, Human
ugagggcagaggcggggcc

SEQ ID NO: 44896 - RNA, 18 nt, Human
ugcagggaggacgcacgg

SEQ ID NO: 44897 - RNA, 19 nt, Human
ugcuguaguggucgaacug

SEQ ID NO: 44898 - RNA, 18 nt, Human
uggaacucggccuuccac

SEQ ID NO: 44899 - RNA, 23 nt, Human
uggggcccuuccccacgguccga

SEQ ID NO: 44900 - RNA, 23 nt, Human
ugggguggggaugggcagagucu

SEQ ID NO: 44901 - RNA, 23 nt, Human
ugggguggggaugggcagagucu

SEQ ID NO: 44902 - RNA, 20 nt, Human
uguuauagcccagcccugaa

SEQ ID NO: 44903 - RNA, 20 nt, Human
uguuauagcccagcccugaa

SEQ ID NO: 44904 - RNA, 18 nt, Human
uuccccccaaugucaggc

SEQ ID NO: 44905 - RNA, 25 nt, Human
uugcagccagagggcgaaggcacgc

SEQ ID NO: 44906 - RNA, 18 nt, Human
uuugggcggguugaaggg

SEQ ID NO: 44907 - RNA, 22 nt, Human
aaggcccaguccuaggaggucc

SEQ ID NO: 44908 - RNA, 23 nt, Human
acacagcuucagcgacgcccagg

SEQ ID NO: 44909 - RNA, 25 nt, Human
acccagagccugcuggggcggcccu

SEQ ID NO: 44910 - RNA, 19 nt, Human
agcacugauguccuccagg

SEQ ID NO: 44911 - RNA, 21 nt, Human
agccugucuucacccggcccc

SEQ ID NO: 44912 - RNA, 18 nt, Human
aggcaggcccucuggcuc

SEQ ID NO: 44913 - RNA, 19 nt, Human
aggcaguggcucccagagc

SEQ ID NO: 44914 - RNA, 22 nt, Human
aggcaguggcucccagagcuca

SEQ ID NO: 44915 - RNA, 24 nt, Human
aggcgccccucccccgccagcccg

SEQ ID NO: 44916 - RNA, 21 nt, Human
agguucccgccggccgcggcc

SEQ ID NO: 44917 - RNA, 18 nt, Human
caccccagcugcugccag

SEQ ID NO: 44918 - RNA, 22 nt, Human
caccccagcugcugccaggggc

SEQ ID NO: 44919 - RNA, 23 nt, Human
caccuccuccuccgccaccacgg

SEQ ID NO: 44920 - RNA, 19 nt, Human
caccuccuccuccgccggc

SEQ ID NO: 44921 - RNA, 22 nt, Human
caccugucccuccugcaccccg

SEQ ID NO: 44922 - RNA, 21 nt, Human
cagccaagucccauucaaguc

SEQ ID NO: 44923 - RNA, 22 nt, Human
cagcccgcaccaccugucccuc

SEQ ID NO: 44924 - RNA, 21 nt, Human
cagcggguccuccaggacugg

SEQ ID NO: 44925 - RNA, 20 nt, Human
cagcguuccccgcacucuuc

SEQ ID NO: 44926 - RNA, 19 nt, Human
cagcucggggcggcuucgg

SEQ ID NO: 44927 - RNA, 20 nt, Human
caggcaguggcucccagagc

SEQ ID NO: 44928 - RNA, 27 nt, Human
caggccccgcccaggaccagggccaga

SEQ ID NO: 44929 - RNA, 21 nt, Human
caggcgccccucccccgccag

SEQ ID NO: 44930 - RNA, 24 nt, Human
caggcgccccucccccgccagccc

SEQ ID NO: 44931 - RNA, 24 nt, Human
caggcuggugggaaaacauggaac

SEQ ID NO: 44932 - RNA, 20 nt, Human
cagggccagaggcaggucau

SEQ ID NO: 44933 - RNA, 22 nt, Human
cagguagguuuccugacagccc

SEQ ID NO: 44934 - RNA, 19 nt, Human
ccacugccgcucccccagu

SEQ ID NO: 44935 - RNA, 23 nt, Human
ccagagcucagcguuccccgcac

SEQ ID NO: 44936 - RNA, 19 nt, Human
cccacaggccccgcccagg

SEQ ID NO: 44937 - RNA, 19 nt, Human
cccacaggccccgcccagg

SEQ ID NO: 44938 - RNA, 22 nt, Human
cccacaggccccgcccaggacc

SEQ ID NO: 44939 - RNA, 20 nt, Human
cccaccggccgggacccucc

SEQ ID NO: 44940 - RNA, 22 nt, Human
cccagccucccgcagccuuggc

SEQ ID NO: 44941 - RNA, 21 nt, Human
cccaggaccagggccagaggc

SEQ ID NO: 44942 - RNA, 22 nt, Human
ccccaccggccgggacccuccc

SEQ ID NO: 44943 - RNA, 25 nt, Human
ccccaccggccgggacccuccccaa

SEQ ID NO: 44944 - RNA, 18 nt, Human
ccccaggcgccccucccc

SEQ ID NO: 44945 - RNA, 20 nt, Human
ccccaugccccuacauccug

SEQ ID NO: 44946 - RNA, 24 nt, Human
ccccaugccccuacauccugcguc

SEQ ID NO: 44947 - RNA, 20 nt, Human
cccccaggcgccccuccccc

SEQ ID NO: 44948 - RNA, 22 nt, Human
cccccaggcgccccucccccgc

SEQ ID NO: 44949 - RNA, 25 nt, Human
cccccaggcgccccucccccgccag

SEQ ID NO: 44950 - RNA, 19 nt, Human
cccccgccagcccggcccc

SEQ ID NO: 44951 - RNA, 18 nt, Human
cccccuggaagaaggccc

SEQ ID NO: 44952 - RNA, 18 nt, Human
ccccgccagcccggcccc

SEQ ID NO: 44953 - RNA, 21 nt, Human
ccccgccagcccggccccacc

SEQ ID NO: 44954 - RNA, 18 nt, Human
ccccggagguaccguggg

SEQ ID NO: 44955 - RNA, 19 nt, Human
ccccggagguaccgugggg

SEQ ID NO: 44956 - RNA, 24 nt, Human
ccccgggagcagcaggagcagcgg

SEQ ID NO: 44957 - RNA, 22 nt, Human
ccccgggcagccaauucgccuc

SEQ ID NO: 44958 - RNA, 24 nt, Human
ccccuacauccugcguccccuuca

SEQ ID NO: 44959 - RNA, 18 nt, Human
ccccucccccgccagccc

SEQ ID NO: 44960 - RNA, 22 nt, Human
ccccuggaagaaggcccagucc

SEQ ID NO: 44961 - RNA, 23 nt, Human
ccccuggaagaaggcccaguccu

SEQ ID NO: 44962 - RNA, 20 nt, Human
cccgcaccaccugucccucc

SEQ ID NO: 44963 - RNA, 20 nt, Human
cccgccugcccagguccagc

SEQ ID NO: 44964 - RNA, 19 nt, Human
cccggccccuuccacaucu

SEQ ID NO: 44965 - RNA, 20 nt, Human
cccucaagccugucuucacc

SEQ ID NO: 44966 - RNA, 20 nt, Human
cccucaggcaguggcuccca

SEQ ID NO: 44967 - RNA, 20 nt, Human
cccucgccgggucccucucc

SEQ ID NO: 44968 - RNA, 21 nt, Human
cccucuggcucuccagacgca

SEQ ID NO: 44969 - RNA, 18 nt, Human
ccgcagccuuggccuugc

SEQ ID NO: 44970 - RNA, 19 nt, Human
ccgccugcccagguccagc

SEQ ID NO: 44971 - RNA, 22 nt, Human
ccggccgggacccuccccacca

SEQ ID NO: 44972 - RNA, 18 nt, Human
ccgguucgggcugcugca

SEQ ID NO: 44973 - RNA, 24 nt, Human
ccuccaggggcugccccuuggucu

SEQ ID NO: 44974 - RNA, 19 nt, Human
ccucccagccucugccgcc

SEQ ID NO: 44975 - RNA, 20 nt, Human
ccucccgcccgacgcucucc

SEQ ID NO: 44976 - RNA, 23 nt, Human
ccucgccgggucccucucccucc

SEQ ID NO: 44977 - RNA, 22 nt, Human
ccucugccgccuuccgcugccu

SEQ ID NO: 44978 - RNA, 18 nt, Human
ccuggccuugggcccugg

SEQ ID NO: 44979 - RNA, 19 nt, Human
ccuuccgcugccuccccgc

SEQ ID NO: 44980 - RNA, 23 nt, Human
cgcccaggaccagggccagaggc

SEQ ID NO: 44981 - RNA, 21 nt, Human
cgccccucccccgccagcccg

SEQ ID NO: 44982 - RNA, 21 nt, Human
cgccuccggguccugagcccu

SEQ ID NO: 44983 - RNA, 21 nt, Human
cggaacuuuccggccccuccc

SEQ ID NO: 44984 - RNA, 23 nt, Human
cgggcagccaauucgccucuugc

SEQ ID NO: 44985 - RNA, 21 nt, Human
cgggucccucucccuccuggg

SEQ ID NO: 44986 - RNA, 21 nt, Human
cgguucgggcugcugcagcag

SEQ ID NO: 44987 - RNA, 25 nt, Human
cuccaggggcugccccuuggucucc

SEQ ID NO: 44988 - RNA, 20 nt, Human
cucccaggaccaccgccucc

SEQ ID NO: 44989 - RNA, 24 nt, Human
cucccaggaccaccgccucccgcc

SEQ ID NO: 44990 - RNA, 18 nt, Human
cucccgcccgacgcucuc

SEQ ID NO: 44991 - RNA, 18 nt, Human
cuccggguccugagcccu

SEQ ID NO: 44992 - RNA, 20 nt, Human
cucgccgggucccucucccu

SEQ ID NO: 44993 - RNA, 18 nt, Human
cucgcgggggccuucccc

SEQ ID NO: 44994 - RNA, 20 nt, Human
cucucccuccuggggcuccu

SEQ ID NO: 44995 - RNA, 19 nt, Human
cucugccgccuuccgcugc

SEQ ID NO: 44996 - RNA, 23 nt, Human
cugcagcagccuccgcgggcucc

SEQ ID NO: 44997 - RNA, 18 nt, Human
cugccgccuuccgcugcc

SEQ ID NO: 44998 - RNA, 18 nt, Human
cugccgccuuccgcugcc

SEQ ID NO: 44999 - RNA, 21 nt, Human
cuggggcuccuucccguucag

SEQ ID NO: 45000 - RNA, 18 nt, Human
cugucccuccugcacccc

SEQ ID NO: 45001 - RNA, 20 nt, Human
cugucccuccugcaccccgg

SEQ ID NO: 45002 - RNA, 23 nt, Human
cuuggucuccuuccagcccuggc

SEQ ID NO: 45003 - RNA, 24 nt, Human
gagcagcaacuucgcccaacaggg

SEQ ID NO: 45004 - RNA, 18 nt, Human
gagcagcaggagcagcgg

SEQ ID NO: 45005 - RNA, 20 nt, Human
gagcagcggguccuccagga

SEQ ID NO: 45006 - RNA, 24 nt, Human
gagcagcggguccuccaggacugg

SEQ ID NO: 45007 - RNA, 23 nt, Human
gagguaccguggggcccgggccu

SEQ ID NO: 45008 - RNA, 19 nt, Human
gcagggcagggcucccagc

SEQ ID NO: 45009 - RNA, 19 nt, Human
gccacaagucacauucugc

SEQ ID NO: 45010 - RNA, 20 nt, Human
gccagcccggccccaccggc

SEQ ID NO: 45011 - RNA, 24 nt, Human
gccccuuggucuccuuccagcccu

SEQ ID NO: 45012 - RNA, 22 nt, Human
gcccgacaccccagcugcugcc

SEQ ID NO: 45013 - RNA, 23 nt, Human
gcccuggccuugggcccuggucc

SEQ ID NO: 45014 - RNA, 20 nt, Human
gccuuggccuugcuccaucc

SEQ ID NO: 45015 - RNA, 21 nt, Human
gccuuggccuugcuccaucuu

SEQ ID NO: 45016 - RNA, 24 nt, Human
gcgggagggaugggcagggcaggg

SEQ ID NO: 45017 - RNA, 21 nt, Human
gcuuccugagccaccucaggc

SEQ ID NO: 45018 - RNA, 23 nt, Human
ggaccagggccagaggcagguca

SEQ ID NO: 45019 - RNA, 22 nt, Human
ggaugggggcaucuccccacuc

SEQ ID NO: 45020 - RNA, 18 nt, Human
ggcagggcucccagccuc

SEQ ID NO: 45021 - RNA, 18 nt, Human
ggccuggggguacuacuc

SEQ ID NO: 45022 - RNA, 22 nt, Human
gggaauuggguggaagaggaag

SEQ ID NO: 45023 - RNA, 18 nt, Human
ggggaauuggguggaaga

SEQ ID NO: 45024 - RNA, 22 nt, Human
ggggcccgggccugccagucac

SEQ ID NO: 45025 - RNA, 24 nt, Human
ggguacuacuccacccacaggccc

SEQ ID NO: 45026 - RNA, 20 nt, Human
guaccguggggcccgggccu

SEQ ID NO: 45027 - RNA, 23 nt, Human
gucccucucccuccuggggcucc

SEQ ID NO: 45028 - RNA, 20 nt, Human
ucaccaccuccuccuccgcc

SEQ ID NO: 45029 - RNA, 22 nt, Human
ucagguagguuuccugacagcc

SEQ ID NO: 45030 - RNA, 22 nt, Human
uccaggggcugccccuuggucu

SEQ ID NO: 45031 - RNA, 18 nt, Human
uccaugguaaggccacaa

SEQ ID NO: 45032 - RNA, 18 nt, Human
ucccacugccgcuccccc

SEQ ID NO: 45033 - RNA, 24 nt, Human
ucccagagcucagcguuccccgca

SEQ ID NO: 45034 - RNA, 21 nt, Human
ucccagucugucacccagggc

SEQ ID NO: 45035 - RNA, 22 nt, Human
ucccagucugucacccagggca

SEQ ID NO: 45036 - RNA, 22 nt, Human
uccccaugccccuacauccugc

SEQ ID NO: 45037 - RNA, 25 nt, Human
ucccuguggccaacacaucccgccu

SEQ ID NO: 45038 - RNA, 24 nt, Human
uccgccggcgccuccggguccuga

SEQ ID NO: 45039 - RNA, 19 nt, Human
uccugcaccccgggcagcc

SEQ ID NO: 45040 - RNA, 18 nt, Human
uccugcguccccuucagc

SEQ ID NO: 45041 - RNA, 21 nt, Human
uccuucaggcaggcccucugg

SEQ ID NO: 45042 - RNA, 21 nt, Human
ucgccucuugcacccccaggc

SEQ ID NO: 45043 - RNA, 22 nt, Human
ucgggcugcugcagcagccucc

SEQ ID NO: 45044 - RNA, 23 nt, Human
ucucccacugccgcucccccagu

SEQ ID NO: 45045 - RNA, 21 nt, Human
ucugcccgacaccccagcugc

SEQ ID NO: 45046 - RNA, 21 nt, Human
ucuugcacccccaggcgcccc

SEQ ID NO: 45047 - RNA, 23 nt, Human
ugauguccuccaggggcugcccc

SEQ ID NO: 45048 - RNA, 20 nt, Human
ugcagggacagcacuggugc

SEQ ID NO: 45049 - RNA, 18 nt, Human
ugcgggagggaugggcag

SEQ ID NO: 45050 - RNA, 22 nt, Human
uggaagaagcaggacugaaugg

SEQ ID NO: 45051 - RNA, 19 nt, Human
uggacggacaggcucaggu

SEQ ID NO: 45052 - RNA, 24 nt, Human
uggcucccagagcucagcguuccc

SEQ ID NO: 45053 - RNA, 20 nt, Human
ugggcccugguccccgccag

SEQ ID NO: 45054 - RNA, 21 nt, Human
uguccuccaggggcugccccu

SEQ ID NO: 45055 - RNA, 22 nt, Human
ugucuucacccggccccuucca

SEQ ID NO: 45056 - RNA, 20 nt, Human
uguggccaacacaucccgcc

SEQ ID NO: 45057 - RNA, 18 nt, Human
uuuccugacagcccgcac

SEQ ID NO: 45058 - RNA, 18 nt, Human
aaccccauacuccuuccc

SEQ ID NO: 45059 - RNA, 18 nt, Human
aaccccgcaaaauccgga

SEQ ID NO: 45060 - RNA, 23 nt, Human
aagaaagcaacauccuaacgccc

SEQ ID NO: 45061 - RNA, 22 nt, Human
aagcccuuaacacguaacauac

SEQ ID NO: 45062 - RNA, 21 nt, Human
aagggaaguaaaaaaaaaaaa

SEQ ID NO: 45063 - RNA, 21 nt, Human
aaugaaccccauacuccuucc

SEQ ID NO: 45064 - RNA, 21 nt, Human
acacuucaguuacagacagac

SEQ ID NO: 45065 - RNA, 19 nt, Human
accccauacuccuucccag

SEQ ID NO: 45066 - RNA, 21 nt, Human
accccauacuccuucccagca

SEQ ID NO: 45067 - RNA, 18 nt, Human
acugcaguaggguuccug

SEQ ID NO: 45068 - RNA, 22 nt, Human
agcagguagcagagcaaaguca

SEQ ID NO: 45069 - RNA, 27 nt, Human
aggaagaagaaagggaaguaaaaaaaa

SEQ ID NO: 45070 - RNA, 19 nt, Human
auaagacacaagacauuuc

SEQ ID NO: 45071 - RNA, 18 nt, Human
auauucaucagcuuccuc

SEQ ID NO: 45072 - RNA, 18 nt, Human
aucuuguucacaaacucc

SEQ ID NO: 45073 - RNA, 21 nt, Human
caagauaguguccaaugaacc

SEQ ID NO: 45074 - RNA, 23 nt, Human
caagauaguguccaaugaacccc

SEQ ID NO: 45075 - RNA, 22 nt, Human
caagcccuuaacacguaacaua

SEQ ID NO: 45076 - RNA, 18 nt, Human
cacagaacauuucagugg

SEQ ID NO: 45077 - RNA, 20 nt, Human
cacagaacauuucaguggga

SEQ ID NO: 45078 - RNA, 21 nt, Human
cacucggugaccaaugcccau

SEQ ID NO: 45079 - RNA, 20 nt, Human
cagacaaaucagcugcauaa

SEQ ID NO: 45080 - RNA, 21 nt, Human
cagacaaaucagcugcauaaa

SEQ ID NO: 45081 - RNA, 22 nt, Human
cagcacaaagaugccauugagg

SEQ ID NO: 45082 - RNA, 22 nt, Human
cagcuuccucccgaguaaagga

SEQ ID NO: 45083 - RNA, 21 nt, Human
cauguuauauaaggaagaaga

SEQ ID NO: 45084 - RNA, 20 nt, Human
ccagcagccgguagcuuccc

SEQ ID NO: 45085 - RNA, 25 nt, Human
ccaucccccugacauaaacagacuc

SEQ ID NO: 45086 - RNA, 18 nt, Human
ccauugagggcuccaaug

SEQ ID NO: 45087 - RNA, 21 nt, Human
cccacaguuucuaagcauguc

SEQ ID NO: 45088 - RNA, 22 nt, Human
cccacggaugacgauacagccc

SEQ ID NO: 45089 - RNA, 20 nt, Human
ccccagcagccgguagcuuc

SEQ ID NO: 45090 - RNA, 18 nt, Human
ccccauacuccuucccag

SEQ ID NO: 45091 - RNA, 18 nt, Human
cccccugacauaaacaga

SEQ ID NO: 45092 - RNA, 24 nt, Human
cccccugacauaaacagacucugg

SEQ ID NO: 45093 - RNA, 23 nt, Human
ccccgcaaaauccggagcacccc

SEQ ID NO: 45094 - RNA, 26 nt, Human
cccgcaaaauccggagcaccccagca

SEQ ID NO: 45095 - RNA, 19 nt, Human
cgacuccgaugagaccauc

SEQ ID NO: 45096 - RNA, 22 nt, Human
cgacuccgaugagaccaucuac

SEQ ID NO: 45097 - RNA, 23 nt, Human
cgagcagaggaguggcagggaag

SEQ ID NO: 45098 - RNA, 26 nt, Human
cgaguaaaggacccacaguuucuaag

SEQ ID NO: 45099 - RNA, 21 nt, Human
cgguagcuucccgggauccgg

SEQ ID NO: 45100 - RNA, 19 nt, Human
cgugcgcggcgcuucuucc

SEQ ID NO: 45101 - RNA, 18 nt, Human
cuacaaaugcgacuccga

SEQ ID NO: 45102 - RNA, 24 nt, Human
cuauauaguuuauuuaaaccagac

SEQ ID NO: 45103 - RNA, 22 nt, Human
cugcuucagccucuucugauca

SEQ ID NO: 45104 - RNA, 19 nt, Human
cuucccuuccuucuucauc

SEQ ID NO: 45105 - RNA, 21 nt, Human
cuuuacauauuaaguuacuac

SEQ ID NO: 45106 - RNA, 18 nt, Human
cuuuguguggacugaagg

SEQ ID NO: 45107 - RNA, 20 nt, Human
gagaagagacugagguggca

SEQ ID NO: 45108 - RNA, 18 nt, Human
gagacugagguggcagcu

SEQ ID NO: 45109 - RNA, 18 nt, Human
gagcaaagucacaaauau

SEQ ID NO: 45110 - RNA, 21 nt, Human
gagcagaggaguggcagggaa

SEQ ID NO: 45111 - RNA, 22 nt, Human
gagguggcagcugcccagaauc

SEQ ID NO: 45112 - RNA, 21 nt, Human
gauccggcuuuugucccggcc

SEQ ID NO: 45113 - RNA, 19 nt, Human
gcagggaagugcugccuga

SEQ ID NO: 45114 - RNA, 21 nt, Human
gcccuacaaugaggaagaccc

SEQ ID NO: 45115 - RNA, 20 nt, Human
ggagcaccccagcagccggu

SEQ ID NO: 45116 - RNA, 20 nt, Human
gggaaguaaaaaaaaaaaaa

SEQ ID NO: 45117 - RNA, 21 nt, Human
ggggugcuuuaaauguauagu

SEQ ID NO: 45118 - RNA, 19 nt, Human
guaaucuuugaggaucugc

SEQ ID NO: 45119 - RNA, 22 nt, Human
uaaaaaaaaaaaaagagagaca

SEQ ID NO: 45120 - RNA, 24 nt, Human
uaacuaauggaaaaagaaagcaac

SEQ ID NO: 45121 - RNA, 19 nt, Human
uacaaugaggaagacccca

SEQ ID NO: 45122 - RNA, 18 nt, Human
uacauuccaggccccugc

SEQ ID NO: 45123 - RNA, 23 nt, Human
uacuuccagugcauaaucgagca

SEQ ID NO: 45124 - RNA, 18 nt, Human
uagcagagcaaagucaca

SEQ ID NO: 45125 - RNA, 18 nt, Human
uauaaaaaaaauaugaag

SEQ ID NO: 45126 - RNA, 21 nt, Human
uccacaggcccgacgaacccc

SEQ ID NO: 45127 - RNA, 19 nt, Human
uccacauauuuugugacaa

SEQ ID NO: 45128 - RNA, 25 nt, Human
uccacauauuuugugacaauggcua

SEQ ID NO: 45129 - RNA, 21 nt, Human
ucccgggauccggcuuuuguc

SEQ ID NO: 45130 - RNA, 22 nt, Human
uccgugcgcggcgcuucuucca

SEQ ID NO: 45131 - RNA, 23 nt, Human
uccgugcgcggcgcuucuuccac

SEQ ID NO: 45132 - RNA, 24 nt, Human
uccgugcgcggcgcuucuuccaca

SEQ ID NO: 45133 - RNA, 23 nt, Human
ugacaauggcuaaggaugcaaug

SEQ ID NO: 45134 - RNA, 21 nt, Human
ugauaauacagagaagagacu

SEQ ID NO: 45135 - RNA, 21 nt, Human
ugcccaugaucagcuucccuu

SEQ ID NO: 45136 - RNA, 24 nt, Human
ugcccaugaucagcuucccuuccu

SEQ ID NO: 45137 - RNA, 18 nt, Human
ugccgaaguccgugcgcg

SEQ ID NO: 45138 - RNA, 20 nt, Human
uggauuacagaugcaaagua

SEQ ID NO: 45139 - RNA, 24 nt, Human
uggcagggaagugcugccugacgu

SEQ ID NO: 45140 - RNA, 22 nt, Human
uggcuguuuacauuccaggccc

SEQ ID NO: 45141 - RNA, 19 nt, Human
uguuucauucccuuccucc

SEQ ID NO: 45142 - RNA, 23 nt, Human
uuaacuaauggaaaaagaaagca

SEQ ID NO: 45143 - RNA, 26 nt, Human
uuacuacuccacauauuuugugacaa

SEQ ID NO: 45144 - RNA, 20 nt, Human
uuccaggccccugcuaaaua

SEQ ID NO: 45145 - RNA, 21 nt, Human
uuggcuugguuuuuauuucua

SEQ ID NO: 45146 - RNA, 23 nt, Human
uuucuaagcaugucuacaaaugc

SEQ ID NO: 45147 - RNA, 21 nt, Human
aaccaccuccuugccuaaccu

SEQ ID NO: 45148 - RNA, 24 nt, Human
aagcaggauggaggaaaaaucaga

SEQ ID NO: 45149 - RNA, 18 nt, Human
aagguggauauaaagugg

SEQ ID NO: 45150 - RNA, 20 nt, Human
accuccuugccuaaccuagc

SEQ ID NO: 45151 - RNA, 20 nt, Human
agaagagacugggaacugca

SEQ ID NO: 45152 - RNA, 22 nt, Human
agagacugggaacugcaggggc

SEQ ID NO: 45153 - RNA, 23 nt, Human
agaggcaagggcugcaggacagg

SEQ ID NO: 45154 - RNA, 19 nt, Human
agggcugcaggacagaaga

SEQ ID NO: 45155 - RNA, 21 nt, Human
aggugacccaguccuggcccc

SEQ ID NO: 45156 - RNA, 19 nt, Human
ccagggaggugguaagcag

SEQ ID NO: 45157 - RNA, 23 nt, Human
cccaguccuggccccggcuguuc

SEQ ID NO: 45158 - RNA, 18 nt, Human
ccccaucucuggccaacc

SEQ ID NO: 45159 - RNA, 20 nt, Human
ccccuggggccgaguggcug

SEQ ID NO: 45160 - RNA, 22 nt, Human
cccugcagcgccccuuuucucg

SEQ ID NO: 45161 - RNA, 19 nt, Human
cccuggggccgaguggcug

SEQ ID NO: 45162 - RNA, 18 nt, Human
cucagacuuaaugggaaa

SEQ ID NO: 45163 - RNA, 22 nt, Human
cucuggccaaccaccuccuugc

SEQ ID NO: 45164 - RNA, 22 nt, Human
gcaggacagaagagacugggaa

SEQ ID NO: 45165 - RNA, 23 nt, Human
gcccugggacucaggaggagaug

SEQ ID NO: 45166 - RNA, 19 nt, Human
gcgugggcugccgggcugg

SEQ ID NO: 45167 - RNA, 22 nt, Human
gcugguaccugcagcucuagug

SEQ ID NO: 45168 - RNA, 22 nt, Human
ggccggaagugcgugggcugcc

SEQ ID NO: 45169 - RNA, 21 nt, Human
ggcgcuggggcgcuugggugu

SEQ ID NO: 45170 - RNA, 19 nt, Human
gggaggugguaagcaggau

SEQ ID NO: 45171 - RNA, 19 nt, Human
gggccgaguggcugguacc

SEQ ID NO: 45172 - RNA, 18 nt, Human
gggugguggagacugugc

SEQ ID NO: 45173 - RNA, 19 nt, Human
gguaagcaggauggaggaa

SEQ ID NO: 45174 - RNA, 19 nt, Human
uaaccuagcucuugccucu

SEQ ID NO: 45175 - RNA, 19 nt, Human
uaaggggguguguuugggg

SEQ ID NO: 45176 - RNA, 20 nt, Human
uaagucccaagagauagggg

SEQ ID NO: 45177 - RNA, 23 nt, Human
uaccugcagcucuaguguuuucc

SEQ ID NO: 45178 - RNA, 21 nt, Human
ucccucuguggccauaacccc

SEQ ID NO: 45179 - RNA, 20 nt, Human
uccuggccccggcuguuccc

SEQ ID NO: 45180 - RNA, 19 nt, Human
ucggaaacccucgacccug

SEQ ID NO: 45181 - RNA, 23 nt, Human
ucuggccaaccaccuccuugccu

SEQ ID NO: 45182 - RNA, 24 nt, Human
ucuguggccauaacccccuggggc

SEQ ID NO: 45183 - RNA, 20 nt, Human
ugacccaguccuggccccgg

SEQ ID NO: 45184 - RNA, 24 nt, Human
ugauucagcucauaggugacccag

SEQ ID NO: 45185 - RNA, 19 nt, Human
uggcuccagggugguggag

SEQ ID NO: 45186 - RNA, 25 nt, Human
uggcuccagggugguggagacugug

SEQ ID NO: 45187 - RNA, 20 nt, Human
ugggaacugcaggggcccug

SEQ ID NO: 45188 - RNA, 21 nt, Human
uggggggaaaaggauggccac

SEQ ID NO: 45189 - RNA, 21 nt, Human
ugugaaagacccuuggcucca

SEQ ID NO: 45190 - RNA, 29 nt, Human
uuccccaucucuggccaaccaccuccuug

SEQ ID NO: 45191 - RNA, 28 nt, Human
uuggcuccagggugguggagacugugcc

SEQ ID NO: 45192 - RNA, 18 nt, Human
aaaugacccucaagagga

SEQ ID NO: 45193 - RNA, 20 nt, Human
aaccgccucccaacaaaggu

SEQ ID NO: 45194 - RNA, 19 nt, Human
aaccugacccaagcagcgg

SEQ ID NO: 45195 - RNA, 21 nt, Human
aagagaagaugauuaacaaaa

SEQ ID NO: 45196 - RNA, 24 nt, Human
aagcagcgggaccgguucccgugc

SEQ ID NO: 45197 - RNA, 18 nt, Human
aaucacugcucugauuug

SEQ ID NO: 45198 - RNA, 21 nt, Human
accauucuagcuuccaaauuc

SEQ ID NO: 45199 - RNA, 25 nt, Human
acucugaaggaaaaggggagagaag

SEQ ID NO: 45200 - RNA, 27 nt, Human
agaaauguguucucccaaaccgccucc

SEQ ID NO: 45201 - RNA, 22 nt, Human
aggaaaaugacccucaagagga

SEQ ID NO: 45202 - RNA, 26 nt, Human
caaauucuggaaaaagagaagaugau

SEQ ID NO: 45203 - RNA, 23 nt, Human
cacugguauaauuaauacagaaa

SEQ ID NO: 45204 - RNA, 20 nt, Human
cagaaaggaaaaugacccuc

SEQ ID NO: 45205 - RNA, 19 nt, Human
cccagaggcagccagggag

SEQ ID NO: 45206 - RNA, 21 nt, Human
cccucaagaggaagguuucau

SEQ ID NO: 45207 - RNA, 24 nt, Human
ccucccagaggcagccagggaggc

SEQ ID NO: 45208 - RNA, 24 nt, Human
cuacaaggcagcaccccucccaga

SEQ ID NO: 45209 - RNA, 22 nt, Human
cuacaggauuggcaccagaccc

SEQ ID NO: 45210 - RNA, 18 nt, Human
cugacccaagcagcggga

SEQ ID NO: 45211 - RNA, 21 nt, Human
cugauggccacguguuccucc

SEQ ID NO: 45212 - RNA, 20 nt, Human
gaacaauaagaggguaggag

SEQ ID NO: 45213 - RNA, 19 nt, Human
gaccggcgaaccugaccca

SEQ ID NO: 45214 - RNA, 25 nt, Human
gaggaacaauaagaggguaggagac

SEQ ID NO: 45215 - RNA, 24 nt, Human
gauucacucugaaggaaaagggga

SEQ ID NO: 45216 - RNA, 25 nt, Human
ggggagagaagagagaaucacuggu

SEQ ID NO: 45217 - RNA, 24 nt, Human
guagaaacuucugguuuugugccu

SEQ ID NO: 45218 - RNA, 21 nt, Human
uaaaagaaaacuucacauuuc

SEQ ID NO: 45219 - RNA, 20 nt, Human
uaagaggguaggagacaccu

SEQ ID NO: 45220 - RNA, 21 nt, Human
uacagaaaggaaaaugacccu

SEQ ID NO: 45221 - RNA, 24 nt, Human
uacagaaaggaaaaugacccucaa

SEQ ID NO: 45222 - RNA, 18 nt, Human
uccaucuacaaggcagca

SEQ ID NO: 45223 - RNA, 22 nt, Human
ucucccaaaccgccucccaaca

SEQ ID NO: 45224 - RNA, 20 nt, Human
ucugaaggaaaaggggagag

SEQ ID NO: 45225 - RNA, 19 nt, Human
ugaaaagauaguaaaagaa

SEQ ID NO: 45226 - RNA, 23 nt, Human
ugaaggaaaaggggagagaagag

SEQ ID NO: 45227 - RNA, 24 nt, Human
ugaucaguaacuuuaaagacaagc

SEQ ID NO: 45228 - RNA, 23 nt, Human
uggcacuacugacauucccacca

SEQ ID NO: 45229 - RNA, 20 nt, Human
ugguggugcggcuuccuccc

SEQ ID NO: 45230 - RNA, 23 nt, Human
uuaacaaaaauagagaauguaga

SEQ ID NO: 45231 - RNA, 25 nt, Human
uuauguggaucuaucaaaagguaca

SEQ ID NO: 45232 - RNA, 22 nt, Human
uucaaauuagaaauguguucuc

SEQ ID NO: 45233 - RNA, 22 nt, Human
uucucccaaaccgccucccaac

SEQ ID NO: 45234 - RNA, 22 nt, Human
cacacguggagcugaacuugac

SEQ ID NO: 45235 - RNA, 18 nt, Human
ucggauccacugauggca

SEQ ID NO: 45236 - RNA, 18 nt, Human
uggaauaggaagccaugg

SEQ ID NO: 45237 - RNA, 18 nt, Human
aggcaguggccaggagug

SEQ ID NO: 45238 - RNA, 24 nt, Human
cacaaaauuugaguugcacacagg

SEQ ID NO: 45239 - RNA, 23 nt, Human
cacacaggcgcuuucugaagcag

SEQ ID NO: 45240 - RNA, 22 nt, Human
cccacaaacuggaaggcauagg

SEQ ID NO: 45241 - RNA, 23 nt, Human
cuggaaggcauaggcaguggcca

SEQ ID NO: 45242 - RNA, 23 nt, Human
gaaaauccaaaaucugugguucu

SEQ ID NO: 45243 - RNA, 26 nt, Human
uaggcaguggccaggaguggaaagag

SEQ ID NO: 45244 - RNA, 19 nt, Human
uccacaaaauuugaguugc

SEQ ID NO: 45245 - RNA, 18 nt, Human
ugaagcagauuaaacuug

SEQ ID NO: 45246 - RNA, 22 nt, Human
ugaagcagauuaaacuuguccu

SEQ ID NO: 45247 - RNA, 18 nt, Human
ugcgcccacaaacuggaa

SEQ ID NO: 45248 - RNA, 21 nt, Human
ugcgcccacaaacuggaaggc

SEQ ID NO: 45249 - RNA, 19 nt, Human
auuaucacaugauggugcu

SEQ ID NO: 45250 - RNA, 22 nt, Human
cccggcugcuccgagggucugc

SEQ ID NO: 45251 - RNA, 19 nt, Human
uaugccauaguaccauuau

SEQ ID NO: 45252 - RNA, 22 nt, Human
ucacaugauggugcugguugcu

SEQ ID NO: 45253 - RNA, 25 nt, Human
ugacuguggagagacacuuccaacc

SEQ ID NO: 45254 - RNA, 23 nt, Human
uggagagacacuuccaacccggc

SEQ ID NO: 45255 - RNA, 19 nt, Human
ugucuggugacuguggaga

SEQ ID NO: 45256 - RNA, 24 nt, Human
aaucaccgcgaucccagauuaggu

SEQ ID NO: 45257 - RNA, 18 nt, Human
aucuccggcguguucugg

SEQ ID NO: 45258 - RNA, 20 nt, Human
cacacuccacaguucaaccc

SEQ ID NO: 45259 - RNA, 18 nt, Human
cacaguucaaccccugcc

SEQ ID NO: 45260 - RNA, 27 nt, Human
caccgcgaucccagauuagguccagcc

SEQ ID NO: 45261 - RNA, 20 nt, Human
ccagggaaaccaaaagcagg

SEQ ID NO: 45262 - RNA, 25 nt, Human
cccacacacuccacaguucaacccc

SEQ ID NO: 45263 - RNA, 18 nt, Human
cgccugggcaaguugagg

SEQ ID NO: 45264 - RNA, 20 nt, Human
cgggcucagaaagcagcagc

SEQ ID NO: 45265 - RNA, 18 nt, Human
gcccacacacuccacagu

SEQ ID NO: 45266 - RNA, 21 nt, Human
uagacuuggcugaaugugcca

SEQ ID NO: 45267 - RNA, 18 nt, Human
uccacggugcaaaucacc

SEQ ID NO: 45268 - RNA, 20 nt, Human
uccacggugcaaaucaccgc

SEQ ID NO: 45269 - RNA, 21 nt, Human
uccggcguguucuggaaucag

SEQ ID NO: 45270 - RNA, 19 nt, Human
uucuggaaucagaaguuga

SEQ ID NO: 45271 - RNA, 23 nt, Human
aaagagcuggcuuugggcccugg

SEQ ID NO: 45272 - RNA, 20 nt, Human
aacacaacugauuuccaucu

SEQ ID NO: 45273 - RNA, 25 nt, Human
aacauuuuuauugauucuccugcca

SEQ ID NO: 45274 - RNA, 22 nt, Human
aaggagccgcgggagguaaagg

SEQ ID NO: 45275 - RNA, 23 nt, Human
aaguauugaaggugccaacgacu

SEQ ID NO: 45276 - RNA, 19 nt, Human
aagugugcacuaugggugu

SEQ ID NO: 45277 - RNA, 23 nt, Human
aauuacuuuuuaagguaagaaac

SEQ ID NO: 45278 - RNA, 23 nt, Human
accaacgccaacagggcagcgcg

SEQ ID NO: 45279 - RNA, 21 nt, Human
accuccucaugaaguaaacuc

SEQ ID NO: 45280 - RNA, 18 nt, Human
accuggaggaggaagggc

SEQ ID NO: 45281 - RNA, 20 nt, Human
acggaggggacuacugucaa

SEQ ID NO: 45282 - RNA, 24 nt, Human
agaaacaguaagucaacugaacaa

SEQ ID NO: 45283 - RNA, 22 nt, Human
agacuagcauacaaguguccuu

SEQ ID NO: 45284 - RNA, 19 nt, Human
aggaggagcugcgggggug

SEQ ID NO: 45285 - RNA, 21 nt, Human
aggaggaggagcugcgggggu

SEQ ID NO: 45286 - RNA, 27 nt, Human
aggaggaggagcugcgggggugggguc

SEQ ID NO: 45287 - RNA, 22 nt, Human
aggcaaagugguucagauggga

SEQ ID NO: 45288 - RNA, 24 nt, Human
aggcaaagugguucagaugggagc

SEQ ID NO: 45289 - RNA, 23 nt, Human
aggggcugggcgggucaccgggg

SEQ ID NO: 45290 - RNA, 19 nt, Human
auaaaaacagucauauucc

SEQ ID NO: 45291 - RNA, 27 nt, Human
caaaccuacugaagagguagacucgau

SEQ ID NO: 45292 - RNA, 22 nt, Human
caacugaacaaagagcuggcuu

SEQ ID NO: 45293 - RNA, 25 nt, Human
caacugaacaaagagcuggcuuuuu

SEQ ID NO: 45294 - RNA, 22 nt, Human
cacaacugauuuccaucuacaa

SEQ ID NO: 45295 - RNA, 18 nt, Human
caccuggagggaguaggg

SEQ ID NO: 45296 - RNA, 21 nt, Human
caccuggagggcccgggcgcu

SEQ ID NO: 45297 - RNA, 21 nt, Human
caccuggguuggggcacagcg

SEQ ID NO: 45298 - RNA, 26 nt, Human
cagaggcaaagugguucagauggggc

SEQ ID NO: 45299 - RNA, 20 nt, Human
caggccauccacacaaaccu

SEQ ID NO: 45300 - RNA, 24 nt, Human
caggguggggucuagucaggcuuu

SEQ ID NO: 45301 - RNA, 20 nt, Human
cauagaggggcugggcgggu

SEQ ID NO: 45302 - RNA, 19 nt, Human
ccaccuggguuggggcaca

SEQ ID NO: 45303 - RNA, 23 nt, Human
ccacgccgacaggggcgccuugc

SEQ ID NO: 45304 - RNA, 21 nt, Human
ccaggccauccacacaaaccu

SEQ ID NO: 45305 - RNA, 27 nt, Human
ccaucuacaauuacuuuuuaaggggaa

SEQ ID NO: 45306 - RNA, 23 nt, Human
ccccauaagcugucugaaucaaa

SEQ ID NO: 45307 - RNA, 22 nt, Human
cccgcaccaacgccaacagggc

SEQ ID NO: 45308 - RNA, 20 nt, Human
cccgcgcgccugcgcagucc

SEQ ID NO: 45309 - RNA, 24 nt, Human
cccgcgcgccugcgcagucccgca

SEQ ID NO: 45310 - RNA, 20 nt, Human
cccgcggguccacgccgaca

SEQ ID NO: 45311 - RNA, 21 nt, Human
ccgcaccaacgccaacagggc

SEQ ID NO: 45312 - RNA, 21 nt, Human
ccggaggaggaggagcugcgg

SEQ ID NO: 45313 - RNA, 21 nt, Human
ccugcagggacugggccgccg

SEQ ID NO: 45314 - RNA, 19 nt, Human
ccugcaggggcggggcugc

SEQ ID NO: 45315 - RNA, 23 nt, Human
ccugcaggggcggggcugcaggu

SEQ ID NO: 45316 - RNA, 20 nt, Human
ccugcgcaaucggcuccugc

SEQ ID NO: 45317 - RNA, 21 nt, Human
ccugcgcaaucggcuccugcg

SEQ ID NO: 45318 - RNA, 25 nt, Human
ccuggguuggggcacagccgggguc

SEQ ID NO: 45319 - RNA, 18 nt, Human
ccuucauuguuuuauguu

SEQ ID NO: 45320 - RNA, 18 nt, Human
cgcacgccgacgcgcgca

SEQ ID NO: 45321 - RNA, 22 nt, Human
cgcagcagggcacgaaccugcc

SEQ ID NO: 45322 - RNA, 21 nt, Human
cgccgacgcgcgcaggcgcac

SEQ ID NO: 45323 - RNA, 22 nt, Human
cgccgagacaccgcggcguucc

SEQ ID NO: 45324 - RNA, 19 nt, Human
cgcgcgcaggcgcacugcc

SEQ ID NO: 45325 - RNA, 21 nt, Human
cgcuccugagaccccaccccc

SEQ ID NO: 45326 - RNA, 20 nt, Human
cggaagaaggcgagggggug

SEQ ID NO: 45327 - RNA, 23 nt, Human
cggggguuggcgggggcgcaguc

SEQ ID NO: 45328 - RNA, 21 nt, Human
cucaugaaguaaacucgacaa

SEQ ID NO: 45329 - RNA, 24 nt, Human
cuccaggccauccacacaaaccua

SEQ ID NO: 45330 - RNA, 25 nt, Human
cuccaggccauccacacaaaccuac

SEQ ID NO: 45331 - RNA, 20 nt, Human
cuccugagaccccaccccca

SEQ ID NO: 45332 - RNA, 26 nt, Human
cuccugagaccccacccccaacaccu

SEQ ID NO: 45333 - RNA, 18 nt, Human
gagcaagcaccugccucc

SEQ ID NO: 45334 - RNA, 20 nt, Human
gaggaggagcugcgggggug

SEQ ID NO: 45335 - RNA, 23 nt, Human
gagggaguagggcggaagaaggc

SEQ ID NO: 45336 - RNA, 23 nt, Human
gcaccaacgccaacagggcagcg

SEQ ID NO: 45337 - RNA, 18 nt, Human
gccugcgcaaucggcucc

SEQ ID NO: 45338 - RNA, 21 nt, Human
gccugcgcaaucggcuccugc

SEQ ID NO: 45339 - RNA, 21 nt, Human
gcgcagucaccuggagggccc

SEQ ID NO: 45340 - RNA, 21 nt, Human
gcgcagucccgcaccaacgcc

SEQ ID NO: 45341 - RNA, 18 nt, Human
gcggggguuggcgggggc

SEQ ID NO: 45342 - RNA, 20 nt, Human
gcuggcgggcuguggugcug

SEQ ID NO: 45343 - RNA, 18 nt, Human
ggaaggagccgcgggagg

SEQ ID NO: 45344 - RNA, 20 nt, Human
ggaaggagccgcgggaggua

SEQ ID NO: 45345 - RNA, 21 nt, Human
ggagaagggguaccuggagga

SEQ ID NO: 45346 - RNA, 18 nt, Human
ggagggcccgggcgcugc

SEQ ID NO: 45347 - RNA, 19 nt, Human
ggcugggcgggucaccggg

SEQ ID NO: 45348 - RNA, 18 nt, Human
gggaagagagagguagca

SEQ ID NO: 45349 - RNA, 21 nt, Human
gggaaggagccgcgggaggua

SEQ ID NO: 45350 - RNA, 18 nt, Human
gggacggggccgcaggag

SEQ ID NO: 45351 - RNA, 19 nt, Human
gggcggaagaaggcgaggg

SEQ ID NO: 45352 - RNA, 20 nt, Human
gggcggggguuggcgggggc

SEQ ID NO: 45353 - RNA, 23 nt, Human
gggcgggucaccggggaacugcc

SEQ ID NO: 45354 - RNA, 20 nt, Human
gggcugggcgggucaccggg

SEQ ID NO: 45355 - RNA, 20 nt, Human
gggcuguggugcugucguuc

SEQ ID NO: 45356 - RNA, 18 nt, Human
ggggacggggccgcagga

SEQ ID NO: 45357 - RNA, 19 nt, Human
ggggacggggccgcaggag

SEQ ID NO: 45358 - RNA, 19 nt, Human
ggggcggggguuggcgggg

SEQ ID NO: 45359 - RNA, 25 nt, Human
ggggcugcagguuguccggaggagg

SEQ ID NO: 45360 - RNA, 19 nt, Human
ggggguggggucaccugga

SEQ ID NO: 45361 - RNA, 20 nt, Human
ggggguggggucaccuggag

SEQ ID NO: 45362 - RNA, 19 nt, Human
gggguggggucaccuggag

SEQ ID NO: 45363 - RNA, 19 nt, Human
gggguguguguguguggug

SEQ ID NO: 45364 - RNA, 18 nt, Human
ggguguguguguguggug

SEQ ID NO: 45365 - RNA, 21 nt, Human
ggguguguguguguggugggg

SEQ ID NO: 45366 - RNA, 18 nt, Human
gguggggucaccuggagg

SEQ ID NO: 45367 - RNA, 24 nt, Human
uaaaacacuucuaaucuagacugu

SEQ ID NO: 45368 - RNA, 22 nt, Human
uaagguaagaaacaguaaguca

SEQ ID NO: 45369 - RNA, 20 nt, Human
uaccccauaagcugucugaa

SEQ ID NO: 45370 - RNA, 21 nt, Human
uaccccauaagcugucugaau

SEQ ID NO: 45371 - RNA, 19 nt, Human
uaccuggaggaggaagggc

SEQ ID NO: 45372 - RNA, 20 nt, Human
uaccuggaggaggaagggcc

SEQ ID NO: 45373 - RNA, 18 nt, Human
uagaggggcugggcgggu

SEQ ID NO: 45374 - RNA, 19 nt, Human
ucaccuggagggaguaggg

SEQ ID NO: 45375 - RNA, 23 nt, Human
uccacacaaaccuacugaagagg

SEQ ID NO: 45376 - RNA, 21 nt, Human
ucccgcgcgcagaggcgccga

SEQ ID NO: 45377 - RNA, 21 nt, Human
uccgcgggucaccugcaggga

SEQ ID NO: 45378 - RNA, 20 nt, Human
uccugagaccccacccccaa

SEQ ID NO: 45379 - RNA, 20 nt, Human
ugaacaaagagcuggcuuug

SEQ ID NO: 45380 - RNA, 22 nt, Human
ugagcccgcggguccacgccga

SEQ ID NO: 45381 - RNA, 22 nt, Human
ugagcgcgcggcucugggcuuu

SEQ ID NO: 45382 - RNA, 19 nt, Human
ugcaggggcggggcugcag

SEQ ID NO: 45383 - RNA, 24 nt, Human
ugccaaauaauaacacuuuuccca

SEQ ID NO: 45384 - RNA, 22 nt, Human
ugccuuugagcccgcggguccu

SEQ ID NO: 45385 - RNA, 18 nt, Human
uggaggaggaagggccgc

SEQ ID NO: 45386 - RNA, 23 nt, Human
uggggucaccuggagggaguagg

SEQ ID NO: 45387 - RNA, 23 nt, Human
uguagaaauuaaaacacuucuaa

SEQ ID NO: 45388 - RNA, 23 nt, Human
uucaccugcaggggcggggcugc

SEQ ID NO: 45389 - RNA, 18 nt, Human
uucagaugggagccaaug

SEQ ID NO: 45390 - RNA, 20 nt, Human
uucaugauuuugacauuauc

SEQ ID NO: 45391 - RNA, 23 nt, Human
uugagcccgcggguccacgccga

SEQ ID NO: 45392 - RNA, 19 nt, Human
uuuuguaacuggggcaaag

SEQ ID NO: 45393 - RNA, 18 nt, Human
aacacagcacuugguaaa

SEQ ID NO: 45394 - RNA, 21 nt, Human
aacucccuucccaccacuccc

SEQ ID NO: 45395 - RNA, 22 nt, Human
aacucugccauuuucuaauccu

SEQ ID NO: 45396 - RNA, 27 nt, Human
aagcaacucccuucccaccacucccca

SEQ ID NO: 45397 - RNA, 18 nt, Human
acagcacuauucauucuc

SEQ ID NO: 45398 - RNA, 20 nt, Human
accaugggccacgcugagcc

SEQ ID NO: 45399 - RNA, 23 nt, Human
acucccuucccaccacuccccac

SEQ ID NO: 45400 - RNA, 21 nt, Human
acucugccauuuucuaauccu

SEQ ID NO: 45401 - RNA, 22 nt, Human
acuucaggcuggaggaaaaaga

SEQ ID NO: 45402 - RNA, 18 nt, Human
agcaccaacucugccauu

SEQ ID NO: 45403 - RNA, 23 nt, Human
agcacuauucauucucugggagc

SEQ ID NO: 45404 - RNA, 21 nt, Human
agccaauguuuguaccccugg

SEQ ID NO: 45405 - RNA, 18 nt, Human
aggaggcaaauccuguuu

SEQ ID NO: 45406 - RNA, 20 nt, Human
aggcccaacccaggaucucc

SEQ ID NO: 45407 - RNA, 22 nt, Human
aggucccuggagaccccagccc

SEQ ID NO: 45408 - RNA, 21 nt, Human
aucagagggaggcccaaccca

SEQ ID NO: 45409 - RNA, 23 nt, Human
caacacagcacuugguaaacauc

SEQ ID NO: 45410 - RNA, 22 nt, Human
caacucccuucccaccacuccc

SEQ ID NO: 45411 - RNA, 18 nt, Human
caagguggauccagcacc

SEQ ID NO: 45412 - RNA, 22 nt, Human
caccacuccccacucccuccca

SEQ ID NO: 45413 - RNA, 23 nt, Human
caucagagggaggcccaacccag

SEQ ID NO: 45414 - RNA, 21 nt, Human
caucucagguguguagggagc

SEQ ID NO: 45415 - RNA, 18 nt, Human
ccaccacuccccacuccc

SEQ ID NO: 45416 - RNA, 26 nt, Human
ccaccacuccccacucccucccaagu

SEQ ID NO: 45417 - RNA, 25 nt, Human
ccaggaucuccuguccaugggcugg

SEQ ID NO: 45418 - RNA, 21 nt, Human
ccaugggccacgcugagcccc

SEQ ID NO: 45419 - RNA, 20 nt, Human
ccaugggcuggggagcagca

SEQ ID NO: 45420 - RNA, 19 nt, Human
cccacucccucccaaguac

SEQ ID NO: 45421 - RNA, 22 nt, Human
cccagcccaccuccccuaggag

SEQ ID NO: 45422 - RNA, 22 nt, Human
ccccacucccucccaaguacag

SEQ ID NO: 45423 - RNA, 19 nt, Human
ccccagcccuauucugggc

SEQ ID NO: 45424 - RNA, 24 nt, Human
ccccagcccuauucugggccacag

SEQ ID NO: 45425 - RNA, 23 nt, Human
cccuucccaccacuccccacucc

SEQ ID NO: 45426 - RNA, 21 nt, Human
ccucccaaguacagacaaccu

SEQ ID NO: 45427 - RNA, 27 nt, Human
ccuucccaccacuccccacucccuccc

SEQ ID NO: 45428 - RNA, 18 nt, Human
ccuuccguccugcuccag

SEQ ID NO: 45429 - RNA, 23 nt, Human
cgagggcccagcccaccuccccu

SEQ ID NO: 45430 - RNA, 27 nt, Human
cuaaaauaagcacugagaggcaagacc

SEQ ID NO: 45431 - RNA, 20 nt, Human
cucugggagcugccccagcc

SEQ ID NO: 45432 - RNA, 22 nt, Human
gagggaggcccaacccaggauc

SEQ ID NO: 45433 - RNA, 22 nt, Human
gauccaguuccuugggagccaa

SEQ ID NO: 45434 - RNA, 20 nt, Human
gcuccaguugaaggggugac

SEQ ID NO: 45435 - RNA, 23 nt, Human
gcugagugacaggcaccaugggc

SEQ ID NO: 45436 - RNA, 18 nt, Human
ggagggaagggggcugag

SEQ ID NO: 45437 - RNA, 24 nt, Human
ggcuggggucaucagagggaggcc

SEQ ID NO: 45438 - RNA, 18 nt, Human
uaaaauaagcacugagag

SEQ ID NO: 45439 - RNA, 20 nt, Human
uaaaauaagcacugagaggc

SEQ ID NO: 45440 - RNA, 21 nt, Human
uagcucaggucccuggagacc

SEQ ID NO: 45441 - RNA, 20 nt, Human
ucaggcuggaggaaaaagaa

SEQ ID NO: 45442 - RNA, 22 nt, Human
uccaacacagcacuugguaaac

SEQ ID NO: 45443 - RNA, 19 nt, Human
ucccuggagaccccagccc

SEQ ID NO: 45444 - RNA, 22 nt, Human
ucucugggagcugccccagccc

SEQ ID NO: 45445 - RNA, 20 nt, Human
ugacugccaguuuacaucuc

SEQ ID NO: 45446 - RNA, 26 nt, Human
ugauucgugugacaagcaacucccuu

SEQ ID NO: 45447 - RNA, 18 nt, Human
uggcuggggucaucagag

SEQ ID NO: 45448 - RNA, 22 nt, Human
uguagcucaggucccuggagac

SEQ ID NO: 45449 - RNA, 22 nt, Human
uguggcuggcuggcuguugggu

SEQ ID NO: 45450 - RNA, 18 nt, Human
uguguagggagcguggag

SEQ ID NO: 45451 - RNA, 23 nt, Human
uguugggugauccaguuccuugg

SEQ ID NO: 45452 - RNA, 21 nt, Human
uucaggcuggaggaaaaagaa

SEQ ID NO: 45453 - RNA, 22 nt, Human
uuucccacuaaaauaagcacug

SEQ ID NO: 45454 - RNA, 21 nt, Human
aacacuguggcugggacacau

SEQ ID NO: 45455 - RNA, 18 nt, Human
agcauaacacuguggcug

SEQ ID NO: 45456 - RNA, 22 nt, Human
agcuguguuuccccuuccugcc

SEQ ID NO: 45457 - RNA, 18 nt, Human
aggaaaagccugccugug

SEQ ID NO: 45458 - RNA, 18 nt, Human
aggcucugagaggcuggu

SEQ ID NO: 45459 - RNA, 19 nt, Human
cagccacagagcauaacac

SEQ ID NO: 45460 - RNA, 23 nt, Human
cagcgccacagguuggaggaaaa

SEQ ID NO: 45461 - RNA, 22 nt, Human
cauacgugggcaucugugccac

SEQ ID NO: 45462 - RNA, 18 nt, Human
cauguguguuucacauac

SEQ ID NO: 45463 - RNA, 22 nt, Human
ccaacaguggagaucgggccuc

SEQ ID NO: 45464 - RNA, 18 nt, Human
cccauugcaccccggaac

SEQ ID NO: 45465 - RNA, 25 nt, Human
ccccauugcaccccggaacucagca

SEQ ID NO: 45466 - RNA, 23 nt, Human
ccccggaacucagcaaaggugag

SEQ ID NO: 45467 - RNA, 20 nt, Human
cccugcugcagcgccacagg

SEQ ID NO: 45468 - RNA, 21 nt, Human
ccucccccauugcaccccgga

SEQ ID NO: 45469 - RNA, 24 nt, Human
ccugccugugagcagggucccggc

SEQ ID NO: 45470 - RNA, 24 nt, Human
cggaggcucugagaggcugguggg

SEQ ID NO: 45471 - RNA, 20 nt, Human
cucccucccccauugcaccc

SEQ ID NO: 45472 - RNA, 18 nt, Human
gcaccccggaacucagca

SEQ ID NO: 45473 - RNA, 20 nt, Human
gccucagagcugggcaguca

SEQ ID NO: 45474 - RNA, 23 nt, Human
gcuuucccucccucccuccccca

SEQ ID NO: 45475 - RNA, 19 nt, Human
ggaaaagccugccugugag

SEQ ID NO: 45476 - RNA, 18 nt, Human
uaggaggaagcuuucccu

SEQ ID NO: 45477 - RNA, 18 nt, Human
ucccggcaggccacccac

SEQ ID NO: 45478 - RNA, 24 nt, Human
ucccucccucccccauugcacccc

SEQ ID NO: 45479 - RNA, 22 nt, Human
ucccucccucccucccccauug

SEQ ID NO: 45480 - RNA, 19 nt, Human
uccugcccugcugcagcgc

SEQ ID NO: 45481 - RNA, 18 nt, Human
ucgggccucagagcuggg

SEQ ID NO: 45482 - RNA, 23 nt, Human
uggagaucgggccucagagcugg

SEQ ID NO: 45483 - RNA, 21 nt, Human
uuucccucccucccuccccca

SEQ ID NO: 45484 - RNA, 20 nt, Human
aacagccucuuucuagcuga

SEQ ID NO: 45485 - RNA, 22 nt, Human
acuucaaaagccuguagagggg

SEQ ID NO: 45486 - RNA, 21 nt, Human
aggcagggugugaggauggca

SEQ ID NO: 45487 - RNA, 23 nt, Human
caaugcccacauggcaaaagccu

SEQ ID NO: 45488 - RNA, 21 nt, Human
cagcagcagccugugggucac

SEQ ID NO: 45489 - RNA, 22 nt, Human
cagcagccugugggucacugug

SEQ ID NO: 45490 - RNA, 20 nt, Human
ccaguauuuuucuaaucuau

SEQ ID NO: 45491 - RNA, 20 nt, Human
cugcuaccacuucaaaagcc

SEQ ID NO: 45492 - RNA, 24 nt, Human
cugcucugggcagauucaaaaggc

SEQ ID NO: 45493 - RNA, 21 nt, Human
cuguggcagagaauacaacca

SEQ ID NO: 45494 - RNA, 24 nt, Human
cuuuguccaccuucucacccuuca

SEQ ID NO: 45495 - RNA, 25 nt, Human
gagguuggccuggcuuauccagcug

SEQ ID NO: 45496 - RNA, 18 nt, Human
gaguguucauccagcagc

SEQ ID NO: 45497 - RNA, 18 nt, Human
ggcaaaagccuguccuuu

SEQ ID NO: 45498 - RNA, 24 nt, Human
gugaggauggcaaugcccacaugg

SEQ ID NO: 45499 - RNA, 20 nt, Human
uauccaguauuuuucuaauc

SEQ ID NO: 45500 - RNA, 21 nt, Human
ucaaaagccuguagaggggaa

SEQ ID NO: 45501 - RNA, 22 nt, Human
ugaacaagcagccugcacuacc

SEQ ID NO: 45502 - RNA, 27 nt, Human
ugaacaagcagccugcacuaccacucc

SEQ ID NO: 45503 - RNA, 23 nt, Human
ugaggagagcuguuucuggcagg

SEQ ID NO: 45504 - RNA, 24 nt, Human
ugaguguucauccagcagcagccu

SEQ ID NO: 45505 - RNA, 21 nt, Human
ugcccacauggcaaaagccug

SEQ ID NO: 45506 - RNA, 19 nt, Human
uguggcagagaauacaacc

SEQ ID NO: 45507 - RNA, 22 nt, Human
uguggcagagaauacaaccauc

SEQ ID NO: 45508 - RNA, 18 nt, Human
aagccgaggcaggcagca

SEQ ID NO: 45509 - RNA, 20 nt, Human
aagccgaggcaggcagcaua

SEQ ID NO: 45510 - RNA, 21 nt, Human
acaccuccucccgccgguacu

SEQ ID NO: 45511 - RNA, 18 nt, Human
agaggcaggggcaggugg

SEQ ID NO: 45512 - RNA, 18 nt, Human
agaggcaggggcaggugg

SEQ ID NO: 45513 - RNA, 18 nt, Human
agcaggcccagccccaag

SEQ ID NO: 45514 - RNA, 18 nt, Human
agcaggcccagccccaag

SEQ ID NO: 45515 - RNA, 22 nt, Human
agcuggggggauggcagccuca

SEQ ID NO: 45516 - RNA, 22 nt, Human
agcuggggggauggcagccuca

SEQ ID NO: 45517 - RNA, 18 nt, Human
aggcacccuggucuccag

SEQ ID NO: 45518 - RNA, 18 nt, Human
aggcacccuggucuccag

SEQ ID NO: 45519 - RNA, 22 nt, Human
aggccagcaggcccagccccaa

SEQ ID NO: 45520 - RNA, 22 nt, Human
aggccagcaggcccagccccaa

SEQ ID NO: 45521 - RNA, 20 nt, Human
aggggcaccacuggagcugg

SEQ ID NO: 45522 - RNA, 20 nt, Human
aggggcaccacuggagcugg

SEQ ID NO: 45523 - RNA, 19 nt, Human
agggggccgggcacccggg

SEQ ID NO: 45524 - RNA, 19 nt, Human
agggggccgggcacccggg

SEQ ID NO: 45525 - RNA, 22 nt, Human
aucauagaggcccagggccccc

SEQ ID NO: 45526 - RNA, 18 nt, Human
cagcacagcuacagcucc

SEQ ID NO: 45527 - RNA, 18 nt, Human
cagcacagcuacagcucc

SEQ ID NO: 45528 - RNA, 18 nt, Human
cagcagcucgugguaucg

SEQ ID NO: 45529 - RNA, 21 nt, Human
cagcaggaucccuggcacaug

SEQ ID NO: 45530 - RNA, 18 nt, Human
cagcaggggcaccacugg

SEQ ID NO: 45531 - RNA, 21 nt, Human
cagcaggggcaccacuggagc

SEQ ID NO: 45532 - RNA, 21 nt, Human
cagcagggugcugucaugagc

SEQ ID NO: 45533 - RNA, 21 nt, Human
cagcagggugcugucaugagc

SEQ ID NO: 45534 - RNA, 18 nt, Human
cagccucgggaaacagcc

SEQ ID NO: 45535 - RNA, 21 nt, Human
cagcgggccucggggcucccu

SEQ ID NO: 45536 - RNA, 23 nt, Human
cagcugggccuucucugcugccc

SEQ ID NO: 45537 - RNA, 18 nt, Human
caggaaggccucguagcg

SEQ ID NO: 45538 - RNA, 19 nt, Human
caggggcaccacuggagcu

SEQ ID NO: 45539 - RNA, 19 nt, Human
caggggcaccacuggagcu

SEQ ID NO: 45540 - RNA, 23 nt, Human
caggggcaccacuggagcugggg

SEQ ID NO: 45541 - RNA, 23 nt, Human
caggggcaccacuggagcugggg

SEQ ID NO: 45542 - RNA, 18 nt, Human
cauguugggguccagugu

SEQ ID NO: 45543 - RNA, 18 nt, Human
cauguugggguccagugu

SEQ ID NO: 45544 - RNA, 18 nt, Human
cauguugggguccagugu

SEQ ID NO: 45545 - RNA, 24 nt, Human
ccaccagcacagcuacagcuccgg

SEQ ID NO: 45546 - RNA, 24 nt, Human
ccaccagcacagcuacagcuccgg

SEQ ID NO: 45547 - RNA, 22 nt, Human
ccagcaggcccagccccaagcu

SEQ ID NO: 45548 - RNA, 22 nt, Human
ccagcaggcccagccccaagcu

SEQ ID NO: 45549 - RNA, 22 nt, Human
ccagcgggccucggggcucccu

SEQ ID NO: 45550 - RNA, 18 nt, Human
ccagcuccagcugcuggc

SEQ ID NO: 45551 - RNA, 24 nt, Human
cccagccccaagcugagugccacc

SEQ ID NO: 45552 - RNA, 24 nt, Human
cccagccccaagcugagugccacc

SEQ ID NO: 45553 - RNA, 19 nt, Human
cccagcuccagcugcuggc

SEQ ID NO: 45554 - RNA, 19 nt, Human
ccccaagcugagugccacc

SEQ ID NO: 45555 - RNA, 19 nt, Human
ccccaagcugagugccacc

SEQ ID NO: 45556 - RNA, 19 nt, Human
ccccaaggcccgcaggcac

SEQ ID NO: 45557 - RNA, 19 nt, Human
ccccaaggcccgcaggcac

SEQ ID NO: 45558 - RNA, 20 nt, Human
ccccaaggcccgcaggcacc

SEQ ID NO: 45559 - RNA, 21 nt, Human
cccccaaggcccgcaggcacc

SEQ ID NO: 45560 - RNA, 22 nt, Human
cccccuggagggccagcagggu

SEQ ID NO: 45561 - RNA, 22 nt, Human
cccccuggagggccagcagggu

SEQ ID NO: 45562 - RNA, 19 nt, Human
ccccuggagggccagcagg

SEQ ID NO: 45563 - RNA, 19 nt, Human
ccccuggagggccagcagg

SEQ ID NO: 45564 - RNA, 22 nt, Human
cccgcaggcacccuggucucca

SEQ ID NO: 45565 - RNA, 22 nt, Human
cccgcaggcacccuggucucca

SEQ ID NO: 45566 - RNA, 20 nt, Human
cccggcaagguuggccuggg

SEQ ID NO: 45567 - RNA, 19 nt, Human
cccugcgcaguggcucucc

SEQ ID NO: 45568 - RNA, 20 nt, Human
cccuggagggccagcagggu

SEQ ID NO: 45569 - RNA, 20 nt, Human
cccuggagggccagcagggu

SEQ ID NO: 45570 - RNA, 19 nt, Human
ccgcagcagcucgugguau

SEQ ID NO: 45571 - RNA, 18 nt, Human
ccgggccggggcagucag

SEQ ID NO: 45572 - RNA, 20 nt, Human
ccgggccggggcagucagcu

SEQ ID NO: 45573 - RNA, 21 nt, Human
ccggggugggcccacgugggc

SEQ ID NO: 45574 - RNA, 21 nt, Human
ccucagcagcuuauccucagc

SEQ ID NO: 45575 - RNA, 20 nt, Human
ccucaggaagcggcccagcu

SEQ ID NO: 45576 - RNA, 19 nt, Human
ccuccagcgggccucgggg

SEQ ID NO: 45577 - RNA, 23 nt, Human
ccucccgccgguacuccggacuc

SEQ ID NO: 45578 - RNA, 18 nt, Human
cgacucaggaagcccguc

SEQ ID NO: 45579 - RNA, 18 nt, Human
cgcagcagcucgugguau

SEQ ID NO: 45580 - RNA, 23 nt, Human
cgcaggacaucuggggaggccca

SEQ ID NO: 45581 - RNA, 19 nt, Human
cgcuggacccgggagaagu

SEQ ID NO: 45582 - RNA, 24 nt, Human
cggccagcaggggcaccacuggag

SEQ ID NO: 45583 - RNA, 24 nt, Human
cggccagcaggggcaccacuggag

SEQ ID NO: 45584 - RNA, 21 nt, Human
cggcggccucgguggccuccc

SEQ ID NO: 45585 - RNA, 21 nt, Human
cgggaucggccuccagcgggc

SEQ ID NO: 45586 - RNA, 18 nt, Human
cggggaggcugagaggca

SEQ ID NO: 45587 - RNA, 19 nt, Human
gaacucaaagccgaggcag

SEQ ID NO: 45588 - RNA, 19 nt, Human
gaacucaaagccgaggcag

SEQ ID NO: 45589 - RNA, 22 nt, Human
gaagcccguccagcccuccagg

SEQ ID NO: 45590 - RNA, 19 nt, Human
gaagcggccuaguggacag

SEQ ID NO: 45591 - RNA, 19 nt, Human
gaagcggccuaguggacag

SEQ ID NO: 45592 - RNA, 20 nt, Human
gcaggacaucuggggaggcc

SEQ ID NO: 45593 - RNA, 20 nt, Human
gcaguggcucuccaaccagc

SEQ ID NO: 45594 - RNA, 22 nt, Human
gcccagggcccccuggagggcc

SEQ ID NO: 45595 - RNA, 22 nt, Human
gcccagggcccccuggagggcc

SEQ ID NO: 45596 - RNA, 19 nt, Human
gcuacagcuccggccagca

SEQ ID NO: 45597 - RNA, 19 nt, Human
gcuacagcuccggccagca

SEQ ID NO: 45598 - RNA, 20 nt, Human
gcuccaauauccaaagccga

SEQ ID NO: 45599 - RNA, 18 nt, Human
gcuggacccgggagaagu

SEQ ID NO: 45600 - RNA, 18 nt, Human
ggcaagguuggccugggc

SEQ ID NO: 45601 - RNA, 22 nt, Human
ggcaccacuggagcugggggga

SEQ ID NO: 45602 - RNA, 21 nt, Human
gggcaccgugugcaccgggau

SEQ ID NO: 45603 - RNA, 19 nt, Human
ggggacagcugcgcauggg

SEQ ID NO: 45604 - RNA, 24 nt, Human
ggggcaccacuggagcugggggga

SEQ ID NO: 45605 - RNA, 19 nt, Human
gguccagugucagcugggg

SEQ ID NO: 45606 - RNA, 19 nt, Human
gguccagugucagcugggg

SEQ ID NO: 45607 - RNA, 19 nt, Human
gguccagugucagcugggg

SEQ ID NO: 45608 - RNA, 18 nt, Human
uagaagagggagacggug

SEQ ID NO: 45609 - RNA, 18 nt, Human
uagaagagggagacggug

SEQ ID NO: 45610 - RNA, 23 nt, Human
uaucggggacagcugcgcauggg

SEQ ID NO: 45611 - RNA, 18 nt, Human
ucagcuggggguagggaa

SEQ ID NO: 45612 - RNA, 18 nt, Human
ucagcuggggguagggaa

SEQ ID NO: 45613 - RNA, 18 nt, Human
ucagcuggggguagggaa

SEQ ID NO: 45614 - RNA, 21 nt, Human
ucauagaggcccagggccccc

SEQ ID NO: 45615 - RNA, 22 nt, Human
uccaauauccaaagccgagauc

SEQ ID NO: 45616 - RNA, 18 nt, Human
uccccaggugcuuccgga

SEQ ID NO: 45617 - RNA, 18 nt, Human
uccccaggugcuuccgga

SEQ ID NO: 45618 - RNA, 19 nt, Human
uccgugcugcggauguaca

SEQ ID NO: 45619 - RNA, 22 nt, Human
ucggcggccucgguggccuccc

SEQ ID NO: 45620 - RNA, 19 nt, Human
ucgguggccucccgcagca

SEQ ID NO: 45621 - RNA, 24 nt, Human
ucuccaggccagcaggcccagccc

SEQ ID NO: 45622 - RNA, 24 nt, Human
ucuccaggccagcaggcccagccc

SEQ ID NO: 45623 - RNA, 25 nt, Human
ucuccaggcgacucaggaagcccuu

SEQ ID NO: 45624 - RNA, 20 nt, Human
ugcaccgggaucggccucca

SEQ ID NO: 45625 - RNA, 21 nt, Human
ugccaccagcacagcuacagc

SEQ ID NO: 45626 - RNA, 21 nt, Human
ugccaccagcacagcuacagc

SEQ ID NO: 45627 - RNA, 18 nt, Human
uggacagggggccgggca

SEQ ID NO: 45628 - RNA, 18 nt, Human
uggacagggggccgggca

SEQ ID NO: 45629 - RNA, 20 nt, Human
uggagcuggggggauggcag

SEQ ID NO: 45630 - RNA, 20 nt, Human
uggagcuggggggauggcag

SEQ ID NO: 45631 - RNA, 20 nt, Human
uggccugggcacucuccagc

SEQ ID NO: 45632 - RNA, 21 nt, Human
uggccugggcacucuccagcg

SEQ ID NO: 45633 - RNA, 18 nt, Human
uggcggacccccuccgug

SEQ ID NO: 45634 - RNA, 18 nt, Human
uggcucacacggggcccc

SEQ ID NO: 45635 - RNA, 18 nt, Human
uggcucacacggggcccc

SEQ ID NO: 45636 - RNA, 24 nt, Human
uggcucuccaaccagcgacagucc

SEQ ID NO: 45637 - RNA, 19 nt, Human
ugggcgggaggccgggccg

SEQ ID NO: 45638 - RNA, 19 nt, Human
ugggcgggaggccgggccg

SEQ ID NO: 45639 - RNA, 21 nt, Human
ugguaguggaagaccgugggc

SEQ ID NO: 45640 - RNA, 19 nt, Human
ucaucuuuccuuuuucuca

SEQ ID NO: 45641 - RNA, 20 nt, Human
uuuuauaucuauauauauau

SEQ ID NO: 45642 - RNA, 22 nt, Human
uuuuauaucuauauauauaugu

SEQ ID NO: 45643 - RNA, 19 nt, Human
aaauacccugucaagggca

SEQ ID NO: 45644 - RNA, 18 nt, Human
augccacaguagcccuag

SEQ ID NO: 45645 - RNA, 18 nt, Human
ccaguaaaggauauagcu

SEQ ID NO: 45646 - RNA, 23 nt, Human
cguuugucuuuccugucuacaua

SEQ ID NO: 45647 - RNA, 25 nt, Human
cuaacauuacuuacuuaacaguacc

SEQ ID NO: 45648 - RNA, 19 nt, Human
cuacaugugaaaaauaugg

SEQ ID NO: 45649 - RNA, 22 nt, Human
cucaaguaagacccaagguaga

SEQ ID NO: 45650 - RNA, 19 nt, Human
cucuaagauaaccuuaaga

SEQ ID NO: 45651 - RNA, 28 nt, Human
cuugaaaacucacuuuucuuuugcauuu

SEQ ID NO: 45652 - RNA, 18 nt, Human
cuuguccucuuuccagca

SEQ ID NO: 45653 - RNA, 19 nt, Human
cuuguccucuuuccagcau

SEQ ID NO: 45654 - RNA, 19 nt, Human
gaaaaauauggaacucaag

SEQ ID NO: 45655 - RNA, 21 nt, Human
gaaauacccugucaagggcca

SEQ ID NO: 45656 - RNA, 23 nt, Human
gacccaagguagaucccaagggc

SEQ ID NO: 45657 - RNA, 19 nt, Human
gcccuaguguuuaaguguu

SEQ ID NO: 45658 - RNA, 21 nt, Human
uaacaguaccuaaauucuaau

SEQ ID NO: 45659 - RNA, 25 nt, Human
uaagacccaagguagaucccaaggg

SEQ ID NO: 45660 - RNA, 23 nt, Human
uaauauuccuaacuucacaaaac

SEQ ID NO: 45661 - RNA, 21 nt, Human
uagaucccaagggcuucagaa

SEQ ID NO: 45662 - RNA, 22 nt, Human
uagaucccaagggcuucagaaa

SEQ ID NO: 45663 - RNA, 22 nt, Human
ucaauaccaucaacaacgaauu

SEQ ID NO: 45664 - RNA, 23 nt, Human
ucuacaugugaaaaauauggaac

SEQ ID NO: 45665 - RNA, 22 nt, Human
ucucaaacuuguccucuuucca

SEQ ID NO: 45666 - RNA, 23 nt, Human
ucuccucucucaaccugccacuc

SEQ ID NO: 45667 - RNA, 24 nt, Human
ugccaaguguuuucaucacauccc

SEQ ID NO: 45668 - RNA, 20 nt, Human
ugccacaguagcccuagugu

SEQ ID NO: 45669 - RNA, 18 nt, Human
uggaacucaaguaagacc

SEQ ID NO: 45670 - RNA, 18 nt, Human
uuaaguguugccucucaa

SEQ ID NO: 45671 - RNA, 21 nt, Human
uucaucacauccccaaggcua

SEQ ID NO: 45672 - RNA, 22 nt, Human
uucuaaaacuucuuaccaguaa

SEQ ID NO: 45673 - RNA, 23 nt, Human
uuuuuuuuuuuuuuuugaugcag

SEQ ID NO: 45674 - RNA, 19 nt, Human
aaaacaagcaagggcccag

SEQ ID NO: 45675 - RNA, 18 nt, Human
aaaacaagcaagggcccg

SEQ ID NO: 45676 - RNA, 23 nt, Human
aagaauggauaaaagcaugaaua

SEQ ID NO: 45677 - RNA, 21 nt, Human
aauagagugauggaggcuuuu

SEQ ID NO: 45678 - RNA, 26 nt, Human
aauggauaaaagcaugaauagaagaa

SEQ ID NO: 45679 - RNA, 22 nt, Human
agaauggauaaaagcaugaaua

SEQ ID NO: 45680 - RNA, 23 nt, Human
agcuaugaagcaaacugcgagca

SEQ ID NO: 45681 - RNA, 23 nt, Human
cccagugugggccacaggguacc

SEQ ID NO: 45682 - RNA, 23 nt, Human
ccccagugugggccacagcugcu

SEQ ID NO: 45683 - RNA, 23 nt, Human
ccugagucaaaacaagcaagggc

SEQ ID NO: 45684 - RNA, 19 nt, Human
gaagacaggacagagaaga

SEQ ID NO: 45685 - RNA, 22 nt, Human
gauaaaagcaugaauagaagaa

SEQ ID NO: 45686 - RNA, 20 nt, Human
gcugcuucacagagcuauga

SEQ ID NO: 45687 - RNA, 27 nt, Human
gcugcuucacagagcuaugaagcaaac

SEQ ID NO: 45688 - RNA, 24 nt, Human
gcuucacagagcuaugaagcaaac

SEQ ID NO: 45689 - RNA, 20 nt, Human
ggaaggaacuaaauauaaaa

SEQ ID NO: 45690 - RNA, 22 nt, Human
gggaaggaacuaaauauaaaau

SEQ ID NO: 45691 - RNA, 23 nt, Human
uaaaaugagccaaauagagugau

SEQ ID NO: 45692 - RNA, 18 nt, Human
ucaaaacaagcaagggcc

SEQ ID NO: 45693 - RNA, 26 nt, Human
ugaaaaaaaaaucaggaauauugaga

SEQ ID NO: 45694 - RNA, 18 nt, Human
ugacuggggaaggaacua

SEQ ID NO: 45695 - RNA, 23 nt, Human
ugacuggggaaggaacuaaauau

SEQ ID NO: 45696 - RNA, 25 nt, Human
ugagucaaaacaagcaagggcccag

SEQ ID NO: 45697 - RNA, 25 nt, Human
ugccugagucaaaacaagcaagggc

SEQ ID NO: 45698 - RNA, 22 nt, Human
uggauaaaagcaugaauagaag

SEQ ID NO: 45699 - RNA, 22 nt, Human
uucacagagcuaugaagcaaac

SEQ ID NO: 45700 - RNA, 20 nt, Human
uugaaaaaaaaaucaggaau

SEQ ID NO: 45701 - RNA, 19 nt, Human
uuuuuuuuuuuuuugcuuu

SEQ ID NO: 45702 - RNA, 20 nt, Human
uuuuuuuuuuuuuuugcuuu

SEQ ID NO: 45703 - RNA, 22 nt, Human
uuuuuuuuuuuuuuugcuuuaa

SEQ ID NO: 45704 - RNA, 26 nt, Human
aaaaacuuuuccacucuaaggcacuc

SEQ ID NO: 45705 - RNA, 21 nt, Human
aacguguugaaacccaugcuu

SEQ ID NO: 45706 - RNA, 21 nt, Human
aagaccgcaacugaguucugg

SEQ ID NO: 45707 - RNA, 25 nt, Human
accuuaagagauggcccccuggagg

SEQ ID NO: 45708 - RNA, 19 nt, Human
acuccaaaaggaacagaaa

SEQ ID NO: 45709 - RNA, 20 nt, Human
acugugcuuuuugugugcuu

SEQ ID NO: 45710 - RNA, 20 nt, Human
agaauagacuuuuauuucau

SEQ ID NO: 45711 - RNA, 20 nt, Human
aucugaagaucccuuccaac

SEQ ID NO: 45712 - RNA, 20 nt, Human
augugugaaaaaaaggauga

SEQ ID NO: 45713 - RNA, 21 nt, Human
caaaaauaagaccgcaacuga

SEQ ID NO: 45714 - RNA, 24 nt, Human
caaaaggaacagaaagucaccagc

SEQ ID NO: 45715 - RNA, 22 nt, Human
cacaugcaugucaacuccaaaa

SEQ ID NO: 45716 - RNA, 21 nt, Human
caccagcaccaucugaagauc

SEQ ID NO: 45717 - RNA, 22 nt, Human
caccaucugaagaucccuucca

SEQ ID NO: 45718 - RNA, 23 nt, Human
caguuuuguucuuuuaccauuca

SEQ ID NO: 45719 - RNA, 21 nt, Human
cauauuccauugaguaaacac

SEQ ID NO: 45720 - RNA, 22 nt, Human
caucugaagaucccuuccaacu

SEQ ID NO: 45721 - RNA, 21 nt, Human
caugucaacuccaaaaggaac

SEQ ID NO: 45722 - RNA, 25 nt, Human
ccaucugaagaucccuuccaacugc

SEQ ID NO: 45723 - RNA, 21 nt, Human
cccaugcuuuggcuaucccua

SEQ ID NO: 45724 - RNA, 22 nt, Human
ccugcauuuccuccaagucuua

SEQ ID NO: 45725 - RNA, 19 nt, Human
ccuucuugggaaauugggg

SEQ ID NO: 45726 - RNA, 21 nt, Human
cugugauuuaaacaguacgaa

SEQ ID NO: 45727 - RNA, 27 nt, Human
cuucuugggaaauuggggaacucugag

SEQ ID NO: 45728 - RNA, 21 nt, Human
gaauauuuucuaaaacuuaag

SEQ ID NO: 45729 - RNA, 18 nt, Human
gagagccauaauguccuc

SEQ ID NO: 45730 - RNA, 18 nt, Human
gauauuuuccucugcuuc

SEQ ID NO: 45731 - RNA, 22 nt, Human
gauuuuuaaaugauaacaauuc

SEQ ID NO: 45732 - RNA, 19 nt, Human
gggcugcaaaauuauuggu

SEQ ID NO: 45733 - RNA, 18 nt, Human
uaaacacagaacuagcaa

SEQ ID NO: 45734 - RNA, 24 nt, Human
uaaugaauuuacucugaucaguuu

SEQ ID NO: 45735 - RNA, 22 nt, Human
uagaauacucaagguaguuccc

SEQ ID NO: 45736 - RNA, 22 nt, Human
uaucccuagguagaaaugaucc

SEQ ID NO: 45737 - RNA, 20 nt, Human
uauucauuucuguucuacug

SEQ ID NO: 45738 - RNA, 22 nt, Human
ucacauuacauauaaccaggaa

SEQ ID NO: 45739 - RNA, 23 nt, Human
uccaaaaggaacagaaagucacc

SEQ ID NO: 45740 - RNA, 21 nt, Human
uccacagcuccuagguauaug

SEQ ID NO: 45741 - RNA, 23 nt, Human
uccucaguucucauauuccauug

SEQ ID NO: 45742 - RNA, 24 nt, Human
ucucuuaguuuuucuuuuacucuu

SEQ ID NO: 45743 - RNA, 23 nt, Human
ucuggcuuuagugacaacgaagg

SEQ ID NO: 45744 - RNA, 24 nt, Human
ucuguaagcguuuagaaaaaucac

SEQ ID NO: 45745 - RNA, 26 nt, Human
ucuuauaccguguacaugacuccuac

SEQ ID NO: 45746 - RNA, 19 nt, Human
ucuucaguaauuacaucca

SEQ ID NO: 45747 - RNA, 19 nt, Human
ugacaacgaaggcaaaaug

SEQ ID NO: 45748 - RNA, 18 nt, Human
ugagggcaaauuguagcu

SEQ ID NO: 45749 - RNA, 24 nt, Human
ugagggcaaauuguagcuuuguuu

SEQ ID NO: 45750 - RNA, 21 nt, Human
ugaguaaacacagaacuagca

SEQ ID NO: 45751 - RNA, 22 nt, Human
ugauuaugaagagauauuuucc

SEQ ID NO: 45752 - RNA, 25 nt, Human
ugauuuaaacaguacgaaaggagaa

SEQ ID NO: 45753 - RNA, 20 nt, Human
ugcaaggagaguugucuuug

SEQ ID NO: 45754 - RNA, 19 nt, Human
ugcaggagaaaacagaagg

SEQ ID NO: 45755 - RNA, 21 nt, Human
uggcccccuggauuguggccu

SEQ ID NO: 45756 - RNA, 21 nt, Human
ugugauaauugcuaaugaauu

SEQ ID NO: 45757 - RNA, 20 nt, Human
uguggacucagccuuccccg

SEQ ID NO: 45758 - RNA, 19 nt, Human
uguuuuuuaauucuacagu

SEQ ID NO: 45759 - RNA, 19 nt, Human
uuagugacaacgaaggcaa

SEQ ID NO: 45760 - RNA, 18 nt, Human
uuccuccaagucuuauac

SEQ ID NO: 45761 - RNA, 22 nt, Human
uugcaggagaaaacagaagggu

SEQ ID NO: 45762 - RNA, 19 nt, Human
uuguggccucuaucucucc

SEQ ID NO: 45763 - RNA, 18 nt, Human
uuuccacucuaaacuaca

SEQ ID NO: 45764 - RNA, 24 nt, Human
uuugcaggagaaaacagaaggguc

SEQ ID NO: 45765 - RNA, 23 nt, Human
uuuuguucuuuuaccauucauag

SEQ ID NO: 45766 - RNA, 19 nt, Human
aacagaaugacuuuaaugc

SEQ ID NO: 45767 - RNA, 19 nt, Human
ccuggucgccgcggagggg

SEQ ID NO: 45768 - RNA, 19 nt, Human
cucucggcucgggcccugg

SEQ ID NO: 45769 - RNA, 22 nt, Human
cugcgggguggcuggagcucag

SEQ ID NO: 45770 - RNA, 22 nt, Human
cuucaaguuuuccauuuucuuc

SEQ ID NO: 45771 - RNA, 19 nt, Human
gacugcgggguggcuggag

SEQ ID NO: 45772 - RNA, 24 nt, Human
gccgcccccccauugagaagauuc

SEQ ID NO: 45773 - RNA, 18 nt, Human
uacgauggcagcaacgga

SEQ ID NO: 45774 - RNA, 24 nt, Human
ucgaaaaauaacaaaaugagguaa

SEQ ID NO: 45775 - RNA, 23 nt, Human
ucgggcccuggucgccgcggagg

SEQ ID NO: 45776 - RNA, 19 nt, Human
ugacugcgggguggcugga

SEQ ID NO: 45777 - RNA, 26 nt, Human
uggcagcaacggaaguuguuacaaag

SEQ ID NO: 45778 - RNA, 18 nt, Human
uuaacagaaugacuuuaa

SEQ ID NO: 45779 - RNA, 20 nt, Human
uuacaaagaaagugacugcg

SEQ ID NO: 45780 - RNA, 22 nt, Human
agcugcuucacaggauuccuga

SEQ ID NO: 45781 - RNA, 20 nt, Human
cacaguugugugcuagagac

SEQ ID NO: 45782 - RNA, 28 nt, Human
cagauuuauuaaaaaacacauagguaac

SEQ ID NO: 45783 - RNA, 22 nt, Human
gaaugauuuggaaaagaacuga

SEQ ID NO: 45784 - RNA, 21 nt, Human
gagacagagaggagcaggaaa

SEQ ID NO: 45785 - RNA, 19 nt, Human
gcuucacaggauuccugac

SEQ ID NO: 45786 - RNA, 24 nt, Human
uaccaguagccuauuucagauuua

SEQ ID NO: 45787 - RNA, 21 nt, Human
ucacaggauuccugacagugc

SEQ ID NO: 45788 - RNA, 21 nt, Human
ucagagcuuuggcuaggaaug

SEQ ID NO: 45789 - RNA, 24 nt, Human
ucagagcuuuggcuaggaaugauu

SEQ ID NO: 45790 - RNA, 20 nt, Human
uggaaaagaacugaaggcag

SEQ ID NO: 45791 - RNA, 20 nt, Human
uggaaaagaacugaaggcau

SEQ ID NO: 45792 - RNA, 23 nt, Human
ugugcuagagacagagaggagca

SEQ ID NO: 45793 - RNA, 23 nt, Human
uucacaggauuccugacagugcu

SEQ ID NO: 45794 - RNA, 23 nt, Human
aaaaaaaaccaaaacaaaacaaa

SEQ ID NO: 45795 - RNA, 23 nt, Human
aaaaaacaaauaaagccaugcca

SEQ ID NO: 45796 - RNA, 23 nt, Human
aaaaaacaaauaaagccaugcca

SEQ ID NO: 45797 - RNA, 26 nt, Human
aaaaaaccaaaacaaaacaaaaaaaa

SEQ ID NO: 45798 - RNA, 30 nt, Human
aaaaaaccaaaacaaaacaaaaaaaacaaa

SEQ ID NO: 45799 - RNA, 19 nt, Human
aaaacaaaacaaaaaaaac

SEQ ID NO: 45800 - RNA, 20 nt, Human
aaaacaaauaaagccaugcc

SEQ ID NO: 45801 - RNA, 19 nt, Human
aaaagccuucauacaucuc

SEQ ID NO: 45802 - RNA, 20 nt, Human
aaaccaaaacaaaacaaaaa

SEQ ID NO: 45803 - RNA, 23 nt, Human
aaaccaaaacaaaacaaaaaaaa

SEQ ID NO: 45804 - RNA, 26 nt, Human
aaaccaaaacaaaacaaaaaaaacaa

SEQ ID NO: 45805 - RNA, 21 nt, Human
aacaaugugcaaucaaagucc

SEQ ID NO: 45806 - RNA, 19 nt, Human
aacuggucucaagucagug

SEQ ID NO: 45807 - RNA, 18 nt, Human
aagccaaaaaaaaaaaaa

SEQ ID NO: 45808 - RNA, 22 nt, Human
aaguugggggacaaaaaggggg

SEQ ID NO: 45809 - RNA, 18 nt, Human
acaaaaagggggaagggg

SEQ ID NO: 45810 - RNA, 18 nt, Human
acaaaacaaaaaaaacaa

SEQ ID NO: 45811 - RNA, 20 nt, Human
acaaaacaaaaaaaacaaau

SEQ ID NO: 45812 - RNA, 21 nt, Human
acaaaacaaaaaaaacaaaua

SEQ ID NO: 45813 - RNA, 19 nt, Human
acccacucccagggagacc

SEQ ID NO: 45814 - RNA, 21 nt, Human
agcaaugcuaucaccuccccu

SEQ ID NO: 45815 - RNA, 22 nt, Human
agggggaagggggggcacgaag

SEQ ID NO: 45816 - RNA, 25 nt, Human
agggggaagggggggcacgaaggcu

SEQ ID NO: 45817 - RNA, 27 nt, Human
agggggaagggggggcacgaaggcuca

SEQ ID NO: 45818 - RNA, 18 nt, Human
agucaagccaaaaaaaaa

SEQ ID NO: 45819 - RNA, 25 nt, Human
auuuacacgaaagcaaugcuaucac

SEQ ID NO: 45820 - RNA, 21 nt, Human
caaaaaaaacaaauaaagcca

SEQ ID NO: 45821 - RNA, 27 nt, Human
caaaaaaaacaaauaaagccaugccaa

SEQ ID NO: 45822 - RNA, 23 nt, Human
caaaauaaaaaaguauuaaggcg

SEQ ID NO: 45823 - RNA, 23 nt, Human
caacaaugugcaaucaaaguccu

SEQ ID NO: 45824 - RNA, 29 nt, Human
caaguugggggacaaaaagggggaagggg

SEQ ID NO: 45825 - RNA, 24 nt, Human
caucucaaguugggggacaaaaag

SEQ ID NO: 45826 - RNA, 24 nt, Human
ccaaaaaaaaaaaaaaaaccaaaa

SEQ ID NO: 45827 - RNA, 27 nt, Human
ccaaaaaaaaaaaaaaaaccaaaacaa

SEQ ID NO: 45828 - RNA, 22 nt, Human
ccaaaacaaaacaaaaaaaaca

SEQ ID NO: 45829 - RNA, 21 nt, Human
ccaaaagccuucauacaucuc

SEQ ID NO: 45830 - RNA, 24 nt, Human
ccaaaagccuucauacaucucaag

SEQ ID NO: 45831 - RNA, 23 nt, Human
ccuccccuguguggacuugggag

SEQ ID NO: 45832 - RNA, 22 nt, Human
ccugagucaagccaaaaaaaaa

SEQ ID NO: 45833 - RNA, 19 nt, Human
cgcuccaaccgacugcugu

SEQ ID NO: 45834 - RNA, 22 nt, Human
cgcuccaaccgacugcugucac

SEQ ID NO: 45835 - RNA, 18 nt, Human
cggcaaaggcgaggcucu

SEQ ID NO: 45836 - RNA, 19 nt, Human
cuggcggcggguguggacg

SEQ ID NO: 45837 - RNA, 26 nt, Human
cuggucucaagucaguguacagguaa

SEQ ID NO: 45838 - RNA, 22 nt, Human
gaaagcaaugcuaucaccuccc

SEQ ID NO: 45839 - RNA, 20 nt, Human
gccaaaaaaaaaaaaaaaac

SEQ ID NO: 45840 - RNA, 24 nt, Human
gccaaaaaaaaaaaaaaaaccaaa

SEQ ID NO: 45841 - RNA, 22 nt, Human
gcccuggcugccuccacccacu

SEQ ID NO: 45842 - RNA, 18 nt, Human
gggacaaaaagggggaag

SEQ ID NO: 45843 - RNA, 26 nt, Human
gggcacgaaggcucaucauucaaaau

SEQ ID NO: 45844 - RNA, 20 nt, Human
ggggaagggggggcacgaag

SEQ ID NO: 45845 - RNA, 20 nt, Human
guugggggacaaaaaggggg

SEQ ID NO: 45846 - RNA, 20 nt, Human
uaaaaaaacaacaaugugca

SEQ ID NO: 45847 - RNA, 23 nt, Human
uaaauccugagucaagccaaaaa

SEQ ID NO: 45848 - RNA, 24 nt, Human
uaaauccugagucaagccaaaaaa

SEQ ID NO: 45849 - RNA, 23 nt, Human
uacacgaaagcaaugcuaucacc

SEQ ID NO: 45850 - RNA, 24 nt, Human
uacagguaagcccuggcugccucc

SEQ ID NO: 45851 - RNA, 18 nt, Human
ucaacuggucucaaguca

SEQ ID NO: 45852 - RNA, 22 nt, Human
ucaagccaaaaaaaaaaaaaaa

SEQ ID NO: 45853 - RNA, 23 nt, Human
ucaagccaaaaaaaaaaaaaaaa

SEQ ID NO: 45854 - RNA, 27 nt, Human
ucaagccaaaaaaaaaaaaaaaaccaa

SEQ ID NO: 45855 - RNA, 23 nt, Human
uccacccacucccagggagacca

SEQ ID NO: 45856 - RNA, 23 nt, Human
uccuuagagagaagugggguggc

SEQ ID NO: 45857 - RNA, 24 nt, Human
ugagucaagccaaaaaaaaaaaaa

SEQ ID NO: 45858 - RNA, 20 nt, Human
ugcaaucaaaguccucggcc

SEQ ID NO: 45859 - RNA, 21 nt, Human
uggcugccuccacccacuccc

SEQ ID NO: 45860 - RNA, 19 nt, Human
ugucaagaaaggguguaac

SEQ ID NO: 45861 - RNA, 24 nt, Human
ugucaagaaaggguguaacgcaac

SEQ ID NO: 45862 - RNA, 20 nt, Human
uguggacgggcggcggaucg

SEQ ID NO: 45863 - RNA, 22 nt, Human
uguggacgggcggcggaucggc

SEQ ID NO: 45864 - RNA, 22 nt, Human
uuaaaaaaacaacaaugugcaa

SEQ ID NO: 45865 - RNA, 19 nt, Human
uuaaggcgaagauuaaaaa

SEQ ID NO: 45866 - RNA, 22 nt, Human
uuaggauggcaagggacuuccu

SEQ ID NO: 45867 - RNA, 26 nt, Human
uucaaaauaaaacaaaauaaaaaagu

SEQ ID NO: 45868 - RNA, 25 nt, Human
aacaaauugcacguguguaaacaaa

SEQ ID NO: 45869 - RNA, 23 nt, Human
aagaugagggaaggugguuugga

SEQ ID NO: 45870 - RNA, 22 nt, Human
acaaacaaauugcacgugugua

SEQ ID NO: 45871 - RNA, 18 nt, Human
agguagauggagagagaa

SEQ ID NO: 45872 - RNA, 20 nt, Human
gguagauggagagagaaggc

SEQ ID NO: 45873 - RNA, 22 nt, Human
uaaagcaauaaauauuagaagc

SEQ ID NO: 45874 - RNA, 20 nt, Human
ugaaagaugagggaaggugg

SEQ ID NO: 45875 - RNA, 22 nt, Human
ugaugaaagaugagggaaggug

SEQ ID NO: 45876 - RNA, 19 nt, Human
cugguaacagaguagucuc

SEQ ID NO: 45877 - RNA, 24 nt, Human
cuucucccagugacugagggcugg

SEQ ID NO: 45878 - RNA, 23 nt, Human
gaggggauccuuggagaaccugu

SEQ ID NO: 45879 - RNA, 20 nt, Human
uaacagaguagucucgaggg

SEQ ID NO: 45880 - RNA, 22 nt, Human
uaacagaguagucucgagggga

SEQ ID NO: 45881 - RNA, 21 nt, Human
ucucccagugacugagggcug

SEQ ID NO: 45882 - RNA, 18 nt, Human
ugagugagcuggggacug

SEQ ID NO: 45883 - RNA, 22 nt, Human
uggagcaccgaggguaugagag

SEQ ID NO: 45884 - RNA, 19 nt, Human
uuggagaaccuguucugac

SEQ ID NO: 45885 - RNA, 19 nt, Human
aaacacacacgcaccaaug

SEQ ID NO: 45886 - RNA, 19 nt, Human
aacacacacgcaccaaugu

SEQ ID NO: 45887 - RNA, 24 nt, Human
aagacgagggcggccgggcggggu

SEQ ID NO: 45888 - RNA, 21 nt, Human
acagcagauggaacagauaga

SEQ ID NO: 45889 - RNA, 21 nt, Human
acccggguggaggcugggagc

SEQ ID NO: 45890 - RNA, 19 nt, Human
acuuuuuuuucuuuuuugc

SEQ ID NO: 45891 - RNA, 25 nt, Human
agaagaaaaaaaaaucaguaaaaag

SEQ ID NO: 45892 - RNA, 28 nt, Human
agaagaaaaaaaaaucaguaaaaaggaa

SEQ ID NO: 45893 - RNA, 24 nt, Human
agcagauggaacagauagaagaaa

SEQ ID NO: 45894 - RNA, 19 nt, Human
aggcaggagaugggcgacg

SEQ ID NO: 45895 - RNA, 20 nt, Human
agggcugggcugggcugggc

SEQ ID NO: 45896 - RNA, 30 nt, Human
auagaagaaaaaaaaaucaguaaaaaggaa

SEQ ID NO: 45897 - RNA, 20 nt, Human
caagacgagggcggccgggc

SEQ ID NO: 45898 - RNA, 22 nt, Human
caagaguacccccuaccccgac

SEQ ID NO: 45899 - RNA, 24 nt, Human
cccacaccaaaauggacaugagau

SEQ ID NO: 45900 - RNA, 23 nt, Human
gaacccaggcaggagaugggcga

SEQ ID NO: 45901 - RNA, 27 nt, Human
gagcugaaaccgaacccaggcaggaga

SEQ ID NO: 45902 - RNA, 25 nt, Human
gaguacccccuaccccgacucccac

SEQ ID NO: 45903 - RNA, 21 nt, Human
gcgcgcgugcuagggucugga

SEQ ID NO: 45904 - RNA, 20 nt, Human
gcggaggugcaaggcagggc

SEQ ID NO: 45905 - RNA, 21 nt, Human
ggagaugggcgacggcggagg

SEQ ID NO: 45906 - RNA, 26 nt, Human
ggaguagggcugggcugggcugggcc

SEQ ID NO: 45907 - RNA, 18 nt, Human
ggcagggaggaucgaugc

SEQ ID NO: 45908 - RNA, 24 nt, Human
ggcuggcggggccgggcucgcucc

SEQ ID NO: 45909 - RNA, 23 nt, Human
ggcugggcugggcuggcggggcc

SEQ ID NO: 45910 - RNA, 18 nt, Human
ggcugggcugggcugggc

SEQ ID NO: 45911 - RNA, 22 nt, Human
gggagggaguagggcugggcug

SEQ ID NO: 45912 - RNA, 25 nt, Human
gggagggaguagggcugggcugggc

SEQ ID NO: 45913 - RNA, 18 nt, Human
gggcugggcugggcuggg

SEQ ID NO: 45914 - RNA, 19 nt, Human
gggcugggcugggcugggc

SEQ ID NO: 45915 - RNA, 24 nt, Human
ggggagggaguagggcugggcugg

SEQ ID NO: 45916 - RNA, 26 nt, Human
ggggagggaguagggcugggcugggc

SEQ ID NO: 45917 - RNA, 21 nt, Human
guggggagggaguagggcugg

SEQ ID NO: 45918 - RNA, 26 nt, Human
uaacuuuuuuuucuuuuuugcagaaa

SEQ ID NO: 45919 - RNA, 21 nt, Human
uacccccuaccccgacuccca

SEQ ID NO: 45920 - RNA, 20 nt, Human
uaguuaaucuuuccucuuuu

SEQ ID NO: 45921 - RNA, 23 nt, Human
ucucugagcaacggcugcugccc

SEQ ID NO: 45922 - RNA, 19 nt, Human
ucuuccuccaccuucucuc

SEQ ID NO: 45923 - RNA, 22 nt, Human
ugcccuggcguggggagggagu

SEQ ID NO: 45924 - RNA, 24 nt, Human
ugcgcgcgugcuagggucuggauu

SEQ ID NO: 45925 - RNA, 23 nt, Human
uggauuucuuccuccaccuucuc

SEQ ID NO: 45926 - RNA, 25 nt, Human
uggcguggggagggaguagggcugg

SEQ ID NO: 45927 - RNA, 20 nt, Human
ugggcugggcuggcggggcc

SEQ ID NO: 45928 - RNA, 19 nt, Human
ugggcugggcugggcuggc

SEQ ID NO: 45929 - RNA, 20 nt, Human
uggggagggaguagggcugg

SEQ ID NO: 45930 - RNA, 21 nt, Human
uggggagggaguagggcuggg

SEQ ID NO: 45931 - RNA, 22 nt, Human
uuccgccgcggcgcugcuggcg

SEQ ID NO: 45932 - RNA, 22 nt, Human
uucgcgggcagggaggaucgau

SEQ ID NO: 45933 - RNA, 20 nt, Human
uugguuuuuaacguaacuuu

SEQ ID NO: 45934 - RNA, 20 nt, Human
aaacagagcacuuuuaugug

SEQ ID NO: 45935 - RNA, 22 nt, Human
aagcaucaaaaaaucacugacu

SEQ ID NO: 45936 - RNA, 21 nt, Human
aagcugucaacaagauggaaa

SEQ ID NO: 45937 - RNA, 24 nt, Human
aagcuuccgcaaaagaaagaacuc

SEQ ID NO: 45938 - RNA, 21 nt, Human
aauauacuccccuagggccaa

SEQ ID NO: 45939 - RNA, 18 nt, Human
aauaucuaguuauuccua

SEQ ID NO: 45940 - RNA, 24 nt, Human
aauccccggcaguuccaucucaca

SEQ ID NO: 45941 - RNA, 19 nt, Human
aauuugugguuuuuucccc

SEQ ID NO: 45942 - RNA, 22 nt, Human
acaaaaagcaugggaaccugga

SEQ ID NO: 45943 - RNA, 22 nt, Human
acuguccaaucccaggggugaa

SEQ ID NO: 45944 - RNA, 19 nt, Human
aggccuuuagacacagaac

SEQ ID NO: 45945 - RNA, 23 nt, Human
auaaauaauccuaaaaaccucau

SEQ ID NO: 45946 - RNA, 18 nt, Human
aucccaggggugaacaca

SEQ ID NO: 45947 - RNA, 24 nt, Human
aucuaguuauuccuacuacacaaa

SEQ ID NO: 45948 - RNA, 22 nt, Human
caaaagaaagaacucaccucca

SEQ ID NO: 45949 - RNA, 23 nt, Human
caaaagaaagaacucaccuccac

SEQ ID NO: 45950 - RNA, 22 nt, Human
caauuacugaacuacgaaaggc

SEQ ID NO: 45951 - RNA, 22 nt, Human
cagcaguaugagcaaaaagaaa

SEQ ID NO: 45952 - RNA, 22 nt, Human
ccuaaaaaccucauuucaccuu

SEQ ID NO: 45953 - RNA, 21 nt, Human
ccuccuaauuuccuauuacuc

SEQ ID NO: 45954 - RNA, 23 nt, Human
cgccugggcgcugggucucgggc

SEQ ID NO: 45955 - RNA, 21 nt, Human
cggacgcacgggcugacuggc

SEQ ID NO: 45956 - RNA, 20 nt, Human
cuacagcaguaugagcaaaa

SEQ ID NO: 45957 - RNA, 20 nt, Human
cucucuggcaauuaaacuga

SEQ ID NO: 45958 - RNA, 18 nt, Human
gagcacuuuuaugugguc

SEQ ID NO: 45959 - RNA, 22 nt, Human
gaggcggcgggcggcgggcggc

SEQ ID NO: 45960 - RNA, 19 nt, Human
gauacugguuucugacuug

SEQ ID NO: 45961 - RNA, 22 nt, Human
gcaaaagaaagaacucaccucc

SEQ ID NO: 45962 - RNA, 20 nt, Human
gcucgguuggccggggcugc

SEQ ID NO: 45963 - RNA, 22 nt, Human
gcugcggcggggcgcgaggggc

SEQ ID NO: 45964 - RNA, 24 nt, Human
ggaaaaacaggggggaauuauagc

SEQ ID NO: 45965 - RNA, 21 nt, Human
ggcggcgggcgcggggugacc

SEQ ID NO: 45966 - RNA, 20 nt, Human
ggcgggcggcgggcgcgggg

SEQ ID NO: 45967 - RNA, 19 nt, Human
ggcgggcggcgggcggcgg

SEQ ID NO: 45968 - RNA, 21 nt, Human
gggcgcgaggggcucggacgc

SEQ ID NO: 45969 - RNA, 25 nt, Human
gggcugcggcggggcgcgaggggcu

SEQ ID NO: 45970 - RNA, 20 nt, Human
guaugagcaaaaagaaagaa

SEQ ID NO: 45971 - RNA, 18 nt, Human
uaaaacuagaggcauaag

SEQ ID NO: 45972 - RNA, 27 nt, Human
uaaaacuagaggcauaaggaaguccug

SEQ ID NO: 45973 - RNA, 22 nt, Human
uaaaauaucuaguuauuccuac

SEQ ID NO: 45974 - RNA, 23 nt, Human
uaaagcuugucaaaguuuccagg

SEQ ID NO: 45975 - RNA, 19 nt, Human
uaagcauauuagagauaaa

SEQ ID NO: 45976 - RNA, 24 nt, Human
uacagcaguaugagcaaaaagaaa

SEQ ID NO: 45977 - RNA, 20 nt, Human
uacuacacaaaacauaugua

SEQ ID NO: 45978 - RNA, 22 nt, Human
uagaaucccaaauauacucccc

SEQ ID NO: 45979 - RNA, 20 nt, Human
uagcaggagugcauguagca

SEQ ID NO: 45980 - RNA, 25 nt, Human
uaugagcaaaaagaaagaaugaaca

SEQ ID NO: 45981 - RNA, 23 nt, Human
uauuacucaaguaauuuguucug

SEQ ID NO: 45982 - RNA, 21 nt, Human
uccuucugucccuagauccuc

SEQ ID NO: 45983 - RNA, 23 nt, Human
uccuucugucccuagauccuccu

SEQ ID NO: 45984 - RNA, 21 nt, Human
ucuuggguauuuuguauuuuc

SEQ ID NO: 45985 - RNA, 24 nt, Human
ucuuuuuaauccccggcaguucca

SEQ ID NO: 45986 - RNA, 22 nt, Human
ugacugaguugaccauccagcc

SEQ ID NO: 45987 - RNA, 23 nt, Human
ugagugauuacagaagcucagca

SEQ ID NO: 45988 - RNA, 19 nt, Human
ugccuugugaugaaccagu

SEQ ID NO: 45989 - RNA, 24 nt, Human
ugcuuuauucucuacaagcuguca

SEQ ID NO: 45990 - RNA, 21 nt, Human
uggaaucaauaaauaauccua

SEQ ID NO: 45991 - RNA, 30 nt, Human
uggaaucaauaaauaauccuaaaaaccucc

SEQ ID NO: 45992 - RNA, 22 nt, Human
uggccggggcugcggcggggcg

SEQ ID NO: 45993 - RNA, 27 nt, Human
ugggcgcugggucucgggcgaagcgga

SEQ ID NO: 45994 - RNA, 21 nt, Human
uguuaggauacacuguccaau

SEQ ID NO: 45995 - RNA, 23 nt, Human
uucccccucucucucucucaacu

SEQ ID NO: 45996 - RNA, 20 nt, Human
uugcauccuucucucuggca

SEQ ID NO: 45997 - RNA, 22 nt, Human
uugccuugugaugaaccaguca

SEQ ID NO: 45998 - RNA, 25 nt, Human
uuugugguuuuuuccccccggucuu

SEQ ID NO: 45999 - RNA, 22 nt, Human
uuuucccccucucucucucuca

SEQ ID NO: 46000 - RNA, 27 nt, Human
uuuuuucccccucucucucucucaacu

SEQ ID NO: 46001 - RNA, 22 nt, Human
cacagggugcauccucucucca

SEQ ID NO: 46002 - RNA, 21 nt, Human
cauagagaaccucagugguug

SEQ ID NO: 46003 - RNA, 24 nt, Human
ucagccacagggugcauccucucu

SEQ ID NO: 46004 - RNA, 20 nt, Human
uccgagggacggaugggauc

SEQ ID NO: 46005 - RNA, 18 nt, Human
uucagaagcacuuggcug

SEQ ID NO: 46006 - RNA, 19 nt, Human
accccggaggacugcagag

SEQ ID NO: 46007 - RNA, 18 nt, Human
aggaaugggacugugggg

SEQ ID NO: 46008 - RNA, 22 nt, Human
cacccacccaccccggaggacu

SEQ ID NO: 46009 - RNA, 26 nt, Human
cacccacccaccccggaggacugcag

SEQ ID NO: 46010 - RNA, 25 nt, Human
ccgcucccgccucagcucccgcccc

SEQ ID NO: 46011 - RNA, 20 nt, Human
cgucggggguguugggucag

SEQ ID NO: 46012 - RNA, 26 nt, Human
cuccuggaggccgucggggguguugg

SEQ ID NO: 46013 - RNA, 21 nt, Human
cugcccaggccccuccuggag

SEQ ID NO: 46014 - RNA, 22 nt, Human
gcccaggccccuccuggaggcc

SEQ ID NO: 46015 - RNA, 19 nt, Human
ugcauagauacagagugga

SEQ ID NO: 46016 - RNA, 21 nt, Human
ugcccaggccccuccuggagg

SEQ ID NO: 46017 - RNA, 22 nt, Human
ugcccaggccccuccuggaggc

SEQ ID NO: 46018 - RNA, 19 nt, Human
uggaggccgucgggggugu

SEQ ID NO: 46019 - RNA, 23 nt, Human
aaaaugucccccacccccuuuua

SEQ ID NO: 46020 - RNA, 19 nt, Human
aacaugccccgcccuccuu

SEQ ID NO: 46021 - RNA, 21 nt, Human
aaccacaggccuagcuggccc

SEQ ID NO: 46022 - RNA, 18 nt, Human
acccccuugcuggggaug

SEQ ID NO: 46023 - RNA, 20 nt, Human
acccccuugcuggggauggg

SEQ ID NO: 46024 - RNA, 28 nt, Human
acccccuuuuaggucugacuccuuauua

SEQ ID NO: 46025 - RNA, 20 nt, Human
acgaacaggagguggcaaug

SEQ ID NO: 46026 - RNA, 21 nt, Human
agagagggagguggggcccug

SEQ ID NO: 46027 - RNA, 21 nt, Human
agcucaauguuacuugugugu

SEQ ID NO: 46028 - RNA, 21 nt, Human
aggagcaaguggaugaagugc

SEQ ID NO: 46029 - RNA, 23 nt, Human
aggcauucuggcccuggagcuca

SEQ ID NO: 46030 - RNA, 24 nt, Human
aggcugcaggggggcacugcugug

SEQ ID NO: 46031 - RNA, 21 nt, Human
agggguucagggcaugcaggg

SEQ ID NO: 46032 - RNA, 21 nt, Human
aguauacgagccaagaccaaa

SEQ ID NO: 46033 - RNA, 20 nt, Human
caccagggcaucuacccagg

SEQ ID NO: 46034 - RNA, 22 nt, Human
caccagugggagcugcuggcug

SEQ ID NO: 46035 - RNA, 21 nt, Human
cacccccuuuuaggucugacu

SEQ ID NO: 46036 - RNA, 24 nt, Human
cagcccacuccccaaacuggcuac

SEQ ID NO: 46037 - RNA, 22 nt, Human
cagcccugagagucggagcagg

SEQ ID NO: 46038 - RNA, 20 nt, Human
cauccucugcccuggcucug

SEQ ID NO: 46039 - RNA, 22 nt, Human
ccacaacagccugacauggcgc

SEQ ID NO: 46040 - RNA, 22 nt, Human
ccagggggauacccacaacagc

SEQ ID NO: 46041 - RNA, 20 nt, Human
cccaacaugccccgcccucc

SEQ ID NO: 46042 - RNA, 23 nt, Human
cccaacaugccccgcccuccuug

SEQ ID NO: 46043 - RNA, 24 nt, Human
cccacaacagccugacauggcgcu

SEQ ID NO: 46044 - RNA, 20 nt, Human
cccacacgccagcucaaggc

SEQ ID NO: 46045 - RNA, 20 nt, Human
cccccucucccaacaugccc

SEQ ID NO: 46046 - RNA, 21 nt, Human
cccccucucccaacaugcccc

SEQ ID NO: 46047 - RNA, 21 nt, Human
cccccuuuuaggucugacucc

SEQ ID NO: 46048 - RNA, 19 nt, Human
ccccucccucccccucucc

SEQ ID NO: 46049 - RNA, 21 nt, Human
ccccucccucccccucuccca

SEQ ID NO: 46050 - RNA, 18 nt, Human
ccccuugcuggggaugga

SEQ ID NO: 46051 - RNA, 22 nt, Human
cccuacaccagggcaucuaccc

SEQ ID NO: 46052 - RNA, 21 nt, Human
cccucaauaaaugaugagcau

SEQ ID NO: 46053 - RNA, 20 nt, Human
cccuuucccacccagggugc

SEQ ID NO: 46054 - RNA, 22 nt, Human
ccuacaccagggcaucuaccca

SEQ ID NO: 46055 - RNA, 26 nt, Human
ccuacaccagggcaucuacccaggaa

SEQ ID NO: 46056 - RNA, 21 nt, Human
ccuguccaugcagcucaaugu

SEQ ID NO: 46057 - RNA, 22 nt, Human
cucccccucucccaacaugccc

SEQ ID NO: 46058 - RNA, 18 nt, Human
cugcacccccuugcuggg

SEQ ID NO: 46059 - RNA, 20 nt, Human
cugugccacccacccagggg

SEQ ID NO: 46060 - RNA, 21 nt, Human
cuugcagcccacuccccaaac

SEQ ID NO: 46061 - RNA, 18 nt, Human
gaagauaggaggacagag

SEQ ID NO: 46062 - RNA, 20 nt, Human
gagccaagaccaaaaagggu

SEQ ID NO: 46063 - RNA, 23 nt, Human
gaggguagagggaggagcaagug

SEQ ID NO: 46064 - RNA, 21 nt, Human
gccccuugcagcccacucccc

SEQ ID NO: 46065 - RNA, 20 nt, Human
gcccugagagucggagcagg

SEQ ID NO: 46066 - RNA, 21 nt, Human
ggccgcgccggcccugcccag

SEQ ID NO: 46067 - RNA, 23 nt, Human
ggcgcucaauucccacacgccag

SEQ ID NO: 46068 - RNA, 22 nt, Human
ggcugccccuugcagcccacuc

SEQ ID NO: 46069 - RNA, 22 nt, Human
gggagguggggcccuggccaca

SEQ ID NO: 46070 - RNA, 18 nt, Human
gguagagggaggagcaag

SEQ ID NO: 46071 - RNA, 22 nt, Human
gugacacaccagugggagcugc

SEQ ID NO: 46072 - RNA, 23 nt, Human
uaagaaaaugucccccacccccu

SEQ ID NO: 46073 - RNA, 19 nt, Human
uaaugauuuacaaaaguuu

SEQ ID NO: 46074 - RNA, 23 nt, Human
ucagggaggcagcccugagaguc

SEQ ID NO: 46075 - RNA, 22 nt, Human
uccaugcagcucaauguuacuu

SEQ ID NO: 46076 - RNA, 22 nt, Human
ucccaacaugccccgcccuccu

SEQ ID NO: 46077 - RNA, 24 nt, Human
ucccaacaugccccgcccuccuug

SEQ ID NO: 46078 - RNA, 19 nt, Human
ucugucuccccucccuccc

SEQ ID NO: 46079 - RNA, 19 nt, Human
ugacccugggcugcacccc

SEQ ID NO: 46080 - RNA, 20 nt, Human
ugacccugggcugcaccccc

SEQ ID NO: 46081 - RNA, 22 nt, Human
ugagagagggagguggggcccu

SEQ ID NO: 46082 - RNA, 19 nt, Human
ugccacccacccagggguu

SEQ ID NO: 46083 - RNA, 23 nt, Human
ugccacccacccagggguucagg

SEQ ID NO: 46084 - RNA, 20 nt, Human
ugccccgcccuccuugggca

SEQ ID NO: 46085 - RNA, 19 nt, Human
ugccccuugcagcccacuc

SEQ ID NO: 46086 - RNA, 21 nt, Human
ugccccuugcagcccacuccc

SEQ ID NO: 46087 - RNA, 20 nt, Human
ugcccuggcucugaagggcc

SEQ ID NO: 46088 - RNA, 22 nt, Human
ugcccuggcucugaagggccug

SEQ ID NO: 46089 - RNA, 21 nt, Human
ugcugugccacccacccaggg

SEQ ID NO: 46090 - RNA, 23 nt, Human
uggagcucagggaggcagcccug

SEQ ID NO: 46091 - RNA, 21 nt, Human
uguagaggggaaggcugcagg

SEQ ID NO: 46092 - RNA, 24 nt, Human
ugucuccccucccucccccucucc

SEQ ID NO: 46093 - RNA, 18 nt, Human
ugugugcauguccugugu

SEQ ID NO: 46094 - RNA, 19 nt, Human
ugugugcauguccugugua

SEQ ID NO: 46095 - RNA, 21 nt, Human
uucaguacucagcccuacacc

SEQ ID NO: 46096 - RNA, 21 nt, Human
uucuugggugagguaagaaaa

SEQ ID NO: 46097 - RNA, 22 nt, Human
uuucuugggugagguaagaaaa

SEQ ID NO: 46098 - RNA, 18 nt, Human
aaaaaguagauuaaaaca

SEQ ID NO: 46099 - RNA, 22 nt, Human
acucuggucacugggguacucg

SEQ ID NO: 46100 - RNA, 20 nt, Human
acugcauuacagacugggcg

SEQ ID NO: 46101 - RNA, 24 nt, Human
acugcauuacagacugggcgacag

SEQ ID NO: 46102 - RNA, 23 nt, Human
acugcuugagccugggaggugga

SEQ ID NO: 46103 - RNA, 19 nt, Human
agacccuugagccgcccaa

SEQ ID NO: 46104 - RNA, 20 nt, Human
agcacauguguaaaaugcag

SEQ ID NO: 46105 - RNA, 24 nt, Human
aggcguuccugggauuaugaguuc

SEQ ID NO: 46106 - RNA, 30 nt, Human
aggcucuuggucacaucugcccacaguccu

SEQ ID NO: 46107 - RNA, 19 nt, Human
agguggaggcugcaguggg

SEQ ID NO: 46108 - RNA, 25 nt, Human
agguggaggcugcagugggcuaugg

SEQ ID NO: 46109 - RNA, 19 nt, Human
aguaaggaaugcaaagaau

SEQ ID NO: 46110 - RNA, 20 nt, Human
auaaagaagagaagcacagg

SEQ ID NO: 46111 - RNA, 20 nt, Human
caauaaagaagagaagcaca

SEQ ID NO: 46112 - RNA, 20 nt, Human
cacaguccuucaagccgcgu

SEQ ID NO: 46113 - RNA, 24 nt, Human
cacugcauuacagacugggcgaca

SEQ ID NO: 46114 - RNA, 19 nt, Human
caggacuaaaauucuacug

SEQ ID NO: 46115 - RNA, 22 nt, Human
cagugugacgcuuaccaaugcu

SEQ ID NO: 46116 - RNA, 24 nt, Human
ccauucugacaaccagucaggcca

SEQ ID NO: 46117 - RNA, 21 nt, Human
cccguagcguucaggacuaaa

SEQ ID NO: 46118 - RNA, 23 nt, Human
ccgcccaauaucucugaaaacgc

SEQ ID NO: 46119 - RNA, 19 nt, Human
ccugggagguggaggcugc

SEQ ID NO: 46120 - RNA, 25 nt, Human
cgcccaauaucucugaaaacgcuau

SEQ ID NO: 46121 - RNA, 19 nt, Human
cgcgugcccucguucagag

SEQ ID NO: 46122 - RNA, 24 nt, Human
cgguggugucacguggguaauggc

SEQ ID NO: 46123 - RNA, 22 nt, Human
cuccagcagcucucacuuuggc

SEQ ID NO: 46124 - RNA, 19 nt, Human
cucuuggucacaucugccu

SEQ ID NO: 46125 - RNA, 24 nt, Human
cugaagaaaaugcauuuuccccgu

SEQ ID NO: 46126 - RNA, 24 nt, Human
cugcuugagccugggagguggagg

SEQ ID NO: 46127 - RNA, 20 nt, Human
cuguaauaaaaucauaagac

SEQ ID NO: 46128 - RNA, 19 nt, Human
cuugagccugggaggugga

SEQ ID NO: 46129 - RNA, 26 nt, Human
gaaaaugcauuuuccccguagcguuc

SEQ ID NO: 46130 - RNA, 24 nt, Human
gacugcuugagccugggaggugga

SEQ ID NO: 46131 - RNA, 19 nt, Human
gaguucuccagcagcucuc

SEQ ID NO: 46132 - RNA, 20 nt, Human
gcaauaaagaagagaagcac

SEQ ID NO: 46133 - RNA, 24 nt, Human
gccugggagguggaggcugcagug

SEQ ID NO: 46134 - RNA, 18 nt, Human
gcgugcccucguucagag

SEQ ID NO: 46135 - RNA, 20 nt, Human
ggacugcuugagccugggag

SEQ ID NO: 46136 - RNA, 21 nt, Human
ggaggcugcagugggcuaugg

SEQ ID NO: 46137 - RNA, 26 nt, Human
ggaggcugcagugggcuauggcuagg

SEQ ID NO: 46138 - RNA, 24 nt, Human
ggaggcugcagugggcuaugguca

SEQ ID NO: 46139 - RNA, 21 nt, Human
ggcgaggggggaaggacugcu

SEQ ID NO: 46140 - RNA, 21 nt, Human
ggggggaaggacugcuugagc

SEQ ID NO: 46141 - RNA, 20 nt, Human
gugaaagcuaugcaaagcca

SEQ ID NO: 46142 - RNA, 19 nt, Human
uaaaaugcagcaaagucug

SEQ ID NO: 46143 - RNA, 22 nt, Human
uaaaaugcagcaaagucugaca

SEQ ID NO: 46144 - RNA, 23 nt, Human
uaaagaagagaagcacaggcaau

SEQ ID NO: 46145 - RNA, 30 nt, Human
uaagcuuuaacauaugcacaaagcaguuuu

SEQ ID NO: 46146 - RNA, 18 nt, Human
uacacacauacaaaugug

SEQ ID NO: 46147 - RNA, 22 nt, Human
uacacacauacaaaugugaagc

SEQ ID NO: 46148 - RNA, 30 nt, Human
uaugaacugaaaaaaaguuacagucuacaa

SEQ ID NO: 46149 - RNA, 21 nt, Human
uaugcacaaagcaguuuugua

SEQ ID NO: 46150 - RNA, 22 nt, Human
uauugcugauuaaaaauucacc

SEQ ID NO: 46151 - RNA, 21 nt, Human
uccugggauuaugaguucucc

SEQ ID NO: 46152 - RNA, 18 nt, Human
ucguucagagcuucucuc

SEQ ID NO: 46153 - RNA, 19 nt, Human
ucucacucuggucacuggg

SEQ ID NO: 46154 - RNA, 23 nt, Human
ucugacaaccagucaggccagca

SEQ ID NO: 46155 - RNA, 20 nt, Human
ucugcccacaguccuucaag

SEQ ID NO: 46156 - RNA, 24 nt, Human
ucuguaauaaaaucauaagaccac

SEQ ID NO: 46157 - RNA, 20 nt, Human
ucuuuuaggauuucucuguu

SEQ ID NO: 46158 - RNA, 22 nt, Human
ugaaaugcccaguucacaguca

SEQ ID NO: 46159 - RNA, 22 nt, Human
ugaacaguucgugaaaugccca

SEQ ID NO: 46160 - RNA, 22 nt, Human
ugaagcacuuaaaaugugauuu

SEQ ID NO: 46161 - RNA, 22 nt, Human
ugacgcuuaccaaugcuccagg

SEQ ID NO: 46162 - RNA, 18 nt, Human
ugagccugggagguggag

SEQ ID NO: 46163 - RNA, 24 nt, Human
ugagccugggagguggaggcugca

SEQ ID NO: 46164 - RNA, 22 nt, Human
ugcaaagaauuccuagugcaau

SEQ ID NO: 46165 - RNA, 22 nt, Human
uggcagaguuuaaaugcacgua

SEQ ID NO: 46166 - RNA, 18 nt, Human
ugggagguggaggcugca

SEQ ID NO: 46167 - RNA, 24 nt, Human
ugggagguggaggcugcagugggc

SEQ ID NO: 46168 - RNA, 21 nt, Human
uggggagggagacagauggau

SEQ ID NO: 46169 - RNA, 23 nt, Human
uggggagggagacagauggauuc

SEQ ID NO: 46170 - RNA, 22 nt, Human
uguaaaaugcagcaaagucuga

SEQ ID NO: 46171 - RNA, 22 nt, Human
uguaaacaucagcacaugugua

SEQ ID NO: 46172 - RNA, 19 nt, Human
uguuccuccagucccuacc

SEQ ID NO: 46173 - RNA, 23 nt, Human
uuaaaaauucaccaccuccuuga

SEQ ID NO: 46174 - RNA, 21 nt, Human
uuaugaguucuccagcagcuc

SEQ ID NO: 46175 - RNA, 22 nt, Human
uuccuucuugacacuaugaaaa

SEQ ID NO: 46176 - RNA, 18 nt, Human
uucucuguguuccuccag

SEQ ID NO: 46177 - RNA, 21 nt, Human
uugagccugggagguggaggc

SEQ ID NO: 46178 - RNA, 20 nt, Human
uuuguaaaaacuacuaagug

SEQ ID NO: 46179 - RNA, 22 nt, Human
aagcacggacagcaugacgacc

SEQ ID NO: 46180 - RNA, 21 nt, Human
acacggcuggacagacaaagc

SEQ ID NO: 46181 - RNA, 24 nt, Human
accacacccccgaccugcacaugc

SEQ ID NO: 46182 - RNA, 19 nt, Human
accaccgccgccgccgccg

SEQ ID NO: 46183 - RNA, 18 nt, Human
accacuguggcaugaggg

SEQ ID NO: 46184 - RNA, 18 nt, Human
agcaugacgaccacaccc

SEQ ID NO: 46185 - RNA, 19 nt, Human
agcgcggcucagagcugcc

SEQ ID NO: 46186 - RNA, 24 nt, Human
agcuccguguggagagagggagca

SEQ ID NO: 46187 - RNA, 21 nt, Human
agggaggaggggaaagcgcgg

SEQ ID NO: 46188 - RNA, 22 nt, Human
agggcugggcagaaacgagagg

SEQ ID NO: 46189 - RNA, 19 nt, Human
aucuuccugccucagccuc

SEQ ID NO: 46190 - RNA, 24 nt, Human
caaagcgcuacgauuacaggccua

SEQ ID NO: 46191 - RNA, 22 nt, Human
caagcuaucuuccugccucagc

SEQ ID NO: 46192 - RNA, 21 nt, Human
cacacacacacucacacgcac

SEQ ID NO: 46193 - RNA, 25 nt, Human
cacacacucacacgcacguguaagg

SEQ ID NO: 46194 - RNA, 19 nt, Human
cacacgcacguguaagggc

SEQ ID NO: 46195 - RNA, 24 nt, Human
cacauugcccagguuugucucgaa

SEQ ID NO: 46196 - RNA, 19 nt, Human
caccacaccaggcccaaag

SEQ ID NO: 46197 - RNA, 20 nt, Human
caccacaccaggcccaaagc

SEQ ID NO: 46198 - RNA, 20 nt, Human
caccgccgccgccgccgccg

SEQ ID NO: 46199 - RNA, 20 nt, Human
caccuacagacacacacaca

SEQ ID NO: 46200 - RNA, 26 nt, Human
caccuuggugugcugugggcuggucc

SEQ ID NO: 46201 - RNA, 33 nt, Human
cagacacacacacacacucacacgcacguggug

SEQ ID NO: 46202 - RNA, 23 nt, Human
cagcaugacgaccacacccccga

SEQ ID NO: 46203 - RNA, 25 nt, Human
cagcaugacgaccacacccccgacc

SEQ ID NO: 46204 - RNA, 20 nt, Human
cagcguccaucccagggagg

SEQ ID NO: 46205 - RNA, 24 nt, Human
caggcacaacgggggacgcaccuc

SEQ ID NO: 46206 - RNA, 25 nt, Human
caggcacaacgggggacgcaccucg

SEQ ID NO: 46207 - RNA, 23 nt, Human
cagggcuccuggccacagagggc

SEQ ID NO: 46208 - RNA, 21 nt, Human
cagggggcuccucuggggccu

SEQ ID NO: 46209 - RNA, 23 nt, Human
cauggcuccuggccacgugccag

SEQ ID NO: 46210 - RNA, 19 nt, Human
ccaccacaccaggcccaaa

SEQ ID NO: 46211 - RNA, 20 nt, Human
ccaccacaccaggcccaaaa

SEQ ID NO: 46212 - RNA, 19 nt, Human
ccaccgccgccgccgccgc

SEQ ID NO: 46213 - RNA, 18 nt, Human
ccagggcuccuggccaca

SEQ ID NO: 46214 - RNA, 24 nt, Human
cccacauugcccagguuugucucg

SEQ ID NO: 46215 - RNA, 24 nt, Human
ccccacauugcccagguuugucuc

SEQ ID NO: 46216 - RNA, 23 nt, Human
cccccgaccugcacaugcacaga

SEQ ID NO: 46217 - RNA, 23 nt, Human
ccgccgccgccgccgcagcccag

SEQ ID NO: 46218 - RNA, 24 nt, Human
ccgccgccgccgccgcagcccagc

SEQ ID NO: 46219 - RNA, 18 nt, Human
ccgccgccgccgccgccg

SEQ ID NO: 46220 - RNA, 21 nt, Human
ccggccccucccaagcgcccc

SEQ ID NO: 46221 - RNA, 22 nt, Human
ccuacagacacacacacacacu

SEQ ID NO: 46222 - RNA, 18 nt, Human
ccuccggccccucccaag

SEQ ID NO: 46223 - RNA, 21 nt, Human
ccucuggggccugaccccauu

SEQ ID NO: 46224 - RNA, 25 nt, Human
ccucuugcgggccagggcuccuggc

SEQ ID NO: 46225 - RNA, 18 nt, Human
ccuuuucuucuucuaggc

SEQ ID NO: 46226 - RNA, 21 nt, Human
cgaaccaggcacaacggggga

SEQ ID NO: 46227 - RNA, 26 nt, Human
cgcuacgauuacaggccuaugccacc

SEQ ID NO: 46228 - RNA, 23 nt, Human
cggcacaugcacacacggcugga

SEQ ID NO: 46229 - RNA, 18 nt, Human
cggcuggacagacaaagc

SEQ ID NO: 46230 - RNA, 22 nt, Human
cguuagaauauacugcuucuga

SEQ ID NO: 46231 - RNA, 18 nt, Human
cucaagcuaucuuccugc

SEQ ID NO: 46232 - RNA, 21 nt, Human
cucaagcuaucuuccugccuc

SEQ ID NO: 46233 - RNA, 21 nt, Human
cucccaagcgccccugucaug

SEQ ID NO: 46234 - RNA, 25 nt, Human
cucccgggcucugucccucuugcgg

SEQ ID NO: 46235 - RNA, 20 nt, Human
cuccucuggggccugacccc

SEQ ID NO: 46236 - RNA, 18 nt, Human
cucuggggccugacccca

SEQ ID NO: 46237 - RNA, 21 nt, Human
cugaccccauugucaagaaac

SEQ ID NO: 46238 - RNA, 23 nt, Human
cugccucagccucucaaagcgcu

SEQ ID NO: 46239 - RNA, 22 nt, Human
cuguagcccuaaagggcuuggg

SEQ ID NO: 46240 - RNA, 22 nt, Human
cuuccugccucagccucucaaa

SEQ ID NO: 46241 - RNA, 24 nt, Human
cuuccugccucagccucucaaagc

SEQ ID NO: 46242 - RNA, 23 nt, Human
cuucugguucuuccgggccaccu

SEQ ID NO: 46243 - RNA, 23 nt, Human
cuugcgggccagggcuccuggcc

SEQ ID NO: 46244 - RNA, 18 nt, Human
cuuuucuucuucuaggcu

SEQ ID NO: 46245 - RNA, 31 nt, Human
gacacacacacacacucacacgcacguguag

SEQ ID NO: 46246 - RNA, 18 nt, Human
gaccacacccccgaccug

SEQ ID NO: 46247 - RNA, 23 nt, Human
gagauggggucuccccacauugc

SEQ ID NO: 46248 - RNA, 23 nt, Human
gcacggacagcaugacgaccaca

SEQ ID NO: 46249 - RNA, 23 nt, Human
gggaggaggggaaagcgcggcuc

SEQ ID NO: 46250 - RNA, 20 nt, Human
ggggcacuccccgccacgga

SEQ ID NO: 46251 - RNA, 21 nt, Human
ggggcuccucuggggccugac

SEQ ID NO: 46252 - RNA, 27 nt, Human
gugcgcaccuacagacacacacacaca

SEQ ID NO: 46253 - RNA, 31 nt, Human
uacagacacacacacacacucacacgcacgg

SEQ ID NO: 46254 - RNA, 21 nt, Human
uacaggccuaugccaccacac

SEQ ID NO: 46255 - RNA, 24 nt, Human
uacgauuacaggccuaugccacca

SEQ ID NO: 46256 - RNA, 19 nt, Human
uacugaaaagaggcaccag

SEQ ID NO: 46257 - RNA, 19 nt, Human
ucaagaaacccuuuucucc

SEQ ID NO: 46258 - RNA, 18 nt, Human
uccacuggcagucucccg

SEQ ID NO: 46259 - RNA, 21 nt, Human
uccacuggcagucucccggca

SEQ ID NO: 46260 - RNA, 19 nt, Human
uccaggacaagagacugua

SEQ ID NO: 46261 - RNA, 24 nt, Human
ucccacuacaaccaguucgaggug

SEQ ID NO: 46262 - RNA, 25 nt, Human
uccccgccacggacuaauaaaacaa

SEQ ID NO: 46263 - RNA, 19 nt, Human
ucccgggcucugucccucu

SEQ ID NO: 46264 - RNA, 24 nt, Human
ucucaaagcgcuacgauuacaggc

SEQ ID NO: 46265 - RNA, 21 nt, Human
ucucagggggcuccucugggg

SEQ ID NO: 46266 - RNA, 23 nt, Human
ucucccggcagcguccaucccag

SEQ ID NO: 46267 - RNA, 24 nt, Human
ucucgaacucucugagcucaagcu

SEQ ID NO: 46268 - RNA, 18 nt, Human
ucuuccgggccaccuugg

SEQ ID NO: 46269 - RNA, 22 nt, Human
ucuucuaggcugugaacuccaa

SEQ ID NO: 46270 - RNA, 22 nt, Human
ugagaggggcugcacuucuggu

SEQ ID NO: 46271 - RNA, 18 nt, Human
ugaguucuccacacaauu

SEQ ID NO: 46272 - RNA, 23 nt, Human
ugcacacacggcuggacagacaa

SEQ ID NO: 46273 - RNA, 19 nt, Human
ugcacagaaagcucaagca

SEQ ID NO: 46274 - RNA, 18 nt, Human
ugccaccacaccaggccc

SEQ ID NO: 46275 - RNA, 21 nt, Human
ugccaggagcuccguguggag

SEQ ID NO: 46276 - RNA, 25 nt, Human
ugccucagccucucaaagcgcuacg

SEQ ID NO: 46277 - RNA, 24 nt, Human
uggcaacaccucgguuccuccggc

SEQ ID NO: 46278 - RNA, 22 nt, Human
uggcacccuacaggguccagga

SEQ ID NO: 46279 - RNA, 19 nt, Human
uggcacugaguucuccaca

SEQ ID NO: 46280 - RNA, 18 nt, Human
uggcaugaggggcucugg

SEQ ID NO: 46281 - RNA, 24 nt, Human
uggggucuccccacauugcccagg

SEQ ID NO: 46282 - RNA, 23 nt, Human
uguagagauggggucuccccaca

SEQ ID NO: 46283 - RNA, 21 nt, Human
ugucucaaacccaacauggga

SEQ ID NO: 46284 - RNA, 23 nt, Human
uucuucuaggcugugaacuccaa

SEQ ID NO: 46285 - RNA, 21 nt, Human
uccacugagucuggagagaca

SEQ ID NO: 46286 - RNA, 20 nt, Human
acacuaccucuacccagaua

SEQ ID NO: 46287 - RNA, 21 nt, Human
accggggccaccuccccucca

SEQ ID NO: 46288 - RNA, 22 nt, Human
accuccccuccaccgcgcggcc

SEQ ID NO: 46289 - RNA, 18 nt, Human
acugccccccaccccccc

SEQ ID NO: 46290 - RNA, 18 nt, Human
acugccccccaccccccc

SEQ ID NO: 46291 - RNA, 24 nt, Human
agcacacaccacacucacacuacc

SEQ ID NO: 46292 - RNA, 27 nt, Human
aggcagaaaggaaucaggugcuccugg

SEQ ID NO: 46293 - RNA, 22 nt, Human
agggcaccauccacugcccccc

SEQ ID NO: 46294 - RNA, 24 nt, Human
auccacugccccccacccccccag

SEQ ID NO: 46295 - RNA, 21 nt, Human
cacacaccacacucacacuac

SEQ ID NO: 46296 - RNA, 22 nt, Human
cacacucacacuaccucuaccc

SEQ ID NO: 46297 - RNA, 20 nt, Human
caccacucccuccuaauaaa

SEQ ID NO: 46298 - RNA, 21 nt, Human
caccauccacugccccccacc

SEQ ID NO: 46299 - RNA, 19 nt, Human
caccgcgcggccgcaguug

SEQ ID NO: 46300 - RNA, 23 nt, Human
caccgcgcggccgcaguugcacc

SEQ ID NO: 46301 - RNA, 21 nt, Human
cacucccuccuaauaaaccgu

SEQ ID NO: 46302 - RNA, 18 nt, Human
cacugccccccacccccc

SEQ ID NO: 46303 - RNA, 23 nt, Human
cagaaaggaaucaggugcuccug

SEQ ID NO: 46304 - RNA, 22 nt, Human
cagcgcuggacggcgggcuggg

SEQ ID NO: 46305 - RNA, 18 nt, Human
caguugcaccgccagcgc

SEQ ID NO: 46306 - RNA, 18 nt, Human
ccacugccccccaccccc

SEQ ID NO: 46307 - RNA, 21 nt, Human
ccacugccccccaccccccca

SEQ ID NO: 46308 - RNA, 21 nt, Human
ccagauagggcaccauccacu

SEQ ID NO: 46309 - RNA, 19 nt, Human
ccccacccccccagccccc

SEQ ID NO: 46310 - RNA, 24 nt, Human
ccccacccccccagcccccugcag

SEQ ID NO: 46311 - RNA, 18 nt, Human
ccccagcacacaccacac

SEQ ID NO: 46312 - RNA, 18 nt, Human
ccccagcccccugcaggc

SEQ ID NO: 46313 - RNA, 21 nt, Human
cccccacccccccagcccccu

SEQ ID NO: 46314 - RNA, 25 nt, Human
ccccccacccccccagcccccugca

SEQ ID NO: 46315 - RNA, 22 nt, Human
cccccugcaggcagaaaggaau

SEQ ID NO: 46316 - RNA, 27 nt, Human
cccccugcaggcagaaaggaaucaggu

SEQ ID NO: 46317 - RNA, 19 nt, Human
cccgggacugggauggggg

SEQ ID NO: 46318 - RNA, 18 nt, Human
ccgcgcggccgcaguugc

SEQ ID NO: 46319 - RNA, 23 nt, Human
ccucccgggacugggaugggggc

SEQ ID NO: 46320 - RNA, 18 nt, Human
ccugccuggcccagcucc

SEQ ID NO: 46321 - RNA, 22 nt, Human
cgcucggcgcagcuggcgcggc

SEQ ID NO: 46322 - RNA, 22 nt, Human
cggaccgggcuggagccgggga

SEQ ID NO: 46323 - RNA, 22 nt, Human
cucugggcccgcucugcgggug

SEQ ID NO: 46324 - RNA, 19 nt, Human
cuggagccggggaggggcu

SEQ ID NO: 46325 - RNA, 18 nt, Human
cuggcgcggcagccuccc

SEQ ID NO: 46326 - RNA, 18 nt, Human
gcacacaccacacucaca

SEQ ID NO: 46327 - RNA, 24 nt, Human
gcacacaccacacucacacuaccu

SEQ ID NO: 46328 - RNA, 24 nt, Human
gcaccgccagcgcuggacggcggg

SEQ ID NO: 46329 - RNA, 18 nt, Human
ggacugggaugggggcug

SEQ ID NO: 46330 - RNA, 21 nt, Human
gggcuggagccggggaggggc

SEQ ID NO: 46331 - RNA, 19 nt, Human
gggcugggguccggcgcgg

SEQ ID NO: 46332 - RNA, 20 nt, Human
ggggaggggcucgcucggcg

SEQ ID NO: 46333 - RNA, 20 nt, Human
ucacacuaccucuacccaga

SEQ ID NO: 46334 - RNA, 18 nt, Human
uccaccacucccuccuaa

SEQ ID NO: 46335 - RNA, 22 nt, Human
uccaccacucccuccuaauaaa

SEQ ID NO: 46336 - RNA, 19 nt, Human
uccccagcacacaccacac

SEQ ID NO: 46337 - RNA, 25 nt, Human
ucugcggguggcggggcgcuagccu

SEQ ID NO: 46338 - RNA, 19 nt, Human
ugcaggcagaaaggaauca

SEQ ID NO: 46339 - RNA, 21 nt, Human
ugccccccacccccccagccc

SEQ ID NO: 46340 - RNA, 22 nt, Human
ugccccccacccccccagcccc

SEQ ID NO: 46341 - RNA, 18 nt, Human
uggcugggugggcugggg

SEQ ID NO: 46342 - RNA, 19 nt, Human
uggcugggugggcuggggg

SEQ ID NO: 46343 - RNA, 21 nt, Human
ugggaugggggcuggagcaaa

SEQ ID NO: 46344 - RNA, 21 nt, Human
uuuggcugggugggcuggggg

SEQ ID NO: 46345 - RNA, 24 nt, Human
ccccaggggcaaagguuuaggagu

SEQ ID NO: 46346 - RNA, 21 nt, Human
ggcucacgcucgccucucagc

SEQ ID NO: 46347 - RNA, 22 nt, Human
gguugggauggaagccccaggg

SEQ ID NO: 46348 - RNA, 19 nt, Human
uacuucagagacagcccug

SEQ ID NO: 46349 - RNA, 24 nt, Human
uacuucagagacagcccuguccau

SEQ ID NO: 46350 - RNA, 18 nt, Human
cauacagguaauauauaa

SEQ ID NO: 46351 - RNA, 19 nt, Human
cuaauauuaacacacaaua

SEQ ID NO: 46352 - RNA, 25 nt, Human
cuaauauuaacacacaauaguucua

SEQ ID NO: 46353 - RNA, 24 nt, Human
cucaaaccucuugucuuccacgcu

SEQ ID NO: 46354 - RNA, 19 nt, Human
uaauaauaaaaaccaaacc

SEQ ID NO: 46355 - RNA, 21 nt, Human
uccacgcugcaggucaucgga

SEQ ID NO: 46356 - RNA, 23 nt, Human
agaguuggggugacuccacaggg

SEQ ID NO: 46357 - RNA, 25 nt, Human
agaguuggggugacuccacagggug

SEQ ID NO: 46358 - RNA, 19 nt, Human
auacgugugugcagaaaug

SEQ ID NO: 46359 - RNA, 23 nt, Human
augccgagguauacgugugugca

SEQ ID NO: 46360 - RNA, 20 nt, Human
caaccaugcccaugugcaag

SEQ ID NO: 46361 - RNA, 23 nt, Human
cagccccacagaguuggggugac

SEQ ID NO: 46362 - RNA, 27 nt, Human
caggagcaucaguaacugacuauugag

SEQ ID NO: 46363 - RNA, 20 nt, Human
cagggugaaggcuuggagga

SEQ ID NO: 46364 - RNA, 19 nt, Human
ccacagaaggaggguuuca

SEQ ID NO: 46365 - RNA, 19 nt, Human
ccagcgguggccgcggccg

SEQ ID NO: 46366 - RNA, 22 nt, Human
ccagcgguggccgcggccggcc

SEQ ID NO: 46367 - RNA, 22 nt, Human
ccccggcgcugcucccuccgcc

SEQ ID NO: 46368 - RNA, 24 nt, Human
cccuccgccgccgcucgguggguc

SEQ ID NO: 46369 - RNA, 21 nt, Human
ccgccgcucggugggucucug

SEQ ID NO: 46370 - RNA, 21 nt, Human
cgcugcucccuccgccgccgc

SEQ ID NO: 46371 - RNA, 19 nt, Human
cggcucgguggccgcucgg

SEQ ID NO: 46372 - RNA, 22 nt, Human
cgguggccgcggccggccacgc

SEQ ID NO: 46373 - RNA, 18 nt, Human
cgugcgccccggcgcugc

SEQ ID NO: 46374 - RNA, 18 nt, Human
cgugcgccccggcgcugc

SEQ ID NO: 46375 - RNA, 19 nt, Human
cgugcgccccggcgcugcu

SEQ ID NO: 46376 - RNA, 21 nt, Human
cucgugcgccccggcgcugcu

SEQ ID NO: 46377 - RNA, 22 nt, Human
cugccggcucgguggccgcucg

SEQ ID NO: 46378 - RNA, 21 nt, Human
cugcucccuccgccgccgcuc

SEQ ID NO: 46379 - RNA, 21 nt, Human
gagaucauggucuucuuggaa

SEQ ID NO: 46380 - RNA, 24 nt, Human
gcgcugcucccuccgccgccgcuc

SEQ ID NO: 46381 - RNA, 25 nt, Human
gugugugcagaaauggacacauagg

SEQ ID NO: 46382 - RNA, 23 nt, Human
ucgguggccgcucggcuuucccu

SEQ ID NO: 46383 - RNA, 23 nt, Human
ucggugggucucugccggcucgg

SEQ ID NO: 46384 - RNA, 19 nt, Human
ucgugcgccccggcgcugc

SEQ ID NO: 46385 - RNA, 21 nt, Human
uggaaggaauaaauguaaaaa

SEQ ID NO: 46386 - RNA, 22 nt, Human
uggaaggaauaaauguaaaaau

SEQ ID NO: 46387 - RNA, 22 nt, Human
aagaaaaugcagcaacgaagaa

SEQ ID NO: 46388 - RNA, 19 nt, Human
aaggggcuugguccggagc

SEQ ID NO: 46389 - RNA, 24 nt, Human
aaggggcuugguccggagccucca

SEQ ID NO: 46390 - RNA, 19 nt, Human
accacugaauaccaccauu

SEQ ID NO: 46391 - RNA, 24 nt, Human
acuggcacgcggagccgcgccccu

SEQ ID NO: 46392 - RNA, 19 nt, Human
agcaacgaagaacagggaa

SEQ ID NO: 46393 - RNA, 21 nt, Human
agggagaagcugaaggggcuu

SEQ ID NO: 46394 - RNA, 24 nt, Human
aucucuugccauuuuuucuucaac

SEQ ID NO: 46395 - RNA, 21 nt, Human
augggguaaauugauuuucau

SEQ ID NO: 46396 - RNA, 20 nt, Human
caaaacagggaccucccucc

SEQ ID NO: 46397 - RNA, 24 nt, Human
caagugaagaaaaugcagcaacga

SEQ ID NO: 46398 - RNA, 24 nt, Human
caauguugagguggucgagccucc

SEQ ID NO: 46399 - RNA, 19 nt, Human
caccacgugacgcgcgggc

SEQ ID NO: 46400 - RNA, 19 nt, Human
caccacgugacgcgcgggc

SEQ ID NO: 46401 - RNA, 18 nt, Human
cacgcggagccgcgcccc

SEQ ID NO: 46402 - RNA, 19 nt, Human
cacgugacgcgcgggcacc

SEQ ID NO: 46403 - RNA, 18 nt, Human
cacugaauaccaccauuc

SEQ ID NO: 46404 - RNA, 23 nt, Human
cagcaacgaagaacagggaacac

SEQ ID NO: 46405 - RNA, 24 nt, Human
cagggaccucccucccccucguuc

SEQ ID NO: 46406 - RNA, 24 nt, Human
cauacccgucccccaggcgcuuca

SEQ ID NO: 46407 - RNA, 24 nt, Human
ccaaaacagggaccucccuccccc

SEQ ID NO: 46408 - RNA, 18 nt, Human
ccaaggcaaaagcugcag

SEQ ID NO: 46409 - RNA, 19 nt, Human
ccauacccgucccccaggc

SEQ ID NO: 46410 - RNA, 24 nt, Human
cccccucguucguuuccuuccucc

SEQ ID NO: 46411 - RNA, 27 nt, Human
ccccuaccucccgcccauacccguccc

SEQ ID NO: 46412 - RNA, 27 nt, Human
ccccucguucguuuccuuccuccuuuc

SEQ ID NO: 46413 - RNA, 22 nt, Human
cccucucgcuccacuucagggg

SEQ ID NO: 46414 - RNA, 18 nt, Human
ccgcugccgcugccgccg

SEQ ID NO: 46415 - RNA, 21 nt, Human
ccgcugccgcugccgccgccg

SEQ ID NO: 46416 - RNA, 24 nt, Human
ccgcugccgcugccgccgccgccg

SEQ ID NO: 46417 - RNA, 27 nt, Human
ccgcugccgcugccgccgccgccgccu

SEQ ID NO: 46418 - RNA, 19 nt, Human
ccucacggguuaacagcag

SEQ ID NO: 46419 - RNA, 27 nt, Human
ccucccgcccauacccgucccccaggc

SEQ ID NO: 46420 - RNA, 19 nt, Human
ccuccuuuccccgcuuucc

SEQ ID NO: 46421 - RNA, 20 nt, Human
ccuccuuuccccgcuuuccc

SEQ ID NO: 46422 - RNA, 22 nt, Human
ccuguguaaagcauuacagaau

SEQ ID NO: 46423 - RNA, 19 nt, Human
ccuuccuccuuuccccgcu

SEQ ID NO: 46424 - RNA, 21 nt, Human
ccuugcucguucccucuucuc

SEQ ID NO: 46425 - RNA, 21 nt, Human
cgauccggagggagaagcuga

SEQ ID NO: 46426 - RNA, 23 nt, Human
cgccccuaccucccgcccauacc

SEQ ID NO: 46427 - RNA, 22 nt, Human
cgcgcgcaugcgcgcgggggac

SEQ ID NO: 46428 - RNA, 24 nt, Human
cgcggagccgcgccccuaccuccc

SEQ ID NO: 46429 - RNA, 19 nt, Human
cguucccucuucucucccc

SEQ ID NO: 46430 - RNA, 23 nt, Human
cucguucccucuucucucccccc

SEQ ID NO: 46431 - RNA, 21 nt, Human
cugccgcugccgccgccgccg

SEQ ID NO: 46432 - RNA, 22 nt, Human
cuucaggggccggcaacgcucc

SEQ ID NO: 46433 - RNA, 19 nt, Human
cuuccgcugccgcugccgc

SEQ ID NO: 46434 - RNA, 24 nt, Human
cuugccauuuuuucuucaacuguu

SEQ ID NO: 46435 - RNA, 20 nt, Human
gaaacucagaccuccgccuc

SEQ ID NO: 46436 - RNA, 27 nt, Human
gaagccgggaccuccccuggcaggaga

SEQ ID NO: 46437 - RNA, 21 nt, Human
gagggagaagcugaaggggcu

SEQ ID NO: 46438 - RNA, 22 nt, Human
gauaugaucucuugccauuuuu

SEQ ID NO: 46439 - RNA, 21 nt, Human
gccgcugccgccgccgccgcc

SEQ ID NO: 46440 - RNA, 20 nt, Human
gccgggaccuccccuggcag

SEQ ID NO: 46441 - RNA, 22 nt, Human
gcugcuaggccugccgccgccc

SEQ ID NO: 46442 - RNA, 18 nt, Human
ggcgcgcgcaugcgcgcg

SEQ ID NO: 46443 - RNA, 23 nt, Human
guaggcacuaggaagaaccaagg

SEQ ID NO: 46444 - RNA, 24 nt, Human
uaacagcagcacaucgauccggag

SEQ ID NO: 46445 - RNA, 28 nt, Human
uaauagguuucucuuuggagugaaguuu

SEQ ID NO: 46446 - RNA, 24 nt, Human
uaccaugggguaaauugauuuuca

SEQ ID NO: 46447 - RNA, 18 nt, Human
uccaccucccacccccaa

SEQ ID NO: 46448 - RNA, 22 nt, Human
ucccucgaaacucagaccuccg

SEQ ID NO: 46449 - RNA, 20 nt, Human
uccuccaaaacagggaccuc

SEQ ID NO: 46450 - RNA, 19 nt, Human
uccuuuuccaccucccacc

SEQ ID NO: 46451 - RNA, 19 nt, Human
ucucuguuauccugaguau

SEQ ID NO: 46452 - RNA, 19 nt, Human
ugaaggggcuugguccgga

SEQ ID NO: 46453 - RNA, 25 nt, Human
ugcagcaacgaagaacagggaacac

SEQ ID NO: 46454 - RNA, 18 nt, Human
ugcgcgcgggggacgguu

SEQ ID NO: 46455 - RNA, 23 nt, Human
ugcugcuaggccugccgccgccc

SEQ ID NO: 46456 - RNA, 19 nt, Human
uggcaggagaaacggcgaa

SEQ ID NO: 46457 - RNA, 21 nt, Human
uggguuccuuuuccaccuccc

SEQ ID NO: 46458 - RNA, 18 nt, Human
ugguccggagccuccacg

SEQ ID NO: 46459 - RNA, 21 nt, Human
uucaggcuuuaaaauuuaagu

SEQ ID NO: 46460 - RNA, 22 nt, Human
uuccaccucccacccccaaauu

SEQ ID NO: 46461 - RNA, 20 nt, Human
uuccgcugccgcugccgccg

SEQ ID NO: 46462 - RNA, 19 nt, Human
uuuccuucccuugcucguu

SEQ ID NO: 46463 - RNA, 24 nt, Human
uuucuucaacuguuacuugugagg

SEQ ID NO: 46464 - RNA, 21 nt, Human
aaaacauccccacaucugccc

SEQ ID NO: 46465 - RNA, 23 nt, Human
aaacauccccacaucugcccugg

SEQ ID NO: 46466 - RNA, 23 nt, Human
aaacauccccacaucugcccugg

SEQ ID NO: 46467 - RNA, 19 nt, Human
aacccccccccgcccugcc

SEQ ID NO: 46468 - RNA, 19 nt, Human
aacccccccccgcccugcc

SEQ ID NO: 46469 - RNA, 22 nt, Human
aacccccccccgcccugccaaa

SEQ ID NO: 46470 - RNA, 22 nt, Human
aacccccccccgcccugccaaa

SEQ ID NO: 46471 - RNA, 19 nt, Human
aaccccugcggagccagga

SEQ ID NO: 46472 - RNA, 19 nt, Human
aaccccugcggagccagga

SEQ ID NO: 46473 - RNA, 21 nt, Human
aagauucaguuuuaaaaaaug

SEQ ID NO: 46474 - RNA, 21 nt, Human
aagauucaguuuuaaaaaaug

SEQ ID NO: 46475 - RNA, 22 nt, Human
aagugcccuccaggccuggucc

SEQ ID NO: 46476 - RNA, 22 nt, Human
aagugcccuccaggccuggucc

SEQ ID NO: 46477 - RNA, 26 nt, Human
aagugcccuccaggccugguccaccc

SEQ ID NO: 46478 - RNA, 26 nt, Human
aagugcccuccaggccugguccaccc

SEQ ID NO: 46479 - RNA, 21 nt, Human
accccugcggagccaggaguu

SEQ ID NO: 46480 - RNA, 21 nt, Human
accccugcggagccaggaguu

SEQ ID NO: 46481 - RNA, 21 nt, Human
agaacccccccccgcccugcc

SEQ ID NO: 46482 - RNA, 21 nt, Human
agaacccccccccgcccugcc

SEQ ID NO: 46483 - RNA, 22 nt, Human
agcugggaugcccagccccuga

SEQ ID NO: 46484 - RNA, 22 nt, Human
agcugggaugcccagccccuga

SEQ ID NO: 46485 - RNA, 19 nt, Human
aggcagaagcuggcaggca

SEQ ID NO: 46486 - RNA, 21 nt, Human
aggcagaagcuggcaggcagc

SEQ ID NO: 46487 - RNA, 19 nt, Human
aggcuagguccacuggugg

SEQ ID NO: 46488 - RNA, 22 nt, Human
aguugaaggguuuggaccugga

SEQ ID NO: 46489 - RNA, 22 nt, Human
aguugaaggguuuggaccugga

SEQ ID NO: 46490 - RNA, 24 nt, Human
aguuucuccggggccuccuguaaa

SEQ ID NO: 46491 - RNA, 24 nt, Human
aguuucuccggggccuccuguaaa

SEQ ID NO: 46492 - RNA, 21 nt, Human
augauguuggugccgcuggga

SEQ ID NO: 46493 - RNA, 20 nt, Human
auuugcauggugccucccuc

SEQ ID NO: 46494 - RNA, 20 nt, Human
auuugcauggugccucccuc

SEQ ID NO: 46495 - RNA, 23 nt, Human
caaaacauccccacaucugcccu

SEQ ID NO: 46496 - RNA, 23 nt, Human
caaaacauccccacaucugcccu

SEQ ID NO: 46497 - RNA, 22 nt, Human
caaaccccugcggagccaggag

SEQ ID NO: 46498 - RNA, 21 nt, Human
caaccaggacagccccagcga

SEQ ID NO: 46499 - RNA, 23 nt, Human
caagcugggaugcccagccccug

SEQ ID NO: 46500 - RNA, 23 nt, Human
caagcugggaugcccagccccug

SEQ ID NO: 46501 - RNA, 19 nt, Human
caaugaugauguuggugcc

SEQ ID NO: 46502 - RNA, 23 nt, Human
cacccaaaccccugcggagccag

SEQ ID NO: 46503 - RNA, 23 nt, Human
cacccaaaccccugcggagccag

SEQ ID NO: 46504 - RNA, 27 nt, Human
cacccugguggugccaagggcagggcc

SEQ ID NO: 46505 - RNA, 27 nt, Human
cacccugguggugccaagggcagggcc

SEQ ID NO: 46506 - RNA, 24 nt, Human
cagccccgucccccuaggucccag

SEQ ID NO: 46507 - RNA, 24 nt, Human
cagccccgucccccuaggucccag

SEQ ID NO: 46508 - RNA, 18 nt, Human
cagccccugacugugcuc

SEQ ID NO: 46509 - RNA, 18 nt, Human
cagccccugacugugcuc

SEQ ID NO: 46510 - RNA, 21 nt, Human
cagcugccugguugcaaggag

SEQ ID NO: 46511 - RNA, 21 nt, Human
cagcugccugguugcaaggag

SEQ ID NO: 46512 - RNA, 20 nt, Human
caggucagagccguccgccg

SEQ ID NO: 46513 - RNA, 22 nt, Human
cauggccauaccucaguuucuc

SEQ ID NO: 46514 - RNA, 22 nt, Human
cauggccauaccucaguuucuc

SEQ ID NO: 46515 - RNA, 23 nt, Human
ccaaaccccugcggagccaggag

SEQ ID NO: 46516 - RNA, 20 nt, Human
ccaagggcagggccacagcc

SEQ ID NO: 46517 - RNA, 20 nt, Human
ccaagggcagggccacagcc

SEQ ID NO: 46518 - RNA, 24 nt, Human
ccacagcccccacccaaaccccug

SEQ ID NO: 46519 - RNA, 24 nt, Human
ccacagcccccacccaaaccccug

SEQ ID NO: 46520 - RNA, 22 nt, Human
ccacccaaaccccugcggagcc

SEQ ID NO: 46521 - RNA, 22 nt, Human
ccacccaaaccccugcggagcc

SEQ ID NO: 46522 - RNA, 22 nt, Human
cccacccaaaccccugcggagc

SEQ ID NO: 46523 - RNA, 22 nt, Human
cccacccaaaccccugcggagc

SEQ ID NO: 46524 - RNA, 28 nt, Human
cccacugccggggcaggugccggggucc

SEQ ID NO: 46525 - RNA, 24 nt, Human
ccccacaucugcccuggccccagc

SEQ ID NO: 46526 - RNA, 24 nt, Human
ccccacaucugcccuggccccagc

SEQ ID NO: 46527 - RNA, 24 nt, Human
cccccccccgcccugccaaaaucc

SEQ ID NO: 46528 - RNA, 24 nt, Human
cccccccccgcccugccaaaaucc

SEQ ID NO: 46529 - RNA, 22 nt, Human
ccccugcaguccagcuccuugc

SEQ ID NO: 46530 - RNA, 23 nt, Human
cccguggugggagcaaauccggc

SEQ ID NO: 46531 - RNA, 27 nt, Human
cccuaggucccagagagauaagacccc

SEQ ID NO: 46532 - RNA, 27 nt, Human
cccuaggucccagagagauaagacccc

SEQ ID NO: 46533 - RNA, 22 nt, Human
cccugcaguccagcuccuugcc

SEQ ID NO: 46534 - RNA, 19 nt, Human
ccgcccaggacgauggcug

SEQ ID NO: 46535 - RNA, 18 nt, Human
ccuaggccuugggcaugg

SEQ ID NO: 46536 - RNA, 18 nt, Human
ccuaggccuugggcaugg

SEQ ID NO: 46537 - RNA, 18 nt, Human
ccugguugcaaggagggg

SEQ ID NO: 46538 - RNA, 18 nt, Human
ccugguugcaaggagggg

SEQ ID NO: 46539 - RNA, 23 nt, Human
cgaauuggagacgaucugggaca

SEQ ID NO: 46540 - RNA, 23 nt, Human
cgaauuggagacgaucugggaca

SEQ ID NO: 46541 - RNA, 21 nt, Human
cgcccugccaaaauccaugug

SEQ ID NO: 46542 - RNA, 21 nt, Human
cgcccugccaaaauccaugug

SEQ ID NO: 46543 - RNA, 20 nt, Human
cgggggcaagcugggaugcc

SEQ ID NO: 46544 - RNA, 20 nt, Human
cgggggcaagcugggaugcc

SEQ ID NO: 46545 - RNA, 18 nt, Human
cggguguggucauccuug

SEQ ID NO: 46546 - RNA, 18 nt, Human
cggguguggucauccuug

SEQ ID NO: 46547 - RNA, 21 nt, Human
cucauacuuccuccaagcuca

SEQ ID NO: 46548 - RNA, 21 nt, Human
cucauacuuccuccaagcuca

SEQ ID NO: 46549 - RNA, 20 nt, Human
cuccccugcaguccagcucc

SEQ ID NO: 46550 - RNA, 22 nt, Human
cugcaaccaggacagccccagc

SEQ ID NO: 46551 - RNA, 25 nt, Human
cugcacguggccuccccugcagucc

SEQ ID NO: 46552 - RNA, 22 nt, Human
cugccggggcaggugcugaagu

SEQ ID NO: 46553 - RNA, 22 nt, Human
cugccugguugcaaggaggggc

SEQ ID NO: 46554 - RNA, 22 nt, Human
cugccugguugcaaggaggggc

SEQ ID NO: 46555 - RNA, 23 nt, Human
cuugggcauggcacaggcagcuu

SEQ ID NO: 46556 - RNA, 23 nt, Human
cuugggcauggcacaggcagcuu

SEQ ID NO: 46557 - RNA, 19 nt, Human
gagccaaugaugauguugg

SEQ ID NO: 46558 - RNA, 21 nt, Human
gcaggcugugccauccuccac

SEQ ID NO: 46559 - RNA, 18 nt, Human
ggaccuggaagacauuug

SEQ ID NO: 46560 - RNA, 18 nt, Human
ggaccuggaagacauuug

SEQ ID NO: 46561 - RNA, 22 nt, Human
ggagcaaauccggcgcucccca

SEQ ID NO: 46562 - RNA, 21 nt, Human
ggcaagcugggaugcccagcc

SEQ ID NO: 46563 - RNA, 21 nt, Human
ggcaagcugggaugcccagcc

SEQ ID NO: 46564 - RNA, 22 nt, Human
ggcuuggagggaggagggugga

SEQ ID NO: 46565 - RNA, 22 nt, Human
ggcuuggagggaggagggugga

SEQ ID NO: 46566 - RNA, 20 nt, Human
gggccacagcccccacccaa

SEQ ID NO: 46567 - RNA, 20 nt, Human
gggccacagcccccacccaa

SEQ ID NO: 46568 - RNA, 18 nt, Human
ggguggggacgugggcag

SEQ ID NO: 46569 - RNA, 23 nt, Human
gguugcaaggaggggccauccag

SEQ ID NO: 46570 - RNA, 23 nt, Human
gguugcaaggaggggccauccag

SEQ ID NO: 46571 - RNA, 19 nt, Human
gguugccguacccauaacc

SEQ ID NO: 46572 - RNA, 19 nt, Human
gguugccguacccauaacc

SEQ ID NO: 46573 - RNA, 22 nt, Human
gucuuugccuguccagucuggc

SEQ ID NO: 46574 - RNA, 20 nt, Human
gugggggacuguggaggaag

SEQ ID NO: 46575 - RNA, 20 nt, Human
gugggggacuguggaggaag

SEQ ID NO: 46576 - RNA, 21 nt, Human
guguggucauccuuggggagg

SEQ ID NO: 46577 - RNA, 21 nt, Human
guguggucauccuuggggagg

SEQ ID NO: 46578 - RNA, 18 nt, Human
uaaaaaauguagauguca

SEQ ID NO: 46579 - RNA, 18 nt, Human
uaaaaaauguagauguca

SEQ ID NO: 46580 - RNA, 23 nt, Human
uaaauccccagcccgugccgccc

SEQ ID NO: 46581 - RNA, 24 nt, Human
uaaauccccagcccgugccgccca

SEQ ID NO: 46582 - RNA, 28 nt, Human
uaggccuugggcauggcacaggcagcuu

SEQ ID NO: 46583 - RNA, 28 nt, Human
uaggccuugggcauggcacaggcagcuu

SEQ ID NO: 46584 - RNA, 23 nt, Human
uaucucuccgucucccccguggg

SEQ ID NO: 46585 - RNA, 23 nt, Human
ucaaaacauccccacaucugccc

SEQ ID NO: 46586 - RNA, 23 nt, Human
ucccuccguggcuggaugggggc

SEQ ID NO: 46587 - RNA, 23 nt, Human
ucccuccguggcuggaugggggc

SEQ ID NO: 46588 - RNA, 19 nt, Human
uccgucucccccgugggug

SEQ ID NO: 46589 - RNA, 18 nt, Human
uccguggcuggauggggg

SEQ ID NO: 46590 - RNA, 18 nt, Human
uccguggcuggauggggg

SEQ ID NO: 46591 - RNA, 18 nt, Human
uccuccaagcucagcggg

SEQ ID NO: 46592 - RNA, 18 nt, Human
uccuccaagcucagcggg

SEQ ID NO: 46593 - RNA, 19 nt, Human
ucugcccuggccccagcac

SEQ ID NO: 46594 - RNA, 19 nt, Human
ucugcccuggccccagcac

SEQ ID NO: 46595 - RNA, 23 nt, Human
ugaaggcagaagcuggcaggcag

SEQ ID NO: 46596 - RNA, 21 nt, Human
ugagguggaagcuacauucac

SEQ ID NO: 46597 - RNA, 21 nt, Human
ugagguggaagcuacauucac

SEQ ID NO: 46598 - RNA, 23 nt, Human
ugcaaccaggacagccccagcug

SEQ ID NO: 46599 - RNA, 21 nt, Human
ugcaaggaggggccauccagg

SEQ ID NO: 46600 - RNA, 21 nt, Human
ugcaaggaggggccauccagg

SEQ ID NO: 46601 - RNA, 25 nt, Human
ugcaaggcugagccgcaggaggugg

SEQ ID NO: 46602 - RNA, 25 nt, Human
ugcaaggcugagccgcaggaggugg

SEQ ID NO: 46603 - RNA, 20 nt, Human
ugccaagggcagggccacag

SEQ ID NO: 46604 - RNA, 20 nt, Human
ugccaagggcagggccacag

SEQ ID NO: 46605 - RNA, 19 nt, Human
ugcucagugacaggacuuc

SEQ ID NO: 46606 - RNA, 19 nt, Human
ugcucagugacaggacuuc

SEQ ID NO: 46607 - RNA, 18 nt, Human
uggaggaagugcccucca

SEQ ID NO: 46608 - RNA, 18 nt, Human
uggaggaagugcccucca

SEQ ID NO: 46609 - RNA, 21 nt, Human
uggcugacagaugcacuuccc

SEQ ID NO: 46610 - RNA, 19 nt, Human
uggggacgugggcaggggg

SEQ ID NO: 46611 - RNA, 23 nt, Human
uggguggggacgugggcaggggg

SEQ ID NO: 46612 - RNA, 21 nt, Human
uguaaaugucaaaacaucccc

SEQ ID NO: 46613 - RNA, 21 nt, Human
uguaaaugucaaaacaucccc

SEQ ID NO: 46614 - RNA, 22 nt, Human
ugugcaaggcugagccgcagga

SEQ ID NO: 46615 - RNA, 22 nt, Human
ugugcaaggcugagccgcagga

SEQ ID NO: 46616 - RNA, 19 nt, Human
uguggaggaagugcccucc

SEQ ID NO: 46617 - RNA, 19 nt, Human
uguggaggaagugcccucc

SEQ ID NO: 46618 - RNA, 18 nt, Human
uguggcaauccaugaggu

SEQ ID NO: 46619 - RNA, 18 nt, Human
uguggcaauccaugaggu

SEQ ID NO: 46620 - RNA, 19 nt, Human
uguggucauccuuggggag

SEQ ID NO: 46621 - RNA, 19 nt, Human
uguggucauccuuggggag

SEQ ID NO: 46622 - RNA, 20 nt, Human
uguuaggcccgcaggcugug

SEQ ID NO: 46623 - RNA, 21 nt, Human
uuaggccccuccggaccuucc

SEQ ID NO: 46624 - RNA, 20 nt, Human
uuaggcccgcaggcugugcc

SEQ ID NO: 46625 - RNA, 20 nt, Human
uuuucuagaacccccccccg

SEQ ID NO: 46626 - RNA, 20 nt, Human
uuuucuagaacccccccccg

SEQ ID NO: 46627 - RNA, 22 nt, Human
aaaaaacuccaacuggagcuga

SEQ ID NO: 46628 - RNA, 18 nt, Human
aaaaagacaaugcccacg

SEQ ID NO: 46629 - RNA, 23 nt, Human
aaauacuaaaagcacaacaagcc

SEQ ID NO: 46630 - RNA, 20 nt, Human
aacaccaccuuucccaagcu

SEQ ID NO: 46631 - RNA, 20 nt, Human
aacaugcucacggcugguca

SEQ ID NO: 46632 - RNA, 20 nt, Human
aacuccaacuggagcugaaa

SEQ ID NO: 46633 - RNA, 22 nt, Human
aagcaaacacauccuguccaga

SEQ ID NO: 46634 - RNA, 20 nt, Human
aagccagccuugaccguugc

SEQ ID NO: 46635 - RNA, 24 nt, Human
acacuacagaccccuuccaaacau

SEQ ID NO: 46636 - RNA, 22 nt, Human
acagaccccuuccaaacaugcu

SEQ ID NO: 46637 - RNA, 18 nt, Human
accauagcacagcacagc

SEQ ID NO: 46638 - RNA, 21 nt, Human
accauagcacagcacagcacu

SEQ ID NO: 46639 - RNA, 22 nt, Human
accuuaagauuccugucugcaa

SEQ ID NO: 46640 - RNA, 20 nt, Human
acuaaaauacuaaaagcaca

SEQ ID NO: 46641 - RNA, 18 nt, Human
acuacagcgcacugcacu

SEQ ID NO: 46642 - RNA, 19 nt, Human
acuacagcgcacugcacug

SEQ ID NO: 46643 - RNA, 19 nt, Human
acuauguugccuagauaca

SEQ ID NO: 46644 - RNA, 22 nt, Human
agaaaaagaagugcuuggcauu

SEQ ID NO: 46645 - RNA, 22 nt, Human
agaaaggacagcgagaaaaaga

SEQ ID NO: 46646 - RNA, 20 nt, Human
agacagagcaccauagcaca

SEQ ID NO: 46647 - RNA, 22 nt, Human
agcagacaugaacuauacccau

SEQ ID NO: 46648 - RNA, 19 nt, Human
agcaguauuauuuuccagc

SEQ ID NO: 46649 - RNA, 18 nt, Human
aggcauuugaagagugaa

SEQ ID NO: 46650 - RNA, 20 nt, Human
aggcauuugaagagugaaga

SEQ ID NO: 46651 - RNA, 19 nt, Human
agucucuauccuggugugg

SEQ ID NO: 46652 - RNA, 27 nt, Human
auccauagucaugaauacuauguugcc

SEQ ID NO: 46653 - RNA, 18 nt, Human
augcaugcuauacgaguu

SEQ ID NO: 46654 - RNA, 23 nt, Human
caaaaaacuccaacuggagcuga

SEQ ID NO: 46655 - RNA, 18 nt, Human
caaguucuggcuugucua

SEQ ID NO: 46656 - RNA, 27 nt, Human
caauuaccaaguguaaucaguuacagu

SEQ ID NO: 46657 - RNA, 20 nt, Human
cacagccuggaccugaagcc

SEQ ID NO: 46658 - RNA, 24 nt, Human
caccaaagcuuccuggccagaagc

SEQ ID NO: 46659 - RNA, 21 nt, Human
caccaccuuucccaagcuaaa

SEQ ID NO: 46660 - RNA, 24 nt, Human
caccauagcacagcacagcacuga

SEQ ID NO: 46661 - RNA, 24 nt, Human
cacuguugaaaaaaggugucggcu

SEQ ID NO: 46662 - RNA, 19 nt, Human
cagaagacagaggcaucaa

SEQ ID NO: 46663 - RNA, 26 nt, Human
cagaccccuuccaaacaugcucacgg

SEQ ID NO: 46664 - RNA, 19 nt, Human
cauggaaaacucagugaug

SEQ ID NO: 46665 - RNA, 20 nt, Human
ccaaaagaaggcuuucucau

SEQ ID NO: 46666 - RNA, 19 nt, Human
ccaccuuucccaagcuaaa

SEQ ID NO: 46667 - RNA, 20 nt, Human
ccaguccagaagacagaggc

SEQ ID NO: 46668 - RNA, 22 nt, Human
ccauggaaaacucagugauggu

SEQ ID NO: 46669 - RNA, 23 nt, Human
cccuuggcucuggccugagaugg

SEQ ID NO: 46670 - RNA, 19 nt, Human
ccuaaaaguugguacaaaa

SEQ ID NO: 46671 - RNA, 18 nt, Human
ccugaagccccuuggcuc

SEQ ID NO: 46672 - RNA, 23 nt, Human
ccuggaccugaagccccuuggcu

SEQ ID NO: 46673 - RNA, 23 nt, Human
ccuugagugacacuacagacccc

SEQ ID NO: 46674 - RNA, 24 nt, Human
cuauacccaugaacaucacauucc

SEQ ID NO: 46675 - RNA, 18 nt, Human
cucauaaaacacucagag

SEQ ID NO: 46676 - RNA, 20 nt, Human
cucauaauauuuaggaaguu

SEQ ID NO: 46677 - RNA, 21 nt, Human
cucccaggugucccugggagc

SEQ ID NO: 46678 - RNA, 19 nt, Human
cugccugccaguugucaag

SEQ ID NO: 46679 - RNA, 26 nt, Human
cuuaagauuccugucugcaacccuuu

SEQ ID NO: 46680 - RNA, 19 nt, Human
gaagccagauuucucccag

SEQ ID NO: 46681 - RNA, 19 nt, Human
gacugcuuuccaauaaggc

SEQ ID NO: 46682 - RNA, 18 nt, Human
gaggaugccccauagaga

SEQ ID NO: 46683 - RNA, 21 nt, Human
gauacaguggggaacaccggg

SEQ ID NO: 46684 - RNA, 18 nt, Human
gcacaacaagccuuccug

SEQ ID NO: 46685 - RNA, 20 nt, Human
ggccuucagugcagcagcuc

SEQ ID NO: 46686 - RNA, 18 nt, Human
gguaguugggggacugcu

SEQ ID NO: 46687 - RNA, 18 nt, Human
gucaaggggcacagggcc

SEQ ID NO: 46688 - RNA, 19 nt, Human
guccgaguuggcccgggga

SEQ ID NO: 46689 - RNA, 19 nt, Human
gugcaaguagacagagcag

SEQ ID NO: 46690 - RNA, 19 nt, Human
gugcagcagcucucgggcc

SEQ ID NO: 46691 - RNA, 26 nt, Human
uaaaaaugccuacuacagcgcacugc

SEQ ID NO: 46692 - RNA, 19 nt, Human
uaacaugccagaucuaagg

SEQ ID NO: 46693 - RNA, 21 nt, Human
uaaugauagcagacaugaacu

SEQ ID NO: 46694 - RNA, 23 nt, Human
uaauucuguauguaucucagcag

SEQ ID NO: 46695 - RNA, 24 nt, Human
uacaaaaaacuccaacuggagcug

SEQ ID NO: 46696 - RNA, 19 nt, Human
uaccaaguguaaucaguua

SEQ ID NO: 46697 - RNA, 18 nt, Human
uaccauaagcacagcugg

SEQ ID NO: 46698 - RNA, 22 nt, Human
uacccaugaacaucacauucca

SEQ ID NO: 46699 - RNA, 27 nt, Human
uacuacagcgcacugcacuguaaucaa

SEQ ID NO: 46700 - RNA, 22 nt, Human
uagguuucuuacagaaacacca

SEQ ID NO: 46701 - RNA, 21 nt, Human
uauagggagguggcgguuugc

SEQ ID NO: 46702 - RNA, 19 nt, Human
uauguugccuagauacagu

SEQ ID NO: 46703 - RNA, 22 nt, Human
uauguugccuagauacaguggg

SEQ ID NO: 46704 - RNA, 19 nt, Human
ucaaguucuggcuuguccu

SEQ ID NO: 46705 - RNA, 18 nt, Human
ucaccaaagcuuccuggc

SEQ ID NO: 46706 - RNA, 21 nt, Human
ucagaaagcaaacacauccug

SEQ ID NO: 46707 - RNA, 19 nt, Human
ucagggucaaguucuggcu

SEQ ID NO: 46708 - RNA, 22 nt, Human
uccagaaaaucaacugagauuc

SEQ ID NO: 46709 - RNA, 24 nt, Human
ucccaggugucccugggagccugc

SEQ ID NO: 46710 - RNA, 23 nt, Human
ucccugaaagccaaacacagccu

SEQ ID NO: 46711 - RNA, 26 nt, Human
ucugcaacccagguucucaccaaagc

SEQ ID NO: 46712 - RNA, 21 nt, Human
ugaauacaggaucauuguauu

SEQ ID NO: 46713 - RNA, 20 nt, Human
ugacuagaucugguuaaugg

SEQ ID NO: 46714 - RNA, 24 nt, Human
ugagauggggaauccagaaaauca

SEQ ID NO: 46715 - RNA, 22 nt, Human
ugcagcagcucucgggcccggc

SEQ ID NO: 46716 - RNA, 22 nt, Human
ugcagccaaguuggaaaaagag

SEQ ID NO: 46717 - RNA, 21 nt, Human
uggaaaaagaggaugccccau

SEQ ID NO: 46718 - RNA, 25 nt, Human
uggaaaacucagugaugguaaaaau

SEQ ID NO: 46719 - RNA, 18 nt, Human
uguaguuuuugcaagcau

SEQ ID NO: 46720 - RNA, 20 nt, Human
uguccagaaucccaucaagc

SEQ ID NO: 46721 - RNA, 19 nt, Human
ugucugaauacaggaucau

SEQ ID NO: 46722 - RNA, 19 nt, Human
uguggcuacaccuuaagau

SEQ ID NO: 46723 - RNA, 22 nt, Human
uguggugauuugcucagcucca

SEQ ID NO: 46724 - RNA, 23 nt, Human
ugugugcgugcgucgcgcgcgcg

SEQ ID NO: 46725 - RNA, 21 nt, Human
uguguguguuugugucacgug

SEQ ID NO: 46726 - RNA, 24 nt, Human
uguuuuaaacauuaaaaaaaaucc

SEQ ID NO: 46727 - RNA, 24 nt, Human
uucuugguacauauuuuucuguuc

SEQ ID NO: 46728 - RNA, 23 nt, Human
uuggaggaagggcuaacaugcca

SEQ ID NO: 46729 - RNA, 20 nt, Human
uuguccaauaucuacgaaua

SEQ ID NO: 46730 - RNA, 18 nt, Human
uuuuuuuuuuuuuuuuug

SEQ ID NO: 46731 - RNA, 20 nt, Human
aacccccagccccuccccaa

SEQ ID NO: 46732 - RNA, 18 nt, Human
acccccagccccucccca

SEQ ID NO: 46733 - RNA, 21 nt, Human
acccccagccccuccccaagc

SEQ ID NO: 46734 - RNA, 23 nt, Human
acccccagccccuccccaagccc

SEQ ID NO: 46735 - RNA, 23 nt, Human
agccccuccccaagcccccgcug

SEQ ID NO: 46736 - RNA, 19 nt, Human
aggcugugcggaccuuccu

SEQ ID NO: 46737 - RNA, 18 nt, Human
caacccccagccccuccc

SEQ ID NO: 46738 - RNA, 21 nt, Human
caagcccccgcugcaacuacg

SEQ ID NO: 46739 - RNA, 20 nt, Human
cagccccuccccaagccccc

SEQ ID NO: 46740 - RNA, 25 nt, Human
cagccccuccccaagcccccgcugc

SEQ ID NO: 46741 - RNA, 21 nt, Human
cccccagccccuccccaagcc

SEQ ID NO: 46742 - RNA, 19 nt, Human
cccccgcugcaacuacgcc

SEQ ID NO: 46743 - RNA, 23 nt, Human
cccuccccaagcccccgcugcaa

SEQ ID NO: 46744 - RNA, 21 nt, Human
ccuccccaagcccccgcugca

SEQ ID NO: 46745 - RNA, 26 nt, Human
cgcugcaacuacgccggcagguccgc

SEQ ID NO: 46746 - RNA, 25 nt, Human
cguccaacccccagccccuccccaa

SEQ ID NO: 46747 - RNA, 19 nt, Human
cucaaucccguccaacccc

SEQ ID NO: 46748 - RNA, 22 nt, Human
cuccccaagcccccgcugcaac

SEQ ID NO: 46749 - RNA, 21 nt, Human
uccaacccccagccccucccc

SEQ ID NO: 46750 - RNA, 24 nt, Human
uccccaagcccccgcugcaacuac

SEQ ID NO: 46751 - RNA, 21 nt, Human
ucccguccaacccccagcccc

SEQ ID NO: 46752 - RNA, 23 nt, Human
ugagcagagacaggcugugcgga

SEQ ID NO: 46753 - RNA, 20 nt, Human
ugcccggagucuuaagacac

SEQ ID NO: 46754 - RNA, 23 nt, Human
ugugcggaccuuccucaaucccg

SEQ ID NO: 46755 - RNA, 22 nt, Human
uugacagcgcguggcggugccc

SEQ ID NO: 46756 - RNA, 18 nt, Human
aaacuaaaaccugaaagc

SEQ ID NO: 46757 - RNA, 18 nt, Human
aaacuaaaaccugaaagc

SEQ ID NO: 46758 - RNA, 19 nt, Human
aaauaaaugccaaaugcuu

SEQ ID NO: 46759 - RNA, 21 nt, Human
aacccauccucguccauaugu

SEQ ID NO: 46760 - RNA, 20 nt, Human
aaggcaaaaaaaaaaaaaaa

SEQ ID NO: 46761 - RNA, 18 nt, Human
aagugcugggauuacagg

SEQ ID NO: 46762 - RNA, 18 nt, Human
aagugcugggauuacagg

SEQ ID NO: 46763 - RNA, 19 nt, Human
aagugcugggauuacaggc

SEQ ID NO: 46764 - RNA, 19 nt, Human
aagugcugggauuacaggc

SEQ ID NO: 46765 - RNA, 21 nt, Human
aagugcugggauuacaggcau

SEQ ID NO: 46766 - RNA, 21 nt, Human
aagugcugggauuacaggcau

SEQ ID NO: 46767 - RNA, 22 nt, Human
aagugcugggauuacaggcaug

SEQ ID NO: 46768 - RNA, 23 nt, Human
aagugcugggauuacaggcauga

SEQ ID NO: 46769 - RNA, 23 nt, Human
aagugcugggauuacaggcauga

SEQ ID NO: 46770 - RNA, 26 nt, Human
aagugcugggauuacaggcaugagcc

SEQ ID NO: 46771 - RNA, 26 nt, Human
aagugcugggauuacaggcaugagcc

SEQ ID NO: 46772 - RNA, 24 nt, Human
aaugccaaaugcuucauauucagc

SEQ ID NO: 46773 - RNA, 21 nt, Human
acuagaaauagacccacaauu

SEQ ID NO: 46774 - RNA, 21 nt, Human
acuagaaauagacccacaauu

SEQ ID NO: 46775 - RNA, 18 nt, Human
acucugucacccaggcug

SEQ ID NO: 46776 - RNA, 18 nt, Human
acucugucacccaggcug

SEQ ID NO: 46777 - RNA, 25 nt, Human
acucugucacccaggcuggagugua

SEQ ID NO: 46778 - RNA, 25 nt, Human
acucugucacccaggcuggagugua

SEQ ID NO: 46779 - RNA, 22 nt, Human
agcccucacuguaagguagugg

SEQ ID NO: 46780 - RNA, 22 nt, Human
agcccucacuguaagguagugg

SEQ ID NO: 46781 - RNA, 22 nt, Human
aggaaguucaaacacaugacca

SEQ ID NO: 46782 - RNA, 22 nt, Human
aggaaguucaaacacaugacca

SEQ ID NO: 46783 - RNA, 23 nt, Human
aggaggcagccuuuucacuucug

SEQ ID NO: 46784 - RNA, 18 nt, Human
aggcaaaaaaaaaaaaaa

SEQ ID NO: 46785 - RNA, 18 nt, Human
aggcaaaaaaaaaaaaaa

SEQ ID NO: 46786 - RNA, 22 nt, Human
aggcggccuggagucuggggcg

SEQ ID NO: 46787 - RNA, 23 nt, Human
aggcugcaggcggccuggagucu

SEQ ID NO: 46788 - RNA, 18 nt, Human
agugcugggauuacaggc

SEQ ID NO: 46789 - RNA, 18 nt, Human
agugcugggauuacaggc

SEQ ID NO: 46790 - RNA, 21 nt, Human
aguguaguggcgcaaccucag

SEQ ID NO: 46791 - RNA, 21 nt, Human
aguguaguggcgcaaccucag

SEQ ID NO: 46792 - RNA, 26 nt, Human
auaaaaaaaaacugaucauuucccua

SEQ ID NO: 46793 - RNA, 20 nt, Human
auaaaauacagaaaaacugc

SEQ ID NO: 46794 - RNA, 25 nt, Human
auaaaauacagaaaaacugcccagu

SEQ ID NO: 46795 - RNA, 25 nt, Human
auaaaauacagaaaaacugcccagu

SEQ ID NO: 46796 - RNA, 18 nt, Human
aucucacucugucaccca

SEQ ID NO: 46797 - RNA, 18 nt, Human
aucucacucugucaccca

SEQ ID NO: 46798 - RNA, 18 nt, Human
augagccaccacucccag

SEQ ID NO: 46799 - RNA, 21 nt, Human
auucauaacccaauccagcug

SEQ ID NO: 46800 - RNA, 23 nt, Human
caaaauaaguagauucacuuuca

SEQ ID NO: 46801 - RNA, 21 nt, Human
caaauaaaugccaaaugcuuc

SEQ ID NO: 46802 - RNA, 21 nt, Human
caaauaaaugccaaaugcuuc

SEQ ID NO: 46803 - RNA, 21 nt, Human
caaauaaaugccaaaugcuuc

SEQ ID NO: 46804 - RNA, 22 nt, Human
caaaucagggcccuaaacaguu

SEQ ID NO: 46805 - RNA, 22 nt, Human
caaaucagggcccuaaacaguu

SEQ ID NO: 46806 - RNA, 24 nt, Human
caagugcugggauuacaggcauga

SEQ ID NO: 46807 - RNA, 24 nt, Human
caagugcugggauuacaggcauga

SEQ ID NO: 46808 - RNA, 24 nt, Human
caauguauacuaaauuuaucuccu

SEQ ID NO: 46809 - RNA, 26 nt, Human
cacacuuaagucagaagagcugagaa

SEQ ID NO: 46810 - RNA, 24 nt, Human
cacccaggcuggaguguaguggcg

SEQ ID NO: 46811 - RNA, 24 nt, Human
cacccaggcuggaguguaguggcg

SEQ ID NO: 46812 - RNA, 22 nt, Human
cacucugucacccaggcuggag

SEQ ID NO: 46813 - RNA, 23 nt, Human
cacucugucacccaggcuggagu

SEQ ID NO: 46814 - RNA, 23 nt, Human
cacucugucacccaggcuggagu

SEQ ID NO: 46815 - RNA, 24 nt, Human
cacucugucacccaggcuggagug

SEQ ID NO: 46816 - RNA, 24 nt, Human
cacuuaagucagaagagcugagaa

SEQ ID NO: 46817 - RNA, 19 nt, Human
cagcugugcugcuauuugg

SEQ ID NO: 46818 - RNA, 22 nt, Human
cagugccuguuaucaauauaaa

SEQ ID NO: 46819 - RNA, 21 nt, Human
cagugcuguuaucaauauaaa

SEQ ID NO: 46820 - RNA, 22 nt, Human
caugaccagcaucugcuaaguc

SEQ ID NO: 46821 - RNA, 22 nt, Human
caugaccagcaucugcuaaguc

SEQ ID NO: 46822 - RNA, 19 nt, Human
caugagccaccacucccag

SEQ ID NO: 46823 - RNA, 19 nt, Human
caugagccaccacucccag

SEQ ID NO: 46824 - RNA, 22 nt, Human
ccaaaugcuucauauucagcgg

SEQ ID NO: 46825 - RNA, 22 nt, Human
ccaaaugcuucauauucagcgg

SEQ ID NO: 46826 - RNA, 18 nt, Human
ccaagugcugggauuaca

SEQ ID NO: 46827 - RNA, 18 nt, Human
ccaagugcugggauuaca

SEQ ID NO: 46828 - RNA, 21 nt, Human
ccaagugcugggauuacaggc

SEQ ID NO: 46829 - RNA, 23 nt, Human
ccaagugcugggauuacaggcau

SEQ ID NO: 46830 - RNA, 23 nt, Human
ccaagugcugggauuacaggcau

SEQ ID NO: 46831 - RNA, 24 nt, Human
ccaagugcugggauuacaggcaug

SEQ ID NO: 46832 - RNA, 19 nt, Human
ccagcaaaucagggcccua

SEQ ID NO: 46833 - RNA, 19 nt, Human
ccagcaaaucagggcccua

SEQ ID NO: 46834 - RNA, 22 nt, Human
ccauaaauucaacuggcuacca

SEQ ID NO: 46835 - RNA, 22 nt, Human
ccauaaauucaacuggcuacca

SEQ ID NO: 46836 - RNA, 22 nt, Human
ccccucaauccucuuuucccuc

SEQ ID NO: 46837 - RNA, 23 nt, Human
ccuagccccucaauccucuuuuc

SEQ ID NO: 46838 - RNA, 23 nt, Human
ccuagccccucaauccucuuuuc

SEQ ID NO: 46839 - RNA, 29 nt, Human
ccuagccccucaauccucuuuucccuccc

SEQ ID NO: 46840 - RNA, 27 nt, Human
ccuagccccucaauccucuuuuccucc

SEQ ID NO: 46841 - RNA, 22 nt, Human
ccucaaaauaagcuagauucac

SEQ ID NO: 46842 - RNA, 24 nt, Human
ccucagccucuccaagugcuggga

SEQ ID NO: 46843 - RNA, 24 nt, Human
ccucagccucuccaagugcuggga

SEQ ID NO: 46844 - RNA, 20 nt, Human
ccuuuguuuuuaguugaagg

SEQ ID NO: 46845 - RNA, 21 nt, Human
ccuuuguuuuuaguugaaggc

SEQ ID NO: 46846 - RNA, 21 nt, Human
ccuuuguuuuuaguugaaggc

SEQ ID NO: 46847 - RNA, 23 nt, Human
ccuuuucaaaaggagaagggcca

SEQ ID NO: 46848 - RNA, 23 nt, Human
ccuuuucaaaaggagaagggcca

SEQ ID NO: 46849 - RNA, 18 nt, Human
cgaagggaucacaggggc

SEQ ID NO: 46850 - RNA, 22 nt, Human
cuagaaauagacccacaauuua

SEQ ID NO: 46851 - RNA, 22 nt, Human
cuagaaauagacccacaauuua

SEQ ID NO: 46852 - RNA, 24 nt, Human
cucacucugucacccaggcuggag

SEQ ID NO: 46853 - RNA, 24 nt, Human
cucacucugucacccaggcuggag

SEQ ID NO: 46854 - RNA, 20 nt, Human
cucauaacccaauccagcug

SEQ ID NO: 46855 - RNA, 24 nt, Human
cuccaagugcugggauuacaggca

SEQ ID NO: 46856 - RNA, 22 nt, Human
cuccuuuguuuuuaguugaagg

SEQ ID NO: 46857 - RNA, 22 nt, Human
cugaaagccucaaaauaaguag

SEQ ID NO: 46858 - RNA, 19 nt, Human
cugcaggaaguucaaacac

SEQ ID NO: 46859 - RNA, 19 nt, Human
cugcaggaaguucaaacac

SEQ ID NO: 46860 - RNA, 20 nt, Human
cugcuaagucacuucccagu

SEQ ID NO: 46861 - RNA, 20 nt, Human
cugcuaagucacuucccagu

SEQ ID NO: 46862 - RNA, 21 nt, Human
gaaccgaugcagaauccaugc

SEQ ID NO: 46863 - RNA, 21 nt, Human
gaagagccauauuaacccaaa

SEQ ID NO: 46864 - RNA, 21 nt, Human
gaagagccauauuaacccaaa

SEQ ID NO: 46865 - RNA, 18 nt, Human
gauuacaggcaugagcca

SEQ ID NO: 46866 - RNA, 18 nt, Human
gauuacaggcaugagcca

SEQ ID NO: 46867 - RNA, 21 nt, Human
gauuacaggcaugagccacca

SEQ ID NO: 46868 - RNA, 21 nt, Human
gauuacaggcaugagccacca

SEQ ID NO: 46869 - RNA, 22 nt, Human
gauuacaggcaugagccaccac

SEQ ID NO: 46870 - RNA, 22 nt, Human
gauuacaggcaugagccaccac

SEQ ID NO: 46871 - RNA, 23 nt, Human
gcaaaaaaaaaaaaaaaaaaaaa

SEQ ID NO: 46872 - RNA, 23 nt, Human
gcaaaaaaaaaaaaaaaaaaaaa

SEQ ID NO: 46873 - RNA, 21 nt, Human
gcgcaaccucagccucuccaa

SEQ ID NO: 46874 - RNA, 21 nt, Human
gcgcaaccucagccucuccaa

SEQ ID NO: 46875 - RNA, 19 nt, Human
ggauuacaggcaugagcca

SEQ ID NO: 46876 - RNA, 19 nt, Human
ggauuacaggcaugagcca

SEQ ID NO: 46877 - RNA, 23 nt, Human
gggauccgcccggccuagccccc

SEQ ID NO: 46878 - RNA, 23 nt, Human
gggauccgcccggccuagccccc

SEQ ID NO: 46879 - RNA, 20 nt, Human
gggcaggcugcaggcggccu

SEQ ID NO: 46880 - RNA, 20 nt, Human
guauacuaaauuuaucuccu

SEQ ID NO: 46881 - RNA, 20 nt, Human
guggcgcaaccucagccucu

SEQ ID NO: 46882 - RNA, 20 nt, Human
guggcgcaaccucagccucu

SEQ ID NO: 46883 - RNA, 24 nt, Human
uaaaaaaaaacugaucauuucccu

SEQ ID NO: 46884 - RNA, 26 nt, Human
uaaaugccaaaugcuucauauucagc

SEQ ID NO: 46885 - RNA, 21 nt, Human
uaacagggauacaugaagaua

SEQ ID NO: 46886 - RNA, 21 nt, Human
uaacagggauacaugaagaua

SEQ ID NO: 46887 - RNA, 20 nt, Human
uaacuagaaauagacccaca

SEQ ID NO: 46888 - RNA, 20 nt, Human
uaacuagaaauagacccaca

SEQ ID NO: 46889 - RNA, 21 nt, Human
uaacuagaaauagacccacaa

SEQ ID NO: 46890 - RNA, 21 nt, Human
uaacuagaaauagacccacaa

SEQ ID NO: 46891 - RNA, 24 nt, Human
uaagcuagauucaccuucaccuua

SEQ ID NO: 46892 - RNA, 28 nt, Human
uaagucacuucccagucuucacaaaaua

SEQ ID NO: 46893 - RNA, 28 nt, Human
uaagucacuucccagucuucacaaaaua

SEQ ID NO: 46894 - RNA, 24 nt, Human
uacaggcaugagccaccacuccca

SEQ ID NO: 46895 - RNA, 24 nt, Human
uacaggcaugagccaccacuccca

SEQ ID NO: 46896 - RNA, 23 nt, Human
uaccugcaggaaguucaaacaca

SEQ ID NO: 46897 - RNA, 23 nt, Human
uaccugcaggaaguucaaacaca

SEQ ID NO: 46898 - RNA, 23 nt, Human
uagccccucaauccucuuuuccc

SEQ ID NO: 46899 - RNA, 23 nt, Human
uagccccucaauccucuuuuccu

SEQ ID NO: 46900 - RNA, 18 nt, Human
uaguugaaggcaaaaaaa

SEQ ID NO: 46901 - RNA, 18 nt, Human
uaguugaaggcaaaaaaa

SEQ ID NO: 46902 - RNA, 20 nt, Human
uauaaaaaaaaacugaucau

SEQ ID NO: 46903 - RNA, 21 nt, Human
uauaaaauacagaaaaacugc

SEQ ID NO: 46904 - RNA, 26 nt, Human
uauaaaauacagaaaaacugcccagc

SEQ ID NO: 46905 - RNA, 26 nt, Human
uauaaaauacagaaaaacugcccagc

SEQ ID NO: 46906 - RNA, 25 nt, Human
ucaaaaggagaagggccaaaccaca

SEQ ID NO: 46907 - RNA, 25 nt, Human
ucaaaaggagaagggccaaaccaca

SEQ ID NO: 46908 - RNA, 19 nt, Human
ucaaaauaagcuagauuca

SEQ ID NO: 46909 - RNA, 22 nt, Human
ucacccaggcuggaguguagug

SEQ ID NO: 46910 - RNA, 22 nt, Human
ucacccaggcuggaguguagug

SEQ ID NO: 46911 - RNA, 24 nt, Human
ucacucugucacccaggcuggagu

SEQ ID NO: 46912 - RNA, 24 nt, Human
ucacucugucacccaggcuggagu

SEQ ID NO: 46913 - RNA, 21 nt, Human
ucauuacaguguauaaaaaaa

SEQ ID NO: 46914 - RNA, 21 nt, Human
ucauuacaguguauaaaaaaa

SEQ ID NO: 46915 - RNA, 22 nt, Human
uccaagugcugggauuacaggc

SEQ ID NO: 46916 - RNA, 23 nt, Human
uccaagugcugggauuacaggca

SEQ ID NO: 46917 - RNA, 23 nt, Human
uccaagugcugggauuacaggca

SEQ ID NO: 46918 - RNA, 24 nt, Human
uccaagugcugggauuacaggcau

SEQ ID NO: 46919 - RNA, 24 nt, Human
uccaagugcugggauuacaggcau

SEQ ID NO: 46920 - RNA, 26 nt, Human
uccacuuuucucacaaauaaaugcca

SEQ ID NO: 46921 - RNA, 26 nt, Human
uccacuuuucucacaaauaaaugcca

SEQ ID NO: 46922 - RNA, 23 nt, Human
ucucacucugucacccaggcugg

SEQ ID NO: 46923 - RNA, 23 nt, Human
ucucacucugucacccaggcugg

SEQ ID NO: 46924 - RNA, 24 nt, Human
ucucacucugucacccaggcugga

SEQ ID NO: 46925 - RNA, 24 nt, Human
ucucacucugucacccaggcugga

SEQ ID NO: 46926 - RNA, 26 nt, Human
ucucacucugucacccaggcuggagu

SEQ ID NO: 46927 - RNA, 26 nt, Human
ucucacucugucacccaggcuggagu

SEQ ID NO: 46928 - RNA, 27 nt, Human
ucucacucugucacccaggcuggagug

SEQ ID NO: 46929 - RNA, 27 nt, Human
ucucacucugucacccaggcuggagug

SEQ ID NO: 46930 - RNA, 24 nt, Human
ucuccaagugcugggauuacaggc

SEQ ID NO: 46931 - RNA, 24 nt, Human
ucuccaagugcugggauuacaggc

SEQ ID NO: 46932 - RNA, 20 nt, Human
ucucugggcagccuucgccu

SEQ ID NO: 46933 - RNA, 20 nt, Human
ucucugggcagccuucgccu

SEQ ID NO: 46934 - RNA, 21 nt, Human
ucucuggugguccaguuuugg

SEQ ID NO: 46935 - RNA, 19 nt, Human
ucugcuaagucacuuccca

SEQ ID NO: 46936 - RNA, 19 nt, Human
ucugcuaagucacuuccca

SEQ ID NO: 46937 - RNA, 24 nt, Human
ucugucacccaggcuggaguguag

SEQ ID NO: 46938 - RNA, 24 nt, Human
ucugucacccaggcuggaguguag

SEQ ID NO: 46939 - RNA, 22 nt, Human
ugaaagccucaaaauaagcuag

SEQ ID NO: 46940 - RNA, 19 nt, Human
ugaaggcaaaaaaaaaaaa

SEQ ID NO: 46941 - RNA, 19 nt, Human
ugaaggcaaaaaaaaaaaa

SEQ ID NO: 46942 - RNA, 23 nt, Human
ugagauccucaaaugacuuggca

SEQ ID NO: 46943 - RNA, 22 nt, Human
ugcaggaaguucaaacacauga

SEQ ID NO: 46944 - RNA, 22 nt, Human
ugcaggaaguucaaacacauga

SEQ ID NO: 46945 - RNA, 20 nt, Human
ugcuggggucuuccuggaug

SEQ ID NO: 46946 - RNA, 18 nt, Human
uggaguguaguggcgcaa

SEQ ID NO: 46947 - RNA, 18 nt, Human
uggaguguaguggcgcaa

SEQ ID NO: 46948 - RNA, 19 nt, Human
uggaguguaguggcgcaac

SEQ ID NO: 46949 - RNA, 19 nt, Human
uggaguguaguggcgcaac

SEQ ID NO: 46950 - RNA, 23 nt, Human
uggaguguaguggcgcaaccuca

SEQ ID NO: 46951 - RNA, 23 nt, Human
uggaguguaguggcgcaaccuca

SEQ ID NO: 46952 - RNA, 18 nt, Human
ugggauuacaggcaugag

SEQ ID NO: 46953 - RNA, 18 nt, Human
ugggauuacaggcaugag

SEQ ID NO: 46954 - RNA, 19 nt, Human
ugggauuacaggcaugagc

SEQ ID NO: 46955 - RNA, 19 nt, Human
ugggauuacaggcaugagc

SEQ ID NO: 46956 - RNA, 22 nt, Human
ugggauuacaggcaugagccac

SEQ ID NO: 46957 - RNA, 22 nt, Human
ugggauuacaggcaugagccac

SEQ ID NO: 46958 - RNA, 23 nt, Human
ugggauuacaggcaugagccacc

SEQ ID NO: 46959 - RNA, 23 nt, Human
ugggauuacaggcaugagccacc

SEQ ID NO: 46960 - RNA, 24 nt, Human
ugggauuacaggcaugagccacca

SEQ ID NO: 46961 - RNA, 24 nt, Human
ugggauuacaggcaugagccacca

SEQ ID NO: 46962 - RNA, 23 nt, Human
uguauaaaaaaaaacugaucauu

SEQ ID NO: 46963 - RNA, 23 nt, Human
uguauaaaaaaaaacugaucauu

SEQ ID NO: 46964 - RNA, 31 nt, Human
uuaguugaaggcaaaaaaaaaaaaaaaaaaa

SEQ ID NO: 46965 - RNA, 31 nt, Human; identical to SEQ ID NO: 46964

SEQ ID NO: 46966 - RNA, 21 nt, Human
uucaaaaggagaagggccaaa

SEQ ID NO: 46967 - RNA, 19 nt, Human
uucacaaaauacaagcugu

SEQ ID NO: 46968 - RNA, 19 nt, Human
uucauauucagcgguucau

SEQ ID NO: 46969 - RNA, 19 nt, Human
uucauauucagcgguucau

SEQ ID NO: 46970 - RNA, 19 nt, Human
uuuugcaccacaggucaaa

SEQ ID NO: 46971 - RNA, 19 nt, Human
uuuugcaccacaggucaaa

SEQ ID NO: 46972 - RNA, 20 nt, Human
aaaaaacacuccaaccagaa

SEQ ID NO: 46973 - RNA, 24 nt, Human
aaaaagcaagaaaacgacaaccca

SEQ ID NO: 46974 - RNA, 24 nt, Human
aaaaagcuggguugaggaagaggc

SEQ ID NO: 46975 - RNA, 21 nt, Human
aaaacaaaacaaaacaaaaag

SEQ ID NO: 46976 - RNA, 24 nt, Human
aaaacaacaccuagaggccaucag

SEQ ID NO: 46977 - RNA, 21 nt, Human
aaaagcaagaaaacgacaacc

SEQ ID NO: 46978 - RNA, 23 nt, Human
aaaaggaagugaaugacaaaaag

SEQ ID NO: 46979 - RNA, 22 nt, Human
aaacaaaaagcaagaaaacgag

SEQ ID NO: 46980 - RNA, 19 nt, Human
aaacaaaacaaaacaaaaa

SEQ ID NO: 46981 - RNA, 23 nt, Human
aaacaaaacaaaacaaaaagcaa

SEQ ID NO: 46982 - RNA, 18 nt, Human
aaacacuccaaccagaaa

SEQ ID NO: 46983 - RNA, 21 nt, Human
aaacacuccaaccagaaaauc

SEQ ID NO: 46984 - RNA, 23 nt, Human
aaacagccccuccccuggagaca

SEQ ID NO: 46985 - RNA, 19 nt, Human
aaacgacaacccaggucuc

SEQ ID NO: 46986 - RNA, 20 nt, Human
aaagagcaacuaaaaauuau

SEQ ID NO: 46987 - RNA, 19 nt, Human
aaagcaccacacggcccuc

SEQ ID NO: 46988 - RNA, 23 nt, Human
aacaaggaaaaaaggcaccaugg

SEQ ID NO: 46989 - RNA, 22 nt, Human
aaccaagcccugggcagggcca

SEQ ID NO: 46990 - RNA, 21 nt, Human
aagagcuugcuaacucacuaa

SEQ ID NO: 46991 - RNA, 23 nt, Human
aagaucugcaagugucucagagc

SEQ ID NO: 46992 - RNA, 21 nt, Human
aagcaagaaaacgacaaccca

SEQ ID NO: 46993 - RNA, 21 nt, Human
aaggggaccuuuccaguuggu

SEQ ID NO: 46994 - RNA, 21 nt, Human
aaguaccaccuccauccagcc

SEQ ID NO: 46995 - RNA, 24 nt, Human
aauacagggaugcagggguuuggg

SEQ ID NO: 46996 - RNA, 22 nt, Human
aaucccuaaaagcuaaaagggg

SEQ ID NO: 46997 - RNA, 25 nt, Human
aaugaggaaacagacucaagaggga

SEQ ID NO: 46998 - RNA, 23 nt, Human
acaaaaaaaaaaaaaaaaaaaaa

SEQ ID NO: 46999 - RNA, 20 nt, Human
acaaaacaacaccuagaggc

SEQ ID NO: 47000 - RNA, 22 nt, Human
acaaaacaacaccuagaggcca

SEQ ID NO: 47001 - RNA, 23 nt, Human
acaaaacacaaugaaaaauaaac

SEQ ID NO: 47002 - RNA, 18 nt, Human
acacgcccucagccauac

SEQ ID NO: 47003 - RNA, 22 nt, Human
agacaaaaaaaaaaaaaaaaaa

SEQ ID NO: 47004 - RNA, 18 nt, Human
agacaugcuucuucaggg

SEQ ID NO: 47005 - RNA, 22 nt, Human
agacccccucaccugcucagag

SEQ ID NO: 47006 - RNA, 19 nt, Human
agcaaacagccccuccccu

SEQ ID NO: 47007 - RNA, 18 nt, Human
agccaccgcagacccccu

SEQ ID NO: 47008 - RNA, 26 nt, Human
agccaggugcccaggcuaaggcuucu

SEQ ID NO: 47009 - RNA, 20 nt, Human
agccgaggaggcacugaguc

SEQ ID NO: 47010 - RNA, 23 nt, Human
agccugagccagcaaacagcccc

SEQ ID NO: 47011 - RNA, 20 nt, Human
agcugcugcuggcugccuuc

SEQ ID NO: 47012 - RNA, 20 nt, Human
aggaaagggagaagccccuu

SEQ ID NO: 47013 - RNA, 22 nt, Human
aggaagacccccacccugcuga

SEQ ID NO: 47014 - RNA, 19 nt, Human
aggagaagcugccagucac

SEQ ID NO: 47015 - RNA, 23 nt, Human
aggagggugggaggagcucagag

SEQ ID NO: 47016 - RNA, 21 nt, Human
aggcaccauggcccauucaag

SEQ ID NO: 47017 - RNA, 25 nt, Human
aggcaugggguuggguuuugaggau

SEQ ID NO: 47018 - RNA, 24 nt, Human
aggcccugggguggugaaucagaa

SEQ ID NO: 47019 - RNA, 21 nt, Human
aggggaccuuuccaguuggug

SEQ ID NO: 47020 - RNA, 21 nt, Human
aggucaggacugcugaggguu

SEQ ID NO: 47021 - RNA, 23 nt, Human
agugcagcugcugcuggcugccu

SEQ ID NO: 47022 - RNA, 23 nt, Human
aucaugcuuuggaauaaggucuc

SEQ ID NO: 47023 - RNA, 22 nt, Human
augcagggguuuggggagaggu

SEQ ID NO: 47024 - RNA, 21 nt, Human
caaaaagcaagaaaacgacaa

SEQ ID NO: 47025 - RNA, 21 nt, Human
caaaacaaaaagcaagaaaac

SEQ ID NO: 47026 - RNA, 21 nt, Human
caaaacacaaugaaaaauaaa

SEQ ID NO: 47027 - RNA, 18 nt, Human
caaaugaggaaacagacu

SEQ ID NO: 47028 - RNA, 22 nt, Human
caaccaagcccugggcagggcc

SEQ ID NO: 47029 - RNA, 20 nt, Human
caaggaaaaaaggcaccaug

SEQ ID NO: 47030 - RNA, 23 nt, Human
caaggaaaaaaggcaccauggcc

SEQ ID NO: 47031 - RNA, 21 nt, Human
cacagccacccugagggaaga

SEQ ID NO: 47032 - RNA, 27 nt, Human
cacagcucaggauucuaagaaucaccu

SEQ ID NO: 47033 - RNA, 19 nt, Human
cacaguacaacuuuauggg

SEQ ID NO: 47034 - RNA, 19 nt, Human
cacaugcagccauacagcc

SEQ ID NO: 47035 - RNA, 22 nt, Human
caccagacccuggacuuugggc

SEQ ID NO: 47036 - RNA, 23 nt, Human
cacccagcaccuuuguggagugg

SEQ ID NO: 47037 - RNA, 23 nt, Human
caccucaaaaacagcauacuggg

SEQ ID NO: 47038 - RNA, 18 nt, Human
cacgcccucagccauacc

SEQ ID NO: 47039 - RNA, 18 nt, Human
cacugagucaacagggag

SEQ ID NO: 47040 - RNA, 19 nt, Human
cacuggaaagaaaagggga

SEQ ID NO: 47041 - RNA, 22 nt, Human
cagaaaaucagcaagucucaga

SEQ ID NO: 47042 - RNA, 22 nt, Human
cagacacauacaaacgcacagu

SEQ ID NO: 47043 - RNA, 19 nt, Human
cagaggggugaaaggggau

SEQ ID NO: 47044 - RNA, 22 nt, Human
cagccagaagccguucccucaa

SEQ ID NO: 47045 - RNA, 21 nt, Human
cagcccgaagucaaugaccag

SEQ ID NO: 47046 - RNA, 24 nt, Human
caggaaccaagccuugaggcagag

SEQ ID NO: 47047 - RNA, 21 nt, Human
caggacugaagccaccacagc

SEQ ID NO: 47048 - RNA, 24 nt, Human
caggagugaauggauggcuucugc

SEQ ID NO: 47049 - RNA, 20 nt, Human
cagggccacagcaguggcug

SEQ ID NO: 47050 - RNA, 18 nt, Human
ccaauggccaugccccga

SEQ ID NO: 47051 - RNA, 20 nt, Human
ccagaaaaucagcaagucuc

SEQ ID NO: 47052 - RNA, 20 nt, Human
ccagcccgaagucaaugacc

SEQ ID NO: 47053 - RNA, 22 nt, Human
cccaagaacauccaagaagcac

SEQ ID NO: 47054 - RNA, 21 nt, Human
cccacggcaaggacaugggga

SEQ ID NO: 47055 - RNA, 22 nt, Human
cccaggcuaaggcuucuagaga

SEQ ID NO: 47056 - RNA, 18 nt, Human
ccccuggagacaaaaaaa

SEQ ID NO: 47057 - RNA, 24 nt, Human
cccgggaccucugaggagagcaga

SEQ ID NO: 47058 - RNA, 20 nt, Human
cccuggagacaaaaaaaaaa

SEQ ID NO: 47059 - RNA, 20 nt, Human
cccuuuccccuucugcaauc

SEQ ID NO: 47060 - RNA, 22 nt, Human
ccgaagucaaugaccagccugc

SEQ ID NO: 47061 - RNA, 21 nt, Human
ccgagucuacucuggucacac

SEQ ID NO: 47062 - RNA, 21 nt, Human
ccgcaggccagguggcuucua

SEQ ID NO: 47063 - RNA, 25 nt, Human
ccucagccauaccugcccacugccc

SEQ ID NO: 47064 - RNA, 20 nt, Human
ccucccgcaggccagguggc

SEQ ID NO: 47065 - RNA, 24 nt, Human
ccuccuccccaccagacccuggac

SEQ ID NO: 47066 - RNA, 18 nt, Human
cuauggcuagcaggcagu

SEQ ID NO: 47067 - RNA, 24 nt, Human
cucagccugagccagcaaacagcc

SEQ ID NO: 47068 - RNA, 27 nt, Human
cuccaggugcuuugcaaaaaccguccu

SEQ ID NO: 47069 - RNA, 21 nt, Human
cuccagugaucucgggcagcu

SEQ ID NO: 47070 - RNA, 21 nt, Human
cuccuucgcaggcuccccugg

SEQ ID NO: 47071 - RNA, 20 nt, Human
cucugcucagagggcaacgg

SEQ ID NO: 47072 - RNA, 20 nt, Human
cucuguacaaaugaggaaac

SEQ ID NO: 47073 - RNA, 21 nt, Human
cugagacugucagccacacag

SEQ ID NO: 47074 - RNA, 18 nt, Human
cugcucagagggcaacgg

SEQ ID NO: 47075 - RNA, 18 nt, Human
cugcugcuggcugccuuc

SEQ ID NO: 47076 - RNA, 22 nt, Human
cuuguaggucacaagcaccugg

SEQ ID NO: 47077 - RNA, 20 nt, Human
cuuuggaaaugugggcuugg

SEQ ID NO: 47078 - RNA, 18 nt, Human
cuuuggaacuggucccca

SEQ ID NO: 47079 - RNA, 22 nt, Human
gaaaauaauaaaacaaaacaaa

SEQ ID NO: 47080 - RNA, 18 nt, Human
gaaguacgaggaggggcc

SEQ ID NO: 47081 - RNA, 24 nt, Human
gaaucaccuuucacaugaagccaa

SEQ ID NO: 47082 - RNA, 19 nt, Human
gacccuggacuuugggccc

SEQ ID NO: 47083 - RNA, 20 nt, Human
gacuuugggccauccucagc

SEQ ID NO: 47084 - RNA, 20 nt, Human
gagaggggaaggaagagaga

SEQ ID NO: 47085 - RNA, 22 nt, Human
gagauuuuuggagauguggagg

SEQ ID NO: 47086 - RNA, 20 nt, Human
gagcuggggcagaaaaaggc

SEQ ID NO: 47087 - RNA, 18 nt, Human
gagggugggaggagcuca

SEQ ID NO: 47088 - RNA, 20 nt, Human
gaugggaggaggccccagga

SEQ ID NO: 47089 - RNA, 18 nt, Human
gcacuaaaucccuugagg

SEQ ID NO: 47090 - RNA, 24 nt, Human
gcagcacaguccauaguuuucuca

SEQ ID NO: 47091 - RNA, 18 nt, Human
gccauccucagccugagc

SEQ ID NO: 47092 - RNA, 24 nt, Human
gccuugaggcagaggguagcacau

SEQ ID NO: 47093 - RNA, 21 nt, Human
gcucaaggaaagggagaaaag

SEQ ID NO: 47094 - RNA, 20 nt, Human
gcucaugcagucacuauggc

SEQ ID NO: 47095 - RNA, 22 nt, Human
ggaagacaggagccaccgcaga

SEQ ID NO: 47096 - RNA, 18 nt, Human
ggacugaagccaccacag

SEQ ID NO: 47097 - RNA, 19 nt, Human
ggacugcugaggguuugcu

SEQ ID NO: 47098 - RNA, 22 nt, Human
ggaggagggugggaggagcuca

SEQ ID NO: 47099 - RNA, 20 nt, Human
ggagguuccuggaggagggu

SEQ ID NO: 47100 - RNA, 22 nt, Human
ggaucccagacacauacaaacg

SEQ ID NO: 47101 - RNA, 23 nt, Human
ggcaaggacauggggaaccugua

SEQ ID NO: 47102 - RNA, 19 nt, Human
ggcacaacgucauucccug

SEQ ID NO: 47103 - RNA, 22 nt, Human
ggccaaguguacacagccuccc

SEQ ID NO: 47104 - RNA, 23 nt, Human
ggccugaggggcuugcuggccuu

SEQ ID NO: 47105 - RNA, 24 nt, Human
ggccugaggggcuugcuggccuug

SEQ ID NO: 47106 - RNA, 19 nt, Human
ggcuuggauucuacagaac

SEQ ID NO: 47107 - RNA, 22 nt, Human
gggauguuuucaccuuuacuuu

SEQ ID NO: 47108 - RNA, 24 nt, Human
gggcuaggagucuggaggagaagc

SEQ ID NO: 47109 - RNA, 19 nt, Human
ggugugguuccagggaggg

SEQ ID NO: 47110 - RNA, 20 nt, Human
gugaagcauuaguagaacug

SEQ ID NO: 47111 - RNA, 21 nt, Human
gugaggcaugggguuggguuu

SEQ ID NO: 47112 - RNA, 23 nt, Human
gugagggagaaaggcuggagaag

SEQ ID NO: 47113 - RNA, 19 nt, Human
guuccuggaggaggguggg

SEQ ID NO: 47114 - RNA, 22 nt, Human
uaaaacaaaacaaaacaaaaag

SEQ ID NO: 47115 - RNA, 23 nt, Human
uaaaacaaaacaaaacaaaaagc

SEQ ID NO: 47116 - RNA, 19 nt, Human
uaaaagguugggccacagg

SEQ ID NO: 47117 - RNA, 22 nt, Human
uaacauugcaaaugacaaacaa

SEQ ID NO: 47118 - RNA, 25 nt, Human
uaacauugcaaaugacaaacaauuc

SEQ ID NO: 47119 - RNA, 19 nt, Human
uaagcuucccuccuccccc

SEQ ID NO: 47120 - RNA, 18 nt, Human
uaaggcagcagcacaguc

SEQ ID NO: 47121 - RNA, 23 nt, Human
uaaggcuucuagagacagggaga

SEQ ID NO: 47122 - RNA, 22 nt, Human
uacacagccucccgcaggccag

SEQ ID NO: 47123 - RNA, 21 nt, Human
uacuaacaaggaaaaaaggca

SEQ ID NO: 47124 - RNA, 25 nt, Human
uagcugggcucccuaaggggaaacc

SEQ ID NO: 47125 - RNA, 23 nt, Human
uagucccucugggcuuccaagga

SEQ ID NO: 47126 - RNA, 23 nt, Human
ucaaguauuuugcauagauguac

SEQ ID NO: 47127 - RNA, 23 nt, Human
ucacaagcaccuggucacccgaa

SEQ ID NO: 47128 - RNA, 20 nt, Human
ucacaugaagccaaaacucc

SEQ ID NO: 47129 - RNA, 21 nt, Human
ucagaggcggccagacaugcu

SEQ ID NO: 47130 - RNA, 21 nt, Human
ucaugcagucacuauggcugu

SEQ ID NO: 47131 - RNA, 26 nt, Human
uccaaacccaagaacauccaagaagc

SEQ ID NO: 47132 - RNA, 18 nt, Human
uccaaccagaaaaucagc

SEQ ID NO: 47133 - RNA, 19 nt, Human
uccagugcagcugcugcug

SEQ ID NO: 47134 - RNA, 21 nt, Human
uccauaguuuucucaaugccu

SEQ ID NO: 47135 - RNA, 18 nt, Human
ucccauggcuuucuuggg

SEQ ID NO: 47136 - RNA, 20 nt, Human
ucccugcucugacuguucca

SEQ ID NO: 47137 - RNA, 21 nt, Human
uccucauacucuccccucccu

SEQ ID NO: 47138 - RNA, 22 nt, Human
uccuuaaucccuaaaagcuaaa

SEQ ID NO: 47139 - RNA, 27 nt, Human
ucuccaggugcuuugcaaaaaccgucc

SEQ ID NO: 47140 - RNA, 22 nt, Human
ucuccuucgcaggcuccccugg

SEQ ID NO: 47141 - RNA, 19 nt, Human
ucugcaagcgaagugcugg

SEQ ID NO: 47142 - RNA, 22 nt, Human
ucugcaagcgaagugcuggccu

SEQ ID NO: 47143 - RNA, 22 nt, Human
ucugcaagugucucagagcugg

SEQ ID NO: 47144 - RNA, 19 nt, Human
ucugugaggcaugggguug

SEQ ID NO: 47145 - RNA, 18 nt, Human
ugaaaaauaaacauauga

SEQ ID NO: 47146 - RNA, 18 nt, Human
ugaacagagccaggagug

SEQ ID NO: 47147 - RNA, 28 nt, Human
ugaagccaccacagcucaggauucuaag

SEQ ID NO: 47148 - RNA, 20 nt, Human
ugaaucagaagucagcuuca

SEQ ID NO: 47149 - RNA, 19 nt, Human
ugacaaaaagcuggguuga

SEQ ID NO: 47150 - RNA, 21 nt, Human
ugaccugauugcaagacuggc

SEQ ID NO: 47151 - RNA, 20 nt, Human
ugagaggacgcguugggggu

SEQ ID NO: 47152 - RNA, 21 nt, Human
ugaggaaacagacucaagagg

SEQ ID NO: 47153 - RNA, 21 nt, Human
ugaggaagaggcucccugcuc

SEQ ID NO: 47154 - RNA, 19 nt, Human
ugagucagagugacccgug

SEQ ID NO: 47155 - RNA, 19 nt, Human
ugcaagugucucagagcug

SEQ ID NO: 47156 - RNA, 20 nt, Human
ugcagaucuugccaucgguc

SEQ ID NO: 47157 - RNA, 19 nt, Human
ugcagcugcugcuggcugc

SEQ ID NO: 47158 - RNA, 19 nt, Human
ugcaggagguggggagggg

SEQ ID NO: 47159 - RNA, 19 nt, Human
ugcccuggaucccagacac

SEQ ID NO: 47160 - RNA, 20 nt, Human
ugccugggcuuugagacgcu

SEQ ID NO: 47161 - RNA, 18 nt, Human
uggcaggaugggaggagg

SEQ ID NO: 47162 - RNA, 20 nt, Human
uggcugccuucuccagugaa

SEQ ID NO: 47163 - RNA, 19 nt, Human
ugggauggaggugauauga

SEQ ID NO: 47164 - RNA, 21 nt, Human
ugggauggaggugauaugaaa

SEQ ID NO: 47165 - RNA, 21 nt, Human
uggggcaccaggaaagugcgg

SEQ ID NO: 47166 - RNA, 18 nt, Human
uggguugaggaagaggcu

SEQ ID NO: 47167 - RNA, 22 nt, Human
uggguugaggaagaggcucccu

SEQ ID NO: 47168 - RNA, 23 nt, Human
uggguuguaaaauuggcaggagg

SEQ ID NO: 47169 - RNA, 22 nt, Human
ugguucuuucuagccauguuua

SEQ ID NO: 47170 - RNA, 19 nt, Human
ugucucagagcuggggcag

SEQ ID NO: 47171 - RNA, 19 nt, Human
ugugagggagaaaggcugg

SEQ ID NO: 47172 - RNA, 23 nt, Human
uguggagugggagucuaucuccc

SEQ ID NO: 47173 - RNA, 24 nt, Human
uguuuucaccuuuacuuuccagga

SEQ ID NO: 47174 - RNA, 22 nt, Human
uuaaggcagcagcacaguccau

SEQ ID NO: 47175 - RNA, 20 nt, Human
uuaggaaguaggcagggaga

SEQ ID NO: 47176 - RNA, 23 nt, Human
uucacaugaagccaaaacuccac

SEQ ID NO: 47177 - RNA, 22 nt, Human
uucacuuuuaaaaagauuuacc

SEQ ID NO: 47178 - RNA, 25 nt, Human
uuccauggucauggguccucugcag

SEQ ID NO: 47179 - RNA, 18 nt, Human
uucccauggcuuucuugg

SEQ ID NO: 47180 - RNA, 22 nt, Human
uucccuuuccccuucugcaauc

SEQ ID NO: 47181 - RNA, 20 nt, Human
uucuggugugguuccaggga

SEQ ID NO: 47182 - RNA, 21 nt, Human
uugcagaggggugaaagggga

SEQ ID NO: 47183 - RNA, 20 nt, Human
uuguaaaauuggcaggaggu

SEQ ID NO: 47184 - RNA, 21 nt, Human
uuucagagcuaucuaccuccu

SEQ ID NO: 47185 - RNA, 24 nt, Human
uuuccugagaucuuucuaaaccca

SEQ ID NO: 47186 - RNA, 24 nt, Human
uuugcauagauguacaaauauugu

SEQ ID NO: 47187 - RNA, 27 nt, Human
agaaauagcguaagauaaccgguaccc

SEQ ID NO: 47188 - RNA, 22 nt, Human
agggcaguuggugguuacaggg

SEQ ID NO: 47189 - RNA, 26 nt, Human
agugucuacuaaccaacagaaauagc

SEQ ID NO: 47190 - RNA, 21 nt, Human
aguuggugguuacagggcagu

SEQ ID NO: 47191 - RNA, 20 nt, Human
aucacaauaugcagguuuga

SEQ ID NO: 47192 - RNA, 22 nt, Human
ccagguaauguacauucuuuuc

SEQ ID NO: 47193 - RNA, 23 nt, Human
ccauccaucacagauaauuacuc

SEQ ID NO: 47194 - RNA, 19 nt, Human
cuaaccaacagaaauagcu

SEQ ID NO: 47195 - RNA, 23 nt, Human
cuugaaguccugggucccagccg

SEQ ID NO: 47196 - RNA, 23 nt, Human
gguaauguacauucuuuucuuuc

SEQ ID NO: 47197 - RNA, 19 nt, Human
guaaaacucauuaucaugc

SEQ ID NO: 47198 - RNA, 19 nt, Human
uaaguaaauuaucugugaa

SEQ ID NO: 47199 - RNA, 19 nt, Human
uacauucuuuucuuuccau

SEQ ID NO: 47200 - RNA, 21 nt, Human
uaccaugccccuacugacaga

SEQ ID NO: 47201 - RNA, 18 nt, Human
uagaagaagugauaucau

SEQ ID NO: 47202 - RNA, 22 nt, Human
uagaagaagugauaucauggca

SEQ ID NO: 47203 - RNA, 24 nt, Human
uagcguaagauaacuuuaaaaaaa

SEQ ID NO: 47204 - RNA, 22 nt, Human
uaucauggcaucucuguugucc

SEQ ID NO: 47205 - RNA, 23 nt, Human
uaugauauuuccuuauaccaugg

SEQ ID NO: 47206 - RNA, 18 nt, Human
ucccagccggaauaaggg

SEQ ID NO: 47207 - RNA, 19 nt, Human
ucuacuaaccaacagaaau

SEQ ID NO: 47208 - RNA, 18 nt, Human
ugaaucccaggaaaccag

SEQ ID NO: 47209 - RNA, 23 nt, Human
uguccauccaucacagauaauua

SEQ ID NO: 47210 - RNA, 18 nt, Human
uuacucuagaagaaguga

SEQ ID NO: 47211 - RNA, 18 nt, Human
uuuuuuuuuuuuuuuuug

SEQ ID NO: 47212 - RNA, 18 nt, Human
aaguaagaauaggcuagg

SEQ ID NO: 47213 - RNA, 18 nt, Human
agugcugaaaauaaaaac

SEQ ID NO: 47214 - RNA, 23 nt, Human
caucagagcugcagugcugaaaa

SEQ ID NO: 47215 - RNA, 24 nt, Human
cauuauggagccaucugucuagag

SEQ ID NO: 47216 - RNA, 22 nt, Human
ccaucagagcugcagugcugaa

SEQ ID NO: 47217 - RNA, 22 nt, Human
ccugguggagcuggaccaucag

SEQ ID NO: 47218 - RNA, 22 nt, Human
cugcagugcugaaaauaaaaac

SEQ ID NO: 47219 - RNA, 19 nt, Human
cugcuggucuggcuccucc

SEQ ID NO: 47220 - RNA, 21 nt, Human
gggaaaaggaaccuuuaauau

SEQ ID NO: 47221 - RNA, 22 nt, Human
ggggaucuguguccugguggag

SEQ ID NO: 47222 - RNA, 22 nt, Human
gucuccuucuuuuucccauuuc

SEQ ID NO: 47223 - RNA, 26 nt, Human
guuuagucuccuucuuuuucccauuu

SEQ ID NO: 47224 - RNA, 19 nt, Human
uaaacagugagacauggcu

SEQ ID NO: 47225 - RNA, 19 nt, Human
ucuccuucuuuuucccauu

SEQ ID NO: 47226 - RNA, 20 nt, Human
ucuguguccugguggagcug

SEQ ID NO: 47227 - RNA, 22 nt, Human
ugacaugaaauguccaugaagu

SEQ ID NO: 47228 - RNA, 19 nt, Human
ugcugugauagcuaaugcu

SEQ ID NO: 47229 - RNA, 23 nt, Human
ugucauuauggagccaucugucu

SEQ ID NO: 47230 - RNA, 22 nt, Human
uguccugguggagcuggaccau

SEQ ID NO: 47231 - RNA, 20 nt, Human
agggagggaaggauguagcu

SEQ ID NO: 47232 - RNA, 22 nt, Human
cuuuauuugcugcuuaaaacaa

SEQ ID NO: 47233 - RNA, 20 nt, Human
gaauauuaaguuagagacau

SEQ ID NO: 47234 - RNA, 20 nt, Human
gacaauguuugugguacuaa

SEQ ID NO: 47235 - RNA, 23 nt, Human
uggaauauuaaguuagagacauu

SEQ ID NO: 47236 - RNA, 22 nt, Human
aaaaauccuauaugccuuagcc

SEQ ID NO: 47237 - RNA, 22 nt, Human
aaaaauccuauaugccuuagcc

SEQ ID NO: 47238 - RNA, 22 nt, Human
aaacagaagcuucaugcauaua

SEQ ID NO: 47239 - RNA, 22 nt, Human
aaacagaagcuucaugcauaua

SEQ ID NO: 47240 - RNA, 23 nt, Human
acagugaggaugugccucagaac

SEQ ID NO: 47241 - RNA, 19 nt, Human
cacaggaccuuggagugcc

SEQ ID NO: 47242 - RNA, 25 nt, Human
ccggcgccgccgaguccguuucccu

SEQ ID NO: 47243 - RNA, 23 nt, Human
ccucaugccggcgccgccgaguc

SEQ ID NO: 47244 - RNA, 21 nt, Human
ccuuagcccugcaugcucauu

SEQ ID NO: 47245 - RNA, 23 nt, Human
cuuggagugccuuuuuccauuag

SEQ ID NO: 47246 - RNA, 27 nt, Human
gaaaacaauaaacagaagccgguaccc

SEQ ID NO: 47247 - RNA, 27 nt, Human
gaaaacaauaaacagaagccgguaccc

SEQ ID NO: 47248 - RNA, 19 nt, Human
gaaguaaaaguugaaguaa

SEQ ID NO: 47249 - RNA, 23 nt, Human
gacaaaaagaaaaugguaaccag

SEQ ID NO: 47250 - RNA, 23 nt, Human
gacaaaaagaaaaugguaaccag

SEQ ID NO: 47251 - RNA, 22 nt, Human
gccuuagcccugcaugcucauu

SEQ ID NO: 47252 - RNA, 23 nt, Human
gcuacauuugggucaugugaguu

SEQ ID NO: 47253 - RNA, 24 nt, Human
gcuacauuugggucaugugaguua

SEQ ID NO: 47254 - RNA, 20 nt, Human
ggagugccuuuuuccauuag

SEQ ID NO: 47255 - RNA, 21 nt, Human
guuaguuaaauccuaagccaa

SEQ ID NO: 47256 - RNA, 21 nt, Human
guuaguuaaauccuaagccaa

SEQ ID NO: 47257 - RNA, 27 nt, Human
uaaaaauacauguuuaaaguuagccua

SEQ ID NO: 47258 - RNA, 27 nt, Human
uaaaaauacauguuuaaaguuagccua

SEQ ID NO: 47259 - RNA, 19 nt, Human
uacagugaggaugugccuc

SEQ ID NO: 47260 - RNA, 19 nt, Human
uacagugaggaugugccuc

SEQ ID NO: 47261 - RNA, 21 nt, Human
uaccaguaccuuuauuguucc

SEQ ID NO: 47262 - RNA, 21 nt, Human
uaccaguaccuuuauuguucc

SEQ ID NO: 47263 - RNA, 25 nt, Human
uaugaaaaguaaaaaacaaaacaaa

SEQ ID NO: 47264 - RNA, 25 nt, Human
uaugaaaaguaaaaaacaaaacaaa

SEQ ID NO: 47265 - RNA, 19 nt, Human
uaugccuuagcccugcaug

SEQ ID NO: 47266 - RNA, 19 nt, Human
uaugccuuagcccugcaug

SEQ ID NO: 47267 - RNA, 20 nt, Human
uccaugagccuggguuucua

SEQ ID NO: 47268 - RNA, 19 nt, Human
ucgcccgagacgcucagcu

SEQ ID NO: 47269 - RNA, 24 nt, Human
ucugaaguaaaaguugaaguaaac

SEQ ID NO: 47270 - RNA, 22 nt, Human
ugaaaaguaaaaaacaaaacaa

SEQ ID NO: 47271 - RNA, 22 nt, Human
ugaaaaguaaaaaacaaaacaa

SEQ ID NO: 47272 - RNA, 19 nt, Human
ugaagagcagauagauuug

SEQ ID NO: 47273 - RNA, 23 nt, Human
ugaagagcagauagauuugcagu

SEQ ID NO: 47274 - RNA, 22 nt, Human
ugacaaaaagaaaaugguaacc

SEQ ID NO: 47275 - RNA, 22 nt, Human
ugacaaaaagaaaaugguaacc

SEQ ID NO: 47276 - RNA, 25 nt, Human
ugacaaaaagaaaaugguaaccaga

SEQ ID NO: 47277 - RNA, 25 nt, Human
ugacaaaaagaaaaugguaaccaga

SEQ ID NO: 47278 - RNA, 20 nt, Human
ugcacaggaccuuggagugc

SEQ ID NO: 47279 - RNA, 24 nt, Human
ugcagugauuccaugagccugggu

SEQ ID NO: 47280 - RNA, 27 nt, Human
ugccggcgccgccgaguccguuucccu

SEQ ID NO: 47281 - RNA, 20 nt, Human
ugccuuagcccugcaugcuc

SEQ ID NO: 47282 - RNA, 20 nt, Human
ugccuuagcccugcaugcuc

SEQ ID NO: 47283 - RNA, 19 nt, Human
uggaaaacaauaaacagaa

SEQ ID NO: 47284 - RNA, 19 nt, Human
uggaaaacaauaaacagaa

SEQ ID NO: 47285 - RNA, 24 nt, Human
uguaauauuucaguaguucuuuuc

SEQ ID NO: 47286 - RNA, 23 nt, Human
uuaaauauggaaaacaauaaaca

SEQ ID NO: 47287 - RNA, 23 nt, Human
uuaaauauggaaaacaauaaaca

SEQ ID NO: 47288 - RNA, 22 nt, Human
uuuaaaguccugcagaaaaauc

SEQ ID NO: 47289 - RNA, 22 nt, Human
uuuaaaguccugcagaaaaauc

SEQ ID NO: 47290 - RNA, 20 nt, Human
uuuacagugaggaugugccu

SEQ ID NO: 47291 - RNA, 20 nt, Human
uuuacagugaggaugugccu

SEQ ID NO: 47292 - RNA, 23 nt, Human
uuuacagugaggaugugccucag

SEQ ID NO: 47293 - RNA, 23 nt, Human
uuuacagugaggaugugccucag

SEQ ID NO: 47294 - RNA, 21 nt, Human
accccauccuugucaccccaa

SEQ ID NO: 47295 - RNA, 18 nt, Human
agcucccgggcgccgcuc

SEQ ID NO: 47296 - RNA, 22 nt, Human
agcuccguagucauuaccaccc

SEQ ID NO: 47297 - RNA, 21 nt, Human
agggggcuccgggcucggggc

SEQ ID NO: 47298 - RNA, 22 nt, Human
aguaugucauacccagaaucca

SEQ ID NO: 47299 - RNA, 22 nt, Human
auagcauggucuuuugcccccu

SEQ ID NO: 47300 - RNA, 19 nt, Human
caacuuuagcuccguaguc

SEQ ID NO: 47301 - RNA, 23 nt, Human
cacgccggcucggcgcgcauggu

SEQ ID NO: 47302 - RNA, 21 nt, Human
cagugcaaggcgguguccauc

SEQ ID NO: 47303 - RNA, 21 nt, Human
ccccauccuugucaccccaac

SEQ ID NO: 47304 - RNA, 21 nt, Human
cgaguaugucauacccagaau

SEQ ID NO: 47305 - RNA, 22 nt, Human
cgccgcuccguguggccggcga

SEQ ID NO: 47306 - RNA, 19 nt, Human
cgccggcucggcgcgcaug

SEQ ID NO: 47307 - RNA, 23 nt, Human
cgcgcauggugccgccgcgggca

SEQ ID NO: 47308 - RNA, 20 nt, Human
cuagccucgcagccacuccc

SEQ ID NO: 47309 - RNA, 21 nt, Human
cuccguguggccggcgagagc

SEQ ID NO: 47310 - RNA, 21 nt, Human
gacagguggugaaagguguuc

SEQ ID NO: 47311 - RNA, 19 nt, Human
gcagggggcuccgggcucg

SEQ ID NO: 47312 - RNA, 22 nt, Human
gcucggggcacggggcgcgggg

SEQ ID NO: 47313 - RNA, 18 nt, Human
gcugcggggcggccgcgg

SEQ ID NO: 47314 - RNA, 18 nt, Human
ggcucggggcugggcggc

SEQ ID NO: 47315 - RNA, 24 nt, Human
ggcugggcggcgcccccuuucccg

SEQ ID NO: 47316 - RNA, 22 nt, Human
gggcagggggcuccgggcucgg

SEQ ID NO: 47317 - RNA, 18 nt, Human
gggcucggggcugggcgg

SEQ ID NO: 47318 - RNA, 28 nt, Human
gguuuuguuuacaaacuuaauaguucca

SEQ ID NO: 47319 - RNA, 23 nt, Human
uaccccauccuugucaccccaac

SEQ ID NO: 47320 - RNA, 18 nt, Human
uagcucccgggcgccgcu

SEQ ID NO: 47321 - RNA, 25 nt, Human
uagcugcggggcggccgcgggcgga

SEQ ID NO: 47322 - RNA, 24 nt, Human
uccguagucauuaccacccaaagg

SEQ ID NO: 47323 - RNA, 22 nt, Human
ucggggcugggcggcgcccccu

SEQ ID NO: 47324 - RNA, 21 nt, Human
ucuuuugcccccucccccguu

SEQ ID NO: 47325 - RNA, 21 nt, Human
ugacagguggugaaagguguu

SEQ ID NO: 47326 - RNA, 19 nt, Human
ugccgccgcgggcaggggg

SEQ ID NO: 47327 - RNA, 22 nt, Human
uggccggcgagagcgccgggcu

SEQ ID NO: 47328 - RNA, 18 nt, Human
uguggccggcgagagcgc

SEQ ID NO: 47329 - RNA, 19 nt, Human
uguguguguguuguuccuu

SEQ ID NO: 47330 - RNA, 21 nt, Human
uuccaaaagagacaguuuucu

SEQ ID NO: 47331 - RNA, 19 nt, Human
uuguguguguguuguuccu

SEQ ID NO: 47332 - RNA, 24 nt, Human
uuuaaugauuccuuuauugcauuu

SEQ ID NO: 47333 - RNA, 24 nt, Human
aaaaaacaaaaaauuaacaaaaaa

SEQ ID NO: 47334 - RNA, 22 nt, Human
aaaauuuucuuuagucucuuca

SEQ ID NO: 47335 - RNA, 19 nt, Human
aagaaggauaggacagaau

SEQ ID NO: 47336 - RNA, 25 nt, Human
acacacacacacacccgcacacaca

SEQ ID NO: 47337 - RNA, 25 nt, Human
acacacacacacccgcacacacaca

SEQ ID NO: 47338 - RNA, 19 nt, Human
acacacccgcacacacaca

SEQ ID NO: 47339 - RNA, 19 nt, Human
acauggccuacaggucacc

SEQ ID NO: 47340 - RNA, 25 nt, Human
agaaaaccucaaaugauauagcuaa

SEQ ID NO: 47341 - RNA, 22 nt, Human
agacaaaaaacaaaaaauuaac

SEQ ID NO: 47342 - RNA, 19 nt, Human
aggaaagagauccacaaaa

SEQ ID NO: 47343 - RNA, 28 nt, Human
auauacugaugcugagacaaaaaacaaa

SEQ ID NO: 47344 - RNA, 18 nt, Human
cacacacacacacacaca

SEQ ID NO: 47345 - RNA, 20 nt, Human
cacacacacacacacacaca

SEQ ID NO: 47346 - RNA, 29 nt, Human
cacacacacacacacacacacccgcacac

SEQ ID NO: 47347 - RNA, 27 nt, Human
cacacacacacacacacacccgcacac

SEQ ID NO: 47348 - RNA, 22 nt, Human
cacacacacccgcacacacaca

SEQ ID NO: 47349 - RNA, 21 nt, Human
caggucaccaguucgcaaccu

SEQ ID NO: 47350 - RNA, 22 nt, Human
cccgcacacacacagauuucca

SEQ ID NO: 47351 - RNA, 19 nt, Human
ccuaaaaccaaccucaaau

SEQ ID NO: 47352 - RNA, 21 nt, Human
ccucaaaugauauagcuaaua

SEQ ID NO: 47353 - RNA, 25 nt, Human
ccugcacacacacacacacacacag

SEQ ID NO: 47354 - RNA, 24 nt, Human
ccugcacacacacacacacacagg

SEQ ID NO: 47355 - RNA, 23 nt, Human
cuaaaucuagcaacccuaaaacc

SEQ ID NO: 47356 - RNA, 22 nt, Human
cuucuugagucgagagcaaaua

SEQ ID NO: 47357 - RNA, 23 nt, Human
gaaaauguuaaccuucuugaguc

SEQ ID NO: 47358 - RNA, 23 nt, Human
gacaaaaaacaaaaaauuaacaa

SEQ ID NO: 47359 - RNA, 24 nt, Human
gguugccagaugaaaagaaaaaga

SEQ ID NO: 47360 - RNA, 25 nt, Human
uaaaacaaucaagauguugcaauca

SEQ ID NO: 47361 - RNA, 26 nt, Human
uaaaacaaucaagauguugcaaucaa

SEQ ID NO: 47362 - RNA, 20 nt, Human
uacacaaauaauuuuaguau

SEQ ID NO: 47363 - RNA, 18 nt, Human
uacuucugccaccccugc

SEQ ID NO: 47364 - RNA, 22 nt, Human
uagcaacccuaaaaccaaccuc

SEQ ID NO: 47365 - RNA, 18 nt, Human
uaggaaagagauccacag

SEQ ID NO: 47366 - RNA, 25 nt, Human
uauguuuuguuuucauuagagaaug

SEQ ID NO: 47367 - RNA, 21 nt, Human
ucaauuccuauuacagauuuu

SEQ ID NO: 47368 - RNA, 20 nt, Human
ucaccaguucgcaaccuggu

SEQ ID NO: 47369 - RNA, 18 nt, Human
ucuuuacaaucaucuucc

SEQ ID NO: 47370 - RNA, 24 nt, Human
ugagacaaaaaacaaaaaauuaac

SEQ ID NO: 47371 - RNA, 26 nt, Human
ugagacaaaaaacaaaaaauuaacaa

SEQ ID NO: 47372 - RNA, 25 nt, Human
ugcacacacacacacacacacaccc

SEQ ID NO: 47373 - RNA, 26 nt, Human
ugcacacacacacacacacacacccg

SEQ ID NO: 47374 - RNA, 27 nt, Human
ugcacacacacacacacacacacccgc

SEQ ID NO: 47375 - RNA, 21 nt, Human
ugccagaugaaaagaaaaaga

SEQ ID NO: 47376 - RNA, 19 nt, Human
ugggauauacugaugcuga

SEQ ID NO: 47377 - RNA, 27 nt, Human
uguagaaaaccucaaaugauauagcua

SEQ ID NO: 47378 - RNA, 19 nt, Human
ugucugcucuucucgcuca

SEQ ID NO: 47379 - RNA, 22 nt, Human
uuauaccaaauuguagaaaacc

SEQ ID NO: 47380 - RNA, 18 nt, Human
uuccucuugaaaauuuuc

SEQ ID NO: 47381 - RNA, 21 nt, Human
uugcaugggauauacugaugc

SEQ ID NO: 47382 - RNA, 21 nt, Human
uuuuuuuuuuuuuuuuuauuu

SEQ ID NO: 47383 - RNA, 23 nt, Human
acacugguccagagcagaaguca

SEQ ID NO: 47384 - RNA, 22 nt, Human
agggagaauguuuuguacucua

SEQ ID NO: 47385 - RNA, 26 nt, Human
agggcgucacaggagguugggacuac

SEQ ID NO: 47386 - RNA, 19 nt, Human
aggugguguggcuccuucu

SEQ ID NO: 47387 - RNA, 20 nt, Human
cgguaaggugucacaugagg

SEQ ID NO: 47388 - RNA, 22 nt, Human
gaaccaucagagcugcagcacu

SEQ ID NO: 47389 - RNA, 22 nt, Human
gagcagaagucagggcuggagu

SEQ ID NO: 47390 - RNA, 21 nt, Human
gcacugcuccuuuccacugca

SEQ ID NO: 47391 - RNA, 21 nt, Human
uaaggugucacaugagguuga

SEQ ID NO: 47392 - RNA, 19 nt, Human
ucaaaaaggcuucaaauca

SEQ ID NO: 47393 - RNA, 24 nt, Human
ucaaaaaggcuucaaaucacagug

SEQ ID NO: 47394 - RNA, 23 nt, Human
ucacaggugguguggcuccuucu

SEQ ID NO: 47395 - RNA, 25 nt, Human
ugacucugggagggugucacccgag

SEQ ID NO: 47396 - RNA, 21 nt, Human
uggaaacacugguccagagca

SEQ ID NO: 47397 - RNA, 21 nt, Human
ugggaaggcaucaacugaggu

SEQ ID NO: 47398 - RNA, 20 nt, Human
uucacaguucgugagacugc

SEQ ID NO: 47399 - RNA, 19 nt, Human
acuccggcuccgcccaggc

SEQ ID NO: 47400 - RNA, 23 nt, Human
aggcagcggcucgcaacuccggc

SEQ ID NO: 47401 - RNA, 21 nt, Human
ccucuaggcagcggcucgcaa

SEQ ID NO: 47402 - RNA, 18 nt, Human
gcccaggcuggauugcgg

SEQ ID NO: 47403 - RNA, 21 nt, Human
uccggcuccgcccaggcugga

SEQ ID NO: 47404 - RNA, 21 nt, Human
aaacacacacaaagcuggggc

SEQ ID NO: 47405 - RNA, 21 nt, Human
aacuucuccaaauuuccacac

SEQ ID NO: 47406 - RNA, 25 nt, Human
acacagcucaucccagccuggugcc

SEQ ID NO: 47407 - RNA, 19 nt, Human
acacaggcgcaggugcccc

SEQ ID NO: 47408 - RNA, 29 nt, Human
acacguacacacacacgcacccgcaagca

SEQ ID NO: 47409 - RNA, 18 nt, Human
acccgcaagcacacagcu

SEQ ID NO: 47410 - RNA, 22 nt, Human
accuggagucgggagcuugggg

SEQ ID NO: 47411 - RNA, 27 nt, Human
acguacacacacacgcacccgcaagca

SEQ ID NO: 47412 - RNA, 25 nt, Human
agacagcuggggcuacacguggcca

SEQ ID NO: 47413 - RNA, 18 nt, Human
agcacacagcucauccca

SEQ ID NO: 47414 - RNA, 18 nt, Human
agcaggggcagguguggc

SEQ ID NO: 47415 - RNA, 23 nt, Human
aggccccagagcaggggcaggug

SEQ ID NO: 47416 - RNA, 18 nt, Human
aggucucaagaaaaccag

SEQ ID NO: 47417 - RNA, 24 nt, Human
caagaaaaccagacaagauagcug

SEQ ID NO: 47418 - RNA, 22 nt, Human
cacgcacccgcaagcacacagc

SEQ ID NO: 47419 - RNA, 21 nt, Human
cagacaagauagcugacucuc

SEQ ID NO: 47420 - RNA, 18 nt, Human
cagcugagccugcaaagu

SEQ ID NO: 47421 - RNA, 22 nt, Human
caggcccaagaucaggggaccu

SEQ ID NO: 47422 - RNA, 19 nt, Human
ccagccuggugccugcaga

SEQ ID NO: 47423 - RNA, 23 nt, Human
cccacgucugugcugccuggaac

SEQ ID NO: 47424 - RNA, 18 nt, Human
ccccagagcaggggcagg

SEQ ID NO: 47425 - RNA, 19 nt, Human
cccugcugaacacacaucu

SEQ ID NO: 47426 - RNA, 19 nt, Human
ccgcaacuucuccaaauuu

SEQ ID NO: 47427 - RNA, 22 nt, Human
ccuggaaccgggugcccagggc

SEQ ID NO: 47428 - RNA, 20 nt, Human
cgaagagcacggaggggaac

SEQ ID NO: 47429 - RNA, 19 nt, Human
cucacugacacccucucga

SEQ ID NO: 47430 - RNA, 20 nt, Human
cuccaaauuuccacacaggc

SEQ ID NO: 47431 - RNA, 20 nt, Human
cugguccugggauggagucu

SEQ ID NO: 47432 - RNA, 24 nt, Human
cuucucugccgcaacuucuccaaa

SEQ ID NO: 47433 - RNA, 18 nt, Human
gacucucccacauagccc

SEQ ID NO: 47434 - RNA, 18 nt, Human
gcccaagaucaggggacc

SEQ ID NO: 47435 - RNA, 23 nt, Human
gccuggugccugcagacagcugg

SEQ ID NO: 47436 - RNA, 21 nt, Human
gcgggagaccagcggccaccu

SEQ ID NO: 47437 - RNA, 22 nt, Human
gcuggaacgcauggcuucucug

SEQ ID NO: 47438 - RNA, 20 nt, Human
ggccccagagcaggggcagg

SEQ ID NO: 47439 - RNA, 22 nt, Human
gggagaccagcggccaccugga

SEQ ID NO: 47440 - RNA, 18 nt, Human
gggcguggacagcaggag

SEQ ID NO: 47441 - RNA, 19 nt, Human
gguguggcugggaggggcu

SEQ ID NO: 47442 - RNA, 18 nt, Human
gucagggucuagggcuga

SEQ ID NO: 47443 - RNA, 22 nt, Human
guggacagcaggagccucucag

SEQ ID NO: 47444 - RNA, 25 nt, Human
uaaacacacacaaagcuggggcugu

SEQ ID NO: 47445 - RNA, 24 nt, Human
uaaagggcauuccuaagcuuaaac

SEQ ID NO: 47446 - RNA, 18 nt, Human
uccaaauuuccacacagg

SEQ ID NO: 47447 - RNA, 26 nt, Human
ucucccacauagcccuuuccauaaag

SEQ ID NO: 47448 - RNA, 20 nt, Human
ucucugccgcaacuucucca

SEQ ID NO: 47449 - RNA, 18 nt, Human
ugaacacagcgggagacc

SEQ ID NO: 47450 - RNA, 21 nt, Human
ugcagucugcucacugacacc

SEQ ID NO: 47451 - RNA, 22 nt, Human
ugcccagggcagccggcucagc

SEQ ID NO: 47452 - RNA, 23 nt, Human
ugcccagggcagccggcucagca

SEQ ID NO: 47453 - RNA, 24 nt, Human
uggaaccgggugcccagggcagcc

SEQ ID NO: 47454 - RNA, 18 nt, Human
ugggaggggcuguauaug

SEQ ID NO: 47455 - RNA, 20 nt, Human
ugggaggggcuguauaugug

SEQ ID NO: 47456 - RNA, 18 nt, Human
ugggauggagucuuucug

SEQ ID NO: 47457 - RNA, 21 nt, Human
uggggcugucccucuugaauc

SEQ ID NO: 47458 - RNA, 18 nt, Human
uuaaacacacacaaagcu

SEQ ID NO: 47459 - RNA, 21 nt, Human
uuagaacagcagcugagccug

SEQ ID NO: 47460 - RNA, 24 nt, Human
uucucauuauuaaagaauaaaagc

SEQ ID NO: 47461 - RNA, 24 nt, Human
uuuccacacaggcgcaggugcccc

SEQ ID NO: 47462 - RNA, 24 nt, Human
aacuccuuuucuaucuacccccau

SEQ ID NO: 47463 - RNA, 20 nt, Human
aagccucguuggccugcucu

SEQ ID NO: 47464 - RNA, 18 nt, Human
aaucccaccuuacugaua

SEQ ID NO: 47465 - RNA, 19 nt, Human
accucauuuuuguuccggc

SEQ ID NO: 47466 - RNA, 18 nt, Human
acgcuggaucccuccagc

SEQ ID NO: 47467 - RNA, 21 nt, Human
acgcuggaucccuccagccuu

SEQ ID NO: 47468 - RNA, 23 nt, Human
agacaagugaucucaaugucccc

SEQ ID NO: 47469 - RNA, 23 nt, Human
agcugaacagacauucaccagga

SEQ ID NO: 47470 - RNA, 18 nt, Human
agggagcuuuaguucggg

SEQ ID NO: 47471 - RNA, 22 nt, Human
aucucacuuuucuccuacuuuu

SEQ ID NO: 47472 - RNA, 21 nt, Human
auuucuauuauucguuggaag

SEQ ID NO: 47473 - RNA, 20 nt, Human
auuugcguuauuucacguug

SEQ ID NO: 47474 - RNA, 22 nt, Human
caaagccucguuggccugcucu

SEQ ID NO: 47475 - RNA, 22 nt, Human
caaagcuaacaccacuuaaacc

SEQ ID NO: 47476 - RNA, 28 nt, Human
caagauacgcuggaucccuccagccuuc

SEQ ID NO: 47477 - RNA, 22 nt, Human
cacagaagagcugaacagacau

SEQ ID NO: 47478 - RNA, 22 nt, Human
caccacaagacaagugaucuca

SEQ ID NO: 47479 - RNA, 19 nt, Human
cacugguuacuggcaagau

SEQ ID NO: 47480 - RNA, 20 nt, Human
cagcccuuccucacuuugcc

SEQ ID NO: 47481 - RNA, 27 nt, Human
cauaaucccaccuuacugauacacugu

SEQ ID NO: 47482 - RNA, 19 nt, Human
cauguaauuuauaguaaca

SEQ ID NO: 47483 - RNA, 23 nt, Human
cauuucccaacccccaugauacu

SEQ ID NO: 47484 - RNA, 20 nt, Human
ccaggauacgacuguuggac

SEQ ID NO: 47485 - RNA, 21 nt, Human
ccccauaaucccaccuuacug

SEQ ID NO: 47486 - RNA, 22 nt, Human
cccccaugauacuaaguuauuu

SEQ ID NO: 47487 - RNA, 23 nt, Human
cccccaugauacuaaguuauuug

SEQ ID NO: 47488 - RNA, 21 nt, Human
ccccccauuguuagugaaggu

SEQ ID NO: 47489 - RNA, 22 nt, Human
ccccucagcagccuccccacca

SEQ ID NO: 47490 - RNA, 20 nt, Human
cccucagcagccuccccacc

SEQ ID NO: 47491 - RNA, 19 nt, Human
cccugcaccagcccuuccu

SEQ ID NO: 47492 - RNA, 18 nt, Human
ccucaaagcuaacaccac

SEQ ID NO: 47493 - RNA, 20 nt, Human
ccucacuuugccuugcccuu

SEQ ID NO: 47494 - RNA, 18 nt, Human
cgggcacagcucgcugca

SEQ ID NO: 47495 - RNA, 21 nt, Human
cguuucauccuccuuguguga

SEQ ID NO: 47496 - RNA, 20 nt, Human
cuacccccauaaucccaccu

SEQ ID NO: 47497 - RNA, 20 nt, Human
cucacagaagagcugaacag

SEQ ID NO: 47498 - RNA, 24 nt, Human
cucagagguuaauaauccucacua

SEQ ID NO: 47499 - RNA, 19 nt, Human
cucauguugaacaaucuga

SEQ ID NO: 47500 - RNA, 19 nt, Human
gaaaccauagcagccauaa

SEQ ID NO: 47501 - RNA, 18 nt, Human
gaaagaaaggaaguugga

SEQ ID NO: 47502 - RNA, 21 nt, Human
gaccugcuaccccucagcagc

SEQ ID NO: 47503 - RNA, 24 nt, Human
gaccugcuaccccucagcagccuc

SEQ ID NO: 47504 - RNA, 18 nt, Human
gccccaggagacaccgcu

SEQ ID NO: 47505 - RNA, 21 nt, Human
gcucgcugcauuggagcccca

SEQ ID NO: 47506 - RNA, 23 nt, Human
uaacauauauuguauaaauacuc

SEQ ID NO: 47507 - RNA, 23 nt, Human
uaauguauaaacauucucugaaa

SEQ ID NO: 47508 - RNA, 25 nt, Human
uacgcuggaucccuccagccuucuu

SEQ ID NO: 47509 - RNA, 22 nt, Human
uauucccaaagcaggguuacau

SEQ ID NO: 47510 - RNA, 24 nt, Human
uauuuuacuauauacauauggaaa

SEQ ID NO: 47511 - RNA, 21 nt, Human
uccaaaaaaggaaagaggaag

SEQ ID NO: 47512 - RNA, 24 nt, Human
ucccaacccccaugauacuaaguu

SEQ ID NO: 47513 - RNA, 22 nt, Human
uccccaaaccugugggacccug

SEQ ID NO: 47514 - RNA, 23 nt, Human
ucccugcaccagcccuuccucac

SEQ ID NO: 47515 - RNA, 24 nt, Human
ucccugcaccagcccuuccucacu

SEQ ID NO: 47516 - RNA, 24 nt, Human
ucucauguugaacaaucugaaguu

SEQ ID NO: 47517 - RNA, 19 nt, Human
ugaacagacauucaccagg

SEQ ID NO: 47518 - RNA, 19 nt, Human
ugagacacaaguuacuucu

SEQ ID NO: 47519 - RNA, 22 nt, Human
ugaugauucaacuccuuuucua

SEQ ID NO: 47520 - RNA, 20 nt, Human
ugcuuucccugcaccagccc

SEQ ID NO: 47521 - RNA, 20 nt, Human
ugcuuuguuuuuucuaaacu

SEQ ID NO: 47522 - RNA, 23 nt, Human
uggauuguuaaaauuaacaauuu

SEQ ID NO: 47523 - RNA, 18 nt, Human
uggccugcucuggauugu

SEQ ID NO: 47524 - RNA, 26 nt, Human
ugugauuguacugauuuucaugagac

SEQ ID NO: 47525 - RNA, 24 nt, Human
uuaauaauccucacuaacuauccu

SEQ ID NO: 47526 - RNA, 19 nt, Human
uuauaugcacuuccacaaa

SEQ ID NO: 47527 - RNA, 21 nt, Human
uuccggcguuucauccuccuu

SEQ ID NO: 47528 - RNA, 24 nt, Human
uugcugagccuuucucuuggaccc

SEQ ID NO: 47529 - RNA, 20 nt, Human
uugcuuuguuuuuucuaaac

SEQ ID NO: 47530 - RNA, 24 nt, Human
uuggagccccaggagacaccgcuc

SEQ ID NO: 47531 - RNA, 18 nt, Human
aaaaaaguuuuagcccuc

SEQ ID NO: 47532 - RNA, 24 nt, Human
aagaaaagugaaaaaaguuuuagc

SEQ ID NO: 47533 - RNA, 20 nt, Human
aagugaaaaaaguuuuagcc

SEQ ID NO: 47534 - RNA, 24 nt, Human
accccuccgccucccgcaugcccc

SEQ ID NO: 47535 - RNA, 23 nt, Human
accuuuucccccucccuccuccu

SEQ ID NO: 47536 - RNA, 18 nt, Human
agaagaaaagugaaaaaa

SEQ ID NO: 47537 - RNA, 25 nt, Human
caccuuuucccccucccuccuccua

SEQ ID NO: 47538 - RNA, 21 nt, Human
cagccacccggucccaccccu

SEQ ID NO: 47539 - RNA, 21 nt, Human
ccacccggucccaccccuccg

SEQ ID NO: 47540 - RNA, 23 nt, Human
ccacccggucccaccccuccgcc

SEQ ID NO: 47541 - RNA, 20 nt, Human
ccagcaggaagaugcagggg

SEQ ID NO: 47542 - RNA, 18 nt, Human
cccccucccuccuccuaa

SEQ ID NO: 47543 - RNA, 20 nt, Human
cccccucccuccuccuaaaa

SEQ ID NO: 47544 - RNA, 20 nt, Human
cccucagcuccagaaauaaa

SEQ ID NO: 47545 - RNA, 24 nt, Human
gaagaugcaggggugcauggucag

SEQ ID NO: 47546 - RNA, 21 nt, Human
gagaagaaaagugaaaaaagu

SEQ ID NO: 47547 - RNA, 21 nt, Human
gccacccggucccaccccucc

SEQ ID NO: 47548 - RNA, 18 nt, Human
gcgcagccacccgguccc

SEQ ID NO: 47549 - RNA, 28 nt, Human
uagcccucagcuccagaaauaaagcgcu

SEQ ID NO: 47550 - RNA, 19 nt, Human
ugcauggucaggcgcgaga

SEQ ID NO: 47551 - RNA, 19 nt, Human
uggaaugggcgcagccacc

SEQ ID NO: 47552 - RNA, 19 nt, Human
uuagcccucagcuccagaa

SEQ ID NO: 47553 - RNA, 24 nt, Human
aaaggcaggucugggguuguugca

SEQ ID NO: 47554 - RNA, 24 nt, Human
acagccaaauguccugcagcugcc

SEQ ID NO: 47555 - RNA, 22 nt, Human
acccacagacggggguucacaa

SEQ ID NO: 47556 - RNA, 21 nt, Human
accucccgccggcucccaggc

SEQ ID NO: 47557 - RNA, 19 nt, Human
acgcugcaggccgccagcu

SEQ ID NO: 47558 - RNA, 22 nt, Human
acgggacagccuggcagaccuc

SEQ ID NO: 47559 - RNA, 25 nt, Human
acuucggggaccccagcuagaccag

SEQ ID NO: 47560 - RNA, 19 nt, Human
agaaggaggcgccgccagg

SEQ ID NO: 47561 - RNA, 21 nt, Human
agaccucccgccggcucccag

SEQ ID NO: 47562 - RNA, 23 nt, Human
agagcccuuccgugggcugcacu

SEQ ID NO: 47563 - RNA, 21 nt, Human
agauuggaaaaaguucgaauu

SEQ ID NO: 47564 - RNA, 21 nt, Human
agccacgacauagcgcccucc

SEQ ID NO: 47565 - RNA, 19 nt, Human
agcccgaggaguggagcgg

SEQ ID NO: 47566 - RNA, 25 nt, Human
agcuccuccugcugcaagcugggcc

SEQ ID NO: 47567 - RNA, 24 nt, Human
agcucucgccaauggcccggcaca

SEQ ID NO: 47568 - RNA, 19 nt, Human
aggaggcggcugcagcugc

SEQ ID NO: 47569 - RNA, 20 nt, Human
aggaucuccucaccaucguc

SEQ ID NO: 47570 - RNA, 18 nt, Human
aggcagccccuggcacug

SEQ ID NO: 47571 - RNA, 24 nt, Human
agggcucaggggcaggcagcuucu

SEQ ID NO: 47572 - RNA, 25 nt, Human
aggggagaugcucaucuucccaggg

SEQ ID NO: 47573 - RNA, 22 nt, Human
aggucugggguuguugcacugc

SEQ ID NO: 47574 - RNA, 18 nt, Human
augcacugcugcuauggg

SEQ ID NO: 47575 - RNA, 21 nt, Human
caccaacacaugcacgccccc

SEQ ID NO: 47576 - RNA, 18 nt, Human
caccaggugcucccuggc

SEQ ID NO: 47577 - RNA, 22 nt, Human
caccaucguccuccccaugggc

SEQ ID NO: 47578 - RNA, 22 nt, Human
cacccccuuagaggaggccuaa

SEQ ID NO: 47579 - RNA, 18 nt, Human
cacgccccccaaaggcag

SEQ ID NO: 47580 - RNA, 23 nt, Human
cacgccccccaaaggcaggucug

SEQ ID NO: 47581 - RNA, 21 nt, Human
cacggaacaaauguucaauga

SEQ ID NO: 47582 - RNA, 20 nt, Human
cacugagaccaggggucaac

SEQ ID NO: 47583 - RNA, 23 nt, Human
cacuggaccagaaacccacagac

SEQ ID NO: 47584 - RNA, 20 nt, Human
cacuggguguccaacaggau

SEQ ID NO: 47585 - RNA, 23 nt, Human
cagaguccccaccuccaaccccc

SEQ ID NO: 47586 - RNA, 24 nt, Human
cagcaccccagugguagaaggagg

SEQ ID NO: 47587 - RNA, 24 nt, Human
cagcaucuuccuggaggggucccc

SEQ ID NO: 47588 - RNA, 21 nt, Human
cagccacgacauagcgcccuc

SEQ ID NO: 47589 - RNA, 20 nt, Human
cagcccgaggaguggagcgg

SEQ ID NO: 47590 - RNA, 18 nt, Human
cagccuggaggacaugac

SEQ ID NO: 47591 - RNA, 20 nt, Human
cagcggcuggccgucggucc

SEQ ID NO: 47592 - RNA, 23 nt, Human
cagcuccuccugcugcaagcugg

SEQ ID NO: 47593 - RNA, 21 nt, Human
cagcugaugugcaugagcugg

SEQ ID NO: 47594 - RNA, 23 nt, Human
caggauccuccgcacgaccccuc

SEQ ID NO: 47595 - RNA, 21 nt, Human
caguauggaaugggacaggcc

SEQ ID NO: 47596 - RNA, 27 nt, Human
cauccagauggccccagccuggaggac

SEQ ID NO: 47597 - RNA, 22 nt, Human
ccaacacaugcacgccccccaa

SEQ ID NO: 47598 - RNA, 21 nt, Human
ccacacagcucuuccuggaca

SEQ ID NO: 47599 - RNA, 23 nt, Human
ccaucugacagaugagaggcugu

SEQ ID NO: 47600 - RNA, 19 nt, Human
cccacacgcagcgcgcccg

SEQ ID NO: 47601 - RNA, 25 nt, Human
cccacagcucacgcugcaggccgcc

SEQ ID NO: 47602 - RNA, 19 nt, Human
cccaugcacugcugcuaug

SEQ ID NO: 47603 - RNA, 18 nt, Human
ccccaaaggcaggucugg

SEQ ID NO: 47604 - RNA, 20 nt, Human
ccccagcuagaccagcgccc

SEQ ID NO: 47605 - RNA, 18 nt, Human
ccccauggggagggagcc

SEQ ID NO: 47606 - RNA, 22 nt, Human
ccccuuagaggaggccuaagcc

SEQ ID NO: 47607 - RNA, 23 nt, Human
ccccuuagaggaggccuaagccc

SEQ ID NO: 47608 - RNA, 21 nt, Human
cccgcucccaucugacagaug

SEQ ID NO: 47609 - RNA, 19 nt, Human
ccgccggcagacucaccag

SEQ ID NO: 47610 - RNA, 20 nt, Human
ccgcucccaucugacagaug

SEQ ID NO: 47611 - RNA, 18 nt, Human
ccucaccaucguccuccc

SEQ ID NO: 47612 - RNA, 20 nt, Human
ccucaccaucguccucccca

SEQ ID NO: 47613 - RNA, 23 nt, Human
ccuccaggcggggcagccggucc

SEQ ID NO: 47614 - RNA, 19 nt, Human
ccuccuggugaccacaccu

SEQ ID NO: 47615 - RNA, 20 nt, Human
ccucggcugacucccucucc

SEQ ID NO: 47616 - RNA, 19 nt, Human
ccugcagcuccuccugcug

SEQ ID NO: 47617 - RNA, 21 nt, Human
ccugcagcuccuccugcugca

SEQ ID NO: 47618 - RNA, 22 nt, Human
ccugcgcugcgacaaggcccgg

SEQ ID NO: 47619 - RNA, 21 nt, Human
ccugcugcaagcugggccuug

SEQ ID NO: 47620 - RNA, 20 nt, Human
ccuggacaggcacccugagg

SEQ ID NO: 47621 - RNA, 23 nt, Human
ccuggcaccugucccauaccugc

SEQ ID NO: 47622 - RNA, 18 nt, Human
ccuggcaccugucccauc

SEQ ID NO: 47623 - RNA, 22 nt, Human
ccugucccauaccugcugggag

SEQ ID NO: 47624 - RNA, 21 nt, Human
cgaccccucucccacagcuca

SEQ ID NO: 47625 - RNA, 24 nt, Human
cgaggaguggagcggagugagagg

SEQ ID NO: 47626 - RNA, 19 nt, Human
cgcacgaccccucucccac

SEQ ID NO: 47627 - RNA, 21 nt, Human
cgcccaugcacugcugcuaug

SEQ ID NO: 47628 - RNA, 19 nt, Human
cgcccgcaggagacggagc

SEQ ID NO: 47629 - RNA, 18 nt, Human
cggcacaugugucugcac

SEQ ID NO: 47630 - RNA, 21 nt, Human
cggcugcagcugcuuuggucc

SEQ ID NO: 47631 - RNA, 21 nt, Human
cucaggggcaggcagcuucuc

SEQ ID NO: 47632 - RNA, 22 nt, Human
cucagucacuggagccuccagg

SEQ ID NO: 47633 - RNA, 19 nt, Human
cuccaggccaucugccccu

SEQ ID NO: 47634 - RNA, 21 nt, Human
cuccgcacgaccccucuccca

SEQ ID NO: 47635 - RNA, 19 nt, Human
cuccgcaggagcgggagca

SEQ ID NO: 47636 - RNA, 26 nt, Human
cuccugcugcaagcugggccuugcuc

SEQ ID NO: 47637 - RNA, 23 nt, Human
cugcaggccuccugggguuccgg

SEQ ID NO: 47638 - RNA, 22 nt, Human
cugcgcauccggcgggugcccc

SEQ ID NO: 47639 - RNA, 21 nt, Human
cuuccugccagggcaggggcu

SEQ ID NO: 47640 - RNA, 19 nt, Human
gacaugacaucccgacaca

SEQ ID NO: 47641 - RNA, 19 nt, Human
gacauuggagaagacucua

SEQ ID NO: 47642 - RNA, 19 nt, Human
gaccccucucccacagcuc

SEQ ID NO: 47643 - RNA, 22 nt, Human
gagagccagcccgaggagugga

SEQ ID NO: 47644 - RNA, 23 nt, Human
gagccuccaggccaucugccccu

SEQ ID NO: 47645 - RNA, 21 nt, Human
gcacgaccccucucccacagc

SEQ ID NO: 47646 - RNA, 20 nt, Human
gcagcgcgcccguccugcgc

SEQ ID NO: 47647 - RNA, 20 nt, Human
gccagacacggaacaaaugu

SEQ ID NO: 47648 - RNA, 19 nt, Human
gcccgggcacaauacagga

SEQ ID NO: 47649 - RNA, 18 nt, Human
gcggagugagagggggcc

SEQ ID NO: 47650 - RNA, 18 nt, Human
gcugcaggccuccugggg

SEQ ID NO: 47651 - RNA, 20 nt, Human
gcuguaguagaggccaggcu

SEQ ID NO: 47652 - RNA, 20 nt, Human
gcuuugguccagcgggucug

SEQ ID NO: 47653 - RNA, 23 nt, Human
ggagagccagcccgaggagugga

SEQ ID NO: 47654 - RNA, 21 nt, Human
ggagggagggguagguggugu

SEQ ID NO: 47655 - RNA, 19 nt, Human
ggaugugcacgcccacccc

SEQ ID NO: 47656 - RNA, 19 nt, Human
ggcgaggcagccccuggca

SEQ ID NO: 47657 - RNA, 24 nt, Human
ggcugugugguacagcagcacccc

SEQ ID NO: 47658 - RNA, 19 nt, Human
gggccguggcuaggguggg

SEQ ID NO: 47659 - RNA, 24 nt, Human
ggggguucacaaggaaugccagga

SEQ ID NO: 47660 - RNA, 18 nt, Human
gggguuccgggcgaggca

SEQ ID NO: 47661 - RNA, 24 nt, Human
ggucccguccucccgggggccacc

SEQ ID NO: 47662 - RNA, 24 nt, Human
guccccaccacacaccuggcaccu

SEQ ID NO: 47663 - RNA, 23 nt, Human
guccccaccuccaacccccuagc

SEQ ID NO: 47664 - RNA, 18 nt, Human
gugagagggggccuuggu

SEQ ID NO: 47665 - RNA, 22 nt, Human
gugaugcggagggaccucacag

SEQ ID NO: 47666 - RNA, 23 nt, Human
uagauaccuaagauuggaaaaag

SEQ ID NO: 47667 - RNA, 18 nt, Human
uagcgcccuccgauccuc

SEQ ID NO: 47668 - RNA, 18 nt, Human
ucacgcugcaggccgcca

SEQ ID NO: 47669 - RNA, 22 nt, Human
ucagcaccaacacaugcacggu

SEQ ID NO: 47670 - RNA, 19 nt, Human
uccaacaggaucuccucac

SEQ ID NO: 47671 - RNA, 30 nt, Human
uccacgccacauucugucccauccaggagg

SEQ ID NO: 47672 - RNA, 20 nt, Human
uccagaguccccaccuccaa

SEQ ID NO: 47673 - RNA, 21 nt, Human
uccagaguccccaccuccaac

SEQ ID NO: 47674 - RNA, 18 nt, Human
uccaugcacguuuugggg

SEQ ID NO: 47675 - RNA, 21 nt, Human
uccaugcacguuuugggggac

SEQ ID NO: 47676 - RNA, 24 nt, Human
ucccaggccaccgccggcagacuc

SEQ ID NO: 47677 - RNA, 21 nt, Human
uccuccgcaggagcgggagca

SEQ ID NO: 47678 - RNA, 18 nt, Human
ucucgcucugccagcugu

SEQ ID NO: 47679 - RNA, 24 nt, Human
ugaaagagcccuuccgugggcugc

SEQ ID NO: 47680 - RNA, 22 nt, Human
ugacucccucuccggggucccc

SEQ ID NO: 47681 - RNA, 20 nt, Human
ugagaggcugugccaaagac

SEQ ID NO: 47682 - RNA, 21 nt, Human
ugagaggcugugccaaagaca

SEQ ID NO: 47683 - RNA, 18 nt, Human
ugagagggggccuuggug

SEQ ID NO: 47684 - RNA, 18 nt, Human
ugaugugcaugagcuggg

SEQ ID NO: 47685 - RNA, 24 nt, Human
ugcacagggguccacacgugugca

SEQ ID NO: 47686 - RNA, 25 nt, Human
ugcaggccgccagcuuguacugcca

SEQ ID NO: 47687 - RNA, 21 nt, Human
ugcaggccuccugggguuccg

SEQ ID NO: 47688 - RNA, 23 nt, Human
ugccaggaccucggcugacuccc

SEQ ID NO: 47689 - RNA, 25 nt, Human
ugccaggaccucggcugacucccuc

SEQ ID NO: 47690 - RNA, 21 nt, Human
ugcggagggaccucacagcca

SEQ ID NO: 47691 - RNA, 19 nt, Human
ugcucaucuucccagccac

SEQ ID NO: 47692 - RNA, 18 nt, Human
uggacauuggagaagacu

SEQ ID NO: 47693 - RNA, 22 nt, Human
uggagggguccccagaugcgga

SEQ ID NO: 47694 - RNA, 19 nt, Human
uggcacacaggucucguuc

SEQ ID NO: 47695 - RNA, 22 nt, Human
ugggcggccugcagcuccuccu

SEQ ID NO: 47696 - RNA, 25 nt, Human
ugggcgggacgauuaggcaguguuu

SEQ ID NO: 47697 - RNA, 19 nt, Human
ugugaaagagcccuuccgu

SEQ ID NO: 47698 - RNA, 22 nt, Human
uguggcaggagagggccuggca

SEQ ID NO: 47699 - RNA, 22 nt, Human
uuccuggacaggcacccugagg

SEQ ID NO: 47700 - RNA, 24 nt, Human
uuccuggacaggcacccugagggc

SEQ ID NO: 47701 - RNA, 19 nt, Human
uucgaauuggaaagcacug

SEQ ID NO: 47702 - RNA, 18 nt, Human
uuggugacugggaaucug

SEQ ID NO: 47703 - RNA, 23 nt, Human
uuuuuuuuuuuuuuuuucagccu

SEQ ID NO: 47704 - RNA, 23 nt, Human
aaaaaaaagacuuaaggcuuagg

SEQ ID NO: 47705 - RNA, 23 nt, Human
aaaaaaagacuuaaggcuuaaag

SEQ ID NO: 47706 - RNA, 21 nt, Human
aaaaagacuuaaggcuuaggg

SEQ ID NO: 47707 - RNA, 18 nt, Human
aaacaagcauaugcacca

SEQ ID NO: 47708 - RNA, 23 nt, Human
aaacaagcauaugcaccauggga

SEQ ID NO: 47709 - RNA, 24 nt, Human
aaaguucuugcacauucugugcuu

SEQ ID NO: 47710 - RNA, 19 nt, Human
aaaugagucaaugcagaac

SEQ ID NO: 47711 - RNA, 24 nt, Human
aacauuuuuauugguacgugcucu

SEQ ID NO: 47712 - RNA, 21 nt, Human
aaccugccuucaaagccccaa

SEQ ID NO: 47713 - RNA, 20 nt, Human
aacuuaauaucaacuacuaa

SEQ ID NO: 47714 - RNA, 19 nt, Human
aauacuaucaagaaaaaaa

SEQ ID NO: 47715 - RNA, 23 nt, Human
aaucauuugagaacacaucucuu

SEQ ID NO: 47716 - RNA, 24 nt, Human
aaucuuagcaacauauuuuucuuu

SEQ ID NO: 47717 - RNA, 18 nt, Human
aaugcaagauguuugcau

SEQ ID NO: 47718 - RNA, 24 nt, Human
acaaaaagucagcugauaugcaca

SEQ ID NO: 47719 - RNA, 22 nt, Human
acaaacagcaucaguaguguac

SEQ ID NO: 47720 - RNA, 18 nt, Human
acacaaaaacaaaggaca

SEQ ID NO: 47721 - RNA, 23 nt, Human
acacacaaaaacaaaggacaccu

SEQ ID NO: 47722 - RNA, 24 nt, Human
acaucuacucccuggagagagcau

SEQ ID NO: 47723 - RNA, 19 nt, Human
agaaaagaaagcccaaagg

SEQ ID NO: 47724 - RNA, 20 nt, Human
agaaagcccaaaggucagaa

SEQ ID NO: 47725 - RNA, 22 nt, Human
agaacaaaaggaggaugaaagc

SEQ ID NO: 47726 - RNA, 22 nt, Human
agacagcucagguacugaccuc

SEQ ID NO: 47727 - RNA, 20 nt, Human
agaggguuucaguuuugucu

SEQ ID NO: 47728 - RNA, 19 nt, Human
agagguuaauucaucuaca

SEQ ID NO: 47729 - RNA, 18 nt, Human
agcaaggugacuacugac

SEQ ID NO: 47730 - RNA, 21 nt, Human
agcaucaguaguguacacuuu

SEQ ID NO: 47731 - RNA, 20 nt, Human
aggaugaaagcaacuagaaa

SEQ ID NO: 47732 - RNA, 24 nt, Human
aggcaccuagaacauccagaaaug

SEQ ID NO: 47733 - RNA, 21 nt, Human
aguuggcuguaguaguuugcu

SEQ ID NO: 47734 - RNA, 24 nt, Human
auacaauauuucuaauauagauaa

SEQ ID NO: 47735 - RNA, 22 nt, Human
auccaaaauuucuuguuaaagu

SEQ ID NO: 47736 - RNA, 18 nt, Human
auuuacacaacagcugca

SEQ ID NO: 47737 - RNA, 21 nt, Human
auuucuuccaaugaauucugg

SEQ ID NO: 47738 - RNA, 23 nt, Human
caaaaucauuaugcugauaucac

SEQ ID NO: 47739 - RNA, 23 nt, Human
caacaaaacccuuuauauuguca

SEQ ID NO: 47740 - RNA, 21 nt, Human
caaguacuuuacaucuacucc

SEQ ID NO: 47741 - RNA, 21 nt, Human
caagucaucaacuuaauauca

SEQ ID NO: 47742 - RNA, 20 nt, Human
caaguguacuaagacaccag

SEQ ID NO: 47743 - RNA, 18 nt, Human
cacaaguguacuaagaca

SEQ ID NO: 47744 - RNA, 22 nt, Human
cacacacaaaaacaaaggacac

SEQ ID NO: 47745 - RNA, 24 nt, Human
cacacacaaaaacaaaggacaccu

SEQ ID NO: 47746 - RNA, 23 nt, Human
cacacacacacaaaaacaaagga

SEQ ID NO: 47747 - RNA, 25 nt, Human
cacagaacaaagcaugcaucucuaa

SEQ ID NO: 47748 - RNA, 22 nt, Human
caucuacauuuuaguuuguaua

SEQ ID NO: 47749 - RNA, 21 nt, Human
cauugugguugugaacauuug

SEQ ID NO: 47750 - RNA, 18 nt, Human
ccaaagcucuacuauacu

SEQ ID NO: 47751 - RNA, 18 nt, Human
ccuagaacauccagaaau

SEQ ID NO: 47752 - RNA, 25 nt, Human
ccugugaccacaaguguacuaagac

SEQ ID NO: 47753 - RNA, 20 nt, Human
ccuucaaagccccaaagcuc

SEQ ID NO: 47754 - RNA, 21 nt, Human
ccuuuauauugucaguagcug

SEQ ID NO: 47755 - RNA, 24 nt, Human
cgacaggcaccuagaacauccaga

SEQ ID NO: 47756 - RNA, 21 nt, Human
cuaaaacaaacaaaaagucag

SEQ ID NO: 47757 - RNA, 24 nt, Human
cuauagcuuuuguguuucuuuucu

SEQ ID NO: 47758 - RNA, 20 nt, Human
cucuaugcacagaacaaagc

SEQ ID NO: 47759 - RNA, 22 nt, Human
cucucauguacauguaauucau

SEQ ID NO: 47760 - RNA, 23 nt, Human
gaacaugaaccauauggaaaaua

SEQ ID NO: 47761 - RNA, 22 nt, Human
gagaacacaucucuuaaaauaa

SEQ ID NO: 47762 - RNA, 22 nt, Human
gagagagcauuucuggcuuugc

SEQ ID NO: 47763 - RNA, 21 nt, Human
gaucuauagagauuuccacuu

SEQ ID NO: 47764 - RNA, 25 nt, Human
gggaagagagagguuguccagguuu

SEQ ID NO: 47765 - RNA, 25 nt, Human
uaaaaaagaacacacacacacaaaa

SEQ ID NO: 47766 - RNA, 28 nt, Human
uaaaaaagaacacacacacacaaaaaca

SEQ ID NO: 47767 - RNA, 19 nt, Human
uaaaacaaacaaaaaguca

SEQ ID NO: 47768 - RNA, 19 nt, Human
uaaacaagcauaugcacca

SEQ ID NO: 47769 - RNA, 18 nt, Human
uaacaucaaauuuguuca

SEQ ID NO: 47770 - RNA, 20 nt, Human
uacuuuacaucuacucccug

SEQ ID NO: 47771 - RNA, 23 nt, Human
uagaaagugagccagcacuuucu

SEQ ID NO: 47772 - RNA, 20 nt, Human
uagagucaauaguuuaagcu

SEQ ID NO: 47773 - RNA, 19 nt, Human
uaucaagaaaaaaaaucaa

SEQ ID NO: 47774 - RNA, 18 nt, Human
uaucucaaccaucgacau

SEQ ID NO: 47775 - RNA, 22 nt, Human
uaugcacagaacaaagcaugca

SEQ ID NO: 47776 - RNA, 19 nt, Human
uauuacaguacauugagua

SEQ ID NO: 47777 - RNA, 27 nt, Human
ucaauaguuuaagcuguuaguuuacaa

SEQ ID NO: 47778 - RNA, 22 nt, Human
ucaguacaacaaacagcaucag

SEQ ID NO: 47779 - RNA, 22 nt, Human
uccauauccaaaauuucuuguu

SEQ ID NO: 47780 - RNA, 21 nt, Human
ucccaaaacuuuuuccuuugc

SEQ ID NO: 47781 - RNA, 21 nt, Human
ucccuggagagagcauuucug

SEQ ID NO: 47782 - RNA, 20 nt, Human
ucccuuuucugcuucagaga

SEQ ID NO: 47783 - RNA, 18 nt, Human
ucucuaauuaugucucuc

SEQ ID NO: 47784 - RNA, 19 nt, Human
ucuggaauuugccuaauuu

SEQ ID NO: 47785 - RNA, 24 nt, Human
ucuugaaccugccuucaaagcccc

SEQ ID NO: 47786 - RNA, 21 nt, Human
ucuugcacaaaguagcagcaa

SEQ ID NO: 47787 - RNA, 19 nt, Human
ugaacagcuagcugagucc

SEQ ID NO: 47788 - RNA, 20 nt, Human
ugaacauuugaacaugaacc

SEQ ID NO: 47789 - RNA, 19 nt, Human
ugaaccauauggaaaauaa

SEQ ID NO: 47790 - RNA, 23 nt, Human
ugagaacacaucucuuaaaauaa

SEQ ID NO: 47791 - RNA, 21 nt, Human
ugagcugacgaucuauagaga

SEQ ID NO: 47792 - RNA, 26 nt, Human
ugcacacacaaguaaacuagagagaa

SEQ ID NO: 47793 - RNA, 22 nt, Human
ugcacagaacaaagcaugcauc

SEQ ID NO: 47794 - RNA, 18 nt, Human
ugcagaacaaaaggagga

SEQ ID NO: 47795 - RNA, 25 nt, Human
ugcagaacaaaaggaggaugaaagc

SEQ ID NO: 47796 - RNA, 22 nt, Human
ugcgaaaauuaaaaaagaacac

SEQ ID NO: 47797 - RNA, 19 nt, Human
uggagagagcauuucuggc

SEQ ID NO: 47798 - RNA, 26 nt, Human
ugggaauuuuuaggaaaaaaaaaaga

SEQ ID NO: 47799 - RNA, 18 nt, Human
ugguaaaugagucaaugc

SEQ ID NO: 47800 - RNA, 23 nt, Human
uguaugcacacacaaguaaacua

SEQ ID NO: 47801 - RNA, 22 nt, Human
ugucaaacaaggcaauacucaa

SEQ ID NO: 47802 - RNA, 18 nt, Human
uucaaagccccaaagcuc

SEQ ID NO: 47803 - RNA, 18 nt, Human
uucugcuucagagagcga

SEQ ID NO: 47804 - RNA, 23 nt, Human
uuuacuguaacuuuucuaaaaca

SEQ ID NO: 47805 - RNA, 25 nt, Human
aaaaaaaaaagaaagaaagaaagaa

SEQ ID NO: 47806 - RNA, 20 nt, Human
aaaaaaaaagauaaucccuc

SEQ ID NO: 47807 - RNA, 24 nt, Human
aaaaaauaaaauucaggaagagga

SEQ ID NO: 47808 - RNA, 23 nt, Human
aaaaauaaaauucaggaagagga

SEQ ID NO: 47809 - RNA, 19 nt, Human
aaacaaaacaaaacaaaaa

SEQ ID NO: 47810 - RNA, 24 nt, Human
aaauaaauacaacuggggcccagg

SEQ ID NO: 47811 - RNA, 19 nt, Human
aacauggugaaaccccguc

SEQ ID NO: 47812 - RNA, 20 nt, Human
aacauggugaaaccccgucu

SEQ ID NO: 47813 - RNA, 21 nt, Human
aacauggugaaaccccgucuc

SEQ ID NO: 47814 - RNA, 20 nt, Human
aacauggugaaacccugucu

SEQ ID NO: 47815 - RNA, 21 nt, Human
aacauggugaaacccugucuc

SEQ ID NO: 47816 - RNA, 21 nt, Human
aacucuccuccugagcccucc

SEQ ID NO: 47817 - RNA, 20 nt, Human
aacuggggcccaggcccucc

SEQ ID NO: 47818 - RNA, 22 nt, Human
aagcacacacacauuuucacac

SEQ ID NO: 47819 - RNA, 21 nt, Human
aagggcagccgggauagugag

SEQ ID NO: 47820 - RNA, 19 nt, Human
aaguccuccacacccuagc

SEQ ID NO: 47821 - RNA, 23 nt, Human
aauagcgagacucugucuccaaa

SEQ ID NO: 47822 - RNA, 25 nt, Human
aaucacuugaacccgggaggcggag

SEQ ID NO: 47823 - RNA, 20 nt, Human
acaaaacaaaacaaaaauua

SEQ ID NO: 47824 - RNA, 23 nt, Human
acacacacacacacgcauacaca

SEQ ID NO: 47825 - RNA, 23 nt, Human
acacacacacacgcauacacaca

SEQ ID NO: 47826 - RNA, 33 nt, Human
acacauuuucacacacacacacacacgcauagu

SEQ ID NO: 47827 - RNA, 24 nt, Human
acagagcgagauucugucucaaaa

SEQ ID NO: 47828 - RNA, 24 nt, Human
accccgucucuacuaaaaauacaa

SEQ ID NO: 47829 - RNA, 24 nt, Human
acccugucucuacuaaaaauacaa

SEQ ID NO: 47830 - RNA, 24 nt, Human
accuaaggucaggaguucgagacc

SEQ ID NO: 47831 - RNA, 24 nt, Human
accucauacauaagcacacacaca

SEQ ID NO: 47832 - RNA, 22 nt, Human
acucugucuccaaacaaaacaa

SEQ ID NO: 47833 - RNA, 21 nt, Human
acugcagcugggagggacuga

SEQ ID NO: 47834 - RNA, 18 nt, Human
agauaaucccucacuccc

SEQ ID NO: 47835 - RNA, 26 nt, Human
agcacacacacauuuucacacacaca

SEQ ID NO: 47836 - RNA, 24 nt, Human
agcacuuugggaggccgaggcagg

SEQ ID NO: 47837 - RNA, 23 nt, Human
agccgggcguggugguaggugcc

SEQ ID NO: 47838 - RNA, 22 nt, Human
agccuggccaacauggugaaac

SEQ ID NO: 47839 - RNA, 22 nt, Human
agccuggccaacauggugaaac

SEQ ID NO: 47840 - RNA, 24 nt, Human
agccuggccaacauggugaaaccc

SEQ ID NO: 47841 - RNA, 24 nt, Human
agccuggccaacauggugaaaccc

SEQ ID NO: 47842 - RNA, 24 nt, Human
agccugggcgacagagcgagauuc

SEQ ID NO: 47843 - RNA, 24 nt, Human
agccuguaaucccagcuacucagg

SEQ ID NO: 47844 - RNA, 23 nt, Human
agcugggcgugguggcaggagcc

SEQ ID NO: 47845 - RNA, 18 nt, Human
aggaagaggaaagcagaa

SEQ ID NO: 47846 - RNA, 20 nt, Human
aggaugcagugagccgagau

SEQ ID NO: 47847 - RNA, 24 nt, Human
aggcacgguggcucacgccuguaa

SEQ ID NO: 47848 - RNA, 23 nt, Human
aggcaggagaauugcuggaaccc

SEQ ID NO: 47849 - RNA, 22 nt, Human
aggcaggucgauuaccugaggu

SEQ ID NO: 47850 - RNA, 26 nt, Human
aggcaggucgauuaccugaggucagg

SEQ ID NO: 47851 - RNA, 18 nt, Human
aggcaugagaaucacuug

SEQ ID NO: 47852 - RNA, 24 nt, Human
aggcaugagaaucacuugaacccg

SEQ ID NO: 47853 - RNA, 18 nt, Human
aggccgaggcaggucgau

SEQ ID NO: 47854 - RNA, 26 nt, Human
aggcgaguggaucaccuaaggucagg

SEQ ID NO: 47855 - RNA, 24 nt, Human
aggcggaggaugcagugagccgag

SEQ ID NO: 47856 - RNA, 20 nt, Human
aggcugaggcaggagaauug

SEQ ID NO: 47857 - RNA, 21 nt, Human
aggcugaggcaggagaauugc

SEQ ID NO: 47858 - RNA, 24 nt, Human
aggcugaggcaugagaaucacuug

SEQ ID NO: 47859 - RNA, 20 nt, Human
aggucgauuaccugagguca

SEQ ID NO: 47860 - RNA, 24 nt, Human
agguggcgaagguugcagugagcu

SEQ ID NO: 47861 - RNA, 24 nt, Human
auccacuaacccaucacugccucc

SEQ ID NO: 47862 - RNA, 24 nt, Human
aucccucacucccugaaggcccac

SEQ ID NO: 47863 - RNA, 22 nt, Human
augcagugagccgagauugugc

SEQ ID NO: 47864 - RNA, 24 nt, Human
auguaccgggcgugguggcucaca

SEQ ID NO: 47865 - RNA, 24 nt, Human
auuaccugaggucaggaguucaag

SEQ ID NO: 47866 - RNA, 24 nt, Human
auugcacuccagccugggcgacag

SEQ ID NO: 47867 - RNA, 24 nt, Human
auugugccauugcacuccagccug

SEQ ID NO: 47868 - RNA, 24 nt, Human
caacauggugaaaccccgucucua

SEQ ID NO: 47869 - RNA, 24 nt, Human
caacauggugaaacccugucucua

SEQ ID NO: 47870 - RNA, 18 nt, Human
caagagcagccuggccaa

SEQ ID NO: 47871 - RNA, 24 nt, Human
caagagcagccuggccaacauggu

SEQ ID NO: 47872 - RNA, 26 nt, Human
cacacacacacacgcauacacacacc

SEQ ID NO: 47873 - RNA, 24 nt, Human
cacacacauuuucacacacacaca

SEQ ID NO: 47874 - RNA, 24 nt, Human
cacaccuguaaucccagcacuuug

SEQ ID NO: 47875 - RNA, 18 nt, Human
cacacgcauacacacacc

SEQ ID NO: 47876 - RNA, 24 nt, Human
caccaccacccuggauuuccuagc

SEQ ID NO: 47877 - RNA, 23 nt, Human
caccuaaggucaggaguucgaga

SEQ ID NO: 47878 - RNA, 19 nt, Human
caccuguaaucccagcacu

SEQ ID NO: 47879 - RNA, 24 nt, Human
caccuguaaucccagcacuuuggg

SEQ ID NO: 47880 - RNA, 22 nt, Human
cacgcccacagccccuccccac

SEQ ID NO: 47881 - RNA, 23 nt, Human
cacgcccacagccccuccccacu

SEQ ID NO: 47882 - RNA, 24 nt, Human
cacgccuguaaucccagcacuuug

SEQ ID NO: 47883 - RNA, 22 nt, Human
cacuaacccaucacugccuccc

SEQ ID NO: 47884 - RNA, 23 nt, Human
cacuccagccugggcgacagagc

SEQ ID NO: 47885 - RNA, 24 nt, Human
cacuccagccugggcgacagagcg

SEQ ID NO: 47886 - RNA, 23 nt, Human
cagaaagggcagccgggauagug

SEQ ID NO: 47887 - RNA, 20 nt, Human
cagcacuuugggagaugaag

SEQ ID NO: 47888 - RNA, 21 nt, Human
cagcacuuugggagaugaagg

SEQ ID NO: 47889 - RNA, 24 nt, Human
cagcacuuugggaggccgaggcag

SEQ ID NO: 47890 - RNA, 25 nt, Human
cagcacuuugggaggccgaggcagg

SEQ ID NO: 47891 - RNA, 24 nt, Human
cagcuacucgggaggcugaggcag

SEQ ID NO: 47892 - RNA, 24 nt, Human
caggaggcugaggcaugagaauca

SEQ ID NO: 47893 - RNA, 19 nt, Human
caggcccucccugccuucc

SEQ ID NO: 47894 - RNA, 20 nt, Human
cagggcagggccagccugcg

SEQ ID NO: 47895 - RNA, 21 nt, Human
caggucgauuaccugagguca

SEQ ID NO: 47896 - RNA, 24 nt, Human
caggucgauuaccugaggucagga

SEQ ID NO: 47897 - RNA, 27 nt, Human
cauaagcacacacacauuuucacacac

SEQ ID NO: 47898 - RNA, 22 nt, Human
caugaggcagcaacagaagcuc

SEQ ID NO: 47899 - RNA, 19 nt, Human
cauuccagcccuggugaca

SEQ ID NO: 47900 - RNA, 19 nt, Human
cauugcacuccagccuggg

SEQ ID NO: 47901 - RNA, 21 nt, Human
cauugcacuccagccugggcg

SEQ ID NO: 47902 - RNA, 22 nt, Human
cauugcacuccagccugggcga

SEQ ID NO: 47903 - RNA, 24 nt, Human
cauugcacuccagccugggcgaca

SEQ ID NO: 47904 - RNA, 30 nt, Human
cauuuucacacacacacacacacgcauaca

SEQ ID NO: 47905 - RNA, 21 nt, Human
ccagggugagggcuaugaggg

SEQ ID NO: 47906 - RNA, 20 nt, Human
ccauugcacuccagccuggg

SEQ ID NO: 47907 - RNA, 21 nt, Human
ccauugcacuccagccugggc

SEQ ID NO: 47908 - RNA, 22 nt, Human
ccauugcacuccagccugggcg

SEQ ID NO: 47909 - RNA, 23 nt, Human
ccauugcacuccagccugggcga

SEQ ID NO: 47910 - RNA, 24 nt, Human
ccauugcacuccagccugggcgac

SEQ ID NO: 47911 - RNA, 18 nt, Human
cccacagccccuccccac

SEQ ID NO: 47912 - RNA, 19 nt, Human
cccaggacccuaguccuug

SEQ ID NO: 47913 - RNA, 19 nt, Human
cccuagcuuuggaaagcuc

SEQ ID NO: 47914 - RNA, 23 nt, Human
cccuccuuuccuggaucuuuguc

SEQ ID NO: 47915 - RNA, 19 nt, Human
cccugccuucccccucccu

SEQ ID NO: 47916 - RNA, 22 nt, Human
cccugccuucccccucccuccu

SEQ ID NO: 47917 - RNA, 23 nt, Human
ccgcagggcagagggggcaguuu

SEQ ID NO: 47918 - RNA, 22 nt, Human
ccgcuucugugccugcccuguc

SEQ ID NO: 47919 - RNA, 22 nt, Human
ccuaaggucaggaguucgagac

SEQ ID NO: 47920 - RNA, 21 nt, Human
ccuauaaucucagcuacucgg

SEQ ID NO: 47921 - RNA, 20 nt, Human
ccuaucaccaccacccugga

SEQ ID NO: 47922 - RNA, 23 nt, Human
ccucauacauaagcacacacaca

SEQ ID NO: 47923 - RNA, 24 nt, Human
ccucccagggcaggaaaccagggc

SEQ ID NO: 47924 - RNA, 21 nt, Human
ccugccaaggucagaggcaaa

SEQ ID NO: 47925 - RNA, 22 nt, Human
ccuggccaacauggugaaaccc

SEQ ID NO: 47926 - RNA, 23 nt, Human
ccuggccaacauggugaaacccc

SEQ ID NO: 47927 - RNA, 24 nt, Human
ccuggccaacauggugaaaccccg

SEQ ID NO: 47928 - RNA, 24 nt, Human
ccuggccaacauggugaaacccug

SEQ ID NO: 47929 - RNA, 22 nt, Human
ccugggcgacagagcgagauuc

SEQ ID NO: 47930 - RNA, 21 nt, Human
ccuguaaucccagcuacucag

SEQ ID NO: 47931 - RNA, 24 nt, Human
cgagaccagccuggccaacauggu

SEQ ID NO: 47932 - RNA, 20 nt, Human
cgaggcaggucgauuaccug

SEQ ID NO: 47933 - RNA, 24 nt, Human
cgaguggaucaccuaaggucagga

SEQ ID NO: 47934 - RNA, 18 nt, Human
cgcagggcagagggggca

SEQ ID NO: 47935 - RNA, 21 nt, Human
cgcauacacacaccacuuaua

SEQ ID NO: 47936 - RNA, 20 nt, Human
cgcccacagccccuccccac

SEQ ID NO: 47937 - RNA, 24 nt, Human
cgccuguaaucccagcacuuuggg

SEQ ID NO: 47938 - RNA, 21 nt, Human
cgggaggcggaggaugcagug

SEQ ID NO: 47939 - RNA, 18 nt, Human
cuagccccagggugaggg

SEQ ID NO: 47940 - RNA, 22 nt, Human
cucacaccuguaaucccagcac

SEQ ID NO: 47941 - RNA, 24 nt, Human
cucacaccuguaaucccagcacuu

SEQ ID NO: 47942 - RNA, 22 nt, Human
cucacgccuguaaucccagcac

SEQ ID NO: 47943 - RNA, 24 nt, Human
cucacgccuguaaucccagcacuu

SEQ ID NO: 47944 - RNA, 22 nt, Human
cuccaaacucuccuccugagcc

SEQ ID NO: 47945 - RNA, 22 nt, Human
cucccagcuaaguccgaggccc

SEQ ID NO: 47946 - RNA, 18 nt, Human
cugcagcugggagggacu

SEQ ID NO: 47947 - RNA, 23 nt, Human
cugcagcugggagggacugaggc

SEQ ID NO: 47948 - RNA, 24 nt, Human
cuggccaacauggugaaacccugu

SEQ ID NO: 47949 - RNA, 21 nt, Human
cugucuccaaacaaaacaaaa

SEQ ID NO: 47950 - RNA, 19 nt, Human
gaaacccugucucuacuaa

SEQ ID NO: 47951 - RNA, 18 nt, Human
gaacccgggaggcggagg

SEQ ID NO: 47952 - RNA, 18 nt, Human
gaagguugcagugagcug

SEQ ID NO: 47953 - RNA, 24 nt, Human
gaagguugcagugagcugaaauca

SEQ ID NO: 47954 - RNA, 20 nt, Human
gaagguugcagugagcuggc

SEQ ID NO: 47955 - RNA, 24 nt, Human
gacagagcgagauucugucucaaa

SEQ ID NO: 47956 - RNA, 21 nt, Human
gacuccugccaaggucagagg

SEQ ID NO: 47957 - RNA, 23 nt, Human
gagaaucacuugaacccgggagg

SEQ ID NO: 47958 - RNA, 23 nt, Human
gagauugugccauugcacuccag

SEQ ID NO: 47959 - RNA, 23 nt, Human
gaggaugcagugagccgagauug

SEQ ID NO: 47960 - RNA, 24 nt, Human
gaggcaaaguuuucagaagggcug

SEQ ID NO: 47961 - RNA, 25 nt, Human
gaggcaggucgauuaccugagguca

SEQ ID NO: 47962 - RNA, 18 nt, Human
gaucaccuaaggucagga

SEQ ID NO: 47963 - RNA, 24 nt, Human
gaucaccuaaggucaggaguucga

SEQ ID NO: 47964 - RNA, 22 nt, Human
gauuaccugaggucaggaguuc

SEQ ID NO: 47965 - RNA, 23 nt, Human
gauuaccugaggucaggaguuca

SEQ ID NO: 47966 - RNA, 24 nt, Human
gauuaccugaggucaggaguucaa

SEQ ID NO: 47967 - RNA, 21 nt, Human
gcaccaaguccuccacacccu

SEQ ID NO: 47968 - RNA, 24 nt, Human
gcacuccagccugggcgacagagc

SEQ ID NO: 47969 - RNA, 21 nt, Human
gcaggaaaccagggcagggcc

SEQ ID NO: 47970 - RNA, 22 nt, Human
gcaggagaauugcuggaaccca

SEQ ID NO: 47971 - RNA, 24 nt, Human
gccaacauggugaaaccccgucuc

SEQ ID NO: 47972 - RNA, 24 nt, Human
gccaacauggugaaacccugucuc

SEQ ID NO: 47973 - RNA, 22 nt, Human
gccauugcacuccagccugggc

SEQ ID NO: 47974 - RNA, 24 nt, Human
gccauugcacuccagccugggcga

SEQ ID NO: 47975 - RNA, 20 nt, Human
gcccucccugccuucccccu

SEQ ID NO: 47976 - RNA, 21 nt, Human
gcccucccugccuucccccuc

SEQ ID NO: 47977 - RNA, 21 nt, Human
gcccugucucugccuucuucc

SEQ ID NO: 47978 - RNA, 23 nt, Human
gccuguaaucccagcuacucagg

SEQ ID NO: 47979 - RNA, 24 nt, Human
gcgacagagcgagauucugucuca

SEQ ID NO: 47980 - RNA, 24 nt, Human
gcgagacucugucuccaaacaaaa

SEQ ID NO: 47981 - RNA, 21 nt, Human
ggagaauugcuggaacccagg

SEQ ID NO: 47982 - RNA, 22 nt, Human
ggaggaugcagugagccgagau

SEQ ID NO: 47983 - RNA, 24 nt, Human
ggaggaugcagugagccgagauug

SEQ ID NO: 47984 - RNA, 18 nt, Human
ggaggccgaggcaggucg

SEQ ID NO: 47985 - RNA, 19 nt, Human
ggagguauuauuauuggca

SEQ ID NO: 47986 - RNA, 22 nt, Human
ggaucaccuaaggucaggaguu

SEQ ID NO: 47987 - RNA, 20 nt, Human
ggcagagaggaggggcaggu

SEQ ID NO: 47988 - RNA, 20 nt, Human
ggcaggaaaccagggcaggg

SEQ ID NO: 47989 - RNA, 23 nt, Human
ggcaggaaaccagggcagggcca

SEQ ID NO: 47990 - RNA, 21 nt, Human
ggcaggagccuguaaucccag

SEQ ID NO: 47991 - RNA, 18 nt, Human
ggcgaagguugcagugag

SEQ ID NO: 47992 - RNA, 19 nt, Human
ggcgaagguugcagugagc

SEQ ID NO: 47993 - RNA, 21 nt, Human
ggcggaggaugcagugagccg

SEQ ID NO: 47994 - RNA, 23 nt, Human
ggcgugguggcucacaccuguaa

SEQ ID NO: 47995 - RNA, 21 nt, Human
ggcucacgccuguaaucccag

SEQ ID NO: 47996 - RNA, 20 nt, Human
gggcagagaggaggggcagg

SEQ ID NO: 47997 - RNA, 24 nt, Human
gggcgugguggcaggagccuguaa

SEQ ID NO: 47998 - RNA, 21 nt, Human
gguaggugccuauaaucucag

SEQ ID NO: 47999 - RNA, 24 nt, Human
gguggcaggagccuguaaucccag

SEQ ID NO: 48000 - RNA, 24 nt, Human
gguggcucacaccuguaaucccag

SEQ ID NO: 48001 - RNA, 23 nt, Human
gguggcucacgccuguaauccca

SEQ ID NO: 48002 - RNA, 24 nt, Human
gguggcucacgccuguaaucccag

SEQ ID NO: 48003 - RNA, 19 nt, Human
guaccgggcgugguggcuc

SEQ ID NO: 48004 - RNA, 19 nt, Human
guacugcagcugggaggga

SEQ ID NO: 48005 - RNA, 19 nt, Human
guccgaggccccggugccc

SEQ ID NO: 48006 - RNA, 20 nt, Human
guccuuguccccuucccugg

SEQ ID NO: 48007 - RNA, 23 nt, Human
guggcucacaccuguaaucccag

SEQ ID NO: 48008 - RNA, 24 nt, Human
uaaauaguagaauucaauuuaaaa

SEQ ID NO: 48009 - RNA, 18 nt, Human
uaccuaucaccaccaccc

SEQ ID NO: 48010 - RNA, 23 nt, Human
uaccugaggucaggaguucaaga

SEQ ID NO: 48011 - RNA, 21 nt, Human
uaggaugcaaccacaucuguc

SEQ ID NO: 48012 - RNA, 21 nt, Human
ucaaaaaaaaaaaagaaagaa

SEQ ID NO: 48013 - RNA, 20 nt, Human
ucaagagcagccuggccaac

SEQ ID NO: 48014 - RNA, 22 nt, Human
ucaagagcagccuggccaacau

SEQ ID NO: 48015 - RNA, 28 nt, Human
ucaauuuaaaaaauauguaccgggcgug

SEQ ID NO: 48016 - RNA, 20 nt, Human
ucaccuaaggucaggaguuc

SEQ ID NO: 48017 - RNA, 24 nt, Human
ucacuugaacccgggaggcggagg

SEQ ID NO: 48018 - RNA, 22 nt, Human
ucaggaagaggaaagcagaaca

SEQ ID NO: 48019 - RNA, 23 nt, Human
uccagccugggcgacagagcgag

SEQ ID NO: 48020 - RNA, 24 nt, Human
uccagccugggcgacagagcgaga

SEQ ID NO: 48021 - RNA, 18 nt, Human
ucccagcuaaguccgagg

SEQ ID NO: 48022 - RNA, 21 nt, Human
ucccugaaggcccacccuacc

SEQ ID NO: 48023 - RNA, 21 nt, Human
ucccuggugcuaaauaaaagu

SEQ ID NO: 48024 - RNA, 18 nt, Human
uccgaggccccggugccc

SEQ ID NO: 48025 - RNA, 24 nt, Human
ucgauuaccugaggucaggaguuc

SEQ ID NO: 48026 - RNA, 23 nt, Human
ucgggaggcugaggcaggagaau

SEQ ID NO: 48027 - RNA, 25 nt, Human
ucucaaaaaaaaaaaagaaagaaag

SEQ ID NO: 48028 - RNA, 24 nt, Human
ucucacgcccacagccccucccca

SEQ ID NO: 48029 - RNA, 20 nt, Human
ucuccaaacaaaacaaaaca

SEQ ID NO: 48030 - RNA, 20 nt, Human
ucuccaaacaaaacaaaacu

SEQ ID NO: 48031 - RNA, 23 nt, Human
ucucuacuaaaaauacaaaaauu

SEQ ID NO: 48032 - RNA, 23 nt, Human
ucucuacuaaaaauacaaaaauu

SEQ ID NO: 48033 - RNA, 22 nt, Human
ucucuuuccuccucugucucuc

SEQ ID NO: 48034 - RNA, 20 nt, Human
ucugcagcuucucuggccuc

SEQ ID NO: 48035 - RNA, 20 nt, Human
ucugucucaaaaaaaaaaaa

SEQ ID NO: 48036 - RNA, 23 nt, Human
ucugucucaaaaaaaaaaaagaa

SEQ ID NO: 48037 - RNA, 25 nt, Human
ucugucucaaaaaaaaaaaagaaag

SEQ ID NO: 48038 - RNA, 19 nt, Human
ucugucucuuuccuccucu

SEQ ID NO: 48039 - RNA, 25 nt, Human
ucugucucuuuccuccucugucucu

SEQ ID NO: 48040 - RNA, 21 nt, Human
ucuuagcaugaggcagcaaca

SEQ ID NO: 48041 - RNA, 26 nt, Human
ucuuuucccaaaaaauaaaauucagg

SEQ ID NO: 48042 - RNA, 27 nt, Human
ugaaggcgaguggaucaccuaagguca

SEQ ID NO: 48043 - RNA, 25 nt, Human
ugacuccaaaaggaucacauaaaua

SEQ ID NO: 48044 - RNA, 22 nt, Human
ugagccgagauugugccauugc

SEQ ID NO: 48045 - RNA, 20 nt, Human
ugaggcagcaacagaagcuc

SEQ ID NO: 48046 - RNA, 19 nt, Human
ugaggcaggagaauugcug

SEQ ID NO: 48047 - RNA, 24 nt, Human
ugaggcaggagaauugcuggaacc

SEQ ID NO: 48048 - RNA, 25 nt, Human
ugaggcaggagaauugcuggaaccc

SEQ ID NO: 48049 - RNA, 20 nt, Human
ugaggcaugagaaucacuug

SEQ ID NO: 48050 - RNA, 24 nt, Human
ugaggcaugagaaucacuugaacc

SEQ ID NO: 48051 - RNA, 21 nt, Human
ugagucuuagcaugaggcagc

SEQ ID NO: 48052 - RNA, 19 nt, Human
ugcaaccacaucugucuga

SEQ ID NO: 48053 - RNA, 22 nt, Human
ugcacuccagccugggcgacag

SEQ ID NO: 48054 - RNA, 24 nt, Human
ugcacuccagccugggcgacagag

SEQ ID NO: 48055 - RNA, 22 nt, Human
ugcccagaaagggcagccggga

SEQ ID NO: 48056 - RNA, 23 nt, Human
ugcccagaaagggcagccgggau

SEQ ID NO: 48057 - RNA, 23 nt, Human
ugccuauaaucucagcuacucgg

SEQ ID NO: 48058 - RNA, 24 nt, Human
ugccuauaaucucagcuacucggg

SEQ ID NO: 48059 - RNA, 27 nt, Human
ugccugcccugucucugccuucuuccg

SEQ ID NO: 48060 - RNA, 18 nt, Human
ugccugugucuucugcag

SEQ ID NO: 48061 - RNA, 19 nt, Human
ugccugugucuucugcagc

SEQ ID NO: 48062 - RNA, 24 nt, Human
uggaucaccuaaggucaggaguuc

SEQ ID NO: 48063 - RNA, 27 nt, Human
uggaucaccuaaggucaggaguucgag

SEQ ID NO: 48064 - RNA, 22 nt, Human
uggcaggagccuguaaucccag

SEQ ID NO: 48065 - RNA, 24 nt, Human
uggccaacauggugaaaccccguc

SEQ ID NO: 48066 - RNA, 24 nt, Human
uggccaacauggugaaacccuguc

SEQ ID NO: 48067 - RNA, 21 nt, Human
uggcucacaccuguaauccca

SEQ ID NO: 48068 - RNA, 24 nt, Human
uggcucacaccuguaaucccagca

SEQ ID NO: 48069 - RNA, 24 nt, Human
uggcucacgccuguaaucccagca

SEQ ID NO: 48070 - RNA, 19 nt, Human
ugggaggccgaggcagguc

SEQ ID NO: 48071 - RNA, 20 nt, Human
ugggaggccgaggcaggucg

SEQ ID NO: 48072 - RNA, 25 nt, Human
ugggcuugggagaggugcccagggg

SEQ ID NO: 48073 - RNA, 24 nt, Human
ugguggcaggagccuguaauccca

SEQ ID NO: 48074 - RNA, 24 nt, Human
ugguggcucacaccuguaauccca

SEQ ID NO: 48075 - RNA, 18 nt, Human
ugucugucagccccuucc

SEQ ID NO: 48076 - RNA, 19 nt, Human
uuagccgggcgugguggua

SEQ ID NO: 48077 - RNA, 24 nt, Human
uuagccgggcguggugguaggugc

SEQ ID NO: 48078 - RNA, 18 nt, Human
uuagcugggcgugguggc

SEQ ID NO: 48079 - RNA, 27 nt, Human
uucacacacacacacacacgcauacac

SEQ ID NO: 48080 - RNA, 27 nt, Human
uucccuggugcuaaauaaaagugaaua

SEQ ID NO: 48081 - RNA, 24 nt, Human
uucucuggccucucccucuguagg

SEQ ID NO: 48082 - RNA, 19 nt, Human
uugcagugagcugaaauca

SEQ ID NO: 48083 - RNA, 30 nt, Human
uugggcguggccaggcacgguggcucacgg

SEQ ID NO: 48084 - RNA, 21 nt, Human
uugucucucccugccuguguc

SEQ ID NO: 48085 - RNA, 23 nt, Human
uugugccauugcacuccagccug

SEQ ID NO: 48086 - RNA, 23 nt, Human
uuuccuagccccagggugagggc

SEQ ID NO: 48087 - RNA, 26 nt, Human
aaaauaaacucucaugagcuuguaga

SEQ ID NO: 48088 - RNA, 22 nt, Human
aaaauacugaaaacagcaagac

SEQ ID NO: 48089 - RNA, 23 nt, Human
aaacaaaaacaacaacuuucuga

SEQ ID NO: 48090 - RNA, 27 nt, Human
aaacaaaaacaacaacuuucugaaaau

SEQ ID NO: 48091 - RNA, 22 nt, Human
aaacacuuacggguacaaucaa

SEQ ID NO: 48092 - RNA, 22 nt, Human
aaacaugaaucauugauaaacc

SEQ ID NO: 48093 - RNA, 24 nt, Human
aaacauuguaggucuuacugaacc

SEQ ID NO: 48094 - RNA, 26 nt, Human
aaccacuucucaauguggcuaacuac

SEQ ID NO: 48095 - RNA, 21 nt, Human
aacuaccaagugaucuuuaau

SEQ ID NO: 48096 - RNA, 26 nt, Human
aagaaaaagguggagaaaagggaccc

SEQ ID NO: 48097 - RNA, 23 nt, Human
aagagaagcagaguaggagacaa

SEQ ID NO: 48098 - RNA, 19 nt, Human
aauacugaaaacagcaaga

SEQ ID NO: 48099 - RNA, 22 nt, Human
aauuuagacauacauuccucag

SEQ ID NO: 48100 - RNA, 24 nt, Human
acaaaaacaacaacuuucugaaaa

SEQ ID NO: 48101 - RNA, 25 nt, Human
acaaaacaaauaagcaaacacaaac

SEQ ID NO: 48102 - RNA, 19 nt, Human
acaaacaguaagaagaagc

SEQ ID NO: 48103 - RNA, 19 nt, Human
acaacaaaagaaaucccaa

SEQ ID NO: 48104 - RNA, 21 nt, Human
acagagagcagauucugccca

SEQ ID NO: 48105 - RNA, 21 nt, Human
acaugucaucacucaaacacu

SEQ ID NO: 48106 - RNA, 20 nt, Human
accacgacugcaucggugcu

SEQ ID NO: 48107 - RNA, 20 nt, Human
accaggggauauaaagugac

SEQ ID NO: 48108 - RNA, 22 nt, Human
acccuugaacaaaacaaauaag

SEQ ID NO: 48109 - RNA, 21 nt, Human
acuuuuuggcauuaaccacau

SEQ ID NO: 48110 - RNA, 21 nt, Human
agaccuccuguucaccacgac

SEQ ID NO: 48111 - RNA, 21 nt, Human
agagagaaaguaguugugaaa

SEQ ID NO: 48112 - RNA, 21 nt, Human
aguaagagaagcagaguagga

SEQ ID NO: 48113 - RNA, 19 nt, Human
aguguuucuuguaauccca

SEQ ID NO: 48114 - RNA, 19 nt, Human
cacacacacacuugcuugc

SEQ ID NO: 48115 - RNA, 23 nt, Human
cacacgcaaacccuacuucuaca

SEQ ID NO: 48116 - RNA, 19 nt, Human
cacauccucuuuuggucac

SEQ ID NO: 48117 - RNA, 18 nt, Human
cauccugaauucuagaca

SEQ ID NO: 48118 - RNA, 20 nt, Human
caucuuauuaaaacagcagc

SEQ ID NO: 48119 - RNA, 22 nt, Human
cccaaugaaaucaaacaacuuu

SEQ ID NO: 48120 - RNA, 28 nt, Human
ccuguagucagaaaauauaccggggucc

SEQ ID NO: 48121 - RNA, 21 nt, Human
cuccuaauucucuuugcacag

SEQ ID NO: 48122 - RNA, 22 nt, Human
gaagcagaguaggagacaacua

SEQ ID NO: 48123 - RNA, 23 nt, Human
gccccuagcauccugaauucuag

SEQ ID NO: 48124 - RNA, 22 nt, Human
ggagagagaaaguaguugugaa

SEQ ID NO: 48125 - RNA, 23 nt, Human
ggguacaaucaagugcuuuccag

SEQ ID NO: 48126 - RNA, 23 nt, Human
guaugaucacacacacacacgca

SEQ ID NO: 48127 - RNA, 18 nt, Human
gucaagaaauacaaaaca

SEQ ID NO: 48128 - RNA, 23 nt, Human
guugugagguuggugaugggggg

SEQ ID NO: 48129 - RNA, 26 nt, Human
uaaaauaagucaagaaauacaaaaca

SEQ ID NO: 48130 - RNA, 21 nt, Human
uaaaauauccacagcucuuuc

SEQ ID NO: 48131 - RNA, 18 nt, Human
uaaacaggcuauggaaac

SEQ ID NO: 48132 - RNA, 26 nt, Human
uaaacaggcuauggaaacaaaaacaa

SEQ ID NO: 48133 - RNA, 26 nt, Human
uaaauugaaaacacagugaaauacga

SEQ ID NO: 48134 - RNA, 21 nt, Human
uaacaauaggcacauuuggca

SEQ ID NO: 48135 - RNA, 20 nt, Human
uaaccucucuccuaauucuc

SEQ ID NO: 48136 - RNA, 24 nt, Human
uaacucccaaguuuuucuauauug

SEQ ID NO: 48137 - RNA, 23 nt, Human
uaagcaaacacaaacgcauuuua

SEQ ID NO: 48138 - RNA, 23 nt, Human
uaaguaaaugaacccguguaugu

SEQ ID NO: 48139 - RNA, 21 nt, Human
uaauaaaaauaaacucucaug

SEQ ID NO: 48140 - RNA, 22 nt, Human
uacaaucaagugcuuuccaguu

SEQ ID NO: 48141 - RNA, 23 nt, Human
uacaucuuauuaaaacagcagca

SEQ ID NO: 48142 - RNA, 21 nt, Human
uaccaguguugaauguguugg

SEQ ID NO: 48143 - RNA, 24 nt, Human
uaccugaaaaaaauacaggcaguc

SEQ ID NO: 48144 - RNA, 22 nt, Human
uagaacucaaacagugguuccc

SEQ ID NO: 48145 - RNA, 23 nt, Human
uauuuacuuuucaaaauuucuca

SEQ ID NO: 48146 - RNA, 21 nt, Human
ucacagagagcagauucugcc

SEQ ID NO: 48147 - RNA, 18 nt, Human
ucagaugaaagcucugga

SEQ ID NO: 48148 - RNA, 22 nt, Human
ucagucaaucuagugagacuca

SEQ ID NO: 48149 - RNA, 21 nt, Human
uccaauccauaucaucuucuc

SEQ ID NO: 48150 - RNA, 21 nt, Human
uccauuucucugaauuucagu

SEQ ID NO: 48151 - RNA, 28 nt, Human
ucggugcugaauccuccaggaccacggu

SEQ ID NO: 48152 - RNA, 21 nt, Human
ucugccaucuucaaauguccc

SEQ ID NO: 48153 - RNA, 21 nt, Human
ucuucaaauguccccugauuu

SEQ ID NO: 48154 - RNA, 21 nt, Human
ugaaaaugauuaugauaccau

SEQ ID NO: 48155 - RNA, 18 nt, Human
ugaacaaaacaaauaagc

SEQ ID NO: 48156 - RNA, 22 nt, Human
ugacaagggggagacaguucug

SEQ ID NO: 48157 - RNA, 24 nt, Human
ugacaaugucacugaagcaugacu

SEQ ID NO: 48158 - RNA, 22 nt, Human
ugagggaaacaugaaucauuga

SEQ ID NO: 48159 - RNA, 20 nt, Human
ugauagaaaacuugcugugu

SEQ ID NO: 48160 - RNA, 18 nt, Human
ugcccgcggggaggggcu

SEQ ID NO: 48161 - RNA, 21 nt, Human
ugcccuuggcauugggugauc

SEQ ID NO: 48162 - RNA, 18 nt, Human
ugcuaugaaguuaacggg

SEQ ID NO: 48163 - RNA, 19 nt, Human
uggaaacaaaaacaacaac

SEQ ID NO: 48164 - RNA, 28 nt, Human
uggcuaacuaccaagugaucuuuaaugu

SEQ ID NO: 48165 - RNA, 19 nt, Human
ugguuuuguaaaacaauua

SEQ ID NO: 48166 - RNA, 27 nt, Human
uguaaaacaauuauuuguuuuaaaagc

SEQ ID NO: 48167 - RNA, 19 nt, Human
ugugcuuauaaaauaauuu

SEQ ID NO: 48168 - RNA, 22 nt, Human
uguuguugggaauauaaccaca

SEQ ID NO: 48169 - RNA, 22 nt, Human
uucacaacaaaagaaaucccaa

SEQ ID NO: 48170 - RNA, 20 nt, Human
uuccaguaaaauauccacag

SEQ ID NO: 48171 - RNA, 19 nt, Human
uugacaaugucacugaagc

SEQ ID NO: 48172 - RNA, 20 nt, Human
uuggagaaguagccccuagc

SEQ ID NO: 48173 - RNA, 19 nt, Human
uuuguuauuugcuaugaag

SEQ ID NO: 48174 - RNA, 20 nt, Human
uuuuuggcauuaaccacauu

SEQ ID NO: 48175 - RNA, 18 nt, Human
uuuuuuuuuuuuuuuuug

SEQ ID NO: 48176 - RNA, 19 nt, Human
aagaaguugcaucugugau

SEQ ID NO: 48177 - RNA, 22 nt, Human
aggcaaacagcccaccuucaag

SEQ ID NO: 48178 - RNA, 18 nt, Human
augucugauucuugcuca

SEQ ID NO: 48179 - RNA, 19 nt, Human
caccagcagagacacucau

SEQ ID NO: 48180 - RNA, 22 nt, Human
cuucaagauagucuugggagaa

SEQ ID NO: 48181 - RNA, 19 nt, Human
cuugcucauuuucuuuuuu

SEQ ID NO: 48182 - RNA, 23 nt, Human
ugccaagauguauuuuaccaaca

SEQ ID NO: 48183 - RNA, 22 nt, Human
ugggagaagcaccagcagagac

SEQ ID NO: 48184 - RNA, 18 nt, Human
ugucugauucuugcucau

SEQ ID NO: 48185 - RNA, 22 nt, Human
uucacgaaaggcaaacagccca

SEQ ID NO: 48186 - RNA, 24 nt, Human
uucuugcucauuuucuuuuuuaaa

SEQ ID NO: 48187 - RNA, 21 nt, Human
auaguuuagggaaauaaguca

SEQ ID NO: 48188 - RNA, 23 nt, Human
cuggagcacacugaacaugcgcc

SEQ ID NO: 48189 - RNA, 18 nt, Human
gccaagagcuggagcaca

SEQ ID NO: 48190 - RNA, 22 nt, Human
uccccuggagggagaacgccaa

SEQ ID NO: 48191 - RNA, 18 nt, Human
ugcgccgcgagccagcac

SEQ ID NO: 48192 - RNA, 22 nt, Human
aaaagagggagagagaguggag

SEQ ID NO: 48193 - RNA, 22 nt, Human
acaagacuggccccugcccccc

SEQ ID NO: 48194 - RNA, 22 nt, Human
accccgggaagcaccgaguggg

SEQ ID NO: 48195 - RNA, 22 nt, Human
acccguccgccacccgcccccc

SEQ ID NO: 48196 - RNA, 23 nt, Human
acuauucccguuuccccuccccu

SEQ ID NO: 48197 - RNA, 21 nt, Human
agaaaaaaaaauugggaugaa

SEQ ID NO: 48198 - RNA, 19 nt, Human
agagggagagagaguggag

SEQ ID NO: 48199 - RNA, 25 nt, Human
agcacaagacuggccccugcccccc

SEQ ID NO: 48200 - RNA, 23 nt, Human
agcuggccccggcccgcgugcgc

SEQ ID NO: 48201 - RNA, 24 nt, Human
aggaaaagcggaaucaaucgggug

SEQ ID NO: 48202 - RNA, 23 nt, Human
auacccucuccucuucccccuua

SEQ ID NO: 48203 - RNA, 20 nt, Human
caaaaccaaucaggcagcga

SEQ ID NO: 48204 - RNA, 26 nt, Human
caggagagggaagaagcccgccaggc

SEQ ID NO: 48205 - RNA, 23 nt, Human
caggagcacaagacuggccccug

SEQ ID NO: 48206 - RNA, 23 nt, Human
caguccacuggacaguugaugau

SEQ ID NO: 48207 - RNA, 18 nt, Human
ccaagggacccagucacc

SEQ ID NO: 48208 - RNA, 20 nt, Human
ccacaguggagacccuuguc

SEQ ID NO: 48209 - RNA, 21 nt, Human
ccacaguggagacccuugucu

SEQ ID NO: 48210 - RNA, 21 nt, Human
cccacguuaaccccuaccaug

SEQ ID NO: 48211 - RNA, 21 nt, Human
ccccaccccgggaagcaccga

SEQ ID NO: 48212 - RNA, 24 nt, Human
ccccauacccucuccucuuccccc

SEQ ID NO: 48213 - RNA, 22 nt, Human
cccgagccgagcgcgagcagcu

SEQ ID NO: 48214 - RNA, 24 nt, Human
cccgccccccugaagucggggccg

SEQ ID NO: 48215 - RNA, 24 nt, Human
cccgccccccugaagugucaacua

SEQ ID NO: 48216 - RNA, 18 nt, Human
cccgcgccagccccgcgc

SEQ ID NO: 48217 - RNA, 23 nt, Human
cccgcgccgccgcccccgagccg

SEQ ID NO: 48218 - RNA, 21 nt, Human
cccggccgcucucuccaggaa

SEQ ID NO: 48219 - RNA, 19 nt, Human
cccguccgccacccgcccc

SEQ ID NO: 48220 - RNA, 22 nt, Human
cccguccgccacccgccccccu

SEQ ID NO: 48221 - RNA, 18 nt, Human
cccugggaucagagagag

SEQ ID NO: 48222 - RNA, 22 nt, Human
cccuuuagaaagagucccuggg

SEQ ID NO: 48223 - RNA, 21 nt, Human
ccgagcaagguccaguccacu

SEQ ID NO: 48224 - RNA, 19 nt, Human
ccgcccccgagccgagcgc

SEQ ID NO: 48225 - RNA, 19 nt, Human
ccgcgcagccgccuccugc

SEQ ID NO: 48226 - RNA, 23 nt, Human
ccgcgcagccgccuccugccucc

SEQ ID NO: 48227 - RNA, 21 nt, Human
ccguccuccgccccugcccgc

SEQ ID NO: 48228 - RNA, 24 nt, Human
ccucaguaccgcauguccaggagc

SEQ ID NO: 48229 - RNA, 24 nt, Human
ccucccgcgccgccgcccccgagc

SEQ ID NO: 48230 - RNA, 26 nt, Human
cgagacccguccgccacccgcccccc

SEQ ID NO: 48231 - RNA, 21 nt, Human
cgcagccgccuccugccuccu

SEQ ID NO: 48232 - RNA, 18 nt, Human
cgcccccgagccgagcgc

SEQ ID NO: 48233 - RNA, 20 nt, Human
cgccuccugccuccucccca

SEQ ID NO: 48234 - RNA, 20 nt, Human
cgcuuucuccucugcggcca

SEQ ID NO: 48235 - RNA, 19 nt, Human
cggcccgagcgcggcccgg

SEQ ID NO: 48236 - RNA, 19 nt, Human
cggcccgcggggcccggcg

SEQ ID NO: 48237 - RNA, 23 nt, Human
cggcccgcggggcccggcggcgg

SEQ ID NO: 48238 - RNA, 23 nt, Human
cguccuccgccccugcccgcgcc

SEQ ID NO: 48239 - RNA, 21 nt, Human
cguggacccacguuaaccccu

SEQ ID NO: 48240 - RNA, 21 nt, Human
cucccgcgccgccgcccccga

SEQ ID NO: 48241 - RNA, 20 nt, Human
cuccuccccaccccgggaag

SEQ ID NO: 48242 - RNA, 25 nt, Human
cucuacgcguggacccacguuaacc

SEQ ID NO: 48243 - RNA, 20 nt, Human
cuggacaguugaugauaggg

SEQ ID NO: 48244 - RNA, 20 nt, Human
cuuccuucccggcuugacau

SEQ ID NO: 48245 - RNA, 18 nt, Human
gacccuugucugcaccuc

SEQ ID NO: 48246 - RNA, 19 nt, Human
gagcagcuggccccggccc

SEQ ID NO: 48247 - RNA, 19 nt, Human
gccaagggacccagucacc

SEQ ID NO: 48248 - RNA, 18 nt, Human
gccccauacccucuccuc

SEQ ID NO: 48249 - RNA, 21 nt, Human
gcccgcuccucccgcgccgcc

SEQ ID NO: 48250 - RNA, 20 nt, Human
gcgcaggagagggaagaagc

SEQ ID NO: 48251 - RNA, 19 nt, Human
ggagaccccaaccgcuuuc

SEQ ID NO: 48252 - RNA, 19 nt, Human
ggcccggccgcucucucca

SEQ ID NO: 48253 - RNA, 23 nt, Human
gggagaccccaaccgcuuucucc

SEQ ID NO: 48254 - RNA, 19 nt, Human
gggcaggugcuggcggccc

SEQ ID NO: 48255 - RNA, 22 nt, Human
guacuggagggguugcggcaau

SEQ ID NO: 48256 - RNA, 23 nt, Human
gugcgcccguccuccgccccugc

SEQ ID NO: 48257 - RNA, 19 nt, Human
guggagacccuugucugca

SEQ ID NO: 48258 - RNA, 24 nt, Human
uacccucuccucuucccccuuagg

SEQ ID NO: 48259 - RNA, 24 nt, Human
uacgcguggacccacguuaacccc

SEQ ID NO: 48260 - RNA, 18 nt, Human
ucaggcagcgagacccgu

SEQ ID NO: 48261 - RNA, 22 nt, Human
uccaggaugcaucuuccgaaga

SEQ ID NO: 48262 - RNA, 20 nt, Human
ucccccggcggccccucugg

SEQ ID NO: 48263 - RNA, 22 nt, Human
ucccccuuaggaauuugugcag

SEQ ID NO: 48264 - RNA, 23 nt, Human
ucccguuuccccuccccugggau

SEQ ID NO: 48265 - RNA, 21 nt, Human
ucccugggagaccccaaccgc

SEQ ID NO: 48266 - RNA, 23 nt, Human
uccuccccaccccgggaagcacc

SEQ ID NO: 48267 - RNA, 19 nt, Human
ucuccaggaaaagcggaau

SEQ ID NO: 48268 - RNA, 21 nt, Human
ucuccaggaaaagcggaauca

SEQ ID NO: 48269 - RNA, 23 nt, Human
ucucucacuauucccguuucccc

SEQ ID NO: 48270 - RNA, 30 nt, Human
ucugcaccucaguaccgcauguccaggagg

SEQ ID NO: 48271 - RNA, 20 nt, Human
ugaaaagagggagagagagu

SEQ ID NO: 48272 - RNA, 21 nt, Human
ugauagggucugccgccccau

SEQ ID NO: 48273 - RNA, 18 nt, Human
ugcccgcgccagccccgc

SEQ ID NO: 48274 - RNA, 23 nt, Human
ugggaugaaaugcaaaaccaauc

SEQ ID NO: 48275 - RNA, 25 nt, Human
uucuuuccuuucccucuacgcgugg

SEQ ID NO: 48276 - RNA, 23 nt, Human
uugugcaguacuggagggguugc

SEQ ID NO: 48277 - RNA, 26 nt, Human
aaacagauagagagcaccagaacuag

SEQ ID NO: 48278 - RNA, 19 nt, Human
acaaggguuugucuuaaac

SEQ ID NO: 48279 - RNA, 23 nt, Human
aggcagagaacuggaguuguuuu

SEQ ID NO: 48280 - RNA, 22 nt, Human
agggagacaagggagaaaggga

SEQ ID NO: 48281 - RNA, 21 nt, Human
agggagaggugggagaaagga

SEQ ID NO: 48282 - RNA, 21 nt, Human
caagcccaaagugcccugagg

SEQ ID NO: 48283 - RNA, 21 nt, Human
caaggaaguaggaaacuucau

SEQ ID NO: 48284 - RNA, 21 nt, Human
cagugagugaucuagccaagc

SEQ ID NO: 48285 - RNA, 19 nt, Human
cccaaagugcccugagguc

SEQ ID NO: 48286 - RNA, 24 nt, Human
cccaaagugcccugaggucacugg

SEQ ID NO: 48287 - RNA, 23 nt, Human
cugcaacuucaaaaucacaacag

SEQ ID NO: 48288 - RNA, 18 nt, Human
gacuucagaugugagcua

SEQ ID NO: 48289 - RNA, 21 nt, Human
gaugugagcuaguauagcuuu

SEQ ID NO: 48290 - RNA, 20 nt, Human
ggagaaagggagagguggga

SEQ ID NO: 48291 - RNA, 21 nt, Human
gugcaggcagagaacuggagu

SEQ ID NO: 48292 - RNA, 19 nt, Human
ucaaagacaaggaaguagg

SEQ ID NO: 48293 - RNA, 20 nt, Human
ucacaacagaagcuacaacc

SEQ ID NO: 48294 - RNA, 21 nt, Human
ucacugguagacuaguuacau

SEQ ID NO: 48295 - RNA, 23 nt, Human
ugacuucagaugugagcuaguau

SEQ ID NO: 48296 - RNA, 22 nt, Human
ugcccugaggucacugguagac

SEQ ID NO: 48297 - RNA, 19 nt, Human
uuuuuuuuuuuuugggcag

SEQ ID NO: 48298 - RNA, 24 nt, Human
uuuuuuuuuuuuuuuuuuuuuggg

SEQ ID NO: 48299 - RNA, 20 nt, Human
aaaaaaaaaaggagaaaaaa

SEQ ID NO: 48300 - RNA, 20 nt, Human
aaaaaaaaauccccugacca

SEQ ID NO: 48301 - RNA, 19 nt, Human
aaaaaaauccccugaccau

SEQ ID NO: 48302 - RNA, 23 nt, Human
aaaaacaaaagacuggacaaaga

SEQ ID NO: 48303 - RNA, 24 nt, Human
aaaaacaaaagacuggacaaagaa

SEQ ID NO: 48304 - RNA, 20 nt, Human
aaaaaccaacgaagucccuu

SEQ ID NO: 48305 - RNA, 18 nt, Human
aaaaagaaaaaaaaaagg

SEQ ID NO: 48306 - RNA, 22 nt, Human
aaaaagaaaaaaaaaaggagaa

SEQ ID NO: 48307 - RNA, 22 nt, Human
aaaaaugaaagcacuuggauaa

SEQ ID NO: 48308 - RNA, 22 nt, Human
aaaacaaaagacuggacaaaga

SEQ ID NO: 48309 - RNA, 21 nt, Human
aaaagaaaaaaaaaaggagaa

SEQ ID NO: 48310 - RNA, 25 nt, Human
aaaagaaaaaaaaaaggagaaaaaa

SEQ ID NO: 48311 - RNA, 27 nt, Human
aaacaaaagacuggacaaaggggaccc

SEQ ID NO: 48312 - RNA, 20 nt, Human
aaaccaacgaagucccuuca

SEQ ID NO: 48313 - RNA, 21 nt, Human
aaaccaacgaagucccuucaa

SEQ ID NO: 48314 - RNA, 23 nt, Human
aaagaagaggcagcuggccagag

SEQ ID NO: 48315 - RNA, 28 nt, Human
aaagacuggacaaagaaagugaagauaa

SEQ ID NO: 48316 - RNA, 25 nt, Human
aaagugcaggaugggaggauggcug

SEQ ID NO: 48317 - RNA, 24 nt, Human
aaauggaaacaaaucaaaacaaaa

SEQ ID NO: 48318 - RNA, 21 nt, Human
aacaaagucccuucaacauga

SEQ ID NO: 48319 - RNA, 20 nt, Human
aacagaaacugaauacuaca

SEQ ID NO: 48320 - RNA, 19 nt, Human
aacagcuucaagcacugac

SEQ ID NO: 48321 - RNA, 23 nt, Human
aaccaagacuccaaaaaaccaac

SEQ ID NO: 48322 - RNA, 24 nt, Human
aaccaagacuccaaaaaaccaacg

SEQ ID NO: 48323 - RNA, 18 nt, Human
aaccugcccuuucaccca

SEQ ID NO: 48324 - RNA, 18 nt, Human
aaccugcccuuucaccca

SEQ ID NO: 48325 - RNA, 21 nt, Human
aaccugcccuuucacccacaa

SEQ ID NO: 48326 - RNA, 22 nt, Human
aagaagaggcagcuggccagag

SEQ ID NO: 48327 - RNA, 18 nt, Human
aagacuccaaaaaaccaa

SEQ ID NO: 48328 - RNA, 22 nt, Human
aagcaggauaaaugggaaccca

SEQ ID NO: 48329 - RNA, 23 nt, Human
aagcaggauaaaugggaacccaa

SEQ ID NO: 48330 - RNA, 19 nt, Human
aaggcaugcccgugcuccc

SEQ ID NO: 48331 - RNA, 21 nt, Human
aagucacuguuaucaagggac

SEQ ID NO: 48332 - RNA, 20 nt, Human
aauggaaaaguaugccugaa

SEQ ID NO: 48333 - RNA, 22 nt, Human
acaaaggauucuaccucacaga

SEQ ID NO: 48334 - RNA, 23 nt, Human
acaacagaaacugaauacuacag

SEQ ID NO: 48335 - RNA, 20 nt, Human
acaaccaagacuccaaaaaa

SEQ ID NO: 48336 - RNA, 23 nt, Human
acaaccaagacuccaaaaaacca

SEQ ID NO: 48337 - RNA, 18 nt, Human
acagaaacugaauacuac

SEQ ID NO: 48338 - RNA, 24 nt, Human
accaaauccuuuauguucaccucu

SEQ ID NO: 48339 - RNA, 21 nt, Human
accaagacuccaaaaaaccaa

SEQ ID NO: 48340 - RNA, 23 nt, Human
accacagaccucucugcccugga

SEQ ID NO: 48341 - RNA, 21 nt, Human
accucucucacacccuaguau

SEQ ID NO: 48342 - RNA, 22 nt, Human
acuccgcacuggaaguggcccc

SEQ ID NO: 48343 - RNA, 24 nt, Human
acugaaaccuaaucaagaccgcaa

SEQ ID NO: 48344 - RNA, 25 nt, Human
acugcagccaucaucacaguacccg

SEQ ID NO: 48345 - RNA, 22 nt, Human
acugcaguuuucaacuccuacc

SEQ ID NO: 48346 - RNA, 22 nt, Human
acuuccguggcacugggaacuu

SEQ ID NO: 48347 - RNA, 22 nt, Human
agacugauuuacugugccccca

SEQ ID NO: 48348 - RNA, 21 nt, Human
agagaggccaaacaaccugag

SEQ ID NO: 48349 - RNA, 24 nt, Human
agaggcaggcucagcuccccaagg

SEQ ID NO: 48350 - RNA, 25 nt, Human
agaggcaggcucagcuccccaaggg

SEQ ID NO: 48351 - RNA, 24 nt, Human
agaggggucugcguaauccacaaa

SEQ ID NO: 48352 - RNA, 18 nt, Human
agcaaucccaaagaaagc

SEQ ID NO: 48353 - RNA, 26 nt, Human
agcaucacaaaacuggacugcagcca

SEQ ID NO: 48354 - RNA, 22 nt, Human
agccugaagaggagaggggcug

SEQ ID NO: 48355 - RNA, 24 nt, Human
agcuggaagcuuggcaauauucca

SEQ ID NO: 48356 - RNA, 27 nt, Human
aggagagaggcaggcucagcuccugaa

SEQ ID NO: 48357 - RNA, 18 nt, Human
agguauagacaaaggauu

SEQ ID NO: 48358 - RNA, 24 nt, Human
aguaaaggaaacagcuucaagcac

SEQ ID NO: 48359 - RNA, 28 nt, Human
agucacaaccaagacuccaaaaaaccaa

SEQ ID NO: 48360 - RNA, 24 nt, Human
agucuaugcuugggcucuucccug

SEQ ID NO: 48361 - RNA, 26 nt, Human
auagaauaaaagcaaagaugugaaug

SEQ ID NO: 48362 - RNA, 21 nt, Human
aucugcaggcuccaaucacac

SEQ ID NO: 48363 - RNA, 20 nt, Human
augcccaagauggaccagag

SEQ ID NO: 48364 - RNA, 23 nt, Human
auggaaacaaaucaaaacaaaac

SEQ ID NO: 48365 - RNA, 19 nt, Human
caaagaaugcacaggagcc

SEQ ID NO: 48366 - RNA, 23 nt, Human
caacacucuaaaagccaacaaag

SEQ ID NO: 48367 - RNA, 24 nt, Human
caacacucuaaaagccaacaaagu

SEQ ID NO: 48368 - RNA, 20 nt, Human
caacagaaacugaauacuac

SEQ ID NO: 48369 - RNA, 22 nt, Human
caaccaagacuccaaaaaacca

SEQ ID NO: 48370 - RNA, 24 nt, Human
caaccaagacuccaaaaaaccaac

SEQ ID NO: 48371 - RNA, 24 nt, Human
caagacuccaaaaaaccaacgaag

SEQ ID NO: 48372 - RNA, 21 nt, Human
caagauggaccagagaggcca

SEQ ID NO: 48373 - RNA, 22 nt, Human
caaggcaugcccgugcucccuu

SEQ ID NO: 48374 - RNA, 24 nt, Human
cacaacuacugcuuucuaugucaa

SEQ ID NO: 48375 - RNA, 19 nt, Human
cacagaccucucugcccug

SEQ ID NO: 48376 - RNA, 25 nt, Human
caccaaauccuuuauguucaccucu

SEQ ID NO: 48377 - RNA, 21 nt, Human
cacucuaaaagccaacaaagu

SEQ ID NO: 48378 - RNA, 21 nt, Human
cacuugggggaaaaaaggggg

SEQ ID NO: 48379 - RNA, 22 nt, Human
cagagagccagacuccacagag

SEQ ID NO: 48380 - RNA, 20 nt, Human
cagcaggugacaacccugua

SEQ ID NO: 48381 - RNA, 21 nt, Human
cagcaggugacaacccuguag

SEQ ID NO: 48382 - RNA, 27 nt, Human
cagcaucacaaaacuggacugcagcca

SEQ ID NO: 48383 - RNA, 19 nt, Human
cagcuggcuaaagugcagg

SEQ ID NO: 48384 - RNA, 22 nt, Human
caggagacaggcgccacuuccc

SEQ ID NO: 48385 - RNA, 20 nt, Human
caggaugggaggauggcugg

SEQ ID NO: 48386 - RNA, 22 nt, Human
caggaugggaggauggcugggc

SEQ ID NO: 48387 - RNA, 19 nt, Human
cagggaagcagcuuuccuu

SEQ ID NO: 48388 - RNA, 23 nt, Human
caguucagacaaaucaacuacaa

SEQ ID NO: 48389 - RNA, 27 nt, Human
caguucagacaaaucaacuacaaaaau

SEQ ID NO: 48390 - RNA, 23 nt, Human
caguuccuugggaugcuuuggug

SEQ ID NO: 48391 - RNA, 23 nt, Human
caucacaaaacuggacugcagcc

SEQ ID NO: 48392 - RNA, 18 nt, Human
caucacaguacccgaguc

SEQ ID NO: 48393 - RNA, 21 nt, Human
ccacggcaccaagucuaugcu

SEQ ID NO: 48394 - RNA, 19 nt, Human
ccaguuaaagaagaggcag

SEQ ID NO: 48395 - RNA, 21 nt, Human
ccccacgccuccgcuacuccg

SEQ ID NO: 48396 - RNA, 19 nt, Human
cccccacgccuccgcuacu

SEQ ID NO: 48397 - RNA, 23 nt, Human
cccccacgccuccgcuacuccgc

SEQ ID NO: 48398 - RNA, 18 nt, Human
cccgacccgccggcggca

SEQ ID NO: 48399 - RNA, 21 nt, Human
ccgcgaggcauugcccggccc

SEQ ID NO: 48400 - RNA, 22 nt, Human
ccugcagcuggcuaaagugcag

SEQ ID NO: 48401 - RNA, 25 nt, Human
ccuggcccgaccgcugguccccugg

SEQ ID NO: 48402 - RNA, 21 nt, Human
cgccagccccucgaggccccc

SEQ ID NO: 48403 - RNA, 19 nt, Human
cggcccgacccgccggcgg

SEQ ID NO: 48404 - RNA, 18 nt, Human
cggggcgucggcacggga

SEQ ID NO: 48405 - RNA, 18 nt, Human
cgggucugcgcgccgggc

SEQ ID NO: 48406 - RNA, 25 nt, Human
cuacaacagaaacugaauacuacag

SEQ ID NO: 48407 - RNA, 22 nt, Human
cuccaaaaaaccaacgaagucc

SEQ ID NO: 48408 - RNA, 21 nt, Human
cuccgcacuggaaguggcccc

SEQ ID NO: 48409 - RNA, 22 nt, Human
cugaaaccuaaucaagaccgca

SEQ ID NO: 48410 - RNA, 18 nt, Human
cugaagaggagaggggcu

SEQ ID NO: 48411 - RNA, 19 nt, Human
cugaugcugagaaccacag

SEQ ID NO: 48412 - RNA, 21 nt, Human
cugaugcugagaaccacagac

SEQ ID NO: 48413 - RNA, 27 nt, Human
cugcgcgccgggcccaagauggcuccc

SEQ ID NO: 48414 - RNA, 19 nt, Human
cuugggggaaaaaaggggg

SEQ ID NO: 48415 - RNA, 24 nt, Human
gaaugcuacgaccuaccucucuca

SEQ ID NO: 48416 - RNA, 25 nt, Human
gacugcagccaucaccacggcacca

SEQ ID NO: 48417 - RNA, 18 nt, Human
gagaagaggcagcuggaa

SEQ ID NO: 48418 - RNA, 21 nt, Human
gagcaggccucuuccacucca

SEQ ID NO: 48419 - RNA, 21 nt, Human
gagggggaaaaggagacauuc

SEQ ID NO: 48420 - RNA, 20 nt, Human
gccuugcccgcccugcagcu

SEQ ID NO: 48421 - RNA, 24 nt, Human
gcuuuaggagaagaggcagcugga

SEQ ID NO: 48422 - RNA, 20 nt, Human
ggaaagaggggaaguagagg

SEQ ID NO: 48423 - RNA, 20 nt, Human
ggagaaccuaaugcccaaga

SEQ ID NO: 48424 - RNA, 19 nt, Human
ggagaagaggcagcuggaa

SEQ ID NO: 48425 - RNA, 22 nt, Human
ggagccagagagccagacucca

SEQ ID NO: 48426 - RNA, 18 nt, Human
ggcccgacccgccggcgg

SEQ ID NO: 48427 - RNA, 24 nt, Human
gggaaaaggagacauucagaucac

SEQ ID NO: 48428 - RNA, 21 nt, Human
gggaaagaggggaaguagagg

SEQ ID NO: 48429 - RNA, 20 nt, Human
gggacacauaaaagcagaau

SEQ ID NO: 48430 - RNA, 21 nt, Human
gggcucuucccugcucugcuc

SEQ ID NO: 48431 - RNA, 21 nt, Human
ggggggccuggccagaccuug

SEQ ID NO: 48432 - RNA, 19 nt, Human
gggggugaguggggguucu

SEQ ID NO: 48433 - RNA, 24 nt, Human
gggggugaguggggguucugaucu

SEQ ID NO: 48434 - RNA, 19 nt, Human
gucacuguuaucaagggac

SEQ ID NO: 48435 - RNA, 19 nt, Human
gucuaugcuugggcucuuc

SEQ ID NO: 48436 - RNA, 23 nt, Human
gugaaugucucuaccagacagag

SEQ ID NO: 48437 - RNA, 18 nt, Human
guucugcaaaggcauccu

SEQ ID NO: 48438 - RNA, 18 nt, Human
uaaaaacaaaagacugga

SEQ ID NO: 48439 - RNA, 19 nt, Human
uaaaaacaaaagacuggac

SEQ ID NO: 48440 - RNA, 22 nt, Human
uaaaaacaaaagacuggacaaa

SEQ ID NO: 48441 - RNA, 19 nt, Human
uaaaaagaaaaaaaaaagg

SEQ ID NO: 48442 - RNA, 21 nt, Human
uaacuucuuagguuucugccu

SEQ ID NO: 48443 - RNA, 22 nt, Human
uaagaucuugggggugaguggg

SEQ ID NO: 48444 - RNA, 19 nt, Human
uaagucacuguuaucaagg

SEQ ID NO: 48445 - RNA, 19 nt, Human
uaagucacuguuaucaagg

SEQ ID NO: 48446 - RNA, 24 nt, Human
uacagagagcauagaauaaaagca

SEQ ID NO: 48447 - RNA, 19 nt, Human
uagcaaucccaaagaaagc

SEQ ID NO: 48448 - RNA, 18 nt, Human
uagccugaagaggagagg

SEQ ID NO: 48449 - RNA, 22 nt, Human
uaggagaagaggcagcuggaaa

SEQ ID NO: 48450 - RNA, 22 nt, Human
uaucugcaggcuccaaucacac

SEQ ID NO: 48451 - RNA, 19 nt, Human
ucagcaguuuggagggaaa

SEQ ID NO: 48452 - RNA, 24 nt, Human
ucagggaugccucgcucucuuccu

SEQ ID NO: 48453 - RNA, 24 nt, Human
ucaguaguccuccugagugugucu

SEQ ID NO: 48454 - RNA, 21 nt, Human
uccacaaaugaaauuaucagu

SEQ ID NO: 48455 - RNA, 19 nt, Human
uccagggaagcagcuuucc

SEQ ID NO: 48456 - RNA, 21 nt, Human
uccagggaagcagcuuuccuu

SEQ ID NO: 48457 - RNA, 20 nt, Human
ucugacacggcucguuucca

SEQ ID NO: 48458 - RNA, 26 nt, Human
ucugacacggcucguuuccagcagau

SEQ ID NO: 48459 - RNA, 18 nt, Human
ucugccucuucacuuggg

SEQ ID NO: 48460 - RNA, 22 nt, Human
ucuguccugugugacucagagg

SEQ ID NO: 48461 - RNA, 27 nt, Human
ucuuagguuucugccucuucacuuggg

SEQ ID NO: 48462 - RNA, 19 nt, Human
ugaacacacgagucaaugu

SEQ ID NO: 48463 - RNA, 21 nt, Human
ugaacacacgagucaauguuc

SEQ ID NO: 48464 - RNA, 19 nt, Human
ugaagauaacagugggcag

SEQ ID NO: 48465 - RNA, 19 nt, Human
ugaagauaacagugggcag

SEQ ID NO: 48466 - RNA, 22 nt, Human
ugacacggcucguuuccagcag

SEQ ID NO: 48467 - RNA, 19 nt, Human
ugaccaacacucuaaaagc

SEQ ID NO: 48468 - RNA, 20 nt, Human
ugacuuagucaacuucccuu

SEQ ID NO: 48469 - RNA, 22 nt, Human
ugacuuagucaacuucccuugg

SEQ ID NO: 48470 - RNA, 20 nt, Human
ugagagccuguguucccagu

SEQ ID NO: 48471 - RNA, 19 nt, Human
ugagcagcucccuuaaccc

SEQ ID NO: 48472 - RNA, 21 nt, Human
ugagcagcucccuuaacccag

SEQ ID NO: 48473 - RNA, 22 nt, Human
ugagggugcuggcucagcacgu

SEQ ID NO: 48474 - RNA, 21 nt, Human
ugcagccaucaucacaguacc

SEQ ID NO: 48475 - RNA, 21 nt, Human
ugcagcuggcuaaagugcagg

SEQ ID NO: 48476 - RNA, 18 nt, Human
ugcccggcccgacccgcc

SEQ ID NO: 48477 - RNA, 22 nt, Human
ugccucgcucucuuccuacaac

SEQ ID NO: 48478 - RNA, 20 nt, Human
ugccuugcccgcccugcagc

SEQ ID NO: 48479 - RNA, 23 nt, Human
ugcuacgaccuaccucucucaca

SEQ ID NO: 48480 - RNA, 18 nt, Human
ugcuugggggucuuccuc

SEQ ID NO: 48481 - RNA, 21 nt, Human
ugcuuugguguucugcaaagg

SEQ ID NO: 48482 - RNA, 18 nt, Human
uggaaaaaugaaagcacu

SEQ ID NO: 48483 - RNA, 23 nt, Human
uggaaacaaaucaaaacaaaacu

SEQ ID NO: 48484 - RNA, 19 nt, Human
uggacugcagccaucacca

SEQ ID NO: 48485 - RNA, 21 nt, Human
uggagaaccuaaugcccaaga

SEQ ID NO: 48486 - RNA, 20 nt, Human
uggcuaaagugcaggauggg

SEQ ID NO: 48487 - RNA, 18 nt, Human
uggcuuaaaaagaaaaaa

SEQ ID NO: 48488 - RNA, 19 nt, Human
ugggaacccaaaguuuuca

SEQ ID NO: 48489 - RNA, 19 nt, Human
ugggggugaguggggguuc

SEQ ID NO: 48490 - RNA, 19 nt, Human
ugugucuagcugacuguua

SEQ ID NO: 48491 - RNA, 20 nt, Human
uguucugcaaaggcauccuu

SEQ ID NO: 48492 - RNA, 21 nt, Human
uucaaagaaugcacaggagcc

SEQ ID NO: 48493 - RNA, 19 nt, Human
uuccagggaagcagcuuuc

SEQ ID NO: 48494 - RNA, 20 nt, Human
uuccagggaagcagcuuucc

SEQ ID NO: 48495 - RNA, 24 nt, Human
uuccuugccuugcccgcccugcag

SEQ ID NO: 48496 - RNA, 22 nt, Human
uuccuugggaugcuuugguguu

SEQ ID NO: 48497 - RNA, 19 nt, Human
uuugcccucugagggggaa

SEQ ID NO: 48498 - RNA, 24 nt, Human
aaagagaccuaaguuuagacagac

SEQ ID NO: 48499 - RNA, 24 nt, Human
aaagcauguaauccaaagccugaa

SEQ ID NO: 48500 - RNA, 21 nt, Human
aagaauuucacacaaaguaau

SEQ ID NO: 48501 - RNA, 24 nt, Human
aagagaccuaaguuuagacagacg

SEQ ID NO: 48502 - RNA, 24 nt, Human
acaaaacacgcuagggggcagaga

SEQ ID NO: 48503 - RNA, 18 nt, Human
acauacagagaacacuga

SEQ ID NO: 48504 - RNA, 23 nt, Human
accugguggucccccgugucccc

SEQ ID NO: 48505 - RNA, 22 nt, Human
acgcaccccauccccuccccac

SEQ ID NO: 48506 - RNA, 22 nt, Human
agaaaagagaccuaaguuuaga

SEQ ID NO: 48507 - RNA, 22 nt, Human
agacggagccguccccuccuca

SEQ ID NO: 48508 - RNA, 23 nt, Human
agagcacuucucucagcuccucu

SEQ ID NO: 48509 - RNA, 19 nt, Human
agauuuacauacagagaac

SEQ ID NO: 48510 - RNA, 21 nt, Human
agccgaauuacauucauagaa

SEQ ID NO: 48511 - RNA, 22 nt, Human
agcguggggaugauaaaaagga

SEQ ID NO: 48512 - RNA, 22 nt, Human
aggaaaaagagccacuguacau

SEQ ID NO: 48513 - RNA, 21 nt, Human
aggaacagagggaacuuaggc

SEQ ID NO: 48514 - RNA, 21 nt, Human
aggcagagcacuucucucagc

SEQ ID NO: 48515 - RNA, 22 nt, Human
aguacagaagcuucuagaggaa

SEQ ID NO: 48516 - RNA, 22 nt, Human
aguugccccuuaagcucuccau

SEQ ID NO: 48517 - RNA, 19 nt, Human
aucugugcacaaugugaag

SEQ ID NO: 48518 - RNA, 19 nt, Human
auguguuuguuuugagaca

SEQ ID NO: 48519 - RNA, 21 nt, Human
caaaucucugagcuuggugga

SEQ ID NO: 48520 - RNA, 23 nt, Human
caaauuaaaagcauguaauccaa

SEQ ID NO: 48521 - RNA, 20 nt, Human
caagugaacacuagaacuca

SEQ ID NO: 48522 - RNA, 18 nt, Human
cacagcccccugcacccc

SEQ ID NO: 48523 - RNA, 19 nt, Human
cacagcccccugcaccccc

SEQ ID NO: 48524 - RNA, 25 nt, Human
cacagcuucgcuaaucccauccuca

SEQ ID NO: 48525 - RNA, 24 nt, Human
caccaugcugggagucugcuccuc

SEQ ID NO: 48526 - RNA, 18 nt, Human
caccccauccccucccca

SEQ ID NO: 48527 - RNA, 19 nt, Human
caccccccaucaugucugc

SEQ ID NO: 48528 - RNA, 19 nt, Human
cacccucuagagccuugga

SEQ ID NO: 48529 - RNA, 20 nt, Human
caccugccccaggucugaug

SEQ ID NO: 48530 - RNA, 23 nt, Human
caccugguggucccccguguccc

SEQ ID NO: 48531 - RNA, 20 nt, Human
cacggaaggccccgagcaac

SEQ ID NO: 48532 - RNA, 26 nt, Human
cacuagaacucacacggaaggccccg

SEQ ID NO: 48533 - RNA, 21 nt, Human
cacugcacuggcaggcagagc

SEQ ID NO: 48534 - RNA, 22 nt, Human
cagaaggggaaaugcugcggca

SEQ ID NO: 48535 - RNA, 18 nt, Human
cagaccaccugcuucugg

SEQ ID NO: 48536 - RNA, 22 nt, Human
cagagacaggaggauuuucaca

SEQ ID NO: 48537 - RNA, 23 nt, Human
cagagacgcuguaaacuggacac

SEQ ID NO: 48538 - RNA, 22 nt, Human
cagcagcacguggucucaccag

SEQ ID NO: 48539 - RNA, 19 nt, Human
cagcaggacugaaguaagc

SEQ ID NO: 48540 - RNA, 28 nt, Human
cagccugaaaggcuccacucucagccgc

SEQ ID NO: 48541 - RNA, 23 nt, Human
caggacacacagucacugcugcg

SEQ ID NO: 48542 - RNA, 22 nt, Human
caguagaacucaauuucuaaac

SEQ ID NO: 48543 - RNA, 18 nt, Human
cauaaaagugaccugaca

SEQ ID NO: 48544 - RNA, 24 nt, Human
cauccccuccccacacugcgcacc

SEQ ID NO: 48545 - RNA, 21 nt, Human
caugcaguuguaacguguggu

SEQ ID NO: 48546 - RNA, 21 nt, Human
caugugcaugacagggccacg

SEQ ID NO: 48547 - RNA, 19 nt, Human
ccacacagggcccucgccu

SEQ ID NO: 48548 - RNA, 19 nt, Human
ccacagcccccugcacccc

SEQ ID NO: 48549 - RNA, 20 nt, Human
ccacagcccccugcaccccc

SEQ ID NO: 48550 - RNA, 23 nt, Human
ccacuguacauguguuuguuuug

SEQ ID NO: 48551 - RNA, 22 nt, Human
ccaugcugggagucugcuccuc

SEQ ID NO: 48552 - RNA, 18 nt, Human
ccaugugcaugacagggc

SEQ ID NO: 48553 - RNA, 22 nt, Human
ccccacacugcgcaccugcccc

SEQ ID NO: 48554 - RNA, 20 nt, Human
ccccaugugcaugacagggc

SEQ ID NO: 48555 - RNA, 21 nt, Human
cccccugcaccccccaucaug

SEQ ID NO: 48556 - RNA, 26 nt, Human
cccccugcaccccccaucaugucugc

SEQ ID NO: 48557 - RNA, 20 nt, Human
ccccgagcaaccacuggccu

SEQ ID NO: 48558 - RNA, 21 nt, Human
ccccgagcaaccacuggccuc

SEQ ID NO: 48559 - RNA, 18 nt, Human
ccccgugucccccuacuc

SEQ ID NO: 48560 - RNA, 26 nt, Human
cccggccgccaaccuggccgcuuggc

SEQ ID NO: 48561 - RNA, 19 nt, Human
ccgccaaccuggccgcuug

SEQ ID NO: 48562 - RNA, 18 nt, Human
ccgccgccgccgccgccg

SEQ ID NO: 48563 - RNA, 18 nt, Human
ccgccgccgccgccgccg

SEQ ID NO: 48564 - RNA, 18 nt, Human
ccgccgcugccgccgccg

SEQ ID NO: 48565 - RNA, 24 nt, Human
ccgccgcugccgccgccgccgccg

SEQ ID NO: 48566 - RNA, 18 nt, Human
ccgcugccgccgccgccg

SEQ ID NO: 48567 - RNA, 24 nt, Human
ccgcugccgccgccgccgccgccg

SEQ ID NO: 48568 - RNA, 27 nt, Human
ccgcuuggccgccgcugccgccgccgg

SEQ ID NO: 48569 - RNA, 22 nt, Human
ccuccaccagucccuggaaccc

SEQ ID NO: 48570 - RNA, 20 nt, Human
ccuccucaguguaccugaac

SEQ ID NO: 48571 - RNA, 24 nt, Human
ccugaaugaauggccagccuggga

SEQ ID NO: 48572 - RNA, 18 nt, Human
ccugcccccaguucagau

SEQ ID NO: 48573 - RNA, 21 nt, Human
ccuggaacccggcaggucaga

SEQ ID NO: 48574 - RNA, 22 nt, Human
cgcaccccauccccuccccaca

SEQ ID NO: 48575 - RNA, 23 nt, Human
cggcagagagaugccaggcggcg

SEQ ID NO: 48576 - RNA, 22 nt, Human
cgggcggcgcucugccucguug

SEQ ID NO: 48577 - RNA, 19 nt, Human
cuacacuacgccagcagca

SEQ ID NO: 48578 - RNA, 22 nt, Human
cuagaggaggcugagggcuaca

SEQ ID NO: 48579 - RNA, 20 nt, Human
cucaaauccuuugucuguau

SEQ ID NO: 48580 - RNA, 19 nt, Human
cucaguguaccugaacacc

SEQ ID NO: 48581 - RNA, 24 nt, Human
cuccaugccagccugaaaggcucc

SEQ ID NO: 48582 - RNA, 22 nt, Human
cucccgggcugacucccucugu

SEQ ID NO: 48583 - RNA, 25 nt, Human
cuccgcgcuuggccagugugucucc

SEQ ID NO: 48584 - RNA, 26 nt, Human
cuccgcgcuuggccagugugucuccc

SEQ ID NO: 48585 - RNA, 19 nt, Human
cucgcgccgggcggcgcuc

SEQ ID NO: 48586 - RNA, 23 nt, Human
cugaucccaaggcagcuuccuuc

SEQ ID NO: 48587 - RNA, 18 nt, Human
cugaugugagaugcuggg

SEQ ID NO: 48588 - RNA, 18 nt, Human
cugcgcaccugccccagg

SEQ ID NO: 48589 - RNA, 22 nt, Human
cugguggucccccguguccccc

SEQ ID NO: 48590 - RNA, 21 nt, Human
cuucucucagcuccucuuuca

SEQ ID NO: 48591 - RNA, 22 nt, Human
gaaggaacagagggaacuuagg

SEQ ID NO: 48592 - RNA, 22 nt, Human
gaccugccauccaccuccaccu

SEQ ID NO: 48593 - RNA, 22 nt, Human
gagguucuggaggaugacgcug

SEQ ID NO: 48594 - RNA, 22 nt, Human
gagguucuggaggaugacgcug

SEQ ID NO: 48595 - RNA, 21 nt, Human
gaugcuggggacaaccgugga

SEQ ID NO: 48596 - RNA, 19 nt, Human
gcaccccauccccucccca

SEQ ID NO: 48597 - RNA, 24 nt, Human
gcaggacacacagucacugcugcg

SEQ ID NO: 48598 - RNA, 20 nt, Human
gccgccaaccuggccgcuug

SEQ ID NO: 48599 - RNA, 22 nt, Human
gccgccgccgccgccgccgccg

SEQ ID NO: 48600 - RNA, 26 nt, Human
gccugaaaggcuccacucucagccgc

SEQ ID NO: 48601 - RNA, 28 nt, Human
ggaaggccccgagcaaccacuggccccu

SEQ ID NO: 48602 - RNA, 25 nt, Human
ggaggugguccacacagggcccucg

SEQ ID NO: 48603 - RNA, 24 nt, Human
ggaguacagaagcuucuagaggag

SEQ ID NO: 48604 - RNA, 23 nt, Human
ggcacugcacuggcaggcagagc

SEQ ID NO: 48605 - RNA, 18 nt, Human
ggccucggggcugggugc

SEQ ID NO: 48606 - RNA, 24 nt, Human
gggcagaccaccugcuucuggggu

SEQ ID NO: 48607 - RNA, 18 nt, Human
guccagauucuaaaauca

SEQ ID NO: 48608 - RNA, 27 nt, Human
guguuccuuguggcuugggaguuccuu

SEQ ID NO: 48609 - RNA, 20 nt, Human
uaaaaaggaaucuuuugagc

SEQ ID NO: 48610 - RNA, 22 nt, Human
uaaaacuauggcauuuuccaag

SEQ ID NO: 48611 - RNA, 24 nt, Human
uaaacugagaaaaguuuuccauga

SEQ ID NO: 48612 - RNA, 19 nt, Human
uaauggcccaucgguuccu

SEQ ID NO: 48613 - RNA, 20 nt, Human
uacccagggagguaccuacg

SEQ ID NO: 48614 - RNA, 22 nt, Human
uaccuacggagaaaagagaccu

SEQ ID NO: 48615 - RNA, 23 nt, Human
uaccuacggagaaaagagaccua

SEQ ID NO: 48616 - RNA, 25 nt, Human
uaccucuauuuucccacccuccucc

SEQ ID NO: 48617 - RNA, 23 nt, Human
uagaacucaauuucuaaacguaa

SEQ ID NO: 48618 - RNA, 21 nt, Human
uagaggaggcugagggcuaca

SEQ ID NO: 48619 - RNA, 27 nt, Human
uagaggaggcugagggcuacagggggg

SEQ ID NO: 48620 - RNA, 19 nt, Human
uaucucagcaggacugaag

SEQ ID NO: 48621 - RNA, 19 nt, Human
uauuuucccacccuccucc

SEQ ID NO: 48622 - RNA, 20 nt, Human
ucaaauccuuugucuguauu

SEQ ID NO: 48623 - RNA, 21 nt, Human
ucacccacauccauucgauuc

SEQ ID NO: 48624 - RNA, 19 nt, Human
ucacuggacgguucagaag

SEQ ID NO: 48625 - RNA, 20 nt, Human
ucacuggacgguucagaagg

SEQ ID NO: 48626 - RNA, 22 nt, Human
ucaguugccccuuaagcucucc

SEQ ID NO: 48627 - RNA, 20 nt, Human
ucauggucgagucggaccug

SEQ ID NO: 48628 - RNA, 18 nt, Human
uccaaagccugaaaaagc

SEQ ID NO: 48629 - RNA, 24 nt, Human
uccaaagccugaaaaagcaaacag

SEQ ID NO: 48630 - RNA, 20 nt, Human
uccacucucagccgcagccg

SEQ ID NO: 48631 - RNA, 22 nt, Human
uccacucucagccgcagccgcg

SEQ ID NO: 48632 - RNA, 23 nt, Human
uccucaguguaccugaacacccu

SEQ ID NO: 48633 - RNA, 20 nt, Human
uccugaccucccgggcugac

SEQ ID NO: 48634 - RNA, 18 nt, Human
ucgcgccgggcggcgcuc

SEQ ID NO: 48635 - RNA, 20 nt, Human
ucgcgccgggcggcgcucug

SEQ ID NO: 48636 - RNA, 24 nt, Human
ucuacugaaaucauucuacuucca

SEQ ID NO: 48637 - RNA, 21 nt, Human
ucuagaggaggcugagggcua

SEQ ID NO: 48638 - RNA, 22 nt, Human
ucucagcuccucuuucauccug

SEQ ID NO: 48639 - RNA, 20 nt, Human
ucucgcgccgggcggcgcuc

SEQ ID NO: 48640 - RNA, 22 nt, Human
ugaaaaagccgacacacccuua

SEQ ID NO: 48641 - RNA, 22 nt, Human
ugaaugaauggccagccuggga

SEQ ID NO: 48642 - RNA, 23 nt, Human
ugaaugaauggccagccugggau

SEQ ID NO: 48643 - RNA, 21 nt, Human
ugaccucccgggcugacuccc

SEQ ID NO: 48644 - RNA, 19 nt, Human
ugagggcuacaggggccug

SEQ ID NO: 48645 - RNA, 19 nt, Human
ugaugugagaugcugggga

SEQ ID NO: 48646 - RNA, 19 nt, Human
ugccaggcggcgaugcugg

SEQ ID NO: 48647 - RNA, 25 nt, Human
ugcccccaguucagaugugagguuc

SEQ ID NO: 48648 - RNA, 26 nt, Human
ugcgcaccugccccaggucugaugac

SEQ ID NO: 48649 - RNA, 22 nt, Human
uggaggugguccacacagggcc

SEQ ID NO: 48650 - RNA, 18 nt, Human
uggaugcccacagccccc

SEQ ID NO: 48651 - RNA, 18 nt, Human
uggcaggcagagcacuuc

SEQ ID NO: 48652 - RNA, 21 nt, Human
uggccagugugucuccuucag

SEQ ID NO: 48653 - RNA, 23 nt, Human
uggccagugugucuccuucaguu

SEQ ID NO: 48654 - RNA, 24 nt, Human
uggccuacacuacgccagcagcac

SEQ ID NO: 48655 - RNA, 23 nt, Human
ugggcagguccggaugugcaguc

SEQ ID NO: 48656 - RNA, 20 nt, Human
uguauacacagauuuacaua

SEQ ID NO: 48657 - RNA, 26 nt, Human
uguauacacagauuuacauacagugu

SEQ ID NO: 48658 - RNA, 21 nt, Human
ugucuuugauaaagcuggaaa

SEQ ID NO: 48659 - RNA, 23 nt, Human
uguuuguuuugagacaugggcag

SEQ ID NO: 48660 - RNA, 19 nt, Human
uuaauggcccaucgguucc

SEQ ID NO: 48661 - RNA, 19 nt, Human
uuagaggugggaaagaugg

SEQ ID NO: 48662 - RNA, 23 nt, Human
uucaaacaguaaacaagaaagug

SEQ ID NO: 48663 - RNA, 24 nt, Human
uuccuaccucuauuuucccacccu

SEQ ID NO: 48664 - RNA, 22 nt, Human
uuccuuguggcuugguacucgu

SEQ ID NO: 48665 - RNA, 22 nt, Human
uucuagaggaggcugagggcua

SEQ ID NO: 48666 - RNA, 21 nt, Human
uucugggguaaaguguuugag

SEQ ID NO: 48667 - RNA, 19 nt, Human
uuggccagugugucuccuu

SEQ ID NO: 48668 - RNA, 25 nt, Human
uuuaaaaaaccugaaugaauggcca

SEQ ID NO: 48669 - RNA, 19 nt, Human
uuuacagaauuuagaggug

SEQ ID NO: 48670 - RNA, 24 nt, Human
uuuccuucuuuaugccuggggcag

SEQ ID NO: 48671 - RNA, 20 nt, Human
aaacaguguuacuagaucuu

SEQ ID NO: 48672 - RNA, 19 nt, Human
aaagugcugggauuacagg

SEQ ID NO: 48673 - RNA, 24 nt, Human
aaagugcugggauuacaggccuga

SEQ ID NO: 48674 - RNA, 21 nt, Human
aacuaccaaaaaagcuaagac

SEQ ID NO: 48675 - RNA, 19 nt, Human
aagugcugggauuacaggc

SEQ ID NO: 48676 - RNA, 19 nt, Human
aagugcugggauuacaggc

SEQ ID NO: 48677 - RNA, 26 nt, Human
aagugcugggauuacaggccugagcc

SEQ ID NO: 48678 - RNA, 20 nt, Human
acagagaugcaaagcucaga

SEQ ID NO: 48679 - RNA, 20 nt, Human
acaggguuucaccagguugg

SEQ ID NO: 48680 - RNA, 24 nt, Human
acaggguuucaccagguuggccag

SEQ ID NO: 48681 - RNA, 24 nt, Human
accagguuggccaggcuggucuug

SEQ ID NO: 48682 - RNA, 22 nt, Human
acccaggcuggagugcagcggu

SEQ ID NO: 48683 - RNA, 21 nt, Human
agaaaaccaacacaaacaggc

SEQ ID NO: 48684 - RNA, 19 nt, Human
agacaggguuucaccaggu

SEQ ID NO: 48685 - RNA, 22 nt, Human
agagaagcaauaaaacacaaug

SEQ ID NO: 48686 - RNA, 18 nt, Human
agagcaggaccacugaag

SEQ ID NO: 48687 - RNA, 18 nt, Human
agccucccgaguagcuag

SEQ ID NO: 48688 - RNA, 21 nt, Human
aggaacccauaaaacagagcu

SEQ ID NO: 48689 - RNA, 18 nt, Human
aguagcuaggauuacagg

SEQ ID NO: 48690 - RNA, 24 nt, Human
agugcugggauuacaggccugagc

SEQ ID NO: 48691 - RNA, 21 nt, Human
auaaaacagagcugcugcaga

SEQ ID NO: 48692 - RNA, 18 nt, Human
auaauugagacaucuaaa

SEQ ID NO: 48693 - RNA, 22 nt, Human
auuacaggccugagccaccaag

SEQ ID NO: 48694 - RNA, 21 nt, Human
auuacaggugugcgccaccau

SEQ ID NO: 48695 - RNA, 24 nt, Human
caaagugcugggauuacaggccug

SEQ ID NO: 48696 - RNA, 22 nt, Human
caagcaauucuccugccucagc

SEQ ID NO: 48697 - RNA, 18 nt, Human
cacaacagagaugcaaag

SEQ ID NO: 48698 - RNA, 21 nt, Human
caccacuaccuccgccuccug

SEQ ID NO: 48699 - RNA, 23 nt, Human
caccacuaccuccgccuccuggg

SEQ ID NO: 48700 - RNA, 21 nt, Human
caccagguuggccaggcuggu

SEQ ID NO: 48701 - RNA, 24 nt, Human
caccagguuggccaggcuggucuu

SEQ ID NO: 48702 - RNA, 20 nt, Human
cagagcaggaccacugaaga

SEQ ID NO: 48703 - RNA, 23 nt, Human
caggcuauuccuagagccaggga

SEQ ID NO: 48704 - RNA, 24 nt, Human
caggguuucaccagguuggccagg

SEQ ID NO: 48705 - RNA, 21 nt, Human
cauuucagcucaauaaauauu

SEQ ID NO: 48706 - RNA, 19 nt, Human
ccaaagugcugggauuaca

SEQ ID NO: 48707 - RNA, 22 nt, Human
ccaaagugcugggauuacaggc

SEQ ID NO: 48708 - RNA, 24 nt, Human
ccaaagugcugggauuacaggccu

SEQ ID NO: 48709 - RNA, 23 nt, Human
ccaccuggccaucgaccuucagg

SEQ ID NO: 48710 - RNA, 19 nt, Human
ccagaucaaaacagaaagc

SEQ ID NO: 48711 - RNA, 23 nt, Human
cccgaguagcuaggauuacaggu

SEQ ID NO: 48712 - RNA, 24 nt, Human
cccgaguagcuaggauuacaggug

SEQ ID NO: 48713 - RNA, 24 nt, Human
ccgaguagcuaggauuacaggugu

SEQ ID NO: 48714 - RNA, 27 nt, Human
ccgccuccuggguucaagcaauucuuu

SEQ ID NO: 48715 - RNA, 19 nt, Human
ccuccgccuccuggguuca

SEQ ID NO: 48716 - RNA, 24 nt, Human
ccuccuggguucaagcaauucucc

SEQ ID NO: 48717 - RNA, 21 nt, Human
ccugaccucaagugaucugcc

SEQ ID NO: 48718 - RNA, 23 nt, Human
ccugaccucaagugaucugccug

SEQ ID NO: 48719 - RNA, 24 nt, Human
ccugccucagccucccgaguagcu

SEQ ID NO: 48720 - RNA, 19 nt, Human
ccuggccaucgaccuucag

SEQ ID NO: 48721 - RNA, 23 nt, Human
ccuggguucaagcaauucuccug

SEQ ID NO: 48722 - RNA, 18 nt, Human
cucaagugaucugccugc

SEQ ID NO: 48723 - RNA, 24 nt, Human
cucccgaguagcuaggauuacagg

SEQ ID NO: 48724 - RNA, 26 nt, Human
cuccugaccucaagugaucugccugc

SEQ ID NO: 48725 - RNA, 21 nt, Human
cuccuggguucaagcaauucu

SEQ ID NO: 48726 - RNA, 23 nt, Human
cucuaucacccaggcuggagugc

SEQ ID NO: 48727 - RNA, 24 nt, Human
gaccacugaagaaugggaaaagaa

SEQ ID NO: 48728 - RNA, 22 nt, Human
gaccucaagugaucugccugcc

SEQ ID NO: 48729 - RNA, 21 nt, Human
gagauagggucuugcucuauc

SEQ ID NO: 48730 - RNA, 24 nt, Human
gaguagcuaggauuacaggugugc

SEQ ID NO: 48731 - RNA, 27 nt, Human
gaucugccugccugggcuucccaaagu

SEQ ID NO: 48732 - RNA, 19 nt, Human
gaugcaaagcucagaaaga

SEQ ID NO: 48733 - RNA, 18 nt, Human
gauuacaggccugagcca

SEQ ID NO: 48734 - RNA, 21 nt, Human
gauuacaggccugagccacca

SEQ ID NO: 48735 - RNA, 18 nt, Human
gauuacaggugugcgcca

SEQ ID NO: 48736 - RNA, 24 nt, Human
gauuacaggugugcgccaccaugc

SEQ ID NO: 48737 - RNA, 20 nt, Human
gcagagagcuacuucaauca

SEQ ID NO: 48738 - RNA, 20 nt, Human
gccucagccucccgaguagc

SEQ ID NO: 48739 - RNA, 20 nt, Human
gccuucauucuuugcuggcu

SEQ ID NO: 48740 - RNA, 23 nt, Human
gcuggucuugaacuccugaccuc

SEQ ID NO: 48741 - RNA, 27 nt, Human
ggacagaacucuuucaauuguaaguca

SEQ ID NO: 48742 - RNA, 19 nt, Human
ggauuacaggccugagcca

SEQ ID NO: 48743 - RNA, 22 nt, Human
ggauuacaggugugcgccacca

SEQ ID NO: 48744 - RNA, 24 nt, Human
ggauuacaggugugcgccaccaug

SEQ ID NO: 48745 - RNA, 24 nt, Human
ggcuggucuugaacuccugaccuc

SEQ ID NO: 48746 - RNA, 22 nt, Human
gguaguaggaaaagauggccac

SEQ ID NO: 48747 - RNA, 19 nt, Human
ggucuugaacuccugaccu

SEQ ID NO: 48748 - RNA, 22 nt, Human
gguuggccaggcuggucuugaa

SEQ ID NO: 48749 - RNA, 24 nt, Human
gucuugcucuaucacccaggcugg

SEQ ID NO: 48750 - RNA, 24 nt, Human
guuuuugcauuuuuaguagagaca

SEQ ID NO: 48751 - RNA, 21 nt, Human
uaaaacacaauggaagucaga

SEQ ID NO: 48752 - RNA, 24 nt, Human
uaaaacacaauggaagucagauag

SEQ ID NO: 48753 - RNA, 22 nt, Human
uacagcuccagaucaaaacaga

SEQ ID NO: 48754 - RNA, 19 nt, Human
uaccuccgccuccuggguu

SEQ ID NO: 48755 - RNA, 20 nt, Human
uagagacaggguuucaccag

SEQ ID NO: 48756 - RNA, 22 nt, Human
uagagacaggguuucaccaggu

SEQ ID NO: 48757 - RNA, 18 nt, Human
uaggauuacaggugugcg

SEQ ID NO: 48758 - RNA, 21 nt, Human
uaggauuacaggugugcgcca

SEQ ID NO: 48759 - RNA, 22 nt, Human
uaggauuacaggugugcgccac

SEQ ID NO: 48760 - RNA, 24 nt, Human
uaggauuacaggugugcgccacca

SEQ ID NO: 48761 - RNA, 25 nt, Human
uaggauuacaggugugcgccaccau

SEQ ID NO: 48762 - RNA, 19 nt, Human
uaguagagacaggguuuca

SEQ ID NO: 48763 - RNA, 25 nt, Human
uaguagagacaggguuucaccaggu

SEQ ID NO: 48764 - RNA, 21 nt, Human
uaguaggaaaagauggccacc

SEQ ID NO: 48765 - RNA, 24 nt, Human
uaguuuuugcauuuuuaguagaga

SEQ ID NO: 48766 - RNA, 21 nt, Human
uaucacccaggcuggagugca

SEQ ID NO: 48767 - RNA, 21 nt, Human
uaugugacccuuacagcucca

SEQ ID NO: 48768 - RNA, 19 nt, Human
ucaagcaauucuccugccu

SEQ ID NO: 48769 - RNA, 24 nt, Human
ucacaaggcaguauaguuuaugaa

SEQ ID NO: 48770 - RNA, 24 nt, Human
ucaccacuaccuccgccuccuggg

SEQ ID NO: 48771 - RNA, 27 nt, Human
ucaccacuaccuccgccuccuggguuc

SEQ ID NO: 48772 - RNA, 18 nt, Human
ucacccaggcuggagugc

SEQ ID NO: 48773 - RNA, 19 nt, Human
uccagaucaaaacagaaag

SEQ ID NO: 48774 - RNA, 24 nt, Human
ucccaaagugcugggauuacaggc

SEQ ID NO: 48775 - RNA, 19 nt, Human
ucccgaguagcuaggauua

SEQ ID NO: 48776 - RNA, 23 nt, Human
ucccgaguagcuaggauuacagg

SEQ ID NO: 48777 - RNA, 24 nt, Human
ucccgaguagcuaggauuacaggu

SEQ ID NO: 48778 - RNA, 24 nt, Human
uccgccuccuggguucaagcaauu

SEQ ID NO: 48779 - RNA, 21 nt, Human
uccuggguucaagcaauucuc

SEQ ID NO: 48780 - RNA, 24 nt, Human
uccuggguucaagcaauucuccug

SEQ ID NO: 48781 - RNA, 19 nt, Human
ucuaucacccaggcuggag

SEQ ID NO: 48782 - RNA, 24 nt, Human
ucuaucacccaggcuggagugcag

SEQ ID NO: 48783 - RNA, 24 nt, Human
ucuccugccucagccucccgagua

SEQ ID NO: 48784 - RNA, 20 nt, Human
ucucuuggcuguuuccuuug

SEQ ID NO: 48785 - RNA, 22 nt, Human
ucucuuggcuguuuccuuuguu

SEQ ID NO: 48786 - RNA, 21 nt, Human
ucuugaacuccugaccucaag

SEQ ID NO: 48787 - RNA, 19 nt, Human
ucuugcucuaucacccagg

SEQ ID NO: 48788 - RNA, 23 nt, Human
ucuugcucuaucacccaggcugg

SEQ ID NO: 48789 - RNA, 24 nt, Human
ucuugcucuaucacccaggcugga

SEQ ID NO: 48790 - RNA, 22 nt, Human
ugaagaaugggaaaagaauggc

SEQ ID NO: 48791 - RNA, 18 nt, Human
ugaccucaagugaucugc

SEQ ID NO: 48792 - RNA, 24 nt, Human
ugaccucaagugaucugccugccu

SEQ ID NO: 48793 - RNA, 23 nt, Human
ugcaaagcucagaaagaauguuc

SEQ ID NO: 48794 - RNA, 23 nt, Human
ugccucagccucccgaguagcua

SEQ ID NO: 48795 - RNA, 24 nt, Human
ugccucagccucccgaguagcuag

SEQ ID NO: 48796 - RNA, 22 nt, Human
ugcucuaucacccaggcuggag

SEQ ID NO: 48797 - RNA, 24 nt, Human
ugcucuaucacccaggcuggagug

SEQ ID NO: 48798 - RNA, 18 nt, Human
ugcugaaucaauguagga

SEQ ID NO: 48799 - RNA, 19 nt, Human
uggagugcagcgguacgau

SEQ ID NO: 48800 - RNA, 24 nt, Human
uggccaggcuggucuugaacuccu

SEQ ID NO: 48801 - RNA, 18 nt, Human
ugggauuacaggccugag

SEQ ID NO: 48802 - RNA, 19 nt, Human
ugggauuacaggccugagc

SEQ ID NO: 48803 - RNA, 21 nt, Human
ugggauuacaggccugagcca

SEQ ID NO: 48804 - RNA, 22 nt, Human
ugggauuacaggccugagccac

SEQ ID NO: 48805 - RNA, 24 nt, Human
ugggauuacaggccugagccacca

SEQ ID NO: 48806 - RNA, 21 nt, Human
uggguucaagcaauucuccug

SEQ ID NO: 48807 - RNA, 23 nt, Human
uggguucaagcaauucuccugcc

SEQ ID NO: 48808 - RNA, 24 nt, Human
uggguucaagcaauucuccugccu

SEQ ID NO: 48809 - RNA, 22 nt, Human
uguaaaacuugcagagcgucaa

SEQ ID NO: 48810 - RNA, 22 nt, Human
uguauuacacaacagagaugca

SEQ ID NO: 48811 - RNA, 18 nt, Human
uuaguagagacaggguuu

SEQ ID NO: 48812 - RNA, 21 nt, Human
uucaagcaauucuccugccuc

SEQ ID NO: 48813 - RNA, 24 nt, Human
uucaagcaauucuccugccucagc

SEQ ID NO: 48814 - RNA, 19 nt, Human
uucuuugcuggcuuucucu

SEQ ID NO: 48815 - RNA, 24 nt, Human
uugcucuaucacccaggcuggagu

SEQ ID NO: 48816 - RNA, 24 nt, Human
uugcuggcuuucucuagguaguag

SEQ ID NO: 48817 - RNA, 20 nt, Human
uuuaugaagaccaccuggcc

SEQ ID NO: 48818 - RNA, 21 nt, Human
uuucaccagguuggccaggcu

SEQ ID NO: 48819 - RNA, 25 nt, Human
uuugauucucuuggcuguuuccuuu

SEQ ID NO: 48820 - RNA, 24 nt, Human
uuuuuaguagagacaggguuucac

SEQ ID NO: 48821 - RNA, 20 nt, Human
uuuuugcauuuuuaguagag

SEQ ID NO: 48822 - RNA, 21 nt, Human
uuuuugcauuuuuaguagaga

SEQ ID NO: 48823 - RNA, 18 nt, Human
aaacccacgaugucagca

SEQ ID NO: 48824 - RNA, 21 nt, Human
accagcuccugggcugugcac

SEQ ID NO: 48825 - RNA, 23 nt, Human
accccaugugcaccccagaggcc

SEQ ID NO: 48826 - RNA, 19 nt, Human
aggaguuucaccagcuccu

SEQ ID NO: 48827 - RNA, 21 nt, Human
aggaguuucaccagcuccugg

SEQ ID NO: 48828 - RNA, 22 nt, Human
auucccaccccaugugcacccc

SEQ ID NO: 48829 - RNA, 23 nt, Human
cacacagcagugggcauggucag

SEQ ID NO: 48830 - RNA, 18 nt, Human
cacagcagugggcauggu

SEQ ID NO: 48831 - RNA, 19 nt, Human
cacccccggagcauuccca

SEQ ID NO: 48832 - RNA, 19 nt, Human
cagcaaacaggaugcucac

SEQ ID NO: 48833 - RNA, 18 nt, Human
cagcagugggcaugguca

SEQ ID NO: 48834 - RNA, 18 nt, Human
caggaugcucacauuguc

SEQ ID NO: 48835 - RNA, 19 nt, Human
cagggggcuucaggaaguc

SEQ ID NO: 48836 - RNA, 20 nt, Human
caguaguagcaguccccgag

SEQ ID NO: 48837 - RNA, 23 nt, Human
caugccuggacaaugcuccuccu

SEQ ID NO: 48838 - RNA, 21 nt, Human
ccaccguggccugugucaccc

SEQ ID NO: 48839 - RNA, 20 nt, Human
ccagcuccugggcugugcac

SEQ ID NO: 48840 - RNA, 18 nt, Human
cccaugugcaccccagag

SEQ ID NO: 48841 - RNA, 18 nt, Human
ccccggagcauucccacc

SEQ ID NO: 48842 - RNA, 18 nt, Human
cccugcucugcuggucug

SEQ ID NO: 48843 - RNA, 18 nt, Human
ccggagcauucccacccc

SEQ ID NO: 48844 - RNA, 18 nt, Human
ccugugucacccccggag

SEQ ID NO: 48845 - RNA, 19 nt, Human
cgagaaucuugaugcggcg

SEQ ID NO: 48846 - RNA, 24 nt, Human
cucacauugucgugccucuggaug

SEQ ID NO: 48847 - RNA, 22 nt, Human
cugggugaggcccgacacgcag

SEQ ID NO: 48848 - RNA, 19 nt, Human
cugugcugugccugcucgg

SEQ ID NO: 48849 - RNA, 18 nt, Human
gggcauggucagucuugg

SEQ ID NO: 48850 - RNA, 20 nt, Human
gguuggcccucgggccacag

SEQ ID NO: 48851 - RNA, 21 nt, Human
uccacccuggcaaguggcucc

SEQ ID NO: 48852 - RNA, 23 nt, Human
ucccaccccaugugcaccccaga

SEQ ID NO: 48853 - RNA, 19 nt, Human
ucuggcugguccuggcugg

SEQ ID NO: 48854 - RNA, 23 nt, Human
uggcucccugcucugcuggucug

SEQ ID NO: 48855 - RNA, 19 nt, Human
ugggcauggucagucuugg

SEQ ID NO: 48856 - RNA, 23 nt, Human
ugugcugugccugcucggugguu

SEQ ID NO: 48857 - RNA, 18 nt, Human
uugaggaguuucaccagc

SEQ ID NO: 48858 - RNA, 24 nt, Human
uugaugcggcgacagugguucucc

SEQ ID NO: 48859 - RNA, 23 nt, Human
aaacagcaguugugcugggcccc

SEQ ID NO: 48860 - RNA, 19 nt, Human
aacuguggaacucugaaca

SEQ ID NO: 48861 - RNA, 19 nt, Human
aagaacccacgaggcacgc

SEQ ID NO: 48862 - RNA, 25 nt, Human
aagugauccucccaccucagccucc

SEQ ID NO: 48863 - RNA, 20 nt, Human
acaaaagacaaauggcauca

SEQ ID NO: 48864 - RNA, 23 nt, Human
acaaaagacaaauggcaucaaaa

SEQ ID NO: 48865 - RNA, 19 nt, Human
acacacggagcagagggac

SEQ ID NO: 48866 - RNA, 20 nt, Human
acacauuuuacaccaaggcc

SEQ ID NO: 48867 - RNA, 22 nt, Human
acacugggguuuuugggaaacu

SEQ ID NO: 48868 - RNA, 24 nt, Human
acagacagcacgcacaucaaaaac

SEQ ID NO: 48869 - RNA, 21 nt, Human
acagcacgcacaucaaaaaca

SEQ ID NO: 48870 - RNA, 22 nt, Human
acaggcacuguaaaucaaagua

SEQ ID NO: 48871 - RNA, 24 nt, Human
acccaggcuggagugcagugguau

SEQ ID NO: 48872 - RNA, 20 nt, Human
accucagccucccauguagc

SEQ ID NO: 48873 - RNA, 23 nt, Human
accucagccucccauguagcugg

SEQ ID NO: 48874 - RNA, 20 nt, Human
acgagaacgagucugcagag

SEQ ID NO: 48875 - RNA, 23 nt, Human
acguuggcugugugucuucuuua

SEQ ID NO: 48876 - RNA, 21 nt, Human
acuguguguuugaauaucaga

SEQ ID NO: 48877 - RNA, 21 nt, Human
agaacaaauucuucaaggccu

SEQ ID NO: 48878 - RNA, 25 nt, Human
agacaaauggcaucaaaacaucaga

SEQ ID NO: 48879 - RNA, 24 nt, Human
agacaggaaaauaaaagauacagg

SEQ ID NO: 48880 - RNA, 22 nt, Human
agagaugggggucuugcuaugu

SEQ ID NO: 48881 - RNA, 21 nt, Human
agauaauauacacccccuagu

SEQ ID NO: 48882 - RNA, 20 nt, Human
agcacagaguccacgugggg

SEQ ID NO: 48883 - RNA, 24 nt, Human
agcacagaguccacgugggggaca

SEQ ID NO: 48884 - RNA, 19 nt, Human
agcugcccagaacuuuaag

SEQ ID NO: 48885 - RNA, 19 nt, Human
aggagccacugcacccggc

SEQ ID NO: 48886 - RNA, 20 nt, Human
aggcagaauacuaaauaagu

SEQ ID NO: 48887 - RNA, 27 nt, Human
agguuggggccugagaauuugcauuuu

SEQ ID NO: 48888 - RNA, 23 nt, Human
auaauauacacccccuaguuuua

SEQ ID NO: 48889 - RNA, 19 nt, Human
auacagucuucuugccaaa

SEQ ID NO: 48890 - RNA, 23 nt, Human
augcccaaauuaaaaucagacca

SEQ ID NO: 48891 - RNA, 20 nt, Human
auguguguguguuucaccuu

SEQ ID NO: 48892 - RNA, 20 nt, Human
auguugcccaggcuggucuc

SEQ ID NO: 48893 - RNA, 21 nt, Human
auucuuuugcagucuaugucu

SEQ ID NO: 48894 - RNA, 22 nt, Human
caaaagacaaauggcaucaaaa

SEQ ID NO: 48895 - RNA, 18 nt, Human
caaaauauugggauuaua

SEQ ID NO: 48896 - RNA, 23 nt, Human
caaaguacauaaaacuuuuaaug

SEQ ID NO: 48897 - RNA, 27 nt, Human
caagugauccucccaccucagccuccc

SEQ ID NO: 48898 - RNA, 27 nt, Human
caagugauccucccaccucagccuccc

SEQ ID NO: 48899 - RNA, 19 nt, Human
cacacaucagacaccaaac

SEQ ID NO: 48900 - RNA, 21 nt, Human
cacggggcaccugccaggcuc

SEQ ID NO: 48901 - RNA, 25 nt, Human
cacuccuaaacagauauguaaaaca

SEQ ID NO: 48902 - RNA, 23 nt, Human
cagaaaagaacaugcaccagaag

SEQ ID NO: 48903 - RNA, 21 nt, Human
caggcacuguaaaucaaagua

SEQ ID NO: 48904 - RNA, 21 nt, Human
caguugugcugggccccagcc

SEQ ID NO: 48905 - RNA, 18 nt, Human
ccacugcacccggccuga

SEQ ID NO: 48906 - RNA, 19 nt, Human
ccacugcacccggccugau

SEQ ID NO: 48907 - RNA, 21 nt, Human
ccacugcacccggccugauga

SEQ ID NO: 48908 - RNA, 19 nt, Human
ccaguuuucugccuggcau

SEQ ID NO: 48909 - RNA, 19 nt, Human
ccauguagcugggacuaca

SEQ ID NO: 48910 - RNA, 24 nt, Human
cccacgaauaaaaggcuuccuaag

SEQ ID NO: 48911 - RNA, 19 nt, Human
ccccagccccggggaucuc

SEQ ID NO: 48912 - RNA, 20 nt, Human
ccccagccccggggaucuca

SEQ ID NO: 48913 - RNA, 22 nt, Human
ccgugggucccaacgggggccc

SEQ ID NO: 48914 - RNA, 24 nt, Human
ccgugggucccaacgggggcccuu

SEQ ID NO: 48915 - RNA, 26 nt, Human
ccucccaccucagccucccauguagc

SEQ ID NO: 48916 - RNA, 20 nt, Human
ccucucuccucggccuccca

SEQ ID NO: 48917 - RNA, 22 nt, Human
ccugggcucaagugauccuccc

SEQ ID NO: 48918 - RNA, 18 nt, Human
ccugggcuuaagugaucc

SEQ ID NO: 48919 - RNA, 22 nt, Human
ccugggcuuaagugauccucuc

SEQ ID NO: 48920 - RNA, 19 nt, Human
ccuuggacaccacuggcaa

SEQ ID NO: 48921 - RNA, 24 nt, Human
cgcucugucacccaggcuggagug

SEQ ID NO: 48922 - RNA, 21 nt, Human
cgggggcccuuggacaccacu

SEQ ID NO: 48923 - RNA, 22 nt, Human
cguuggcugugugucuucuuua

SEQ ID NO: 48924 - RNA, 20 nt, Human
cuagauacauucaacaugcu

SEQ ID NO: 48925 - RNA, 24 nt, Human
cucaagugauccucccaccucagc

SEQ ID NO: 48926 - RNA, 24 nt, Human
cucagccucccauguagcugggac

SEQ ID NO: 48927 - RNA, 23 nt, Human
cucccauguagcugggacuacag

SEQ ID NO: 48928 - RNA, 24 nt, Human
cucgcucugucacccaggcuggag

SEQ ID NO: 48929 - RNA, 20 nt, Human
cugccaggcucgcucacagu

SEQ ID NO: 48930 - RNA, 20 nt, Human
cuggacuuccugggcucaag

SEQ ID NO: 48931 - RNA, 20 nt, Human
cugggccccagccccgggga

SEQ ID NO: 48932 - RNA, 22 nt, Human
cugggguuuuugggaaacugga

SEQ ID NO: 48933 - RNA, 23 nt, Human
cuugaucagggaucagaaucacc

SEQ ID NO: 48934 - RNA, 18 nt, Human
gacagaaguugcagucag

SEQ ID NO: 48935 - RNA, 22 nt, Human
gacagcacgcacaucaaaaaca

SEQ ID NO: 48936 - RNA, 18 nt, Human
gagggagggaggucugaa

SEQ ID NO: 48937 - RNA, 20 nt, Human
gaguuugauacaaaacuggu

SEQ ID NO: 48938 - RNA, 21 nt, Human
gauacaaaacugguccuaggc

SEQ ID NO: 48939 - RNA, 21 nt, Human
gaugagcagaugcgguuggcg

SEQ ID NO: 48940 - RNA, 19 nt, Human
gauuauaggagccacugca

SEQ ID NO: 48941 - RNA, 18 nt, Human
gauugaugacaaaacuua

SEQ ID NO: 48942 - RNA, 21 nt, Human
gcacagcagcugugcccgugc

SEQ ID NO: 48943 - RNA, 18 nt, Human
gcccagaacuuuaaggag

SEQ ID NO: 48944 - RNA, 18 nt, Human
gcuccuuuucccuuuugc

SEQ ID NO: 48945 - RNA, 25 nt, Human
gcucugucacccaggcuggagugca

SEQ ID NO: 48946 - RNA, 22 nt, Human
gcuggggguguucacucagggu

SEQ ID NO: 48947 - RNA, 19 nt, Human
ggaaagaugaaugguugcu

SEQ ID NO: 48948 - RNA, 20 nt, Human
ggcugugugucuucuuuagc

SEQ ID NO: 48949 - RNA, 21 nt, Human
gggcucaagugauccucccac

SEQ ID NO: 48950 - RNA, 22 nt, Human
gggcucaagugauccucccacc

SEQ ID NO: 48951 - RNA, 20 nt, Human
gggcuuaagugauccucucu

SEQ ID NO: 48952 - RNA, 24 nt, Human
gggggucuugcuauguugcccagg

SEQ ID NO: 48953 - RNA, 19 nt, Human
gggguuuuugggaaacugg

SEQ ID NO: 48954 - RNA, 22 nt, Human
gggucuugcuauguugcccagg

SEQ ID NO: 48955 - RNA, 27 nt, Human
gguaagacuggugauauggcuuuggga

SEQ ID NO: 48956 - RNA, 24 nt, Human
gugauccucccaccucagccuccc

SEQ ID NO: 48957 - RNA, 18 nt, Human
uaaaaaaucagagccagg

SEQ ID NO: 48958 - RNA, 19 nt, Human
uaaggagagcauuggggag

SEQ ID NO: 48959 - RNA, 27 nt, Human
uaagugauccucucuccucggccuccc

SEQ ID NO: 48960 - RNA, 20 nt, Human
uacaaaagacaaauggcauc

SEQ ID NO: 48961 - RNA, 23 nt, Human
uacagucuucuugccaaaaugaa

SEQ ID NO: 48962 - RNA, 18 nt, Human
uaccauauuuuccagaaa

SEQ ID NO: 48963 - RNA, 19 nt, Human
uauaaucaaggcucacuac

SEQ ID NO: 48964 - RNA, 22 nt, Human
uauguugcccaggcuggucuca

SEQ ID NO: 48965 - RNA, 23 nt, Human
uauguugcccaggcuggucucag

SEQ ID NO: 48966 - RNA, 24 nt, Human
uauguugcccaggcuggucucaga

SEQ ID NO: 48967 - RNA, 24 nt, Human
uauuggcuucuggagagcucuuuc

SEQ ID NO: 48968 - RNA, 23 nt, Human
uauuuuuuugcagagaugggggu

SEQ ID NO: 48969 - RNA, 24 nt, Human
ucaaaagggagaauggauggaaaa

SEQ ID NO: 48970 - RNA, 24 nt, Human
ucacacacuguguccuaaucugaa

SEQ ID NO: 48971 - RNA, 21 nt, Human
ucacaguccuggcacagcagc

SEQ ID NO: 48972 - RNA, 24 nt, Human
ucacccaggcuggagugcaguggu

SEQ ID NO: 48973 - RNA, 20 nt, Human
ucacuaaacagcaguugugc

SEQ ID NO: 48974 - RNA, 18 nt, Human
ucacuacguucuggacuu

SEQ ID NO: 48975 - RNA, 20 nt, Human
ucagggaucagaaucaccug

SEQ ID NO: 48976 - RNA, 26 nt, Human
ucagggaucagaaucaccuggagaag

SEQ ID NO: 48977 - RNA, 18 nt, Human
ucaguuagcucacgcuau

SEQ ID NO: 48978 - RNA, 21 nt, Human
ucauugccucguuuaaucacu

SEQ ID NO: 48979 - RNA, 20 nt, Human
uccagaaaagaacaugcacc

SEQ ID NO: 48980 - RNA, 24 nt, Human
ucccauguagcugggacuacaggc

SEQ ID NO: 48981 - RNA, 21 nt, Human
uccugggcucaagugauccuc

SEQ ID NO: 48982 - RNA, 22 nt, Human
uccugggcucaagugauccucc

SEQ ID NO: 48983 - RNA, 24 nt, Human
uccugggcucaagugauccuccca

SEQ ID NO: 48984 - RNA, 21 nt, Human
uccugggcuuaagugauccuc

SEQ ID NO: 48985 - RNA, 20 nt, Human
uccuuacacauuuuacacca

SEQ ID NO: 48986 - RNA, 24 nt, Human
ucgcucugucacccaggcuggagu

SEQ ID NO: 48987 - RNA, 19 nt, Human
ucucgcucugucacccagg

SEQ ID NO: 48988 - RNA, 23 nt, Human
ucucgcucugucacccaggcugg

SEQ ID NO: 48989 - RNA, 24 nt, Human
ucucgcucugucacccaggcugga

SEQ ID NO: 48990 - RNA, 26 nt, Human
ucucgcucugucacccaggcuggagu

SEQ ID NO: 48991 - RNA, 27 nt, Human
ucucgcucugucacccaggcuggagug

SEQ ID NO: 48992 - RNA, 21 nt, Human
ucugaagcuugaucagggauc

SEQ ID NO: 48993 - RNA, 21 nt, Human
ucugcagaggcuccauaggac

SEQ ID NO: 48994 - RNA, 21 nt, Human
ucugccccuguuuccucaccu

SEQ ID NO: 48995 - RNA, 23 nt, Human
ucuggagagcucuuucugaaaca

SEQ ID NO: 48996 - RNA, 24 nt, Human
ucugucacccaggcuggagugcag

SEQ ID NO: 48997 - RNA, 18 nt, Human
ucuugcuauguugcccag

SEQ ID NO: 48998 - RNA, 19 nt, Human
ucuugcuauguugcccagg

SEQ ID NO: 48999 - RNA, 23 nt, Human
ucuugcuauguugcccaggcugg

SEQ ID NO: 49000 - RNA, 24 nt, Human
ucuugcuauguugcccaggcuggu

SEQ ID NO: 49001 - RNA, 26 nt, Human
ucuuuuuagcgcaaacccaaguucgg

SEQ ID NO: 49002 - RNA, 21 nt, Human
ugaaacaacugugucaaaagg

SEQ ID NO: 49003 - RNA, 22 nt, Human
ugaauaucagaugagcagaugc

SEQ ID NO: 49004 - RNA, 20 nt, Human
ugagcacagaguccacgugg

SEQ ID NO: 49005 - RNA, 18 nt, Human
ugagcucacggaaacgcu

SEQ ID NO: 49006 - RNA, 18 nt, Human
ugaguuagaggaaagaga

SEQ ID NO: 49007 - RNA, 20 nt, Human
ugauauggcuuugggagagc

SEQ ID NO: 49008 - RNA, 22 nt, Human
ugauccucucuccucggccucc

SEQ ID NO: 49009 - RNA, 23 nt, Human
ugauuccaaauuauucuuuugca

SEQ ID NO: 49010 - RNA, 25 nt, Human
ugcagagaugggggucuugcuaugu

SEQ ID NO: 49011 - RNA, 24 nt, Human
ugcagucagaaagugugugauacc

SEQ ID NO: 49012 - RNA, 23 nt, Human
ugcagucuaugucuguuagcucu

SEQ ID NO: 49013 - RNA, 19 nt, Human
ugccaggcucgcucacagu

SEQ ID NO: 49014 - RNA, 21 nt, Human
ugcccaaauuaaaaucagacc

SEQ ID NO: 49015 - RNA, 20 nt, Human
ugcccagaacuuuaaggagc

SEQ ID NO: 49016 - RNA, 22 nt, Human
ugcccaggcuggucucagacuc

SEQ ID NO: 49017 - RNA, 24 nt, Human
ugcccaggcuggucucagacuccu

SEQ ID NO: 49018 - RNA, 28 nt, Human
ugcccaggcuggucucagacuccugggc

SEQ ID NO: 49019 - RNA, 27 nt, Human
ugcuauguugcccaggcuggucucaga

SEQ ID NO: 49020 - RNA, 19 nt, Human
ugcugggccccagccccgg

SEQ ID NO: 49021 - RNA, 18 nt, Human
uggagugcagugguauaa

SEQ ID NO: 49022 - RNA, 25 nt, Human
uggagugcagugguauaaggcucug

SEQ ID NO: 49023 - RNA, 21 nt, Human
uggagugcagugguauaauca

SEQ ID NO: 49024 - RNA, 24 nt, Human
uggagugcagugguauaaucaagg

SEQ ID NO: 49025 - RNA, 21 nt, Human
uggcaucaaaacaucagacga

SEQ ID NO: 49026 - RNA, 19 nt, Human
uggcauuuuugcucacagg

SEQ ID NO: 49027 - RNA, 21 nt, Human
ugggaaugagucacaguccug

SEQ ID NO: 49028 - RNA, 21 nt, Human
ugggacuacaggcacgugcca

SEQ ID NO: 49029 - RNA, 22 nt, Human
ugggacuacaggcacgugccac

SEQ ID NO: 49030 - RNA, 24 nt, Human
ugggacuacaggcacgugccacca

SEQ ID NO: 49031 - RNA, 18 nt, Human
ugggauuauaggagccac

SEQ ID NO: 49032 - RNA, 19 nt, Human
ugggcacacaucagacacc

SEQ ID NO: 49033 - RNA, 24 nt, Human
ugggcucaagugauccucccaccu

SEQ ID NO: 49034 - RNA, 19 nt, Human
ugggcuuaagugauccucu

SEQ ID NO: 49035 - RNA, 19 nt, Human
ugggggaaugggagggacu

SEQ ID NO: 49036 - RNA, 23 nt, Human
ugggugagcacagaguccacgug

SEQ ID NO: 49037 - RNA, 18 nt, Human
uguaagacuuaaagguua

SEQ ID NO: 49038 - RNA, 19 nt, Human
uguagcugggacuacaggc

SEQ ID NO: 49039 - RNA, 19 nt, Human
uguagcugggacuacaggc

SEQ ID NO: 49040 - RNA, 24 nt, Human
uguagcugggacuacaggcacgug

SEQ ID NO: 49041 - RNA, 20 nt, Human
ugugauaccuuccugaaaau

SEQ ID NO: 49042 - RNA, 25 nt, Human
uuaccuggucauucgguguauccag

SEQ ID NO: 49043 - RNA, 26 nt, Human
uucaggguccuccuucagguuggggc

SEQ ID NO: 49044 - RNA, 27 nt, Human
uucccugaaagcguucucuagagaugc

SEQ ID NO: 49045 - RNA, 24 nt, Human
uugaagccaauggcacugggaccc

SEQ ID NO: 49046 - RNA, 25 nt, Human
uugaagccaauggcacugggacccc

SEQ ID NO: 49047 - RNA, 21 nt, Human
uugggauuauaggagccacug

SEQ ID NO: 49048 - RNA, 25 nt, Human
aagcaguagcaaaggcgacuguagc

SEQ ID NO: 49049 - RNA, 21 nt, Human
aagcuuuuaauaaaacagucu

SEQ ID NO: 49050 - RNA, 23 nt, Human
aaggcagcuuugucccagcucug

SEQ ID NO: 49051 - RNA, 20 nt, Human
aauccccccuccccugccag

SEQ ID NO: 49052 - RNA, 22 nt, Human
acucggaccacauggagaccuc

SEQ ID NO: 49053 - RNA, 21 nt, Human
agaggaauagcagggccaccc

SEQ ID NO: 49054 - RNA, 20 nt, Human
agcaagagcucaaaaggcaa

SEQ ID NO: 49055 - RNA, 19 nt, Human
agcuuccccgccugugcuc

SEQ ID NO: 49056 - RNA, 18 nt, Human
agggauuggaacgagggc

SEQ ID NO: 49057 - RNA, 18 nt, Human
aggggacaggaguuccag

SEQ ID NO: 49058 - RNA, 21 nt, Human
caaaaaauaaauucucccuuc

SEQ ID NO: 49059 - RNA, 23 nt, Human
caaaaugggagccauguccugcc

SEQ ID NO: 49060 - RNA, 23 nt, Human
caaggcaauaucggaaaguguau

SEQ ID NO: 49061 - RNA, 19 nt, Human
cacacauccacgaacaaau

SEQ ID NO: 49062 - RNA, 21 nt, Human
caccaggacgagggccgucuc

SEQ ID NO: 49063 - RNA, 21 nt, Human
cagaaauaaauccccccuccc

SEQ ID NO: 49064 - RNA, 18 nt, Human
ccccccuccccugccagg

SEQ ID NO: 49065 - RNA, 27 nt, Human
ccccucaggggcaaggacggcagggau

SEQ ID NO: 49066 - RNA, 19 nt, Human
cccgccugugcucccucca

SEQ ID NO: 49067 - RNA, 25 nt, Human
cccggaaagcccagcggcaaaggca

SEQ ID NO: 49068 - RNA, 19 nt, Human
cccuaugccuaagaccccc

SEQ ID NO: 49069 - RNA, 19 nt, Human
cccuaugccuaagaccccu

SEQ ID NO: 49070 - RNA, 19 nt, Human
cccuccacagucccggaaa

SEQ ID NO: 49071 - RNA, 25 nt, Human
ccucagagcucacacauccacgaac

SEQ ID NO: 49072 - RNA, 19 nt, Human
ccucccuucaaaaugggag

SEQ ID NO: 49073 - RNA, 18 nt, Human
ccucuucuugucuggggc

SEQ ID NO: 49074 - RNA, 19 nt, Human
ccugccccaccaagcccug

SEQ ID NO: 49075 - RNA, 20 nt, Human
cgaacaaaugaaggcugagg

SEQ ID NO: 49076 - RNA, 21 nt, Human
cgaacaaaugaaggcugagga

SEQ ID NO: 49077 - RNA, 23 nt, Human
cgagggccgucucaccucacucg

SEQ ID NO: 49078 - RNA, 21 nt, Human
cggaaagcccagcggcaaagg

SEQ ID NO: 49079 - RNA, 18 nt, Human
cuaugccuaagaccccua

SEQ ID NO: 49080 - RNA, 19 nt, Human
cucaccucacucggaccac

SEQ ID NO: 49081 - RNA, 19 nt, Human
cucuggacugggccuccuc

SEQ ID NO: 49082 - RNA, 23 nt, Human
cuuucuguucucaugacuaaggg

SEQ ID NO: 49083 - RNA, 20 nt, Human
gaccucccuucaaaauggga

SEQ ID NO: 49084 - RNA, 18 nt, Human
gaucaggaacaccaggac

SEQ ID NO: 49085 - RNA, 22 nt, Human
gcagggauuggaacgagggcuc

SEQ ID NO: 49086 - RNA, 23 nt, Human
gcucuggacugggccuccucuca

SEQ ID NO: 49087 - RNA, 21 nt, Human
ggaacgagggcucuggaagga

SEQ ID NO: 49088 - RNA, 21 nt, Human
ggagguuucuaaaccuaaagu

SEQ ID NO: 49089 - RNA, 18 nt, Human
ggccuccucucagggcuc

SEQ ID NO: 49090 - RNA, 21 nt, Human
gggacaggaguuccagaagaa

SEQ ID NO: 49091 - RNA, 21 nt, Human
gggcggaggggaggccaccuc

SEQ ID NO: 49092 - RNA, 20 nt, Human
uaaauccccccuccccugcc

SEQ ID NO: 49093 - RNA, 20 nt, Human
uagaagaucuguuuauauau

SEQ ID NO: 49094 - RNA, 21 nt, Human
ucagagcucacacauccacga

SEQ ID NO: 49095 - RNA, 19 nt, Human
ucagggcucucugagaccg

SEQ ID NO: 49096 - RNA, 19 nt, Human
uccaggaaggucgggacuu

SEQ ID NO: 49097 - RNA, 24 nt, Human
uccaggaaggucgggacuuccuuc

SEQ ID NO: 49098 - RNA, 21 nt, Human
ucccagcucugccacccuccu

SEQ ID NO: 49099 - RNA, 22 nt, Human
uccccgccugugcucccuccac

SEQ ID NO: 49100 - RNA, 19 nt, Human
ucccuccacagucccggaa

SEQ ID NO: 49101 - RNA, 23 nt, Human
ucucuuaaagcaguagcaaaggc

SEQ ID NO: 49102 - RNA, 20 nt, Human
ucuuucagaaauaaaucccc

SEQ ID NO: 49103 - RNA, 24 nt, Human
ugaaaggaaauauugcacuuucug

SEQ ID NO: 49104 - RNA, 19 nt, Human
ugaaguggagcuuccccgc

SEQ ID NO: 49105 - RNA, 19 nt, Human
ugagggccucuucuugucu

SEQ ID NO: 49106 - RNA, 18 nt, Human
ugccuaagaccccuaugc

SEQ ID NO: 49107 - RNA, 19 nt, Human
ugcuggggacacuacaggc

SEQ ID NO: 49108 - RNA, 19 nt, Human
uggaacgagggcucuggaa

SEQ ID NO: 49109 - RNA, 24 nt, Human
ugucccagcucugccacccuccug

SEQ ID NO: 49110 - RNA, 20 nt, Human
uuccagaagaaccuuucaag

SEQ ID NO: 49111 - RNA, 25 nt, Human
uucucaugacuaaggggacaggagu

SEQ ID NO: 49112 - RNA, 28 nt, Human
caguggguugaaguccuuccccccuggg

SEQ ID NO: 49113 - RNA, 23 nt, Human
uggguugaaguccuucgacugcu

SEQ ID NO: 49114 - RNA, 18 nt, Human
aaaaggaaggcaaagaca

SEQ ID NO: 49115 - RNA, 22 nt, Human
aaacagauaugcacacaaagac

SEQ ID NO: 49116 - RNA, 25 nt, Human
aaaccaaagcccacggccucccacc

SEQ ID NO: 49117 - RNA, 24 nt, Human
aaagaucgcgccauugcacuccag

SEQ ID NO: 49118 - RNA, 22 nt, Human
aaagcauaccaugucccaggac

SEQ ID NO: 49119 - RNA, 23 nt, Human
aacauucuccugaaauauggcca

SEQ ID NO: 49120 - RNA, 18 nt, Human
aaccaaagcccacggccu

SEQ ID NO: 49121 - RNA, 22 nt, Human
aaccugcugcccagacagacag

SEQ ID NO: 49122 - RNA, 20 nt, Human
aaccugggguggagagcuga

SEQ ID NO: 49123 - RNA, 20 nt, Human
aagaaacuugcccaaaacca

SEQ ID NO: 49124 - RNA, 23 nt, Human
aagaaacuugcccaaaaccaggc

SEQ ID NO: 49125 - RNA, 19 nt, Human
aagaaagaaagucacuugc

SEQ ID NO: 49126 - RNA, 22 nt, Human
aagaagcagagacaagccaccc

SEQ ID NO: 49127 - RNA, 19 nt, Human
aagagaugcuccaugcccc

SEQ ID NO: 49128 - RNA, 21 nt, Human
aagauuuggcacauggaaaca

SEQ ID NO: 49129 - RNA, 19 nt, Human
aagcagagacaagccaccc

SEQ ID NO: 49130 - RNA, 23 nt, Human
aagcagagacaagccacccaagg

SEQ ID NO: 49131 - RNA, 21 nt, Human
aagcauggaauaggcacuccu

SEQ ID NO: 49132 - RNA, 19 nt, Human
aagguuccucuuccccacc

SEQ ID NO: 49133 - RNA, 20 nt, Human
aauugcuugaacccgggugg

SEQ ID NO: 49134 - RNA, 20 nt, Human
acaaaauauucccaggaaaa

SEQ ID NO: 49135 - RNA, 24 nt, Human
acaaaauauucccaggaaaaaaga

SEQ ID NO: 49136 - RNA, 23 nt, Human
acaaagaccaacaugcacacaca

SEQ ID NO: 49137 - RNA, 18 nt, Human
acaagaaacuugcccaaa

SEQ ID NO: 49138 - RNA, 21 nt, Human
acaccuguaaucccagcacuu

SEQ ID NO: 49139 - RNA, 23 nt, Human
acaccuguaaucccagcacuuug

SEQ ID NO: 49140 - RNA, 20 nt, Human
acagagugagacuccgucuc

SEQ ID NO: 49141 - RNA, 23 nt, Human
acagagugagacuccgucucaaa

SEQ ID NO: 49142 - RNA, 24 nt, Human
acagagugagacuccgucucaaaa

SEQ ID NO: 49143 - RNA, 19 nt, Human
accaacaaauucaggccag

SEQ ID NO: 49144 - RNA, 21 nt, Human
accaacugggugaggaaaggg

SEQ ID NO: 49145 - RNA, 23 nt, Human
accaaguagucucuuccuauccc

SEQ ID NO: 49146 - RNA, 19 nt, Human
acccagaaaccaggccucc

SEQ ID NO: 49147 - RNA, 23 nt, Human
acccagaaaccaggccuccacag

SEQ ID NO: 49148 - RNA, 18 nt, Human
acccagugagcacagagu

SEQ ID NO: 49149 - RNA, 20 nt, Human
acccagugagcacagagucc

SEQ ID NO: 49150 - RNA, 23 nt, Human
accccagccccaaagcauaccau

SEQ ID NO: 49151 - RNA, 21 nt, Human
accccauggcaccaaguaguc

SEQ ID NO: 49152 - RNA, 18 nt, Human
accccuccccugcuccca

SEQ ID NO: 49153 - RNA, 22 nt, Human
accccuccccugcucccaaagg

SEQ ID NO: 49154 - RNA, 19 nt, Human
acccucaccccuaccccau

SEQ ID NO: 49155 - RNA, 24 nt, Human
accucgucucuacuaaaaauacaa

SEQ ID NO: 49156 - RNA, 24 nt, Human
accugggcaucucucuacaucccc

SEQ ID NO: 49157 - RNA, 24 nt, Human
acuccagccugggugacagaguga

SEQ ID NO: 49158 - RNA, 23 nt, Human
acucccaaaccuagcaacucuuu

SEQ ID NO: 49159 - RNA, 23 nt, Human
acuugggagggcagguuugggau

SEQ ID NO: 49160 - RNA, 21 nt, Human
agaaagucacuugcauaaucc

SEQ ID NO: 49161 - RNA, 18 nt, Human
agaagacagaggcccaca

SEQ ID NO: 49162 - RNA, 19 nt, Human
agaagacagaggcccacag

SEQ ID NO: 49163 - RNA, 19 nt, Human
agacagaggcccacaggag

SEQ ID NO: 49164 - RNA, 18 nt, Human
agacagcaagagagcacu

SEQ ID NO: 49165 - RNA, 19 nt, Human
agacaggaagggaaucuag

SEQ ID NO: 49166 - RNA, 21 nt, Human
agacaggaagggaaucuagag

SEQ ID NO: 49167 - RNA, 18 nt, Human
agaccuggaaaacagaua

SEQ ID NO: 49168 - RNA, 19 nt, Human
agacgagcaugauccaagc

SEQ ID NO: 49169 - RNA, 21 nt, Human
agacgagcaugauccaagcaa

SEQ ID NO: 49170 - RNA, 18 nt, Human
agagaaacugaggcacca

SEQ ID NO: 49171 - RNA, 18 nt, Human
agagaugcuccaugcccc

SEQ ID NO: 49172 - RNA, 22 nt, Human
agagcuucucccuccucugcuc

SEQ ID NO: 49173 - RNA, 20 nt, Human
agagguugcagugagcaaag

SEQ ID NO: 49174 - RNA, 24 nt, Human
agagguugcagugagcaaagaucg

SEQ ID NO: 49175 - RNA, 21 nt, Human
agauaggaggauggcuuaagg

SEQ ID NO: 49176 - RNA, 20 nt, Human
agauaugcacacaaagacca

SEQ ID NO: 49177 - RNA, 20 nt, Human
agcauggaauaggcacuccu

SEQ ID NO: 49178 - RNA, 21 nt, Human
agccacccaaggcugaggucu

SEQ ID NO: 49179 - RNA, 19 nt, Human
agcccacggccucccaccu

SEQ ID NO: 49180 - RNA, 19 nt, Human
agcccuggccggccugcuc

SEQ ID NO: 49181 - RNA, 21 nt, Human
agcccuggccggccugcucuu

SEQ ID NO: 49182 - RNA, 23 nt, Human
agccuggccaagauggugaaacc

SEQ ID NO: 49183 - RNA, 24 nt, Human
agccugggugacagagugagacuc

SEQ ID NO: 49184 - RNA, 24 nt, Human
agcuccugaccugacauccccaca

SEQ ID NO: 49185 - RNA, 18 nt, Human
agcugaggagcaggagca

SEQ ID NO: 49186 - RNA, 21 nt, Human
aggaaaaaagagggaaaagaa

SEQ ID NO: 49187 - RNA, 20 nt, Human
aggaagagaugcuccaugcc

SEQ ID NO: 49188 - RNA, 19 nt, Human
aggagagaggcaaccuggg

SEQ ID NO: 49189 - RNA, 23 nt, Human
aggagcacaaggacucacauaga

SEQ ID NO: 49190 - RNA, 24 nt, Human
aggcacaguggcuuacaccuguaa

SEQ ID NO: 49191 - RNA, 24 nt, Human
aggcaggagaauugcuugaacccg

SEQ ID NO: 49192 - RNA, 28 nt, Human
aggccagagucaaggagguugcagggaa

SEQ ID NO: 49193 - RNA, 24 nt, Human
aggcgugguggcucacguccguaa

SEQ ID NO: 49194 - RNA, 22 nt, Human
agggagcuggugucagaagggg

SEQ ID NO: 49195 - RNA, 19 nt, Human
agggguaaaaggaaggcaa

SEQ ID NO: 49196 - RNA, 24 nt, Human
agguagaucacaaggucaggaguu

SEQ ID NO: 49197 - RNA, 25 nt, Human
aggugaacuuccagcuccugaccug

SEQ ID NO: 49198 - RNA, 24 nt, Human
aguggcuuacaccuguaaucccag

SEQ ID NO: 49199 - RNA, 23 nt, Human
auaaaaccaaagcccacggccuc

SEQ ID NO: 49200 - RNA, 22 nt, Human
aucacaaggucaggaguucaag

SEQ ID NO: 49201 - RNA, 19 nt, Human
aucacagccacugccacca

SEQ ID NO: 49202 - RNA, 24 nt, Human
aucgcgccauugcacuccagccug

SEQ ID NO: 49203 - RNA, 18 nt, Human
aucuggaccccgacgggg

SEQ ID NO: 49204 - RNA, 19 nt, Human
augaaguaccugauggccc

SEQ ID NO: 49205 - RNA, 19 nt, Human
augauccaagcacagccug

SEQ ID NO: 49206 - RNA, 21 nt, Human
auugcacuccagccuggguga

SEQ ID NO: 49207 - RNA, 24 nt, Human
auugcacuccagccugggugacag

SEQ ID NO: 49208 - RNA, 24 nt, Human
caaaaccaggcacaguggcuuaca

SEQ ID NO: 49209 - RNA, 25 nt, Human
caaaaccaggcacaguggcuuacac

SEQ ID NO: 49210 - RNA, 20 nt, Human
caaaccccagacaguucaag

SEQ ID NO: 49211 - RNA, 21 nt, Human
caacaggugagaacccaagac

SEQ ID NO: 49212 - RNA, 23 nt, Human
caacaggugagaacccaagacac

SEQ ID NO: 49213 - RNA, 21 nt, Human
caaccugggguggagagcuga

SEQ ID NO: 49214 - RNA, 19 nt, Human
caagaaacuugcccaaaac

SEQ ID NO: 49215 - RNA, 22 nt, Human
caagacaaagugaucuucaagc

SEQ ID NO: 49216 - RNA, 21 nt, Human
caagagagcacuggggcagag

SEQ ID NO: 49217 - RNA, 24 nt, Human
caagauggugaaaccucgucucua

SEQ ID NO: 49218 - RNA, 23 nt, Human
caagccacccaaggcugaggucu

SEQ ID NO: 49219 - RNA, 25 nt, Human
caaguagucucuuccuaucccuucc

SEQ ID NO: 49220 - RNA, 20 nt, Human
caagucuuuuccccuccuuc

SEQ ID NO: 49221 - RNA, 23 nt, Human
caagugcacugccugccccuucc

SEQ ID NO: 49222 - RNA, 20 nt, Human
caauacagcaagacccugcc

SEQ ID NO: 49223 - RNA, 20 nt, Human
cacacaaagaccaacaugca

SEQ ID NO: 49224 - RNA, 20 nt, Human
cacaguaccagugaggccag

SEQ ID NO: 49225 - RNA, 18 nt, Human
cacauagaccuggaaaac

SEQ ID NO: 49226 - RNA, 24 nt, Human
cacccaaggcugaggucuucccac

SEQ ID NO: 49227 - RNA, 18 nt, Human
cacccccacagugguuac

SEQ ID NO: 49228 - RNA, 20 nt, Human
caccugcaggugaacuucca

SEQ ID NO: 49229 - RNA, 23 nt, Human
caccuggcaagaagcagagacaa

SEQ ID NO: 49230 - RNA, 18 nt, Human
caccuguaaucccagcac

SEQ ID NO: 49231 - RNA, 19 nt, Human
caccuguaaucccagcacu

SEQ ID NO: 49232 - RNA, 18 nt, Human
caccuuggucccuucagc

SEQ ID NO: 49233 - RNA, 24 nt, Human
cacguccguaaucccagcacuuug

SEQ ID NO: 49234 - RNA, 22 nt, Human
cacuccagccugggugacagag

SEQ ID NO: 49235 - RNA, 24 nt, Human
cacuccagccugggugacagagug

SEQ ID NO: 49236 - RNA, 19 nt, Human
cacugccaccacuaguagc

SEQ ID NO: 49237 - RNA, 19 nt, Human
cacugccugccccuuccac

SEQ ID NO: 49238 - RNA, 18 nt, Human
cacuuuggaaggcccugg

SEQ ID NO: 49239 - RNA, 19 nt, Human
cagacagacagggaagggu

SEQ ID NO: 49240 - RNA, 23 nt, Human
cagacaguucaagugcuggcaug

SEQ ID NO: 49241 - RNA, 23 nt, Human
cagagacaagccacccaaggcug

SEQ ID NO: 49242 - RNA, 20 nt, Human
cagaggucccuuuguucccc

SEQ ID NO: 49243 - RNA, 21 nt, Human
cagcacuuuggaaggcccugg

SEQ ID NO: 49244 - RNA, 24 nt, Human
cagcacuuuggaaggcccuggcag

SEQ ID NO: 49245 - RNA, 18 nt, Human
cagcacuuugugaggccg

SEQ ID NO: 49246 - RNA, 24 nt, Human
cagcacuuugugaggccgagauag

SEQ ID NO: 49247 - RNA, 21 nt, Human
cagcuccugaccugacauccc

SEQ ID NO: 49248 - RNA, 19 nt, Human
caggacaagaaacuugccc

SEQ ID NO: 49249 - RNA, 19 nt, Human
caggguguggacaggcccu

SEQ ID NO: 49250 - RNA, 18 nt, Human
caguaccagugaggccag

SEQ ID NO: 49251 - RNA, 20 nt, Human
caugcuaccccagccccaaa

SEQ ID NO: 49252 - RNA, 19 nt, Human
cauugcacuccagccuggg

SEQ ID NO: 49253 - RNA, 21 nt, Human
cauugcacuccagccugggug

SEQ ID NO: 49254 - RNA, 22 nt, Human
cauugcacuccagccuggguga

SEQ ID NO: 49255 - RNA, 24 nt, Human
cauugcacuccagccugggugaca

SEQ ID NO: 49256 - RNA, 24 nt, Human
cauugcacuccagccugggugaca

SEQ ID NO: 49257 - RNA, 23 nt, Human
ccaaaccuagcaacucuggaaac

SEQ ID NO: 49258 - RNA, 19 nt, Human
ccaaagcauaccauguccc

SEQ ID NO: 49259 - RNA, 19 nt, Human
ccaaagcccacggccuccc

SEQ ID NO: 49260 - RNA, 20 nt, Human
ccaacaugcacacacaguua

SEQ ID NO: 49261 - RNA, 23 nt, Human
ccaccacuaguagcucauuaccu

SEQ ID NO: 49262 - RNA, 19 nt, Human
ccacccagugagcacagag

SEQ ID NO: 49263 - RNA, 26 nt, Human
ccacucccaaaccuagcaacucuuuu

SEQ ID NO: 49264 - RNA, 21 nt, Human
ccacugccaccacuaguagcu

SEQ ID NO: 49265 - RNA, 18 nt, Human
ccagcccucaaggcuuca

SEQ ID NO: 49266 - RNA, 26 nt, Human
ccagcuccugaccugacauccccaca

SEQ ID NO: 49267 - RNA, 20 nt, Human
ccauugcacuccagccuggg

SEQ ID NO: 49268 - RNA, 21 nt, Human
ccauugcacuccagccugggu

SEQ ID NO: 49269 - RNA, 21 nt, Human
ccauugcacuccagccugggu

SEQ ID NO: 49270 - RNA, 22 nt, Human
ccauugcacuccagccugggug

SEQ ID NO: 49271 - RNA, 24 nt, Human
ccauugcacuccagccugggugac

SEQ ID NO: 49272 - RNA, 24 nt, Human
cccaaaccuagcaacucuggaaac

SEQ ID NO: 49273 - RNA, 27 nt, Human
cccacacacaggcuugcucucugagca

SEQ ID NO: 49274 - RNA, 22 nt, Human
cccacucugaucuacuuauacc

SEQ ID NO: 49275 - RNA, 19 nt, Human
cccagaaaccaggccucca

SEQ ID NO: 49276 - RNA, 21 nt, Human
cccagacaguucaagugcugg

SEQ ID NO: 49277 - RNA, 24 nt, Human
cccagcacuuuggaaggcccuggc

SEQ ID NO: 49278 - RNA, 19 nt, Human
ccccaaagcauaccauguc

SEQ ID NO: 49279 - RNA, 20 nt, Human
ccccacacacaggcuugcuc

SEQ ID NO: 49280 - RNA, 30 nt, Human
ccccaucccacuccugugcaaccugggcaa

SEQ ID NO: 49281 - RNA, 20 nt, Human
cccccgaacggcacuuaggg

SEQ ID NO: 49282 - RNA, 23 nt, Human
ccccgccgcccccgcgggcuccg

SEQ ID NO: 49283 - RNA, 18 nt, Human
cccgccgcccccgcgggc

SEQ ID NO: 49284 - RNA, 19 nt, Human
cccgcgcguccuggccguc

SEQ ID NO: 49285 - RNA, 22 nt, Human
cccuuguuuuccagcuugaggg

SEQ ID NO: 49286 - RNA, 22 nt, Human
ccgccgcccccgcgggcuccgg

SEQ ID NO: 49287 - RNA, 18 nt, Human
ccgcgccugcccugggcc

SEQ ID NO: 49288 - RNA, 22 nt, Human
ccuaucccuuccuauccaggga

SEQ ID NO: 49289 - RNA, 23 nt, Human
ccucccaccuccugacuccucua

SEQ ID NO: 49290 - RNA, 24 nt, Human
ccuccccugcucccaaaggcugga

SEQ ID NO: 49291 - RNA, 23 nt, Human
ccucuguccaucaaaccccagac

SEQ ID NO: 49292 - RNA, 18 nt, Human
ccugauggcccauuuggu

SEQ ID NO: 49293 - RNA, 20 nt, Human
ccugccccuuccacucccaa

SEQ ID NO: 49294 - RNA, 23 nt, Human
ccugcccugggcccccgccccgc

SEQ ID NO: 49295 - RNA, 19 nt, Human
ccugcugggauguucccuu

SEQ ID NO: 49296 - RNA, 21 nt, Human
ccuggccaagauggugaaacc

SEQ ID NO: 49297 - RNA, 24 nt, Human
ccuggccaagauggugaaaccucg

SEQ ID NO: 49298 - RNA, 22 nt, Human
ccugggugacagagugagacuc

SEQ ID NO: 49299 - RNA, 19 nt, Human
ccuguaaucccagcuacuc

SEQ ID NO: 49300 - RNA, 21 nt, Human
ccuguaaucccagcuacucag

SEQ ID NO: 49301 - RNA, 22 nt, Human
ccuguaaucccagcuacucagg

SEQ ID NO: 49302 - RNA, 24 nt, Human
cgagcccgcgcguccuggccgucc

SEQ ID NO: 49303 - RNA, 26 nt, Human
cgccauugcacuccagccugggugac

SEQ ID NO: 49304 - RNA, 22 nt, Human
cggcuccgcgccugcccugggc

SEQ ID NO: 49305 - RNA, 23 nt, Human
cgguagguagccccuuguuuucc

SEQ ID NO: 49306 - RNA, 23 nt, Human
cguccguaaucccagcacuuugg

SEQ ID NO: 49307 - RNA, 23 nt, Human
cuacugaccccuccccugcuccc

SEQ ID NO: 49308 - RNA, 21 nt, Human
cuagaaacaugcuagacucag

SEQ ID NO: 49309 - RNA, 20 nt, Human
cuagaguucaaccuccuaac

SEQ ID NO: 49310 - RNA, 24 nt, Human
cuagcaacucuggaaacccuucuc

SEQ ID NO: 49311 - RNA, 24 nt, Human
cucacguccguaaucccagcacuu

SEQ ID NO: 49312 - RNA, 27 nt, Human
cucagcccugaaccugcugccgguucc

SEQ ID NO: 49313 - RNA, 26 nt, Human
cucauaaaauuacuuggagguaggca

SEQ ID NO: 49314 - RNA, 19 nt, Human
cucccaccuccugacuccu

SEQ ID NO: 49315 - RNA, 26 nt, Human
cuccgucucaaaaaaaaaaaauuagc

SEQ ID NO: 49316 - RNA, 21 nt, Human
cucuggaaacccuucuccucu

SEQ ID NO: 49317 - RNA, 18 nt, Human
cucuguccaucaaacccc

SEQ ID NO: 49318 - RNA, 18 nt, Human
cugaaauauggccaaagc

SEQ ID NO: 49319 - RNA, 19 nt, Human
cugaccccuccccugcucc

SEQ ID NO: 49320 - RNA, 18 nt, Human
cuggaaacccuucuccuc

SEQ ID NO: 49321 - RNA, 20 nt, Human
cuggccggccugcucuuugg

SEQ ID NO: 49322 - RNA, 22 nt, Human
cuuacaccuguaaucccagcac

SEQ ID NO: 49323 - RNA, 25 nt, Human
cuuccagcuccugaccugacauccc

SEQ ID NO: 49324 - RNA, 27 nt, Human
cuuccagcuccugaccugacaucuuac

SEQ ID NO: 49325 - RNA, 24 nt, Human
cuucugccagcccucaaggcuuca

SEQ ID NO: 49326 - RNA, 20 nt, Human
cuugaacccggguggcagag

SEQ ID NO: 49327 - RNA, 19 nt, Human
gaaaccucgucucuacuaa

SEQ ID NO: 49328 - RNA, 24 nt, Human
gaagacagaggcccacaggagaga

SEQ ID NO: 49329 - RNA, 21 nt, Human
gaagagaugcuccaugccccc

SEQ ID NO: 49330 - RNA, 21 nt, Human
gacagaggcccacaggagaga

SEQ ID NO: 49331 - RNA, 24 nt, Human
gagacuugggagggcagguuuggg

SEQ ID NO: 49332 - RNA, 21 nt, Human
gagagcagccugggcaauaca

SEQ ID NO: 49333 - RNA, 24 nt, Human
gagcugaggcaggagaauugcuug

SEQ ID NO: 49334 - RNA, 20 nt, Human
gaggauggcuuaaggcuagg

SEQ ID NO: 49335 - RNA, 18 nt, Human
gagguaggcaacaagggu

SEQ ID NO: 49336 - RNA, 22 nt, Human
gagguaggcaacaaggguaucc

SEQ ID NO: 49337 - RNA, 22 nt, Human
gaucacaaggucaggaguucaa

SEQ ID NO: 49338 - RNA, 24 nt, Human
gaucacaaggucaggaguucaaga

SEQ ID NO: 49339 - RNA, 21 nt, Human
gcaacaaggguauccccaauc

SEQ ID NO: 49340 - RNA, 19 nt, Human
gcaauacagcaagacccug

SEQ ID NO: 49341 - RNA, 23 nt, Human
gcacuccagccugggugacagag

SEQ ID NO: 49342 - RNA, 24 nt, Human
gcacuccagccugggugacagagu

SEQ ID NO: 49343 - RNA, 30 nt, Human
gcaggagcacaaggacucacauagaccugg

SEQ ID NO: 49344 - RNA, 19 nt, Human
gccauugcacuccagccug

SEQ ID NO: 49345 - RNA, 24 nt, Human
gccauugcacuccagccuggguga

SEQ ID NO: 49346 - RNA, 18 nt, Human
gccccaaagcauaccaug

SEQ ID NO: 49347 - RNA, 23 nt, Human
gccuguaaucccagcuacucagg

SEQ ID NO: 49348 - RNA, 20 nt, Human
gcgggcgccuguaaucccag

SEQ ID NO: 49349 - RNA, 19 nt, Human
gcuaccacaccccauccca

SEQ ID NO: 49350 - RNA, 21 nt, Human
ggaaaaaagagggaaaagaag

SEQ ID NO: 49351 - RNA, 21 nt, Human
ggaaacccuucuccucugccu

SEQ ID NO: 49352 - RNA, 21 nt, Human
ggaaauuccucagccucuguc

SEQ ID NO: 49353 - RNA, 24 nt, Human
ggaauaggcacuccucaugccugu

SEQ ID NO: 49354 - RNA, 21 nt, Human
ggacaagaaacuugcccaaaa

SEQ ID NO: 49355 - RNA, 20 nt, Human
ggcaacagaagaggaagaga

SEQ ID NO: 49356 - RNA, 22 nt, Human
ggcaagugcacugccugccccu

SEQ ID NO: 49357 - RNA, 19 nt, Human
ggcagacgagcaugaucca

SEQ ID NO: 49358 - RNA, 23 nt, Human
ggcagagguugcagugagcaaag

SEQ ID NO: 49359 - RNA, 18 nt, Human
ggcagagugaccugaucu

SEQ ID NO: 49360 - RNA, 21 nt, Human
ggcagguagaucacaagguca

SEQ ID NO: 49361 - RNA, 23 nt, Human
ggcagguagaucacaaggucagg

SEQ ID NO: 49362 - RNA, 20 nt, Human
ggccaagauggugaaaccuc

SEQ ID NO: 49363 - RNA, 21 nt, Human
ggccaggcgugguggcucacg

SEQ ID NO: 49364 - RNA, 18 nt, Human
ggcgugguggcgggcgcc

SEQ ID NO: 49365 - RNA, 23 nt, Human
ggcgugguggcgggcgccuguaa

SEQ ID NO: 49366 - RNA, 19 nt, Human
gggauauggcuggggacag

SEQ ID NO: 49367 - RNA, 23 nt, Human
gggcaagugcacugccugccccu

SEQ ID NO: 49368 - RNA, 20 nt, Human
gggcauggcuggcacugugg

SEQ ID NO: 49369 - RNA, 24 nt, Human
gggccaggcgugguggcucacguc

SEQ ID NO: 49370 - RNA, 24 nt, Human
gguggcgggcgccuguaaucccag

SEQ ID NO: 49371 - RNA, 24 nt, Human
gguggcucacguccguaaucccag

SEQ ID NO: 49372 - RNA, 21 nt, Human
guggcagagguugcagugagc

SEQ ID NO: 49373 - RNA, 25 nt, Human
guucaccauccucccccacccccac

SEQ ID NO: 49374 - RNA, 24 nt, Human
uaaaaccaaagcccacggccuccc

SEQ ID NO: 49375 - RNA, 27 nt, Human
uaaaaccaaagcccacggccucccacc

SEQ ID NO: 49376 - RNA, 20 nt, Human
uaagaaagaaagucacuugc

SEQ ID NO: 49377 - RNA, 24 nt, Human
uaagauuuggcacauggaaacauu

SEQ ID NO: 49378 - RNA, 24 nt, Human
uacaaaauauuguacaaaauauuc

SEQ ID NO: 49379 - RNA, 23 nt, Human
uacagacagagaaacugaggcac

SEQ ID NO: 49380 - RNA, 22 nt, Human
uaccagugaggccagacacccc

SEQ ID NO: 49381 - RNA, 21 nt, Human
uacccagaaaccaggccucca

SEQ ID NO: 49382 - RNA, 21 nt, Human
uaccugauggcccauuugguu

SEQ ID NO: 49383 - RNA, 24 nt, Human
uacugaccccuccccugcucccaa

SEQ ID NO: 49384 - RNA, 22 nt, Human
uagaucacaaggucaggaguuc

SEQ ID NO: 49385 - RNA, 19 nt, Human
uaugcacacaaagaccaac

SEQ ID NO: 49386 - RNA, 24 nt, Human
uaugcacacaaagaccaacaugca

SEQ ID NO: 49387 - RNA, 31 nt, Human
uaugcacacaaagaccaacaugcacacagug

SEQ ID NO: 49388 - RNA, 23 nt, Human
uauggccaaagcuggcuccccag

SEQ ID NO: 49389 - RNA, 24 nt, Human
ucacaaggucaggaguucaagacc

SEQ ID NO: 49390 - RNA, 21 nt, Human
ucagaggucccuuuguucccc

SEQ ID NO: 49391 - RNA, 23 nt, Human
uccagccugggugacagagugag

SEQ ID NO: 49392 - RNA, 24 nt, Human
uccagccugggugacagagugaga

SEQ ID NO: 49393 - RNA, 18 nt, Human
ucccaaaggcuggaagau

SEQ ID NO: 49394 - RNA, 19 nt, Human
ucccagaagacagaggccu

SEQ ID NO: 49395 - RNA, 21 nt, Human
uccccacacacaggcuugcuc

SEQ ID NO: 49396 - RNA, 19 nt, Human
ucccucugcuucugcuacu

SEQ ID NO: 49397 - RNA, 20 nt, Human
uccggccggccggccggccg

SEQ ID NO: 49398 - RNA, 21 nt, Human
uccuaucccuuccuauccagg

SEQ ID NO: 49399 - RNA, 23 nt, Human
ucgcgccauugcacuccagccug

SEQ ID NO: 49400 - RNA, 23 nt, Human
ucucuacuaaaaauacaaaaauu

SEQ ID NO: 49401 - RNA, 20 nt, Human
ucugagcauuuuucacagua

SEQ ID NO: 49402 - RNA, 23 nt, Human
ucuggcacugccccagcccuggc

SEQ ID NO: 49403 - RNA, 22 nt, Human
ugagaacccaagacacagucag

SEQ ID NO: 49404 - RNA, 20 nt, Human
ugaggaaagggacaauggua

SEQ ID NO: 49405 - RNA, 19 nt, Human
ugaggagcaggagcacaag

SEQ ID NO: 49406 - RNA, 22 nt, Human
ugaggcaccaacaaauucaggc

SEQ ID NO: 49407 - RNA, 24 nt, Human
ugaggcaggagaauugcuugaacc

SEQ ID NO: 49408 - RNA, 25 nt, Human
ugaggcaggagaauugcuugaaccc

SEQ ID NO: 49409 - RNA, 21 nt, Human
ugagggcagacgagcaugauc

SEQ ID NO: 49410 - RNA, 23 nt, Human
ugaucuacuuauacccucacccc

SEQ ID NO: 49411 - RNA, 19 nt, Human
ugcaaccugggcaucucuc

SEQ ID NO: 49412 - RNA, 22 nt, Human
ugcacuccagccugggugacag

SEQ ID NO: 49413 - RNA, 24 nt, Human
ugcacuccagccugggugacagag

SEQ ID NO: 49414 - RNA, 19 nt, Human
ugcacugccugccccuucc

SEQ ID NO: 49415 - RNA, 24 nt, Human
ugcaugaagaugcccaagggaggc

SEQ ID NO: 49416 - RNA, 19 nt, Human
ugcccaggaccagugcugg

SEQ ID NO: 49417 - RNA, 19 nt, Human
ugcccaggaccagugcugg

SEQ ID NO: 49418 - RNA, 20 nt, Human
ugcccaggaccagugcuggg

SEQ ID NO: 49419 - RNA, 18 nt, Human
ugcccugggcccccgccc

SEQ ID NO: 49420 - RNA, 21 nt, Human
ugcccugggcccccgccccgc

SEQ ID NO: 49421 - RNA, 22 nt, Human
ugcccugggcccccgccccgcc

SEQ ID NO: 49422 - RNA, 23 nt, Human
ugcuaccacaccccaucccacuc

SEQ ID NO: 49423 - RNA, 24 nt, Human
ugcucuuuggcaccugcaggugaa

SEQ ID NO: 49424 - RNA, 18 nt, Human
ugcugggauguucccuuu

SEQ ID NO: 49425 - RNA, 22 nt, Human
uggaaaacagauaugcacacaa

SEQ ID NO: 49426 - RNA, 19 nt, Human
uggaauaggcacuccucau

SEQ ID NO: 49427 - RNA, 18 nt, Human
uggagguaggcaacaagg

SEQ ID NO: 49428 - RNA, 21 nt, Human
uggcaacagaagaggaagaga

SEQ ID NO: 49429 - RNA, 22 nt, Human
uggcaacagaagaggaagagau

SEQ ID NO: 49430 - RNA, 23 nt, Human
uggcacugugguacggggaucca

SEQ ID NO: 49431 - RNA, 24 nt, Human
uggcagagguugcagugagcaaag

SEQ ID NO: 49432 - RNA, 24 nt, Human
uggcagguagaucacaaggucagg

SEQ ID NO: 49433 - RNA, 19 nt, Human
uggcauggagcacuggggc

SEQ ID NO: 49434 - RNA, 22 nt, Human
uggcgggcgccuguaaucccag

SEQ ID NO: 49435 - RNA, 22 nt, Human
uggcucacguccguaaucccag

SEQ ID NO: 49436 - RNA, 24 nt, Human
uggcucacguccguaaucccagca

SEQ ID NO: 49437 - RNA, 21 nt, Human
uggcuccccagagcuucuccc

SEQ ID NO: 49438 - RNA, 21 nt, Human
uggcuuacaccuguaauccca

SEQ ID NO: 49439 - RNA, 22 nt, Human
uggcuuacaccuguaaucccag

SEQ ID NO: 49440 - RNA, 24 nt, Human
uggcuuacaccuguaaucccagca

SEQ ID NO: 49441 - RNA, 20 nt, Human
ugggauguucccuuuugugg

SEQ ID NO: 49442 - RNA, 18 nt, Human
ugggccaggcgugguggc

SEQ ID NO: 49443 - RNA, 21 nt, Human
ugggccaggcgugguggcuca

SEQ ID NO: 49444 - RNA, 23 nt, Human
uggggacaggggaguagauuuuc

SEQ ID NO: 49445 - RNA, 23 nt, Human
uggggcagagugaccugaucugg

SEQ ID NO: 49446 - RNA, 20 nt, Human
ugguagggaaggaaggagau

SEQ ID NO: 49447 - RNA, 24 nt, Human
ugguggcgggcgccuguaauccca

SEQ ID NO: 49448 - RNA, 24 nt, Human
ugguggcucacguccguaauccca

SEQ ID NO: 49449 - RNA, 20 nt, Human
ugguugaugcaugaagaugc

SEQ ID NO: 49450 - RNA, 19 nt, Human
ugucagaaggggcaugagg

SEQ ID NO: 49451 - RNA, 18 nt, Human
ugucccaggacacuaucu

SEQ ID NO: 49452 - RNA, 18 nt, Human
uuagccgggcgugguggc

SEQ ID NO: 49453 - RNA, 22 nt, Human
uuagccgggcgugguggcgggc

SEQ ID NO: 49454 - RNA, 24 nt, Human
uuagccgggcgugguggcgggcgc

SEQ ID NO: 49455 - RNA, 24 nt, Human
uucacaguaccagugaggccagac

SEQ ID NO: 49456 - RNA, 24 nt, Human
uucaccauccucccccacccccac

SEQ ID NO: 49457 - RNA, 23 nt, Human
uugcaaaggcaagcauggaauag

SEQ ID NO: 49458 - RNA, 18 nt, Human
uugcuugaacccgggugg

SEQ ID NO: 49459 - RNA, 25 nt, Human
uuggucccuucagcugaauuugugg

SEQ ID NO: 49460 - RNA, 19 nt, Human
uugguugaugcaugaagau

SEQ ID NO: 49461 - RNA, 21 nt, Human
uugguugaugcaugaagaugc

SEQ ID NO: 49462 - RNA, 24 nt, Human
uuuguacaaaauauuguacaaaau

SEQ ID NO: 49463 - RNA, 22 nt, Human
uuuuccccuccuucugccauga

SEQ ID NO: 49464 - RNA, 18 nt, Human
aaaaagaaaauaccugca

SEQ ID NO: 49465 - RNA, 19 nt, Human
aaaaagaaaauaccugcag

SEQ ID NO: 49466 - RNA, 18 nt, Human
aaaaaguuuuggugugua

SEQ ID NO: 49467 - RNA, 18 nt, Human
aaaccuuccugacuugcc

SEQ ID NO: 49468 - RNA, 18 nt, Human
aagacacauccccaaaac

SEQ ID NO: 49469 - RNA, 19 nt, Human
aagcugccucauucaaagg

SEQ ID NO: 49470 - RNA, 24 nt, Human
aauaagccagaaaaccuuagguau

SEQ ID NO: 49471 - RNA, 21 nt, Human
acagagcuucuggccuccccu

SEQ ID NO: 49472 - RNA, 20 nt, Human
acagauuucaguauaguauu

SEQ ID NO: 49473 - RNA, 20 nt, Human
acagauuucaguauaguauu

SEQ ID NO: 49474 - RNA, 20 nt, Human
acagcucagcuuacuccccc

SEQ ID NO: 49475 - RNA, 20 nt, Human
acccuguuguuacaguuagg

SEQ ID NO: 49476 - RNA, 23 nt, Human
agacagguucaauuuucguuccc

SEQ ID NO: 49477 - RNA, 20 nt, Human
agagcauacacuggagggaa

SEQ ID NO: 49478 - RNA, 20 nt, Human
agauacgugugucugucaua

SEQ ID NO: 49479 - RNA, 19 nt, Human
agcacaguaagacacaucc

SEQ ID NO: 49480 - RNA, 21 nt, Human
agcacaguaagacacaucccc

SEQ ID NO: 49481 - RNA, 22 nt, Human
agcugaccccauaagcugaugc

SEQ ID NO: 49482 - RNA, 21 nt, Human
aggaaagaagagaugcacuca

SEQ ID NO: 49483 - RNA, 22 nt, Human
aggcccaccagggagagggagu

SEQ ID NO: 49484 - RNA, 20 nt, Human
agggcuggggagagggccuc

SEQ ID NO: 49485 - RNA, 26 nt, Human
agggcuggggagagggccucugggau

SEQ ID NO: 49486 - RNA, 22 nt, Human
aguaagacacauccccaaaacc

SEQ ID NO: 49487 - RNA, 20 nt, Human
auaaaacaaaaugacaccag

SEQ ID NO: 49488 - RNA, 25 nt, Human
auaaaacaaaaugacaccaguaauu

SEQ ID NO: 49489 - RNA, 24 nt, Human
caaaaugacaccaguaauuacuug

SEQ ID NO: 49490 - RNA, 21 nt, Human
caacaagucuggucagucacc

SEQ ID NO: 49491 - RNA, 21 nt, Human
caacaugcacagccaucugca

SEQ ID NO: 49492 - RNA, 21 nt, Human
caacucaucccaggaccccaa

SEQ ID NO: 49493 - RNA, 20 nt, Human
cacgacacagcacaggcaga

SEQ ID NO: 49494 - RNA, 19 nt, Human
cacugcuagaucuugagag

SEQ ID NO: 49495 - RNA, 24 nt, Human
cacugugccgccagcauccuccug

SEQ ID NO: 49496 - RNA, 19 nt, Human
cagcauccuccugugcauc

SEQ ID NO: 49497 - RNA, 18 nt, Human
cagcccggggcaacucau

SEQ ID NO: 49498 - RNA, 25 nt, Human
cagcccuucauguaaaaaguuuugg

SEQ ID NO: 49499 - RNA, 25 nt, Human
cagcccuucauguaaaaaguuuugg

SEQ ID NO: 49500 - RNA, 20 nt, Human
cagggccuggagggcaucug

SEQ ID NO: 49501 - RNA, 19 nt, Human
cauccagacugggcugacu

SEQ ID NO: 49502 - RNA, 19 nt, Human
caugcacagccaucugcau

SEQ ID NO: 49503 - RNA, 20 nt, Human
caugcacagccaucugcaug

SEQ ID NO: 49504 - RNA, 22 nt, Human
ccaccgccacccccgcacuuag

SEQ ID NO: 49505 - RNA, 25 nt, Human
ccaccgccacccccgcacuuagcug

SEQ ID NO: 49506 - RNA, 18 nt, Human
cccacagccagcugaccu

SEQ ID NO: 49507 - RNA, 22 nt, Human
cccccgugggccuaggccucug

SEQ ID NO: 49508 - RNA, 20 nt, Human
ccccgcacuuagcuguacuc

SEQ ID NO: 49509 - RNA, 23 nt, Human
ccccuuggugucuagaaaaacag

SEQ ID NO: 49510 - RNA, 20 nt, Human
cccuccaccgccacccccgc

SEQ ID NO: 49511 - RNA, 21 nt, Human
ccugacuugccaggagagccc

SEQ ID NO: 49512 - RNA, 24 nt, Human
ccugugcauccagacugggcugac

SEQ ID NO: 49513 - RNA, 23 nt, Human
cggggcaacucaucccaggaccc

SEQ ID NO: 49514 - RNA, 21 nt, Human
cguucccuccaccgccacccc

SEQ ID NO: 49515 - RNA, 21 nt, Human
cugagcacagcacagugcuuu

SEQ ID NO: 49516 - RNA, 24 nt, Human
cugagcacagcacagugcuuugcu

SEQ ID NO: 49517 - RNA, 18 nt, Human
cugauuccacuuaugugc

SEQ ID NO: 49518 - RNA, 25 nt, Human
cugauuccacuuaugugcagcacau

SEQ ID NO: 49519 - RNA, 21 nt, Human
cugcugcuccccgccuucuug

SEQ ID NO: 49520 - RNA, 21 nt, Human
gagcacagcacagugcuuugc

SEQ ID NO: 49521 - RNA, 25 nt, Human
gaugaggccaccgguuaagucuucc

SEQ ID NO: 49522 - RNA, 20 nt, Human
gcacaguaagacacaucccc

SEQ ID NO: 49523 - RNA, 19 nt, Human
gcagcccggggcaacucau

SEQ ID NO: 49524 - RNA, 18 nt, Human
gccaggcccaccagggag

SEQ ID NO: 49525 - RNA, 26 nt, Human
gccaugaaauuccuuuauacagcaag

SEQ ID NO: 49526 - RNA, 23 nt, Human
gcuugcuucagggaaggagacug

SEQ ID NO: 49527 - RNA, 21 nt, Human
ggaaagaagagaugcacucac

SEQ ID NO: 49528 - RNA, 20 nt, Human
ggagccucugcaugcaccca

SEQ ID NO: 49529 - RNA, 19 nt, Human
ggaggccccagggccugga

SEQ ID NO: 49530 - RNA, 22 nt, Human
ggccguuaaggaggccccaggg

SEQ ID NO: 49531 - RNA, 21 nt, Human
ggcguggggcggagagucuuc

SEQ ID NO: 49532 - RNA, 18 nt, Human
ggcuucccggccuuuucg

SEQ ID NO: 49533 - RNA, 18 nt, Human
gggagagggccucugggc

SEQ ID NO: 49534 - RNA, 18 nt, Human
gggcuggggagagggccu

SEQ ID NO: 49535 - RNA, 20 nt, Human
ggggagagggccucugggcc

SEQ ID NO: 49536 - RNA, 21 nt, Human
ggggccguuaaggaggcccca

SEQ ID NO: 49537 - RNA, 21 nt, Human
guaagacacauccccaaaacc

SEQ ID NO: 49538 - RNA, 20 nt, Human
guccgcacagcucuggcacc

SEQ ID NO: 49539 - RNA, 22 nt, Human
gugcaugugucugagaaauccu

SEQ ID NO: 49540 - RNA, 23 nt, Human
uaaaaaggcagagcauacacugg

SEQ ID NO: 49541 - RNA, 23 nt, Human
uaaaaaguuuugguguggccggu

SEQ ID NO: 49542 - RNA, 22 nt, Human
uaaaaaugaaacagcauuuuga

SEQ ID NO: 49543 - RNA, 24 nt, Human
uaaaacaaacaugccagacaaggc

SEQ ID NO: 49544 - RNA, 25 nt, Human
uaaaacaaacaugccagacaaggca

SEQ ID NO: 49545 - RNA, 22 nt, Human
uaagacacauccccaaaaccug

SEQ ID NO: 49546 - RNA, 18 nt, Human
uaaugaucuucucuucug

SEQ ID NO: 49547 - RNA, 19 nt, Human
uacugauuccacuuaugug

SEQ ID NO: 49548 - RNA, 19 nt, Human
uagaauacaccugcccuuc

SEQ ID NO: 49549 - RNA, 18 nt, Human
uaggccucuguccucucc

SEQ ID NO: 49550 - RNA, 19 nt, Human
uaggccucuguccucuccg

SEQ ID NO: 49551 - RNA, 24 nt, Human
uauaaccugaacacugaaaacuaa

SEQ ID NO: 49552 - RNA, 24 nt, Human
uauguuauauuagcaacagaaacc

SEQ ID NO: 49553 - RNA, 21 nt, Human
ucaaaaggauaaaaaccccau

SEQ ID NO: 49554 - RNA, 21 nt, Human
ucaauuuucguucccuccacc

SEQ ID NO: 49555 - RNA, 20 nt, Human
ucaucuuguaaaggcuccug

SEQ ID NO: 49556 - RNA, 19 nt, Human
ucccagauccaggagccuc

SEQ ID NO: 49557 - RNA, 21 nt, Human
ucccagauccaggagccucug

SEQ ID NO: 49558 - RNA, 20 nt, Human
uccgcacagcucuggcacca

SEQ ID NO: 49559 - RNA, 21 nt, Human
uccgcacagcucuggcaccag

SEQ ID NO: 49560 - RNA, 20 nt, Human
uccucaggacucuaucccca

SEQ ID NO: 49561 - RNA, 22 nt, Human
uccuccagugcagguccaaaga

SEQ ID NO: 49562 - RNA, 24 nt, Human
ucuaaacagacuccauuccuuucu

SEQ ID NO: 49563 - RNA, 18 nt, Human
ucuagaaaaacagaccuc

SEQ ID NO: 49564 - RNA, 21 nt, Human
ucuauaaccugaacacugaaa

SEQ ID NO: 49565 - RNA, 23 nt, Human
ucucaaagucagccccgaaccag

SEQ ID NO: 49566 - RNA, 19 nt, Human
ucuccagaaugcuugccuc

SEQ ID NO: 49567 - RNA, 21 nt, Human
ucuccagaaugcuugccucac

SEQ ID NO: 49568 - RNA, 21 nt, Human
ucugcaugccuuugggauugg

SEQ ID NO: 49569 - RNA, 21 nt, Human
ucugccaacacccucccccgu

SEQ ID NO: 49570 - RNA, 21 nt, Human
ucugggccugcugcuccaugg

SEQ ID NO: 49571 - RNA, 21 nt, Human
ucuuaauuugcagcccggggc

SEQ ID NO: 49572 - RNA, 23 nt, Human
ugaaacaaauguuacagaucuau

SEQ ID NO: 49573 - RNA, 20 nt, Human
ugaaacagcauuuugaaaca

SEQ ID NO: 49574 - RNA, 18 nt, Human
ugaaggacggcaggggag

SEQ ID NO: 49575 - RNA, 21 nt, Human
ugacuugccaggagagccccc

SEQ ID NO: 49576 - RNA, 21 nt, Human
ugcaugcacccaugcggagua

SEQ ID NO: 49577 - RNA, 22 nt, Human
uggaagucuguuuucaucaugu

SEQ ID NO: 49578 - RNA, 23 nt, Human
uggagaaggucacuguuuguuug

SEQ ID NO: 49579 - RNA, 19 nt, Human
uggagggcaucugucugcc

SEQ ID NO: 49580 - RNA, 25 nt, Human
uggagggcaucugucugccaacacc

SEQ ID NO: 49581 - RNA, 20 nt, Human
uggcucaguggcugcuucga

SEQ ID NO: 49582 - RNA, 20 nt, Human
ugggaaguugaagcacagua

SEQ ID NO: 49583 - RNA, 21 nt, Human
uggggagagggccucugggcc

SEQ ID NO: 49584 - RNA, 21 nt, Human
ugguguuuuucucucuaccug

SEQ ID NO: 49585 - RNA, 22 nt, Human
ugguguuuuucucucuaccugu

SEQ ID NO: 49586 - RNA, 18 nt, Human
ugguuaaaaaggcagagc

SEQ ID NO: 49587 - RNA, 22 nt, Human
uguaaaaaaggcaacuuaagcg

SEQ ID NO: 49588 - RNA, 25 nt, Human
ugucauaaaacaaaaugacaccagu

SEQ ID NO: 49589 - RNA, 20 nt, Human
ugucuagaaaaacagaccuc

SEQ ID NO: 49590 - RNA, 20 nt, Human
ugucugccaacacccucccc

SEQ ID NO: 49591 - RNA, 18 nt, Human
ugugcgugcccacaggcc

SEQ ID NO: 49592 - RNA, 24 nt, Human
ugugucugucauaaaacaaaauga

SEQ ID NO: 49593 - RNA, 21 nt, Human
uguuacagaccaggcacagag

SEQ ID NO: 49594 - RNA, 23 nt, Human
uguuaggaaauuuccucaauaag

SEQ ID NO: 49595 - RNA, 19 nt, Human
uguugccaugaaauuccuu

SEQ ID NO: 49596 - RNA, 18 nt, Human
uucaaaaggauaaaaacc

SEQ ID NO: 49597 - RNA, 19 nt, Human
uucaaauugcuaauuuaau

SEQ ID NO: 49598 - RNA, 22 nt, Human
uucccuccaccgccacccccgc

SEQ ID NO: 49599 - RNA, 19 nt, Human
uuccuugggaaguugaagc

SEQ ID NO: 49600 - RNA, 19 nt, Human
uuccuuucugguaagaaaa

SEQ ID NO: 49601 - RNA, 20 nt, Human
uuguugccaugaaauuccuu

SEQ ID NO: 49602 - RNA, 21 nt, Human
uuuuucucucuaccuguuuga

SEQ ID NO: 49603 - RNA, 22 nt, Human
aaaaaaaaaaaaaaacagaaag

SEQ ID NO: 49604 - RNA, 21 nt, Human
aaaaaaaaaaaaacagaaaga

SEQ ID NO: 49605 - RNA, 20 nt, Human
aaaaaaaaacagaaagaaaa

SEQ ID NO: 49606 - RNA, 21 nt, Human
aaaagaaauacaaaaaaaaaa

SEQ ID NO: 49607 - RNA, 25 nt, Human
aagcgccugggcgccgugcuucugc

SEQ ID NO: 49608 - RNA, 24 nt, Human
aauacaaaaaaaaaaaaaaacaga

SEQ ID NO: 49609 - RNA, 23 nt, Human
acaaaaaaaaaaaaaaacagaaa

SEQ ID NO: 49610 - RNA, 22 nt, Human
acccuggagcucugaaacgcac

SEQ ID NO: 49611 - RNA, 22 nt, Human
accucggcguccuugcgugcug

SEQ ID NO: 49612 - RNA, 23 nt, Human
agaaaggcauguccaggggcccc

SEQ ID NO: 49613 - RNA, 21 nt, Human
agacucagccgagcgcuagcg

SEQ ID NO: 49614 - RNA, 20 nt, Human
agcaggggcggagcuggggg

SEQ ID NO: 49615 - RNA, 20 nt, Human
agccacgcagccccuuccug

SEQ ID NO: 49616 - RNA, 23 nt, Human
agccggcgcagcuuggguacgca

SEQ ID NO: 49617 - RNA, 20 nt, Human
agcugggggcgguggcaaag

SEQ ID NO: 49618 - RNA, 18 nt, Human
agcugugcuuucgaaggg

SEQ ID NO: 49619 - RNA, 18 nt, Human
aggagaagggaggcccga

SEQ ID NO: 49620 - RNA, 21 nt, Human
aggagccgcagcgcugugagc

SEQ ID NO: 49621 - RNA, 21 nt, Human
aggaggaggagggggucacgg

SEQ ID NO: 49622 - RNA, 22 nt, Human
aggaggaggagggggucacggu

SEQ ID NO: 49623 - RNA, 24 nt, Human
aggaggaggagggggucacgguga

SEQ ID NO: 49624 - RNA, 24 nt, Human
aggaucaggagaggcgggggaagg

SEQ ID NO: 49625 - RNA, 18 nt, Human
aggcacgcgcgggccggc

SEQ ID NO: 49626 - RNA, 20 nt, Human
aggcauguccaggggccccg

SEQ ID NO: 49627 - RNA, 19 nt, Human
aggcgaagguuuggaggag

SEQ ID NO: 49628 - RNA, 23 nt, Human
aggcggacguggagaaaggcaug

SEQ ID NO: 49629 - RNA, 20 nt, Human
aggggguggaggguacggga

SEQ ID NO: 49630 - RNA, 19 nt, Human
agucgcugagcggugggag

SEQ ID NO: 49631 - RNA, 20 nt, Human
aguggugagggcuccaaagc

SEQ ID NO: 49632 - RNA, 23 nt, Human
auaaaagaaauacaaaaaaaaaa

SEQ ID NO: 49633 - RNA, 19 nt, Human
caaaaucccccaagaggcc

SEQ ID NO: 49634 - RNA, 24 nt, Human
caccaagacugcggcugcagccag

SEQ ID NO: 49635 - RNA, 20 nt, Human
cacccgcggugacuuaaacc

SEQ ID NO: 49636 - RNA, 22 nt, Human
cacugcuccgcggcugcagggg

SEQ ID NO: 49637 - RNA, 20 nt, Human
caggagcccugcgcuagggc

SEQ ID NO: 49638 - RNA, 19 nt, Human
caggagccgcagcgcugug

SEQ ID NO: 49639 - RNA, 22 nt, Human
caggagccgcagcgcugugagc

SEQ ID NO: 49640 - RNA, 21 nt, Human
ccaccuccuccaccaagacug

SEQ ID NO: 49641 - RNA, 22 nt, Human
ccccagggucccagccugaucu

SEQ ID NO: 49642 - RNA, 18 nt, Human
cccccggccuucccuggg

SEQ ID NO: 49643 - RNA, 21 nt, Human
ccccgcgccaagccacgcccc

SEQ ID NO: 49644 - RNA, 26 nt, Human
ccccgcgccaagccacgcccccggaa

SEQ ID NO: 49645 - RNA, 27 nt, Human
cccgcagccggaugcagguggaggagc

SEQ ID NO: 49646 - RNA, 21 nt, Human
cccgcccccgcgccaagccac

SEQ ID NO: 49647 - RNA, 22 nt, Human
cccgcccccgcgccaagccacg

SEQ ID NO: 49648 - RNA, 19 nt, Human
cccgcgccaagccacgccc

SEQ ID NO: 49649 - RNA, 18 nt, Human
cccggagggggugugggg

SEQ ID NO: 49650 - RNA, 25 nt, Human
ccgcagcgcugugagccacgcagcc

SEQ ID NO: 49651 - RNA, 23 nt, Human
ccuaggcugacccguugcaggag

SEQ ID NO: 49652 - RNA, 24 nt, Human
ccucaggagccgcagcgcugugag

SEQ ID NO: 49653 - RNA, 22 nt, Human
ccucugcaggugcggagccagg

SEQ ID NO: 49654 - RNA, 19 nt, Human
cgcaccgcgggcgccaggc

SEQ ID NO: 49655 - RNA, 21 nt, Human
cgccugggcgccgugcuucug

SEQ ID NO: 49656 - RNA, 21 nt, Human
cgcugugagccacgcagcccc

SEQ ID NO: 49657 - RNA, 18 nt, Human
cggcgcuaacaauucacc

SEQ ID NO: 49658 - RNA, 23 nt, Human
cggcggcagcgaugggugcgaag

SEQ ID NO: 49659 - RNA, 18 nt, Human
cggcugcagggggccugg

SEQ ID NO: 49660 - RNA, 18 nt, Human
cgggccggggguggcgga

SEQ ID NO: 49661 - RNA, 22 nt, Human
cggugguggucaccaccuccuu

SEQ ID NO: 49662 - RNA, 22 nt, Human
cuggccagaagcaucccucccg

SEQ ID NO: 49663 - RNA, 24 nt, Human
cuggccagaagcaucccucccgga

SEQ ID NO: 49664 - RNA, 22 nt, Human
cugggggcgguggcaaagaagg

SEQ ID NO: 49665 - RNA, 21 nt, Human
gaaggaggaggagggggucac

SEQ ID NO: 49666 - RNA, 20 nt, Human
gaagggucgcagcacacagu

SEQ ID NO: 49667 - RNA, 21 nt, Human
gacucagccgagcgcuagcgg

SEQ ID NO: 49668 - RNA, 21 nt, Human
gagaccugucagaguggucag

SEQ ID NO: 49669 - RNA, 20 nt, Human
gagcuugcggcggaccaagu

SEQ ID NO: 49670 - RNA, 22 nt, Human
gaggagaagggaggcccgaggc

SEQ ID NO: 49671 - RNA, 23 nt, Human
gaguccauuuggcucggagcuag

SEQ ID NO: 49672 - RNA, 21 nt, Human
gaugcagguggaggagcggug

SEQ ID NO: 49673 - RNA, 20 nt, Human
gcaccuggaagaucgcggcg

SEQ ID NO: 49674 - RNA, 18 nt, Human
gcagcgcugugagccacg

SEQ ID NO: 49675 - RNA, 23 nt, Human
gcccccggccuucccugggcgca

SEQ ID NO: 49676 - RNA, 18 nt, Human
gcccgaggccgcguggaa

SEQ ID NO: 49677 - RNA, 18 nt, Human
gcccugcgcuagggcucc

SEQ ID NO: 49678 - RNA, 18 nt, Human
gccgagcgcuagcggaca

SEQ ID NO: 49679 - RNA, 19 nt, Human
gccugguaggagcuuggca

SEQ ID NO: 49680 - RNA, 21 nt, Human
gcgaaguuagcagauguggcu

SEQ ID NO: 49681 - RNA, 20 nt, Human
gcgcacugcgauccagcguu

SEQ ID NO: 49682 - RNA, 19 nt, Human
gcgcagccuuugcucucca

SEQ ID NO: 49683 - RNA, 22 nt, Human
gcgcccccggccuucccugggc

SEQ ID NO: 49684 - RNA, 20 nt, Human
gcgccugggcgccgugcuuc

SEQ ID NO: 49685 - RNA, 18 nt, Human
gcgcgggccggcguggga

SEQ ID NO: 49686 - RNA, 19 nt, Human
gcggcugcagggggccugg

SEQ ID NO: 49687 - RNA, 20 nt, Human
gcuaaacgcaaaauccccca

SEQ ID NO: 49688 - RNA, 18 nt, Human
ggagaggcgggggaagga

SEQ ID NO: 49689 - RNA, 23 nt, Human
ggaggaggagggggucacgguga

SEQ ID NO: 49690 - RNA, 20 nt, Human
ggaggcagccggaggagggg

SEQ ID NO: 49691 - RNA, 18 nt, Human
ggcagcgaugggugcgaa

SEQ ID NO: 49692 - RNA, 21 nt, Human
ggccgccgcagucccgcagcc

SEQ ID NO: 49693 - RNA, 18 nt, Human
ggcgcacugcgauccagc

SEQ ID NO: 49694 - RNA, 21 nt, Human
ggcgcagccuuugcucuccaa

SEQ ID NO: 49695 - RNA, 18 nt, Human
ggcggcgcgccccgcgac

SEQ ID NO: 49696 - RNA, 18 nt, Human
gggaaggaaaaaguggug

SEQ ID NO: 49697 - RNA, 18 nt, Human
gggauggggagcaggggc

SEQ ID NO: 49698 - RNA, 22 nt, Human
gggccggcgggcgcccccggcc

SEQ ID NO: 49699 - RNA, 20 nt, Human
gggcgguggcaaagaaggag

SEQ ID NO: 49700 - RNA, 19 nt, Human
ggggaggcagccggaggag

SEQ ID NO: 49701 - RNA, 22 nt, Human
ggggaggcagccggaggagggg

SEQ ID NO: 49702 - RNA, 20 nt, Human
ggggcaaagggcaccuggaa

SEQ ID NO: 49703 - RNA, 22 nt, Human
ggguacgcagcggcaguggcuu

SEQ ID NO: 49704 - RNA, 21 nt, Human
uaguuaauuuggaggaagggg

SEQ ID NO: 49705 - RNA, 22 nt, Human
ucauagaggcagucaguuuccu

SEQ ID NO: 49706 - RNA, 22 nt, Human
ucccugggcgcacugcgaucca

SEQ ID NO: 49707 - RNA, 21 nt, Human
uccgcuguucuuuuuuaggca

SEQ ID NO: 49708 - RNA, 18 nt, Human
uccugggcucaggcuccu

SEQ ID NO: 49709 - RNA, 20 nt, Human
ucgggcggguccuggcugcu

SEQ ID NO: 49710 - RNA, 19 nt, Human
ugacagaugagccgcgucc

SEQ ID NO: 49711 - RNA, 20 nt, Human
ugagggcuccaaagccaaga

SEQ ID NO: 49712 - RNA, 24 nt, Human
ugagggcuccaaagccaagagcuc

SEQ ID NO: 49713 - RNA, 19 nt, Human
ugaucuauaagacgagguc

SEQ ID NO: 49714 - RNA, 21 nt, Human
ugcccaggggcaaagggcacc

SEQ ID NO: 49715 - RNA, 21 nt, Human
ugcgcuagggcucccuguagg

SEQ ID NO: 49716 - RNA, 18 nt, Human
ugcggauaucugaggcug

SEQ ID NO: 49717 - RNA, 20 nt, Human
uggagaggugguagccucgg

SEQ ID NO: 49718 - RNA, 19 nt, Human
uggcaaagaaggaggagga

SEQ ID NO: 49719 - RNA, 20 nt, Human
uggcuauuuguccucaggag

SEQ ID NO: 49720 - RNA, 20 nt, Human
uggggaggcagccggaggag

SEQ ID NO: 49721 - RNA, 21 nt, Human
ugggguuuuuuuuuuuuuuuu

SEQ ID NO: 49722 - RNA, 22 nt, Human
uuagcagauguggcuggaauca

SEQ ID NO: 49723 - RNA, 24 nt, Human
uuccagcuggccgcgccagccggu

SEQ ID NO: 49724 - RNA, 23 nt, Human
uuggaggagaagggaggcccgag

SEQ ID NO: 49725 - RNA, 21 nt, Human
uuuuuuguucuaaaaaaaauu

SEQ ID NO: 49726 - RNA, 23 nt, Human
uuuuuuuuuuuuuuuuguucuaa

SEQ ID NO: 49727 - RNA, 18 nt, Human
uuuuuuuuuuuuuuuuug

SEQ ID NO: 49728 - RNA, 23 nt, Human
uuuuuuuuuuuuuuuuuuguucu

SEQ ID NO: 49729 - RNA, 20 nt, Human
aaacaaaauaaacucaaaaa

SEQ ID NO: 49730 - RNA, 18 nt, Human
aacguugagcuuggugag

SEQ ID NO: 49731 - RNA, 23 nt, Human
aagcaauaaaaaugagaucuuaa

SEQ ID NO: 49732 - RNA, 21 nt, Human
aagcacaacagccaaauacaa

SEQ ID NO: 49733 - RNA, 18 nt, Human
aagucaaauaauacccaa

SEQ ID NO: 49734 - RNA, 19 nt, Human
aaugcaagugugugugcgc

SEQ ID NO: 49735 - RNA, 24 nt, Human
agaaacaaaauaaacucaaaaaca

SEQ ID NO: 49736 - RNA, 23 nt, Human
agacagaaacaaaauaaacucaa

SEQ ID NO: 49737 - RNA, 20 nt, Human
agagaggucgggucguaggg

SEQ ID NO: 49738 - RNA, 19 nt, Human
aggcagcgggguuuccagg

SEQ ID NO: 49739 - RNA, 20 nt, Human
aggcgucgugcccggcuggc

SEQ ID NO: 49740 - RNA, 18 nt, Human
agucagcuuccaggacca

SEQ ID NO: 49741 - RNA, 25 nt, Human
caauaaaaaugagaucuuaaccaca

SEQ ID NO: 49742 - RNA, 21 nt, Human
cagcuuccaggaccaacgccu

SEQ ID NO: 49743 - RNA, 24 nt, Human
caggaccaacgccuccacucccga

SEQ ID NO: 49744 - RNA, 19 nt, Human
ccccgaggccugggcacac

SEQ ID NO: 49745 - RNA, 20 nt, Human
ccccuggguggagggucggg

SEQ ID NO: 49746 - RNA, 18 nt, Human
cccgcucagugcagggag

SEQ ID NO: 49747 - RNA, 18 nt, Human
ccucacacacucuuugaa

SEQ ID NO: 49748 - RNA, 21 nt, Human
ccugcaugcaugugggcgagc

SEQ ID NO: 49749 - RNA, 24 nt, Human
cgaggccgaggccagcccugaagg

SEQ ID NO: 49750 - RNA, 19 nt, Human
cgggcuccuuccacggucu

SEQ ID NO: 49751 - RNA, 24 nt, Human
cugaaggcacuuguucuccaccac

SEQ ID NO: 49752 - RNA, 23 nt, Human
cuuccaggaccaacgccuccacu

SEQ ID NO: 49753 - RNA, 18 nt, Human
cuuggaaagcacaacagc

SEQ ID NO: 49754 - RNA, 18 nt, Human
gagacccccgaggccugg

SEQ ID NO: 49755 - RNA, 20 nt, Human
gagccccuaaacccgcucag

SEQ ID NO: 49756 - RNA, 19 nt, Human
gagcgaaagggaagaaugg

SEQ ID NO: 49757 - RNA, 25 nt, Human
ggacacugugacauagacagaaaca

SEQ ID NO: 49758 - RNA, 20 nt, Human
ggagaccccuggguggaggg

SEQ ID NO: 49759 - RNA, 21 nt, Human
gggcagcgggugggcgccgcc

SEQ ID NO: 49760 - RNA, 18 nt, Human
gucucgugggacguggga

SEQ ID NO: 49761 - RNA, 23 nt, Human
gucucuugggggacaggugggca

SEQ ID NO: 49762 - RNA, 18 nt, Human
gugcuuacauagagaggu

SEQ ID NO: 49763 - RNA, 19 nt, Human
gugugugugcgcaugugug

SEQ ID NO: 49764 - RNA, 21 nt, Human
ucacccacagcccacggggcg

SEQ ID NO: 49765 - RNA, 19 nt, Human
uccacacagaaguuagggc

SEQ ID NO: 49766 - RNA, 20 nt, Human
uccaggaccaacgccuccac

SEQ ID NO: 49767 - RNA, 23 nt, Human
uccaggaccaacgccuccacucc

SEQ ID NO: 49768 - RNA, 25 nt, Human
ucgugacaugcccccuucgcacccc

SEQ ID NO: 49769 - RNA, 22 nt, Human
ucuucggcuuugacgggcuccu

SEQ ID NO: 49770 - RNA, 18 nt, Human
ucuuugaaacguugagcu

SEQ ID NO: 49771 - RNA, 24 nt, Human
ugacauagacagaaacaaaauaaa

SEQ ID NO: 49772 - RNA, 23 nt, Human
ugacaugcccccuucgcaccccc

SEQ ID NO: 49773 - RNA, 21 nt, Human
ugaccacauaacaccacgucc

SEQ ID NO: 49774 - RNA, 22 nt, Human
ugacgggcuccuuccacggucu

SEQ ID NO: 49775 - RNA, 25 nt, Human
ugagacccccgaggccugggcacac

SEQ ID NO: 49776 - RNA, 20 nt, Human
ugcgggugggcaaugggggg

SEQ ID NO: 49777 - RNA, 18 nt, Human
ugcugucuuggccugcau

SEQ ID NO: 49778 - RNA, 21 nt, Human
ugggaaaaagcaauaaaaaug

SEQ ID NO: 49779 - RNA, 19 nt, Human
ugucucgugggacguggga

SEQ ID NO: 49780 - RNA, 22 nt, Human
ugugcgcaugugugcuuacaua

SEQ ID NO: 49781 - RNA, 21 nt, Human
ugugugcuuacauagagaggu

SEQ ID NO: 49782 - RNA, 21 nt, Human
uuugacgggcuccuuccacgg

SEQ ID NO: 49783 - RNA, 25 nt, Human
uuuuuuuuuuuuuugcaaccucgga

SEQ ID NO: 49784 - RNA, 18 nt, Human
uuuuuuuuuuuuuuuuug

SEQ ID NO: 49785 - RNA, 23 nt, Human
uuuuuuuuuuuuuuuuugcaacc

SEQ ID NO: 49786 - RNA, 26 nt, Human
cggcaggucagccccaaugugucucu

SEQ ID NO: 49787 - RNA, 21 nt, Human
gacagcagcggcaggucagcc

SEQ ID NO: 49788 - RNA, 20 nt, Human
ugacagcagcggcaggucag

SEQ ID NO: 49789 - RNA, 21 nt, Human
aaaaagaaacugagcuccuga

SEQ ID NO: 49790 - RNA, 22 nt, Human
aaaaagaaacugagcuccugaa

SEQ ID NO: 49791 - RNA, 21 nt, Human
aaagaaaauucuagaaaggcc

SEQ ID NO: 49792 - RNA, 21 nt, Human
aaagaaaauucuagaaaggcc

SEQ ID NO: 49793 - RNA, 22 nt, Human
aacaacaacagcaucugccgag

SEQ ID NO: 49794 - RNA, 22 nt, Human
aacaacaacagcaucugccgag

SEQ ID NO: 49795 - RNA, 24 nt, Human
aagaaagcaaaaagcagccuauuc

SEQ ID NO: 49796 - RNA, 24 nt, Human
aagaaagcaaaaagcagccuauuc

SEQ ID NO: 49797 - RNA, 18 nt, Human
aagaagaaagcaaaaagc

SEQ ID NO: 49798 - RNA, 18 nt, Human
aagaagaaagcaaaaagc

SEQ ID NO: 49799 - RNA, 23 nt, Human
aagcggcggucagugccaugcag

SEQ ID NO: 49800 - RNA, 23 nt, Human
aagcggcggucagugccaugcag

SEQ ID NO: 49801 - RNA, 23 nt, Human
aauccagagacccaagugaaaaa

SEQ ID NO: 49802 - RNA, 23 nt, Human
aauccagagacccaagugaaaaa

SEQ ID NO: 49803 - RNA, 21 nt, Human
aaugccacaugaagccaggag

SEQ ID NO: 49804 - RNA, 21 nt, Human
aaugccacaugaagccaggag

SEQ ID NO: 49805 - RNA, 19 nt, Human
acagaagagaggcagcacg

SEQ ID NO: 49806 - RNA, 19 nt, Human
acagaagagaggcagcacg

SEQ ID NO: 49807 - RNA, 21 nt, Human
accaagggccuguugggccca

SEQ ID NO: 49808 - RNA, 21 nt, Human
accaagggccuguugggccca

SEQ ID NO: 49809 - RNA, 23 nt, Human
agaaagcaaaaagcagccuauuc

SEQ ID NO: 49810 - RNA, 23 nt, Human
agaaagcaaaaagcagccuauuc

SEQ ID NO: 49811 - RNA, 19 nt, Human
agccaaagcugcagaagcc

SEQ ID NO: 49812 - RNA, 19 nt, Human
agccaaagcugcagaagcc

SEQ ID NO: 49813 - RNA, 24 nt, Human
agcucugagcccuuuuccagccuc

SEQ ID NO: 49814 - RNA, 24 nt, Human
agcucugagcccuuuuccagccuc

SEQ ID NO: 49815 - RNA, 23 nt, Human
agcuggaagcggcggucagugcc

SEQ ID NO: 49816 - RNA, 23 nt, Human
agcuggaagcggcggucagugcc

SEQ ID NO: 49817 - RNA, 20 nt, Human
aggcagcacgcuugcccgcg

SEQ ID NO: 49818 - RNA, 20 nt, Human
aggcagcacgcuugcccgcg

SEQ ID NO: 49819 - RNA, 19 nt, Human
agggaaguaacaacaacag

SEQ ID NO: 49820 - RNA, 19 nt, Human
agggaaguaacaacaacag

SEQ ID NO: 49821 - RNA, 20 nt, Human
aggggcaggguggggugggg

SEQ ID NO: 49822 - RNA, 20 nt, Human
aggggcaggguggggugggg

SEQ ID NO: 49823 - RNA, 23 nt, Human
aguaggggccucaguggggcuug

SEQ ID NO: 49824 - RNA, 18 nt, Human
agucauugcauauguggg

SEQ ID NO: 49825 - RNA, 18 nt, Human
agucauugcauauguggg

SEQ ID NO: 49826 - RNA, 21 nt, Human
agugggauccgagguggcucg

SEQ ID NO: 49827 - RNA, 21 nt, Human
agugggauccgagguggcucg

SEQ ID NO: 49828 - RNA, 22 nt, Human
aucacaacuagggcaucuuucu

SEQ ID NO: 49829 - RNA, 22 nt, Human
aucacaacuagggcaucuuucu

SEQ ID NO: 49830 - RNA, 20 nt, Human
augccacaugaagccaggag

SEQ ID NO: 49831 - RNA, 23 nt, Human
caaaacgacacagaagagaggca

SEQ ID NO: 49832 - RNA, 23 nt, Human
caaaacgacacagaagagaggca

SEQ ID NO: 49833 - RNA, 20 nt, Human
caacaaaacgacacagaaga

SEQ ID NO: 49834 - RNA, 20 nt, Human
caacaaaacgacacagaaga

SEQ ID NO: 49835 - RNA, 19 nt, Human
caacaggagggacggcagg

SEQ ID NO: 49836 - RNA, 19 nt, Human
caacaggagggacggcagg

SEQ ID NO: 49837 - RNA, 22 nt, Human
caagcagagacagaauguggug

SEQ ID NO: 49838 - RNA, 22 nt, Human
caagcagagacagaauguggug

SEQ ID NO: 49839 - RNA, 21 nt, Human
cagaagccuucaguaccuucc

SEQ ID NO: 49840 - RNA, 21 nt, Human
cagaagccuucaguaccuucc

SEQ ID NO: 49841 - RNA, 18 nt, Human
cagagcacagacguggcc

SEQ ID NO: 49842 - RNA, 18 nt, Human
cagagcacagacguggcc

SEQ ID NO: 49843 - RNA, 22 nt, Human
cagcaucacugucaucuccagu

SEQ ID NO: 49844 - RNA, 21 nt, Human
cagcaucuggcccagaccugc

SEQ ID NO: 49845 - RNA, 21 nt, Human
cagcaucuggcccagaccugc

SEQ ID NO: 49846 - RNA, 19 nt, Human
cagcucugagcccuuuucc

SEQ ID NO: 49847 - RNA, 19 nt, Human
cagcucugagcccuuuucc

SEQ ID NO: 49848 - RNA, 20 nt, Human
caucaggggacagaucgggg

SEQ ID NO: 49849 - RNA, 18 nt, Human
caucuuucuggcugaguu

SEQ ID NO: 49850 - RNA, 18 nt, Human
caucuuucuggcugaguu

SEQ ID NO: 49851 - RNA, 19 nt, Human
ccacaugaagccaggaguc

SEQ ID NO: 49852 - RNA, 19 nt, Human
ccacaugaagccaggaguc

SEQ ID NO: 49853 - RNA, 24 nt, Human
ccaccggggcugggucuggggcug

SEQ ID NO: 49854 - RNA, 24 nt, Human
ccaccucgaguuaccuuugaucac

SEQ ID NO: 49855 - RNA, 24 nt, Human
ccaccucgaguuaccuuugaucac

SEQ ID NO: 49856 - RNA, 23 nt, Human
ccaccucggccggcgagcgcgcc

SEQ ID NO: 49857 - RNA, 25 nt, Human
ccagccucuuggagggaaguaacaa

SEQ ID NO: 49858 - RNA, 25 nt, Human
ccagccucuuggagggaaguaacaa

SEQ ID NO: 49859 - RNA, 20 nt, Human
ccagggucgcuccggacagg

SEQ ID NO: 49860 - RNA, 20 nt, Human
ccagggucgcuccggacagg

SEQ ID NO: 49861 - RNA, 23 nt, Human
ccaucaaugacggugaugucgag

SEQ ID NO: 49862 - RNA, 23 nt, Human
ccaucaaugacggugaugucgag

SEQ ID NO: 49863 - RNA, 18 nt, Human
cccacaucuggcaccagc

SEQ ID NO: 49864 - RNA, 18 nt, Human
cccacaucuggcaccagc

SEQ ID NO: 49865 - RNA, 23 nt, Human
cccagcaucuggcccagaccugc

SEQ ID NO: 49866 - RNA, 19 nt, Human
ccccagggcuacccuccac

SEQ ID NO: 49867 - RNA, 19 nt, Human
ccccagggcuacccuccac

SEQ ID NO: 49868 - RNA, 23 nt, Human
ccccugaagccucccccaaauaa

SEQ ID NO: 49869 - RNA, 23 nt, Human
ccccugaagccucccccaaauaa

SEQ ID NO: 49870 - RNA, 22 nt, Human
cccuccugauauaccuucccua

SEQ ID NO: 49871 - RNA, 22 nt, Human
cccuccugauauaccuucccua

SEQ ID NO: 49872 - RNA, 19 nt, Human
ccgcggcggcccccuccuc

SEQ ID NO: 49873 - RNA, 22 nt, Human
ccggcgcggcgggcgagacggg

SEQ ID NO: 49874 - RNA, 24 nt, Human
ccuagucaggcugguaccggcacc

SEQ ID NO: 49875 - RNA, 24 nt, Human
ccuagucaggcugguaccggcacc

SEQ ID NO: 49876 - RNA, 21 nt, Human
ccuaugacaggaauccagaga

SEQ ID NO: 49877 - RNA, 21 nt, Human
ccuaugacaggaauccagaga

SEQ ID NO: 49878 - RNA, 22 nt, Human
ccuaugacaggaauccagagac

SEQ ID NO: 49879 - RNA, 22 nt, Human
ccuaugacaggaauccagagac

SEQ ID NO: 49880 - RNA, 18 nt, Human
ccuccuccuucucuaaca

SEQ ID NO: 49881 - RNA, 23 nt, Human
ccucuaggcggagggcuuggcuu

SEQ ID NO: 49882 - RNA, 23 nt, Human
ccucuaggcggagggcuuggcuu

SEQ ID NO: 49883 - RNA, 19 nt, Human
ccugcggcucagaggaagc

SEQ ID NO: 49884 - RNA, 19 nt, Human
ccugcggcucagaggaagc

SEQ ID NO: 49885 - RNA, 19 nt, Human
cgacacagaagagaggcag

SEQ ID NO: 49886 - RNA, 19 nt, Human
cgacacagaagagaggcag

SEQ ID NO: 49887 - RNA, 24 nt, Human
cggcucagaggaagcuggaagcgg

SEQ ID NO: 49888 - RNA, 24 nt, Human
cggcucagaggaagcuggaagcgg

SEQ ID NO: 49889 - RNA, 22 nt, Human
cggggacgcuggcagagccagg

SEQ ID NO: 49890 - RNA, 22 nt, Human
cggggacgcuggcagagccagg

SEQ ID NO: 49891 - RNA, 24 nt, Human
cuccaccucgaguuaccuuugauc

SEQ ID NO: 49892 - RNA, 24 nt, Human
cuccaccucgaguuaccuuugauc

SEQ ID NO: 49893 - RNA, 22 nt, Human
cuccaguagucggcuccggcac

SEQ ID NO: 49894 - RNA, 19 nt, Human
cuccccccuguggggagag

SEQ ID NO: 49895 - RNA, 19 nt, Human
cuccccccuguggggagag

SEQ ID NO: 49896 - RNA, 18 nt, Human
cuccugaaucugauucug

SEQ ID NO: 49897 - RNA, 18 nt, Human
cuccugaaucugauucug

SEQ ID NO: 49898 - RNA, 20 nt, Human
cugcagaagccuucaguacc

SEQ ID NO: 49899 - RNA, 19 nt, Human
cuggcccagaccugccucu

SEQ ID NO: 49900 - RNA, 19 nt, Human
cuggcccagaccugccucu

SEQ ID NO: 49901 - RNA, 22 nt, Human
cuggcccagaccugccucuuca

SEQ ID NO: 49902 - RNA, 22 nt, Human
cuggcccagaccugccucuuca

SEQ ID NO: 49903 - RNA, 25 nt, Human
cugggguuuccugcccagcaucugg

SEQ ID NO: 49904 - RNA, 25 nt, Human
cugggguuuccugcccagcaucugg

SEQ ID NO: 49905 - RNA, 20 nt, Human
cuguugggcccacacaagcu

SEQ ID NO: 49906 - RNA, 20 nt, Human
cuguugggcccacacaagcu

SEQ ID NO: 49907 - RNA, 20 nt, Human
gaccugccucuucaaggccg

SEQ ID NO: 49908 - RNA, 20 nt, Human
gaccugccucuucaaggccg

SEQ ID NO: 49909 - RNA, 19 nt, Human
gacuuagugccuccccccu

SEQ ID NO: 49910 - RNA, 19 nt, Human
gacuuagugccuccccccu

SEQ ID NO: 49911 - RNA, 21 nt, Human
gaggggaccucuaggcggagg

SEQ ID NO: 49912 - RNA, 21 nt, Human
gaggggaccucuaggcggagg

SEQ ID NO: 49913 - RNA, 19 nt, Human
gagguggcucggcccauca

SEQ ID NO: 49914 - RNA, 19 nt, Human
gagguggcucggcccauca

SEQ ID NO: 49915 - RNA, 22 nt, Human
gccaaagcugcagaagccuuca

SEQ ID NO: 49916 - RNA, 22 nt, Human
gccaaagcugcagaagccuuca

SEQ ID NO: 49917 - RNA, 19 nt, Human
gccucaguggggcuugggg

SEQ ID NO: 49918 - RNA, 21 nt, Human
gcugcagaagccuucaguacc

SEQ ID NO: 49919 - RNA, 20 nt, Human
gcuggcucggggcuggccuc

SEQ ID NO: 49920 - RNA, 21 nt, Human
ggacaaggggcaggguggggu

SEQ ID NO: 49921 - RNA, 21 nt, Human
ggacaaggggcaggguggggu

SEQ ID NO: 49922 - RNA, 21 nt, Human
ggacagagcacagacguggcc

SEQ ID NO: 49923 - RNA, 21 nt, Human
ggacagagcacagacguggcc

SEQ ID NO: 49924 - RNA, 18 nt, Human
ggaggggaagccaagcag

SEQ ID NO: 49925 - RNA, 18 nt, Human
ggaggggaagccaagcag

SEQ ID NO: 49926 - RNA, 24 nt, Human
ggcaacaaaacgacacagaagaga

SEQ ID NO: 49927 - RNA, 24 nt, Human
ggcaacaaaacgacacagaagaga

SEQ ID NO: 49928 - RNA, 19 nt, Human
gggcagggugggguggggc

SEQ ID NO: 49929 - RNA, 24 nt, Human
gggccccagggcuacccuccaccu

SEQ ID NO: 49930 - RNA, 24 nt, Human
gggccccagggcuacccuccaccu

SEQ ID NO: 49931 - RNA, 24 nt, Human
gggccuguugggcccacacaagcu

SEQ ID NO: 49932 - RNA, 24 nt, Human
gggccuguugggcccacacaagcu

SEQ ID NO: 49933 - RNA, 19 nt, Human
ggggcaggguggggugggg

SEQ ID NO: 49934 - RNA, 19 nt, Human
ggggcaggguggggugggg

SEQ ID NO: 49935 - RNA, 22 nt, Human
gggguaaaggaggggauaaagg

SEQ ID NO: 49936 - RNA, 22 nt, Human
ggucagugccaugcagcagccu

SEQ ID NO: 49937 - RNA, 19 nt, Human
gguuccugcucagcagcuc

SEQ ID NO: 49938 - RNA, 25 nt, Human
guaccggcaccuccugaaauggguc

SEQ ID NO: 49939 - RNA, 26 nt, Human
guaccggcaccuccugaaauggguca

SEQ ID NO: 49940 - RNA, 19 nt, Human
gucaccugagacuuuaggg

SEQ ID NO: 49941 - RNA, 19 nt, Human
gucaccugagacuuuaggg

SEQ ID NO: 49942 - RNA, 19 nt, Human
gugcgcucgugcuccaccu

SEQ ID NO: 49943 - RNA, 21 nt, Human
guggugcgcccucggcggacu

SEQ ID NO: 49944 - RNA, 19 nt, Human
uaaaggaggggauaaagga

SEQ ID NO: 49945 - RNA, 19 nt, Human
uaaaggaggggauaaagga

SEQ ID NO: 49946 - RNA, 18 nt, Human
uaagcuaaauuguaaacc

SEQ ID NO: 49947 - RNA, 18 nt, Human
uaagcuaaauuguaaacc

SEQ ID NO: 49948 - RNA, 24 nt, Human
uacaaaagugaaaauuaaaaguca

SEQ ID NO: 49949 - RNA, 24 nt, Human
uacaaaagugaaaauuaaaaguca

SEQ ID NO: 49950 - RNA, 20 nt, Human
uacaaaggauuaaacuacaa

SEQ ID NO: 49951 - RNA, 20 nt, Human
uacaaaggauuaaacuacaa

SEQ ID NO: 49952 - RNA, 19 nt, Human
uaccaagggccuguugggc

SEQ ID NO: 49953 - RNA, 19 nt, Human
uaccaagggccuguugggc

SEQ ID NO: 49954 - RNA, 23 nt, Human
uagguuccuaacacgugcgcucg

SEQ ID NO: 49955 - RNA, 22 nt, Human
uauauagauuuaagugagauca

SEQ ID NO: 49956 - RNA, 22 nt, Human
uauauagauuuaagugagauca

SEQ ID NO: 49957 - RNA, 20 nt, Human
uauaugcaacuauauuucau

SEQ ID NO: 49958 - RNA, 20 nt, Human
uauaugcaacuauauuucau

SEQ ID NO: 49959 - RNA, 19 nt, Human
ucagaaaggacgggguacg

SEQ ID NO: 49960 - RNA, 18 nt, Human
ucagugggauccgaggug

SEQ ID NO: 49961 - RNA, 18 nt, Human
ucagugggauccgaggug

SEQ ID NO: 49962 - RNA, 20 nt, Human
ucuagaaaggccucuucccc

SEQ ID NO: 49963 - RNA, 20 nt, Human
ucuagaaaggccucuucccc

SEQ ID NO: 49964 - RNA, 19 nt, Human
ucuaugggcuuccuccucc

SEQ ID NO: 49965 - RNA, 19 nt, Human
ucuuucuggcugaguuaag

SEQ ID NO: 49966 - RNA, 19 nt, Human
ucuuucuggcugaguuaag

SEQ ID NO: 49967 - RNA, 22 nt, Human
ugaaaaagaaacugagcuccug

SEQ ID NO: 49968 - RNA, 19 nt, Human
ugacgugcagccaaagcug

SEQ ID NO: 49969 - RNA, 19 nt, Human
ugacgugcagccaaagcug

SEQ ID NO: 49970 - RNA, 24 nt, Human
ugagaacaguccccugaagccucc

SEQ ID NO: 49971 - RNA, 24 nt, Human
ugagaacaguccccugaagccucc

SEQ ID NO: 49972 - RNA, 18 nt, Human
ugagcccacaucuggcac

SEQ ID NO: 49973 - RNA, 18 nt, Human
ugagcccacaucuggcac

SEQ ID NO: 49974 - RNA, 19 nt, Human
ugaggcucaggagggugac

SEQ ID NO: 49975 - RNA, 19 nt, Human
ugaggcucaggagggugac

SEQ ID NO: 49976 - RNA, 22 nt, Human
ugaguaaaacauguuacacugg

SEQ ID NO: 49977 - RNA, 22 nt, Human
ugaguaaaacauguuacacugg

SEQ ID NO: 49978 - RNA, 21 nt, Human
ugcagccaaagcugcagaagc

SEQ ID NO: 49979 - RNA, 21 nt, Human
ugcagccaaagcugcagaagc

SEQ ID NO: 49980 - RNA, 25 nt, Human
ugcccagcaucuggcccagaccugc

SEQ ID NO: 49981 - RNA, 23 nt, Human
ugcccgcguagcaggcccugcgg

SEQ ID NO: 49982 - RNA, 23 nt, Human
ugcccgcguagcaggcccugcgg

SEQ ID NO: 49983 - RNA, 19 nt, Human
ugccucuucaaggccgcug

SEQ ID NO: 49984 - RNA, 19 nt, Human
ugccucuucaaggccgcug

SEQ ID NO: 49985 - RNA, 20 nt, Human
ugccuuggcaacaaaacgac

SEQ ID NO: 49986 - RNA, 20 nt, Human
ugccuuggcaacaaaacgac

SEQ ID NO: 49987 - RNA, 20 nt, Human
uggcagagccagggucgcuc

SEQ ID NO: 49988 - RNA, 20 nt, Human
uggcagagccagggucgcuc

SEQ ID NO: 49989 - RNA, 25 nt, Human
uggcagcaucacugucaucuccagu

SEQ ID NO: 49990 - RNA, 18 nt, Human
uggcccagaccugccucu

SEQ ID NO: 49991 - RNA, 18 nt, Human
uggcccagaccugccucu

SEQ ID NO: 49992 - RNA, 22 nt, Human
uggcucggcccaucaugcccag

SEQ ID NO: 49993 - RNA, 22 nt, Human
uggcucggcccaucaugcccag

SEQ ID NO: 49994 - RNA, 20 nt, Human
uggcucggggcuggccucag

SEQ ID NO: 49995 - RNA, 21 nt, Human
uggggcugcugagcacacacu

SEQ ID NO: 49996 - RNA, 21 nt, Human
uggggcugcugagcacacacu

SEQ ID NO: 49997 - RNA, 23 nt, Human
ugggggucuaugggcuuccuccu

SEQ ID NO: 49998 - RNA, 19 nt, Human
ugggguggggcugcugagc

SEQ ID NO: 49999 - RNA, 19 nt, Human
ugggguggggcugcugagc

SEQ ID NO: 50000 - RNA, 20 nt, Human
ugggucuggggcuggcucgg

SEQ ID NO: 50001 - RNA, 20 nt, Human
uggugauuucacaacaggag

SEQ ID NO: 50002 - RNA, 20 nt, Human
uggugauuucacaacaggag

SEQ ID NO: 50003 - RNA, 22 nt, Human
uguaaaccugcucaaagaaaau

SEQ ID NO: 50004 - RNA, 22 nt, Human
uguaaaccugcucaaagaaaau

SEQ ID NO: 50005 - RNA, 18 nt, Human
ugucgaggggccccaggg

SEQ ID NO: 50006 - RNA, 18 nt, Human
ugucgaggggccccaggg

SEQ ID NO: 50007 - RNA, 19 nt, Human
uguugggcccacacaagcu

SEQ ID NO: 50008 - RNA, 19 nt, Human
uguugggcccacacaagcu

SEQ ID NO: 50009 - RNA, 21 nt, Human
uucaggaccuguccucccaag

SEQ ID NO: 50010 - RNA, 21 nt, Human
uucaggaccuguccucccaag

SEQ ID NO: 50011 - RNA, 21 nt, Human
uugggaagccgagugcuucug

SEQ ID NO: 50012 - RNA, 18 nt, Human
uuuuuuuuuuuuuuuuug

SEQ ID NO: 50013 - RNA, 18 nt, Human
uuuuuuuuuuuuuuuuug

SEQ ID NO: 50014 - RNA, 20 nt, Human
uuuuuuuuuuuuuuuuugcu

SEQ ID NO: 50015 - RNA, 23 nt, Human
uuuuuuuuuuuuuuuuuugcuga

SEQ ID NO: 50016 - RNA, 23 nt, Human
uuuuuuuuuuuuuuuuuugcuga

SEQ ID NO: 50017 - RNA, 21 nt, Human
aaaccauccccaauccucagc

SEQ ID NO: 50018 - RNA, 21 nt, Human
aaaccauccccaauccucagc

SEQ ID NO: 50019 - RNA, 21 nt, Human
aacaaaggcagcccacaacua

SEQ ID NO: 50020 - RNA, 21 nt, Human
aacaaaggcagcccacaacua

SEQ ID NO: 50021 - RNA, 18 nt, Human
aagaacaugagaagacag

SEQ ID NO: 50022 - RNA, 18 nt, Human
aagaacaugagaagacag

SEQ ID NO: 50023 - RNA, 25 nt, Human
aagaacaugagaagacaguguuggc

SEQ ID NO: 50024 - RNA, 25 nt, Human
aagaacaugagaagacaguguuggc

SEQ ID NO: 50025 - RNA, 22 nt, Human
aagggaaggggaggagagagag

SEQ ID NO: 50026 - RNA, 22 nt, Human
aagggaaggggaggagagagag

SEQ ID NO: 50027 - RNA, 18 nt, Human
aaguggaaagagaagaga

SEQ ID NO: 50028 - RNA, 19 nt, Human
aaguggaaagagaagagau

SEQ ID NO: 50029 - RNA, 19 nt, Human
aaguggaaagagaagagau

SEQ ID NO: 50030 - RNA, 30 nt, Human
acacaaccucaaacauccagguggaaacuu

SEQ ID NO: 50031 - RNA, 23 nt, Human
accaccucuuauagcucuuccau

SEQ ID NO: 50032 - RNA, 23 nt, Human
accaccucuuauagcucuuccau

SEQ ID NO: 50033 - RNA, 18 nt, Human
acccaaaguggaaagaga

SEQ ID NO: 50034 - RNA, 18 nt, Human
acccaaaguggaaagaga

SEQ ID NO: 50035 - RNA, 24 nt, Human
accuuacucaggggaagccuugac

SEQ ID NO: 50036 - RNA, 24 nt, Human
accuuacucaggggaagccuugac

SEQ ID NO: 50037 - RNA, 20 nt, Human
acucaggggaagccuugacc

SEQ ID NO: 50038 - RNA, 21 nt, Human
acuccugcaggcaggcugggc

SEQ ID NO: 50039 - RNA, 25 nt, Human
acuuucuccuucuuuuugcucuuuu

SEQ ID NO: 50040 - RNA, 20 nt, Human
agaaauggaccuuacucagg

SEQ ID NO: 50041 - RNA, 20 nt, Human
agaaauggaccuuacucagg

SEQ ID NO: 50042 - RNA, 19 nt, Human
agaagacaguguuggcauu

SEQ ID NO: 50043 - RNA, 19 nt, Human
agaagacaguguuggcauu

SEQ ID NO: 50044 - RNA, 19 nt, Human
agagaagagauuuuuaaau

SEQ ID NO: 50045 - RNA, 19 nt, Human
agagaagagauuuuuaaau

SEQ ID NO: 50046 - RNA, 19 nt, Human
agagaggaggcaggaggga

SEQ ID NO: 50047 - RNA, 19 nt, Human
agagaggaggcaggaggga

SEQ ID NO: 50048 - RNA, 18 nt, Human
agcaagagcaaaggcacc

SEQ ID NO: 50049 - RNA, 22 nt, Human
agccuaugaguccccacuucac

SEQ ID NO: 50050 - RNA, 19 nt, Human
aggcaggagggagcccaag

SEQ ID NO: 50051 - RNA, 19 nt, Human
aggcaggagggagcccaag

SEQ ID NO: 50052 - RNA, 19 nt, Human
aggcaggagggagcccaag

SEQ ID NO: 50053 - RNA, 19 nt, Human
aggcaggagggagcccaag

SEQ ID NO: 50054 - RNA, 18 nt, Human
aggggucaaguuccuggc

SEQ ID NO: 50055 - RNA, 18 nt, Human
aggggucaaguuccuggc

SEQ ID NO: 50056 - RNA, 23 nt, Human
aggguccuacucuaucccuccuu

SEQ ID NO: 50057 - RNA, 23 nt, Human
aggguccuacucuaucccuccuu

SEQ ID NO: 50058 - RNA, 21 nt, Human
agguggaaacuccugcgcggc

SEQ ID NO: 50059 - RNA, 18 nt, Human
aguagaaggagcacugga

SEQ ID NO: 50060 - RNA, 18 nt, Human
aguagaaggagcacugga

SEQ ID NO: 50061 - RNA, 19 nt, Human
agugguuccaugaagaaag

SEQ ID NO: 50062 - RNA, 19 nt, Human
agugguuccaugaagaaag

SEQ ID NO: 50063 - RNA, 22 nt, Human
auacaacccaaagccaacagag

SEQ ID NO: 50064 - RNA, 22 nt, Human
auacaacccaaagccaacagag

SEQ ID NO: 50065 - RNA, 21 nt, Human
aucuacacaaccucaaacauc

SEQ ID NO: 50066 - RNA, 22 nt, Human
augggagaagggaaggggagga

SEQ ID NO: 50067 - RNA, 22 nt, Human
augggagaagggaaggggagga

SEQ ID NO: 50068 - RNA, 23 nt, Human
caaacaaaggcagcccacaacua

SEQ ID NO: 50069 - RNA, 23 nt, Human
caaacaaaggcagcccacaacua

SEQ ID NO: 50070 - RNA, 23 nt, Human
caaaggcacccaagaucacaggg

SEQ ID NO: 50071 - RNA, 21 nt, Human
caaaggcagcccacaacuagg

SEQ ID NO: 50072 - RNA, 21 nt, Human
caaaggcagcccacaacuagg

SEQ ID NO: 50073 - RNA, 18 nt, Human
caaauuucugcccugagc

SEQ ID NO: 50074 - RNA, 19 nt, Human
caaauuucugcccugagca

SEQ ID NO: 50075 - RNA, 19 nt, Human
caaauuucugcccugagca

SEQ ID NO: 50076 - RNA, 19 nt, Human
caacccaaagccaacagag

SEQ ID NO: 50077 - RNA, 19 nt, Human
caacccaaagccaacagag

SEQ ID NO: 50078 - RNA, 19 nt, Human
caacuguaaaacgaagggu

SEQ ID NO: 50079 - RNA, 19 nt, Human
caacuguaaaacgaagggu

SEQ ID NO: 50080 - RNA, 18 nt, Human
caagagcaaaggcaccca

SEQ ID NO: 50081 - RNA, 22 nt, Human
caagcuaagccaucagcccuug

SEQ ID NO: 50082 - RNA, 22 nt, Human
caagcuaagccaucagcccuug

SEQ ID NO: 50083 - RNA, 26 nt, Human
cacccaagaucacaggggaagguggg

SEQ ID NO: 50084 - RNA, 21 nt, Human
cacugcucagucugcaccccc

SEQ ID NO: 50085 - RNA, 23 nt, Human
cagagaugggagaagggaagggg

SEQ ID NO: 50086 - RNA, 23 nt, Human
cagagaugggagaagggaagggg

SEQ ID NO: 50087 - RNA, 24 nt, Human
cagcaagagcaaaggcacccaaga

SEQ ID NO: 50088 - RNA, 23 nt, Human
cagcagugauuucaaacacaugc

SEQ ID NO: 50089 - RNA, 23 nt, Human
cagcauuuccucuguuguuuuga

SEQ ID NO: 50090 - RNA, 24 nt, Human
cagcauuucucugagagcuggugc

SEQ ID NO: 50091 - RNA, 24 nt, Human
cagcauuucucugagagcuggugc

SEQ ID NO: 50092 - RNA, 22 nt, Human
caggagggagcccaaggguguc

SEQ ID NO: 50093 - RNA, 22 nt, Human
caggagggagcccaaggguguc

SEQ ID NO: 50094 - RNA, 25 nt, Human
caggauggacagauagggacggaca

SEQ ID NO: 50095 - RNA, 25 nt, Human
caggauggacagauagggacggaca

SEQ ID NO: 50096 - RNA, 26 nt, Human
caggccccaggauggacagauaggga

SEQ ID NO: 50097 - RNA, 26 nt, Human
caggccccaggauggacagauaggga

SEQ ID NO: 50098 - RNA, 21 nt, Human
cagggacagagaugggagaag

SEQ ID NO: 50099 - RNA, 21 nt, Human
cagggacagagaugggagaag

SEQ ID NO: 50100 - RNA, 22 nt, Human
cagggcugggcacaccuggggc

SEQ ID NO: 50101 - RNA, 18 nt, Human
cauugcuaccuugcaagg

SEQ ID NO: 50102 - RNA, 20 nt, Human
cauuuccucuguuguuuuga

SEQ ID NO: 50103 - RNA, 18 nt, Human
ccaagaucacaggggaag

SEQ ID NO: 50104 - RNA, 19 nt, Human
ccaagaucacaggggaagg

SEQ ID NO: 50105 - RNA, 19 nt, Human
ccaccaccccuuccggcug

SEQ ID NO: 50106 - RNA, 20 nt, Human
ccagcauuucucugagagcu

SEQ ID NO: 50107 - RNA, 20 nt, Human
ccagcauuucucugagagcu

SEQ ID NO: 50108 - RNA, 23 nt, Human
ccagcauuucucugagagcuggu

SEQ ID NO: 50109 - RNA, 21 nt, Human
ccaugaagaaagcucaggguu

SEQ ID NO: 50110 - RNA, 21 nt, Human
ccaugaagaaagcucaggguu

SEQ ID NO: 50111 - RNA, 24 nt, Human
cccaagaucacaggggaagguggg

SEQ ID NO: 50112 - RNA, 20 nt, Human
cccagcauuucucugagagc

SEQ ID NO: 50113 - RNA, 20 nt, Human
cccagcauuucucugagagc

SEQ ID NO: 50114 - RNA, 18 nt, Human
cccaugcugcagcccgcg

SEQ ID NO: 50115 - RNA, 25 nt, Human
ccccaagccuaugaguccccacuuc

SEQ ID NO: 50116 - RNA, 19 nt, Human
ccccacggaagaacaugag

SEQ ID NO: 50117 - RNA, 20 nt, Human
cccccuagcuccacucucaa

SEQ ID NO: 50118 - RNA, 24 nt, Human
cccugugcuugcagggacagagau

SEQ ID NO: 50119 - RNA, 20 nt, Human
ccuaugaguccccacuucac

SEQ ID NO: 50120 - RNA, 26 nt, Human
ccuccauuugcagcaagagcaaaggc

SEQ ID NO: 50121 - RNA, 20 nt, Human
ccucccguugaccaccaccc

SEQ ID NO: 50122 - RNA, 20 nt, Human
ccucugccgucugcuccucc

SEQ ID NO: 50123 - RNA, 18 nt, Human
ccugguccucacagcacc

SEQ ID NO: 50124 - RNA, 22 nt, Human
ccugugcuugcagggacagaga

SEQ ID NO: 50125 - RNA, 22 nt, Human
ccugugcuugcagggacagaga

SEQ ID NO: 50126 - RNA, 20 nt, Human
ccuugacaaaaggcucgggu

SEQ ID NO: 50127 - RNA, 22 nt, Human
ccuugggcaagucaccugauuu

SEQ ID NO: 50128 - RNA, 22 nt, Human
ccuugggcaagucaccugauuu

SEQ ID NO: 50129 - RNA, 22 nt, Human
cgggguaguaaggaggacagag

SEQ ID NO: 50130 - RNA, 21 nt, Human
cuaagcacuagacaaaacacu

SEQ ID NO: 50131 - RNA, 23 nt, Human
cucaagcacaaaaacaauuacaa

SEQ ID NO: 50132 - RNA, 23 nt, Human
cucacagcccugccgucagaauu

SEQ ID NO: 50133 - RNA, 19 nt, Human
cucaggggaagccuugacc

SEQ ID NO: 50134 - RNA, 19 nt, Human
cucaggggaagccuugacc

SEQ ID NO: 50135 - RNA, 18 nt, Human
cuccagcccagugcccac

SEQ ID NO: 50136 - RNA, 19 nt, Human
cuccagcccagugcccacc

SEQ ID NO: 50137 - RNA, 23 nt, Human
cuccagccccaagccuaugaguc

SEQ ID NO: 50138 - RNA, 19 nt, Human
cuccugcaggcaggcuggg

SEQ ID NO: 50139 - RNA, 19 nt, Human
cucuaucccuccuuagccc

SEQ ID NO: 50140 - RNA, 19 nt, Human
cucuaucccuccuuagccc

SEQ ID NO: 50141 - RNA, 20 nt, Human
cucugauuuagucugagccu

SEQ ID NO: 50142 - RNA, 20 nt, Human
cucugauuuagucugagccu

SEQ ID NO: 50143 - RNA, 18 nt, Human
cucugccgucugcuccuc

SEQ ID NO: 50144 - RNA, 18 nt, Human
cugagccugugagagcuc

SEQ ID NO: 50145 - RNA, 22 nt, Human
cuuagcuaucuccggucggcca

SEQ ID NO: 50146 - RNA, 21 nt, Human
cuuauagcucuuccauccauc

SEQ ID NO: 50147 - RNA, 21 nt, Human
cuuauagcucuuccauccauc

SEQ ID NO: 50148 - RNA, 23 nt, Human
cuuggaaggugagcccucugggg

SEQ ID NO: 50149 - RNA, 18 nt, Human
gaaggggaggagagagag

SEQ ID NO: 50150 - RNA, 18 nt, Human
gaaggggaggagagagag

SEQ ID NO: 50151 - RNA, 22 nt, Human
gacauuguccucccugguccuc

SEQ ID NO: 50152 - RNA, 21 nt, Human
gagggaaggucgggggaaacc

SEQ ID NO: 50153 - RNA, 21 nt, Human
gagggaaggucgggggaaacc

SEQ ID NO: 50154 - RNA, 21 nt, Human
gcacaauucaaaggggucaag

SEQ ID NO: 50155 - RNA, 21 nt, Human
gcacaauucaaaggggucaag

SEQ ID NO: 50156 - RNA, 22 nt, Human
gcaccugggagucuccagcccc

SEQ ID NO: 50157 - RNA, 22 nt, Human
gccccaagccuaugagucccca

SEQ ID NO: 50158 - RNA, 25 nt, Human
gcccugugcuugcagggacagagau

SEQ ID NO: 50159 - RNA, 18 nt, Human
gcccuugggaacaaagau

SEQ ID NO: 50160 - RNA, 27 nt, Human
gccuccauuugcagcaagagcaaaggc

SEQ ID NO: 50161 - RNA, 24 nt, Human
gcggcggcggggaugacuggccac

SEQ ID NO: 50162 - RNA, 19 nt, Human
gcugcugggagauccccca

SEQ ID NO: 50163 - RNA, 19 nt, Human
ggacagcauccaaacaaag

SEQ ID NO: 50164 - RNA, 20 nt, Human
ggacagcauccaaacaaagg

SEQ ID NO: 50165 - RNA, 20 nt, Human
ggacagcauccaaacaaagg

SEQ ID NO: 50166 - RNA, 25 nt, Human
ggaggagagagaggaggcaggaggg

SEQ ID NO: 50167 - RNA, 25 nt, Human
ggaggagagagaggaggcaggaggg

SEQ ID NO: 50168 - RNA, 23 nt, Human
ggauggacagauagggacggaca

SEQ ID NO: 50169 - RNA, 18 nt, Human
ggccacaucuacacaacc

SEQ ID NO: 50170 - RNA, 21 nt, Human
guagagauagcuccauccaca

SEQ ID NO: 50171 - RNA, 21 nt, Human
guagagauagcuccauccaca

SEQ ID NO: 50172 - RNA, 21 nt, Human
guccaggguccuacucuaucc

SEQ ID NO: 50173 - RNA, 21 nt, Human
guccaggguccuacucuaucc

SEQ ID NO: 50174 - RNA, 20 nt, Human
gucgggugaucucuaaguuc

SEQ ID NO: 50175 - RNA, 20 nt, Human
gucgggugaucucuaaguuc

SEQ ID NO: 50176 - RNA, 21 nt, Human
guggacagcauccaaacaaag

SEQ ID NO: 50177 - RNA, 21 nt, Human
guucggaauuucuuuuucuuc

SEQ ID NO: 50178 - RNA, 25 nt, Human
uaaaaaauccacccagcuaaucugc

SEQ ID NO: 50179 - RNA, 24 nt, Human
uaagaugccaguuucggucuguaa

SEQ ID NO: 50180 - RNA, 24 nt, Human
uaagaugccaguuucggucuguaa

SEQ ID NO: 50181 - RNA, 19 nt, Human
uacaacccaaagccaacag

SEQ ID NO: 50182 - RNA, 19 nt, Human
uacaacccaaagccaacag

SEQ ID NO: 50183 - RNA, 24 nt, Human
uaccaccucuuauagcucuuccau

SEQ ID NO: 50184 - RNA, 20 nt, Human
uaccaggccccaggauggac

SEQ ID NO: 50185 - RNA, 20 nt, Human
uaccaggccccaggauggac

SEQ ID NO: 50186 - RNA, 23 nt, Human
uaccaggcuagaggcucagagac

SEQ ID NO: 50187 - RNA, 22 nt, Human
uagaaagucagcauuuccucug

SEQ ID NO: 50188 - RNA, 22 nt, Human
uagaaagucagcauuuccucug

SEQ ID NO: 50189 - RNA, 18 nt, Human
uagaaggagcacuggacu

SEQ ID NO: 50190 - RNA, 18 nt, Human
uagaaggagcacuggacu

SEQ ID NO: 50191 - RNA, 23 nt, Human
uagaaggagcacuggacuggaag

SEQ ID NO: 50192 - RNA, 23 nt, Human
uagaaggagcacuggacuggaag

SEQ ID NO: 50193 - RNA, 22 nt, Human
uagcuccacucucaagggugcc

SEQ ID NO: 50194 - RNA, 22 nt, Human
ucaaacauccagguggaaacuc

SEQ ID NO: 50195 - RNA, 19 nt, Human
ucaaugccccacggaagaa

SEQ ID NO: 50196 - RNA, 23 nt, Human
ucaaugccccacggaagaacaug

SEQ ID NO: 50197 - RNA, 23 nt, Human
ucaaugccccacggaagaacaug

SEQ ID NO: 50198 - RNA, 18 nt, Human
ucacaggggaaggugggu

SEQ ID NO: 50199 - RNA, 22 nt, Human
ucagagacucucagggcugggc

SEQ ID NO: 50200 - RNA, 18 nt, Human
ucaggccuuugcugagga

SEQ ID NO: 50201 - RNA, 23 nt, Human
ucagggcugggcacaccuggggc

SEQ ID NO: 50202 - RNA, 22 nt, Human
uccacaggagauuggauuccug

SEQ ID NO: 50203 - RNA, 22 nt, Human
uccacaggagauuggauuccug

SEQ ID NO: 50204 - RNA, 21 nt, Human
uccaggguccuacucuauccc

SEQ ID NO: 50205 - RNA, 21 nt, Human
uccaggguccuacucuauccc

SEQ ID NO: 50206 - RNA, 23 nt, Human
uccagguggaaacuccugcgcgg

SEQ ID NO: 50207 - RNA, 21 nt, Human
uccauccaucauucaaguggu

SEQ ID NO: 50208 - RNA, 21 nt, Human
uccauccaucauucaaguggu

SEQ ID NO: 50209 - RNA, 20 nt, Human
uccauggcaggagguacgga

SEQ ID NO: 50210 - RNA, 19 nt, Human
ucccccagcagugcagcgg

SEQ ID NO: 50211 - RNA, 20 nt, Human
ucccccagcagugcagcggc

SEQ ID NO: 50212 - RNA, 22 nt, Human
ucccccagcagugcagcggcuc

SEQ ID NO: 50213 - RNA, 23 nt, Human
ucccucccguugaccaccacccc

SEQ ID NO: 50214 - RNA, 19 nt, Human
ucccuccuuagcccugugc

SEQ ID NO: 50215 - RNA, 19 nt, Human
ucccuccuuagcccugugc

SEQ ID NO: 50216 - RNA, 22 nt, Human
ucccuccuuagcccugugcuug

SEQ ID NO: 50217 - RNA, 20 nt, Human
ucccugguccucacagcacc

SEQ ID NO: 50218 - RNA, 23 nt, Human
uccucccugguccucacagcacc

SEQ ID NO: 50219 - RNA, 22 nt, Human
ucggguucccgcuagucccuca

SEQ ID NO: 50220 - RNA, 23 nt, Human
ucucagggcugggcacaccuggg

SEQ ID NO: 50221 - RNA, 18 nt, Human
ucuccuucuuuuugcucu

SEQ ID NO: 50222 - RNA, 18 nt, Human
ucucuugggcaacuguaa

SEQ ID NO: 50223 - RNA, 18 nt, Human
ucucuugggcaacuguaa

SEQ ID NO: 50224 - RNA, 19 nt, Human
ucugagccugugagagcuc

SEQ ID NO: 50225 - RNA, 19 nt, Human
ucugagccugugagagcuc

SEQ ID NO: 50226 - RNA, 20 nt, Human
ucugccgcuaacuagcugug

SEQ ID NO: 50227 - RNA, 20 nt, Human
ucugccgcuaacuagcugug

SEQ ID NO: 50228 - RNA, 24 nt, Human
ucugccgcuaacuagcugugugac

SEQ ID NO: 50229 - RNA, 24 nt, Human
ucugccgcuaacuagcugugugac

SEQ ID NO: 50230 - RNA, 19 nt, Human
ucugcuccuccucccuccc

SEQ ID NO: 50231 - RNA, 22 nt, Human
ucuuauagcucuuccauccauc

SEQ ID NO: 50232 - RNA, 26 nt, Human
ucuuugagggagacuuggaaggugag

SEQ ID NO: 50233 - RNA, 21 nt, Human
ugacaaaaggcucggguuccc

SEQ ID NO: 50234 - RNA, 20 nt, Human
ugagagcuggugcaagagga

SEQ ID NO: 50235 - RNA, 20 nt, Human
ugagagcuggugcaagagga

SEQ ID NO: 50236 - RNA, 21 nt, Human
ugagggagacuuggaagguga

SEQ ID NO: 50237 - RNA, 18 nt, Human
ugaucucuaaguuccccu

SEQ ID NO: 50238 - RNA, 18 nt, Human
ugaucucuaaguuccccu

SEQ ID NO: 50239 - RNA, 19 nt, Human
ugaucucuaaguuccccuu

SEQ ID NO: 50240 - RNA, 19 nt, Human
ugaucucuaaguuccccuu

SEQ ID NO: 50241 - RNA, 18 nt, Human
ugcccugagcauuaaaca

SEQ ID NO: 50242 - RNA, 18 nt, Human
ugcccugagcauuaaaca

SEQ ID NO: 50243 - RNA, 22 nt, Human
ugcccugagcauuaaacaacuu

SEQ ID NO: 50244 - RNA, 22 nt, Human
ugcccugagcauuaaacaacuu

SEQ ID NO: 50245 - RNA, 19 nt, Human
ugcugggagaucccccagc

SEQ ID NO: 50246 - RNA, 20 nt, Human
uggaaggugagcccucuggg

SEQ ID NO: 50247 - RNA, 21 nt, Human
uggacagcauccaaacaaagg

SEQ ID NO: 50248 - RNA, 21 nt, Human
uggcccagcccuguccaaggg

SEQ ID NO: 50249 - RNA, 19 nt, Human
uggcuagucacuuugacga

SEQ ID NO: 50250 - RNA, 19 nt, Human
uggcuagucacuuugacga

SEQ ID NO: 50251 - RNA, 22 nt, Human
ugggaacaaagauuacuuucug

SEQ ID NO: 50252 - RNA, 22 nt, Human
ugggaacaaagauuacuuucug

SEQ ID NO: 50253 - RNA, 19 nt, Human
ugggaagaaauggaccuua

SEQ ID NO: 50254 - RNA, 23 nt, Human
ugggagaagggaaggggaggaga

SEQ ID NO: 50255 - RNA, 23 nt, Human
ugggagaagggaaggggaggaga

SEQ ID NO: 50256 - RNA, 23 nt, Human
ugggguaguacaagcuaagccau

SEQ ID NO: 50257 - RNA, 23 nt, Human
ugggguaguacaagcuaagccau

SEQ ID NO: 50258 - RNA, 24 nt, Human
uggggugcgcuuaaaaaauccacc

SEQ ID NO: 50259 - RNA, 22 nt, Human
uggugcaagaggauuaauccug

SEQ ID NO: 50260 - RNA, 22 nt, Human
uggugcaagaggauuaauccug

SEQ ID NO: 50261 - RNA, 25 nt, Human
ugguggucaucuggcucaggccuuu

SEQ ID NO: 50262 - RNA, 21 nt, Human
ugugaccuugggcaagucacc

SEQ ID NO: 50263 - RNA, 21 nt, Human
ugugaccuugggcaagucacc

SEQ ID NO: 50264 - RNA, 22 nt, Human
uucaacuucccaaauuucugcc

SEQ ID NO: 50265 - RNA, 22 nt, Human
uucaacuucccaaauuucugcc

SEQ ID NO: 50266 - RNA, 19 nt, Human
uucaagugguuccaugaag

SEQ ID NO: 50267 - RNA, 19 nt, Human
uucaagugguuccaugaag

SEQ ID NO: 50268 - RNA, 22 nt, Human
uuccugggaagaaauggaccuu

SEQ ID NO: 50269 - RNA, 22 nt, Human
uuccugggaagaaauggaccuu

SEQ ID NO: 50270 - RNA, 22 nt, Human
uuccuugacaaaaggcucgggu

SEQ ID NO: 50271 - RNA, 21 nt, Human
uuuucugcccaugcugcagcc

SEQ ID NO: 50272 - RNA, 23 nt, Human
aauuucuuucuaacagauauuau

SEQ ID NO: 50273 - RNA, 22 nt, Human
cucacuggcaauuucuuucuaa

SEQ ID NO: 50274 - RNA, 18 nt, Human
cugaaacaaugggacucc

SEQ ID NO: 50275 - RNA, 26 nt, Human
guaaaaccucuuuccaguucuuaaag

SEQ ID NO: 50276 - RNA, 22 nt, Human
uauaauaauaauuauaaaaaga

SEQ ID NO: 50277 - RNA, 18 nt, Human
ucuaaacuaauaaaaaag

SEQ ID NO: 50278 - RNA, 21 nt, Human
uggcaaacaaaguuacuucag

SEQ ID NO: 50279 - RNA, 24 nt, Human
ugugguauuuagaugugcaauguc

SEQ ID NO: 50280 - RNA, 20 nt, Human
uuaaaacuaguaauugcuua

SEQ ID NO: 50281 - RNA, 23 nt, Human
uuaaaauucaaagccauuucugg

SEQ ID NO: 50282 - RNA, 19 nt, Human
uuaaaguccaguuugcuac

SEQ ID NO: 50283 - RNA, 18 nt, Human
uuagaugugcaaugucac

SEQ ID NO: 50284 - RNA, 19 nt, Human
uuuguaaaaccucuuucca

SEQ ID NO: 50285 - RNA, 22 nt, Human
uuuguaaaaccucuuuccaguu

SEQ ID NO: 50286 - RNA, 20 nt, Human
aagcccccaaauguaauuua

SEQ ID NO: 50287 - RNA, 18 nt, Human
acaagggaaaacaucugu

SEQ ID NO: 50288 - RNA, 22 nt, Human
aggaagguuuauuggcuucaau

SEQ ID NO: 50289 - RNA, 22 nt, Human
ccagcuguugcuccagaucaug

SEQ ID NO: 50290 - RNA, 23 nt, Human
guccuuguggauuucuucccugg

SEQ ID NO: 50291 - RNA, 18 nt, Human
guugcuccagaucaugua

SEQ ID NO: 50292 - RNA, 21 nt, Human
ucaacacuuuauuuaguucuc

SEQ ID NO: 50293 - RNA, 18 nt, Human
uggauuucuucccugcuc

SEQ ID NO: 50294 - RNA, 18 nt, Human
uuuggaaagcccccaaau

SEQ ID NO: 50295 - RNA, 20 nt, Human
aaagauuaugaagauaccaa

SEQ ID NO: 50296 - RNA, 19 nt, Human
aaugcuaggauuauagacu

SEQ ID NO: 50297 - RNA, 22 nt, Human
aggaagguuuguuggcuucaau

SEQ ID NO: 50298 - RNA, 20 nt, Human
aggaggcugaagacugcuac

SEQ ID NO: 50299 - RNA, 18 nt, Human
augaagcaagaaaucugc

SEQ ID NO: 50300 - RNA, 28 nt, Human
auguauguguauauauauaucuacuagg

SEQ ID NO: 50301 - RNA, 18 nt, Human
auugaaaacaauuuugca

SEQ ID NO: 50302 - RNA, 24 nt, Human
caauuguauaucgaccauaaagaa

SEQ ID NO: 50303 - RNA, 19 nt, Human
cacuuuauuuacuucucac

SEQ ID NO: 50304 - RNA, 22 nt, Human
cgacagugaaaacugagacaga

SEQ ID NO: 50305 - RNA, 18 nt, Human
cgaccauaaagaaauagu

SEQ ID NO: 50306 - RNA, 22 nt, Human
cuagcuguugcuccagaucuug

SEQ ID NO: 50307 - RNA, 23 nt, Human
cugaagacugcuacaggggaagg

SEQ ID NO: 50308 - RNA, 18 nt, Human
guugcuccagaucuugua

SEQ ID NO: 50309 - RNA, 22 nt, Human
uaaaaacacugccauuuacugu

SEQ ID NO: 50310 - RNA, 18 nt, Human
uaaagcucaaaaugcaaa

SEQ ID NO: 50311 - RNA, 19 nt, Human
uaacaaagcauuaacacag

SEQ ID NO: 50312 - RNA, 20 nt, Human
uaacaaagcauuaacacagg

SEQ ID NO: 50313 - RNA, 26 nt, Human
uacauuuguauauguguauauaugua

SEQ ID NO: 50314 - RNA, 24 nt, Human
uaccaaaaaugcaagaagucacag

SEQ ID NO: 50315 - RNA, 18 nt, Human
uaccaggaauaaucuuug

SEQ ID NO: 50316 - RNA, 23 nt, Human
uaguuaauagaaaaguucuagau

SEQ ID NO: 50317 - RNA, 28 nt, Human
uauacauuuguauauguguauauuacau

SEQ ID NO: 50318 - RNA, 20 nt, Human
uauauauguauguguauaua

SEQ ID NO: 50319 - RNA, 21 nt, Human
uauauguguauauauguaugu

SEQ ID NO: 50320 - RNA, 21 nt, Human
uauauguguauauauguaugu

SEQ ID NO: 50321 - RNA, 23 nt, Human
uauauguguauauauguaugugu

SEQ ID NO: 50322 - RNA, 21 nt, Human
uauguauguguauauauauau

SEQ ID NO: 50323 - RNA, 18 nt, Human
uauguguauauauauauc

SEQ ID NO: 50324 - RNA, 19 nt, Human
uauguguauauauguaugu

SEQ ID NO: 50325 - RNA, 22 nt, Human
uauguguauauauguaugugua

SEQ ID NO: 50326 - RNA, 23 nt, Human
uauguguauauauguauguguau

SEQ ID NO: 50327 - RNA, 21 nt, Human
uauuagaaaaaggaaaauguc

SEQ ID NO: 50328 - RNA, 19 nt, Human
ucacagcauuugccauccc

SEQ ID NO: 50329 - RNA, 19 nt, Human
uccuuccccugagaguggg

SEQ ID NO: 50330 - RNA, 24 nt, Human
ucgacagugaaaacugagacagaa

SEQ ID NO: 50331 - RNA, 18 nt, Human
ucgaccauaaagaaauag

SEQ ID NO: 50332 - RNA, 20 nt, Human
ucgaccauaaagaaauagua

SEQ ID NO: 50333 - RNA, 18 nt, Human
ucuagauugaaaacaauu

SEQ ID NO: 50334 - RNA, 22 nt, Human
ucucuacacuuaaagccaccau

SEQ ID NO: 50335 - RNA, 20 nt, Human
ugacacaguagaaugguuaa

SEQ ID NO: 50336 - RNA, 22 nt, Human
ugaggcuuugucauaugaagca

SEQ ID NO: 50337 - RNA, 19 nt, Human
ugcaaauccuuccccugag

SEQ ID NO: 50338 - RNA, 19 nt, Human
ugcaagaagucacaggaau

SEQ ID NO: 50339 - RNA, 21 nt, Human
ugcuaggauuauagacuugau

SEQ ID NO: 50340 - RNA, 19 nt, Human
uggcaaaggugacacagua

SEQ ID NO: 50341 - RNA, 23 nt, Human
ugggaaagcauuaacaaaugaga

SEQ ID NO: 50342 - RNA, 19 nt, Human
uguauauauguauguguau

SEQ ID NO: 50343 - RNA, 23 nt, Human
uguauauauguauguguauauau

SEQ ID NO: 50344 - RNA, 24 nt, Human
uguauauguguauauauguaugug

SEQ ID NO: 50345 - RNA, 24 nt, Human
uguguauauauguauguguauaua

SEQ ID NO: 50346 - RNA, 20 nt, Human
uguugcuccagaucuuguag

SEQ ID NO: 50347 - RNA, 19 nt, Human
uuacuguaguaaaaugugg

SEQ ID NO: 50348 - RNA, 23 nt, Human
uucauaauaugaaauagaaugua

SEQ ID NO: 50349 - RNA, 19 nt, Human
uuccccugagagugggaaa

SEQ ID NO: 50350 - RNA, 23 nt, Human
uugcaacaauagcauuuuuggag

SEQ ID NO: 50351 - RNA, 21 nt, Human
uuguggauuucuucucugcuu

SEQ ID NO: 50352 - RNA, 19 nt, Human
uuuacauucugcauucaca

SEQ ID NO: 50353 - RNA, 19 nt, Human
uuuacuguaguaaaaugug

SEQ ID NO: 50354 - RNA, 20 nt, Human
uuuuuugaacaugauucugg

SEQ ID NO: 50355 - RNA, 22 nt, Human
aggaagguuuauuggcuucaau

SEQ ID NO: 50356 - RNA, 21 nt, Human
gaggaggcugaaaacugcuac

SEQ ID NO: 50357 - RNA, 18 nt, Human
gcuacaagggaaggcauc

SEQ ID NO: 50358 - RNA, 18 nt, Human
guugcuccagaucaugua

SEQ ID NO: 50359 - RNA, 22 nt, Human
ucaacacuuuauuuaguucuca

SEQ ID NO: 50360 - RNA, 19 nt, Human
uuggcuucaauuccccagu

SEQ ID NO: 50361 - RNA, 20 nt, Human
uuucuuuggaaagcucccac

SEQ ID NO: 50362 - RNA, 24 nt, Human
aaaaaaauuauaaacauauggcca

SEQ ID NO: 50363 - RNA, 19 nt, Human
aaagcucuuuuauguuccc

SEQ ID NO: 50364 - RNA, 19 nt, Human
aaauaauagagaaaagccc

SEQ ID NO: 50365 - RNA, 19 nt, Human
aacaauccauuauacucuu

SEQ ID NO: 50366 - RNA, 22 nt, Human
aacuaauuuuaaacaauuucua

SEQ ID NO: 50367 - RNA, 19 nt, Human
aaguuuuguggguauuagg

SEQ ID NO: 50368 - RNA, 27 nt, Human
aaucuaguuuuauuuauuaucucuuca

SEQ ID NO: 50369 - RNA, 26 nt, Human
accccauugcucccagugagcuccaa

SEQ ID NO: 50370 - RNA, 19 nt, Human
acccugauaaucacuuccu

SEQ ID NO: 50371 - RNA, 26 nt, Human
agacaaaacguggagagaagggaccc

SEQ ID NO: 50372 - RNA, 18 nt, Human
agggaugggguacaugag

SEQ ID NO: 50373 - RNA, 18 nt, Human
agguacaaagucuauaau

SEQ ID NO: 50374 - RNA, 22 nt, Human
auagagaaaagcccauuaaaca

SEQ ID NO: 50375 - RNA, 20 nt, Human
augagcugucuuugaauaau

SEQ ID NO: 50376 - RNA, 27 nt, Human
auuuaacuuaccuguucuucuccuuca

SEQ ID NO: 50377 - RNA, 19 nt, Human
cacagcccugccggccucu

SEQ ID NO: 50378 - RNA, 25 nt, Human
cagugagcuccaagauuuuuuaaau

SEQ ID NO: 50379 - RNA, 20 nt, Human
caucacccagguaugaagcc

SEQ ID NO: 50380 - RNA, 18 nt, Human
caugugcaggaugugcag

SEQ ID NO: 50381 - RNA, 19 nt, Human
ccagaaaauuuucaacaua

SEQ ID NO: 50382 - RNA, 24 nt, Human
ccagguaugaagcccagcauccau

SEQ ID NO: 50383 - RNA, 20 nt, Human
cccacuuucaacuucccaga

SEQ ID NO: 50384 - RNA, 18 nt, Human
ccggccucuuaccacauc

SEQ ID NO: 50385 - RNA, 21 nt, Human
cguggagagaaaaguauaaug

SEQ ID NO: 50386 - RNA, 21 nt, Human
cucccuguugugcuaucaaau

SEQ ID NO: 50387 - RNA, 26 nt, Human
cucucugccgacucccugcccucaac

SEQ ID NO: 50388 - RNA, 24 nt, Human
cugcaaccccauugcucccaguga

SEQ ID NO: 50389 - RNA, 18 nt, Human
cuuugaauaauaccauuc

SEQ ID NO: 50390 - RNA, 23 nt, Human
gaaaauuuucaacauagacaaaa

SEQ ID NO: 50391 - RNA, 20 nt, Human
ggccaaucuaguuuuauuua

SEQ ID NO: 50392 - RNA, 19 nt, Human
gugcaggaugugcagguuu

SEQ ID NO: 50393 - RNA, 20 nt, Human
guugugcuaucaaauaccag

SEQ ID NO: 50394 - RNA, 20 nt, Human
uaauagagaaaagcccauua

SEQ ID NO: 50395 - RNA, 19 nt, Human
uaaugugauuuuuuccagu

SEQ ID NO: 50396 - RNA, 22 nt, Human
uacaauuaaauugcuguugacu

SEQ ID NO: 50397 - RNA, 19 nt, Human
uaccaggucuuauucauuc

SEQ ID NO: 50398 - RNA, 27 nt, Human
uaccuguucuucuccuucacaacccug

SEQ ID NO: 50399 - RNA, 23 nt, Human
uagcuauucuuccugaugcucuc

SEQ ID NO: 50400 - RNA, 24 nt, Human
uagcuauucuuccugaugcucucu

SEQ ID NO: 50401 - RNA, 19 nt, Human
ucacuuccuuuucuccuuu

SEQ ID NO: 50402 - RNA, 20 nt, Human
ucauguguccauguguucuc

SEQ ID NO: 50403 - RNA, 20 nt, Human
ucccugcccucaacaggccc

SEQ ID NO: 50404 - RNA, 19 nt, Human
uccuuuguugcuguaauuc

SEQ ID NO: 50405 - RNA, 18 nt, Human
ucucucucugccgacucc

SEQ ID NO: 50406 - RNA, 24 nt, Human
ucugccgacucccugcccucaaca

SEQ ID NO: 50407 - RNA, 19 nt, Human
ucuuugggaaacuguguug

SEQ ID NO: 50408 - RNA, 22 nt, Human
ugcacagaucaucucaucaccc

SEQ ID NO: 50409 - RNA, 21 nt, Human
uggggucuccaucuccucaag

SEQ ID NO: 50410 - RNA, 21 nt, Human
uguggguauuagguguauaua

SEQ ID NO: 50411 - RNA, 24 nt, Human
uguguguuguuccccaucaugugu

SEQ ID NO: 50412 - RNA, 19 nt, Human
uuaaacauauaaagaugaa

SEQ ID NO: 50413 - RNA, 24 nt, Human
uuacauagguaaacauguaccaug

SEQ ID NO: 50414 - RNA, 24 nt, Human
uucaacauagacaaaacguggaga

SEQ ID NO: 50415 - RNA, 19 nt, Human
uuccaggguacaugugcag

SEQ ID NO: 50416 - RNA, 19 nt, Human
uuccaguaaaaaucuuuuu

SEQ ID NO: 50417 - RNA, 20 nt, Human
uuuaagcuuguguaucaaua

SEQ ID NO: 50418 - RNA, 23 nt, Human
uuuauugaaaaauauaaaauaau

SEQ ID NO: 50419 - RNA, 22 nt, Human
aacaaggcacaguaccucccuu

SEQ ID NO: 50420 - RNA, 18 nt, Human
aacguuauguuucugagg

SEQ ID NO: 50421 - RNA, 20 nt, Human
aagagcaauuuggcaauguc

SEQ ID NO: 50422 - RNA, 20 nt, Human
aagcugcuccuaucacauca

SEQ ID NO: 50423 - RNA, 18 nt, Human
acagaaacuggcaacaac

SEQ ID NO: 50424 - RNA, 20 nt, Human
acagaagcagacuugggucc

SEQ ID NO: 50425 - RNA, 19 nt, Human
acauacaccuauuuaagcc

SEQ ID NO: 50426 - RNA, 24 nt, Human
acugaauuauccuuguccuugauu

SEQ ID NO: 50427 - RNA, 18 nt, Human
agaaacuggcaacaacuu

SEQ ID NO: 50428 - RNA, 18 nt, Human
agaacagauaaauuaugg

SEQ ID NO: 50429 - RNA, 19 nt, Human
aggggggcggggcgugggg

SEQ ID NO: 50430 - RNA, 18 nt, Human
auaaugggcagacaaacc

SEQ ID NO: 50431 - RNA, 21 nt, Human
augaaugacacacauaacccu

SEQ ID NO: 50432 - RNA, 21 nt, Human
augagugaaaaaagcuguaga

SEQ ID NO: 50433 - RNA, 25 nt, Human
auuccauacucauguaauucacaaa

SEQ ID NO: 50434 - RNA, 22 nt, Human
caaaaguaggugcugagaacuu

SEQ ID NO: 50435 - RNA, 20 nt, Human
caaggcacaguaccucccuu

SEQ ID NO: 50436 - RNA, 23 nt, Human
caaugaugacagcauaaaacaag

SEQ ID NO: 50437 - RNA, 19 nt, Human
caccuauuuaagcccagaa

SEQ ID NO: 50438 - RNA, 19 nt, Human
cagacacccaccacugccc

SEQ ID NO: 50439 - RNA, 24 nt, Human
caguacuaaagaguagaugguuua

SEQ ID NO: 50440 - RNA, 21 nt, Human
cagugaaaguacaacaacaca

SEQ ID NO: 50441 - RNA, 18 nt, Human
cauguaauucacaaaaac

SEQ ID NO: 50442 - RNA, 23 nt, Human
ccucuuggaggggaggaauggca

SEQ ID NO: 50443 - RNA, 21 nt, Human
ccugcuuccuuucccuuuccc

SEQ ID NO: 50444 - RNA, 24 nt, Human
ccuuaaagauaauaucacagaagc

SEQ ID NO: 50445 - RNA, 20 nt, Human
ccuucaacuggacuggagaa

SEQ ID NO: 50446 - RNA, 18 nt, Human
cgaaguggcaaaauguua

SEQ ID NO: 50447 - RNA, 28 nt, Human
cggcgcggggggcugacauccggggugg

SEQ ID NO: 50448 - RNA, 19 nt, Human
cugcuuccuuucccuuucc

SEQ ID NO: 50449 - RNA, 21 nt, Human
gaacaaggcacaguaccuccc

SEQ ID NO: 50450 - RNA, 23 nt, Human
gaagcagacuuggguccugauua

SEQ ID NO: 50451 - RNA, 22 nt, Human
gaaguggcaaaauguuaagauu

SEQ ID NO: 50452 - RNA, 19 nt, Human
gagcaauuuggcaaugucu

SEQ ID NO: 50453 - RNA, 19 nt, Human
gaggggggcggggcguggg

SEQ ID NO: 50454 - RNA, 23 nt, Human
gcaacaacuucaugccuucaacu

SEQ ID NO: 50455 - RNA, 18 nt, Human
gcaaguaugaggcuuaaa

SEQ ID NO: 50456 - RNA, 22 nt, Human
gcugugagguuggaggcgcuuc

SEQ ID NO: 50457 - RNA, 20 nt, Human
ggcgagcgccuagcgagggg

SEQ ID NO: 50458 - RNA, 19 nt, Human
ggcggggcguggggggggc

SEQ ID NO: 50459 - RNA, 26 nt, Human
ggcggugcucgagcuguggggcagcc

SEQ ID NO: 50460 - RNA, 20 nt, Human
gggcggggcguggggggggc

SEQ ID NO: 50461 - RNA, 23 nt, Human
gggcggggcguggggggggcuug

SEQ ID NO: 50462 - RNA, 21 nt, Human
ggggcggggcguggggggggc

SEQ ID NO: 50463 - RNA, 21 nt, Human
gugaaaaaagcuguagaauga

SEQ ID NO: 50464 - RNA, 20 nt, Human
uaaaacaguacuaaagagua

SEQ ID NO: 50465 - RNA, 22 nt, Human
uaccucuuggaggggaggaaug

SEQ ID NO: 50466 - RNA, 18 nt, Human
ucagauauaauuauacaa

SEQ ID NO: 50467 - RNA, 21 nt, Human
uccacacaaauguagaaauug

SEQ ID NO: 50468 - RNA, 21 nt, Human
uccauacucauguaauucaca

SEQ ID NO: 50469 - RNA, 20 nt, Human
ugaacgagagcuucagauau

SEQ ID NO: 50470 - RNA, 20 nt, Human
ugacugaauuauccuugucc

SEQ ID NO: 50471 - RNA, 24 nt, Human
ugacugaauuauccuuguccuuga

SEQ ID NO: 50472 - RNA, 19 nt, Human
ugagugaaaaaagcuguag

SEQ ID NO: 50473 - RNA, 20 nt, Human
ugagugaaaaaagcuguaga

SEQ ID NO: 50474 - RNA, 19 nt, Human
ugcaauggcuccaaccgga

SEQ ID NO: 50475 - RNA, 20 nt, Human
ugccauccuaggaauuuggg

SEQ ID NO: 50476 - RNA, 25 nt, Human
ugcccugcuuccuuucccuuucccu

SEQ ID NO: 50477 - RNA, 24 nt, Human
uggcaacaacuucaugccuucaac

SEQ ID NO: 50478 - RNA, 20 nt, Human
uguagaaugagcaaguauga

SEQ ID NO: 50479 - RNA, 20 nt, Human
uguggauaauuguuaccucu

SEQ ID NO: 50480 - RNA, 22 nt, Human
uuaaagauaauaucacagaagc

SEQ ID NO: 50481 - RNA, 19 nt, Human
uucaugccuucaacuggac

SEQ ID NO: 50482 - RNA, 19 nt, Human
uuggaggggaggaauggca

SEQ ID NO: 50483 - RNA, 23 nt, Human
aagccaauacacccuuucucuug

SEQ ID NO: 50484 - RNA, 19 nt, Human
agacauaaaauuuaugugg

SEQ ID NO: 50485 - RNA, 27 nt, Human
caaacacacagacauaaaauuuaugug

SEQ ID NO: 50486 - RNA, 25 nt, Human
caaauuccugaaagccucuucaauu

SEQ ID NO: 50487 - RNA, 23 nt, Human
caauacacccuuucucuuggucu

SEQ ID NO: 50488 - RNA, 19 nt, Human
cacccuuucucuuggucuc

SEQ ID NO: 50489 - RNA, 23 nt, Human
cuacucccaagccaauacacccu

SEQ ID NO: 50490 - RNA, 19 nt, Human
cucaaacacacagacauaa

SEQ ID NO: 50491 - RNA, 21 nt, Human
cuguagcaacuuucacuguag

SEQ ID NO: 50492 - RNA, 20 nt, Human
gaaauaaaacaaaaugcaga

SEQ ID NO: 50493 - RNA, 21 nt, Human
gacccuucuucuacucccaag

SEQ ID NO: 50494 - RNA, 27 nt, Human
uacaaauuccugaaagccucuucaauu

SEQ ID NO: 50495 - RNA, 20 nt, Human
uauugagaaagggagauccu

SEQ ID NO: 50496 - RNA, 19 nt, Human
ucaggauuauguauuuuau

SEQ ID NO: 50497 - RNA, 18 nt, Human
ucccaagccaauacaccc

SEQ ID NO: 50498 - RNA, 18 nt, Human
ugagaaagggagauccug

SEQ ID NO: 50499 - RNA, 23 nt, Human
ugagaaagggagauccuguagca

SEQ ID NO: 50500 - RNA, 21 nt, Human
uuggucucaaacacacagaca

SEQ ID NO: 50501 - RNA, 23 nt, Human
uuggucucaaacacacagacaua

SEQ ID NO: 50502 - RNA, 18 nt, Human
uuuauugagaaagggaga

SEQ ID NO: 50503 - RNA, 18 nt, Human
aaauagccuuguguaccc

SEQ ID NO: 50504 - RNA, 25 nt, Human
aaauagccuuguguacccauaugau

SEQ ID NO: 50505 - RNA, 21 nt, Human
aacacagaccuccugccacuu

SEQ ID NO: 50506 - RNA, 20 nt, Human
agccuuguguacccauauga

SEQ ID NO: 50507 - RNA, 19 nt, Human
auagacuuuuucugacuga

SEQ ID NO: 50508 - RNA, 23 nt, Human
caacauagaaauccaaguguaug

SEQ ID NO: 50509 - RNA, 24 nt, Human
caagagaaacuccaguucaccaug

SEQ ID NO: 50510 - RNA, 18 nt, Human
ccuccugccacuuuggau

SEQ ID NO: 50511 - RNA, 19 nt, Human
ccuuguguacccauaugau

SEQ ID NO: 50512 - RNA, 18 nt, Human
cucacaagagaaacucca

SEQ ID NO: 50513 - RNA, 18 nt, Human
gaaaaaugugcccguccc

SEQ ID NO: 50514 - RNA, 19 nt, Human
gacaacacagaccuccugc

SEQ ID NO: 50515 - RNA, 22 nt, Human
gacaacacagaccuccugccac

SEQ ID NO: 50516 - RNA, 24 nt, Human
gaugagggaacucucacaagagaa

SEQ ID NO: 50517 - RNA, 19 nt, Human
uaaaacucuuaaaaaucuc

SEQ ID NO: 50518 - RNA, 19 nt, Human
uauauaacagcagcuugug

SEQ ID NO: 50519 - RNA, 21 nt, Human
ucaccaugacaacacagaccu

SEQ ID NO: 50520 - RNA, 24 nt, Human
ucguugaaaaaugugcccgucccu

SEQ ID NO: 50521 - RNA, 19 nt, Human
ucugacugaugcucaguuc

SEQ ID NO: 50522 - RNA, 22 nt, Human
ucuguauuucugcaaacauaga

SEQ ID NO: 50523 - RNA, 22 nt, Human
ugacaacacagaccuccugcca

SEQ ID NO: 50524 - RNA, 18 nt, Human
uguaaaucaaaaauauua

SEQ ID NO: 50525 - RNA, 24 nt, Human
uguuaagugaauauuacucuggga

SEQ ID NO: 50526 - RNA, 20 nt, Human
uuaaaaaucuccauuucaac

SEQ ID NO: 50527 - RNA, 20 nt, Human
uuaaauggagucacuacuaa

SEQ ID NO: 50528 - RNA, 26 nt, Human
uugcaauucuacuguaucaaauugaa

SEQ ID NO: 50529 - RNA, 18 nt, Human
uuuucaguuucaccaagu

SEQ ID NO: 50530 - RNA, 20 nt, Human
aaacaaaucaguguacuaaa

SEQ ID NO: 50531 - RNA, 19 nt, Human
aagauucagcauuauuaua

SEQ ID NO: 50532 - RNA, 21 nt, Human
aagcagaaauguaaaaaacaa

SEQ ID NO: 50533 - RNA, 22 nt, Human
aagcagaaauguaaaaaacaaa

SEQ ID NO: 50534 - RNA, 24 nt, Human
aagcagaaauguaaaaaacaaauc

SEQ ID NO: 50535 - RNA, 22 nt, Human
aagcauuaccauacccuuguac

SEQ ID NO: 50536 - RNA, 19 nt, Human
accacagcaacugcuuccc

SEQ ID NO: 50537 - RNA, 21 nt, Human
acuuuggcucuacagcccacc

SEQ ID NO: 50538 - RNA, 18 nt, Human
aggaaaaaauggcagaua

SEQ ID NO: 50539 - RNA, 24 nt, Human
auagacacacauauacuccuaaau

SEQ ID NO: 50540 - RNA, 20 nt, Human
auaguaggaaaaaauggcag

SEQ ID NO: 50541 - RNA, 21 nt, Human
auuaaauugcaucugcauuca

SEQ ID NO: 50542 - RNA, 23 nt, Human
caaagcagaaauguaaaaaacaa

SEQ ID NO: 50543 - RNA, 21 nt, Human
caacugcuucccggcucaggc

SEQ ID NO: 50544 - RNA, 19 nt, Human
cacacaccccgcgcggccg

SEQ ID NO: 50545 - RNA, 24 nt, Human
cacacaccccgcgcggccggcccc

SEQ ID NO: 50546 - RNA, 18 nt, Human
cagugucugcacuccugg

SEQ ID NO: 50547 - RNA, 19 nt, Human
ccaccucugccauccacuc

SEQ ID NO: 50548 - RNA, 22 nt, Human
ccccgcgcggccggccccuggc

SEQ ID NO: 50549 - RNA, 21 nt, Human
ccccuggcuagccggccccgg

SEQ ID NO: 50550 - RNA, 20 nt, Human
ccggccccuggcuagccggc

SEQ ID NO: 50551 - RNA, 23 nt, Human
ccucacacaccccgcgcggccgg

SEQ ID NO: 50552 - RNA, 22 nt, Human
cggccccuggcuagccggcccc

SEQ ID NO: 50553 - RNA, 19 nt, Human
cggcucaggcacucagcga

SEQ ID NO: 50554 - RNA, 20 nt, Human
cuacagcccaccucugccau

SEQ ID NO: 50555 - RNA, 19 nt, Human
cucccaccccacuuuggcu

SEQ ID NO: 50556 - RNA, 28 nt, Human
cucccaccccacuuuggcucuacagccc

SEQ ID NO: 50557 - RNA, 22 nt, Human
gaaaaugaaauaaaaauuucua

SEQ ID NO: 50558 - RNA, 18 nt, Human
gcucuacagcccaccucu

SEQ ID NO: 50559 - RNA, 19 nt, Human
ggaaauaaacaucauuuuu

SEQ ID NO: 50560 - RNA, 24 nt, Human
ggagcgcguccucacacaccccgc

SEQ ID NO: 50561 - RNA, 24 nt, Human
ggcacuaucaaacuauggaaauaa

SEQ ID NO: 50562 - RNA, 18 nt, Human
ggcucaggcacucagcga

SEQ ID NO: 50563 - RNA, 23 nt, Human
gggagcgcguccucacacacccc

SEQ ID NO: 50564 - RNA, 23 nt, Human
gggcagugucugcacuccugggc

SEQ ID NO: 50565 - RNA, 18 nt, Human
uaaaaaacaaaucagugu

SEQ ID NO: 50566 - RNA, 19 nt, Human
uaaaaaacaaaucagugua

SEQ ID NO: 50567 - RNA, 20 nt, Human
uaaaaaacaaaucaguguac

SEQ ID NO: 50568 - RNA, 21 nt, Human
uaauuggcauuuaaguggcac

SEQ ID NO: 50569 - RNA, 22 nt, Human
uacagcccaccucugccaucca

SEQ ID NO: 50570 - RNA, 21 nt, Human
uaccacagcaacugcuucccg

SEQ ID NO: 50571 - RNA, 24 nt, Human
uaccauacccuuguacccucuaaa

SEQ ID NO: 50572 - RNA, 19 nt, Human
uacccuuguacccucuaaa

SEQ ID NO: 50573 - RNA, 19 nt, Human
uagggcagugucugcacuc

SEQ ID NO: 50574 - RNA, 23 nt, Human
uauagacacacauauacuccuaa

SEQ ID NO: 50575 - RNA, 24 nt, Human
uauauuaaauugcaucugcauuca

SEQ ID NO: 50576 - RNA, 18 nt, Human
uauguauguguguguaua

SEQ ID NO: 50577 - RNA, 22 nt, Human
uauuauaguaggaaaaaauggc

SEQ ID NO: 50578 - RNA, 24 nt, Human
ucccaccccacuuuggcucuacag

SEQ ID NO: 50579 - RNA, 23 nt, Human
uccucacacaccccgcgcggccg

SEQ ID NO: 50580 - RNA, 22 nt, Human
ucuacaagcauuaccauacccu

SEQ ID NO: 50581 - RNA, 25 nt, Human
ugguauauuuauguauguguguguu

SEQ ID NO: 50582 - RNA, 19 nt, Human
uguauagacacacauauac

SEQ ID NO: 50583 - RNA, 20 nt, Human
ugugguauauuuauguaugu

SEQ ID NO: 50584 - RNA, 20 nt, Human
uguguauagacacacauaua

SEQ ID NO: 50585 - RNA, 22 nt, Human
uguguguauagacacacauaua

SEQ ID NO: 50586 - RNA, 27 nt, Human
uguguguauagacacacauauacuuca

SEQ ID NO: 50587 - RNA, 22 nt, Human
uguguguguauagacacacaua

SEQ ID NO: 50588 - RNA, 22 nt, Human
uuauaguaggaaaaaauggcag

SEQ ID NO: 50589 - RNA, 25 nt, Human
uucaaagcagaaauguaaaaaacaa

SEQ ID NO: 50590 - RNA, 23 nt, Human
uucuacaagcauuaccauacccu

SEQ ID NO: 50591 - RNA, 24 nt, Human
uugaaaaugaaauaaaaauuucua

SEQ ID NO: 50592 - RNA, 19 nt, Human
uuggcucuacagcccaccu

SEQ ID NO: 50593 - RNA, 18 nt, Human
aaaaaucuugacagcaac

SEQ ID NO: 50594 - RNA, 18 nt, Human
aaauauugauaguuaccu

SEQ ID NO: 50595 - RNA, 18 nt, Human
aacuuuacaccucgcuga

SEQ ID NO: 50596 - RNA, 18 nt, Human
aagcccccagaaggaggg

SEQ ID NO: 50597 - RNA, 21 nt, Human
acccauuuuauguaaauagau

SEQ ID NO: 50598 - RNA, 18 nt, Human
agauuauacagagacucg

SEQ ID NO: 50599 - RNA, 22 nt, Human
auugcacuuuuccucuuuaggu

SEQ ID NO: 50600 - RNA, 22 nt, Human
caauggcaaaacuccgaagucc

SEQ ID NO: 50601 - RNA, 24 nt, Human
cacacaaacacacucacauuccac

SEQ ID NO: 50602 - RNA, 26 nt, Human
caccgcucgggaaguccuucgucccg

SEQ ID NO: 50603 - RNA, 23 nt, Human
caccugagcaaggcuaaggaagc

SEQ ID NO: 50604 - RNA, 22 nt, Human
cacgucuuaaaauaggggagga

SEQ ID NO: 50605 - RNA, 20 nt, Human
cacuugcaccugagcaaggc

SEQ ID NO: 50606 - RNA, 22 nt, Human
cauucacgucuuaaaauagggg

SEQ ID NO: 50607 - RNA, 25 nt, Human
ccacuggcaauggcaaaacuccgaa

SEQ ID NO: 50608 - RNA, 25 nt, Human
cccacuggcaauggcaaaacuccga

SEQ ID NO: 50609 - RNA, 18 nt, Human
cccggacucagggucucc

SEQ ID NO: 50610 - RNA, 19 nt, Human
ccgcagggcugucagagcc

SEQ ID NO: 50611 - RNA, 22 nt, Human
ccucccggacucagggucuccg

SEQ ID NO: 50612 - RNA, 21 nt, Human
cggcgaacaacuuuacaccuc

SEQ ID NO: 50613 - RNA, 25 nt, Human
cucacauuccacgcggcgaacaacu

SEQ ID NO: 50614 - RNA, 20 nt, Human
cuccuuaagccuggcaaaca

SEQ ID NO: 50615 - RNA, 20 nt, Human
gcaaaacuccgaaguccaag

SEQ ID NO: 50616 - RNA, 20 nt, Human
gccgugagaaaucaguuugu

SEQ ID NO: 50617 - RNA, 20 nt, Human
gcuaaggaagcgaagccccc

SEQ ID NO: 50618 - RNA, 21 nt, Human
ggauucuucugcaccccgccc

SEQ ID NO: 50619 - RNA, 20 nt, Human
uaaauagauuauacagagaa

SEQ ID NO: 50620 - RNA, 20 nt, Human
uaagccuggcaaacacucgg

SEQ ID NO: 50621 - RNA, 21 nt, Human
uacaaaaaaaaucuugacagc

SEQ ID NO: 50622 - RNA, 24 nt, Human
uauguacaacacgcauugcacuuu

SEQ ID NO: 50623 - RNA, 19 nt, Human
ucagaccccugcuccgggg

SEQ ID NO: 50624 - RNA, 23 nt, Human
ucagagcccgguccccacaccgc

SEQ ID NO: 50625 - RNA, 20 nt, Human
ugagcaaggcuaaggaagcg

SEQ ID NO: 50626 - RNA, 21 nt, Human
ugcacacaaacacacucacau

SEQ ID NO: 50627 - RNA, 19 nt, Human
uggcucagaccccugcucc

SEQ ID NO: 50628 - RNA, 20 nt, Human
aaccgacggccaccuccccu

SEQ ID NO: 50629 - RNA, 24 nt, Human
aaccuacccuuucugccucuccca

SEQ ID NO: 50630 - RNA, 18 nt, Human
aagacaagcagacucccc

SEQ ID NO: 50631 - RNA, 18 nt, Human
aagccccugaaaacccag

SEQ ID NO: 50632 - RNA, 18 nt, Human
aaggucaaccgacggcca

SEQ ID NO: 50633 - RNA, 25 nt, Human
aaucaucagaaaugauuacugaacc

SEQ ID NO: 50634 - RNA, 20 nt, Human
acaagcagacuccccugccu

SEQ ID NO: 50635 - RNA, 23 nt, Human
acagacacucccucguccacccc

SEQ ID NO: 50636 - RNA, 21 nt, Human
accccguucccaggcaggcag

SEQ ID NO: 50637 - RNA, 20 nt, Human
accucgacgccuucagcagc

SEQ ID NO: 50638 - RNA, 21 nt, Human
acgaggcaagcaccauccugc

SEQ ID NO: 50639 - RNA, 22 nt, Human
acuguucuguccaagugccccc

SEQ ID NO: 50640 - RNA, 20 nt, Human
agagggagaggaggcucugg

SEQ ID NO: 50641 - RNA, 22 nt, Human
agaucccuaaaguccuagaccc

SEQ ID NO: 50642 - RNA, 19 nt, Human
agcaccauccugccugcug

SEQ ID NO: 50643 - RNA, 26 nt, Human
agcacuccagcaaaucaucagaaaug

SEQ ID NO: 50644 - RNA, 23 nt, Human
aggacccuugcccucccaggccu

SEQ ID NO: 50645 - RNA, 20 nt, Human
aggccuccugcagggcccag

SEQ ID NO: 50646 - RNA, 18 nt, Human
aggcucccccaccuugcc

SEQ ID NO: 50647 - RNA, 18 nt, Human
aggcucccccgccucgcc

SEQ ID NO: 50648 - RNA, 18 nt, Human
agggcguggagccagcaa

SEQ ID NO: 50649 - RNA, 19 nt, Human
agggcucagagcuaccacc

SEQ ID NO: 50650 - RNA, 23 nt, Human
aucccuaaaguccuagacccccg

SEQ ID NO: 50651 - RNA, 22 nt, Human
caaagccccugaaaacccagcc

SEQ ID NO: 50652 - RNA, 21 nt, Human
caaccgacggccaccuccccu

SEQ ID NO: 50653 - RNA, 21 nt, Human
caagcaccuucucccagccca

SEQ ID NO: 50654 - RNA, 26 nt, Human
caagugcccccacaccucgacgccuu

SEQ ID NO: 50655 - RNA, 22 nt, Human
cacaugggccucccuugggagc

SEQ ID NO: 50656 - RNA, 18 nt, Human
caccaaagcuggcagagc

SEQ ID NO: 50657 - RNA, 22 nt, Human
caccaacaucuaagacaagcag

SEQ ID NO: 50658 - RNA, 22 nt, Human
caccuccccucccucgcccccc

SEQ ID NO: 50659 - RNA, 19 nt, Human
caccugguauggccugggg

SEQ ID NO: 50660 - RNA, 23 nt, Human
cagaagcccaagcaccuucuccc

SEQ ID NO: 50661 - RNA, 21 nt, Human
cagagccucccccaugccccc

SEQ ID NO: 50662 - RNA, 24 nt, Human
cagaucccagaucccuaaaguccu

SEQ ID NO: 50663 - RNA, 23 nt, Human
cagcaaggccuucccccacaugg

SEQ ID NO: 50664 - RNA, 25 nt, Human
cagcacuccagcaaaucaucagaaa

SEQ ID NO: 50665 - RNA, 23 nt, Human
cagcagagauggggucaccuagg

SEQ ID NO: 50666 - RNA, 23 nt, Human
cagcccggcccaaggucaccaaa

SEQ ID NO: 50667 - RNA, 20 nt, Human
cagccugcuaaacccacccc

SEQ ID NO: 50668 - RNA, 18 nt, Human
cagcuggggcaggcucag

SEQ ID NO: 50669 - RNA, 23 nt, Human
caggaucccccgccucgcccucc

SEQ ID NO: 50670 - RNA, 19 nt, Human
caggcccagaagcagcaga

SEQ ID NO: 50671 - RNA, 25 nt, Human
caucagcagacgggcaccaaggggc

SEQ ID NO: 50672 - RNA, 23 nt, Human
ccaacaucuaagacaagcagacu

SEQ ID NO: 50673 - RNA, 18 nt, Human
ccaagcaccuucucccag

SEQ ID NO: 50674 - RNA, 19 nt, Human
ccagcaccuaccgcaccaa

SEQ ID NO: 50675 - RNA, 18 nt, Human
ccagcccagguggcuccu

SEQ ID NO: 50676 - RNA, 24 nt, Human
ccagcccugaagcgcuggacugcu

SEQ ID NO: 50677 - RNA, 24 nt, Human
ccaggaucccccgccucgcccucc

SEQ ID NO: 50678 - RNA, 25 nt, Human
ccaggcccggcaacgggggccagug

SEQ ID NO: 50679 - RNA, 20 nt, Human
ccaguggagcugguggccca

SEQ ID NO: 50680 - RNA, 21 nt, Human
ccaucaggcccagaagcagca

SEQ ID NO: 50681 - RNA, 22 nt, Human
ccaucaggcccagaagcagcag

SEQ ID NO: 50682 - RNA, 20 nt, Human
cccacaccucgacgccuuca

SEQ ID NO: 50683 - RNA, 20 nt, Human
cccagcccugaagcgcugga

SEQ ID NO: 50684 - RNA, 18 nt, Human
ccccaggaccugcccagc

SEQ ID NO: 50685 - RNA, 20 nt, Human
ccccaggaccugcccagccc

SEQ ID NO: 50686 - RNA, 20 nt, Human
ccccccgacacaggggcucc

SEQ ID NO: 50687 - RNA, 19 nt, Human
cccccgccucgcccucccc

SEQ ID NO: 50688 - RNA, 19 nt, Human
cccccgccucgcccucccc

SEQ ID NO: 50689 - RNA, 21 nt, Human
cccccggacaccugcaacaga

SEQ ID NO: 50690 - RNA, 19 nt, Human
ccccgccucgcccucccac

SEQ ID NO: 50691 - RNA, 18 nt, Human
cccuuucugccucuccca

SEQ ID NO: 50692 - RNA, 20 nt, Human
ccgcaccaagcucacucccc

SEQ ID NO: 50693 - RNA, 18 nt, Human
ccgcagaagcccaagcac

SEQ ID NO: 50694 - RNA, 18 nt, Human
ccuaaaguccuagacccc

SEQ ID NO: 50695 - RNA, 20 nt, Human
ccuacagucaacacugaguc

SEQ ID NO: 50696 - RNA, 22 nt, Human
ccuacccuuucugccucuccca

SEQ ID NO: 50697 - RNA, 22 nt, Human
ccucaccgcagaagcccaagca

SEQ ID NO: 50698 - RNA, 21 nt, Human
ccucccacacaggggcuccag

SEQ ID NO: 50699 - RNA, 21 nt, Human
ccucccacacaggggcuccag

SEQ ID NO: 50700 - RNA, 23 nt, Human
ccuccugcagggcccagagguug

SEQ ID NO: 50701 - RNA, 19 nt, Human
ccucguccaccccguuccc

SEQ ID NO: 50702 - RNA, 20 nt, Human
ccugaagcgcuggacugcuc

SEQ ID NO: 50703 - RNA, 22 nt, Human
ccugcaacagagcuuccaaagc

SEQ ID NO: 50704 - RNA, 24 nt, Human
ccugcaacagagcuuccaaagccc

SEQ ID NO: 50705 - RNA, 19 nt, Human
ccugccccuuagcugccuc

SEQ ID NO: 50706 - RNA, 18 nt, Human
ccugcuaaacccacccca

SEQ ID NO: 50707 - RNA, 25 nt, Human
ccugcugcagccugcuaaacccacc

SEQ ID NO: 50708 - RNA, 25 nt, Human
ccuucccccacaugcucucaggggg

SEQ ID NO: 50709 - RNA, 19 nt, Human
cgccccccgacacaggggc

SEQ ID NO: 50710 - RNA, 18 nt, Human
cgccucgcccucccacac

SEQ ID NO: 50711 - RNA, 18 nt, Human
cgccucgcccucccacac

SEQ ID NO: 50712 - RNA, 28 nt, Human
cgccucgcccucccacacaggggcucca

SEQ ID NO: 50713 - RNA, 28 nt, Human
cgccucgcccucccacacaggggcucca

SEQ ID NO: 50714 - RNA, 20 nt, Human
cuagcaccugguauggccug

SEQ ID NO: 50715 - RNA, 18 nt, Human
cucaaccucucuccuucc

SEQ ID NO: 50716 - RNA, 23 nt, Human
cucauaguccuccggcucccgcc

SEQ ID NO: 50717 - RNA, 19 nt, Human
cuccaggcuuggcagggca

SEQ ID NO: 50718 - RNA, 18 nt, Human
cucccacguacaauccug

SEQ ID NO: 50719 - RNA, 22 nt, Human
cucccaggccuccugcagggcc

SEQ ID NO: 50720 - RNA, 22 nt, Human
cucccccaccuugccccccaac

SEQ ID NO: 50721 - RNA, 25 nt, Human
cuccuccccggaaagcucagggcaa

SEQ ID NO: 50722 - RNA, 18 nt, Human
cucgccccccgacacagg

SEQ ID NO: 50723 - RNA, 19 nt, Human
cucuggacaacgcgcggca

SEQ ID NO: 50724 - RNA, 19 nt, Human
cucuggccagucucuccua

SEQ ID NO: 50725 - RNA, 19 nt, Human
cugcagccugcuaaaccca

SEQ ID NO: 50726 - RNA, 24 nt, Human
cugcuaaacccaccccaggggcgc

SEQ ID NO: 50727 - RNA, 19 nt, Human
cugggcacaucagcagacg

SEQ ID NO: 50728 - RNA, 20 nt, Human
cuucagcagccgcuagcucc

SEQ ID NO: 50729 - RNA, 20 nt, Human
cuuccaaagccccugaaaac

SEQ ID NO: 50730 - RNA, 22 nt, Human
cuuccaaagccccugaaaaccc

SEQ ID NO: 50731 - RNA, 24 nt, Human
cuuccaaagccccugaaaacccag

SEQ ID NO: 50732 - RNA, 20 nt, Human
gaacaggccagugcauccuc

SEQ ID NO: 50733 - RNA, 20 nt, Human
gaggcaagcaccauccugcc

SEQ ID NO: 50734 - RNA, 22 nt, Human
gcaagaaggagggcucagagcu

SEQ ID NO: 50735 - RNA, 18 nt, Human
gcccccagccaacagccc

SEQ ID NO: 50736 - RNA, 18 nt, Human
gccccccaacacaggggc

SEQ ID NO: 50737 - RNA, 18 nt, Human
gcccggcaacgggggccg

SEQ ID NO: 50738 - RNA, 19 nt, Human
gccgcagcgcucccagccc

SEQ ID NO: 50739 - RNA, 25 nt, Human
gcugcaccaccaacaucuaagacag

SEQ ID NO: 50740 - RNA, 21 nt, Human
ggcugggcucuggacaacgcg

SEQ ID NO: 50741 - RNA, 21 nt, Human
gggcuccaggcucccccaccu

SEQ ID NO: 50742 - RNA, 21 nt, Human
gggcuccaggcucccccgccu

SEQ ID NO: 50743 - RNA, 19 nt, Human
gggcugcaccaccaacauc

SEQ ID NO: 50744 - RNA, 19 nt, Human
gggcugggcugggcucugg

SEQ ID NO: 50745 - RNA, 21 nt, Human
gggcuggugggagcggaaggc

SEQ ID NO: 50746 - RNA, 22 nt, Human
ggggcuccaggaucccccgccu

SEQ ID NO: 50747 - RNA, 18 nt, Human
guccucagaggugggaac

SEQ ID NO: 50748 - RNA, 21 nt, Human
guggguaucucuucagagccu

SEQ ID NO: 50749 - RNA, 19 nt, Human
uaagacaagcagacucccc

SEQ ID NO: 50750 - RNA, 26 nt, Human
uacagaacaggccagugcauccucaa

SEQ ID NO: 50751 - RNA, 20 nt, Human
uagacaccuggucccuccgu

SEQ ID NO: 50752 - RNA, 21 nt, Human
uagacccccggacaccugcaa

SEQ ID NO: 50753 - RNA, 21 nt, Human
uaggacccuugcccucccagg

SEQ ID NO: 50754 - RNA, 22 nt, Human
ucagagccucccccaugccccc

SEQ ID NO: 50755 - RNA, 23 nt, Human
ucagcagacgggcaccaaggggc

SEQ ID NO: 50756 - RNA, 24 nt, Human
ucaugggauggucaggcagguggg

SEQ ID NO: 50757 - RNA, 20 nt, Human
uccaaagccccugaaaaccc

SEQ ID NO: 50758 - RNA, 22 nt, Human
uccaggaucccccgccucgccc

SEQ ID NO: 50759 - RNA, 19 nt, Human
uccaggcuccuccccggaa

SEQ ID NO: 50760 - RNA, 22 nt, Human
ucccagaggcagugcccaaagu

SEQ ID NO: 50761 - RNA, 24 nt, Human
ucccagaggcagugcccaaaguuc

SEQ ID NO: 50762 - RNA, 27 nt, Human
ucccagaucccuaaaguccuagacccc

SEQ ID NO: 50763 - RNA, 22 nt, Human
ucccaggcaggcagaaugcucc

SEQ ID NO: 50764 - RNA, 22 nt, Human
ucccaggccuccugcagggccc

SEQ ID NO: 50765 - RNA, 21 nt, Human
uccccaggaccugcccagccc

SEQ ID NO: 50766 - RNA, 22 nt, Human
ucccccaccuugccccccaaca

SEQ ID NO: 50767 - RNA, 18 nt, Human
ucccccgccucgcccucc

SEQ ID NO: 50768 - RNA, 18 nt, Human
ucccccgccucgcccucc

SEQ ID NO: 50769 - RNA, 21 nt, Human
uccccugccucaccgcagaag

SEQ ID NO: 50770 - RNA, 21 nt, Human
uccggcucccgccgcagcgcu

SEQ ID NO: 50771 - RNA, 23 nt, Human
uccguaggacccuugcccuccca

SEQ ID NO: 50772 - RNA, 21 nt, Human
uccucaccugccagccucaca

SEQ ID NO: 50773 - RNA, 18 nt, Human
uccugcagggcccagagg

SEQ ID NO: 50774 - RNA, 19 nt, Human
ucuaguguucuccucucca

SEQ ID NO: 50775 - RNA, 21 nt, Human
ucucccagcccagguggcucc

SEQ ID NO: 50776 - RNA, 20 nt, Human
ucuccuacagaacaggccag

SEQ ID NO: 50777 - RNA, 18 nt, Human
ugacacucauguucagaa

SEQ ID NO: 50778 - RNA, 26 nt, Human
ugagguuaaacccuuccucaccugcc

SEQ ID NO: 50779 - RNA, 19 nt, Human
ugaguccuuacagacacuc

SEQ ID NO: 50780 - RNA, 24 nt, Human
ugauuccugccccuuagcugccuc

SEQ ID NO: 50781 - RNA, 28 nt, Human
ugcaacagagcuuccaaagccccugaaa

SEQ ID NO: 50782 - RNA, 25 nt, Human
ugcagggcccagagguguaggguag

SEQ ID NO: 50783 - RNA, 24 nt, Human
ugccugcugcagccugcuaaaccc

SEQ ID NO: 50784 - RNA, 21 nt, Human
ugcuaaacccaccccaggggc

SEQ ID NO: 50785 - RNA, 21 nt, Human
uggagccagcacuccagcaaa

SEQ ID NO: 50786 - RNA, 21 nt, Human
uggagggaccacacucugugg

SEQ ID NO: 50787 - RNA, 22 nt, Human
uggcccagggcaaggagagcag

SEQ ID NO: 50788 - RNA, 23 nt, Human
uggccggcaggggucccagaggc

SEQ ID NO: 50789 - RNA, 23 nt, Human
ugggcugggcucuggacaacgcg

SEQ ID NO: 50790 - RNA, 24 nt, Human
ugggcuggugggagcggaaggcgg

SEQ ID NO: 50791 - RNA, 23 nt, Human
ugggguccagaguccucagaggu

SEQ ID NO: 50792 - RNA, 21 nt, Human
uggguaucucuucagagccuc

SEQ ID NO: 50793 - RNA, 22 nt, Human
uuacugaaccuacccuuucugc

SEQ ID NO: 50794 - RNA, 19 nt, Human
uuagucacaugggccuccc

SEQ ID NO: 50795 - RNA, 28 nt, Human
uucacaugacagcaaggccuucccccac

SEQ ID NO: 50796 - RNA, 26 nt, Human
uuuauuagucacaugggccucccuug

SEQ ID NO: 50797 - RNA, 21 nt, Human
aaacaucugcuuccucagaac

SEQ ID NO: 50798 - RNA, 18 nt, Human
aaccucuccccugggacc

SEQ ID NO: 50799 - RNA, 18 nt, Human
aacgugacuggucaagcc

SEQ ID NO: 50800 - RNA, 20 nt, Human
aagcugcucuguggagacaa

SEQ ID NO: 50801 - RNA, 23 nt, Human
aaggccucucacuggguagcucu

SEQ ID NO: 50802 - RNA, 19 nt, Human
accccugagccccuuccuc

SEQ ID NO: 50803 - RNA, 26 nt, Human
accuggugcaaggccucacagcauga

SEQ ID NO: 50804 - RNA, 23 nt, Human
acucagcacaugccaguggccug

SEQ ID NO: 50805 - RNA, 22 nt, Human
acuccaagagauggcccuggga

SEQ ID NO: 50806 - RNA, 23 nt, Human
agaaggaaaggcaguuagacaag

SEQ ID NO: 50807 - RNA, 18 nt, Human
agacccagcagccagaga

SEQ ID NO: 50808 - RNA, 19 nt, Human
agcagcaucauggcucagc

SEQ ID NO: 50809 - RNA, 19 nt, Human
agccaaccagaaagauaaa

SEQ ID NO: 50810 - RNA, 20 nt, Human
agccacuccccagucucagg

SEQ ID NO: 50811 - RNA, 24 nt, Human
agcucacgguccauugcugcagcc

SEQ ID NO: 50812 - RNA, 22 nt, Human
aggaggcuauuggagccacucc

SEQ ID NO: 50813 - RNA, 18 nt, Human
aggcaggcucagcacgga

SEQ ID NO: 50814 - RNA, 24 nt, Human
agucugcugugcccaagcugcucu

SEQ ID NO: 50815 - RNA, 23 nt, Human
aguggccugccagccccaaccuc

SEQ ID NO: 50816 - RNA, 22 nt, Human
agugguguguggguggcaggag

SEQ ID NO: 50817 - RNA, 21 nt, Human
caaagaugcugcuggugcugu

SEQ ID NO: 50818 - RNA, 19 nt, Human
caaaguaggaaccggcugc

SEQ ID NO: 50819 - RNA, 21 nt, Human
caaccagaaagauaaagaucu

SEQ ID NO: 50820 - RNA, 21 nt, Human
cacacuuacauuuuuccugga

SEQ ID NO: 50821 - RNA, 21 nt, Human
caccucugggcccagcagcuc

SEQ ID NO: 50822 - RNA, 25 nt, Human
cagaaaaaaacauucccuuuagaag

SEQ ID NO: 50823 - RNA, 24 nt, Human
cagaacccaagcccuucuugcugg

SEQ ID NO: 50824 - RNA, 21 nt, Human
cagaccccugagccccuuccu

SEQ ID NO: 50825 - RNA, 23 nt, Human
cagcagcuccugaacccuaggag

SEQ ID NO: 50826 - RNA, 27 nt, Human
ccacagacgacaggcaggcucagcacg

SEQ ID NO: 50827 - RNA, 26 nt, Human
ccagucugcugugcccaagcugcucu

SEQ ID NO: 50828 - RNA, 21 nt, Human
ccccagucucagggccaggcc

SEQ ID NO: 50829 - RNA, 24 nt, Human
cccccaccuggugcaaggccucac

SEQ ID NO: 50830 - RNA, 20 nt, Human
ccccugagccccuuccucac

SEQ ID NO: 50831 - RNA, 23 nt, Human
ccccugagccccuuccucacagg

SEQ ID NO: 50832 - RNA, 22 nt, Human
ccccuuccucacaggagccaag

SEQ ID NO: 50833 - RNA, 19 nt, Human
cccgccuggcucccagccc

SEQ ID NO: 50834 - RNA, 18 nt, Human
ccgcccgccuggcuccca

SEQ ID NO: 50835 - RNA, 19 nt, Human
ccucagggucuccuggcac

SEQ ID NO: 50836 - RNA, 22 nt, Human
ccucugggcccagcagcuccug

SEQ ID NO: 50837 - RNA, 21 nt, Human
ccugaaaccaggcccucugca

SEQ ID NO: 50838 - RNA, 19 nt, Human
ccugcuggggcgcucucca

SEQ ID NO: 50839 - RNA, 22 nt, Human
cucacagcaugaaacaucugcu

SEQ ID NO: 50840 - RNA, 22 nt, Human
cucagaacccaagcccuucuug

SEQ ID NO: 50841 - RNA, 18 nt, Human
cucugggcccagcagcuc

SEQ ID NO: 50842 - RNA, 23 nt, Human
cucuguggagacaagguggugcu

SEQ ID NO: 50843 - RNA, 24 nt, Human
cugcaguggagggcugggccugcc

SEQ ID NO: 50844 - RNA, 22 nt, Human
cuggcagcagcaucauggcucu

SEQ ID NO: 50845 - RNA, 24 nt, Human
cuugcugggccucaugcugcucca

SEQ ID NO: 50846 - RNA, 18 nt, Human
gaggcuauuggagccacu

SEQ ID NO: 50847 - RNA, 22 nt, Human
gauggcagcugugacagcagga

SEQ ID NO: 50848 - RNA, 21 nt, Human
gcagcagcaucauggcucagc

SEQ ID NO: 50849 - RNA, 24 nt, Human
gcccucagggucuccuggcacucu

SEQ ID NO: 50850 - RNA, 20 nt, Human
gcccugggacugagaagugg

SEQ ID NO: 50851 - RNA, 21 nt, Human
gcugugacagcaggagaggac

SEQ ID NO: 50852 - RNA, 23 nt, Human
gcuucaggguuccugaggcaccu

SEQ ID NO: 50853 - RNA, 19 nt, Human
ggaaggggcaaacuccaug

SEQ ID NO: 50854 - RNA, 19 nt, Human
gggcugggccagcucacgg

SEQ ID NO: 50855 - RNA, 21 nt, Human
gguuuccucacacuuacauuu

SEQ ID NO: 50856 - RNA, 21 nt, Human
gugcaaggccucacagcauga

SEQ ID NO: 50857 - RNA, 23 nt, Human
guuacaacucccuauccuugauc

SEQ ID NO: 50858 - RNA, 21 nt, Human
uaggaaccggcugcccucagg

SEQ ID NO: 50859 - RNA, 24 nt, Human
uaggagagucuagggagaguggug

SEQ ID NO: 50860 - RNA, 18 nt, Human
uaucucagaaaaaaacau

SEQ ID NO: 50861 - RNA, 24 nt, Human
ucaccucugggcccagcagcuccu

SEQ ID NO: 50862 - RNA, 24 nt, Human
ucagaacccaagcccuucuugcug

SEQ ID NO: 50863 - RNA, 22 nt, Human
ucagggucuccuggcacucucu

SEQ ID NO: 50864 - RNA, 19 nt, Human
ucaugcugcuccagccugg

SEQ ID NO: 50865 - RNA, 22 nt, Human
ucaugcugcuccagccuggggc

SEQ ID NO: 50866 - RNA, 19 nt, Human
uccaagggcuuuuucacag

SEQ ID NO: 50867 - RNA, 23 nt, Human
uccauugcugcagcccagccgcc

SEQ ID NO: 50868 - RNA, 20 nt, Human
uccccgggcagaggcucugg

SEQ ID NO: 50869 - RNA, 20 nt, Human
uccccugggaccugggccca

SEQ ID NO: 50870 - RNA, 21 nt, Human
uccccugggaccugggcccau

SEQ ID NO: 50871 - RNA, 20 nt, Human
uccugaaaccaggcccucug

SEQ ID NO: 50872 - RNA, 22 nt, Human
ucucucaguccaaaguaggaac

SEQ ID NO: 50873 - RNA, 18 nt, Human
ucugcaguggagggcugg

SEQ ID NO: 50874 - RNA, 21 nt, Human
ucugcugugcccaagcugcuc

SEQ ID NO: 50875 - RNA, 18 nt, Human
ugacagcaggagaggacu

SEQ ID NO: 50876 - RNA, 18 nt, Human
ugagaaguggauggcagc

SEQ ID NO: 50877 - RNA, 19 nt, Human
ugagaaguggauggcagcu

SEQ ID NO: 50878 - RNA, 19 nt, Human
ugccaguggccugccagcc

SEQ ID NO: 50879 - RNA, 23 nt, Human
ugcccaagcugcucuguggagac

SEQ ID NO: 50880 - RNA, 20 nt, Human
ugcucuggcacugcucuguu

SEQ ID NO: 50881 - RNA, 28 nt, Human
ugcucuguuacaacucccuauccuugau

SEQ ID NO: 50882 - RNA, 22 nt, Human
ugcugggccucaugcugcucca

SEQ ID NO: 50883 - RNA, 26 nt, Human
ugcugugcccaagcugcucuguggag

SEQ ID NO: 50884 - RNA, 22 nt, Human
ugcuuccagaugcuucugcagu

SEQ ID NO: 50885 - RNA, 20 nt, Human
uggugcuguggcccccaccu

SEQ ID NO: 50886 - RNA, 23 nt, Human
ugguguguggguggcaggaggcu

SEQ ID NO: 50887 - RNA, 21 nt, Human
ugugacagcaggagaggacug

SEQ ID NO: 50888 - RNA, 23 nt, Human
uguggguggcaggaggcuauugg

SEQ ID NO: 50889 - RNA, 28 nt, Human
uuccucagaacccaagcccuucuugcug

SEQ ID NO: 50890 - RNA, 25 nt, Human
uugcugggccucaugcugcuccagc

SEQ ID NO: 50891 - RNA, 18 nt, Human
uuuagaaggaaaggcagu

SEQ ID NO: 50892 - RNA, 24 nt, Human
uuuccucacacuuacauuuuuccu

SEQ ID NO: 50893 - RNA, 22 nt, Human
uuuuuuuuuuuuuuuuucauuu

SEQ ID NO: 50894 - RNA, 19 nt, Human
aaacaaggcagacuuuuaa

SEQ ID NO: 50895 - RNA, 18 nt, Human
aaccagccguguccucuu

SEQ ID NO: 50896 - RNA, 21 nt, Human
aaggcgcgccgggcgaggggc

SEQ ID NO: 50897 - RNA, 23 nt, Human
acaaggcagacuuuuaaaaacaa

SEQ ID NO: 50898 - RNA, 22 nt, Human
acaguaaaauaguuucaguaau

SEQ ID NO: 50899 - RNA, 22 nt, Human
agcaccacccacucgcccgagc

SEQ ID NO: 50900 - RNA, 27 nt, Human
agcaccacccacucgcccgagcccaaa

SEQ ID NO: 50901 - RNA, 19 nt, Human
agccucggggcuggggcgc

SEQ ID NO: 50902 - RNA, 20 nt, Human
agcugaauagaucauaaaua

SEQ ID NO: 50903 - RNA, 19 nt, Human
aggcgcgccgggcgagggg

SEQ ID NO: 50904 - RNA, 19 nt, Human
aggcggcacccauuggccc

SEQ ID NO: 50905 - RNA, 25 nt, Human
auggccauagcgcccggaccgcgcc

SEQ ID NO: 50906 - RNA, 21 nt, Human
caccacccacucgcccgagcc

SEQ ID NO: 50907 - RNA, 24 nt, Human
cacccacucgcccgagcccaaagu

SEQ ID NO: 50908 - RNA, 26 nt, Human
cauggccauagcgcccggaccgcgcc

SEQ ID NO: 50909 - RNA, 20 nt, Human
cccacucgcccgagcccaaa

SEQ ID NO: 50910 - RNA, 21 nt, Human
ccccccgcggccaagaggcgg

SEQ ID NO: 50911 - RNA, 25 nt, Human
cgggacccacgggucggggcccccc

SEQ ID NO: 50912 - RNA, 23 nt, Human
cuccgccugccgcuucugagccu

SEQ ID NO: 50913 - RNA, 18 nt, Human
gaagaggcgagagccuag

SEQ ID NO: 50914 - RNA, 20 nt, Human
gagccuacuacugacacagg

SEQ ID NO: 50915 - RNA, 21 nt, Human
ggcggauaacuaacaaauugc

SEQ ID NO: 50916 - RNA, 18 nt, Human
gggcauggccauagcgcc

SEQ ID NO: 50917 - RNA, 28 nt, Human
gggcauggccauagcgcccggaccgcgc

SEQ ID NO: 50918 - RNA, 19 nt, Human
gggcuggggcgcugguggc

SEQ ID NO: 50919 - RNA, 18 nt, Human
uaaaagcagcugaauaga

SEQ ID NO: 50920 - RNA, 21 nt, Human
uaaaagcagcugaauagauca

SEQ ID NO: 50921 - RNA, 19 nt, Human
uagcgcccggaccgcgccu

SEQ ID NO: 50922 - RNA, 23 nt, Human
ucauaaauauauuugucaauccu

SEQ ID NO: 50923 - RNA, 23 nt, Human
uccacacaguaaaagcagcugaa

SEQ ID NO: 50924 - RNA, 21 nt, Human
uccaccauaaacaaggcagac

SEQ ID NO: 50925 - RNA, 18 nt, Human
uccauuuccuugugaggu

SEQ ID NO: 50926 - RNA, 20 nt, Human
uccuuggagccuacuacuga

SEQ ID NO: 50927 - RNA, 21 nt, Human
ucggggcuggggcgcuggugg

SEQ ID NO: 50928 - RNA, 19 nt, Human
ucuuguggauuuguaucuu

SEQ ID NO: 50929 - RNA, 20 nt, Human
ucuuucacaaugaaaaccag

SEQ ID NO: 50930 - RNA, 18 nt, Human
ugacacauacauauuagc

SEQ ID NO: 50931 - RNA, 19 nt, Human
uggcccgcgcgcccgcccg

SEQ ID NO: 50932 - RNA, 18 nt, Human
uucacaaugaaaaccagc

SEQ ID NO: 50933 - RNA, 22 nt, Human
uucuccuggaagaggcgagagc

SEQ ID NO: 50934 - RNA, 21 nt, Human
uuuccaccauaaacaaggcag

SEQ ID NO: 50935 - RNA, 20 nt, Human
aaaaagagacuuugguggca

SEQ ID NO: 50936 - RNA, 22 nt, Human
aaacucaguuuauuucuucugu

SEQ ID NO: 50937 - RNA, 19 nt, Human
aaaugagucaccaccacac

SEQ ID NO: 50938 - RNA, 19 nt, Human
aagaggaaguacagagcuc

SEQ ID NO: 50939 - RNA, 20 nt, Human
aagaggagccaugaguggca

SEQ ID NO: 50940 - RNA, 29 nt, Human
aaguuuccagaaugcuguaggacagcucu

SEQ ID NO: 50941 - RNA, 19 nt, Human
aaugaaguggaggaagaga

SEQ ID NO: 50942 - RNA, 19 nt, Human
acagagucaucucugaugg

SEQ ID NO: 50943 - RNA, 24 nt, Human
accaccacacacauguucagccca

SEQ ID NO: 50944 - RNA, 19 nt, Human
agaaaggacaaaggaaaaa

SEQ ID NO: 50945 - RNA, 23 nt, Human
agaagcagaggaacaaaaaagag

SEQ ID NO: 50946 - RNA, 19 nt, Human
agacgucuucccagagguc

SEQ ID NO: 50947 - RNA, 24 nt, Human
agagcagaagaggagccaugagug

SEQ ID NO: 50948 - RNA, 21 nt, Human
agaggaaguacagagcucaga

SEQ ID NO: 50949 - RNA, 23 nt, Human
agagguccaugugcagugacagu

SEQ ID NO: 50950 - RNA, 23 nt, Human
agauguccucaacgccucugccu

SEQ ID NO: 50951 - RNA, 26 nt, Human
aggaacaaaaaagagacuuugguggc

SEQ ID NO: 50952 - RNA, 21 nt, Human
agugagaugggccaagaggaa

SEQ ID NO: 50953 - RNA, 22 nt, Human
augcaaucuuucugccagcuua

SEQ ID NO: 50954 - RNA, 19 nt, Human
auuggguaucagaguucau

SEQ ID NO: 50955 - RNA, 19 nt, Human
caaaaagauggaaagagca

SEQ ID NO: 50956 - RNA, 23 nt, Human
caauggcauggaaaugagucacc

SEQ ID NO: 50957 - RNA, 22 nt, Human
caccacacacauguucagccca

SEQ ID NO: 50958 - RNA, 18 nt, Human
cagauguccucaacgccu

SEQ ID NO: 50959 - RNA, 18 nt, Human
cagcaagauccgucugua

SEQ ID NO: 50960 - RNA, 19 nt, Human
cagcccaacuagagccuuu

SEQ ID NO: 50961 - RNA, 22 nt, Human
cagggaccagaggacagugcag

SEQ ID NO: 50962 - RNA, 25 nt, Human
cauacaggcccucaaguguuuguug

SEQ ID NO: 50963 - RNA, 19 nt, Human
cauggaaaugagucaccac

SEQ ID NO: 50964 - RNA, 18 nt, Human
ccaccacacacauguuca

SEQ ID NO: 50965 - RNA, 19 nt, Human
ccaucaagauaagcaaccc

SEQ ID NO: 50966 - RNA, 22 nt, Human
cccaacaucuucuaggcauccu

SEQ ID NO: 50967 - RNA, 19 nt, Human
cccaagucaggccuccaaa

SEQ ID NO: 50968 - RNA, 23 nt, Human
cccaagucaggccuccaaaacac

SEQ ID NO: 50969 - RNA, 20 nt, Human
cccaggggaaccuccacagg

SEQ ID NO: 50970 - RNA, 20 nt, Human
ccccaaacagauguccucaa

SEQ ID NO: 50971 - RNA, 23 nt, Human
ccccaagucaggccuccaaaaca

SEQ ID NO: 50972 - RNA, 24 nt, Human
ccgcacauccucaaguuuccagaa

SEQ ID NO: 50973 - RNA, 19 nt, Human
ccucaacgccucugccugc

SEQ ID NO: 50974 - RNA, 21 nt, Human
ccuccaaaacacugaauuaga

SEQ ID NO: 50975 - RNA, 21 nt, Human
ccuccuaaccuuagccagaac

SEQ ID NO: 50976 - RNA, 24 nt, Human
ccuuggcccaggcauacaggcccu

SEQ ID NO: 50977 - RNA, 26 nt, Human
cuccaaaacacugaauuagagagaaa

SEQ ID NO: 50978 - RNA, 20 nt, Human
cugaaucugaaagugcugcu

SEQ ID NO: 50979 - RNA, 24 nt, Human
cuggagaugcucccaccucagugg

SEQ ID NO: 50980 - RNA, 20 nt, Human
gacaggugagccagcaagau

SEQ ID NO: 50981 - RNA, 19 nt, Human
gagcacuggagaugcuccc

SEQ ID NO: 50982 - RNA, 22 nt, Human
gagcagaagaggagccaugagu

SEQ ID NO: 50983 - RNA, 20 nt, Human
gagcucagaacucucagcaa

SEQ ID NO: 50984 - RNA, 19 nt, Human
gauaaggaggcaaacggga

SEQ ID NO: 50985 - RNA, 19 nt, Human
gcaaacgggagaagcagag

SEQ ID NO: 50986 - RNA, 19 nt, Human
gcaaacgggagaagcagag

SEQ ID NO: 50987 - RNA, 18 nt, Human
gcagaggaacaaaaaaga

SEQ ID NO: 50988 - RNA, 22 nt, Human
ggaaagagcagaagaggagccg

SEQ ID NO: 50989 - RNA, 18 nt, Human
ggagauauaauuggggag

SEQ ID NO: 50990 - RNA, 24 nt, Human
ggaggcaaacgggagaagcagagg

SEQ ID NO: 50991 - RNA, 23 nt, Human
ggcaaacgggagaagcagaggaa

SEQ ID NO: 50992 - RNA, 26 nt, Human
gggagaagcagaggaacaaaaaagag

SEQ ID NO: 50993 - RNA, 20 nt, Human
gggggagauauaauugggga

SEQ ID NO: 50994 - RNA, 20 nt, Human
guccccaagucaggccucca

SEQ ID NO: 50995 - RNA, 22 nt, Human
gugggggagauauaauugggga

SEQ ID NO: 50996 - RNA, 19 nt, Human
guggggugaucucuuggaa

SEQ ID NO: 50997 - RNA, 19 nt, Human
uaaaauucccaacuugcuc

SEQ ID NO: 50998 - RNA, 23 nt, Human
uaagucaacuaggcacccuucag

SEQ ID NO: 50999 - RNA, 22 nt, Human
uagaaagggcucaucacaggug

SEQ ID NO: 51000 - RNA, 24 nt, Human
uagcuuuuauuuacucaaaaacau

SEQ ID NO: 51001 - RNA, 24 nt, Human
uaggacagcucuauauggacugaa

SEQ ID NO: 51002 - RNA, 20 nt, Human
ucaaggauguaaaaaucccu

SEQ ID NO: 51003 - RNA, 24 nt, Human
ucaaguguuuguugauggggaauc

SEQ ID NO: 51004 - RNA, 22 nt, Human
ucaauaauacguuguccccaag

SEQ ID NO: 51005 - RNA, 18 nt, Human
ucagcccaacuagagccu

SEQ ID NO: 51006 - RNA, 22 nt, Human
uccacagggacaggugagccag

SEQ ID NO: 51007 - RNA, 21 nt, Human
uccgagagcagguucucugcu

SEQ ID NO: 51008 - RNA, 30 nt, Human
ucgagacaagauuggguaucagaguucauu

SEQ ID NO: 51009 - RNA, 18 nt, Human
ucucugcucaauuccaca

SEQ ID NO: 51010 - RNA, 23 nt, Human
ucugcucaauuccacaauggcau

SEQ ID NO: 51011 - RNA, 19 nt, Human
ugaaagugcugcugcucuu

SEQ ID NO: 51012 - RNA, 19 nt, Human
ugccugcagcuuuuuggcu

SEQ ID NO: 51013 - RNA, 18 nt, Human
uggaaagagcagaagagg

SEQ ID NO: 51014 - RNA, 18 nt, Human
uggaggaagagaguagug

SEQ ID NO: 51015 - RNA, 21 nt, Human
uggcagccuccuaaccuuagc

SEQ ID NO: 51016 - RNA, 20 nt, Human
uggcauggaaaugagucacc

SEQ ID NO: 51017 - RNA, 24 nt, Human
ugggagcagagcuggaagcacuga

SEQ ID NO: 51018 - RNA, 18 nt, Human
ugguggggugaucucuug

SEQ ID NO: 51019 - RNA, 23 nt, Human
uuagagagaaaggacaaaggaaa

SEQ ID NO: 51020 - RNA, 21 nt, Human
uuggcccaggcauacaggccc

SEQ ID NO: 51021 - RNA, 22 nt, Human
uuggcccaggcauacaggcccu

SEQ ID NO: 51022 - RNA, 20 nt, Human
uuuggcuuuuugaguuccau

SEQ ID NO: 51023 - RNA, 21 nt, Human
aaaaaaaacuaaaaaggggac

SEQ ID NO: 51024 - RNA, 25 nt, Human
aaaaaacaaaaacaaccccaaaaca

SEQ ID NO: 51025 - RNA, 19 nt, Human
aaaaacuaaaaaggggaca

SEQ ID NO: 51026 - RNA, 25 nt, Human
aaaacaaccccaaaacaaccccucc

SEQ ID NO: 51027 - RNA, 21 nt, Human
aaacaaaaacaaccccaaaac

SEQ ID NO: 51028 - RNA, 19 nt, Human
aaacaaccccaaaacaacc

SEQ ID NO: 51029 - RNA, 26 nt, Human
aaacaaccccaaaacaaccccucccc

SEQ ID NO: 51030 - RNA, 19 nt, Human
aaacaaccccuccccacag

SEQ ID NO: 51031 - RNA, 24 nt, Human
aaacaaccccuccccacagacaca

SEQ ID NO: 51032 - RNA, 21 nt, Human
aaacuaaaaaggggacaauaa

SEQ ID NO: 51033 - RNA, 23 nt, Human
aacaaaaacaaccccaaaacaac

SEQ ID NO: 51034 - RNA, 24 nt, Human
aacaucuuuccaaaaucaaaacua

SEQ ID NO: 51035 - RNA, 26 nt, Human
aagaaaaaacaaaaacaaccccaaaa

SEQ ID NO: 51036 - RNA, 30 nt, Human
aagaaaaaacaaaaacaaccccaaaacaaa

SEQ ID NO: 51037 - RNA, 18 nt, Human
aagcgcuucgggugaauu

SEQ ID NO: 51038 - RNA, 24 nt, Human
aaucuaaauaguaugaaauuaguu

SEQ ID NO: 51039 - RNA, 26 nt, Human
acaaaaaaaacuaaaaaggggacaau

SEQ ID NO: 51040 - RNA, 22 nt, Human
acaaaaacaaccccaaaacaac

SEQ ID NO: 51041 - RNA, 22 nt, Human
acaaaacaagggacuugagaag

SEQ ID NO: 51042 - RNA, 23 nt, Human
acaaaacaagggacuugagaagu

SEQ ID NO: 51043 - RNA, 18 nt, Human
acaaccccuccccacaga

SEQ ID NO: 51044 - RNA, 18 nt, Human
accacaagaggcaaacaa

SEQ ID NO: 51045 - RNA, 24 nt, Human
accacaagaggcaaacaaaaaaaa

SEQ ID NO: 51046 - RNA, 22 nt, Human
accacagccaccgggugugacu

SEQ ID NO: 51047 - RNA, 25 nt, Human
accacagccaccgggugugacucgg

SEQ ID NO: 51048 - RNA, 21 nt, Human
accccaaaacaaccccucccc

SEQ ID NO: 51049 - RNA, 25 nt, Human
agaaaaaacaaaaacaaccccaaaa

SEQ ID NO: 51050 - RNA, 18 nt, Human
agaaggaaagcucuuuuu

SEQ ID NO: 51051 - RNA, 21 nt, Human
aggcagacauucuaacgaagc

SEQ ID NO: 51052 - RNA, 23 nt, Human
caaaaaaaacuaaaaaggggaca

SEQ ID NO: 51053 - RNA, 21 nt, Human
caaaacaaccccuccccacag

SEQ ID NO: 51054 - RNA, 20 nt, Human
caaaacaagggacuugagaa

SEQ ID NO: 51055 - RNA, 22 nt, Human
caagaaaaaacaaaaacaaccc

SEQ ID NO: 51056 - RNA, 26 nt, Human
caagaaaaaacaaaaacaaccccaaa

SEQ ID NO: 51057 - RNA, 24 nt, Human
caagaggcaaacaaaaaaaacuaa

SEQ ID NO: 51058 - RNA, 24 nt, Human
cacaacacaaaacaagggacuuga

SEQ ID NO: 51059 - RNA, 23 nt, Human
cacagacacaacacaaaacaagg

SEQ ID NO: 51060 - RNA, 18 nt, Human
caccacaagaggcaaaca

SEQ ID NO: 51061 - RNA, 21 nt, Human
caccacaagaggcaaacaaaa

SEQ ID NO: 51062 - RNA, 24 nt, Human
caccacaagaggcaaacaaaaaaa

SEQ ID NO: 51063 - RNA, 24 nt, Human
caccccucaccacaagaggcaaac

SEQ ID NO: 51064 - RNA, 21 nt, Human
cccacagacacaacacaaaac

SEQ ID NO: 51065 - RNA, 23 nt, Human
cccacagacacaacacaaaacaa

SEQ ID NO: 51066 - RNA, 20 nt, Human
ccccaaaacaaccccucccc

SEQ ID NO: 51067 - RNA, 20 nt, Human
ccccacagacacaacacaaa

SEQ ID NO: 51068 - RNA, 23 nt, Human
ccccucaccacaagaggcaaaca

SEQ ID NO: 51069 - RNA, 19 nt, Human
cccgacgccacgaccuaga

SEQ ID NO: 51070 - RNA, 18 nt, Human
ccucgccgccucgcgugc

SEQ ID NO: 51071 - RNA, 20 nt, Human
cgaccuagaaacacgcuugc

SEQ ID NO: 51072 - RNA, 23 nt, Human
cgaccuagaaacacgcuugccgc

SEQ ID NO: 51073 - RNA, 25 nt, Human
cgccucgccgccucgcgugcgcuca

SEQ ID NO: 51074 - RNA, 23 nt, Human
cguuccuuccuuuggucuuccca

SEQ ID NO: 51075 - RNA, 19 nt, Human
cuaaagacgaacacuuaga

SEQ ID NO: 51076 - RNA, 23 nt, Human
cuaccuggcaagaaaaaacaaaa

SEQ ID NO: 51077 - RNA, 21 nt, Human
cuccccacagacacaacacaa

SEQ ID NO: 51078 - RNA, 23 nt, Human
cuccggaagcccgacgccacgac

SEQ ID NO: 51079 - RNA, 21 nt, Human
cuggagaaggaaagcucuuuu

SEQ ID NO: 51080 - RNA, 19 nt, Human
cuucccacaccccucacca

SEQ ID NO: 51081 - RNA, 25 nt, Human
gacaauaagugcaagauaaaaaaga

SEQ ID NO: 51082 - RNA, 20 nt, Human
gcaagaaaaaacaaaaacac

SEQ ID NO: 51083 - RNA, 22 nt, Human
gccucgcgugcgcucacccagc

SEQ ID NO: 51084 - RNA, 20 nt, Human
ggaagcccgacgccacgacc

SEQ ID NO: 51085 - RNA, 23 nt, Human
guaaggcagacauucuaacgaag

SEQ ID NO: 51086 - RNA, 18 nt, Human
ucacccagccgcacggcc

SEQ ID NO: 51087 - RNA, 19 nt, Human
ucagcaacuuagcggccag

SEQ ID NO: 51088 - RNA, 22 nt, Human
ucagcaacuuagcggccaggug

SEQ ID NO: 51089 - RNA, 19 nt, Human
ucaguuuuaucuaccuggc

SEQ ID NO: 51090 - RNA, 21 nt, Human
ucauaccacagccaccgggug

SEQ ID NO: 51091 - RNA, 21 nt, Human
ucccuggggaaaccaguaagg

SEQ ID NO: 51092 - RNA, 27 nt, Human
ucuccagccuuuucucuauggggccgc

SEQ ID NO: 51093 - RNA, 24 nt, Human
ucucuaugucaguuuuaucuaccu

SEQ ID NO: 51094 - RNA, 25 nt, Human
ucucucuccagccuuuucucuaugu

SEQ ID NO: 51095 - RNA, 21 nt, Human
ucugaggugguuuaguacagg

SEQ ID NO: 51096 - RNA, 18 nt, Human
ugacucggcuaccucucc

SEQ ID NO: 51097 - RNA, 24 nt, Human
ugagaaguuagagaaaaccuuuaa

SEQ ID NO: 51098 - RNA, 19 nt, Human
ugcaagauaaaaaagaaaa

SEQ ID NO: 51099 - RNA, 21 nt, Human
uuccaaaaucaaaacuaaaga

SEQ ID NO: 51100 - RNA, 20 nt, Human
uuccuggagaaggaaagcuc

SEQ ID NO: 51101 - RNA, 20 nt, Human
uuucugaggugguuuaguac

SEQ ID NO: 51102 - RNA, 20 nt, Human
aaaauccccucacuuccauc

SEQ ID NO: 51103 - RNA, 21 nt, Human
aaaauccccucacuuccauca

SEQ ID NO: 51104 - RNA, 22 nt, Human
aaccaugaaaccuacuggucca

SEQ ID NO: 51105 - RNA, 18 nt, Human
aagaagagcuggccuucc

SEQ ID NO: 51106 - RNA, 19 nt, Human
aagaagagcuggccuuccg

SEQ ID NO: 51107 - RNA, 23 nt, Human
aagaaguaaauccaagugucagg

SEQ ID NO: 51108 - RNA, 19 nt, Human
aaguaaauccaagugucag

SEQ ID NO: 51109 - RNA, 18 nt, Human
aauggcuaugggcugggu

SEQ ID NO: 51110 - RNA, 19 nt, Human
acacguggcugaugauucu

SEQ ID NO: 51111 - RNA, 27 nt, Human
acccaccccauucccagcagguccccu

SEQ ID NO: 51112 - RNA, 19 nt, Human
acuuaggaacaagcgaugu

SEQ ID NO: 51113 - RNA, 18 nt, Human
agaaggaagugggguggg

SEQ ID NO: 51114 - RNA, 22 nt, Human
agaauguguguguguguugggg

SEQ ID NO: 51115 - RNA, 24 nt, Human
agcacuuugggaggcugaggcagg

SEQ ID NO: 51116 - RNA, 21 nt, Human
aggaagugggguggguaccua

SEQ ID NO: 51117 - RNA, 26 nt, Human
agggagcccugccagguggguuuggc

SEQ ID NO: 51118 - RNA, 26 nt, Human
agggagcccugccagguggguuuggc

SEQ ID NO: 51119 - RNA, 18 nt, Human
auggagagaaugugugug

SEQ ID NO: 51120 - RNA, 18 nt, Human
auugguccugucuugucc

SEQ ID NO: 51121 - RNA, 23 nt, Human
auuucauccacagaaaggauugc

SEQ ID NO: 51122 - RNA, 23 nt, Human
auuugcagacugccuaggucucc

SEQ ID NO: 51123 - RNA, 21 nt, Human
cacagagugaccaagaaagca

SEQ ID NO: 51124 - RNA, 18 nt, Human
cacaugaaggggcagggc

SEQ ID NO: 51125 - RNA, 24 nt, Human
cacgccuguaaucccagcacuuug

SEQ ID NO: 51126 - RNA, 24 nt, Human
cagcacuuugggaggcugaggcag

SEQ ID NO: 51127 - RNA, 24 nt, Human
cagcacuuugggaggcugaggcag

SEQ ID NO: 51128 - RNA, 26 nt, Human
cagcagguccccucuuugauuggucc

SEQ ID NO: 51129 - RNA, 22 nt, Human
caguggugcuuaaaccgugcuc

SEQ ID NO: 51130 - RNA, 19 nt, Human
ccaagaagagcuggccuuc

SEQ ID NO: 51131 - RNA, 18 nt, Human
ccacagaaaggauugcac

SEQ ID NO: 51132 - RNA, 19 nt, Human
ccacccaccccauucccag

SEQ ID NO: 51133 - RNA, 19 nt, Human
ccagggccaccucccgggc

SEQ ID NO: 51134 - RNA, 19 nt, Human
ccagggccaccucccgggc

SEQ ID NO: 51135 - RNA, 26 nt, Human
ccagugguggguuucaugcuccccuu

SEQ ID NO: 51136 - RNA, 22 nt, Human
cccagccggggccggggagguc

SEQ ID NO: 51137 - RNA, 22 nt, Human
cccagccggggccggggagguc

SEQ ID NO: 51138 - RNA, 22 nt, Human
ccccuuuccucugcaucuuucc

SEQ ID NO: 51139 - RNA, 19 nt, Human
ccgcugccugaugaguugg

SEQ ID NO: 51140 - RNA, 21 nt, Human
ccucuccaccugccgggcugg

SEQ ID NO: 51141 - RNA, 22 nt, Human
ccugccgggcuggccuagcccu

SEQ ID NO: 51142 - RNA, 20 nt, Human
ccuggccagcccugggaacc

SEQ ID NO: 51143 - RNA, 20 nt, Human
ccuggccagcccugggaacc

SEQ ID NO: 51144 - RNA, 20 nt, Human
ccuuccgagaaggaaguggg

SEQ ID NO: 51145 - RNA, 24 nt, Human
cgccuguaaucccagcacuuuggg

SEQ ID NO: 51146 - RNA, 18 nt, Human
cgggagcgcgggagccgg

SEQ ID NO: 51147 - RNA, 18 nt, Human
cgggagcgcgggagccgg

SEQ ID NO: 51148 - RNA, 19 nt, Human
cucaccagucaccauggag

SEQ ID NO: 51149 - RNA, 22 nt, Human
cucacgccuguaaucccagcac

SEQ ID NO: 51150 - RNA, 24 nt, Human
cucacgccuguaaucccagcacuu

SEQ ID NO: 51151 - RNA, 26 nt, Human
cucacuuccaucaagaaauagcucca

SEQ ID NO: 51152 - RNA, 21 nt, Human
cuccaugguguacuauguacc

SEQ ID NO: 51153 - RNA, 21 nt, Human
cucccgggcuggcgcggaggc

SEQ ID NO: 51154 - RNA, 21 nt, Human
cucccgggcuggcgcggaggc

SEQ ID NO: 51155 - RNA, 19 nt, Human
cugccggggacccucucca

SEQ ID NO: 51156 - RNA, 19 nt, Human
gaaaauaaaauccccucac

SEQ ID NO: 51157 - RNA, 20 nt, Human
gagaauguguguguguguug

SEQ ID NO: 51158 - RNA, 21 nt, Human
gagacacccucccucuucccu

SEQ ID NO: 51159 - RNA, 19 nt, Human
gcagggaaaugcuguuccg

SEQ ID NO: 51160 - RNA, 24 nt, Human
gcccugggaacccucagaaggcca

SEQ ID NO: 51161 - RNA, 24 nt, Human
gcccugggaacccucagaaggcca

SEQ ID NO: 51162 - RNA, 20 nt, Human
gcugccggggacccucucca

SEQ ID NO: 51163 - RNA, 23 nt, Human
ggcacgguggcucacgccuguaa

SEQ ID NO: 51164 - RNA, 19 nt, Human
ggccaggggcgcgcggggc

SEQ ID NO: 51165 - RNA, 21 nt, Human
ggccgggcacgguggcucacg

SEQ ID NO: 51166 - RNA, 21 nt, Human
gggacccucuccaccugccgg

SEQ ID NO: 51167 - RNA, 20 nt, Human
gguccggcuguccagggcca

SEQ ID NO: 51168 - RNA, 20 nt, Human
gguccggcuguccagggcca

SEQ ID NO: 51169 - RNA, 23 nt, Human
gguggcucacgccuguaauccca

SEQ ID NO: 51170 - RNA, 24 nt, Human
gguggcucacgccuguaaucccag

SEQ ID NO: 51171 - RNA, 21 nt, Human
gguugugagacacccucccuc

SEQ ID NO: 51172 - RNA, 21 nt, Human
gucaguagguugagccugaaa

SEQ ID NO: 51173 - RNA, 24 nt, Human
guccagcccugcuguuuuucuuuc

SEQ ID NO: 51174 - RNA, 20 nt, Human
gugggaaacaacccuggcca

SEQ ID NO: 51175 - RNA, 20 nt, Human
gugggaaacaacccuggcca

SEQ ID NO: 51176 - RNA, 18 nt, Human
guggguuuggcugggggu

SEQ ID NO: 51177 - RNA, 18 nt, Human
guggguuuggcugggggu

SEQ ID NO: 51178 - RNA, 23 nt, Human
uaaagaaguaaauccaaguguca

SEQ ID NO: 51179 - RNA, 23 nt, Human
uaaagaaguaaauccaaguguca

SEQ ID NO: 51180 - RNA, 19 nt, Human
uaaagacauggccaggggc

SEQ ID NO: 51181 - RNA, 21 nt, Human
uaagaaugaaaugggggaggg

SEQ ID NO: 51182 - RNA, 21 nt, Human
uacccgaagcugggugcgaag

SEQ ID NO: 51183 - RNA, 18 nt, Human
uaggucuccagcuaccug

SEQ ID NO: 51184 - RNA, 21 nt, Human
uaugggaagguaagauaacug

SEQ ID NO: 51185 - RNA, 18 nt, Human
ucccagcagguccccucu

SEQ ID NO: 51186 - RNA, 24 nt, Human
ucccagccggggccggggaggucc

SEQ ID NO: 51187 - RNA, 20 nt, Human
ucccugaaggcucuuuuccu

SEQ ID NO: 51188 - RNA, 19 nt, Human
ucccugugcccuacccgcu

SEQ ID NO: 51189 - RNA, 23 nt, Human
ucccugugcccuacccgcugccu

SEQ ID NO: 51190 - RNA, 23 nt, Human
uccugucuuguccuccaagaaga

SEQ ID NO: 51191 - RNA, 24 nt, Human
ugaaaauaaaauccccucacuucc

SEQ ID NO: 51192 - RNA, 24 nt, Human
ugaagugggcacagagugaccaag

SEQ ID NO: 51193 - RNA, 22 nt, Human
ugaccaagaaagcauuagcugc

SEQ ID NO: 51194 - RNA, 20 nt, Human
ugagacacccucccucuucc

SEQ ID NO: 51195 - RNA, 24 nt, Human
ugcuuaaaccgugcuccauggugu

SEQ ID NO: 51196 - RNA, 22 nt, Human
uggagagaaugugugugugugu

SEQ ID NO: 51197 - RNA, 18 nt, Human
uggccaggggcgcgcggg

SEQ ID NO: 51198 - RNA, 24 nt, Human
uggcucacgccuguaaucccagca

SEQ ID NO: 51199 - RNA, 21 nt, Human
ugggaaacaacccuggccagc

SEQ ID NO: 51200 - RNA, 21 nt, Human
ugggaaacaacccuggccagc

SEQ ID NO: 51201 - RNA, 19 nt, Human
ugggaggcugaggcaggca

SEQ ID NO: 51202 - RNA, 20 nt, Human
ugggaggcugaggcaggcag

SEQ ID NO: 51203 - RNA, 24 nt, Human
ugggucgcaggaccaguggugggu

SEQ ID NO: 51204 - RNA, 21 nt, Human
ugggugcgaagauccaggaga

SEQ ID NO: 51205 - RNA, 27 nt, Human
ugucuuauucguccuggcugggggaag

SEQ ID NO: 51206 - RNA, 19 nt, Human
ugugcccuacccgcugccu

SEQ ID NO: 51207 - RNA, 21 nt, Human
ugugcucaaaauauucaugau

SEQ ID NO: 51208 - RNA, 22 nt, Human
uugguugugagacacccucccu

SEQ ID NO: 51209 - RNA, 18 nt, Human
uugugagacacccucccu

SEQ ID NO: 51210 - RNA, 20 nt, Human
uuugcauucaugaucauucc

SEQ ID NO: 51211 - RNA, 22 nt, Human
agccugggggaugauugggcuc

SEQ ID NO: 51212 - RNA, 25 nt, Human
agcugcccugaaacuuugcuucccc

SEQ ID NO: 51213 - RNA, 18 nt, Human
agggaaagaaagcugcgc

SEQ ID NO: 51214 - RNA, 21 nt, Human
cagcugcccugaaacuuugcu

SEQ ID NO: 51215 - RNA, 24 nt, Human
ccagcccgcagcacgucuccugcc

SEQ ID NO: 51216 - RNA, 21 nt, Human
cccacgauguuuuccucccca

SEQ ID NO: 51217 - RNA, 23 nt, Human
cccacgauguuuuccuccccagg

SEQ ID NO: 51218 - RNA, 21 nt, Human
ccccacgauguuuuccucccc

SEQ ID NO: 51219 - RNA, 19 nt, Human
cccccgggcagcccagccc

SEQ ID NO: 51220 - RNA, 21 nt, Human
cuggcaggagucaucuccccc

SEQ ID NO: 51221 - RNA, 18 nt, Human
cuucccccguggucuucu

SEQ ID NO: 51222 - RNA, 20 nt, Human
gcccugaaacuuugcuuccc

SEQ ID NO: 51223 - RNA, 20 nt, Human
ggcucggaagggcugcggcg

SEQ ID NO: 51224 - RNA, 19 nt, Human
gggaaagaaagcugcgcac

SEQ ID NO: 51225 - RNA, 22 nt, Human
gggcucggaagggcugcggcga

SEQ ID NO: 51226 - RNA, 18 nt, Human
aaaaggccccacggagcc

SEQ ID NO: 51227 - RNA, 21 nt, Human
aaggccccacggagcccgcag

SEQ ID NO: 51228 - RNA, 25 nt, Human
accagcccgccucucuggucccccu

SEQ ID NO: 51229 - RNA, 24 nt, Human
agcucugcccaguuccucagggau

SEQ ID NO: 51230 - RNA, 20 nt, Human
cacggagcccgcagccucuc

SEQ ID NO: 51231 - RNA, 24 nt, Human
ccccacggagcccgcagccucucc

SEQ ID NO: 51232 - RNA, 21 nt, Human
ccccuuacccccaagcccagc

SEQ ID NO: 51233 - RNA, 18 nt, Human
cgguggccgggccggggg

SEQ ID NO: 51234 - RNA, 21 nt, Human
cuuacccccaagcccagcaca

SEQ ID NO: 51235 - RNA, 18 nt, Human
gcauggaggauggggcag

SEQ ID NO: 51236 - RNA, 22 nt, Human
gcccagcacacuccgcggccua

SEQ ID NO: 51237 - RNA, 19 nt, Human
gguggccgggccgggggca

SEQ ID NO: 51238 - RNA, 21 nt, Human
ucagggaugucacagagcagc

SEQ ID NO: 51239 - RNA, 18 nt, Human
ugucacagagcagcugcc

SEQ ID NO: 51240 - RNA, 18 nt, Human
uucaccuuucaagggcuc

SEQ ID NO: 51241 - RNA, 18 nt, Human
aaaccaaggccaagagaa

SEQ ID NO: 51242 - RNA, 24 nt, Human
aacagcagcuaaaagauuuccccc

SEQ ID NO: 51243 - RNA, 19 nt, Human
aagcacggaggggggaaag

SEQ ID NO: 51244 - RNA, 21 nt, Human
aagcugcccucggccaacggc

SEQ ID NO: 51245 - RNA, 22 nt, Human
aaggcacccccguccucaggcg

SEQ ID NO: 51246 - RNA, 20 nt, Human
acacaaagucucugcccucc

SEQ ID NO: 51247 - RNA, 22 nt, Human
acacagacauacaagauagaaa

SEQ ID NO: 51248 - RNA, 20 nt, Human
acuuggaaggaugacaggaa

SEQ ID NO: 51249 - RNA, 22 nt, Human
acuuggaaggaugacaggaaau

SEQ ID NO: 51250 - RNA, 21 nt, Human
agaaagggcuugcauugcaaa

SEQ ID NO: 51251 - RNA, 21 nt, Human
agacgcugcgguucuggcccg

SEQ ID NO: 51252 - RNA, 19 nt, Human
agcaagaagcuucccuugu

SEQ ID NO: 51253 - RNA, 19 nt, Human
agcacggaggggggaaagg

SEQ ID NO: 51254 - RNA, 18 nt, Human
aggaaaaaaauggacaga

SEQ ID NO: 51255 - RNA, 26 nt, Human
aggaaaaaaauggacagaagggaccc

SEQ ID NO: 51256 - RNA, 22 nt, Human
aggaagauggcuccaggucaag

SEQ ID NO: 51257 - RNA, 22 nt, Human
aggccgggcccgaacuggagga

SEQ ID NO: 51258 - RNA, 20 nt, Human
agggaggccgggcccgaacu

SEQ ID NO: 51259 - RNA, 18 nt, Human
agggagggggccgcaggg

SEQ ID NO: 51260 - RNA, 24 nt, Human
aguugugcgcccugcuggggcugg

SEQ ID NO: 51261 - RNA, 18 nt, Human
aucaaugacaugaucuca

SEQ ID NO: 51262 - RNA, 18 nt, Human
cacaggaaaaaaauggac

SEQ ID NO: 51263 - RNA, 19 nt, Human
caccagaaagggcuugcau

SEQ ID NO: 51264 - RNA, 20 nt, Human
cacccccguccucaggcggg

SEQ ID NO: 51265 - RNA, 21 nt, Human
caccccucgaugccccccgcu

SEQ ID NO: 51266 - RNA, 20 nt, Human
cagacgaggaaacgcagagc

SEQ ID NO: 51267 - RNA, 23 nt, Human
cagcagcuaaaagauuuccccau

SEQ ID NO: 51268 - RNA, 21 nt, Human
caggagccgcgacggaggcag

SEQ ID NO: 51269 - RNA, 18 nt, Human
cagggguucuccugggcg

SEQ ID NO: 51270 - RNA, 21 nt, Human
caucauaauauuuacauagga

SEQ ID NO: 51271 - RNA, 21 nt, Human
ccaggagccgcgacggaggca

SEQ ID NO: 51272 - RNA, 20 nt, Human
cccaaggccaggauuucaac

SEQ ID NO: 51273 - RNA, 23 nt, Human
cccauagucagcacuuucggggc

SEQ ID NO: 51274 - RNA, 18 nt, Human
cccccagacgcugcgguu

SEQ ID NO: 51275 - RNA, 18 nt, Human
ccccccgcugccugcagu

SEQ ID NO: 51276 - RNA, 20 nt, Human
cccgcucgccuggcugcggc

SEQ ID NO: 51277 - RNA, 23 nt, Human
cccggguuucugagugcccuggg

SEQ ID NO: 51278 - RNA, 18 nt, Human
cccugcuggggcuggggc

SEQ ID NO: 51279 - RNA, 19 nt, Human
ccgcaugaaggcacccccg

SEQ ID NO: 51280 - RNA, 21 nt, Human
ccucgaugccccccgcugccu

SEQ ID NO: 51281 - RNA, 20 nt, Human
ccuuccggcccggcgcccgu

SEQ ID NO: 51282 - RNA, 22 nt, Human
cgacauagagggacuucauaac

SEQ ID NO: 51283 - RNA, 25 nt, Human
cgccccgcucgccuggcugcggcuc

SEQ ID NO: 51284 - RNA, 19 nt, Human
cgcggacucugccgccucu

SEQ ID NO: 51285 - RNA, 21 nt, Human
cggcccggggcuggggcgcgg

SEQ ID NO: 51286 - RNA, 20 nt, Human
cucaaccagaaaagcacgga

SEQ ID NO: 51287 - RNA, 21 nt, Human
cuccuuggagucuaaaaacag

SEQ ID NO: 51288 - RNA, 18 nt, Human
cugaagagcugugagggc

SEQ ID NO: 51289 - RNA, 24 nt, Human
cuuggagucuaaaaacagcagcua

SEQ ID NO: 51290 - RNA, 20 nt, Human
gacgcucucggugggcgccu

SEQ ID NO: 51291 - RNA, 22 nt, Human
gagacuuccaaaguugugcgcc

SEQ ID NO: 51292 - RNA, 22 nt, Human
gagagccgauggguaaagagag

SEQ ID NO: 51293 - RNA, 19 nt, Human
gagccaugcccuuguaguc

SEQ ID NO: 51294 - RNA, 23 nt, Human
gagcuccuaauacagccaaguuu

SEQ ID NO: 51295 - RNA, 19 nt, Human
gagggcaggcagggcugcc

SEQ ID NO: 51296 - RNA, 21 nt, Human
gagugcccuggggcuaagcac

SEQ ID NO: 51297 - RNA, 21 nt, Human
gauggggagggcaggcagggc

SEQ ID NO: 51298 - RNA, 18 nt, Human
gccaacggcugcuccugg

SEQ ID NO: 51299 - RNA, 18 nt, Human
gcccuggagggagagagg

SEQ ID NO: 51300 - RNA, 18 nt, Human
gccgggcccgaacuggag

SEQ ID NO: 51301 - RNA, 20 nt, Human
gccuggcagcaagaagcuuc

SEQ ID NO: 51302 - RNA, 19 nt, Human
gcgcccgcuggccugggcc

SEQ ID NO: 51303 - RNA, 23 nt, Human
gcgcggacucugccgccucucgg

SEQ ID NO: 51304 - RNA, 19 nt, Human
gcggcggcggggugaggag

SEQ ID NO: 51305 - RNA, 21 nt, Human
gcggggugaggaguguggggg

SEQ ID NO: 51306 - RNA, 22 nt, Human
gcggggugaggagugugggggc

SEQ ID NO: 51307 - RNA, 21 nt, Human
gcugaugugaggcagaaaggc

SEQ ID NO: 51308 - RNA, 24 nt, Human
ggaaacgcagagcaggcagcgccc

SEQ ID NO: 51309 - RNA, 20 nt, Human
ggaggcagccgaagggugcu

SEQ ID NO: 51310 - RNA, 24 nt, Human
ggcagggcugcccuuagcauuuuu

SEQ ID NO: 51311 - RNA, 21 nt, Human
ggccgcagggaggccgggccc

SEQ ID NO: 51312 - RNA, 19 nt, Human
ggccggggcaggugaacga

SEQ ID NO: 51313 - RNA, 24 nt, Human
ggcugaugugaggcagaaaggcuc

SEQ ID NO: 51314 - RNA, 24 nt, Human
ggcuggggcgcacugugcggagcu

SEQ ID NO: 51315 - RNA, 23 nt, Human
gggaaaggacaacauuuugauac

SEQ ID NO: 51316 - RNA, 24 nt, Human
gggcaggugaacgaucagcucucc

SEQ ID NO: 51317 - RNA, 20 nt, Human
ggggacggcggcggcggcgg

SEQ ID NO: 51318 - RNA, 23 nt, Human
ggggcccgcccccaccccgggag

SEQ ID NO: 51319 - RNA, 19 nt, Human
ggggccgcagggaggccgg

SEQ ID NO: 51320 - RNA, 23 nt, Human
ggggccgcagggaggccgggccc

SEQ ID NO: 51321 - RNA, 22 nt, Human
gggggauggggagggcaggcag

SEQ ID NO: 51322 - RNA, 26 nt, Human
guuugcuucuuccacauaauuuccac

SEQ ID NO: 51323 - RNA, 21 nt, Human
uaaaaacagcagcuaaaagau

SEQ ID NO: 51324 - RNA, 27 nt, Human
uaaacacaaagucucugcccuccuccc

SEQ ID NO: 51325 - RNA, 18 nt, Human
uacaguuuggcaggccca

SEQ ID NO: 51326 - RNA, 19 nt, Human
uagcaacaugugcugacau

SEQ ID NO: 51327 - RNA, 21 nt, Human
uagguaacccccauccauuaa

SEQ ID NO: 51328 - RNA, 18 nt, Human
uaucagguuugcuucuuc

SEQ ID NO: 51329 - RNA, 19 nt, Human
ucaacaucaaaaccaaggc

SEQ ID NO: 51330 - RNA, 20 nt, Human
uccaggagccgcgacggagg

SEQ ID NO: 51331 - RNA, 18 nt, Human
uccccauagucagcacuu

SEQ ID NO: 51332 - RNA, 22 nt, Human
ucccgcgaacugcgccuggcuc

SEQ ID NO: 51333 - RNA, 24 nt, Human
ucccugucaggaaaucucaaagca

SEQ ID NO: 51334 - RNA, 21 nt, Human
uccugggcguccgccuggugg

SEQ ID NO: 51335 - RNA, 19 nt, Human
ucggggcaggaggggcaca

SEQ ID NO: 51336 - RNA, 21 nt, Human
ucuucaaaaagagagagagag

SEQ ID NO: 51337 - RNA, 21 nt, Human
ucuucaagcaguggcccugga

SEQ ID NO: 51338 - RNA, 22 nt, Human
ugaacgcgggcgcccgcuggcc

SEQ ID NO: 51339 - RNA, 23 nt, Human
ugagcgaaagcaagaggucuuaa

SEQ ID NO: 51340 - RNA, 19 nt, Human
ugaggcagaaaggcucauu

SEQ ID NO: 51341 - RNA, 20 nt, Human
ugcaaaggggcuuggccuga

SEQ ID NO: 51342 - RNA, 27 nt, Human
ugcccuccuccccugacuuuggcaauu

SEQ ID NO: 51343 - RNA, 18 nt, Human
ugcugccagcugccuucc

SEQ ID NO: 51344 - RNA, 22 nt, Human
ugcuggggcuggggcgcacugu

SEQ ID NO: 51345 - RNA, 23 nt, Human
ugcuguuaggcacaggaaaaaaa

SEQ ID NO: 51346 - RNA, 24 nt, Human
uggaaggcaucucucccaaggcca

SEQ ID NO: 51347 - RNA, 25 nt, Human
uggacagaaaucuuuucccugucag

SEQ ID NO: 51348 - RNA, 18 nt, Human
uggcccacuaggaagaug

SEQ ID NO: 51349 - RNA, 20 nt, Human
uggcccggcccggcccgggg

SEQ ID NO: 51350 - RNA, 21 nt, Human
uggcccggcccggcccggggc

SEQ ID NO: 51351 - RNA, 18 nt, Human
uggccugggccugcugcc

SEQ ID NO: 51352 - RNA, 22 nt, Human
uggccugggccugcugccagcu

SEQ ID NO: 51353 - RNA, 25 nt, Human
uggcucgcgcuucagacgcucucgg

SEQ ID NO: 51354 - RNA, 23 nt, Human
uggcugcggcucacauagggagg

SEQ ID NO: 51355 - RNA, 18 nt, Human
uguaguccagugcuugcu

SEQ ID NO: 51356 - RNA, 19 nt, Human
uguaguccagugcuugcuc

SEQ ID NO: 51357 - RNA, 18 nt, Human
ugucaggaaaucucaaag

SEQ ID NO: 51358 - RNA, 20 nt, Human
ugucaggaaaucucaaagca

SEQ ID NO: 51359 - RNA, 18 nt, Human
ugucuaaaacauguagaa

SEQ ID NO: 51360 - RNA, 21 nt, Human
uucaagaagggagaacaaaaa

SEQ ID NO: 51361 - RNA, 23 nt, Human
uucacauuugaucuguaaacuuu

SEQ ID NO: 51362 - RNA, 22 nt, Human
uuccaaaguugugcgcccugcu

SEQ ID NO: 51363 - RNA, 24 nt, Human
uucggggcaggaggggcacacaga

SEQ ID NO: 51364 - RNA, 22 nt, Human
uugcuucuuccacauaauuucc

SEQ ID NO: 51365 - RNA, 21 nt, Human
uugugcgcccugcuggggcug

SEQ ID NO: 51366 - RNA, 22 nt, Human
uuuauucuucaagaagggagaa

SEQ ID NO: 51367 - RNA, 22 nt, Human
aaaaaaaaaaaaaaacaccacc

SEQ ID NO: 51368 - RNA, 20 nt, Human
aaaacaccacaagcaaguga

SEQ ID NO: 51369 - RNA, 21 nt, Human
aaaacucccucggugcccuuc

SEQ ID NO: 51370 - RNA, 18 nt, Human
aaccacagauccgaaaca

SEQ ID NO: 51371 - RNA, 22 nt, Human
aaccaggaagcagggguccuca

SEQ ID NO: 51372 - RNA, 21 nt, Human
aacucccucggugcccuucca

SEQ ID NO: 51373 - RNA, 21 nt, Human
aagaaacgaaaacaccacaag

SEQ ID NO: 51374 - RNA, 23 nt, Human
aagaaacgaaaacaccacaagca

SEQ ID NO: 51375 - RNA, 18 nt, Human
aagaagcagggugacccc

SEQ ID NO: 51376 - RNA, 22 nt, Human
aagaagcagggugaccccggcg

SEQ ID NO: 51377 - RNA, 23 nt, Human
aagaccuccccagcgaggcaucc

SEQ ID NO: 51378 - RNA, 18 nt, Human
aagcaagugaccugccag

SEQ ID NO: 51379 - RNA, 20 nt, Human
aagcagggguccucaaugca

SEQ ID NO: 51380 - RNA, 22 nt, Human
aagccaggcccucuccaaggga

SEQ ID NO: 51381 - RNA, 25 nt, Human
aaggaaccacagauccgaaacaggc

SEQ ID NO: 51382 - RNA, 21 nt, Human
aaggacucauuuggggcuugg

SEQ ID NO: 51383 - RNA, 18 nt, Human
aagugaccugccaggaac

SEQ ID NO: 51384 - RNA, 19 nt, Human
aagugaccugccaggaaca

SEQ ID NO: 51385 - RNA, 26 nt, Human
acaagcaagugaccugccaggaacac

SEQ ID NO: 51386 - RNA, 22 nt, Human
acacaccccagggacagaacaa

SEQ ID NO: 51387 - RNA, 25 nt, Human
acacaccccagggacagaacaaaag

SEQ ID NO: 51388 - RNA, 23 nt, Human
acacagcagggcaagaagcaggg

SEQ ID NO: 51389 - RNA, 18 nt, Human
acaccacaagcaagugac

SEQ ID NO: 51390 - RNA, 20 nt, Human
accccauaagcccccauccc

SEQ ID NO: 51391 - RNA, 18 nt, Human
acccucuugguguugccg

SEQ ID NO: 51392 - RNA, 23 nt, Human
agaagaacacauucucaaagaga

SEQ ID NO: 51393 - RNA, 21 nt, Human
agaggguggagaagggguccc

SEQ ID NO: 51394 - RNA, 20 nt, Human
agaugaaaaagaaacgaaaa

SEQ ID NO: 51395 - RNA, 24 nt, Human
agcagaaagcccaggggaggcagc

SEQ ID NO: 51396 - RNA, 21 nt, Human
agcauggggcucugggaagaa

SEQ ID NO: 51397 - RNA, 19 nt, Human
agccccccugcccaccccu

SEQ ID NO: 51398 - RNA, 19 nt, Human
agccggcaaggggaagcuu

SEQ ID NO: 51399 - RNA, 25 nt, Human
agcucagaguuuaaaaaaaaaaaaa

SEQ ID NO: 51400 - RNA, 20 nt, Human
aggaagcagggguccucaau

SEQ ID NO: 51401 - RNA, 18 nt, Human
aggcaagaacacuggggg

SEQ ID NO: 51402 - RNA, 18 nt, Human
aggcaagaacacuggggg

SEQ ID NO: 51403 - RNA, 19 nt, Human
aggcagagaccaggccucc

SEQ ID NO: 51404 - RNA, 23 nt, Human
aggcagagaccaggccuccaaga

SEQ ID NO: 51405 - RNA, 25 nt, Human
aggcuggcuccgugcucuuuguggg

SEQ ID NO: 51406 - RNA, 19 nt, Human
agggagaggguggagaagg

SEQ ID NO: 51407 - RNA, 19 nt, Human
caaagccuuucaucucccu

SEQ ID NO: 51408 - RNA, 22 nt, Human
cacaagguccucaagaaaggga

SEQ ID NO: 51409 - RNA, 25 nt, Human
cacacacagcagggcaagaagcagg

SEQ ID NO: 51410 - RNA, 18 nt, Human
cacagccccaucagcauu

SEQ ID NO: 51411 - RNA, 23 nt, Human
caccacaagcaagugaccugcca

SEQ ID NO: 51412 - RNA, 21 nt, Human
caccccauaagcccccauccc

SEQ ID NO: 51413 - RNA, 22 nt, Human
caccccauaagcccccauccca

SEQ ID NO: 51414 - RNA, 27 nt, Human
caccccauaagcccccaucccagcgcc

SEQ ID NO: 51415 - RNA, 21 nt, Human
caccuccaucggccugugcuc

SEQ ID NO: 51416 - RNA, 20 nt, Human
caccugggggcgcugccacc

SEQ ID NO: 51417 - RNA, 23 nt, Human
caccugucacaggcucucaucuu

SEQ ID NO: 51418 - RNA, 21 nt, Human
cacugggacccuugcuagcag

SEQ ID NO: 51419 - RNA, 24 nt, Human
cagaacaaaagucuacaggaagac

SEQ ID NO: 51420 - RNA, 21 nt, Human
cagauccgaaacaggcaaagg

SEQ ID NO: 51421 - RNA, 21 nt, Human
cagcaaguaggcagugagcua

SEQ ID NO: 51422 - RNA, 23 nt, Human
cagccagaagaacacauucucaa

SEQ ID NO: 51423 - RNA, 18 nt, Human
cagccccccugcccaccc

SEQ ID NO: 51424 - RNA, 22 nt, Human
cagccccccugcccaccccucc

SEQ ID NO: 51425 - RNA, 24 nt, Human
cagcgaggcauccacguggccacc

SEQ ID NO: 51426 - RNA, 21 nt, Human
cauaagcccccaucccagcgc

SEQ ID NO: 51427 - RNA, 23 nt, Human
cauuuggggcuuggagaccuggc

SEQ ID NO: 51428 - RNA, 20 nt, Human
ccaaccccacaggggcagcg

SEQ ID NO: 51429 - RNA, 18 nt, Human
ccaagaccuccccagcga

SEQ ID NO: 51430 - RNA, 24 nt, Human
ccaccccauaagcccccaucccag

SEQ ID NO: 51431 - RNA, 26 nt, Human
ccaccccucccaagggguuccuaaga

SEQ ID NO: 51432 - RNA, 22 nt, Human
ccagaagaacacauucucaaag

SEQ ID NO: 51433 - RNA, 20 nt, Human
ccagcgccugccgggaccgc

SEQ ID NO: 51434 - RNA, 18 nt, Human
ccaggggaggcagccaca

SEQ ID NO: 51435 - RNA, 25 nt, Human
cccacagagcucaaagcuuucugca

SEQ ID NO: 51436 - RNA, 21 nt, Human
ccccacagagcucaaagcuuu

SEQ ID NO: 51437 - RNA, 21 nt, Human
ccccccugcccaccccuccca

SEQ ID NO: 51438 - RNA, 20 nt, Human
cccccgacaccugccaagcu

SEQ ID NO: 51439 - RNA, 19 nt, Human
ccccuaggggcgcaccagg

SEQ ID NO: 51440 - RNA, 24 nt, Human
ccccuccauucucucuacacccag

SEQ ID NO: 51441 - RNA, 18 nt, Human
ccccugcccaccccuccc

SEQ ID NO: 51442 - RNA, 23 nt, Human
ccgcaccaaccccacaggggcag

SEQ ID NO: 51443 - RNA, 22 nt, Human
ccggccagcagagggucacagu

SEQ ID NO: 51444 - RNA, 23 nt, Human
ccggcgccaccgcaccaacccca

SEQ ID NO: 51445 - RNA, 24 nt, Human
ccucaacaacccacugaggaccaa

SEQ ID NO: 51446 - RNA, 21 nt, Human
ccucaagaaagggaagcccag

SEQ ID NO: 51447 - RNA, 21 nt, Human
ccugcccaccccucccaaggg

SEQ ID NO: 51448 - RNA, 19 nt, Human
ccuugcuagcagccccccu

SEQ ID NO: 51449 - RNA, 20 nt, Human
ccuugcuagcagccccccug

SEQ ID NO: 51450 - RNA, 25 nt, Human
cuagcagccccccugcccaccccuc

SEQ ID NO: 51451 - RNA, 25 nt, Human
cucagaguuuaaaaaaaaaaaaaaa

SEQ ID NO: 51452 - RNA, 21 nt, Human
cucccucggugcccuuccaaa

SEQ ID NO: 51453 - RNA, 23 nt, Human
cucuacacccagaaaacucccuc

SEQ ID NO: 51454 - RNA, 21 nt, Human
cucuaguguguucccccacag

SEQ ID NO: 51455 - RNA, 18 nt, Human
cucuccuggcccagcucc

SEQ ID NO: 51456 - RNA, 18 nt, Human
cucuggccucaacaaccc

SEQ ID NO: 51457 - RNA, 21 nt, Human
cucuggccucaacaacccacu

SEQ ID NO: 51458 - RNA, 22 nt, Human
cucuuuuugguccccuccauuc

SEQ ID NO: 51459 - RNA, 23 nt, Human
cugccgggaccgcgagugccuag

SEQ ID NO: 51460 - RNA, 22 nt, Human
cuggcccauucccccgacaccu

SEQ ID NO: 51461 - RNA, 19 nt, Human
cuucguuucuuccuccccc

SEQ ID NO: 51462 - RNA, 21 nt, Human
gaaacaggcaaagggggaaag

SEQ ID NO: 51463 - RNA, 22 nt, Human
gaagcccagacauuggucugga

SEQ ID NO: 51464 - RNA, 18 nt, Human
gacccaagccacuaaaaa

SEQ ID NO: 51465 - RNA, 20 nt, Human
gagaccuggccgggcacucc

SEQ ID NO: 51466 - RNA, 19 nt, Human
gagauccuuuaacuugaaa

SEQ ID NO: 51467 - RNA, 24 nt, Human
gagcagcguggcuggguccgaggc

SEQ ID NO: 51468 - RNA, 21 nt, Human
gagcauggggcucugggaaga

SEQ ID NO: 51469 - RNA, 23 nt, Human
gcagccccccugcccaccccucc

SEQ ID NO: 51470 - RNA, 20 nt, Human
gcccagacauuggucuggag

SEQ ID NO: 51471 - RNA, 21 nt, Human
gcccagcuccccaccacaucc

SEQ ID NO: 51472 - RNA, 18 nt, Human
gccgggaccgcgagugcc

SEQ ID NO: 51473 - RNA, 18 nt, Human
gccuccaagaccucccca

SEQ ID NO: 51474 - RNA, 19 nt, Human
ggaagccucccacacccca

SEQ ID NO: 51475 - RNA, 22 nt, Human
ggacagaacaaaagucuacagg

SEQ ID NO: 51476 - RNA, 23 nt, Human
ggacccuugcuagcagccccccu

SEQ ID NO: 51477 - RNA, 19 nt, Human
ggaggggugcuggguaagg

SEQ ID NO: 51478 - RNA, 23 nt, Human
ggcagggagcagaaagcccaggg

SEQ ID NO: 51479 - RNA, 19 nt, Human
ggccagcagagggucacag

SEQ ID NO: 51480 - RNA, 25 nt, Human
gggagacccaagccacuaaaaaccc

SEQ ID NO: 51481 - RNA, 26 nt, Human
gggagacccaagccacuaaaaacccu

SEQ ID NO: 51482 - RNA, 21 nt, Human
gggauuuuuauaucaccauau

SEQ ID NO: 51483 - RNA, 18 nt, Human
gggcucugggaagaaagu

SEQ ID NO: 51484 - RNA, 21 nt, Human
ggggaaaggagggcccagaga

SEQ ID NO: 51485 - RNA, 24 nt, Human
uaagaugccuacuggcccaauguu

SEQ ID NO: 51486 - RNA, 24 nt, Human
uacaggaucugggcagggagcaga

SEQ ID NO: 51487 - RNA, 24 nt, Human
uauccuuuauugauaaaauagcuc

SEQ ID NO: 51488 - RNA, 19 nt, Human
uauguuccagaggauuuga

SEQ ID NO: 51489 - RNA, 19 nt, Human
ucaagaaagggaagcccag

SEQ ID NO: 51490 - RNA, 20 nt, Human
ucacaaggacucauuugggg

SEQ ID NO: 51491 - RNA, 24 nt, Human
ucagaguuuaaaaaaaaaaaaaaa

SEQ ID NO: 51492 - RNA, 20 nt, Human
ucagggagaggguggagaag

SEQ ID NO: 51493 - RNA, 24 nt, Human
uccacaagcacccaccugggggga

SEQ ID NO: 51494 - RNA, 20 nt, Human
uccacguggccacccaccua

SEQ ID NO: 51495 - RNA, 23 nt, Human
uccauucucucuacacccagaaa

SEQ ID NO: 51496 - RNA, 22 nt, Human
ucccacaccccaggaaggacuc

SEQ ID NO: 51497 - RNA, 21 nt, Human
ucccagggcgauacucuggcc

SEQ ID NO: 51498 - RNA, 22 nt, Human
uccuggcccagcuccccaccac

SEQ ID NO: 51499 - RNA, 24 nt, Human
ucgaggcagagaccaggccuccaa

SEQ ID NO: 51500 - RNA, 19 nt, Human
ucugggugccagguuuugg

SEQ ID NO: 51501 - RNA, 25 nt, Human
ugaaaaagaaacgaaaacaccacaa

SEQ ID NO: 51502 - RNA, 21 nt, Human
ugaaauagugauucugucugc

SEQ ID NO: 51503 - RNA, 21 nt, Human
ugaagccaggcccucuccaag

SEQ ID NO: 51504 - RNA, 21 nt, Human
ugacaaaagacuuauccccca

SEQ ID NO: 51505 - RNA, 18 nt, Human
ugaggccuacaggaucug

SEQ ID NO: 51506 - RNA, 20 nt, Human
ugauucugucugccacuccc

SEQ ID NO: 51507 - RNA, 20 nt, Human
ugcacagccccaucagcauu

SEQ ID NO: 51508 - RNA, 19 nt, Human
ugccaguaccccaccuggg

SEQ ID NO: 51509 - RNA, 18 nt, Human
ugccagugaucggggauc

SEQ ID NO: 51510 - RNA, 21 nt, Human
uggaaggcuggcuccgugcuc

SEQ ID NO: 51511 - RNA, 19 nt, Human
ugggaaaaguggaaggcug

SEQ ID NO: 51512 - RNA, 20 nt, Human
ugggaaaaguggaaggcugg

SEQ ID NO: 51513 - RNA, 23 nt, Human
ugggacccuugcuagcagccccc

SEQ ID NO: 51514 - RNA, 21 nt, Human
ugucacaggcucucaucuuag

SEQ ID NO: 51515 - RNA, 22 nt, Human
ugucacaggcucucaucuuaga

SEQ ID NO: 51516 - RNA, 25 nt, Human
uguggauauuuugagcugucuuggg

SEQ ID NO: 51517 - RNA, 23 nt, Human
uguucugggugccagguuuuggg

SEQ ID NO: 51518 - RNA, 24 nt, Human
uguucugggugccagguuuugggg

SEQ ID NO: 51519 - RNA, 18 nt, Human
uugaagccaggcccucuc

SEQ ID NO: 51520 - RNA, 21 nt, Human
uuuugagcugucuuggggaga

SEQ ID NO: 51521 - RNA, 22 nt, Human
uuuuggggugggacugagaacc

SEQ ID NO: 51522 - RNA, 23 nt, Human
uuuuggggugggacugagaacca

SEQ ID NO: 51523 - RNA, 21 nt, Human
aaacacagaucuccucguucc

SEQ ID NO: 51524 - RNA, 19 nt, Human
aggccgggggcggggggug

SEQ ID NO: 51525 - RNA, 19 nt, Human
cccagaagcccgggcgcgg

SEQ ID NO: 51526 - RNA, 19 nt, Human
ccccugggaagccgugccc

SEQ ID NO: 51527 - RNA, 18 nt, Human
cgggggguguggcagggc

SEQ ID NO: 51528 - RNA, 23 nt, Human
cguggcuuuucucuuugccucgg

SEQ ID NO: 51529 - RNA, 21 nt, Human
cucucccaucccuucccaaac

SEQ ID NO: 51530 - RNA, 18 nt, Human
gagcugcggaggccgggg

SEQ ID NO: 51531 - RNA, 18 nt, Human
gaggccgggggcgggggg

SEQ ID NO: 51532 - RNA, 21 nt, Human
gccacucucccaucccuuccc

SEQ ID NO: 51533 - RNA, 18 nt, Human
gccgagcugcggaggccg

SEQ ID NO: 51534 - RNA, 18 nt, Human
ggcagggcugggccgugg

SEQ ID NO: 51535 - RNA, 19 nt, Human
gggcgggggguguggcagg

SEQ ID NO: 51536 - RNA, 24 nt, Human
gggcgggggguguggcagggcugg

SEQ ID NO: 51537 - RNA, 18 nt, Human
ggguguggcagggcuggg

SEQ ID NO: 51538 - RNA, 21 nt, Human
guggcuuuucucuuugccucg

SEQ ID NO: 51539 - RNA, 20 nt, Human
uaaguaaacacagaucuccu

SEQ ID NO: 51540 - RNA, 19 nt, Human
ucagcaagccacucuccca

SEQ ID NO: 51541 - RNA, 22 nt, Human
ucccuucccaaacuuuccuuuu

SEQ ID NO: 51542 - RNA, 21 nt, Human
ucggucuuaaguaaacacaga

SEQ ID NO: 51543 - RNA, 23 nt, Human
ugcggaggccgggggcggggggu

SEQ ID NO: 51544 - RNA, 18 nt, Human
ugggccgugguuggggaa

SEQ ID NO: 51545 - RNA, 22 nt, Human
uggggaacaccccagaagcccg

SEQ ID NO: 51546 - RNA, 24 nt, Human
uuccuuuuugugcaacgguccgug

SEQ ID NO: 51547 - RNA, 26 nt, Human
uugugcaacgguccguggcuuuucuc

SEQ ID NO: 51548 - RNA, 23 nt, Human
aaacaucagaauauauuuaugac

SEQ ID NO: 51549 - RNA, 25 nt, Human
aagaaaacaaacggagggaaagugg

SEQ ID NO: 51550 - RNA, 24 nt, Human
aagaguuucaggaaggguggggga

SEQ ID NO: 51551 - RNA, 21 nt, Human
acacacacacacacacacaca

SEQ ID NO: 51552 - RNA, 25 nt, Human
acacacacacacacacacacacggu

SEQ ID NO: 51553 - RNA, 23 nt, Human
acacacacacacacacacgcaca

SEQ ID NO: 51554 - RNA, 23 nt, Human
acacacacacacaccauguaagg

SEQ ID NO: 51555 - RNA, 23 nt, Human
acacacacacacacgcacacaca

SEQ ID NO: 51556 - RNA, 23 nt, Human
acacacacacacgcacacacaca

SEQ ID NO: 51557 - RNA, 23 nt, Human
acacacacgcacacacacacaca

SEQ ID NO: 51558 - RNA, 18 nt, Human
acagagccuggagaacac

SEQ ID NO: 51559 - RNA, 19 nt, Human
accccaacucccucggugc

SEQ ID NO: 51560 - RNA, 23 nt, Human
acccuggagcucccaaaacccuu

SEQ ID NO: 51561 - RNA, 23 nt, Human
acccuggcgaaguccuucugaca

SEQ ID NO: 51562 - RNA, 21 nt, Human
acgcacacacacacacacaca

SEQ ID NO: 51563 - RNA, 20 nt, Human
agaaaacaaacggagggaaa

SEQ ID NO: 51564 - RNA, 24 nt, Human
agaaaagagugaggauuaggccua

SEQ ID NO: 51565 - RNA, 18 nt, Human
agagcgcucagccucccc

SEQ ID NO: 51566 - RNA, 24 nt, Human
agagcgcucagccuccccccaccc

SEQ ID NO: 51567 - RNA, 18 nt, Human
agcaagauaucaaaggcu

SEQ ID NO: 51568 - RNA, 23 nt, Human
agccagagcgcucagccuccccc

SEQ ID NO: 51569 - RNA, 20 nt, Human
aggaagaaaagagugaggau

SEQ ID NO: 51570 - RNA, 23 nt, Human
aguaauaagggaaccagagauaa

SEQ ID NO: 51571 - RNA, 18 nt, Human
augaacccuggagcuccc

SEQ ID NO: 51572 - RNA, 21 nt, Human
auggaaccaggggagcucucu

SEQ ID NO: 51573 - RNA, 19 nt, Human
caaagccagccugcugcuc

SEQ ID NO: 51574 - RNA, 23 nt, Human
caagaggauggugaaaacccacu

SEQ ID NO: 51575 - RNA, 19 nt, Human
caagccgggugaugggugc

SEQ ID NO: 51576 - RNA, 20 nt, Human
cacacacacacacacacaca

SEQ ID NO: 51577 - RNA, 25 nt, Human
cacacacacacacacacacgcacac

SEQ ID NO: 51578 - RNA, 24 nt, Human
cacacacacacacgcacacacaca

SEQ ID NO: 51579 - RNA, 28 nt, Human
cacacacacacacgcacacacacacaca

SEQ ID NO: 51580 - RNA, 28 nt, Human
cacacacacgcacacacacacacacaca

SEQ ID NO: 51581 - RNA, 29 nt, Human
cacacgcacacacacacacacacaccaug

SEQ ID NO: 51582 - RNA, 18 nt, Human
cacagagccuggagaaca

SEQ ID NO: 51583 - RNA, 21 nt, Human
caccuggacacuaccacugag

SEQ ID NO: 51584 - RNA, 20 nt, Human
caccuggcucaggggagggg

SEQ ID NO: 51585 - RNA, 30 nt, Human
cacgcacacacacacacacacaccauguag

SEQ ID NO: 51586 - RNA, 23 nt, Human
cacuaaggucucaucaggguuug

SEQ ID NO: 51587 - RNA, 21 nt, Human
cagagccuggagaacacuaag

SEQ ID NO: 51588 - RNA, 21 nt, Human
cagucgucagguucuggaggg

SEQ ID NO: 51589 - RNA, 23 nt, Human
caguuuuacuuuaagaggauaau

SEQ ID NO: 51590 - RNA, 18 nt, Human
ccaacccaagcaaugcuu

SEQ ID NO: 51591 - RNA, 27 nt, Human
ccacagagccuggagaacagcggaccg

SEQ ID NO: 51592 - RNA, 23 nt, Human
ccacagccagcccaucccccugu

SEQ ID NO: 51593 - RNA, 19 nt, Human
ccacugagggaggagugaa

SEQ ID NO: 51594 - RNA, 18 nt, Human
ccagagauaaaaccccaa

SEQ ID NO: 51595 - RNA, 24 nt, Human
ccagagguuuuccacagguucuga

SEQ ID NO: 51596 - RNA, 23 nt, Human
ccagcccaucccccugugggccc

SEQ ID NO: 51597 - RNA, 21 nt, Human
ccagcgcagaguagaagggaa

SEQ ID NO: 51598 - RNA, 19 nt, Human
cccaaaacccuggcgaagu

SEQ ID NO: 51599 - RNA, 20 nt, Human
cccaagcaaugcuuugugcc

SEQ ID NO: 51600 - RNA, 22 nt, Human
cccaccccaacucccucggugc

SEQ ID NO: 51601 - RNA, 19 nt, Human
ccccaacucccucggugcc

SEQ ID NO: 51602 - RNA, 22 nt, Human
ccccagccugggccaucuucuc

SEQ ID NO: 51603 - RNA, 24 nt, Human
ccccccaccccaacucccucggug

SEQ ID NO: 51604 - RNA, 19 nt, Human
cccccugcccuaaaccugg

SEQ ID NO: 51605 - RNA, 24 nt, Human
ccccugcccuaaaccuggccacag

SEQ ID NO: 51606 - RNA, 18 nt, Human
cccgggucgcgcgugggg

SEQ ID NO: 51607 - RNA, 19 nt, Human
cccucggugccaccgcucu

SEQ ID NO: 51608 - RNA, 19 nt, Human
cccugcccuaaaccuggcc

SEQ ID NO: 51609 - RNA, 23 nt, Human
cccuggagcucccaaaacccugg

SEQ ID NO: 51610 - RNA, 18 nt, Human
ccuccccccaccccaacu

SEQ ID NO: 51611 - RNA, 20 nt, Human
ccugcccuaaaccuggccac

SEQ ID NO: 51612 - RNA, 18 nt, Human
ccuggcucaggggagggg

SEQ ID NO: 51613 - RNA, 22 nt, Human
ccugugccuccagacacacaca

SEQ ID NO: 51614 - RNA, 21 nt, Human
ccuugggucacauggcccagu

SEQ ID NO: 51615 - RNA, 20 nt, Human
cgcacacacacacacacaca

SEQ ID NO: 51616 - RNA, 21 nt, Human
cgcucagccuccccccacccc

SEQ ID NO: 51617 - RNA, 22 nt, Human
cgcucagccuccccccacccca

SEQ ID NO: 51618 - RNA, 24 nt, Human
cucagccuccccccaccccaacuc

SEQ ID NO: 51619 - RNA, 22 nt, Human
cuccccccaccccaacucccuc

SEQ ID NO: 51620 - RNA, 18 nt, Human
cugcucucagccugggcc

SEQ ID NO: 51621 - RNA, 19 nt, Human
cugcugcucucagccuggu

SEQ ID NO: 51622 - RNA, 24 nt, Human
cuuaugaacccuggagcucccaaa

SEQ ID NO: 51623 - RNA, 18 nt, Human
gaaagaaggaaggagggg

SEQ ID NO: 51624 - RNA, 24 nt, Human
gagcgcucagccuccccccacccc

SEQ ID NO: 51625 - RNA, 22 nt, Human
gccagcccaucccccugugggc

SEQ ID NO: 51626 - RNA, 20 nt, Human
gccuccccccaccccaacuc

SEQ ID NO: 51627 - RNA, 20 nt, Human
gcuaaagugagagaggccag

SEQ ID NO: 51628 - RNA, 25 nt, Human
gcucccaaaacccuggcgaaguccu

SEQ ID NO: 51629 - RNA, 18 nt, Human
ggacaaaugcccccugcc

SEQ ID NO: 51630 - RNA, 24 nt, Human
ggagggaaagugggccgaggauga

SEQ ID NO: 51631 - RNA, 20 nt, Human
ggccagagguuuuccacagg

SEQ ID NO: 51632 - RNA, 20 nt, Human
ggugagugggaagguagagg

SEQ ID NO: 51633 - RNA, 19 nt, Human
gugccugugccuccagaca

SEQ ID NO: 51634 - RNA, 18 nt, Human
guggcagaaggaauggaa

SEQ ID NO: 51635 - RNA, 19 nt, Human
uaaaccuggccacagccag

SEQ ID NO: 51636 - RNA, 20 nt, Human
uaaggcaccacuggauuaua

SEQ ID NO: 51637 - RNA, 21 nt, Human
ucaccuggcucaggggagggg

SEQ ID NO: 51638 - RNA, 24 nt, Human
ucagccuccccccaccccaacucc

SEQ ID NO: 51639 - RNA, 19 nt, Human
uccaaguccuguggggagc

SEQ ID NO: 51640 - RNA, 20 nt, Human
uccagacacacacacacaca

SEQ ID NO: 51641 - RNA, 33 nt, Human
uccagacacacacacacacacacacacgcagug

SEQ ID NO: 51642 - RNA, 18 nt, Human
uccauggcuaaagugaga

SEQ ID NO: 51643 - RNA, 23 nt, Human
uccauggcuaaagugagagaggc

SEQ ID NO: 51644 - RNA, 18 nt, Human
ucccaaaacccuggcgaa

SEQ ID NO: 51645 - RNA, 18 nt, Human
uccccccaccccaacucc

SEQ ID NO: 51646 - RNA, 23 nt, Human
ucccccugugggcccucugucca

SEQ ID NO: 51647 - RNA, 20 nt, Human
ucccucggugccaccgcucu

SEQ ID NO: 51648 - RNA, 24 nt, Human
ucccucggugccaccgcucuuggg

SEQ ID NO: 51649 - RNA, 18 nt, Human
uccuucugacacugcugu

SEQ ID NO: 51650 - RNA, 21 nt, Human
ugaaaagaaaacaaacggagg

SEQ ID NO: 51651 - RNA, 18 nt, Human
ugcaaaaggaaaagaagg

SEQ ID NO: 51652 - RNA, 18 nt, Human
ugcaaaaggaaaagaagg

SEQ ID NO: 51653 - RNA, 21 nt, Human
ugcccuaaaccuggccacagc

SEQ ID NO: 51654 - RNA, 20 nt, Human
uggaaccaggggagcucucu

SEQ ID NO: 51655 - RNA, 22 nt, Human
uggaggggacaaaugcccccug

SEQ ID NO: 51656 - RNA, 18 nt, Human
uggcagaaggaauggaac

SEQ ID NO: 51657 - RNA, 28 nt, Human
uggggcgguagggaaagaaggaaggagg

SEQ ID NO: 51658 - RNA, 19 nt, Human
ugguaaggaucccuccuug

SEQ ID NO: 51659 - RNA, 24 nt, Human
ugguucaccuucuuaugaacccug

SEQ ID NO: 51660 - RNA, 18 nt, Human
ugucacagccggggaauc

SEQ ID NO: 51661 - RNA, 19 nt, Human
uuccauggcuaaagugaga

SEQ ID NO: 51662 - RNA, 19 nt, Human
aagcggggccucccggggg

SEQ ID NO: 51663 - RNA, 22 nt, Human
aagcugaaaaggggucaccaga

SEQ ID NO: 51664 - RNA, 20 nt, Human
aagcugaaaaggggucaccg

SEQ ID NO: 51665 - RNA, 19 nt, Human
aaguggcagaagcugcucu

SEQ ID NO: 51666 - RNA, 20 nt, Human
aagugggaguggaggcagcc

SEQ ID NO: 51667 - RNA, 21 nt, Human
acagcuugguguggcaucauc

SEQ ID NO: 51668 - RNA, 21 nt, Human
accagguacaaaaagagucug

SEQ ID NO: 51669 - RNA, 22 nt, Human
acccacugccucaccccaccug

SEQ ID NO: 51670 - RNA, 22 nt, Human
agccauggcgguggaggagacc

SEQ ID NO: 51671 - RNA, 28 nt, Human
agccgaaucaggcaccauuuuuuauaaa

SEQ ID NO: 51672 - RNA, 18 nt, Human
aggcagagcacuggcaca

SEQ ID NO: 51673 - RNA, 20 nt, Human
aggcagccagugacacagag

SEQ ID NO: 51674 - RNA, 18 nt, Human
aggccccagccagccucc

SEQ ID NO: 51675 - RNA, 18 nt, Human
agggaagugggaguggag

SEQ ID NO: 51676 - RNA, 18 nt, Human
agggguaggaggggaagu

SEQ ID NO: 51677 - RNA, 22 nt, Human
agggugcgccaacccagccccg

SEQ ID NO: 51678 - RNA, 21 nt, Human
caagccccgcagugucaggga

SEQ ID NO: 51679 - RNA, 27 nt, Human
cacacacacaggcagagcacuggcaca

SEQ ID NO: 51680 - RNA, 22 nt, Human
cacagcuugguguggcaucauc

SEQ ID NO: 51681 - RNA, 23 nt, Human
cacagcuugguguggcaucaucc

SEQ ID NO: 51682 - RNA, 19 nt, Human
cacagucccauggcacaag

SEQ ID NO: 51683 - RNA, 22 nt, Human
caccccaccuggaagauggccu

SEQ ID NO: 51684 - RNA, 23 nt, Human
caccccaccuggaagauggccug

SEQ ID NO: 51685 - RNA, 20 nt, Human
caccgagacccuccccauca

SEQ ID NO: 51686 - RNA, 21 nt, Human
cagaccaccuuggaagccaug

SEQ ID NO: 51687 - RNA, 23 nt, Human
cagauggggucgcacccagccca

SEQ ID NO: 51688 - RNA, 21 nt, Human
cagcaccugcugccaaugcca

SEQ ID NO: 51689 - RNA, 20 nt, Human
cagcagggaggguagcagca

SEQ ID NO: 51690 - RNA, 20 nt, Human
caggagcccgagucacugug

SEQ ID NO: 51691 - RNA, 18 nt, Human
caggagccgaggcaagcg

SEQ ID NO: 51692 - RNA, 21 nt, Human
cagggagacaacgggccccuc

SEQ ID NO: 51693 - RNA, 20 nt, Human
cagguacaaaaagagucuga

SEQ ID NO: 51694 - RNA, 23 nt, Human
caggugccuugcuguggucccug

SEQ ID NO: 51695 - RNA, 18 nt, Human
ccaaugccacucucucag

SEQ ID NO: 51696 - RNA, 21 nt, Human
ccaccgagacccuccccauca

SEQ ID NO: 51697 - RNA, 19 nt, Human
ccacugccucaccccaccu

SEQ ID NO: 51698 - RNA, 22 nt, Human
ccaggccuaacacuguuggcac

SEQ ID NO: 51699 - RNA, 19 nt, Human
ccagggagacaacgggccc

SEQ ID NO: 51700 - RNA, 20 nt, Human
ccaucaggccccagcccagc

SEQ ID NO: 51701 - RNA, 21 nt, Human
cccacagagcccaggguggca

SEQ ID NO: 51702 - RNA, 18 nt, Human
ccccagcccagcagaagc

SEQ ID NO: 51703 - RNA, 19 nt, Human
ccccuccucucgccaacac

SEQ ID NO: 51704 - RNA, 20 nt, Human
ccccugaagucaggacagag

SEQ ID NO: 51705 - RNA, 22 nt, Human
cccgagcagaccaccuuggaag

SEQ ID NO: 51706 - RNA, 22 nt, Human
cccugugcugugccugccccug

SEQ ID NO: 51707 - RNA, 21 nt, Human
ccgaucacccagacacugugc

SEQ ID NO: 51708 - RNA, 18 nt, Human
ccgccgccgccgccgccg

SEQ ID NO: 51709 - RNA, 23 nt, Human
ccgccgccgccgccgccgccgcc

SEQ ID NO: 51710 - RNA, 26 nt, Human
ccgccgccgccgccgccgccgccgcu

SEQ ID NO: 51711 - RNA, 25 nt, Human
ccgccgccgccgccgccgccgccgg

SEQ ID NO: 51712 - RNA, 23 nt, Human
ccgccgccgccgccgccgccgcu

SEQ ID NO: 51713 - RNA, 22 nt, Human
ccgggugcuggggguuggggca

SEQ ID NO: 51714 - RNA, 23 nt, Human
ccuaacacuguuggcaccuccuc

SEQ ID NO: 51715 - RNA, 23 nt, Human
ccucccgccgccgccgccgccgc

SEQ ID NO: 51716 - RNA, 22 nt, Human
ccuccucccgccgccgccgcua

SEQ ID NO: 51717 - RNA, 21 nt, Human
ccucucgccaacacuguggag

SEQ ID NO: 51718 - RNA, 20 nt, Human
cgagugcacacacacaggca

SEQ ID NO: 51719 - RNA, 21 nt, Human
cgccgccgccgccgccgcucc

SEQ ID NO: 51720 - RNA, 20 nt, Human
cgccgggcagcggcuggguu

SEQ ID NO: 51721 - RNA, 22 nt, Human
cggcaaagaaacgccccgggga

SEQ ID NO: 51722 - RNA, 21 nt, Human
cggcacugacaggacgugggc

SEQ ID NO: 51723 - RNA, 22 nt, Human
cgggcagccccugaagucagga

SEQ ID NO: 51724 - RNA, 22 nt, Human
cgggggagcugggccaggcugg

SEQ ID NO: 51725 - RNA, 19 nt, Human
cucccgggggagcugggcc

SEQ ID NO: 51726 - RNA, 23 nt, Human
cugguaccaccgagacccucccc

SEQ ID NO: 51727 - RNA, 22 nt, Human
cugugcucuucccccacaggaa

SEQ ID NO: 51728 - RNA, 22 nt, Human
gacagugcagggccugccccuc

SEQ ID NO: 51729 - RNA, 22 nt, Human
gacccacugccucaccccaccu

SEQ ID NO: 51730 - RNA, 21 nt, Human
gagaggacugucagcugggag

SEQ ID NO: 51731 - RNA, 18 nt, Human
gagcccgagucacugugg

SEQ ID NO: 51732 - RNA, 20 nt, Human
gagggccagggagacaacgg

SEQ ID NO: 51733 - RNA, 24 nt, Human
gccagggagacaacgggccccucc

SEQ ID NO: 51734 - RNA, 21 nt, Human
gccccuccucucgccaacacu

SEQ ID NO: 51735 - RNA, 24 nt, Human
gcccgagcagaccaccuuggaagc

SEQ ID NO: 51736 - RNA, 23 nt, Human
gccuccucccgccgccgccgccg

SEQ ID NO: 51737 - RNA, 23 nt, Human
gccuccucccgccgccgccgccg

SEQ ID NO: 51738 - RNA, 23 nt, Human
ggaagauggccugggcccgagca

SEQ ID NO: 51739 - RNA, 18 nt, Human
ggaagugggacccacugc

SEQ ID NO: 51740 - RNA, 19 nt, Human
ggagcugggccaggcuggg

SEQ ID NO: 51741 - RNA, 22 nt, Human
ggagggguaggaggggaagugg

SEQ ID NO: 51742 - RNA, 20 nt, Human
ggcacagcuugguguggcau

SEQ ID NO: 51743 - RNA, 20 nt, Human
gggaaugaguagacgggagg

SEQ ID NO: 51744 - RNA, 20 nt, Human
gggagcugggccaggcuggg

SEQ ID NO: 51745 - RNA, 18 nt, Human
gggaugggccacccacag

SEQ ID NO: 51746 - RNA, 18 nt, Human
gggcuggccagucugggc

SEQ ID NO: 51747 - RNA, 21 nt, Human
ggggacagcagggaggguagc

SEQ ID NO: 51748 - RNA, 21 nt, Human
ggggugcagugggaaaauuca

SEQ ID NO: 51749 - RNA, 21 nt, Human
ggucaccagguacaaaaagag

SEQ ID NO: 51750 - RNA, 23 nt, Human
gucucauuuuucacucuuuaaaa

SEQ ID NO: 51751 - RNA, 21 nt, Human
guggaggcagccagugacaca

SEQ ID NO: 51752 - RNA, 21 nt, Human
guuggcaccuccuccugcuua

SEQ ID NO: 51753 - RNA, 21 nt, Human
uacaaaaagagucugagacag

SEQ ID NO: 51754 - RNA, 22 nt, Human
uacaaaaagagucugagacagc

SEQ ID NO: 51755 - RNA, 24 nt, Human
uacaaaaagagucugagacagccg

SEQ ID NO: 51756 - RNA, 19 nt, Human
uacacugaugggccaggau

SEQ ID NO: 51757 - RNA, 20 nt, Human
uacacugaugggccaggaug

SEQ ID NO: 51758 - RNA, 23 nt, Human
uaccaccgagacccuccccauca

SEQ ID NO: 51759 - RNA, 21 nt, Human
ucacugugggagccuugaggg

SEQ ID NO: 51760 - RNA, 23 nt, Human
ucaggccaggcgaggccaguaug

SEQ ID NO: 51761 - RNA, 18 nt, Human
ucagggaagugggagugg

SEQ ID NO: 51762 - RNA, 21 nt, Human
ucccauggcacaagugcagcc

SEQ ID NO: 51763 - RNA, 25 nt, Human
ucccccacaggaagacacugggagc

SEQ ID NO: 51764 - RNA, 24 nt, Human
ucccgccgccgccgccgccgccgg

SEQ ID NO: 51765 - RNA, 19 nt, Human
ucccgggggagcugggcca

SEQ ID NO: 51766 - RNA, 21 nt, Human
ucccugagcccgggugcuggg

SEQ ID NO: 51767 - RNA, 23 nt, Human
ucccugugcugugccugccccug

SEQ ID NO: 51768 - RNA, 21 nt, Human
uccucccgccgccgccgccgc

SEQ ID NO: 51769 - RNA, 19 nt, Human
uccugaauaagggcacagg

SEQ ID NO: 51770 - RNA, 23 nt, Human
ucgcacccagcccagcaucagcg

SEQ ID NO: 51771 - RNA, 18 nt, Human
ugacacagaggcuuuucc

SEQ ID NO: 51772 - RNA, 21 nt, Human
ugagacagccgaaucaggcac

SEQ ID NO: 51773 - RNA, 22 nt, Human
ugagacagccgaaucaggcacc

SEQ ID NO: 51774 - RNA, 19 nt, Human
ugaguagacgggaggggag

SEQ ID NO: 51775 - RNA, 23 nt, Human
ugaguagacgggaggggagggug

SEQ ID NO: 51776 - RNA, 19 nt, Human
ugcacacacacaggcagag

SEQ ID NO: 51777 - RNA, 21 nt, Human
ugcagcaggagccgaggcaag

SEQ ID NO: 51778 - RNA, 21 nt, Human
ugcagcaggagggggugcagu

SEQ ID NO: 51779 - RNA, 23 nt, Human
ugcaggugccuugcugugguccc

SEQ ID NO: 51780 - RNA, 18 nt, Human
ugcuggggguuggggcaa

SEQ ID NO: 51781 - RNA, 20 nt, Human
uggagaggacugucagcugg

SEQ ID NO: 51782 - RNA, 18 nt, Human
uggccugggcccgagcag

SEQ ID NO: 51783 - RNA, 20 nt, Human
ugggagcgggcagccccuga

SEQ ID NO: 51784 - RNA, 24 nt, Human
ugggcagauggggucgcacccagc

SEQ ID NO: 51785 - RNA, 21 nt, Human
uggggcuggccagucugggcg

SEQ ID NO: 51786 - RNA, 18 nt, Human
uggggguuggggcaagag

SEQ ID NO: 51787 - RNA, 19 nt, Human
uggggguuggggcaagagg

SEQ ID NO: 51788 - RNA, 18 nt, Human
ugguaccaccgagacccu

SEQ ID NO: 51789 - RNA, 24 nt, Human
uggucccugagcccgggugcuggg

SEQ ID NO: 51790 - RNA, 21 nt, Human
uguggggcuggccagucuggg

SEQ ID NO: 51791 - RNA, 28 nt, Human
uugcuguggucccugagcccgggugcug

SEQ ID NO: 51792 - RNA, 18 nt, Human
aaaaaggcuucaugcccu

SEQ ID NO: 51793 - RNA, 19 nt, Human
aaaauaucaaggacaggau

SEQ ID NO: 51794 - RNA, 22 nt, Human
aaacaaauacaaaaacaaagau

SEQ ID NO: 51795 - RNA, 25 nt, Human
aaacaaauacaaaaacaaagauuug

SEQ ID NO: 51796 - RNA, 26 nt, Human
aaacugcucuugccccugaaaccuag

SEQ ID NO: 51797 - RNA, 23 nt, Human
aacuuuuauuucuucaguaguuu

SEQ ID NO: 51798 - RNA, 23 nt, Human
aagauuuggaacugcuaaaaaua

SEQ ID NO: 51799 - RNA, 24 nt, Human
aaggaaccagaaugacugucacag

SEQ ID NO: 51800 - RNA, 22 nt, Human
aauacaaaaacaaagauuugga

SEQ ID NO: 51801 - RNA, 18 nt, Human
acaaauacaaaaacaaag

SEQ ID NO: 51802 - RNA, 24 nt, Human
agaaggaaccagaaugacugucac

SEQ ID NO: 51803 - RNA, 24 nt, Human
agacauagaaaaucagcagugacu

SEQ ID NO: 51804 - RNA, 18 nt, Human
agcaaacaaauacaaaaa

SEQ ID NO: 51805 - RNA, 18 nt, Human
agcugaccccaagccgaa

SEQ ID NO: 51806 - RNA, 23 nt, Human
aggaaaaaggcuucaugcccuaa

SEQ ID NO: 51807 - RNA, 19 nt, Human
aguuaaucccauacacuug

SEQ ID NO: 51808 - RNA, 21 nt, Human
auagaaaaucagcagugacua

SEQ ID NO: 51809 - RNA, 24 nt, Human
aucagaaaauaucuucaacuuuua

SEQ ID NO: 51810 - RNA, 23 nt, Human
caaaaggcugagacccuggugug

SEQ ID NO: 51811 - RNA, 23 nt, Human
caaaauaacugcauuaaaaagua

SEQ ID NO: 51812 - RNA, 19 nt, Human
caacuuuuaaccccaggac

SEQ ID NO: 51813 - RNA, 27 nt, Human
cacacaacugcuaauugucgagaccug

SEQ ID NO: 51814 - RNA, 22 nt, Human
cacagcaaacaaauacaaaaac

SEQ ID NO: 51815 - RNA, 24 nt, Human
cagaugccucauccucguucaccc

SEQ ID NO: 51816 - RNA, 23 nt, Human
caggaaaaaggcuucaugcccua

SEQ ID NO: 51817 - RNA, 22 nt, Human
caggaugcagacaauuacgaug

SEQ ID NO: 51818 - RNA, 21 nt, Human
cagugggagaaaacaaacuuc

SEQ ID NO: 51819 - RNA, 20 nt, Human
cauucccaccuggcugaggg

SEQ ID NO: 51820 - RNA, 21 nt, Human
ccagaaugacugucacacaac

SEQ ID NO: 51821 - RNA, 19 nt, Human
ccagguacugcuugucgac

SEQ ID NO: 51822 - RNA, 18 nt, Human
ccccaaaaggcugagacc

SEQ ID NO: 51823 - RNA, 21 nt, Human
ccuaaaacuccacggccuguc

SEQ ID NO: 51824 - RNA, 20 nt, Human
cgacaugaaagucaauauac

SEQ ID NO: 51825 - RNA, 20 nt, Human
cuggggagucuaagaugugu

SEQ ID NO: 51826 - RNA, 19 nt, Human
gaagugcacaaaagaaaca

SEQ ID NO: 51827 - RNA, 23 nt, Human
gacaagaagucaguugcgaagug

SEQ ID NO: 51828 - RNA, 18 nt, Human
gacacauucauuccucag

SEQ ID NO: 51829 - RNA, 21 nt, Human
gaggcagggcagucauguggg

SEQ ID NO: 51830 - RNA, 19 nt, Human
gcaaacaaauacaaaaaca

SEQ ID NO: 51831 - RNA, 26 nt, Human
gcgagcuuuggcggcggcggcggcgg

SEQ ID NO: 51832 - RNA, 28 nt, Human
gcugagacccugguguguccuccucgag

SEQ ID NO: 51833 - RNA, 21 nt, Human
ggaacagacuggucagaggca

SEQ ID NO: 51834 - RNA, 18 nt, Human
ggagcugagcugacccca

SEQ ID NO: 51835 - RNA, 24 nt, Human
gggggccccggaacagacugguca

SEQ ID NO: 51836 - RNA, 21 nt, Human
guaucaguggggccuggaggc

SEQ ID NO: 51837 - RNA, 22 nt, Human
uaaaaaguacuuacuuugcccc

SEQ ID NO: 51838 - RNA, 25 nt, Human
uagguaccaaaguguguagcaaaga

SEQ ID NO: 51839 - RNA, 23 nt, Human
uaguaguuaauguaaagacauac

SEQ ID NO: 51840 - RNA, 20 nt, Human
uauggagcaaagacauagaa

SEQ ID NO: 51841 - RNA, 19 nt, Human
ucaauacaauucaucugaa

SEQ ID NO: 51842 - RNA, 24 nt, Human
ucacuguaaaucuuuccaaugauu

SEQ ID NO: 51843 - RNA, 18 nt, Human
ucagaugccucauccucg

SEQ ID NO: 51844 - RNA, 21 nt, Human
ucaguaguuucuaaugcagac

SEQ ID NO: 51845 - RNA, 23 nt, Human
ucaguaguuucuaaugcagacaa

SEQ ID NO: 51846 - RNA, 25 nt, Human
ucaucagaaaauaucuucaacuuuu

SEQ ID NO: 51847 - RNA, 21 nt, Human
ucccccagcaguauggagcaa

SEQ ID NO: 51848 - RNA, 19 nt, Human
uccucagcauuuuuucaau

SEQ ID NO: 51849 - RNA, 25 nt, Human
ucguucaccccaaaaggcugagacc

SEQ ID NO: 51850 - RNA, 27 nt, Human
ugaacacagcaaacaaauacaaaaaca

SEQ ID NO: 51851 - RNA, 21 nt, Human
ugacacauucauuccucagca

SEQ ID NO: 51852 - RNA, 20 nt, Human
ugagugcuccugcaugccaa

SEQ ID NO: 51853 - RNA, 18 nt, Human
ugauaaguaggagucacu

SEQ ID NO: 51854 - RNA, 23 nt, Human
ugcagacaaaugugacaaggcag

SEQ ID NO: 51855 - RNA, 20 nt, Human
ugcuaaaaauaucaaggaca

SEQ ID NO: 51856 - RNA, 23 nt, Human
ugcugcugggaccaggaaaaagg

SEQ ID NO: 51857 - RNA, 18 nt, Human
uggcggcggcggcggcgg

SEQ ID NO: 51858 - RNA, 18 nt, Human
uggcggcggcggcggcgg

SEQ ID NO: 51859 - RNA, 23 nt, Human
uggcugagggggccccggaacag

SEQ ID NO: 51860 - RNA, 21 nt, Human
ugggaccaggaaaaaggcuuc

SEQ ID NO: 51861 - RNA, 23 nt, Human
uggggguaucaguggggccugga

SEQ ID NO: 51862 - RNA, 21 nt, Human
ugucguacagcccagugcagc

SEQ ID NO: 51863 - RNA, 21 nt, Human
uucaugacagaugcaugacga

SEQ ID NO: 51864 - RNA, 25 nt, Human
uugacacauucauuccucagcauuu

SEQ ID NO: 51865 - RNA, 23 nt, Human
uuggggguaucaguggggccugg

SEQ ID NO: 51866 - RNA, 21 nt, Human
uuuugguaauuaucuuccaaa

SEQ ID NO: 51867 - RNA, 22 nt, Human
agacugagaaacaggaaagcac

SEQ ID NO: 51868 - RNA, 25 nt, Human
cucuuuguuuuugccuuguugagaa

SEQ ID NO: 51869 - RNA, 20 nt, Human
gaacuacauuuacuaugcaa

SEQ ID NO: 51870 - RNA, 21 nt, Human
gagcagagucaacuucaacgc

SEQ ID NO: 51871 - RNA, 19 nt, Human
uacuaugcaagagcagagu

SEQ ID NO: 51872 - RNA, 26 nt, Human
ucagcaauuaacaaugauuuucguuu

SEQ ID NO: 51873 - RNA, 21 nt, Human
ugagaaacaggaaagcaccau

SEQ ID NO: 51874 - RNA, 20 nt, Human
uuucguuuaauucucuucca

SEQ ID NO: 51875 - RNA, 21 nt, Human
aacauaaagauuguuguuuug

SEQ ID NO: 51876 - RNA, 23 nt, Human
aacccccucccagccccaccaaa

SEQ ID NO: 51877 - RNA, 20 nt, Human
aagaaaggagaaauaaaggc

SEQ ID NO: 51878 - RNA, 24 nt, Human
aauacauaacccccucccagcccc

SEQ ID NO: 51879 - RNA, 19 nt, Human
acagcccgcucaagggggu

SEQ ID NO: 51880 - RNA, 20 nt, Human
acaguaggcauccaucugaa

SEQ ID NO: 51881 - RNA, 21 nt, Human
acauaacccccucccagcccc

SEQ ID NO: 51882 - RNA, 23 nt, Human
accaugagagcagcaggagcaac

SEQ ID NO: 51883 - RNA, 33 nt, Human
agaaaauagacagcccaaaauuuaaacagaaaa

SEQ ID NO: 51884 - RNA, 19 nt, Human
agaggaagaaggagccaga

SEQ ID NO: 51885 - RNA, 23 nt, Human
agaggaagaaggagccagaggcc

SEQ ID NO: 51886 - RNA, 23 nt, Human
agagguaauguuugaaauuaaag

SEQ ID NO: 51887 - RNA, 26 nt, Human
agcccaaaauuuaaacagaauucaua

SEQ ID NO: 51888 - RNA, 22 nt, Human
aggcggccggcgaggagugagc

SEQ ID NO: 51889 - RNA, 19 nt, Human
agugagcgaacugaacugc

SEQ ID NO: 51890 - RNA, 18 nt, Human
augacaauaaugaagaaa

SEQ ID NO: 51891 - RNA, 25 nt, Human
cacaugcagaggaagaaggagccag

SEQ ID NO: 51892 - RNA, 26 nt, Human
caccaugagagcagcaggagcaacaa

SEQ ID NO: 51893 - RNA, 19 nt, Human
cagcagaaaauagacagcc

SEQ ID NO: 51894 - RNA, 20 nt, Human
cagcagaaaauagacagccc

SEQ ID NO: 51895 - RNA, 23 nt, Human
cagcagaaaauagacagcccaaa

SEQ ID NO: 51896 - RNA, 24 nt, Human
cagcagaaaauagacagcccaaaa

SEQ ID NO: 51897 - RNA, 18 nt, Human
cagcaggagcaacaaaug

SEQ ID NO: 51898 - RNA, 19 nt, Human
cagcaggagcaacaaauga

SEQ ID NO: 51899 - RNA, 18 nt, Human
cagccaguccccgccccg

SEQ ID NO: 51900 - RNA, 24 nt, Human
cagccaguccccgccccgcucucc

SEQ ID NO: 51901 - RNA, 21 nt, Human
caggaagaggcccugguggcg

SEQ ID NO: 51902 - RNA, 20 nt, Human
caggagcaacaaaugauuug

SEQ ID NO: 51903 - RNA, 22 nt, Human
cauaacccccucccagccccac

SEQ ID NO: 51904 - RNA, 24 nt, Human
caucugaaaagacuggaaacaacu

SEQ ID NO: 51905 - RNA, 24 nt, Human
ccaaagcucaauuuugcaugguuu

SEQ ID NO: 51906 - RNA, 19 nt, Human
ccaaaguuaaucuccacag

SEQ ID NO: 51907 - RNA, 20 nt, Human
ccagccaguccccgccccgc

SEQ ID NO: 51908 - RNA, 23 nt, Human
ccaucugaaaagacuggaaacaa

SEQ ID NO: 51909 - RNA, 18 nt, Human
cccaccaaagcucaauuu

SEQ ID NO: 51910 - RNA, 20 nt, Human
cccccgccccgccgggccgc

SEQ ID NO: 51911 - RNA, 20 nt, Human
cccccucccagccccaccaa

SEQ ID NO: 51912 - RNA, 22 nt, Human
ccccgccgggccgccacccucc

SEQ ID NO: 51913 - RNA, 19 nt, Human
ccccgcgcaggccggccuc

SEQ ID NO: 51914 - RNA, 22 nt, Human
cccgccgggccgccacccucca

SEQ ID NO: 51915 - RNA, 21 nt, Human
cccuccagccaguccccgccc

SEQ ID NO: 51916 - RNA, 22 nt, Human
cccucccagccccaccaaagcu

SEQ ID NO: 51917 - RNA, 21 nt, Human
ccggccccgcccccgccccgc

SEQ ID NO: 51918 - RNA, 18 nt, Human
ccuccagccaguccccgc

SEQ ID NO: 51919 - RNA, 22 nt, Human
cgaacugaacugcucugcggcc

SEQ ID NO: 51920 - RNA, 23 nt, Human
cgauguugaaaaccaauccacuu

SEQ ID NO: 51921 - RNA, 26 nt, Human
cgcucaaggggguaccaugacugccc

SEQ ID NO: 51922 - RNA, 22 nt, Human
cuccagccaguccccgccccgc

SEQ ID NO: 51923 - RNA, 19 nt, Human
cucccagccccaccaaagc

SEQ ID NO: 51924 - RNA, 24 nt, Human
cugccccgcgcaggccggccucgg

SEQ ID NO: 51925 - RNA, 25 nt, Human
cugguggcggcaacggccgccaccc

SEQ ID NO: 51926 - RNA, 19 nt, Human
cuguagggcuucaaacuua

SEQ ID NO: 51927 - RNA, 22 nt, Human
gaaggagccagaggccggcccc

SEQ ID NO: 51928 - RNA, 22 nt, Human
gaaugaucagaauguaaaaaua

SEQ ID NO: 51929 - RNA, 27 nt, Human
gacaauaaugaagaaaaaccgguaccc

SEQ ID NO: 51930 - RNA, 19 nt, Human
gagcccgaaggagaggcgg

SEQ ID NO: 51931 - RNA, 21 nt, Human
gccggccucggcagcaccgcc

SEQ ID NO: 51932 - RNA, 23 nt, Human
ggaaacaucuauucucuuugaac

SEQ ID NO: 51933 - RNA, 22 nt, Human
ggcggccggcgaggagugagcg

SEQ ID NO: 51934 - RNA, 21 nt, Human
guaaaacuuaagaacacgcaa

SEQ ID NO: 51935 - RNA, 18 nt, Human
gucuuuuccccucccucu

SEQ ID NO: 51936 - RNA, 20 nt, Human
gucuuuuccccucccucuca

SEQ ID NO: 51937 - RNA, 22 nt, Human
uaaacagaauucauagcauuac

SEQ ID NO: 51938 - RNA, 27 nt, Human
uaaagaaaaauauccaccauauauuac

SEQ ID NO: 51939 - RNA, 26 nt, Human
uaaaggucccaugaauacauaacccc

SEQ ID NO: 51940 - RNA, 21 nt, Human
uaacccccucccagccccacc

SEQ ID NO: 51941 - RNA, 22 nt, Human
uaagaaagucuuuuccccuccc

SEQ ID NO: 51942 - RNA, 22 nt, Human
uacauaacccccucccagcccc

SEQ ID NO: 51943 - RNA, 24 nt, Human
uagacagcccaaaauuuaaacaga

SEQ ID NO: 51944 - RNA, 24 nt, Human
uauuacuaaacauugaaaaaaaaa

SEQ ID NO: 51945 - RNA, 27 nt, Human
uauuugguucuuuuaaucagcuauuca

SEQ ID NO: 51946 - RNA, 24 nt, Human
uccaccauauauuacaacagaucu

SEQ ID NO: 51947 - RNA, 18 nt, Human
ucccagccccaccaaagc

SEQ ID NO: 51948 - RNA, 23 nt, Human
uccccgccccgcucuccgccaca

SEQ ID NO: 51949 - RNA, 21 nt, Human
ucuccgccacagcccgcucaa

SEQ ID NO: 51950 - RNA, 24 nt, Human
ucuccgccacagcccgcucaaggg

SEQ ID NO: 51951 - RNA, 23 nt, Human
ugacacuuacagaugauucugua

SEQ ID NO: 51952 - RNA, 22 nt, Human
ugacagaaauaaguucuguguu

SEQ ID NO: 51953 - RNA, 18 nt, Human
ugagagcagcaggagcaa

SEQ ID NO: 51954 - RNA, 18 nt, Human
ugauucuguaggcauauc

SEQ ID NO: 51955 - RNA, 22 nt, Human
ugccuaauugucaaaauaacac

SEQ ID NO: 51956 - RNA, 20 nt, Human
uggcaccaugagagcagcag

SEQ ID NO: 51957 - RNA, 21 nt, Human
uuaaacagaauucauagcauu

SEQ ID NO: 51958 - RNA, 20 nt, Human
uucauuuugacacuuacaga

SEQ ID NO: 51959 - RNA, 24 nt, Human
uucuguacaaauuaaaggucccau

SEQ ID NO: 51960 - RNA, 20 nt, Human
uugaaaaaaaaaacguggca

SEQ ID NO: 51961 - RNA, 26 nt, Human
uugaaaaaaaaaacguggcaccauga

SEQ ID NO: 51962 - RNA, 30 nt, Human
uuucaagaaaggagaaauaaaggcauaauu

SEQ ID NO: 51963 - RNA, 22 nt, Human
aaaagugaagaauuauuacugg

SEQ ID NO: 51964 - RNA, 23 nt, Human
acaugaauccaacagacaucucc

SEQ ID NO: 51965 - RNA, 20 nt, Human
acuaagaaaguuuaaaacag

SEQ ID NO: 51966 - RNA, 21 nt, Human
acuaagaaaguuuaaaacagu

SEQ ID NO: 51967 - RNA, 19 nt, Human
agacaugaauccaacagac

SEQ ID NO: 51968 - RNA, 18 nt, Human
cagacaucuccuccucau

SEQ ID NO: 51969 - RNA, 23 nt, Human
caugaauccaacagacaucuccu

SEQ ID NO: 51970 - RNA, 21 nt, Human
cuguugagggacccaguuaua

SEQ ID NO: 51971 - RNA, 18 nt, Human
ggaagauaaucagagugg

SEQ ID NO: 51972 - RNA, 19 nt, Human
uaagaaccaagccuuucuc

SEQ ID NO: 51973 - RNA, 19 nt, Human
uagcaaaagacaugaaucc

SEQ ID NO: 51974 - RNA, 25 nt, Human
uagcagaagcuacugaacuauagca

SEQ ID NO: 51975 - RNA, 24 nt, Human
uaucaggaugggaguuaaggucuc

SEQ ID NO: 51976 - RNA, 26 nt, Human
uauggggaaggcgggggucggaaacc

SEQ ID NO: 51977 - RNA, 18 nt, Human
ucagugaaauuuagcaga

SEQ ID NO: 51978 - RNA, 27 nt, Human
ugaaccacauaagaccuauuuuagccc

SEQ ID NO: 51979 - RNA, 19 nt, Human
ugaacuauagcaaaagaca

SEQ ID NO: 51980 - RNA, 23 nt, Human
uggggaaggcgggggugggaguu

SEQ ID NO: 51981 - RNA, 23 nt, Human
uguugagggacccaguuauacca

SEQ ID NO: 51982 - RNA, 25 nt, Human
uuaaaaucagugaaauuuagcagaa

SEQ ID NO: 51983 - RNA, 20 nt, Human
uuacuggauguuaguugugc

SEQ ID NO: 51984 - RNA, 26 nt, Human
uugaaaauauggggaaggcgggggug

SEQ ID NO: 51985 - RNA, 24 nt, Human
uugagggacccaguuauaccauaa

SEQ ID NO: 51986 - RNA, 23 nt, Human
uuuaaaagugaagaauuauuacu

SEQ ID NO: 51987 - RNA, 24 nt, Human
acauuccuuucucuccgugccucu

SEQ ID NO: 51988 - RNA, 22 nt, Human
acccggggucgggggagacucg

SEQ ID NO: 51989 - RNA, 21 nt, Human
acccucacccugcuccuccca

SEQ ID NO: 51990 - RNA, 22 nt, Human
acccugcuccucccagcucagc

SEQ ID NO: 51991 - RNA, 19 nt, Human
aggaggagggaagccggga

SEQ ID NO: 51992 - RNA, 21 nt, Human
aggcugcaggggaggaggagg

SEQ ID NO: 51993 - RNA, 22 nt, Human
aggcugcaggggaggaggaggg

SEQ ID NO: 51994 - RNA, 20 nt, Human
agguggugaguggggcaggu

SEQ ID NO: 51995 - RNA, 19 nt, Human
auuugggaaggggaggggg

SEQ ID NO: 51996 - RNA, 21 nt, Human
caagcugggcuggggcccccg

SEQ ID NO: 51997 - RNA, 19 nt, Human
cacccugcuccucccagcu

SEQ ID NO: 51998 - RNA, 23 nt, Human
cagcucagcuaagcucgucccuc

SEQ ID NO: 51999 - RNA, 24 nt, Human
cccacccucacccugcuccuccca

SEQ ID NO: 52000 - RNA, 18 nt, Human
ccccccucccaaccuccc

SEQ ID NO: 52001 - RNA, 27 nt, Human
ccccccucccaaccucccugucccggc

SEQ ID NO: 52002 - RNA, 25 nt, Human
ccccucuguccccccucccaaccuc

SEQ ID NO: 52003 - RNA, 23 nt, Human
cccuugggaccuggucucccauc

SEQ ID NO: 52004 - RNA, 22 nt, Human
ccuccaggccuuagcuugccuc

SEQ ID NO: 52005 - RNA, 22 nt, Human
ccugcuccucccagcucagcua

SEQ ID NO: 52006 - RNA, 18 nt, Human
ccugggacccggggucgg

SEQ ID NO: 52007 - RNA, 22 nt, Human
cucuguccccccucccaaccuc

SEQ ID NO: 52008 - RNA, 20 nt, Human
cugacccuccaggccuuagc

SEQ ID NO: 52009 - RNA, 21 nt, Human
cuugcucccuugggaccuggu

SEQ ID NO: 52010 - RNA, 20 nt, Human
gaagccgggaaugggguagg

SEQ ID NO: 52011 - RNA, 18 nt, Human
gcccaggcagacugucgg

SEQ ID NO: 52012 - RNA, 20 nt, Human
gccccggcugugcgccccgg

SEQ ID NO: 52013 - RNA, 21 nt, Human
gcgaugggagaggaccaggug

SEQ ID NO: 52014 - RNA, 18 nt, Human
gcggggggcgcgggcugc

SEQ ID NO: 52015 - RNA, 20 nt, Human
gcugcaggggaggaggaggg

SEQ ID NO: 52016 - RNA, 21 nt, Human
gcugcgccccggcugugcgcc

SEQ ID NO: 52017 - RNA, 20 nt, Human
ggcagguggaggugggagca

SEQ ID NO: 52018 - RNA, 20 nt, Human
ggccggggcugcugcgcuuc

SEQ ID NO: 52019 - RNA, 18 nt, Human
gggaaugggguaggaaga

SEQ ID NO: 52020 - RNA, 22 nt, Human
gggagcauaccugggacccggg

SEQ ID NO: 52021 - RNA, 21 nt, Human
gggaggaggagggaagccggg

SEQ ID NO: 52022 - RNA, 18 nt, Human
gucccucgugcccccccu

SEQ ID NO: 52023 - RNA, 21 nt, Human
guggggcagguggagguggga

SEQ ID NO: 52024 - RNA, 19 nt, Human
uaccagggugagagggcug

SEQ ID NO: 52025 - RNA, 22 nt, Human
ucacccugcuccucccagcuca

SEQ ID NO: 52026 - RNA, 22 nt, Human
ucagggcagguauccaccuaac

SEQ ID NO: 52027 - RNA, 18 nt, Human
uccaggccuuagcuugcc

SEQ ID NO: 52028 - RNA, 18 nt, Human
ucccaaccucccuguccc

SEQ ID NO: 52029 - RNA, 25 nt, Human
ucccucgugcccccccuuuuguggg

SEQ ID NO: 52030 - RNA, 18 nt, Human
ucugucuccccucugucc

SEQ ID NO: 52031 - RNA, 19 nt, Human
ugaguggggcagguggagg

SEQ ID NO: 52032 - RNA, 19 nt, Human
ugcaggggaggaggaggga

SEQ ID NO: 52033 - RNA, 23 nt, Human
ugcgugcaugcaguaccagggug

SEQ ID NO: 52034 - RNA, 19 nt, Human
ugcugggggcgccgggcgg

SEQ ID NO: 52035 - RNA, 20 nt, Human
ugcugggggcgccgggcggc

SEQ ID NO: 52036 - RNA, 23 nt, Human
ugggaaggggagggggaauccug

SEQ ID NO: 52037 - RNA, 25 nt, Human
ugggaaggggagggggaauccuggg

SEQ ID NO: 52038 - RNA, 24 nt, Human
ugucagggcagguauccaccuaac

SEQ ID NO: 52039 - RNA, 25 nt, Human
ugucuccccucuguccccccuccca

SEQ ID NO: 52040 - RNA, 22 nt, Human
uguggcccaggcagacugucgg

SEQ ID NO: 52041 - RNA, 24 nt, Human
aaaaaaaagaauauaagagcagga

SEQ ID NO: 52042 - RNA, 24 nt, Human
aaaaugauucaauuauuuucccua

SEQ ID NO: 52043 - RNA, 20 nt, Human
aaauaaauacauagaacuca

SEQ ID NO: 52044 - RNA, 23 nt, Human
aaaugauucaauuauuuucccua

SEQ ID NO: 52045 - RNA, 25 nt, Human
aagcaucucccuaggcucauugguc

SEQ ID NO: 52046 - RNA, 19 nt, Human
acaguagggagagaacaag

SEQ ID NO: 52047 - RNA, 19 nt, Human
agauucaucagcaccacca

SEQ ID NO: 52048 - RNA, 20 nt, Human
agcuguuggggcuuugacgg

SEQ ID NO: 52049 - RNA, 22 nt, Human
aggaaaaaaaagaauauaagag

SEQ ID NO: 52050 - RNA, 25 nt, Human
aggaaaaaaaagaauauaagagcag

SEQ ID NO: 52051 - RNA, 19 nt, Human
aggaguggaaaggaagggg

SEQ ID NO: 52052 - RNA, 20 nt, Human
agggcuuuugagagaaaugg

SEQ ID NO: 52053 - RNA, 19 nt, Human
agguguccccagucaggcc

SEQ ID NO: 52054 - RNA, 22 nt, Human
auaagagcaggaucaaaaaaaa

SEQ ID NO: 52055 - RNA, 24 nt, Human
auaguaggaaugcauguuaagauu

SEQ ID NO: 52056 - RNA, 20 nt, Human
aucaaaaaaaagcaagagac

SEQ ID NO: 52057 - RNA, 28 nt, Human
auuauuuucccuauuuucaaccuucagg

SEQ ID NO: 52058 - RNA, 21 nt, Human
caaaaaaaagcaagagacuua

SEQ ID NO: 52059 - RNA, 22 nt, Human
caacccacaguuaggagcaaag

SEQ ID NO: 52060 - RNA, 18 nt, Human
caaugcagccccuccuaa

SEQ ID NO: 52061 - RNA, 21 nt, Human
cacaguagggagagaacaaga

SEQ ID NO: 52062 - RNA, 18 nt, Human
cacaguuaggagcaaagu

SEQ ID NO: 52063 - RNA, 19 nt, Human
cacuccuuuucccucuuca

SEQ ID NO: 52064 - RNA, 19 nt, Human
ccagaacacuugagggaag

SEQ ID NO: 52065 - RNA, 20 nt, Human
ccccugcaaugcagccccuc

SEQ ID NO: 52066 - RNA, 20 nt, Human
cccugugacccaguacucca

SEQ ID NO: 52067 - RNA, 23 nt, Human
ccugauuucucugaggaaaaaaa

SEQ ID NO: 52068 - RNA, 22 nt, Human
cggcuaauucaaaugauagguu

SEQ ID NO: 52069 - RNA, 21 nt, Human
cuaggcucauuggucugcgcu

SEQ ID NO: 52070 - RNA, 21 nt, Human
cucucccccugcaaugcagcc

SEQ ID NO: 52071 - RNA, 24 nt, Human
cugauuucucugaggaaaaaaaag

SEQ ID NO: 52072 - RNA, 20 nt, Human
gaaaaaaaagaauauaagag

SEQ ID NO: 52073 - RNA, 19 nt, Human
gaaagcaucucccuaggcu

SEQ ID NO: 52074 - RNA, 20 nt, Human
gacaagaugucgagucagaa

SEQ ID NO: 52075 - RNA, 29 nt, Human
gacaaugagggcaaggugaugggagagaa

SEQ ID NO: 52076 - RNA, 18 nt, Human
gaucucuuccagcacccc

SEQ ID NO: 52077 - RNA, 21 nt, Human
gcgccgggcuggagaaauaca

SEQ ID NO: 52078 - RNA, 23 nt, Human
gcuauuauucccgaucucuucca

SEQ ID NO: 52079 - RNA, 20 nt, Human
gcuugaaccauuuacuuugu

SEQ ID NO: 52080 - RNA, 23 nt, Human
ggaaaaaaaagaauauaagagca

SEQ ID NO: 52081 - RNA, 18 nt, Human
ggaaaggaguggaaagga

SEQ ID NO: 52082 - RNA, 21 nt, Human
ggacaagaugucgagucagaa

SEQ ID NO: 52083 - RNA, 22 nt, Human
ggauuccccgcccccuccugcc

SEQ ID NO: 52084 - RNA, 23 nt, Human
ggcaaggugaugggagagagaag

SEQ ID NO: 52085 - RNA, 21 nt, Human
ggggacaagaugucgagucag

SEQ ID NO: 52086 - RNA, 22 nt, Human
gucaaaaaucagucuuccauuu

SEQ ID NO: 52087 - RNA, 22 nt, Human
gucugcgcuauuauucccgauc

SEQ ID NO: 52088 - RNA, 20 nt, Human
gugaagaagggacacucuuu

SEQ ID NO: 52089 - RNA, 24 nt, Human
uaccucuaacuacccuccugauuu

SEQ ID NO: 52090 - RNA, 22 nt, Human
uagacagauagauaaauaaaua

SEQ ID NO: 52091 - RNA, 23 nt, Human
uagcuagaguuuucaacccacag

SEQ ID NO: 52092 - RNA, 24 nt, Human
ucacuccuuuucccucuucaguga

SEQ ID NO: 52093 - RNA, 20 nt, Human
ucccccugcaaugcagcccc

SEQ ID NO: 52094 - RNA, 24 nt, Human
uccccgcccccuccugccugacuc

SEQ ID NO: 52095 - RNA, 20 nt, Human
ucccugugacccaguacucc

SEQ ID NO: 52096 - RNA, 18 nt, Human
ucugaggaaaaaaaagaa

SEQ ID NO: 52097 - RNA, 20 nt, Human
ucugcgcuauuauucccgau

SEQ ID NO: 52098 - RNA, 22 nt, Human
ucuggaguuaauauuugggggg

SEQ ID NO: 52099 - RNA, 19 nt, Human
ucuggcagauucaucagca

SEQ ID NO: 52100 - RNA, 21 nt, Human
ugacucggcuaauucaaauga

SEQ ID NO: 52101 - RNA, 22 nt, Human
ugagagaaauggaguagacaga

SEQ ID NO: 52102 - RNA, 23 nt, Human
ugaggaaaaaaaagaauauaaga

SEQ ID NO: 52103 - RNA, 19 nt, Human
ugagggcuuuugagagaaa

SEQ ID NO: 52104 - RNA, 22 nt, Human
ugaguaggugugaagaagggac

SEQ ID NO: 52105 - RNA, 25 nt, Human
uggaaaggaaggggcuugagaggga

SEQ ID NO: 52106 - RNA, 18 nt, Human
uggagggagugccucggg

SEQ ID NO: 52107 - RNA, 23 nt, Human
uggaguagacagauagauaaaua

SEQ ID NO: 52108 - RNA, 26 nt, Human
uggcagauucaucagcaccaccaaca

SEQ ID NO: 52109 - RNA, 19 nt, Human
ugggagagagaagucuugg

SEQ ID NO: 52110 - RNA, 18 nt, Human
uuccccgcccccuccugc

SEQ ID NO: 52111 - RNA, 21 nt, Human
uuccccgcccccuccugccug

SEQ ID NO: 52112 - RNA, 20 nt, Human
uugucuucucacuccuuuuc

SEQ ID NO: 52113 - RNA, 18 nt, Human
uuuacugcccuggagcag

SEQ ID NO: 52114 - RNA, 19 nt, Human
uuuguguuuacugcccugg

SEQ ID NO: 52115 - RNA, 23 nt, Human
uuuuauaccucuaacuacccucc

SEQ ID NO: 52116 - RNA, 18 nt, Human
uuuuuuuuuuuuuuucug

SEQ ID NO: 52117 - RNA, 24 nt, Human
uuuuuuuuuuuuuuuuuuucuggg

SEQ ID NO: 52118 - RNA, 24 nt, Human
aagaggggggcaugcugaagagga

SEQ ID NO: 52119 - RNA, 21 nt, Human
aagccuaccaggguauagagg

SEQ ID NO: 52120 - RNA, 21 nt, Human
acucugaguguacacaugggg

SEQ ID NO: 52121 - RNA, 23 nt, Human
agccuggagcggcagcaggacuc

SEQ ID NO: 52122 - RNA, 19 nt, Human
aggagggguggggaugggg

SEQ ID NO: 52123 - RNA, 22 nt, Human
aggcccaggauacagaccagga

SEQ ID NO: 52124 - RNA, 18 nt, Human
aggcccggagcgccgagc

SEQ ID NO: 52125 - RNA, 20 nt, Human
aguguacacauggguguggg

SEQ ID NO: 52126 - RNA, 23 nt, Human
caaagcagcagcuuggccaaggc

SEQ ID NO: 52127 - RNA, 19 nt, Human
caagccccugaguccccug

SEQ ID NO: 52128 - RNA, 19 nt, Human
cacugcaaagcuaaggcaa

SEQ ID NO: 52129 - RNA, 20 nt, Human
cagaacagcucccagaccau

SEQ ID NO: 52130 - RNA, 21 nt, Human
cagcucccagaccaugguccc

SEQ ID NO: 52131 - RNA, 21 nt, Human
cagcuuggccaaggccucugg

SEQ ID NO: 52132 - RNA, 22 nt, Human
cauggguguggggugaagaggg

SEQ ID NO: 52133 - RNA, 20 nt, Human
ccaaaggagagcuacagcac

SEQ ID NO: 52134 - RNA, 26 nt, Human
ccaauccuacacuuggccccucucuu

SEQ ID NO: 52135 - RNA, 21 nt, Human
ccagaacagcucccagaccau

SEQ ID NO: 52136 - RNA, 22 nt, Human
ccaggagggguggggauggggg

SEQ ID NO: 52137 - RNA, 27 nt, Human
cccccugccccagaacagcucccagac

SEQ ID NO: 52138 - RNA, 18 nt, Human
ccgcgccgcgguuguccc

SEQ ID NO: 52139 - RNA, 19 nt, Human
ccuggagcggcagcaggac

SEQ ID NO: 52140 - RNA, 18 nt, Human
cuaaggcaaagaauagag

SEQ ID NO: 52141 - RNA, 21 nt, Human
cugaguguacacaugggugug

SEQ ID NO: 52142 - RNA, 22 nt, Human
cuuggccccucucuuaaguucu

SEQ ID NO: 52143 - RNA, 18 nt, Human
gaccaugguccccaaucc

SEQ ID NO: 52144 - RNA, 24 nt, Human
gagcggcagcaggacucugaguga

SEQ ID NO: 52145 - RNA, 18 nt, Human
gagcugcagggaagggag

SEQ ID NO: 52146 - RNA, 19 nt, Human
gcaaaacauucuuagggcc

SEQ ID NO: 52147 - RNA, 18 nt, Human
gcagcaggacucugagug

SEQ ID NO: 52148 - RNA, 22 nt, Human
gccacaacgccaggcccggagc

SEQ ID NO: 52149 - RNA, 18 nt, Human
gccuaccaggguauagag

SEQ ID NO: 52150 - RNA, 26 nt, Human
gcucccagaccaugguccccaauccu

SEQ ID NO: 52151 - RNA, 20 nt, Human
ggagcggcagcaggacucug

SEQ ID NO: 52152 - RNA, 19 nt, Human
ggagggguggggauggggg

SEQ ID NO: 52153 - RNA, 19 nt, Human
ggccaagccccugaguccc

SEQ ID NO: 52154 - RNA, 21 nt, Human
guccccaauccuacacuuggc

SEQ ID NO: 52155 - RNA, 22 nt, Human
guccugcucagguuccuucugc

SEQ ID NO: 52156 - RNA, 25 nt, Human
gugaagggcagcgacccccaugugc

SEQ ID NO: 52157 - RNA, 21 nt, Human
guguggggugaagaggggggc

SEQ ID NO: 52158 - RNA, 18 nt, Human
uaaggcaaagaauagagc

SEQ ID NO: 52159 - RNA, 18 nt, Human
uacacauggguguggggu

SEQ ID NO: 52160 - RNA, 20 nt, Human
uacuucagguggggguccug

SEQ ID NO: 52161 - RNA, 25 nt, Human
ucaaagcagcagcuuggccaaggcc

SEQ ID NO: 52162 - RNA, 23 nt, Human
uccaugaggcuccaggauggaug

SEQ ID NO: 52163 - RNA, 19 nt, Human
ucccagaccauggucccca

SEQ ID NO: 52164 - RNA, 21 nt, Human
ucccagaccaugguccccaau

SEQ ID NO: 52165 - RNA, 22 nt, Human
uccccaauccuacacuuggccc

SEQ ID NO: 52166 - RNA, 24 nt, Human
ucccccugccccagaacagcuccc

SEQ ID NO: 52167 - RNA, 22 nt, Human
ucucuuaaguucuacuucaggu

SEQ ID NO: 52168 - RNA, 18 nt, Human
ucugccaccuuauccccu

SEQ ID NO: 52169 - RNA, 18 nt, Human
ucuuaaguucuacuucag

SEQ ID NO: 52170 - RNA, 22 nt, Human
ugaggcccaggauacagaccag

SEQ ID NO: 52171 - RNA, 20 nt, Human
ugccccagaacagcucccag

SEQ ID NO: 52172 - RNA, 21 nt, Human
ugccccagaacagcucccaga

SEQ ID NO: 52173 - RNA, 23 nt, Human
ugccccagaacagcucccagacc

SEQ ID NO: 52174 - RNA, 23 nt, Human
ugcggcgccacaacgccaggccc

SEQ ID NO: 52175 - RNA, 18 nt, Human
uggaggggaggacaugaa

SEQ ID NO: 52176 - RNA, 19 nt, Human
uggcaagggcugcggcgcc

SEQ ID NO: 52177 - RNA, 21 nt, Human
ugggagaugccuccccucaau

SEQ ID NO: 52178 - RNA, 23 nt, Human
uggguguggggugaagagggggg

SEQ ID NO: 52179 - RNA, 18 nt, Human
uggugggagaugccuccc

SEQ ID NO: 52180 - RNA, 23 nt, Human
ugucuccaagaucccgcuuucaa

SEQ ID NO: 52181 - RNA, 23 nt, Human
uugcauauucccccugccccaga

SEQ ID NO: 52182 - RNA, 21 nt, Human
uuuuuuuuuuuuuuuuccaga

SEQ ID NO: 52183 - RNA, 22 nt, Human
uuuuuuuuuuuuuuuuuuccag

SEQ ID NO: 52184 - RNA, 18 nt, Human
aacaacacaugaaccaac

SEQ ID NO: 52185 - RNA, 20 nt, Human
aacaacacaugaaccaacga

SEQ ID NO: 52186 - RNA, 22 nt, Human
aauuaaaauaaauaaaauuuca

SEQ ID NO: 52187 - RNA, 25 nt, Human
agaguaaauuuauaggcagaaauaa

SEQ ID NO: 52188 - RNA, 18 nt, Human
aggcaggcgggggcgggu

SEQ ID NO: 52189 - RNA, 18 nt, Human
aggcggcgucggcggcgg

SEQ ID NO: 52190 - RNA, 19 nt, Human
aggcggcgucggcggcggc

SEQ ID NO: 52191 - RNA, 21 nt, Human
aggcggcgucggcggcggcgg

SEQ ID NO: 52192 - RNA, 19 nt, Human
aggcguaggccccgcaccg

SEQ ID NO: 52193 - RNA, 18 nt, Human
aggugguauguuauggca

SEQ ID NO: 52194 - RNA, 21 nt, Human
auugcaacuggaauuucaauc

SEQ ID NO: 52195 - RNA, 19 nt, Human
caccaggauccccgccccg

SEQ ID NO: 52196 - RNA, 19 nt, Human
cauuaguuaugaauugcaa

SEQ ID NO: 52197 - RNA, 20 nt, Human
cccggcuccgcuaggcccga

SEQ ID NO: 52198 - RNA, 26 nt, Human
cccgggcugggacagcugacugaggc

SEQ ID NO: 52199 - RNA, 20 nt, Human
cggcaguggcggcgccgggc

SEQ ID NO: 52200 - RNA, 23 nt, Human
cgugaugugacacaguguugugg

SEQ ID NO: 52201 - RNA, 18 nt, Human
cuccuggcugcggcagug

SEQ ID NO: 52202 - RNA, 19 nt, Human
cuccuggcugcggcagugg

SEQ ID NO: 52203 - RNA, 19 nt, Human
cugcaccuucaccggacgc

SEQ ID NO: 52204 - RNA, 24 nt, Human
cugcaccuucaccggacgcgcauu

SEQ ID NO: 52205 - RNA, 19 nt, Human
cuggcaccaggauccccgc

SEQ ID NO: 52206 - RNA, 18 nt, Human
gcagcgaugcgccucaca

SEQ ID NO: 52207 - RNA, 20 nt, Human
ggaaauauuaaagggccaac

SEQ ID NO: 52208 - RNA, 25 nt, Human
ggcggcgucggcggcggcggcagcg

SEQ ID NO: 52209 - RNA, 27 nt, Human
gucggcggcggcggcagcgaugcgccu

SEQ ID NO: 52210 - RNA, 23 nt, Human
uaggcagaaauaacuaagucuua

SEQ ID NO: 52211 - RNA, 21 nt, Human
ucaaaaacaacaacacaugaa

SEQ ID NO: 52212 - RNA, 19 nt, Human
ucccggcuccgcuaggccc

SEQ ID NO: 52213 - RNA, 18 nt, Human
uccgcuaggcccgaacca

SEQ ID NO: 52214 - RNA, 22 nt, Human
ucuccuggcugcggcaguggcg

SEQ ID NO: 52215 - RNA, 21 nt, Human
ugaaccaacgaggagaaaacu

SEQ ID NO: 52216 - RNA, 25 nt, Human
ugacugaggcaggcgggggcggguu

SEQ ID NO: 52217 - RNA, 20 nt, Human
ugaggcaggcgggggcgggu

SEQ ID NO: 52218 - RNA, 24 nt, Human
ugccaagggcgaggggcuccggga

SEQ ID NO: 52219 - RNA, 18 nt, Human
uggcugcggcaguggcgg

SEQ ID NO: 52220 - RNA, 24 nt, Human
ugguauguuauggcaguuuuccuu

SEQ ID NO: 52221 - RNA, 20 nt, Human
uucaaucuuaucauagcuca

SEQ ID NO: 52222 - RNA, 23 nt, Human
uuuggauuaucaaaaacaacaac

SEQ ID NO: 52223 - RNA, 19 nt, Human
caccagucucuuugggugg

SEQ ID NO: 52224 - RNA, 19 nt, Human
cacuggaacaggaggccag

SEQ ID NO: 52225 - RNA, 22 nt, Human
ccccuggaagcacuggaacagg

SEQ ID NO: 52226 - RNA, 22 nt, Human
gucagcuucugaacguggaucc

SEQ ID NO: 52227 - RNA, 19 nt, Human
uugccugcagagucagcuu

SEQ ID NO: 52228 - RNA, 24 nt, Human
acaucaauuucauccuuuaagacc

SEQ ID NO: 52229 - RNA, 18 nt, Human
aggaccagugagaauggc

SEQ ID NO: 52230 - RNA, 21 nt, Human
caagaaggcgaugaugagcac

SEQ ID NO: 52231 - RNA, 22 nt, Human
caagaaggcgaugaugagcacc

SEQ ID NO: 52232 - RNA, 20 nt, Human
caauguagacaacaggcacc

SEQ ID NO: 52233 - RNA, 18 nt, Human
cagcagaaaagagccauc

SEQ ID NO: 52234 - RNA, 19 nt, Human
cagcagaaaagagccauca

SEQ ID NO: 52235 - RNA, 19 nt, Human
cagcaggcccucuucugau

SEQ ID NO: 52236 - RNA, 22 nt, Human
cagugccuggaggaccagugag

SEQ ID NO: 52237 - RNA, 20 nt, Human
cauccuuuaagaccuuggca

SEQ ID NO: 52238 - RNA, 22 nt, Human
ccaaugccagcaggcccucuuc

SEQ ID NO: 52239 - RNA, 25 nt, Human
cccacaccaacgaacaucuccaaaa

SEQ ID NO: 52240 - RNA, 26 nt, Human
cccacaccaacgaacaucuccaaaaa

SEQ ID NO: 52241 - RNA, 21 nt, Human
cccuuugggauuuuugcuccu

SEQ ID NO: 52242 - RNA, 23 nt, Human
cgaacaucuccaaaaacucagau

SEQ ID NO: 52243 - RNA, 18 nt, Human
cuccuaggucuugauacu

SEQ ID NO: 52244 - RNA, 23 nt, Human
gaggaccagugagaauggcaccc

SEQ ID NO: 52245 - RNA, 19 nt, Human
gcccacaccaacgaacauc

SEQ ID NO: 52246 - RNA, 22 nt, Human
uagcagcgucuucccagugccu

SEQ ID NO: 52247 - RNA, 21 nt, Human
uagcuagcagcgucuucccag

SEQ ID NO: 52248 - RNA, 23 nt, Human
ucagcagaaaagagccaucacuu

SEQ ID NO: 52249 - RNA, 22 nt, Human
uccacuaacggugaugaagggg

SEQ ID NO: 52250 - RNA, 19 nt, Human
uccaugaucucuagcuugg

SEQ ID NO: 52251 - RNA, 25 nt, Human
uccaugaucucuagcuuggccuccu

SEQ ID NO: 52252 - RNA, 21 nt, Human
ucuccaaaaacucagauccac

SEQ ID NO: 52253 - RNA, 19 nt, Human
ugccagcaggcccucuucu

SEQ ID NO: 52254 - RNA, 28 nt, Human
uguagagcaagaaggcgaugaugagcac

SEQ ID NO: 52255 - RNA, 20 nt, Human
uuagcuagcagcgucuuccc

SEQ ID NO: 52256 - RNA, 18 nt, Human
uucaagaaauucacaaaa

SEQ ID NO: 52257 - RNA, 22 nt, Human
uugauaagcagcaauuauaucu

SEQ ID NO: 52258 - RNA, 22 nt, Human
uuucaagaaauucacaaauucc

SEQ ID NO: 52259 - RNA, 21 nt, Human
aacaacaauaguuauacuaag

SEQ ID NO: 52260 - RNA, 21 nt, Human
auacaacaacaauaguuauac

SEQ ID NO: 52261 - RNA, 19 nt, Human
caaaauguuguguuuauug

SEQ ID NO: 52262 - RNA, 23 nt, Human
caggaaaugcgauucaucaccac

SEQ ID NO: 52263 - RNA, 24 nt, Human
caggugacaguuacagaaaaaucc

SEQ ID NO: 52264 - RNA, 22 nt, Human
ccacauuuacaaaagaaagaaa

SEQ ID NO: 52265 - RNA, 25 nt, Human
ccccuggaucaauuugcuuuagucc

SEQ ID NO: 52266 - RNA, 20 nt, Human
cuaauaaauaucaauacaac

SEQ ID NO: 52267 - RNA, 22 nt, Human
cuacaguguuucccccuggauc

SEQ ID NO: 52268 - RNA, 23 nt, Human
gacucuuuuugugagcaccaaua

SEQ ID NO: 52269 - RNA, 23 nt, Human
uacuaauaaauaucaauacaaca

SEQ ID NO: 52270 - RNA, 24 nt, Human
uaggaagccuucccuuuggugcuu

SEQ ID NO: 52271 - RNA, 23 nt, Human
ucuuuacauaucuccagcagcug

SEQ ID NO: 52272 - RNA, 21 nt, Human
ugacaguuacagaaaaauccu

SEQ ID NO: 52273 - RNA, 19 nt, Human
uucaaaaauaaagaguagc

SEQ ID NO: 52274 - RNA, 27 nt, Human
acucguuuugucuucucuuccccugaa

SEQ ID NO: 52275 - RNA, 19 nt, Human
aucucacauaaaagucuuu

SEQ ID NO: 52276 - RNA, 18 nt, Human
cuucucuuccccugaagu

SEQ ID NO: 52277 - RNA, 24 nt, Human
cuuuaucauuucauuaauucacaa

SEQ ID NO: 52278 - RNA, 20 nt, Human
uggcagugguggaagcacaa

SEQ ID NO: 52279 - RNA, 24 nt, Human
uuaaaauuaaagagaaaaguucac

SEQ ID NO: 52280 - RNA, 23 nt, Human
aaacaaaccaagcuaaacaaccc

SEQ ID NO: 52281 - RNA, 20 nt, Human
aaaccaagcuaaacaaccca

SEQ ID NO: 52282 - RNA, 25 nt, Human
aaagugccaauucaacauaaauuua

SEQ ID NO: 52283 - RNA, 20 nt, Human
aaaucugccuuuugaaacca

SEQ ID NO: 52284 - RNA, 18 nt, Human
aacaaaccaagcuaaaca

SEQ ID NO: 52285 - RNA, 19 nt, Human
aacccauuucuugacuucu

SEQ ID NO: 52286 - RNA, 20 nt, Human
aagaggaaaaaagcaaagaa

SEQ ID NO: 52287 - RNA, 22 nt, Human
aagaggaaaaaagcaaagaaaa

SEQ ID NO: 52288 - RNA, 24 nt, Human
acaacccauuucuugacuucuaau

SEQ ID NO: 52289 - RNA, 18 nt, Human
acauauucaucuucagau

SEQ ID NO: 52290 - RNA, 21 nt, Human
agaggaaaaaagcaaagaaaa

SEQ ID NO: 52291 - RNA, 20 nt, Human
agcgaucgccgaacaauugu

SEQ ID NO: 52292 - RNA, 21 nt, Human
aucacugugacauaaugaaau

SEQ ID NO: 52293 - RNA, 18 nt, Human
aucauuuuuaaaagaaac

SEQ ID NO: 52294 - RNA, 23 nt, Human
caauaaucagugcuaagacaugc

SEQ ID NO: 52295 - RNA, 18 nt, Human
cagaauguugggagaaga

SEQ ID NO: 52296 - RNA, 18 nt, Human
cagcgcgagaaaaguccc

SEQ ID NO: 52297 - RNA, 19 nt, Human
caugcugagacucugcaug

SEQ ID NO: 52298 - RNA, 19 nt, Human
cauguucuaucaucuuccu

SEQ ID NO: 52299 - RNA, 22 nt, Human
cgagaaaagucccggcagccag

SEQ ID NO: 52300 - RNA, 18 nt, Human
cugaccaccgaagagacc

SEQ ID NO: 52301 - RNA, 24 nt, Human
cugaccaccgaagagaccagcgcu

SEQ ID NO: 52302 - RNA, 23 nt, Human
cuuccuuccucaaguuuuuaggg

SEQ ID NO: 52303 - RNA, 23 nt, Human
cuuucacacacugagagcuccau

SEQ ID NO: 52304 - RNA, 23 nt, Human
gaaauaacagaauguugggagaa

SEQ ID NO: 52305 - RNA, 23 nt, Human
gagaccagcgcgagaaaaguccc

SEQ ID NO: 52306 - RNA, 24 nt, Human
gaggaaaaaagcaaagaaaaucaa

SEQ ID NO: 52307 - RNA, 19 nt, Human
gaggaacacuagaugauga

SEQ ID NO: 52308 - RNA, 22 nt, Human
ggaaaaaagcaaagaaaaucaa

SEQ ID NO: 52309 - RNA, 18 nt, Human
uaaaaauagauaauacaa

SEQ ID NO: 52310 - RNA, 21 nt, Human
uaaaaccaauaaucagugcua

SEQ ID NO: 52311 - RNA, 21 nt, Human
uaaaucucaaaguagcaauuu

SEQ ID NO: 52312 - RNA, 22 nt, Human
uaagaggaaaaaagcaaagaaa

SEQ ID NO: 52313 - RNA, 22 nt, Human
uaauauaucacuguggaaauaa

SEQ ID NO: 52314 - RNA, 20 nt, Human
uauacaaaauacagccacau

SEQ ID NO: 52315 - RNA, 18 nt, Human
uaugaugauuccuuuugg

SEQ ID NO: 52316 - RNA, 24 nt, Human
uauuuuacaaaaagacuuuagaac

SEQ ID NO: 52317 - RNA, 21 nt, Human
uauuuucauuaaauuguuuca

SEQ ID NO: 52318 - RNA, 18 nt, Human
ucaaguuccccaaaucau

SEQ ID NO: 52319 - RNA, 23 nt, Human
ucgccgaacaauuguuuuuauua

SEQ ID NO: 52320 - RNA, 18 nt, Human
ugaaggaaaaaugcugcu

SEQ ID NO: 52321 - RNA, 18 nt, Human
ugggagaagauaaaucug

SEQ ID NO: 52322 - RNA, 19 nt, Human
ugggagaagauaaaucugc

SEQ ID NO: 52323 - RNA, 20 nt, Human
uguacaaaacaaagaguauc

SEQ ID NO: 52324 - RNA, 23 nt, Human
uguucuaucaucuuccuuccuca

SEQ ID NO: 52325 - RNA, 23 nt, Human
uucaaaaguaucagaaauaacag

SEQ ID NO: 52326 - RNA, 22 nt, Human
uucuguagaguugucauacaga

SEQ ID NO: 52327 - RNA, 24 nt, Human
uuuagaacuuucacacacugagag

SEQ ID NO: 52328 - RNA, 26 nt, Human
augacaaaaagcgacaagagggaccc

SEQ ID NO: 52329 - RNA, 18 nt, Human
cagccuggcaggcuccug

SEQ ID NO: 52330 - RNA, 22 nt, Human
cagccuggcaggcuccugggcu

SEQ ID NO: 52331 - RNA, 20 nt, Human
cagcguccugggugcguccu

SEQ ID NO: 52332 - RNA, 23 nt, Human
caggcuccugggcucagcguccu

SEQ ID NO: 52333 - RNA, 20 nt, Human
cagucccacacaccuggccg

SEQ ID NO: 52334 - RNA, 18 nt, Human
cgacaagaagaggacacc

SEQ ID NO: 52335 - RNA, 23 nt, Human
cguccugggugcguccuggaagc

SEQ ID NO: 52336 - RNA, 23 nt, Human
gacaagaagaggacaccgucugg

SEQ ID NO: 52337 - RNA, 21 nt, Human
ggcuccugggcucagcguccu

SEQ ID NO: 52338 - RNA, 18 nt, Human
guccugggugcguccugg

SEQ ID NO: 52339 - RNA, 20 nt, Human
uaaugggauuccuuauauga

SEQ ID NO: 52340 - RNA, 22 nt, Human
uaugacaaaaagcgacaagaag

SEQ ID NO: 52341 - RNA, 24 nt, Human
uaugacaaaaagcgacaagaagag

SEQ ID NO: 52342 - RNA, 24 nt, Human
ugacaaaaagcgacaagaagagga

SEQ ID NO: 52343 - RNA, 21 nt, Human
uggcaggcuccugggcucagc

SEQ ID NO: 52344 - RNA, 21 nt, Human
ugggugcguccuggaagcucu

SEQ ID NO: 52345 - RNA, 21 nt, Human
aaagggagcugauggauggga

SEQ ID NO: 52346 - RNA, 23 nt, Human
agaaaagggagcugauggauggg

SEQ ID NO: 52347 - RNA, 21 nt, Human
agaguuggucugaggccagaa

SEQ ID NO: 52348 - RNA, 21 nt, Human
aggccagaacaguucaaggga

SEQ ID NO: 52349 - RNA, 20 nt, Human
agggagcugauggaugggau

SEQ ID NO: 52350 - RNA, 26 nt, Human
agggagcugauggaugggaucugucu

SEQ ID NO: 52351 - RNA, 24 nt, Human
aggugggguuauacaggagagaga

SEQ ID NO: 52352 - RNA, 19 nt, Human
caagggaaaaagaaaaggg

SEQ ID NO: 52353 - RNA, 20 nt, Human
gggagcugauggaugggauc

SEQ ID NO: 52354 - RNA, 20 nt, Human
ugguuguagaagaaagcuug

SEQ ID NO: 52355 - RNA, 19 nt, Human
ugucagguguuuaaucauc

SEQ ID NO: 52356 - RNA, 20 nt, Human
uucaagggaaaaagaaaagg

SEQ ID NO: 52357 - RNA, 27 nt, Human
uucaagggaaaaagaaaagggagcuuc

SEQ ID NO: 52358 - RNA, 19 nt, Human
uuuugagaugugucaggug

SEQ ID NO: 52359 - RNA, 18 nt, Human
uuuuuuuuuuuuuuuuug

SEQ ID NO: 52360 - RNA, 22 nt, Human
aaaaaauuaaaaaccuagacca

SEQ ID NO: 52361 - RNA, 21 nt, Human
aaacagaaggggaagggcugg

SEQ ID NO: 52362 - RNA, 25 nt, Human
aaacuacauaaaccuuugauaaacu

SEQ ID NO: 52363 - RNA, 23 nt, Human
aaacuuuaaaauauaccacgcag

SEQ ID NO: 52364 - RNA, 21 nt, Human
aaaugcuguauuacagauucu

SEQ ID NO: 52365 - RNA, 22 nt, Human
aacaaggaaggaacugaagaga

SEQ ID NO: 52366 - RNA, 20 nt, Human
aacauagugagacccaguuu

SEQ ID NO: 52367 - RNA, 21 nt, Human
aacaucauagagcugucugcu

SEQ ID NO: 52368 - RNA, 22 nt, Human
aaccugggcaacauagugagac

SEQ ID NO: 52369 - RNA, 22 nt, Human
aaccuguaaacuaacuaaaaaa

SEQ ID NO: 52370 - RNA, 18 nt, Human
aacuacauaaaccuuuga

SEQ ID NO: 52371 - RNA, 22 nt, Human
aagcaauacacuuaggaaagcc

SEQ ID NO: 52372 - RNA, 19 nt, Human
aaggaaggaacugaagaga

SEQ ID NO: 52373 - RNA, 19 nt, Human
aaguaugaagcauucuacc

SEQ ID NO: 52374 - RNA, 19 nt, Human
aauauuauauagcaaugaa

SEQ ID NO: 52375 - RNA, 24 nt, Human
aauuucacauuuuagcaaguauag

SEQ ID NO: 52376 - RNA, 19 nt, Human
acaaauagaagaugacaug

SEQ ID NO: 52377 - RNA, 21 nt, Human
acaauauccuaaaaauuuacc

SEQ ID NO: 52378 - RNA, 21 nt, Human
acauuaaaaaaaaucaaugcu

SEQ ID NO: 52379 - RNA, 20 nt, Human
accacagcauacuaaacugg

SEQ ID NO: 52380 - RNA, 22 nt, Human
accacagcauacuaaacuggua

SEQ ID NO: 52381 - RNA, 23 nt, Human
accacagcauacuaaacugguaa

SEQ ID NO: 52382 - RNA, 19 nt, Human
acuagacacaguaguucaa

SEQ ID NO: 52383 - RNA, 23 nt, Human
acucaaguaugaagcauucuacc

SEQ ID NO: 52384 - RNA, 23 nt, Human
acugaagauuauauauaccacaa

SEQ ID NO: 52385 - RNA, 21 nt, Human
acuuccagugauuuuauugaa

SEQ ID NO: 52386 - RNA, 22 nt, Human
acuuucagaggccaaagaggga

SEQ ID NO: 52387 - RNA, 22 nt, Human
acuuuguauuccaauuuagcug

SEQ ID NO: 52388 - RNA, 22 nt, Human
agaaaacaguaaaaaacaguaa

SEQ ID NO: 52389 - RNA, 19 nt, Human
agaaaagcaauacacuuag

SEQ ID NO: 52390 - RNA, 18 nt, Human
agaauucuugccacuacu

SEQ ID NO: 52391 - RNA, 22 nt, Human
agagggaggguugcuugagucc

SEQ ID NO: 52392 - RNA, 23 nt, Human
agccucgcacagaagccgcagcc

SEQ ID NO: 52393 - RNA, 18 nt, Human
aggaaggaacugaagaga

SEQ ID NO: 52394 - RNA, 23 nt, Human
aggggaagggcuggcugcccagc

SEQ ID NO: 52395 - RNA, 24 nt, Human
aggguugcuugaguccaggaguuc

SEQ ID NO: 52396 - RNA, 23 nt, Human
auagcaaugaaagaauucuugcc

SEQ ID NO: 52397 - RNA, 18 nt, Human
aucaauaugaccagucuc

SEQ ID NO: 52398 - RNA, 20 nt, Human
augcuuguaaucccaguacu

SEQ ID NO: 52399 - RNA, 22 nt, Human
augcuuugcauguuuccucaca

SEQ ID NO: 52400 - RNA, 23 nt, Human
caauaccuuauccagcaucacuc

SEQ ID NO: 52401 - RNA, 18 nt, Human
caauaucaaccugggcaa

SEQ ID NO: 52402 - RNA, 22 nt, Human
caaugaaagagaaugaaucuua

SEQ ID NO: 52403 - RNA, 24 nt, Human
cacaacgaauaagaccgaaauaaa

SEQ ID NO: 52404 - RNA, 22 nt, Human
cacaauauccuaaaaauuuacc

SEQ ID NO: 52405 - RNA, 19 nt, Human
cacaauucacauguuacaa

SEQ ID NO: 52406 - RNA, 18 nt, Human
cacagucgaaugaguuac

SEQ ID NO: 52407 - RNA, 19 nt, Human
cacagucgaaugaguuacc

SEQ ID NO: 52408 - RNA, 19 nt, Human
cacagucgaaugaguuacc

SEQ ID NO: 52409 - RNA, 19 nt, Human
cacagucgaaugaguuacc

SEQ ID NO: 52410 - RNA, 20 nt, Human
cacccgguacccaaccuggc

SEQ ID NO: 52411 - RNA, 20 nt, Human
cacgagcuuucaagcauggg

SEQ ID NO: 52412 - RNA, 23 nt, Human
cacuucugcuuacaagagauuag

SEQ ID NO: 52413 - RNA, 23 nt, Human
cagaaguaaaauucgaaucuguu

SEQ ID NO: 52414 - RNA, 18 nt, Human
cagcccaaggagggccgg

SEQ ID NO: 52415 - RNA, 18 nt, Human
cagcgccgaggcagcugg

SEQ ID NO: 52416 - RNA, 19 nt, Human
cauaagaauuaaaagaacu

SEQ ID NO: 52417 - RNA, 19 nt, Human
cauaagaauuaaaagaacu

SEQ ID NO: 52418 - RNA, 19 nt, Human
cauaagaauuaaaagaacu

SEQ ID NO: 52419 - RNA, 19 nt, Human
cauaagaauuaaaagaacu

SEQ ID NO: 52420 - RNA, 24 nt, Human
cauagugagacccaguuucuuguu

SEQ ID NO: 52421 - RNA, 24 nt, Human
cauucccagccccaagccacaggg

SEQ ID NO: 52422 - RNA, 21 nt, Human
ccaaauucgggucgccagcca

SEQ ID NO: 52423 - RNA, 19 nt, Human
ccacagcguauucaguaug

SEQ ID NO: 52424 - RNA, 21 nt, Human
ccacuacuuucuuccaacuga

SEQ ID NO: 52425 - RNA, 19 nt, Human
cccagccccaagccacagg

SEQ ID NO: 52426 - RNA, 25 nt, Human
ccccaaauggcuacauuaaaaaaau

SEQ ID NO: 52427 - RNA, 19 nt, Human
ccccaagccacagggcucu

SEQ ID NO: 52428 - RNA, 20 nt, Human
ccccaagccacagggcucug

SEQ ID NO: 52429 - RNA, 22 nt, Human
ccccuggaaacguacauuccua

SEQ ID NO: 52430 - RNA, 23 nt, Human
ccgugcgcgcacucgccccaggu

SEQ ID NO: 52431 - RNA, 18 nt, Human
cgaccggggcagcgccga

SEQ ID NO: 52432 - RNA, 25 nt, Human
cggggagaaacagaaggggaagggc

SEQ ID NO: 52433 - RNA, 20 nt, Human
cuaaaaaaaugcuacuuuga

SEQ ID NO: 52434 - RNA, 19 nt, Human
cuacggucggggggagggg

SEQ ID NO: 52435 - RNA, 22 nt, Human
cuacuaugaucuagcaauagau

SEQ ID NO: 52436 - RNA, 18 nt, Human
cuacugaauucauaucca

SEQ ID NO: 52437 - RNA, 21 nt, Human
cuacugaauucauauccauau

SEQ ID NO: 52438 - RNA, 22 nt, Human
cuagcagagcaaugaaagagaa

SEQ ID NO: 52439 - RNA, 23 nt, Human
cuagugcaacacaauauccuaaa

SEQ ID NO: 52440 - RNA, 22 nt, Human
cuauuucuaaagcaaggucagc

SEQ ID NO: 52441 - RNA, 22 nt, Human
cucaaagauaacaggugggcaa

SEQ ID NO: 52442 - RNA, 22 nt, Human
cuccacagucgaaugaguuacc

SEQ ID NO: 52443 - RNA, 22 nt, Human
cuccacagucgaaugaguuacc

SEQ ID NO: 52444 - RNA, 22 nt, Human
cuccacagucgaaugaguuacc

SEQ ID NO: 52445 - RNA, 22 nt, Human
cuccacagucgaaugaguuacc

SEQ ID NO: 52446 - RNA, 22 nt, Human
cugaagauuauauauaccacaa

SEQ ID NO: 52447 - RNA, 22 nt, Human
cugaauauuauauagcaaugaa

SEQ ID NO: 52448 - RNA, 28 nt, Human
cuggugcuacggucggggggaggggacg

SEQ ID NO: 52449 - RNA, 19 nt, Human
cuuacuagagauaacccca

SEQ ID NO: 52450 - RNA, 24 nt, Human
cuuucauuaaucuuccucauuaga

SEQ ID NO: 52451 - RNA, 20 nt, Human
gaaaaaccaaggcauagucc

SEQ ID NO: 52452 - RNA, 24 nt, Human
gaaauaaaaaugcuguauuacaga

SEQ ID NO: 52453 - RNA, 18 nt, Human
gaagcauucuaccgaaac

SEQ ID NO: 52454 - RNA, 21 nt, Human
gaaggggaagggcuggcugcc

SEQ ID NO: 52455 - RNA, 20 nt, Human
gagaaacagaaggggaaggg

SEQ ID NO: 52456 - RNA, 20 nt, Human
gagaagcaggcagagucuca

SEQ ID NO: 52457 - RNA, 23 nt, Human
gcaaucuccccauucccaaauuc

SEQ ID NO: 52458 - RNA, 20 nt, Human
gcaggacccgcgacucuggu

SEQ ID NO: 52459 - RNA, 22 nt, Human
gccgggcgccgugaagggcaaa

SEQ ID NO: 52460 - RNA, 21 nt, Human
gccgugcgcgcacucgccccu

SEQ ID NO: 52461 - RNA, 22 nt, Human
gccucuggaauagcugccguag

SEQ ID NO: 52462 - RNA, 19 nt, Human
gcuuguaaucccaguacuu

SEQ ID NO: 52463 - RNA, 20 nt, Human
ggaagggcuggcugcccagc

SEQ ID NO: 52464 - RNA, 19 nt, Human
ggagaugagaacagaggga

SEQ ID NO: 52465 - RNA, 24 nt, Human
ggcuuaugcuuguaaucccaguac

SEQ ID NO: 52466 - RNA, 20 nt, Human
gggagaaacagaaggggaag

SEQ ID NO: 52467 - RNA, 22 nt, Human
gggaguuauacgugcggcuucu

SEQ ID NO: 52468 - RNA, 27 nt, Human
ggggagaaacagaaggggaagggcugg

SEQ ID NO: 52469 - RNA, 24 nt, Human
ggggcagcgccgaggcagcugggu

SEQ ID NO: 52470 - RNA, 23 nt, Human
ggguugcuugaguccaggaguuc

SEQ ID NO: 52471 - RNA, 23 nt, Human
gguggcuuaugcuuguaauccca

SEQ ID NO: 52472 - RNA, 24 nt, Human
gguggcuuaugcuuguaaucccag

SEQ ID NO: 52473 - RNA, 24 nt, Human
gguugcuugaguccaggaguucaa

SEQ ID NO: 52474 - RNA, 21 nt, Human
gucucuuucuccuuccccugg

SEQ ID NO: 52475 - RNA, 21 nt, Human
uaacaggugggcaaucucccc

SEQ ID NO: 52476 - RNA, 20 nt, Human
uaagaaaacaguaaaaaaca

SEQ ID NO: 52477 - RNA, 19 nt, Human
uaaguaaaucauauaaaau

SEQ ID NO: 52478 - RNA, 20 nt, Human
uaaguaaaucauauaaaaua

SEQ ID NO: 52479 - RNA, 23 nt, Human
uacaauuaaaaaauuaaaaaccu

SEQ ID NO: 52480 - RNA, 24 nt, Human
uacauaugaugaccuugcauccua

SEQ ID NO: 52481 - RNA, 21 nt, Human
uacauuaaaaaaauugugaac

SEQ ID NO: 52482 - RNA, 21 nt, Human
uaccacauugaaaaacagaug

SEQ ID NO: 52483 - RNA, 23 nt, Human
uaccauagaggaaauaauguuua

SEQ ID NO: 52484 - RNA, 23 nt, Human
uacuagagauaaccccaaauggc

SEQ ID NO: 52485 - RNA, 25 nt, Human
uagcagagcaaugaaagagaaugaa

SEQ ID NO: 52486 - RNA, 18 nt, Human
uaggaaagccugaaguca

SEQ ID NO: 52487 - RNA, 18 nt, Human
uaggaaagccugaaguca

SEQ ID NO: 52488 - RNA, 18 nt, Human
uagugaaaaaccaaggca

SEQ ID NO: 52489 - RNA, 21 nt, Human
uauauagcaaugaaagaauuc

SEQ ID NO: 52490 - RNA, 20 nt, Human
uaugcuuguaaucccaguac

SEQ ID NO: 52491 - RNA, 25 nt, Human
uauucacauagcaacuugggaugug

SEQ ID NO: 52492 - RNA, 21 nt, Human
ucaagucugaagagggucuuu

SEQ ID NO: 52493 - RNA, 26 nt, Human
ucacauagcaacuugggaugugcaaa

SEQ ID NO: 52494 - RNA, 20 nt, Human
ucagaggccaaagagggagg

SEQ ID NO: 52495 - RNA, 20 nt, Human
ucagaggccaaagagggagg

SEQ ID NO: 52496 - RNA, 23 nt, Human
uccaaacuauggauuucuaggca

SEQ ID NO: 52497 - RNA, 23 nt, Human
ucccagccccaagccacagggcu

SEQ ID NO: 52498 - RNA, 24 nt, Human
ucccagccccaagccacagggcuc

SEQ ID NO: 52499 - RNA, 19 nt, Human
uccuaccucccugaauauc

SEQ ID NO: 52500 - RNA, 19 nt, Human
ucgcacagaagccgcagcc

SEQ ID NO: 52501 - RNA, 21 nt, Human
ucucuuucuccuuccccugga

SEQ ID NO: 52502 - RNA, 19 nt, Human
ugaaauacaauaccuuauc

SEQ ID NO: 52503 - RNA, 19 nt, Human
ugaagagggucuuuuccag

SEQ ID NO: 52504 - RNA, 18 nt, Human
ugaaugcauaaugauuua

SEQ ID NO: 52505 - RNA, 20 nt, Human
ugacuuuaagauuuuuaagg

SEQ ID NO: 52506 - RNA, 21 nt, Human
ugagaagcaggcagagucuca

SEQ ID NO: 52507 - RNA, 22 nt, Human
ugagaagcaggcagagucucaa

SEQ ID NO: 52508 - RNA, 20 nt, Human
ugagcacaacgaauaagacc

SEQ ID NO: 52509 - RNA, 20 nt, Human
ugcauguuuccucacauaag

SEQ ID NO: 52510 - RNA, 23 nt, Human
ugcccagaaguuuuaguuugcug

SEQ ID NO: 52511 - RNA, 22 nt, Human
uggcuuaugcuuguaaucccag

SEQ ID NO: 52512 - RNA, 24 nt, Human
uggcuuaugcuuguaaucccagua

SEQ ID NO: 52513 - RNA, 23 nt, Human
ugugacuuuaagauuuuuaaggc

SEQ ID NO: 52514 - RNA, 21 nt, Human
ugugcauauagcauuuacaua

SEQ ID NO: 52515 - RNA, 23 nt, Human
ugugcauauagcauuuacauaug

SEQ ID NO: 52516 - RNA, 24 nt, Human
ugugcauauagcauuuacauaugg

SEQ ID NO: 52517 - RNA, 18 nt, Human
uguuuuggcacuacuuug

SEQ ID NO: 52518 - RNA, 19 nt, Human
uguuuuuaggaaauaaauu

SEQ ID NO: 52519 - RNA, 25 nt, Human
uuaaacuuuaaaauauaccacgcag

SEQ ID NO: 52520 - RNA, 19 nt, Human
uuaccacauugaaaaacag

SEQ ID NO: 52521 - RNA, 20 nt, Human
uuaguuuuggaaaccagaaa

SEQ ID NO: 52522 - RNA, 23 nt, Human
uuauuuuccaaacuauggauuuc

SEQ ID NO: 52523 - RNA, 24 nt, Human
uucauuucuguacaaauagaagau

SEQ ID NO: 52524 - RNA, 19 nt, Human
uuccagugauuuuauugaa

SEQ ID NO: 52525 - RNA, 22 nt, Human
uugaagaagagcaggcagauaa

SEQ ID NO: 52526 - RNA, 24 nt, Human
uuggaaaccagaaaacuaagcuag

SEQ ID NO: 52527 - RNA, 18 nt, Human
uuuaagauaucuacugaa

SEQ ID NO: 52528 - RNA, 21 nt, Human
uuuaagauaucuacugaauuc

SEQ ID NO: 52529 - RNA, 26 nt, Human
uuuauuuuccaaacuauggauuucua

SEQ ID NO: 52530 - RNA, 19 nt, Human
uuuccaguuucuccauuuc

SEQ ID NO: 52531 - RNA, 23 nt, Human
aagaaaaacagaucuagagacaa

SEQ ID NO: 52532 - RNA, 23 nt, Human
aagcccccuucaccuacacgcag

SEQ ID NO: 52533 - RNA, 18 nt, Human
ccacauaaaacuguacag

SEQ ID NO: 52534 - RNA, 19 nt, Human
cccuucaccuacacgcagc

SEQ ID NO: 52535 - RNA, 18 nt, Human
ccugcaugaauuguuccc

SEQ ID NO: 52536 - RNA, 20 nt, Human
ggaagcccccuucaccuaca

SEQ ID NO: 52537 - RNA, 21 nt, Human
uaagaaaaacagaucuagaga

SEQ ID NO: 52538 - RNA, 19 nt, Human
uccccacauaaaacuguac

SEQ ID NO: 52539 - RNA, 22 nt, Human
ucuagagacaauccaguaggcu

SEQ ID NO: 52540 - RNA, 27 nt, Human
ucucuuaguacugccauuauuauugac

SEQ ID NO: 52541 - RNA, 18 nt, Human
ucuuuaacaaguguaagg

SEQ ID NO: 52542 - RNA, 22 nt, Human
uguaaaaaguccaguuucucag

SEQ ID NO: 52543 - RNA, 19 nt, Human
uguacaguuagugacugaa

SEQ ID NO: 52544 - RNA, 21 nt, Human
uuagugacugaauuguauacu

SEQ ID NO: 52545 - RNA, 19 nt, Human
uuaguguuuaagaaaaaca

SEQ ID NO: 52546 - RNA, 18 nt, Human
uuuuuuuuuuuuuuuuug

SEQ ID NO: 52547 - RNA, 20 nt, Human
uuuuuuuuuuuuuuuuuggu

SEQ ID NO: 52548 - RNA, 20 nt, Human
aaaaaacagcaacggaguac

SEQ ID NO: 52549 - RNA, 27 nt, Human
aaaaacagcaacggaguaccgguaccc

SEQ ID NO: 52550 - RNA, 18 nt, Human
accccacagagucuucca

SEQ ID NO: 52551 - RNA, 20 nt, Human
acccuggagcccagcugcac

SEQ ID NO: 52552 - RNA, 27 nt, Human
acuuccaagaguguguuuauaaaaaaa

SEQ ID NO: 52553 - RNA, 21 nt, Human
agccgggaggaguccccucug

SEQ ID NO: 52554 - RNA, 19 nt, Human
aggcggcugagcagagggc

SEQ ID NO: 52555 - RNA, 18 nt, Human
cagcaggagcagcaggcc

SEQ ID NO: 52556 - RNA, 21 nt, Human
cagcgggccacagccgcaagc

SEQ ID NO: 52557 - RNA, 19 nt, Human
cagcugagcccccugcagg

SEQ ID NO: 52558 - RNA, 20 nt, Human
caggccagcaggagcagcag

SEQ ID NO: 52559 - RNA, 21 nt, Human
caggggccugugucugagacc

SEQ ID NO: 52560 - RNA, 21 nt, Human
caggggccugugucugaggcc

SEQ ID NO: 52561 - RNA, 21 nt, Human
cagggugcgugagucugggac

SEQ ID NO: 52562 - RNA, 18 nt, Human
ccaccugcccuccccagg

SEQ ID NO: 52563 - RNA, 20 nt, Human
ccaggccagcaggagcagca

SEQ ID NO: 52564 - RNA, 20 nt, Human
ccaggcggcugagcagaggg

SEQ ID NO: 52565 - RNA, 22 nt, Human
ccagugacagaaggggcuuccu

SEQ ID NO: 52566 - RNA, 21 nt, Human
cccaccagcgggccacagccg

SEQ ID NO: 52567 - RNA, 23 nt, Human
cccaccagcgggccacagccgca

SEQ ID NO: 52568 - RNA, 19 nt, Human
cccaggucaugcccugccu

SEQ ID NO: 52569 - RNA, 19 nt, Human
ccccacagagucuuccagg

SEQ ID NO: 52570 - RNA, 18 nt, Human
cccggcccggcgcccgac

SEQ ID NO: 52571 - RNA, 18 nt, Human
cccuccaggccccuccuc

SEQ ID NO: 52572 - RNA, 24 nt, Human
cccucugcccauccuccagccauc

SEQ ID NO: 52573 - RNA, 20 nt, Human
cccuggagcccagcugcacc

SEQ ID NO: 52574 - RNA, 21 nt, Human
cccuggagcccagcugcaccc

SEQ ID NO: 52575 - RNA, 22 nt, Human
ccggcgcccgacggcgccgcca

SEQ ID NO: 52576 - RNA, 18 nt, Human
cggcccggcgcccgacgg

SEQ ID NO: 52577 - RNA, 18 nt, Human
cggcuuccaccugcccuc

SEQ ID NO: 52578 - RNA, 19 nt, Human
cgggaggaguccccucugc

SEQ ID NO: 52579 - RNA, 21 nt, Human
cggggaggguccagcugagcc

SEQ ID NO: 52580 - RNA, 20 nt, Human
cuccugggccaucgggggcc

SEQ ID NO: 52581 - RNA, 23 nt, Human
cugcaggggacaccaggggccug

SEQ ID NO: 52582 - RNA, 19 nt, Human
cugcccuccccaggucaug

SEQ ID NO: 52583 - RNA, 19 nt, Human
cugcuccugggccaucggg

SEQ ID NO: 52584 - RNA, 23 nt, Human
cuuccaggccagcaggagcagca

SEQ ID NO: 52585 - RNA, 20 nt, Human
cuugugggcuggacccugga

SEQ ID NO: 52586 - RNA, 20 nt, Human
gaugcagcuugugggcugga

SEQ ID NO: 52587 - RNA, 21 nt, Human
gccagugacagaaggggcuuc

SEQ ID NO: 52588 - RNA, 27 nt, Human
gcccuccccaggucaugcccugccggu

SEQ ID NO: 52589 - RNA, 22 nt, Human
gcccuggaggccccuccucucc

SEQ ID NO: 52590 - RNA, 23 nt, Human
gcccuggaggccccuccucuccc

SEQ ID NO: 52591 - RNA, 24 nt, Human
gcuccugggccaucgggggcccca

SEQ ID NO: 52592 - RNA, 20 nt, Human
ggaguacagugcugacccca

SEQ ID NO: 52593 - RNA, 21 nt, Human
ggaguccccucugcccauccu

SEQ ID NO: 52594 - RNA, 21 nt, Human
ggccagcaggagcagcaggcc

SEQ ID NO: 52595 - RNA, 20 nt, Human
ggcugagugagagcuggggg

SEQ ID NO: 52596 - RNA, 23 nt, Human
ggcugagugagagcugggggagc

SEQ ID NO: 52597 - RNA, 18 nt, Human
gggaggaguccccucugc

SEQ ID NO: 52598 - RNA, 20 nt, Human
ggggaggguccagcugagcc

SEQ ID NO: 52599 - RNA, 18 nt, Human
gugggcuggacccuggag

SEQ ID NO: 52600 - RNA, 21 nt, Human
uaaaaaaacagcaacggagua

SEQ ID NO: 52601 - RNA, 21 nt, Human
uacagugcugaccccacagag

SEQ ID NO: 52602 - RNA, 19 nt, Human
uccaagaguguguuuauaa

SEQ ID NO: 52603 - RNA, 20 nt, Human
ucccagagacccugaugcag

SEQ ID NO: 52604 - RNA, 20 nt, Human
uccccaggucaugcccugcc

SEQ ID NO: 52605 - RNA, 23 nt, Human
uccccaggucaugcccugccgug

SEQ ID NO: 52606 - RNA, 19 nt, Human
ucccggcucccuguggccc

SEQ ID NO: 52607 - RNA, 21 nt, Human
uccugggccaucgggggccuu

SEQ ID NO: 52608 - RNA, 21 nt, Human
ucugaggccagugacagaagg

SEQ ID NO: 52609 - RNA, 20 nt, Human
ucugcuccugggccaucggg

SEQ ID NO: 52610 - RNA, 20 nt, Human
ugagagcugggggagccgga

SEQ ID NO: 52611 - RNA, 19 nt, Human
ugagucugggacuccuggc

SEQ ID NO: 52612 - RNA, 20 nt, Human
ugcaggggacaccaggggcc

SEQ ID NO: 52613 - RNA, 24 nt, Human
ugcccucgagcccggggagggucc

SEQ ID NO: 52614 - RNA, 18 nt, Human
uggcccagggugcgugag

SEQ ID NO: 52615 - RNA, 25 nt, Human
uggcccuccaggccccuccucuccc

SEQ ID NO: 52616 - RNA, 21 nt, Human
uggcccuggaggccccuccuc

SEQ ID NO: 52617 - RNA, 19 nt, Human
uggcucagcccaccagcgg

SEQ ID NO: 52618 - RNA, 21 nt, Human
ugggucccaggcggcugagca

SEQ ID NO: 52619 - RNA, 21 nt, Human
ugguauuuggaagccgggagg

SEQ ID NO: 52620 - RNA, 24 nt, Human
uggugggucccaggcggcugagca

SEQ ID NO: 52621 - RNA, 21 nt, Human
gaaaacuuaaaaaaaaaauug

SEQ ID NO: 52622 - RNA, 21 nt, Human
guauaaccacaguugaaaacu

SEQ ID NO: 52623 - RNA, 18 nt, Human
aaacagaacacccccaaa

SEQ ID NO: 52624 - RNA, 21 nt, Human
aaccacugugaaagaccaagu

SEQ ID NO: 52625 - RNA, 22 nt, Human
aagcaacagauacugcaaagca

SEQ ID NO: 52626 - RNA, 21 nt, Human
aagcacauggcuugauacuuc

SEQ ID NO: 52627 - RNA, 19 nt, Human
acaaggucaauucccagga

SEQ ID NO: 52628 - RNA, 19 nt, Human
acacaauucuaauuucugu

SEQ ID NO: 52629 - RNA, 18 nt, Human
acacuugaaaccaaauuu

SEQ ID NO: 52630 - RNA, 20 nt, Human
acagaacacccccaaaacau

SEQ ID NO: 52631 - RNA, 23 nt, Human
acccuaguaaccucugaucucca

SEQ ID NO: 52632 - RNA, 18 nt, Human
acccugaugccacagccu

SEQ ID NO: 52633 - RNA, 21 nt, Human
acuaguuuugguuuugucuug

SEQ ID NO: 52634 - RNA, 20 nt, Human
acuugccagaggcuuucccu

SEQ ID NO: 52635 - RNA, 18 nt, Human
aggaggggcugggcagua

SEQ ID NO: 52636 - RNA, 23 nt, Human
aggggccaaagaaaucaggaggg

SEQ ID NO: 52637 - RNA, 23 nt, Human
aguuccuggccagaguugacucu

SEQ ID NO: 52638 - RNA, 20 nt, Human
caaaaaagguuuuauccaaa

SEQ ID NO: 52639 - RNA, 28 nt, Human
caaaaaagguuuuauccaaaaaaguuaa

SEQ ID NO: 52640 - RNA, 23 nt, Human
caacacgucaccacccuuugcuc

SEQ ID NO: 52641 - RNA, 21 nt, Human
caagacaagcaacagauacug

SEQ ID NO: 52642 - RNA, 22 nt, Human
caagacaagcaacagauacugc

SEQ ID NO: 52643 - RNA, 23 nt, Human
cacagccuuucacguuuccuaaa

SEQ ID NO: 52644 - RNA, 18 nt, Human
caccauaguccaggggcc

SEQ ID NO: 52645 - RNA, 21 nt, Human
cagaaugcuccccuacccuga

SEQ ID NO: 52646 - RNA, 23 nt, Human
cagacaaaucgauuacaagguca

SEQ ID NO: 52647 - RNA, 24 nt, Human
cagcaccauaguccaggggccaaa

SEQ ID NO: 52648 - RNA, 24 nt, Human
ccucugaucuccaucugccucauc

SEQ ID NO: 52649 - RNA, 21 nt, Human
cucuggauuuccucacccacc

SEQ ID NO: 52650 - RNA, 20 nt, Human
cugacagacagaagggcuuu

SEQ ID NO: 52651 - RNA, 25 nt, Human
cugccuugugugagucggcggcuag

SEQ ID NO: 52652 - RNA, 23 nt, Human
cuggauuuccucacccaccugcc

SEQ ID NO: 52653 - RNA, 20 nt, Human
cuugccagaggcuuucccug

SEQ ID NO: 52654 - RNA, 20 nt, Human
gaaagcuacuugccagaggc

SEQ ID NO: 52655 - RNA, 26 nt, Human
gagaaaacagaacacccccaaaacau

SEQ ID NO: 52656 - RNA, 24 nt, Human
gcagaaugcuccccuacccugaug

SEQ ID NO: 52657 - RNA, 19 nt, Human
gcuugauacuucuguugau

SEQ ID NO: 52658 - RNA, 18 nt, Human
ggagaaaacagaacaccc

SEQ ID NO: 52659 - RNA, 24 nt, Human
ggagaaaacagaacacccccaaaa

SEQ ID NO: 52660 - RNA, 25 nt, Human
uaaacccuaguaaccucugaucucc

SEQ ID NO: 52661 - RNA, 23 nt, Human
uaaccucugaucuccaucugccu

SEQ ID NO: 52662 - RNA, 22 nt, Human
uacagcaccauaguccaggggc

SEQ ID NO: 52663 - RNA, 20 nt, Human
uaccuuagaguuccuggcca

SEQ ID NO: 52664 - RNA, 24 nt, Human
ucaaaaaagguuuuauccaaaaaa

SEQ ID NO: 52665 - RNA, 19 nt, Human
ucaggguguguucaggagu

SEQ ID NO: 52666 - RNA, 19 nt, Human
uccuaaacccuaguaaccu

SEQ ID NO: 52667 - RNA, 24 nt, Human
ucucaaggccugacagacagaagg

SEQ ID NO: 52668 - RNA, 22 nt, Human
ucuucaggguguguucaggagu

SEQ ID NO: 52669 - RNA, 24 nt, Human
ugacagacagaagggcuuggagau

SEQ ID NO: 52670 - RNA, 23 nt, Human
ugccagaggcuuucccugagagc

SEQ ID NO: 52671 - RNA, 18 nt, Human
ugguaaacgaaccacugu

SEQ ID NO: 52672 - RNA, 20 nt, Human
uuaaucaagacaagcaacag

SEQ ID NO: 52673 - RNA, 21 nt, Human
uuccuggccagaguugacucu

SEQ ID NO: 52674 - RNA, 24 nt, Human
uugucuugucccuuccuugagcag

SEQ ID NO: 52675 - RNA, 22 nt, Human
uuuuuuuuuuuuuuuuucuguu

SEQ ID NO: 52676 - RNA, 26 nt, Human
uuuuuuuuuuuuuuuuuuuucugggg

SEQ ID NO: 52677 - RNA, 19 nt, Human
aaaaagcaacaaguuuaca

SEQ ID NO: 52678 - RNA, 22 nt, Human
aaaaagcaacaaguuuacaaaa

SEQ ID NO: 52679 - RNA, 23 nt, Human
aaaaagcaacaaguuuacaaaaa

SEQ ID NO: 52680 - RNA, 22 nt, Human
aaaugggggcuuggaaaggccc

SEQ ID NO: 52681 - RNA, 18 nt, Human
acaccguggggcaggcgc

SEQ ID NO: 52682 - RNA, 19 nt, Human
acacucaggcaagaaaauc

SEQ ID NO: 52683 - RNA, 18 nt, Human
accacaaggagaggcagc

SEQ ID NO: 52684 - RNA, 20 nt, Human
accacaaggagaggcagcag

SEQ ID NO: 52685 - RNA, 18 nt, Human
acgccgagcccuccacgc

SEQ ID NO: 52686 - RNA, 22 nt, Human
agcacacacaggaaggagcagc

SEQ ID NO: 52687 - RNA, 19 nt, Human
agcacgggagcaacgcaga

SEQ ID NO: 52688 - RNA, 22 nt, Human
agccauggccaggcccagauac

SEQ ID NO: 52689 - RNA, 19 nt, Human
agcuccucucgauagcccc

SEQ ID NO: 52690 - RNA, 23 nt, Human
aggcagggcccagagcacacaca

SEQ ID NO: 52691 - RNA, 20 nt, Human
aggccgaggcagggcccaga

SEQ ID NO: 52692 - RNA, 21 nt, Human
agggccagcugagggucagga

SEQ ID NO: 52693 - RNA, 24 nt, Human
aucaaaaagcaacaaguuuacaaa

SEQ ID NO: 52694 - RNA, 18 nt, Human
auggccaggcccagauac

SEQ ID NO: 52695 - RNA, 22 nt, Human
auggggguggggaagggacggg

SEQ ID NO: 52696 - RNA, 19 nt, Human
caacacucaggcaagaaaa

SEQ ID NO: 52697 - RNA, 21 nt, Human
cacacaggaaggagcagcuca

SEQ ID NO: 52698 - RNA, 20 nt, Human
cacagcgauugacacagaaa

SEQ ID NO: 52699 - RNA, 20 nt, Human
cacagguaugggggugcagg

SEQ ID NO: 52700 - RNA, 26 nt, Human
caccacguucgucuucuccucgcgcc

SEQ ID NO: 52701 - RNA, 19 nt, Human
caccguggggcaggcgcag

SEQ ID NO: 52702 - RNA, 20 nt, Human
cacgggagcaacgcagagcu

SEQ ID NO: 52703 - RNA, 19 nt, Human
cacguucgucuucuccucg

SEQ ID NO: 52704 - RNA, 23 nt, Human
cagaggucaaccccaucccacag

SEQ ID NO: 52705 - RNA, 18 nt, Human
cagcagccuggggcuggc

SEQ ID NO: 52706 - RNA, 21 nt, Human
cagcgauugacacagaaacau

SEQ ID NO: 52707 - RNA, 19 nt, Human
cagcucaaaugggggcuug

SEQ ID NO: 52708 - RNA, 18 nt, Human
caggagccggggcugcuu

SEQ ID NO: 52709 - RNA, 23 nt, Human
cagugagcuccucucgauagccc

SEQ ID NO: 52710 - RNA, 19 nt, Human
caguuuaaggcauuucugg

SEQ ID NO: 52711 - RNA, 19 nt, Human
cauggccaggcccagauac

SEQ ID NO: 52712 - RNA, 19 nt, Human
cauggccaggcccagauac

SEQ ID NO: 52713 - RNA, 23 nt, Human
ccaccuuguugccgccguccagc

SEQ ID NO: 52714 - RNA, 18 nt, Human
ccagcaggcucucccggg

SEQ ID NO: 52715 - RNA, 21 nt, Human
cccacagugagcuccucucga

SEQ ID NO: 52716 - RNA, 25 nt, Human
cccaccacuccaggggucaaauaaa

SEQ ID NO: 52717 - RNA, 21 nt, Human
cccgccugacggagcgagggu

SEQ ID NO: 52718 - RNA, 18 nt, Human
cccuggucuggccucugc

SEQ ID NO: 52719 - RNA, 20 nt, Human
ccuccacgcugccaccucgc

SEQ ID NO: 52720 - RNA, 25 nt, Human
ccuccacgcugccaccucgccuguc

SEQ ID NO: 52721 - RNA, 19 nt, Human
ccuggggcuggcgcaggca

SEQ ID NO: 52722 - RNA, 18 nt, Human
cucagcagccccuuccuc

SEQ ID NO: 52723 - RNA, 26 nt, Human
cucaggcaagaaaaucauaucaaaaa

SEQ ID NO: 52724 - RNA, 25 nt, Human
cuccaccgucccggugagcaccacg

SEQ ID NO: 52725 - RNA, 21 nt, Human
cugccaccucugcaccugccc

SEQ ID NO: 52726 - RNA, 22 nt, Human
cugccaccucugcaccugcccc

SEQ ID NO: 52727 - RNA, 24 nt, Human
cugccccuugaccuuggucagaca

SEQ ID NO: 52728 - RNA, 20 nt, Human
cugcuccucagcagccuggg

SEQ ID NO: 52729 - RNA, 18 nt, Human
cuggccacagguaugggg

SEQ ID NO: 52730 - RNA, 21 nt, Human
gaaaauaauuacagcgggcgc

SEQ ID NO: 52731 - RNA, 20 nt, Human
gaacacagccauggccaggc

SEQ ID NO: 52732 - RNA, 21 nt, Human
gagaugggaaagaugagaccc

SEQ ID NO: 52733 - RNA, 23 nt, Human
gcagaggucaaccccaucccaca

SEQ ID NO: 52734 - RNA, 18 nt, Human
gcaggcgcagugcaaggc

SEQ ID NO: 52735 - RNA, 21 nt, Human
gcccuguggggucacccggag

SEQ ID NO: 52736 - RNA, 18 nt, Human
gcgcagugcaaggcgggg

SEQ ID NO: 52737 - RNA, 18 nt, Human
gcgggcgcggggcucugg

SEQ ID NO: 52738 - RNA, 22 nt, Human
gcuggccacagguaugggggug

SEQ ID NO: 52739 - RNA, 21 nt, Human
ggaggacugggcuggggcugg

SEQ ID NO: 52740 - RNA, 18 nt, Human
ggcagggccagcugaggg

SEQ ID NO: 52741 - RNA, 22 nt, Human
ggccccaucagaccucagcagc

SEQ ID NO: 52742 - RNA, 21 nt, Human
ggccgaggcagggcccagagc

SEQ ID NO: 52743 - RNA, 22 nt, Human
ggccucugcuccucagcagccu

SEQ ID NO: 52744 - RNA, 18 nt, Human
ggcuggggcugggggugg

SEQ ID NO: 52745 - RNA, 21 nt, Human
gggauggggguggggaaggga

SEQ ID NO: 52746 - RNA, 24 nt, Human
gggcaugucccgccggcuccgggc

SEQ ID NO: 52747 - RNA, 19 nt, Human
gggcccagagcacacacag

SEQ ID NO: 52748 - RNA, 19 nt, Human
gggcuggggguggggaugg

SEQ ID NO: 52749 - RNA, 19 nt, Human
ggggaugggaugggggugg

SEQ ID NO: 52750 - RNA, 20 nt, Human
gggguggggaugggaugggg

SEQ ID NO: 52751 - RNA, 22 nt, Human
guaacacggcacccagccccac

SEQ ID NO: 52752 - RNA, 24 nt, Human
uaccgccagacccgaaccuugcag

SEQ ID NO: 52753 - RNA, 26 nt, Human
ucacagaugagggggucuccaaagcc

SEQ ID NO: 52754 - RNA, 18 nt, Human
ucagcagccuggggcugg

SEQ ID NO: 52755 - RNA, 24 nt, Human
ucccgggccaccaggucuuugccc

SEQ ID NO: 52756 - RNA, 25 nt, Human
ucccgggccaccaggucuuugcccu

SEQ ID NO: 52757 - RNA, 20 nt, Human
uccucgcgccgcuccagcgc

SEQ ID NO: 52758 - RNA, 18 nt, Human
uccugaggcugccaucca

SEQ ID NO: 52759 - RNA, 26 nt, Human
uccugcuccuaggaggacugggcugg

SEQ ID NO: 52760 - RNA, 18 nt, Human
uccugguguccccagugg

SEQ ID NO: 52761 - RNA, 18 nt, Human
ucucccgggccaccaggu

SEQ ID NO: 52762 - RNA, 22 nt, Human
ucugcaccugccccuugaccuu

SEQ ID NO: 52763 - RNA, 21 nt, Human
ucugcuccucagcagccuggg

SEQ ID NO: 52764 - RNA, 23 nt, Human
ucugcuccucagcagccuggggc

SEQ ID NO: 52765 - RNA, 21 nt, Human
ugacacagaaacauacuagag

SEQ ID NO: 52766 - RNA, 18 nt, Human
ugaggcaggggugugugu

SEQ ID NO: 52767 - RNA, 21 nt, Human
ugcaaggcgggggcucagcac

SEQ ID NO: 52768 - RNA, 27 nt, Human
ugcaaggcgggggcucagcaccuugag

SEQ ID NO: 52769 - RNA, 21 nt, Human
ugcagcacggcugccuggacg

SEQ ID NO: 52770 - RNA, 19 nt, Human
ugccuggacggaagggagg

SEQ ID NO: 52771 - RNA, 20 nt, Human
ugccuggacggaagggaggc

SEQ ID NO: 52772 - RNA, 18 nt, Human
uggacggaagggaggccg

SEQ ID NO: 52773 - RNA, 19 nt, Human
uggcagagggauacgguca

SEQ ID NO: 52774 - RNA, 27 nt, Human
uggcagagggauacggucauguccagg

SEQ ID NO: 52775 - RNA, 18 nt, Human
uggcugggcagggccagc

SEQ ID NO: 52776 - RNA, 22 nt, Human
uggcugggcagggccagcugag

SEQ ID NO: 52777 - RNA, 23 nt, Human
uggcugggcagggccagcugagg

SEQ ID NO: 52778 - RNA, 18 nt, Human
ugggauggggguggggaa

SEQ ID NO: 52779 - RNA, 21 nt, Human
ugggauggggguggggaaggg

SEQ ID NO: 52780 - RNA, 21 nt, Human
ugggcagggccagcugagggu

SEQ ID NO: 52781 - RNA, 24 nt, Human
ugggcuggggcuggggguggggau

SEQ ID NO: 52782 - RNA, 22 nt, Human
uggggcuggggguggggauggg

SEQ ID NO: 52783 - RNA, 18 nt, Human
uggggguggggaugggau

SEQ ID NO: 52784 - RNA, 21 nt, Human
ugggguguggcagagggauac

SEQ ID NO: 52785 - RNA, 21 nt, Human
uggucuggccucugcuccuca

SEQ ID NO: 52786 - RNA, 20 nt, Human
ugucacagaugagggggucu

SEQ ID NO: 52787 - RNA, 25 nt, Human
uucaaguaccgccagacccgaaccu

SEQ ID NO: 52788 - RNA, 27 nt, Human
uuggaaaggcccugugggaagcgccgc

SEQ ID NO: 52789 - RNA, 20 nt, Human
uuucuggcuucggagccauc

SEQ ID NO: 52790 - RNA, 23 nt, Human
aaauuugggagcaagagagggug

SEQ ID NO: 52791 - RNA, 23 nt, Human
aaggacccuuccuggaggguggg

SEQ ID NO: 52792 - RNA, 18 nt, Human
agagggugcccagggucc

SEQ ID NO: 52793 - RNA, 20 nt, Human
caggagccgauuaaaauuug

SEQ ID NO: 52794 - RNA, 22 nt, Human
caggccgugaaggacccuuccu

SEQ ID NO: 52795 - RNA, 19 nt, Human
cccgacccugacguuggcc

SEQ ID NO: 52796 - RNA, 25 nt, Human
cccuacccuagccccgacccugacc

SEQ ID NO: 52797 - RNA, 25 nt, Human
cccuagccccgacccugacguuggc

SEQ ID NO: 52798 - RNA, 23 nt, Human
cccuuggcuuauauggcagggcc

SEQ ID NO: 52799 - RNA, 21 nt, Human
ccuccgggauucuugccuaga

SEQ ID NO: 52800 - RNA, 19 nt, Human
ccuuccuggaggguggggg

SEQ ID NO: 52801 - RNA, 31 nt, Human
ccuugccccuacccuagccccgacccugacc

SEQ ID NO: 52802 - RNA, 24 nt, Human
gcaagagagggugcccagggucca

SEQ ID NO: 52803 - RNA, 21 nt, Human
ggagccgauuaaaauuuggga

SEQ ID NO: 52804 - RNA, 23 nt, Human
ggagggugggggcacaguucagg

SEQ ID NO: 52805 - RNA, 22 nt, Human
gggggcacaguucaggcccuca

SEQ ID NO: 52806 - RNA, 18 nt, Human
guccacaaauuuccacag

SEQ ID NO: 52807 - RNA, 21 nt, Human
guucccggccaccccgugccc

SEQ ID NO: 52808 - RNA, 20 nt, Human
uauggcagggccuaaugaag

SEQ ID NO: 52809 - RNA, 23 nt, Human
ucccggccaccccgugcccuugg

SEQ ID NO: 52810 - RNA, 18 nt, Human
ucccugaaccugagccuu

SEQ ID NO: 52811 - RNA, 20 nt, Human
ugacugaucccugcagccaa

SEQ ID NO: 52812 - RNA, 23 nt, Human
ugcccaggguccacaaauuucca

SEQ ID NO: 52813 - RNA, 23 nt, Human
ugccccuacccuagccccgaccc

SEQ ID NO: 52814 - RNA, 20 nt, Human
ugggagcaagagagggugcc

SEQ ID NO: 52815 - RNA, 18 nt, Human
ugggggcacaguucaggc

SEQ ID NO: 52816 - RNA, 19 nt, Human
uuccacaggacagggaccu

SEQ ID NO: 52817 - RNA, 23 nt, Human
uuccuggagggugggggcacagu

SEQ ID NO: 52818 - RNA, 19 nt, Human
uuccuugccccuacccuag

SEQ ID NO: 52819 - RNA, 23 nt, Human
uugccuagagaguucccggccac

SEQ ID NO: 52820 - RNA, 22 nt, Human
uuuuuuuuuuuuuuuuuguugg

SEQ ID NO: 52821 - RNA, 21 nt, Human
uuuuuuuuuuuuuuuuuuguu

SEQ ID NO: 52822 - RNA, 24 nt, Human
uuuuuuuuuuuuuuuuuuguuggu

SEQ ID NO: 52823 - RNA, 24 nt, Human
uuuuuuuuuuuuuuuuuuuguugg

SEQ ID NO: 52824 - RNA, 18 nt, Human
acaaaccgaaggcaaugc

SEQ ID NO: 52825 - RNA, 18 nt, Human
aggugggagacugggggu

SEQ ID NO: 52826 - RNA, 21 nt, Human
ccagaacaacggcagcuucuu

SEQ ID NO: 52827 - RNA, 22 nt, Human
ccgcugcaggcuucuacugcuc

SEQ ID NO: 52828 - RNA, 24 nt, Human
cgguuggaauucuuuuuggaacag

SEQ ID NO: 52829 - RNA, 24 nt, Human
cuucugcuguaguacccagaacaa

SEQ ID NO: 52830 - RNA, 22 nt, Human
gaggugcauuugugccgcugca

SEQ ID NO: 52831 - RNA, 20 nt, Human
gccaggggcagaggccuugg

SEQ ID NO: 52832 - RNA, 25 nt, Human
gccuccccacccccauucucuaaaa

SEQ ID NO: 52833 - RNA, 23 nt, Human
ggaaaaaacuaagguauuacaga

SEQ ID NO: 52834 - RNA, 23 nt, Human
ggaggugcauuugugccgcugca

SEQ ID NO: 52835 - RNA, 21 nt, Human
uauuacagacacuacacggag

SEQ ID NO: 52836 - RNA, 22 nt, Human
ucaagacacuaaauacaaaccg

SEQ ID NO: 52837 - RNA, 22 nt, Human
uccaugcagcacacuuagacca

SEQ ID NO: 52838 - RNA, 22 nt, Human
uccgcauucaaacagaaauuca

SEQ ID NO: 52839 - RNA, 19 nt, Human
ugaaaagggaacacuuuuu

SEQ ID NO: 52840 - RNA, 26 nt, Human
ugccaggcacuguguucuggggcccu

SEQ ID NO: 52841 - RNA, 25 nt, Human
ugcugcuggccuuugccucaaaggc

SEQ ID NO: 52842 - RNA, 22 nt, Human
uggaaaaaacuaagguauuaca

SEQ ID NO: 52843 - RNA, 20 nt, Human
uuccagcucaaagucgacuc

SEQ ID NO: 52844 - RNA, 18 nt, Human
uucugcuguaguacccag

SEQ ID NO: 52845 - RNA, 20 nt, Human
uucuugccuccccaccccca

SEQ ID NO: 52846 - RNA, 20 nt, Human
aaacaaacacaucuauagaa

SEQ ID NO: 52847 - RNA, 22 nt, Human
aacccaauaguuaacaugauuc

SEQ ID NO: 52848 - RNA, 24 nt, Human
aauaucuacccacuucuaaacaaa

SEQ ID NO: 52849 - RNA, 24 nt, Human
caaugcuacauaaagugcauugaa

SEQ ID NO: 52850 - RNA, 21 nt, Human
caggauggggcgcuggaggcg

SEQ ID NO: 52851 - RNA, 19 nt, Human
ccacuucuaaacaaacaca

SEQ ID NO: 52852 - RNA, 23 nt, Human
ccacuucuaaacaaacacaucua

SEQ ID NO: 52853 - RNA, 24 nt, Human
ccugcacuacuucagucacaaccc

SEQ ID NO: 52854 - RNA, 18 nt, Human
cuucuaaacaaacacauc

SEQ ID NO: 52855 - RNA, 21 nt, Human
ggcgcuggaggcggcggaacc

SEQ ID NO: 52856 - RNA, 20 nt, Human
guuuuuuuuuuuuaaaggua

SEQ ID NO: 52857 - RNA, 22 nt, Human
uaaagugcauugaauaucgaaa

SEQ ID NO: 52858 - RNA, 23 nt, Human
uaaagugcauugaauaucgaaaa

SEQ ID NO: 52859 - RNA, 19 nt, Human
uaacaagagauggcagcgg

SEQ ID NO: 52860 - RNA, 22 nt, Human
uacccacuucuaaacaaacaca

SEQ ID NO: 52861 - RNA, 24 nt, Human
uacucagguuuuuuuuuuuuaaaa

SEQ ID NO: 52862 - RNA, 18 nt, Human
ucauucaaugcuacauaa

SEQ ID NO: 52863 - RNA, 23 nt, Human
ucucucaagcuuccugggaaaua

SEQ ID NO: 52864 - RNA, 22 nt, Human
ucuguauaaacucauuucucuc

SEQ ID NO: 52865 - RNA, 21 nt, Human
ugcacuacuucagucacaacc

SEQ ID NO: 52866 - RNA, 22 nt, Human
ugcacuacuucagucacaaccc

SEQ ID NO: 52867 - RNA, 19 nt, Human
uggaggcggcggaaccugu

SEQ ID NO: 52868 - RNA, 21 nt, Human
ugguaaauguagaauguaaug

SEQ ID NO: 52869 - RNA, 20 nt, Human
ugguuucaaggcaaacccug

SEQ ID NO: 52870 - RNA, 21 nt, Human
uguagaauguaaugguuucaa

SEQ ID NO: 52871 - RNA, 23 nt, Human
uucaaugcuacauaaagugcauu

SEQ ID NO: 52872 - RNA, 21 nt, Human
uugaauaucgaaaauaaaaca

SEQ ID NO: 52873 - RNA, 23 nt, Human
uuucauuuauucuuugcaguuaa

SEQ ID NO: 52874 - RNA, 24 nt, Human
uuugguaaauguagaauguaaugg

SEQ ID NO: 52875 - RNA, 22 nt, Human
aaaaaauaacaggacaaaagca

SEQ ID NO: 52876 - RNA, 18 nt, Human
aaauacaccuggugccga

SEQ ID NO: 52877 - RNA, 22 nt, Human
aacaaucuggaacucucaucuc

SEQ ID NO: 52878 - RNA, 18 nt, Human
aaugcucauuugguagug

SEQ ID NO: 52879 - RNA, 23 nt, Human
acacuauaucaaauacaccuggu

SEQ ID NO: 52880 - RNA, 20 nt, Human
agcuaggugggcaguggugc

SEQ ID NO: 52881 - RNA, 19 nt, Human
agcuguggagccuuuggac

SEQ ID NO: 52882 - RNA, 19 nt, Human
agcuguggagccuuuggac

SEQ ID NO: 52883 - RNA, 23 nt, Human
aggaaagaaaagcuuuuguucag

SEQ ID NO: 52884 - RNA, 21 nt, Human
aggaaggcauacuuuaugaua

SEQ ID NO: 52885 - RNA, 21 nt, Human
aggacaaaagcaggcuaggga

SEQ ID NO: 52886 - RNA, 23 nt, Human
aggagcagguccccagaugaaca

SEQ ID NO: 52887 - RNA, 18 nt, Human
aggccaggacagcuaggu

SEQ ID NO: 52888 - RNA, 19 nt, Human
auaaaaaauaacaggacaa

SEQ ID NO: 52889 - RNA, 18 nt, Human
auauacauauauauauau

SEQ ID NO: 52890 - RNA, 18 nt, Human
auauacauauauauauau

SEQ ID NO: 52891 - RNA, 19 nt, Human
auauagauauacauauaua

SEQ ID NO: 52892 - RNA, 19 nt, Human
auauagauauacauauaua

SEQ ID NO: 52893 - RNA, 20 nt, Human
aucaaauacacccgcgcccc

SEQ ID NO: 52894 - RNA, 26 nt, Human
caccgaaugugguacagccacacucu

SEQ ID NO: 52895 - RNA, 26 nt, Human
cacuauaucaaauacacccgcgcccc

SEQ ID NO: 52896 - RNA, 21 nt, Human
cacuauaucaaauacaccucc

SEQ ID NO: 52897 - RNA, 21 nt, Human
cacuauaucaaauacaccucc

SEQ ID NO: 52898 - RNA, 22 nt, Human
cacucgcuggguccgcuccagc

SEQ ID NO: 52899 - RNA, 22 nt, Human
cacucugaggugaaggucagca

SEQ ID NO: 52900 - RNA, 22 nt, Human
caggaaggcauacuuuaugaua

SEQ ID NO: 52901 - RNA, 21 nt, Human
cagguccccagaugaacaugg

SEQ ID NO: 52902 - RNA, 19 nt, Human
ccccagaugaacauggcug

SEQ ID NO: 52903 - RNA, 22 nt, Human
ccgcccgccgccucggcguccc

SEQ ID NO: 52904 - RNA, 21 nt, Human
ccgccucggcgucccggcugu

SEQ ID NO: 52905 - RNA, 18 nt, Human
ccgcgccccgggcgcugc

SEQ ID NO: 52906 - RNA, 18 nt, Human
ccgcggcccggcagagcu

SEQ ID NO: 52907 - RNA, 19 nt, Human
cgccgcggcccggcagagc

SEQ ID NO: 52908 - RNA, 20 nt, Human
cgcuggaaucauuggcgagg

SEQ ID NO: 52909 - RNA, 18 nt, Human
cucgcuggguccgcucca

SEQ ID NO: 52910 - RNA, 26 nt, Human
cucuugcuccuucuuucagggccgcc

SEQ ID NO: 52911 - RNA, 19 nt, Human
cugccugggguccuggcug

SEQ ID NO: 52912 - RNA, 19 nt, Human
cugcugccugggguccugg

SEQ ID NO: 52913 - RNA, 22 nt, Human
cuugcaauggcaugcccuccuc

SEQ ID NO: 52914 - RNA, 19 nt, Human
gaagugcugcagaggaaug

SEQ ID NO: 52915 - RNA, 18 nt, Human
gaaucauuggcgaggagg

SEQ ID NO: 52916 - RNA, 23 nt, Human
gagcagguccccagaugaacaug

SEQ ID NO: 52917 - RNA, 21 nt, Human
gagcugcuagcggcgcgccgg

SEQ ID NO: 52918 - RNA, 21 nt, Human
gaguuauucagauaaaaaccc

SEQ ID NO: 52919 - RNA, 18 nt, Human
gcacgaaaacuuuacugc

SEQ ID NO: 52920 - RNA, 23 nt, Human
gcagagcugcuagcggcgcgccg

SEQ ID NO: 52921 - RNA, 27 nt, Human
gcccucacucgcuggguccgcuccagc

SEQ ID NO: 52922 - RNA, 18 nt, Human
gccgcggcccggcagagc

SEQ ID NO: 52923 - RNA, 18 nt, Human
gcggcgcgccgguccaga

SEQ ID NO: 52924 - RNA, 23 nt, Human
ggaauguucucuugcuccuucuu

SEQ ID NO: 52925 - RNA, 18 nt, Human
ggacaaaagcaggcuagg

SEQ ID NO: 52926 - RNA, 19 nt, Human
ggacaaaagcaggcuaggg

SEQ ID NO: 52927 - RNA, 22 nt, Human
ggcagagcugcuagcggcgcgc

SEQ ID NO: 52928 - RNA, 20 nt, Human
ggcgaggaggcagcuccgaa

SEQ ID NO: 52929 - RNA, 19 nt, Human
gggcacaggccaggacagc

SEQ ID NO: 52930 - RNA, 22 nt, Human
guccugucacucgcugcugccu

SEQ ID NO: 52931 - RNA, 22 nt, Human
uaaaaaauaacaggacaaaagc

SEQ ID NO: 52932 - RNA, 23 nt, Human
uaaaauuucucaaaucaacacau

SEQ ID NO: 52933 - RNA, 21 nt, Human
uaacaggacaaaagcaggcua

SEQ ID NO: 52934 - RNA, 22 nt, Human
uacaccgaaugugguacagcca

SEQ ID NO: 52935 - RNA, 22 nt, Human
uacagccacacucugaggugaa

SEQ ID NO: 52936 - RNA, 19 nt, Human
uacauauauauauaugugu

SEQ ID NO: 52937 - RNA, 22 nt, Human
uaccacaaacuauauacacuuc

SEQ ID NO: 52938 - RNA, 25 nt, Human
uagauauacauauauauauaugugu

SEQ ID NO: 52939 - RNA, 18 nt, Human
uauacauauauauauaug

SEQ ID NO: 52940 - RNA, 19 nt, Human
uauacauauauauauaugu

SEQ ID NO: 52941 - RNA, 20 nt, Human
uauacauauauauauaugug

SEQ ID NO: 52942 - RNA, 23 nt, Human
uauauauauguguagaauauaua

SEQ ID NO: 52943 - RNA, 22 nt, Human
uauaucaaauacacccgcgccc

SEQ ID NO: 52944 - RNA, 25 nt, Human
uauaucaaauacaccuccucugagc

SEQ ID NO: 52945 - RNA, 25 nt, Human
uauaucaaauacaccuccucugagc

SEQ ID NO: 52946 - RNA, 22 nt, Human
uauaucaaauacaccuggugcc

SEQ ID NO: 52947 - RNA, 24 nt, Human
ucccgcccgccgccucggcguccc

SEQ ID NO: 52948 - RNA, 19 nt, Human
uccugucacucgcugcugc

SEQ ID NO: 52949 - RNA, 20 nt, Human
ucgcuggguccgcuccagcc

SEQ ID NO: 52950 - RNA, 22 nt, Human
ucgcuggguccgcuccagccgc

SEQ ID NO: 52951 - RNA, 26 nt, Human
ucucuugcaauggcaugcccuccucu

SEQ ID NO: 52952 - RNA, 23 nt, Human
ucucuugcuccuucuuucacaaa

SEQ ID NO: 52953 - RNA, 27 nt, Human
ucucuugcuccuucuuucagggccgcc

SEQ ID NO: 52954 - RNA, 20 nt, Human
ugacuugugauucauuuucu

SEQ ID NO: 52955 - RNA, 20 nt, Human
ugacuugugauucauuuucu

SEQ ID NO: 52956 - RNA, 21 nt, Human
ugaggugaaggucagcauugg

SEQ ID NO: 52957 - RNA, 24 nt, Human
ugauauauaaucuuuuuaccacaa

SEQ ID NO: 52958 - RNA, 23 nt, Human
ugcugggcacacagauccuauug

SEQ ID NO: 52959 - RNA, 20 nt, Human
uggaaucauuggcgaggagg

SEQ ID NO: 52960 - RNA, 18 nt, Human
uggcugagcauucucuug

SEQ ID NO: 52961 - RNA, 18 nt, Human
ugggguccuggcugucag

SEQ ID NO: 52962 - RNA, 20 nt, Human
ugggguccuggcugucaggg

SEQ ID NO: 52963 - RNA, 24 nt, Human
ugggucgaauuuguugcaaacacu

SEQ ID NO: 52964 - RNA, 24 nt, Human
ugggucgaauuuguugcaaacacu

SEQ ID NO: 52965 - RNA, 24 nt, Human
ugggucgaauuuguugcaaacacu

SEQ ID NO: 52966 - RNA, 24 nt, Human
ugggucgaauuuguugcaaacacu

SEQ ID NO: 52967 - RNA, 24 nt, Human
ugggucgaauuuguugcaaacacu

SEQ ID NO: 52968 - RNA, 22 nt, Human
uguacaaaaugugcaguaccag

SEQ ID NO: 52969 - RNA, 23 nt, Human
uguacaaaaugugcaguaccagg

SEQ ID NO: 52970 - RNA, 19 nt, Human
ugucaaauaucaaacccgc

SEQ ID NO: 52971 - RNA, 21 nt, Human
ugucuuguugcaaaaggaaag

SEQ ID NO: 52972 - RNA, 22 nt, Human
uuaaaguaaauauaacuuugcc

SEQ ID NO: 52973 - RNA, 22 nt, Human
uucagauaaaaacccagccauu

SEQ ID NO: 52974 - RNA, 22 nt, Human
uucucaaaucaacacauucauc

SEQ ID NO: 52975 - RNA, 20 nt, Human
uuuuggcaguguaaaccuau

SEQ ID NO: 52976 - RNA, 24 nt, Human
acugcagcucauuuggaaggcacu

SEQ ID NO: 52977 - RNA, 19 nt, Human
agggaaaagggcugccugg

SEQ ID NO: 52978 - RNA, 23 nt, Human
cacccaaccugccgcucgggaac

SEQ ID NO: 52979 - RNA, 18 nt, Human
caguggcuuuccuguccu

SEQ ID NO: 52980 - RNA, 26 nt, Human
ccaaagccuggaauauuucccagcag

SEQ ID NO: 52981 - RNA, 19 nt, Human
ccacuggagggaaaagggc

SEQ ID NO: 52982 - RNA, 19 nt, Human
cccaaccugccgcucggga

SEQ ID NO: 52983 - RNA, 22 nt, Human
ccucccgggcugggucaguggc

SEQ ID NO: 52984 - RNA, 24 nt, Human
ccuggggcugcacuggccuuggcc

SEQ ID NO: 52985 - RNA, 22 nt, Human
cucccgggcugggucaguggcu

SEQ ID NO: 52986 - RNA, 21 nt, Human
cugccugguucugccucccgg

SEQ ID NO: 52987 - RNA, 22 nt, Human
cugccugguucugccucccggg

SEQ ID NO: 52988 - RNA, 18 nt, Human
cuggggcugcacuggccu

SEQ ID NO: 52989 - RNA, 23 nt, Human
gaggugagaggugaggauuggug

SEQ ID NO: 52990 - RNA, 20 nt, Human
gaggugccacuggagggaaa

SEQ ID NO: 52991 - RNA, 20 nt, Human
gcaugggacaggugugugcc

SEQ ID NO: 52992 - RNA, 18 nt, Human
gccuggggccagggaggc

SEQ ID NO: 52993 - RNA, 18 nt, Human
gccugguucugccucccg

SEQ ID NO: 52994 - RNA, 18 nt, Human
gcugcacuggccuuggcc

SEQ ID NO: 52995 - RNA, 22 nt, Human
ggaaaagggcugccuggggcca

SEQ ID NO: 52996 - RNA, 19 nt, Human
ggaggaccuugcagggucu

SEQ ID NO: 52997 - RNA, 19 nt, Human
ggccuggggacugcagcuc

SEQ ID NO: 52998 - RNA, 19 nt, Human
ggccuuggccaaagccugg

SEQ ID NO: 52999 - RNA, 20 nt, Human
ucaguggcuuuccugucccc

SEQ ID NO: 53000 - RNA, 24 nt, Human
ucccgggaggcucauggccugggg

SEQ ID NO: 53001 - RNA, 21 nt, Human
uccgcacccaaccugccgcuc

SEQ ID NO: 53002 - RNA, 21 nt, Human
ugcacuggccuuggccaaagc

SEQ ID NO: 53003 - RNA, 19 nt, Human
uggggccagggaggcugcc

SEQ ID NO: 53004 - RNA, 19 nt, Human
uuccuguccccaggccugg

SEQ ID NO: 53005 - RNA, 22 nt, Human
uuccuguccccaggccuggagg

SEQ ID NO: 53006 - RNA, 18 nt, Human
aagaggguacucuguucc

SEQ ID NO: 53007 - RNA, 20 nt, Human
aaggaaggacugacuuagug

SEQ ID NO: 53008 - RNA, 23 nt, Human
acccaggguugugaaaggaaccc

SEQ ID NO: 53009 - RNA, 20 nt, Human
accccuguaaaacagggacu

SEQ ID NO: 53010 - RNA, 19 nt, Human
aggaaaauucaaacaacag

SEQ ID NO: 53011 - RNA, 19 nt, Human
aggcaccaagauuuuuauu

SEQ ID NO: 53012 - RNA, 18 nt, Human
agggacuaaaaguacuaa

SEQ ID NO: 53013 - RNA, 19 nt, Human
agggacuaaaaguacuaac

SEQ ID NO: 53014 - RNA, 18 nt, Human
agggaggagagguggggc

SEQ ID NO: 53015 - RNA, 21 nt, Human
caagcacacagguauaagucc

SEQ ID NO: 53016 - RNA, 20 nt, Human
caaggacagcagcuggaggg

SEQ ID NO: 53017 - RNA, 19 nt, Human
cacugagcucaugguuccc

SEQ ID NO: 53018 - RNA, 19 nt, Human
cacuggaccuguaaaccaa

SEQ ID NO: 53019 - RNA, 20 nt, Human
ccagcacuaagccaggcucu

SEQ ID NO: 53020 - RNA, 23 nt, Human
ccagucacaaaguuggugccauu

SEQ ID NO: 53021 - RNA, 19 nt, Human
cuaaaaguacuaaccucau

SEQ ID NO: 53022 - RNA, 18 nt, Human
cucaugguucccuguggc

SEQ ID NO: 53023 - RNA, 21 nt, Human
cucuguucuuucucaguugcc

SEQ ID NO: 53024 - RNA, 26 nt, Human
cugcagcagaggccaaaaacuaagug

SEQ ID NO: 53025 - RNA, 18 nt, Human
cugucacuucucuguucu

SEQ ID NO: 53026 - RNA, 20 nt, Human
gcccagcacuaagccaggcu

SEQ ID NO: 53027 - RNA, 22 nt, Human
gccccucucaaccccuagcugu

SEQ ID NO: 53028 - RNA, 21 nt, Human
ggacacugacaaaccagucac

SEQ ID NO: 53029 - RNA, 21 nt, Human
ggaggagagguggggccuggg

SEQ ID NO: 53030 - RNA, 20 nt, Human
ggagggugaaacgcagaccu

SEQ ID NO: 53031 - RNA, 20 nt, Human
gggcgaagggggcugggccu

SEQ ID NO: 53032 - RNA, 19 nt, Human
gugaucagccccagagagu

SEQ ID NO: 53033 - RNA, 23 nt, Human
guggcagauuucacgaaaucugc

SEQ ID NO: 53034 - RNA, 24 nt, Human
uaaccccuguaaaacagggacuaa

SEQ ID NO: 53035 - RNA, 22 nt, Human
uaagccaggcucucaggaaaau

SEQ ID NO: 53036 - RNA, 19 nt, Human
uaaguccacagaccaggug

SEQ ID NO: 53037 - RNA, 23 nt, Human
uaaugagguuuaagagaaggccc

SEQ ID NO: 53038 - RNA, 23 nt, Human
uagcugucacuucucuguucuuu

SEQ ID NO: 53039 - RNA, 20 nt, Human
uagggaggagagguggggcc

SEQ ID NO: 53040 - RNA, 23 nt, Human
ucagccccagagagucgaugggg

SEQ ID NO: 53041 - RNA, 21 nt, Human
uccacagaccaggugaaggcc

SEQ ID NO: 53042 - RNA, 21 nt, Human
ucccuguggcugggaccucca

SEQ ID NO: 53043 - RNA, 21 nt, Human
ucucuguucuuucucaguugc

SEQ ID NO: 53044 - RNA, 19 nt, Human
ucugguuauaaaguggugg

SEQ ID NO: 53045 - RNA, 23 nt, Human
ugaccggggcuugaagaggguac

SEQ ID NO: 53046 - RNA, 20 nt, Human
ugagcuguuccaagaccacu

SEQ ID NO: 53047 - RNA, 18 nt, Human
ugagguuuaagagaaggc

SEQ ID NO: 53048 - RNA, 24 nt, Human
uggaacaguaugacggcugcagca

SEQ ID NO: 53049 - RNA, 19 nt, Human
uggaccuguaaaccaagca

SEQ ID NO: 53050 - RNA, 18 nt, Human
uggagggugaaacgcaga

SEQ ID NO: 53051 - RNA, 23 nt, Human
uguaaaacagggacuaaaaguac

SEQ ID NO: 53052 - RNA, 24 nt, Human
ugugacuccacuacuggcuuccag

SEQ ID NO: 53053 - RNA, 19 nt, Human
uguuuuucuggccccucuc

SEQ ID NO: 53054 - RNA, 22 nt, Human
uuaacagucuauucuaaccccu

SEQ ID NO: 53055 - RNA, 24 nt, Human
uuggugccauuagcucuuagggag

SEQ ID NO: 53056 - RNA, 23 nt, Human
uuuucuggccccucucaaccccu

SEQ ID NO: 53057 - RNA, 23 nt, Human
aaaaaaccuaaaguuugaaggua

SEQ ID NO: 53058 - RNA, 18 nt, Human
aaaaagccuauuuuccac

SEQ ID NO: 53059 - RNA, 23 nt, Human
aagauugugccacugcacuccag

SEQ ID NO: 53060 - RNA, 21 nt, Human
aaguuugaagguaaacgaacu

SEQ ID NO: 53061 - RNA, 24 nt, Human
aaucacuugaacccaggagguaga

SEQ ID NO: 53062 - RNA, 19 nt, Human
acccuuucuaucuugacug

SEQ ID NO: 53063 - RNA, 22 nt, Human
acgcaggcuuccgcagcccgcg

SEQ ID NO: 53064 - RNA, 21 nt, Human
acuaauuuaauccaaaaacca

SEQ ID NO: 53065 - RNA, 28 nt, Human
acucucucucaaaaaaaaaaaaaaaaaa

SEQ ID NO: 53066 - RNA, 24 nt, Human
acugcacuccaguuugggcggcag

SEQ ID NO: 53067 - RNA, 26 nt, Human
acugcacuccaguuugggcggcagag

SEQ ID NO: 53068 - RNA, 24 nt, Human
acugccucccgccgccgcgcgcac

SEQ ID NO: 53069 - RNA, 18 nt, Human
agaaaaaaaugugaggca

SEQ ID NO: 53070 - RNA, 21 nt, Human
agaauccaguagcucaaaacu

SEQ ID NO: 53071 - RNA, 22 nt, Human
agagguugcagugagccaagau

SEQ ID NO: 53072 - RNA, 24 nt, Human
agagguugcagugagccaagauug

SEQ ID NO: 53073 - RNA, 21 nt, Human
agccaagauugugccacugca

SEQ ID NO: 53074 - RNA, 20 nt, Human
agcccgcgccaguacaggug

SEQ ID NO: 53075 - RNA, 18 nt, Human
agccucccgaguagcuag

SEQ ID NO: 53076 - RNA, 22 nt, Human
aggagccugggccgucuauuua

SEQ ID NO: 53077 - RNA, 18 nt, Human
aggcaagagaaucacuug

SEQ ID NO: 53078 - RNA, 24 nt, Human
aggcaagagaaucacuugaaccca

SEQ ID NO: 53079 - RNA, 24 nt, Human
aggcugaggcaagagaaucacuug

SEQ ID NO: 53080 - RNA, 25 nt, Human
aggcuggagugcaguggggcgaucu

SEQ ID NO: 53081 - RNA, 24 nt, Human
agguagagguugcagugagccaag

SEQ ID NO: 53082 - RNA, 22 nt, Human
agugcaguggggcgaucuuggc

SEQ ID NO: 53083 - RNA, 25 nt, Human
agugcaguggggcgaucuuggcccu

SEQ ID NO: 53084 - RNA, 24 nt, Human
aguuuuguauauuuuguggugccc

SEQ ID NO: 53085 - RNA, 19 nt, Human
auaaaguauguaaagcccc

SEQ ID NO: 53086 - RNA, 18 nt, Human
augaagaucaguauauca

SEQ ID NO: 53087 - RNA, 20 nt, Human
augcccgcaaucccagcaac

SEQ ID NO: 53088 - RNA, 23 nt, Human
auguuaggacaguaaaguuggua

SEQ ID NO: 53089 - RNA, 19 nt, Human
auuauaucuauacaaugca

SEQ ID NO: 53090 - RNA, 18 nt, Human
auucuccugccucagccu

SEQ ID NO: 53091 - RNA, 24 nt, Human
auugugccacugcacuccaguuug

SEQ ID NO: 53092 - RNA, 21 nt, Human
caacucgggaggcugaggcaa

SEQ ID NO: 53093 - RNA, 19 nt, Human
cacgguggcgccgcgcccc

SEQ ID NO: 53094 - RNA, 23 nt, Human
cacucauuacaauacuuugcacc

SEQ ID NO: 53095 - RNA, 23 nt, Human
cacuccaguuugggcggcagagu

SEQ ID NO: 53096 - RNA, 19 nt, Human
cacugcacuccaguuuggg

SEQ ID NO: 53097 - RNA, 20 nt, Human
cacugcacuccaguuugggc

SEQ ID NO: 53098 - RNA, 22 nt, Human
cacugcacuccaguuugggcgg

SEQ ID NO: 53099 - RNA, 24 nt, Human
cacugcacuccaguuugggcggca

SEQ ID NO: 53100 - RNA, 23 nt, Human
cagaguaagacucucucucaaaa

SEQ ID NO: 53101 - RNA, 22 nt, Human
caggcuauucuccugccucagc

SEQ ID NO: 53102 - RNA, 22 nt, Human
caucauggagauaucaauaaag

SEQ ID NO: 53103 - RNA, 21 nt, Human
caugcccgcaaucccagcaac

SEQ ID NO: 53104 - RNA, 20 nt, Human
ccacugcacuccaguuuggg

SEQ ID NO: 53105 - RNA, 21 nt, Human
ccacugcacuccaguuugggc

SEQ ID NO: 53106 - RNA, 22 nt, Human
ccacugcacuccaguuugggcg

SEQ ID NO: 53107 - RNA, 22 nt, Human
ccacugcacuccaguuugggcg

SEQ ID NO: 53108 - RNA, 23 nt, Human
ccacugcacuccaguuugggcgg

SEQ ID NO: 53109 - RNA, 24 nt, Human
ccacugcacuccaguuugggcggc

SEQ ID NO: 53110 - RNA, 22 nt, Human
ccaggagguagagguugcagug

SEQ ID NO: 53111 - RNA, 21 nt, Human
ccaguaacauguggaagagag

SEQ ID NO: 53112 - RNA, 18 nt, Human
ccaugcccgcaaucccag

SEQ ID NO: 53113 - RNA, 18 nt, Human
ccccagccacugccuccc

SEQ ID NO: 53114 - RNA, 19 nt, Human
ccccagccacugccucccg

SEQ ID NO: 53115 - RNA, 24 nt, Human
cccgaguagcuaggacuacaggcu

SEQ ID NO: 53116 - RNA, 19 nt, Human
cccgggcacuggcggccgg

SEQ ID NO: 53117 - RNA, 23 nt, Human
cccugcaaccuccgauucccagg

SEQ ID NO: 53118 - RNA, 19 nt, Human
cccuguucugagcuggcgg

SEQ ID NO: 53119 - RNA, 18 nt, Human
ccgcgagcaaggcggcgc

SEQ ID NO: 53120 - RNA, 23 nt, Human
ccgcgccucaacgccucggcuca

SEQ ID NO: 53121 - RNA, 23 nt, Human
ccgguguaggcugggaccacugc

SEQ ID NO: 53122 - RNA, 19 nt, Human
ccgugaccgucgccgcggc

SEQ ID NO: 53123 - RNA, 20 nt, Human
ccucccgccgccgcgcgcac

SEQ ID NO: 53124 - RNA, 23 nt, Human
ccugccucagccucccgaguagc

SEQ ID NO: 53125 - RNA, 20 nt, Human
ccugggccuggcgcagugag

SEQ ID NO: 53126 - RNA, 21 nt, Human
cgaaauuuauaaagucaacac

SEQ ID NO: 53127 - RNA, 20 nt, Human
cgccccgugaccgucgccgc

SEQ ID NO: 53128 - RNA, 20 nt, Human
cggagacccgcgagcaaggc

SEQ ID NO: 53129 - RNA, 24 nt, Human
cggcagaguaagacucucucucaa

SEQ ID NO: 53130 - RNA, 18 nt, Human
cggcugcucccagcuucc

SEQ ID NO: 53131 - RNA, 22 nt, Human
cuaaacaauuuauccaguaaca

SEQ ID NO: 53132 - RNA, 25 nt, Human
cucaaaaaaaaaaaaaaaaaaagaa

SEQ ID NO: 53133 - RNA, 19 nt, Human
cucaacgccucggcucacg

SEQ ID NO: 53134 - RNA, 24 nt, Human
cucagagauauuuuguccgaagcc

SEQ ID NO: 53135 - RNA, 22 nt, Human
cucauuacaauacuuugcacca

SEQ ID NO: 53136 - RNA, 23 nt, Human
cucauuacaauacuuugcaccaa

SEQ ID NO: 53137 - RNA, 24 nt, Human
cucccgaguagcuaggacuacagg

SEQ ID NO: 53138 - RNA, 20 nt, Human
cucccgccgccgcgcgcacc

SEQ ID NO: 53139 - RNA, 18 nt, Human
cucucucaaaaaaaaaaa

SEQ ID NO: 53140 - RNA, 23 nt, Human
cugccucagccucccgaguagcu

SEQ ID NO: 53141 - RNA, 21 nt, Human
cugcucccgggacuucccaaa

SEQ ID NO: 53142 - RNA, 23 nt, Human
gagaaucacuugaacccaggagg

SEQ ID NO: 53143 - RNA, 20 nt, Human
gaggcggcccgggcggagga

SEQ ID NO: 53144 - RNA, 21 nt, Human
gagguagagguugcagugagc

SEQ ID NO: 53145 - RNA, 26 nt, Human
gaguagcuaggacuacaggcucacgc

SEQ ID NO: 53146 - RNA, 22 nt, Human
gcaaccuccgauucccagguuc

SEQ ID NO: 53147 - RNA, 22 nt, Human
gcaagagaaucacuugaaccca

SEQ ID NO: 53148 - RNA, 22 nt, Human
gcacccuuucuaucuugacugu

SEQ ID NO: 53149 - RNA, 23 nt, Human
gcacuccaguuugggcggcagag

SEQ ID NO: 53150 - RNA, 23 nt, Human
gccaccaugcccgcaaucccagg

SEQ ID NO: 53151 - RNA, 22 nt, Human
gccacugcacuccaguuugggc

SEQ ID NO: 53152 - RNA, 24 nt, Human
gccacugcacuccaguuugggcgg

SEQ ID NO: 53153 - RNA, 22 nt, Human
gcccgcaggugaggcggcccgg

SEQ ID NO: 53154 - RNA, 19 nt, Human
gcgccgcgccucaacgccu

SEQ ID NO: 53155 - RNA, 23 nt, Human
ggacaguaaaguugguaggguga

SEQ ID NO: 53156 - RNA, 22 nt, Human
ggacuacaggcucacgccacca

SEQ ID NO: 53157 - RNA, 20 nt, Human
ggcggccggguccccggaac

SEQ ID NO: 53158 - RNA, 19 nt, Human
gggaggcugaggcaagaga

SEQ ID NO: 53159 - RNA, 23 nt, Human
gggaggcugaggcaagagaauca

SEQ ID NO: 53160 - RNA, 27 nt, Human
gggccaccagucccggcugcucccagg

SEQ ID NO: 53161 - RNA, 21 nt, Human
gggcggaggaggagccugggc

SEQ ID NO: 53162 - RNA, 19 nt, Human
ggggcgaucuuggcccugc

SEQ ID NO: 53163 - RNA, 18 nt, Human
gguauggacuuuuuaaaa

SEQ ID NO: 53164 - RNA, 21 nt, Human
ggugcuuugcuuaauuaaaaa

SEQ ID NO: 53165 - RNA, 21 nt, Human
gugauuuuauuauucuuagau

SEQ ID NO: 53166 - RNA, 19 nt, Human
gugcuuugcuuaauuaaaa

SEQ ID NO: 53167 - RNA, 22 nt, Human
uaaaaagccuauuuuccacuaa

SEQ ID NO: 53168 - RNA, 20 nt, Human
uaaacucccuuuucuaaaag

SEQ ID NO: 53169 - RNA, 24 nt, Human
uaaagguaaagagugguauauuua

SEQ ID NO: 53170 - RNA, 21 nt, Human
uaacaugauaggaaaaacuag

SEQ ID NO: 53171 - RNA, 18 nt, Human
uaacuguauaacugauug

SEQ ID NO: 53172 - RNA, 21 nt, Human
uaagaauccaguagcucaaaa

SEQ ID NO: 53173 - RNA, 23 nt, Human
uaauaagaauccaguagcucaaa

SEQ ID NO: 53174 - RNA, 19 nt, Human
uaauaccaacuuuaagcag

SEQ ID NO: 53175 - RNA, 24 nt, Human
uacaaugcaccauucaauucacuc

SEQ ID NO: 53176 - RNA, 19 nt, Human
uacacagaacucagagaua

SEQ ID NO: 53177 - RNA, 22 nt, Human
uaccucaccacuccguggcagc

SEQ ID NO: 53178 - RNA, 19 nt, Human
uagaauccuggccuggguc

SEQ ID NO: 53179 - RNA, 24 nt, Human
uaggacuacaggcucacgccacca

SEQ ID NO: 53180 - RNA, 20 nt, Human
uauauaaaauauacauccua

SEQ ID NO: 53181 - RNA, 19 nt, Human
uauguaaagccccaacaaa

SEQ ID NO: 53182 - RNA, 25 nt, Human
ucaaaaaaaaaaaaaaaaaaagaau

SEQ ID NO: 53183 - RNA, 20 nt, Human
ucaaauaugagaaaaacaca

SEQ ID NO: 53184 - RNA, 23 nt, Human
uccacuguucuaagaagcgaaau

SEQ ID NO: 53185 - RNA, 18 nt, Human
uccaguuugggcggcaga

SEQ ID NO: 53186 - RNA, 19 nt, Human
ucccagguucaggcuauuc

SEQ ID NO: 53187 - RNA, 21 nt, Human
ucccagguucaggcuauucuc

SEQ ID NO: 53188 - RNA, 24 nt, Human
ucccagguucaggcuauucuccug

SEQ ID NO: 53189 - RNA, 24 nt, Human
ucccgaguagcuaggacuacaggc

SEQ ID NO: 53190 - RNA, 19 nt, Human
ucccugauaaaguuuugua

SEQ ID NO: 53191 - RNA, 25 nt, Human
ucgggaggcugaggcaagagaauca

SEQ ID NO: 53192 - RNA, 22 nt, Human
ucuagaccucuggucuaaaucc

SEQ ID NO: 53193 - RNA, 21 nt, Human
ucuauugccaggcuggagugc

SEQ ID NO: 53194 - RNA, 23 nt, Human
ucuauugccaggcuggagugcag

SEQ ID NO: 53195 - RNA, 24 nt, Human
ucuccugccucagccucccgagua

SEQ ID NO: 53196 - RNA, 23 nt, Human
ucucucucaaaaaaaaaaaaaaa

SEQ ID NO: 53197 - RNA, 21 nt, Human
ucugagcuggcgguccggggc

SEQ ID NO: 53198 - RNA, 25 nt, Human
ugaaaauacacagaacucagagaua

SEQ ID NO: 53199 - RNA, 23 nt, Human
ugaaaugggugcuuugcuuaauu

SEQ ID NO: 53200 - RNA, 22 nt, Human
ugagauaaaagcagagguuaac

SEQ ID NO: 53201 - RNA, 22 nt, Human
ugagccaagauugugccacugc

SEQ ID NO: 53202 - RNA, 18 nt, Human
ugagcugccugggccugg

SEQ ID NO: 53203 - RNA, 18 nt, Human
ugaggcaagagaaucacu

SEQ ID NO: 53204 - RNA, 20 nt, Human
ugaggcaagagaaucacuug

SEQ ID NO: 53205 - RNA, 24 nt, Human
ugaggcaagagaaucacuugaacc

SEQ ID NO: 53206 - RNA, 25 nt, Human
ugaggcaagagaaucacuugaaccc

SEQ ID NO: 53207 - RNA, 24 nt, Human
ugccacugcacuccaguuugggcg

SEQ ID NO: 53208 - RNA, 21 nt, Human
ugccaggcuggagugcagugg

SEQ ID NO: 53209 - RNA, 19 nt, Human
ugccccuguucugagcugg

SEQ ID NO: 53210 - RNA, 24 nt, Human
ugccucagccucccgaguagcuag

SEQ ID NO: 53211 - RNA, 18 nt, Human
ugccugggccuggcgcag

SEQ ID NO: 53212 - RNA, 23 nt, Human
ugccugggccuggcgcagugagg

SEQ ID NO: 53213 - RNA, 23 nt, Human
uggagugcaguggggcgaucuug

SEQ ID NO: 53214 - RNA, 24 nt, Human
uggagugcaguggggcgaucuugg

SEQ ID NO: 53215 - RNA, 24 nt, Human
uggauucauuacuugauuucuuag

SEQ ID NO: 53216 - RNA, 28 nt, Human
uggcagcacccuuucuaucuugacuggu

SEQ ID NO: 53217 - RNA, 20 nt, Human
ugggcggcagaguaagacuc

SEQ ID NO: 53218 - RNA, 19 nt, Human
uggggcgaucuuggcccug

SEQ ID NO: 53219 - RNA, 22 nt, Human
ugguaaugaagaucaguauauc

SEQ ID NO: 53220 - RNA, 19 nt, Human
uggucuaaauccuuagaua

SEQ ID NO: 53221 - RNA, 22 nt, Human
ugugccacugcacuccaguuug

SEQ ID NO: 53222 - RNA, 19 nt, Human
uuaaaauaugccugaauua

SEQ ID NO: 53223 - RNA, 22 nt, Human
uuaauuuaaaaaagaaaaagaa

SEQ ID NO: 53224 - RNA, 21 nt, Human
uucaggcuauucuccugccuc

SEQ ID NO: 53225 - RNA, 22 nt, Human
uugcagugagccaagauugugc

SEQ ID NO: 53226 - RNA, 20 nt, Human
uuguauuuggggaacuaaua

SEQ ID NO: 53227 - RNA, 23 nt, Human
uuuaaagacaauuuauacacauu

SEQ ID NO: 53228 - RNA, 20 nt, Human
uuuaaauguaaaaauagagu

SEQ ID NO: 53229 - RNA, 24 nt, Human
uuuuccauaauccuucacaaacua

SEQ ID NO: 53230 - RNA, 19 nt, Human
aaccagaggcagagaacac

SEQ ID NO: 53231 - RNA, 21 nt, Human
aaccagaggcagagaacacaa

SEQ ID NO: 53232 - RNA, 18 nt, Human
aaccuccucaucucugcc

SEQ ID NO: 53233 - RNA, 21 nt, Human
aaggccccccacccaugccca

SEQ ID NO: 53234 - RNA, 24 nt, Human
acaguuccaaugguuuuuguaagg

SEQ ID NO: 53235 - RNA, 20 nt, Human
acccacucugcuucuguccu

SEQ ID NO: 53236 - RNA, 18 nt, Human
aggcaggcgugcaggugg

SEQ ID NO: 53237 - RNA, 20 nt, Human
caaggccccccacccaugcc

SEQ ID NO: 53238 - RNA, 21 nt, Human
cacucugcuucuguccuguga

SEQ ID NO: 53239 - RNA, 24 nt, Human
cacuugcguggccagcagacaagg

SEQ ID NO: 53240 - RNA, 19 nt, Human
cagcagacaaggcccccca

SEQ ID NO: 53241 - RNA, 27 nt, Human
cagcagacaaggccccccacccaugcc

SEQ ID NO: 53242 - RNA, 18 nt, Human
cauuaacaggcacauaua

SEQ ID NO: 53243 - RNA, 21 nt, Human
ccaaaccuccucaucucugcc

SEQ ID NO: 53244 - RNA, 19 nt, Human
ccaaugguuuuuguaaggu

SEQ ID NO: 53245 - RNA, 19 nt, Human
ccccccacccaugcccagg

SEQ ID NO: 53246 - RNA, 18 nt, Human
gagaggcccuggcaggca

SEQ ID NO: 53247 - RNA, 20 nt, Human
gcaggcgugcaggugguugg

SEQ ID NO: 53248 - RNA, 18 nt, Human
gccagcagacaaggcccc

SEQ ID NO: 53249 - RNA, 19 nt, Human
uccaaugguuuuuguaagg

SEQ ID NO: 53250 - RNA, 20 nt, Human
uccaaugguuuuuguaaggu

SEQ ID NO: 53251 - RNA, 18 nt, Human
ucugugccaaaccuccuc

SEQ ID NO: 53252 - RNA, 25 nt, Human
ugacaaguugucaaccuaaugccuu

SEQ ID NO: 53253 - RNA, 20 nt, Human
ugccccagagaggcccuggc

SEQ ID NO: 53254 - RNA, 21 nt, Human
uggcaggcaggcgugcaggug

SEQ ID NO: 53255 - RNA, 21 nt, Human
ugucaaacauaaccaccaccc

SEQ ID NO: 53256 - RNA, 21 nt, Human
uucauuaacaggcacauauaa

SEQ ID NO: 53257 - RNA, 19 nt, Human
uugucaaccuaaugccuuc

SEQ ID NO: 53258 - RNA, 20 nt, Human
aaaaacagagaagacuugaa

SEQ ID NO: 53259 - RNA, 18 nt, Human
aaacucuaagaaagugag

SEQ ID NO: 53260 - RNA, 24 nt, Human
aaagugcugggauuacaggcguga

SEQ ID NO: 53261 - RNA, 22 nt, Human
aacaugcuucugcugauuaaaa

SEQ ID NO: 53262 - RNA, 20 nt, Human
aagaauaaaaacagagaaga

SEQ ID NO: 53263 - RNA, 21 nt, Human
aagagacccacgagagccaau

SEQ ID NO: 53264 - RNA, 22 nt, Human
aagagacccacgagagccaaua

SEQ ID NO: 53265 - RNA, 22 nt, Human
aaguagcugggauuacaggugc

SEQ ID NO: 53266 - RNA, 19 nt, Human
aagugcugggauuacaggc

SEQ ID NO: 53267 - RNA, 19 nt, Human
aagugcugggauuacaggc

SEQ ID NO: 53268 - RNA, 26 nt, Human
aagugcugggauuacaggcgugagcc

SEQ ID NO: 53269 - RNA, 18 nt, Human
acacacauacaaaaugua

SEQ ID NO: 53270 - RNA, 24 nt, Human
acacacauacaaaauguagcaaac

SEQ ID NO: 53271 - RNA, 18 nt, Human
accacgccuggcuaauuu

SEQ ID NO: 53272 - RNA, 18 nt, Human
accuccauccccacccau

SEQ ID NO: 53273 - RNA, 18 nt, Human
acgggguuuugccauguu

SEQ ID NO: 53274 - RNA, 23 nt, Human
acgggguuuugccauguuggcca

SEQ ID NO: 53275 - RNA, 24 nt, Human
acgggguuuugccauguuggccag

SEQ ID NO: 53276 - RNA, 21 nt, Human
acugcaaccuccaccuccugg

SEQ ID NO: 53277 - RNA, 21 nt, Human
acugcaaccuccaccuccugg

SEQ ID NO: 53278 - RNA, 22 nt, Human
acugcaaccuccaccuccuggg

SEQ ID NO: 53279 - RNA, 24 nt, Human
acugcaaccuccaccuccuggguu

SEQ ID NO: 53280 - RNA, 26 nt, Human
acugcaauguuacaauuacauacguu

SEQ ID NO: 53281 - RNA, 21 nt, Human
agaaagugagaguugaagaau

SEQ ID NO: 53282 - RNA, 18 nt, Human
agacaggaucuuguuaug

SEQ ID NO: 53283 - RNA, 18 nt, Human
agagacccacgagagcca

SEQ ID NO: 53284 - RNA, 21 nt, Human
agcacaauuuccuugcaaugc

SEQ ID NO: 53285 - RNA, 20 nt, Human
aggaugcucccagguccugc

SEQ ID NO: 53286 - RNA, 19 nt, Human
agggauaugguuauucuga

SEQ ID NO: 53287 - RNA, 22 nt, Human
agggaucccuuauuggcuccuu

SEQ ID NO: 53288 - RNA, 24 nt, Human
aggggacaauguugcauucaaaac

SEQ ID NO: 53289 - RNA, 24 nt, Human
aggugauccgcccggcucggccuc

SEQ ID NO: 53290 - RNA, 18 nt, Human
agugcugggauuacaggc

SEQ ID NO: 53291 - RNA, 20 nt, Human
agugguguccagagugucuu

SEQ ID NO: 53292 - RNA, 22 nt, Human
aguugugcauucaaguuuuccu

SEQ ID NO: 53293 - RNA, 19 nt, Human
auguugcccaggcuggccu

SEQ ID NO: 53294 - RNA, 19 nt, Human
auuacaggugccugcuacc

SEQ ID NO: 53295 - RNA, 18 nt, Human
auuuaucauuuauuuaac

SEQ ID NO: 53296 - RNA, 24 nt, Human
caaagugcugggauuacaggcgug

SEQ ID NO: 53297 - RNA, 21 nt, Human
caaauagacaccaaaagagac

SEQ ID NO: 53298 - RNA, 23 nt, Human
caaccuccaccuccuggguucaa

SEQ ID NO: 53299 - RNA, 23 nt, Human
caaccucccaagcagcuagaacu

SEQ ID NO: 53300 - RNA, 22 nt, Human
caagcgauucuccugccucagc

SEQ ID NO: 53301 - RNA, 27 nt, Human
caagcgauucuccugccucagccuccc

SEQ ID NO: 53302 - RNA, 27 nt, Human
caagggaaaagaauagaaaaaucuauc

SEQ ID NO: 53303 - RNA, 21 nt, Human
caauaagauuaaaauaagaca

SEQ ID NO: 53304 - RNA, 18 nt, Human
cagacgggguuuugccau

SEQ ID NO: 53305 - RNA, 21 nt, Human
cagagugucuucuugccuccc

SEQ ID NO: 53306 - RNA, 24 nt, Human
caggaucuuguuauguugcccagg

SEQ ID NO: 53307 - RNA, 23 nt, Human
caggugauccgcccggcucggcc

SEQ ID NO: 53308 - RNA, 19 nt, Human
cauaaaaacaugcuucugc

SEQ ID NO: 53309 - RNA, 24 nt, Human
cauguuggccaggcuggucucaaa

SEQ ID NO: 53310 - RNA, 22 nt, Human
ccaaagugcugggauuacaggc

SEQ ID NO: 53311 - RNA, 22 nt, Human
ccaaagugcugggauuacaggc

SEQ ID NO: 53312 - RNA, 24 nt, Human
ccaaagugcugggauuacaggcgu

SEQ ID NO: 53313 - RNA, 22 nt, Human
ccaagcagcuagaacuaugagc

SEQ ID NO: 53314 - RNA, 21 nt, Human
ccaaguagcugggauuacagg

SEQ ID NO: 53315 - RNA, 23 nt, Human
ccaauagauuuuccucuccccaa

SEQ ID NO: 53316 - RNA, 24 nt, Human
ccaccuccuggguucaagcgauuc

SEQ ID NO: 53317 - RNA, 19 nt, Human
ccauguuggccaggcuggu

SEQ ID NO: 53318 - RNA, 22 nt, Human
cccaaguagcugggauuacagg

SEQ ID NO: 53319 - RNA, 23 nt, Human
cccaaguagcugggauuacaggu

SEQ ID NO: 53320 - RNA, 24 nt, Human
cccaaguagcugggauuacaggug

SEQ ID NO: 53321 - RNA, 20 nt, Human
cccggcccucucucuuucuu

SEQ ID NO: 53322 - RNA, 24 nt, Human
cccggcccucucucuuucuuuuuu

SEQ ID NO: 53323 - RNA, 24 nt, Human
cccuggccagaccuguguuccuuc

SEQ ID NO: 53324 - RNA, 19 nt, Human
ccuccaccuccuggguuca

SEQ ID NO: 53325 - RNA, 20 nt, Human
ccucccuccucaaccuccca

SEQ ID NO: 53326 - RNA, 23 nt, Human
ccucccuccucaaccucccaagc

SEQ ID NO: 53327 - RNA, 22 nt, Human
ccucccugcaagucucaggcca

SEQ ID NO: 53328 - RNA, 24 nt, Human
ccuccuggguucaagcgauucucc

SEQ ID NO: 53329 - RNA, 18 nt, Human
ccugaccacaggugaucc

SEQ ID NO: 53330 - RNA, 23 nt, Human
ccugccucagccucccaaguagc

SEQ ID NO: 53331 - RNA, 23 nt, Human
ccuggguucaagcgauucuccug

SEQ ID NO: 53332 - RNA, 22 nt, Human
cgugagccaccacgcccggccc

SEQ ID NO: 53333 - RNA, 24 nt, Human
cucagccucccaaguagcugggau

SEQ ID NO: 53334 - RNA, 26 nt, Human
cucccugcaagucucaggccagaaaa

SEQ ID NO: 53335 - RNA, 24 nt, Human
cuccucaaccucccaagcagcuag

SEQ ID NO: 53336 - RNA, 21 nt, Human
cuccuggguucaagcgauucu

SEQ ID NO: 53337 - RNA, 19 nt, Human
cucucauuaggagguccua

SEQ ID NO: 53338 - RNA, 21 nt, Human
cucuugucgcccaggcuggag

SEQ ID NO: 53339 - RNA, 18 nt, Human
cugcaaccuccaccuccu

SEQ ID NO: 53340 - RNA, 23 nt, Human
cugcaaccuccaccuccuggguu

SEQ ID NO: 53341 - RNA, 23 nt, Human
cugccucagccucccaaguagcu

SEQ ID NO: 53342 - RNA, 24 nt, Human
cugcucucauccuaccuaaaaguc

SEQ ID NO: 53343 - RNA, 24 nt, Human
cuugcucuugucgcccaggcugga

SEQ ID NO: 53344 - RNA, 24 nt, Human
cuugucgcccaggcuggagugcaa

SEQ ID NO: 53345 - RNA, 21 nt, Human
cuuucucucucucucucuuuu

SEQ ID NO: 53346 - RNA, 21 nt, Human
cuuuuuuuuuuuuuuuuuuuu

SEQ ID NO: 53347 - RNA, 23 nt, Human
gaaaucauguuaauaaaaaauca

SEQ ID NO: 53348 - RNA, 18 nt, Human
gaccacaggugauccgcc

SEQ ID NO: 53349 - RNA, 18 nt, Human
gaccuguguuccuucucu

SEQ ID NO: 53350 - RNA, 19 nt, Human
gacgggguuuugccauguu

SEQ ID NO: 53351 - RNA, 22 nt, Human
gagagacaggaucuuguuaugu

SEQ ID NO: 53352 - RNA, 24 nt, Human
gaguacagacgggguuuugccaug

SEQ ID NO: 53353 - RNA, 18 nt, Human
gauuacaggcgugagcca

SEQ ID NO: 53354 - RNA, 21 nt, Human
gauuacaggcgugagccacca

SEQ ID NO: 53355 - RNA, 22 nt, Human
gauuacaggcgugagccaccac

SEQ ID NO: 53356 - RNA, 21 nt, Human
gauucuccugccucagccucc

SEQ ID NO: 53357 - RNA, 22 nt, Human
gcaaccuccaccuccuggguuc

SEQ ID NO: 53358 - RNA, 20 nt, Human
gccauguuggccaggcuggu

SEQ ID NO: 53359 - RNA, 19 nt, Human
gcccaggcuggagugcaac

SEQ ID NO: 53360 - RNA, 22 nt, Human
gcccucucucuuucuuuuuuuu

SEQ ID NO: 53361 - RNA, 24 nt, Human
gcgauucuccugccucagccuccc

SEQ ID NO: 53362 - RNA, 21 nt, Human
gcucuugucgcccaggcugga

SEQ ID NO: 53363 - RNA, 19 nt, Human
gcuggagugcaacggcacg

SEQ ID NO: 53364 - RNA, 18 nt, Human
ggacaaauagacaccaaa

SEQ ID NO: 53365 - RNA, 21 nt, Human
ggacaaauagacaccaaaaga

SEQ ID NO: 53366 - RNA, 18 nt, Human
ggagaagcaucacacaca

SEQ ID NO: 53367 - RNA, 19 nt, Human
ggauuacaggcgugagcca

SEQ ID NO: 53368 - RNA, 23 nt, Human
ggcacgaucucagcuuacugcaa

SEQ ID NO: 53369 - RNA, 23 nt, Human
gggguuuugccauguuggccagg

SEQ ID NO: 53370 - RNA, 22 nt, Human
ggguuuugccauguuggccagg

SEQ ID NO: 53371 - RNA, 19 nt, Human
gguaauaacggcacaggga

SEQ ID NO: 53372 - RNA, 23 nt, Human
guacagacgggguuuugccaugu

SEQ ID NO: 53373 - RNA, 18 nt, Human
guagcugggauuacaggu

SEQ ID NO: 53374 - RNA, 26 nt, Human
guucaagccauccucccuccucaacc

SEQ ID NO: 53375 - RNA, 21 nt, Human
guucucuuucucucuccgggc

SEQ ID NO: 53376 - RNA, 22 nt, Human
guugcuagguaauaacggcaca

SEQ ID NO: 53377 - RNA, 20 nt, Human
guuuggggucacaaucaccc

SEQ ID NO: 53378 - RNA, 21 nt, Human
uaaagcacaauuuccuugcaa

SEQ ID NO: 53379 - RNA, 20 nt, Human
uaaaguagcuugaaggugac

SEQ ID NO: 53380 - RNA, 22 nt, Human
uacaaaauguagcaaaccuuga

SEQ ID NO: 53381 - RNA, 22 nt, Human
uacagacgggguuuugccaugu

SEQ ID NO: 53382 - RNA, 23 nt, Human
uacaggcgugagccaccacgccc

SEQ ID NO: 53383 - RNA, 20 nt, Human
uaccuaaaagucauagaaaa

SEQ ID NO: 53384 - RNA, 25 nt, Human
uacuaaaaaucaagagaaauggcuu

SEQ ID NO: 53385 - RNA, 21 nt, Human
uacugcaaccuccaccuccug

SEQ ID NO: 53386 - RNA, 23 nt, Human
uacugcaaccuccaccuccuggg

SEQ ID NO: 53387 - RNA, 19 nt, Human
uauaucagaaaaggaaauc

SEQ ID NO: 53388 - RNA, 18 nt, Human
uaucagaaaaggaaaucc

SEQ ID NO: 53389 - RNA, 20 nt, Human
uauguugcccaggcuggccu

SEQ ID NO: 53390 - RNA, 23 nt, Human
uauguugcccaggcuggccuuga

SEQ ID NO: 53391 - RNA, 24 nt, Human
uauguugcccaggcuggccuugaa

SEQ ID NO: 53392 - RNA, 23 nt, Human
ucaaacuccugaccacaggugau

SEQ ID NO: 53393 - RNA, 25 nt, Human
ucaagccauccucccuccucaaccu

SEQ ID NO: 53394 - RNA, 19 nt, Human
ucaagcgauucuccugccu

SEQ ID NO: 53395 - RNA, 18 nt, Human
ucacccagauacucucau

SEQ ID NO: 53396 - RNA, 20 nt, Human
ucagccucccaaguagcugg

SEQ ID NO: 53397 - RNA, 21 nt, Human
uccauccccacccauaacaau

SEQ ID NO: 53398 - RNA, 24 nt, Human
ucccaaagugcugggauuacaggc

SEQ ID NO: 53399 - RNA, 23 nt, Human
ucccaaguagcugggauuacagg

SEQ ID NO: 53400 - RNA, 24 nt, Human
ucccaaguagcugggauuacaggu

SEQ ID NO: 53401 - RNA, 21 nt, Human
uccccauccuucucucccaaa

SEQ ID NO: 53402 - RNA, 21 nt, Human
uccuggguucaagcgauucuc

SEQ ID NO: 53403 - RNA, 24 nt, Human
uccuggguucaagcgauucuccug

SEQ ID NO: 53404 - RNA, 18 nt, Human
ucgcccaggcuggagugc

SEQ ID NO: 53405 - RNA, 18 nt, Human
ucggccucccaaagugcu

SEQ ID NO: 53406 - RNA, 22 nt, Human
ucuauaccuccauccccaccca

SEQ ID NO: 53407 - RNA, 18 nt, Human
ucuaucacuaacaccacu

SEQ ID NO: 53408 - RNA, 26 nt, Human
ucuccugccucagccucccaaguagc

SEQ ID NO: 53409 - RNA, 24 nt, Human
ucucuuucucucucucucucuuuu

SEQ ID NO: 53410 - RNA, 24 nt, Human
ucuugcucuugucgcccaggcugg

SEQ ID NO: 53411 - RNA, 25 nt, Human
ucuugcucuugucgcccaggcugga

SEQ ID NO: 53412 - RNA, 19 nt, Human
ucuuguuauguugcccagg

SEQ ID NO: 53413 - RNA, 23 nt, Human
ucuuguuauguugcccaggcugg

SEQ ID NO: 53414 - RNA, 19 nt, Human
ucuuucucucucucucucc

SEQ ID NO: 53415 - RNA, 25 nt, Human
ugaccacaggugauccgcccggcuc

SEQ ID NO: 53416 - RNA, 21 nt, Human
ugaccugauuggcauuucuga

SEQ ID NO: 53417 - RNA, 18 nt, Human
ugagacagagucuugcuc

SEQ ID NO: 53418 - RNA, 23 nt, Human
ugagagacaggaucuuguuaugu

SEQ ID NO: 53419 - RNA, 26 nt, Human
ugagaugaagagacccacgagagcca

SEQ ID NO: 53420 - RNA, 25 nt, Human
ugagccagaagcaaauuugcuguca

SEQ ID NO: 53421 - RNA, 24 nt, Human
ugaguacagacgggguuuugccau

SEQ ID NO: 53422 - RNA, 24 nt, Human
ugauggaagaguuuguguuacuug

SEQ ID NO: 53423 - RNA, 24 nt, Human
ugccauguuggccaggcuggucuc

SEQ ID NO: 53424 - RNA, 27 nt, Human
ugccauguuggccaggcuggucucaaa

SEQ ID NO: 53425 - RNA, 24 nt, Human
ugccucagccucccaaguagcugg

SEQ ID NO: 53426 - RNA, 24 nt, Human
ugcucuugucgcccaggcuggagu

SEQ ID NO: 53427 - RNA, 24 nt, Human
ugcugggauuacaggcgugagcca

SEQ ID NO: 53428 - RNA, 23 nt, Human
ugcuuccccauccuucucuccca

SEQ ID NO: 53429 - RNA, 20 nt, Human
uggagugcaacggcacgauc

SEQ ID NO: 53430 - RNA, 20 nt, Human
uggaucugcucaucuucauu

SEQ ID NO: 53431 - RNA, 24 nt, Human
uggccaggcuggucucaaacuccu

SEQ ID NO: 53432 - RNA, 24 nt, Human
uggccugauggaagaguuuguguu

SEQ ID NO: 53433 - RNA, 18 nt, Human
ugggauuacaggcgugag

SEQ ID NO: 53434 - RNA, 19 nt, Human
ugggauuacaggcgugagc

SEQ ID NO: 53435 - RNA, 22 nt, Human
ugggauuacaggcgugagccac

SEQ ID NO: 53436 - RNA, 23 nt, Human
ugggauuacaggcgugagccacc

SEQ ID NO: 53437 - RNA, 24 nt, Human
ugggauuacaggcgugagccacca

SEQ ID NO: 53438 - RNA, 22 nt, Human
ugggauuacaggugccugcuac

SEQ ID NO: 53439 - RNA, 24 nt, Human
ugggauuacaggugccugcuacca

SEQ ID NO: 53440 - RNA, 23 nt, Human
uggguucaagcgauucuccugcc

SEQ ID NO: 53441 - RNA, 24 nt, Human
uggguucaagcgauucuccugccu

SEQ ID NO: 53442 - RNA, 20 nt, Human
ugucgcccaggcuggagugc

SEQ ID NO: 53443 - RNA, 22 nt, Human
uguuauguugcccaggcuggcc

SEQ ID NO: 53444 - RNA, 22 nt, Human
uguucacaguccuccugcccau

SEQ ID NO: 53445 - RNA, 24 nt, Human
uuacugcaaccuccaccuccuggg

SEQ ID NO: 53446 - RNA, 25 nt, Human
uuacugcaaccuccaccuccugggu

SEQ ID NO: 53447 - RNA, 21 nt, Human
uucaagcgauucuccugccuc

SEQ ID NO: 53448 - RNA, 23 nt, Human
uucaagcgauucuccugccucag

SEQ ID NO: 53449 - RNA, 24 nt, Human
uucaagcgauucuccugccucagc

SEQ ID NO: 53450 - RNA, 23 nt, Human
uucaauauaucagaaaaggaaau

SEQ ID NO: 53451 - RNA, 22 nt, Human
uucacagcuuccaaaauuauuu

SEQ ID NO: 53452 - RNA, 21 nt, Human
uugagagacaggaucuuguua

SEQ ID NO: 53453 - RNA, 20 nt, Human
uugauccucucaccaugcuu

SEQ ID NO: 53454 - RNA, 24 nt, Human
uugccauguuggccaggcuggucu

SEQ ID NO: 53455 - RNA, 21 nt, Human
uuugauccucucaccaugcuu

SEQ ID NO: 53456 - RNA, 22 nt, Human
uuuguacaaacauaaaaacaug

SEQ ID NO: 53457 - RNA, 23 nt, Human
uuuugccauguuggccaggcugg

SEQ ID NO: 53458 - RNA, 20 nt, Human
uuuuuuuuucugagacagag

SEQ ID NO: 53459 - RNA, 24 nt, Human
uuuuuuuuuucugagacagagucu

SEQ ID NO: 53460 - RNA, 21 nt, Human
uuuuuuuuuugagagacaggg

SEQ ID NO: 53461 - RNA, 18 nt, Human
uuuuuuuuuuuuuuucug

SEQ ID NO: 53462 - RNA, 18 nt, Human
uuuuuuuuuuuuuuuuug

SEQ ID NO: 53463 - RNA, 26 nt, Human
aaaaaacaaaauuuggcugggcuugg

SEQ ID NO: 53464 - RNA, 19 nt, Human
aaaaggccuaaaaucagag

SEQ ID NO: 53465 - RNA, 20 nt, Human
aacgugaugaaaccccaucu

SEQ ID NO: 53466 - RNA, 21 nt, Human
aacgugaugaaaccccaucuc

SEQ ID NO: 53467 - RNA, 18 nt, Human
aagaaauaagguggcugg

SEQ ID NO: 53468 - RNA, 19 nt, Human
aagcauggcugcagaacac

SEQ ID NO: 53469 - RNA, 22 nt, Human
aagcugcuaauuaggcaaccug

SEQ ID NO: 53470 - RNA, 21 nt, Human
aaguguuuaaggccaagaacc

SEQ ID NO: 53471 - RNA, 19 nt, Human
aauugcuugagcccagagg

SEQ ID NO: 53472 - RNA, 22 nt, Human
aauuuguuccaguucucuccug

SEQ ID NO: 53473 - RNA, 18 nt, Human
acacugcagggaaggcag

SEQ ID NO: 53474 - RNA, 20 nt, Human
accagcaacaucccuaaagg

SEQ ID NO: 53475 - RNA, 26 nt, Human
accccaucucuacaaaaaaaaaacaa

SEQ ID NO: 53476 - RNA, 22 nt, Human
acccugaagcauggcugcagaa

SEQ ID NO: 53477 - RNA, 18 nt, Human
acugcacuccagccugag

SEQ ID NO: 53478 - RNA, 19 nt, Human
agaaaguguuuaaggccaa

SEQ ID NO: 53479 - RNA, 24 nt, Human
agaggcugcagugagccgugauug

SEQ ID NO: 53480 - RNA, 18 nt, Human
agcacuuuuguucaaagc

SEQ ID NO: 53481 - RNA, 18 nt, Human
agcagcuauaagaaaggc

SEQ ID NO: 53482 - RNA, 20 nt, Human
agcaugauuuaagguugaau

SEQ ID NO: 53483 - RNA, 21 nt, Human
agcauuuuagaauuagaaaca

SEQ ID NO: 53484 - RNA, 21 nt, Human
agcauuuugggaggccgaggc

SEQ ID NO: 53485 - RNA, 20 nt, Human
agcccagagguucgagauca

SEQ ID NO: 53486 - RNA, 27 nt, Human
agcccagagguucgagaucagccuggg

SEQ ID NO: 53487 - RNA, 23 nt, Human
agccugagauccugucucaaaaa

SEQ ID NO: 53488 - RNA, 22 nt, Human
agccugggcaacgugaugaaac

SEQ ID NO: 53489 - RNA, 24 nt, Human
agccugggcaacgugaugaaaccc

SEQ ID NO: 53490 - RNA, 22 nt, Human
agcuaccaaaaaugaaaggcaa

SEQ ID NO: 53491 - RNA, 24 nt, Human
agcuacuugggaggcugagguggg

SEQ ID NO: 53492 - RNA, 24 nt, Human
agcuauaagaaaggcauuaaacaa

SEQ ID NO: 53493 - RNA, 23 nt, Human
aggaaaauaguauuuuguuuaga

SEQ ID NO: 53494 - RNA, 19 nt, Human
aggaagaauauauucaagg

SEQ ID NO: 53495 - RNA, 21 nt, Human
aggcaagaaaugaaaggagga

SEQ ID NO: 53496 - RNA, 19 nt, Human
aggccgaggcgagugaauu

SEQ ID NO: 53497 - RNA, 24 nt, Human
aggcugaggugggaggaucaccug

SEQ ID NO: 53498 - RNA, 19 nt, Human
agguagaggcugcagugag

SEQ ID NO: 53499 - RNA, 21 nt, Human
agguagaggcugcagugagcc

SEQ ID NO: 53500 - RNA, 20 nt, Human
aggugggaggaucaccugag

SEQ ID NO: 53501 - RNA, 24 nt, Human
aggugggaggaucaccugagccug

SEQ ID NO: 53502 - RNA, 23 nt, Human
agugaugaggacaaaaagaggaa

SEQ ID NO: 53503 - RNA, 24 nt, Human
aguggcucaggccuguaaucccag

SEQ ID NO: 53504 - RNA, 18 nt, Human
auaacucaaauccuacua

SEQ ID NO: 53505 - RNA, 24 nt, Human
augggcuggugucuugucaguugg

SEQ ID NO: 53506 - RNA, 24 nt, Human
auugugccacugcacuccagccug

SEQ ID NO: 53507 - RNA, 23 nt, Human
auuugacuccggucaaaucaaga

SEQ ID NO: 53508 - RNA, 19 nt, Human
caagacagauauguuggau

SEQ ID NO: 53509 - RNA, 23 nt, Human
caagaccugaggcuguccaccaa

SEQ ID NO: 53510 - RNA, 24 nt, Human
caccaacagcuauacccugaagca

SEQ ID NO: 53511 - RNA, 20 nt, Human
caccccucacacccaggaaa

SEQ ID NO: 53512 - RNA, 18 nt, Human
cacugcacuccagccuga

SEQ ID NO: 53513 - RNA, 19 nt, Human
cacugcacuccagccugag

SEQ ID NO: 53514 - RNA, 19 nt, Human
cacugcacuccagccugag

SEQ ID NO: 53515 - RNA, 20 nt, Human
cacugcacuccagccugaga

SEQ ID NO: 53516 - RNA, 21 nt, Human
cagcaccuggugaagcguccu

SEQ ID NO: 53517 - RNA, 23 nt, Human
cagcauuuugggaggccgaggcg

SEQ ID NO: 53518 - RNA, 24 nt, Human
cagccugagauccugucucaaaaa

SEQ ID NO: 53519 - RNA, 21 nt, Human
cagcuacuugggaggcugagg

SEQ ID NO: 53520 - RNA, 24 nt, Human
cagcuacuugggaggcugaggugg

SEQ ID NO: 53521 - RNA, 24 nt, Human
cagguggauaggaggacaagaaau

SEQ ID NO: 53522 - RNA, 23 nt, Human
caucagcauuguccuuuuuaaga

SEQ ID NO: 53523 - RNA, 21 nt, Human
ccaacagcuauacccugaagc

SEQ ID NO: 53524 - RNA, 20 nt, Human
ccacugcacuccagccugag

SEQ ID NO: 53525 - RNA, 20 nt, Human
ccacugcacuccagccugag

SEQ ID NO: 53526 - RNA, 21 nt, Human
ccacugcacuccagccugaga

SEQ ID NO: 53527 - RNA, 22 nt, Human
ccacugcacuccagccugagau

SEQ ID NO: 53528 - RNA, 18 nt, Human
ccagaaaguguuuaaggc

SEQ ID NO: 53529 - RNA, 23 nt, Human
ccagcaacaucccuaaaggucuc

SEQ ID NO: 53530 - RNA, 18 nt, Human
ccagcaccuggugaagcg

SEQ ID NO: 53531 - RNA, 20 nt, Human
ccagccugagauccugucuc

SEQ ID NO: 53532 - RNA, 24 nt, Human
ccaugcaggccauguguggaugca

SEQ ID NO: 53533 - RNA, 21 nt, Human
cccaucucuacaaaaaaaaaa

SEQ ID NO: 53534 - RNA, 18 nt, Human
ccccagggagccuucuuc

SEQ ID NO: 53535 - RNA, 26 nt, Human
cccccaagaccugaggcuguccaccu

SEQ ID NO: 53536 - RNA, 18 nt, Human
ccuauagucccagcuacu

SEQ ID NO: 53537 - RNA, 21 nt, Human
ccuauagucccagcuacuugg

SEQ ID NO: 53538 - RNA, 22 nt, Human
ccucacacccaggaaagccucc

SEQ ID NO: 53539 - RNA, 23 nt, Human
ccucccgcgggccgcuccugggu

SEQ ID NO: 53540 - RNA, 25 nt, Human
ccuccuguucguggccagcaccugg

SEQ ID NO: 53541 - RNA, 22 nt, Human
ccugagccuggggagguagagg

SEQ ID NO: 53542 - RNA, 24 nt, Human
ccugggcaacgugaugaaacccca

SEQ ID NO: 53543 - RNA, 20 nt, Human
ccugggugggcgacccuggc

SEQ ID NO: 53544 - RNA, 20 nt, Human
ccuguaaucccagcauuuug

SEQ ID NO: 53545 - RNA, 18 nt, Human
cgacccuggcgcaccccu

SEQ ID NO: 53546 - RNA, 18 nt, Human
cgcaccccucacacccag

SEQ ID NO: 53547 - RNA, 21 nt, Human
cgcaccccucacacccaggaa

SEQ ID NO: 53548 - RNA, 25 nt, Human
cggcucguccacuugugcccccuca

SEQ ID NO: 53549 - RNA, 21 nt, Human
cuaccaaaaaugaaaggcaag

SEQ ID NO: 53550 - RNA, 24 nt, Human
cucaggccuguaaucccagcauuu

SEQ ID NO: 53551 - RNA, 22 nt, Human
cugcagugagccgugauugugc

SEQ ID NO: 53552 - RNA, 24 nt, Human
cugcgcccucggccggaggcucac

SEQ ID NO: 53553 - RNA, 24 nt, Human
cuuucacaccucguuuaguggcua

SEQ ID NO: 53554 - RNA, 19 nt, Human
gagcaccaguauugaguga

SEQ ID NO: 53555 - RNA, 21 nt, Human
gagcccagagguucgagauca

SEQ ID NO: 53556 - RNA, 24 nt, Human
gaggcgagugaauugcuugagccc

SEQ ID NO: 53557 - RNA, 26 nt, Human
gaucagcauuuuagaauuagaaacac

SEQ ID NO: 53558 - RNA, 22 nt, Human
gaugcagguggauaggaggaca

SEQ ID NO: 53559 - RNA, 21 nt, Human
gauugugccacugcacuccag

SEQ ID NO: 53560 - RNA, 21 nt, Human
gcagggaaggcagccccaugc

SEQ ID NO: 53561 - RNA, 20 nt, Human
gccaagaaccaaaauuacag

SEQ ID NO: 53562 - RNA, 22 nt, Human
gcccagagguucgagaucagcc

SEQ ID NO: 53563 - RNA, 23 nt, Human
gcgagugaauugcuugagcccag

SEQ ID NO: 53564 - RNA, 23 nt, Human
gcgcugcgcccucggccggaggc

SEQ ID NO: 53565 - RNA, 21 nt, Human
gcugggcuuggugaugugugc

SEQ ID NO: 53566 - RNA, 22 nt, Human
gcugggcuuggugaugugugcc

SEQ ID NO: 53567 - RNA, 18 nt, Human
gcuggucauccucuugag

SEQ ID NO: 53568 - RNA, 20 nt, Human
ggcaagaaaugaaaggagga

SEQ ID NO: 53569 - RNA, 24 nt, Human
ggccuguaaucccagcauuuuggg

SEQ ID NO: 53570 - RNA, 23 nt, Human
ggcgcaguggcucaggccuguaa

SEQ ID NO: 53571 - RNA, 20 nt, Human
ggcguugcggggccccaggg

SEQ ID NO: 53572 - RNA, 19 nt, Human
ggcugggcgcaguggcuca

SEQ ID NO: 53573 - RNA, 18 nt, Human
gucaguuguuaagcaguu

SEQ ID NO: 53574 - RNA, 18 nt, Human
gugaugaaaccccaucuc

SEQ ID NO: 53575 - RNA, 20 nt, Human
gugugccuauagucccagcu

SEQ ID NO: 53576 - RNA, 21 nt, Human
uaaaacaagacaaacuauucc

SEQ ID NO: 53577 - RNA, 22 nt, Human
uaaaauguacacagucuugaaa

SEQ ID NO: 53578 - RNA, 19 nt, Human
uaaacaguucucuaccuuu

SEQ ID NO: 53579 - RNA, 21 nt, Human
uaaacaguucucuaccuuuca

SEQ ID NO: 53580 - RNA, 20 nt, Human
uaaaggaaaauaguauuuug

SEQ ID NO: 53581 - RNA, 19 nt, Human
uaaauuaggucauaauagu

SEQ ID NO: 53582 - RNA, 22 nt, Human
uaagcagcuaccaaaaaugaaa

SEQ ID NO: 53583 - RNA, 24 nt, Human
uacaaaaaaaaaacaaaauuuggc

SEQ ID NO: 53584 - RNA, 19 nt, Human
uaccaaaaaugaaaggcaa

SEQ ID NO: 53585 - RNA, 21 nt, Human
uaccaaaaaugaaaggcaaga

SEQ ID NO: 53586 - RNA, 20 nt, Human
uacccugaagcauggcugca

SEQ ID NO: 53587 - RNA, 24 nt, Human
uauacccugaagcauggcugcaga

SEQ ID NO: 53588 - RNA, 24 nt, Human
uaucuuuggaaauaauuuaaaaug

SEQ ID NO: 53589 - RNA, 21 nt, Human
uauuccagugaccauaauugc

SEQ ID NO: 53590 - RNA, 24 nt, Human
ucaaaaaauaauaacucaaauccu

SEQ ID NO: 53591 - RNA, 22 nt, Human
ucaaaucaagacuugaccagca

SEQ ID NO: 53592 - RNA, 19 nt, Human
ucaaauccuggcugggcgc

SEQ ID NO: 53593 - RNA, 23 nt, Human
ucaccgcaaucuuccgcucuggg

SEQ ID NO: 53594 - RNA, 20 nt, Human
ucaccugagccuggggaggu

SEQ ID NO: 53595 - RNA, 22 nt, Human
ucacuaucuuuggaaauaauuu

SEQ ID NO: 53596 - RNA, 21 nt, Human
ucaggccuguaaucccagcau

SEQ ID NO: 53597 - RNA, 23 nt, Human
uccaccaacagcuauacccugaa

SEQ ID NO: 53598 - RNA, 21 nt, Human
ucccccggacugcgggcgggc

SEQ ID NO: 53599 - RNA, 21 nt, Human
ucuuccaucagcauuguccuu

SEQ ID NO: 53600 - RNA, 25 nt, Human
ucuugaaaucuugauauaacauuuu

SEQ ID NO: 53601 - RNA, 19 nt, Human
ugaacuaaaggaaaauagu

SEQ ID NO: 53602 - RNA, 24 nt, Human
ugaauugcuugagcccagagguuc

SEQ ID NO: 53603 - RNA, 23 nt, Human
ugagcccagagguucgagaucag

SEQ ID NO: 53604 - RNA, 22 nt, Human
ugagccgugauugugccacugc

SEQ ID NO: 53605 - RNA, 19 nt, Human
ugagccuggggagguagag

SEQ ID NO: 53606 - RNA, 25 nt, Human
ugagccuggggagguagaggcugca

SEQ ID NO: 53607 - RNA, 21 nt, Human
ugaggauuccaagauugcuug

SEQ ID NO: 53608 - RNA, 19 nt, Human
ugaggugggaggaucaccu

SEQ ID NO: 53609 - RNA, 20 nt, Human
ugaggugggaggaucaccug

SEQ ID NO: 53610 - RNA, 21 nt, Human
ugaggugggaggaucaccuga

SEQ ID NO: 53611 - RNA, 23 nt, Human
ugaggugggaggaucaccugagc

SEQ ID NO: 53612 - RNA, 24 nt, Human
ugaggugggaggaucaccugagcc

SEQ ID NO: 53613 - RNA, 19 nt, Human
ugaguaaguucucugaguc

SEQ ID NO: 53614 - RNA, 21 nt, Human
ugagugaugaggacaaaaaga

SEQ ID NO: 53615 - RNA, 21 nt, Human
ugaugaggacaaaaagaggaa

SEQ ID NO: 53616 - RNA, 18 nt, Human
ugaugugugccuauaguc

SEQ ID NO: 53617 - RNA, 18 nt, Human
ugcagggaaggcagcccc

SEQ ID NO: 53618 - RNA, 22 nt, Human
ugcagugagccgugauugugcc

SEQ ID NO: 53619 - RNA, 18 nt, Human
ugcccccaagaccugagg

SEQ ID NO: 53620 - RNA, 24 nt, Human
ugccuauagucccagcuacuuggg

SEQ ID NO: 53621 - RNA, 19 nt, Human
ugcggggccccagggagcc

SEQ ID NO: 53622 - RNA, 22 nt, Human
uggcucaggccuguaaucccag

SEQ ID NO: 53623 - RNA, 24 nt, Human
uggcucaggccuguaaucccagca

SEQ ID NO: 53624 - RNA, 19 nt, Human
uggcuggaaggaccuccag

SEQ ID NO: 53625 - RNA, 22 nt, Human
ugggaggccgaggcgagugaau

SEQ ID NO: 53626 - RNA, 24 nt, Human
ugggaggccgaggcgagugaauug

SEQ ID NO: 53627 - RNA, 19 nt, Human
ugggaggcugaggugggag

SEQ ID NO: 53628 - RNA, 24 nt, Human
ugggaggcugaggugggaggauca

SEQ ID NO: 53629 - RNA, 20 nt, Human
ugggcuggugucuugucagu

SEQ ID NO: 53630 - RNA, 24 nt, Human
ugguaugcacaaaaggccuaaaau

SEQ ID NO: 53631 - RNA, 24 nt, Human
uggugaugugugccuauaguccca

SEQ ID NO: 53632 - RNA, 24 nt, Human
uguagaaugucuuaccccaccaua

SEQ ID NO: 53633 - RNA, 20 nt, Human
uguucaaagcuagaacccac

SEQ ID NO: 53634 - RNA, 20 nt, Human
uucuucggcacacacacugg

SEQ ID NO: 53635 - RNA, 24 nt, Human
uugcuggucauccucuugagccuu

SEQ ID NO: 53636 - RNA, 21 nt, Human
uugcuugagcccagagguucg

SEQ ID NO: 53637 - RNA, 19 nt, Human
uuggcugggcuuggugaug

SEQ ID NO: 53638 - RNA, 24 nt, Human
uuggcugggcuuggugaugugugc

SEQ ID NO: 53639 - RNA, 18 nt, Human
uugggaggccgaggcgag

SEQ ID NO: 53640 - RNA, 24 nt, Human
uugggaggccgaggcgagugaauu

SEQ ID NO: 53641 - RNA, 25 nt, Human
uugggaggcugaggugggaggauca

SEQ ID NO: 53642 - RNA, 23 nt, Human
uugugccacugcacuccagccug

SEQ ID NO: 53643 - RNA, 23 nt, Human
uuuaagcagcuaccaaaaaugaa

SEQ ID NO: 53644 - RNA, 22 nt, Human
uuuguucaaagcuagaacccac

SEQ ID NO: 53645 - RNA, 21 nt, Human
aaacagauguuuauugugauc

SEQ ID NO: 53646 - RNA, 24 nt, Human
agcaaaccgggucugccaccuucu

SEQ ID NO: 53647 - RNA, 22 nt, Human
augcccaaauaaccuaggugac

SEQ ID NO: 53648 - RNA, 24 nt, Human
cagccuccugaucccuggggcgau

SEQ ID NO: 53649 - RNA, 21 nt, Human
caugcccaaauaaccuaggug

SEQ ID NO: 53650 - RNA, 18 nt, Human
ccagcaauuauucuaucc

SEQ ID NO: 53651 - RNA, 21 nt, Human
ccaggcccaguguggguagga

SEQ ID NO: 53652 - RNA, 19 nt, Human
ccaguguggguaggaguga

SEQ ID NO: 53653 - RNA, 24 nt, Human
gaagaggcuguaucacauauucuu

SEQ ID NO: 53654 - RNA, 20 nt, Human
gaauugguccuuuuuacuuu

SEQ ID NO: 53655 - RNA, 19 nt, Human
gaucagcaaaccgggucug

SEQ ID NO: 53656 - RNA, 22 nt, Human
ucagccuccugaucccuggggc

SEQ ID NO: 53657 - RNA, 20 nt, Human
uucaaagcuacaaagacucu

SEQ ID NO: 53658 - RNA, 21 nt, Human
aaaaaucaccgagaugacccc

SEQ ID NO: 53659 - RNA, 24 nt, Human
aacuaccagaagaauuaaaaacag

SEQ ID NO: 53660 - RNA, 18 nt, Human
aagugacaccacgauccu

SEQ ID NO: 53661 - RNA, 21 nt, Human
aagugacaccacgauccuggu

SEQ ID NO: 53662 - RNA, 19 nt, Human
aaguuacaaaaaucaccga

SEQ ID NO: 53663 - RNA, 22 nt, Human
aaugagagggguagaggagaaa

SEQ ID NO: 53664 - RNA, 24 nt, Human
accgagaugacccccaaauguaac

SEQ ID NO: 53665 - RNA, 19 nt, Human
acuaaagucagugggauuc

SEQ ID NO: 53666 - RNA, 22 nt, Human
agaacccucucaggcuaagcuc

SEQ ID NO: 53667 - RNA, 20 nt, Human
aggccacuugcucccugccu

SEQ ID NO: 53668 - RNA, 24 nt, Human
caaaaaucaccgagaugaccccca

SEQ ID NO: 53669 - RNA, 19 nt, Human
cacggaaggaaugagaggg

SEQ ID NO: 53670 - RNA, 20 nt, Human
cacuugcucccugccugggu

SEQ ID NO: 53671 - RNA, 20 nt, Human
cagaagugaccaggccacuu

SEQ ID NO: 53672 - RNA, 22 nt, Human
caucaagacccacuaaagucag

SEQ ID NO: 53673 - RNA, 22 nt, Human
ccacuugcucccugccugggug

SEQ ID NO: 53674 - RNA, 24 nt, Human
ccacuugcucccugccuggguggc

SEQ ID NO: 53675 - RNA, 20 nt, Human
cccacuaaagucagugggau

SEQ ID NO: 53676 - RNA, 20 nt, Human
gagagcucuaaguguccugc

SEQ ID NO: 53677 - RNA, 18 nt, Human
ggccacuugcucccugcc

SEQ ID NO: 53678 - RNA, 19 nt, Human
ggccacuugcucccugccu

SEQ ID NO: 53679 - RNA, 19 nt, Human
ggccacuugcucccugccu

SEQ ID NO: 53680 - RNA, 19 nt, Human
gggauuguuuuuuuuuuuu

SEQ ID NO: 53681 - RNA, 30 nt, Human
uacaaaaaucaccgagaugacccccaaauu

SEQ ID NO: 53682 - RNA, 21 nt, Human
uagagaaaacuaccagaagaa

SEQ ID NO: 53683 - RNA, 23 nt, Human
uagagagcucuaaguguccugcg

SEQ ID NO: 53684 - RNA, 24 nt, Human
ucaaucgaaccagaagugaccagg

SEQ ID NO: 53685 - RNA, 18 nt, Human
ucaccgagaugaccccca

SEQ ID NO: 53686 - RNA, 23 nt, Human
ucaccgagaugacccccaaaugu

SEQ ID NO: 53687 - RNA, 21 nt, Human
uccaaaauggggagacaggga

SEQ ID NO: 53688 - RNA, 25 nt, Human
ucgaaccagaagugaccaggccacu

SEQ ID NO: 53689 - RNA, 21 nt, Human
ucucaggcuaagcuccagugu

SEQ ID NO: 53690 - RNA, 19 nt, Human
ugccuggguggcugugggc

SEQ ID NO: 53691 - RNA, 22 nt, Human
ugccuggguggcugugggccuc

SEQ ID NO: 53692 - RNA, 20 nt, Human
uggcacggaaggaaugagag

SEQ ID NO: 53693 - RNA, 23 nt, Human
ugggauuguuuuuuuuuuuuuuu

SEQ ID NO: 53694 - RNA, 22 nt, Human
ugggguaaaaucuagaaacuga

SEQ ID NO: 53695 - RNA, 24 nt, Human
uggguggcugugggccucaggggg

SEQ ID NO: 53696 - RNA, 26 nt, Human
uguuuuuuuuuuuuuuuuuaccaugg

SEQ ID NO: 53697 - RNA, 24 nt, Human
uuaaaaacagggucaauuaaaacc

SEQ ID NO: 53698 - RNA, 18 nt, Human
uugcucccugccugggug

SEQ ID NO: 53699 - RNA, 25 nt, Human
uuuuuuuuuuuuuuuuuaccauggg

SEQ ID NO: 53700 - RNA, 20 nt, Human
aaccaugcuggggacgaaag

SEQ ID NO: 53701 - RNA, 21 nt, Human
acaugauggcuggugucccca

SEQ ID NO: 53702 - RNA, 19 nt, Human
acuggagugcaguggcgca

SEQ ID NO: 53703 - RNA, 21 nt, Human
agaugugaaugccacugaacu

SEQ ID NO: 53704 - RNA, 21 nt, Human
agugcaguggcgcaaucucag

SEQ ID NO: 53705 - RNA, 23 nt, Human
caaccuccaccucccgaguucaa

SEQ ID NO: 53706 - RNA, 28 nt, Human
caagugauucucaugccucaggcuccca

SEQ ID NO: 53707 - RNA, 21 nt, Human
cacccaccaccacacccagcu

SEQ ID NO: 53708 - RNA, 21 nt, Human
cacugcaaccuccaccucccg

SEQ ID NO: 53709 - RNA, 22 nt, Human
cagccccucgcuuggccucggg

SEQ ID NO: 53710 - RNA, 20 nt, Human
cagcggguacagccuggacc

SEQ ID NO: 53711 - RNA, 19 nt, Human
cagcugagagcagcgggua

SEQ ID NO: 53712 - RNA, 21 nt, Human
caggcacccaccaccacaccc

SEQ ID NO: 53713 - RNA, 23 nt, Human
caggcacccaccaccacacccag

SEQ ID NO: 53714 - RNA, 18 nt, Human
caguggauccuugaccuu

SEQ ID NO: 53715 - RNA, 24 nt, Human
ccaccucccgaguucaagugauuc

SEQ ID NO: 53716 - RNA, 21 nt, Human
ccacgggcccagcugagagca

SEQ ID NO: 53717 - RNA, 23 nt, Human
ccauguagcugggauuacaggca

SEQ ID NO: 53718 - RNA, 21 nt, Human
cccaccaccacacccagcuaa

SEQ ID NO: 53719 - RNA, 19 nt, Human
cccauguagcugggauuac

SEQ ID NO: 53720 - RNA, 18 nt, Human
ccccagaaacacagagcu

SEQ ID NO: 53721 - RNA, 23 nt, Human
cccgaguucaagugauucucaug

SEQ ID NO: 53722 - RNA, 23 nt, Human
ccucacagggcaguggggccagg

SEQ ID NO: 53723 - RNA, 21 nt, Human
ccuccuggcuauagcaggggc

SEQ ID NO: 53724 - RNA, 18 nt, Human
cggggcuggggcggacgc

SEQ ID NO: 53725 - RNA, 24 nt, Human
cucacugcaaccuccaccucccga

SEQ ID NO: 53726 - RNA, 19 nt, Human
cucccgaguucaagugauu

SEQ ID NO: 53727 - RNA, 23 nt, Human
cugcaaccuccaccucccgaguu

SEQ ID NO: 53728 - RNA, 24 nt, Human
cugcaaccuccaccucccgaguuc

SEQ ID NO: 53729 - RNA, 20 nt, Human
cuguggggccuccgcgccgg

SEQ ID NO: 53730 - RNA, 19 nt, Human
gaaugccacugaacugaaa

SEQ ID NO: 53731 - RNA, 19 nt, Human
gacacuggcagccccucgc

SEQ ID NO: 53732 - RNA, 23 nt, Human
gaccagacuggagugcaguggcg

SEQ ID NO: 53733 - RNA, 22 nt, Human
gcaaccuccaccucccgaguuc

SEQ ID NO: 53734 - RNA, 24 nt, Human
gcccggcccacccacgggcccagc

SEQ ID NO: 53735 - RNA, 21 nt, Human
gcggggcuguggggccuccgc

SEQ ID NO: 53736 - RNA, 18 nt, Human
ggacccggggcuggggcg

SEQ ID NO: 53737 - RNA, 19 nt, Human
ggacccggggcuggggcgg

SEQ ID NO: 53738 - RNA, 20 nt, Human
ggcccagcugagagcagcgg

SEQ ID NO: 53739 - RNA, 21 nt, Human
ggcuggggcggacgcgguggg

SEQ ID NO: 53740 - RNA, 22 nt, Human
gggcuggggcggacgcgguggg

SEQ ID NO: 53741 - RNA, 23 nt, Human
gggcuggggcggacgcggugggu

SEQ ID NO: 53742 - RNA, 22 nt, Human
gggcuguggggccuccgcgccg

SEQ ID NO: 53743 - RNA, 22 nt, Human
ggggcuggggcggacgcggugg

SEQ ID NO: 53744 - RNA, 18 nt, Human
guagcugggauuacaggc

SEQ ID NO: 53745 - RNA, 21 nt, Human
guggggcaggguuuaauuucc

SEQ ID NO: 53746 - RNA, 21 nt, Human
uaauuuuuauauuuuuaguag

SEQ ID NO: 53747 - RNA, 22 nt, Human
uaauuuuuauauuuuuaguagg

SEQ ID NO: 53748 - RNA, 24 nt, Human
ucaccaggcaaggagaggcucccg

SEQ ID NO: 53749 - RNA, 18 nt, Human
ucacugcaaccuccaccu

SEQ ID NO: 53750 - RNA, 19 nt, Human
ucacugcaaccuccaccuc

SEQ ID NO: 53751 - RNA, 22 nt, Human
ucacugcaaccuccaccucccg

SEQ ID NO: 53752 - RNA, 27 nt, Human
ucacugcaaccuccaccucccgaguuc

SEQ ID NO: 53753 - RNA, 24 nt, Human
ucccauguagcugggauuacaggc

SEQ ID NO: 53754 - RNA, 21 nt, Human
uccccagaaacacagagcugu

SEQ ID NO: 53755 - RNA, 21 nt, Human
ucccgaguucaagugauucuc

SEQ ID NO: 53756 - RNA, 24 nt, Human
ucccgaguucaagugauucucaug

SEQ ID NO: 53757 - RNA, 20 nt, Human
uccucacagggcaguggggc

SEQ ID NO: 53758 - RNA, 26 nt, Human
uccuugaccuccuggcuauagcaggg

SEQ ID NO: 53759 - RNA, 25 nt, Human
ucucacucuugccgaccagacugga

SEQ ID NO: 53760 - RNA, 22 nt, Human
ugcaguggcgcaaucucagcuc

SEQ ID NO: 53761 - RNA, 23 nt, Human
ugcaguggcgcaaucucagcuca

SEQ ID NO: 53762 - RNA, 21 nt, Human
ugccucaggcucccauguagc

SEQ ID NO: 53763 - RNA, 24 nt, Human
ugccucaggcucccauguagcugg

SEQ ID NO: 53764 - RNA, 18 nt, Human
uggagugcaguggcgcaa

SEQ ID NO: 53765 - RNA, 23 nt, Human
uggagugcaguggcgcaaucuca

SEQ ID NO: 53766 - RNA, 24 nt, Human
uggagugcaguggcgcaaucucag

SEQ ID NO: 53767 - RNA, 24 nt, Human
uggcgcaaucucagcucacugcaa

SEQ ID NO: 53768 - RNA, 19 nt, Human
ugggauuacaggcacccac

SEQ ID NO: 53769 - RNA, 21 nt, Human
ugggauuacaggcacccacca

SEQ ID NO: 53770 - RNA, 24 nt, Human
ugggauuacaggcacccaccacca

SEQ ID NO: 53771 - RNA, 18 nt, Human
uggggcaggguuuaauuu

SEQ ID NO: 53772 - RNA, 22 nt, Human
uggggccaggcccagggagguc

SEQ ID NO: 53773 - RNA, 18 nt, Human
uggggccuccgcgccggc

SEQ ID NO: 53774 - RNA, 18 nt, Human
ugguuuuuuuguuuuguu

SEQ ID NO: 53775 - RNA, 19 nt, Human
uguagcugggauuacaggc

SEQ ID NO: 53776 - RNA, 24 nt, Human
uguagcugggauuacaggcaccca

SEQ ID NO: 53777 - RNA, 22 nt, Human
uguccuucucagcacucucuca

SEQ ID NO: 53778 - RNA, 23 nt, Human
uucaagugauucucaugccucag

SEQ ID NO: 53779 - RNA, 21 nt, Human
uucucaugccucaggcuccca

SEQ ID NO: 53780 - RNA, 21 nt, Human
uucucaugccucaggcuccca

SEQ ID NO: 53781 - RNA, 25 nt, Human
uucucaugccucaggcucccaugua

SEQ ID NO: 53782 - RNA, 24 nt, Human
aaagugcugggauuacaggcauga

SEQ ID NO: 53783 - RNA, 19 nt, Human
aacugcccaggaagcccca

SEQ ID NO: 53784 - RNA, 23 nt, Human
aagaggcucucuuggcuuaaagg

SEQ ID NO: 53785 - RNA, 20 nt, Human
aagggguuuugccauguugg

SEQ ID NO: 53786 - RNA, 19 nt, Human
aagugcugggauuacaggc

SEQ ID NO: 53787 - RNA, 21 nt, Human
aagugcugggauuacaggcau

SEQ ID NO: 53788 - RNA, 26 nt, Human
aagugcugggauuacaggcaugagcc

SEQ ID NO: 53789 - RNA, 19 nt, Human
aauggcucccccuacaugc

SEQ ID NO: 53790 - RNA, 20 nt, Human
acaugacugacuccccaccc

SEQ ID NO: 53791 - RNA, 19 nt, Human
acccaggcuggagugcagu

SEQ ID NO: 53792 - RNA, 18 nt, Human
acgggguggggcggggcu

SEQ ID NO: 53793 - RNA, 23 nt, Human
acugacuccccacccacccaugc

SEQ ID NO: 53794 - RNA, 22 nt, Human
agaauuggaaacggcucacaga

SEQ ID NO: 53795 - RNA, 18 nt, Human
agagaaaaagcaguaaaa

SEQ ID NO: 53796 - RNA, 23 nt, Human
agagcgaugggggucagggccaa

SEQ ID NO: 53797 - RNA, 20 nt, Human
agauucaccuuuuauaacuu

SEQ ID NO: 53798 - RNA, 26 nt, Human
agccaccucauugggccucccccucc

SEQ ID NO: 53799 - RNA, 23 nt, Human
agccccacuugccauaacagccc

SEQ ID NO: 53800 - RNA, 18 nt, Human
agcuagaggagggguggc

SEQ ID NO: 53801 - RNA, 18 nt, Human
aggaaacuuuaaauaacc

SEQ ID NO: 53802 - RNA, 26 nt, Human
aggaggaacggaggguugaggggccg

SEQ ID NO: 53803 - RNA, 24 nt, Human
aggagggguggcuggcaaagggag

SEQ ID NO: 53804 - RNA, 22 nt, Human
aggcaggcauggaacauaugcu

SEQ ID NO: 53805 - RNA, 22 nt, Human
aggcgcugcgcucaggccagga

SEQ ID NO: 53806 - RNA, 25 nt, Human
aggcuggagugcaguggcgcaaucu

SEQ ID NO: 53807 - RNA, 20 nt, Human
aggggcuggggacuugcggc

SEQ ID NO: 53808 - RNA, 22 nt, Human
aguaaauaagggguuuugccau

SEQ ID NO: 53809 - RNA, 18 nt, Human
aguagcugggaauacagg

SEQ ID NO: 53810 - RNA, 23 nt, Human
agugcaguggcgcaaucuuggcu

SEQ ID NO: 53811 - RNA, 24 nt, Human
agugcaguggcgcaaucuuggcuc

SEQ ID NO: 53812 - RNA, 18 nt, Human
agugcugggauuacaggc

SEQ ID NO: 53813 - RNA, 23 nt, Human
augaaaaaccagccccacuugcc

SEQ ID NO: 53814 - RNA, 24 nt, Human
augaaucaacuccaacuggaagcu

SEQ ID NO: 53815 - RNA, 23 nt, Human
augcuguucuggucuccagcccu

SEQ ID NO: 53816 - RNA, 28 nt, Human
auuucuuuuuuuuuuuuuuuuuuuuuga

SEQ ID NO: 53817 - RNA, 24 nt, Human
caaagugcugggauuacaggcaug

SEQ ID NO: 53818 - RNA, 23 nt, Human
caacugcccaggaagccccacuc

SEQ ID NO: 53819 - RNA, 27 nt, Human
caacugcccaggaagccccacucagac

SEQ ID NO: 53820 - RNA, 20 nt, Human
caacuggaagcagagaaaaa

SEQ ID NO: 53821 - RNA, 24 nt, Human
cacccaggcuggagugcaguggcg

SEQ ID NO: 53822 - RNA, 22 nt, Human
cacgccauucuccugccucagc

SEQ ID NO: 53823 - RNA, 25 nt, Human
cacucccggguucacgccauucucc

SEQ ID NO: 53824 - RNA, 22 nt, Human
cagaggagcccaggcugggacc

SEQ ID NO: 53825 - RNA, 18 nt, Human
cagagggugggcuguguc

SEQ ID NO: 53826 - RNA, 20 nt, Human
cagcagggcaggguggaggc

SEQ ID NO: 53827 - RNA, 21 nt, Human
caggcugggaccgguucugcc

SEQ ID NO: 53828 - RNA, 18 nt, Human
cagggcaggguggaggcg

SEQ ID NO: 53829 - RNA, 22 nt, Human
caggugauccuccugccucagc

SEQ ID NO: 53830 - RNA, 20 nt, Human
cauccggggccccgcacgcu

SEQ ID NO: 53831 - RNA, 23 nt, Human
cauccugaccuugaggugggggu

SEQ ID NO: 53832 - RNA, 19 nt, Human
caugccaccaugcccggcu

SEQ ID NO: 53833 - RNA, 24 nt, Human
cauguuggccaggcugcucucgaa

SEQ ID NO: 53834 - RNA, 23 nt, Human
ccaaagugcugggauuacaggca

SEQ ID NO: 53835 - RNA, 24 nt, Human
ccaaagugcugggauuacaggcau

SEQ ID NO: 53836 - RNA, 19 nt, Human
ccacucccggguucacgcc

SEQ ID NO: 53837 - RNA, 18 nt, Human
ccacugggccagcuggcg

SEQ ID NO: 53838 - RNA, 22 nt, Human
ccauguuggccaggcugcucuc

SEQ ID NO: 53839 - RNA, 24 nt, Human
cccaaagugcugggauuacaggca

SEQ ID NO: 53840 - RNA, 19 nt, Human
cccaggggauucuggggug

SEQ ID NO: 53841 - RNA, 22 nt, Human
ccccaacugcccaggaagcccc

SEQ ID NO: 53842 - RNA, 24 nt, Human
ccccaacugcccaggaagccccac

SEQ ID NO: 53843 - RNA, 18 nt, Human
ccccacccacccaugcca

SEQ ID NO: 53844 - RNA, 19 nt, Human
ccccgcacgcuucgggcca

SEQ ID NO: 53845 - RNA, 21 nt, Human
ccccgcacgcuucgggccaug

SEQ ID NO: 53846 - RNA, 18 nt, Human
ccccgccacucagcgccg

SEQ ID NO: 53847 - RNA, 22 nt, Human
ccccucggagcaggggccccgc

SEQ ID NO: 53848 - RNA, 18 nt, Human
cccugugcgaggaagggc

SEQ ID NO: 53849 - RNA, 20 nt, Human
cccugugcgaggaagggccc

SEQ ID NO: 53850 - RNA, 19 nt, Human
ccucaggccaggcaugccc

SEQ ID NO: 53851 - RNA, 19 nt, Human
ccucccaccagagcuagag

SEQ ID NO: 53852 - RNA, 24 nt, Human
ccuccugccucagcuucccaaagu

SEQ ID NO: 53853 - RNA, 24 nt, Human
ccucuaaucaggacgggguggggc

SEQ ID NO: 53854 - RNA, 18 nt, Human
ccugaccucaggugaucc

SEQ ID NO: 53855 - RNA, 21 nt, Human
ccugaccucaggugauccucc

SEQ ID NO: 53856 - RNA, 23 nt, Human
ccugaccucaggugauccuccug

SEQ ID NO: 53857 - RNA, 19 nt, Human
ccugccgaggucccgggag

SEQ ID NO: 53858 - RNA, 20 nt, Human
ccuugucuucugcuacuccg

SEQ ID NO: 53859 - RNA, 22 nt, Human
cgcugcgcucaggccaggagga

SEQ ID NO: 53860 - RNA, 23 nt, Human
cgggguggggcggggcucugagc

SEQ ID NO: 53861 - RNA, 24 nt, Human
cuacuccgcugaacuccuguuuau

SEQ ID NO: 53862 - RNA, 19 nt, Human
cucacagagggugggcugu

SEQ ID NO: 53863 - RNA, 25 nt, Human
cucaccccugaccaugacuccccca

SEQ ID NO: 53864 - RNA, 21 nt, Human
cucagcuguccaugaaaacag

SEQ ID NO: 53865 - RNA, 18 nt, Human
cucaggugauccuccugc

SEQ ID NO: 53866 - RNA, 21 nt, Human
cucccggguucacgccauucu

SEQ ID NO: 53867 - RNA, 24 nt, Human
cugccgaggucccgggagccgugu

SEQ ID NO: 53868 - RNA, 23 nt, Human
cugccucagccucaugaguagcu

SEQ ID NO: 53869 - RNA, 23 nt, Human
cugccucagcuucccaaagugcu

SEQ ID NO: 53870 - RNA, 18 nt, Human
cugucacccaggcuggag

SEQ ID NO: 53871 - RNA, 18 nt, Human
cuugccauaacagcccca

SEQ ID NO: 53872 - RNA, 20 nt, Human
gaagccaauucacuacccac

SEQ ID NO: 53873 - RNA, 24 nt, Human
gaauacaggcacaugccaccaugc

SEQ ID NO: 53874 - RNA, 23 nt, Human
gaaucaacuccaacuggaagcag

SEQ ID NO: 53875 - RNA, 22 nt, Human
gaccucaggugauccuccugcc

SEQ ID NO: 53876 - RNA, 24 nt, Human
gaccucaggugauccuccugccuc

SEQ ID NO: 53877 - RNA, 18 nt, Human
gaggucccgggagccgug

SEQ ID NO: 53878 - RNA, 20 nt, Human
gaguagcugggaauacaggc

SEQ ID NO: 53879 - RNA, 19 nt, Human
gagucuguuuuagaauugg

SEQ ID NO: 53880 - RNA, 20 nt, Human
gagucuguuuuagaauuggg

SEQ ID NO: 53881 - RNA, 18 nt, Human
gauuacaggcaugagcca

SEQ ID NO: 53882 - RNA, 20 nt, Human
gauuacaggcaugagccacc

SEQ ID NO: 53883 - RNA, 23 nt, Human
gauuacaggcaugagccaccuca

SEQ ID NO: 53884 - RNA, 24 nt, Human
gccauguuggccaggcugcucucg

SEQ ID NO: 53885 - RNA, 23 nt, Human
gcccaggcugggaccgguucugc

SEQ ID NO: 53886 - RNA, 20 nt, Human
gccccaacugcccaggaagc

SEQ ID NO: 53887 - RNA, 26 nt, Human
gccccacuugccauaacagccccaac

SEQ ID NO: 53888 - RNA, 24 nt, Human
gccucagcuucccaaagugcuggg

SEQ ID NO: 53889 - RNA, 20 nt, Human
gccucaugaguagcugggaa

SEQ ID NO: 53890 - RNA, 24 nt, Human
gcgcaggaaggguucuccccaggg

SEQ ID NO: 53891 - RNA, 19 nt, Human
gcucugagcuggggaagcg

SEQ ID NO: 53892 - RNA, 25 nt, Human
gcucugucacccaggcuggagugca

SEQ ID NO: 53893 - RNA, 19 nt, Human
gcuggagugcaguggcgca

SEQ ID NO: 53894 - RNA, 20 nt, Human
ggaauacaggcacaugccac

SEQ ID NO: 53895 - RNA, 18 nt, Human
ggacgggguggggcgggg

SEQ ID NO: 53896 - RNA, 19 nt, Human
ggagcccaggcugggaccg

SEQ ID NO: 53897 - RNA, 19 nt, Human
ggauuacaggcaugagcca

SEQ ID NO: 53898 - RNA, 23 nt, Human
ggcaaagggaggcugaggaggaa

SEQ ID NO: 53899 - RNA, 19 nt, Human
ggcggggcucugagcuggg

SEQ ID NO: 53900 - RNA, 22 nt, Human
ggcuggggacuugcggccaggu

SEQ ID NO: 53901 - RNA, 23 nt, Human
gggaggcugaggaggaacggagg

SEQ ID NO: 53902 - RNA, 25 nt, Human
gggcaggcgggguccacaagaggcu

SEQ ID NO: 53903 - RNA, 21 nt, Human
gggccaaggcacagagcaaga

SEQ ID NO: 53904 - RNA, 18 nt, Human
gggcggggcucugagcug

SEQ ID NO: 53905 - RNA, 21 nt, Human
gggcggggcucugagcugggg

SEQ ID NO: 53906 - RNA, 19 nt, Human
ggggcggggcucugagcug

SEQ ID NO: 53907 - RNA, 21 nt, Human
gggggacauugagucuguuuu

SEQ ID NO: 53908 - RNA, 22 nt, Human
gggggugagggggacauugagu

SEQ ID NO: 53909 - RNA, 22 nt, Human
gggguuuugccauguuggccag

SEQ ID NO: 53910 - RNA, 23 nt, Human
gggguuuugccauguuggccagg

SEQ ID NO: 53911 - RNA, 22 nt, Human
ggguggcuggcaaagggaggcu

SEQ ID NO: 53912 - RNA, 22 nt, Human
ggguuuugccauguuggccagg

SEQ ID NO: 53913 - RNA, 23 nt, Human
guaaauaagggguuuugccaugu

SEQ ID NO: 53914 - RNA, 24 nt, Human
guccucaggccaggcaugcccugu

SEQ ID NO: 53915 - RNA, 24 nt, Human
gucuugcucugucacccaggcugg

SEQ ID NO: 53916 - RNA, 24 nt, Human
gugauccuccugccucagcuuccc

SEQ ID NO: 53917 - RNA, 18 nt, Human
gugcucucuggggagggg

SEQ ID NO: 53918 - RNA, 18 nt, Human
gugggcgccggggccagu

SEQ ID NO: 53919 - RNA, 21 nt, Human
uaaaggaaacuuuaaauaacc

SEQ ID NO: 53920 - RNA, 23 nt, Human
uaaccaauggaaaugaaaaacca

SEQ ID NO: 53921 - RNA, 19 nt, Human
uaaguuuuuguauuuuuag

SEQ ID NO: 53922 - RNA, 23 nt, Human
uacaggcacaugccaccaugccc

SEQ ID NO: 53923 - RNA, 20 nt, Human
uacaggcaugagccaccuca

SEQ ID NO: 53924 - RNA, 19 nt, Human
uacaugccuugucuucugc

SEQ ID NO: 53925 - RNA, 24 nt, Human
uaguaaauaagggguuuugccaug

SEQ ID NO: 53926 - RNA, 22 nt, Human
ucacccaggcuggagugcagug

SEQ ID NO: 53927 - RNA, 18 nt, Human
ucaggccaggcaugcccu

SEQ ID NO: 53928 - RNA, 24 nt, Human
ucaugaguagcugggaauacaggc

SEQ ID NO: 53929 - RNA, 23 nt, Human
ucauugcaagcuccacucccggg

SEQ ID NO: 53930 - RNA, 24 nt, Human
ucccaaagugcugggauuacaggc

SEQ ID NO: 53931 - RNA, 21 nt, Human
ucccggguucacgccauucuc

SEQ ID NO: 53932 - RNA, 24 nt, Human
ucccggguucacgccauucuccug

SEQ ID NO: 53933 - RNA, 24 nt, Human
ucuccugccucagccucaugagua

SEQ ID NO: 53934 - RNA, 23 nt, Human
ucucgaacuccugaccucaggug

SEQ ID NO: 53935 - RNA, 23 nt, Human
ucucuggggaggggugcgggugg

SEQ ID NO: 53936 - RNA, 24 nt, Human
ucugucacccaggcuggagugcag

SEQ ID NO: 53937 - RNA, 21 nt, Human
ucugugcucagcagggcaggg

SEQ ID NO: 53938 - RNA, 23 nt, Human
ucuugcucugucacccaggcugg

SEQ ID NO: 53939 - RNA, 24 nt, Human
ucuugcucugucacccaggcugga

SEQ ID NO: 53940 - RNA, 18 nt, Human
ucuuuuuuuuuuuuuuuu

SEQ ID NO: 53941 - RNA, 28 nt, Human
ugaaaacaggauaagcggcuuccucccu

SEQ ID NO: 53942 - RNA, 18 nt, Human
ugaccucaggugauccuc

SEQ ID NO: 53943 - RNA, 20 nt, Human
ugaccucaggugauccuccu

SEQ ID NO: 53944 - RNA, 24 nt, Human
ugaccucaggugauccuccugccu

SEQ ID NO: 53945 - RNA, 22 nt, Human
ugagacggagucuugcucuguc

SEQ ID NO: 53946 - RNA, 19 nt, Human
ugagaugcccuuuucagac

SEQ ID NO: 53947 - RNA, 22 nt, Human
ugagaugcccuuuucagacccu

SEQ ID NO: 53948 - RNA, 24 nt, Human
ugaggggcuggggacuugcggcca

SEQ ID NO: 53949 - RNA, 21 nt, Human
ugaggugggggugagggggac

SEQ ID NO: 53950 - RNA, 21 nt, Human
ugaugaggucaaaaaaugaaa

SEQ ID NO: 53951 - RNA, 22 nt, Human
ugcaguggcgcaaucuuggcuc

SEQ ID NO: 53952 - RNA, 23 nt, Human
ugcaguggcgcaaucuuggcuca

SEQ ID NO: 53953 - RNA, 27 nt, Human
ugccauguuggccaggcugcucucgaa

SEQ ID NO: 53954 - RNA, 25 nt, Human
ugcccggcuaaguuuuuguauuuuu

SEQ ID NO: 53955 - RNA, 24 nt, Human
ugccucagccucaugaguagcugg

SEQ ID NO: 53956 - RNA, 24 nt, Human
ugccucagcuucccaaagugcugg

SEQ ID NO: 53957 - RNA, 23 nt, Human
ugcgaggaagggccccgggccuc

SEQ ID NO: 53958 - RNA, 21 nt, Human
ugcucucgaacuccugaccuc

SEQ ID NO: 53959 - RNA, 20 nt, Human
ugcucucuggggaggggugc

SEQ ID NO: 53960 - RNA, 24 nt, Human
ugcucugucacccaggcuggagug

SEQ ID NO: 53961 - RNA, 23 nt, Human
uggagugcaguggcgcaaucuug

SEQ ID NO: 53962 - RNA, 24 nt, Human
uggagugcaguggcgcaaucuugg

SEQ ID NO: 53963 - RNA, 18 nt, Human
uggcaaagggaggcugag

SEQ ID NO: 53964 - RNA, 24 nt, Human
uggccaggcugcucucgaacuccu

SEQ ID NO: 53965 - RNA, 20 nt, Human
uggcgcaaucuuggcucauu

SEQ ID NO: 53966 - RNA, 24 nt, Human
uggcucccccuacaugccuugucu

SEQ ID NO: 53967 - RNA, 22 nt, Human
ugggaauacaggcacaugccac

SEQ ID NO: 53968 - RNA, 24 nt, Human
ugggaauacaggcacaugccacca

SEQ ID NO: 53969 - RNA, 25 nt, Human
ugggaauacaggcacaugccaccau

SEQ ID NO: 53970 - RNA, 18 nt, Human
ugggauuacaggcaugag

SEQ ID NO: 53971 - RNA, 21 nt, Human
ugggauuacaggcaugagcca

SEQ ID NO: 53972 - RNA, 22 nt, Human
ugggauuacaggcaugagccac

SEQ ID NO: 53973 - RNA, 23 nt, Human
ugggauuacaggcaugagccacc

SEQ ID NO: 53974 - RNA, 23 nt, Human
ugggauuacaggcaugagccacc

SEQ ID NO: 53975 - RNA, 23 nt, Human
ugggauuacaggcaugagccacc

SEQ ID NO: 53976 - RNA, 24 nt, Human
ugggauuacaggcaugagccaccu

SEQ ID NO: 53977 - RNA, 25 nt, Human
ugggauuacaggcaugagccaccuc

SEQ ID NO: 53978 - RNA, 21 nt, Human
ugggccgccccaacugcccag

SEQ ID NO: 53979 - RNA, 22 nt, Human
ugggccucccccauucaauuuc

SEQ ID NO: 53980 - RNA, 21 nt, Human
uggggcggggcucugagcugg

SEQ ID NO: 53981 - RNA, 21 nt, Human
ugucacccaggcuggagugca

SEQ ID NO: 53982 - RNA, 21 nt, Human
uguucuggucuccagcccuca

SEQ ID NO: 53983 - RNA, 22 nt, Human
uuaaagggcacgcagcuugggc

SEQ ID NO: 53984 - RNA, 24 nt, Human
uuaguaaauaagggguuuugccau

SEQ ID NO: 53985 - RNA, 25 nt, Human
uuaguaaauaagggguuuugccaug

SEQ ID NO: 53986 - RNA, 24 nt, Human
uugcucugucacccaggcuggagu

SEQ ID NO: 53987 - RNA, 21 nt, Human
uuggcucauugcaagcuccac

SEQ ID NO: 53988 - RNA, 20 nt, Human
uuuaaauaaccaauggaaau

SEQ ID NO: 53989 - RNA, 21 nt, Human
uuuuuaguaaauaagggguuu

SEQ ID NO: 53990 - RNA, 24 nt, Human
uuuuuuuuuuuugagacggagucu

SEQ ID NO: 53991 - RNA, 22 nt, Human
uuuuuuuuuuuuuugagacgga

SEQ ID NO: 53992 - RNA, 18 nt, Human
uuuuuuuuuuuuuuuuug

SEQ ID NO: 53993 - RNA, 21 nt, Human
aaaaugccacaacaggggaua

SEQ ID NO: 53994 - RNA, 21 nt, Human
aagagucccuucacacagugc

SEQ ID NO: 53995 - RNA, 20 nt, Human
aagcugccuugucucugggc

SEQ ID NO: 53996 - RNA, 19 nt, Human
aaguauuccucugagcccc

SEQ ID NO: 53997 - RNA, 24 nt, Human
acacacacacacaacacacauaca

SEQ ID NO: 53998 - RNA, 31 nt, Human
acacacacacacacaacacacauacacacag

SEQ ID NO: 53999 - RNA, 26 nt, Human
acacacacacacacacaacacacaua

SEQ ID NO: 54000 - RNA, 31 nt, Human
acacacacacacacacaacacacauacacag

SEQ ID NO: 54001 - RNA, 24 nt, Human
acccugaccacccuuccccucugc

SEQ ID NO: 54002 - RNA, 25 nt, Human
acuugcucauuuauuuaaaagaguc

SEQ ID NO: 54003 - RNA, 18 nt, Human
agaguagcacacacgcca

SEQ ID NO: 54004 - RNA, 18 nt, Human
aggaagcagauaucuuuc

SEQ ID NO: 54005 - RNA, 18 nt, Human
aggcaccucauugaaaau

SEQ ID NO: 54006 - RNA, 24 nt, Human
agugcuaucuccacuagaccaagc

SEQ ID NO: 54007 - RNA, 19 nt, Human
aucuccacuagaccaagcu

SEQ ID NO: 54008 - RNA, 25 nt, Human
augcacacacacacacacacaacac

SEQ ID NO: 54009 - RNA, 21 nt, Human
auuucauucccuucccccucc

SEQ ID NO: 54010 - RNA, 18 nt, Human
caaagcucccuguuccaa

SEQ ID NO: 54011 - RNA, 25 nt, Human
cacaacacacauacacacagaugag

SEQ ID NO: 54012 - RNA, 27 nt, Human
cacacaacacacauacacacagauggu

SEQ ID NO: 54013 - RNA, 20 nt, Human
cacacacacacaacacacau

SEQ ID NO: 54014 - RNA, 25 nt, Human
cacacacacacacaacacacauaca

SEQ ID NO: 54015 - RNA, 25 nt, Human
cacccuuccccucugccaccacugg

SEQ ID NO: 54016 - RNA, 18 nt, Human
cacccuuccccucugccc

SEQ ID NO: 54017 - RNA, 21 nt, Human
cagcugaggaaacaggagcac

SEQ ID NO: 54018 - RNA, 23 nt, Human
ccaagcugccuugucucugggcu

SEQ ID NO: 54019 - RNA, 20 nt, Human
ccagguacugagcaaaaacc

SEQ ID NO: 54020 - RNA, 18 nt, Human
cccccuccccuugauucc

SEQ ID NO: 54021 - RNA, 20 nt, Human
ccccucugcccagcaccuag

SEQ ID NO: 54022 - RNA, 20 nt, Human
ccccugaacuccaagcacag

SEQ ID NO: 54023 - RNA, 20 nt, Human
cccucaccagcccucccuca

SEQ ID NO: 54024 - RNA, 21 nt, Human
cccuuuccauuucauucccuu

SEQ ID NO: 54025 - RNA, 20 nt, Human
ccucacccugaccacccuuc

SEQ ID NO: 54026 - RNA, 24 nt, Human
ccucacccugaccacccuuccccu

SEQ ID NO: 54027 - RNA, 21 nt, Human
ccucccuuuccauuucauucc

SEQ ID NO: 54028 - RNA, 26 nt, Human
cgaugcacacacacacacacacaaca

SEQ ID NO: 54029 - RNA, 27 nt, Human
cgaugcacacacacacacacacaacac

SEQ ID NO: 54030 - RNA, 21 nt, Human
cgccaaagauacaucaagcaa

SEQ ID NO: 54031 - RNA, 22 nt, Human
cgccgaagucucucacugccac

SEQ ID NO: 54032 - RNA, 20 nt, Human
cucccucaccauccucaccc

SEQ ID NO: 54033 - RNA, 27 nt, Human
cuccuaccacacagcugccagcgacaa

SEQ ID NO: 54034 - RNA, 19 nt, Human
gaaauuccuucuuggaccc

SEQ ID NO: 54035 - RNA, 19 nt, Human
gcaagacgauaggauugug

SEQ ID NO: 54036 - RNA, 26 nt, Human
gcacacacacacacacacaacacaca

SEQ ID NO: 54037 - RNA, 18 nt, Human
gccauuaaggccaagaag

SEQ ID NO: 54038 - RNA, 19 nt, Human
gccucacagggauggaaag

SEQ ID NO: 54039 - RNA, 23 nt, Human
gcgaugcacacacacacacacac

SEQ ID NO: 54040 - RNA, 18 nt, Human
gcucauuuauuuaaaaga

SEQ ID NO: 54041 - RNA, 21 nt, Human
ggaaagaaauuccuucuugga

SEQ ID NO: 54042 - RNA, 18 nt, Human
gucucgccuggccuucug

SEQ ID NO: 54043 - RNA, 25 nt, Human
uaaaagaaacugccacacuacaaua

SEQ ID NO: 54044 - RNA, 23 nt, Human
uaaaagagucccuucacacagug

SEQ ID NO: 54045 - RNA, 22 nt, Human
uaccacacagcugccagcgaca

SEQ ID NO: 54046 - RNA, 21 nt, Human
uagcacacacgccaaagauac

SEQ ID NO: 54047 - RNA, 23 nt, Human
uagccuaguaaauuagugguaag

SEQ ID NO: 54048 - RNA, 22 nt, Human
uaucuaaaaaaaaugccacaac

SEQ ID NO: 54049 - RNA, 22 nt, Human
ucacaggauuugagaauggaaa

SEQ ID NO: 54050 - RNA, 21 nt, Human
ucacccugaccacccuucccc

SEQ ID NO: 54051 - RNA, 18 nt, Human
ucauaugcacauacuugg

SEQ ID NO: 54052 - RNA, 24 nt, Human
uccaagcacagugcuaucuccacu

SEQ ID NO: 54053 - RNA, 25 nt, Human
uccaagcuauagacagacaggacaa

SEQ ID NO: 54054 - RNA, 19 nt, Human
uccaaguauuccucugagc

SEQ ID NO: 54055 - RNA, 20 nt, Human
uccagaguaaaugaaaaccc

SEQ ID NO: 54056 - RNA, 22 nt, Human
ucccucaccauccucacccuga

SEQ ID NO: 54057 - RNA, 20 nt, Human
ucccuguuccaagcuauaga

SEQ ID NO: 54058 - RNA, 23 nt, Human
uccgccgaagucucucacugcca

SEQ ID NO: 54059 - RNA, 19 nt, Human
uccuaccacacagcugcca

SEQ ID NO: 54060 - RNA, 19 nt, Human
uccuagguccccugaacuc

SEQ ID NO: 54061 - RNA, 19 nt, Human
uccucacccugaccacccu

SEQ ID NO: 54062 - RNA, 19 nt, Human
ucucuuucaaauguggaga

SEQ ID NO: 54063 - RNA, 27 nt, Human
ucugcccagcaccuaagagcagggauc

SEQ ID NO: 54064 - RNA, 23 nt, Human
ucuuucaaauguggagaugguuu

SEQ ID NO: 54065 - RNA, 19 nt, Human
ucuuuggaugacauagcuu

SEQ ID NO: 54066 - RNA, 22 nt, Human
ugaaaauaauacaucacagugc

SEQ ID NO: 54067 - RNA, 23 nt, Human
ugaaaguagguagccuaguaaau

SEQ ID NO: 54068 - RNA, 24 nt, Human
ugaacuccaagcacagugcuaucu

SEQ ID NO: 54069 - RNA, 19 nt, Human
ugagauaaaagcugagguc

SEQ ID NO: 54070 - RNA, 21 nt, Human
ugagccccucaccagcccucc

SEQ ID NO: 54071 - RNA, 20 nt, Human
ugcacacacacacacacaca

SEQ ID NO: 54072 - RNA, 23 nt, Human
ugccuugucucugggcucaagag

SEQ ID NO: 54073 - RNA, 27 nt, Human
ugcgaugcacacacacacacacacagu

SEQ ID NO: 54074 - RNA, 22 nt, Human
uggaaaggacaaucuuuggaug

SEQ ID NO: 54075 - RNA, 19 nt, Human
uggaccuccuaccacacag

SEQ ID NO: 54076 - RNA, 18 nt, Human
uggcaugugcuggguagc

SEQ ID NO: 54077 - RNA, 21 nt, Human
ugggauuuguccuaggucccc

SEQ ID NO: 54078 - RNA, 23 nt, Human
ugggguucugagauaaaagcuga

SEQ ID NO: 54079 - RNA, 22 nt, Human
uuacacuuuaaaaacucucacc

SEQ ID NO: 54080 - RNA, 22 nt, Human
aaaaaaaaaagaaaaaaaaaag

SEQ ID NO: 54081 - RNA, 21 nt, Human
aaaagaaaaaaaaaagccaaa

SEQ ID NO: 54082 - RNA, 19 nt, Human
aaaagccuaagagugaaaa

SEQ ID NO: 54083 - RNA, 21 nt, Human
aaacaaccacuaugaguaagu

SEQ ID NO: 54084 - RNA, 24 nt, Human
aaacagauguccaaaaaaaaaaga

SEQ ID NO: 54085 - RNA, 19 nt, Human
aacagcugucaaaaaccaa

SEQ ID NO: 54086 - RNA, 18 nt, Human
aaccccuccccucagccc

SEQ ID NO: 54087 - RNA, 19 nt, Human
aaccccuccccucagccca

SEQ ID NO: 54088 - RNA, 26 nt, Human
acagauguccaaaaaaaaaagaaaaa

SEQ ID NO: 54089 - RNA, 21 nt, Human
acagccuuuguggggaugggg

SEQ ID NO: 54090 - RNA, 19 nt, Human
accacaucuuccugguucu

SEQ ID NO: 54091 - RNA, 18 nt, Human
accagcuggagcugaagu

SEQ ID NO: 54092 - RNA, 20 nt, Human
agaaaaggaguuauuccuac

SEQ ID NO: 54093 - RNA, 19 nt, Human
agacaaccccuccccucag

SEQ ID NO: 54094 - RNA, 23 nt, Human
agaugcugcaagcuaccucagcu

SEQ ID NO: 54095 - RNA, 18 nt, Human
agccuuuguggggauggg

SEQ ID NO: 54096 - RNA, 19 nt, Human
agcugucaaaaaccagcug

SEQ ID NO: 54097 - RNA, 24 nt, Human
agcugucaaaaaccagcuggagcu

SEQ ID NO: 54098 - RNA, 23 nt, Human
augucaaaaauauuaccacagca

SEQ ID NO: 54099 - RNA, 25 nt, Human
auguccaaaaaaaaaagaaaaaaaa

SEQ ID NO: 54100 - RNA, 28 nt, Human
caaaaaaaaaagaaaaaaaaaagccaaa

SEQ ID NO: 54101 - RNA, 27 nt, Human
caaaaauauuaccacagcaacagcugu

SEQ ID NO: 54102 - RNA, 23 nt, Human
cacccuccgcucucacugggacu

SEQ ID NO: 54103 - RNA, 18 nt, Human
cagccccgaccgcggccc

SEQ ID NO: 54104 - RNA, 23 nt, Human
cagucacucaagaccagagaaac

SEQ ID NO: 54105 - RNA, 25 nt, Human
ccaauacuacacacacuauugaaug

SEQ ID NO: 54106 - RNA, 24 nt, Human
cccaggaugucugaaaaggagaga

SEQ ID NO: 54107 - RNA, 18 nt, Human
cccccuaccucuggcacc

SEQ ID NO: 54108 - RNA, 22 nt, Human
cccccuaccucuggcacccucc

SEQ ID NO: 54109 - RNA, 19 nt, Human
ccccggaggaagccccggg

SEQ ID NO: 54110 - RNA, 22 nt, Human
ccccggaggaagccccgggaac

SEQ ID NO: 54111 - RNA, 24 nt, Human
cccgaccgcggccccggaggaagc

SEQ ID NO: 54112 - RNA, 23 nt, Human
cggaaaaaaaugaacuguggaca

SEQ ID NO: 54113 - RNA, 19 nt, Human
cuacucauuuguuuuccua

SEQ ID NO: 54114 - RNA, 21 nt, Human
cucaagaccagagaaacaacc

SEQ ID NO: 54115 - RNA, 20 nt, Human
gaaaagaugcugcaagcuac

SEQ ID NO: 54116 - RNA, 29 nt, Human
gaacucuuucuacucauuuguuuuccuau

SEQ ID NO: 54117 - RNA, 19 nt, Human
gccccgaccgcggccccgg

SEQ ID NO: 54118 - RNA, 21 nt, Human
gccgccccuacagggggaagg

SEQ ID NO: 54119 - RNA, 20 nt, Human
gccugggacaaagccugggc

SEQ ID NO: 54120 - RNA, 19 nt, Human
ggaaaaaaaugaacugugg

SEQ ID NO: 54121 - RNA, 19 nt, Human
uaaaagaaaggaacagugu

SEQ ID NO: 54122 - RNA, 18 nt, Human
uaagacaaccccuccccu

SEQ ID NO: 54123 - RNA, 19 nt, Human
uaagacaaccccuccccuc

SEQ ID NO: 54124 - RNA, 19 nt, Human
uaagacaaccccuccccuc

SEQ ID NO: 54125 - RNA, 23 nt, Human
uaauaagauucucuucauagcuc

SEQ ID NO: 54126 - RNA, 19 nt, Human
uaccaggagggcacacacc

SEQ ID NO: 54127 - RNA, 26 nt, Human
uagaaaagaugcugcaagcuaccuca

SEQ ID NO: 54128 - RNA, 21 nt, Human
ucaaaaaccagcuggagcuga

SEQ ID NO: 54129 - RNA, 20 nt, Human
ucaauccauaaagucagacc

SEQ ID NO: 54130 - RNA, 21 nt, Human
uccaaaaaaaaaagaaaaaaa

SEQ ID NO: 54131 - RNA, 22 nt, Human
uccuggugcugugguucaacag

SEQ ID NO: 54132 - RNA, 21 nt, Human
ucuggcacccuccgcucucac

SEQ ID NO: 54133 - RNA, 22 nt, Human
ugaaaacagauguccaaaaaaa

SEQ ID NO: 54134 - RNA, 18 nt, Human
ugaaaggcagaggagggc

SEQ ID NO: 54135 - RNA, 22 nt, Human
ugaacuguggacacagucacuc

SEQ ID NO: 54136 - RNA, 23 nt, Human
ugaccacaucuuccugguucuuc

SEQ ID NO: 54137 - RNA, 20 nt, Human
ugagagggauaaaagcaaua

SEQ ID NO: 54138 - RNA, 21 nt, Human
uggacacagucacucaagacc

SEQ ID NO: 54139 - RNA, 19 nt, Human
ugguucaacagccuuugug

SEQ ID NO: 54140 - RNA, 18 nt, Human
ugucaaaaaccagcugga

SEQ ID NO: 54141 - RNA, 18 nt, Human
ugucaaaaaccagcugga

SEQ ID NO: 54142 - RNA, 18 nt, Human
uguggggauggggagaac

SEQ ID NO: 54143 - RNA, 19 nt, Human
uucaacuagaaaagaugcu

SEQ ID NO: 54144 - RNA, 23 nt, Human
uucacaauaaaagaaaggaacag

SEQ ID NO: 54145 - RNA, 19 nt, Human
uuccugguucuuccauugg

SEQ ID NO: 54146 - RNA, 25 nt, Human
uuuuuuucacaauaaaagaaaggaa

SEQ ID NO: 54147 - RNA, 25 nt, Human
aaacccucucaagcaagcaacauac

SEQ ID NO: 54148 - RNA, 25 nt, Human
aaacccucucaagcaagcaacauac

SEQ ID NO: 54149 - RNA, 23 nt, Human
aacagcuauccacggaauccaug

SEQ ID NO: 54150 - RNA, 24 nt, Human
aacucacauagcgccccugcuugc

SEQ ID NO: 54151 - RNA, 23 nt, Human
aagagcagaagcugcacugcaga

SEQ ID NO: 54152 - RNA, 23 nt, Human
aagagcagaagcugcacugcaga

SEQ ID NO: 54153 - RNA, 20 nt, Human
aagcaacauacaucccuggc

SEQ ID NO: 54154 - RNA, 20 nt, Human
aagcaacauacaucccuggc

SEQ ID NO: 54155 - RNA, 20 nt, Human
aaguucccagaucacagucu

SEQ ID NO: 54156 - RNA, 24 nt, Human
acacauauuuacagaguuugcaca

SEQ ID NO: 54157 - RNA, 24 nt, Human
acacauauuuacagaguuugcaca

SEQ ID NO: 54158 - RNA, 19 nt, Human
acaccacuucaucuccaac

SEQ ID NO: 54159 - RNA, 19 nt, Human
acaccuugcuggguagugc

SEQ ID NO: 54160 - RNA, 18 nt, Human
acaguugcaauuuaaaaa

SEQ ID NO: 54161 - RNA, 18 nt, Human
acaguugcaauuuaaaaa

SEQ ID NO: 54162 - RNA, 20 nt, Human
accucgaucucccagaugau

SEQ ID NO: 54163 - RNA, 23 nt, Human
agaaaggacuuucuggagaggac

SEQ ID NO: 54164 - RNA, 23 nt, Human
agaaaggacuuucuggagaggac

SEQ ID NO: 54165 - RNA, 19 nt, Human
agaaggaagaagaggggaa

SEQ ID NO: 54166 - RNA, 19 nt, Human
agaaggaagaagaggggaa

SEQ ID NO: 54167 - RNA, 21 nt, Human
agaggggaauggaacaggggg

SEQ ID NO: 54168 - RNA, 21 nt, Human
agaggggaauggaacaggggg

SEQ ID NO: 54169 - RNA, 19 nt, Human
aggaagaagaggggaaugg

SEQ ID NO: 54170 - RNA, 19 nt, Human
aggaagaagaggggaaugg

SEQ ID NO: 54171 - RNA, 28 nt, Human
aggaagaagaggggaauggaacaggggg

SEQ ID NO: 54172 - RNA, 28 nt, Human
aggaagaagaggggaauggaacaggggg

SEQ ID NO: 54173 - RNA, 21 nt, Human
aggaggcaaccacuugggcuc

SEQ ID NO: 54174 - RNA, 20 nt, Human
aggaugucaucggcagagaa

SEQ ID NO: 54175 - RNA, 20 nt, Human
aggcagugccagugaaggca

SEQ ID NO: 54176 - RNA, 18 nt, Human
aggcugcgcagcgcgugg

SEQ ID NO: 54177 - RNA, 21 nt, Human
agggaccgguuuaucaacacc

SEQ ID NO: 54178 - RNA, 18 nt, Human
aggggcccuggccagagg

SEQ ID NO: 54179 - RNA, 18 nt, Human
aggggcccuggccagagg

SEQ ID NO: 54180 - RNA, 19 nt, Human
agugaaggcaaugggggag

SEQ ID NO: 54181 - RNA, 23 nt, Human
auagcgccccugcuugccaauua

SEQ ID NO: 54182 - RNA, 21 nt, Human
auaggacuacaguauggauaa

SEQ ID NO: 54183 - RNA, 21 nt, Human
auaggacuacaguauggauaa

SEQ ID NO: 54184 - RNA, 21 nt, Human
aucggggugcgggaugcggag

SEQ ID NO: 54185 - RNA, 18 nt, Human
auugaccugguugaccac

SEQ ID NO: 54186 - RNA, 19 nt, Human
caaaaaaagacucucagga

SEQ ID NO: 54187 - RNA, 19 nt, Human
caaaaaaagacucucagga

SEQ ID NO: 54188 - RNA, 22 nt, Human
caaaaaaagacucucaggaagc

SEQ ID NO: 54189 - RNA, 22 nt, Human
caaaaaaagacucucaggaagc

SEQ ID NO: 54190 - RNA, 18 nt, Human
caacagugcaaaaaaaga

SEQ ID NO: 54191 - RNA, 25 nt, Human
cacacuguccagaaggacuucugcu

SEQ ID NO: 54192 - RNA, 21 nt, Human
caccaggccccguccgcaccg

SEQ ID NO: 54193 - RNA, 19 nt, Human
caccagggaccgguuuauc

SEQ ID NO: 54194 - RNA, 25 nt, Human
cacgaacaggugcccggcauugacc

SEQ ID NO: 54195 - RNA, 18 nt, Human
cacuggggugggcaaggu

SEQ ID NO: 54196 - RNA, 18 nt, Human
caggggcggcacagauga

SEQ ID NO: 54197 - RNA, 23 nt, Human
caguuggacuguaacuugucacc

SEQ ID NO: 54198 - RNA, 33 nt, Human
ccaagagcagaagcugcacugcagaguuuacua

SEQ ID NO: 54199 - RNA, 22 nt, Human
ccacacuccacagcugaaucag

SEQ ID NO: 54200 - RNA, 21 nt, Human
ccacuggggugggcaaggugg

SEQ ID NO: 54201 - RNA, 25 nt, Human
cccgcagcgccgcgcuuccgcagcu

SEQ ID NO: 54202 - RNA, 22 nt, Human
ccgccggcccccggcugugccc

SEQ ID NO: 54203 - RNA, 18 nt, Human
ccggcccgcagcgccgcg

SEQ ID NO: 54204 - RNA, 18 nt, Human
ccuggccugucugccagu

SEQ ID NO: 54205 - RNA, 18 nt, Human
ccuggccugucugccagu

SEQ ID NO: 54206 - RNA, 21 nt, Human
ccuuuggcuuugcgaagagaa

SEQ ID NO: 54207 - RNA, 23 nt, Human
cgaagagaacccauaguuccauc

SEQ ID NO: 54208 - RNA, 23 nt, Human
cgaagagaacccauaguuccauc

SEQ ID NO: 54209 - RNA, 19 nt, Human
cucccccacgugcuagccc

SEQ ID NO: 54210 - RNA, 23 nt, Human
cuucaucuccaaccacacuccac

SEQ ID NO: 54211 - RNA, 24 nt, Human
gaaacccucucaagcaagcaacau

SEQ ID NO: 54212 - RNA, 24 nt, Human
gaaacccucucaagcaagcaacau

SEQ ID NO: 54213 - RNA, 26 nt, Human
gaaacccucucaagcaagcaacauac

SEQ ID NO: 54214 - RNA, 26 nt, Human
gaaacccucucaagcaagcaacauac

SEQ ID NO: 54215 - RNA, 22 nt, Human
gaagaagaggggaauggaacag

SEQ ID NO: 54216 - RNA, 22 nt, Human
gaagaagaggggaauggaacag

SEQ ID NO: 54217 - RNA, 20 nt, Human
gaguuacuuuuuuuuuuuuu

SEQ ID NO: 54218 - RNA, 18 nt, Human
gcaaaaaguucccagauc

SEQ ID NO: 54219 - RNA, 18 nt, Human
gcaaaaaguucccagauc

SEQ ID NO: 54220 - RNA, 22 nt, Human
gcacgucuacuuucacccucuu

SEQ ID NO: 54221 - RNA, 23 nt, Human
gcagcucccccacgugcuagccc

SEQ ID NO: 54222 - RNA, 22 nt, Human
gccaccaggccccguccgcacc

SEQ ID NO: 54223 - RNA, 23 nt, Human
gccccgcggcccggcccgcagcg

SEQ ID NO: 54224 - RNA, 26 nt, Human
gccugggcauuuuggaagccgggccc

SEQ ID NO: 54225 - RNA, 27 nt, Human
ggaagaagaggggaauggaacaggggg

SEQ ID NO: 54226 - RNA, 27 nt, Human
ggaagaagaggggaauggaacaggggg

SEQ ID NO: 54227 - RNA, 23 nt, Human
ggaaggagauagaaggaagaaga

SEQ ID NO: 54228 - RNA, 23 nt, Human
ggaaggagauagaaggaagaaga

SEQ ID NO: 54229 - RNA, 23 nt, Human
ggaggcuugaaguaauuacaccu

SEQ ID NO: 54230 - RNA, 25 nt, Human
ggcaagguggggauuccaggcugag

SEQ ID NO: 54231 - RNA, 19 nt, Human
ggcaaugggggagcguaga

SEQ ID NO: 54232 - RNA, 24 nt, Human
gggaaggagauagaaggaagaaga

SEQ ID NO: 54233 - RNA, 24 nt, Human
gggaaggagauagaaggaagaaga

SEQ ID NO: 54234 - RNA, 21 nt, Human
gggcaagguggggauuccagg

SEQ ID NO: 54235 - RNA, 25 nt, Human
ggguuggagccugccugggcauuuu

SEQ ID NO: 54236 - RNA, 22 nt, Human
ggucgaggcugcgcagcgcgug

SEQ ID NO: 54237 - RNA, 19 nt, Human
guucagcucuuugaacuuc

SEQ ID NO: 54238 - RNA, 24 nt, Human
uacaaccaggcuuggcaggauacc

SEQ ID NO: 54239 - RNA, 24 nt, Human
uacaaccaggcuuggcaggauacc

SEQ ID NO: 54240 - RNA, 18 nt, Human
uaccaguuccccucccca

SEQ ID NO: 54241 - RNA, 18 nt, Human
uaccaguuccccucccca

SEQ ID NO: 54242 - RNA, 20 nt, Human
uaccauacagucaccugucc

SEQ ID NO: 54243 - RNA, 20 nt, Human
uaccauacagucaccugucc

SEQ ID NO: 54244 - RNA, 20 nt, Human
uacuuuuuuuuuuuuuuaaa

SEQ ID NO: 54245 - RNA, 20 nt, Human
uacuuuuuuuuuuuuuuaaa

SEQ ID NO: 54246 - RNA, 19 nt, Human
uagaaggaagaagagggga

SEQ ID NO: 54247 - RNA, 19 nt, Human
uagaaggaagaagagggga

SEQ ID NO: 54248 - RNA, 27 nt, Human
uagagaccuaaaugaaguuuauaaaaa

SEQ ID NO: 54249 - RNA, 27 nt, Human
uagagaccuaaaugaaguuuauaaaaa

SEQ ID NO: 54250 - RNA, 24 nt, Human
uauccuuuggcuuugcgaagagaa

SEQ ID NO: 54251 - RNA, 24 nt, Human
uauccuuuggcuuugcgaagagaa

SEQ ID NO: 54252 - RNA, 21 nt, Human
ucaaaggcuuguguaguagcu

SEQ ID NO: 54253 - RNA, 22 nt, Human
ucaacaccacuucaucuccaac

SEQ ID NO: 54254 - RNA, 21 nt, Human
ucaagcaagcaacauacaucc

SEQ ID NO: 54255 - RNA, 21 nt, Human
ucaagcaagcaacauacaucc

SEQ ID NO: 54256 - RNA, 24 nt, Human
ucacagucucuaccauacagucac

SEQ ID NO: 54257 - RNA, 24 nt, Human
ucacagucucuaccauacagucac

SEQ ID NO: 54258 - RNA, 18 nt, Human
ucagaccugauuugccgg

SEQ ID NO: 54259 - RNA, 22 nt, Human
ucagcgcuuugucuacaugaug

SEQ ID NO: 54260 - RNA, 21 nt, Human
uccacagcugaaucagaggaa

SEQ ID NO: 54261 - RNA, 25 nt, Human
uccaugcuguuccugucagaaccug

SEQ ID NO: 54262 - RNA, 18 nt, Human
uccgcaccaggggcggca

SEQ ID NO: 54263 - RNA, 21 nt, Human
uccgcgcgccgccgccggccc

SEQ ID NO: 54264 - RNA, 18 nt, Human
uccuuuuuuuuuuuuuuu

SEQ ID NO: 54265 - RNA, 18 nt, Human
uccuuuuuuuuuuuuuuu

SEQ ID NO: 54266 - RNA, 19 nt, Human
ucuaccuacaggugacaug

SEQ ID NO: 54267 - RNA, 19 nt, Human
ucuaccuacaggugacaug

SEQ ID NO: 54268 - RNA, 19 nt, Human
ucugaacugucuacgcugg

SEQ ID NO: 54269 - RNA, 18 nt, Human
ugaccuccacggugaugc

SEQ ID NO: 54270 - RNA, 21 nt, Human
ugaccugguugaccacaauga

SEQ ID NO: 54271 - RNA, 26 nt, Human
ugagccaggaugucaucggcagagaa

SEQ ID NO: 54272 - RNA, 22 nt, Human
ugaguuacuuuuuuuuuuuuuu

SEQ ID NO: 54273 - RNA, 24 nt, Human
ugcacaaauagaaaaugguuacaa

SEQ ID NO: 54274 - RNA, 24 nt, Human
ugcacaaauagaaaaugguuacaa

SEQ ID NO: 54275 - RNA, 19 nt, Human
ugccugggcauuuuggaag

SEQ ID NO: 54276 - RNA, 23 nt, Human
ugcgaagagaacccauaguucca

SEQ ID NO: 54277 - RNA, 23 nt, Human
ugcgaagagaacccauaguucca

SEQ ID NO: 54278 - RNA, 18 nt, Human
ugcggaguccgcgcgccg

SEQ ID NO: 54279 - RNA, 22 nt, Human
ugcuucagaaaacucacauagc

SEQ ID NO: 54280 - RNA, 18 nt, Human
uggccagaggggccaaga

SEQ ID NO: 54281 - RNA, 18 nt, Human
uggccagaggggccaaga

SEQ ID NO: 54282 - RNA, 20 nt, Human
uggcggcaucugcuuccggu

SEQ ID NO: 54283 - RNA, 18 nt, Human
uguggcagaucuggacgc

SEQ ID NO: 54284 - RNA, 18 nt, Human
uguguuuagagaccuaaa

SEQ ID NO: 54285 - RNA, 18 nt, Human
uguguuuagagaccuaaa

SEQ ID NO: 54286 - RNA, 19 nt, Human
uguguuuagagaccuaaau

SEQ ID NO: 54287 - RNA, 23 nt, Human
uuaauucaaugaguuacuuuuuu

SEQ ID NO: 54288 - RNA, 23 nt, Human
uuaauucaaugaguuacuuuuuu

SEQ ID NO: 54289 - RNA, 18 nt, Human
uuggagccugccugggca

SEQ ID NO: 54290 - RNA, 19 nt, Human
uuuguuauuccgauguuca

SEQ ID NO: 54291 - RNA, 19 nt, Human
uuuguuauuccgauguuca

SEQ ID NO: 54292 - RNA, 20 nt, Human
uuuuuuuuuuuuaaacagau

SEQ ID NO: 54293 - RNA, 20 nt, Human
uuuuuuuuuuuuaaacagau

SEQ ID NO: 54294 - RNA, 21 nt, Human
aaaaaaacaaccccuucucau

SEQ ID NO: 54295 - RNA, 22 nt, Human
aaaaagaccaccaaaacaacca

SEQ ID NO: 54296 - RNA, 20 nt, Human
aaaacaaccaaagcagauga

SEQ ID NO: 54297 - RNA, 24 nt, Human
aaaacaaccaaagcagaugaaaca

SEQ ID NO: 54298 - RNA, 18 nt, Human
aaacaucagaacaucaaa

SEQ ID NO: 54299 - RNA, 21 nt, Human
aaaccaagacaggccauuaga

SEQ ID NO: 54300 - RNA, 23 nt, Human
aaacucccucccagggccugccu

SEQ ID NO: 54301 - RNA, 19 nt, Human
aaacuggaaggaaaaggua

SEQ ID NO: 54302 - RNA, 23 nt, Human
aaagcaaagccgagcagcaggca

SEQ ID NO: 54303 - RNA, 21 nt, Human
aaaguaugcacaaccaaaggc

SEQ ID NO: 54304 - RNA, 22 nt, Human
aaaucccaucagcaccaaccuc

SEQ ID NO: 54305 - RNA, 21 nt, Human
aacagugcuggcugccacuuc

SEQ ID NO: 54306 - RNA, 21 nt, Human
aacccucuccauuuucuaaga

SEQ ID NO: 54307 - RNA, 20 nt, Human
aacucugugccaggcacguu

SEQ ID NO: 54308 - RNA, 19 nt, Human
aagaagaaaacacagucaa

SEQ ID NO: 54309 - RNA, 21 nt, Human
aagaagaaaacacagucaaua

SEQ ID NO: 54310 - RNA, 20 nt, Human
aagaccaccaaaacaaccaa

SEQ ID NO: 54311 - RNA, 23 nt, Human
aagauaaauaaaauacgaagcca

SEQ ID NO: 54312 - RNA, 23 nt, Human
aagaugaaaacacggugggaaaa

SEQ ID NO: 54313 - RNA, 23 nt, Human
aagaugaaaacacggugggaaaa

SEQ ID NO: 54314 - RNA, 22 nt, Human
aagcaaagccgagcagcaggca

SEQ ID NO: 54315 - RNA, 18 nt, Human
aagcacaaaauuuuccag

SEQ ID NO: 54316 - RNA, 20 nt, Human
aauaagaagagccaagagaa

SEQ ID NO: 54317 - RNA, 21 nt, Human
aauuagccagucagcacacuu

SEQ ID NO: 54318 - RNA, 19 nt, Human
acaaagguauguaagcaca

SEQ ID NO: 54319 - RNA, 20 nt, Human
acaaaucauggccgaagcag

SEQ ID NO: 54320 - RNA, 19 nt, Human
acaaggagaagaaugcagg

SEQ ID NO: 54321 - RNA, 19 nt, Human
acaagggucugaagcuggu

SEQ ID NO: 54322 - RNA, 18 nt, Human
acacacugaaaaaaaucu

SEQ ID NO: 54323 - RNA, 19 nt, Human
acaggagaccacaggcuaa

SEQ ID NO: 54324 - RNA, 22 nt, Human
acauaauuacaaaugaauauac

SEQ ID NO: 54325 - RNA, 20 nt, Human
accaagcccaaacucccugc

SEQ ID NO: 54326 - RNA, 22 nt, Human
accacccuccugcggaucccca

SEQ ID NO: 54327 - RNA, 24 nt, Human
accuaacgacaacgacugagauga

SEQ ID NO: 54328 - RNA, 24 nt, Human
accuccccucccacaucaagaaac

SEQ ID NO: 54329 - RNA, 24 nt, Human
acgugcucuaacuucagcauccac

SEQ ID NO: 54330 - RNA, 20 nt, Human
acuucaaaagacacagagug

SEQ ID NO: 54331 - RNA, 19 nt, Human
acuuccaaggggggaagag

SEQ ID NO: 54332 - RNA, 18 nt, Human
acuuggauacacucuuuc

SEQ ID NO: 54333 - RNA, 18 nt, Human
acuuugugcucacgacua

SEQ ID NO: 54334 - RNA, 24 nt, Human
agaaaaagagcccuagaaacaaaa

SEQ ID NO: 54335 - RNA, 23 nt, Human
agaaagaaagauaaauaaaauac

SEQ ID NO: 54336 - RNA, 18 nt, Human
agaagaaugcagguucag

SEQ ID NO: 54337 - RNA, 18 nt, Human
agaaugaggcgggguggg

SEQ ID NO: 54338 - RNA, 21 nt, Human
agagcacguacgcaaguaaau

SEQ ID NO: 54339 - RNA, 20 nt, Human
agcaaaggggcgacucugaa

SEQ ID NO: 54340 - RNA, 21 nt, Human
agcacacaaauguccauagag

SEQ ID NO: 54341 - RNA, 23 nt, Human
agcagguuuuggccuuuggucug

SEQ ID NO: 54342 - RNA, 23 nt, Human
aggaaaguucaaaaccaagccca

SEQ ID NO: 54343 - RNA, 18 nt, Human
aggcaaagguaggucaga

SEQ ID NO: 54344 - RNA, 23 nt, Human
aggcacacagaucuccagcagcc

SEQ ID NO: 54345 - RNA, 19 nt, Human
aggcagccaucuguaucug

SEQ ID NO: 54346 - RNA, 19 nt, Human
aggcagccaucuguaucug

SEQ ID NO: 54347 - RNA, 20 nt, Human
aggggcacccggccuacauu

SEQ ID NO: 54348 - RNA, 22 nt, Human
aggucagcgcggagcccgagca

SEQ ID NO: 54349 - RNA, 18 nt, Human
aggucucaaaacuuugug

SEQ ID NO: 54350 - RNA, 18 nt, Human
aguacugggugaacugcu

SEQ ID NO: 54351 - RNA, 19 nt, Human
agucaauaaaguuuaugcc

SEQ ID NO: 54352 - RNA, 18 nt, Human
aguugggugguuugaggg

SEQ ID NO: 54353 - RNA, 23 nt, Human
auacuaaaauccuugggaagacc

SEQ ID NO: 54354 - RNA, 24 nt, Human
auagaaaccaagacaggccauuag

SEQ ID NO: 54355 - RNA, 22 nt, Human
auagaaagcacuucuguggaca

SEQ ID NO: 54356 - RNA, 19 nt, Human
auggacccccucccuuuaa

SEQ ID NO: 54357 - RNA, 22 nt, Human
auggccgaagcagagucugggc

SEQ ID NO: 54358 - RNA, 22 nt, Human
caaaaaaacaaccccuucucau

SEQ ID NO: 54359 - RNA, 25 nt, Human
caaaaccaagcccaaacucccugcc

SEQ ID NO: 54360 - RNA, 19 nt, Human
caaaagcacaggcagccac

SEQ ID NO: 54361 - RNA, 21 nt, Human
caaaagcacaggcagccacca

SEQ ID NO: 54362 - RNA, 24 nt, Human
caaacccggagaacaggggcaccc

SEQ ID NO: 54363 - RNA, 22 nt, Human
caaccaaagcagaugaaacauc

SEQ ID NO: 54364 - RNA, 23 nt, Human
caacuccaaugcaaauacuaaaa

SEQ ID NO: 54365 - RNA, 22 nt, Human
caagccccggguagaucucagg

SEQ ID NO: 54366 - RNA, 24 nt, Human
caagccccggguagaucucaggaa

SEQ ID NO: 54367 - RNA, 18 nt, Human
caagugaacaaagaugaa

SEQ ID NO: 54368 - RNA, 18 nt, Human
caagugaacaaagaugaa

SEQ ID NO: 54369 - RNA, 21 nt, Human
cacaaaucauggccgaagcag

SEQ ID NO: 54370 - RNA, 22 nt, Human
cacaaaucauggccgaagcaga

SEQ ID NO: 54371 - RNA, 23 nt, Human
cacagaucaaguccaaaacaucu

SEQ ID NO: 54372 - RNA, 18 nt, Human
caccuccccucccacauc

SEQ ID NO: 54373 - RNA, 21 nt, Human
caccuccccucccacaucaag

SEQ ID NO: 54374 - RNA, 19 nt, Human
cacgccuuuaacccuuagu

SEQ ID NO: 54375 - RNA, 24 nt, Human
cacucgaauaagaagagccaagag

SEQ ID NO: 54376 - RNA, 19 nt, Human
cagaagccccuccggacug

SEQ ID NO: 54377 - RNA, 20 nt, Human
cagcaaaguuugauguagug

SEQ ID NO: 54378 - RNA, 20 nt, Human
cagcaucuggguuuuaaccc

SEQ ID NO: 54379 - RNA, 21 nt, Human
cagcaucuggguuuuaacccg

SEQ ID NO: 54380 - RNA, 19 nt, Human
cagcccaaccugagagucc

SEQ ID NO: 54381 - RNA, 22 nt, Human
cagcuguccuagcuucagagca

SEQ ID NO: 54382 - RNA, 22 nt, Human
cagcuguccuagcuucagagca

SEQ ID NO: 54383 - RNA, 22 nt, Human
caggacugucuuucuaaacucc

SEQ ID NO: 54384 - RNA, 19 nt, Human
caguccgagucaccccaaa

SEQ ID NO: 54385 - RNA, 19 nt, Human
cauaagaagggcgcuuuca

SEQ ID NO: 54386 - RNA, 26 nt, Human
caucaagaaacaacgccaaaggucuc

SEQ ID NO: 54387 - RNA, 24 nt, Human
caucaagccuucucucacugguuu

SEQ ID NO: 54388 - RNA, 22 nt, Human
cauugccucaggaacacagcca

SEQ ID NO: 54389 - RNA, 22 nt, Human
ccaaaaaaacaaccccuucuca

SEQ ID NO: 54390 - RNA, 19 nt, Human
ccaaaacaaccaaagcaga

SEQ ID NO: 54391 - RNA, 20 nt, Human
ccaaaacgcagagggugcac

SEQ ID NO: 54392 - RNA, 19 nt, Human
ccaaccagaaccugaccaa

SEQ ID NO: 54393 - RNA, 19 nt, Human
ccaagcccaaacucccugc

SEQ ID NO: 54394 - RNA, 27 nt, Human
ccagaacagacagccaagccccgggua

SEQ ID NO: 54395 - RNA, 20 nt, Human
ccagcccaaccugagagucc

SEQ ID NO: 54396 - RNA, 20 nt, Human
ccaggcacugcccuugugcu

SEQ ID NO: 54397 - RNA, 20 nt, Human
ccauagguggcugcgcaccu

SEQ ID NO: 54398 - RNA, 18 nt, Human
ccaucuaaaacuagguug

SEQ ID NO: 54399 - RNA, 20 nt, Human
cccaaaaaaacaaccccuuc

SEQ ID NO: 54400 - RNA, 24 nt, Human
cccaaaaaaacaaccccuucucau

SEQ ID NO: 54401 - RNA, 25 nt, Human
cccaaaacuuaagcacaguuucagg

SEQ ID NO: 54402 - RNA, 19 nt, Human
cccaaacucccugcccucu

SEQ ID NO: 54403 - RNA, 24 nt, Human
cccacaucaagaaacaacgccaaa

SEQ ID NO: 54404 - RNA, 23 nt, Human
cccacgccuccccugcgcauccc

SEQ ID NO: 54405 - RNA, 23 nt, Human
ccccagauagcucucacgggggu

SEQ ID NO: 54406 - RNA, 30 nt, Human
cccccaaaacuuaagcacaguuucaggcag

SEQ ID NO: 54407 - RNA, 19 nt, Human
ccccgcgggccgagcuggg

SEQ ID NO: 54408 - RNA, 19 nt, Human
cccggggcucccccgcggg

SEQ ID NO: 54409 - RNA, 21 nt, Human
ccgagucaccccaaaaaaaca

SEQ ID NO: 54410 - RNA, 24 nt, Human
ccucaagugaacaaagaugaaaac

SEQ ID NO: 54411 - RNA, 24 nt, Human
ccucaagugaacaaagaugaaaac

SEQ ID NO: 54412 - RNA, 19 nt, Human
ccucacagccacccucuuu

SEQ ID NO: 54413 - RNA, 21 nt, Human
ccucacccagcaagggccaga

SEQ ID NO: 54414 - RNA, 23 nt, Human
ccucacccagcaagggccagaca

SEQ ID NO: 54415 - RNA, 22 nt, Human
ccucaggaacacagccaggagg

SEQ ID NO: 54416 - RNA, 20 nt, Human
ccucccagggccugccuggc

SEQ ID NO: 54417 - RNA, 26 nt, Human
ccucccuuuaaaauuucaucugggaa

SEQ ID NO: 54418 - RNA, 20 nt, Human
ccuccugcaaaucccaggag

SEQ ID NO: 54419 - RNA, 19 nt, Human
ccugaaacaccgagaucga

SEQ ID NO: 54420 - RNA, 18 nt, Human
ccugaaccacaggcagac

SEQ ID NO: 54421 - RNA, 22 nt, Human
ccugagaguccugggcagucac

SEQ ID NO: 54422 - RNA, 23 nt, Human
ccugaguagggccagcccaaccu

SEQ ID NO: 54423 - RNA, 22 nt, Human
ccugcaaaucccaggaggggaa

SEQ ID NO: 54424 - RNA, 24 nt, Human
ccuggccagcaggcaguagauucc

SEQ ID NO: 54425 - RNA, 25 nt, Human
ccuggccagcaggcaguagauucca

SEQ ID NO: 54426 - RNA, 19 nt, Human
ccuguacuuacgaggccau

SEQ ID NO: 54427 - RNA, 18 nt, Human
ccuguacuuacgaggccu

SEQ ID NO: 54428 - RNA, 21 nt, Human
ccuuccgggccagcuccucuc

SEQ ID NO: 54429 - RNA, 21 nt, Human
ccuuccgggccagcuccucuc

SEQ ID NO: 54430 - RNA, 21 nt, Human
ccuuugauuaaagaaugaggc

SEQ ID NO: 54431 - RNA, 23 nt, Human
cgacuaauacugaggccucagga

SEQ ID NO: 54432 - RNA, 18 nt, Human
cgcaaguaaaucccauca

SEQ ID NO: 54433 - RNA, 22 nt, Human
cgcaccuagacgguccugcuga

SEQ ID NO: 54434 - RNA, 21 nt, Human
cgcccaggaggacuggacgcu

SEQ ID NO: 54435 - RNA, 18 nt, Human
cgccucggucgccgccgc

SEQ ID NO: 54436 - RNA, 18 nt, Human
cgccucggucgccgccgc

SEQ ID NO: 54437 - RNA, 27 nt, Human
cgccugugcucugccgagacugccgug

SEQ ID NO: 54438 - RNA, 20 nt, Human
cgccuuccgggccagcuccu

SEQ ID NO: 54439 - RNA, 20 nt, Human
cgccuuccgggccagcuccu

SEQ ID NO: 54440 - RNA, 25 nt, Human
cgcggugaagcgccugugcucugcc

SEQ ID NO: 54441 - RNA, 19 nt, Human
cuagagcacugucaaggcc

SEQ ID NO: 54442 - RNA, 19 nt, Human
cucaaaagccccaugcuuc

SEQ ID NO: 54443 - RNA, 22 nt, Human
cucaaaagccccaugcuuccga

SEQ ID NO: 54444 - RNA, 19 nt, Human
cucagccagcuguccuagc

SEQ ID NO: 54445 - RNA, 19 nt, Human
cucagccagcuguccuagc

SEQ ID NO: 54446 - RNA, 21 nt, Human
cucaggaacacagccaggagg

SEQ ID NO: 54447 - RNA, 19 nt, Human
cuccagcagccgcugcccc

SEQ ID NO: 54448 - RNA, 22 nt, Human
cuccccucccacaucaagaaac

SEQ ID NO: 54449 - RNA, 22 nt, Human
cucgccucggucgccgccgcuu

SEQ ID NO: 54450 - RNA, 20 nt, Human
cugccuggcuguccucuggg

SEQ ID NO: 54451 - RNA, 18 nt, Human
cuggaaaucugggggcuc

SEQ ID NO: 54452 - RNA, 19 nt, Human
cuguccucugggcacagcu

SEQ ID NO: 54453 - RNA, 18 nt, Human
cuuccgggccagcuccuc

SEQ ID NO: 54454 - RNA, 18 nt, Human
cuuccgggccagcuccuc

SEQ ID NO: 54455 - RNA, 21 nt, Human
cuucgccugaacccacuucuc

SEQ ID NO: 54456 - RNA, 21 nt, Human
cuucgccugaacccacuucuc

SEQ ID NO: 54457 - RNA, 18 nt, Human
cuuggaguuguacaaaua

SEQ ID NO: 54458 - RNA, 23 nt, Human
cuugguaaggauucuucccccca

SEQ ID NO: 54459 - RNA, 19 nt, Human
gaacagacagccaagcccc

SEQ ID NO: 54460 - RNA, 22 nt, Human
gaacagacagccaagccccggg

SEQ ID NO: 54461 - RNA, 21 nt, Human
gaaccacaggcagacucacca

SEQ ID NO: 54462 - RNA, 23 nt, Human
gaagccccuccggacugcagcac

SEQ ID NO: 54463 - RNA, 21 nt, Human
gaauaguauuacccugagaca

SEQ ID NO: 54464 - RNA, 18 nt, Human
gacaauaggcggccgccc

SEQ ID NO: 54465 - RNA, 18 nt, Human
gacccaggacacgugcgg

SEQ ID NO: 54466 - RNA, 24 nt, Human
gagaagacauccuuugauuaaaga

SEQ ID NO: 54467 - RNA, 20 nt, Human
gagaguccugggcagucaca

SEQ ID NO: 54468 - RNA, 23 nt, Human
gagcaaaagcacaggcagccacc

SEQ ID NO: 54469 - RNA, 18 nt, Human
gagcagugggcguccagu

SEQ ID NO: 54470 - RNA, 18 nt, Human
gaguaggccucuucacuu

SEQ ID NO: 54471 - RNA, 20 nt, Human
gagucaccccaaaaaaacaa

SEQ ID NO: 54472 - RNA, 18 nt, Human
gauccccacgccuccccu

SEQ ID NO: 54473 - RNA, 24 nt, Human
gcaaagccgagcagcaggcagcca

SEQ ID NO: 54474 - RNA, 24 nt, Human
gcaaagccgagcagcaggcagcca

SEQ ID NO: 54475 - RNA, 22 nt, Human
gcaacuagagcacugucaaggc

SEQ ID NO: 54476 - RNA, 18 nt, Human
gcacgcggggacagcagg

SEQ ID NO: 54477 - RNA, 20 nt, Human
gcaggaacugcuacacaugg

SEQ ID NO: 54478 - RNA, 20 nt, Human
gcaggaacugcuacacaugg

SEQ ID NO: 54479 - RNA, 21 nt, Human
gcaggaacugcuacacauggc

SEQ ID NO: 54480 - RNA, 21 nt, Human
gcaggaacugcuacacauggc

SEQ ID NO: 54481 - RNA, 22 nt, Human
gcaugcacuaacaccuccccuc

SEQ ID NO: 54482 - RNA, 21 nt, Human
gccaccaucccagguaaaucc

SEQ ID NO: 54483 - RNA, 28 nt, Human
gccccaauuccauccacaggguuauuuc

SEQ ID NO: 54484 - RNA, 19 nt, Human
gccuccuuccccacccgac

SEQ ID NO: 54485 - RNA, 19 nt, Human
gccuggccugggugcgagg

SEQ ID NO: 54486 - RNA, 19 nt, Human
gccuggccugggugcgagg

SEQ ID NO: 54487 - RNA, 22 nt, Human
gcggcucccggggcucccccgc

SEQ ID NO: 54488 - RNA, 24 nt, Human
gcggugaagcgccugugcucugcc

SEQ ID NO: 54489 - RNA, 19 nt, Human
gcuacauugaaaggaaagu

SEQ ID NO: 54490 - RNA, 20 nt, Human
gcucgccucggucgccgccg

SEQ ID NO: 54491 - RNA, 19 nt, Human
gcugcacugcagacuguau

SEQ ID NO: 54492 - RNA, 22 nt, Human
ggaaaagcaaaagcaaagccga

SEQ ID NO: 54493 - RNA, 22 nt, Human
ggaaaagcaaaagcaaagccga

SEQ ID NO: 54494 - RNA, 19 nt, Human
ggaacaaaucccccugagg

SEQ ID NO: 54495 - RNA, 19 nt, Human
ggacccccucccuuuaaaa

SEQ ID NO: 54496 - RNA, 18 nt, Human
ggaccuggggccgcccag

SEQ ID NO: 54497 - RNA, 23 nt, Human
ggaccuggggccgcccaggagga

SEQ ID NO: 54498 - RNA, 23 nt, Human
ggagaacaggggcacccggccua

SEQ ID NO: 54499 - RNA, 23 nt, Human
ggagaagaaugcagguucaguac

SEQ ID NO: 54500 - RNA, 21 nt, Human
ggaggccguggccccuucuga

SEQ ID NO: 54501 - RNA, 21 nt, Human
ggcaggaacugcuacacaugg

SEQ ID NO: 54502 - RNA, 21 nt, Human
ggcaggaacugcuacacaugg

SEQ ID NO: 54503 - RNA, 18 nt, Human
ggcucccggggcuccccc

SEQ ID NO: 54504 - RNA, 18 nt, Human
gggaaaccagucucugag

SEQ ID NO: 54505 - RNA, 25 nt, Human
gggacagcaggagaggugggcuggc

SEQ ID NO: 54506 - RNA, 21 nt, Human
ggggaagagagaugacaaagg

SEQ ID NO: 54507 - RNA, 22 nt, Human
gguaaggauucuuccccccaga

SEQ ID NO: 54508 - RNA, 21 nt, Human
guccccauguacguacacaga

SEQ ID NO: 54509 - RNA, 23 nt, Human
gucgccgccgcuuuagccgcucc

SEQ ID NO: 54510 - RNA, 20 nt, Human
gugcuaaguugaccagacgc

SEQ ID NO: 54511 - RNA, 23 nt, Human
gugcuggcugccacuucacucgg

SEQ ID NO: 54512 - RNA, 22 nt, Human
guggacagcaacuucuggauca

SEQ ID NO: 54513 - RNA, 18 nt, Human
gugggcuggccaggauca

SEQ ID NO: 54514 - RNA, 21 nt, Human
guuugaaguuguuacuuuugu

SEQ ID NO: 54515 - RNA, 24 nt, Human
uaaaaaagaccaccaaaacaacca

SEQ ID NO: 54516 - RNA, 24 nt, Human
uaaaaacuggaaggaaaagguaag

SEQ ID NO: 54517 - RNA, 23 nt, Human
uaaaucagaaagugauuaaagua

SEQ ID NO: 54518 - RNA, 22 nt, Human
uaaaucccaucagcaccaaccu

SEQ ID NO: 54519 - RNA, 18 nt, Human
uaaauccccaggacagga

SEQ ID NO: 54520 - RNA, 19 nt, Human
uaacaaauacgggagaaaa

SEQ ID NO: 54521 - RNA, 23 nt, Human
uaacaccuccccucccacaucaa

SEQ ID NO: 54522 - RNA, 22 nt, Human
uaacauaagaagggcgcuuuca

SEQ ID NO: 54523 - RNA, 27 nt, Human
uaacgacaacgacugagaugacuggaa

SEQ ID NO: 54524 - RNA, 20 nt, Human
uaagcacaguucuugguaag

SEQ ID NO: 54525 - RNA, 24 nt, Human
uaaguaacuuuacaauuauuauca

SEQ ID NO: 54526 - RNA, 24 nt, Human
uacaaauuagccagucagcacacu

SEQ ID NO: 54527 - RNA, 20 nt, Human
uacccugagacacagaaggg

SEQ ID NO: 54528 - RNA, 24 nt, Human
uagaaaccaagacaggccauuaga

SEQ ID NO: 54529 - RNA, 24 nt, Human
uagagcauuugcaaacaagcaaug

SEQ ID NO: 54530 - RNA, 24 nt, Human
uagaugaguacuuggaaagaugcc

SEQ ID NO: 54531 - RNA, 22 nt, Human
uaggaacuccaucuuuccccca

SEQ ID NO: 54532 - RNA, 21 nt, Human
uaggcucccacauuccaagga

SEQ ID NO: 54533 - RNA, 28 nt, Human
uauaugcagacagguccccauguacgua

SEQ ID NO: 54534 - RNA, 27 nt, Human
uaucccaaccacccuccugcggauccc

SEQ ID NO: 54535 - RNA, 20 nt, Human
uaugcagacagguccccaug

SEQ ID NO: 54536 - RNA, 19 nt, Human
uauuacccugagacacaga

SEQ ID NO: 54537 - RNA, 19 nt, Human
ucaaacaagggagaagaca

SEQ ID NO: 54538 - RNA, 20 nt, Human
ucaacccuugcaugcacuaa

SEQ ID NO: 54539 - RNA, 19 nt, Human
ucacaaccacgccuuccgg

SEQ ID NO: 54540 - RNA, 19 nt, Human
ucacaaccacgccuuccgg

SEQ ID NO: 54541 - RNA, 21 nt, Human
ucacaaccacgccuuccgggc

SEQ ID NO: 54542 - RNA, 21 nt, Human
ucacaaccacgccuuccgggc

SEQ ID NO: 54543 - RNA, 21 nt, Human
ucaccccaaaaaaacaacccc

SEQ ID NO: 54544 - RNA, 20 nt, Human
ucagaaagugauuaaaguau

SEQ ID NO: 54545 - RNA, 21 nt, Human
ucagccagcuguccuagcuuc

SEQ ID NO: 54546 - RNA, 21 nt, Human
ucagccagcuguccuagcuuc

SEQ ID NO: 54547 - RNA, 19 nt, Human
ucaggaggcagcugccuca

SEQ ID NO: 54548 - RNA, 21 nt, Human
ucaggccggggaagguguggg

SEQ ID NO: 54549 - RNA, 25 nt, Human
ucauucucaaacaagggagaagaca

SEQ ID NO: 54550 - RNA, 19 nt, Human
uccauagagcauuugcaaa

SEQ ID NO: 54551 - RNA, 20 nt, Human
uccauagguggcugcgcacc

SEQ ID NO: 54552 - RNA, 25 nt, Human
uccaucuuucccccaaaacuuaagc

SEQ ID NO: 54553 - RNA, 19 nt, Human
ucccacaucaagaaacaac

SEQ ID NO: 54554 - RNA, 21 nt, Human
ucccagggccugccuggcugu

SEQ ID NO: 54555 - RNA, 19 nt, Human
uccccaggacaggaacaaa

SEQ ID NO: 54556 - RNA, 23 nt, Human
ucccccgcgggccgagcugggac

SEQ ID NO: 54557 - RNA, 19 nt, Human
ucccccugaggacaacuuc

SEQ ID NO: 54558 - RNA, 20 nt, Human
ucccggggcucccccgcggg

SEQ ID NO: 54559 - RNA, 21 nt, Human
ucccuaaaaugaaaugagaaa

SEQ ID NO: 54560 - RNA, 22 nt, Human
ucccuuccucccccccgccucc

SEQ ID NO: 54561 - RNA, 24 nt, Human
uccgagucaccccaaaaaaacaac

SEQ ID NO: 54562 - RNA, 23 nt, Human
uccgguguaucccaaccacccuc

SEQ ID NO: 54563 - RNA, 26 nt, Human
uccuugggaagaccuggcuacagaaa

SEQ ID NO: 54564 - RNA, 23 nt, Human
ucuaagaagaaaacacagucaau

SEQ ID NO: 54565 - RNA, 20 nt, Human
ucuaggcucccacauuccaa

SEQ ID NO: 54566 - RNA, 22 nt, Human
ucuccauuauaaaauaguugca

SEQ ID NO: 54567 - RNA, 19 nt, Human
ucuguaucugcuuccaggg

SEQ ID NO: 54568 - RNA, 19 nt, Human
ucuguaucugcuuccaggg

SEQ ID NO: 54569 - RNA, 22 nt, Human
ucugugccaggcacguuacuag

SEQ ID NO: 54570 - RNA, 22 nt, Human
ucuguggacagcaacuucugga

SEQ ID NO: 54571 - RNA, 23 nt, Human
ucuucuuugucucugaggaugga

SEQ ID NO: 54572 - RNA, 21 nt, Human
ugaaaacacggugggaaaagc

SEQ ID NO: 54573 - RNA, 21 nt, Human
ugaaaacacggugggaaaagc

SEQ ID NO: 54574 - RNA, 19 nt, Human
ugaaaaugaagccaaccga

SEQ ID NO: 54575 - RNA, 19 nt, Human
ugaaaggaaaguucaaaac

SEQ ID NO: 54576 - RNA, 20 nt, Human
ugaaaguggcaguuugcaug

SEQ ID NO: 54577 - RNA, 23 nt, Human
ugaaauagaaagcacuucugugg

SEQ ID NO: 54578 - RNA, 23 nt, Human
ugaaauagcauuaacuaggauaa

SEQ ID NO: 54579 - RNA, 22 nt, Human
ugaagcugguaacuagaaagaa

SEQ ID NO: 54580 - RNA, 21 nt, Human
ugaauuaugcaacuccuccuc

SEQ ID NO: 54581 - RNA, 22 nt, Human
ugacagaaaaaggcaaagguag

SEQ ID NO: 54582 - RNA, 23 nt, Human
ugacuaucacuaacagguaauau

SEQ ID NO: 54583 - RNA, 26 nt, Human
ugagaaauacaugcaaaaaggguuuc

SEQ ID NO: 54584 - RNA, 19 nt, Human
ugagagcagagguauccgg

SEQ ID NO: 54585 - RNA, 22 nt, Human
ugagagcagagguauccggugu

SEQ ID NO: 54586 - RNA, 18 nt, Human
ugagaugacuggaauuga

SEQ ID NO: 54587 - RNA, 18 nt, Human
ugagcaaaggggcgacuc

SEQ ID NO: 54588 - RNA, 23 nt, Human
ugaguggucagugacaaucaaaa

SEQ ID NO: 54589 - RNA, 19 nt, Human
ugaugacaaaaugagauac

SEQ ID NO: 54590 - RNA, 26 nt, Human
ugcaacuccuccuccucaucacucga

SEQ ID NO: 54591 - RNA, 22 nt, Human
ugcacuaacaccuccccuccca

SEQ ID NO: 54592 - RNA, 24 nt, Human
ugcacuaacaccuccccucccaca

SEQ ID NO: 54593 - RNA, 22 nt, Human
ugcacugcagacuguauuccug

SEQ ID NO: 54594 - RNA, 23 nt, Human
ugcacuggcaggaacugcuacac

SEQ ID NO: 54595 - RNA, 18 nt, Human
ugcauugccucaggaaca

SEQ ID NO: 54596 - RNA, 20 nt, Human
ugccccaauuccauccacag

SEQ ID NO: 54597 - RNA, 20 nt, Human
ugcccucuucuuugucucug

SEQ ID NO: 54598 - RNA, 19 nt, Human
ugcuaaguugaccagacgc

SEQ ID NO: 54599 - RNA, 21 nt, Human
uggaaaucugggggcucugga

SEQ ID NO: 54600 - RNA, 24 nt, Human
uggacccccucccuuuaaaauuuc

SEQ ID NO: 54601 - RNA, 23 nt, Human
uggaugaaguugggugguuugag

SEQ ID NO: 54602 - RNA, 22 nt, Human
uggcaaaauucgagaaaacaca

SEQ ID NO: 54603 - RNA, 23 nt, Human
uggcagcauuaaaacacuuuuca

SEQ ID NO: 54604 - RNA, 20 nt, Human
uggcaggggacacagccagu

SEQ ID NO: 54605 - RNA, 21 nt, Human
uggcaggggacacagccagug

SEQ ID NO: 54606 - RNA, 18 nt, Human
uggcaguggugugcccuc

SEQ ID NO: 54607 - RNA, 22 nt, Human
uggccucuaagguuauaguccc

SEQ ID NO: 54608 - RNA, 19 nt, Human
ugggaaaagcaaaagcaaa

SEQ ID NO: 54609 - RNA, 19 nt, Human
ugggaaaagcaaaagcaaa

SEQ ID NO: 54610 - RNA, 20 nt, Human
ugggagaggcacgacggggg

SEQ ID NO: 54611 - RNA, 22 nt, Human
ugguaagcgguucuguugcugc

SEQ ID NO: 54612 - RNA, 20 nt, Human
ugguaugugcccgggauggg

SEQ ID NO: 54613 - RNA, 18 nt, Human
ugguauuguggaagguac

SEQ ID NO: 54614 - RNA, 22 nt, Human
ugucaucccuaaaaugaaauga

SEQ ID NO: 54615 - RNA, 18 nt, Human
uguccaggaccuggggcc

SEQ ID NO: 54616 - RNA, 21 nt, Human
ugucugggagaggcacgacgg

SEQ ID NO: 54617 - RNA, 22 nt, Human
ugucuuucuaaacucccuccca

SEQ ID NO: 54618 - RNA, 24 nt, Human
uguggcgacgugcucuaacuucag

SEQ ID NO: 54619 - RNA, 23 nt, Human
uuagauccagcaacuagagcacu

SEQ ID NO: 54620 - RNA, 20 nt, Human
uuccaaaaaaaccuugguag

SEQ ID NO: 54621 - RNA, 20 nt, Human
uuccaaggcucugguuaacu

SEQ ID NO: 54622 - RNA, 19 nt, Human
uuccagggccucccuucug

SEQ ID NO: 54623 - RNA, 22 nt, Human
uuccugcagaagccccuccgga

SEQ ID NO: 54624 - RNA, 20 nt, Human
uucuccaugacagaaaaagg

SEQ ID NO: 54625 - RNA, 23 nt, Human
uugaaaguggcaguuugcauguu

SEQ ID NO: 54626 - RNA, 24 nt, Human
uuucuaggcucccacauuccaagg

SEQ ID NO: 54627 - RNA, 19 nt, Human
uuugaguggggucugggca

SEQ ID NO: 54628 - RNA, 18 nt, Human
uuuggucuguuucugaag

SEQ ID NO: 54629 - RNA, 19 nt, Human
uuuuaaacuuguccaacca

SEQ ID NO: 54630 - RNA, 24 nt, Human
uuuuuuuuuuuuuuuuuucucagg

SEQ ID NO: 54631 - RNA, 20 nt, Human
aaaaaaagaaaaacaaagaa

SEQ ID NO: 54632 - RNA, 18 nt, Human
aaaaacacacgcuguagu

SEQ ID NO: 54633 - RNA, 20 nt, Human
aaaaagaaauucucacucca

SEQ ID NO: 54634 - RNA, 19 nt, Human
aaaaugcccccaccaucuu

SEQ ID NO: 54635 - RNA, 27 nt, Human
aaaaugcccccaccaucuugaaccagu

SEQ ID NO: 54636 - RNA, 20 nt, Human
aaagaaaaacaaagaaaaaa

SEQ ID NO: 54637 - RNA, 21 nt, Human
aacacaaaaucaaaauuggca

SEQ ID NO: 54638 - RNA, 24 nt, Human
aagagcacagagaaaaucuggcuc

SEQ ID NO: 54639 - RNA, 18 nt, Human
aaggaaacugaugggcac

SEQ ID NO: 54640 - RNA, 27 nt, Human
aaucacucuaaaaccaaagcaggauaa

SEQ ID NO: 54641 - RNA, 25 nt, Human
acacacacacacacauccacacaca

SEQ ID NO: 54642 - RNA, 21 nt, Human
acagcuuugugacugugggag

SEQ ID NO: 54643 - RNA, 24 nt, Human
acgcuguagucacccaaggaaacu

SEQ ID NO: 54644 - RNA, 22 nt, Human
acucuggaauuuuaauacacac

SEQ ID NO: 54645 - RNA, 18 nt, Human
acuuaggcuacuuuuuuu

SEQ ID NO: 54646 - RNA, 22 nt, Human
agaaugcaauacuuccagaaag

SEQ ID NO: 54647 - RNA, 19 nt, Human
agguaaagacgauccuccu

SEQ ID NO: 54648 - RNA, 20 nt, Human
aguaguuaaucagcucugga

SEQ ID NO: 54649 - RNA, 19 nt, Human
agucaccaaaaaaguccuu

SEQ ID NO: 54650 - RNA, 20 nt, Human
aucauccugaaacacacugg

SEQ ID NO: 54651 - RNA, 20 nt, Human
augagucagagaaaacauga

SEQ ID NO: 54652 - RNA, 24 nt, Human
augguuccauuuuuuacuuugugc

SEQ ID NO: 54653 - RNA, 22 nt, Human
auguguguguguauauauaugu

SEQ ID NO: 54654 - RNA, 23 nt, Human
auuugugaauaaauguccccccc

SEQ ID NO: 54655 - RNA, 24 nt, Human
caagugacaggugggaaacuggug

SEQ ID NO: 54656 - RNA, 30 nt, Human
cacacacacacacacauccacacacacccu

SEQ ID NO: 54657 - RNA, 26 nt, Human
cacacacauccacacacaccccaucu

SEQ ID NO: 54658 - RNA, 21 nt, Human
cacacauccacacacacccca

SEQ ID NO: 54659 - RNA, 23 nt, Human
cacacgcuguagucacccaagga

SEQ ID NO: 54660 - RNA, 24 nt, Human
cacagugaaaacagcuuugugacu

SEQ ID NO: 54661 - RNA, 19 nt, Human
cacaguuuuaaaacaaagg

SEQ ID NO: 54662 - RNA, 22 nt, Human
caccauuguccuucaucgccca

SEQ ID NO: 54663 - RNA, 26 nt, Human
caccauuguccuucaucgcccagaga

SEQ ID NO: 54664 - RNA, 18 nt, Human
cacuuuauauauauauau

SEQ ID NO: 54665 - RNA, 20 nt, Human
cagaguucgccuuuuuuuuc

SEQ ID NO: 54666 - RNA, 22 nt, Human
cagcaaaaauaguaucucuuac

SEQ ID NO: 54667 - RNA, 21 nt, Human
caggcaggggaaagaggaaag

SEQ ID NO: 54668 - RNA, 21 nt, Human
cagggacggcuggggauccgc

SEQ ID NO: 54669 - RNA, 18 nt, Human
cauccacacacaccccau

SEQ ID NO: 54670 - RNA, 21 nt, Human
cauuguauauugcagcuucug

SEQ ID NO: 54671 - RNA, 20 nt, Human
cccagagccuagcacggugc

SEQ ID NO: 54672 - RNA, 21 nt, Human
cccauagaacuauccuacucu

SEQ ID NO: 54673 - RNA, 19 nt, Human
ccccaaaaaaagaaaaaca

SEQ ID NO: 54674 - RNA, 26 nt, Human
cccccaaaaaaagaaaaacaaagaaa

SEQ ID NO: 54675 - RNA, 19 nt, Human
cccccaaagucaacacuag

SEQ ID NO: 54676 - RNA, 22 nt, Human
ccccccaaagucaacacuaguc

SEQ ID NO: 54677 - RNA, 19 nt, Human
cccucccuuuuucucucuc

SEQ ID NO: 54678 - RNA, 23 nt, Human
ccuauaaacacggcagaaugcaa

SEQ ID NO: 54679 - RNA, 21 nt, Human
ccucccccaaaaaaagaaaaa

SEQ ID NO: 54680 - RNA, 21 nt, Human
ccuccuuccugaguccuccca

SEQ ID NO: 54681 - RNA, 20 nt, Human
ccucuguucuuaucccugug

SEQ ID NO: 54682 - RNA, 18 nt, Human
ccuucccucccuuuuucu

SEQ ID NO: 54683 - RNA, 19 nt, Human
ccuuucucuuuugauuccu

SEQ ID NO: 54684 - RNA, 18 nt, Human
cuagaacccgggagaacg

SEQ ID NO: 54685 - RNA, 19 nt, Human
cucacaaucacucuaaaac

SEQ ID NO: 54686 - RNA, 19 nt, Human
cucacaaucacucuaaaac

SEQ ID NO: 54687 - RNA, 23 nt, Human
cuccaaggcagaguucgccuuuu

SEQ ID NO: 54688 - RNA, 19 nt, Human
cuccaugccaaccucccuc

SEQ ID NO: 54689 - RNA, 21 nt, Human
cucccuuuuucucucucuacc

SEQ ID NO: 54690 - RNA, 22 nt, Human
cuccugaagccagcaaacagcu

SEQ ID NO: 54691 - RNA, 21 nt, Human
cugugcgcacggcgggcucgc

SEQ ID NO: 54692 - RNA, 23 nt, Human
cuuccccuuucucagccuccuca

SEQ ID NO: 54693 - RNA, 18 nt, Human
cuuccuggguugaaggaa

SEQ ID NO: 54694 - RNA, 23 nt, Human
cuucuaaucuaacacggaucuca

SEQ ID NO: 54695 - RNA, 21 nt, Human
cuugcaacagggaucuuacuu

SEQ ID NO: 54696 - RNA, 29 nt, Human
cuuguuacacuuuauauauauauaugugu

SEQ ID NO: 54697 - RNA, 24 nt, Human
cuuucuccuucccucccuuuuuuu

SEQ ID NO: 54698 - RNA, 21 nt, Human
gaaacgccauucauuuuaugg

SEQ ID NO: 54699 - RNA, 18 nt, Human
gaacccgggagaacgccc

SEQ ID NO: 54700 - RNA, 21 nt, Human
gaagauagacagcaguaaucc

SEQ ID NO: 54701 - RNA, 19 nt, Human
gaauaaauaggagacuuuc

SEQ ID NO: 54702 - RNA, 19 nt, Human
gaaugacuuuccuccaggg

SEQ ID NO: 54703 - RNA, 23 nt, Human
gacaggugggaaacuggugcagg

SEQ ID NO: 54704 - RNA, 25 nt, Human
gagaacgcccagggacggcugggga

SEQ ID NO: 54705 - RNA, 25 nt, Human
gagaauucauucaaaauauucagga

SEQ ID NO: 54706 - RNA, 21 nt, Human
gaguauaauuuccaaacacag

SEQ ID NO: 54707 - RNA, 22 nt, Human
gaguuaaugcaacacccucuga

SEQ ID NO: 54708 - RNA, 21 nt, Human
gaucccagagccuagcacggu

SEQ ID NO: 54709 - RNA, 22 nt, Human
gauuguguuugugacaugaaga

SEQ ID NO: 54710 - RNA, 19 nt, Human
gcaccagccugggcccuac

SEQ ID NO: 54711 - RNA, 19 nt, Human
gccacugugccuggggcug

SEQ ID NO: 54712 - RNA, 19 nt, Human
gccacugugccuggggcug

SEQ ID NO: 54713 - RNA, 22 nt, Human
gcccagagaggcuggucucagu

SEQ ID NO: 54714 - RNA, 24 nt, Human
ggagcauggcccaagaacccccag

SEQ ID NO: 54715 - RNA, 23 nt, Human
gggaaagaggaaagaaaaaacac

SEQ ID NO: 54716 - RNA, 21 nt, Human
guaaagagcaacacaaaauca

SEQ ID NO: 54717 - RNA, 18 nt, Human
gucugaguuaauuauugc

SEQ ID NO: 54718 - RNA, 21 nt, Human
gucugauggggggacuuccuu

SEQ ID NO: 54719 - RNA, 18 nt, Human
guggcccaagguuucuug

SEQ ID NO: 54720 - RNA, 26 nt, Human
guguacacacacacacacacacaucc

SEQ ID NO: 54721 - RNA, 22 nt, Human
gugucauccaaguaaaacacag

SEQ ID NO: 54722 - RNA, 24 nt, Human
guguguauauauauguggacauug

SEQ ID NO: 54723 - RNA, 23 nt, Human
guuccauuuuuuacuuugugccu

SEQ ID NO: 54724 - RNA, 21 nt, Human
guuuccuucaaaacagaacaa

SEQ ID NO: 54725 - RNA, 19 nt, Human
uaaaaacucaacacacauu

SEQ ID NO: 54726 - RNA, 23 nt, Human
uaaaaaugcccccaccaucuuga

SEQ ID NO: 54727 - RNA, 22 nt, Human
uaaaacacagcacggccuccug

SEQ ID NO: 54728 - RNA, 25 nt, Human
uaaaacacagcacggccuccugcca

SEQ ID NO: 54729 - RNA, 22 nt, Human
uaaaagaagcaaaggaaaugug

SEQ ID NO: 54730 - RNA, 20 nt, Human
uaacaagcuugugugcuauu

SEQ ID NO: 54731 - RNA, 23 nt, Human
uaacauacacaggaaaaccagau

SEQ ID NO: 54732 - RNA, 30 nt, Human
uaacaucauccauuugguuuguuuuucucc

SEQ ID NO: 54733 - RNA, 19 nt, Human
uaagagauguaggggccac

SEQ ID NO: 54734 - RNA, 23 nt, Human
uaauacacacacacacacacccu

SEQ ID NO: 54735 - RNA, 20 nt, Human
uacacacacacacacacaca

SEQ ID NO: 54736 - RNA, 25 nt, Human
uacacuuuauauauauauaugugug

SEQ ID NO: 54737 - RNA, 21 nt, Human
uaccuccuuauuuuauuccca

SEQ ID NO: 54738 - RNA, 22 nt, Human
uagacagcaguaauccggaagg

SEQ ID NO: 54739 - RNA, 27 nt, Human
uauaauacaaaauaguuauaaacaccu

SEQ ID NO: 54740 - RNA, 19 nt, Human
uauauauauauaugugugu

SEQ ID NO: 54741 - RNA, 26 nt, Human
uaucauccugaaacacacugguugcu

SEQ ID NO: 54742 - RNA, 21 nt, Human
uaugaagaggcaaguaaacug

SEQ ID NO: 54743 - RNA, 23 nt, Human
uauguguguguguauauauaugu

SEQ ID NO: 54744 - RNA, 20 nt, Human
uauucaggagacucaaccau

SEQ ID NO: 54745 - RNA, 23 nt, Human
ucaaauuacaaaaccgcucaaaa

SEQ ID NO: 54746 - RNA, 24 nt, Human
ucaacuuaauauuacaaauacugc

SEQ ID NO: 54747 - RNA, 19 nt, Human
ucaggacuucuaaucuaac

SEQ ID NO: 54748 - RNA, 19 nt, Human
ucagugaauauuauaagca

SEQ ID NO: 54749 - RNA, 18 nt, Human
ucauaacugccucuucug

SEQ ID NO: 54750 - RNA, 20 nt, Human
uccaagccugcacuuauuuc

SEQ ID NO: 54751 - RNA, 25 nt, Human
uccacacacggagcauggcccaaga

SEQ ID NO: 54752 - RNA, 23 nt, Human
uccacuccugaagccagcaaaca

SEQ ID NO: 54753 - RNA, 22 nt, Human
uccauuugggaucccagagccu

SEQ ID NO: 54754 - RNA, 20 nt, Human
ucccagagccuagcacggug

SEQ ID NO: 54755 - RNA, 22 nt, Human
ucccagagccuagcacggugcu

SEQ ID NO: 54756 - RNA, 21 nt, Human
uccccuccucccccaaaaaaa

SEQ ID NO: 54757 - RNA, 18 nt, Human
uccuggguguccagaguc

SEQ ID NO: 54758 - RNA, 22 nt, Human
ucgcuggguucucagcccaggc

SEQ ID NO: 54759 - RNA, 25 nt, Human
ucuaaaaaugcccccaccaucuuga

SEQ ID NO: 54760 - RNA, 23 nt, Human
ucuacauaaggauugcugaguuu

SEQ ID NO: 54761 - RNA, 23 nt, Human
ucucauuugugaauaaauguccc

SEQ ID NO: 54762 - RNA, 28 nt, Human
ucucuaaguggcccuaccaccauugucc

SEQ ID NO: 54763 - RNA, 19 nt, Human
ucugauugauccaaaagga

SEQ ID NO: 54764 - RNA, 26 nt, Human
ucuuucuccuucccucccuuuuucuc

SEQ ID NO: 54765 - RNA, 24 nt, Human
ugaauaaauguccccccccaaagu

SEQ ID NO: 54766 - RNA, 18 nt, Human
ugacaggugggaaacugg

SEQ ID NO: 54767 - RNA, 21 nt, Human
ugcaagugacaggugggaaac

SEQ ID NO: 54768 - RNA, 18 nt, Human
ugcaaugcugcugccucc

SEQ ID NO: 54769 - RNA, 18 nt, Human
ugccacugacagacccug

SEQ ID NO: 54770 - RNA, 20 nt, Human
ugccgcucuaaaaaugcccc

SEQ ID NO: 54771 - RNA, 20 nt, Human
ugccuggggcugugcaaugc

SEQ ID NO: 54772 - RNA, 19 nt, Human
ugcuauuugggcugccauc

SEQ ID NO: 54773 - RNA, 22 nt, Human
uggcccaagaacccccagcucu

SEQ ID NO: 54774 - RNA, 23 nt, Human
ugggauugagucaccaaaaaagu

SEQ ID NO: 54775 - RNA, 18 nt, Human
ugggcaacccauagaacu

SEQ ID NO: 54776 - RNA, 23 nt, Human
uguaaaguaugagaauaaauagg

SEQ ID NO: 54777 - RNA, 24 nt, Human
uguccccccccaaagucaacacua

SEQ ID NO: 54778 - RNA, 18 nt, Human
ugugcuauuugggcugcc

SEQ ID NO: 54779 - RNA, 21 nt, Human
uguguauauauauguggacau

SEQ ID NO: 54780 - RNA, 20 nt, Human
uguguguguguauauauaug

SEQ ID NO: 54781 - RNA, 26 nt, Human
uguguguguguauauauauguggacc

SEQ ID NO: 54782 - RNA, 23 nt, Human
uguuacacuuuauauauauauau

SEQ ID NO: 54783 - RNA, 29 nt, Human
uguuacacuuuauauauauauaugugugu

SEQ ID NO: 54784 - RNA, 18 nt, Human
uguugagaauucauucaa

SEQ ID NO: 54785 - RNA, 21 nt, Human
uuaacaucuacauacaaauuu

SEQ ID NO: 54786 - RNA, 20 nt, Human
uucaucugccucuaaagcca

SEQ ID NO: 54787 - RNA, 24 nt, Human
uuccccuuucucagccuccucaug

SEQ ID NO: 54788 - RNA, 21 nt, Human
uugcuagaacccgggagaacg

SEQ ID NO: 54789 - RNA, 24 nt, Human
uuguaagaggugggguuaacaagc

SEQ ID NO: 54790 - RNA, 26 nt, Human
uuguaagaggugggguuaacaagcuu

SEQ ID NO: 54791 - RNA, 28 nt, Human
uuguaagaggugggguuaacaagcuugu

SEQ ID NO: 54792 - RNA, 22 nt, Human
uugugugcuauuuggggguggg

SEQ ID NO: 54793 - RNA, 22 nt, Human
uuuaauuauuugucuucagaga

SEQ ID NO: 54794 - RNA, 25 nt, Human
uuucuugcaacagggaucuuacuug

SEQ ID NO: 54795 - RNA, 18 nt, Human
uuuggggguggggcugag

SEQ ID NO: 54796 - RNA, 20 nt, Human
uuugugacaugaagaacuau

SEQ ID NO: 54797 - RNA, 20 nt, Human
uuuuggauccauuguagauu

SEQ ID NO: 54798 - RNA, 19 nt, Human
aacgugacacccagaaggg

SEQ ID NO: 54799 - RNA, 18 nt, Human
aacucuccaugcccuccu

SEQ ID NO: 54800 - RNA, 21 nt, Human
aagaugaagaggagucaagga

SEQ ID NO: 54801 - RNA, 21 nt, Human
ccuacagccuugacugccagc

SEQ ID NO: 54802 - RNA, 18 nt, Human
cucuuccagucugccuca

SEQ ID NO: 54803 - RNA, 18 nt, Human
cugaaaacgugacaccca

SEQ ID NO: 54804 - RNA, 19 nt, Human
cugauggugggggugcucu

SEQ ID NO: 54805 - RNA, 18 nt, Human
cugcucaaguguauuggg

SEQ ID NO: 54806 - RNA, 21 nt, Human
cuucaacucuccaugcccucc

SEQ ID NO: 54807 - RNA, 24 nt, Human
gcuuuuuucuucaacucuccaugc

SEQ ID NO: 54808 - RNA, 24 nt, Human
ggagaugugccccuuuagauggaa

SEQ ID NO: 54809 - RNA, 22 nt, Human
guuuguugacaccucuuacauu

SEQ ID NO: 54810 - RNA, 21 nt, Human
ucaacucuccaugcccuccua

SEQ ID NO: 54811 - RNA, 19 nt, Human
ucuuuuagauguuuggcug

SEQ ID NO: 54812 - RNA, 21 nt, Human
uggcugaaaacgugacaccca

SEQ ID NO: 54813 - RNA, 23 nt, Human
uggcugaaaacgugacacccaga

SEQ ID NO: 54814 - RNA, 18 nt, Human
uggcugggauggaaugcu

SEQ ID NO: 54815 - RNA, 22 nt, Human
ugugaugacucuuccagucugc

SEQ ID NO: 54816 - RNA, 20 nt, Human
uucuucaacucuccaugccc

SEQ ID NO: 54817 - RNA, 19 nt, Human
uuucccaguuuguugacac

SEQ ID NO: 54818 - RNA, 22 nt, Human
uuuucuucaacucuccaugccc

SEQ ID NO: 54819 - RNA, 20 nt, Human
uuuuuuauuuuauuucccag

SEQ ID NO: 54820 - RNA, 24 nt, Human
uuuuuuuuuuuuuuuauuauuuuu

SEQ ID NO: 54821 - RNA, 24 nt, Human
ccaauggcuuuauuaacucccucu

SEQ ID NO: 54822 - RNA, 18 nt, Human
gaggccaagaagcugugg

SEQ ID NO: 54823 - RNA, 18 nt, Human
uagcugcagagcuggaag

SEQ ID NO: 54824 - RNA, 25 nt, Human
caaacuggaagagacuucuacucua

SEQ ID NO: 54825 - RNA, 22 nt, Human
caaagagaagucuugcugaaag

SEQ ID NO: 54826 - RNA, 20 nt, Human
caaagcaaacuggaagagac

SEQ ID NO: 54827 - RNA, 18 nt, Human
caagcuagacacgcccuc

SEQ ID NO: 54828 - RNA, 22 nt, Human
cacagguauaggucacuugggg

SEQ ID NO: 54829 - RNA, 18 nt, Human
cagggcucuugagaucca

SEQ ID NO: 54830 - RNA, 18 nt, Human
cagguauaggucacuugg

SEQ ID NO: 54831 - RNA, 21 nt, Human
caucaagcuagacacgcccuc

SEQ ID NO: 54832 - RNA, 21 nt, Human
ccccagacccccgcccaguac

SEQ ID NO: 54833 - RNA, 18 nt, Human
cgagcaggcaaccacagc

SEQ ID NO: 54834 - RNA, 21 nt, Human
cuagacacgcccucgcuggcc

SEQ ID NO: 54835 - RNA, 23 nt, Human
cucuacagguugcugucccacug

SEQ ID NO: 54836 - RNA, 23 nt, Human
cugcugagugacacaggccauac

SEQ ID NO: 54837 - RNA, 21 nt, Human
cugguagauuuugcuucucuu

SEQ ID NO: 54838 - RNA, 21 nt, Human
gcaaagagaagucuugcugaa

SEQ ID NO: 54839 - RNA, 21 nt, Human
gccacucuacagguugcuguc

SEQ ID NO: 54840 - RNA, 27 nt, Human
ucaaaacucaaccguuaguggcacuau

SEQ ID NO: 54841 - RNA, 18 nt, Human
uccccagacccccgccca

SEQ ID NO: 54842 - RNA, 18 nt, Human
ugcaaggaaaaaaaugag

SEQ ID NO: 54843 - RNA, 21 nt, Human
ugcugcgcuccccagaccccc

SEQ ID NO: 54844 - RNA, 21 nt, Human
uuggucagaaaaggguauuca

SEQ ID NO: 54845 - RNA, 23 nt, Human
aagcaggagagauuuaaccagag

SEQ ID NO: 54846 - RNA, 27 nt, Human
aagcaggagagauuuaaccagaggcga

SEQ ID NO: 54847 - RNA, 20 nt, Human
agaccucaugcaaugcccuc

SEQ ID NO: 54848 - RNA, 21 nt, Human
caaugggcuuugcuguagcuu

SEQ ID NO: 54849 - RNA, 24 nt, Human
caccagcauagagccauccucugu

SEQ ID NO: 54850 - RNA, 22 nt, Human
cagaccucaugcaaugcccucc

SEQ ID NO: 54851 - RNA, 21 nt, Human
gcuguagcuugcugaaaucac

SEQ ID NO: 54852 - RNA, 22 nt, Human
ugaaaaaacaaaauuauugucu

SEQ ID NO: 54853 - RNA, 18 nt, Human
ugcugaaaucaccaagca

SEQ ID NO: 54854 - RNA, 22 nt, Human
uuucuggccaaugggcuuugcu

SEQ ID NO: 54855 - RNA, 18 nt, Human
accggcauagagacgucc

SEQ ID NO: 54856 - RNA, 25 nt, Human
acucagcuguaguugacugaaguca

SEQ ID NO: 54857 - RNA, 18 nt, Human
caccggcauagagacguc

SEQ ID NO: 54858 - RNA, 19 nt, Human
ucacuugucugacuagcaa

SEQ ID NO: 54859 - RNA, 23 nt, Human
uuuauugucuuucuggccuaugg

SEQ ID NO: 54860 - RNA, 23 nt, Human
agcuagcugaaguugccaagcag

SEQ ID NO: 54861 - RNA, 19 nt, Human
caccagcauagagacaucc

SEQ ID NO: 54862 - RNA, 18 nt, Human
cagaggccguguguccag

SEQ ID NO: 54863 - RNA, 19 nt, Human
cugcaucaccauccacacc

SEQ ID NO: 54864 - RNA, 21 nt, Human
uagaugucgugcaacacccuc

SEQ ID NO: 54865 - RNA, 22 nt, Human
ucugcaucaccauccacaccac

SEQ ID NO: 54866 - RNA, 18 nt, Human
ugccaagcaggaggggag

SEQ ID NO: 54867 - RNA, 21 nt, Human
aaccuugcuccucugucccac

SEQ ID NO: 54868 - RNA, 24 nt, Human
aagcgucgaaaaggucaagugcua

SEQ ID NO: 54869 - RNA, 24 nt, Human
acacaugggcaggaccugcccggc

SEQ ID NO: 54870 - RNA, 20 nt, Human
acagagugaggggacacaug

SEQ ID NO: 54871 - RNA, 20 nt, Human
acccccaaaaugcauuugaa

SEQ ID NO: 54872 - RNA, 22 nt, Human
agcggaaagguuaagcgucgaa

SEQ ID NO: 54873 - RNA, 21 nt, Human
agcuggccuggccacagccuc

SEQ ID NO: 54874 - RNA, 23 nt, Human
aggcccagggccccagagagaug

SEQ ID NO: 54875 - RNA, 21 nt, Human
agggcugaggccacacccgga

SEQ ID NO: 54876 - RNA, 22 nt, Human
cacagcacaaaaacgucuuucc

SEQ ID NO: 54877 - RNA, 21 nt, Human
caccagguugaacugaggccc

SEQ ID NO: 54878 - RNA, 19 nt, Human
cacccgagaaauaaaaacc

SEQ ID NO: 54879 - RNA, 20 nt, Human
cacgcgcuccucucaggcug

SEQ ID NO: 54880 - RNA, 22 nt, Human
cagcccagggcggcuggcugac

SEQ ID NO: 54881 - RNA, 21 nt, Human
cagccccuuugacuucuuuga

SEQ ID NO: 54882 - RNA, 19 nt, Human
cagccuccgaugacguccu

SEQ ID NO: 54883 - RNA, 21 nt, Human
cagccuccgaugacguccuca

SEQ ID NO: 54884 - RNA, 26 nt, Human
cagcguggcuucucucaaaugcaccc

SEQ ID NO: 54885 - RNA, 24 nt, Human
cauagugagguugcaucuggugcc

SEQ ID NO: 54886 - RNA, 23 nt, Human
caucccuggucccaucccagggg

SEQ ID NO: 54887 - RNA, 20 nt, Human
ccaaugccacauugcgcaua

SEQ ID NO: 54888 - RNA, 24 nt, Human
ccaccagguugaacugaggcccag

SEQ ID NO: 54889 - RNA, 23 nt, Human
ccacccccacagggagucaggga

SEQ ID NO: 54890 - RNA, 21 nt, Human
ccacuggguaaacccuggccc

SEQ ID NO: 54891 - RNA, 23 nt, Human
ccacuggguaaacccuggcccau

SEQ ID NO: 54892 - RNA, 18 nt, Human
cccaaaaugcauuugaac

SEQ ID NO: 54893 - RNA, 19 nt, Human
ccccaaugccacauugcgc

SEQ ID NO: 54894 - RNA, 25 nt, Human
cccccaaaaugcauuugaacaacau

SEQ ID NO: 54895 - RNA, 22 nt, Human
cccccaucccuggucccauccc

SEQ ID NO: 54896 - RNA, 18 nt, Human
ccccgagcccagcuggcc

SEQ ID NO: 54897 - RNA, 18 nt, Human
cccuaagccccuggugac

SEQ ID NO: 54898 - RNA, 19 nt, Human
ccucucaggcuggcgcucc

SEQ ID NO: 54899 - RNA, 20 nt, Human
ccuggcccaucccccauccc

SEQ ID NO: 54900 - RNA, 21 nt, Human
cggcagcggcagcgucuggcc

SEQ ID NO: 54901 - RNA, 24 nt, Human
cggcagcgucuggccaggaggcgu

SEQ ID NO: 54902 - RNA, 19 nt, Human
cuccggugggacagucacc

SEQ ID NO: 54903 - RNA, 21 nt, Human
cugagggggaggcuccggugg

SEQ ID NO: 54904 - RNA, 19 nt, Human
cugccuccuccaggcagcc

SEQ ID NO: 54905 - RNA, 23 nt, Human
cugcugugugccugccaccccuc

SEQ ID NO: 54906 - RNA, 21 nt, Human
gacagagugaggggacacaug

SEQ ID NO: 54907 - RNA, 21 nt, Human
gacaggcugccuccuccaggc

SEQ ID NO: 54908 - RNA, 19 nt, Human
gaggggacacaugggcagg

SEQ ID NO: 54909 - RNA, 22 nt, Human
gcagcgucuggccaggaggcgu

SEQ ID NO: 54910 - RNA, 21 nt, Human
gccccuggugacagauggccc

SEQ ID NO: 54911 - RNA, 18 nt, Human
gcguggaggggcccaggg

SEQ ID NO: 54912 - RNA, 23 nt, Human
gcuggccuggccacagccucuga

SEQ ID NO: 54913 - RNA, 18 nt, Human
gcuggcugacagagugag

SEQ ID NO: 54914 - RNA, 18 nt, Human
ggacacaugggcaggacc

SEQ ID NO: 54915 - RNA, 18 nt, Human
ggcaggaccugcccggcc

SEQ ID NO: 54916 - RNA, 24 nt, Human
ggcaggaccugcccggccccccaa

SEQ ID NO: 54917 - RNA, 24 nt, Human
ggccuggggcgacagcggaaaggu

SEQ ID NO: 54918 - RNA, 18 nt, Human
gguaaacccuggcccauc

SEQ ID NO: 54919 - RNA, 22 nt, Human
gguaaacccuggcccauccccc

SEQ ID NO: 54920 - RNA, 19 nt, Human
guaaaaaaacgccguggug

SEQ ID NO: 54921 - RNA, 23 nt, Human
uaaaaaaacgccguggugcagcg

SEQ ID NO: 54922 - RNA, 24 nt, Human
uacacaauaacaaauuuaaaccuu

SEQ ID NO: 54923 - RNA, 19 nt, Human
uaccauagugagguugcau

SEQ ID NO: 54924 - RNA, 19 nt, Human
ucacaaagauuaaaaaccu

SEQ ID NO: 54925 - RNA, 23 nt, Human
ucccacuggguaaacccuggccc

SEQ ID NO: 54926 - RNA, 22 nt, Human
ucccuggucccaucccaggggc

SEQ ID NO: 54927 - RNA, 18 nt, Human
ucucaggcuggcgcuccc

SEQ ID NO: 54928 - RNA, 24 nt, Human
ucucucaaaugcacccgagaaaua

SEQ ID NO: 54929 - RNA, 19 nt, Human
ugaacugaggcccagggcc

SEQ ID NO: 54930 - RNA, 19 nt, Human
ugacagacagcccagggcg

SEQ ID NO: 54931 - RNA, 22 nt, Human
ugacagagugaggggacacaug

SEQ ID NO: 54932 - RNA, 21 nt, Human
ugacagauggcccugugcccu

SEQ ID NO: 54933 - RNA, 22 nt, Human
ugacaggcugccuccuccaggc

SEQ ID NO: 54934 - RNA, 19 nt, Human
ugaggcccagggccccaga

SEQ ID NO: 54935 - RNA, 23 nt, Human
ugcccgaggcucccgcgacgcuc

SEQ ID NO: 54936 - RNA, 23 nt, Human
ugccuccuccaggcagccccuuu

SEQ ID NO: 54937 - RNA, 23 nt, Human
ugcugugugccugccacccccag

SEQ ID NO: 54938 - RNA, 26 nt, Human
ugcugugugccugccacccccaggag

SEQ ID NO: 54939 - RNA, 18 nt, Human
uggcacgaggccgccucu

SEQ ID NO: 54940 - RNA, 23 nt, Human
uggcacgaggccgccucuccauc

SEQ ID NO: 54941 - RNA, 21 nt, Human
uggccaggaggcguggagggg

SEQ ID NO: 54942 - RNA, 24 nt, Human
uggccuggccacagccucugaugc

SEQ ID NO: 54943 - RNA, 19 nt, Human
uggggcgacagcggaaagg

SEQ ID NO: 54944 - RNA, 21 nt, Human
uggugacagacagcccagggc

SEQ ID NO: 54945 - RNA, 23 nt, Human
ugucacaaagauuaaaaaccccc

SEQ ID NO: 54946 - RNA, 19 nt, Human
uucccuaagccccugguga

SEQ ID NO: 54947 - RNA, 24 nt, Human
uuguucugagggcugaggccacac

SEQ ID NO: 54948 - RNA, 21 nt, Human
aaaaccacccagcggugaugg

SEQ ID NO: 54949 - RNA, 18 nt, Human
agggcacagucugucacc

SEQ ID NO: 54950 - RNA, 18 nt, Human
caccggcagccgcccagc

SEQ ID NO: 54951 - RNA, 22 nt, Human
cagcucagggcagcaggacaug

SEQ ID NO: 54952 - RNA, 23 nt, Human
caucgccacgcugcgcugguucc

SEQ ID NO: 54953 - RNA, 20 nt, Human
ccuuguguuucccggcagcg

SEQ ID NO: 54954 - RNA, 21 nt, Human
cggcagccgcccagccucucc

SEQ ID NO: 54955 - RNA, 20 nt, Human
cucuacccccgcccaucgcc

SEQ ID NO: 54956 - RNA, 21 nt, Human
gugcguccucugcgugggcag

SEQ ID NO: 54957 - RNA, 20 nt, Human
uaaaaaaccacccagcggug

SEQ ID NO: 54958 - RNA, 23 nt, Human
uagcucgggacagcucagggcag

SEQ ID NO: 54959 - RNA, 22 nt, Human
ucaccggcagccgcccagccuc

SEQ ID NO: 54960 - RNA, 19 nt, Human
ucaccuagcucgggacagc

SEQ ID NO: 54961 - RNA, 21 nt, Human
ucccggcagcggcaacggcgc

SEQ ID NO: 54962 - RNA, 22 nt, Human
ucccggcagcggcaacggcgcc

SEQ ID NO: 54963 - RNA, 23 nt, Human
acaguucuaaaagcagcauuuac

SEQ ID NO: 54964 - RNA, 23 nt, Human
gcacaggggcaucaguugguugg

SEQ ID NO: 54965 - RNA, 21 nt, Human
gggcacaggggcaucaguugg

SEQ ID NO: 54966 - RNA, 22 nt, Human
guucuugggccuggcacugucc

SEQ ID NO: 54967 - RNA, 24 nt, Human
ucacuugucugaggccccgggaac

SEQ ID NO: 54968 - RNA, 22 nt, Human
ugggcacaggggcaucaguugg

SEQ ID NO: 54969 - RNA, 19 nt, Human
uucuugggccuggcacugu

SEQ ID NO: 54970 - RNA, 18 nt, Human
aaagacaacucugaagac

SEQ ID NO: 54971 - RNA, 19 nt, Human
acucugaagaccaucugga

SEQ ID NO: 54972 - RNA, 18 nt, Human
aggaaguaugcuggcucc

SEQ ID NO: 54973 - RNA, 20 nt, Human
aggaggcgggcacucaaguc

SEQ ID NO: 54974 - RNA, 18 nt, Human
aggcggcggcgaaggagg

SEQ ID NO: 54975 - RNA, 21 nt, Human
aggcgggcacucaagucgaga

SEQ ID NO: 54976 - RNA, 22 nt, Human
cccuaaacccgaggaagggguc

SEQ ID NO: 54977 - RNA, 22 nt, Human
cgaaggaggcgggcacucaagu

SEQ ID NO: 54978 - RNA, 19 nt, Human
cuccugguccccacauccc

SEQ ID NO: 54979 - RNA, 23 nt, Human
gcggcggcgaaggaggcgggcac

SEQ ID NO: 54980 - RNA, 25 nt, Human
ggaagaacugggcauaacugcgcug

SEQ ID NO: 54981 - RNA, 19 nt, Human
gggguccagcagggucccg

SEQ ID NO: 54982 - RNA, 20 nt, Human
gucguguccccacagcggga

SEQ ID NO: 54983 - RNA, 23 nt, Human
uccugguccccacauccccuaaa

SEQ ID NO: 54984 - RNA, 23 nt, Human
uccuguggaaagaaucuaggugg

SEQ ID NO: 54985 - RNA, 19 nt, Human
uggagaagaagccacucau

SEQ ID NO: 54986 - RNA, 28 nt, Human
uucacauauaaagacaacucugaagacc

SEQ ID NO: 54987 - RNA, 25 nt, Human
uuuuuuuuuuuuuuuuauuuccagg

SEQ ID NO: 54988 - RNA, 21 nt, Human
uuuuuuuuuuuuuuuuuauuu

SEQ ID NO: 54989 - RNA, 20 nt, Human
aacuuagaagaguauuagug

SEQ ID NO: 54990 - RNA, 22 nt, Human
aagcacagagaaaagaggcaaa

SEQ ID NO: 54991 - RNA, 25 nt, Human
acacuggaacuuccacaaccggagg

SEQ ID NO: 54992 - RNA, 20 nt, Human
acuuagaagaguauuaguga

SEQ ID NO: 54993 - RNA, 19 nt, Human
agacaggguguuggcuuua

SEQ ID NO: 54994 - RNA, 23 nt, Human
caacacaucuuugaaaaauaaca

SEQ ID NO: 54995 - RNA, 22 nt, Human
cacagaaacuagaaauccucua

SEQ ID NO: 54996 - RNA, 25 nt, Human
cagaauuuucaggauagcaacacau

SEQ ID NO: 54997 - RNA, 25 nt, Human
ccacagaaacuagaaauccucuacc

SEQ ID NO: 54998 - RNA, 24 nt, Human
ccacagaaccuacagaauuuucag

SEQ ID NO: 54999 - RNA, 23 nt, Human
cuagaaauccucuaccgaagugg

SEQ ID NO: 55000 - RNA, 18 nt, Human
gaaaaagaaaacagauga

SEQ ID NO: 55001 - RNA, 24 nt, Human
guuggcuuuacaccaacgaaaaag

SEQ ID NO: 55002 - RNA, 24 nt, Human
uaccacucuauuagauucuuucca

SEQ ID NO: 55003 - RNA, 19 nt, Human
uccucuaccgaaguggaau

SEQ ID NO: 55004 - RNA, 21 nt, Human
ugaagcacagagaaaagaggc

SEQ ID NO: 55005 - RNA, 18 nt, Human
ugccaaaggcgugugggg

SEQ ID NO: 55006 - RNA, 18 nt, Human
uggaacuuccacagaacc

SEQ ID NO: 55007 - RNA, 18 nt, Human
ugggguugacagaagaga

SEQ ID NO: 55008 - RNA, 22 nt, Human
uuacaccaacgaaaaagaaaac

SEQ ID NO: 55009 - RNA, 21 nt, Human
uugaaaaauaacagugcugua

SEQ ID NO: 55010 - RNA, 19 nt, Human
uugaagcacagagaaaaga

SEQ ID NO: 55011 - RNA, 24 nt, Human
uuggcuuuacaccaacgaaaaaga

SEQ ID NO: 55012 - RNA, 22 nt, Human
aaaaagaaauccucagugcaga

SEQ ID NO: 55013 - RNA, 24 nt, Human
aagcugccaccuuuggguuuuagg

SEQ ID NO: 55014 - RNA, 23 nt, Human
agauaauucucugaaaaccugug

SEQ ID NO: 55015 - RNA, 26 nt, Human
auagcaaucagaaucagaaauguacc

SEQ ID NO: 55016 - RNA, 20 nt, Human
aucauggcugccaaaacuug

SEQ ID NO: 55017 - RNA, 19 nt, Human
augagaaaguuuggggcau

SEQ ID NO: 55018 - RNA, 21 nt, Human
caaaaagaaauccucagugca

SEQ ID NO: 55019 - RNA, 20 nt, Human
caacuaggacaguuucucuc

SEQ ID NO: 55020 - RNA, 23 nt, Human
caacucccagaacaaagcuuaca

SEQ ID NO: 55021 - RNA, 21 nt, Human
cccucccuugugauaaaaauc

SEQ ID NO: 55022 - RNA, 20 nt, Human
ccucccuugugauaaaaauu

SEQ ID NO: 55023 - RNA, 23 nt, Human
cggaaaaaaaauugaaccaaaca

SEQ ID NO: 55024 - RNA, 20 nt, Human
cuugaaccaugaauugcugu

SEQ ID NO: 55025 - RNA, 19 nt, Human
gugugucuauaugcaucug

SEQ ID NO: 55026 - RNA, 19 nt, Human
uaacagcaacucccagaac

SEQ ID NO: 55027 - RNA, 22 nt, Human
uagcaaucagaaucagaaaugu

SEQ ID NO: 55028 - RNA, 19 nt, Human
uauguaugugugucuauau

SEQ ID NO: 55029 - RNA, 18 nt, Human
uaugugugucuauaugca

SEQ ID NO: 55030 - RNA, 25 nt, Human
uaugugugucuauaugcaucuguga

SEQ ID NO: 55031 - RNA, 23 nt, Human
ucucugaaaaccugugacagcuu

SEQ ID NO: 55032 - RNA, 23 nt, Human
ucucuggacaacuaggacaguuu

SEQ ID NO: 55033 - RNA, 23 nt, Human
ucuuggugggccacugacggagu

SEQ ID NO: 55034 - RNA, 27 nt, Human
ugaaauaaaaacauuacauuauacauc

SEQ ID NO: 55035 - RNA, 25 nt, Human
ugaaccaaacacaacauaugaccua

SEQ ID NO: 55036 - RNA, 18 nt, Human
ugacucucggccuccccu

SEQ ID NO: 55037 - RNA, 23 nt, Human
ugaguguccccaaucuucacaag

SEQ ID NO: 55038 - RNA, 22 nt, Human
ugggaguaccauuauguaugug

SEQ ID NO: 55039 - RNA, 20 nt, Human
ugguagaaugaacugcuuaa

SEQ ID NO: 55040 - RNA, 24 nt, Human
aagcagacaugacauccuaggaaa

SEQ ID NO: 55041 - RNA, 21 nt, Human
acaaagcuagagagaucauac

SEQ ID NO: 55042 - RNA, 25 nt, Human
acaaaggaaaaucacauaacuauga

SEQ ID NO: 55043 - RNA, 27 nt, Human
acuucaagagucacuaagggaaagaag

SEQ ID NO: 55044 - RNA, 19 nt, Human
aggcaaauaauucuuucag

SEQ ID NO: 55045 - RNA, 24 nt, Human
auaggacuugggggucacauuuca

SEQ ID NO: 55046 - RNA, 24 nt, Human
caagagucacuaagggaaagaagc

SEQ ID NO: 55047 - RNA, 19 nt, Human
cagaagaagcuacauguca

SEQ ID NO: 55048 - RNA, 20 nt, Human
cggcuccuggaacacagccu

SEQ ID NO: 55049 - RNA, 22 nt, Human
cuugggggucacauuucagaag

SEQ ID NO: 55050 - RNA, 22 nt, Human
ggaaagaagcuaaaugcaacug

SEQ ID NO: 55051 - RNA, 21 nt, Human
gucacauuucagaaggcaaau

SEQ ID NO: 55052 - RNA, 23 nt, Human
uaaaaaaaucaagaaaagaaaaa

SEQ ID NO: 55053 - RNA, 19 nt, Human
uaaguacuucaagagucac

SEQ ID NO: 55054 - RNA, 21 nt, Human
uacaaaggaaaaucacauaac

SEQ ID NO: 55055 - RNA, 23 nt, Human
uauugaagagcuucucuccacuc

SEQ ID NO: 55056 - RNA, 22 nt, Human
ucagaagaagcuacaugucaag

SEQ ID NO: 55057 - RNA, 22 nt, Human
ugacaagcagacaugacauccu

SEQ ID NO: 55058 - RNA, 18 nt, Human
uuagcuauugaagagcuu

SEQ ID NO: 55059 - RNA, 22 nt, Human
uuagcuauugaagagcuucucu

SEQ ID NO: 55060 - RNA, 20 nt, Human
uucaugcaagguuguuuuua

SEQ ID NO: 55061 - RNA, 20 nt, Human
cgggccgggugucccuagcc

SEQ ID NO: 55062 - RNA, 22 nt, Human
aaaaaaccuuacugugaauccu

SEQ ID NO: 55063 - RNA, 23 nt, Human
aaaaaccaaaaaaccuuacugug

SEQ ID NO: 55064 - RNA, 25 nt, Human
aaaacaagaaaacaaaaaacaaaaa

SEQ ID NO: 55065 - RNA, 20 nt, Human
aaacaaaaaacaaaaaccaa

SEQ ID NO: 55066 - RNA, 22 nt, Human
aaacaaaaaacaaaaaccaaaa

SEQ ID NO: 55067 - RNA, 23 nt, Human
aaacaaaaaacaaaaaccaaaaa

SEQ ID NO: 55068 - RNA, 23 nt, Human
aaaccacaccacagggguaaacc

SEQ ID NO: 55069 - RNA, 20 nt, Human
aaagauacaauaacucuacc

SEQ ID NO: 55070 - RNA, 23 nt, Human
aaauaggacuuaaaaauaacaag

SEQ ID NO: 55071 - RNA, 23 nt, Human
aagaaaaauucacaaccugccag

SEQ ID NO: 55072 - RNA, 21 nt, Human
aagaaaacaaaaaacaaaaac

SEQ ID NO: 55073 - RNA, 23 nt, Human
aagaggaaaagaaaaauucacaa

SEQ ID NO: 55074 - RNA, 19 nt, Human
aagcacuacuuucccaauu

SEQ ID NO: 55075 - RNA, 24 nt, Human
aagccaaaugugguaauuuauauc

SEQ ID NO: 55076 - RNA, 22 nt, Human
aagccuccagaagaaugugucc

SEQ ID NO: 55077 - RNA, 18 nt, Human
aagggaaacacagaaaug

SEQ ID NO: 55078 - RNA, 23 nt, Human
aauaaacaggagagugagaggaa

SEQ ID NO: 55079 - RNA, 21 nt, Human
acaaaaaccaaaaaaccuuac

SEQ ID NO: 55080 - RNA, 23 nt, Human
acaagaaaacaaaaaacaaaaac

SEQ ID NO: 55081 - RNA, 22 nt, Human
acagcaaucauucaacuccagu

SEQ ID NO: 55082 - RNA, 19 nt, Human
acccugaggagaccgcugg

SEQ ID NO: 55083 - RNA, 23 nt, Human
accucggaaagaggcguggcuug

SEQ ID NO: 55084 - RNA, 24 nt, Human
agaaaacaaaaaacaaaaaccaaa

SEQ ID NO: 55085 - RNA, 18 nt, Human
agaagauuggaucuuuag

SEQ ID NO: 55086 - RNA, 19 nt, Human
agcaaagguaaccucaaca

SEQ ID NO: 55087 - RNA, 20 nt, Human
aggaaaagaaaaauucacaa

SEQ ID NO: 55088 - RNA, 25 nt, Human
aggaaaagaaaaauucacaaccugc

SEQ ID NO: 55089 - RNA, 19 nt, Human
aggaacccucuaacguauc

SEQ ID NO: 55090 - RNA, 20 nt, Human
aggaagacuacacagacuua

SEQ ID NO: 55091 - RNA, 19 nt, Human
aggcauccccagucuggug

SEQ ID NO: 55092 - RNA, 21 nt, Human
agugaaauacucaggccacuu

SEQ ID NO: 55093 - RNA, 18 nt, Human
aguuaguaaccauaaaag

SEQ ID NO: 55094 - RNA, 23 nt, Human
auggccaacagcucccuccccag

SEQ ID NO: 55095 - RNA, 18 nt, Human
auucugucauauuccaaa

SEQ ID NO: 55096 - RNA, 25 nt, Human
caaaaaccaaaaaaccuuacuguga

SEQ ID NO: 55097 - RNA, 20 nt, Human
caaagacccuggcgcccuuc

SEQ ID NO: 55098 - RNA, 21 nt, Human
caacugcuggacacuucaaau

SEQ ID NO: 55099 - RNA, 24 nt, Human
caagaaaacaaaaaacaaaaacca

SEQ ID NO: 55100 - RNA, 19 nt, Human
cacacacugguucuguuac

SEQ ID NO: 55101 - RNA, 18 nt, Human
caccacagggguaaaccu

SEQ ID NO: 55102 - RNA, 30 nt, Human
caccuucaccucggaaagaggcguggcuuu

SEQ ID NO: 55103 - RNA, 24 nt, Human
ccaaaaaaccuuacugugaauccu

SEQ ID NO: 55104 - RNA, 18 nt, Human
ccaaggaauggucccacc

SEQ ID NO: 55105 - RNA, 19 nt, Human
cccaaggaauggucccacc

SEQ ID NO: 55106 - RNA, 18 nt, Human
cccgggaaggucagaaau

SEQ ID NO: 55107 - RNA, 23 nt, Human
cuaggauuugcuaugcuguugug

SEQ ID NO: 55108 - RNA, 24 nt, Human
cucauuuuauuauugcccucccca

SEQ ID NO: 55109 - RNA, 23 nt, Human
cuccuccgcgcucccuggcccga

SEQ ID NO: 55110 - RNA, 21 nt, Human
cuuacugugaauccuuuccca

SEQ ID NO: 55111 - RNA, 24 nt, Human
cuuuccaguuguguacgcuuuacu

SEQ ID NO: 55112 - RNA, 19 nt, Human
gaacccucuaacguaucac

SEQ ID NO: 55113 - RNA, 23 nt, Human
gaacuggagaaaaggaagacuac

SEQ ID NO: 55114 - RNA, 18 nt, Human
gacugcgauuucacagac

SEQ ID NO: 55115 - RNA, 21 nt, Human
gcccugcuugcagaacacaca

SEQ ID NO: 55116 - RNA, 19 nt, Human
gccuauagauuuuuaaacc

SEQ ID NO: 55117 - RNA, 23 nt, Human
gguaacagaacuggagaaaagga

SEQ ID NO: 55118 - RNA, 18 nt, Human
guuuuugaagcuauaugg

SEQ ID NO: 55119 - RNA, 22 nt, Human
guuuuuguuuuugaagcuauau

SEQ ID NO: 55120 - RNA, 26 nt, Human
uaaaaacaagaaaacaaaaaacaaaa

SEQ ID NO: 55121 - RNA, 23 nt, Human
uaaaauacugaaaauucagugua

SEQ ID NO: 55122 - RNA, 21 nt, Human
uaaaccacaccacagggguaa

SEQ ID NO: 55123 - RNA, 21 nt, Human
uaacagaacuggagaaaagga

SEQ ID NO: 55124 - RNA, 18 nt, Human
uaaccucaacaauauuuu

SEQ ID NO: 55125 - RNA, 22 nt, Human
uaaccucaacaauauuuucugc

SEQ ID NO: 55126 - RNA, 23 nt, Human
uaaccucaacaauauuuucugcu

SEQ ID NO: 55127 - RNA, 20 nt, Human
uaauuugcaaacuuaagcac

SEQ ID NO: 55128 - RNA, 26 nt, Human
uacacagacuuaucauaagcuguuag

SEQ ID NO: 55129 - RNA, 21 nt, Human
uacuugagauaaaauacugaa

SEQ ID NO: 55130 - RNA, 18 nt, Human
uauuacagcagucuuucc

SEQ ID NO: 55131 - RNA, 22 nt, Human
ucaaauauccaauuuuauuuua

SEQ ID NO: 55132 - RNA, 19 nt, Human
uccacccugaggagaccgc

SEQ ID NO: 55133 - RNA, 22 nt, Human
uccgcgcucccuggcccgaggc

SEQ ID NO: 55134 - RNA, 21 nt, Human
uccuccgcgcucccuggcccg

SEQ ID NO: 55135 - RNA, 22 nt, Human
ucucacugucuccaggaucugg

SEQ ID NO: 55136 - RNA, 20 nt, Human
ucucugggcuauugauucuu

SEQ ID NO: 55137 - RNA, 19 nt, Human
ucuguaagcagguccaccc

SEQ ID NO: 55138 - RNA, 19 nt, Human
ugaaaccuaacacuauaua

SEQ ID NO: 55139 - RNA, 19 nt, Human
ugaauuacagcucugauuu

SEQ ID NO: 55140 - RNA, 19 nt, Human
ugacaagggugauaggccc

SEQ ID NO: 55141 - RNA, 19 nt, Human
ugacuaagcucucugggcu

SEQ ID NO: 55142 - RNA, 19 nt, Human
ugaggaaggagccccgccu

SEQ ID NO: 55143 - RNA, 22 nt, Human
ugcacaucaucauuuggauucc

SEQ ID NO: 55144 - RNA, 25 nt, Human
ugcucuguaagcagguccacccuga

SEQ ID NO: 55145 - RNA, 19 nt, Human
uggcuugcucuguaagcag

SEQ ID NO: 55146 - RNA, 20 nt, Human
uggugcaagagcccugcuug

SEQ ID NO: 55147 - RNA, 19 nt, Human
ugucauauuccaaaggcag

SEQ ID NO: 55148 - RNA, 25 nt, Human
ugucauauuccaaaggcaguauugg

SEQ ID NO: 55149 - RNA, 26 nt, Human
uuacaacuauaaaaagauacaauaac

SEQ ID NO: 55150 - RNA, 24 nt, Human
uuacagcagucuuuccaguugugu

SEQ ID NO: 55151 - RNA, 23 nt, Human
uuagcagcaaagguaaccucaac

SEQ ID NO: 55152 - RNA, 19 nt, Human
uuccacgguaugcacuaac

SEQ ID NO: 55153 - RNA, 21 nt, Human
uucccaaagaggaaaagaaaa

SEQ ID NO: 55154 - RNA, 18 nt, Human
uuucccacauucuuacug

SEQ ID NO: 55155 - RNA, 20 nt, Human
uuucuaaauacaguauauua

SEQ ID NO: 55156 - RNA, 20 nt, Human
uuugcaaacuuaagcacuac

SEQ ID NO: 55157 - RNA, 18 nt, Human
aaaacagccagcaacugg

SEQ ID NO: 55158 - RNA, 20 nt, Human
aaaauggugaaaccucaucu

SEQ ID NO: 55159 - RNA, 20 nt, Human
aaaccccuaacacuuuccaa

SEQ ID NO: 55160 - RNA, 22 nt, Human
aacaauuacuccucuauccccu

SEQ ID NO: 55161 - RNA, 20 nt, Human
aagcaacucaugggccacca

SEQ ID NO: 55162 - RNA, 18 nt, Human
aagccaaugaagaguggg

SEQ ID NO: 55163 - RNA, 21 nt, Human
aaggaaaagcaccucugguuu

SEQ ID NO: 55164 - RNA, 18 nt, Human
aaucgcuugaaucuggga

SEQ ID NO: 55165 - RNA, 24 nt, Human
aaucgcuugaaucugggaggcgga

SEQ ID NO: 55166 - RNA, 18 nt, Human
aauggaaucauacagucu

SEQ ID NO: 55167 - RNA, 20 nt, Human
acaccacugcacuccagccu

SEQ ID NO: 55168 - RNA, 24 nt, Human
acaccacugcacuccagccugggc

SEQ ID NO: 55169 - RNA, 24 nt, Human
acagagugagacuccgugucaaaa

SEQ ID NO: 55170 - RNA, 18 nt, Human
accaaaucaugcaaccau

SEQ ID NO: 55171 - RNA, 22 nt, Human
accacugcacuccagccugggc

SEQ ID NO: 55172 - RNA, 24 nt, Human
accacugcacuccagccugggcga

SEQ ID NO: 55173 - RNA, 24 nt, Human
accucaucucuacuaaaaauacaa

SEQ ID NO: 55174 - RNA, 24 nt, Human
accugaggucaggaguucaagauc

SEQ ID NO: 55175 - RNA, 24 nt, Human
acuccagccugggcgacagaguga

SEQ ID NO: 55176 - RNA, 18 nt, Human
acuccuucccacaaauua

SEQ ID NO: 55177 - RNA, 24 nt, Human
acugcacuccagccugggcgacag

SEQ ID NO: 55178 - RNA, 26 nt, Human
acugcacuccagccugggcgacagag

SEQ ID NO: 55179 - RNA, 22 nt, Human
agaaucgcuugaaucugggagg

SEQ ID NO: 55180 - RNA, 22 nt, Human
agacaaggaaaagcaccucugg

SEQ ID NO: 55181 - RNA, 20 nt, Human
agacaggagaaucgcuugaa

SEQ ID NO: 55182 - RNA, 24 nt, Human
agacaggagaaucgcuugaaucug

SEQ ID NO: 55183 - RNA, 21 nt, Human
agcaacuaaaacagccagcaa

SEQ ID NO: 55184 - RNA, 24 nt, Human
agcacuuugggaggcugaggcggg

SEQ ID NO: 55185 - RNA, 23 nt, Human
agccuggccaaaauggugaaacc

SEQ ID NO: 55186 - RNA, 24 nt, Human
agccugggcgacagagugagacuc

SEQ ID NO: 55187 - RNA, 19 nt, Human
aggcggagguugcagugag

SEQ ID NO: 55188 - RNA, 21 nt, Human
aggcggagguugcagugagac

SEQ ID NO: 55189 - RNA, 24 nt, Human
aggcggagguugcagugagacgag

SEQ ID NO: 55190 - RNA, 22 nt, Human
aggcggguggaucaccugaggu

SEQ ID NO: 55191 - RNA, 26 nt, Human
aggcggguggaucaccugaggucagg

SEQ ID NO: 55192 - RNA, 24 nt, Human
aggcugagacaggagaaucgcuug

SEQ ID NO: 55193 - RNA, 21 nt, Human
aggcugaggcggguggaucac

SEQ ID NO: 55194 - RNA, 24 nt, Human
aggcugaggcggguggaucaccug

SEQ ID NO: 55195 - RNA, 22 nt, Human
aggugguuguggaauugcugga

SEQ ID NO: 55196 - RNA, 23 nt, Human
aguugagucgauccacuaaacca

SEQ ID NO: 55197 - RNA, 24 nt, Human
aucacaccacugcacuccagccug

SEQ ID NO: 55198 - RNA, 20 nt, Human
aucaguagcaaaaugaaggg

SEQ ID NO: 55199 - RNA, 21 nt, Human
auggaagcaacucaugggcca

SEQ ID NO: 55200 - RNA, 23 nt, Human
auggcauguaccuauaaucccag

SEQ ID NO: 55201 - RNA, 21 nt, Human
auggucggguguuguggcucc

SEQ ID NO: 55202 - RNA, 21 nt, Human
caaaaacaaaucccaugccca

SEQ ID NO: 55203 - RNA, 25 nt, Human
caaaaccccuaacacuuuccaagcu

SEQ ID NO: 55204 - RNA, 23 nt, Human
caagcgcacccaugggaaagucc

SEQ ID NO: 55205 - RNA, 20 nt, Human
caaggaauauuccauggaaa

SEQ ID NO: 55206 - RNA, 21 nt, Human
cacaccacugcacuccagccu

SEQ ID NO: 55207 - RNA, 23 nt, Human
caccugaggucaggaguucaaga

SEQ ID NO: 55208 - RNA, 23 nt, Human
caccuguaaucccagcacuuugg

SEQ ID NO: 55209 - RNA, 24 nt, Human
caccuguaaucccagcacuuuggg

SEQ ID NO: 55210 - RNA, 22 nt, Human
cacuccagccugggcgacagag

SEQ ID NO: 55211 - RNA, 22 nt, Human
cacuccagccugggcgacagag

SEQ ID NO: 55212 - RNA, 24 nt, Human
cacuccagccugggcgacagagug

SEQ ID NO: 55213 - RNA, 19 nt, Human
cacugcacuccagccuggg

SEQ ID NO: 55214 - RNA, 20 nt, Human
cacugcacuccagccugggc

SEQ ID NO: 55215 - RNA, 22 nt, Human
cacugcacuccagccugggcga

SEQ ID NO: 55216 - RNA, 23 nt, Human
cacugcacuccagccugggcgac

SEQ ID NO: 55217 - RNA, 24 nt, Human
cacugcacuccagccugggcgaca

SEQ ID NO: 55218 - RNA, 24 nt, Human
cagcacuuugggaggcugaggcgg

SEQ ID NO: 55219 - RNA, 22 nt, Human
cagcucuguccacauggccgcc

SEQ ID NO: 55220 - RNA, 18 nt, Human
cagugagacgagaucaca

SEQ ID NO: 55221 - RNA, 23 nt, Human
cauggucggguguuguggcuccc

SEQ ID NO: 55222 - RNA, 21 nt, Human
ccaagggggcugugguugggg

SEQ ID NO: 55223 - RNA, 20 nt, Human
ccacugcacuccagccuggg

SEQ ID NO: 55224 - RNA, 21 nt, Human
ccacugcacuccagccugggc

SEQ ID NO: 55225 - RNA, 21 nt, Human
ccacugcacuccagccugggc

SEQ ID NO: 55226 - RNA, 23 nt, Human
ccacugcacuccagccugggcga

SEQ ID NO: 55227 - RNA, 24 nt, Human
ccacugcacuccagccugggcgac

SEQ ID NO: 55228 - RNA, 22 nt, Human
ccagaacauuuucaaaaccucc

SEQ ID NO: 55229 - RNA, 24 nt, Human
cccaccuguaaucccagcacuuug

SEQ ID NO: 55230 - RNA, 21 nt, Human
ccuauaaucccagcuacucag

SEQ ID NO: 55231 - RNA, 18 nt, Human
ccuccagagacuccuaag

SEQ ID NO: 55232 - RNA, 24 nt, Human
ccuggccaaaauggugaaaccuca

SEQ ID NO: 55233 - RNA, 22 nt, Human
ccugggcgacagagugagacuc

SEQ ID NO: 55234 - RNA, 24 nt, Human
cggguggaucaccugaggucagga

SEQ ID NO: 55235 - RNA, 22 nt, Human
cgugucaaaaaaaaaaaaaaaa

SEQ ID NO: 55236 - RNA, 24 nt, Human
cuaguucaaaaccccuaacacuuu

SEQ ID NO: 55237 - RNA, 24 nt, Human
cucccaccuguaaucccagcacuu

SEQ ID NO: 55238 - RNA, 24 nt, Human
cuccgugucaaaaaaaaaaaaaaa

SEQ ID NO: 55239 - RNA, 22 nt, Human
cucugagccugguccccaucuc

SEQ ID NO: 55240 - RNA, 20 nt, Human
cugcagcaggcucgggcucc

SEQ ID NO: 55241 - RNA, 20 nt, Human
cugcagcaggcucgggcucc

SEQ ID NO: 55242 - RNA, 18 nt, Human
cuggcacacagacaagga

SEQ ID NO: 55243 - RNA, 23 nt, Human
cuggccaaaauggugaaaccuca

SEQ ID NO: 55244 - RNA, 21 nt, Human
cuucccacaaauuaaggaaaa

SEQ ID NO: 55245 - RNA, 19 nt, Human
cuugaaucugggaggcgga

SEQ ID NO: 55246 - RNA, 24 nt, Human
gacagagugagacuccgugucaaa

SEQ ID NO: 55247 - RNA, 19 nt, Human
gacugugacugggccuccc

SEQ ID NO: 55248 - RNA, 23 nt, Human
gagaucacaccacugcacuccag

SEQ ID NO: 55249 - RNA, 23 nt, Human
gaggcggguggaucaccugaggu

SEQ ID NO: 55250 - RNA, 21 nt, Human
gaucaccugaggucaggaguu

SEQ ID NO: 55251 - RNA, 23 nt, Human
gaucaccugaggucaggaguuca

SEQ ID NO: 55252 - RNA, 24 nt, Human
gaucaccugaggucaggaguucaa

SEQ ID NO: 55253 - RNA, 19 nt, Human
gaucacgcuuggguucugg

SEQ ID NO: 55254 - RNA, 24 nt, Human
gauggcauguaccuauaaucccag

SEQ ID NO: 55255 - RNA, 24 nt, Human
gcacacagacaaggaaaagcaccu

SEQ ID NO: 55256 - RNA, 24 nt, Human
gcacuccagccugggcgacagagu

SEQ ID NO: 55257 - RNA, 20 nt, Human
gccaccaagggggcuguggu

SEQ ID NO: 55258 - RNA, 20 nt, Human
gccaggugugauggcaugua

SEQ ID NO: 55259 - RNA, 23 nt, Human
ggagguugcagugagacgagauc

SEQ ID NO: 55260 - RNA, 24 nt, Human
ggagguugcagugagacgagauca

SEQ ID NO: 55261 - RNA, 20 nt, Human
ggccaaaauggugaaaccuc

SEQ ID NO: 55262 - RNA, 18 nt, Human
gggaggcggagguugcag

SEQ ID NO: 55263 - RNA, 24 nt, Human
ggguguuguggcucccaccuguaa

SEQ ID NO: 55264 - RNA, 25 nt, Human
ggguucacugaugucacagcaugug

SEQ ID NO: 55265 - RNA, 21 nt, Human
gguggaucaccugaggucagg

SEQ ID NO: 55266 - RNA, 22 nt, Human
gugacugggccucccugacagc

SEQ ID NO: 55267 - RNA, 22 nt, Human
guggcucccaccuguaauccca

SEQ ID NO: 55268 - RNA, 21 nt, Human
uaaaaauacaaaaauuagcca

SEQ ID NO: 55269 - RNA, 20 nt, Human
uaaaacagccagcaacuggc

SEQ ID NO: 55270 - RNA, 21 nt, Human
uaaauggaaucauacagucug

SEQ ID NO: 55271 - RNA, 21 nt, Human
uaagcauauucuuugccuacu

SEQ ID NO: 55272 - RNA, 19 nt, Human
uacaucucucuggcuuguu

SEQ ID NO: 55273 - RNA, 18 nt, Human
uaccauaauuaaacaauu

SEQ ID NO: 55274 - RNA, 24 nt, Human
uaccuauaaucccagcuacucagg

SEQ ID NO: 55275 - RNA, 21 nt, Human
uacuucauuccuuuuuauggc

SEQ ID NO: 55276 - RNA, 22 nt, Human
uagcaaaaugaagggcaagcaa

SEQ ID NO: 55277 - RNA, 23 nt, Human
ucaaaaaaaaaaaaaaaaagaaa

SEQ ID NO: 55278 - RNA, 25 nt, Human
ucaaaaaaaaaaaaaaaaagaaaaa

SEQ ID NO: 55279 - RNA, 24 nt, Human
ucaaaaccccuaacacuuuccaag

SEQ ID NO: 55280 - RNA, 23 nt, Human
ucacaccacugcacuccagccug

SEQ ID NO: 55281 - RNA, 31 nt, Human
ucacaccacugcacuccagccugggcgacaa

SEQ ID NO: 55282 - RNA, 23 nt, Human
ucaccugaggucaggaguucaag

SEQ ID NO: 55283 - RNA, 18 nt, Human
ucagccuggccaaaaugg

SEQ ID NO: 55284 - RNA, 24 nt, Human
ucaguagcaaaaugaagggcaagg

SEQ ID NO: 55285 - RNA, 19 nt, Human
uccaaggaauauuccaugg

SEQ ID NO: 55286 - RNA, 23 nt, Human
uccagccugggcgacagagugag

SEQ ID NO: 55287 - RNA, 24 nt, Human
uccagccugggcgacagagugaga

SEQ ID NO: 55288 - RNA, 22 nt, Human
ucccaaaaacaaaucccaugcc

SEQ ID NO: 55289 - RNA, 31 nt, Human
ucccaaaaacaaaucccaugcccacuaacaa

SEQ ID NO: 55290 - RNA, 21 nt, Human
uccccuggcaaccacuaaucu

SEQ ID NO: 55291 - RNA, 23 nt, Human
uccgugucaaaaaaaaaaaaaaa

SEQ ID NO: 55292 - RNA, 28 nt, Human
uccgugucaaaaaaaaaaaaaaaaagaa

SEQ ID NO: 55293 - RNA, 24 nt, Human
ucgcuugaaucugggaggcggagg

SEQ ID NO: 55294 - RNA, 23 nt, Human
ucucuacuaaaaauacaaaaauu

SEQ ID NO: 55295 - RNA, 26 nt, Human
ucucucuggcuuguuucacugagaag

SEQ ID NO: 55296 - RNA, 22 nt, Human
ucucuggcuuguuucacugaga

SEQ ID NO: 55297 - RNA, 23 nt, Human
ucuguagccuuguacaucucucu

SEQ ID NO: 55298 - RNA, 19 nt, Human
ugaaaccucaucucuacua

SEQ ID NO: 55299 - RNA, 20 nt, Human
ugagacaggagaaucgcuug

SEQ ID NO: 55300 - RNA, 24 nt, Human
ugagacaggagaaucgcuugaauc

SEQ ID NO: 55301 - RNA, 20 nt, Human
ugaggcggguggaucaccug

SEQ ID NO: 55302 - RNA, 22 nt, Human
ugaggcggguggaucaccugag

SEQ ID NO: 55303 - RNA, 24 nt, Human
ugaggcggguggaucaccugaggu

SEQ ID NO: 55304 - RNA, 26 nt, Human
ugaggcggguggaucaccugagguca

SEQ ID NO: 55305 - RNA, 19 nt, Human
ugagucgauccacuaaacc

SEQ ID NO: 55306 - RNA, 21 nt, Human
ugagucgauccacuaaaccau

SEQ ID NO: 55307 - RNA, 19 nt, Human
uggaagcaacucaugggcc

SEQ ID NO: 55308 - RNA, 20 nt, Human
uggaaucauacagucuguag

SEQ ID NO: 55309 - RNA, 24 nt, Human
uggaucaccugaggucaggaguuc

SEQ ID NO: 55310 - RNA, 26 nt, Human
uggaucaccugaggucaggaguucaa

SEQ ID NO: 55311 - RNA, 21 nt, Human
uggcaaccacuaaucuauguu

SEQ ID NO: 55312 - RNA, 24 nt, Human
uggcucccaccuguaaucccagca

SEQ ID NO: 55313 - RNA, 22 nt, Human
ugggaaaguccuuggaucagca

SEQ ID NO: 55314 - RNA, 23 nt, Human
ugggaaaguccuuggaucagcag

SEQ ID NO: 55315 - RNA, 20 nt, Human
ugggaggcggagguugcagu

SEQ ID NO: 55316 - RNA, 29 nt, Human
ugggaggcggagguugcagugacaacggu

SEQ ID NO: 55317 - RNA, 20 nt, Human
ugggaggcugaggcgggugg

SEQ ID NO: 55318 - RNA, 23 nt, Human
ugggaggcugaggcggguggauc

SEQ ID NO: 55319 - RNA, 24 nt, Human
ugggaggcugaggcggguggauca

SEQ ID NO: 55320 - RNA, 19 nt, Human
uguaccuauaaucccagcu

SEQ ID NO: 55321 - RNA, 20 nt, Human
ugucaaaaaaaaaaaaaaaa

SEQ ID NO: 55322 - RNA, 24 nt, Human
uguggcucccaccuguaaucccag

SEQ ID NO: 55323 - RNA, 19 nt, Human
ugugggguuucuucuaaga

SEQ ID NO: 55324 - RNA, 19 nt, Human
uguucuuggcuuuaaaaca

SEQ ID NO: 55325 - RNA, 21 nt, Human
uucaaaaccucccaaaaacaa

SEQ ID NO: 55326 - RNA, 24 nt, Human
uugaaucugggaggcggagguugc

SEQ ID NO: 55327 - RNA, 20 nt, Human
uugcagugagacgagaucac

SEQ ID NO: 55328 - RNA, 25 nt, Human
uugggaggcugaggcggguggauca

SEQ ID NO: 55329 - RNA, 20 nt, Human
uuucauauaaauggaaucau

SEQ ID NO: 55330 - RNA, 24 nt, Human
uuuucaggguucacugaugucaca

SEQ ID NO: 55331 - RNA, 24 nt, Human
uuuuuuuuuuuuuuuugcucacag

SEQ ID NO: 55332 - RNA, 20 nt, Human
uuuuuuuuuuuuuuuuugcu

SEQ ID NO: 55333 - RNA, 26 nt, Human
uuuuuuuuuuuuuuuuuuuuuugggg

SEQ ID NO: 55334 - RNA, 23 nt, Human
aacaauagcuuuuucuuccccua

SEQ ID NO: 55335 - RNA, 23 nt, Human
aagcguuucagagagaggauaac

SEQ ID NO: 55336 - RNA, 26 nt, Human
acaaagcaggguguagcaguugccuu

SEQ ID NO: 55337 - RNA, 20 nt, Human
acccaagagauuuuguagga

SEQ ID NO: 55338 - RNA, 24 nt, Human
agauauucagcacgcaaggaucau

SEQ ID NO: 55339 - RNA, 19 nt, Human
caacccaccauguuuauca

SEQ ID NO: 55340 - RNA, 26 nt, Human
caauagcuuuuucuuccccuauaaac

SEQ ID NO: 55341 - RNA, 24 nt, Human
caauggcugagggaggaagcuugc

SEQ ID NO: 55342 - RNA, 24 nt, Human
cuuuucagauauucagcacgcaag

SEQ ID NO: 55343 - RNA, 20 nt, Human
uagcccagaauacaaagcag

SEQ ID NO: 55344 - RNA, 20 nt, Human
uaggaagcguuucagagaga

SEQ ID NO: 55345 - RNA, 26 nt, Human
uauaauuguaaacaauagcuuuuucu

SEQ ID NO: 55346 - RNA, 21 nt, Human
ucaauggcugagggaggaagc

SEQ ID NO: 55347 - RNA, 18 nt, Human
ucagagagaggauaacac

SEQ ID NO: 55348 - RNA, 20 nt, Human
ucuagaacuuucuugacccu

SEQ ID NO: 55349 - RNA, 21 nt, Human
ugaaagcuagcaguauuguug

SEQ ID NO: 55350 - RNA, 24 nt, Human
uguaaacaauagcuuuuucuuccc

SEQ ID NO: 55351 - RNA, 19 nt, Human
uuaauggugauauaauugu

SEQ ID NO: 55352 - RNA, 21 nt, Human
uuagcccagaauacaaagcag

SEQ ID NO: 55353 - RNA, 20 nt, Human
uugcugaucuugcugaacuu

SEQ ID NO: 55354 - RNA, 20 nt, Human
agcagaggaguggggcuggg

SEQ ID NO: 55355 - RNA, 20 nt, Human
agccagugagggugguccgc

SEQ ID NO: 55356 - RNA, 22 nt, Human
aggaguggggcugggcuggggc

SEQ ID NO: 55357 - RNA, 19 nt, Human
agggguggagacuuggaau

SEQ ID NO: 55358 - RNA, 21 nt, Human
cacaguauggccaggccaggc

SEQ ID NO: 55359 - RNA, 20 nt, Human
caggagagccagugagggug

SEQ ID NO: 55360 - RNA, 21 nt, Human
ccaggccaggcggagcaaccc

SEQ ID NO: 55361 - RNA, 23 nt, Human
ccuuugacacagccucucccggu

SEQ ID NO: 55362 - RNA, 25 nt, Human
gcuggggcugcaggagcgauucucc

SEQ ID NO: 55363 - RNA, 21 nt, Human
ggaguggggcugggcuggggc

SEQ ID NO: 55364 - RNA, 19 nt, Human
ggccaggcggagcaacccc

SEQ ID NO: 55365 - RNA, 21 nt, Human
ggcugggcuggggcugcagga

SEQ ID NO: 55366 - RNA, 19 nt, Human
ggggcugggcuggggcugc

SEQ ID NO: 55367 - RNA, 18 nt, Human
ucagcagaggaguggggc

SEQ ID NO: 55368 - RNA, 24 nt, Human
ucagcaggucagcagaggaguggg

SEQ ID NO: 55369 - RNA, 21 nt, Human
ucccagggccaggagagccag

SEQ ID NO: 55370 - RNA, 18 nt, Human
uggaauggugaggccugg

SEQ ID NO: 55371 - RNA, 20 nt, Human
ugggacacaguauggccagg

SEQ ID NO: 55372 - RNA, 25 nt, Human
ugggaguggggugugcacaggucag

SEQ ID NO: 55373 - RNA, 18 nt, Human
uggggcugggcuggggcu

SEQ ID NO: 55374 - RNA, 23 nt, Human
ugugggaguggggugugcacagg

SEQ ID NO: 55375 - RNA, 22 nt, Human
uugcugaguuagaaaauuguau

SEQ ID NO: 55376 - RNA, 21 nt, Human
uuuuuuuuuuuuugcugaguu

SEQ ID NO: 55377 - RNA, 22 nt, Human
uuuuuuuuuuuuuuuugcugag

SEQ ID NO: 55378 - RNA, 18 nt, Human
uuuuuuuuuuuuuuuuug

SEQ ID NO: 55379 - RNA, 20 nt, Human
uuuuuuuuuuuuuuuuugcu

SEQ ID NO: 55380 - RNA, 24 nt, Human
aaagugcugggauuacaggcauga

SEQ ID NO: 55381 - RNA, 18 nt, Human
aacacuucauacuaugau

SEQ ID NO: 55382 - RNA, 23 nt, Human
aagaggaauaauucaguagaggc

SEQ ID NO: 55383 - RNA, 25 nt, Human
aagcaauccucccaccucggccucc

SEQ ID NO: 55384 - RNA, 22 nt, Human
aagcagauguguauuaguagac

SEQ ID NO: 55385 - RNA, 25 nt, Human
aagccaauaauuuaaacauacucaa

SEQ ID NO: 55386 - RNA, 24 nt, Human
aagcugaagugcaguggugcaauc

SEQ ID NO: 55387 - RNA, 19 nt, Human
aagugcugggauuacaggc

SEQ ID NO: 55388 - RNA, 21 nt, Human
aagugcugggauuacaggcau

SEQ ID NO: 55389 - RNA, 26 nt, Human
aagugcugggauuacaggcaugagcc

SEQ ID NO: 55390 - RNA, 22 nt, Human
aaucacagccugcugcagccuu

SEQ ID NO: 55391 - RNA, 21 nt, Human
acacaggcucaugccaccaca

SEQ ID NO: 55392 - RNA, 24 nt, Human
acagauuuguccuugaagaccuac

SEQ ID NO: 55393 - RNA, 20 nt, Human
accaggggccuacuccugga

SEQ ID NO: 55394 - RNA, 24 nt, Human
aggaaaugguucccucacuuuaag

SEQ ID NO: 55395 - RNA, 23 nt, Human
aggcgccgggggaggacugagcu

SEQ ID NO: 55396 - RNA, 20 nt, Human
agggggcggcgggguguagg

SEQ ID NO: 55397 - RNA, 18 nt, Human
agugaugguggcagcaga

SEQ ID NO: 55398 - RNA, 25 nt, Human
agugcaguggugcaaucacagccug

SEQ ID NO: 55399 - RNA, 18 nt, Human
agugcugggauuacaggc

SEQ ID NO: 55400 - RNA, 21 nt, Human
aucacauucucucauugagug

SEQ ID NO: 55401 - RNA, 20 nt, Human
auccuccugcuucagccucc

SEQ ID NO: 55402 - RNA, 24 nt, Human
aucuaagguauuuuaugauuacuc

SEQ ID NO: 55403 - RNA, 19 nt, Human
aucucucuauaguuucaaa

SEQ ID NO: 55404 - RNA, 24 nt, Human
augaccaaccgcaguggcuuacuc

SEQ ID NO: 55405 - RNA, 24 nt, Human
caaagugcugggauuacaggcaug

SEQ ID NO: 55406 - RNA, 25 nt, Human
caaaguuccaagauuuagauaagca

SEQ ID NO: 55407 - RNA, 24 nt, Human
caacacaagaaugacaggugaugc

SEQ ID NO: 55408 - RNA, 19 nt, Human
caagaagaucuaaucucac

SEQ ID NO: 55409 - RNA, 27 nt, Human
caagcaauccucccaccucggccuccc

SEQ ID NO: 55410 - RNA, 28 nt, Human
caagcaauccucccaccucggccuccca

SEQ ID NO: 55411 - RNA, 24 nt, Human
cacagaguguuugcauauuuucuu

SEQ ID NO: 55412 - RNA, 22 nt, Human
cacagccugcugcagccuuggc

SEQ ID NO: 55413 - RNA, 23 nt, Human
cacagccugcugcagccuuggcc

SEQ ID NO: 55414 - RNA, 20 nt, Human
cacaggcucaugccaccaca

SEQ ID NO: 55415 - RNA, 24 nt, Human
caccucggccucccaaagugcugg

SEQ ID NO: 55416 - RNA, 19 nt, Human
cacgcggcccccgcccucu

SEQ ID NO: 55417 - RNA, 21 nt, Human
cacuguguuguccaggcuggu

SEQ ID NO: 55418 - RNA, 24 nt, Human
cacuguguuguccaggcuggucuc

SEQ ID NO: 55419 - RNA, 23 nt, Human
cagccuccuaagcagcugggaac

SEQ ID NO: 55420 - RNA, 24 nt, Human
cagggucuugcucuguugcccaag

SEQ ID NO: 55421 - RNA, 20 nt, Human
cagguaaugcugcauuccac

SEQ ID NO: 55422 - RNA, 24 nt, Human
caugccaccacaucuagcuaauuu

SEQ ID NO: 55423 - RNA, 23 nt, Human
ccaaagugcugggauuacaggca

SEQ ID NO: 55424 - RNA, 24 nt, Human
ccaaagugcugggauuacaggcau

SEQ ID NO: 55425 - RNA, 24 nt, Human
ccacgcccgcugagucccacugcc

SEQ ID NO: 55426 - RNA, 23 nt, Human
ccacgggccagggggcggcgggg

SEQ ID NO: 55427 - RNA, 22 nt, Human
ccaggccucuuugucugugaga

SEQ ID NO: 55428 - RNA, 24 nt, Human
cccaaagugcugggauuacaggca

SEQ ID NO: 55429 - RNA, 21 nt, Human
cccccgcccucuccccggcuc

SEQ ID NO: 55430 - RNA, 20 nt, Human
cccgcccucuccccggcucu

SEQ ID NO: 55431 - RNA, 24 nt, Human
cccgcccucuccccggcucuggca

SEQ ID NO: 55432 - RNA, 21 nt, Human
cccuccgccucccuccggggg

SEQ ID NO: 55433 - RNA, 20 nt, Human
cccuucaguaugaccaaccg

SEQ ID NO: 55434 - RNA, 19 nt, Human
ccgcugagucccacugcca

SEQ ID NO: 55435 - RNA, 24 nt, Human
ccuaagcagcugggaacacaggcu

SEQ ID NO: 55436 - RNA, 23 nt, Human
ccuccacgcccgcugagucccac

SEQ ID NO: 55437 - RNA, 26 nt, Human
ccucccaccucggccucccaaagugc

SEQ ID NO: 55438 - RNA, 23 nt, Human
ccuccugcuucagccuccuaagc

SEQ ID NO: 55439 - RNA, 23 nt, Human
ccugcagucaggagcuccaaggc

SEQ ID NO: 55440 - RNA, 20 nt, Human
ccuggacucaagcaauccuc

SEQ ID NO: 55441 - RNA, 20 nt, Human
cgcccagggcucgcucgcuc

SEQ ID NO: 55442 - RNA, 21 nt, Human
cgcuggggagugggaggcggg

SEQ ID NO: 55443 - RNA, 19 nt, Human
cggaggcgccgggggagga

SEQ ID NO: 55444 - RNA, 20 nt, Human
cggcccacgugacagccgcu

SEQ ID NO: 55445 - RNA, 24 nt, Human
cuacagaaauaagaaacuuacaga

SEQ ID NO: 55446 - RNA, 24 nt, Human
cucaagcaauccucccaccucggc

SEQ ID NO: 55447 - RNA, 23 nt, Human
cucaccccuauuggccugggcgg

SEQ ID NO: 55448 - RNA, 25 nt, Human
cucccuuacaaccccgcaguuugua

SEQ ID NO: 55449 - RNA, 20 nt, Human
cucgacccaaagccucaccc

SEQ ID NO: 55450 - RNA, 28 nt, Human
cucgcccagggcucgcucggccuaaugg

SEQ ID NO: 55451 - RNA, 23 nt, Human
cucuguugcccaagcugaagugc

SEQ ID NO: 55452 - RNA, 23 nt, Human
cugcuucagccuccuaagcagcu

SEQ ID NO: 55453 - RNA, 22 nt, Human
cuugaagaccuacuaaccugca

SEQ ID NO: 55454 - RNA, 19 nt, Human
gaccauccaccaucugucu

SEQ ID NO: 55455 - RNA, 23 nt, Human
gaccuccacgcccgcugaguccc

SEQ ID NO: 55456 - RNA, 20 nt, Human
gagacagggucuugcucugu

SEQ ID NO: 55457 - RNA, 20 nt, Human
gagcagugcgggagccgagc

SEQ ID NO: 55458 - RNA, 19 nt, Human
gaggcgccgggggaggacu

SEQ ID NO: 55459 - RNA, 26 nt, Human
gaugauaaagaaugaaugaggaagaa

SEQ ID NO: 55460 - RNA, 18 nt, Human
gauuacaggcaugagcca

SEQ ID NO: 55461 - RNA, 21 nt, Human
gauuacaggcaugagccacca

SEQ ID NO: 55462 - RNA, 22 nt, Human
gauuacaggcaugagccaccac

SEQ ID NO: 55463 - RNA, 21 nt, Human
gcaggugcaggccucgccucc

SEQ ID NO: 55464 - RNA, 24 nt, Human
gcccacgugacagccgcuguucac

SEQ ID NO: 55465 - RNA, 23 nt, Human
gcccagggcucgcucgcucagcc

SEQ ID NO: 55466 - RNA, 22 nt, Human
gcugcagccuuggccucgcagg

SEQ ID NO: 55467 - RNA, 24 nt, Human
ggacagagucccugcagucaggag

SEQ ID NO: 55468 - RNA, 22 nt, Human
ggagacagggucuugcucuguu

SEQ ID NO: 55469 - RNA, 22 nt, Human
ggaguaaccccucccuucccca

SEQ ID NO: 55470 - RNA, 19 nt, Human
ggauuacaggcaugagcca

SEQ ID NO: 55471 - RNA, 22 nt, Human
ggccacgggccagggggcggcg

SEQ ID NO: 55472 - RNA, 20 nt, Human
gggagugggaggcgggaagc

SEQ ID NO: 55473 - RNA, 19 nt, Human
ggggagugggaggcgggaa

SEQ ID NO: 55474 - RNA, 24 nt, Human
ggucucacuguguuguccaggcug

SEQ ID NO: 55475 - RNA, 19 nt, Human
guggugcaaucacagccug

SEQ ID NO: 55476 - RNA, 20 nt, Human
uaaccccucccuuccccacc

SEQ ID NO: 55477 - RNA, 23 nt, Human
uaagauguagaauucuauaacuc

SEQ ID NO: 55478 - RNA, 24 nt, Human
uaauagaacaaauuauucaacaaa

SEQ ID NO: 55479 - RNA, 23 nt, Human
uacaggcaugagccaccacgccc

SEQ ID NO: 55480 - RNA, 19 nt, Human
uacccuauuagggaauguu

SEQ ID NO: 55481 - RNA, 21 nt, Human
uacuccuggaggucaaguccu

SEQ ID NO: 55482 - RNA, 20 nt, Human
uaggguauaucugagguucc

SEQ ID NO: 55483 - RNA, 18 nt, Human
uaucugagguuccauacc

SEQ ID NO: 55484 - RNA, 25 nt, Human
ucaaucaauccuccugcuucagccu

SEQ ID NO: 55485 - RNA, 20 nt, Human
ucagccuccuaagcagcugg

SEQ ID NO: 55486 - RNA, 19 nt, Human
ucagccuugcccacucagc

SEQ ID NO: 55487 - RNA, 19 nt, Human
ucauugagugagcugaguc

SEQ ID NO: 55488 - RNA, 21 nt, Human
uccaccgucaacccacagcca

SEQ ID NO: 55489 - RNA, 23 nt, Human
uccaccgucaacccacagccaca

SEQ ID NO: 55490 - RNA, 24 nt, Human
ucccaaagugcugggauuacaggc

SEQ ID NO: 55491 - RNA, 23 nt, Human
uccccggcucuggcagcgggcug

SEQ ID NO: 55492 - RNA, 25 nt, Human
uccccggcucuggcagcgggcuggg

SEQ ID NO: 55493 - RNA, 19 nt, Human
uccuaauaucccaggccuc

SEQ ID NO: 55494 - RNA, 18 nt, Human
ucggccucccaaagugcu

SEQ ID NO: 55495 - RNA, 19 nt, Human
ucuauaacuccaacacaac

SEQ ID NO: 55496 - RNA, 21 nt, Human
ucucaccucucuggacuacag

SEQ ID NO: 55497 - RNA, 19 nt, Human
ucucacuguguuguccagg

SEQ ID NO: 55498 - RNA, 23 nt, Human
ucucacuguguuguccaggcugg

SEQ ID NO: 55499 - RNA, 24 nt, Human
ucucacuguguuguccaggcuggu

SEQ ID NO: 55500 - RNA, 26 nt, Human
ucuccaccgucaacccacagccacaa

SEQ ID NO: 55501 - RNA, 23 nt, Human
ucugagacucccuuacaacccuu

SEQ ID NO: 55502 - RNA, 18 nt, Human
ucuugcucuguugcccaa

SEQ ID NO: 55503 - RNA, 19 nt, Human
ucuugcucuguugcccaag

SEQ ID NO: 55504 - RNA, 23 nt, Human
ucuugcucuguugcccaagcuga

SEQ ID NO: 55505 - RNA, 24 nt, Human
ucuugcucuguugcccaagcugaa

SEQ ID NO: 55506 - RNA, 21 nt, Human
ugaaaccucacagggaaccaa

SEQ ID NO: 55507 - RNA, 19 nt, Human
ugaagaccuacuaaccugc

SEQ ID NO: 55508 - RNA, 19 nt, Human
ugaagugcaguggugcaau

SEQ ID NO: 55509 - RNA, 24 nt, Human
ugaaugaggaagaaugaagaccac

SEQ ID NO: 55510 - RNA, 20 nt, Human
ugagcagugccauuaacugg

SEQ ID NO: 55511 - RNA, 19 nt, Human
ugaggaagaaugaagacca

SEQ ID NO: 55512 - RNA, 24 nt, Human
ugaggaagaaugaagaccacuggu

SEQ ID NO: 55513 - RNA, 23 nt, Human
ugagucccacugccagucggagg

SEQ ID NO: 55514 - RNA, 18 nt, Human
ugagugagcugagucuuu

SEQ ID NO: 55515 - RNA, 24 nt, Human
ugauagagaugaggucucacugug

SEQ ID NO: 55516 - RNA, 21 nt, Human
ugcccaagcugaagugcagug

SEQ ID NO: 55517 - RNA, 20 nt, Human
ugccugcccugcucugucca

SEQ ID NO: 55518 - RNA, 24 nt, Human
ugcucuguugcccaagcugaagug

SEQ ID NO: 55519 - RNA, 24 nt, Human
ugcuucagccuccuaagcagcugg

SEQ ID NO: 55520 - RNA, 21 nt, Human
uggagugaaggauucagugag

SEQ ID NO: 55521 - RNA, 26 nt, Human
uggccugggcggcccacgugacagcc

SEQ ID NO: 55522 - RNA, 24 nt, Human
ugggaacacaggcucaugccacca

SEQ ID NO: 55523 - RNA, 20 nt, Human
ugggaggcgggaagcaugca

SEQ ID NO: 55524 - RNA, 20 nt, Human
ugggauguaggggguggagu

SEQ ID NO: 55525 - RNA, 18 nt, Human
ugggauuacaggcaugag

SEQ ID NO: 55526 - RNA, 19 nt, Human
ugggauuacaggcaugagc

SEQ ID NO: 55527 - RNA, 22 nt, Human
ugggauuacaggcaugagccac

SEQ ID NO: 55528 - RNA, 23 nt, Human
ugggauuacaggcaugagccacc

SEQ ID NO: 55529 - RNA, 24 nt, Human
ugggauuacaggcaugagccacca

SEQ ID NO: 55530 - RNA, 24 nt, Human
ugggauuacaggcaugagccacca

SEQ ID NO: 55531 - RNA, 18 nt, Human
uggggagugggaggcggg

SEQ ID NO: 55532 - RNA, 21 nt, Human
uguagggauggagggaaggug

SEQ ID NO: 55533 - RNA, 18 nt, Human
uguccagaccauccacca

SEQ ID NO: 55534 - RNA, 24 nt, Human
uguccaggcuggucucaaauuccu

SEQ ID NO: 55535 - RNA, 23 nt, Human
uguguuguccaggcuggucucaa

SEQ ID NO: 55536 - RNA, 24 nt, Human
uguguuguccaggcuggucucaaa

SEQ ID NO: 55537 - RNA, 21 nt, Human
uucaaaaagugaaauuuuacu

SEQ ID NO: 55538 - RNA, 25 nt, Human
uuccuggacucaagcaauccuccca

SEQ ID NO: 55539 - RNA, 21 nt, Human
uucuauaacuccaacacaaga

SEQ ID NO: 55540 - RNA, 21 nt, Human
uucuuguccagaccauccacc

SEQ ID NO: 55541 - RNA, 24 nt, Human
aaagugcugggauuacagguguga

SEQ ID NO: 55542 - RNA, 24 nt, Human
aagcauccggcuuguuaggaaauu

SEQ ID NO: 55543 - RNA, 24 nt, Human
aagcugcccuuccuccuggcuguc

SEQ ID NO: 55544 - RNA, 20 nt, Human
aaggagaacuugccauggua

SEQ ID NO: 55545 - RNA, 18 nt, Human
aagugcugggauuacagg

SEQ ID NO: 55546 - RNA, 19 nt, Human
aagugcugggauuacaggu

SEQ ID NO: 55547 - RNA, 26 nt, Human
aagugcugggauuacaggugugagcc

SEQ ID NO: 55548 - RNA, 18 nt, Human
acgaugggcaggaugggc

SEQ ID NO: 55549 - RNA, 24 nt, Human
acgcaaucucagcucacggcaacc

SEQ ID NO: 55550 - RNA, 21 nt, Human
acgccaggcuaauuuuuguau

SEQ ID NO: 55551 - RNA, 18 nt, Human
acgggguuucgccauguu

SEQ ID NO: 55552 - RNA, 19 nt, Human
acgggguuucgccauguua

SEQ ID NO: 55553 - RNA, 20 nt, Human
acgggguuucgccauguuag

SEQ ID NO: 55554 - RNA, 24 nt, Human
acgggguuucgccauguuagccag

SEQ ID NO: 55555 - RNA, 21 nt, Human
agacaggagacgaaacucagg

SEQ ID NO: 55556 - RNA, 25 nt, Human
agacaggagacgaaacucaggucca

SEQ ID NO: 55557 - RNA, 21 nt, Human
agacgaaacucagguccaccc

SEQ ID NO: 55558 - RNA, 20 nt, Human
agcagccucucauuguccaa

SEQ ID NO: 55559 - RNA, 18 nt, Human
agccuccugaguagcugg

SEQ ID NO: 55560 - RNA, 18 nt, Human
agccuuggccuccauggc

SEQ ID NO: 55561 - RNA, 22 nt, Human
aggcaggcuggccagggucaug

SEQ ID NO: 55562 - RNA, 25 nt, Human
aggcaggcuggccagggucggaccc

SEQ ID NO: 55563 - RNA, 23 nt, Human
aggcgcgauggugggagaaggug

SEQ ID NO: 55564 - RNA, 22 nt, Human
aggcguacagggccaggggcuu

SEQ ID NO: 55565 - RNA, 18 nt, Human
aggcugaggcagggagag

SEQ ID NO: 55566 - RNA, 19 nt, Human
agggaggaggcugaggcag

SEQ ID NO: 55567 - RNA, 24 nt, Human
aggugauccgccugccucggccuc

SEQ ID NO: 55568 - RNA, 22 nt, Human
aguagagacgggguuucgccau

SEQ ID NO: 55569 - RNA, 21 nt, Human
aguagcugggauuacaggcau

SEQ ID NO: 55570 - RNA, 18 nt, Human
agugugcagcugcagccu

SEQ ID NO: 55571 - RNA, 18 nt, Human
aucgcauaaccacagccc

SEQ ID NO: 55572 - RNA, 23 nt, Human
augcgccaccacgccaggcuaau

SEQ ID NO: 55573 - RNA, 24 nt, Human
auuuuuguauuuuuaguagagacg

SEQ ID NO: 55574 - RNA, 24 nt, Human
caaagugcugggauuacaggugug

SEQ ID NO: 55575 - RNA, 23 nt, Human
caaccuccaccucccggguucaa

SEQ ID NO: 55576 - RNA, 22 nt, Human
caagcgauucuccugccuuagc

SEQ ID NO: 55577 - RNA, 24 nt, Human
caccacgccaggcuaauuuuugua

SEQ ID NO: 55578 - RNA, 23 nt, Human
cacccacuccuccaaaaggcaac

SEQ ID NO: 55579 - RNA, 24 nt, Human
caccucggcucucaugguugggag

SEQ ID NO: 55580 - RNA, 19 nt, Human
cagcuuguucaaaaguggg

SEQ ID NO: 55581 - RNA, 22 nt, Human
caggugauccgccugccucggc

SEQ ID NO: 55582 - RNA, 20 nt, Human
cagugacgcaaucucagcuc

SEQ ID NO: 55583 - RNA, 24 nt, Human
caugcgccaccacgccaggcuaau

SEQ ID NO: 55584 - RNA, 23 nt, Human
cauguuagccaggcugaucuuga

SEQ ID NO: 55585 - RNA, 24 nt, Human
cauguuagccaggcugaucuugaa

SEQ ID NO: 55586 - RNA, 21 nt, Human
ccaaagugcugggauuacagg

SEQ ID NO: 55587 - RNA, 21 nt, Human
ccaaagugcugggauuacagg

SEQ ID NO: 55588 - RNA, 24 nt, Human
ccaaagugcugggauuacaggugu

SEQ ID NO: 55589 - RNA, 18 nt, Human
ccaaauguagguuucuca

SEQ ID NO: 55590 - RNA, 24 nt, Human
ccaccucccggguucaagcgauuc

SEQ ID NO: 55591 - RNA, 18 nt, Human
ccagccgcaggcgacagc

SEQ ID NO: 55592 - RNA, 22 nt, Human
ccagccgcaggcgacagcuguc

SEQ ID NO: 55593 - RNA, 22 nt, Human
ccaggccccgucuccaccagcc

SEQ ID NO: 55594 - RNA, 21 nt, Human
ccaggggcuucucccgccggu

SEQ ID NO: 55595 - RNA, 21 nt, Human
ccauguuagccaggcugaucu

SEQ ID NO: 55596 - RNA, 23 nt, Human
cccacagaagcccccgcugcugg

SEQ ID NO: 55597 - RNA, 22 nt, Human
cccacuggcacccacuccucca

SEQ ID NO: 55598 - RNA, 24 nt, Human
cccacuggcacccacuccuccaaa

SEQ ID NO: 55599 - RNA, 22 nt, Human
cccgcaggccgcaggagcagcc

SEQ ID NO: 55600 - RNA, 19 nt, Human
cccgggagcccaggccccg

SEQ ID NO: 55601 - RNA, 23 nt, Human
cccggguucaagcgauucuccug

SEQ ID NO: 55602 - RNA, 20 nt, Human
cccuuccuccuggcuguccc

SEQ ID NO: 55603 - RNA, 24 nt, Human
ccucccggguucaagcgauucucc

SEQ ID NO: 55604 - RNA, 24 nt, Human
ccuccuucugucacccaggccgga

SEQ ID NO: 55605 - RNA, 23 nt, Human
ccugaguagcugggauuacaggc

SEQ ID NO: 55606 - RNA, 24 nt, Human
ccugaguagcugggauuacaggca

SEQ ID NO: 55607 - RNA, 18 nt, Human
ccugagucagaugccagg

SEQ ID NO: 55608 - RNA, 19 nt, Human
ccugagucagaugccaggg

SEQ ID NO: 55609 - RNA, 21 nt, Human
ccugauuucaggugauccgcc

SEQ ID NO: 55610 - RNA, 23 nt, Human
ccugccuuagccuccugaguagc

SEQ ID NO: 55611 - RNA, 24 nt, Human
ccugccuuagccuccugaguagcu

SEQ ID NO: 55612 - RNA, 21 nt, Human
ccuggcugucccgcucugccu

SEQ ID NO: 55613 - RNA, 24 nt, Human
cgccauguuagccaggcugaucuu

SEQ ID NO: 55614 - RNA, 27 nt, Human
cgccauguuagccaggcugaucuugaa

SEQ ID NO: 55615 - RNA, 18 nt, Human
cggcaaccuccaccuccc

SEQ ID NO: 55616 - RNA, 24 nt, Human
cgggguuucgccauguuagccagg

SEQ ID NO: 55617 - RNA, 22 nt, Human
cucacggcaaccuccaccuccc

SEQ ID NO: 55618 - RNA, 24 nt, Human
cucacggcaaccuccaccucccgg

SEQ ID NO: 55619 - RNA, 27 nt, Human
cucagcaaucccucaaucccucaaucc

SEQ ID NO: 55620 - RNA, 22 nt, Human
cucagguccaccccugucccuc

SEQ ID NO: 55621 - RNA, 19 nt, Human
cucauuguccaaauguagg

SEQ ID NO: 55622 - RNA, 21 nt, Human
cuccucuggcaugggcuggag

SEQ ID NO: 55623 - RNA, 19 nt, Human
cucugccaagcugcccuuc

SEQ ID NO: 55624 - RNA, 22 nt, Human
cugaggcucugccaagcugccc

SEQ ID NO: 55625 - RNA, 23 nt, Human
cugaguagcugggauuacaggca

SEQ ID NO: 55626 - RNA, 24 nt, Human
cugaguagcugggauuacaggcau

SEQ ID NO: 55627 - RNA, 21 nt, Human
cugcccuuccuccuggcuguc

SEQ ID NO: 55628 - RNA, 23 nt, Human
cugccucggccucccaaagugcu

SEQ ID NO: 55629 - RNA, 18 nt, Human
cuggagcuccagcucagc

SEQ ID NO: 55630 - RNA, 24 nt, Human
cuuagccuccugaguagcugggau

SEQ ID NO: 55631 - RNA, 18 nt, Human
gaaacucagguccacccc

SEQ ID NO: 55632 - RNA, 24 nt, Human
gagacgggguuucgccauguuagc

SEQ ID NO: 55633 - RNA, 18 nt, Human
gagcagcauggggaagag

SEQ ID NO: 55634 - RNA, 24 nt, Human
gagcagcauggggaagaguaugac

SEQ ID NO: 55635 - RNA, 22 nt, Human
gaguagcugggauuacaggcau

SEQ ID NO: 55636 - RNA, 24 nt, Human
gaguagcugggauuacaggcaugc

SEQ ID NO: 55637 - RNA, 18 nt, Human
gauuacaggcaugcgcca

SEQ ID NO: 55638 - RNA, 18 nt, Human
gauuacaggugugagccg

SEQ ID NO: 55639 - RNA, 23 nt, Human
gauuacaggugugagccgccuca

SEQ ID NO: 55640 - RNA, 24 nt, Human
gauuacaggugugagccgccucac

SEQ ID NO: 55641 - RNA, 24 nt, Human
gauuucaggugauccgccugccuc

SEQ ID NO: 55642 - RNA, 22 nt, Human
gcaaccuccaccucccggguuc

SEQ ID NO: 55643 - RNA, 21 nt, Human
gcccaggaggaugagcagcau

SEQ ID NO: 55644 - RNA, 22 nt, Human
gcccuggagccuuggcaauccu

SEQ ID NO: 55645 - RNA, 22 nt, Human
gccugggccuggggaagggcuc

SEQ ID NO: 55646 - RNA, 23 nt, Human
gcucugccugguggcccugcugu

SEQ ID NO: 55647 - RNA, 22 nt, Human
ggaagaggagguggcccgcagg

SEQ ID NO: 55648 - RNA, 20 nt, Human
ggagaacuugccaugguacc

SEQ ID NO: 55649 - RNA, 19 nt, Human
ggagccaaggaagaggagg

SEQ ID NO: 55650 - RNA, 22 nt, Human
ggagcggcugagggaggaggcu

SEQ ID NO: 55651 - RNA, 25 nt, Human
ggaggaggcugaggcagggagaggg

SEQ ID NO: 55652 - RNA, 26 nt, Human
ggagguuuuuuuuuuuuuuuuuuuua

SEQ ID NO: 55653 - RNA, 19 nt, Human
ggauuacaggcaugcgcca

SEQ ID NO: 55654 - RNA, 21 nt, Human
ggccaguuucagaaucaucag

SEQ ID NO: 55655 - RNA, 20 nt, Human
ggcugaucuugaacuccuga

SEQ ID NO: 55656 - RNA, 21 nt, Human
gggaagaaggcuuuauucagg

SEQ ID NO: 55657 - RNA, 19 nt, Human
gggaagacccaggagggag

SEQ ID NO: 55658 - RNA, 20 nt, Human
gggaggcggccccgcuccgu

SEQ ID NO: 55659 - RNA, 20 nt, Human
gggcccaggaggaugagcag

SEQ ID NO: 55660 - RNA, 18 nt, Human
gggccuggggaagggcuc

SEQ ID NO: 55661 - RNA, 20 nt, Human
gggcucagagcagugugcag

SEQ ID NO: 55662 - RNA, 23 nt, Human
gggguuucgccauguuagccagg

SEQ ID NO: 55663 - RNA, 23 nt, Human
guagagacgggguuucgccaugu

SEQ ID NO: 55664 - RNA, 20 nt, Human
guagcugggauuacaggcau

SEQ ID NO: 55665 - RNA, 23 nt, Human
gucaugugcaugaagccgucguu

SEQ ID NO: 55666 - RNA, 21 nt, Human
gugguuggugcgggggcaggg

SEQ ID NO: 55667 - RNA, 22 nt, Human
gugguuggugcgggggcagggg

SEQ ID NO: 55668 - RNA, 22 nt, Human
uaaggcagagccuccuucuguc

SEQ ID NO: 55669 - RNA, 24 nt, Human
uaauuuuuguauuuuuaguagaga

SEQ ID NO: 55670 - RNA, 18 nt, Human
uacagggccaggggcuuc

SEQ ID NO: 55671 - RNA, 22 nt, Human
uaccggcccaucccacuggcac

SEQ ID NO: 55672 - RNA, 22 nt, Human
uagagacgggguuucgccaugu

SEQ ID NO: 55673 - RNA, 24 nt, Human
uagccaggcugaucuugaacuccu

SEQ ID NO: 55674 - RNA, 20 nt, Human
uagccuccugaguagcuggg

SEQ ID NO: 55675 - RNA, 24 nt, Human
uaguagagacgggguuucgccaug

SEQ ID NO: 55676 - RNA, 21 nt, Human
uaucgcauaaccacagcccca

SEQ ID NO: 55677 - RNA, 19 nt, Human
ucaaaagugggacuuggga

SEQ ID NO: 55678 - RNA, 19 nt, Human
ucaaugguuaauucucuca

SEQ ID NO: 55679 - RNA, 24 nt, Human
ucacggcaaccuccaccucccggg

SEQ ID NO: 55680 - RNA, 18 nt, Human
ucagagcagugugcagcu

SEQ ID NO: 55681 - RNA, 24 nt, Human
ucagagcagugugcagcugcagcc

SEQ ID NO: 55682 - RNA, 22 nt, Human
ucagcacccgcuugaccaccug

SEQ ID NO: 55683 - RNA, 21 nt, Human
ucaggugauccgccugccucg

SEQ ID NO: 55684 - RNA, 21 nt, Human
uccaaauguagguuucucaag

SEQ ID NO: 55685 - RNA, 21 nt, Human
uccacugaacaaauggaaaaa

SEQ ID NO: 55686 - RNA, 23 nt, Human
uccauccccgggcugcgcaggag

SEQ ID NO: 55687 - RNA, 23 nt, Human
ucccaaagugcugggauuacagg

SEQ ID NO: 55688 - RNA, 21 nt, Human
ucccacagaagcccccgcugc

SEQ ID NO: 55689 - RNA, 21 nt, Human
ucccacuggcacccacuccuc

SEQ ID NO: 55690 - RNA, 21 nt, Human
ucccggguucaagcgauucuc

SEQ ID NO: 55691 - RNA, 24 nt, Human
ucccggguucaagcgauucuccug

SEQ ID NO: 55692 - RNA, 21 nt, Human
uccgugccaccccacugagaa

SEQ ID NO: 55693 - RNA, 18 nt, Human
uccucuggcaugggcugg

SEQ ID NO: 55694 - RNA, 24 nt, Human
uccugaguagcugggauuacaggc

SEQ ID NO: 55695 - RNA, 20 nt, Human
uccuucugucacccaggccg

SEQ ID NO: 55696 - RNA, 19 nt, Human
ucgaaggagaacuugccau

SEQ ID NO: 55697 - RNA, 18 nt, Human
ucggccucccaaagugcu

SEQ ID NO: 55698 - RNA, 24 nt, Human
ucuccugccuuagccuccugagua

SEQ ID NO: 55699 - RNA, 23 nt, Human
ucuugaacuccugauuucaggug

SEQ ID NO: 55700 - RNA, 19 nt, Human
ugacgcaaucucagcucac

SEQ ID NO: 55701 - RNA, 19 nt, Human
ugagaaggguugucaggca

SEQ ID NO: 55702 - RNA, 21 nt, Human
ugaggauaaagaguuacaagc

SEQ ID NO: 55703 - RNA, 23 nt, Human
ugaggcagggagagggaagaccc

SEQ ID NO: 55704 - RNA, 19 nt, Human
ugaguggauggggcccagg

SEQ ID NO: 55705 - RNA, 21 nt, Human
ugaguggauggggcccaggag

SEQ ID NO: 55706 - RNA, 18 nt, Human
ugauuucaggugauccgc

SEQ ID NO: 55707 - RNA, 24 nt, Human
ugauuucaggugauccgccugccu

SEQ ID NO: 55708 - RNA, 23 nt, Human
ugcagcugcagccuuggccucca

SEQ ID NO: 55709 - RNA, 19 nt, Human
ugccaugguaccggcccau

SEQ ID NO: 55710 - RNA, 21 nt, Human
ugccucggccucccaaagugc

SEQ ID NO: 55711 - RNA, 24 nt, Human
ugccucggccucccaaagugcugg

SEQ ID NO: 55712 - RNA, 24 nt, Human
ugccuuagccuccugaguagcugg

SEQ ID NO: 55713 - RNA, 18 nt, Human
ugcugggauuacaggugu

SEQ ID NO: 55714 - RNA, 18 nt, Human
ugcuggucugggucagca

SEQ ID NO: 55715 - RNA, 20 nt, Human
uggagagaagagggaggcgg

SEQ ID NO: 55716 - RNA, 24 nt, Human
uggagccuuggcaauccuuuuccu

SEQ ID NO: 55717 - RNA, 20 nt, Human
uggaugcagugauuccaugg

SEQ ID NO: 55718 - RNA, 20 nt, Human
uggauggggcccaggaggau

SEQ ID NO: 55719 - RNA, 20 nt, Human
uggcaauccuuuuccuccuc

SEQ ID NO: 55720 - RNA, 18 nt, Human
uggcaugggcuggaggga

SEQ ID NO: 55721 - RNA, 21 nt, Human
uggccagggucaugugcauga

SEQ ID NO: 55722 - RNA, 19 nt, Human
ugggagcggcugagggagg

SEQ ID NO: 55723 - RNA, 18 nt, Human
ugggauuacaggcaugcg

SEQ ID NO: 55724 - RNA, 21 nt, Human
ugggauuacaggcaugcgcca

SEQ ID NO: 55725 - RNA, 22 nt, Human
ugggauuacaggcaugcgccac

SEQ ID NO: 55726 - RNA, 24 nt, Human
ugggauuacaggcaugcgccacca

SEQ ID NO: 55727 - RNA, 18 nt, Human
ugggauuacaggugugag

SEQ ID NO: 55728 - RNA, 19 nt, Human
ugggauuacaggugugagc

SEQ ID NO: 55729 - RNA, 21 nt, Human
ugggauuacaggugugagccg

SEQ ID NO: 55730 - RNA, 21 nt, Human
ugggauuacaggugugagccg

SEQ ID NO: 55731 - RNA, 22 nt, Human
ugggauuacaggugugagccgc

SEQ ID NO: 55732 - RNA, 23 nt, Human
ugggauuacaggugugagccgcc

SEQ ID NO: 55733 - RNA, 23 nt, Human
ugggauuacaggugugagccgcc

SEQ ID NO: 55734 - RNA, 25 nt, Human
ugggauuacaggugugagccgccuc

SEQ ID NO: 55735 - RNA, 18 nt, Human
ugguuggugcgggggcag

SEQ ID NO: 55736 - RNA, 21 nt, Human
uguauuuuuaguagagacggg

SEQ ID NO: 55737 - RNA, 18 nt, Human
ugucaggcaggaaacccu

SEQ ID NO: 55738 - RNA, 24 nt, Human
ugugcagcugcagccuuggccucc

SEQ ID NO: 55739 - RNA, 18 nt, Human
uuaguagagacgggguuu

SEQ ID NO: 55740 - RNA, 22 nt, Human
uuaguagagacgggguuucgcc

SEQ ID NO: 55741 - RNA, 24 nt, Human
uuaguagagacgggguuucgccau

SEQ ID NO: 55742 - RNA, 20 nt, Human
uucaagcgauucuccugccu

SEQ ID NO: 55743 - RNA, 24 nt, Human
uucaagcgauucuccugccuuagc

SEQ ID NO: 55744 - RNA, 23 nt, Human
uucagaaucaucagcuuguucaa

SEQ ID NO: 55745 - RNA, 21 nt, Human
uucaggugauccgccugccuc

SEQ ID NO: 55746 - RNA, 19 nt, Human
uucccaugccucccaccuc

SEQ ID NO: 55747 - RNA, 23 nt, Human
uuguauuuuuaguagagacgggg

SEQ ID NO: 55748 - RNA, 21 nt, Human
uuucgccauguuagccaggcu

SEQ ID NO: 55749 - RNA, 23 nt, Human
uuuuuaguagagacgggguuucg

SEQ ID NO: 55750 - RNA, 24 nt, Human
uuuuuaguagagacgggguuucgc

SEQ ID NO: 55751 - RNA, 20 nt, Human
uuuuuguauuuuuaguagag

SEQ ID NO: 55752 - RNA, 26 nt, Human
uuuuuuuuuuaaggcagagccuccuu

SEQ ID NO: 55753 - RNA, 23 nt, Human
uuuuuuuuuuuuaaggcagagcc

SEQ ID NO: 55754 - RNA, 23 nt, Human
uuuuuuuuuuuuuuuuuuuaagg

SEQ ID NO: 55755 - RNA, 20 nt, Human
aaccugaggcugggggagcc

SEQ ID NO: 55756 - RNA, 21 nt, Human
aaguggcccaggcccuggagc

SEQ ID NO: 55757 - RNA, 18 nt, Human
acagucuuugaggacgug

SEQ ID NO: 55758 - RNA, 20 nt, Human
acagucuuugaggacgugcu

SEQ ID NO: 55759 - RNA, 21 nt, Human
accagagggguggugcagaga

SEQ ID NO: 55760 - RNA, 23 nt, Human
agcaacuuucacauaaggaaacu

SEQ ID NO: 55761 - RNA, 23 nt, Human
aggcagggcacuguauuuuccag

SEQ ID NO: 55762 - RNA, 22 nt, Human
aggcccuggagcugcgcagccc

SEQ ID NO: 55763 - RNA, 21 nt, Human
agggcuggaauuggggagggu

SEQ ID NO: 55764 - RNA, 23 nt, Human
agggugcggugugaaccagaggg

SEQ ID NO: 55765 - RNA, 21 nt, Human
aguggauggagcugcuguggg

SEQ ID NO: 55766 - RNA, 24 nt, Human
aguugaaggccucacgcagccgcc

SEQ ID NO: 55767 - RNA, 20 nt, Human
augagcucagauaugucugc

SEQ ID NO: 55768 - RNA, 21 nt, Human
augccccuaagaaggcagggc

SEQ ID NO: 55769 - RNA, 19 nt, Human
caggaugcagucaugugac

SEQ ID NO: 55770 - RNA, 21 nt, Human
caggcauacacagagggccac

SEQ ID NO: 55771 - RNA, 23 nt, Human
cagggcacuguauuuuccagggu

SEQ ID NO: 55772 - RNA, 23 nt, Human
ccaacccugaccgagagggcaaa

SEQ ID NO: 55773 - RNA, 18 nt, Human
cccaguggauggagcugc

SEQ ID NO: 55774 - RNA, 18 nt, Human
cccaguggauggagcugc

SEQ ID NO: 55775 - RNA, 20 nt, Human
ccccaggccucagcccugcu

SEQ ID NO: 55776 - RNA, 18 nt, Human
cccccaggucccacuaac

SEQ ID NO: 55777 - RNA, 19 nt, Human
cccccccgacuccauuuua

SEQ ID NO: 55778 - RNA, 20 nt, Human
cccugugacugggccuggcc

SEQ ID NO: 55779 - RNA, 20 nt, Human
ccuacccccaggccucagcc

SEQ ID NO: 55780 - RNA, 18 nt, Human
ccugcggucuggaggaac

SEQ ID NO: 55781 - RNA, 23 nt, Human
ccuggagcugcgcagcccggaac

SEQ ID NO: 55782 - RNA, 18 nt, Human
ccuggagggcuccacgcu

SEQ ID NO: 55783 - RNA, 23 nt, Human
cuccuacccccaggccucagccc

SEQ ID NO: 55784 - RNA, 18 nt, Human
cugggccagcacgucgcg

SEQ ID NO: 55785 - RNA, 21 nt, Human
cuggugcaguugggauggggc

SEQ ID NO: 55786 - RNA, 20 nt, Human
cugugugacccguuggaggc

SEQ ID NO: 55787 - RNA, 22 nt, Human
gaacaaugugaguugggagcau

SEQ ID NO: 55788 - RNA, 22 nt, Human
gacagaaguccauguaagcagc

SEQ ID NO: 55789 - RNA, 19 nt, Human
gagguggaagugcgcgugu

SEQ ID NO: 55790 - RNA, 22 nt, Human
gcccugugucuggucuuacaug

SEQ ID NO: 55791 - RNA, 18 nt, Human
ggagcugcugugggugag

SEQ ID NO: 55792 - RNA, 21 nt, Human
ggaugugagaggaucccuggg

SEQ ID NO: 55793 - RNA, 21 nt, Human
ggccugaagguucuugagagc

SEQ ID NO: 55794 - RNA, 22 nt, Human
ggggaggguggggugagugagg

SEQ ID NO: 55795 - RNA, 24 nt, Human
ggguccuucgcugcaccuccacuc

SEQ ID NO: 55796 - RNA, 20 nt, Human
gggugcggugugaaccagag

SEQ ID NO: 55797 - RNA, 19 nt, Human
guggagugaugcaaacccc

SEQ ID NO: 55798 - RNA, 24 nt, Human
uaagucacaagcugaucgcaggag

SEQ ID NO: 55799 - RNA, 21 nt, Human
uacacagagggccacagccaa

SEQ ID NO: 55800 - RNA, 25 nt, Human
uacaugcaggcgugucuuggugaua

SEQ ID NO: 55801 - RNA, 24 nt, Human
uacccccaggccucagcccugcuc

SEQ ID NO: 55802 - RNA, 18 nt, Human
uacgggcaugugugugug

SEQ ID NO: 55803 - RNA, 18 nt, Human
uagaagcaagaccuugcu

SEQ ID NO: 55804 - RNA, 19 nt, Human
uaugcagguccugggccag

SEQ ID NO: 55805 - RNA, 28 nt, Human
ucaugugacagcuccagcaaccugaggc

SEQ ID NO: 55806 - RNA, 19 nt, Human
ucccaguggauggagcugc

SEQ ID NO: 55807 - RNA, 21 nt, Human
ucccaguggauggagcugcug

SEQ ID NO: 55808 - RNA, 19 nt, Human
ucccccagauagaagcaag

SEQ ID NO: 55809 - RNA, 22 nt, Human
ucugcggccucucggccucucu

SEQ ID NO: 55810 - RNA, 22 nt, Human
ucuggcaaaggaugagcucaga

SEQ ID NO: 55811 - RNA, 18 nt, Human
ugacacugccccugugac

SEQ ID NO: 55812 - RNA, 19 nt, Human
ugaccgagagggcaaaggg

SEQ ID NO: 55813 - RNA, 21 nt, Human
ugaccgagagggcaaagggcu

SEQ ID NO: 55814 - RNA, 23 nt, Human
ugacugggccuggccaacccuga

SEQ ID NO: 55815 - RNA, 23 nt, Human
ugaggacaccuggcauguucugc

SEQ ID NO: 55816 - RNA, 21 nt, Human
ugccuagaggggagagcaaag

SEQ ID NO: 55817 - RNA, 20 nt, Human
ugcuccuacccccaggccuc

SEQ ID NO: 55818 - RNA, 25 nt, Human
ugcucugcugacugcgauccuccca

SEQ ID NO: 55819 - RNA, 23 nt, Human
ugcugugggugagugcagggugc

SEQ ID NO: 55820 - RNA, 23 nt, Human
uggcaaaggaugagcucagauau

SEQ ID NO: 55821 - RNA, 18 nt, Human
uggcauaagugacuccau

SEQ ID NO: 55822 - RNA, 23 nt, Human
ugggaugugagaggaucccuggg

SEQ ID NO: 55823 - RNA, 24 nt, Human
ugggcucugccccuggguccuucg

SEQ ID NO: 55824 - RNA, 23 nt, Human
uggggaggguggggugagugagg

SEQ ID NO: 55825 - RNA, 18 nt, Human
ugguagguaagcaucugc

SEQ ID NO: 55826 - RNA, 20 nt, Human
ugucuuggugauaaauccug

SEQ ID NO: 55827 - RNA, 18 nt, Human
ugugagaggaucccuggg

SEQ ID NO: 55828 - RNA, 21 nt, Human
uguuacgggcaugugugugug

SEQ ID NO: 55829 - RNA, 21 nt, Human
uuaaaggacagaaguccaugu

SEQ ID NO: 55830 - RNA, 23 nt, Human
uucagggcugaugccccuaagaa

SEQ ID NO: 55831 - RNA, 24 nt, Human
uuccagggugacacugccccugug

SEQ ID NO: 55832 - RNA, 24 nt, Human
uucgcugcaccuccacucccuuuc

SEQ ID NO: 55833 - RNA, 22 nt, Human
uucucugugugacccguuggag

SEQ ID NO: 55834 - RNA, 21 nt, Human
uugcagcccuggcaggcagga

SEQ ID NO: 55835 - RNA, 23 nt, Human
uugggauggggcagagguggaag

SEQ ID NO: 55836 - RNA, 24 nt, Human
uugggauggggcagagguggaagu

SEQ ID NO: 55837 - RNA, 19 nt, Human
uuuucugguggagacggcc

SEQ ID NO: 55838 - RNA, 27 nt, Human
aaaaauaaagggagauuaccgguaccc

SEQ ID NO: 55839 - RNA, 20 nt, Human
aaucccaucgaucugaucug

SEQ ID NO: 55840 - RNA, 19 nt, Human
ccgcaccccgcgccucuac

SEQ ID NO: 55841 - RNA, 21 nt, Human
cuccgcaccccgcgccucuac

SEQ ID NO: 55842 - RNA, 20 nt, Human
gagucagucuuaaacaaacu

SEQ ID NO: 55843 - RNA, 18 nt, Human
ucccuagcuccgcacccc

SEQ ID NO: 55844 - RNA, 21 nt, Human
ugacaaaugaagcuggucaaa

SEQ ID NO: 55845 - RNA, 22 nt, Human
aaggcggcaggccugcugcaaa

SEQ ID NO: 55846 - RNA, 20 nt, Human
aggaaucucuugauuuaauc

SEQ ID NO: 55847 - RNA, 19 nt, Human
aggcggcaggccugcugca

SEQ ID NO: 55848 - RNA, 19 nt, Human
caaaaacagcugcuggaac

SEQ ID NO: 55849 - RNA, 22 nt, Human
cagucauaauaaugcauuuauu

SEQ ID NO: 55850 - RNA, 21 nt, Human
ccaaaaacagcugcuggaaca

SEQ ID NO: 55851 - RNA, 18 nt, Human
ggcaggccugcugcaaag

SEQ ID NO: 55852 - RNA, 22 nt, Human
uccaaaaacagcugcuggaaca

SEQ ID NO: 55853 - RNA, 23 nt, Human
ugcuggaacaccucaaauuaagg

SEQ ID NO: 55854 - RNA, 21 nt, Human
uggaacaccucaaauuaaggg

SEQ ID NO: 55855 - RNA, 23 nt, Human
uucuuugucuucuccaaaaacag

SEQ ID NO: 55856 - RNA, 24 nt, Human
aaacacuaugaaaacauaaccugg

SEQ ID NO: 55857 - RNA, 18 nt, Human
aaagacguccacagcccc

SEQ ID NO: 55858 - RNA, 24 nt, Human
aaagugcugggauuauaggcauga

SEQ ID NO: 55859 - RNA, 24 nt, Human
aaauuauggcuauuuauuuuuggu

SEQ ID NO: 55860 - RNA, 25 nt, Human
aagcgauccucccaccucagccucc

SEQ ID NO: 55861 - RNA, 19 nt, Human
aaguagcuggggcuauagg

SEQ ID NO: 55862 - RNA, 24 nt, Human
aagugauccacccaccuuggccuc

SEQ ID NO: 55863 - RNA, 19 nt, Human
aagugcugggauuauaggc

SEQ ID NO: 55864 - RNA, 21 nt, Human
aagugcugggauuauaggcau

SEQ ID NO: 55865 - RNA, 23 nt, Human
aaugcaguggaaugaucauggcu

SEQ ID NO: 55866 - RNA, 24 nt, Human
acauagccuuccccuaacaaauuc

SEQ ID NO: 55867 - RNA, 21 nt, Human
acuguaucccccaggcugaaa

SEQ ID NO: 55868 - RNA, 18 nt, Human
agacaaggucucacugua

SEQ ID NO: 55869 - RNA, 21 nt, Human
agacaguaucucuucacuagu

SEQ ID NO: 55870 - RNA, 22 nt, Human
agaguucaaugaagaugaugaa

SEQ ID NO: 55871 - RNA, 24 nt, Human
aggcugaaaugcaguggaaugauc

SEQ ID NO: 55872 - RNA, 19 nt, Human
agugauccacccaccuugg

SEQ ID NO: 55873 - RNA, 22 nt, Human
auaagucuuuuuuuccgagucc

SEQ ID NO: 55874 - RNA, 21 nt, Human
augaaagaaacacuaugaaaa

SEQ ID NO: 55875 - RNA, 23 nt, Human
augaaagaaacacuaugaaaaca

SEQ ID NO: 55876 - RNA, 24 nt, Human
caaagugcugggauuauaggcaug

SEQ ID NO: 55877 - RNA, 18 nt, Human
caaccgccugggcucaag

SEQ ID NO: 55878 - RNA, 27 nt, Human
caagcgauccucccaccucagccuccc

SEQ ID NO: 55879 - RNA, 27 nt, Human
caagcgauccucccaccucagccuccc

SEQ ID NO: 55880 - RNA, 23 nt, Human
caagugauccacccaccuuggcc

SEQ ID NO: 55881 - RNA, 24 nt, Human
caccauguugccuaggcugaucuc

SEQ ID NO: 55882 - RNA, 27 nt, Human
caccauguugccuaggcugaucucgaa

SEQ ID NO: 55883 - RNA, 22 nt, Human
cacccaccuuggccucccaaag

SEQ ID NO: 55884 - RNA, 23 nt, Human
cacccaccuuggccucccaaagu

SEQ ID NO: 55885 - RNA, 24 nt, Human
caccucagccucccaaguagcugg

SEQ ID NO: 55886 - RNA, 22 nt, Human
cacuaugaaaacauaaccuggg

SEQ ID NO: 55887 - RNA, 19 nt, Human
cagcccccuuauguaauga

SEQ ID NO: 55888 - RNA, 24 nt, Human
cagccucaaccgccugggcucaag

SEQ ID NO: 55889 - RNA, 24 nt, Human
caggauuucaccauguugccuagg

SEQ ID NO: 55890 - RNA, 21 nt, Human
caguggaaugaucauggcuca

SEQ ID NO: 55891 - RNA, 18 nt, Human
cauagcuggaauucaugc

SEQ ID NO: 55892 - RNA, 19 nt, Human
cauguugccuaggcugauc

SEQ ID NO: 55893 - RNA, 21 nt, Human
cauguugccuaggcugaucuc

SEQ ID NO: 55894 - RNA, 24 nt, Human
cauguugccuaggcugaucucgaa

SEQ ID NO: 55895 - RNA, 24 nt, Human
ccaaagugcugggauuauaggcau

SEQ ID NO: 55896 - RNA, 18 nt, Human
ccacaccaagcuaauuuu

SEQ ID NO: 55897 - RNA, 23 nt, Human
ccacauagccuuccccuaacaaa

SEQ ID NO: 55898 - RNA, 23 nt, Human
ccauaaucucuccaaagauggca

SEQ ID NO: 55899 - RNA, 24 nt, Human
cccaaguagcuggggcuauaggca

SEQ ID NO: 55900 - RNA, 23 nt, Human
cccaccucagccucccaaguagc

SEQ ID NO: 55901 - RNA, 23 nt, Human
ccucccaccucagccucccaagu

SEQ ID NO: 55902 - RNA, 26 nt, Human
ccucccaccucagccucccaaguagc

SEQ ID NO: 55903 - RNA, 24 nt, Human
ccugaacucaagugauccacccac

SEQ ID NO: 55904 - RNA, 20 nt, Human
ccugggcucaagcgauccuc

SEQ ID NO: 55905 - RNA, 21 nt, Human
ccugggcucaagcgauccucc

SEQ ID NO: 55906 - RNA, 20 nt, Human
cuauaggcagagggcaccac

SEQ ID NO: 55907 - RNA, 24 nt, Human
cucaagcgauccucccaccucagc

SEQ ID NO: 55908 - RNA, 24 nt, Human
cucaagugauccacccaccuuggc

SEQ ID NO: 55909 - RNA, 18 nt, Human
cucacugcagccucaacc

SEQ ID NO: 55910 - RNA, 24 nt, Human
cucagccucccaaguagcuggggc

SEQ ID NO: 55911 - RNA, 23 nt, Human
cugcagccucaaccgccugggcu

SEQ ID NO: 55912 - RNA, 22 nt, Human
cuggggcuauaggcagagggca

SEQ ID NO: 55913 - RNA, 20 nt, Human
cuuaccacauagccuucccc

SEQ ID NO: 55914 - RNA, 27 nt, Human
cuucuuguuccaaguuuccuccaaaag

SEQ ID NO: 55915 - RNA, 19 nt, Human
gaaagaaacacuaugaaaa

SEQ ID NO: 55916 - RNA, 24 nt, Human
gaacucaagugauccacccaccuu

SEQ ID NO: 55917 - RNA, 19 nt, Human
gaucauggcucacugcagc

SEQ ID NO: 55918 - RNA, 19 nt, Human
gauuauaggcaugaggcac

SEQ ID NO: 55919 - RNA, 21 nt, Human
gauuauaggcaugaggcacug

SEQ ID NO: 55920 - RNA, 24 nt, Human
gccugggcucaagcgauccuccca

SEQ ID NO: 55921 - RNA, 18 nt, Human
ggagccugacaacuggca

SEQ ID NO: 55922 - RNA, 23 nt, Human
ggagccugacaacuggcaucauu

SEQ ID NO: 55923 - RNA, 19 nt, Human
ggcugaaaugcaguggaau

SEQ ID NO: 55924 - RNA, 21 nt, Human
gguaaagacaggauuucacca

SEQ ID NO: 55925 - RNA, 22 nt, Human
guaaagacaggauuucaccaug

SEQ ID NO: 55926 - RNA, 22 nt, Human
guagagcuuaccacauagccuu

SEQ ID NO: 55927 - RNA, 24 nt, Human
gugauccacccaccuuggccuccc

SEQ ID NO: 55928 - RNA, 22 nt, Human
uaaagacaggauuucaccaugu

SEQ ID NO: 55929 - RNA, 24 nt, Human
uaacaaauuccaaagacguccaca

SEQ ID NO: 55930 - RNA, 22 nt, Human
uagcuggggcuauaggcagagg

SEQ ID NO: 55931 - RNA, 24 nt, Human
ucacugcagccucaaccgccuggg

SEQ ID NO: 55932 - RNA, 20 nt, Human
ucagccucccaaguagcugg

SEQ ID NO: 55933 - RNA, 23 nt, Human
ucagccucccaaguagcuggggc

SEQ ID NO: 55934 - RNA, 19 nt, Human
uccaaagauggcaaauuau

SEQ ID NO: 55935 - RNA, 20 nt, Human
uccaaguuuccuccaaaagu

SEQ ID NO: 55936 - RNA, 18 nt, Human
uccacauugaaaauagac

SEQ ID NO: 55937 - RNA, 24 nt, Human
ucccaaagugcugggauuauaggc

SEQ ID NO: 55938 - RNA, 24 nt, Human
ucccaaguagcuggggcuauaggc

SEQ ID NO: 55939 - RNA, 21 nt, Human
ucccccaggcugaaaugcagu

SEQ ID NO: 55940 - RNA, 24 nt, Human
ucucacuguaucccccaggcugaa

SEQ ID NO: 55941 - RNA, 21 nt, Human
ucucgaacuccugaacucaag

SEQ ID NO: 55942 - RNA, 21 nt, Human
ugaaagaaacacuaugaaaac

SEQ ID NO: 55943 - RNA, 24 nt, Human
ugaaagaaacacuaugaaaacaua

SEQ ID NO: 55944 - RNA, 19 nt, Human
ugaaaugcaguggaaugau

SEQ ID NO: 55945 - RNA, 24 nt, Human
ugauccacccaccuuggccuccca

SEQ ID NO: 55946 - RNA, 26 nt, Human
ugcagccaggcauuggccauaguggc

SEQ ID NO: 55947 - RNA, 24 nt, Human
ugccuaggcugaucucgaacuccu

SEQ ID NO: 55948 - RNA, 22 nt, Human
ugccugcagccaggcauuggcc

SEQ ID NO: 55949 - RNA, 18 nt, Human
ugggaggagccugacaac

SEQ ID NO: 55950 - RNA, 23 nt, Human
ugggaggagccugacaacuggca

SEQ ID NO: 55951 - RNA, 19 nt, Human
ugggauuauaggcaugagg

SEQ ID NO: 55952 - RNA, 21 nt, Human
ugggauuauaggcaugaggca

SEQ ID NO: 55953 - RNA, 22 nt, Human
ugggauuauaggcaugaggcac

SEQ ID NO: 55954 - RNA, 22 nt, Human
ugggauuauaggcaugaggcac

SEQ ID NO: 55955 - RNA, 22 nt, Human
ugggauuauaggcaugaggcac

SEQ ID NO: 55956 - RNA, 24 nt, Human
ugggauuauaggcaugaggcacug

SEQ ID NO: 55957 - RNA, 24 nt, Human
ugguaaagacaggauuucaccaug

SEQ ID NO: 55958 - RNA, 18 nt, Human
uuggccucccaaagugcu

SEQ ID NO: 55959 - RNA, 24 nt, Human
uugguaaagacaggauuucaccau

SEQ ID NO: 55960 - RNA, 21 nt, Human
uuucaccauguugccuaggcu

SEQ ID NO: 55961 - RNA, 21 nt, Human
uuuuccgaguccacauugaaa

SEQ ID NO: 55962 - RNA, 24 nt, Human
uuuuuaaaauuuaccaaaugaaau

SEQ ID NO: 55963 - RNA, 19 nt, Human
uuuuugguuuugcagcauu

SEQ ID NO: 55964 - RNA, 19 nt, Human
uuuuuuuuuuaaagacaag

SEQ ID NO: 55965 - RNA, 22 nt, Human
aagagaaauaaaucuuuggcca

SEQ ID NO: 55966 - RNA, 19 nt, Human
aagccagccuggagccccg

SEQ ID NO: 55967 - RNA, 23 nt, Human
agagaaauaaaucuuuggccagg

SEQ ID NO: 55968 - RNA, 18 nt, Human
aggcaccccugcguaccc

SEQ ID NO: 55969 - RNA, 24 nt, Human
agggggcagggccuggaguuguug

SEQ ID NO: 55970 - RNA, 20 nt, Human
cagacgacaccacacaccac

SEQ ID NO: 55971 - RNA, 20 nt, Human
cagccugggaacaccuccgc

SEQ ID NO: 55972 - RNA, 20 nt, Human
cagggccuggaguuguuggg

SEQ ID NO: 55973 - RNA, 25 nt, Human
ccccgaggaggcggccuccucuucu

SEQ ID NO: 55974 - RNA, 19 nt, Human
ccgaggaggcggccuccuc

SEQ ID NO: 55975 - RNA, 22 nt, Human
cuggaguuguugggggcagccu

SEQ ID NO: 55976 - RNA, 18 nt, Human
cugguaguagcaaguucc

SEQ ID NO: 55977 - RNA, 18 nt, Human
gagcgcgggcaagccagc

SEQ ID NO: 55978 - RNA, 23 nt, Human
ggagaguccguggacggagugug

SEQ ID NO: 55979 - RNA, 21 nt, Human
ggcagggccuggaguuguugg

SEQ ID NO: 55980 - RNA, 25 nt, Human
gggcagggccuggaguuguuggggg

SEQ ID NO: 55981 - RNA, 19 nt, Human
ggggcagccugggaacacc

SEQ ID NO: 55982 - RNA, 18 nt, Human
uaaaucuuuggccaggga

SEQ ID NO: 55983 - RNA, 19 nt, Human
uaaaucuuuggccagggac

SEQ ID NO: 55984 - RNA, 18 nt, Human
ucuucaagagugggaggg

SEQ ID NO: 55985 - RNA, 22 nt, Human
ugaggcaccccugcguacccuc

SEQ ID NO: 55986 - RNA, 20 nt, Human
ugccggaaagggugauggac

SEQ ID NO: 55987 - RNA, 18 nt, Human
ugggagggggcagggccu

SEQ ID NO: 55988 - RNA, 19 nt, Human
ugggagggggcagggccug

SEQ ID NO: 55989 - RNA, 24 nt, Human
uucacagacgacaccacacaccac

SEQ ID NO: 55990 - RNA, 22 nt, Human
agaguccuccuagauaucaaaa

SEQ ID NO: 55991 - RNA, 18 nt, Human
agauaucaaaagcugugg

SEQ ID NO: 55992 - RNA, 23 nt, Human
agaucuuugguagcacacaauuu

SEQ ID NO: 55993 - RNA, 20 nt, Human
agcuaucuccuucccaaccu

SEQ ID NO: 55994 - RNA, 19 nt, Human
cuacuagaagcacuggagc

SEQ ID NO: 55995 - RNA, 24 nt, Human
gaagaguccuccuagauaucaaaa

SEQ ID NO: 55996 - RNA, 18 nt, Human
ggauuggaggaaaaguug

SEQ ID NO: 55997 - RNA, 18 nt, Human
gggagagaagaguccucc

SEQ ID NO: 55998 - RNA, 23 nt, Human
ggugacagguaguuugggagaga

SEQ ID NO: 55999 - RNA, 21 nt, Human
ucagcaguuguucuuuggaug

SEQ ID NO: 56000 - RNA, 18 nt, Human
uccaggauuggaggaaaa

SEQ ID NO: 56001 - RNA, 19 nt, Human
ugcagcuaucuccuuccca

SEQ ID NO: 56002 - RNA, 23 nt, Human
uggagcuaggcuggcgggcauug

SEQ ID NO: 56003 - RNA, 21 nt, Human
ugguugcagcuaucuccuucc

SEQ ID NO: 56004 - RNA, 22 nt, Human
uugcucccuuucagcccuccua

SEQ ID NO: 56005 - RNA, 19 nt, Human
uugguagcacacaauuuuu

SEQ ID NO: 56006 - RNA, 21 nt, Human
uugguugcagcuaucuccuuc

SEQ ID NO: 56007 - RNA, 21 nt, Human
uuucuuggguggguauucugg

SEQ ID NO: 56008 - RNA, 24 nt, Human
accauuuauuugcuguaugguaug

SEQ ID NO: 56009 - RNA, 22 nt, Human
agcaaugagagaggggaaggga

SEQ ID NO: 56010 - RNA, 21 nt, Human
aggaagacaaguuggugccag

SEQ ID NO: 56011 - RNA, 18 nt, Human
aggcaagaaggagagccc

SEQ ID NO: 56012 - RNA, 22 nt, Human
aggcaagaaggagagcccaggg

SEQ ID NO: 56013 - RNA, 24 nt, Human
agggggagacccagccauccuguu

SEQ ID NO: 56014 - RNA, 24 nt, Human
aguuggugccaggugaaggcaucu

SEQ ID NO: 56015 - RNA, 18 nt, Human
cagccgcagccacaagca

SEQ ID NO: 56016 - RNA, 20 nt, Human
ccaggugaaggcaucucugc

SEQ ID NO: 56017 - RNA, 22 nt, Human
ccauccuguucugacuucuagc

SEQ ID NO: 56018 - RNA, 21 nt, Human
ccgcagccacaagcacagcuc

SEQ ID NO: 56019 - RNA, 23 nt, Human
cuggaagagguagggggagaccc

SEQ ID NO: 56020 - RNA, 22 nt, Human
gacagggcaggcaagaaggaga

SEQ ID NO: 56021 - RNA, 18 nt, Human
gagacagggcaggcaaga

SEQ ID NO: 56022 - RNA, 23 nt, Human
ggagacagggcaggcaagaagga

SEQ ID NO: 56023 - RNA, 25 nt, Human
uagggggagacccagccauccuguu

SEQ ID NO: 56024 - RNA, 21 nt, Human
ucugcauagcuauuuggcccu

SEQ ID NO: 56025 - RNA, 23 nt, Human
ucugcauagcuauuuggcccugg

SEQ ID NO: 56026 - RNA, 19 nt, Human
ugacuucuagcaauuucuu

SEQ ID NO: 56027 - RNA, 20 nt, Human
ugagagaggggaagggaagu

SEQ ID NO: 56028 - RNA, 22 nt, Human
ugccaggugaaggcaucucugc

SEQ ID NO: 56029 - RNA, 19 nt, Human
uggccaugacuacaagcaa

SEQ ID NO: 56030 - RNA, 18 nt, Human
ugggaaaauugugggagc

SEQ ID NO: 56031 - RNA, 21 nt, Human
ugggaaaauugugggagcugg

SEQ ID NO: 56032 - RNA, 24 nt, Human
ugggagcuggaagagguaggggga

SEQ ID NO: 56033 - RNA, 24 nt, Human
ugggugcagauggcugggccaagg

SEQ ID NO: 56034 - RNA, 24 nt, Human
ugguauguacucaaggcaugaguc

SEQ ID NO: 56035 - RNA, 18 nt, Human
uugugggagcuggaagag

SEQ ID NO: 56036 - RNA, 24 nt, Human
uuuuuuuuuuuuuuuuuuuguuuu

SEQ ID NO: 56037 - RNA, 27 nt, Human
uuuuuuuuuuuuuuuuuuuuuuugggg

SEQ ID NO: 56038 - RNA, 22 nt, Human
aaaacaggcucgcucuggccca

SEQ ID NO: 56039 - RNA, 27 nt, Human
aaacacaacuuuauugaugaaacacaa

SEQ ID NO: 56040 - RNA, 27 nt, Human
aaccucguccuccuucccccaggccac

SEQ ID NO: 56041 - RNA, 20 nt, Human
aacugcaaauaucucaauau

SEQ ID NO: 56042 - RNA, 19 nt, Human
acaggcccucucgcccucu

SEQ ID NO: 56043 - RNA, 22 nt, Human
accaacugcaaauaucucaaua

SEQ ID NO: 56044 - RNA, 21 nt, Human
accucguccuccuucccccag

SEQ ID NO: 56045 - RNA, 18 nt, Human
agucuuagaauaacaaau

SEQ ID NO: 56046 - RNA, 25 nt, Human
agugcaaccggaccaaacgaagacu

SEQ ID NO: 56047 - RNA, 21 nt, Human
caaacgaagacuaggauuaga

SEQ ID NO: 56048 - RNA, 23 nt, Human
caaccggaccaaacgaagacuag

SEQ ID NO: 56049 - RNA, 20 nt, Human
caacuuuauugaugaaacac

SEQ ID NO: 56050 - RNA, 20 nt, Human
cacaggcccucucgcccucu

SEQ ID NO: 56051 - RNA, 23 nt, Human
cagaaccucguccuccuuccccc

SEQ ID NO: 56052 - RNA, 29 nt, Human
ccaaaauagcagcugaaaagaucucuuua

SEQ ID NO: 56053 - RNA, 19 nt, Human
cccaagaucugcagggauu

SEQ ID NO: 56054 - RNA, 23 nt, Human
ccccaggccacaggcccucucgc

SEQ ID NO: 56055 - RNA, 22 nt, Human
cgcucuggcccagagaagcgcg

SEQ ID NO: 56056 - RNA, 23 nt, Human
cucguccuccuucccccaggcca

SEQ ID NO: 56057 - RNA, 18 nt, Human
cugcugggauccaggcag

SEQ ID NO: 56058 - RNA, 21 nt, Human
cuuccugcuccaaggguugga

SEQ ID NO: 56059 - RNA, 21 nt, Human
gaaaaacaaagaauuuacaaa

SEQ ID NO: 56060 - RNA, 18 nt, Human
gaccaaacgaagacuagg

SEQ ID NO: 56061 - RNA, 22 nt, Human
gaggcagcucgacuugguucuu

SEQ ID NO: 56062 - RNA, 18 nt, Human
gcugggauccaggcagaa

SEQ ID NO: 56063 - RNA, 20 nt, Human
ggccccaagaucugcaggga

SEQ ID NO: 56064 - RNA, 20 nt, Human
guuggacuggccuccggccc

SEQ ID NO: 56065 - RNA, 19 nt, Human
guuucuuccugcuccaagg

SEQ ID NO: 56066 - RNA, 19 nt, Human
uaacccgagcacaaaacag

SEQ ID NO: 56067 - RNA, 19 nt, Human
uagaauaacaaauauaaac

SEQ ID NO: 56068 - RNA, 20 nt, Human
ucauccuaaacccaaccauu

SEQ ID NO: 56069 - RNA, 19 nt, Human
uccaaaauagcagcugaaa

SEQ ID NO: 56070 - RNA, 19 nt, Human
uccaaggguuggacuggcc

SEQ ID NO: 56071 - RNA, 19 nt, Human
ucccccaggccacaggccc

SEQ ID NO: 56072 - RNA, 21 nt, Human
uccggccccaagaucugcagg

SEQ ID NO: 56073 - RNA, 25 nt, Human
ugaaaaacaaagaauuuacaaauca

SEQ ID NO: 56074 - RNA, 20 nt, Human
ugcagggauuccaggcagac

SEQ ID NO: 56075 - RNA, 24 nt, Human
ugcaugauguauaaccaauucauu

SEQ ID NO: 56076 - RNA, 24 nt, Human
ugcuuaaaacacaacuuuauugau

SEQ ID NO: 56077 - RNA, 20 nt, Human
uggccuccggccccaagauc

SEQ ID NO: 56078 - RNA, 25 nt, Human
ugggacaaaucucuuaacccgagca

SEQ ID NO: 56079 - RNA, 21 nt, Human
uguauaaccaauucauuguca

SEQ ID NO: 56080 - RNA, 19 nt, Human
uucccaaauggcacagcgu

SEQ ID NO: 56081 - RNA, 23 nt, Human
aaaaggaagacagacccuccaaa

SEQ ID NO: 56082 - RNA, 20 nt, Human
aagcuggugacugucacaga

SEQ ID NO: 56083 - RNA, 19 nt, Human
acaaguucugcugaggcuu

SEQ ID NO: 56084 - RNA, 19 nt, Human
acagagcccaaaaggaaga

SEQ ID NO: 56085 - RNA, 24 nt, Human
acagagcccaaaaggaagacagac

SEQ ID NO: 56086 - RNA, 18 nt, Human
acagauaacaucacucug

SEQ ID NO: 56087 - RNA, 21 nt, Human
aggaagacagacccuccaaag

SEQ ID NO: 56088 - RNA, 18 nt, Human
aggccauucauaauggac

SEQ ID NO: 56089 - RNA, 23 nt, Human
agucuuugguggauaaauucaag

SEQ ID NO: 56090 - RNA, 23 nt, Human
auccuaaggacagacugaagagc

SEQ ID NO: 56091 - RNA, 24 nt, Human
auuuucuccuccuccuccucgccu

SEQ ID NO: 56092 - RNA, 22 nt, Human
cacagagcccaaaaggaagaca

SEQ ID NO: 56093 - RNA, 21 nt, Human
cagacugaagagcagaaauau

SEQ ID NO: 56094 - RNA, 21 nt, Human
ccacuguagcugcaguugcac

SEQ ID NO: 56095 - RNA, 19 nt, Human
cccaaaaggaagacagacc

SEQ ID NO: 56096 - RNA, 24 nt, Human
gaaagcccgaauuccuuuuccagg

SEQ ID NO: 56097 - RNA, 19 nt, Human
gagcccaaaaggaagacag

SEQ ID NO: 56098 - RNA, 19 nt, Human
gcacggcagcgagcugcgc

SEQ ID NO: 56099 - RNA, 21 nt, Human
ggacugaaaagacggggggug

SEQ ID NO: 56100 - RNA, 19 nt, Human
ggcugugugggccggaggu

SEQ ID NO: 56101 - RNA, 22 nt, Human
gggugaggcucuucaguuuagg

SEQ ID NO: 56102 - RNA, 21 nt, Human
ucaaaacaaauaauagaacag

SEQ ID NO: 56103 - RNA, 27 nt, Human
ucaaaacaaauaauagaacaguaggcc

SEQ ID NO: 56104 - RNA, 22 nt, Human
ucaagagcaguuugcuuuuuuc

SEQ ID NO: 56105 - RNA, 19 nt, Human
uccaagcagcacgauuaaa

SEQ ID NO: 56106 - RNA, 22 nt, Human
uccacacugcaaaaucaugaaa

SEQ ID NO: 56107 - RNA, 19 nt, Human
uccacuguagcugcaguug

SEQ ID NO: 56108 - RNA, 20 nt, Human
uccuccuccucgccuggguu

SEQ ID NO: 56109 - RNA, 19 nt, Human
ucuccuccuccuccucgcc

SEQ ID NO: 56110 - RNA, 24 nt, Human
ugaaauuucuucaagucuuuugac

SEQ ID NO: 56111 - RNA, 27 nt, Human
ugaggcucuucaguuuaggaggucccc

SEQ ID NO: 56112 - RNA, 21 nt, Human
ugaggcucuucaguuuaggcu

SEQ ID NO: 56113 - RNA, 20 nt, Human
uggaacuggauugcuuaagg

SEQ ID NO: 56114 - RNA, 22 nt, Human
uggugacugucacagauaacau

SEQ ID NO: 56115 - RNA, 21 nt, Human
uuagagcuucauccuaaggac

SEQ ID NO: 56116 - RNA, 26 nt, Human
uuuccacuguagcugcaguugcacag

SEQ ID NO: 56117 - RNA, 19 nt, Human
uuuuuuuuuuuuuuuuuaa

SEQ ID NO: 56118 - RNA, 27 nt, Human
aaaaagcaacaaacauguuuucagaac

SEQ ID NO: 56119 - RNA, 21 nt, Human
aagcaguucgccccuucuucu

SEQ ID NO: 56120 - RNA, 19 nt, Human
aauagcagggaccaaggaa

SEQ ID NO: 56121 - RNA, 20 nt, Human
aaugaaaaugacagaaggga

SEQ ID NO: 56122 - RNA, 21 nt, Human
acucaguuaaauaucagcauu

SEQ ID NO: 56123 - RNA, 24 nt, Human
acucccaacaaucuuuccaaucuc

SEQ ID NO: 56124 - RNA, 22 nt, Human
agaagggagcuuacucaugaug

SEQ ID NO: 56125 - RNA, 19 nt, Human
agaggcuuggacccacugc

SEQ ID NO: 56126 - RNA, 20 nt, Human
agcaguucgccccuucuucu

SEQ ID NO: 56127 - RNA, 23 nt, Human
agcugauuguggggguugaccuc

SEQ ID NO: 56128 - RNA, 18 nt, Human
aggaauagaguagucacu

SEQ ID NO: 56129 - RNA, 23 nt, Human
aggccggcccgcccucagggcag

SEQ ID NO: 56130 - RNA, 20 nt, Human
agggagcuuacucaugaugg

SEQ ID NO: 56131 - RNA, 21 nt, Human
agggauucgggacaauuuccu

SEQ ID NO: 56132 - RNA, 23 nt, Human
caacaaucuuuccaaucucuacu

SEQ ID NO: 56133 - RNA, 25 nt, Human
caaccuacagaaagacuggccaccc

SEQ ID NO: 56134 - RNA, 22 nt, Human
caagacaagcaguucgccccuu

SEQ ID NO: 56135 - RNA, 20 nt, Human
cacugucacuuaugcagaag

SEQ ID NO: 56136 - RNA, 20 nt, Human
cagggcaguggggagcuggu

SEQ ID NO: 56137 - RNA, 21 nt, Human
ccaacucaguuaaauaucagc

SEQ ID NO: 56138 - RNA, 23 nt, Human
ccacucccaacaaucuuuccaau

SEQ ID NO: 56139 - RNA, 26 nt, Human
ccacucccaacaaucuuuccaaucuc

SEQ ID NO: 56140 - RNA, 20 nt, Human
ccagcauuaacauacaauuu

SEQ ID NO: 56141 - RNA, 21 nt, Human
ccauauaaacaagguggagaa

SEQ ID NO: 56142 - RNA, 22 nt, Human
cccaacaaucuuuccaaucucu

SEQ ID NO: 56143 - RNA, 18 nt, Human
ccuuccucuucuuuugcc

SEQ ID NO: 56144 - RNA, 22 nt, Human
ccuucuccucuuccuuuuuccc

SEQ ID NO: 56145 - RNA, 20 nt, Human
cgagauaaaaagcaacaaac

SEQ ID NO: 56146 - RNA, 22 nt, Human
cgcuucaagcggagccaccugc

SEQ ID NO: 56147 - RNA, 24 nt, Human
cuccgccgcaggccggcccgcccu

SEQ ID NO: 56148 - RNA, 18 nt, Human
cuccucuuccuuuuuccc

SEQ ID NO: 56149 - RNA, 20 nt, Human
cuggccacccgggagaggcu

SEQ ID NO: 56150 - RNA, 20 nt, Human
cugggcucaagccuguggag

SEQ ID NO: 56151 - RNA, 23 nt, Human
cuucagccacuucaaggccacaa

SEQ ID NO: 56152 - RNA, 22 nt, Human
cuuccagcauuaacauacaauu

SEQ ID NO: 56153 - RNA, 22 nt, Human
cuuccuuuuucccuccgccgca

SEQ ID NO: 56154 - RNA, 22 nt, Human
cuucuccucuuccuuuuucccu

SEQ ID NO: 56155 - RNA, 22 nt, Human
gaaacuuccucccucgcuucaa

SEQ ID NO: 56156 - RNA, 24 nt, Human
gaaaggauuccuuuaccauauaaa

SEQ ID NO: 56157 - RNA, 24 nt, Human
gccccuucuucuuuucccuagugg

SEQ ID NO: 56158 - RNA, 19 nt, Human
ggcaguggggagcugguac

SEQ ID NO: 56159 - RNA, 22 nt, Human
ggcugggggaggaaggcugugg

SEQ ID NO: 56160 - RNA, 25 nt, Human
uaugcagaagaaauagcaaaauauu

SEQ ID NO: 56161 - RNA, 26 nt, Human
uaugcagaagaaauagcaaaauauuu

SEQ ID NO: 56162 - RNA, 21 nt, Human
uccaucuuaaaccuaaagacc

SEQ ID NO: 56163 - RNA, 19 nt, Human
ucccaacaaucuuuccaau

SEQ ID NO: 56164 - RNA, 25 nt, Human
ucccaacaaucuuuccaaucucuac

SEQ ID NO: 56165 - RNA, 18 nt, Human
uccccgacaauagcaggg

SEQ ID NO: 56166 - RNA, 19 nt, Human
uccuuccucuucuuuugcc

SEQ ID NO: 56167 - RNA, 21 nt, Human
ucuucuuuugccuggcguugu

SEQ ID NO: 56168 - RNA, 18 nt, Human
ugccuggcguugugccgc

SEQ ID NO: 56169 - RNA, 20 nt, Human
uggccacccgggagaggcuu

SEQ ID NO: 56170 - RNA, 22 nt, Human
ugggcucaagccuguggagggu

SEQ ID NO: 56171 - RNA, 21 nt, Human
uugugccgcaaccuacagaaa

SEQ ID NO: 56172 - RNA, 25 nt, Human
uuuauccaucuuaaaccuaaagacc

SEQ ID NO: 56173 - RNA, 23 nt, Human
uuuuuuuuuucccuuccagcauu

SEQ ID NO: 56174 - RNA, 22 nt, Human
uuuuuuuuuuuuuuuuucccuu

SEQ ID NO: 56175 - RNA, 22 nt, Human
aaaaccuuucagcacuguucac

SEQ ID NO: 56176 - RNA, 21 nt, Human
aacaaugacuuuucaccauuu

SEQ ID NO: 56177 - RNA, 23 nt, Human
agggaggggaagaaaacacagca

SEQ ID NO: 56178 - RNA, 21 nt, Human
caaaaaguucacaaaaccuuu

SEQ ID NO: 56179 - RNA, 22 nt, Human
caacaaugacuuuucaccauuu

SEQ ID NO: 56180 - RNA, 23 nt, Human
cacauuuguuuaggaaacaauuu

SEQ ID NO: 56181 - RNA, 22 nt, Human
cacuucuuuucuuguucagaga

SEQ ID NO: 56182 - RNA, 22 nt, Human
caguuugagagaauuuuaauga

SEQ ID NO: 56183 - RNA, 21 nt, Human
cauuuccuuuccugugguucc

SEQ ID NO: 56184 - RNA, 18 nt, Human
ccgcccgccggccgcugc

SEQ ID NO: 56185 - RNA, 21 nt, Human
ccgccgcccgccggccgcugc

SEQ ID NO: 56186 - RNA, 23 nt, Human
ccgccgcccgccggccgcugcuc

SEQ ID NO: 56187 - RNA, 20 nt, Human
ccgccggccgcugcucgugc

SEQ ID NO: 56188 - RNA, 22 nt, Human
gauucuucgcaauuagcaguuu

SEQ ID NO: 56189 - RNA, 22 nt, Human
ggaaacaauuuguuuaggaaua

SEQ ID NO: 56190 - RNA, 20 nt, Human
gggaagaaaacacagcacca

SEQ ID NO: 56191 - RNA, 27 nt, Human
uagcaaaaaguucacaaaaccuuucag

SEQ ID NO: 56192 - RNA, 22 nt, Human
uauacauagcaaaaaguucaca

SEQ ID NO: 56193 - RNA, 21 nt, Human
uccugugguuccaugguucuc

SEQ ID NO: 56194 - RNA, 19 nt, Human
uguagaaguauccccgccg

SEQ ID NO: 56195 - RNA, 20 nt, Human
uuccaugguucucaaaaugg

SEQ ID NO: 56196 - RNA, 20 nt, Human
uuccaugguucucaaaaugg

SEQ ID NO: 56197 - RNA, 21 nt, Human
uuccaugguucucaaaauggu

SEQ ID NO: 56198 - RNA, 21 nt, Human
uuuuguguagacaacaaugac

SEQ ID NO: 56199 - RNA, 18 nt, Human
uuuuuuuuuuuuuuuuug

SEQ ID NO: 56200 - RNA, 20 nt, Human
uuuuuuuuuuuuuuuuuggu

SEQ ID NO: 56201 - RNA, 19 nt, Human
aaaaaccuuaugcaaccac

SEQ ID NO: 56202 - RNA, 21 nt, Human
aaaauagguuggcacaaaaca

SEQ ID NO: 56203 - RNA, 18 nt, Human
aaacagaccuggaagcuc

SEQ ID NO: 56204 - RNA, 18 nt, Human
aagaggcucugaacaguc

SEQ ID NO: 56205 - RNA, 19 nt, Human
aauacagcuuuuuuggugg

SEQ ID NO: 56206 - RNA, 22 nt, Human
aaucuugccgcccccuccucac

SEQ ID NO: 56207 - RNA, 27 nt, Human
acaaaacaaaacgugacauuuggucuc

SEQ ID NO: 56208 - RNA, 23 nt, Human
acaacaaacaugcauaaaaaccu

SEQ ID NO: 56209 - RNA, 20 nt, Human
acacugcucuccgggcccag

SEQ ID NO: 56210 - RNA, 23 nt, Human
acagaccuggaagcucaggggcg

SEQ ID NO: 56211 - RNA, 22 nt, Human
acugucugccugcugaacuucu

SEQ ID NO: 56212 - RNA, 21 nt, Human
acuucugggcgugaaucccag

SEQ ID NO: 56213 - RNA, 19 nt, Human
agccucacccuucgcucuc

SEQ ID NO: 56214 - RNA, 22 nt, Human
agcgcccgcggcuuuggguggc

SEQ ID NO: 56215 - RNA, 24 nt, Human
aggccguuuacacugcucuccggg

SEQ ID NO: 56216 - RNA, 22 nt, Human
aucuugccgcccccuccucacc

SEQ ID NO: 56217 - RNA, 21 nt, Human
augaaacagaccuggaagcuc

SEQ ID NO: 56218 - RNA, 18 nt, Human
caagcacacugggcucac

SEQ ID NO: 56219 - RNA, 22 nt, Human
caaucucugcaacuuuuaaggc

SEQ ID NO: 56220 - RNA, 20 nt, Human
cacccuucgcucuccccgag

SEQ ID NO: 56221 - RNA, 21 nt, Human
cacucaagcacacugggcuca

SEQ ID NO: 56222 - RNA, 21 nt, Human
cagagggcggccggaaagcac

SEQ ID NO: 56223 - RNA, 19 nt, Human
cagcccccgcgcugcgcaa

SEQ ID NO: 56224 - RNA, 23 nt, Human
cagccuccaaucucugcaacuuu

SEQ ID NO: 56225 - RNA, 23 nt, Human
cagcggcuccuuccaccugaucu

SEQ ID NO: 56226 - RNA, 24 nt, Human
cauaaaaaccuuaugcaaccacau

SEQ ID NO: 56227 - RNA, 26 nt, Human
ccagcggcuccuuccaccugaucucc

SEQ ID NO: 56228 - RNA, 25 nt, Human
ccagcugcuaccaccgcugccgccc

SEQ ID NO: 56229 - RNA, 19 nt, Human
cccagcggcuccuuccacc

SEQ ID NO: 56230 - RNA, 22 nt, Human
cccccaacugcacggaggcgag

SEQ ID NO: 56231 - RNA, 18 nt, Human
ccggcgccucggcuccuc

SEQ ID NO: 56232 - RNA, 18 nt, Human
ccgggcccagccucaccc

SEQ ID NO: 56233 - RNA, 21 nt, Human
ccucacccuucgcucuccccg

SEQ ID NO: 56234 - RNA, 24 nt, Human
ccuccaagcucuucugcccggucu

SEQ ID NO: 56235 - RNA, 22 nt, Human
ccugccccccgcagucggagcu

SEQ ID NO: 56236 - RNA, 20 nt, Human
ccuugagccucccgcucucc

SEQ ID NO: 56237 - RNA, 22 nt, Human
cgaaagaauaggaugaacccau

SEQ ID NO: 56238 - RNA, 21 nt, Human
cgaguccagagacacucaagc

SEQ ID NO: 56239 - RNA, 20 nt, Human
cgcccgaaaucuugccgccc

SEQ ID NO: 56240 - RNA, 21 nt, Human
cggagcuggggucuguccccu

SEQ ID NO: 56241 - RNA, 19 nt, Human
cgucuguagcucgcugcgc

SEQ ID NO: 56242 - RNA, 21 nt, Human
cucaagcuaucucuccgcugc

SEQ ID NO: 56243 - RNA, 21 nt, Human
cucacccaucaucagcgcccg

SEQ ID NO: 56244 - RNA, 22 nt, Human
cucacccaucaucagcgcccgc

SEQ ID NO: 56245 - RNA, 18 nt, Human
cugcccggucugggcggg

SEQ ID NO: 56246 - RNA, 19 nt, Human
cugcgggaaggcuucggac

SEQ ID NO: 56247 - RNA, 22 nt, Human
gaacggcggcucccagcugcug

SEQ ID NO: 56248 - RNA, 21 nt, Human
gaacuucugggcgugaauccc

SEQ ID NO: 56249 - RNA, 23 nt, Human
gggcggccggaaagcaccucggu

SEQ ID NO: 56250 - RNA, 22 nt, Human
gguacuucaaaauagguuggca

SEQ ID NO: 56251 - RNA, 20 nt, Human
ggucugggcgggaaccgagg

SEQ ID NO: 56252 - RNA, 18 nt, Human
gguggccgaccagagggc

SEQ ID NO: 56253 - RNA, 24 nt, Human
gugguacuucaaaauagguuggca

SEQ ID NO: 56254 - RNA, 21 nt, Human
uaaaaaccuuaugcaaccaca

SEQ ID NO: 56255 - RNA, 23 nt, Human
uaaaugaaacagaccuggaagcu

SEQ ID NO: 56256 - RNA, 23 nt, Human
uacaacaaacaugcauaaaaacc

SEQ ID NO: 56257 - RNA, 24 nt, Human
uacacugcucuccgggcccagccu

SEQ ID NO: 56258 - RNA, 26 nt, Human
uacacugcucuccgggcccagccuca

SEQ ID NO: 56259 - RNA, 20 nt, Human
ucacuggcugggaccuugag

SEQ ID NO: 56260 - RNA, 22 nt, Human
ucagcgcccgcggcuuugggug

SEQ ID NO: 56261 - RNA, 22 nt, Human
ucucaccggcgccucggcuccu

SEQ ID NO: 56262 - RNA, 21 nt, Human
ucucggggcagccuccaaucu

SEQ ID NO: 56263 - RNA, 19 nt, Human
ucucucuccuccacggucu

SEQ ID NO: 56264 - RNA, 21 nt, Human
ucucugcaacuuuuaaggcug

SEQ ID NO: 56265 - RNA, 22 nt, Human
ucugccugcugaacuucugggc

SEQ ID NO: 56266 - RNA, 21 nt, Human
ucugggcgugaaucccagccc

SEQ ID NO: 56267 - RNA, 21 nt, Human
ucuucugcccggucugggcgg

SEQ ID NO: 56268 - RNA, 23 nt, Human
ugaacaguccuugguacccagcg

SEQ ID NO: 56269 - RNA, 21 nt, Human
uucagggcaggggcgcccgaa

SEQ ID NO: 56270 - RNA, 19 nt, Human
uugccgcccccuccucacc

SEQ ID NO: 56271 - RNA, 18 nt, Human
uuugcagcguccuugcuc

SEQ ID NO: 56272 - RNA, 23 nt, Human
uuuggcuccuccaagcucuucug

SEQ ID NO: 56273 - RNA, 24 nt, Human
uuuuggcuccuccaagcucuucug

SEQ ID NO: 56274 - RNA, 21 nt, Human
aaccagacucacaaaaguaag

SEQ ID NO: 56275 - RNA, 21 nt, Human
agaggaggaggaggagggggg

SEQ ID NO: 56276 - RNA, 21 nt, Human
aggaggaggagggggggaggg

SEQ ID NO: 56277 - RNA, 21 nt, Human
aggaggagggggggagggagg

SEQ ID NO: 56278 - RNA, 19 nt, Human
aggagggggggagggaggg

SEQ ID NO: 56279 - RNA, 22 nt, Human
aggagggggggagggaggggaa

SEQ ID NO: 56280 - RNA, 26 nt, Human
aguauaaaaacacauacaaaaaggga

SEQ ID NO: 56281 - RNA, 21 nt, Human
caccacuuuguuccagacucu

SEQ ID NO: 56282 - RNA, 19 nt, Human
cacuuuguuccagacucuu

SEQ ID NO: 56283 - RNA, 22 nt, Human
cagaggaggaggaggagggggg

SEQ ID NO: 56284 - RNA, 24 nt, Human
cccagcuuaggcgcagugccgccc

SEQ ID NO: 56285 - RNA, 25 nt, Human
cggcagaggaggaggaggagggggg

SEQ ID NO: 56286 - RNA, 23 nt, Human
gaggaggaggagggggggaggga

SEQ ID NO: 56287 - RNA, 22 nt, Human
ggaggaggaggagggggggagg

SEQ ID NO: 56288 - RNA, 23 nt, Human
ggaggaggaggagggggggaggg

SEQ ID NO: 56289 - RNA, 22 nt, Human
ggagggaggggaaggggagagc

SEQ ID NO: 56290 - RNA, 18 nt, Human
ggagggggggagggaggg

SEQ ID NO: 56291 - RNA, 23 nt, Human
ggagggggggagggaggggaagg

SEQ ID NO: 56292 - RNA, 22 nt, Human
ggcagaggaggaggaggagggg

SEQ ID NO: 56293 - RNA, 25 nt, Human
gggcggcagaggaggaggaggaggg

SEQ ID NO: 56294 - RNA, 20 nt, Human
gggggagggaggggaagggg

SEQ ID NO: 56295 - RNA, 22 nt, Human
uacacauggacaaagaauaagc

SEQ ID NO: 56296 - RNA, 20 nt, Human
uucucuagguucauaaaaua

SEQ ID NO: 56297 - RNA, 23 nt, Human
aaaaaggaucuagucuuugcaga

SEQ ID NO: 56298 - RNA, 18 nt, Human
aagauagaaaugucaguc

SEQ ID NO: 56299 - RNA, 24 nt, Human
acauagucacacucauuuccaugu

SEQ ID NO: 56300 - RNA, 19 nt, Human
acuaugcggucugcaaagc

SEQ ID NO: 56301 - RNA, 23 nt, Human
cagcagcuuaggcgaggggagcc

SEQ ID NO: 56302 - RNA, 22 nt, Human
ccauguugucuguggcugccuu

SEQ ID NO: 56303 - RNA, 24 nt, Human
cccccagcagcuuaggcgagggga

SEQ ID NO: 56304 - RNA, 21 nt, Human
ggagagcugaguaguugagac

SEQ ID NO: 56305 - RNA, 19 nt, Human
ggggguuuaacugggggag

SEQ ID NO: 56306 - RNA, 24 nt, Human
guugucuguggcugccuucaugcu

SEQ ID NO: 56307 - RNA, 21 nt, Human
uacugcuccccugggcuagug

SEQ ID NO: 56308 - RNA, 22 nt, Human
uaggggguuuaacugggggagg

SEQ ID NO: 56309 - RNA, 23 nt, Human
ugaaauucaagauagaaauguca

SEQ ID NO: 56310 - RNA, 20 nt, Human
ugcugcagcaggagagcuga

SEQ ID NO: 56311 - RNA, 23 nt, Human
uggcugccuucaugcugcagcag

SEQ ID NO: 56312 - RNA, 24 nt, Human
ugucuguggcugccuucaugcugc

SEQ ID NO: 56313 - RNA, 22 nt, Human
uuccauguugucuguggcugcc

SEQ ID NO: 56314 - RNA, 18 nt, Human
agcccagcugguggugag

SEQ ID NO: 56315 - RNA, 21 nt, Human
aggcaggcaagagaagccagg

SEQ ID NO: 56316 - RNA, 24 nt, Human
caagaggggcacucagucccagac

SEQ ID NO: 56317 - RNA, 22 nt, Human
caaggcaggcaagagaagccag

SEQ ID NO: 56318 - RNA, 25 nt, Human
cacacgaaggcccaaggcaggcaag

SEQ ID NO: 56319 - RNA, 18 nt, Human
caccguggagggccacac

SEQ ID NO: 56320 - RNA, 23 nt, Human
ccagacaccguggagggccacac

SEQ ID NO: 56321 - RNA, 19 nt, Human
ccugccagccaaauucugg

SEQ ID NO: 56322 - RNA, 21 nt, Human
cugcucuucaggaggcaagag

SEQ ID NO: 56323 - RNA, 22 nt, Human
gaaggcccaaggcaggcaagag

SEQ ID NO: 56324 - RNA, 20 nt, Human
gaggggcacucagucccaga

SEQ ID NO: 56325 - RNA, 20 nt, Human
ggcccaaggcaggcaagaga

SEQ ID NO: 56326 - RNA, 21 nt, Human
ggcccagcggagcccagcugg

SEQ ID NO: 56327 - RNA, 19 nt, Human
guagggcacagaaugggga

SEQ ID NO: 56328 - RNA, 19 nt, Human
ucuggaaaagcugcugccc

SEQ ID NO: 56329 - RNA, 22 nt, Human
ucuggaaaagcugcugcccuug

SEQ ID NO: 56330 - RNA, 18 nt, Human
ugacuaggccugccagcc

SEQ ID NO: 56331 - RNA, 18 nt, Human
ugcccuugguggccgggg

SEQ ID NO: 56332 - RNA, 18 nt, Human
uggggugacuaggccugc

SEQ ID NO: 56333 - RNA, 22 nt, Human
uggugagguggcgagguggggu

SEQ ID NO: 56334 - RNA, 18 nt, Human
ugguggccggggugggug

SEQ ID NO: 56335 - RNA, 23 nt, Human
ugguggccggggugggugccggg

SEQ ID NO: 56336 - RNA, 20 nt, Human
ugguguuuuggucucugagg

SEQ ID NO: 56337 - RNA, 20 nt, Human
uugcuuguuuguuuuguuuu

SEQ ID NO: 56338 - RNA, 20 nt, Human
uuuugcuuguuuguuuuguu

SEQ ID NO: 56339 - RNA, 22 nt, Human
aaaggaggaaggaaggaaagag

SEQ ID NO: 56340 - RNA, 21 nt, Human
aacaacaacaaaaaaaucaua

SEQ ID NO: 56341 - RNA, 20 nt, Human
aacauagugaggccccgucu

SEQ ID NO: 56342 - RNA, 21 nt, Human
aacauagugaggccccgucuc

SEQ ID NO: 56343 - RNA, 19 nt, Human
aaccacgaaggggucagcu

SEQ ID NO: 56344 - RNA, 19 nt, Human
aaugaagaaagaggaagag

SEQ ID NO: 56345 - RNA, 19 nt, Human
accacugcacuccagccug

SEQ ID NO: 56346 - RNA, 18 nt, Human
acugcacuccagccuggg

SEQ ID NO: 56347 - RNA, 19 nt, Human
acugggugcagagaccaug

SEQ ID NO: 56348 - RNA, 25 nt, Human
acuuuuuauuauuguuaaacucaau

SEQ ID NO: 56349 - RNA, 23 nt, Human
agaggaaggaagauaggaaagga

SEQ ID NO: 56350 - RNA, 18 nt, Human
agccguggugauggcacc

SEQ ID NO: 56351 - RNA, 20 nt, Human
agccuaggcaacauagugag

SEQ ID NO: 56352 - RNA, 24 nt, Human
agccugggugucaaagugagacuc

SEQ ID NO: 56353 - RNA, 24 nt, Human
agccuguagucccagcuacucagg

SEQ ID NO: 56354 - RNA, 20 nt, Human
agcguaaaacaacuuuuuau

SEQ ID NO: 56355 - RNA, 24 nt, Human
agcuacucaggaggcugagguggg

SEQ ID NO: 56356 - RNA, 23 nt, Human
agcugggcaugauggcaugagcc

SEQ ID NO: 56357 - RNA, 24 nt, Human
aggaaggaagauaggaaaggagga

SEQ ID NO: 56358 - RNA, 18 nt, Human
aggaaggaaggaaagagg

SEQ ID NO: 56359 - RNA, 19 nt, Human
aggaaggaaggaaagagga

SEQ ID NO: 56360 - RNA, 24 nt, Human
aggcugaggugggaggaucauuug

SEQ ID NO: 56361 - RNA, 24 nt, Human
aggugccccucuagggaggguggg

SEQ ID NO: 56362 - RNA, 24 nt, Human
auccuauuuccagccuaggcaaca

SEQ ID NO: 56363 - RNA, 20 nt, Human
caccacugcacuccagccug

SEQ ID NO: 56364 - RNA, 26 nt, Human
caccacugcacuccagccuggguguc

SEQ ID NO: 56365 - RNA, 22 nt, Human
cacuccagccugggugucaaag

SEQ ID NO: 56366 - RNA, 22 nt, Human
cacuccagccugggugucaaag

SEQ ID NO: 56367 - RNA, 24 nt, Human
cacuccagccugggugucaaagug

SEQ ID NO: 56368 - RNA, 18 nt, Human
cacugcacuccagccugg

SEQ ID NO: 56369 - RNA, 19 nt, Human
cacugcacuccagccuggg

SEQ ID NO: 56370 - RNA, 21 nt, Human
cacugcacuccagccugggug

SEQ ID NO: 56371 - RNA, 21 nt, Human
cacugcacuccagccugggug

SEQ ID NO: 56372 - RNA, 23 nt, Human
cacugcacuccagccuggguguc

SEQ ID NO: 56373 - RNA, 23 nt, Human
cacugcacuccagccuggguguc

SEQ ID NO: 56374 - RNA, 21 nt, Human
cagcuacucaggaggcugagg

SEQ ID NO: 56375 - RNA, 24 nt, Human
cagcuacucaggaggcugaggugg

SEQ ID NO: 56376 - RNA, 20 nt, Human
ccacugcacuccagccuggg

SEQ ID NO: 56377 - RNA, 20 nt, Human
ccacugcacuccagccuggg

SEQ ID NO: 56378 - RNA, 20 nt, Human
ccacugcacuccagccuggg

SEQ ID NO: 56379 - RNA, 20 nt, Human
ccacugcacuccagccuggg

SEQ ID NO: 56380 - RNA, 21 nt, Human
ccacugcacuccagccugggu

SEQ ID NO: 56381 - RNA, 21 nt, Human
ccacugcacuccagccugggu

SEQ ID NO: 56382 - RNA, 22 nt, Human
ccacugcacuccagccugggug

SEQ ID NO: 56383 - RNA, 23 nt, Human
ccacugcacuccagccugggugu

SEQ ID NO: 56384 - RNA, 19 nt, Human
cccgucuccacgaaaauaa

SEQ ID NO: 56385 - RNA, 21 nt, Human
ccuauuuccagccuaggcaac

SEQ ID NO: 56386 - RNA, 22 nt, Human
ccugggugucaaagugagacuc

SEQ ID NO: 56387 - RNA, 19 nt, Human
ccuguagucccagcuacuc

SEQ ID NO: 56388 - RNA, 21 nt, Human
ccuguagucccagcuacucag

SEQ ID NO: 56389 - RNA, 22 nt, Human
ccuguagucccagcuacucagg

SEQ ID NO: 56390 - RNA, 18 nt, Human
gaaagaggaagagagaga

SEQ ID NO: 56391 - RNA, 24 nt, Human
gaagauaggaaaggaggaaggaag

SEQ ID NO: 56392 - RNA, 21 nt, Human
gaaggaaggaaagaggaguaa

SEQ ID NO: 56393 - RNA, 25 nt, Human
gacucugucuuaacaacaacaaaaa

SEQ ID NO: 56394 - RNA, 24 nt, Human
gagaggaaggaagauaggaaagga

SEQ ID NO: 56395 - RNA, 24 nt, Human
gaucauuugagcccaggacgcuga

SEQ ID NO: 56396 - RNA, 24 nt, Human
gcccaggacgcugaggcugcagug

SEQ ID NO: 56397 - RNA, 19 nt, Human
gcugaaauaaccaaagggu

SEQ ID NO: 56398 - RNA, 19 nt, Human
ggaaaggaggaaggaagga

SEQ ID NO: 56399 - RNA, 24 nt, Human
ggaagagggugggacuugggaggg

SEQ ID NO: 56400 - RNA, 21 nt, Human
gggaagagggugggacuuggg

SEQ ID NO: 56401 - RNA, 21 nt, Human
gggcagggcuauaaccacgaa

SEQ ID NO: 56402 - RNA, 20 nt, Human
gggcugaaauaaccaaaggg

SEQ ID NO: 56403 - RNA, 21 nt, Human
gggugggacuugggagggcag

SEQ ID NO: 56404 - RNA, 24 nt, Human
ggugauggcaccacugcacuccag

SEQ ID NO: 56405 - RNA, 19 nt, Human
ggugggacuugggagggca

SEQ ID NO: 56406 - RNA, 23 nt, Human
ggugggacuugggagggcagggc

SEQ ID NO: 56407 - RNA, 20 nt, Human
gucagcuuguggcuugggug

SEQ ID NO: 56408 - RNA, 22 nt, Human
gugccccucuagggaggguggg

SEQ ID NO: 56409 - RNA, 22 nt, Human
gugucaaagugagacucugucu

SEQ ID NO: 56410 - RNA, 24 nt, Human
gugucaaagugagacucugucuua

SEQ ID NO: 56411 - RNA, 20 nt, Human
uaaaacaacuuuuuauuauu

SEQ ID NO: 56412 - RNA, 19 nt, Human
uaaaagguguggaguaaua

SEQ ID NO: 56413 - RNA, 22 nt, Human
uaauauguauuauaucccccua

SEQ ID NO: 56414 - RNA, 18 nt, Human
uagcguaaaacaacuuuu

SEQ ID NO: 56415 - RNA, 23 nt, Human
uccagccugggugucaaagugag

SEQ ID NO: 56416 - RNA, 24 nt, Human
uccagccugggugucaaagugaga

SEQ ID NO: 56417 - RNA, 21 nt, Human
uccuaguucuuuuccaucuuu

SEQ ID NO: 56418 - RNA, 18 nt, Human
ucuagucuugaaaugauu

SEQ ID NO: 56419 - RNA, 22 nt, Human
ugaaugaagaaagaggaagaga

SEQ ID NO: 56420 - RNA, 23 nt, Human
ugagccuguagucccagcuacuc

SEQ ID NO: 56421 - RNA, 20 nt, Human
ugaggugggaggaucauuug

SEQ ID NO: 56422 - RNA, 23 nt, Human
ugaggugggaggaucauuugagc

SEQ ID NO: 56423 - RNA, 24 nt, Human
ugaggugggaggaucauuugagcc

SEQ ID NO: 56424 - RNA, 24 nt, Human
ugauggcaugagccuguaguccca

SEQ ID NO: 56425 - RNA, 20 nt, Human
uggcaccacugcacuccagc

SEQ ID NO: 56426 - RNA, 19 nt, Human
ugggacaugggaagagggu

SEQ ID NO: 56427 - RNA, 20 nt, Human
ugggacuugggagggcaggg

SEQ ID NO: 56428 - RNA, 18 nt, Human
ugucaaagugagacucug

SEQ ID NO: 56429 - RNA, 21 nt, Human
uguuaaacucaauuuggguuc

SEQ ID NO: 56430 - RNA, 18 nt, Human
uuagcugggcaugauggc

SEQ ID NO: 56431 - RNA, 23 nt, Human
uuauauaauuguggcuauuugcc

SEQ ID NO: 56432 - RNA, 19 nt, Human
aaaugcugagcugggugug

SEQ ID NO: 56433 - RNA, 24 nt, Human
aagaauaaauggaaagguacuggc

SEQ ID NO: 56434 - RNA, 24 nt, Human
aggcaggcuggaguccaucuggcu

SEQ ID NO: 56435 - RNA, 23 nt, Human
cagaaaauaaucaucccaugucu

SEQ ID NO: 56436 - RNA, 20 nt, Human
cagccugccaggcaggcugg

SEQ ID NO: 56437 - RNA, 19 nt, Human
cagcgagcgccgggagccu

SEQ ID NO: 56438 - RNA, 21 nt, Human
cagcgagcgccgggagccucg

SEQ ID NO: 56439 - RNA, 27 nt, Human
caugucuccaacaagaauagacaucua

SEQ ID NO: 56440 - RNA, 19 nt, Human
cgggccgcgggagcagcga

SEQ ID NO: 56441 - RNA, 21 nt, Human
cuccaacaagaauagacaucu

SEQ ID NO: 56442 - RNA, 21 nt, Human
cugaagaucaaagaauaaaug

SEQ ID NO: 56443 - RNA, 20 nt, Human
cuggggcagcuggccuuccc

SEQ ID NO: 56444 - RNA, 20 nt, Human
gaaaugcugagcugggugug

SEQ ID NO: 56445 - RNA, 23 nt, Human
gcuggaguccaucuggcuggggc

SEQ ID NO: 56446 - RNA, 20 nt, Human
ggacaggacgcugugcaguc

SEQ ID NO: 56447 - RNA, 19 nt, Human
ggguaccuacuaugugcaa

SEQ ID NO: 56448 - RNA, 22 nt, Human
gguguggaaaugcugagcuggg

SEQ ID NO: 56449 - RNA, 19 nt, Human
gugauuugcuguugcugcu

SEQ ID NO: 56450 - RNA, 21 nt, Human
ucaguggucgugauuugcugu

SEQ ID NO: 56451 - RNA, 21 nt, Human
uccaacaagaauagacaucua

SEQ ID NO: 56452 - RNA, 22 nt, Human
ucccugaagaucaaagaauaaa

SEQ ID NO: 56453 - RNA, 19 nt, Human
uggaaagguacuggccucg

SEQ ID NO: 56454 - RNA, 24 nt, Human
ugguguggaaaugcugagcugggg

SEQ ID NO: 56455 - RNA, 23 nt, Human
uguggacaggacgcugugcaguc

SEQ ID NO: 56456 - RNA, 22 nt, Human
uugcuguugcugcuuggugugg

SEQ ID NO: 56457 - RNA, 21 nt, Human
aaacaaacaaaaugcauggga

SEQ ID NO: 56458 - RNA, 27 nt, Human
aaacaaacaaaaugcaugggaauagca

SEQ ID NO: 56459 - RNA, 23 nt, Human
aaacacaaaccuggucacaaaac

SEQ ID NO: 56460 - RNA, 24 nt, Human
aaacacaaaccuggucacaaaaca

SEQ ID NO: 56461 - RNA, 23 nt, Human
aacaccaaccccauauucagcag

SEQ ID NO: 56462 - RNA, 20 nt, Human
aaccccauauucagcagaga

SEQ ID NO: 56463 - RNA, 26 nt, Human
aagaaaacacaaaccuggucacaaaa

SEQ ID NO: 56464 - RNA, 18 nt, Human
agaacaccaaccccauau

SEQ ID NO: 56465 - RNA, 21 nt, Human
agagaggacugcucugccucc

SEQ ID NO: 56466 - RNA, 25 nt, Human
agagcugaauuaugaugacuuguag

SEQ ID NO: 56467 - RNA, 19 nt, Human
agugaagaaacaaacaaaa

SEQ ID NO: 56468 - RNA, 18 nt, Human
auagcaaauuuggggcca

SEQ ID NO: 56469 - RNA, 21 nt, Human
caaacaaaaugcaugggaaua

SEQ ID NO: 56470 - RNA, 21 nt, Human
caaccccauauucagcagaga

SEQ ID NO: 56471 - RNA, 22 nt, Human
cagaaugcucucaagagcugaa

SEQ ID NO: 56472 - RNA, 24 nt, Human
ccaauagauuuacagccaucuaaa

SEQ ID NO: 56473 - RNA, 21 nt, Human
ccuccagcugcacaaccugcc

SEQ ID NO: 56474 - RNA, 26 nt, Human
gagaacaccaaccccauauucagcag

SEQ ID NO: 56475 - RNA, 22 nt, Human
ggaaaagcaagguuaacucaag

SEQ ID NO: 56476 - RNA, 21 nt, Human
guuugcuucaggcuccccaga

SEQ ID NO: 56477 - RNA, 19 nt, Human
uauuuuaagaaaacacaaa

SEQ ID NO: 56478 - RNA, 22 nt, Human
ucugcauuuuauuuuaagaaaa

SEQ ID NO: 56479 - RNA, 21 nt, Human
ugaagaaacaaacaaaaugca

SEQ ID NO: 56480 - RNA, 19 nt, Human
ugacaugacaucauuuugu

SEQ ID NO: 56481 - RNA, 23 nt, Human
ugcaugggaauagcaaauuuggg

SEQ ID NO: 56482 - RNA, 18 nt, Human
ugcuucaggcuccccaga

SEQ ID NO: 56483 - RNA, 18 nt, Human
ugggaauagcaaauuugg

SEQ ID NO: 56484 - RNA, 25 nt, Human
aaacaauaggauaaaggucuaaagc

SEQ ID NO: 56485 - RNA, 20 nt, Human
acaauugcaaaaucaacuug

SEQ ID NO: 56486 - RNA, 24 nt, Human
agauuauguuagaauacaagauug

SEQ ID NO: 56487 - RNA, 22 nt, Human
aggauaaaggucuaaagccuug

SEQ ID NO: 56488 - RNA, 23 nt, Human
auaucauuauugcuagccccaaa

SEQ ID NO: 56489 - RNA, 24 nt, Human
caauaggauaaaggucuaaagccu

SEQ ID NO: 56490 - RNA, 20 nt, Human
cauagcaggcauuugccucc

SEQ ID NO: 56491 - RNA, 22 nt, Human
ccccgcgcagggcagccacucc

SEQ ID NO: 56492 - RNA, 19 nt, Human
ccucaauaaacaauaggau

SEQ ID NO: 56493 - RNA, 24 nt, Human
cgcgugggugggugcgugcgugcg

SEQ ID NO: 56494 - RNA, 23 nt, Human
cuagccccaaaaagaguugcaaa

SEQ ID NO: 56495 - RNA, 21 nt, Human
gcacaauccuucugcccaaag

SEQ ID NO: 56496 - RNA, 23 nt, Human
gcacaauccuucugcccaaagcc

SEQ ID NO: 56497 - RNA, 22 nt, Human
ggaguugacaaucugcacaauc

SEQ ID NO: 56498 - RNA, 20 nt, Human
guaauaguuaaaacacauac

SEQ ID NO: 56499 - RNA, 19 nt, Human
uaaaacacauacagacaac

SEQ ID NO: 56500 - RNA, 18 nt, Human
uaaaggucuaaagccuug

SEQ ID NO: 56501 - RNA, 21 nt, Human
uacauguaaauuguggaguau

SEQ ID NO: 56502 - RNA, 21 nt, Human
uauugcuagccccaaaaagag

SEQ ID NO: 56503 - RNA, 24 nt, Human
ucacauagcaggcauuugccuccc

SEQ ID NO: 56504 - RNA, 22 nt, Human
uccccgcgcagggcagccacuc

SEQ ID NO: 56505 - RNA, 23 nt, Human
ucccuaacaugcacuguaauagu

SEQ ID NO: 56506 - RNA, 25 nt, Human
uccucaauaaacaauaggauaaagg

SEQ ID NO: 56507 - RNA, 21 nt, Human
ugaguguccccgcgcagggca

SEQ ID NO: 56508 - RNA, 21 nt, Human
ugcacaauccuucugcccaaa

SEQ ID NO: 56509 - RNA, 24 nt, Human
aagcgcuccuuggaucuggugacc

SEQ ID NO: 56510 - RNA, 19 nt, Human
accuugaggaggcagggga

SEQ ID NO: 56511 - RNA, 19 nt, Human
aggagggaggcgaaguggg

SEQ ID NO: 56512 - RNA, 19 nt, Human
aggagggaggcgaaguggg

SEQ ID NO: 56513 - RNA, 19 nt, Human
aggauagaggcaggguggg

SEQ ID NO: 56514 - RNA, 24 nt, Human
aggcagccgcauggcacaaaucug

SEQ ID NO: 56515 - RNA, 20 nt, Human
aggcaggguggggguugggu

SEQ ID NO: 56516 - RNA, 22 nt, Human
aggcaggguggggguugggugg

SEQ ID NO: 56517 - RNA, 18 nt, Human
agggaggcgaagugggga

SEQ ID NO: 56518 - RNA, 24 nt, Human
cagagcuccucaagcgcuccuugg

SEQ ID NO: 56519 - RNA, 23 nt, Human
cagcaggagggaggcgaaguggg

SEQ ID NO: 56520 - RNA, 23 nt, Human
cagcucccagggcgcccugggcu

SEQ ID NO: 56521 - RNA, 19 nt, Human
caggguggggguugggugg

SEQ ID NO: 56522 - RNA, 19 nt, Human
caggguggggguugggugg

SEQ ID NO: 56523 - RNA, 21 nt, Human
ccagaugucccgggagggccc

SEQ ID NO: 56524 - RNA, 19 nt, Human
ccccugggaauccccgauc

SEQ ID NO: 56525 - RNA, 19 nt, Human
cccugaaggggaugcggag

SEQ ID NO: 56526 - RNA, 20 nt, Human
cccuguacccagagcuccuc

SEQ ID NO: 56527 - RNA, 18 nt, Human
ccugaaggggaugcggag

SEQ ID NO: 56528 - RNA, 21 nt, Human
ccugauccacccaaguccuug

SEQ ID NO: 56529 - RNA, 22 nt, Human
ccugcucccugaaggggaugcg

SEQ ID NO: 56530 - RNA, 24 nt, Human
ccugcucccugaaggggaugcgga

SEQ ID NO: 56531 - RNA, 20 nt, Human
cggcucaggacggggaacag

SEQ ID NO: 56532 - RNA, 21 nt, Human
cgguggggcacgcggucuggg

SEQ ID NO: 56533 - RNA, 24 nt, Human
cucaggacggggaacagggcagga

SEQ ID NO: 56534 - RNA, 23 nt, Human
gagaccuugaggaggcaggggag

SEQ ID NO: 56535 - RNA, 23 nt, Human
gagaccuugaggaggcaggggag

SEQ ID NO: 56536 - RNA, 21 nt, Human
gaggaggcaggggagucuucc

SEQ ID NO: 56537 - RNA, 19 nt, Human
gaggcaggggagucuuccu

SEQ ID NO: 56538 - RNA, 18 nt, Human
gcgcccugggcuccugcu

SEQ ID NO: 56539 - RNA, 22 nt, Human
ggcaggaagcaucugaguggcu

SEQ ID NO: 56540 - RNA, 22 nt, Human
gggaauccccgauccaguagcc

SEQ ID NO: 56541 - RNA, 20 nt, Human
gggagggcccaugggcucug

SEQ ID NO: 56542 - RNA, 24 nt, Human
gggcagcaggagggaggcgaagug

SEQ ID NO: 56543 - RNA, 25 nt, Human
ggggaacagggcaggacgcccggag

SEQ ID NO: 56544 - RNA, 18 nt, Human
ggggagacagcagaggac

SEQ ID NO: 56545 - RNA, 18 nt, Human
ggggagcaggauaacucc

SEQ ID NO: 56546 - RNA, 24 nt, Human
gggggcagcaggagggaggcgaag

SEQ ID NO: 56547 - RNA, 20 nt, Human
ggguggggguugggugguuu

SEQ ID NO: 56548 - RNA, 20 nt, Human
gguccaggccugcuuggucu

SEQ ID NO: 56549 - RNA, 23 nt, Human
gguggguugcaggguugccggaa

SEQ ID NO: 56550 - RNA, 19 nt, Human
gucccaggcucagcuccca

SEQ ID NO: 56551 - RNA, 20 nt, Human
gucuccuaggagaauggaga

SEQ ID NO: 56552 - RNA, 25 nt, Human
uagaggcaggguggggguugggugg

SEQ ID NO: 56553 - RNA, 25 nt, Human
uagccuccuuggguggguugcaggg

SEQ ID NO: 56554 - RNA, 20 nt, Human
ucccagggcgcccugggcuc

SEQ ID NO: 56555 - RNA, 23 nt, Human
ucccagggcgcccugggcuccug

SEQ ID NO: 56556 - RNA, 21 nt, Human
uccccgauccaguagccuccu

SEQ ID NO: 56557 - RNA, 19 nt, Human
uccuaggagaauggagacc

SEQ ID NO: 56558 - RNA, 20 nt, Human
uccuggaagucccaggcuca

SEQ ID NO: 56559 - RNA, 21 nt, Human
uccuugggucuaccaggugcc

SEQ ID NO: 56560 - RNA, 23 nt, Human
uccuugggucuaccaggugcugc

SEQ ID NO: 56561 - RNA, 18 nt, Human
uccuuggguggguugcag

SEQ ID NO: 56562 - RNA, 18 nt, Human
ucugaguggcugugacuu

SEQ ID NO: 56563 - RNA, 22 nt, Human
ucugcagucucugggguuggga

SEQ ID NO: 56564 - RNA, 18 nt, Human
ugaggggagguccuggaa

SEQ ID NO: 56565 - RNA, 21 nt, Human
ugcccagcauccagauguccc

SEQ ID NO: 56566 - RNA, 20 nt, Human
ugcggagggaagaagggccc

SEQ ID NO: 56567 - RNA, 18 nt, Human
ugcuuugucuccuaggag

SEQ ID NO: 56568 - RNA, 20 nt, Human
ugcuuugucuccuaggagaa

SEQ ID NO: 56569 - RNA, 18 nt, Human
uggaaugauccuaguggg

SEQ ID NO: 56570 - RNA, 19 nt, Human
uggaaugggcacugggggg

SEQ ID NO: 56571 - RNA, 19 nt, Human
uggagaccuugaggaggca

SEQ ID NO: 56572 - RNA, 21 nt, Human
ugggcucuggguugcugcccu

SEQ ID NO: 56573 - RNA, 22 nt, Human
ugggggacgucucuggguccag

SEQ ID NO: 56574 - RNA, 22 nt, Human
uggggugcaggcagccgcaugg

SEQ ID NO: 56575 - RNA, 20 nt, Human
uggugaccuggaaugggcac

SEQ ID NO: 56576 - RNA, 18 nt, Human
ugguuuuggucccuuuau

SEQ ID NO: 56577 - RNA, 20 nt, Human
uuggucccuuuauugucugg

SEQ ID NO: 56578 - RNA, 19 nt, Human
accaaaaagagaaaaaaaa

SEQ ID NO: 56579 - RNA, 19 nt, Human
agagaggagcuggcgugug

SEQ ID NO: 56580 - RNA, 26 nt, Human
agagcccaggagugugagcccugcca

SEQ ID NO: 56581 - RNA, 19 nt, Human
agcccugccagguggcucu

SEQ ID NO: 56582 - RNA, 19 nt, Human
agcgcaacgcggcccgggc

SEQ ID NO: 56583 - RNA, 23 nt, Human
aggcuuugagaaugucugcaguc

SEQ ID NO: 56584 - RNA, 19 nt, Human
agggagcaaaggcuggagg

SEQ ID NO: 56585 - RNA, 21 nt, Human
aggugggcggcagacuuuggu

SEQ ID NO: 56586 - RNA, 22 nt, Human
auccacaauguuccacggaggc

SEQ ID NO: 56587 - RNA, 20 nt, Human
caaagggcagcggggaggga

SEQ ID NO: 56588 - RNA, 24 nt, Human
caccaccaaaaagagaaaaaaaaa

SEQ ID NO: 56589 - RNA, 21 nt, Human
cagagcccaggagugugagcc

SEQ ID NO: 56590 - RNA, 20 nt, Human
cagcggggagggagcaaagg

SEQ ID NO: 56591 - RNA, 23 nt, Human
ccaccaccaaaaagagaaaaaaa

SEQ ID NO: 56592 - RNA, 20 nt, Human
ccagguggcucuucccggcc

SEQ ID NO: 56593 - RNA, 21 nt, Human
ccccaagaccugcuuuauccc

SEQ ID NO: 56594 - RNA, 23 nt, Human
ccccaagaccugcuuuaucccug

SEQ ID NO: 56595 - RNA, 20 nt, Human
ccccugaaggagggcucgcc

SEQ ID NO: 56596 - RNA, 26 nt, Human
ccccugaaggagggcucgccugggga

SEQ ID NO: 56597 - RNA, 23 nt, Human
ccccuugaggggggggcugccgu

SEQ ID NO: 56598 - RNA, 22 nt, Human
cccugccagguggcucuucccg

SEQ ID NO: 56599 - RNA, 21 nt, Human
cccuuuuaaccaccaccaaaa

SEQ ID NO: 56600 - RNA, 24 nt, Human
ccucggaaauauuuggaaaguuuu

SEQ ID NO: 56601 - RNA, 21 nt, Human
ccugcccaagagaaaucuacc

SEQ ID NO: 56602 - RNA, 24 nt, Human
ccuggguccccuuucuugcaguug

SEQ ID NO: 56603 - RNA, 18 nt, Human
cggccugggcacgcuggg

SEQ ID NO: 56604 - RNA, 23 nt, Human
cgggcuugugggugcccgggccc

SEQ ID NO: 56605 - RNA, 22 nt, Human
cguucgcuagaaaaauaagagg

SEQ ID NO: 56606 - RNA, 22 nt, Human
cugcccaagagaaaucuacccu

SEQ ID NO: 56607 - RNA, 20 nt, Human
gagcgcaacgcggcccgggc

SEQ ID NO: 56608 - RNA, 23 nt, Human
gaggagcuggcguguguguucag

SEQ ID NO: 56609 - RNA, 19 nt, Human
gaggggggggcugccgugu

SEQ ID NO: 56610 - RNA, 19 nt, Human
gagguaaggagaugggagu

SEQ ID NO: 56611 - RNA, 23 nt, Human
gagucgcuucagagaggagcugg

SEQ ID NO: 56612 - RNA, 22 nt, Human
gcagagcacuggcgaggguccg

SEQ ID NO: 56613 - RNA, 18 nt, Human
gcagcggggagggagcaa

SEQ ID NO: 56614 - RNA, 19 nt, Human
gcagucuguacucucugcc

SEQ ID NO: 56615 - RNA, 20 nt, Human
gcucgccuggggacagggac

SEQ ID NO: 56616 - RNA, 23 nt, Human
ggagcaaaggcuggaggccagaa

SEQ ID NO: 56617 - RNA, 23 nt, Human
ggagcuggcguguguguucagag

SEQ ID NO: 56618 - RNA, 22 nt, Human
ggaggcccccaccucccugccc

SEQ ID NO: 56619 - RNA, 22 nt, Human
ggcugccgugugggaaguuggc

SEQ ID NO: 56620 - RNA, 25 nt, Human
ggcuggaggccagaaguggguuugg

SEQ ID NO: 56621 - RNA, 27 nt, Human
gggcagcggggagggagcaaaggcugg

SEQ ID NO: 56622 - RNA, 22 nt, Human
gggcuugugggugcccgggccc

SEQ ID NO: 56623 - RNA, 21 nt, Human
gggugcccgggcccugggccc

SEQ ID NO: 56624 - RNA, 23 nt, Human
gguaaggagaugggagugggagg

SEQ ID NO: 56625 - RNA, 23 nt, Human
gguaaggagaugggagugggagg

SEQ ID NO: 56626 - RNA, 24 nt, Human
gguaaggagaugggagugggaggg

SEQ ID NO: 56627 - RNA, 24 nt, Human
ggucaggagaugagacugggaggg

SEQ ID NO: 56628 - RNA, 20 nt, Human
ggugcccgggcccugggccc

SEQ ID NO: 56629 - RNA, 24 nt, Human
gguuccagagguaaggagauggga

SEQ ID NO: 56630 - RNA, 22 nt, Human
guccaggcacaagcgcguggga

SEQ ID NO: 56631 - RNA, 22 nt, Human
gugggugggagggggugggcug

SEQ ID NO: 56632 - RNA, 19 nt, Human
guucgcuagaaaaauaaga

SEQ ID NO: 56633 - RNA, 20 nt, Human
uaaccaccaccaaaaagaga

SEQ ID NO: 56634 - RNA, 27 nt, Human
uaaccaccaccaaaaagagaaaaaaaa

SEQ ID NO: 56635 - RNA, 23 nt, Human
uagaaaaauaagaggcuuugaga

SEQ ID NO: 56636 - RNA, 18 nt, Human
uaggauggccacccaggc

SEQ ID NO: 56637 - RNA, 18 nt, Human
uagggccugggggguucc

SEQ ID NO: 56638 - RNA, 20 nt, Human
uccacggaggcuucagggcc

SEQ ID NO: 56639 - RNA, 19 nt, Human
ucccuuuuaaccaccacca

SEQ ID NO: 56640 - RNA, 18 nt, Human
ucugcagucuguacucuc

SEQ ID NO: 56641 - RNA, 23 nt, Human
ucugcagucuguacucucugccu

SEQ ID NO: 56642 - RNA, 25 nt, Human
ucuguacucucugccugcccaagag

SEQ ID NO: 56643 - RNA, 24 nt, Human
ugaggggggggcugccguguggga

SEQ ID NO: 56644 - RNA, 19 nt, Human
ugcaguugcagaggcugag

SEQ ID NO: 56645 - RNA, 22 nt, Human
uggcgaggguccguccaggcac
